United States Patent Application Publication US 2023/0026259 A1 - sequence listing, part 13

SEQ ID NO: 57986 - protein, 914 aa, Homo sapiens
  Payload ID: 11369
  Gene Symbol: NFATC4
  Gene Name: nuclear factor of activated T-cells, cytoplasmic, calcineurin-dependent 4
  Uniprot ID: Q14934
  ENSP ID: ENSP00000388668
MLSGRDLGAPAGSMGAASCEDEELEFKLVFGEEKEAPPLGAGGLGEELDSEDAPPCCRLALGEPPPYGAAPIGIPRPPPPRPGMHSPPPRPAPSPGTWESQPARSVRLGGPGGGAGGAGGGRVLECPSIRITSISPTPEPPAALEDNPDAWGDGSPRDYPPPEGFGGYREAGGQGGGAFFSPSPGSSSLSSWSFFSDASDEAALYAACDEVESELNEAASRFGLGSPLPSPRASPRPWTPEDPWSLYGPSPGGRGPEDSWLLLSAPGPTPASPRPASPCGKRRYSSSGTPSSASPALSRRGSLGEEGSEPPPPPPLPLARDPGSPGPFDYVGAPPAESIPQKTRRTSSEQAVALPRSEEPASCNGKLPLGAEESVAPPGGSRKEVAGMDYLAVPSPLAWSKARIGGHSPIFRTSALPPLDWPLPSQYEQLELRIEVQPRAHHRAHYETEGSRGAVKAAPGGHPVVKLLGYSEKPLTLQMFIGTADERNLRPHAFYQVHRITGKMVATASYEAVVSGTKVLEMTLLPENNMAANIDCAGILKLRNSDIELRKGETDIGRKNTRVRLVFRVHVPQGGGKVVSVQAASVPIECSQRSAQELPQVEAYSPSACSVRGGEELVLTGSNFLPDSKVVFIERGPDGKLQWEEEATVNRLQSNEVTLTLTVPEYSNKRVSRPVQVYFYVSNGRRKRSPTQSFRFLPVICKEEPLPDSSLRGFPSASATPFGTDMDFSPPRPPYPSYPHEDPACETPYLSEGFGYGMPPLYPQTGPPPSYRPGLRMFPETRGTTGCAQPPAVSFLPRPFPSDPYGGRGSSFSLGLPFSPPAPFRPPPLPASPPLEGPFPSQSDVHPLPAEGYNKVGPGYGPGEGAPEQEKSRGGYSSGFRDSVPIQGITLEEGGCGTGGCECECVQEIALHVC

SEQ ID NO: 57987 - protein, 964 aa, Homo sapiens
  Payload ID: 11369
  Gene Symbol: NFATC4
  Gene Name: nuclear factor of activated T-cells, cytoplasmic, calcineurin-dependent 4
  Uniprot ID: Q14934
  ENSP ID: ENSP00000388910
MITTLPSLLPASLASISHRVTNLPSNSLSHNPGLSKPDFPGNSSPGLPSSSSPGRDLGAPAGSMGAASCEDEELEFKLVFGEEKEAPPLGAGGLGEELDSEDAPPCCRLALGEPPPYGAAPIGIPRPPPPRPGMHSPPPRPAPSPGTWESQPARSVRLGGPGGGAGGAGGGRVLECPSIRITSISPTPEPPAALEDNPDAWGDGSPRDYPPPEGFGGYREAGGQGGGAFFSPSPGSSSLSSWSFFSDASDEAALYAACDEVESELNEAASRFGLGSPLPSPRASPRPWTPEDPWSLYGPSPGGRGPEDSWLLLSAPGPTPASPRPASPCGKRRYSSSGTPSSASPALSRRGSLGEEGSEPPPPPPLPLARDPGSPGPFDYVGAPPAESIPQKTRRTSSEQAVALPRSEEPASCNGKLPLGAEESVAPPGGSRKEVAGMDYLAVPSPLAWSKARIGGHSPIFRTSALPPLDWPLPSQYEQLELRIEVQPRAHHRAHYETEGSRGAVKAAPGGHPVVKLLGYSEKPLTLQMFIGTADERNLRPHAFYQVHRITGKMVATASYEAVVSGTKVLEMTLLPENNMAANIDCAGILKLRNSDIELRKGETDIGRKNTRVRLVFRVHVPQGGGKVVSVQAASVPIECSQRSAQELPQVEAYSPSACSVRGGEELVLTGSNFLPDSKVVFIERGPDGKLQWEEEATVNRLQSNEVTLTLTVPEYSNKRVSRPVQVYFYVSNGRRKRSPTQSFRFLPVICKEEPLPDSSLRGFPSASATPFGTDMDFSPPRPPYPSYPHEDPACETPYLSEGFGYGMPPLYPQTGPPPSYRPGLRMFPETRGTTGCAQPPAVSFLPRPFPSDPYGGRGSSFSLGLPFSPPAPFRPPPLPASPPLEGPFPSQSDVHPLPAEGYNKVGPGYGPGEGAPEQEKSRGGYSSGFRDSVPIQGITLEEGGCGTGGCECECVQEIALHVC

SEQ ID NO: 57988 - protein, 889 aa, Homo sapiens
  Payload ID: 11369
  Gene Symbol: NFATC4
  Gene Name: nuclear factor of activated T-cells, cytoplasmic, calcineurin-dependent 4
  Uniprot ID: Q14934
  ENSP ID: ENSP00000396788
MPASISSIFPGPTLLLSCGSEELDSEDAPPCCRLALGEPPPYGAAPIGIPRPPPPRPGMHSPPPRPAPSPGTWESQPARSVRLGGPGGGAGGAGGGRVLECPSIRITSISPTPEPPAALEDNPDAWGDGSPRDYPPPEGFGGYREAGGQGGGAFFSPSPGSSSLSSWSFFSDASDEAALYAACDEVESELNEAASRFGLGSPLPSPRASPRPWTPEDPWSLYGPSPGGRGPEDSWLLLSAPGPTPASPRPASPCGKRRYSSSGTPSSASPALSRRGSLGEEGSEPPPPPPLPLARDPGSPGPFDYVGAPPAESIPQKTRRTSSEQAVALPRSEEPASCNGKLPLGAEESVAPPGGSRKEVAGMDYLAVPSPLAWSKARIGGHSPIFRTSALPPLDWPLPSQYEQLELRIEVQPRAHHRAHYETEGSRGAVKAAPGGHPVVKLLGYSEKPLTLQMFIGTADERNLRPHAFYQVHRITGKMVATASYEAVVSGTKVLEMTLLPENNMAANIDCAGILKLRNSDIELRKGETDIGRKNTRVRLVFRVHVPQGGGKVVSVQAASVPIECSQRSAQELPQVEAYSPSACSVRGGEELVLTGSNFLPDSKVVFIERGPDGKLQWEEEATVNRLQSNEVTLTLTVPEYSNKRVSRPVQVYFYVSNGRRKRSPTQSFRFLPVICKEEPLPDSSLRGFPSASATPFGTDMDFSPPRPPYPSYPHEDPACETPYLSEGFGYGMPPLYPQTGPPPSYRPGLRMFPETRGTTGCAQPPAVSFLPRPFPSDPYGGRGSSFSLGLPFSPPAPFRPPPLPASPPLEGPFPSQSDVHPLPAEGYNKVGPGYGPGEGAPEQEKSRGGYSSGFRDSVPIQGITLEEGGCGTGGCECECVQEIALHVC

SEQ ID NO: 57989 - protein, 933 aa, Homo sapiens
  Payload ID: 11369
  Gene Symbol: NFATC4
  Gene Name: nuclear factor of activated T-cells, cytoplasmic, calcineurin-dependent 4
  Uniprot ID: Q14934
  ENSP ID: ENSP00000439350
MADGGADSAAQRLPEGPGRVAPGRDLGAPAGSMGAASCEDEELEFKLVFGEEKEAPPLGAGGLGEELDSEDAPPCCRLALGEPPPYGAAPIGIPRPPPPRPGMHSPPPRPAPSPGTWESQPARSVRLGGPGGGAGGAGGGRVLECPSIRITSISPTPEPPAALEDNPDAWGDGSPRDYPPPEGFGGYREAGGQGGGAFFSPSPGSSSLSSWSFFSDASDEAALYAACDEVESELNEAASRFGLGSPLPSPRASPRPWTPEDPWSLYGPSPGGRGPEDSWLLLSAPGPTPASPRPASPCGKRRYSSSGTPSSASPALSRRGSLGEEGSEPPPPPPLPLARDPGSPGPFDYVGAPPAESIPQKTRRTSSEQAVALPRSEEPASCNGKLPLGAEESVAPPGGSRKEVAGMDYLAVPSPLAWSKARIGGHSPIFRTSALPPLDWPLPSQYEQLELRIEVQPRAHHRAHYETEGSRGAVKAAPGGHPVVKLLGYSEKPLTLQMFIGTADERNLRPHAFYQVHRITGKMVATASYEAVVSGTKVLEMTLLPENNMAANIDCAGILKLRNSDIELRKGETDIGRKNTRVRLVFRVHVPQGGGKVVSVQAASVPIECSQRSAQELPQVEAYSPSACSVRGGEELVLTGSNFLPDSKVVFIERGPDGKLQWEEEATVNRLQSNEVTLTLTVPEYSNKRVSRPVQVYFYVSNGRRKRSPTQSFRFLPVICKEEPLPDSSLRGFPSASATPFGTDMDFSPPRPPYPSYPHEDPACETPYLSEGFGYGMPPLYPQTGPPPSYRPGLRMFPETRGTTGCAQPPAVSFLPRPFPSDPYGGRGSSFSLGLPFSPPAPFRPPPLPASPPLEGPFPSQSDVHPLPAEGYNKVGPGYGPGEGAPEQEKSRGGYSSGFRDSVPIQGITLEEGGCGTGGCECECVQEIALHVC

SEQ ID NO: 57990 - protein, 832 aa, Homo sapiens
  Payload ID: 11369
  Gene Symbol: NFATC4
  Gene Name: nuclear factor of activated T-cells, cytoplasmic, calcineurin-dependent 4
  Uniprot ID: Q14934
  ENSP ID: ENSP00000450469
MHSPPPRPAPSPGTWESQPARSVRLGGPGGGAGGAGGGRVLECPSIRITSISPTPEPPAALEDNPDAWGDGSPRDYPPPEGFGGYREAGGQGGGAFFSPSPGSSSLSSWSFFSDASDEAALYAACDEVESELNEAASRFGLGSPLPSPRASPRPWTPEDPWSLYGPSPGGRGPEDSWLLLSAPGPTPASPRPASPCGKRRYSSSGTPSSASPALSRRGSLGEEGSEPPPPPPLPLARDPGSPGPFDYVGAPPAESIPQKTRRTSSEQAVALPRSEEPASCNGKLPLGAEESVAPPGGSRKEVAGMDYLAVPSPLAWSKARIGGHSPIFRTSALPPLDWPLPSQYEQLELRIEVQPRAHHRAHYETEGSRGAVKAAPGGHPVVKLLGYSEKPLTLQMFIGTADERNLRPHAFYQVHRITGKMVATASYEAVVSGTKVLEMTLLPENNMAANIDCAGILKLRNSDIELRKGETDIGRKNTRVRLVFRVHVPQGGGKVVSVQAASVPIECSQRSAQELPQVEAYSPSACSVRGGEELVLTGSNFLPDSKVVFIERGPDGKLQWEEEATVNRLQSNEVTLTLTVPEYSNKRVSRPVQVYFYVSNGRRKRSPTQSFRFLPVICKEEPLPDSSLRGFPSASATPFGTDMDFSPPRPPYPSYPHEDPACETPYLSEGFGYGMPPLYPQTGPPPSYRPGLRMFPETRGTTGCAQPPAVSFLPRPFPSDPYGGRGSSFSLGLPFSPPAPFRPPPLPASPPLEGPFPSQSDVHPLPAEGYNKVGPGYGPGEGAPEQEKSRGGYSSGFRDSVPIQGITLEEVSEIIGRDLSGFPAPPGEEPPA

SEQ ID NO: 57991 - protein, 901 aa, Homo sapiens
  Payload ID: 11369
  Gene Symbol: NFATC4
  Gene Name: nuclear factor of activated T-cells, cytoplasmic, calcineurin-dependent 4
  Uniprot ID: Q14934
  ENSP ID: ENSP00000450590
MGAASCEDEELEFKLVFGEEKEAPPLGAGGLGEELDSEDAPPCCRLALGEPPPYGAAPIGIPRPPPPRPGMHSPPPRPAPSPGTWESQPARSVRLGGPGGGAGGAGGGRVLECPSIRITSISPTPEPPAALEDNPDAWGDGSPRDYPPPEGFGGYREAGGQGGGAFFSPSPGSSSLSSWSFFSDASDEAALYAACDEVESELNEAASRFGLGSPLPSPRASPRPWTPEDPWSLYGPSPGGRGPEDSWLLLSAPGPTPASPRPASPCGKRRYSSSGTPSSASPALSRRGSLGEEGSEPPPPPPLPLARDPGSPGPFDYVGAPPAESIPQKTRRTSSEQAVALPRSEEPASCNGKLPLGAEESVAPPGGSRKEVAGMDYLAVPSPLAWSKARIGGHSPIFRTSALPPLDWPLPSQYEQLELRIEVQPRAHHRAHYETEGSRGAVKAAPGGHPVVKLLGYSEKPLTLQMFIGTADERNLRPHAFYQVHRITGKMVATASYEAVVSGTKVLEMTLLPENNMAANIDCAGILKLRNSDIELRKGETDIGRKNTRVRLVFRVHVPQGGGKVVSVQAASVPIECSQRSAQELPQVEAYSPSACSVRGGEELVLTGSNFLPDSKVVFIERGPDGKLQWEEEATVNRLQSNEVTLTLTVPEYSNKRVSRPVQVYFYVSNGRRKRSPTQSFRFLPVICKEEPLPDSSLRGFPSASATPFGTDMDFSPPRPPYPSYPHEDPACETPYLSEGFGYGMPPLYPQTGPPPSYRPGLRMFPETRGTTGCAQPPAVSFLPRPFPSDPYGGRGSSFSLGLPFSPPAPFRPPPLPASPPLEGPFPSQSDVHPLPAEGYNKVGPGYGPGEGAPEQEKSRGGYSSGFRDSVPIQGITLEEGGCGTGGCECECVQEIALHVC

SEQ ID NO: 57992 - protein, 807 aa, Homo sapiens
  Payload ID: 11369
  Gene Symbol: NFATC4
  Gene Name: nuclear factor of activated T-cells, cytoplasmic, calcineurin-dependent 4
  Uniprot ID: Q14934
  ENSP ID: ENSP00000450644
MLSGRDLGAPAGSMGAASCEDEELEFKLVFGEEKEAPPLGAGGLGEELDSEDAPPCCRLALGEPPPYGAAPIGIPRPPPPRPGMHSPPPRPAPSPGTWESQPARSVRLGGPGGGAGGAGGGRVLECPSIRITSISPTPEPPAALEDNPDAWGDGSPRDYPPPEGFGGYREAGGQGGGAFFSPSPGSSSLSSWSFFSDASDEAALYAACDEVESELNEAASRFGLGSPLPSPRASPRPWTPEDPWSLYGPSPGGRGPEDSWLLLSAPGPTPASPRPASPCGKRRYSSSGTPSSASPALSRRGSLGEEGSEPPPPPPLPLARDPGSPGPFDYVGAPPAESIPQKTRRTSSEQAVALPRSEEPASCNGKLPLGAEESVAPPGGSRKEVAGMDYLAVPSPLAWSKARIGGHSPIFRTSALPPLDWPLPSQYEQLELRIEVQPRAHHRAHYETEGSRGAVKAAPGGHPVVKLLGYSEKPLTLQMFIGTADERNLRPHAFYQVHRITGKMVATASYEAVVSGTKVLEMTLLPENNMAANIDCAGILKLRNSDIELRKGETDIGRKNTRVRLVFRVHVPQGGGKVVSVQAASVPIECSQRSAQELPQVEAYSPSACSVRGGEELVLTGSNFLPDSKVVFIERGPDGKLQWEEEATVNRLQSNEVTLTLTVPEYSNKRVSRPVQVYFYVSNGRRKRSPTQSFRFLPVICKEEPLPDSSLRGFPSASATPFGTDMDFSPPRPPYPSYPHEDPACETPYLSEGFGYGMPPLYPQTGPPPSYRPGLRMFPETRGTTVSEIIGRDLSGFPAPPGEEPPA

SEQ ID NO: 57993 - protein, 890 aa, Homo sapiens
  Payload ID: 11369
  Gene Symbol: NFATC4
  Gene Name: nuclear factor of activated T-cells, cytoplasmic, calcineurin-dependent 4
  Uniprot ID: Q14934
  ENSP ID: ENSP00000450686
MPASISSIFPGPTLLLSCGSEELDSEDAPPCCRLALGEPPPYGAAPIGIPRPPPPRPGMHSPPPRPAPSPGTWESQPARSVRLGGPGGGAGGAGGGRVLECPSIRITSISPTPEPPAALEDNPDAWGDGSPRDYPPPEGFGGYREAGGQGGGAFFSPSPGSSSLSSWSFFSDASDEAALYAACDEVESELNEAASRFGLGSPLPSPRASPRPWTPEDPWSLYGPSPGGRGPEDSWLLLSAPGPTPASPRPASPCGKRRYSSSGTPSSASPALSRRGSLGEEGSEPPPPPPLPLARDPGSPGPFDYVGAPPAESIPQKTRRTSSEQAVALPRSEEPASCNGKLPLGAEESVAPPGGSRKEVAGMDYLAVPSPLAWSKARIGGHSPIFRTSALPPLDWPLPSQYEQLELRIEVQPRAHHRAHYETEGSRGAVKAAPGGHPVVKLLGYSEKPLTLQMFIGTADERNLRPHAFYQVHRITGKMVATASYEAVVSGTKVLEMTLLPENNMAANIDCAGILKLRNSDIELRKGETDIGRKNTRVRLVFRVHVPQGGGKVVSVQAASVPIECSQRSAQELPQVEAYSPSACSVRGGEELVLTGSNFLPDSKVVFIERGPDGKLQWEEEATVNRLQSNEVTLTLTVPEYSNKRVSRPVQVYFYVSNGRRKRSPTQSFRFLPVICKEEPLPDSSLRGFPSASATPFGTDMDFSPPRPPYPSYPHEDPACETPYLSEGFGYGMPPLYPQTGPPPSYRPGLRMFPETRGTTGCAQPPAVSFLPRPFPSDPYGGRGSSFSLGLPFSPPAPFRPPPLPASPPLEGPFPSQSDVHPLPAEGYNKVGPGYGPGEGAPEQEKSRGGYSSGFRDSVPIQGITLEEVSEIIGRDLSGFPAPPGEEPPA

SEQ ID NO: 57994 - protein, 724 aa, Homo sapiens
  Payload ID: 11369
  Gene Symbol: NFATC4
  Gene Name: nuclear factor of activated T-cells, cytoplasmic, calcineurin-dependent 4
  Uniprot ID: Q14934
  ENSP ID: ENSP00000450733
MHSPPPRPAPSPGTWESQPARSVRLGGPGGGAGGAGGGRVLECPSIRITSISPTPEPPAALEDNPDAWGDGSPRDYPPPEGFGGYREAGGQGGGAFFSPSPGSSSLSSWSFFSDASDEAALYAACDEVESELNEAASRFGLGSPLPSPRASPRPWTPEDPWSLYGPSPGGRGPEDSWLLLSAPGPTPASPRPASPCGKRRYSSSGTPSSASPALSRRGSLGEEGSEPPPPPPLPLARDPGSPGPFDYVGAPPAESIPQKTRRTSSEQAVALPRSEEPASCNGKLPLGAEESVAPPGGSRKEVAGMDYLAVPSPLAWSKARIGGHSPIFRTSALPPLDWPLPSQYEQLELRIEVQPRAHHRAHYETEGSRGAVKAAPGGHPVVKLLGYSEKPLTLQMFIGTADERNLRPHAFYQVHRITGKMVATASYEAVVSGTKVLEMTLLPENNMAANIDCAGILKLRNSDIELRKGETDIGRKNTRVRLVFRVHVPQGGGKVVSVQAASVPIECSQRSAQELPQVEAYSPSACSVRGGEELVLTGSNFLPDSKVVFIERGPDGKLQWEEEATVNRLQSNEVTLTLTVPEYSNKRVSRPVQVYFYVSNGRRKRSPTQSFRFLPVICKEEPLPDSSLRGFPSASATPFGTDMDFSPPRPPYPSYPHEDPACETPYLSEGFGYGMPPLYPQTGPPPSYRPGLRMFPETRGTTVSEIIGRDLSGFPAPPGEEPPA

SEQ ID NO: 57995 - protein, 329 aa, Homo sapiens
  Payload ID: 11369
  Gene Symbol: NFATC4
  Gene Name: nuclear factor of activated T-cells, cytoplasmic, calcineurin-dependent 4
  Uniprot ID: Q14934
  ENSP ID: ENSP00000450810
MFIGTADERNLRPHAFYQVHRITGKMVATASYEAVVSGTKVLEMTLLPENNMAANIDCAGILKLRNSDIELRKGETDIGRKNTRVRLVFRVHVPQGGGKVVSVQAASVPIECSQRSAQELPQVEAYSPSACSVRGGEELVLTGSNFLPDSKVVFIERGPDGKLQWEEEATVNRLQSNEVTLTLTVPEYSNKRVSRPVQVYFYVSNGRRKRSPTQSFRFLPVICKEEPLPDSSLRGFPSASATPFGTDMDFSPPRPPYPSYPHEDPACETPYLSEGFGYGMPPLYPQTGPPPSYRPGLRMFPETRGTTVSEIIGRDLSGFPAPPGEEPPA

SEQ ID NO: 57996 - protein, 794 aa, Homo sapiens
  Payload ID: 11369
  Gene Symbol: NFATC4
  Gene Name: nuclear factor of activated T-cells, cytoplasmic, calcineurin-dependent 4
  Uniprot ID: Q14934
  ENSP ID: ENSP00000451151
MGAASCEDEELEFKLVFGEEKEAPPLGAGGLGEELDSEDAPPCCRLALGEPPPYGAAPIGIPRPPPPRPGMHSPPPRPAPSPGTWESQPARSVRLGGPGGGAGGAGGGRVLECPSIRITSISPTPEPPAALEDNPDAWGDGSPRDYPPPEGFGGYREAGGQGGGAFFSPSPGSSSLSSWSFFSDASDEAALYAACDEVESELNEAASRFGLGSPLPSPRASPRPWTPEDPWSLYGPSPGGRGPEDSWLLLSAPGPTPASPRPASPCGKRRYSSSGTPSSASPALSRRGSLGEEGSEPPPPPPLPLARDPGSPGPFDYVGAPPAESIPQKTRRTSSEQAVALPRSEEPASCNGKLPLGAEESVAPPGGSRKEVAGMDYLAVPSPLAWSKARIGGHSPIFRTSALPPLDWPLPSQYEQLELRIEVQPRAHHRAHYETEGSRGAVKAAPGGHPVVKLLGYSEKPLTLQMFIGTADERNLRPHAFYQVHRITGKMVATASYEAVVSGTKVLEMTLLPENNMAANIDCAGILKLRNSDIELRKGETDIGRKNTRVRLVFRVHVPQGGGKVVSVQAASVPIECSQRSAQELPQVEAYSPSACSVRGGEELVLTGSNFLPDSKVVFIERGPDGKLQWEEEATVNRLQSNEVTLTLTVPEYSNKRVSRPVQVYFYVSNGRRKRSPTQSFRFLPVICKEEPLPDSSLRGFPSASATPFGTDMDFSPPRPPYPSYPHEDPACETPYLSEGFGYGMPPLYPQTGPPPSYRPGLRMFPETRGTTVSEIIGRDLSGFPAPPGEEPPA

SEQ ID NO: 57997 - protein, 437 aa, Homo sapiens
  Payload ID: 11369
  Gene Symbol: NFATC4
  Gene Name: nuclear factor of activated T-cells, cytoplasmic, calcineurin-dependent 4
  Uniprot ID: Q14934
  ENSP ID: ENSP00000451183
MFIGTADERNLRPHAFYQVHRITGKMVATASYEAVVSGTKVLEMTLLPENNMAANIDCAGILKLRNSDIELRKGETDIGRKNTRVRLVFRVHVPQGGGKVVSVQAASVPIECSQRSAQELPQVEAYSPSACSVRGGEELVLTGSNFLPDSKVVFIERGPDGKLQWEEEATVNRLQSNEVTLTLTVPEYSNKRVSRPVQVYFYVSNGRRKRSPTQSFRFLPVICKEEPLPDSSLRGFPSASATPFGTDMDFSPPRPPYPSYPHEDPACETPYLSEGFGYGMPPLYPQTGPPPSYRPGLRMFPETRGTTGCAQPPAVSFLPRPFPSDPYGGRGSSFSLGLPFSPPAPFRPPPLPASPPLEGPFPSQSDVHPLPAEGYNKVGPGYGPGEGAPEQEKSRGGYSSGFRDSVPIQGITLEEVSEIIGRDLSGFPAPPGEEPPA

SEQ ID NO: 57998 - protein, 915 aa, Homo sapiens
  Payload ID: 11369
  Gene Symbol: NFATC4
  Gene Name: nuclear factor of activated T-cells, cytoplasmic, calcineurin-dependent 4
  Uniprot ID: Q14934
  ENSP ID: ENSP00000451224
MLSGRDLGAPAGSMGAASCEDEELEFKLVFGEEKEAPPLGAGGLGEELDSEDAPPCCRLALGEPPPYGAAPIGIPRPPPPRPGMHSPPPRPAPSPGTWESQPARSVRLGGPGGGAGGAGGGRVLECPSIRITSISPTPEPPAALEDNPDAWGDGSPRDYPPPEGFGGYREAGGQGGGAFFSPSPGSSSLSSWSFFSDASDEAALYAACDEVESELNEAASRFGLGSPLPSPRASPRPWTPEDPWSLYGPSPGGRGPEDSWLLLSAPGPTPASPRPASPCGKRRYSSSGTPSSASPALSRRGSLGEEGSEPPPPPPLPLARDPGSPGPFDYVGAPPAESIPQKTRRTSSEQAVALPRSEEPASCNGKLPLGAEESVAPPGGSRKEVAGMDYLAVPSPLAWSKARIGGHSPIFRTSALPPLDWPLPSQYEQLELRIEVQPRAHHRAHYETEGSRGAVKAAPGGHPVVKLLGYSEKPLTLQMFIGTADERNLRPHAFYQVHRITGKMVATASYEAVVSGTKVLEMTLLPENNMAANIDCAGILKLRNSDIELRKGETDIGRKNTRVRLVFRVHVPQGGGKVVSVQAASVPIECSQRSAQELPQVEAYSPSACSVRGGEELVLTGSNFLPDSKVVFIERGPDGKLQWEEEATVNRLQSNEVTLTLTVPEYSNKRVSRPVQVYFYVSNGRRKRSPTQSFRFLPVICKEEPLPDSSLRGFPSASATPFGTDMDFSPPRPPYPSYPHEDPACETPYLSEGFGYGMPPLYPQTGPPPSYRPGLRMFPETRGTTGCAQPPAVSFLPRPFPSDPYGGRGSSFSLGLPFSPPAPFRPPPLPASPPLEGPFPSQSDVHPLPAEGYNKVGPGYGPGEGAPEQEKSRGGYSSGFRDSVPIQGITLEEVSEIIGRDLSGFPAPPGEEPPA

SEQ ID NO: 57999 - protein, 831 aa, Homo sapiens
  Payload ID: 11369
  Gene Symbol: NFATC4
  Gene Name: nuclear factor of activated T-cells, cytoplasmic, calcineurin-dependent 4
  Uniprot ID: Q14934
  ENSP ID: ENSP00000451284
MHSPPPRPAPSPGTWESQPARSVRLGGPGGGAGGAGGGRVLECPSIRITSISPTPEPPAALEDNPDAWGDGSPRDYPPPEGFGGYREAGGQGGGAFFSPSPGSSSLSSWSFFSDASDEAALYAACDEVESELNEAASRFGLGSPLPSPRASPRPWTPEDPWSLYGPSPGGRGPEDSWLLLSAPGPTPASPRPASPCGKRRYSSSGTPSSASPALSRRGSLGEEGSEPPPPPPLPLARDPGSPGPFDYVGAPPAESIPQKTRRTSSEQAVALPRSEEPASCNGKLPLGAEESVAPPGGSRKEVAGMDYLAVPSPLAWSKARIGGHSPIFRTSALPPLDWPLPSQYEQLELRIEVQPRAHHRAHYETEGSRGAVKAAPGGHPVVKLLGYSEKPLTLQMFIGTADERNLRPHAFYQVHRITGKMVATASYEAVVSGTKVLEMTLLPENNMAANIDCAGILKLRNSDIELRKGETDIGRKNTRVRLVFRVHVPQGGGKVVSVQAASVPIECSQRSAQELPQVEAYSPSACSVRGGEELVLTGSNFLPDSKVVFIERGPDGKLQWEEEATVNRLQSNEVTLTLTVPEYSNKRVSRPVQVYFYVSNGRRKRSPTQSFRFLPVICKEEPLPDSSLRGFPSASATPFGTDMDFSPPRPPYPSYPHEDPACETPYLSEGFGYGMPPLYPQTGPPPSYRPGLRMFPETRGTTGCAQPPAVSFLPRPFPSDPYGGRGSSFSLGLPFSPPAPFRPPPLPASPPLEGPFPSQSDVHPLPAEGYNKVGPGYGPGEGAPEQEKSRGGYSSGFRDSVPIQGITLEEGGCGTGGCECECVQEIALHVC

SEQ ID NO: 58000 - protein, 436 aa, Homo sapiens
  Payload ID: 11369
  Gene Symbol: NFATC4
  Gene Name: nuclear factor of activated T-cells, cytoplasmic, calcineurin-dependent 4
  Uniprot ID: Q14934
  ENSP ID: ENSP00000451395
MFIGTADERNLRPHAFYQVHRITGKMVATASYEAVVSGTKVLEMTLLPENNMAANIDCAGILKLRNSDIELRKGETDIGRKNTRVRLVFRVHVPQGGGKVVSVQAASVPIECSQRSAQELPQVEAYSPSACSVRGGEELVLTGSNFLPDSKVVFIERGPDGKLQWEEEATVNRLQSNEVTLTLTVPEYSNKRVSRPVQVYFYVSNGRRKRSPTQSFRFLPVICKEEPLPDSSLRGFPSASATPFGTDMDFSPPRPPYPSYPHEDPACETPYLSEGFGYGMPPLYPQTGPPPSYRPGLRMFPETRGTTGCAQPPAVSFLPRPFPSDPYGGRGSSFSLGLPFSPPAPFRPPPLPASPPLEGPFPSQSDVHPLPAEGYNKVGPGYGPGEGAPEQEKSRGGYSSGFRDSVPIQGITLEEGGCGTGGCECECVQEIALHVC

SEQ ID NO: 58001 - protein, 782 aa, Homo sapiens
  Payload ID: 11369
  Gene Symbol: NFATC4
  Gene Name: nuclear factor of activated T-cells, cytoplasmic, calcineurin-dependent 4
  Uniprot ID: Q14934
  ENSP ID: ENSP00000451454
MPASISSIFPGPTLLLSCGSEELDSEDAPPCCRLALGEPPPYGAAPIGIPRPPPPRPGMHSPPPRPAPSPGTWESQPARSVRLGGPGGGAGGAGGGRVLECPSIRITSISPTPEPPAALEDNPDAWGDGSPRDYPPPEGFGGYREAGGQGGGAFFSPSPGSSSLSSWSFFSDASDEAALYAACDEVESELNEAASRFGLGSPLPSPRASPRPWTPEDPWSLYGPSPGGRGPEDSWLLLSAPGPTPASPRPASPCGKRRYSSSGTPSSASPALSRRGSLGEEGSEPPPPPPLPLARDPGSPGPFDYVGAPPAESIPQKTRRTSSEQAVALPRSEEPASCNGKLPLGAEESVAPPGGSRKEVAGMDYLAVPSPLAWSKARIGGHSPIFRTSALPPLDWPLPSQYEQLELRIEVQPRAHHRAHYETEGSRGAVKAAPGGHPVVKLLGYSEKPLTLQMFIGTADERNLRPHAFYQVHRITGKMVATASYEAVVSGTKVLEMTLLPENNMAANIDCAGILKLRNSDIELRKGETDIGRKNTRVRLVFRVHVPQGGGKVVSVQAASVPIECSQRSAQELPQVEAYSPSACSVRGGEELVLTGSNFLPDSKVVFIERGPDGKLQWEEEATVNRLQSNEVTLTLTVPEYSNKRVSRPVQVYFYVSNGRRKRSPTQSFRFLPVICKEEPLPDSSLRGFPSASATPFGTDMDFSPPRPPYPSYPHEDPACETPYLSEGFGYGMPPLYPQTGPPPSYRPGLRMFPETRGTTVSEIIGRDLSGFPAPPGEEPPA

SEQ ID NO: 58002 - protein, 82 aa, Homo sapiens
  Payload ID: 11369
  Gene Symbol: NFATC4
  Gene Name: nuclear factor of activated T-cells, cytoplasmic, calcineurin-dependent 4
  Uniprot ID: Q14934
  ENSP ID: ENSP00000451496
MDFSPPRPPYPSYPHEDPACETPYLSEGFGYGMPPLYPQTGPPPSYRPGLRMFPETRGTTVSEIIGRDLSGFPAPPGEEPPA

SEQ ID NO: 58003 - protein, 826 aa, Homo sapiens
  Payload ID: 11369
  Gene Symbol: NFATC4
  Gene Name: nuclear factor of activated T-cells, cytoplasmic, calcineurin-dependent 4
  Uniprot ID: Q14934
  ENSP ID: ENSP00000451502
MADGGADSAAQRLPEGPGRVAPGRDLGAPAGSMGAASCEDEELEFKLVFGEEKEAPPLGAGGLGEELDSEDAPPCCRLALGEPPPYGAAPIGIPRPPPPRPGMHSPPPRPAPSPGTWESQPARSVRLGGPGGGAGGAGGGRVLECPSIRITSISPTPEPPAALEDNPDAWGDGSPRDYPPPEGFGGYREAGGQGGGAFFSPSPGSSSLSSWSFFSDASDEAALYAACDEVESELNEAASRFGLGSPLPSPRASPRPWTPEDPWSLYGPSPGGRGPEDSWLLLSAPGPTPASPRPASPCGKRRYSSSGTPSSASPALSRRGSLGEEGSEPPPPPPLPLARDPGSPGPFDYVGAPPAESIPQKTRRTSSEQAVALPRSEEPASCNGKLPLGAEESVAPPGGSRKEVAGMDYLAVPSPLAWSKARIGGHSPIFRTSALPPLDWPLPSQYEQLELRIEVQPRAHHRAHYETEGSRGAVKAAPGGHPVVKLLGYSEKPLTLQMFIGTADERNLRPHAFYQVHRITGKMVATASYEAVVSGTKVLEMTLLPENNMAANIDCAGILKLRNSDIELRKGETDIGRKNTRVRLVFRVHVPQGGGKVVSVQAASVPIECSQRSAQELPQVEAYSPSACSVRGGEELVLTGSNFLPDSKVVFIERGPDGKLQWEEEATVNRLQSNEVTLTLTVPEYSNKRVSRPVQVYFYVSNGRRKRSPTQSFRFLPVICKEEPLPDSSLRGFPSASATPFGTDMDFSPPRPPYPSYPHEDPACETPYLSEGFGYGMPPLYPQTGPPPSYRPGLRMFPETRGTTVSEIIGRDLSGFPAPPGEEPPA

SEQ ID NO: 58004 - protein, 190 aa, Homo sapiens
  Payload ID: 11369
  Gene Symbol: NFATC4
  Gene Name: nuclear factor of activated T-cells, cytoplasmic, calcineurin-dependent 4
  Uniprot ID: Q14934
  ENSP ID: ENSP00000451590
MDFSPPRPPYPSYPHEDPACETPYLSEGFGYGMPPLYPQTGPPPSYRPGLRMFPETRGTTGCAQPPAVSFLPRPFPSDPYGGRGSSFSLGLPFSPPAPFRPPPLPASPPLEGPFPSQSDVHPLPAEGYNKVGPGYGPGEGAPEQEKSRGGYSSGFRDSVPIQGITLEEVSEIIGRDLSGFPAPPGEEPPA

SEQ ID NO: 58005 - protein, 189 aa, Homo sapiens
  Payload ID: 11369
  Gene Symbol: NFATC4
  Gene Name: nuclear factor of activated T-cells, cytoplasmic, calcineurin-dependent 4
  Uniprot ID: Q14934
  ENSP ID: ENSP00000451801
MDFSPPRPPYPSYPHEDPACETPYLSEGFGYGMPPLYPQTGPPPSYRPGLRMFPETRGTTGCAQPPAVSFLPRPFPSDPYGGRGSSFSLGLPFSPPAPFRPPPLPASPPLEGPFPSQSDVHPLPAEGYNKVGPGYGPGEGAPEQEKSRGGYSSGFRDSVPIQGITLEEGGCGTGGCECECVQEIALHVC

SEQ ID NO: 58006 - protein, 143 aa, Homo sapiens
  Payload ID: 11369
  Gene Symbol: NFATC4
  Gene Name: nuclear factor of activated T-cells, cytoplasmic, calcineurin-dependent 4
  ENSP ID: ENSP00000451853
MGAASCEDEELEFKLVFGEEKEAPPLGAGGLGEELDSEDAPPCCRLALGEPPPYGAAPIGIPRPPPPRPGMHSPPPRPAPSPGTWESQPARSVRLGGPGGGAGGAGGGRVLECPSIRITSISPTPEPPAALEDNPDAWGDGSP

SEQ ID NO: 58007 - protein, 139 aa, Homo sapiens
  Payload ID: 11369
  Gene Symbol: NFATC4
  Gene Name: nuclear factor of activated T-cells, cytoplasmic, calcineurin-dependent 4
  ENSP ID: ENSP00000451992
MGAASCEDEELEFKLVFGEEKEAPPLGAGGLGEELDSEDAPPCCRLALGEPPPYGAAPIGIPRPPPPRPGMHSPPPRPAPSPGTWESQPARTSALPPLDWPLPSQYEQLELRIEVQPRAHHRAHYETEGSRGAVKAAPG

SEQ ID NO: 58008 - protein, 857 aa, Homo sapiens
  Payload ID: 11369
  Gene Symbol: NFATC4
  Gene Name: nuclear factor of activated T-cells, cytoplasmic, calcineurin-dependent 4
  Uniprot ID: Q14934
  ENSP ID: ENSP00000452039
MITTLPSLLPASLASISHRVTNLPSNSLSHNPGLSKPDFPGNSSPGLPSSSSPGRDLGAPAGSMGAASCEDEELEFKLVFGEEKEAPPLGAGGLGEELDSEDAPPCCRLALGEPPPYGAAPIGIPRPPPPRPGMHSPPPRPAPSPGTWESQPARSVRLGGPGGGAGGAGGGRVLECPSIRITSISPTPEPPAALEDNPDAWGDGSPRDYPPPEGFGGYREAGGQGGGAFFSPSPGSSSLSSWSFFSDASDEAALYAACDEVESELNEAASRFGLGSPLPSPRASPRPWTPEDPWSLYGPSPGGRGPEDSWLLLSAPGPTPASPRPASPCGKRRYSSSGTPSSASPALSRRGSLGEEGSEPPPPPPLPLARDPGSPGPFDYVGAPPAESIPQKTRRTSSEQAVALPRSEEPASCNGKLPLGAEESVAPPGGSRKEVAGMDYLAVPSPLAWSKARIGGHSPIFRTSALPPLDWPLPSQYEQLELRIEVQPRAHHRAHYETEGSRGAVKAAPGGHPVVKLLGYSEKPLTLQMFIGTADERNLRPHAFYQVHRITGKMVATASYEAVVSGTKVLEMTLLPENNMAANIDCAGILKLRNSDIELRKGETDIGRKNTRVRLVFRVHVPQGGGKVVSVQAASVPIECSQRSAQELPQVEAYSPSACSVRGGEELVLTGSNFLPDSKVVFIERGPDGKLQWEEEATVNRLQSNEVTLTLTVPEYSNKRVSRPVQVYFYVSNGRRKRSPTQSFRFLPVICKEEPLPDSSLRGFPSASATPFGTDMDFSPPRPPYPSYPHEDPACETPYLSEGFGYGMPPLYPQTGPPPSYRPGLRMFPETRGTTVSEIIGRDLSGFPAPPGEEPPA

SEQ ID NO: 58009 - protein, 934 aa, Homo sapiens
  Payload ID: 11369
  Gene Symbol: NFATC4
  Gene Name: nuclear factor of activated T-cells, cytoplasmic, calcineurin-dependent 4
  Uniprot ID: Q14934
  ENSP ID: ENSP00000452270
MADGGADSAAQRLPEGPGRVAPGRDLGAPAGSMGAASCEDEELEFKLVFGEEKEAPPLGAGGLGEELDSEDAPPCCRLALGEPPPYGAAPIGIPRPPPPRPGMHSPPPRPAPSPGTWESQPARSVRLGGPGGGAGGAGGGRVLECPSIRITSISPTPEPPAALEDNPDAWGDGSPRDYPPPEGFGGYREAGGQGGGAFFSPSPGSSSLSSWSFFSDASDEAALYAACDEVESELNEAASRFGLGSPLPSPRASPRPWTPEDPWSLYGPSPGGRGPEDSWLLLSAPGPTPASPRPASPCGKRRYSSSGTPSSASPALSRRGSLGEEGSEPPPPPPLPLARDPGSPGPFDYVGAPPAESIPQKTRRTSSEQAVALPRSEEPASCNGKLPLGAEESVAPPGGSRKEVAGMDYLAVPSPLAWSKARIGGHSPIFRTSALPPLDWPLPSQYEQLELRIEVQPRAHHRAHYETEGSRGAVKAAPGGHPVVKLLGYSEKPLTLQMFIGTADERNLRPHAFYQVHRITGKMVATASYEAVVSGTKVLEMTLLPENNMAANIDCAGILKLRNSDIELRKGETDIGRKNTRVRLVFRVHVPQGGGKVVSVQAASVPIECSQRSAQELPQVEAYSPSACSVRGGEELVLTGSNFLPDSKVVFIERGPDGKLQWEEEATVNRLQSNEVTLTLTVPEYSNKRVSRPVQVYFYVSNGRRKRSPTQSFRFLPVICKEEPLPDSSLRGFPSASATPFGTDMDFSPPRPPYPSYPHEDPACETPYLSEGFGYGMPPLYPQTGPPPSYRPGLRMFPETRGTTGCAQPPAVSFLPRPFPSDPYGGRGSSFSLGLPFSPPAPFRPPPLPASPPLEGPFPSQSDVHPLPAEGYNKVGPGYGPGEGAPEQEKSRGGYSSGFRDSVPIQGITLEEVSEIIGRDLSGFPAPPGEEPPA

SEQ ID NO: 58010 - protein, 832 aa, Homo sapiens; identical to SEQ ID NO: 57990
  Payload ID: 11369
  Gene Symbol: NFATC4
  Gene Name: nuclear factor of activated T-cells, cytoplasmic, calcineurin-dependent 4
  Uniprot ID: Q14934
  ENSP ID: ENSP00000452349

SEQ ID NO: 58011 - protein, 196 aa, Homo sapiens
  Payload ID: 11369
  Gene Symbol: NFATC4
  Gene Name: nuclear factor of activated T-cells, cytoplasmic, calcineurin-dependent 4
  ENSP ID: ENSP00000452352
MPASISSIFPELDSEDAPPCCRLALGEPPPYGAAPIGIPRPPPPRPGMHSPPPRPAPSPGTWESQPARSVRLGGPGGGAGGAGGGRVLECPSIRITSISPTPEPPAALEDNPDAWGDGSPRDYPPPEGFGGYREAGGQGGGAFFSPSPGSSSLSSWSFFSDASDEAALYAACDEVESELNEAASRFGLGSPLPSPR

SEQ ID NO: 58012 - protein, 969 aa, Homo sapiens
  Payload ID: 11370
  Gene Symbol: NFKB1
  Gene Name: nuclear factor of kappa light polypeptide gene enhancer in B-cells 1
  Uniprot ID: P19838
  ENSP ID: ENSP00000226574
MAEDDPYLGRPEQMFHLDPSLTHTIFNPEVFQPQMALPTADGPYLQILEQPKQRGFRFRYVCEGPSHGGLPGASSEKNKKSYPQVKICNYVGPAKVIVQLVTNGKNIHLHAHSLVGKHCEDGICTVTAGPKDMVVGFANLGILHVTKKKVFETLEARMTEACIRGYNPGLLVHPDLAYLQAEGGGDRQLGDREKELIRQAALQQTKEMDLSVVRLMFTAFLPDSTGSFTRRLEPVVSDAIYDSKAPNASNLKIVRMDRTAGCVTGGEEIYLLCDKVQKDDIQIRFYEEEENGGVWEGFGDFSPTDVHRQFAIVFKTPKYKDINITKPASVFVQLRRKSDLETSEPKPFLYYPEIKDKEEVQRKRQKLMPNFSDSFGGGSGAGAGGGGMFGSGGGGGGTGSTGPGYSFPHYGFPTYGGITFHPGTTKSNAGMKHGTMDTESKKDPEGCDKSDDKNTVNLFGKVIETTEQDQEPSEATVGNGEVTLTYATGTKEESAGVQDNLFLEKAMQLAKRHANALFDYAVTGDVKMLLAVQRHLTAVQDENGDSVLHLAIIHLHSQLVRDLLEVTSGLISDDIINMRNDLYQTPLHLAVITKQEDVVEDLLRAGADLSLLDRLGNSVLHLAAKEGHDKVLSILLKHKKAALLLDHPNGDGLNAIHLAMMSNSLPCLLLLVAAGADVNAQEQKSGRTALHLAVEHDNISLAGCLLLEGDAHVDSTTYDGTTPLHIAAGRGSTRLAALLKAAGADPLVENFEPLYDLDDSWENAGEDEGVVPGTTPLDMATSWQVFDILNGKPYEPEFTSDDLLAQGDMKQLAEDVKLQLYKLLEIPDPDKNWATLAQKLGLGILNNAFRLSPAPSKTLMDNYEVSGGTVRELVEALRQMGYTEAIEVIQAASSPVKTTSQAHSLPLSPASTRQQIDELRDSDSVCDSGVETSFRKLSFTESLTSGASLLTLNKMPHDYGQEGPLEGKI

SEQ ID NO: 58013 - protein, 968 aa, Homo sapiens
  Payload ID: 11370
  Gene Symbol: NFKB1
  Gene Name: nuclear factor of kappa light polypeptide gene enhancer in B-cells 1
  Uniprot ID: P19838
  ENSP ID: ENSP00000378297
MAEDDPYLGRPEQMFHLDPSLTHTIFNPEVFQPQMALPTDGPYLQILEQPKQRGFRFRYVCEGPSHGGLPGASSEKNKKSYPQVKICNYVGPAKVIVQLVTNGKNIHLHAHSLVGKHCEDGICTVTAGPKDMVVGFANLGILHVTKKKVFETLEARMTEACIRGYNPGLLVHPDLAYLQAEGGGDRQLGDREKELIRQAALQQTKEMDLSVVRLMFTAFLPDSTGSFTRRLEPVVSDAIYDSKAPNASNLKIVRMDRTAGCVTGGEEIYLLCDKVQKDDIQIRFYEEEENGGVWEGFGDFSPTDVHRQFAIVFKTPKYKDINITKPASVFVQLRRKSDLETSEPKPFLYYPEIKDKEEVQRKRQKLMPNFSDSFGGGSGAGAGGGGMFGSGGGGGGTGSTGPGYSFPHYGFPTYGGITFHPGTTKSNAGMKHGTMDTESKKDPEGCDKSDDKNTVNLFGKVIETTEQDQEPSEATVGNGEVTLTYATGTKEESAGVQDNLFLEKAMQLAKRHANALFDYAVTGDVKMLLAVQRHLTAVQDENGDSVLHLAIIHLHSQLVRDLLEVTSGLISDDIINMRNDLYQTPLHLAVITKQEDVVEDLLRAGADLSLLDRLGNSVLHLAAKEGHDKVLSILLKHKKAALLLDHPNGDGLNAIHLAMMSNSLPCLLLLVAAGADVNAQEQKSGRTALHLAVEHDNISLAGCLLLEGDAHVDSTTYDGTTPLHIAAGRGSTRLAALLKAAGADPLVENFEPLYDLDDSWENAGEDEGVVPGTTPLDMATSWQVFDILNGKPYEPEFTSDDLLAQGDMKQLAEDVKLQLYKLLEIPDPDKNWATLAQKLGLGILNNAFRLSPAPSKTLMDNYEVSGGTVRELVEALRQMGYTEAIEVIQAASSPVKTTSQAHSLPLSPASTRQQIDELRDSDSVCDSGVETSFRKLSFTESLTSGASLLTLNKMPHDYGQEGPLEGKI

SEQ ID NO: 58014 - protein, 74 aa, Homo sapiens
  Payload ID: 11370
  Gene Symbol: NFKB1
  Gene Name: nuclear factor of kappa light polypeptide gene enhancer in B-cells 1
  ENSP ID: ENSP00000420904
MKRTTSFRMAEDDPYLGRPEQMFHLDPSLTHTIFNPEVFQPQMALPTDGPYLQILEQPKQRGFRFRYVCEGPSH

SEQ ID NO: 58015 - protein, 144 aa, Homo sapiens
  Payload ID: 11370
  Gene Symbol: NFKB1
  Gene Name: nuclear factor of kappa light polypeptide gene enhancer in B-cells 1
  ENSP ID: ENSP00000423877
MAEDDPYLGRPEQMFHLDPSLTHTIFNPEVFQPQMALPTADGPYLQILEQPKQRGFRFRYVCEGPSHGGLPGASSEKNKKSYPQVKICNYVGPAKVIVQLVTNGKNIHLHAHSLVGKHCEDGICTVTAGPKDMVVGFANLGILH

SEQ ID NO: 58016 - protein, 968 aa, Homo sapiens; identical to SEQ ID NO: 58013
  Payload ID: 11370
  Gene Symbol: NFKB1
  Gene Name: nuclear factor of kappa light polypeptide gene enhancer in B-cells 1
  Uniprot ID: P19838
  ENSP ID: ENSP00000424790

SEQ ID NO: 58017 - protein, 196 aa, Homo sapiens
  Payload ID: 11370
  Gene Symbol: NFKB1
  Gene Name: nuclear factor of kappa light polypeptide gene enhancer in B-cells 1
  ENSP ID: ENSP00000424815
MDLSVVRLMFTAFLPDSTGSFTRRLEPVVSDAIYDSKAPNASNLKIVRMDRTAGCVTGGEEIYLLCDKVQKDDIQIRFYEEEENGGVWEGFGDFSPTDVHRQFAIVFKTPKYKDINITKPASVFVQLRRKSDLETSEPKPFLYYPEIKDKEEVQRKRQKLMPNFSDSFGGGSGAGAGGGGMFGSGGGGGGTGSTGP

SEQ ID NO: 58018 - protein, 198 aa, Homo sapiens
  Payload ID: 11370
  Gene Symbol: NFKB1
  Gene Name: nuclear factor of kappa light polypeptide gene enhancer in B-cells 1
  ENSP ID: ENSP00000426147
MKRTTSFRMAEDDPYLGRPEQMFHLDPSLTHTIFNPEVFQPQMALPTADGPYLQILEQPKQRGFRFRYVCEGPSHGGLPGASSEKNKKSYPQVKICNYVGPAKVIVQLVTNGKNIHLHAHSLVGKHCEDGICTVTAGPKDMVVGFANLGILHVTKKKVFETLEARMTEACIRGYNPGLLVHPDLAYLQAEGGGDRQLG

SEQ ID NO: 58019 - protein, 788 aa, Homo sapiens
  Payload ID: 11370
  Gene Symbol: NFKB1
  Gene Name: nuclear factor of kappa light polypeptide gene enhancer in B-cells 1
  Uniprot ID: P19838
  ENSP ID: ENSP00000469340
MNGLCCMALDREKELIRQAALQQTKEMDLSVVRLMFTAFLPDSTGSFTRRLEPVVSDAIYDSKAPNASNLKIVRMDRTAGCVTGGEEIYLLCDKVQKDDIQIRFYEEEENGGVWEGFGDFSPTDVHRQFAIVFKTPKYKDINITKPASVFVQLRRKSDLETSEPKPFLYYPEIKDKEEVQRKRQKLMPNFSDSFGGGSGAGAGGGGMFGSGGGGGGTGSTGPGYSFPHYGFPTYGGITFHPGTTKSNAGMKHGTMDTESKKDPEGCDKSDDKNTVNLFGKVIETTEQDQEPSEATVGNGEVTLTYATGTKEESAGVQDNLFLEKAMQLAKRHANALFDYAVTGDVKMLLAVQRHLTAVQDENGDSVLHLAIIHLHSQLVRDLLEVTSGLISDDIINMRNDLYQTPLHLAVITKQEDVVEDLLRAGADLSLLDRLGNSVLHLAAKEGHDKVLSILLKHKKAALLLDHPNGDGLNAIHLAMMSNSLPCLLLLVAAGADVNAQEQKSGRTALHLAVEHDNISLAGCLLLEGDAHVDSTTYDGTTPLHIAAGRGSTRLAALLKAAGADPLVENFEPLYDLDDSWENAGEDEGVVPGTTPLDMATSWQVFDILNGKPYEPEFTSDDLLAQGDMKQLAEDVKLQLYKLLEIPDPDKNWATLAQKLGLGILNNAFRLSPAPSKTLMDNYEVSGGTVRELVEALRQMGYTEAIEVIQAASSPVKTTSQAHSLPLSPASTRQQIDELRDSDSVCDSGVETSFRKLSFTESLTSGASLLTLNKMPHDYGQEGPLEGKI

SEQ ID NO: 58020 - protein, 899 aa, Homo sapiens
  Payload ID: 11371
  Gene Symbol: NFKB2
  Gene Name: nuclear factor of kappa light polypeptide gene enhancer in B-cells 2 (p49/p100)
  Uniprot ID: Q00653
  ENSP ID: ENSP00000189444
MESCYNPGLDGIIEYDDFKLNSSIVEPKEPAPETADGPYLVIVEQPKQRGFRFRYGCEGPSHGGLPGASSEKGRKTYPTVKICNYEGPAKIEVDLVTHSDPPRAHAHSLVGKQCSELGICAVSVGPKDMTAQFNNLGVLHVTKKNMMGTMIQKLQRQRLRSRPQGLTEAEQRELEQEAKELKKVMDLSIVRLRFSAFLRASDGSFSLPLKPVISQPIHDSKSPGASNLKISRMDKTAGSVRGGDEVYLLCDKVQKDDIEVRFYEDDENGWQAFGDFSPTDVHKQYAIVFRTPPYHKMKIERPVTVFLQLKRKRGGDVSDSKQFTYYPLVEDKEEVQRKRRKALPTFSQPFGGGSHMGGGSGGAAGGYGGAGGGGSLGFFPSSLAYSPYQSGAGPMGCYPGGGGGAQMAATVPSRDSGEEAAEPSAPSRTPQCEPQAPEMLQRAREYNARLFGLAQRSARALLDYGVTADARALLAGQRHLLTAQDENGDTPLHLAIIHGQTSVIEQIVYVIHHAQDLGVVNLTNHLHQTPLHLAVITGQTSVVSFLLRVGADPALLDRHGDSAMHLALRAGAGAPELLRALLQSGAPAVPQLLHMPDFEGLYPVHLAVRARSPECLDLLVDSGAEVEATERQGGRTALHLATEMEELGLVTHLVTKLRANVNARTFAGNTPLHLAAGLGYPTLTRLLLKAGADIHAENEEPLCPLPSPPTSDSDSDSEGPEKDTRSSFRGHTPLDLTCSTKVKTLLLNAAQNTMEPPLTPPSPAGPGLSLGDTALQNLEQLLDGPEAQGSWAELAERLGLRSLVDTYRQTTSPSGSLLRSYELAGGDLAGLLEALSDMGLEEGVRLLRGPETRDKLPSTEVKEDSAYGSQSVEQEAEKLGPPPEPPGGLCHGHPQPQVH

SEQ ID NO: 58021 - protein, 900 aa, Homo sapiens
  Payload ID: 11371
  Gene Symbol: NFKB2
  Gene Name: nuclear factor of kappa light polypeptide gene enhancer in B-cells 2 (p49/p100)
  Uniprot ID: Q00653
  ENSP ID: ENSP00000358983
MESCYNPGLDGIIEYDDFKLNSSIVEPKEPAPETADGPYLVIVEQPKQRGFRFRYGCEGPSHGGLPGASSEKGRKTYPTVKICNYEGPAKIEVDLVTHSDPPRAHAHSLVGKQCSELGICAVSVGPKDMTAQFNNLGVLHVTKKNMMGTMIQKLQRQRLRSRPQGLTEAEQRELEQEAKELKKVMDLSIVRLRFSAFLRASDGSFSLPLKPVISQPIHDSKSPGASNLKISRMDKTAGSVRGGDEVYLLCDKVQKDDIEVRFYEDDENGWQAFGDFSPTDVHKQYAIVFRTPPYHKMKIERPVTVFLQLKRKRGGDVSDSKQFTYYPLVEDKEEVQRKRRKALPTFSQPFGGGSHMGGGSGGAAGGYGGAGGGGSLGFFPSSLAYSPYQSGAGPMGCYPGGGGGAQMAATVPSRDSGEEAAEPSAPSRTPQCEPQAPEMLQRAREYNARLFGLAQRSARALLDYGVTADARALLAGQRHLLTAQDENGDTPLHLAIIHGQTSVIEQIVYVIHHAQDLGVVNLTNHLHQTPLHLAVITGQTSVVSFLLRVGADPALLDRHGDSAMHLALRAGAGAPELLRALLQSGAPAVPQLLHMPDFEGLYPVHLAVRARSPECLDLLVDSGAEVEATERQGGRTALHLATEMEELGLVTHLVTKLRANVNARTFAGNTPLHLAAGLGYPTLTRLLLKAGADIHAENEEPLCPLPSPPTSDSDSDSEGPEKDTRSSFRGHTPLDLTCSTKVKTLLLNAAQNTMEPPLTPPSPAGPGLSLGDTALQNLEQLLDGPEAQGSWAELAERLGLRSLVDTYRQTTSPSGSLLRSYELAGGDLAGLLEALSDMGLEEGVRLLRGPETRDKLPSTAEVKEDSAYGSQSVEQEAEKLGPPPEPPGGLCHGHPQPQVH

SEQ ID NO: 58022 - protein, 899 aa, Homo sapiens; identical to SEQ ID NO: 58020
  Payload ID: 11371
  Gene Symbol: NFKB2
  Gene Name: nuclear factor of kappa light polypeptide gene enhancer in B-cells 2 (p49/p100)
  Uniprot ID: Q00653
  ENSP ID: ENSP00000410256

SEQ ID NO: 58023 - protein, 22 aa, Homo sapiens
  Payload ID: 11371
  Gene Symbol: NFKB2
  Gene Name: nuclear factor of kappa light polypeptide gene enhancer in B-cells 2 (p49/p100)
  ENSP ID: ENSP00000470826
MESCYNPGLDGIIEYDDFKLNS

SEQ ID NO: 58024 - protein, 68 aa, Homo sapiens
  Payload ID: 11371
  Gene Symbol: NFKB2
  Gene Name: nuclear factor of kappa light polypeptide gene enhancer in B-cells 2 (p49/p100)
  ENSP ID: ENSP00000471586
MESCYNPGLDGIIEYDDFKLNSSIVEPKEPAPETADGPYLVIVEQPKQRGFRFRYGCEGPSHGGLPGA

SEQ ID NO: 58025 - protein, 415 aa, Homo sapiens
  Payload ID: 11371
  Gene Symbol: NFKB2
  Gene Name: nuclear factor of kappa light polypeptide gene enhancer in B-cells 2 (p49/p100)
  ENSP ID: ENSP00000480211
MESCYNPGLDGIIEYDDFKLNSSIVEPKEPAPETADGPYLVIVEQPKQRGFRFRYGCEGPSHGGLPGASSEKGRKTYPTVKICNYEGPAKIEVDLVTHSDPPRAHAHSLVGKQCSELGICAVSVGPKDMTAQFNNLGVLHVTKKNMMGTMIQKLQRQRLRSRPQGLTEAEQRELEQEAKELKKVMDLSIVRLRFSAFLRASDGSFSLPLKPVISQPIHDSKSPGASNLKISRMDKTAGSVRGGDEVYLLCDKVQKDDIEVRFYEDDENGWQAFGDFSPTDVHKQYAIVFRTPPYHKMKIERPVTVFLQLKRKRGGDVSDSKQFTYYPLVEDKEEVQRKRRKALPTFSQPFGGGSHMGGGSGGAAGGYGGAGGGEGVLMEGGVKVREAVEEKNLGRPGVVAHACNPAFGRPRQAIT

SEQ ID NO: 58026 - protein, 317 aa, Homo sapiens
  Payload ID: 11372
  Gene Symbol: NFKBIA
  Gene Name: nuclear factor of kappa light polypeptide gene enhancer in B-cells inhibitor, alpha
  Uniprot ID: P25963
  ENSP ID: ENSP00000216797
MFQAAERPQEWAMEGPRDGLKKERLLDDRHDSGLDSMKDEEYEQMVKELQEIRLEPQEVPRGSEPWKQQLTEDGDSFLHLAIIHEEKALTMEVIRQVKGDLAFLNFQNNLQQTPLHLAVITNQPEIAEALLGAGCDPELRDFRGNTPLHLACEQGCLASVGVLTQSCTTPHLHSILKATNYNGHTCLHLASIHGYLGIVELLVSLGADVNAQEPCNGRTALHLAVDLQNPDLVSLLLKCGADVNRVTYQGYSPYQLTWGRPSTRIQQQLGQLTLENLQMLPESEDEESYDTESEFTEFTEDELPYDDCVFGGQRLTL

SEQ ID NO: 58027 - protein, 227 aa, Homo sapiens
  Payload ID: 11372
  Gene Symbol: NFKBIA
  Gene Name: nuclear factor of kappa light polypeptide gene enhancer in B-cells inhibitor, alpha
  ENSP ID: ENSP00000450514
MEVIRQVKGDLAFLNFQNNLQQTPLHLAVITNQPEIAEALLGAGCDPELRDFRGNTPLHLACEQGCLASVGVLTQSCTTPHLHSILKATNYNGHTCLHLASIHGYLGIVELLVSLGADVNAQEPCNGRTALHLAVDLQNPDLVSLLLKCGADVNRVTYQGYSPYQLTWGRPSTRIQQQLGQLTLENLQMLPESEDEESYDTESEFTEFTEDELPYDDCVFGGQRLTL

SEQ ID NO: 58028 - protein, 82 aa, Homo sapiens
  Payload ID: 11372
  Gene Symbol: NFKBIA
  Gene Name: nuclear factor of kappa light polypeptide gene enhancer in B-cells inhibitor, alpha
  ENSP ID: ENSP00000450537
MFQAAERPQEWAMEGPRDGLKKERLLDDRHDSGLDSMKDEEYEQMVKELQEIRLEPQEVPRGSEPWKQQLTEDGDSLHSTWL

SEQ ID NO: 58029 - protein, 274 aa, Homo sapiens
  Payload ID: 11372
  Gene Symbol: NFKBIA
  Gene Name: nuclear factor of kappa light polypeptide gene enhancer in B-cells inhibitor, alpha
  ENSP ID: ENSP00000451257
MFQAAERPQEWAMEGPRDGLKKERLLDDRHDSGLDSMKDEEYEQMVKELQEIRLEPQEVPRGSEPWKQQLTEDGDSFLHLAIIHEEKALTMEVIRQVKGDLAFLNFQNNLQQTPLHLAVITNQPEIAEALLGAGCDPELRDFRGNTPLHLACEQGCLASVGVLTQSCTTPHLHSILKATNYNGHTCLHLASIHGYLGIVELLVSLGADVNAQLTWGRPSTRIQQQLGQLTLENLQMLPESEDEESYDTESEFTEFTEDELPYDDCVFGGQRLTL

SEQ ID NO: 58030 - protein, 68 aa, Homo sapiens
  Payload ID: 11372
  Gene Symbol: NFKBIA
  Gene Name: nuclear factor of kappa light polypeptide gene enhancer in B-cells inhibitor, alpha
  ENSP ID: ENSP00000451281
MFQAAERPQEWAMEGPRDGLKKERLLDDRHDSGLDSMKDEEYEQMLTEDGDSFLHLAIIHEEKALTME

SEQ ID NO: 58031 - protein, 356 aa, Homo sapiens
  Payload ID: 11373
  Gene Symbol: NFKBIB
  Gene Name: nuclear factor of kappa light polypeptide gene enhancer in B-cells inhibitor, beta
  Uniprot ID: Q15653
  ENSP ID: ENSP00000312988
MAGVACLGKAADADEWCDSGLGSLGPDAAAPGGPGLGAELGPGLSWAPLVFGYVTEDGDTALHLAVIHQHEPFLDFLLGFSAGTEYMDLQNDLGQTALHLAAILGETSTVEKLYAAGAGLCVAERRGHTALHLACRVGAHACARALLQPRPRRPREAPDTYLAQGPDRTPDTNHTPVALYPDSDLEKEEEESEEDWKLQLEAENYEGHTPLHVAVIHKDVEMVRLLRDAGADLDKPEPTCGRSPLHLAVEAQAADVLELLLRAGANPAARMYGGRTPLGSAMLRPNPILARLLRAHGAPEPEGEDEKSGPCSSSSDSDSGDEGDEYDDIVVHSSRSQTRLPPTPASKPLPDDPRPV

SEQ ID NO: 58032 - protein, 270 aa, Homo sapiens
  Payload ID: 11373
  Gene Symbol: NFKBIB
  Gene Name: nuclear factor of kappa light polypeptide gene enhancer in B-cells inhibitor, beta
  ENSP ID: ENSP00000375929
MDLQNDLGQTALHLAAILGETSTVEKLYAAGAGLCVAERRGHTALHLACRVGAHACARALLQPRPRRPREAPDTYLAQGPDRTPDTNHTPVALYPDSDLEKEEEESEEDWKLQLEAENYEGHTPLHVAVIHKDVEMVRLLRDAGADLDKPEPTCGRSPLHLAVEAQAADVLELLLRAGANPAARMYGGRTPLGSAMLRPNPILARLLRAHGAPEPEGEDEKSGPCSSSSDSDSGDEGDEYDDIVVHSSRSQTRLPPTPASKPLPDDPRPV

SEQ ID NO: 58033 - protein, 65 aa, Homo sapiens
  Payload ID: 11373
  Gene Symbol: NFKBIB
  Gene Name: nuclear factor of kappa light polypeptide gene enhancer in B-cells inhibitor, beta
  ENSP ID: ENSP00000438598
MAGVACLGKAADADEWCDSGLGSLGPDAAAPGGPGLGAELGPGLSWAPLVFGYVTEDGDTLLGRH

SEQ ID NO: 58034 - protein, 149 aa, Homo sapiens
  Payload ID: 11373
  Gene Symbol: NFKBIB
  Gene Name: nuclear factor of kappa light polypeptide gene enhancer in B-cells inhibitor, beta
  ENSP ID: ENSP00000458685
MNGFSAGTEYMDLQNDLGQTALHLAAILGETSTVEKLYAAGAGLCVAERRGHTALHLACRVGAHACARALLQPRPRRPREAPDTYLAQGPDRTPDTNHTPVALYPDSDLEKEEEESEEDWKLQLEAENYEGHTPLHVAVIHKDVEMVRL

SEQ ID NO: 58035 - protein, 338 aa, Homo sapiens
  Payload ID: 11373
  Gene Symbol: NFKBIB
  Gene Name: nuclear factor of kappa light polypeptide gene enhancer in B-cells inhibitor, beta
  Uniprot ID: Q15653
  ENSP ID: ENSP00000459728
MAGVACLGKAADADEWCDSGLGSLGPDAAAPGGPGLGAELGPGLSWAPLVFGYVTEDGDTALHLAVIHQHEPFLDFLLGFSAGTEYMDLQNDLGQTALHLAAILGETSTVEKLYAAGAGLCVAERRGHTALHLACRVGAHACARALLQPRPRRPREAPDTYLAQGPDRTPDTNHTPVALYPDSDLEKEEEESEEDWKLQLEAENYEGHTPLHVAVIHKDVEMVRLLRDAGADLDKPEPTCGRSPLHLAVEAQAADVLELLLRAGANPAARMYGGRTPLGSAMLRPNPILARLLRAHGAPEPEGEDEKSGPCSSSSDSDSGDEGVSQEERQGSPAGGSG

SEQ ID NO: 58036 - protein, 233 aa, Homo sapiens
  Payload ID: 11373
  Gene Symbol: NFKBIB
  Gene Name: nuclear factor of kappa light polypeptide gene enhancer in B-cells inhibitor, beta
  ENSP ID: ENSP00000461617
MDLQNDLGQTALHLAAILGETSTVEKLYAAGAGLCVAERRGHTALHLACRVGAHACARALLQPRPRRPREAPDTYLAQGPDRTPDTNHTPVALYPDSDLEKEEEESEEDWKLQLEAENYEGHTPLHVAVIHKDVEMVRLLRDAGADLDKPEPTCGRSPLHLAVEAQAADVLELLLRAGANPAARMYGGRTPLGSAMLRPNPILARLLRAHGAPEPEGEDEKSGPCSSSSDSDS

SEQ ID NO: 58037 - protein, 149 aa, Homo sapiens; identical to SEQ ID NO: 58034
  Payload ID: 11373
  Gene Symbol: NFKBIB
  Gene Name: Nuclear factor of kappa light polypeptide gene enhancer in B-cells inhibitor, beta
  ENSP ID: ENSP00000489042

SEQ ID NO: 58038 - protein, 65 aa, Homo sapiens; identical to SEQ ID NO: 58033
  Payload ID: 11373
  Gene Symbol: NFKBIB
  Gene Name: Nuclear factor of kappa light polypeptide gene enhancer in B-cells inhibitor, beta
  ENSP ID: ENSP00000489085

SEQ ID NO: 58039 - protein, 356 aa, Homo sapiens; identical to SEQ ID NO: 58031
  Payload ID: 11373
  Gene Symbol: NFKBIB
  Gene Name: Nuclear factor of kappa light polypeptide gene enhancer in B-cells inhibitor, beta
  ENSP ID: ENSP00000489138

SEQ ID NO: 58040 - protein, 338 aa, Homo sapiens; identical to SEQ ID NO: 58035
  Payload ID: 11373
  Gene Symbol: NFKBIB
  Gene Name: Nuclear factor of kappa light polypeptide gene enhancer in B-cells inhibitor, beta
  ENSP ID: ENSP00000489145

SEQ ID NO: 58041 - protein, 270 aa, Homo sapiens; identical to SEQ ID NO: 58032
  Payload ID: 11373
  Gene Symbol: NFKBIB
  Gene Name: Nuclear factor of kappa light polypeptide gene enhancer in B-cells inhibitor, beta
  ENSP ID: ENSP00000489191

SEQ ID NO: 58042 - protein, 233 aa, Homo sapiens; identical to SEQ ID NO: 58036
  Payload ID: 11373
  Gene Symbol: NFKBIB
  Gene Name: Nuclear factor of kappa light polypeptide gene enhancer in B-cells inhibitor, beta
  ENSP ID: ENSP00000489318

SEQ ID NO: 58043 - protein, 313 aa, Homo sapiens
  Payload ID: 11374
  Gene Symbol: NFKBID
  Gene Name: nuclear factor of kappa light polypeptide gene enhancer in B-cells inhibitor, delta
  Uniprot ID: Q8NI38
  ENSP ID: ENSP00000380109
MEAGPWRVSAPPSGPPQFPAVVPGPSLEVARAHMLALGPQQLLAQDEEGDTLLHLFAARGLRWAAYAAAEVLQVYRRLDIREHKGKTPLLVAAAANQPLIVEDLLNLGAEPNAADHQGRSVLHVAATYGLPGVLLAVLNSGVQVDLEARDFEGLTPLHTAILALNVAMRPSDLCPRVLSTQARDRLDCVHMLLQMGANHTSQEIKSNKTVLHLAVQAANPTLVQLLLELPRGDLRTFVNMKAHGNTALHMAAALPPGPAQEAIVRHLLAAGADPTLRNLENEQPVHLLRPGPGPEGLRQLLKRSRVAPPGLSS

SEQ ID NO: 58044 - protein, 150 aa, Homo sapiens
  Payload ID: 11374
  Gene Symbol: NFKBID
  Gene Name: nuclear factor of kappa light polypeptide gene enhancer in B-cells inhibitor, delta
  ENSP ID: ENSP00000465684
MEDPPDTQFYVGSSLPQAGPWRVSAPPSGPPQFPAVVPGPSLEVARAHMLALGPQQLLAQDEEGDTLLHLFAARGLRWAAYAAAEVLQVYRRLDIREHKGKTPLLVAAAANQPLIVEDLLNLGAEPNAADHQGRSVLHVAATYGLPGVLL

SEQ ID NO: 58045 - protein, 65 aa, Homo sapiens
  Payload ID: 11374
  Gene Symbol: NFKBID
  Gene Name: nuclear factor of kappa light polypeptide gene enhancer in B-cells inhibitor, delta
  ENSP ID: ENSP00000467127
  MOD_RES (1)..(1): Any amino acid
XSGVQVDLEARDFEGLTPLHTAILALNVAMRPSDLCPRVLSTQARDRLDCVHMLLQMGANHTSQR

SEQ ID NO: 58046 - protein, 313 aa, Homo sapiens; identical to SEQ ID NO: 58043
  Payload ID: 11374
  Gene Symbol: NFKBID
  Gene Name: nuclear factor of kappa light polypeptide gene enhancer in B-cells inhibitor, delta
  Uniprot ID: Q8NI38
  ENSP ID: ENSP00000475712

SEQ ID NO: 58047 - protein, 500 aa, Homo sapiens
  Payload ID: 11375
  Gene Symbol: NFKBIE
  Gene Name: nuclear factor of kappa light polypeptide gene enhancer in B-cells inhibitor, epsilon
  Uniprot ID: O00221
  ENSP ID: ENSP00000275015
MNQRRSESRPGNHRLQAYAEPGKGDSGGAGPLSGSARRGRGGGGAIRVRRPCWSGGAGRGGGPAWAVRLPTVTAGWTWPALRTLSSLRAGPSEPHSPGRRPPRAGRPLCQADPQPGKAARRSLEPDPAQTGPRPARAAGMSEARKGPDEAEESQYDSGIESLRSLRSLPESTSAPASGPSDGSPQPCTHPPGPVKEPQEKEDADGERADSTYGSSSLTYTLSLLGGPEAEDPAPRLPLPHVGALSPQQLEALTYISEDGDTLVHLAVIHEAPAVLLCCLALLPQEVLDIQNNLYQTALHLAVHLDQPGAVRALVLKGASRALQDRHGDTALHVACQRQHLACARCLLEGRPEPGRGTSHSLDLQLQNWQGLACLHIATLQKNQPLMELLLRNGADIDVQEGTSGKTALHLAVETQERGLVQFLLQAGAQVDARMLNGCTPLHLAAGRGLMGISSTLCKAGADSLLRNVEDETPQDLTEESLVLLPFDDLKISGKLLLCTD

SEQ ID NO: 58048 - protein, 55 aa, Homo sapiens
  Payload ID: 11375
  Gene Symbol: NFKBIE
  Gene Name: nuclear factor of kappa light polypeptide gene enhancer in B-cells inhibitor, epsilon
  ENSP ID: ENSP00000394658
GRGLMGISSTLCKAGADSLLRNVEDETPQDLTEESLVLLPFDDLKISGKLLLCTD

SEQ ID NO: 58049 - protein, 141 aa, Homo sapiens
  Payload ID: 11375
  Gene Symbol: NFKBIE
  Gene Name: nuclear factor of kappa light polypeptide gene enhancer in B-cells inhibitor, epsilon
  ENSP ID: ENSP00000454778
MSEARKGPDEAEESQYDSGIESLRSLRSLPESTSAPASGPSDGSPQPCTHPPGPVKEPQEKEDADGERADSTYGSSSLTYTLSLLGGPEAEDPAPRLPLPHVGALSPQQLEALTYISEDGDTQHSIWLYIWTNRAQFGHWC

SEQ ID NO: 58050 - protein, 499 aa, Homo sapiens
  Payload ID: 11375
  Gene Symbol: NFKBIE
  Gene Name: nuclear factor of kappa light polypeptide gene enhancer in B-cells inhibitor, epsilon
  ENSP ID: ENSP00000479764
MNQRRSESRPGNHRLQAYAEPGKGDSGGAGPLSGSARRGRGGGGAIRVRRPCWSGGAGRGGGPAWAVRLPTVTAGWTWPALRTLSSLRAGPSEPHSPGRRPPRAGRPLCQADPQPGKAARRSLEPDPAQTGPRPARAAGMSEARKGPDEAEESQYDSGIESLRSLRSLPESTSAPASGPSDGSPQPCTHPPGPVKEPQEKEDADGERADSTYGSSSLTYTLSLLGGPEAEDPAPRLPLPHVGALSPQQLEALTYISEDGDTLVHLAVIHEAPAVLLCCLALLPQEVLDIQNNLYQTALHLAVHLDQPGAVRALVLKGASRALQDRHGDTALHVACQRQTWPVPAACWKGGQPGRGTSHSLDLQLQNWQGLACLHIATLQKNQPLMELLLRNGADIDVQEGTSGKTALHLAVETQERGLVQFLLQAGAQVDARMLNGCTPLHLAAGRGLMGISSTLCKAGADSLLRNVEDETPQDLTEESLVLLPFDDLKISGKLLLCTD

SEQ ID NO: 58051 - protein, 361 aa, Homo sapiens
  Payload ID: 11375
  Gene Symbol: NFKBIE
  Gene Name: nuclear factor of kappa light polypeptide gene enhancer in B-cells inhibitor, epsilon
  ENSP ID: ENSP00000480216
MSEARKGPDEAEESQYDSGIESLRSLRSLPESTSAPASGPSDGSPQPCTHPPGPVKEPQEKEDADGERADSTYGSSSLTYTLSLLGGPEAEDPAPRLPLPHVGALSPQQLEALTYISEDGDTLVHLAVIHEAPAVLLCCLALLPQEVLDIQNNLYQTALHLAVHLDQPGAVRALVLKGASRALQDRHGDTALHVACQRQHLACARCLLEGRPEPGRGTSHSLDLQLQNWQGLACLHIATLQKNQPLMELLLRNGADIDVQEGTSGKTALHLAVETQERGLVQFLLQAGAQVDARMLNGCTPLHLAAGRGLMGISSTLCKAGADSLLRNVEDETPQDLTEESLVLLPFDDLKISGKLLLCTD

SEQ ID NO: 58052 - protein, 596 aa, Homo sapiens
  Payload ID: 11376
  Gene Symbol: NFKBIZ
  Gene Name: nuclear factor of kappa light polypeptide gene enhancer in B-cells inhibitor, zeta
  Uniprot ID: Q9BYH8
  ENSP ID: ENSP00000325593
MIVDKLLDDSRGGEGLRDAAGGCGLMTSPLNLSYFYGASPPAAAPGACDASCSVLGPSAPGSPGSDSSDFSSASSVSSCGAVESRSRGGARAERQPVEPHMGVGRQQRGPFQGVRVKNSVKELLLHIRSHKQKASGQAVDDFKTQGVNIEQFRELKNTVSYSGKRKGPDSLSDGPACKRPALLHSQFLTPPQTPTPGESMEDVHLNEPKQESSADLLQNIINIKNECSPVSLNTVQTSSSVQQQNDAHLHSFSMMPSSACEAMVGHEMASDSSNTSLPFSNMGNPMNTTQLGKSLFQWQVEQEESKLANISQDQFLSKDADGDTFLHIAVAQGRRALSYVLARKMNALHMLDIKEHNGQSAFQVAVAANQHLIVQDLVNIGAQVNTTDCWGRTPLHVCAEKGHSQVLQAIQKGAVGSNQFVDLEATNYDGLTPLHCAVIAHNAVVHELQRNQQPHSPEVQELLLKNKSLVDTIKCLIQMGAAVEAKDRKSGRTALHLAAEEANLELIRLFLELPSCLSFVNAKAYNGNTALHVAASLQYRLTQLDAVRLLMRKGADPSTRNLENEQPVHLVPDGPVGEQIRRILKGKSIQQRAPPY

SEQ ID NO: 58053 - protein, 718 aa, Homo sapiens
  Payload ID: 11376
  Gene Symbol: NFKBIZ
  Gene Name: nuclear factor of kappa light polypeptide gene enhancer in B-cells inhibitor, zeta
  Uniprot ID: Q9BYH8
  ENSP ID: ENSP00000325663
MIVDKLLDDSRGGEGLRDAAGGCGLMTSPLNLSYFYGASPPAAAPGACDASCSVLGPSAPGSPGSDSSDFSSASSVSSCGAVESRSRGGARAERQPVEPHMGVGRQQRGPFQGVRVKNSVKELLLHIRSHKQKASGQAVDDFKTQGVNIEQFRELKNTVSYSGKRKGPDSLSDGPACKRPALLHSQFLTPPQTPTPGESMEDVHLNEPKQESSADLLQNIINIKNECSPVSLNTVQVSWLNPVVVPQSSPAEQCQDFHGGQVFSPPQKCQPFQVRGSQQMIDQASLYQYSPQNQHVEQQPHYTHKPTLEYSPFPIPPQSPAYEPNLFDGPESQFCPNQSLVSLLGDQRESENIANPMQTSSSVQQQNDAHLHSFSMMPSSACEAMVGHEMASDSSNTSLPFSNMGNPMNTTQLGKSLFQWQVEQEESKLANISQDQFLSKDADGDTFLHIAVAQGRRALSYVLARKMNALHMLDIKEHNGQSAFQVAVAANQHLIVQDLVNIGAQVNTTDCWGRTPLHVCAEKGHSQVLQAIQKGAVGSNQFVDLEATNYDGLTPLHCAVIAHNAVVHELQRNQQPHSPEVQELLLKNKSLVDTIKCLIQMGAAVEAKDRKSGRTALHLAAEEANLELIRLFLELPSCLSFVNAKAYNGNTALHVAASLQYRLTQLDAVRLLMRKGADPSTRNLENEQPVHLVPDGPVGEQIRRILKGKSIQQRAPPY

SEQ ID NO: 58054 - protein, 618 aa, Homo sapiens
  Payload ID: 11376
  Gene Symbol: NFKBIZ
  Gene Name: nuclear factor of kappa light polypeptide gene enhancer in B-cells inhibitor, zeta
  Uniprot ID: Q9BYH8
  ENSP ID: ENSP00000377618
MGVGRQQRGPFQGVRVKNSVKELLLHIRSHKQKASGQAVDDFKTQGVNIEQFRELKNTVSYSGKRKGPDSLSDGPACKRPALLHSQFLTPPQTPTPGESMEDVHLNEPKQESSADLLQNIINIKNECSPVSLNTVQVSWLNPVVVPQSSPAEQCQDFHGGQVFSPPQKCQPFQVRGSQQMIDQASLYQYSPQNQHVEQQPHYTHKPTLEYSPFPIPPQSPAYEPNLFDGPESQFCPNQSLVSLLGDQRESENIANPMQTSSSVQQQNDAHLHSFSMMPSSACEAMVGHEMASDSSNTSLPFSNMGNPMNTTQLGKSLFQWQVEQEESKLANISQDQFLSKDADGDTFLHIAVAQGRRALSYVLARKMNALHMLDIKEHNGQSAFQVAVAANQHLIVQDLVNIGAQVNTTDCWGRTPLHVCAEKGHSQVLQAIQKGAVGSNQFVDLEATNYDGLTPLHCAVIAHNAVVHELQRNQQPHSPEVQELLLKNKSLVDTIKCLIQMGAAVEAKDRKSGRTALHLAAEEANLELIRLFLELPSCLSFVNAKAYNGNTALHVAASLQYRLTQLDAVRLLMRKGADPSTRNLENEQPVHLVPDGPVGEQIRRILKGKSIQQRAPPY

SEQ ID NO: 58055 - protein, 129 aa, Homo sapiens
  Payload ID: 11376
  Gene Symbol: NFKBIZ
  Gene Name: nuclear factor of kappa light polypeptide gene enhancer in B-cells inhibitor, zeta
  ENSP ID: ENSP00000418498
MGVGRQQRGPFQGVRVKNSVKELLLHIRSHKQKASGQAVDDFKTQGVNIEQFRELKNTVSYSGKRKGPDSLSDGPACKRPALLHSQFLTPPQTPTPGESMEDVHLNEPKQESSADLLQNIINIKNECSP

SEQ ID NO: 58056 - protein, 110 aa, Homo sapiens
  Payload ID: 11376
  Gene Symbol: NFKBIZ
  Gene Name: nuclear factor of kappa light polypeptide gene enhancer in B-cells inhibitor, zeta
  ENSP ID: ENSP00000418502
MIVDKLLDDSRGGEGLRDAAGGCGLMTSPLNLSYFYGASPPAAAPGACDASCSVLGPSAPGSPGSDSSDFSSASSVSSCGAVESRSRGGARAERQPVEPHMGVGRQQRGP

SEQ ID NO: 58057 - protein, 601 aa, Homo sapiens
  Payload ID: 11376
  Gene Symbol: NFKBIZ
  Gene Name: nuclear factor of kappa light polypeptide gene enhancer in B-cells inhibitor, zeta
  ENSP ID: ENSP00000419800
MGVGRQQRGPFQGVRVKNSVKELLLHIRSHKQKASGQAVDDFKTQGVNIEQFRELKNTVSYSGKRKGPDSLSDGPACKRPALLHSQFLTPPQTPTPGESMEDVHLNEPKQESSADLLQNIINIKNECSPVSLNTVQVSWLNPVVVPQSSPAEQCQDFHGGQVFSPPQKCQPFQVRGSQQMIDQASLYQYSPQNQHVEQQPHYTHKPTLEYSPFPIPPQSPAYEPNLFDGPESQFCPNQSLVSLLGDQRESENIANPMQTSSSVQQQNDAHLHSFSMMPSSACEAMVGHEMASDSSNTSLPFSNMGNPMNTTQLGKSLFQWQVEQEESKLANISQDQFLSKDADGDTFLHIAVAQGRRALSYVLARKMNALHMLDIKEHNGQSAFQVAVAANQHLIVQDLVNIGAQVNTTDCWGRTPLHVCAEKGHSQVLQAIQKGAVGSNQFVDLEATNYDGLTPLHCAVIAHNAVVHELQRNQQPHSPEVQELLLKNKSLVDTIKCLIQMGAAVEAKDRKSGRTALHLAAEEANLELIRLFLELPSCLSFVNAKAYNGNTALHVAASLQYRLTQLDAVRLLMRKGADPSTRNLENEQPVHLVPDGPVGEQ

SEQ ID NO: 58058 - protein, 130 aa, Homo sapiens
  Payload ID: 11376
  Gene Symbol: NFKBIZ
  Gene Name: nuclear factor of kappa light polypeptide gene enhancer in B-cells inhibitor, zeta
  ENSP ID: ENSP00000420700
  MOD_RES (1)..(1): Any amino acid
XLTPLHCAVIAHNAVVHELQRNQQPHSPEVQELLLKNKSLVDTIKCLIQMGAAVEAKAYNGNTALHVAASLQYRLTQLDAVRLLMRKGADPSTRNLENEQPVHLVPDGPVGEQIRRILKGKSIQQRAPPY

SEQ ID NO: 58059 - protein, 366 aa, Homo sapiens
  Payload ID: 11377
  Gene Symbol: NFKBIL1
  Gene Name: nuclear factor of kappa light polypeptide gene enhancer in B-cells inhibitor-like 1
  ENSP ID: ENSP00000365315
MSNPSPQVPEEEASTSVCRPKSSMASTSRRQRRERRFRRYLSAGRLVRAQALLQRHPGLDVDAGQPPPLHRACARHDAPALCLLLRLGADPAHQDRHGDTALHAAARQGPDAYTDFFLPLLSRCPSAMGIKNKDGETPGQILGWGPPWDSAEEEEEDDASKEREWRQKLQGDASHETQEPESFSAWSDRLAREHAQKCQQQQREAEGSRRPPRAEGSSQSWRQQEEEQRLFRERARAKEEELRESRARRAQEALGDREPKPTRAGPREEHPRGAGRGSLWRFGDVPWPCPGGGDPEAMAAALVARGPPLEEQGALRRYLRVQQVRWHPDRFLQRFRSQIETWELGRVMGAVTALSQALNRHAEALK

SEQ ID NO: 58060 - protein, 358 aa, Homo sapiens
  Payload ID: 11377
  Gene Symbol: NFKBIL1
  Gene Name: nuclear factor of kappa light polypeptide gene enhancer in B-cells inhibitor-like 1
  ENSP ID: ENSP00000365316
MASTSRRQRRERRFRRYLSAGRLVRAQALLQRHPGLDVDAGQPPPLHRACARHDAPALCLLLRLGADPAHQDRHGDTALHAAARQGPDAYTDFFLPLLSRCPSAMGIKNKDGETPGQILGWGPPWDSAEEEEEDDASKEREWRQKLQGELEDEWQEVMGRFEGDASHETQEPESFSAWSDRLAREHAQKCQQQQREAEGSRRPPRAEGSSQSWRQQEEEQRLFRERARAKEEELRESRARRAQEALGDREPKPTRAGPREEHPRGAGRGSLWRFGDVPWPCPGGGDPEAMAAALVARGPPLEEQGALRRYLRVQQVRWHPDRFLQRFRSQIETWELGRVMGAVTALSQALNRHAEALK

SEQ ID NO: 58061 - protein, 381 aa, Homo sapiens
  Payload ID: 11377
  Gene Symbol: NFKBIL1
  Gene Name: nuclear factor of kappa light polypeptide gene enhancer in B-cells inhibitor-like 1
  Uniprot ID: Q9UBC1
  ENSP ID: ENSP00000365318
MSNPSPQVPEEEASTSVCRPKSSMASTSRRQRRERRFRRYLSAGRLVRAQALLQRHPGLDVDAGQPPPLHRACARHDAPALCLLLRLGADPAHQDRHGDTALHAAARQGPDAYTDFFLPLLSRCPSAMGIKNKDGETPGQILGWGPPWDSAEEEEEDDASKEREWRQKLQGELEDEWQEVMGRFEGDASHETQEPESFSAWSDRLAREHAQKCQQQQREAEGSRRPPRAEGSSQSWRQQEEEQRLFRERARAKEEELRESRARRAQEALGDREPKPTRAGPREEHPRGAGRGSLWRFGDVPWPCPGGGDPEAMAAALVARGPPLEEQGALRRYLRVQQVRWHPDRFLQRFRSQIETWELGRVMGAVTALSQALNRHAEALK

SEQ ID NO: 58062 - protein, 366 aa, Homo sapiens [sequence omitted]

SEQ ID NO: 58063 - protein, 358 aa, Homo sapiens
  Payload ID: 11377
  Gene Symbol: NFKBIL1
  Gene Name: nuclear factor of kappa light polypeptide gene enhancer in B-cells inhibitor-like 1
  Uniprot ID: Q9UBC1
  ENSP ID: ENSP00000383137
MASTSRRQRRERRFRRYLSAGRLVRAQALLQRHPGLDVDAGQPPPLHRACARHDAPALCLLLRLGADPAHQDRHGDTALHAAARQGPDAYTDFFLPLLSRCPSAMGIKNKDGETPGQILGWGPPWDSAEEEEEDDASKEREWRQKLQGELEDEWQEVMGRFEGDASHETQEPESFSAWSDRLAREHAQKCQQQQREAEGSCRPPRAEGSSQSWRQQEEEQRLFRERARAKEEELRESRARRAQEALGDREPKPTRAGPREEHPRGAGRGSLWRFGDVPWPCPGGGDPEAMAAALVARGPPLEEQGALRRYLRVQQVRWHPDRFLQRFRSQIETWELGRVMGAVTALSQALNRHAEALK

SEQ ID NO: 58064 - protein, 381 aa, Homo sapiens
  Payload ID: 11377
  Gene Symbol: NFKBIL1
  Gene Name: nuclear factor of kappa light polypeptide gene enhancer in B-cells inhibitor-like 1
  Uniprot ID: Q9UBC1
  ENSP ID: ENSP00000383142
MSNPSPQVPEEEASTSVCRPKSSMASTSRRQRRERRFRRYLSAGRLVRAQALLQRHPGLDVDAGQPPPLHRACARHDAPALCLLLRLGADPAHQDRHGDTALHAAARQGPDAYTDFFLPLLSRCPSAMGIKNKDGETPGQILGWGPPWDSAEEEEEDDASKEREWRQKLQGELEDEWQEVMGRFEGDASHETQEPESFSAWSDRLAREHAQKCQQQQREAEGSCRPPRAEGSSQSWRQQEEEQRLFRERARAKEEELRESRARRAQEALGDREPKPTRAGPREEHPRGAGRGSLWRFGDVPWPCPGGGDPEAMAAALVARGPPLEEQGALRRYLRVQQVRWHPDRFLQRFRSQIETWELGRVMGAVTALSQALNRHAEALK

SEQ ID NO: 58065 - protein, 381 aa, Homo sapiens; identical to SEQ ID NO: 58064
  Payload ID: 11377
  Gene Symbol: NFKBIL1
  Gene Name: nuclear factor of kappa light polypeptide gene enhancer in B-cells inhibitor-like 1
  Uniprot ID: Q9UBC1
  ENSP ID: ENSP00000394486

SEQ ID NO: 58066 - protein, 381 aa, Homo sapiens; identical to SEQ ID NO: 58064
  Payload ID: 11377
  Gene Symbol: NFKBIL1
  Gene Name: nuclear factor of kappa light polypeptide gene enhancer in B-cells inhibitor-like 1
  Uniprot ID: Q9UBC1
  ENSP ID: ENSP00000395544

SEQ ID NO: 58067 - protein, 358 aa, Homo sapiens; identical to SEQ ID NO: 58063
  Payload ID: 11377
  Gene Symbol: NFKBIL1
  Gene Name: nuclear factor of kappa light polypeptide gene enhancer in B-cells inhibitor-like 1
  Uniprot ID: Q9UBC1
  ENSP ID: ENSP00000395977

SEQ ID NO: 58068 - protein, 381 aa, Homo sapiens; identical to SEQ ID NO: 58064
  Payload ID: 11377
  Gene Symbol: NFKBIL1
  Gene Name: nuclear factor of kappa light polypeptide gene enhancer in B-cells inhibitor-like 1
  Uniprot ID: Q9UBC1
  ENSP ID: ENSP00000396656

SEQ ID NO: 58069 - protein, 366 aa, Homo sapiens [sequence omitted]

SEQ ID NO: 58070 - protein, 358 aa, Homo sapiens; identical to SEQ ID NO: 58063
  Payload ID: 11377
  Gene Symbol: NFKBIL1
  Gene Name: nuclear factor of kappa light polypeptide gene enhancer in B-cells inhibitor-like 1
  Uniprot ID: Q9UBC1
  ENSP ID: ENSP00000401830

SEQ ID NO: 58071 - protein, 366 aa, Homo sapiens [sequence omitted]

SEQ ID NO: 58072 - protein, 358 aa, Homo sapiens; identical to SEQ ID NO: 58063
  Payload ID: 11377
  Gene Symbol: NFKBIL1
  Gene Name: nuclear factor of kappa light polypeptide gene enhancer in B-cells inhibitor-like 1
  Uniprot ID: Q9UBC1
  ENSP ID: ENSP00000407809

SEQ ID NO: 58073 - protein, 381 aa, Homo sapiens; identical to SEQ ID NO: 58064
  Payload ID: 11377
  Gene Symbol: NFKBIL1
  Gene Name: nuclear factor of kappa light polypeptide gene enhancer in B-cells inhibitor-like 1
  Uniprot ID: Q9UBC1
  ENSP ID: ENSP00000408426

SEQ ID NO: 58074 - protein, 358 aa, Homo sapiens; identical to SEQ ID NO: 58063
  Payload ID: 11377
  Gene Symbol: NFKBIL1
  Gene Name: nuclear factor of kappa light polypeptide gene enhancer in B-cells inhibitor-like 1
  Uniprot ID: Q9UBC1
  ENSP ID: ENSP00000411174

SEQ ID NO: 58075 - protein, 381 aa, Homo sapiens; identical to SEQ ID NO: 58064
  Payload ID: 11377
  Gene Symbol: NFKBIL1
  Gene Name: nuclear factor of kappa light polypeptide gene enhancer in B-cells inhibitor-like 1
  Uniprot ID: Q9UBC1
  ENSP ID: ENSP00000411611

SEQ ID NO: 58076 - protein, 366 aa, Homo sapiens [sequence omitted]

SEQ ID NO: 58077 - protein, 358 aa, Homo sapiens; identical to SEQ ID NO: 58063
  Payload ID: 11377
  Gene Symbol: NFKBIL1
  Gene Name: nuclear factor of kappa light polypeptide gene enhancer in B-cells inhibitor-like 1
  Uniprot ID: Q9UBC1
  ENSP ID: ENSP00000413952

SEQ ID NO: 58078 - protein, 366 aa, Homo sapiens [sequence omitted]

SEQ ID NO: 58079 - protein, 366 aa, Homo sapiens [sequence omitted]

SEQ ID NO: 58080 - protein, 222 aa, Homo sapiens
  Payload ID: 11377
  Gene Symbol: NFKBIL1
  Gene Name: nuclear factor of kappa light polypeptide gene enhancer in B-cells inhibitor-like 1
  ENSP ID: ENSP00000433434
MSNPSPQVPEEEASTSVCRPKSSMASTSRRQRRERRFRRYLSAGRLVRAQALLQRHPGLDVDAGQPPPLHRACARHDAPALCLLLRLGADPAHQDRHGDTALHAAARQGPDAYTDFFLPLLSRCPSAMGIKNKDGETPGQILGWGPPWDSAEEEEEDDASKEREWRQKLQGELEDEWQEVMGRFEGEKSTAIHSCPSPLAAFHLHECVTLGSSAPSSVLPCF

SEQ ID NO: 58081 - protein, 125 aa, Homo sapiens
  Payload ID: 11377
  Gene Symbol: NFKBIL1
  Gene Name: nuclear factor of kappa light polypeptide gene enhancer in B-cells inhibitor-like 1
  ENSP ID: ENSP00000435404
MSNPSPQVPEEEASTSVCRPKSSMASTSRRQRRERRFRRYLSAGRLVRAQALLQRHPGLDVDAGQPPPLHRACARHDAPALCLLLRLGADPAHQDRHGDTALHAAARQGPDGQQSFGKSLLCRRP

SEQ ID NO: 58082 - protein, 125 aa, Homo sapiens; identical to SEQ ID NO: 58081
  Payload ID: 11377
  Gene Symbol: NFKBIL1
  Gene Name: nuclear factor of kappa light polypeptide gene enhancer in B-cells inhibitor-like 1
  ENSP ID: ENSP00000437148

SEQ ID NO: 58083 - protein, 1299 aa, Homo sapiens [sequence omitted]

SEQ ID NO: 58084 - protein, 92 aa, Homo sapiens
  Payload ID: 11378
  Gene Symbol: NFRKB
  Gene Name: nuclear factor related to kappaB binding protein
  ENSP ID: ENSP00000431247
MDSLDHMLTDPLELGPCGDGHGTRIMEDCLLGGTRVSLPEDLLEDPEIFFDVVSLSTWQEVLSDSQREHLQQFLPQFPEDSAEQQNELILAL

SEQ ID NO: 58085 - protein, 188 aa, Homo sapiens
  Payload ID: 11378
  Gene Symbol: NFRKB
  Gene Name: nuclear factor related to kappaB binding protein
  ENSP ID: ENSP00000431854
MDSLDHMLTDPLELGPCGDGHGTRIMEDCLLGGTRVSLPEDLLEDPEIFFDVVSLSTWQEVLSDSQREHLQQFLPQFPEDSAEQQNELILALFSGENFRFGNPLHIAQKLFRDGHFNPEVVKYRQLCFKSQYKRYLNSQQQYFHRLLKQILASRSDLLEMARRSGPALPFRQKRPSPSRTPEEREWRT

SEQ ID NO: 58086 - protein, 122 aa, Homo sapiens
  Payload ID: 11378
  Gene Symbol: NFRKB
  Gene Name: nuclear factor related to kappaB binding protein
  ENSP ID: ENSP00000432520
MDSLDHMLTDPLELGPCGDGHGTRIMEDCLLGGTRVSLPEDLLEDPEIFFDVVSLSTWQEVLSDSQREHLQQFLPQFPEDSAEQQNELILALFSGENFRFGNPLHIAQKLFRDTEAAKSGFV

SEQ ID NO: 58087 - protein, 987 aa, Homo sapiens
  Payload ID: 11378
  Gene Symbol: NFRKB
  Gene Name: nuclear factor related to kappaB binding protein
  ENSP ID: ENSP00000432606
MDSLDHMLTDPLELGPCGDGHGTRIMEDCLLGGTRVSLPEDLLEDPEIFFDVVSLSTWQEVLSDSQREHLQQFLPQFPEDSAEQQNELILALFSGENFRFGNPLHIAQKLFRDGHFNPEVVKYRQLCFKSQYKRYLNSQQQYFHRLLKQILASRSDLLEMARRSGPALPFRQKRPSPSRTPEEREWRTQQRYLKVLREVKEECGDTALSSDEEATLDLQEQFSFEDLSSWLPSSPARSPSPAVPLRVVPTLSTTDMKTADKVELGDSDLKIMLKKHHEKRKHQPDHPDLLTGDLTLNDIMTRVNAGRKGSLAALYDLAVLKKKVKEKEEKKKKKIKTIKSEAEDLAEPLSSTEGVAPLSQAPSPLAIPAIKEEPLEDLKPCLGINEISSSFFSLLLEILLLESQASLPMLEERVLDWQSSPASSLNSWFSAAPNWAELVLPALQYLAGESRAVPSSFSPFVEFKEKTQQWKLLGQSQDNEKELAALFQLWLETKDQAFCKKMKTAQMPQHLSLGRTDYVVRPSTGEEKRVFQEQERYRYSQPHKAFTFRMHGFESVVGPVKGVFDKETSLNKAREHSLLRSDRPAYVTILSLVRDAAARLPNGEGTRAEICELLKDSQFLAPDVTSTQVNTVVSGALDRLHYEKDPCVKYDIGRKLWIYLHRDRSEEEFERIHQAQAAAAKARKALQQKPKPPSKVKSSSKESSIKVLSSGPSEQSQMSLSDSSMPPTPVTPVTPTTPALPAIPISPPPVSAVNKSGPSTVSEPAKSSSGVLLVSSPTMPHLGTMLSPASSQTAPSSQAAARVVSHSGSAGLSQVRVVAQPSLPAVPQQSGGPAQTLPQMPAGPQIRVPATATQTKVVPQTVMATVPVKAQTTAATVQRPGPGQTGLTVTSLPATASPVSKPATSSPGTSAPSASTAAVIQNVTGQNIIKQVAITGQLGVKPQTGNSIPLTATNFRIQGKDVLRLPPSSITTDAKGQTVLRITPDMM

SEQ ID NO: 58088 - protein, 1299 aa, Homo sapiens [sequence omitted]

SEQ ID NO: 58089 - protein, 147 aa, Homo sapiens
  Payload ID: 11378
  Gene Symbol: NFRKB
  Gene Name: nuclear factor related to kappaB binding protein
  ENSP ID: ENSP00000433730
MDSLDHMLTDPLELGPCGDGHGTRIMEDCLLGGTRVSLPEDLLEDPEIFFDVVSLSTWQEVLSDSQREHLQQFLPQFPEDSAEQQNELILALFSGENFRFGNPLHIAQKLFRDGHFNPEVVKYRQLCFKSQYKRYLNSQQQYFHRLL

SEQ ID NO: 58090 - protein, 46 aa, Homo sapiens
  Payload ID: 11378
  Gene Symbol: NFRKB
  Gene Name: nuclear factor related to kappaB binding protein
  ENSP ID: ENSP00000433764
MDSLDHMLTDPLELGPCGDGHGTRIMEDCLLGGTRVSLPEDLLEDV

SEQ ID NO: 58091 - protein, 188 aa, Homo sapiens; identical to SEQ ID NO: 58085
  Payload ID: 11378
  Gene Symbol: NFRKB
  Gene Name: nuclear factor related to kappaB binding protein
  ENSP ID: ENSP00000434326

SEQ ID NO: 58092 - protein, 1324 aa, Homo sapiens
  Payload ID: 11378
  Gene Symbol: NFRKB
  Gene Name: nuclear factor related to kappaB binding protein
  Uniprot ID: Q6P4R8
  ENSP ID: ENSP00000436926
MHVFVQSTCGEETMDSLDHMLTDPLELGPCGDGHGTRIMEDCLLGGTRVSLPEDLLEDPEIFFDVVSLSTWQEVLSDSQREHLQQFLPQFPEDSAEQQNELILALFSGENFRFGNPLHIAQKLFRDGHFNPEVVKYRQLCFKSQYKRYLNSQQQYFHRLLKQILASRSDLLEMARRSGPALPFRQKRPSPSRTPEEREWRTQQRYLKVLREVKEECGDTALSSDEEATLDLQEQFSFEDLSSWLPSSPARSPSPAVPLRVVPTLSTTDMKTADKVELGDSDLKIMLKKHHEKRKHQPDHPDLLTGDLTLNDIMTRVNAGRKGSLAALYDLAVLKKKVKEKEEKKKKKIKTIKSEAEDLAEPLSSTEGVAPLSQAPSPLAIPAIKEEPLEDLKPCLGINEISSSFFSLLLEILLLESQASLPMLEERVLDWQSSPASSLNSWFSAAPNWAELVLPALQYLAGESRAVPSSFSPFVEFKEKTQQWKLLGQSQDNEKELAALFQLWLETKDQAFCKQENEDSSDATTPVPRVRTDYVVRPSTGEEKRVFQEQERYRYSQPHKAFTFRMHGFESVVGPVKGVFDKETSLNKAREHSLLRSDRPAYVTILSLVRDAAARLPNGEGTRAEICELLKDSQFLAPDVTSTQVNTVVSGALDRLHYEKDPCVKYDIGRKLWIYLHRDRSEEEFERIHQAQAAAAKARKALQQKPKPPSKVKSSSKESSIKVLSSGPSEQSQMSLSDSSMPPTPVTPVTPTTPALPAIPISPPPVSAVNKSGPSTVSEPAKSSSGVLLVSSPTMPHLGTMLSPASSQTAPSSQAAARVVSHSGSAGLSQVRVVAQPSLPAVPQQSGGPAQTLPQMPAGPQIRVPATATQTKVVPQTVMATVPVKAQTTAATVQRPGPGQTGLTVTSLPATASPVSKPATSSPGTSAPSASTAAVIQNVTGQNIIKQVAITGQLGVKPQTGNSIPLTATNFRIQGKDVLRLPPSSITTDAKGQTVLRITPDMMATLAKSQVTTVKLTQDLFGTGGNTTGKGISATLHVTSNPVHAADSPAKASSASAPSSTPTGTTVVKVTPDLKPTEASSSAFRLMPALGVSVADQKGKSTVASSEAKPAATIRIVQGLGVMPPKAGQTITVATHAKQGASVASGSGTVHTSAVSLPSMNAAVSKTVAVASGAASTPISISTGAPTVRQVPVSTTVVSTSQAGKLPTRITVPLSVISQPMKGKSVVTAPIIKGNLGANLSGLGRNIILTTMPAGTKLIAGNKPVSFLTAQQLQQLQQQGQATQVRIQTVPASHLQQGTASGSSKAVSTVVVTTAPSPKQAPEQQ

SEQ ID NO: 58093 - protein, 373 aa, Homo sapiens
  Payload ID: 11379
  Gene Symbol: NFE2
  Gene Name: nuclear factor, erythroid 2
  Uniprot ID: Q16621
  ENSP ID: ENSP00000312436
MSPCPPQQSRNRVIQLSTSELGEMELTWQEIMSITELQGLNAPSEPSFEPQAPAPYLGPPPPTTYCPCSIHPDSGFPLPPPPYELPASTSHVPDPPYSYGNMAIPVSKPLSLSGLLSEPLQDPLALLDIGLPAGPPKPQEDPESDSGLSLNYSDAESLELEGTEAGRRRSEYVEMYPVEYPYSLMPNSLAHSNYTLPAAETPLALEPSSGPVRAKPTARGEAGSRDERRALAMKIPFPTDKIVNLPVDDFNELLARYPLTESQLALVRDIRRRGKNKVAAQNCRKRKLETIVQLERELERLTNERERLLRARGEADRTLEVMRQQLTELYRDIFQHLRDESGNSYSPEEYALQQAADGTIFLVPRGTKMEATD

SEQ ID NO: 58094 - protein, 373 aa, Homo sapiens; identical to SEQ ID NO: 58093
  Payload ID: 11379
  Gene Symbol: NFE2
  Gene Name: nuclear factor, erythroid 2
  Uniprot ID: Q16621
  ENSP ID: ENSP00000397185

SEQ ID NO: 58095 - protein, 373 aa, Homo sapiens; identical to SEQ ID NO: 58093
  Payload ID: 11379
  Gene Symbol: NFE2
  Gene Name: nuclear factor, erythroid 2
  Uniprot ID: Q16621
  ENSP ID: ENSP00000439120

SEQ ID NO: 58096 - protein, 343 aa, Homo sapiens
  Payload ID: 11379
  Gene Symbol: NFE2
  Gene Name: nuclear factor, erythroid 2
  ENSP ID: ENSP00000446929
MSPCPPQQSRNRVIQLSTSELGEMELTWQEIMSITELQGLNAPSEPSFEPQAPAPYLGPPPPTTYCPCSIHPDSGFPLPPPPYELPASTSHVPDPPYSYGNMAIPVSKPLSLSGLLSEPLQDPLALLDIGLPAGPPKPQEDPESDSGLSLNYSDAESLELEGTEAGRRRSEYVEMYPVEYPYSLMPNSLAHSNYTLPAAETPLALEPSSGPVRAKPTARGEAGSRDERRALAMKIPFPTDKIVNLPVDDFNELLARYPLTESQLALVRDIRRRGKNKVAAQNCRKRKLETIVQLERELERLTNERERLLRARGEADRTLEVMRQQLTELYRDIFQHLRDESGN

SEQ ID NO: 58097 - protein, 373 aa, Homo sapiens; identical to SEQ ID NO: 58093
  Payload ID: 11379
  Gene Symbol: NFE2
  Gene Name: nuclear factor, erythroid 2
  Uniprot ID: Q16621
  ENSP ID: ENSP00000447558

SEQ ID NO: 58098 - protein, 742 aa, Homo sapiens
  Payload ID: 11380
  Gene Symbol: NFE2L1
  Gene Name: nuclear factor, erythroid 2-like 1
  Uniprot ID: Q14494
  ENSP ID: ENSP00000350072
MLSLKKYLTEGLLQFTILLSLIGVRVDVDTYLTSQLPPLREIILGPSSAYTQTQFHNLRNTLDGYGIHPKSIDLDNYFTARRLLSQVRALDRFQVPTTEVNAWLVHRDPEGSVSGSQPNSGLALESSSGLQDVTGPDNGVRESETEQGFGEDLEDLGAVAPPVSGDLTKEDIDLIDILWRQDIDLGAGREVFDYSHRQKEQDVEKELRDGGEQDTWAGEGAEALARNLLVDGETGESFPAQFPADISSITEAVPSESEPPALQNNLLSPLLTGTESPFDLEQQWQDLMSIMEMQAMEVNTSASEILYSAPPGDPLSTNYSLAPNTPINQNVSLHQASLGGCSQDFLLFSPEVESLPVASSSTLLPLAPSNSTSLNSTFGSTNLTGLFFPPQLNGTANDTAGPELPDPLGGLLDEAMLDEISLMDLAIEEGFNPVQASQLEEEFDSDSGLSLDSSHSPSSLSSSEGSSSSSSSSSSSSSSASSSASSSFSEEGAVGYSSDSETLDLEEAEGAVGYQPEYSKFCRMSYQDPAQLSCLPYLEHVGHNHTYNMAPSALDSADLPPPSALKKGSKEKQADFLDKQMSRDEHRARAMKIPFTNDKIINLPVEEFNELLSKYQLSEAQLSLIRDIRRRGKNKMAAQNCRKRKLDTILNLERDVEDLQRDKARLLREKVEFLRSLRQMKQKVQSLYQEVFGRLRDENGRPYSPSQYALQYAGDGSVLLIPRTMADQQARRQERKPKDRRK

SEQ ID NO: 58099 - protein, 772 aa, Homo sapiens
  Payload ID: 11380
  Gene Symbol: NFE2L1
  Gene Name: nuclear factor, erythroid 2-like 1
  Uniprot ID: Q14494
  ENSP ID: ENSP00000354855
MLSLKKYLTEGLLQFTILLSLIGVRVDVDTYLTSQLPPLREIILGPSSAYTQTQFHNLRNTLDGYGIHPKSIDLDNYFTARRLLSQVRALDRFQVPTTEVNAWLVHRDPEGSVSGSQPNSGLALESSSGLQDVTGPDNGVRESETEQGFGEDLEDLGAVAPPVSGDLTKEDIDLIDILWRQDIDLGAGREVFDYSHRQKEQDVEKELRDGGEQDTWAGEGAEALARNLLVDGETGESFPAQVPSGEDQTALSLEECLRLLEATCPFGENAEFPADISSITEAVPSESEPPALQNNLLSPLLTGTESPFDLEQQWQDLMSIMEMQAMEVNTSASEILYSAPPGDPLSTNYSLAPNTPINQNVSLHQASLGGCSQDFLLFSPEVESLPVASSSTLLPLAPSNSTSLNSTFGSTNLTGLFFPPQLNGTANDTAGPELPDPLGGLLDEAMLDEISLMDLAIEEGFNPVQASQLEEEFDSDSGLSLDSSHSPSSLSSSEGSSSSSSSSSSSSSSASSSASSSFSEEGAVGYSSDSETLDLEEAEGAVGYQPEYSKFCRMSYQDPAQLSCLPYLEHVGHNHTYNMAPSALDSADLPPPSALKKGSKEKQADFLDKQMSRDEHRARAMKIPFTNDKIINLPVEEFNELLSKYQLSEAQLSLIRDIRRRGKNKMAAQNCRKRKLDTILNLERDVEDLQRDKARLLREKVEFLRSLRQMKQKVQSLYQEVFGRLRDENGRPYSPSQYALQYAGDGSVLLIPRTMADQQARRQERKPKDRRK

SEQ ID NO: 58100 - protein, 761 aa, Homo sapiens
  Payload ID: 11380
  Gene Symbol: NFE2L1
  Gene Name: nuclear factor, erythroid 2-like 1
  ENSP ID: ENSP00000355190
MLSLKKYLTEGLLQFTILLSLIGVRVDVDTYLTSQLPPLREIILGPSSAYTQTQFHNLRNTLDGYGIHPKSIDLDNYFTARRLLSQVRALDRFQVPTTEVNAWLVHRDPEGSVSGSQPNSGLALESSSGLQDVTGPDNGVRESETEQGFGEDLEDLGAVAPPVSGDLTKEDIDLGAGREVFDYSHRQKEQDVEKELRDGGEQDTWAGEGAEALARNLLVDGETGESFPAQVPSGEDQTALSLEECLRLLEATCPFGENAEFPADISSITEAVPSESEPPALQNNLLSPLLTGTESPFDLEQQWQDLMSIMEMQAMEVNTSASEILYSAPPGDPLSTNYSLAPNTPINQNVSLHQASLGGCSQDFLLFSPEVESLPVASSSTLLPLAPSNSTSLNSTFGSTNLTGLFFPPQLNGTANDTAGPELPDPLGGLLDEAMLDEISLMDLAIEEGFNPVQASQLEEEFDSDSGLSLDSSHSPSSLSSSEGSSSSSSSSSSSSSSASSSASSSFSEEGAVGYSSDSETLDLEEAEGAVGYQPEYSKFCRMSYQDPAQLSCLPYLEHVGHNHTYNMAPSALDSADLPPPSALKKGSKEKQADFLDKQMSRDEHRARAMKIPFTNDKIINLPVEEFNELLSKYQLSEAQLSLIRDIRRRGKNKMAAQNCRKRKLDTILNLERDVEDLQRDKARLLREKVEFLRSLRQMKQKVQSLYQEVFGRLRDENGRPYSPSQYALQYAGDGSVLLIPRTMADQQARRQERKPKDRRK

SEQ ID NO: 58101 - protein, 616 aa, Homo sapiens
  Payload ID: 11380
  Gene Symbol: NFE2L1
  Gene Name: nuclear factor, erythroid 2-like 1
  ENSP ID: ENSP00000445811
MTRLDRSSHSGGGHAKGSRPLNSLLAGHRVAQPASAPGSRASVQDIDLIDILWRQDIDLGAGREVFDYSHRQKEQDVEKELRDGGEQDTWAGEGAEALARNLLVDGETGESFPAQFPADISSITEAVPSESEPPALQNNLLSPLLTGTESPFDLEQQWQDLMSIMEMQAMEVNTSASEILYSAPPGDPLSTNYSLAPNTPINQNVSLHQASLGGCSQDFLLFSPEVESLPVASSSTLLPLAPSNSTSLNSTFGSTNLTGLFFPPQLNGTANDTAGPELPDPLGGLLDEAMLDEISLMDLAIEEGFNPVQASQLEEEFDSDSGLSLDSSHSPSSLSSSEGSSSSSSSSSSSSSSASSSASSSFSEEGAVGYSSDSETLDLEEAEGAVGYQPEYSKFCRMSYQDPAQLSCLPYLEHVGHNHTYNMAPSALDSADLPPPSALKKGSKEKQADFLDKQMSRDEHRARAMKIPFTNDKIINLPVEEFNELLSKYQLSEAQLSLIRDIRRRGKNKMAAQNCRKRKLDTILNLERDVEDLQRDKARLLREKVEFLRSLRQMKQKVQSLYQEVFGRLRDENGRPYSPSQYALQYAGDGSVLLIPRTMADQQARRQERKPKDRRK

SEQ ID NO: 58102 - protein, 742 aa, Homo sapiens; identical to SEQ ID NO: 58098
  Payload ID: 11380
  Gene Symbol: NFE2L1
  Gene Name: nuclear factor, erythroid 2-like 1
  Uniprot ID: Q14494
  ENSP ID: ENSP00000461960

SEQ ID NO: 58103 - protein, 133 aa, Homo sapiens
  Payload ID: 11380
  Gene Symbol: NFE2L1
  Gene Name: nuclear factor, erythroid 2-like 1
  ENSP ID: ENSP00000461971
SEEGAVGYSSDSETLDLEEAEGAVGYQPEYSKFCRMSYQDPAQLSCLPYLEHVGHNHTYNMAPSALDSADLPPPSALKKGSKEKQADFLDKQMSRDEHRARAMKIPFTNDKIINLPVEELCGAKADRGEGMDL

SEQ ID NO: 58104 - protein, 9 aa, Homo sapiens
  Payload ID: 11380
  Gene Symbol: NFE2L1
  Gene Name: nuclear factor, erythroid 2-like 1
  ENSP ID: ENSP00000462003
MLSLKKYLT

SEQ ID NO: 58105 - protein, 3 aa, Homo sapiens
  Payload ID: 11380
  Gene Symbol: NFE2L1
  Gene Name: nuclear factor, erythroid 2-like 1
  ENSP ID: ENSP00000462253
MLS

SEQ ID NO: 58106 - protein, 63 aa, Homo sapiens
  Payload ID: 11380
  Gene Symbol: NFE2L1
  Gene Name: nuclear factor, erythroid 2-like 1
  ENSP ID: ENSP00000462444
MTRLDRSSHSGGGHAKGSRPLNSLLAGHRVAQPASAPGSRASVQDIDLIDILWRQDIDLGAGR

SEQ ID NO: 58107 - protein, 62 aa, Homo sapiens
  Payload ID: 11380
  Gene Symbol: NFE2L1
  Gene Name: nuclear factor, erythroid 2-like 1
  ENSP ID: ENSP00000462610
MSIMEMQAMEVNTSASEILYSAPPGDPLSTNYSLAPNTPINQNVSLHQASLGGCSQDFLLFS

SEQ ID NO: 58108 - protein, 19 aa, Homo sapiens
  Payload ID: 11380
  Gene Symbol: NFE2L1
  Gene Name: nuclear factor, erythroid 2-like 1
  ENSP ID: ENSP00000462971
MSIMEMQAMEVNTSASEIL

SEQ ID NO: 58109 - protein, 573 aa, Homo sapiens
  Payload ID: 11380
  Gene Symbol: NFE2L1
  Gene Name: nuclear factor, erythroid 2-like 1
  ENSP ID: ENSP00000463291
MGWESHLTAASADIDLGAGREVFDYSHRQKEQDVEKELRDGGEQDTWAGEGAEALARNLLVDGETGESFPAQFPADISSITEAVPSESEPPALQNNLLSPLLTGTESPFDLEQQWQDLMSIMEMQAMEVNTSASEILYSAPPGDPLSTNYSLAPNTPINQNVSLHQASLGGCSQDFLLFSPEVESLPVASSSTLLPLAPSNSTSLNSTFGSTNLTGLFFPPQLNGTANDTAGPELPDPLGGLLDEAMLDEISLMDLAIEEGFNPVQASQLEEEFDSDSGLSLDSSHSPSSLSSSEGSSSSSSSSSSSSSSASSSASSSFSEEGAVGYSSDSETLDLEEAEGAVGYQPEYSKFCRMSYQDPAQLSCLPYLEHVGHNHTYNMAPSALDSADLPPPSALKKGSKEKQADFLDKQMSRDEHRARAMKIPFTNDKIINLPVEEFNELLSKYQLSEAQLSLIRDIRRRGKNKMAAQNCRKRKLDTILNLERDVEDLQRDKARLLREKVEFLRSLRQMKQKVQSLYQEVFGRLRDENGRPYSPSQYALQYAGDGSVLLIPRTMADQQARRQERKPKDRRK

SEQ ID NO: 58110 - protein, 82 aa, Homo sapiens
  Payload ID: 11380
  Gene Symbol: NFE2L1
  Gene Name: nuclear factor, erythroid 2-like 1
  ENSP ID: ENSP00000463657
MLSLKKYLTEGLLQFTILLSLIGVRVDVDTYLTSQLPPLREIILGPSSAYTQTQFHNLRNTLDGYGIHPKSIDLDNYFTARR

SEQ ID NO: 58111 - protein, 47 aa, Homo sapiens
  Payload ID: 11380
  Gene Symbol: NFE2L1
  Gene Name: nuclear factor, erythroid 2-like 1
  ENSP ID: ENSP00000463744
MSIMEMQAMEVNTSASEILYSAPPGDPLSTNYSLAPNTPINQNVSLH

SEQ ID NO: 58112 - protein, 161 aa, Homo sapiens
  Payload ID: 11380
  Gene Symbol: NFE2L1
  Gene Name: nuclear factor, erythroid 2-like 1
  ENSP ID: ENSP00000463836
MTRLDRSSHSGGGHAKGSRPLNSLLAGHRVAQPASAPGSRASVQDIDLGAGREVFDYSHRQKEQDVEKELRDGGEQDTWAGEGAEALARNLLVDGETGESFPAQFPADISSITEAVPSESEPPALQNNLLSPLLTGTESPFDLEQQWQDLMSIMEMQAMEV

SEQ ID NO: 58113 - protein, 99 aa, Homo sapiens
  Payload ID: 11380
  Gene Symbol: NFE2L1
  Gene Name: nuclear factor, erythroid 2-like 1
  ENSP ID: ENSP00000463960
MLSLKKYLTEGLLQFTILLSLIGVRVDVDTYLTSQLPPLREIILGPSSAYTQTQFHNLRNTLDGYGIHPKSIDLDNYFTARRLLSQVRALDRFQVPTTE

SEQ ID NO: 58114 - protein, 23 aa, Homo sapiens
  Payload ID: 11380
  Gene Symbol: NFE2L1
  Gene Name: nuclear factor, erythroid 2-like 1
  ENSP ID: ENSP00000464018
MSIMEMQAMEVNTSASEILYSAP

SEQ ID NO: 58115 - protein, 111 aa, Homo sapiens
  Payload ID: 11380
  Gene Symbol: NFE2L1
  Gene Name: nuclear factor, erythroid 2-like 1
  ENSP ID: ENSP00000464203
MTRLDRSSHSGGGHAKGSRPLNSLLAGHRVAQPASAPGSRASVQDIDLIDILWRQDIDLGAGREVFDYSHRQKEQDVEKELRDGGEQDTWAGEGAEALARNLLVDGETGES

SEQ ID NO: 58116 - protein, 584 aa, Homo sapiens
  Payload ID: 11380
  Gene Symbol: NFE2L1
  Gene Name: nuclear factor, erythroid 2-like 1
  ENSP ID: ENSP00000464446
MGWESHLTAASADIDLIDILWRQDIDLGAGREVFDYSHRQKEQDVEKELRDGGEQDTWAGEGAEALARNLLVDGETGESFPAQFPADISSITEAVPSESEPPALQNNLLSPLLTGTESPFDLEQQWQDLMSIMEMQAMEVNTSASEILYSAPPGDPLSTNYSLAPNTPINQNVSLHQASLGGCSQDFLLFSPEVESLPVASSSTLLPLAPSNSTSLNSTFGSTNLTGLFFPPQLNGTANDTAGPELPDPLGGLLDEAMLDEISLMDLAIEEGFNPVQASQLEEEFDSDSGLSLDSSHSPSSLSSSEGSSSSSSSSSSSSSSASSSASSSFSEEGAVGYSSDSETLDLEEAEGAVGYQPEYSKFCRMSYQDPAQLSCLPYLEHVGHNHTYNMAPSALDSADLPPPSALKKGSKEKQADFLDKQMSRDEHRARAMKIPFTNDKIINLPVEEFNELLSKYQLSEAQLSLIRDIRRRGKNKMAAQNCRKRKLDTILNLERDVEDLQRDKARLLREKVEFLRSLRQMKQKVQSLYQEVFGRLRDENGRPYSPSQYALQYAGDGSVLLIPRTMADQQARRQERKPKDRRK

SEQ ID NO: 58117 - protein, 605 aa, Homo sapiens
  Payload ID: 11381
  Gene Symbol: NFE2L2
  Gene Name: nuclear factor, erythroid 2-like 2
  Uniprot ID: Q16236
  ENSP ID: ENSP00000380252
MMDLELPPPGLPSQQDMDLIDILWRQDIDLGVSREVFDFSQRRKEYELEKQKKLEKERQEQLQKEQEKAFFAQLQLDEETGEFLPIQPAQHIQSETSGSANYSQVAHIPKSDALYFDDCMQLLAQTFPFVDDNEVSSATFQSLVPDIPGHIESPVFIATNQAQSPETSVAQVAPVDLDGMQQDIEQVWEELLSIPELQCLNIENDKLVETTMVPSPEAKLTEVDNYHFYSSIPSMEKEVGNCSPHFLNAFEDSFSSILSTEDPNQLTVNSLNSDATVNTDFGDEFYSAFIAEPSISNSMPSPATLSHSLSELLNGPIDVSDLSLCKAFNQNHPESTAEFNDSDSGISLNTSPSVASPEHSVESSSYGDTLLGLSDSEVEELDSAPGSVKQNGPKTPVHSSGDMVQPLSPSQGQSTHVHDAQCENTPEKELPVSPGHRKTPFTKDKHSSRLEAHLTRDELRAKALHIPFPVEKIINLPVVDFNEMMSKEQFNEAQLALIRDIRRRGKNKVAAQNCRKRKLENIVELEQDLDHLKDEKEKLLKEKGENDKSLHLLKKQLSTLYLEVFSMLRDEDGKPYSPSEYSLQQTRDGNVFLVPKSKKPDVKKN

SEQ ID NO: 58118 - protein, 589 aa, Homo sapiens
  Payload ID: 11381
  Gene Symbol: NFE2L2
  Gene Name: nuclear factor, erythroid 2-like 2
  Uniprot ID: Q16236
  ENSP ID: ENSP00000380253
MDLIDILWRQDIDLGVSREVFDFSQRRKEYELEKQKKLEKERQEQLQKEQEKAFFAQLQLDEETGEFLPIQPAQHIQSETSGSANYSQVAHIPKSDALYFDDCMQLLAQTFPFVDDNEVSSATFQSLVPDIPGHIESPVFIATNQAQSPETSVAQVAPVDLDGMQQDIEQVWEELLSIPELQCLNIENDKLVETTMVPSPEAKLTEVDNYHFYSSIPSMEKEVGNCSPHFLNAFEDSFSSILSTEDPNQLTVNSLNSDATVNTDFGDEFYSAFIAEPSISNSMPSPATLSHSLSELLNGPIDVSDLSLCKAFNQNHPESTAEFNDSDSGISLNTSPSVASPEHSVESSSYGDTLLGLSDSEVEELDSAPGSVKQNGPKTPVHSSGDMVQPLSPSQGQSTHVHDAQCENTPEKELPVSPGHRKTPFTKDKHSSRLEAHLTRDELRAKALHIPFPVEKIINLPVVDFNEMMSKEQFNEAQLALIRDIRRRGKNKVAAQNCRKRKLENIVELEQDLDHLKDEKEKLLKEKGENDKSLHLLKKQLSTLYLEVFSMLRDEDGKPYSPSEYSLQQTRDGNVFLVPKSKKPDVKKN

SEQ ID NO: 58119 - protein, 68 aa, Homo sapiens
  Payload ID: 11381
  Gene Symbol: NFE2L2
  Gene Name: nuclear factor, erythroid 2-like 2
  ENSP ID: ENSP00000391291
MMDLELPPPGLPSQQDMDLIDNYHFYSSIPSMEKEVGNCSPHFLNAFEDSFSSILSTEDPNQLTVNSL

SEQ ID NO: 58120 - protein, 265 aa, Homo sapiens
  Payload ID: 11381
  Gene Symbol: NFE2L2
  Gene Name: nuclear factor, erythroid 2-like 2
  ENSP ID: ENSP00000391590
MDLIDILWRQDIDLGVSREVFDFSQRRKEYELEKQKKLEKERQEQLQKEQEKAFFAQLQLDEETAEFNDSDSGISLNTSPSVASPEHSVESSSYGDTLLGLSDSEVEELDSAPGSVKQNGPKTPVHSSGDMVQPLSPSQGQSTHVHDAQCENTPEKELPVSPGHRKTPFTKDKHSSRLEAHLTRDELRAKALHIPFPVEKIINLPVVDFNEMMSKEQFNEAQLALIRDIRRRGKNKVAAQNCRKRKLENIVELEQDLDHLKDEKE

SEQ ID NO: 58121 - protein, 280 aa, Homo sapiens
  Payload ID: 11381
  Gene Symbol: NFE2L2
  Gene Name: nuclear factor, erythroid 2-like 2
  ENSP ID: ENSP00000400073
MDLIDILWRQDIDLGVSREVFDFSQRRKEYELEKQKKLEKERQEQLQKEQEKAFFAQLQLDEETGEFLPIQPAQHIQSETSGSANYSQVAHIPKSDALYFDDCMQLLAQTFPFVDDNEVSSATFQSLVPDIPGHIESPVFIATNQAQSPETSVAQVAPVDLDGMQQDIEQVWEELLSIPELQCLNIENDKLVETTMVPSPEAKLTEVDNYHFYSSIPSMEKEVGNCSPHFLNAFEDSFSSILSTEDPNQLTVNSLNSDATVNTDFGDEFYSAFIAEPSIS

SEQ ID NO: 58122 - protein, 141 aa, Homo sapiens
  Payload ID: 11381
  Gene Symbol: NFE2L2
  Gene Name: nuclear factor, erythroid 2-like 2
  ENSP ID: ENSP00000410015
MDLIDILWRQDIDLGVSREVFDFSQRRKEYELEKQKKLEKERQEQLQKEQEKAFFAQLQLDEETGEFLPIQPAQHIQSETSGSANYSQVAHIPKSDALYFDDCMQLLAQTFPFVDDNEVRYKITWLIEKLHHNYKITIYSM

SEQ ID NO: 58123 - protein, 582 aa, Homo sapiens
  Payload ID: 11381
  Gene Symbol: NFE2L2
  Gene Name: nuclear factor, erythroid 2-like 2
  Uniprot ID: Q16236
  ENSP ID: ENSP00000411575
MDLIDILWRQDIDLGVSREVFDFSQRRKEYELEKQKKLEKERQEQLQKEQEKAFFAQLQLDEETGEFLPIQPAQHIQSETSGSANYSQVAHIPKSDALYFDDCMQLLAQTFPFVDDNESLVPDIPGHIESPVFIATNQAQSPETSVAQVAPVDLDGMQQDIEQVWEELLSIPELQCLNIENDKLVETTMVPSPEAKLTEVDNYHFYSSIPSMEKEVGNCSPHFLNAFEDSFSSILSTEDPNQLTVNSLNSDATVNTDFGDEFYSAFIAEPSISNSMPSPATLSHSLSELLNGPIDVSDLSLCKAFNQNHPESTAEFNDSDSGISLNTSPSVASPEHSVESSSYGDTLLGLSDSEVEELDSAPGSVKQNGPKTPVHSSGDMVQPLSPSQGQSTHVHDAQCENTPEKELPVSPGHRKTPFTKDKHSSRLEAHLTRDELRAKALHIPFPVEKIINLPVVDFNEMMSKEQFNEAQLALIRDIRRRGKNKVAAQNCRKRKLENIVELEQDLDHLKDEKEKLLKEKGENDKSLHLLKKQLSTLYLEVFSMLRDEDGKPYSPSEYSLQQTRDGNVFLVPKSKKPDVKKN

SEQ ID NO: 58124 - protein, 234 aa, Homo sapiens
  Payload ID: 11381
  Gene Symbol: NFE2L2
  Gene Name: nuclear factor, erythroid 2-like 2
  ENSP ID: ENSP00000412191
MDLIDILWRQDIDLGVSREVFDFSQRRKEYELEKQKKLEKERQEQLQKEQEKAFFAQLQLDEETGEFLPIQPAQHIQSETSGSANYSQVAHIPKSDALYFDDCMQLLAQTFPFVDDNEVSSATFQSLVPDIPGHIESPVFIATNQAQSPETSVAQVAPVDLDGMQQDIEQVWEELLSIPELQCLNIENDKLVETTMVPSPEAKLTEVDNYHFYSSIPSMEKEVGNCSPHFLNAF

SEQ ID NO: 58125 - protein, 47 aa, Homo sapiens
  Payload ID: 11381
  Gene Symbol: NFE2L2
  Gene Name: nuclear factor, erythroid 2-like 2
  ENSP ID: ENSP00000416308
TSVAQVAPVDLDGMQQDIEQVWEELLSIPELQWRQGFTMLTRVVWNS

SEQ ID NO: 58126 - protein, 265 aa, Homo sapiens
  Payload ID: 11381
  Gene Symbol: NFE2L2
  Gene Name: nuclear factor, erythroid 2-like 2
  ENSP ID: ENSP00000464920
MIVSFLRPPQTCGTDMDLIDILWRQDIDLGVSREVFDFSQRRKEYELEKQKKLEKERQEQLQKEQEKAFFAQLQLDEETGEFLPIQPAQHIQSETSGSANYSQVAHIPKSDALYFDDCMQLLAQTFPFVDDNEVSSATFQSLVPDIPGHIESPVFIATNQAQSPETSVAQVAPVDLDGMQQDIEQVWEELLSIPELQCLNIENDKLVETTMVPSPEAKLTEVDNYHFYSSIPSMEKEVGNCSPHFLNAFEDSFSSILSTEDPNQL

SEQ ID NO: 58127 - protein, 589 aa, Homo sapiens; identical to SEQ ID NO: 58118
  Payload ID: 11381
  Gene Symbol: NFE2L2
  Gene Name: nuclear factor, erythroid 2-like 2
  Uniprot ID: Q16236
  ENSP ID: ENSP00000467401

SEQ ID NO: 58128 - protein, 146 aa, Homo sapiens
  Payload ID: 11381
  Gene Symbol: NFE2L2
  Gene Name: nuclear factor, erythroid 2-like 2
  ENSP ID: ENSP00000468089
MDLIDILWRQDIDLGVSREVFDFSQRRKEYELEKQKKLEKERQEQLQKEQEKAFFAQLQLDEETGEFLPIQPAQHIQSETSGSANYSQVAHIPKSDALYFDDCMQLLAQTFPFVDDNEVSSATFQSLVPDIPGHIESPVFIATNQA

SEQ ID NO: 58129 - protein, 694 aa, Homo sapiens
  Payload ID: 11382
  Gene Symbol: NFE2L3
  Gene Name: nuclear factor, erythroid 2-like 3
  Uniprot ID: Q9Y4A8
  ENSP ID: ENSP00000056233
MKHLKRWWSAGGGLLHLTLLLSLAGLRVDLDLYLLLPPPTLLQDELLFLGGPASSAYALSPFSASGGWGRAGHLHPKGRELDPAAPPEGQLLREVRALGVPFVPRTSVDAWLVHSVAAGSADEAHGLLGAAAASSTGGAGASVDGGSQAVQGGGGDPRAARSGPLDAGEEEKAPAEPTAQVPDAGGCASEENGVLREKHEAVDHSSQHEENEERVSAQKENSLQQNDDDENKIAEKPDWEAEKTTESRNERHLNGTDTSFSLEDLFQLLSSQPENSLEGISLGDIPLPGSISDGMNSSAHYHVNFSQAISQDVNLHEAILLCPNNTFRRDPTARTSQSQEPFLQLNSHTTNPEQTLPGTNLTGFLSPVDNHMRNLTSQDLLYDLDINIFDEINLMSLATEDNFDPIDVSQLFDEPDSDSGLSLDSSHNNTSVIKSNSSHSVCDEGAIGYCTDHESSSHHDLEGAVGGYYPEPSKLCHLDQSDSDFHGDLTFQHVFHNHTYHLQPTAPESTSEPFPWPGKSQKIRSRYLEDTDRNLSRDEQRAKALHIPFSVDEIVGMPVDSFNSMLSRYYLTDLQVSLIRDIRRRGKNKVAAQNCRKRKLDIILNLEDDVCNLQAKKETLKREQAQCNKAINIMKQKLHDLYHDIFSRLRDDQGRPVNPNHYALQCTHDGSILIVPKELVASGHKKETQKGKRK

SEQ ID NO: 58130 - protein, 83 aa, Homo sapiens
  Payload ID: 11382
  Gene Symbol: NFE2L3
  Gene Name: nuclear factor, erythroid 2-like 3
  ENSP ID: ENSP00000475463
NEERVSAQKENSLQQNDDDENKIAEKPDWEAEKTTESRNERHLNGTDTSFSLEDLFQLLSSQPENSLEVIGTLAFILAGTYLH

SEQ ID NO: 58131 - protein, 462 aa, Homo sapiens
  Payload ID: 11383
  Gene Symbol: NFIL3
  Gene Name: nuclear factor, interleukin 3 regulated
  Uniprot ID: Q16649
  ENSP ID: ENSP00000297689
MQLRKMQTVKKEQASLDASSNVDKMMVLNSALTEVSEDSTTGEELLLSEGSVGKNKSSACRRKREFIPDEKKDAMYWEKRRKNNEAAKRSREKRRLNDLVLENKLIALGEENATLKAELLSLKLKFGLISSTAYAQEIQKLSNSTAVYFQDYQTSKSNVSSFVDEHEPSMVSSSCISVIKHSPQSSLSDVSEVSSVEHTQESSVQGSCRSPENKFQIIKQEPMELESYTREPRDDRGSYTASIYQNYMGNSFSGYSHSPPLLQVNRSSSNSPRTSETDDGVVGKSSDGEDEQQVPKGPIHSPVELKHVHATVVKVPEVNSSALPHKLRIKAKAMQIKVEAFDNEFEATQKLSSPIDMTSKRHFELEKHSAPSMVHSSLTPFSVQVTNIQDWSLKSEHWHQKELSGKTQNSFKTGVVEMKDSGYKVSDPENLYLKQGIANLSAEVVSLKRLIATQPISASDSG

SEQ ID NO: 58132 - protein, 495 aa, Homo sapiens
  Payload ID: 11384
  Gene Symbol: NUFIP1
  Gene Name: nuclear fragile X mental retardation protein interacting protein 1
  Uniprot ID: Q9UHK0
  ENSP ID: ENSP00000368459
MAEPTSDFETPIGWHASPELTPTLGPLSDTAPPRDSWMFWAMLPPPPPPLTSSLPAAGSKPSSESQPPMEAQSLPGAPPPFDAQILPGAQPPFDAQSPLDSQPQPSGQPWNFHASTSWYWRQSSDRFPRHQKSFNPAVKNSYYPRKYDAKFTDFSLPPSRKQKKKKRKEPVFHFFCDTCDRGFKNQEKYDKHMSEHTKCPELDCSFTAHEKIVQFHWRNMHAPGMKKIKLDTPEEIARWREERRKNYPTLANIERKKKLKLEKEKRGAVLTTTQYGKMKGMSRHSQMAKIRSPGKNHKWKNDNSRQRAVTGSGSHLCDLKLEGPPEANADPLGVLINSDSESDKEEKPQHSVIPKEVTPALCSLMSSYGSLSGSESEPEETPIKTEADVLAENQVLDSSAPKSPSQDVKATVRNFSEAKSENRKKSFEKTNPKRKKDYHNYQTLFEPRTHHPYLLEMLLAPDIRHERNVILQCVRYIIKKDFFGLDTNSAKSKDV

SEQ ID NO: 58133 - protein, 695 aa, Homo sapiens
  Payload ID: 11385
  Gene Symbol: NUFIP2
  Gene Name: nuclear fragile X mental retardation protein interacting protein 2
  Uniprot ID: Q7Z417
  ENSP ID: ENSP00000225388
MEEKPGQPQPQHHHSHHHPHHHPQQQQQQPHHHHHYYFYNHSHNHHHHHHHQQPHQYLQHGAEGSPKAQPKPLKHEQKHTLQQHQETPKKKTGYGELNGNAGEREISLKNLSSDEATNPISRVLNGNQQVVDTSLKQTVKANTFGKAGIKTKNFIQKNSMDKKNGKSYENKSGENQSVDKSDTIPIPNGVVTNNSGYITNGYMGKGADNDGSGSESGYTTPKKRKARRNSAKGCENLNIVQDKIMQQETSVPTLKQGLETFKPDYSEQKGNRVDGSKPIWKYETGPGGTSRGKPAVGDMLRKSSDSKPGVSSKKFDDRPKGKHASAVASKEDSWTLFKPPPVFPVDNSSAKIVPKISYASKVKENLNKTIQNSSVSPTSSSSSSSSTGETQTQSSSRLSQVPMSALKSVTSANFSNGPVLAGTDGNVYPPGGQPLLTTAANTLTPISSGTDSVLQDMSLTSAAVEQIKTSLFIYPSNMQTMLLSTAQVDLPSQTDQQNLGDIFQNQWGLSFINEPSAGPETVTGKSSEHKVMEVTFQGEYPATLVSQGAEIIPSGTEHPVFPKAYELEKRTSPQVLGSILKSGTTSESGALSLEPSHIGDLQKADTSSQGALVFLSKDYEIESQNPLASPTNTLLGSAKEQRYQRGLERNDSWGSFDLRAAIVYHTKEMESIWNLQKQDPKRIITYNEAMDSPDQ

SEQ ID NO: 58134 - protein, 120 aa, Homo sapiens
  Payload ID: 11385
  Gene Symbol: NUFIP2
  Gene Name: nuclear fragile X mental retardation protein interacting protein 2
  Uniprot ID: Q7Z417
  ENSP ID: ENSP00000463450
MEEKPGQPQPQHHHSHHHPHHHPQQQQQQPHHHHHYYFYNHSHNHHHHHHHQQPHQYLQHGAEGSPKAQPKPLKHEQKHTLQQHQETPKKKTEMESIWNLQKQDPKRIITYNEAMDSPDQ

SEQ ID NO: 58135 - protein, 76 aa, Homo sapiens
  Payload ID: 11386
  Gene Symbol: NUGGC
  Gene Name: nuclear GTPase, germinal center associated
  ENSP ID: ENSP00000388515
MAETKDVFGQEPHPVEDDLYKERTRKRRKSDRDQRFRAFPSMEQSALKEYTSFGDLVLYPCQVPAGDISLLIPDEK

SEQ ID NO: 58136 - protein, 796 aa, Homo sapiens
  Payload ID: 11386
  Gene Symbol: NUGGC
  Gene Name: nuclear GTPase, germinal center associated
  Uniprot ID: Q68CJ6
  ENSP ID: ENSP00000408697
MAETKDVFGQEPHPVEDDLYKERTRKRRKSDRDQRFRAFPSMEQSALKEYEKLESRTRRVLSNTYQKLIQSVFLDDSIPNGVKYLINRLLALIEKPTVDPIYIALFGSTGAGKSSLINAIIQQAMFLPVSGESICTSCIVQVSSGCCVQYEAKIHLLSDQEWREELKNLTKLLHRTEELSREEADAWNRDEAVEEATWKLQMIYGNGAESKNYEELLRAKPKRKIPTSRVITLKAEEAEELSIKLDPYIRTQRRDWDGEAAEMRIWPLIKHVEVTLPKSDLIPEGVVLVDIPGTGDFNSKRDEMWKKTIDKCSVIWVISDIERVSGGQAHEDLLNESIKACQRGFCRDVALVVTKMDKLHLPEYLRERKAGNQAIQSQREAVLERNEMIKLQRTRILKEKLKRKLPADFKVLEASDLVYTVSAQEYWQQALLTEEETEIPKLREYIRKSLLDKKKRTVTKYVTEAFGLLLLTDSFNSTQNLPNEHLHMSVLRRFAEEKVELLEKAIAQCFACMEQPLQEGVRTARTSYRCILRACLVRSKGNQGFHQTLKAVCLKNGIYASRTLARIDLNEALTQPVYDQIDPVFGSIFRTGKPTGSALMPHIDAFKQSLQEKMTEIGIRSGWKYDSCKKNFLIQEISAILGGLEDHILRRKRRIYESLTASVQSDLKLCYEEAAQITGKKACERMKDAIRRGVDRQVAEGMFERAQERMQHQFQQLKTGIVEKVKGSITTMLALASSQGDGLYKELADVGSEYKEMEKLHRSLREVAENARLRKGMQEFLLRASPSKAGPPGTSL

SEQ ID NO: 58137 - protein, 979 aa, Homo sapiens
  Payload ID: 11387
  Gene Symbol: NUMA1
  Gene Name: nuclear mitotic apparatus protein 1
  Uniprot ID: Q14980
  ENSP ID: ENSP00000260051
MTLHATRGAALLSWVNSLHVADPVEAVLQLQDCSIFIKIIDRIHGTEEGQQILKQPVSERLDFVCSFLQKNRKHPSSPECLVSAQKVLEGSELELAKMTMLLLYHSTMSSKSPRDWEQFEYKIQAELAVILKFVLDHEDGLNLNEDLENFLQKAPVPSTCSSTFPEELSPPSHQAKREIRFLELQKVASSSSGNNFLSGSPASPMGDILQTPQFQMRRLKKQLADERSNRDELELELAENRKLLTEKDAQIAMMQQRIDRLALLNEKQAASPLEPKELEELRDKNESLTMRLHETLKQCQDLKTEKSQMDRKINQLSEENGDLSFKLREFASHLQQLQDALNELTEEHSKATQEWLEKQAQLEKELSAALQDKKCLEEKNEILQGKLSQLEEHLSQLQDNPPQEKGEVLGDVLQVEELSKKLADSDQASKVQQQKLKAVQAQGGESQQEAQRLQAQLNELQAQLSQKEQAAEHYKLQMEKAKTHYDAKKQQNQELQEQLRSLEQLQKENKELRAEAERLGHELQQAGLKTKEAEQTCRHLTAQVRSLEAQVAHADQQLRDLGKFQVATDALKSREPQAKPQLDLSIDSLDLSCEEGTPLSITSKLPRTQPDGTSVPGEPASPISQRLPPKVESLESLYFTPIPARSQAPLESSLDSLGDVFLDSGRKTRSARRRTTQIINITMTKKLDVEEPDSANSSFYSTRSAPASQASLRATSSTQSLARLGSPDYGNSALLSLPGYRPTTRSSARRSQAGVSSGAPPGRNSFYMGTCQDEPEQLDDWNRIAELQQRNRVCPPHLKTCYPLESRPSLSLGTITDEEMKTGDPQETLRRASMQPIQIAEGTGITTRQQRKRVSLEPHQGPGTPESKKATSCFPRPMTPRDRHEGRKQSTTEAQKKAAPASTKQADRRQSMAFSILNTPKKLGNSLLRRGASKKALSKASPNTRSGTRRSPRIATTTASAATAAAIGATPRAKGKAKH

SEQ ID NO: 58138 - protein, 2101 aa, Homo sapiens
  Payload ID: 11387
  Gene Symbol: NUMA1
  Gene Name: nuclear mitotic apparatus protein 1
  Uniprot ID: Q14980
  ENSP ID: ENSP00000351851
MTLHATRGAALLSWVNSLHVADPVEAVLQLQDCSIFIKIIDRIHGTEEGQQILKQPVSERLDFVCSFLQKNRKHPSSPECLVSAQKVLEGSELELAKMTMLLLYHSTMSSKSPRDWEQFEYKIQAELAVILKFVLDHEDGLNLNEDLENFLQKAPVPSTCSSTFPEELSPPSHQAKREIRFLELQKVASSSSGNNFLSGSPASPMGDILQTPQFQMRRLKKQLADERSNRDELELELAENRKLLTEKDAQIAMMQQRIDRLALLNEKQAASPLEPKELEELRDKNESLTMRLHETLKQCQDLKTEKSQMDRKINQLSEENGDLSFKLREFASHLQQLQDALNELTEEHSKATQEWLEKQAQLEKELSAALQDKKCLEEKNEILQGKLSQLEEHLSQLQDNPPQEKGEVLGDVLQLETLKQEAATLAANNTQLQARVEMLETERGQQEAKLLAERGHFEEEKQQLSSLITDLQSSISNLSQAKEELEQASQAHGARLTAQVASLTSELTTLNATIQQQDQELAGLKQQAKEKQAQLAQTLQQQEQASQGLRHQVEQLSSSLKQKEQQLKEVAEKQEATRQDHAQQLATAAEEREASLRERDAALKQLEALEKEKAAKLEILQQQLQVANEARDSAQTSVTQAQREKAELSRKVEELQACVETARQEQHEAQAQVAELELQLRSEQQKATEKERVAQEKDQLQEQLQALKESLKVTKGSLEEEKRRAADALEEQQRCISELKAETRSLVEQHKRERKELEEERAGRKGLEARLQQLGEAHQAETEVLRRELAEAMAAQHTAESECEQLVKEVAAWRERYEDSQQEEAQYGAMFQEQLMTLKEECEKARQELQEAKEKVAGIESHSELQISRQQNELAELHANLARALQQVQEKEVRAQKLADDLSTLQEKMAATSKEVARLETLVRKAGEQQETASRELVKEPARAGDRQPEWLEEQQGRQFCSTQAALQAMEREAEQMGNELERLRAALMESQGQQQEERGQQEREVARLTQERGRAQADLALEKAARAELEMRLQNALNEQRVEFATLQEALAHALTEKEGKDQELAKLRGLEAAQIKELEELRQTVKQLKEQLAKKEKEHASGSGAQSEAAGRTEPTGPKLEALRAEVSKLEQQCQKQQEQADSLERSLEAERASRAERDSALETLQGQLEEKAQELGHSQSALASAQRELAAFRTKVQDHSKAEDEWKAQVARGRQEAERKNSLISSLEEEVSILNRQVLEKEGESKELKRLVMAESEKSQKLEERLRLLQAETASNSARAAERSSALREEVQSLREEAEKQRVASENLRQELTSQAERAEELGQELKAWQEKFFQKEQALSTLQLEHTSTQALVSELLPAKHLCQQLQAEQAAAEKRHREELEQSKQAAGGLRAELLRAQRELGELIPLRQKVAEQERTAQQLRAEKASYAEQLSMLKKAHGLLAEENRGLGERANLGRQFLEVELDQAREKYVQELAAVRADAETRLAEVQREAQSTARELEVMTAKYEGAKVKVLEERQRFQEERQKLTAQVEELSKKLADSDQASKVQQQKLKAVQAQGGESQQEAQRLQAQLNELQAQLSQKEQAAEHYKLQMEKAKTHYDAKKQQNQELQEQLRSLEQLQKENKELRAEAERLGHELQQAGLKTKEAEQTCRHLTAQVRSLEAQVAHADQQLRDLGKFQVATDALKSREPQAKPQLDLSIDSLDLSCEEGTPLSITSKLPRTQPDGTSVPGEPASPISQRLPPKVESLESLYFTPIPARSQAPLESSLDSLGDVFLDSGRKTRSARRRTTQIINITMTKKLDVEEPDSANSSFYSTRSAPASQASLRATSSTQSLARLGSPDYGNSALLSLPGYRPTTRSSARRSQAGVSSGAPPGRNSFYMGTCQDEPEQLDDWNRIAELQQRNRVCPPHLKTCYPLESRPSLSLGTITDEEMKTGDPQETLRRASMQPIQIAEGTGITTRQQRKRVSLEPHQGPGTPESKKATSCFPRPMTPRDRHEGRKQSTTEAQKKAAPASTKQADRRQSMAFSILNTPKKLGNSLLRRGASKKALSKASPNTRSGTRRSPRIATTTASAATAAAIGATPRAKGKAKH

SEQ ID NO: 58139 - protein, 91 aa, Homo sapiens
  Payload ID: 11387
  Gene Symbol: NUMA1
  Gene Name: nuclear mitotic apparatus protein 1
  ENSP ID: ENSP00000357955
MTLHATRGAALLSWVNSLHVADPVEAVLQLQDCSIFIKIIDRIHGTEEGQQILKQPVSERLDFVCSFLQKNRKHPSSPECLVSAQKVLEGS

SEQ ID NO: 58140 - protein, 2115 aa, Homo sapiens
  Payload ID: 11387
  Gene Symbol: NUMA1
  Gene Name: nuclear mitotic apparatus protein 1
  Uniprot ID: Q14980
  ENSP ID: ENSP00000377298
MTLHATRGAALLSWVNSLHVADPVEAVLQLQDCSIFIKIIDRIHGTEEGQQILKQPVSERLDFVCSFLQKNRKHPSSPECLVSAQKVLEGSELELAKMTMLLLYHSTMSSKSPRDWEQFEYKIQAELAVILKFVLDHEDGLNLNEDLENFLQKAPVPSTCSSTFPEELSPPSHQAKREIRFLELQKVASSSSGNNFLSGSPASPMGDILQTPQFQMRRLKKQLADERSNRDELELELAENRKLLTEKDAQIAMMQQRIDRLALLNEKQAASPLEPKELEELRDKNESLTMRLHETLKQCQDLKTEKSQMDRKINQLSEENGDLSFKLREFASHLQQLQDALNELTEEHSKATQEWLEKQAQLEKELSAALQDKKCLEEKNEILQGKLSQLEEHLSQLQDNPPQEKGEVLGDVLQLETLKQEAATLAANNTQLQARVEMLETERGQQEAKLLAERGHFEEEKQQLSSLITDLQSSISNLSQAKEELEQASQAHGARLTAQVASLTSELTTLNATIQQQDQELAGLKQQAKEKQAQLAQTLQQQEQASQGLRHQVEQLSSSLKQKEQQLKEVAEKQEATRQDHAQQLATAAEEREASLRERDAALKQLEALEKEKAAKLEILQQQLQVANEARDSAQTSVTQAQREKAELSRKVEELQACVETARQEQHEAQAQVAELELQLRSEQQKATEKERVAQEKDQLQEQLQALKESLKVTKGSLEEEKRRAADALEEQQRCISELKAETRSLVEQHKRERKELEEERAGRKGLEARLQQLGEAHQAETEVLRRELAEAMAAQHTAESECEQLVKEVAAWRERYEDSQQEEAQYGAMFQEQLMTLKEECEKARQELQEAKEKVAGIESHSELQISRQQNELAELHANLARALQQVQEKEVRAQKLADDLSTLQEKMAATSKEVARLETLVRKAGEQQETASRELVKEPARAGDRQPEWLEEQQGRQFCSTQAALQAMEREAEQMGNELERLRAALMESQGQQQEERGQQEREVARLTQERGRAQADLALEKAARAELEMRLQNALNEQRVEFATLQEALAHALTEKEGKDQELAKLRGLEAAQIKELEELRQTVKQLKEQLAKKEKEHASGSGAQSEAAGRTEPTGPKLEALRAEVSKLEQQCQKQQEQADSLERSLEAERASRAERDSALETLQGQLEEKAQELGHSQSALASAQRELAAFRTKVQDHSKAEDEWKAQVARGRQEAERKNSLISSLEEEVSILNRQVLEKEGESKELKRLVMAESEKSQKLEERLRLLQAETASNSARAAERSSALREEVQSLREEAEKQRVASENLRQELTSQAERAEELGQELKAWQEKFFQKEQALSTLQLEHTSTQALVSELLPAKHLCQQLQAEQAAAEKRHREELEQSKQAAGGLRAELLRAQRELGELIPLRQKVAEQERTAQQLRAEKASYAEQLSMLKKAHGLLAEENRGLGERANLGRQFLEVELDQAREKYVQELAAVRADAETRLAEVQREAQSTARELEVMTAKYEGAKVKVLEERQRFQEERQKLTAQVEQLEVFQREQTKQVEELSKKLADSDQASKVQQQKLKAVQAQGGESQQEAQRLQAQLNELQAQLSQKEQAAEHYKLQMEKAKTHYDAKKQQNQELQEQLRSLEQLQKENKELRAEAERLGHELQQAGLKTKEAEQTCRHLTAQVRSLEAQVAHADQQLRDLGKFQVATDALKSREPQAKPQLDLSIDSLDLSCEEGTPLSITSKLPRTQPDGTSVPGEPASPISQRLPPKVESLESLYFTPIPARSQAPLESSLDSLGDVFLDSGRKTRSARRRTTQIINITMTKKLDVEEPDSANSSFYSTRSAPASQASLRATSSTQSLARLGSPDYGNSALLSLPGYRPTTRSSARRSQAGVSSGAPPGRNSFYMGTCQDEPEQLDDWNRIAELQQRNRVCPPHLKTCYPLESRPSLSLGTITDEEMKTGDPQETLRRASMQPIQIAEGTGITTRQQRKRVSLEPHQGPGTPESKKATSCFPRPMTPRDRHEGRKQSTTEAQKKAAPASTKQADRRQSMAFSILNTPKKLGNSLLRRGASKKALSKASPNTRSGTRRSPRIATTTASAATAAAIGATPRAKGKAKH

SEQ ID NO: 58141 - protein, 75 aa, Homo sapiens
  Payload ID: 11387
  Gene Symbol: NUMA1
  Gene Name: nuclear mitotic apparatus protein 1
  ENSP ID: ENSP00000438318
MTLHATRGAALLSWVNSLHVADPVEAVLQLQDCSIFIKIIDRIHGTEEGQQILKQPVSERLDFVCSFLQKNRKHP

SEQ ID NO: 58142 - protein, 82 aa, Homo sapiens
  Payload ID: 11387
  Gene Symbol: NUMA1
  Gene Name: nuclear mitotic apparatus protein 1
  ENSP ID: ENSP00000438331
MTLHATRGAALLSWVNSLHVADPVEAVLQLQDCSIFIKIIDRIHGTEEGQQILKQPVSERLDFVCSFLQKNRKHPSSPECLV

SEQ ID NO: 58143 - protein, 159 aa, Homo sapiens
  Payload ID: 11387
  Gene Symbol: NUMA1
  Gene Name: nuclear mitotic apparatus protein 1
  ENSP ID: ENSP00000438589
MTLHATRGAALLSWVNSLHVADPVEAVLQLQDCSIFIKIIDRIHGTEEGQQILKQPVSERLDFVCSFLQKNRKHPSSPECLVSAQKVLEGSELELAKMTMLLLYHSTMSSKSPRDWEQFEYKIQAELAVILKFVLDHEDGLNLNEDLENFLQKAPVPST

SEQ ID NO: 58144 - protein, 174 aa, Homo sapiens
  Payload ID: 11387
  Gene Symbol: NUMA1
  Gene Name: nuclear mitotic apparatus protein 1
  ENSP ID: ENSP00000438821
MTLHATRGAALLSWVNSLHVADPVEAVLQLQDCSIFIKIIDRIHGTEEGQQILKQPVSERLDFVCSFLQKNRKHPSSPECLVSAQKVLEGSELELAKMTMLLLYHSTMSSKSPRDWEQFEYKIQAELAVILKFVLDHEDGLNLNEDLENFLQKAPVPSTCSSTFPEELSPPSHQ

SEQ ID NO: 58145 - protein, 159 aa, Homo sapiens; identical to SEQ ID NO: 58143
  Payload ID: 11387
  Gene Symbol: NUMA1
  Gene Name: nuclear mitotic apparatus protein 1
  ENSP ID: ENSP00000439092

SEQ ID NO: 58146 - protein, 109 aa, Homo sapiens
  Payload ID: 11387
  Gene Symbol: NUMA1
  Gene Name: nuclear mitotic apparatus protein 1
  ENSP ID: ENSP00000439576
MTLHATRGAALLSWVNSLHVADPVEAVLQLQDCSIFIKIIDRIHGTEEGQQILKQPVSERLDFVCSFLQKNRKHPSSPECLVSAQKVLEGSELELAKMTMLLLYHSTMS

SEQ ID NO: 58147 - protein, 201 aa, Homo sapiens
  Payload ID: 11387
  Gene Symbol: NUMA1
  Gene Name: nuclear mitotic apparatus protein 1
  ENSP ID: ENSP00000439759
MTLHATRGAALLSWVNSLHVADPVEAVLQLQDCSIFIKIIDRIHGTEEGQQILKQPVSERLDFVCSFLQKNRKHPSSPECLVSAQKVLEGSELELAKMTMLLLYHSTMSSKSPRDWEQFEYKIQAELAVILKFVLDHEDGLNLNEDLENFLQKAPVPSTCSSTFPEELSPPSHQAKREIRFLELQKVASSSSGNNFLSGSP

SEQ ID NO: 58148 - protein, 964 aa, Homo sapiens
  Payload ID: 11387
  Gene Symbol: NUMA1
  Gene Name: nuclear mitotic apparatus protein 1
  ENSP ID: ENSP00000440954
  MOD_RES (1)..(1): Any amino acid
XRAERDSALETLQGQLEEKAQELGHSQSALASAQRELAAFRTKVQDHSKAEDEWKAQVARGRQEAERKNSLISSLEEEVSILNRQVLEKEGESKELKRLVMAESEKSQKLEERLRLLQAETASNSARAAERSSALREEVQSLREEAEKQRVASENLRQELTSQAERAEELGQELKAWQEKFFQKEQALSTLQLEHTSTQALVSELLPAKHLCQQLQAEQAAAEKRHREELEQSKQAAGGLRAELLRAQRELGELIPLRQKVAEQERTAQQLRAEKASYAEQLSMLKKAHGLLAEENRGLGERANLGRQFLEVELDQAREKYVQELAAVRADAETRLAEVQREAQSTARELEVMTAKYEGAKVKVLEERQRFQEERQKLTAQVEELSKKLADSDQASKVQQQKLKAVQAQGGESQQEAQRLQAQLNELQAQLSQKEQAAEHYKLQMEKAKTHYDAKKQQNQELQEQLRSLEQLQKENKELRAEAERLGHELQQAGLKTKEAEQTCRHLTAQVRSLEAQVAHADQQLRDLGKFQVATDALKSREPQAKPQLDLSIDSLDLSCEEGTPLSITRHKALMTIIPDLSPNNPLSKLPRTQPDGTSVPGEPASPISQRLPPKVESLESLYFTPIPARSQAPLESSLDSLGDVFLDSGRKTRSARRRTTQIINITMTKKLDVEEPDSANSSFYSTRSAPASQASLRATSSTQSLARLGSPDYGNSALLSLPGYRPTTRSSARRSQAGVSSGAPPGRNSFYMGTCQDEPEQLDDWNRIAELQQRNRVCPPHLKTCYPLESRPSLSLGTITDEEMKTGDPQETLRRASMQPIQIAEGTGITTRQQRKRVSLEPHQGPGTPESKKATSCFPRPMTPRDRHEGRKQSTTEAQKKAAPASTKQADRRQSMAFSILNTPKKLGNSLLRRGASKKALSKASPNTRSGTRRSPRIATTTASAATAAAIGATPRAKGKAKH

SEQ ID NO: 58149 - protein, 72 aa, Homo sapiens
  Payload ID: 11387
  Gene Symbol: NUMA1
  Gene Name: nuclear mitotic apparatus protein 1
  ENSP ID: ENSP00000441598
MTLHATRGAALLSWVNSLHVADPVEAVLQLQDCSIFIKIIDRIHGTEEGQQILKQPVSERLDFVCSFLQKNR

SEQ ID NO: 58150 - protein, 61 aa, Homo sapiens
  Payload ID: 11387
  Gene Symbol: NUMA1
  Gene Name: nuclear mitotic apparatus protein 1
  ENSP ID: ENSP00000441674
MTLHATRGAALLSWVNSLHVADPVEAVLQLQDCSIFIKIIDRIHGTEEGQQILKQPVSERL

SEQ ID NO: 58151 - protein, 56 aa, Homo sapiens
  Payload ID: 11387
  Gene Symbol: NUMA1
  Gene Name: nuclear mitotic apparatus protein 1
  ENSP ID: ENSP00000442331
MTLHATRGAALLSWVNSLHVADPVEAVLQLQDCSIFIKIIDRIHGTEEGQQILKQP

SEQ ID NO: 58152 - protein, 220 aa, Homo sapiens
  Payload ID: 11387
  Gene Symbol: NUMA1
  Gene Name: nuclear mitotic apparatus protein 1
  ENSP ID: ENSP00000442761
MTLHATRGAALLSWVNSLHVADPVEAVLQLQDCSIFIKIIDRIHGTEEGQQILKQPVSERLDFVCSFLQKNRKHPSSPECLVSAQKVLEGSELELAKMTMLLLYHSTMSSKSPRDWEQFEYKIQAELAVILKFVLDHEDGLNLNEDLENFLQKAPVPSTCSSTFPEELSPPSHQAKREIRFLELQKVASSSSGNNFLSGSPASPMGDILQTPQFQMRRLK

SEQ ID NO: 58153 - protein, 691 aa, Homo sapiens
  Payload ID: 11387
  Gene Symbol: NUMA1
  Gene Name: nuclear mitotic apparatus protein 1
  ENSP ID: ENSP00000442936
MTLHATRGAALLSWVNSLHVADPVEAVLQLQDCSIFIKIIDRIHGTEEGQQILKQPVSERLDFVCSFLQKNRKHPSSPECLVSAQKVLEGSELELAKMTMLLLYHSTMSSKSPRDWEQFEYKIQAELAVILKFVLDHEDGLNLNEDLENFLQKAPVPSTCSSTFPEELSPPSHQAKREIRFLELQKVASSSSGNNFLSGSPASPMGDILQTPQFQMRRLKKQLADERSNRDELELELAENRKLLTEKDAQIAMMQQRIDRLALLNEKQAASPLEPKELEELRDKNESLTMRLHETLKQCQDLKTEKSQMDRKINQLSEENGDLSFKLREFASHLQQLQDALNELTEEHSKATQEWLEKQAQLEKELSAALQDKKCLEEKNEILQGKLSQLEEHLSQLQDNPPQEKGEVLGDVLQLETLKQEAATLAANNTQLQARVEMLETERGQQEAKLLAERGHFEEEKQQLSSLITDLQSSISNLSQAKEELEQASQAHGARLTAQVASLTSELTTLNATIQQQDQELAGLKQQAKEKQAQLAQTLQQQEQASQGLRHQVEQLSSSLKQKEQQLKEVAEKQEATRQDHAQQLATAAEEREASLRERDAALKQLEALEKEKAAKLEILQQQLQVANEARDSAQTSVTQAQREKAELSRKVEELQACVETARQEQHEAQAQVAELELQLRSEQQKATEKE

SEQ ID NO: 58154 - protein, 146 aa, Homo sapiens
  Payload ID: 11387
  Gene Symbol: NUMA1
  Gene Name: nuclear mitotic apparatus protein 1
  ENSP ID: ENSP00000444175
MTLHATRGAALLSWVNSLHVADPVEAVLQLQDCSIFIKIIDRIHGTEEGQQILKQPVSERLDFVCSFLQKNRKHPSSPECLVSAQKVLEGSELELAKMTMLLLYHSTMSSKSPRDWEQFEYKIQAELAVILKFVLDHEDGLNLNED

SEQ ID NO: 58155 - protein, 59 aa, Homo sapiens
  Payload ID: 11387
  Gene Symbol: NUMA1
  Gene Name: nuclear mitotic apparatus protein 1
  ENSP ID: ENSP00000444831
MTLHATRGAALLSWVNSLHVADPVEAVLQLQDCSIFIKIIDRIHGTEEGQQILKQPVSE

SEQ ID NO: 58156 - protein, 851 aa, Homo sapiens
  Payload ID: 11387
  Gene Symbol: NUMA1
  Gene Name: nuclear mitotic apparatus protein 1
  ENSP ID: ENSP00000444880
MTLHATRGAALLSWVNSLHVADPVEAVLQLQDCSIFIKIIDRIHGTEEGQQILKQPVSERLDFVCSFLQKNRKHPSSPECLVSAQKVLEGSELELAKMTMLLLYHSTMSSKSPRDWEQFEYKIQAELAVILKFVLDHEDGLNLNEDLENFLQKAPVPSTCSSTFPEELSPPSHQAKREIRFLELQKVASSSSGNNFLSGSPASPMGDILQTPQFQMRRLKKQLADERSNRDELELELAENRKLLTEKDAQIAMMQQRIDRLALLNEKQAASPLEPKELEELRDKNESLTMRLHETLKQCQDLKTEKSQMDRKINQLSEENGDLSFKLREFASHLQQLQDALNELTEEHSKATQEWLEKQAQLEKELSAALQDKKCLEEKNEILQGKLSQLEEHLSQLQDNPPQEKGEVLGDVLQLETLKQEAATLAANNTQLQARVEMLETERGQQEAKLLAERGHFEEEKQQLSSLITDLQSSISNLSQAKEELEQASQAHGARLTAQVASLTSELTTLNATIQQQDQELAGLKQQAKEKQAQLAQTLQQQEQASQGLRHQVEQLSSSLKQKEQQLKEVAEKQEATRQDHAQQLATAAEEREASLRERDAALKQLEALEKEKAAKLEILQQQLQVANEARDSAQTSVTQAQREKAELSRKVEELQACVETARQEQHEAQAQVAELELQLRSEQQKATEKERVAQEKDQLQEQLQALKESLKVTKGSLEEEKRRAADALEEQQRCISELKAETRSLVEQHKRERKELEEERAGRKGLEARLQQLGEAHQAETEVLRRELAEAMAAQHTAESECEQLVKEVAAWRERYEDSQQEEAQYGAMFQEQLMTLKEECEKARQELQE

SEQ ID NO: 58157 - protein, 353 aa, Homo sapiens
  Payload ID: 11387
  Gene Symbol: NUMA1
  Gene Name: nuclear mitotic apparatus protein 1
  ENSP ID: ENSP00000446396
  MOD_RES (1)..(1): Any amino acid
XELLRAQRELGELIPLRQKVAEQERTAQQLRAEKASYAEQLSMLKKAHGLLAEENRGLGERANLGRQFLEVELDQAREKYVQELAAVRADAETRLAEVQREAQSTARELEVMTAKYEGAKVKVLEERQRFQEERQKLTAQVEELSKKLADSDQASKVQQQKLKAVQAQGGESQQEAQRLQAQLNELQAQLSQKEQAAEHYKLQMEKAKTHYDAKKQQNQELQEQLRSLEQLQKENKELRAEAERLGHELQQAGLKTKEAEQTCRHLTAQVRSLEAQVAHADQQLRDLGKFQVATDALKSREPQAKPQLDLSIDSLDLSCEEGTPLSITRSGGSLPPYVCLWSACCLSGCILVR

SEQ ID NO: 58158 - protein, 2101 aa, Homo sapiens; identical to SEQ ID NO: 58138
  Payload ID: 11387
  Gene Symbol: NUMA1
  Gene Name: nuclear mitotic apparatus protein 1
  Uniprot ID: Q14980
  ENSP ID: ENSP00000478624

SEQ ID NO: 58159 - protein, 979 aa, Homo sapiens; identical to SEQ ID NO: 58137
  Payload ID: 11387
  Gene Symbol: NUMA1
  Gene Name: nuclear mitotic apparatus protein 1
  Uniprot ID: Q14980
  ENSP ID: ENSP00000480172

SEQ ID NO: 58160 - protein, 2099 aa, Homo sapiens
  Payload ID: 11387
  Gene Symbol: NUMA1
  Gene Name: nuclear mitotic apparatus protein 1
  ENSP ID: ENSP00000481541
MTLHATRGAALLSWVNSLHVADPVEAVLQLQDCSIFIKIIDRIHGTEEGQQILKQPVSERLDFVCSFLQKNRKHPSSPECLVSAQKVLEGSELELAKMTMLLLYHSTMSSKSPRDWEQFEYKIQAELAVILKFVLDHEDGLNLNEDLENFLQKAPVPSTCSSTFPEELSPPSHQAKREIRFLELQKVASSSSGNNFLSGSPASPMGDILQTPQFQMRRLKKQLADERSNRDELELELAENRKLLTEKDAQIAMMQQRIDRLALLNEKQAASPLEPKELEELRDKNESLTMRLHETLKQCQDLKTEKSQMDRKINQLSEENGDLSFKLREFASHLQQLQDALNELTEEHSKATQEWLEKQAQLEKELSAALQDKKCLEEKNEILQGKLSQLEEHLSQLQDNPPQEKGEVLGDVLQLETLKQEAATLAANNTQLQARVEMLETERGQQEAKLLAERGHFEEEKQQLSSLITDLQSSISNLSQAKEELEQASQAHGARLTAQVASLTSELTTLNATIQQQDQELAGLKQQAKEKQAQLAQTLQQQEQASQGLRHQVEQLSSSLKQKEQQLKEVAEKQEATRQDHAQQLATAAEEREASLRERDAALKQLEALEKEKAAKLEILQQQLQVANEARDSAQTSVTQAQREKAELSRKVEELQACVETARQEQHEAQAQVAELELQLRSEQQKATEKERVAQEKDQLQEQLQALKESLKVTKGSLEEEKRRAADALEEQQRCISELKAETRSLVEQHKRERKELEEERAGRKGLEARLQQLGEAHQAETEVLRRELAEAMAAQHTAESECEQLVKEVAAWRERYEDSQQEEAQYGAMFQEQLMTLKEECEKARQELQEAKEKVAGIESHSELQISRQQNELAELHANLARALQQVQEKEVRAQKLADDLSTLQEKMAATSKEVARLETLVRKAGEQQETASRELVKEPARAGDRQPEWLEEQQGRQFCSTQAALQAMEREAEQMGNELERLRAALMESQGQQQEERGQQEREVARLTQERGRAQADLALEKAARAELEMRLQNALNEQRVEFATLQEALAHALTEKEGKDQELAKLRGLEAAQIKELEELRQTVKQLKEQLAKKEKEHASGSGAQSEAAGRTEPTGPKLEALRAEVSKLEQQCQKQQEQADSLERSLEAERASRAERDSALETLQGQLEEKAQELGHSQSALASAQRELAAFRTKVQDHSKAEDEWKAQVARGRQEAERKNSLISSLEEEVSILNRQVLEKEGESKELKRLVMAESEKSQKLEEGCACCRQRQPATVPELQNAALLCGRRCRASGREKQRVASENLRQELTSQAERAEELGQELKAWQEKFFQKEQALSTLQLEHTSTQALVSELLPAKHLCQQLQAEQAAAEKRHREELEQSKQAAGGLRAELLRAQRELGELIPLRQKVAEQERTAQQLRAEKASYAEQLSMLKKAHGLLAEENRGLGERANLGRQFLEVELDQAREKYVQELAAVRADAETRLAEVQREAQSTARELEVMTAKYEGAKVKVLEERQRFQEERQKLTAQVEELSKKLADSDQASKVQQQKLKAVQAQGGESQQEAQRLQAQLNELQAQLSQKEQAAEHYKLQMEKAKTHYDAKKQQNQELQEQLRSLEQLQKENKELRAEAERLGHELQQAGLKTKEAEQTCRHLTAQVRSLEAQVAHADQQLRDLGKFQVATDALKSREPQAKPQLDLSIDSLDLSCEEGTPLSITSKLPRTQPDGTSVPGEPASPISQRLPPKVESLESLYFTPIPARSQAPLESSLDSLGDVFLDSGRKTRSARRRTTQIINITMTKKLDVEEPDSANSSFYSTRSAPASQASLRATSSTQSLARLGSPDYGNSALLSLPGYRPTTRSSARRSQAGVSSGAPPGRNSFYMGTCQDEPEQLDDWNRIAELQQRNRVCPPHLKTCYPLESRPSLSLGTITDEEMKTGDPQETLRRASMQPIQIAEGTGITTRQQRKRVSLEPHQGPGTPESKKATSCFPRPMTPRDRHEGRKQSTTEAQKKAAPASTKQADRRQSMAFSILNTPKKLGNSLLRRGASKKALSKASPNTRSGTRRSPRIATTTASAATAAAIGATPRAKGKAKH

SEQ ID NO: 58161 - protein, 1156 aa, Homo sapiens
  Payload ID: 11388
  Gene Symbol: NPAP1
  Gene Name: nuclear pore associated protein 1
  Uniprot ID: Q9NZP6
  ENSP ID: ENSP00000333735
MGNLLSKFRPGCRRRPLPGPGRGAPAPLSRDASPPGRAHSVPTPRPFRGLFRRNARRRPSAASIFVAPKRPCPLPRAAAAPLGVLPAVGWGLAIRKTPMLPARNPPRFGHPSSVRIPPPSRMFTLLLPSPREPAVKARKPIPATLLEETEVWAQEGPRRVKKDEDPVQIEGEDDEKRTPLSSGEASSTSRSQGTQGDVASFRCSPGPLEGNVYHKFSENSMSEKAQASPASSCLEGPAMPSTHSQAGCARHLGKPDPDATAPPEPAVGCSLLQQKLAAEVLNEEPPPSSLGLPIPLMSGKRMPDEKPFCIPPRSAAPPRAARNRPCKRKMSIPLLLPLPPSLPLLWDRGELPPPAKLPCLSVEGDLHTLEKSPEYKRNSRILEDKTETMTNSSITQPAPSFSQPVQTTDSLPLTTYTSQVSAPLPIPDLADLATGPLILPIPPLSTTPKMDEKIAFTIPNSPLALPADLVPILGDQSNEKGGSYNSVVGAAPLTSDPPTPPSSTPSFKPPVTRESPISMCVDSPPPLSFLTLLPVPSTGTSVITSKPMNSTSVISTVTTNASAHLTSQTAVDPEVVNMDTTAPSQVVIFTSSLSSRVSSLPNSQIHCSAEQRHPGKTSVYTSPLPFIFHNTTPSFNQLFGKEATPQPKFEAPDGQPQKASLPSACVFLSLPIIPPPDTSTLVNSASTASSSKPPIETNAMHTTPPSKAVILQSASVSKKYLPFYLGLPGSGNTQPSGNTASVQGSTSLPAQSVRAPATASNHPLNPGATPQPKFGAPDGPQQKTSLPSAHDFLSLPIMVPPDTSTLVSSASAASLSKPAIDTSDMNTTPPSKTVILQSTFVSRKEEYIRFYMGLPGSGNTLHSDSIASAQVSTSFPAQADRRPTTTSSHPLNTGSISHSTLGATDGQQKSDSSFILGNPATPAPVIGLTSPSVQPLSGSIIPPGFAELTSPYTALGTPVNAEPVEGHNASAFPNGTAKTSGFRIATGMPGTGDSTLLVGNTIPGPQVIMGPGTPMDGGSIGFSMSAPGPSSTSGELNIGQGQSGTPSTTSVFPFGQAAWDPTGHSMAAAPQGASNIPVFGYTSAAAYIPGLDPPTQNSCSGMGGDGTRSIVGGPCVPAFQQCILQHTWTERKFYTSSTHYYGQETYVRRHVCFQLP

SEQ ID NO: 58162 - protein, 350 aa, Homo sapiens
  Payload ID: 11389
  Gene Symbol: NPIPA1
  Gene Name: nuclear pore complex interacting protein family, member A1
  Uniprot ID: Q9UND3
  ENSP ID: ENSP00000331843
MFCCLGYEWLSGGCKTWHSAWVINTLADHRHRGTDFGGSPWLLIITVFLRSYKFAISLCTSYLCVSFLKTIFPSQNGHDGSTDVQQRARRSNRRRQEGIKIVLEDIFTLWRQVETKVRAKIRKMKVTTKVNRHDKINGKRKTAKEHLRKLSMKEREHGEKERQVSEAEENGKLDMKEIHTYMEMFQRAQALRRRAEDYYRCKITPSARKPLCNRVRMAAVEHRHSSGLPYWPYLTAETLKNRMGHQPPPPTQQHSIIDNSLSLKTPSECLLTPLPPSALPSADDNLKTPAECLLYPLPPSADDNLKTPPECLLTPLPPSAPPSVDDNLKTPPECVCSLPFHPQRMIISRN

SEQ ID NO: 58163 - protein, 219 aa, Homo sapiens
  Payload ID: 11389
  Gene Symbol: NPIPA1
  Gene Name: nuclear pore complex interacting protein family, member A1
  ENSP ID: ENSP00000410814
MRVRWLLFWLLFWLLLGFISHQSTCVSRWVLWLLFWLLLGFISHQSTCVINTLADHRHRGTDFGGSPWLLIITVFLRSYKFAISLCTSYLCVSFLKTIFPSQNGHDGSTDVQQRARRSNRRRQEGIKIVLEDIFTLWRQVETKVRAKIRKMKVTTKVNRHDKINGKRKTAKEHLRKLSMKEREHGEKERQVSEAEENGKLDMKEIHTYMEMFQRAQALR

SEQ ID NO: 58164 - protein, 185 aa, Homo sapiens
  Payload ID: 11389
  Gene Symbol: NPIPA1
  Gene Name: nuclear pore complex interacting protein family, member A1
  ENSP ID: ENSP00000445593
  MOD_RES (1)..(1): Any amino acid
XTKVRAKIRKMKVTTKVNRHDKINGKRKTAKEHLRKLSMKEREHGEKERQVSEAEENGKLDMKEIHTYMEMFQRAQALRRRAEDYYRCKITPSARKPLCNRVSLLVFLAFGHSLPGQDMDTFFSLRLCAQALQREMAERKAAYKHHSPIPVGNRVAQKHLHPHPVGPPSNILSVRGSVFVIANGP

SEQ ID NO: 58165 - protein, 232 aa, Homo sapiens
  Payload ID: 11389
  Gene Symbol: NPIPA1
  Gene Name: nuclear pore complex interacting protein family, member A1
  ENSP ID: ENSP00000484994
MFCCLGYEWLSGGCKTWHSAWVINTLADHRHRGTDFGGSPWLLIITVFLRSYKFAISLCTSYLCVSFLKTIFPSQNGHDGSTDVQQRARRSNRRRQEGIKIVLEDIFTLWRQVETKVRAKIRKMKVTTKVNRHDKINGKRKTAKEHLRKLSMKEREHGEKERQVSEAEENGKLDMKEIHTYMEMFQRAQALRRRAEDYYRCKITPSARKPLCNRCTYNLVLPGSEKKYYSHA

SEQ ID NO: 58166 - protein, 369 aa, Homo sapiens
  Payload ID: 11389
  Gene Symbol: NPIPA1
  Gene Name: nuclear pore complex interacting protein family, member A1
  ENSP ID: ENSP00000487754
MFCCLGYEWLSGGCKTWHSAWVINTLADHRHRGTDFGGSPWLLIITVFLRSYKFAISLCTSYLCVSFLKTIFPSQNGHDGSTDVQQRARRSNRRRQEGIKIVLEDIFTLWRQVETKVRAKIRKMKVTTKVNRHDKINGKRKTAKEHLRKLSMKEREHGEKERQVSEAEENGKLDMKEIHTYMEMFQRAQALRRRAEDYYRCKITPSARKPLCNRVRMAAVEHRHSSGLPYWPYLTAETLKNRMGHQPPPPTQQHSIIDNSLSLKTPSERLLYPLPPSADDNLKTPPECLLTPLPPSALPSADDNLKTPAECLLYPLPPSADDNLKTPPECLFTPLPPSAPPSVDDNLKTPPECVCSLPFHPQRMIISRN

SEQ ID NO: 58167 - protein, 218 aa, Homo sapiens
  Payload ID: 11389
  Gene Symbol: NPIPA1
  Gene Name: nuclear pore complex interacting protein family, member A1
  ENSP ID: ENSP00000487760
RVRWLLFWLLFWLLLGFISHQSTCVSRWVLWLLFWLLLGFISHQSTCVINTLADHRHRGTDFGGSPWLLIITVFLRSYKFAISLCTSYLCVSFLKTIFPSQNGHDGSTDVQQRARRSNRRRQEGIKIVLEDIFTLWRQVETKVRAKIRKMKVTTKVNRHDKINGKRKTAKEHLRKLSMKEREHGEKERQVSEAEENGKLDMKEIHTYMEMFQRAQALR

SEQ ID NO: 58168 - protein, 185 aa, Homo sapiens; identical to SEQ ID NO: 58164
  Payload ID: 11389
  Gene Symbol: NPIPA1
  Gene Name: nuclear pore complex interacting protein family, member A1
  ENSP ID: ENSP00000488834
  MOD_RES (1)..(1): Any amino acid

SEQ ID NO: 58169 - protein, 369 aa, Homo sapiens
  Payload ID: 11390
  Gene Symbol: NPIPA2
  Gene Name: nuclear pore complex interacting protein family, member A2
  Uniprot ID: E9PIF3
  ENSP ID: ENSP00000432029
MVKLSIVLTPRFLSHDQGQLTKELQQHVKSVTCPCEYLRKVINTLADHRHRGTDFGGSPWLLIITVFLRSYKFAISLCTSYLCVSFLKTIFPSQNGHDGSTDVQQRARRSNRRRQEGIKIVLEDIFTLWRQVETKVRAKICKMKVTTKVNRHDKINGKRKTAKEHLRKLSMKEREHGEKERQVSEAEENGKLDMKEIHTYMEMFQRAQALRRRAEDYYRCKITPSARKPLCNRVRMAAAEHRHSSGLPYWPYLTAETLKNRMGHQPPPPTQQHSIIDNSLSLKTPPECLLTPLPPSALPSADDNLKTPAECLLYPLPPSADDNLKTPPECLLTPLPPSAPPSADDNLKTPPKCVCSLPFHPQRMIISRN

SEQ ID NO: 58170 - protein, 317 aa, Homo sapiens
  Payload ID: 11390
  Gene Symbol: NPIPA2
  Gene Name: nuclear pore complex interacting protein family, member A2
  ENSP ID: ENSP00000432767
MVKLSIVLTPRFLSHDQGQLTKELQQHVKSVTCPCEYLRKVINTLADHRHRGTDFGGSPWLLIITVFLRSYKFAISLCTSYLCVSFLKTIFPSQNGHDGSTDVQQRARRSNRRRQEGIKIVLEDIFTLWRQVETKVRAKICKMKVTTKVNRHDKINGKRKTAKEHLRKLSMKEREHGEKERQVSEAEENGKLDMKEIHTYMEMFQRAQALRRRAEDYYRCKITPSARKPLCNRVSLLVFLAFGHSLPGQDMDTFFSLRLCAQALQREMAERKAAYKHHSPIPVGNRVAQKHLHPHPVGPPSNILSVRGSVFVIANGP

SEQ ID NO: 58171 - protein, 350 aa, Homo sapiens
  Payload ID: 11390
  Gene Symbol: NPIPA2
  Gene Name: nuclear pore complex interacting protein family, member A2
  ENSP ID: ENSP00000446882
MFCCLGYEWLSGGCKTWHSAWVINTLADHRHRGTDFGGSPWLLIITVFLRSYKFAISLCTSYLCVSFLKTIFPSQNGHDGSTDVQQRARRSNRRRQEGIKIVLEDIFTLWRQVETKVRAKICKMKVTTKVNRHDKINGKRKTAKEHLRKLSMKEREHGEKERQVSEAEENGKLDMKEIHTYMEMFQRAQALRRRAEDYYRCKITPSARKPLCNRVRMAAAEHRHSSGLPYWPYLTAETLKNRMGHQPPPPTQQHSIIDNSLSLKTPPECLLTPLPPSALPSADDNLKTPAECLLYPLPPSADDNLKTPPECLLTPLPPSAPPSADDNLKTPPKCVCSLPFHPQRMIISRN

SEQ ID NO: 58172 - protein, 317 aa, Homo sapiens; identical to SEQ ID NO: 58170
  Payload ID: 11391
  Gene Symbol: NPIPA3
  Gene Name: nuclear pore complex interacting protein family, member A3
  ENSP ID: ENSP00000434172

SEQ ID NO: 58173 - protein, 369 aa, Homo sapiens
  Payload ID: 11391
  Gene Symbol: NPIPA3
  Gene Name: nuclear pore complex interacting protein family, member A3
  ENSP ID: ENSP00000437133
MVKLSIVLTPRFLSHDQGQLTKELQQHVKSVTCPCEYLRKVINTLADHRHRGTDFGGSPWLLIITVFLRSYKFAISLCTSYLCVSFLKTIFPSQNGHDGSTDVQQRARRSNRRRQEGIKIVLEDIFTLWRQVETKVRAKICKMKVTTKVNRHDKINGKRKTAKEHLRKLSMKEREHGEKERQVSEAEENGKLDMKEIHTYMEMFQRAQALRRRAEDYYRCKITPSARKPLCNRVRMAAAEHRHSSGLPYWPYLTAETLKNRMGHQPPPPTQQHSIIDNSLSLKTPPECLLTPLPPSALPSADDNLKTPAECLLYPLPPSADDNLKTPPECLLTPLPPSAPPSVDDNLKTPPKCVCSLPFHPQRMIISRN

SEQ ID NO: 58174 - protein, 350 aa, Homo sapiens
  Payload ID: 11391
  Gene Symbol: NPIPA3
  Gene Name: nuclear pore complex interacting protein family, member A3
  Uniprot ID: F8WFD2
  ENSP ID: ENSP00000448841
MFCCLGYEWLSGGCKTWHSAWVINTLADHRHRGTDFGGSPWLLIITVFLRSYKFAISLCTSYLCVSFLKTIFPSQNGHDGSTDVQQRARRSNRRRQEGIKIVLEDIFTLWRQVETKVRAKICKMKVTTKVNRHDKINGKRKTAKEHLRKLSMKEREHGEKERQVSEAEENGKLDMKEIHTYMEMFQRAQALRRRAEDYYRCKITPSARKPLCNRVRMAAAEHRHSSGLPYWPYLTAETLKNRMGHQPPPPTQQHSIIDNSLSLKTPPECLLTPLPPSALPSADDNLKTPAECLLYPLPPSADDNLKTPPECLLTPLPPSAPPSVDDNLKTPPKCVCSLPFHPQRMIISRN

SEQ ID NO: 58175 - protein, 350 aa, Homo sapiens
  Payload ID: 11391
  Gene Symbol: NPIPA3
  Gene Name: nuclear pore complex interacting protein family, member A3
  ENSP ID: ENSP00000479725
MFCCLGYEWLSGGCKTWHSAWVINTLADHRHRGTDFGGSPWLLIITVFLRSYKFAISLCTSYLCVSFLKTIFPSQNGHDGSTDVQQRARRSNRRRQEGIKIVLEDIFTLWRQVETKVRAKICKMKVTTKVNRHDKINGKRKTAKEHLRKLSMKEREHGEKERQVSEAEENGKLDMKEIHTYMEMFQRAQALRRRAEDYYRCKITPSARKPLCNRVRMAAAEHRHSSGLPYWPYLTAETLKNRMGHQPPPPTQQHSIIDNSLSLKTPPECLLYPLPPSADDNLKTPPECLLTPLPPSAPPSADDNLKTPPECLLTPLPPSAPPSADDNLKTPPKCVCSLPFHPQRMIISRN

SEQ ID NO: 58176 - protein, 350 aa, Homo sapiens; identical to SEQ ID NO: 58171
  Payload ID: 11391
  Gene Symbol: NPIPA3
  Gene Name: nuclear pore complex interacting protein family, member A3
  ENSP ID: ENSP00000483111

SEQ ID NO: 58177 - protein, 350 aa, Homo sapiens; identical to SEQ ID NO: 58171
  Payload ID: 11391
  Gene Symbol: NPIPA3
  Gene Name: nuclear pore complex interacting protein family, member A3
  ENSP ID: ENSP00000484195

SEQ ID NO: 58178 - protein, 369 aa, Homo sapiens; identical to SEQ ID NO: 58169
  Payload ID: 11391
  Gene Symbol: NPIPA3
  Gene Name: nuclear pore complex interacting protein family, member A3
  ENSP ID: ENSP00000487879

SEQ ID NO: 58179 - protein, 317 aa, Homo sapiens; identical to SEQ ID NO: 58170
  Payload ID: 11391
  Gene Symbol: NPIPA3
  Gene Name: nuclear pore complex interacting protein family, member A3
  ENSP ID: ENSP00000488574

SEQ ID NO: 58180 - protein, 350 aa, Homo sapiens
  Payload ID: 11392
  Gene Symbol: NPIPA5
  Gene Name: nuclear pore complex interacting protein family, member A5
  Uniprot ID: E9PKD4
  ENSP ID: ENSP00000433597
MFCCLGYEWLSGGCKTWHSAWVINTLADHRHRGTDFGGSPWLLIITVFLRSYKFAISLCTSYLCVSFLKTIFPSQNGHDGSTDVQQRARRSNCRRQEGIKIVLEDIFTLWRQVETKVRAKIRKMKVTTKVNRHDKINGKRKTAKEHLRKLSMKEREHGEKERQVSEAEENGKLDMKEIHTYMEMFQRAQALRRRAEDYYRCKITPSARKPLCNRVRMAAVEHRHSSGLPYWPYLTAETLKNRMGHQPPPPTQQHSIIDNSLSLKTPSERLLYPLPPSADDNLKTPPECLLTPLPPSALPSADDNLKTPAECLLTPLPPSAPPSADDNLKTPPECVCSLPFHPQRMIISRN

SEQ ID NO: 58181 - protein, 317 aa, Homo sapiens
  Payload ID: 11392
  Gene Symbol: NPIPA5
  Gene Name: nuclear pore complex interacting protein family, member A5
  ENSP ID: ENSP00000435611
MVKLSIVLTPRFLSHDQGQLTKELQQHVKSVTCPCEYLRKVINTLADHRHRGTDFGGSPWLLIITVFLRSYKFAISLCTSYLCVSFLKTIFPSQNGHDGSTDVQQRARRSNCRRQEGIKIVLEDIFTLWRQVETKVRAKIRKMKVTTKVNRHDKINGKRKTAKEHLRKLSMKEREHGEKERQVSEAEENGKLDMKEIHTYMEMFQRAQALRRRAEDYYRCKITPSARKPLCNRVSLLVFLAFGHSLPGQDMDTFFSLRLCAQALQREMAERKAAYKHHSPIPVGNRVAQKHLHPHPVGPPSNILSVRGSIFVIANGP

SEQ ID NO: 58182 - protein, 232 aa, Homo sapiens; identical to SEQ ID NO: 1177
  Payload ID: 11392
  Gene Symbol: NPIPA5
  Gene Name: nuclear pore complex interacting protein family, member A5
  Uniprot ID: E9PKD4
  ENSP ID: ENSP00000441072

SEQ ID NO: 58183 - protein, 350 aa, Homo sapiens
  Payload ID: 11392
  Gene Symbol: NPIPA5
  Gene Name: nuclear pore complex interacting protein family, member A5
  ENSP ID: ENSP00000488135
MFCCLGYEWLSGGCKTWHSAWVINTLADHRHRGTDFGGSPWLLIITVFLRSYKFAISLCTSYLCVSFLKTIFPSQNGHDGSTDVQQRARRSNCRRQEGIKIVLEDIFTLWRQVETKVRAKIRKMKVTTKVNCHDKINGKRKTAKEHLRKLSMKEREHGEKERQVSEAEENGKLDMKEIHTYMEMFQRARALRRRAEDYYRCKITPSARKPLCNRVRMAAVEHRHSSGLPYWPYLTAETLKNRMGHQPPPPTQQHSIIDNSLSLKTPSERLLYPLPPSADDNLKTPPECLLTPLPPSALPSADDNLKTPAECLLTPLPPSAPPSADDNLKTPPECVCSLPFHPQRMIISRN

SEQ ID NO: 58184 - protein, 56 aa, Homo sapiens
  Payload ID: 11393
  Gene Symbol: NPIPA7
  Gene Name: nuclear pore complex interacting protein family, member A7
  ENSP ID: ENSP00000343256
  MOD_RES (1)..(1): Any amino acid
XKWEIGYERNTHLHGNVSTCASVAAAGRGLLQMQNHPFCKKASLQPVHLQFGITWE

SEQ ID NO: 58185 - protein, 369 aa, Homo sapiens
  Payload ID: 11393
  Gene Symbol: NPIPA7
  Gene Name: nuclear pore complex interacting protein family, member A7
  Uniprot ID: E9PJI5
  ENSP ID: ENSP00000431814
MFCCLGYEWLSGGCTTWHSAWVINTLADHRHRGTDFGGSPWLLIITVFLRSYKFAISLCTSYLCVSFLKTIFPSQNGHDGSTDVQQRARRSNRRRQEGIKIVLEDIFTLWRQVETKVRAKIRKMKVTTKVNRHDKINGKRKTAKEHLRKLSMKEREHREEERQVSEAEENGKLDMKEIHTYMEMFQRAQALRRRAEDYYRCKITPSARKPLCNRVRMAAVEHRHSSGLPYWPYLTAETLKNRMGHQPPPPTQQHSIIDNSLSLKTPSECVLYPLPPSADDNLKTPPECLLTPLPPSALPSADDNLKTPAECLLYPLPPSADDNLKTPPECLLTPLPPSAPPSADDNLKTPPECVCSLPFHPQRMIISRN

SEQ ID NO: 58186 - protein, 369 aa, Homo sapiens; identical to SEQ ID NO: 58185
  Payload ID: 11393
  Gene Symbol: NPIPA7
  Gene Name: nuclear pore complex interacting protein family, member A7
  Uniprot ID: E9PJI5
  ENSP ID: ENSP00000479584

SEQ ID NO: 58187 - protein, 369 aa, Homo sapiens; identical to SEQ ID NO: 58185
  Payload ID: 11394
  Gene Symbol: NPIPA8
  Gene Name: nuclear pore complex interacting protein family, member A8
  Uniprot ID: P0DM63
  ENSP ID: ENSP00000435325

SEQ ID NO: 58188 - protein, 369 aa, Homo sapiens; identical to SEQ ID NO: 58185
  Payload ID: 11394
  Gene Symbol: NPIPA8
  Gene Name: nuclear pore complex interacting protein family, member A8
  Uniprot ID: P0DM63
  ENSP ID: ENSP00000438887

SEQ ID NO: 58189 - protein, 130 aa, Homo sapiens
  Payload ID: 11394
  Gene Symbol: NPIPA8
  Gene Name: nuclear pore complex interacting protein family, member A8
  ENSP ID: ENSP00000439498
  MOD_RES (1)..(1): Any amino acid
XIKIVLEDIFTLWRQVETKVRAKIRKMKVTTKVNRHDKINGKRKTAKEHLRKLSMKEREHREEERQVSEAEENGKLDMKEIHTYMEMFQRAQALRRRAEDYYRCKITPSARKPLCNRCTYNLVLPGSEKK

SEQ ID NO: 58190 - protein, 1161 aa, Homo sapiens
  Payload ID: 11395
  Gene Symbol: NPIPB11
  Gene Name: nuclear pore complex interacting protein family, member B11
  Uniprot ID: E5RHQ5
  ENSP ID: ENSP00000430853
MVKLSIVLTPQFLSHDQGQLTKELQQHVKSVTCPCEYLRKVINTLADHHHRGTDFGGSPWLHIIIAFPTSYKVVITLWIVYLWVSLLKTIFWSRNGHDGSTDVQQRAWRSNRRRQEGLRSICMHTKKRVSSFRGNKIGLKDVITLRRHVETKVRAKIRKRKVTTKINRHDKINGKRKTARKQKMFQRAQELRRRAEDYHKCKIPPSARKALCNWVRMAAAEHRHSSGLPYWPYLTAETLKNRMGHQPPPPTQQHCITDNSLSLKTPLECLLTPLPPSADDNLKTPPECLLTPLPPSADDNLKTPPECLLTPLPPSAPPSAPPSADDNLKTRAECLLHPLPPSADDNLKTPSERQLTPLPPSAPPSADDNIKTTAERLRGPLPPSADDNLKTPSERQLTPLPPSAPPSADDNIKTPAEHLRGPLPPSADDNLKTPSERQLTPLPPSAPPSADDNIKTPAERLRGPLPPSADDNLKTPSERQLTPLPPSAPPSADDNIKTPAEHLRGPLPPSADDNLKTPSERQLTPLPPSAPPSADDNIKTTAEHLRGPLPPSADDNLKTPSERQLTPLPPSAPPSADDNIKTPAEHLQFRFHPQRMIISRDLPSVSSLPFHPQLHPQQMIISRYLLSICGFRFHRQRMIISRHLPSVSSLPFHPQLHPQQMIISRHLPSVCGGRFHPQPMIISRHLPSVSSLPFHPQLHPQQMIISRHLPSVCGGRFHPQPMIISRHLPSVSSLPFHPQLHPQQMIISRHLPSVCGGRFHPQPMIISRHLPSVSSLPFHPQLHPQQMIISRHLPSVCGGRFHPQPMIISRHLPSVSSLPFHPQLHPQQMIISRHLPSVCGGRFHPQPMIISRHLPSVSSLPFHPQLHPQQMIISRHLPSVCGERLWVPLPPSADDNLKTPSKRQLTPLPPSAPPSADDNIKTPAERLRGPLPPSADDNLKTPSKRQLTPLPPSAPPSADDNIKTPAERLRGPLPPSADDNLKTPSERQLTPLPPSAPPSADDNIKTPAERLRGPLPPSADDNLKTPSERQLTPLPPSAPTSADDNIKTPAERLRGPLPPSADDNLKTPPLATQEAEAEKPRKPKRQRAAEMEPPPEPKRRRVGDVEPSRKPKRRRAADVEPSSPEPKRRRVGDVEPSRKPKRRRAADVEPSSPEPKRRRLS

SEQ ID NO: 58191 - protein, 250 aa, Homo sapiens
  Payload ID: 11395
  Gene Symbol: NPIPB11
  Gene Name: nuclear pore complex interacting protein family, member B11
  ENSP ID: ENSP00000479201
MRGRWMLFWLLFGLLLEFISHQCIRVINTLADHHHRGTDFGGSPWLHIIIAFPTSYKVVITLWIVYLWVSLLKTIFWSRNGHDGSTDVQQRAWRSNRRRQEGNKIGLKDVITLRRHVETKVRAKIRKRKVTTKINRHDKINGKRKTARKQKMFQRAQELRRRAEDYHKCKIPPSARKALCNWVSLLVFLAFGHSLPGQDMDTFFSLQLCAQALQREMAERKAAYKHHSPIPVGNRVAQKHLHPHPVGPLI

SEQ ID NO: 58192 - protein, 443 aa, Homo sapiens
  Payload ID: 11396
  Gene Symbol: NPIPB15
  Gene Name: nuclear pore complex interacting protein family, member B15
  Uniprot ID: A6NHN6
  ENSP ID: ENSP00000411140
MRLRFWLLIWLLLGFISHQPTPVINSLAVYRHRETDFGVGVRDHPGQHGKTPSPQKLDNLIIIIIGFLRRDTFTILFCTSYLCVSFLKTIFWSRNGHDGSTDVQQRAWRSNRSRQKGLRSICMHTKKRVSSFRGNKIGLKDVITLRRHVETKVRAKIRKRKVTTKINRHDKINGKRKTARKQKMFQRAQELRRRAEDYHKCKIPPSARKPLCNWVRMAAAEHRHSSGLPCWPYLTAEALKNRMGRQPPPPTQQHSITDNSLSLKTPPECLLHPLPPSVDDNIKECPLAPLPPSVDDNLKEYLLVPLPPSPLPPSVDDNLKDCLFVPLPPSPLPPSVDDNLKTPPLATQEAEAEKPPKPKRWRVDEVEQSPKPKRRRADEVEQSPKPKRQREAEAQQLPKPKRRRLSKLRTRHCTQAWAIRINPWVEKKKKIKKQNKTHAPKTN

SEQ ID NO: 58193 - protein, 250 aa, Homo sapiens [sequence omitted]

SEQ ID NO: 58194 - protein, 251 aa, Homo sapiens
  Payload ID: 11397
  Gene Symbol: NPIPB3
  Gene Name: nuclear pore complex interacting protein family, member B3
  ENSP ID: ENSP00000413141
MPMRVPEEVTLRNPGSSGRKERPEAGTGSWLGRTRNQVINTLADHHHRGTDFGGSPWLHVIIAFPTSYKVVITLWIVYLWVSLLKTIFWSRNGHDGSTDVQQRAWRSNRRRQEGLRSICMHTKKRVSSFRGNKIGLKDVITLRRHVETKVRAKIRKRKVTTKINHHDKINGKRKTARKQKMFQRAQELRRRAEDYHKCKIPPSARKALCNWVRMAAAEHRHSSGLPYWPYLTAETLKNRMGHQPPPPTQQH

SEQ ID NO: 58195 - protein, 97 aa, Homo sapiens
  Payload ID: 11397
  Gene Symbol: NPIPB3
  Gene Name: nuclear pore complex interacting protein family, member B3
  ENSP ID: ENSP00000436028
MFCCLGYEWLSGGCKTWHSAWVINTLADHHHRGTDFGGSPWLHVIIAFPTSYKVVITLWIVYLWVSLLKTIFWSRNGHDGSTDVQQRAWRSNRRRQE

SEQ ID NO: 58196 - protein, 104 aa, Homo sapiens
  Payload ID: 11397
  Gene Symbol: NPIPB3
  Gene Name: nuclear pore complex interacting protein family, member B3
  ENSP ID: ENSP00000439062
MVKLSIVLTPQFLSHDQGQLTKELQQHVKSVTCPCEYLRKVINTLADHHHRGTDFGGSPWLHVIIAFPTSYKVVITLWIVYLWVSLLKTIFWSRNGHDGSTDVQ

SEQ ID NO: 58197 - protein, 420 aa, Homo sapiens
  Payload ID: 11397
  Gene Symbol: NPIPB3
  Gene Name: nuclear pore complex interacting protein family, member B3
  Uniprot ID: Q92617
  ENSP ID: ENSP00000444096
MAAAEHRHSSGLPYWPYLTAETLKNRMGHQPPPPTQQHSITDNSLSLKTPPECLLTPLPPSADDNLKTPPECVLTPLPPSADDNLKTPPECVLTPLPPSADDNLKTPPECLLTPLPPSADDNLKTPPECLLTPLPPSALPSAPPSADDNLKTRAECLLHPLPPSADDNLKTPSERQLTPLPPSAPPSADDNIKTPAERLRGPLPPSADDNLKTPSERQLTPLPPSAPPSADDNIKTPAERLRGPLPPSADDNLKTPSERQLTPLPPSAPPSADDNIKTPAERLRGPLPPSADDNLKTPPLATQEAEAEKPRKPKRQRAAEMEPPPEPKRRRVGDVEPSRKPKRRRAADVEPSSPEPKRRRVGDVEPSRKPKRRRAADVEPSSPEPKRRRVGDVEPSRKPKRRRAADVEPSLPEPKRRRLS

SEQ ID NO: 58198 - protein, 358 aa, Homo sapiens
  Payload ID: 11397
  Gene Symbol: NPIPB3
  Gene Name: nuclear pore complex interacting protein family, member B3
  ENSP ID: ENSP00000446048
MVKLSIVLTPQFLSHDQGQLTKELQQHVKSVTCPCEYLRKVINTLADHHHRGTDFGGSPWLHVIIAFPTSYKVVITLWIVYLWVSLLKTIFWSRNGHDGSTDVQQRAWRSNRRRQEGLRSICMHTKKRVSSFRGNKIGLKDVITLRRHVETKVRAKIRKRKVTTKINHHDKINGKRKTARKQKMFQRAQELRRRAEDYHKCKIPPSARKALCNWVRMAAAEHRHSSGLPYWPYLTAETLKNRMGHQPPPPTQQHSITDNSLSLKTPPECLLTPLPPSADDNLKTPPECVLTPLPPSADDNLKTPPECVLTPLPPSADDNLKTPPECLLTPLPPSADDNLKTPPECLLTPLPPSALPSA

SEQ ID NO: 58199 - protein, 162 aa, Homo sapiens
  Payload ID: 11398
  Gene Symbol: NPIPB4
  Gene Name: nuclear pore complex interacting protein family, member B4
  ENSP ID: ENSP00000339196
MVKLSIVLTPQFLSHDQGQLTKELQQHVKSVTCPCEYLRKVINTLADHHHRGTDFGGSPWLHVIIAFPTSYKVVITLWIVYLWVSLLKTIFWSRNGHDGSTDVQQRAWRSNRRRQEGLRSICMHTKKRVSSFRGNKIVLKDVITLRRHVETKVRAKIRKRKV

SEQ ID NO: 58200 - protein, 1138 aa, Homo sapiens
  Payload ID: 11398
  Gene Symbol: NPIPB4
  Gene Name: nuclear pore complex interacting protein family, member B4
  Uniprot ID: C9JG80
  ENSP ID: ENSP00000404439
MVKLSIVLTPQFLSHDQGQLTKELQQHVKSVTCPCEYLRKVINTLADHHHRGTDFGGSPWLHVIIAFPTSYKVVITLWIVYLWVSLLKTIFWSRNGHDGSTDVQQRAWRSNRRRQEGLRSICMHTKKRVSSFRGNKIVLKDVITLRRHVETKVRAKIRKRKVTTKINHHDKINGKRKTARKQKMFQRAQELRRRAEDYHKCKIPPSARKALCNWVRMAAAEHRHSSGLPYWPYLTAETLKNRMGHQPPPPTQQHSITDNSLSLKTPPECLLTPLPPSADDNLKTPPECVLTPLPPSADDNLKTPPECVLTPLPPSADDNLKTPPECLLTPLPPSADDKLKTPPECLLTPLPPSALPSAPPSADDNLKTRAECLLHPLPPSADDNLKTPSERQLTPLPPSAPPSADDNIKTPAERLRGPLPPSADDNLKTPSERQLTPLPPSAPPSADDNIKTPAERLRGPLPPSADDNLKTPSERQLTPLPPSAPPSADDNIKTPAERLRGPLPPSADDNLKTPSERQLTPLPPSAPPSADDNIKTPAERLRGPLPPSADDNLKTPSERQLTPLPPSAPPSADDNIKTPAERLRGPLPPSADDNLKTPSERQLTPLPPSAPPSADDNIKTPAFHPQRMIISRHLPSVSSLPFHPQLHPQQMIISRYLLSVCGFRFHHQPMIISRHLPSVSSLPFHPQLHPQQMIISRHLPSVCGGRFHPQRMIISRHLPSVSSLPFHPQLHPQQMIISRHLPSVCGGRFHPQRMIISRHLPSVSSLPFHPQLHPQQMIISRHLPSVCGGRFHPQRMIISRHLPSVSSLPFHPQLHPQQMIISRHLPSVCGGRFHPQRMIISRHLPSVSSLPFHPQLHPQQMIISRHLPSVCGERLRGPLPPSADDNLKTPSERQLTPLPPSAPPSADDNIKTPAERLRGPLPPSADDNLKTPSERQLTPLPPSAPPSADDNIKTPAERLRGPLPPSADDNLKTPSERQLTPLPPSAPPSADDNIKTPAERLRGPLPPSADDNLKTPPLATQEAEAEKPRKPKRQRAAEMEPPPEPKRRRVGDVEPSRKPKRRRAADVEPSSPEPKRRRVGDVEPSRKPKRRRAADVEPSSPEPKRRRVGDVEPSRKPKRRRAADVEPSLPEPKRRRLS

SEQ ID NO: 58201 - protein, 49 aa, Homo sapiens
  Payload ID: 11398
  Gene Symbol: NPIPB4
  Gene Name: nuclear pore complex interacting protein family, member B4
  ENSP ID: ENSP00000429523
MVKLSIVLTPQFLSHDQGQLTKELQQHVKSVTCPCEYLRKVDGRMATWM

SEQ ID NO: 58202 - protein, 148 aa, Homo sapiens
  Payload ID: 11398
  Gene Symbol: NPIPB4
  Gene Name: nuclear pore complex interacting protein family, member B4
  ENSP ID: ENSP00000429543
MVKLSIVLTPQFLSHDQGQLTKELQQHVKSVTCPCEYLRKVINTLADHHHRGTDFGGSPWLHVIIAFPTSYKVVITLWIVYLWVSLLKTIFWSRNGHDGSTDVQQRAWRSNRRRQEGLRSICMHTKKRVSSFRGNKIVLKDVITLRRH

SEQ ID NO: 58203 - protein, 49 aa, Homo sapiens; identical to SEQ ID NO: 58201
  Payload ID: 11398
  Gene Symbol: NPIPB4
  Gene Name: nuclear pore complex interacting protein family, member B4
  ENSP ID: ENSP00000433301

SEQ ID NO: 58204 - protein, 420 aa, Homo sapiens [sequence omitted]

SEQ ID NO: 58205 - protein, 49 aa, Homo sapiens; identical to SEQ ID NO: 58201
  Payload ID: 11398
  Gene Symbol: NPIPB4
  Gene Name: nuclear pore complex interacting protein family, member B4
  ENSP ID: ENSP00000439720

SEQ ID NO: 58206 - protein, 90 aa, Homo sapiens
  Payload ID: 11398
  Gene Symbol: NPIPB4
  Gene Name: nuclear pore complex interacting protein family, member B4
  ENSP ID: ENSP00000439732
MFCCLGYEWLSGGCKTWHSAWVINTLADHHHRGTDFGGSPWLHVIIAFPTSYKVVITLWIVYLWVSLLKTIFWSRNGHDGSTDVQQRAWR

SEQ ID NO: 58207 - protein, 29 aa, Homo sapiens
  Payload ID: 11398
  Gene Symbol: NPIPB4
  Gene Name: nuclear pore complex interacting protein family, member B4
  ENSP ID: ENSP00000442065
MVKLSIVLTPQFLSHDQGQLTKELQQHVK

SEQ ID NO: 58208 - protein, 40 aa, Homo sapiens
  Payload ID: 11398
  Gene Symbol: NPIPB4
  Gene Name: nuclear pore complex interacting protein family, member B4
  ENSP ID: ENSP00000442776
MVKLSIVLTPQFLSHDQGQLTKELQQHVKSVTCPCEYLRK

SEQ ID NO: 58209 - protein, 27 aa, Homo sapiens
  Payload ID: 11398
  Gene Symbol: NPIPB4
  Gene Name: nuclear pore complex interacting protein family, member B4
  ENSP ID: ENSP00000443445
MVKLSIVLTPQFLSHDQGQLTKELQQH

SEQ ID NO: 58210 - protein, 250 aa, Homo sapiens
  Payload ID: 11398
  Gene Symbol: NPIPB4
  Gene Name: nuclear pore complex interacting protein family, member B4
  ENSP ID: ENSP00000477616
MRVRWMLFWLLFGLLLEFISHQCISVINTLADHHHRGTDFGGSPWLHVIIAFPTSYKVVITLWIVYLWVSLLKTIFWSRNGHDGSTDVQQRAWRSNRRRQEGNKIVLKDVITLRRHVETKVRAKIRKRKVTTKINHHDKINGKRKTARKQKMFQRAQELRRRAEDYHKCKIPPSARKALCNWVSLLVFLAFGHSLPGQDMDTFFSLQLCAQALQREMAERKAAYKHHSPIPVGNRVAQKHLHPHPVGPLI

SEQ ID NO: 58211 - protein, 420 aa, Homo sapiens; identical to SEQ ID NO: 58197
  Payload ID: 11399
  Gene Symbol: NPIPB5
  Gene Name: nuclear pore complex interacting protein family, member B5
  ENSP ID: ENSP00000349936

SEQ ID NO: 58212 - protein, 1126 aa, Homo sapiens [sequence omitted]

SEQ ID NO: 58213 - protein, 49 aa, Homo sapiens; identical to SEQ ID NO: 58201
  Payload ID: 11399
  Gene Symbol: NPIPB5
  Gene Name: nuclear pore complex interacting protein family, member B5
  ENSP ID: ENSP00000428548

SEQ ID NO: 58214 - protein, 49 aa, Homo sapiens; identical to SEQ ID NO: 58201
  Payload ID: 11399
  Gene Symbol: NPIPB5
  Gene Name: nuclear pore complex interacting protein family, member B5
  ENSP ID: ENSP00000429898

SEQ ID NO: 58215 - protein, 1133 aa, Homo sapiens
  Payload ID: 11399
  Gene Symbol: NPIPB5
  Gene Name: nuclear pore complex interacting protein family, member B5
  Uniprot ID: A8MRT5
  ENSP ID: ENSP00000430633
MVKLSIVLTPQFLSHDQGQLTKELQQHVKSVTCPCEYLRKVINTLADHHHRGTDFGGSPWLHVIIAFPTSYKVVITLWIVYLWVSLLKTIFWSRNGHDGSTDVQQRAWRSNRRRQEGLRSICMHTKKRVSSFRGNKIGLKDVITLRRHVETKVRAKIRKRKVTTKINHHDKINGKRKTARKQKMFQRAQELRRRAEDYHKCKIPPSARKALCNWVRMAAAEHRHSSGLPYWPYLTAETLKNRMGHQPPPPTQQHSITDNSLSLKTPPECLLTPLPPSADDNLKTPPECVLTPLPPSADDNLKTPPECVLTPLPPSADDNLKTPPECLLTPLPPSADDNLKTPPECLLTPLPPSALPSAPPSADDNLKTRAECLLHPLPPSADDNLKTPSERQLTPLPPSAPPSADDNIKTPAERLRGPLPPSADDNLKTPSERQLTPLPPSAPPSADDNIKTPAERLRGPLPPSADDNLKTPSERQLTPLPPSAPPSADDNIKTPAERLRGPLPPSADDNLKTPSERQLTALPPSADDNIKTPAERLRGPLPPSADDNLKTPSERQLTPLPPSAPPSADDNIKTPAFHPQRMISRHLPSVSSLPFHPQLHPQQMIISRYLLSVCGFRFHHQPMIISRHLPSVSSLPFHPQLHPQQMIISRHLPSVCGGRFHPERMIISRHLPSVSSLPFHPQLHPQQMIISRHLPSVCGGRFHPQQMIISRHLPSVSSLPFHPQLHPQQMIISRHLPSVCGGRFHPQRMIISRHLPSVSSLPFHPQLHPQQMIISRHLPSVCGGRFHPQQMIISRHLPSVSSLPFHPQLHPQQMIISRHLPSVCGGRFHPQRMIISRHLPSVSSLPFHPQLHPQQMIISRHLPSVCGERLRGPLPPSADDNLKTPSERQLTPLPPSAPPSADDNIKTPAERLRGPLPPSADDNLKTPSERQLTPLPPSAPPSADDNIKTPAERLRGPLPPSADDNLKTPSERQLTPLPPSAPPSADDNIKTPAERLRGPLPPSADDNLKTPPLATQEAEAEKPRKPKRQRAAEMEPPPEPKRRRVGDVEPSRKPKRRRAADVEPSSPEPKRRRVGDVEPSRKPKRRRAADVEPSSPEPKRRRVGDVEPSRKPKRRRAADVEPSLPEPKRRRLS

SEQ ID NO: 58216 - protein, 595 aa, Homo sapiens
  Payload ID: 11399
  Gene Symbol: NPIPB5
  Gene Name: nuclear pore complex interacting protein family, member B5
  ENSP ID: ENSP00000431553
MVKLSIVLTPQFLSHDQGQLTKELQQHVKSVTCPCEYLRKVINTLADHHHRGTDFGGSPWLHVIIAFPTSYKVVITLWIVYLWVSLLKTIFWSRNGHDGSTDVQQRAWRSNRRRQEGLRSICMHTKKRVSSFRGNKIGLKDVITLRRHVETKVRAKIRKRKVTTKINHHDKINGKRKTARKQKMFQRAQELRRRAEDYHKCKIPPSARKALCNWVRMAAAEHRHSSGLPYWPYLTAETLKNRMGHQPPPPTQQHSITDNSLSLKTPPECLLTPLPPSADDNLKTPPECVLTPLPPSADDNLKTPPECVLTPLPPSADDNLKTPPECLLTPLPPSADDNLKTPPECLLTPLPPSALPSAPPSADDNLKTRAECLLHPLPPSADDNLKTPSERQLTPLPPSAPPSADDNIKTPAERLRGPLPPSADDNLKTPSERQLTPLPPSAPPSADDNIKTPAERLRGPLPPSADDNLKTPSERQLTPLPPSAPPSADDNIKTPAERLRGPLPPSADDNLKTPSERQLTALPPSADDNIKTPAERLRGPLPPSADDNLKTPSERQLTPLPPSAPPSADDNIKTPAFHPQRMISRHLPSVSSLPF

SEQ ID NO: 58217 - protein, 40 aa, Homo sapiens; identical to SEQ ID NO: 58208
  Payload ID: 11399
  Gene Symbol: NPIPB5
  Gene Name: nuclear pore complex interacting protein family, member B5
  ENSP ID: ENSP00000439898

SEQ ID NO: 58218 - protein, 11 aa, Homo sapiens
  Payload ID: 11399
  Gene Symbol: NPIPB5
  Gene Name: nuclear pore complex interacting protein family, member B5
  ENSP ID: ENSP00000440137
MVKLSIVLTPQ

SEQ ID NO: 58219 - protein, 49 aa, Homo sapiens; identical to SEQ ID NO: 58201
  Payload ID: 11399
  Gene Symbol: NPIPB5
  Gene Name: nuclear pore complex interacting protein family, member B5
  ENSP ID: ENSP00000440316

SEQ ID NO: 58220 - protein, 1133 aa, Homo sapiens; identical to SEQ ID NO: 58215
  Payload ID: 11399
  Gene Symbol: NPIPB5
  Gene Name: nuclear pore complex interacting protein family, member B5
  Uniprot ID: A8MRT5
  ENSP ID: ENSP00000440703

SEQ ID NO: 58221 - protein, 78 aa, Homo sapiens
  Payload ID: 11399
  Gene Symbol: NPIPB5
  Gene Name: nuclear pore complex interacting protein family, member B5
  ENSP ID: ENSP00000441303
MVKLSIVLTPQFLSHDQGQLTKELQQHVKSVTCPCEYLRKVINTLADHHHRGTDFGGSPWLHVIIAFPTSYKVVITLW

SEQ ID NO: 58222 - protein, 40 aa, Homo sapiens; identical to SEQ ID NO: 58208
  Payload ID: 11399
  Gene Symbol: NPIPB5
  Gene Name: nuclear pore complex interacting protein family, member B5
  ENSP ID: ENSP00000441759

SEQ ID NO: 58223 - protein, 104 aa, Homo sapiens; identical to SEQ ID NO: 58196
  Payload ID: 11399
  Gene Symbol: NPIPB5
  Gene Name: nuclear pore complex interacting protein family, member B5
  ENSP ID: ENSP00000442912

SEQ ID NO: 58224 - protein, 119 aa, Homo sapiens
  Payload ID: 11399
  Gene Symbol: NPIPB5
  Gene Name: nuclear pore complex interacting protein family, member B5
  ENSP ID: ENSP00000442935
MVKLSIVLTPQFLSHDQGQLTKELQQHVKSVTCPCEYLRKVINTLADHHHRGTDFGGSPWLHVIIAFPTSYKVVITLWIVYLWVSLLKTIFWSRNGHDGSTDVQQRAWRSNRRRQEGLR

SEQ ID NO: 58225 - protein, 13 aa, Homo sapiens
  Payload ID: 11399
  Gene Symbol: NPIPB5
  Gene Name: nuclear pore complex interacting protein family, member B5
  ENSP ID: ENSP00000444299
MVKLSIVLTPQFL

SEQ ID NO: 58226 - protein, 595 aa, Homo sapiens; identical to SEQ ID NO: 58216
  Payload ID: 11399
  Gene Symbol: NPIPB5
  Gene Name: nuclear pore complex interacting protein family, member B5
  ENSP ID: ENSP00000445388

SEQ ID NO: 58227 - protein, 49 aa, Homo sapiens; identical to SEQ ID NO: 58201
  Payload ID: 11399
  Gene Symbol: NPIPB5
  Gene Name: nuclear pore complex interacting protein family, member B5
  ENSP ID: ENSP00000445754

SEQ ID NO: 58228 - protein, 68 aa, Homo sapiens
  Payload ID: 11399
  Gene Symbol: NPIPB5
  Gene Name: nuclear pore complex interacting protein family, member B5
  ENSP ID: ENSP00000449628
HVIIAFPTSYKVVITLWIVYLWVSLLKTIFWSRNGHDGSTDVQQRAWRSNRRRQEGFSPSPLLTLTKG

SEQ ID NO: 58229 - protein, 250 aa, Homo sapiens [sequence omitted]

SEQ ID NO: 58230 - protein, 425 aa, Homo sapiens
  Payload ID: 11400
  Gene Symbol: NPIPB6
  Gene Name: nuclear pore complex interacting protein family, member B6
  Uniprot ID: E9PJ23
  ENSP ID: ENSP00000431871
MVKLSIVLTPQFLSHDQSQLTKELQQHVKSVTCPCEYLRKVINSLAVYRHRETDFGVGVRDHPGQHGKTPSPQKLDNLIIIIIGFLRRYTFNILFCTSCLCVSFLKTIFWSRNGHDGSMDVQQRAWRSNRSRQKGLRSICMHTKKRVSSFRGNKIGLKDVITLRRHVETKVRAKIRKRKVTTKINRHDKINGKRKTARKQKMFQRAQELRRRAEDYHKCKIPPSARKPLCNWVRMVAAEHRHSSGLPYWPYLTAETLKNRMGRQPPPPTQQHSITDNSLSLKTPTECLLTPLPPSVDDNIKECPLAPLPPSPLPPSVDDNLKECLFVPLPPSPLPPSVDDNLKTPPLATQEAEVEKPPKPKRWRVDEVEQSPKPKRRRVDEVEQSPKPKRQREAEAQQLPKPKRRRLSKLRTRHCTQAWAIRINP

SEQ ID NO: 58231 - protein, 407 aa, Homo sapiens
  Payload ID: 11400
  Gene Symbol: NPIPB6
  Gene Name: nuclear pore complex interacting protein family, member B6
  ENSP ID: ENSP00000435924
MRLRFWLLIWLLLGFISHQPTPVINSLAVYRHRETDFGVGVRDHPGQHGKTPSPQKLDNLIIIIIGFLRRYTFNILFCTSCLCVSFLKTIFWSRNGHDGSMDVQQRAWRSNRSRQKGLRSICMHTKKRVSSFRGNKIGLKDVITLRRHVETKVRAKIRKRKVTTKINRHDKINGKRKTARKQKMFQRAQELRRRAEDYHKCKIPPSARKPLCNWVRMVAAEHRHSSGLPYWPYLTAETLKNRMGRQPPPPTQQHSITDNSLSLKTPTECLLTPLPPSVDDNIKECPLAPLPPSPLPPSVDDNLKECLFVPLPPSPLPPSVDDNLKTPPLATQEAEVEKPPKPKRWRVDEVEQSPKPKRRRVDEVEQSPKPKRQREAEAQQLPKPKRRRLSKLRTRHCTQAWAIRINP

SEQ ID NO: 58232 - protein, 414 aa, Homo sapiens
  Payload ID: 11401
  Gene Symbol: NPIPB7
  Gene Name: nuclear pore complex interacting protein family, member B7
  Uniprot ID: O75200
  ENSP ID: ENSP00000405348
MRLRFWLLIWLLLGFISHQPTPVINSLAVYRHRETDFGVGVRDHPGQHGKTPSPQKLDNLIIIIIGFLRRYTFNVLFCTSCLCVSFLKTIFWSRNGHDGSMDVQQRAWRSNRSRQKGLRSICMHTKKRVSSFRGNKIGLKDVITLRRHVETKVRAKIRKRKVTTKINRHDKINGKRKTARKQKMFQRAQELRRRAEDYHKCKIPPSARKPLCNWVRMAAAEHCHSSGLPYWLYLTAETLKNRMGRQPPPPTQQHSITDNSLSLKTPPECLLTPLPPSVDDNIKECPLAPLPPSPLPPSVDDNLKECLFVPLPPSPLPPSVDDNLKECLFVPLPPSPLPPSVDDNLKTPPLATQEAEVEKPPKPKRWRVDEVEQSPKPKRQREAEAQQLPKPKRRRLSKLRTRHCTQAWAIRINP

SEQ ID NO: 58233 - protein, 421 aa, Homo sapiens [sequence omitted]

SEQ ID NO: 58234 - protein, 144 aa, Homo sapiens
  Payload ID: 11402
  Gene Symbol: NPIPB8
  Gene Name: nuclear pore complex interacting protein family, member B8
  ENSP ID: ENSP00000434100
LKDVITLRRHVETKVRAKIRKRKVTTKINRHDKINGKRKTARKQKMFQRAQELRRRAEDYHKCKIPPSARKPLCNWVSLFVFLAFEHSLPGQDMDTFFSLQLCAQALQREMAERKAAYRHHSPIPVGNRVVQKHLHPHPVGPLI

SEQ ID NO: 58235 - protein, 432 aa, Homo sapiens
  Payload ID: 11402
  Gene Symbol: NPIPB8
  Gene Name: nuclear pore complex interacting protein family, member B8
  Uniprot ID: E9PQR5
  ENSP ID: ENSP00000434399
MVKLSIVLTPQFLSHDQGQLTKELQQHVKSVTCPCEYLRKVINSLAVYRHRETDFGVGVRDHPGQHGKTPSPQKLDNLIIIIIGFLRCYTFNILFCTSCLCVSFLKTIFWSRNGHDGSMDVQQRAWRSNRSRQKGLRSICMHTKKRVSSFRGNKIGLKDVITLRRHVETKVRAKIRKRKVTTKINRHDKINGKRKTARKQKMFQRAQELRRRAEDYHKCKIPPSARKPLCNWVRMAAAEHRHSSGLPYWLYLTAETLKNRMGRQPPPPTQQHSITDNSLSLKTPPECLLTPLPPSVDDNIKECPLAPLPPSPLPPSVDDNLKECLFVPLPPSPLPPSVDDNLKECLFVPLPPSPLPPSVDDNLKTPPLATQEAEVEKPPKPKRWRVDEVEQSPKPKRQREAEAQQLPKPKRRRLSKLRTRHCTQAWAIRINP

SEQ ID NO: 58236 - protein, 314 aa, Homo sapiens
  Payload ID: 11403
  Gene Symbol: NPIPB9
  Gene Name: nuclear pore complex interacting protein family, member B9
  ENSP ID: ENSP00000350444
MDVQQRAWRSNRSRQKGLRSICMHTKKRVSSFRGNKIGLKDVITLRRHVETKVRAKIRKRKVTTKINRHDKINGKRKTARKQKMFQRAQELRRRAEDYHKCKIPPSARKPLCNWVRMAAAEHRHSSGLPYWLYLTAETLKNRMGRQPPPPTQQHSITDNSLSLKTPPECLLTPLPPSVDDNIKECPLAPLPPSPLPPSVDDNLKECLFVPLPPSPLPPSVDDNLKECLFVPLPPSPLPPSVDDNLKTPPLATQEAEVEKPPKPKRWRVDEVEQSPKPKRQREAEAQQLPKPKRRRLSKLRTRHCTQAWAIRINP

SEQ ID NO: 58237 - protein, 429 aa, Homo sapiens
  Payload ID: 11403
  Gene Symbol: NPIPB9
  Gene Name: nuclear pore complex interacting protein family, member B9
  Uniprot ID: F8W1W9
  ENSP ID: ENSP00000446902
MPMRVPEEVTLRNPGSSGRKERPEAGTGSWLGRTRNQVINSLAVYRHRETDFGVGVRDHPGQHGKTPSPQKLDNLIIIIIGFLRRYTFNILFCTSCLCVSFLKTIFWSRNGHDGSMDVQQRAWRSNRSRQKGLRSICMHTKKRVSSFRGNKIGLKDVITLRRHVETKVRAKIRKRKVTTKINRHDKINGKRKTARKQKMFQRAQELRRRAEDYHKCKIPPSARKPLCNWVRMAAAEHRHSSGLPYWLYLTAETLKNRMGRQPPPPTQQHSITDNSLSLKTPPECLLTPLPPSVDDNIKECPLAPLPPSPLPPSVDDNLKECLFVPLPPSPLPPSVDDNLKECLFVPLPPSPLPPSVDDNLKTPPLATQEAEVEKPPKPKRWRVDEVEQSPKPKRQREAEAQQLPKPKRRRLSKLRTRHCTQAWAIRINP

SEQ ID NO: 58238 - protein, 408 aa, Homo sapiens
  Payload ID: 11404
  Gene Symbol: NARF
  Gene Name: nuclear prelamin A recognition factor
  Uniprot ID: Q9UHQ1
  ENSP ID: ENSP00000283996
MKCEHCTRKECSKKTKTDDQENVSADAPSPAQENGEKCDTSKHKVLVVSVCPQSLPYFAAKFNLSVTDASRRLCGFLKSLGVHYVFDTTIAADFSILESQKEFVRRYRQHSEEERTLPMLTSACPGWVRYAERVLGRPITAHLCTAKSPQQVMGSLVKDYFARQQNLSPEKIFHVIVAPCYDKKLEALQESLPPALHGSRGADCVLTSGEIAQIMEQGDLSVRDAAVDTLFGDLKEDKVTRHDGASSDGHLAHIFRHAAKELFNEDVEEVTYRALRNKDFQEVTLEKNGEVVLRFAAAYGFRNIQNMILKLKKGKFPFHFVEVLACAGGCLNGRGQAQTPDGHADKALLRQMEGIYADIPVRRPESSAHVQELYQEWLEGINSPKAREVLHTTYQSQERGTHSLDIKW

SEQ ID NO: 58239 - protein, 456 aa, Homo sapiens
  Payload ID: 11404
  Gene Symbol: NARF
  Gene Name: nuclear prelamin A recognition factor
  Uniprot ID: Q9UHQ1
  ENSP ID: ENSP00000309899
MKCEHCTRKECSKKTKTDDQENVSADAPSPAQENGEKGEFHKLADAKIFLSDCLACDSCMTAEEGVQLSQQNAKDFFRVLNLNKKCDTSKHKVLVVSVCPQSLPYFAAKFNLSVTDASRRLCGFLKSLGVHYVFDTTIAADFSILESQKEFVRRYRQHSEEERTLPMLTSACPGWVRYAERVLGRPITAHLCTAKSPQQVMGSLVKDYFARQQNLSPEKIFHVIVAPCYDKKLEALQESLPPALHGSRGADCVLTSGEIAQIMEQGDLSVRDAAVDTLFGDLKEDKVTRHDGASSDGHLAHIFRHAAKELFNEDVEEVTYRALRNKDFQEVTLEKNGEVVLRFAAAYGFRNIQNMILKLKKGKFPFHFVEVLACAGGCLNGRGQAQTPDGHADKALLRQMEGIYADIPVRRPESSAHVQELYQEWLEGINSPKAREVLHTTYQSQERGTHSLDIKW

SEQ ID NO: 58240 - protein, 262 aa, Homo sapiens
  Payload ID: 11404
  Gene Symbol: NARF
  Gene Name: nuclear prelamin A recognition factor
  ENSP ID: ENSP00000363739
MKCEHCTRKECSKKTKTDDQENVSADAPSPAQENGEKGEFHKLADAKIFLSDCLACDSCMTAEEGVQLSQQNAKDFFRVLNLNKKCDTSKHKVLVVSVCPQSLPYFAAKFNLSVTDASRRLCGFLKSLGVHYVFDTTIAADFSILESQKEFVRRYRQHSEEERTLPMLTSACPGWVRYAERVLGRPITAHLCTAKSPQQVMGSLVKDYFARQQNLSPEKIFHVIVAPCYDKKLEALQESLPPALHGSRGADCVLTSGESQAW

SEQ ID NO: 58241 - protein, 397 aa, Homo sapiens
  Payload ID: 11404
  Gene Symbol: NARF
  Gene Name: nuclear prelamin A recognition factor
  Uniprot ID: Q9UHQ1
  ENSP ID: ENSP00000374656
MTAEEGVQLSQQNAKDFFRVLNLNKKCDTSKHKVLVVSVCPQSLPYFAAKFNLSVTDASRRLCGFLKSLGVHYVFDTTIAADFSILESQKEFVRRYRQHSEEERTLPMLTSACPGWVRYAERVLGRPITAHLCTAKSPQQVMGSLVKDYFARQQNLSPEKIFHVIVAPCYDKKLEALQESLPPALHGSRGADCVLTSGEIAQIMEQGDLSVRDAAVDTLFGDLKEDKVTRHDGASSDGHLAHIFRHAAKELFNEDVEEVTYRALRNKDFQEVTLEKNGEVVLRFAAAYGFRNIQNMILKLKKGKFPFHFVEVLACAGGCLNGRGQAQTPDGHADKALLRQMEGIYADIPVRRPESSAHVQELYQEWLEGINSPKAREVLHTTYQSQERGTHSLDIKW

SEQ ID NO: 58242 - protein, 503 aa, Homo sapiens
  Payload ID: 11404
  Gene Symbol: NARF
  Gene Name: nuclear prelamin A recognition factor
  ENSP ID: ENSP00000409710
MKCEHCTRKECSKKTKTDDQENVSADAPSPAQENGEKGEFHKLADAKIFLSDCLACDSCMTAEEGVQLSQQNAKDFFRVLNLNKKCDTSKHKVLVVSVCPQSLPYFAAKFNLSVTDASRRLCGFLKSLGVHYVFDTTIAADFSILESQKEFVRRYRQHSEEERTLPMLTSACPGWVRYAERVLGRPITAHLCTAKSPQQVMGSLVKDYFARQQNLSPEKIFHVIVAPCYDKKLEALQESLPPALHGSRGADCVLTSGKVLISWWCTPVITATQEAAARESLEPGRQRLQRDKIAPLDSSLGGGGEIAQIMEQGDLSVRDAAVDTLFGDLKEDKVTRHDGASSDGHLAHIFRHAAKELFNEDVEEVTYRALRNKDFQEVTLEKNGEVVLRFAAAYGFRNIQNMILKLKKGKFPFHFVEVLACAGGCLNGRGQAQTPDGHADKALLRQMEGIYADIPVRRPESSAHVQELYQEWLEGINSPKAREVLHTTYQSQERGTHSLDIKW

SEQ ID NO: 58243 - protein, 502 aa, Homo sapiens
  Payload ID: 11404
  Gene Symbol: NARF
  Gene Name: nuclear prelamin A recognition factor
  ENSP ID: ENSP00000414678
MKCEHCTRKECSKKTKTDDQENVSADAPSPAQENGEKGEFHKLADAKIFLSDCLACDSCMTAEEGVQLSQQNAKDFFRVLNLNKKCDTSKHKVLVVSVCPQSLPYFAAKFNLSVTDASRRLCGFLKSLGVHYVFDTTIAADFSILESQKEFVRRYRQHSEEERTLPMLTSACPGWVRYAERVLGRPITAHLCTAKSPQQVMGSLVKDYFARQQVQEEMGSAFPVLPGGSTGWGALQMFGRTTPSPEGGSRQTWMECWCSNLSPEKIFHVIVAPCYDKKLEALQESLPPALHGSRGADCVLTSGEIAQIMEQGDLSVRDAAVDTLFGDLKEDKVTRHDGASSDGHLAHIFRHAAKELFNEDVEEVTYRALRNKDFQEVTLEKNGEVVLRFAAAYGFRNIQNMILKLKKGKFPFHFVEVLACAGGCLNGRGQAQTPDGHADKALLRQMEGIYADIPVRRPESSAHVQELYQEWLEGINSPKAREVLHTTYQSQERGTHSLDIKW

SEQ ID NO: 58244 - protein, 188 aa, Homo sapiens
  Payload ID: 11404
  Gene Symbol: NARF
  Gene Name: nuclear prelamin A recognition factor
  ENSP ID: ENSP00000462006
MKCEHCTRKECSKKTKTDDQENVSADAPSPAQENGEKGEFHKLADAKIFLSDCLACDSCMTAEEGVQLSQQNAKDFFRVLNLNKKCDTSKHKVLVVSVCPQSLPYFAAKFNLSVTDASRRLCGFLKSLGVHYVFDTTIAADFSILESQKEFVRRYRQHSEEERTLPMLTSACPGMLPFPSSLQACRFP

SEQ ID NO: 58245 - protein, 37 aa, Homo sapiens
  Payload ID: 11404
  Gene Symbol: NARF
  Gene Name: nuclear prelamin A recognition factor
  ENSP ID: ENSP00000462240
MTAEEGVQLSQQNAKDFFRVLNLNKKCDTSKHKVLVV

SEQ ID NO: 58246 - protein, 217 aa, Homo sapiens
  Payload ID: 11404
  Gene Symbol: NARF
  Gene Name: nuclear prelamin A recognition factor
  ENSP ID: ENSP00000462305
MKCEHCTRKECSKKTKTDDQENVSADAPSPAQENGEKGEFHKLADAKIFLSDCLACDSCMTAEEGVQLSQQNAKDFFRVLNLNKKCDTSKHKVLVVSVCPQSLPYFAAKFNLSVTDASRRLCGFLKSLGWVRYAERVLGRPITAHLCTAKSPQQVMGSLVKDYFARQQNLSPEKIFHVIVAPCYDKKLEALQESLPPALHGSRGADCVLTSGESQAW

SEQ ID NO: 58247 - protein, 262 aa, Homo sapiens
  Payload ID: 11404
  Gene Symbol: NARF
  Gene Name: nuclear prelamin A recognition factor
  ENSP ID: ENSP00000462792
MKCEHCTRKECSKKTKTDDQENVSADAPSPAQENGEKGEFHKLADAKIFLSDCLACDSCMTAEEGVQLSQQNAKDFFRVLNLNKKCDTSKHKVLVVSVCPQSLPYFAAKFNLSVTDASRRLCGFLKSLGWVRYAERVLGRPITAHLCTAKSPQQVMGSLVKDYFARQQNLSPEKIFHVIVAPCYDKKLEALQESLPPALHGSRGADCVLTSGEIAQIMEQGDLSVRDAAVDTLFGDLKEDKVTRHDGASSDGHLAHIFRHAA

SEQ ID NO: 58248 - protein, 167 aa, Homo sapiens
  Payload ID: 11404
  Gene Symbol: NARF
  Gene Name: nuclear prelamin A recognition factor
  ENSP ID: ENSP00000462970
  MOD_RES (1)..(1): Any amino acid
XNLSPEKIFHVIVAPCYDKKLEALQESLPPALHGSRGADCVLTSGEIAQIMEQGDLSVRDAAVDTLNKDFQEVTLEKNGEVVLRFAAAYGFRNIQNMILKLKKGKFPFHFVEVLACAGGCLNGRGQAQTPDGHADKALLRQMEGIYADIPVRRPESSAHVQELYQEW

SEQ ID NO: 58249 - protein, 143 aa, Homo sapiens
  Payload ID: 11404
  Gene Symbol: NARF
  Gene Name: nuclear prelamin A recognition factor
  ENSP ID: ENSP00000463087
MKCEHCTRKECSKKTKTDDQENVSADAPSPAQENGEKGEFHKLADAKIFLSDCLACDSCMTAEEGVQLSQQNAKDFFRVLNLNKKCDTSKHKVLVVSVCPQSLPYFAAKFNLSVTDASRRLCGFLKSLGMLPFPSSLQACRFP

SEQ ID NO: 58250 - protein, 86 aa, Homo sapiens
  Payload ID: 11404
  Gene Symbol: NARF
  Gene Name: nuclear prelamin A recognition factor
  ENSP ID: ENSP00000463347
MTAEEGVQLSQQNAKDFFRVLNLNKKCDTSKHKVLVVSVCPQSLPYFAAKFNLSVTDASRRLCGFLKSLGVHYVFDTTIAADFSIL

SEQ ID NO: 58251 - protein, 99 aa, Homo sapiens
  Payload ID: 11404
  Gene Symbol: NARF
  Gene Name: nuclear prelamin A recognition factor
  ENSP ID: ENSP00000463697
MKCEHCTRKECSKKTKTDDQENVSADAPSPAQENGEASRFFSFVSAQSKLLLLFFSLGAHSTVHITALKKTEVRGHGGSRLESQHFGRPRWTDHLRSGV

SEQ ID NO: 58252 - protein, 158 aa, Homo sapiens
  Payload ID: 11404
  Gene Symbol: NARF
  Gene Name: nuclear prelamin A recognition factor
  ENSP ID: ENSP00000464124
MTAEEGVQLSQQNAKDFFRVLNLNKKCDTSKHKVLVVSVCPQSLPYFAAKFNLSVTDASRRLCGFLKSLGVHYVFDTTIAADFSILESQKEFVRRYRQHSEEERTLPMLTSACPGWVRYAERVLGRPITAHLCTAKSPQQVMGSLVKDYFARQQNLSP

SEQ ID NO: 58253 - protein, 87 aa, Homo sapiens
  Payload ID: 11404
  Gene Symbol: NARF
  Gene Name: nuclear prelamin A recognition factor
  ENSP ID: ENSP00000464644
MTAEEGVQLSQQNAKDFFRVLNLNKKCDTSKHKVLVVSVCPQSLPYFAAKFNLSVTDASRRLCGFLKSLGVHYVFDTTIAADFSILE

SEQ ID NO: 58254 - protein, 99 aa, Homo sapiens; identical to SEQ ID NO: 58251
  Payload ID: 11404
  Gene Symbol: NARF
  Gene Name: nuclear prelamin A recognition factor
  ENSP ID: ENSP00000467119

SEQ ID NO: 58255 - protein, 476 aa, Homo sapiens
  Payload ID: 11405
  Gene Symbol: NARFL
  Gene Name: nuclear prelamin A recognition factor-like
  Uniprot ID: Q9H6Q4
  ENSP ID: ENSP00000251588
MASPFSGALQLTDLDDFIGPSQECIKPVKVEKRAGSGVAKIRIEDDGSYFQINQDGGTRRLEKAKVSLNDCLACSGCITSAETVLITQQSHEELKKVLDANKMAAPSQQRLVVVSVSPQSRASLAARFQLNPTDTARKLTSFFKKIGVHFVFDTAFSRHFSLLESQREFVRRFRGQADCRQALPLLASACPGWICYAEKTHGSFILPHISTARSPQQVMGSLVKDFFAQQQHLTPDKIYHVTVMPCYDKKLEASRPDFFNQEHQTRDVDCVLTTGEVFRLLEEEGVSLPDLEPAPLDSLCSGASAEEPTSHRGGGSGGYLEHVFRHAARELFGIHVAEVTYKPLRNKDFQEVTLEKEGQVLLHFAMAYGFRNIQNLVQRLKRGRCPYHYVEVMACPSGCLNGGGQLQAPDRPSRELLQHVERLYGMVRAEAPEDAPGVQELYTHWLQGTDSECAGRLLHTQYHAVEKASTGLGIRW

SEQ ID NO: 58256 - protein, 374 aa, Homo sapiens
  Payload ID: 11405
  Gene Symbol: NARFL
  Gene Name: nuclear prelamin A recognition factor-like
  Uniprot ID: Q9H6Q4
  ENSP ID: ENSP00000444008
MAAPSQQRLVVVSVSPQSRASLAARFQLNPTDTARKLTSFFKKIGVHFVFDTAFSRHFSLLESQREFVRRFRGQADCRQALPLLASACPGWICYAEKTHGSFILPHISTARSPQQVMGSLVKDFFAQQQHLTPDKIYHVTVMPCYDKKLEASRPDFFNQEHQTRDVDCVLTTGEVFRLLEEEGVSLPDLEPAPLDSLCSGASAEEPTSHRGGGSGGYLEHVFRHAARELFGIHVAEVTYKPLRNKDFQEVTLEKEGQVLLHFAMAYGFRNIQNLVQRLKRGRCPYHYVEVMACPSGCLNGGGQLQAPDRPSRELLQHVERLYGMVRAEAPEDAPGVQELYTHWLQGTDSECAGRLLHTQYHAVEKASTGLGIRW

SEQ ID NO: 58257 - protein, 82 aa, Homo sapiens
  Payload ID: 11405
  Gene Symbol: NARFL
  Gene Name: nuclear prelamin A recognition factor-like
  ENSP ID: ENSP00000455514
MASPFSGALQLTDLDDFIGPSQECIKPVKVEKRAGSGVAKIRIEDDGSYFQINQVRHRRLLHHLSCPADPKHFSLLPPVTER

SEQ ID NO: 58258 - protein, 70 aa, Homo sapiens
  Payload ID: 11405
  Gene Symbol: NARFL
  Gene Name: nuclear prelamin A recognition factor-like
  ENSP ID: ENSP00000455543
MASPFSGALQLTDLDDFIGPSQIQAHVLSMGSATLVSVVVTPPVHVKGEGVHQACQSGKKGGKWRGQDSH

SEQ ID NO: 58259 - protein, 188 aa, Homo sapiens
  Payload ID: 11405
  Gene Symbol: NARFL
  Gene Name: nuclear prelamin A recognition factor-like
  ENSP ID: ENSP00000456497
MASPFSGALQLTDLDDFIGPSQECIKPVKVEKRAGSGVAKIRIEDDGSYFQINQDGGTRRLEKAKVSLNDCLACSGCITSAETVLITQQSHEELKKVLDANKGCTSSSTPPSQGTSASWRASESLCGDSEDRPTADRRCPCWPLPAQAGSAMPRRLTAASSSPTSAPPGPRSRSWAPWSRTSSPSSST

SEQ ID NO: 58260 - protein, 186 aa, Homo sapiens
  Payload ID: 11405
  Gene Symbol: NARFL
  Gene Name: nuclear prelamin A recognition factor-like
  ENSP ID: ENSP00000456701
MAAPSQQRLVVVSVSPQSRASLAARFQLNPTDTARKLTSFFKKIGVHFVFDTAFSRHFSLLESQREFVRRFRGQADCRQALPLLASACPGWICYAEKTHGSFILPHISTARSPQQVMGSLVKDFFAQQQHLTPDKIYHVTVMPCYDKKLEASRPDFFNQEHQTRDVDCVLTTGEVFRLLEEEGVSL

SEQ ID NO: 58261 - protein, 110 aa, Homo sapiens
  Payload ID: 11405
  Gene Symbol: NARFL
  Gene Name: nuclear prelamin A recognition factor-like
  ENSP ID: ENSP00000456733
MAAPSQQRLVVVSVSPQSRASLAARFQLNPTDTARKLTSFFKKIGVHFVFDTAFSRHFSLLESQREFVRRFRGQADCRQALPLLASACPGWICYAEKTHGSFILPHISTA

SEQ ID NO: 58262 - protein, 374 aa, Homo sapiens; identical to SEQ ID NO: 58256
  Payload ID: 11405
  Gene Symbol: NARFL
  Gene Name: nuclear prelamin A recognition factor-like
  Uniprot ID: Q9H6Q4
  ENSP ID: ENSP00000457058

SEQ ID NO: 58263 - protein, 66 aa, Homo sapiens
  Payload ID: 11405
  Gene Symbol: NARFL
  Gene Name: nuclear prelamin A recognition factor-like
  ENSP ID: ENSP00000457609
MASPFSGALQLTDLDDFIGPSQECIKPVKVEKRAGSGVAKIRIEDDGSYFQINQSPPSAFSCPTAL

SEQ ID NO: 58264 - protein, 53 aa, Homo sapiens
  Payload ID: 11405
  Gene Symbol: NARFL
  Gene Name: nuclear prelamin A recognition factor-like
  ENSP ID: ENSP00000459523
MAAPSQQRLVVVSVSPQSRASLAARFQLNPTDTARKLTSFFKKIGVHFVFDTA

SEQ ID NO: 58265 - protein, 1427 aa, Homo sapiens
  Payload ID: 11406
  Gene Symbol: NPAT
  Gene Name: nuclear protein, ataxia-telangiectasia locus
  Uniprot ID: Q14207
  ENSP ID: ENSP00000278612
MLLPSDVARLVLGYLQQENLISTCQTFILESSDLKEYAEHCTDEGFIPACLLSLFGKNLTTILNEYVAMKTKETSNNVPAIMSSLWKKLDHTLSQIRSMQSSPRFAGSQRARTRTGIAEIKRQRKLASQTAPASAELLTLPYLSGQFTTPPSTGTQVTRPSGQISDPSRSYFVVVNHSQSQDTVTTGEALNVIPGAQEKKAHASLMSPGRRKSESQRKSTTLSGPHSTIRNFQDPNAFAVEKQMVIENAREKILSNKSLQEKLAENINKFLTSDNNIAQVPKQTDNNPTEPETSIDEFLGLPSEIHMSEEAIQDILEQTESDPAFQALFDLFDYGKTKNNKNISQSISSQPMESNPSIVLADETNLAVKGSFETEESDGQSGQPAFCTSYQNDDPLNALKNSNNHDVLRQEDQENFSQISTSIQKKAFKTAVPTEQKCDIDITFESVPNLNDFNQRGNSNAECNPHCAELYTNQMSTETEMAIGIEKNSLSSNVPSESQLQPDQPDIPITSFVSLGCEANNENLILSGKSSQLLSQDTSLTGKPSKKSQFCENSNDTVKLKINFHGSKSSDSSEVHKSKIEINVLEPVMSQLSNCQDNSCLQSEILPVSVESSHLNVSGQVEIHLGDSLSSTKQPSNDSASVELNHTENEAQASKSENSQEPSSSVKEENTIFLSLGGNANCEKVALTPPEGTPVENSHSLPPESVCSSVGDSHPESQNTDDKPSSNNSAEIDASNIVSLKVIISDDPFVSSDTELTSAVSSINGENLPTIILSSPTKSPTKNAELVKCLSSEETVGAVVYAEVGDSASMEQSLLTFKSEDSAVNNTQNEDGIAFSANVTPCVSKDGGYIQLMPATSTAFGNSNNILIATCVTDPTALGTSVSQSNVVVLPGNSAPMTAQPLPPQLQTPPRSNSVFAVNQAVSPNFSQGSAIIIASPVQPVLQGMVGMIPVSVVGQNGNNFSTPPRQVLHMPLTAPVCNRSIPQFPVPPKSQKAQGLRNKPCIGKQVNNLVDSSGHSVGCHAQKTEVSDKSIATDLGKKSEETTVPFPEESIVPAAKPCHRRVLCFDSTTAPVANTQGPNHKMVSQNKERNAVSFPNLDSPNVSSTLKPPSNNAIKREKEKPPLPKILSKSESAISRHTTIRETQSEKKVSPTEIVLESFHKATANKENELCSDVERQKNPENSKLSIGQQNGGLRSEKSIASLQEMTKKQGTSSNNKNVLSVGTAVKDLKQEQTKSASSLITTEMLQDIQRHSSVSRLADSSDLPVPRTPGSGAGEKHKEEPIDIIKAPSSRRFSEDSSTSKVMVPPVTPDLPACSPASETGSENSVNMAAHTLMILSRAAISRTTSATPLKDNTQQFRASSRSTTKKRKIEELDERERNSRPSSKNLTNSSIPMKKKKIKKKKLPSSFPAGMDVDKFLLSLHYDE

SEQ ID NO: 58266 - protein, 60 aa, Homo sapiens
  Payload ID: 11406
  Gene Symbol: NPAT
  Gene Name: nuclear protein, ataxia-telangiectasia locus
  ENSP ID: ENSP00000433497
MLLPSDVARLVLDRVSPCCPGSSAVVQSWFAAASTSWAQAILPPPPPEQLELQVHTTKPS

SEQ ID NO: 58267 - protein, 299 aa, Homo sapiens
  Payload ID: 11406
  Gene Symbol: NPAT
  Gene Name: nuclear protein, ataxia-telangiectasia locus
  ENSP ID: ENSP00000436510
  MOD_RES (1)..(1): Any amino acid
XLVDSSGHSVGCHAQNFVLFCFRTEVSDKSIATDLGKKSEETTVPFPEESIVPAAKPCHRRVLCFDSTTAPVANTQGPNHKMVSQNKERNAVSFPNLDSPNVSSTLKPPSNNAIKREKEKPPLPKILSKSESAISRHTTIRETQSEKKVSPTEIVLESFHKATANKENELCSDVERQKNPENSKLSIGQQNGGLRSEKSIASLQEMTKKQGTSSNNKNVLSVGTAVKDLKQEQTKSASSLITTEMLQDIQRHSSVSRLADSSDLPVPRTPGSGAGEKHKEEPIDIIKAPSSRRFSEDSS

SEQ ID NO: 58268 - protein, 82 aa, Homo sapiens
  Payload ID: 11407
  Gene Symbol: NUPR1
  Gene Name: nuclear protein, transcriptional regulator, 1
  Uniprot ID: O60356
  ENSP ID: ENSP00000315559
MATFPPATSAPQQPPGPEDEDSSLDESDLYSLAHSYLGGGGRKGRTKREAAANTNRPSPGGHERKLVTKLQNSERKKRGARR

SEQ ID NO: 58269 - protein, 100 aa, Homo sapiens
  Payload ID: 11407
  Gene Symbol: NUPR1
  Gene Name: nuclear protein, transcriptional regulator, 1
  Uniprot ID: O60356
  ENSP ID: ENSP00000379003
MATFPPATSAPQQPPGPEDEDSSLDESDLYSLAHSYLGPLIMPMPTSPLTPALVTGGGGRKGRTKREAAANTNRPSPGGHERKLVTKLQNSERKKRGARR

SEQ ID NO: 58270 - protein, 43 aa, Homo sapiens
  Payload ID: 11407
  Gene Symbol: NUPR1
  Gene Name: nuclear protein, transcriptional regulator, 1
  ENSP ID: ENSP00000456597
MATFPPATSAPQQPPGPEDEDSSLDESDLYSLAHSYLGWSAVV

SEQ ID NO: 58271 - protein, 97 aa, Homo sapiens
  Payload ID: 11408
  Gene Symbol: NUPR1L
  Gene Name: nuclear protein, transcriptional regulator, 1-like
  Uniprot ID: A6NF83
  ENSP ID: ENSP00000455442
MEAPAERALPRLQALARPPPPISYEEELYDCLDYYYLRDFPACGAGRSKGRTRREQALRTNWPAPGGHERKVAQKLLNGQRKRRQRQLHPKMRTRLT

SEQ ID NO: 58272 - protein, 139 aa, Homo sapiens
  Payload ID: 11409
  Gene Symbol: NR2C2AP
  Gene Name: nuclear receptor 2C2-associated protein
  Uniprot ID: Q86WQ0
  ENSP ID: ENSP00000332823
MTHSLVCPETVSRVSSVLNRNTRQFGKKHLFDQDEETCWNSDQGPSQWVTLEFPQLIRVSQLQIQFQGGFSSRRGCLEGSQGTQALHKIVDFYPEDNNSLQTFPIPAAEVDRLKVTFEDATDFFGRVVIYHLRVLGEKV

SEQ ID NO: 58273 - protein, 167 aa, Homo sapiens
  Payload ID: 11409
  Gene Symbol: NR2C2AP
  Gene Name: nuclear receptor 2C2-associated protein
  Uniprot ID: Q86WQ0
  ENSP ID: ENSP00000402756
MTHSLVCPETVSRVSSVLNRNTRQFGKKHLFDQDEETCWNSDQGPSQWVTLEFPQLIRVSQLQIQFQGGFSSRRGCLEGSQGTQALHKIVDFYPEDNNSLQTFPIPAAEVDRLKVTFEDATDFFGRVVIYHLRVLGEKGTNRDPCRDLHYRAKLGEPRTHPRNLNFP

SEQ ID NO: 58274 - protein, 54 aa, Homo sapiens
  Payload ID: 11409
  Gene Symbol: NR2C2AP
  Gene Name: nuclear receptor 2C2-associated protein
  ENSP ID: ENSP00000438092
MTHSLVCPETVSRVSSVLNRNTRQFGKKHLFDQDEETCWNSDQVHRALRLSTRL

SEQ ID NO: 58275 - protein, 127 aa, Homo sapiens
  Payload ID: 11409
  Gene Symbol: NR2C2AP
  Gene Name: nuclear receptor 2C2-associated protein
  ENSP ID: ENSP00000475559
MTHSLVCPETVSRVSSVLNRNTRQFGKKHLFDQDEETCWNSDQGPSQWVTLEFPQLIRVSQLQIQFQGGFSSRRGCLEGSQGTQALHKIVDFYPEDNNSLQISCPCFWGGWSVPLEALDSPKPEWEP

SEQ ID NO: 58276 - protein, 29 aa, Homo sapiens
  Payload ID: 11409
  Gene Symbol: NR2C2AP
  Gene Name: nuclear receptor 2C2-associated protein
  ENSP ID: ENSP00000476087
GKKHLFDQDEETCWNSDQVHRALRLSTRL

SEQ ID NO: 58277 - protein, 287 aa, Homo sapiens
  Payload ID: 11410
  Gene Symbol: NRBF2
  Gene Name: nuclear receptor binding factor 2
  Uniprot ID: Q96F24
  ENSP ID: ENSP00000277746
MEVMEGPLNLAHQQSRRADRLLAAGKYEEAISCHKKAAAYLSEAMKLTQSEQAHLSLELQRDSHMKQLLLIQERWKRAQREERLKAQQNTDKDAAAHLQTSHKPSAEDAEGQSPLSQKYSPSTEKCLPEIQGIFDRDPDTLLYLLQQKSEPAEPCIGSKAPKDDKTIIEEQATKIADLKRHVEFLVAENERLRKENKQLKAEKARLLKGPIEKELDVDADFVETSELWSLPPHAETATASSTWQKFAANTGKAKDIPIPNLPPLDFPSPELPLMELSEDILKGFMNN

SEQ ID NO: 58278 - protein, 277 aa, Homo sapiens
  Payload ID: 11410
  Gene Symbol: NRBF2
  Gene Name: nuclear receptor binding factor 2
  Uniprot ID: Q96F24
  ENSP ID: ENSP00000397502
MFPGATTPLPKAAAYPGVYGSNGRTPQPAYLSEAMKLTQSEQAHLSLELQRDSHMKQLLLIQERWKRAQREERLKAQQNTDKDAAAHLQTSHKPSAEDAEGQSPLSQKYSPSTEKCLPEIQGIFDRDPDTLLYLLQQKSEPAEPCIGSKAPKDDKTIIEEQATKIADLKRHVEFLVAENERLRKENKQLKAEKARLLKGPIEKELDVDADFVETSELWSLPPHAETATASSTWQKFAANTGKAKDIPIPNLPPLDFPSPELPLMELSEDILKGFMNN

SEQ ID NO: 58279 - protein, 273 aa, Homo sapiens
  Payload ID: 11410
  Gene Symbol: NRBF2
  Gene Name: nuclear receptor binding factor 2
  ENSP ID: ENSP00000478749
MEVMEGPLNLAHQQSRRADRLLAAGKYEEAISCHKKAAAYLSEAMKLTQSEQAHLSLELQRDSHMKQLLLIQERWKRAQREERLKAQQNTDKDAAAHLQTSHKPSAEDAEGQSPLSQKYSPSTEKCLPEIQGIFDRDPDTLLYLLQQKSEPAEPCIGSKAPKDDKTIIEEQATKIADLKRHVEFLVAENERLRKENKQLKAEKARLLKGPIEKELDVDADFVETSELWSLPPRNCYSLLNLAEVRSKYWERTFQSPIFLPWIFHLQNFLLWSS

SEQ ID NO: 58280 - protein, 535 aa, Homo sapiens
  Payload ID: 11411
  Gene Symbol: NRBP1
  Gene Name: nuclear receptor binding protein 1
  Uniprot ID: Q9UHY1
  ENSP ID: ENSP00000233557
MSEGESQTVLSSGSDPKVESSSSAPGLTSVSPPVTSTTSAASPEEEEESEDESEILEESPCGRWQKRREEVNQRNVPGIDSAYLAMDTEEGVEVVWNEVQFSERKNYKLQEEKVRAVFDNLIQLEHLNIVKFHKYWADIKENKARVIFITEYMSSGSLKQFLKKTKKNHKTMNEKAWKRWCTQILSALSYLHSCDPPIIHGNLTCDTIFIQHNGLIKIGSVAPDTINNHVKTCREEQKNLHFFAPEYGEVTNVTTAVDIYSFGMCALEMAVLEIQGNGESSYVPQEAISSAIQLLEDPLQREFIQKCLQSEPARRPTARELLFHPALFEVPSLKLLAAHCIVGHQHMIPENALEEITKNMDTSAVLAEIPAGPGREPVQTLYSQSPALELDKFLEDVRNGIYPLTAFGLPRPQQPQQEEVTSPVVPPSVKTPTPEPAEVETRKVVLMQCNIESVEEGVKHHLTLLLKLEDKLNRHLSCDLMPNENIPELAAELVQLGFISEADQSRLTSLLEETLNKFNFARNSTLNSAAVTVSS

SEQ ID NO: 58281 - protein, 535 aa, Homo sapiens; identical to SEQ ID NO: 58280
  Payload ID: 11411
  Gene Symbol: NRBP1
  Gene Name: nuclear receptor binding protein 1
  Uniprot ID: Q9UHY1
  ENSP ID: ENSP00000369181

SEQ ID NO: 58282 - protein, 543 aa, Homo sapiens
  Payload ID: 11411
  Gene Symbol: NRBP1
  Gene Name: nuclear receptor binding protein 1
  ENSP ID: ENSP00000369192
MSEGESQTVLSSGSDPKVESSSSAPGLTSVSPPVTSTTSAASPEEEEESEDESEILEESPCGRWQKRREEVNQRNVPGIDSAYLAMDTEEGVEVVWNEVQFSERKNYKLQEEKVRAVFDNLIQLEHLNIVKFHKYWADIKENKARVIFITEYMSSGSLKQFLKKTKKNHKTMNEKAWKRWCTQILSALSYLHSCDPPIIHGNLTCDTIFIQHNGLIKIGSVFHRIFANVAPDTINNHVKTCREEQKNLHFFAPEYGEVTNVTTAVDIYSFGMCALEMAVLEIQGNGESSYVPQEAISSAIQLLEDPLQREFIQKCLQSEPARRPTARELLFHPALFEVPSLKLLAAHCIVGHQHMIPENALEEITKNMDTSAVLAEIPAGPGREPVQTLYSQSPALELDKFLEDVRNGIYPLTAFGLPRPQQPQQEEVTSPVVPPSVKTPTPEPAEVETRKVVLMQCNIESVEEGVKHHLTLLLKLEDKLNRHLSCDLMPNENIPELAAELVQLGFISEADQSRLTSLLEETLNKFNFARNSTLNSAAVTVSS

SEQ ID NO: 58283 - protein, 155 aa, Homo sapiens
  Payload ID: 11411
  Gene Symbol: NRBP1
  Gene Name: nuclear receptor binding protein 1
  ENSP ID: ENSP00000403916
MSEGESQTVLSSGSDPKVESSSSAPGLTSVSPPVTSTTSAASPEEEEESEDESEILEESPCGRWQKRREEVNQRNVPGIDSAYLAMDTEEGVEVVWNEVQFSERKNYKLQEEKVRAVFDNLIQLEHLNIVKFHKYWADIKENKARVIFITEYMSS

SEQ ID NO: 58284 - protein, 81 aa, Homo sapiens
  Payload ID: 11411
  Gene Symbol: NRBP1
  Gene Name: nuclear receptor binding protein 1
  ENSP ID: ENSP00000415406
MSEGESQTVLSSGSDPKVESSSSAPGLTSVSPPVTSTTSAASPEEEEESEDESEILEESPCGRWQKRREEVNQRNVPGIDS

SEQ ID NO: 58285 - protein, 501 aa, Homo sapiens
  Payload ID: 11412
  Gene Symbol: NRBP2
  Gene Name: nuclear receptor binding protein 2
  Uniprot ID: Q9NSY0
  ENSP ID: ENSP00000414055
MAAPEPAPRRAREREREREDESEDESDILEESPCGRWQKRREQVNQGNMPGLQSTFLAMDTEEGVEVVWNELHFGDRKAFAAHEEKIQTVFEQLVLVDHPNIVKLHKYWLDTSEACARVIFITEYVSSGSLKQFLKKTKKNHKAMNARAWKRWCTQILSALSFLHACSPPIIHGNLTSDTIFIQHNGLIKIGSVWHRIFSNALPDDLRSPIRAEREELRNLHFFPPEYGEVADGTAVDIFSFGMCALEMAVLEIQTNGDTRVTEEAIARARHSLSDPNMREFILCCLARDPARRPSAHSLLFHRVLFEVHSLKLLAAHCFIQHQYLMPENVVEEKTKAMDLHAVLAELPRPRRPPLQWRYSEVSFMELDKFLEDVRNGIYPLMNFAATRPLGLPRVLAPPPEEVQKAKTPTPEPFDSETRKVIQMQCNLERSEDKARWHLTLLLVLEDRLHRQLTYDLLPTDSAQDLASELVHYGFLHEDDRMKLAAFLESTFLKYRGTQA

SEQ ID NO: 58286 - protein, 168 aa, Homo sapiens
  Payload ID: 11412
  Gene Symbol: NRBP2
  Gene Name: nuclear receptor binding protein 2
  ENSP ID: ENSP00000431280
  MOD_RES (1)..(1): Any amino acid
XLGLPRVLAPPPEEVQKAKTPTPEPFDSETRKVIQMQCNLERSEDKARWHLTLLLVLEDRLHRQLTYDLLPRRPDEAGRLPGEHLPQVPWDPGLTRSPSPRGPCRGAAWAGHVGETPAPWGCPPPCAWEHKGPGSEGTPRLLRVGLTLPWAPRGWGVGVGEPLGLPGP

SEQ ID NO: 58287 - protein, 232 aa, Homo sapiens
  Payload ID: 11412
  Gene Symbol: NRBP2
  Gene Name: nuclear receptor binding protein 2
  ENSP ID: ENSP00000432374
MPGLQSTFLAMDTEEGVEVVWNELHFGDRKAFAAHEEKIQTVFEQLVLVDHPNIVKLHKYWLDTSEACARVIFITEYVSSGSLKQFLKKTKKNHKAMNARAWKRWCTQILSALSFLHACSPPIIHGNLTSDTIFIQHNGLIKIGSVWHRIFSNALPDDLRSPIRAEREELRNLHFFPPEYGEVADGTAVDIFSFGMCALEMAVLEIQTNGDTRVTEEAIARARHSLSDPNMR

SEQ ID NO: 58288 - protein, 2427 aa, Homo sapiens
  Payload ID: 11413
  Gene Symbol: NSD1
  Gene Name: nuclear receptor binding SET domain protein 1
  Uniprot ID: Q96L73
  ENSP ID: ENSP00000343209
MPLKTRTALSDDPDSSTSTLGNMLELPGTSSSSTSQELPFCQPKKKSTPLKYEVGDLIWAKFKRRPWWPCRICSDPLINTHSKMKVSNRRPYRQYYVEAFGDPSERAWVAGKAIVMFEGRHQFEELPVLRRRGKQKEKGYRHKVPQKILSKWEASVGLAEQYDVPKGSKNRKCIPGSIKLDSEEDMPFEDCTNDPESEHDLLLNGCLKSLAFDSEHSADEKEKPCAKSRARKSSDNPKRTSVKKGHIQFEAHKDERRGKIPENLGLNFISGDISDTQASNELSRIANSLTGSNTAPGSFLFSSCGKNTAKKEFETSNGDSLLGLPEGALISKCSREKNKPQRSLVCGSKVKLCYIGAGDEEKRSDSISICTTSDDGSSDLDPIEHSSESDNSVLEIPDAFDRTENMLSMQKNEKIKYSRFAATNTRVKAKQKPLISNSHTDHLMGCTKSAEPGTETSQVNLSDLKASTLVHKPQSDFTNDALSPKFNLSSSISSENSLIKGGAANQALLHSKSKQPKFRSIKCKHKENPVMAEPPVINEECSLKCCSSDTKGSPLASISKSGKVDGLKLLNNMHEKTRDSSDIETAVVKHVLSELKELSYRSLGEDVSDSGTSKPSKPLLFSSASSQNHIPIEPDYKFSTLLMMLKDMHDSKTKEQRLMTAQNLVSYRSPGRGDCSTNSPVGVSKVLVSGGSTHNSEKKGDGTQNSANPSPSGGDSALSGELSASLPGLLSDKRDLPASGKSRSDCVTRRNCGRSKPSSKLRDAFSAQMVKNTVNRKALKTERKRKLNQLPSVTLDAVLQGDRERGGSLRGGAEDPSKEDPLQIMGHLTSEDGDHFSDVHFDSKVKQSDPGKISEKGLSFENGKGPELDSVMNSENDELNGVNQVVPKKRWQRLNQRRTKPRKRMNRFKEKENSECAFRVLLPSDPVQEGRDEFPEHRTPSASILEEPLTEQNHADCLDSAGPRLNVCDKSSASIGDMEKEPGIPSLTPQAELPEPAVRSEKKRLRKPSKWLLEYTEEYDQIFAPKKKQKKVQEQVHKVSSRCEEESLLARGRSSAQNKQVDENSLISTKEEPPVLEREAPFLEGPLAQSELGGGHAELPQLTLSVPVAPEVSPRPALESEELLVKTPGNYESKRQRKPTKKLLESNDLDPGFMPKKGDLGLSKKCYEAGHLENGITESCATSYSKDFGGGTTKIFDKPRKRKRQRHAAAKMQCKKVKNDDSSKEIPGSEGELMPHRTATSPKETVEEGVEHDPGMPASKKMQGERGGGAALKENVCQNCEKLGELLLCEAQCCGAFHLECLGLTEMPRGKFICNECRTGIHTCFVCKQSGEDVKRCLLPLCGKFYHEECVQKYPPTVMQNKGFRCSLHICITCHAANPANVSASKGRLMRCVRCPVAYHANDFCLAAGSKILASNSIICPNHFTPRRGCRNHEHVNVSWCFVCSEGGSLLCCDSCPAAFHRECLNIDIPEGNWYCNDCKAGKKPHYREIVWVKVGRYRWWPAEICHPRAVPSNIDKMRHDVGEFPVLFFGSNDYLWTHQARVFPYMEGDVSSKDKMGKGVDGTYKKALQEAAARFEELKAQKELRQLQEDRKNDKKPPPYKHIKVNRPIGRVQIFTADLSEIPRCNCKATDENPCGIDSECINRMLLYECHPTVCPAGGRCQNQCFSKRQYPEVEIFRTLQRGWGLRTKTDIKKGEFVNEYVGELIDEEECRARIRYAQEHDITNFYMLTLDKDRIIDAGPKGNYARFMNHCCQPNCETQKWSVNGDTRVGLFALSDIKAGTELTFNYNLECLGNGKTVCKCGAPNCSGFLGVRPKNQPIATEEKSKKFKKKQQGKRRTQGEITKEREDECFSCGDAGQLVSCKKPGCPKVYHADCLNLTKRPAGKWECPWHQCDICGKEAASFCEMCPSSFCKQHREGMLFISKLDGRLSCTEHDPCGPNPLEPGEIREYVPPPVPLPPGPSTHLAEQSTGMAAQAPKMSDKPPADTNQMLSLSKKALAGTCQRPLLPERPLERTDSRPQPLDKVRDLAGSGTKSQSLVSSQRPLDRPPAVAGPRPQLSDKPSPVTSPSSSPSVRSQPLERPLGTADPRLDKSIGAASPRPQSLEKTSVPTGLRLPPPDRLLITSSPKPQTSDRPTDKPHASLSQRLPPPEKVLSAVVQTLVAKEKALRPVDQNTQSKNRAALVMDLIDLTPRQKERAASPHQVTPQADEKMPVLESSSWPASKGLGHMPRAVEKGCVSDPLQTSGKAAAPSEDPWQAVKSLTQARLLSQPPAKAFLYEPTTQASGRASAGAEQTPGPLSQSPGLVKQAKQMVGGQQLPALAAKSGQSFRSLGKAPASLPTEEKKLVTTEQSPWALGKASSRAGLWPIVAGQTLAQSCWSAGSTQTLAQTCWSLGRGQDPKPEQNTLPALNQAPSSHKCAESEQK

SEQ ID NO: 58289 - protein, 2427 aa, Homo sapiens; identical to SEQ ID NO: 58288
  Payload ID: 11413
  Gene Symbol: NSD1
  Gene Name: nuclear receptor binding SET domain protein 1
  Uniprot ID: Q96L73
  ENSP ID: ENSP00000346111

SEQ ID NO: 58290 - protein, 64 aa, Homo sapiens
  Payload ID: 11413
  Gene Symbol: NSD1
  Gene Name: nuclear receptor binding SET domain protein 1
  ENSP ID: ENSP00000364499
DKSSASIGDMEKEPGIPSLTPQAELPEPGGVLLCHPGWSAVARSRLTATSASQVQVILLSHPPE

SEQ ID NO: 58291 - protein, 2696 aa, Homo sapiens
  Payload ID: 11413
  Gene Symbol: NSD1
  Gene Name: nuclear receptor binding SET domain protein 1
  Uniprot ID: Q96L73
  ENSP ID: ENSP00000395929
MDQTCELPRRNCLLPFSNPVNLDAPEDKDSPFGNGQSNFSEPLNGCTMQLSTVSGTSQNAYGQDSPSCYIPLRRLQDLASMINVEYLNGSADGSESFQDPEKSDSRAQTPIVCTSLSPGGPTALAMKQEPSCNNSPELQVKVTKTIKNGFLHFENFTCVDDADVDSEMDPEQPVTEDESIEEIFEETQTNATCNYETKSENGVKVAMGSEQDSTPESRHGAVKSPFLPLAPQTETQKNKQRNEVDGSNEKAALLPAPFSLGDTNITIEEQLNSINLSFQDDPDSSTSTLGNMLELPGTSSSSTSQELPFCQPKKKSTPLKYEVGDLIWAKFKRRPWWPCRICSDPLINTHSKMKVSNRRPYRQYYVEAFGDPSERAWVAGKAIVMFEGRHQFEELPVLRRRGKQKEKGYRHKVPQKILSKWEASVGLAEQYDVPKGSKNRKCIPGSIKLDSEEDMPFEDCTNDPESEHDLLLNGCLKSLAFDSEHSADEKEKPCAKSRARKSSDNPKRTSVKKGHIQFEAHKDERRGKIPENLGLNFISGDISDTQASNELSRIANSLTGSNTAPGSFLFSSCGKNTAKKEFETSNGDSLLGLPEGALISKCSREKNKPQRSLVCGSKVKLCYIGAGDEEKRSDSISICTTSDDGSSDLDPIEHSSESDNSVLEIPDAFDRTENMLSMQKNEKIKYSRFAATNTRVKAKQKPLISNSHTDHLMGCTKSAEPGTETSQVNLSDLKASTLVHKPQSDFTNDALSPKFNLSSSISSENSLIKGGAANQALLHSKSKQPKFRSIKCKHKENPVMAEPPVINEECSLKCCSSDTKGSPLASISKSGKVDGLKLLNNMHEKTRDSSDIETAVVKHVLSELKELSYRSLGEDVSDSGTSKPSKPLLFSSASSQNHIPIEPDYKFSTLLMMLKDMHDSKTKEQRLMTAQNLVSYRSPGRGDCSTNSPVGVSKVLVSGGSTHNSEKKGDGTQNSANPSPSGGDSALSGELSASLPGLLSDKRDLPASGKSRSDCVTRRNCGRSKPSSKLRDAFSAQMVKNTVNRKALKTERKRKLNQLPSVTLDAVLQGDRERGGSLRGGAEDPSKEDPLQIMGHLTSEDGDHFSDVHFDSKVKQSDPGKISEKGLSFENGKGPELDSVMNSENDELNGVNQVVPKKRWQRLNQRRTKPRKRMNRFKEKENSECAFRVLLPSDPVQEGRDEFPEHRTPSASILEEPLTEQNHADCLDSAGPRLNVCDKSSASIGDMEKEPGIPSLTPQAELPEPAVRSEKKRLRKPSKWLLEYTEEYDQIFAPKKKQKKVQEQVHKVSSRCEEESLLARGRSSAQNKQVDENSLISTKEEPPVLEREAPFLEGPLAQSELGGGHAELPQLTLSVPVAPEVSPRPALESEELLVKTPGNYESKRQRKPTKKLLESNDLDPGFMPKKGDLGLSKKCYEAGHLENGITESCATSYSKDFGGGTTKIFDKPRKRKRQRHAAAKMQCKKVKNDDSSKEIPGSEGELMPHRTATSPKETVEEGVEHDPGMPASKKMQGERGGGAALKENVCQNCEKLGELLLCEAQCCGAFHLECLGLTEMPRGKFICNECRTGIHTCFVCKQSGEDVKRCLLPLCGKFYHEECVQKYPPTVMQNKGFRCSLHICITCHAANPANVSASKGRLMRCVRCPVAYHANDFCLAAGSKILASNSIICPNHFTPRRGCRNHEHVNVSWCFVCSEGGSLLCCDSCPAAFHRECLNIDIPEGNWYCNDCKAGKKPHYREIVWVKVGRYRWWPAEICHPRAVPSNIDKMRHDVGEFPVLFFGSNDYLWTHQARVFPYMEGDVSSKDKMGKGVDGTYKKALQEAAARFEELKAQKELRQLQEDRKNDKKPPPYKHIKVNRPIGRVQIFTADLSEIPRCNCKATDENPCGIDSECINRMLLYECHPTVCPAGGRCQNQCFSKRQYPEVEIFRTLQRGWGLRTKTDIKKGEFVNEYVGELIDEEECRARIRYAQEHDITNFYMLTLDKDRIIDAGPKGNYARFMNHCCQPNCETQKWSVNGDTRVGLFALSDIKAGTELTFNYNLECLGNGKTVCKCGAPNCSGFLGVRPKNQPIATEEKSKKFKKKQQGKRRTQGEITKEREDECFSCGDAGQLVSCKKPGCPKVYHADCLNLTKRPAGKWECPWHQCDICGKEAASFCEMCPSSFCKQHREGMLFISKLDGRLSCTEHDPCGPNPLEPGEIREYVPPPVPLPPGPSTHLAEQSTGMAAQAPKMSDKPPADTNQMLSLSKKALAGTCQRPLLPERPLERTDSRPQPLDKVRDLAGSGTKSQSLVSSQRPLDRPPAVAGPRPQLSDKPSPVTSPSSSPSVRSQPLERPLGTADPRLDKSIGAASPRPQSLEKTSVPTGLRLPPPDRLLITSSPKPQTSDRPTDKPHASLSQRLPPPEKVLSAVVQTLVAKEKALRPVDQNTQSKNRAALVMDLIDLTPRQKERAASPHQVTPQADEKMPVLESSSWPASKGLGHMPRAVEKGCVSDPLQTSGKAAAPSEDPWQAVKSLTQARLLSQPPAKAFLYEPTTQASGRASAGAEQTPGPLSQSPGLVKQAKQMVGGQQLPALAAKSGQSFRSLGKAPASLPTEEKKLVTTEQSPWALGKASSRAGLWPIVAGQTLAQSCWSAGSTQTLAQTCWSLGRGQDPKPEQNTLPALNQAPSSHKCAESEQK

SEQ ID NO: 58292 - protein, 9 aa, Homo sapiens
  Payload ID: 11413
  Gene Symbol: NSD1
  Gene Name: nuclear receptor binding SET domain protein 1
  ENSP ID: ENSP00000422996
MRHDVGEFP

SEQ ID NO: 58293 - protein, 52 aa, Homo sapiens
  Payload ID: 11413
  Gene Symbol: NSD1
  Gene Name: nuclear receptor binding SET domain protein 1
  ENSP ID: ENSP00000423048
MRHDVGEFPVLFFGSNDYLWTHQARVFPYMEGDVSSKDKMGKGVDGTYKKAL

SEQ ID NO: 58294 - protein, 155 aa, Homo sapiens
  Payload ID: 11413
  Gene Symbol: NSD1
  Gene Name: nuclear receptor binding SET domain protein 1
  ENSP ID: ENSP00000423372
MPLKTRTALSDDPDSSTSTLGNMLELPGTSSSSTSQELPFCQPKKKSTPLKYEVGDLIWAKFKRRPWWPCRICSDPLINTHSKMKVSNRRPYRQYYVEAFGDPSERAWVAGKAIVMFEGRHQFEELPVLRRRGKQKEKGYRHKVPQKILSKWEAS

SEQ ID NO: 58295 - protein, 124 aa, Homo sapiens
  Payload ID: 11413
  Gene Symbol: NSD1
  Gene Name: nuclear receptor binding SET domain protein 1
  ENSP ID: ENSP00000423982
MPLKTRTALSDDPDSSTSTLGNMLELPGTSSSSTSQELPFCQPKKKSTPLKYEVGDLIWAKFKRRPWWPCRICSDPLINTHSKMKVSNRRPYRQYYVEAFGDPSERAWVAGKAIVMFEGRHQFE

SEQ ID NO: 58296 - protein, 94 aa, Homo sapiens
  Payload ID: 11413
  Gene Symbol: NSD1
  Gene Name: nuclear receptor binding SET domain protein 1
  ENSP ID: ENSP00000424024
MRHDVGEFPVLFFGSNDYLWTHQARVFPYMEGDVSSKDKMGKGVDGTYKKALQEAAARFEELKAQKELRQLQEDRKNDKKPPPYKHIKVNRPIG

SEQ ID NO: 58297 - protein, 5 aa, Homo sapiens
  Payload ID: 11413
  Gene Symbol: NSD1
  Gene Name: nuclear receptor binding SET domain protein 1
  ENSP ID: ENSP00000424096
MRHDV

SEQ ID NO: 58298 - protein, 34 aa, Homo sapiens
  Payload ID: 11413
  Gene Symbol: NSD1
  Gene Name: nuclear receptor binding SET domain protein 1
  ENSP ID: ENSP00000425120
MRHDVGEFPVLFFGSNDYLWTHQARVFPYMEGDV

SEQ ID NO: 58299 - protein, 67 aa, Homo sapiens
  Payload ID: 11413
  Gene Symbol: NSD1
  Gene Name: nuclear receptor binding SET domain protein 1
  ENSP ID: ENSP00000426428
MPLKTRTALSDDPDSSTSTLGNMLELPGTSSSSTSQELPFRLALSCCPGWRRDSWAHSILLHQLELQ

SEQ ID NO: 58300 - protein, 1399 aa, Homo sapiens
  Payload ID: 11414
  Gene Symbol: NCOA1
  Gene Name: nuclear receptor coactivator 1
  Uniprot ID: Q15788
  ENSP ID: ENSP00000288599
MSGLGDSSSDPANPDSHKRKGSPCDTLASSTEKRRREQENKYLEELAELLSANISDIDSLSVKPDKCKILKKTVDQIQLMKRMEQEKSTTDDDVQKSDISSSSQGVIEKESLGPLLLEALDGFFFVVNCEGRIVFVSENVTSYLGYNQEELMNTSVYSILHVGDHAEFVKNLLPKSLVNGVPWPQEATRRNSHTFNCRMLIHPPDEPGTENQEACQRYEVMQCFTVSQPKSIQEDGEDFQSCLICIARRLPRPPAITGVESFMTKQDTTGKIISIDTSSLRAAGRTGWEDLVRKCIYAFFQPQGREPSYARQLFQEVMTRGTASSPSYRFILNDGTMLSAHTKCKLCYPQSPDMQPFIMGIHIIDREHSGLSPQDDTNSGMSIPRVNPSVNPSISPAHGVARSSTLPPSNSNMVSTRINRQQSSDLHSSSHSNSSNSQGSFGCSPGSQIVANVALNQGQASSQSSNPSLNLNNSPMEGTGISLAQFMSPRRQVTSGLATRPRMPNNSFPPNISTLSSPVGMTSSACNNNNRSYSNIPVTSLQGMNEGPNNSVGFSASSPVLRQMSSQNSPSRLNIQPAKAESKDNKEIASILNEMIQSDNSSSDGKPLDSGLLHNNDRLSDGDSKYSQTSHKLVQLLTTTAEQQLRHADIDTSCKDVLSCTGTSNSASANSSGGSCPSSHSSLTERHKILHRLLQEGSPSDITTLSVEPDKKDSASTSVSVTGQVQGNSSIKLELDASKKKESKDHQLLRYLLDKDEKDLRSTPNLSLDDVKVKVEKKEQMDPCNTNPTPMTKPTPEEIKLEAQSQFTADLDQFDQLLPTLEKAAQLPGLCETDRMDGAVTSVTIKSEILPASLQSATARPTSRLNRLPELELEAIDNQFGQPGTGDQIPWTNNTVTAINQSKSEDQCISSQLDELLCPPTTVEGRNDEKALLEQLVSFLSGKDETELAELDRALGIDKLVQGGGLDVLSERFPPQQATPPLIMEERPNLYSQPYSSPSPTANLPSPFQGMVRQKPSLGTMPVQVTPPRGAFSPGMGMQPRQTLNRPPAAPNQLRLQLQQRLQGQQQLIHQNRQAILNQFAATAPVGINMRSGMQQQITPQPPLNAQMLAQRQRELYSQQHRQRQLIQQQRAMLMRQQSFGNNLPPSSGLPVQMGNPRLPQGAPQQFPYPPNYGTNPGTPPASTSPFSQLAANPEASLANRNSMVSRGMTGNIGGQFGTGINPQMQQNVFQYPGAGMVPQGEANFAPSLSPGSSMVPMPIPPPQSSLLQQTPPASGYQSPDMKAWQQGAIGNNNVFSQAVQNQPTPAQPGVYNNMSITVSMAGGNTNVQNMNPMMAQMQMSSLQMPGMNTVCPEQINDPALRHTGLYCNQLSSTDLLKTEADGTQDKKTEEFFSVVTTD

SEQ ID NO: 58301 - protein, 1441 aa, Homo sapiens
  Payload ID: 11414
  Gene Symbol: NCOA1
  Gene Name: nuclear receptor coactivator 1
  Uniprot ID: Q15788
  ENSP ID: ENSP00000320940
MSGLGDSSSDPANPDSHKRKGSPCDTLASSTEKRRREQENKYLEELAELLSANISDIDSLSVKPDKCKILKKTVDQIQLMKRMEQEKSTTDDDVQKSDISSSSQGVIEKESLGPLLLEALDGFFFVVNCEGRIVFVSENVTSYLGYNQEELMNTSVYSILHVGDHAEFVKNLLPKSLVNGVPWPQEATRRNSHTFNCRMLIHPPDEPGTENQEACQRYEVMQCFTVSQPKSIQEDGEDFQSCLICIARRLPRPPAITGVESFMTKQDTTGKIISIDTSSLRAAGRTGWEDLVRKCIYAFFQPQGREPSYARQLFQEVMTRGTASSPSYRFILNDGTMLSAHTKCKLCYPQSPDMQPFIMGIHIIDREHSGLSPQDDTNSGMSIPRVNPSVNPSISPAHGVARSSTLPPSNSNMVSTRINRQQSSDLHSSSHSNSSNSQGSFGCSPGSQIVANVALNQGQASSQSSNPSLNLNNSPMEGTGISLAQFMSPRRQVTSGLATRPRMPNNSFPPNISTLSSPVGMTSSACNNNNRSYSNIPVTSLQGMNEGPNNSVGFSASSPVLRQMSSQNSPSRLNIQPAKAESKDNKEIASILNEMIQSDNSSSDGKPLDSGLLHNNDRLSDGDSKYSQTSHKLVQLLTTTAEQQLRHADIDTSCKDVLSCTGTSNSASANSSGGSCPSSHSSLTERHKILHRLLQEGSPSDITTLSVEPDKKDSASTSVSVTGQVQGNSSIKLELDASKKKESKDHQLLRYLLDKDEKDLRSTPNLSLDDVKVKVEKKEQMDPCNTNPTPMTKPTPEEIKLEAQSQFTADLDQFDQLLPTLEKAAQLPGLCETDRMDGAVTSVTIKSEILPASLQSATARPTSRLNRLPELELEAIDNQFGQPGTGDQIPWTNNTVTAINQSKSEDQCISSQLDELLCPPTTVEGRNDEKALLEQLVSFLSGKDETELAELDRALGIDKLVQGGGLDVLSERFPPQQATPPLIMEERPNLYSQPYSSPSPTANLPSPFQGMVRQKPSLGTMPVQVTPPRGAFSPGMGMQPRQTLNRPPAAPNQLRLQLQQRLQGQQQLIHQNRQAILNQFAATAPVGINMRSGMQQQITPQPPLNAQMLAQRQRELYSQQHRQRQLIQQQRAMLMRQQSFGNNLPPSSGLPVQMGNPRLPQGAPQQFPYPPNYGTNPGTPPASTSPFSQLAANPEASLANRNSMVSRGMTGNIGGQFGTGINPQMQQNVFQYPGAGMVPQGEANFAPSLSPGSSMVPMPIPPPQSSLLQQTPPASGYQSPDMKAWQQGAIGNNNVFSQAVQNQPTPAQPGVYNNMSITVSMAGGNTNVQNMNPMMAQMQMSSLQMPGMNTVCPEQINDPALRHTGLYCNQLSSTDLLKTEADGTQQVQQVQVFADVQCTVNLVGGDPYLNQPGPLGTQKPTSGPQTPQAQQKSLLQQLLTE

SEQ ID NO: 58302 - protein, 1440 aa, Homo sapiens
  Payload ID: 11414
  Gene Symbol: NCOA1
  Gene Name: nuclear receptor coactivator 1
  Uniprot ID: Q15788
  ENSP ID: ENSP00000379197
MSGLGDSSSDPANPDSHKRKGSPCDTLASSTEKRRREQENKYLEELAELLSANISDIDSLSVKPDKCKILKKTVDQIQLMKRMEQEKSTTDDDVQKSDISSSSQGVIEKESLGPLLLEALDGFFFVVNCEGRIVFVSENVTSYLGYNQEELMNTSVYSILHVGDHAEFVKNLLPKSLVNGVPWPQEATRRNSHTFNCRMLIHPPDEPGTENQEACQRYEVMQCFTVSQPKSIQEDGEDFQSCLICIARRLPRPPAITGVESFMTKQDTTGKIISIDTSSLRAAGRTGWEDLVRKCIYAFFQPQGREPSYARQLFQEVMTRGTASSPSYRFILNDGTMLSAHTKCKLCYPQSPDMQPFIMGIHIIDREHSGLSPQDDTNSGMSIPRVNPSVNPSISPAHGVARSSTLPPSNSNMVSTRINRQQSSDLHSSSHSNSSNSQGSFGCSPGSQIVANVALNQGQASSQSSNPSLNLNNSPMEGTGISLAQFMSPRRQVTSGLATRPRMPNNSFPPNISTLSSPVGMTSSACNNNNRSYSNIPVTSLQGMNEGPNNSVGFSASSPVLRQMSSQNSPSRLNIQPAKAESKDNKEIASILNEMIQSDNSSSDGKPLDSGLLHNNDRLSDGDSKYSQTSHKLVQLLTTTAEQQLRHADIDTSCKDVLSCTGTSNSASANSSGGSCPSSHSSLTERHKILHRLLQEGSPSDITTLSVEPDKKDSASTSVSVTGQVQGNSSIKLELDASKKKESKDHQLLRYLLDKDEKDLRSTPNLSLDDVKVKVEKKEQMDPCNTNPTPMTKPTPEEIKLEAQSQFTADLDQFDQLLPTLEKAAQLPGLCETDRMDGAVTSVTIKSEILPASLQSATARPTSRLNRLPELELEAIDNQFGQPGTGDQIPWTNNTVTAINQSKSEDQCISSQLDELLCPPTTVEGRNDEKALLEQLVSFLSGKDETELAELDRALGIDKLVQGGGLDVLSERFPPQQATPPLIMEERPNLYSQPYSSPSPTANLPSPFQGMVRQKPSLGTMPVQVTPPRGAFSPGMGMQPRQTLNRPPAAPNQLRLQLQQRLQGQQQLIHQNRQAILNQFAATAPVGINMRSGMQQQITPQPPLNAQMLAQRQRELYSQQHRQRQLIQQQRAMLMRQQSFGNNLPPSSGLPVQMGNPRLPQGAPQQFPYPPNYGTNPGTPPASTSPFSQLAANPEASLANRNSMVSRGMTGNIGGQFGTGINPQMQQNVFQYPGAGMVPQGEANFAPSLSPGSSMVPMPIPPPQSSLLQQTPPASGYQSPDMKAWQQGAIGNNNVFSQAVQNQPTPAQPGVYNNMSITVSMAGGNTNVQNMNPMMAQMQMSSLQMPGMNTVCPEQINDPALRHTGLYCNQLSSTDLLKTEADGTQVQQVQVFADVQCTVNLVGGDPYLNQPGPLGTQKPTSGPQTPQAQQKSLLQQLLTE

SEQ ID NO: 58303 - protein, 1399 aa, Homo sapiens; identical to SEQ ID NO: 58300
  Payload ID: 11414
  Gene Symbol: NCOA1
  Gene Name: nuclear receptor coactivator 1
  Uniprot ID: Q15788
  ENSP ID: ENSP00000385097

SEQ ID NO: 58304 - protein, 1248 aa, Homo sapiens
  Payload ID: 11414
  Gene Symbol: NCOA1
  Gene Name: nuclear receptor coactivator 1
  ENSP ID: ENSP00000385195
MNTSVYSILHVGDHAEFVKNLLPKSLVNGVPWPQEATRRNSHTFNCRMLIHPPDEPGTENQEACQRYEVMQCFTVSQPKSIQEDGEDFQSCLICIARRLPRPPAITGVESFMTKQDTTGKIISIDTSSLRAAGRTGWEDLVRKCIYAFFQPQGREPSYARQLFQEVMTRGTASSPSYRFILNDGTMLSAHTKCKLCYPQSPDMQPFIMGIHIIDREHSGLSPQDDTNSGMSIPRVNPSVNPSISPAHGVARSSTLPPSNSNMVSTRINRQQSSDLHSSSHSNSSNSQGSFGCSPGSQIVANVALNQGQASSQSSNPSLNLNNSPMEGTGISLAQFMSPRRQVTSGLATRPRMPNNSFPPNISTLSSPVGMTSSACNNNNRSYSNIPVTSLQGMNEGPNNSVGFSASSPVLRQMSSQNSPSRLNIQPAKAESKDNKEIASILNEMIQSDNSSSDGKPLDSGLLHNNDRLSDGDSKYSQTSHKLVQLLTTTAEQQLRHADIDTSCKDVLSCTGTSNSASANSSGGSCPSSHSSLTERHKILHRLLQEGSPSDITTLSVEPDKKDSASTSVSVTGQVQGNSSIKLELDASKKKESKDHQLLRYLLDKDEKDLRSTPNLSLDDVKVKVEKKEQMDPCNTNPTPMTKPTPEEIKLEAQSQFTADLDQFDQLLPTLEKAAQLPGLCETDRMDGAVTSVTIKSEILPASLQSATARPTSRLNRLPELELEAIDNQFGQPGTGDQIPWTNNTVTAINQSKSEDQCISSQLDELLCPPTTVEGRNDEKALLEQLVSFLSGKDETELAELDRALGIDKLVQGGGLDVLSERFPPQQATPPLIMEERPNLYSQPYSSPSPTANLPSPFQGMVRQKPSLGTMPVQVTPPRGAFSPGMGMQPRQTLNRPPAAPNQLRLQLQQRLQGQQQLIHQNRQAILNQFAATAPVGINMRSGMQQQITPQPPLNAQMLAQRQRELYSQQHRQRQLIQQQRAMLMRQQSFGNNLPPSSGLPVQMGNPRLPQGAPQQFPYPPNYGTNPGTPPASTSPFSQLAANPEASLANRNSMVSRGMTGNIGGQFGTGINPQMQQNVFQYPGAGMVPQGEANFAPSLSPGSSMVPMPIPPPQSSLLQQTPPASGYQSPDMKAWQQGAIGNNNVFSQAVQNQPTPAQPGVYNNMSITVSMAGGNTNVQNMNPMMAQMQMSSLQMPGMNTVCPEQINDPALRHTGLYCNQLSSTDLLKTEADGTQDKKTEEFFSVVTTD

SEQ ID NO: 58305 - protein, 1441 aa, Homo sapiens; identical to SEQ ID NO: 58301
  Payload ID: 11414
  Gene Symbol: NCOA1
  Gene Name: nuclear receptor coactivator 1
  Uniprot ID: Q15788
  ENSP ID: ENSP00000385216

SEQ ID NO: 58306 - protein, 1464 aa, Homo sapiens
  Payload ID: 11415
  Gene Symbol: NCOA2
  Gene Name: nuclear receptor coactivator 2
  Uniprot ID: Q15596
  ENSP ID: ENSP00000399968
MSGMGENTSDPSRAETRKRKECPDQLGPSPKRNTEKRNREQENKYIEELAELIFANFNDIDNFNFKPDKCAILKETVKQIRQIKEQEKAAAANIDEVQKSDVSSTGQGVIDKDALGPMMLEALDGFFFVVNLEGNVVFVSENVTQYLRYNQEELMNKSVYSILHVGDHTEFVKNLLPKSIVNGGSWSGEPPRRNSHTFNCRMLVKPLPDSEEEGHDNQEAHQKYETMQCFAVSQPKSIKEEGEDLQSCLICVARRVPMKERPVLPSSESFTTRQDLQGKITSLDTSTMRAAMKPGWEDLVRRCIQKFHAQHEGESVSYAKRHHHEVLRQGLAFSQIYRFSLSDGTLVAAQTKSKLIRSQTTNEPQLVISLHMLHREQNVCVMNPDLTGQTMGKPLNPISSNSPAHQALCSGNPGQDMTLSSNINFPINGPKEQMGMPMGRFGGSGGMNHVSGMQATTPQGSNYALKMNSPSQSSPGMNPGQPTSMLSPRHRMSPGVAGSPRIPPSQFSPAGSLHSPVGVCSSTGNSHSYTNSSLNALQALSEGHGVSLGSSLASPDLKMGNLQNSPVNMNPPPLSKMGSLDSKDCFGLYGEPSEGTTGQAESSCHPGEQKETNDPNLPPAVSSERADGQSRLHDSKGQTKLLQLLTTKSDQMEPSPLASSLSDTNKDSTGSLPGSGSTHGTSLKEKHKILHRLLQDSSSPVDLAKLTAEATGKDLSQESSSTAPGSEVTIKQEPVSPKKKENALLRYLLDKDDTKDIGLPEITPKLERLDSKTDPASNTKLIAMKTEKEEMSFEPGDQPGSELDNLEEILDDLQNSQLPQLFPDTRPGAPAGSVDKQAIINDLMQLTAENSPVTPVGAQKTALRISQSTFNNPRPGQLGRLLPNQNLPLDITLQSPTGAGPFPPIRNSSPYSVIPQPGMMGNQGMIGNQGNLGNSSTGMIGNSASRPTMPSGEWAPQSSAVRVTCAATTSAMNRPVQGGMIRNPAASIPMRPSSQPGQRQTLQSQVMNIGPSELEMNMGGPQYSQQQAPPNQTAPWPESILPIDQASFASQNRQPFGSSPDDLLCPHPAAESPSDEGALLDQLYLALRNFDGLEEIDRALGIPELVSQSQAVDPEQFSSQDSNIMLEQKAPVFPQQYASQAQMAQGSYSPMQDPNFHTMGQRPSYATLRMQPRPGLRPTGLVQNQPNQLRLQLQHRLQAQQNRQPLMNQISNVSNVNLTLRPGVPTQAPINAQMLAQRQREILNQHLRQRQMHQQQQVQQRTLMMRGQGLNMTPSMVAPSGMPATMSNPRIPQANAQQFPFPPNYGISQQPDPGFTGATTPQSPLMSPRMAHTQSPMMQQSQANPAYQAPSDINGWAQGNMGGNSMFSQQSPPHFGQQANTSMYSNNMNINVSMATNTGGMSSMNQMTGQISMTSVTSVPTSGLSSMGPEQVNDPALRGGNLFPNQLPGMDMIKQEGDTTRKYC

SEQ ID NO: 58307 - protein, 590 aa, Homo sapiens
  Payload ID: 11415
  Gene Symbol: NCOA2
  Gene Name: nuclear receptor coactivator 2
  ENSP ID: ENSP00000429132
  MOD_RES (1)..(1): Any amino acid
XEEILDDLQNSQLPQLFPDTRPGAPAGSVDKQAIINDLMQLTAENSPVTPVGAQKTALRISQSRMIGNSASRPTMPSGEWAPQSSAVRVTCAATTSAMNRPVQGGMIRNPAASIPMRPSSQPGQRQTLQSQVMNIGPSELEMNMGGPQYSQQQAPPNQTAPWPESILPIDQASFASQNRQPFGSSPDDLLCPHPAAESPSDEGALLDQLYLALRNFDGLEEIDRALGIPELVSQSQAVDPEQFSSQDSNIMLEQKAPVFPQQYASQAQMAQGSYSPMQDPNFHTMGQRPSYATLRMQPRPGLRPTGLVQNQPNQLRLQLQHRLQAQQNRQPLMNQISNVSNVNLTLRPGVPTQAPINAQMLAQRQREILNQHLRQRQMHQQQQVQQRTLMMRGQGLNMTPSMVAPSGMPATMSNPRIPQANAQQFPFPPNYGISQQPDPGFTGATTPQSPLMSPRMAHTQSPMMQQSQANPAYQAPSDINGWAQGNMGGNSMFSQQSPPHFGQQANTSMYSNNMNINVSMATNTGGMSSMNQMTGQISMTSVTSVPTSGLSSMGPEQVNDPALRGGNLFPNQLPGMDMIKQEGDTTRKYC

SEQ ID NO: 58308 - protein, 946 aa, Homo sapiens
  Payload ID: 11415
  Gene Symbol: NCOA2
  Gene Name: nuclear receptor coactivator 2
  ENSP ID: ENSP00000430148
MSGMGENTSDPSRAETRKRKECPDQLGPSPKRNTEKRNREQENKYIEELAELIFANFNDIDNFNFKPDKCAILKETVKQIRQIKEQEKAAAANIDEVQKSDVSSTGQGVIDKDALGPMMLEALDGFFFVVNLEGNVVFVSENVTQYLRYNQEELMNKSVYSILHVGDHTEFVKNLLPKSIVNGGSWSGEPPRRNSHTFNCRMLVKPLPDSEEEGHDNQEAHQKYETMQCFAVSQPKSIKEEGEDLQSCLICVARRVPMKERPVLPSSESFTTRQDLQGKITSLDTSTMRAAMKPGWEDLVRRCIQKFHAQHEGESVSYAKRHHHEVLRQGLAFSQIYRFSLSDGTLVAAQTKSKLIRSQTTNEPQLVISLHMLHREQNVCVMNPDLTGQTMGKPLNPISSNSPAHQALCSGNPGQDMTLSSNINFPINGPKEQMGMPMGRFGGSGGMNHVSGMQATTPQGSNYALKMNSPSQSSPGMNPGQPTSMLSPRHRMSPGVAGSPRIPPSQFSPAGSLHSPVGVCSSTGNSHSYTNSSLNALQALSEGHGVSLGSSLASPDLKMGNLQNSPVNMNPPPLSKMGSLDSKDCFGLYGEPSEGTTGQAESSCHPGEQKETNDPNLPPAVSSERADGQSRLHDSKGQTKLLQLLTTKSDQMEPSPLASSLSDTNKDSTGSLPGSGSTHGTSLKEKHKILHRLLQDSSSPVDLAKLTAEATGKDLSQESSSTAPGSEVTIKQEPVSPKKKENALLRYLLDKDDTKDIGLPEITPKLERLDSKTDPASNTKLIAMKTEKEEMSFEPGDQPGSELDNLEEILDDLQNSQLPQLFPDTRPGAPAGSVDKQAIINDLMQLTAENSPVTPVGAQKTALRISQSRMIGNSASRPTMPSGEWAPQSSAVRVTCAATTSAMNRPVQGGMIRNPAASIPMRPSSQPGQRQTLQSQVMNIGKGHLN

SEQ ID NO: 58309 - protein, 16 aa, Homo sapiens
  Payload ID: 11415
  Gene Symbol: NCOA2
  Gene Name: nuclear receptor coactivator 2
  ENSP ID: ENSP00000430348
MSGMGENTSDPSRAET

SEQ ID NO: 58310 - protein, 8 aa, Homo sapiens
  Payload ID: 11415
  Gene Symbol: NCOA2
  Gene Name: nuclear receptor coactivator 2
  ENSP ID: ENSP00000430850
MSGMGENT

SEQ ID NO: 58311 - protein, 1415 aa, Homo sapiens
  Payload ID: 11416
  Gene Symbol: NCOA3
  Gene Name: nuclear receptor coactivator 3
  Uniprot ID: Q9Y6Q9
  ENSP ID: ENSP00000361065
MSGLGENLDPLASDSRKRKLPCDTPGQGLTCSGEKRRREQESKYIEELAELISANLSDIDNFNVKPDKCAILKETVRQIRQIKEQGKTISNDDDVQKADVSSTGQGVIDKDSLGPLLLQALDGFLFVVNRDGNIVFVSENVTQYLQYKQEDLVNTSVYNILHEEDRKDFLKNLPKSTVNGVSWTNETQRQKSHTFNCRMLMKTPHDILEDINASPEMRQRYETMQCFALSQPRAMMEEGEDLQSCMICVARRITTGERTFPSNPESFITRHDLSGKVVNIDTNSLRSSMRPGFEDIIRRCIQRFFSLNDGQSWSQKRHYQEVTSDGIFSPTAYLNGHAETPVYRFSLADGTIVTAQTKSKLFRNPVTNDRHGFVSTHFLQREQNGYRPNPNPVGQGIRPPMAGCNSSVGGMSMSPNQGLQMPSSRAYGLADPSTTGQMSGARYGGSSNIASLTPGPGMQSPSSYQNNNYGLNMSSPPHGSPGLAPNQQNIMISPRNRGSPKIASHQFSPVAGVHSPMASSGNTGNHSFSSSSLSALQAISEGVGTSLLSTLSSPGPKLDNSPNMNITQPSKVSNQDSKSPLGFYCDQNPVESSMCQSNSRDHLSDKESKESSVEGAENQRGPLESKGHKKLLQLLTCSSDDRGHSSLTNSPLDSSCKESSVSVTSPSGVSSSTSGGVSSTSNMHGSLLQEKHRILHKLLQNGNSPAEVAKITAEATGKDTSSITSCGDGNVVKQEQLSPKKKENNALLRYLLDRDDPSDALSKELQPQVEGVDNKMSQCTSSTIPSSSQEKDPKIKTETSEEGSGDLDNLDAILGDLTSSDFYNNSISSNGSHLGTKQQVFQGTNSLGLKSSQSVQSIRPPYNRAVSLDSPVSVGSSPPVKNISAFPMLPKQPMLGGNPRMMDSQENYGSSMGDWGLPNSKAGRMEPMNSNSMGRPGGDYNTSLPRPALGGSIPTLPLRSNSIPGARPVLQQQQQMLQMRPGEIPMGMGANPYGQAAASNQLGSWPDGMLSMEQVSHGTQNRPLLRNSLDDLVGPPSNLEGQSDERALLDQLHTLLSNTDATGLEEIDRALGIPELVNQGQALEPKQDAFQGQEAAVMMDQKAGLYGQTYPAQGPPMQGGFHLQGQSPSFNSMMNQMNQQGNFPLQGMHPRANIMRPRTNTPKQLRMQLQQRLQGQQFLNQSRQALELKMENPTAGGAAVMRPMMQPQQGFLNAQMVAQRSRELLSHHFRQQRVAMMMQQQQQQQQQQQQQQQQQQQQQQQQQQQQQTQAFSPPPNVTASPSMDGLLAGPTMPQAPPQQFPYQPNYGMGQQPDPAFGRVSSPPNAMMSSRMGPSQNPMMQHPQAASIYQSSEMKGWPSGNLARNSSFSQQQFAHQGNPAVYSMVHMNGSSGHMGQMNMNPMPMSGMPMGPDQKYC

SEQ ID NO: 58312 - protein, 1424 aa, Homo sapiens
  Payload ID: 11416
  Gene Symbol: NCOA3
  Gene Name: nuclear receptor coactivator 3
  Uniprot ID: Q9Y6Q9
  ENSP ID: ENSP00000361066
MSGLGENLDPLASDSRKRKLPCDTPGQGLTCSGEKRRREQESKYIEELAELISANLSDIDNFNVKPDKCAILKETVRQIRQIKEQGKTISNDDDVQKADVSSTGQGVIDKDSLGPLLLQALDGFLFVVNRDGNIVFVSENVTQYLQYKQEDLVNTSVYNILHEEDRKDFLKNLPKSTVNGVSWTNETQRQKSHTFNCRMLMKTPHDILEDINASPEMRQRYETMQCFALSQPRAMMEEGEDLQSCMICVARRITTGERTFPSNPESFITRHDLSGKVVNIDTNSLRSSMRPGFEDIIRRCIQRFFSLNDGQSWSQKRHYQEAYLNGHAETPVYRFSLADGTIVTAQTKSKLFRNPVTNDRHGFVSTHFLQREQNGYRPNPNPVGQGIRPPMAGCNSSVGGMSMSPNQGLQMPSSRAYGLADPSTTGQMSGARYGGSSNIASLTPGPGMQSPSSYQNNNYGLNMSSPPHGSPGLAPNQQNIMISPRNRGSPKIASHQFSPVAGVHSPMASSGNTGNHSFSSSSLSALQAISEGVGTSLLSTLSSPGPKLDNSPNMNITQPSKVSNQDSKSPLGFYCDQNPVESSMCQSNSRDHLSDKESKESSVEGAENQRGPLESKGHKKLLQLLTCSSDDRGHSSLTNSPLDSSCKESSVSVTSPSGVSSSTSGGVSSTSNMHGSLLQEKHRILHKLLQNGNSPAEVAKITAEATGKDTSSITSCGDGNVVKQEQLSPKKKENNALLRYLLDRDDPSDALSKELQPQVEGVDNKMSQCTSSTIPSSSQEKDPKIKTETSEEGSGDLDNLDAILGDLTSSDFYNNSISSNGSHLGTKQQVFQGTNSLGLKSSQSVQSIRPPYNRAVSLDSPVSVGSSPPVKNISAFPMLPKQPMLGGNPRMMDSQENYGSSMGGPNRNVTVTQTPSSGDWGLPNSKAGRMEPMNSNSMGRPGGDYNTSLPRPALGGSIPTLPLRSNSIPGARPVLQQQQQMLQMRPGEIPMGMGANPYGQAAASNQLGSWPDGMLSMEQVSHGTQNRPLLRNSLDDLVGPPSNLEGQSDERALLDQLHTLLSNTDATGLEEIDRALGIPELVNQGQALEPKQDAFQGQEAAVMMDQKAGLYGQTYPAQGPPMQGGFHLQGQSPSFNSMMNQMNQQGNFPLQGMHPRANIMRPRTNTPKQLRMQLQQRLQGQQFLNQSRQALELKMENPTAGGAAVMRPMMQPQVSSQQGFLNAQMVAQRSRELLSHHFRQQRVAMMMQQQQQQQQQQQQQQQQQQQQQQQQQQQQQTQAFSPPPNVTASPSMDGLLAGPTMPQAPPQQFPYQPNYGMGQQPDPAFGRVSSPPNAMMSSRMGPSQNPMMQHPQAASIYQSSEMKGWPSGNLARNSSFSQQQFAHQGNPAVYSMVHMNGSSGHMGQMNMNPMPMSGMPMGPDQKYC

SEQ ID NO: 58313 - protein, 1420 aa, Homo sapiens
  Payload ID: 11416
  Gene Symbol: NCOA3
  Gene Name: nuclear receptor coactivator 3
  Uniprot ID: Q9Y6Q9
  ENSP ID: ENSP00000361073
MSGLGENLDPLASDSRKRKLPCDTPGQGLTCSGEKRRREQESKYIEELAELISANLSDIDNFNVKPDKCAILKETVRQIRQIKEQGKTISNDDDVQKADVSSTGQGVIDKDSLGPLLLQALDGFLFVVNRDGNIVFVSENVTQYLQYKQEDLVNTSVYNILHEEDRKDFLKNLPKSTVNGVSWTNETQRQKSHTFNCRMLMKTPHDILEDINASPEMRQRYETMQCFALSQPRAMMEEGEDLQSCMICVARRITTGERTFPSNPESFITRHDLSGKVVNIDTNSLRSSMRPGFEDIIRRCIQRFFSLNDGQSWSQKRHYQEAYLNGHAETPVYRFSLADGTIVTAQTKSKLFRNPVTNDRHGFVSTHFLQREQNGYRPNPNPVGQGIRPPMAGCNSSVGGMSMSPNQGLQMPSSRAYGLADPSTTGQMSGARYGGSSNIASLTPGPGMQSPSSYQNNNYGLNMSSPPHGSPGLAPNQQNIMISPRNRGSPKIASHQFSPVAGVHSPMASSGNTGNHSFSSSSLSALQAISEGVGTSLLSTLSSPGPKLDNSPNMNITQPSKVSNQDSKSPLGFYCDQNPVESSMCQSNSRDHLSDKESKESSVEGAENQRGPLESKGHKKLLQLLTCSSDDRGHSSLTNSPLDSSCKESSVSVTSPSGVSSSTSGGVSSTSNMHGSLLQEKHRILHKLLQNGNSPAEVAKITAEATGKDTSSITSCGDGNVVKQEQLSPKKKENNALLRYLLDRDDPSDALSKELQPQVEGVDNKMSQCTSSTIPSSSQEKDPKIKTETSEEGSGDLDNLDAILGDLTSSDFYNNSISSNGSHLGTKQQVFQGTNSLGLKSSQSVQSIRPPYNRAVSLDSPVSVGSSPPVKNISAFPMLPKQPMLGGNPRMMDSQENYGSSMGGPNRNVTVTQTPSSGDWGLPNSKAGRMEPMNSNSMGRPGGDYNTSLPRPALGGSIPTLPLRSNSIPGARPVLQQQQQMLQMRPGEIPMGMGANPYGQAAASNQLGSWPDGMLSMEQVSHGTQNRPLLRNSLDDLVGPPSNLEGQSDERALLDQLHTLLSNTDATGLEEIDRALGIPELVNQGQALEPKQDAFQGQEAAVMMDQKAGLYGQTYPAQGPPMQGGFHLQGQSPSFNSMMNQMNQQGNFPLQGMHPRANIMRPRTNTPKQLRMQLQQRLQGQQFLNQSRQALELKMENPTAGGAAVMRPMMQPQQGFLNAQMVAQRSRELLSHHFRQQRVAMMMQQQQQQQQQQQQQQQQQQQQQQQQQQQQQTQAFSPPPNVTASPSMDGLLAGPTMPQAPPQQFPYQPNYGMGQQPDPAFGRVSSPPNAMMSSRMGPSQNPMMQHPQAASIYQSSEMKGWPSGNLARNSSFSQQQFAHQGNPAVYSMVHMNGSSGHMGQMNMNPMPMSGMPMGPDQKYC

SEQ ID NO: 58314 - protein, 448 aa, Homo sapiens
  Payload ID: 11417
  Gene Symbol: NCOA4
  Gene Name: nuclear receptor coactivator 4
  ENSP ID: ENSP00000462352
MAHASSANIGPFLEKRGCISMPEQKSASGIVAVPFSEWLLGSKPASGYQAPYIPSTDPQDWLTQKQTLENSQTSSRACNFFNNVGGNLKGLENWLLKSEKSSYQKCNSHSTTSSFSIEMEKVGDQELPDQDEMDLSDWLVTPQESHKLRKPENGSRETSEKFKLLFQSYNVNDWLVKTDSCTNCQGNQPKGVEIENLGNLKCLNDHLEAKKPLSTPSMVTEDWLVQNHQDPCKVEEVCRANEPCTSFAECVCDENCEKEALYKWLLKKEGKDKNGMPVEPKPEPEKHKDSLNMWLCPRKEVIEQTKAPKAMTPSRIADSFQVIKNSPLSEWLIRPPYKEGSPKEVPGTEDRAGKQKFKSPMNTSWCSFNTADWVLPGKKMGNLSQLSSGEDKWLLRKKAQEVLLNSPLQEEHNFPPDHYGLPAVCDLFACMQLKVDKEKWLYRTPLQM

SEQ ID NO: 58315 - protein, 614 aa, Homo sapiens
  Payload ID: 11417
  Gene Symbol: NCOA4
  Gene Name: nuclear receptor coactivator 4
  Uniprot ID: Q13772
  ENSP ID: ENSP00000462943
MNTFQDQSGSSSNREPLLRCSDARRDLELAIGGVLRAEQQIKDNLREVKAQIHSCISRHLECLRSREVWLYEQVDLIYQLKEETLQQQAQQLYSLLGQFNCLTHQLECTQNKDLANQVSVCLERLGSLTLKPEDSTVLLFEADTITLRQTITTFGSLKTIQIPEHLMAHASSANIGPFLEKRGCISMPEQKSASGIVAVPFSEWLLGSKPASGYQAPYIPSTDPQDWLTQKQTLENSQTSSRACNFFNNVGGNLKGLENWLLKSEKSSYQKCNSHSTTSSFSIEMEKVGDQELPDQDEMDLSDWLVTPQESHKLRKPENGSRETSEKFKLLFQSYNVNDWLVKTDSCTNCQGNQPKGVEIENLGNLKCLNDHLEAKKPLSTPSMVTEDWLVQNHQDPCKVEEVCRANEPCTSFAECVCDENCEKEALYKWLLKKEGKDKNGMPVEPKPEPEKHKDSLNMWLCPRKEVIEQTKAPKAMTPSRIADSFQVIKNSPLSEWLIRPPYKEGSPKEVPGTEDRAGKQKFKSPMNTSWCSFNTADWVLPGKKMGNLSQLSSGEDKWLLRKKAQEVLLNSPLQEEHNFPPDHYGLPAVCDLFACMQLKVDKEKWLYRTPLQM

SEQ ID NO: 58316 - protein, 514 aa, Homo sapiens
  Payload ID: 11417
  Gene Symbol: NCOA4
  Gene Name: nuclear receptor coactivator 4
  ENSP ID: ENSP00000463022
MNRWTLFISLKRRHFNSRLSSSTRLGSLTLKPEDSTVLLFEADTITLRQTITTFGSLKTIQIPEHLMAHASSANIGPFLEKRGCISMPEQKSASGIVAVPFSEWLLGSKPASGYQAPYIPSTDPQDWLTQKQTLENSQTSSRACNFFNNVGGNLKGLENWLLKSEKSSYQKCNSHSTTSSFSIEMEKVGDQELPDQDEMDLSDWLVTPQESHKLRKPENGSRETSEKFKLLFQSYNVNDWLVKTDSCTNCQGNQPKGVEIENLGNLKCLNDHLEAKKPLSTPSMVTEDWLVQNHQDPCKVEEVCRANEPCTSFAECVCDENCEKEALYKWLLKKEGKDKNGMPVEPKPEPEKHKDSLNMWLCPRKEVIEQTKAPKAMTPSRIADSFQVIKNSPLSEWLIRPPYKEGSPKEVPGTEDRAGKQKFKSPMNTSWCSFNTADWVLPGKKMGNLSQLSSGEDKWLLRKKAQEVLLNSPLQEEHNFPPDHYGLPAVCDLFACMQLKVDKEKWLYRTPLQM

SEQ ID NO: 58317 - protein, 650 aa, Homo sapiens
  Payload ID: 11417
  Gene Symbol: NCOA4
  Gene Name: nuclear receptor coactivator 4
  Uniprot ID: Q13772
  ENSP ID: ENSP00000463027
MGAQLTTFALAGAVRRMNTFQDQSGSSSNREPLLRCSDARRDLELAIGGVLRAEQQIKDNLREVKAQIHSCISRHLECLRSREVWLYEQVDLIYQLKEETLQQQAQQLYSLLGQFNCLTHQLECTQNKDLANQVSVCLERLGSLTLKPEDSTVLLFEADTITLRQTITTFGSLKTIQIPEHLMAHASSANIGPFLEKRGCISMPEQKSASGIVAVPFSEWLLGSKPASGYQAPYIPSTDPQDWLTQKQTLENSQTSSRACNFFNNVGGNLKGLENWLLKSEKSSYQKCNSHSTTSSFSIEMEKVGDQELPDQDEMDLSDWLVTPQESHKLRKPENGSRETSEKFKLLFQSYNVNDWLVKTDSCTNCQGNQPKGVEIENLGNLKCLNDHLEAKKPLSTPSMVTEDWLVQNHQDPCKVEEVCRANEPCTSFAECVCDENCEKEALYKWLLKKEGKDKNGMPVEPKPEPEKHKDSLNMWLCPRKEVIEQTKAPKAMTPSRIADSFQVIKNSPLSEWLIRPPYKEGSPKEVPGTEDRAGKQKFKSPMNTSWCSFNTADWVLPGKKMGNLSQLSSGEDKWLLRKKAQEVLLNSPLQEEHNFPPDHYGLPAVCDLFACMQLKVDKEKWLYRTPLQAYFKMNFQDVTVGNFQIPCGF

SEQ ID NO: 58318 - protein, 630 aa, Homo sapiens
  Payload ID: 11417
  Gene Symbol: NCOA4
  Gene Name: nuclear receptor coactivator 4
  Uniprot ID: Q13772
  ENSP ID: ENSP00000463455
MGAQLTTFALAGAVRRMNTFQDQSGSSSNREPLLRCSDARRDLELAIGGVLRAEQQIKDNLREVKAQIHSCISRHLECLRSREVWLYEQVDLIYQLKEETLQQQAQQLYSLLGQFNCLTHQLECTQNKDLANQVSVCLERLGSLTLKPEDSTVLLFEADTITLRQTITTFGSLKTIQIPEHLMAHASSANIGPFLEKRGCISMPEQKSASGIVAVPFSEWLLGSKPASGYQAPYIPSTDPQDWLTQKQTLENSQTSSRACNFFNNVGGNLKGLENWLLKSEKSSYQKCNSHSTTSSFSIEMEKVGDQELPDQDEMDLSDWLVTPQESHKLRKPENGSRETSEKFKLLFQSYNVNDWLVKTDSCTNCQGNQPKGVEIENLGNLKCLNDHLEAKKPLSTPSMVTEDWLVQNHQDPCKVEEVCRANEPCTSFAECVCDENCEKEALYKWLLKKEGKDKNGMPVEPKPEPEKHKDSLNMWLCPRKEVIEQTKAPKAMTPSRIADSFQVIKNSPLSEWLIRPPYKEGSPKEVPGTEDRAGKQKFKSPMNTSWCSFNTADWVLPGKKMGNLSQLSSGEDKWLLRKKAQEVLLNSPLQEEHNFPPDHYGLPAVCDLFACMQLKVDKEKWLYRTPLQM

SEQ ID NO: 58319 - protein, 614 aa, Homo sapiens; identical to SEQ ID NO: 58315
  Payload ID: 11417
  Gene Symbol: NCOA4
  Gene Name: nuclear receptor coactivator 4
  Uniprot ID: Q13772
  ENSP ID: ENSP00000463476

SEQ ID NO: 58320 - protein, 614 aa, Homo sapiens; identical to SEQ ID NO: 58315
  Payload ID: 11417
  Gene Symbol: NCOA4
  Gene Name: nuclear receptor coactivator 4
  Uniprot ID: Q13772
  ENSP ID: ENSP00000464054

SEQ ID NO: 58321 - protein, 579 aa, Homo sapiens
  Payload ID: 11418
  Gene Symbol: NCOA5
  Gene Name: nuclear receptor coactivator 5
  Uniprot ID: Q9HCD5
  ENSP ID: ENSP00000290231
MNTAPSRPSPTRRDPYGFGDSRDSRRDRSPIRGSPRREPRDGRNGRDARDSRDIRDPRDLRDHRHSRDLRDHRDSRSVRDVRDVRDLRDFRDLRDSRDFRDQRDPMYDRYRDMRDSRDPMYRREGSYDRYLRMDDYCRRKDDSYFDRYRDSFDGRGPPGPESQSRAKERLKREERRREELYRQYFEEIQRRFDAERPVDCSVIVVNKQTKDYAESVGRKVRDLGMVVDLIFLNTEVSLSQALEDVSRGGSPFAIVITQQHQIHRSCTVNIMFGTPQEHRNMPQADAMVLVARNYERYKNECREKEREEIARQAAKMADEAILQERERGGPEEGVRGGHPPAIQSLINLLADNRYLTAEETDKIINYLRERKERLMRSSTDSLPGPISRQPLGATSGASLKTQPSSQPLQSGQVLPSATPTPSAPPTSQQELQAKILSLFNSGTVTANSSSASPSVAAGNTPNQNFSTAANSQPQQRSQASGNQPPSILGQGGSAQNMGPRPGAPSQGLFGQPSSRLAPASNMTSQRPVSSTGINFDNPSVQKALDTLIQSGPALSHLVSQTTAQMGQPQAPMGSYQRHY

SEQ ID NO: 58322 - protein, 104 aa, Homo sapiens
  Payload ID: 11418
  Gene Symbol: NCOA5
  Gene Name: nuclear receptor coactivator 5
  ENSP ID: ENSP00000361365
MYDRYRDMRDSRDPMYRREGSYDRYLRMDDYCRRKDDSYFDRYRDSFDGRGPPGPESQSRAKERLKREERRREELYRQYFEEIQRRFDAERPVDCSVIVVNKQT

SEQ ID NO: 58323 - protein, 2063 aa, Homo sapiens
  Payload ID: 11419
  Gene Symbol: NCOA6
  Gene Name: nuclear receptor coactivator 6
  Uniprot ID: Q14686
  ENSP ID: ENSP00000351894
MVLDDLPNLEDIYTSLCSSTMEDSEMDFDSGLEDDDTKSDSILEDSTIFVAFKGNIDDKDFKWKLDAILKNVPNLLHMESSKLKVQKVEPWNSVRVTFNIPREAAERLRILAQSNNQQLRDLGILSVQIEGEGAINLALAQNRSQDVRMNGPMGAGNSVRMEAGFPMASGPGIIRMNNPATVMIPPGGNVSSSMMAPGPNPELQPRTPRPASQSDAMDPLLSGLHIQQQSHPSGSLAPPHHPMQPVSVNRQMNPANFPQLQQQQQQQQQQQQQQQQQQQQQQQQQLQARPPQQHQQQQPQGIRPQFTAPTQVPVPPGWNQLPSGALQPPPAQGSLGTMTANQGWKKAPLPGPMQQQLQARPSLATVQTPSHPPPPYPFGSQQASQAHTNFPQMSNPGQFTAPQMKSLQGGPSRVPTPLQQPHLTNKSPASSPSSFQQGSPASSPTVNQTQQQMGPRPPQNNPLPQGFQQPVSSPGRNPMVQQGNVPPNFMVMQQQPPNQGPQSLHPGLGGMPKRLPPGFSAGQANPNFMQGQVPSTTATTPGNSGAPQLQANQNVQHAGGQGAGPPQNQMQVSHGPPNMMQPSLMGIHGNMNNQQAGTSGVPQVNLSNMQGQPQQGPPSQLMGMHQQIVPSQGQMVQQQGTLNPQNPMILSRAQLMPQGQMMVNPPSQNLGPSPQRMTPPKQMLSQQGPQMMAPHNQMMGPQGQVLLQQNPMIEQIMTNQMQGNKQQFNTQNQSNVMPGPAQIMRGPTPNMQGNMVQFTGQMSGQMLPQQGPVNNSPSQVMGIQGQVLRPPGPSPHMAQQHGDPATTANNDVSLSQMMPDVSIQQTNMVPPHVQAMQGNSASGNHFSGHGMSFNAPFSGAPNGNQMSCGQNPGFPVNKDVTLTSPLLVNLLQSDISAGHFGVNNKQNNTNANKPKKKKPPRKKKNSQQDLNTPDTRPAGLEEADQPPLPGEQGINLDNSGPKLPEFSNRPPGYPSQPVEQRPLQQMPPQLMQHVAPPPQPPQQQPQPQLPQQQQPPPPSQPQSQQQQQQQQQMMMMLMMQQDPKSVRLPVSQNVHPPRGPLNPDSQRMPMQQSGSVPVMVSLQGPASVPPSPDKQRMPMPVNTPLGSNSRKMVYQESPQNPSSSPLAEMASLPEASGSEAPSVPGGPNNMPSHVVLPQNQLMMTGPKPGPSPLSATQGATPQQPPVNSLPSSHGHHFPNVAAPTQTSRPKTPNRASPRPYYPQTPNNRPPSTEPSEISLSPERLNASIAGLFPPQINIPLPPRPNLNRGFDQQGLNPTTLKAIGQAPSNLTMNPSNFATPQTHKLDSVVVNSGKQSNSGATKRASPSNSRRSSPGSSRKTTPSPGRQNSKAPKLTLASQTNAALLQNVELPRNVLVSPTPLANPPVPGSFPNNSGLNPQNSTVSVAAVGGVVEDNKESLNVPQDSDCQNSQSRKEQVNIELKAVPAQEVKMVVPEDQSKKDGQPSDPNKLPSVEENKNLVSPAMREAPTSLSQLLDNSGAPNVTIKPPGLTDLEVTPPVVSGEDLKKASVIPTLQDLSSSKEPSNSLNLPHSNELCSSLVHPELSEVSSNVAPSIPPVMSRPVSSSSISTPLPPNQITVFVTSNPITTSANTSAALPTHLQSALMSTVVTMPNAGSKVMVSEGQSAAQSNARPQFITPVFINSSSIIQVMKGSQPSTIPAAPLTTNSGLMPPSVAVVGPLHIPQNIKFSSAPVPPNALSSSPAPNIQTGRPLVLSSRATPVQLPSPPCTSSPVVPSHPPVQQVKELNPDEASPQVNTSADQNTLPSSQSTTMVSPLLTNSPGSSGNRRSPVSSSKGKGKVDKIGQILLTKACKKVTGSLEKGEEQYGADGETEGQGLDTTAPGLMGTEQLSTELDSKTPTPPAPTLLKMTSSPVGPGTASAGPSLPGGALPTSVRSIVTTLVPSELISAVPTTKSNHGGIASESLAGGLVEEKVGSHPELLPSIAPSQNLVSKETSTTALQASVARPELEVNAAIVSGQSSEPKEIVEKSKIPGRRNSRTEEPTVASESVENGHRKRSSRPASASSSTKDITSAVQSKRRKSK

SEQ ID NO: 58324 - protein, 2063 aa, Homo sapiens; identical to SEQ ID NO: 58323
  Payload ID: 11419
  Gene Symbol: NCOA6
  Gene Name: nuclear receptor coactivator 6
  Uniprot ID: Q14686
  ENSP ID: ENSP00000363929

SEQ ID NO: 58325 - protein, 1070 aa, Homo sapiens
  Payload ID: 11419
  Gene Symbol: NCOA6
  Gene Name: nuclear receptor coactivator 6
  ENSP ID: ENSP00000481177
MVLDDLPNLEDIYTSLCSSTMEDSEMDFDSGLEDDDTKSDSILEDSTIFVAFKGNIDDKDFKWKLDAILKNVPNLLHMESSKLKVQKVEPWNSVRVTFNIPREAAERLRILAQSNNQQLRDLGILSVQIEGEGAINLALAQNRSQDVRMNGPMGAGNSVRMEAGFPMASGPGIIRMNNPATVMIPPGGNVSSSMMAPGPNPELQPRTPRPASQSDAMDPLLSGLHIQQQSHPSGSLAPPHHPMQPVSVNRQMNPANFPQLQQQQQQQQQQQQQQQQQQQQQQQQQLQARPPQQHQQQQPQGIRPQFTAPTQVPVPPGWNQLPSGALQPPPAQGSLGTMTANQGWKKAPLPGPMQQQLQARPSLATVQTPSHPPPPYPFGSQQASQAHTNFPQMSNPGQFTAPQMKSLQGGPSRVPTPLQQPHLTNKSPASSPSSFQQGSPASSPTVNQTQQQMGPRPPQNNPLPQGFQQPVSSPGRNPMVQQGNVPPNFMVMQQQPPNQGPQSLHPGLGGMPKRLPPGFSAGQANPNFMQGQVPSTTATTPGNSGAPQLQANQNVQHAGGQGAGPPQNQMQVSHGPPNMMQPSLMGIHGNMNNQQAGTSGVPQVNLSNMQGQPQQGPPSQLMGMHQQIVPSQGQMVQQQGTLNPQNPMILSRAQLMPQGQMMVNPPSQNLGPSPQRMTPPKQMLSQQGPQMMAPHNQMMGPQGQVLLQQNPMIEQIMTNQMQGNKQQFNTQNQSNVMPGPAQIMRGPTPNMQGNMVQFTGQMSGQMLPQQGPVNNSPSQVMGIQGQVLRPPGPSPHMAQQHGDPATTANNDVSLSQMMPDVSIQQTNMVPPHVQAMQGNSASGNHFSGHGMSFNAPFSGAPNGNQMSCGQNPGFPVNKDVTLTSPLLVNLLQSDISAGHFGVNNKQNNTNANKPKKKKPPRKKKNSQQDLNTPDTRPAGLEEADQPPLPGEQGINLDNSGPKLPEFSNRPPAPSQNLVSKETSTTALQASVARPELEVNAAIVSGQSSEPKEIVEKSKIPGRRNSRTEEPTVASESVENGHRKRSSRPASASSSTKDITSAVQSKRRKSK

SEQ ID NO: 58326 - protein, 982 aa, Homo sapiens
  Payload ID: 11419
  Gene Symbol: NCOA6
  Gene Name: nuclear receptor coactivator 6
  ENSP ID: ENSP00000481935
MVLDDLPNLEDIYTSLCSSTMEDSEMDFDSGLEDDDTKSDSILEDSTIFVAFKGNIDDKDFKWKLDAILKNVPNLLHMESSKLKVQKVEPWNSVRVTFNIPREAAERLRILAQSNNQQLRDLGILSVQIEGEGAINLALAQNRSQDVRMNGPMGAGNSVRMEAGFPMASGPGIIRMNNPATVMIPPGGNVSSSMMAPGPNPELQPRTPRPASQSDAMDPLLSGLHIQQQSHPSGSLAPPHHPMQPVSVNRQMNPANFPQLQQQQQQQQQQQQQQQQQQQQQQQQQLQARPPQQHQQQQPQGIRPQFTAPTQVPVPPGWNQLPSGALQPPPAQGSLGTMTANQGWKKAPLPGPMQQQLQARPSLATVQTPSHPPPPYPFGSQQASQAHTNFPQMSNPGQFTAPQMKSLQGGPSRVPTPLQQPHLTNKSPASSPSSFQQGSPASSPTVNQTQQQMGPRPPQNNPLPQGFQQPVSSPGRNPMVQQGNVPPNFMVMQQQPPNQGPQSLHPGLGGMPKRLPPGFSAGQANPNFMQGQVPSTTATTPGNSGAPQLQANQNVQHAGGQGAGPPQNQMQVSHGPPNMMQPSLMGIHGNMNNQQAGTSGVPQVNLSNMQGQPQQGPPSQLMGMHQQIVPSQGQMVQQQGTLNPQNPMILSRAQLMPQGQMMVNPPSQNLGPSPQRMTPPKQMLSQQGPQMMAPHNQMMGPQGQVLLQQNPMIEQIMTNQMQGNKQQFNTQNQSNVMPGPAQIMRGPTPNMQGNMVQFTGQMSGQMLPQQGPVNNSPSQVMGIQGQVLRPPGPSPHMAQQHGDPATTANNDVSLSQMMPDVSIQQTNMVPPHVQAMQGNSASGNHFSGHGMSFNAPFSGAPNGNQMSCGQNPGFPVNKDVTLTSPLLVNLLQSDISAGHFGVNNKQNNTNANKPKKKKPPRKKKNSQQDLNTPDTRPAGLEEADQPPLPGEQGINLDNSGPKLPEFSNRPPAKMLRVPTTEW

SEQ ID NO: 58327 - protein, 220 aa, Homo sapiens
  Payload ID: 11419
  Gene Symbol: NCOA6
  Gene Name: nuclear receptor coactivator 6
  ENSP ID: ENSP00000486894
  MOD_RES (1)..(1): Any amino acid
XPGFPVNKDVTLTSPLLVNLLQSDISAGHFGVNNKQNNTNANKPKKKKPPRKKKNSQQDLNTPDTRPAGLEEADQPPLPGEQGINLDNSGPKLPEFSNRPPAPSQNLVSKETSTTALQASVARPELEVNAAIVSGQSSEPKEIVEKSKIPGRRNSRTEEPTVASESVENGHRKRSSRPASASSSTKAGAPMKDQMLCVERATRGGPKRDLYKLRVESGPL

SEQ ID NO: 58328 - protein, 827 aa, Homo sapiens
  Payload ID: 11420
  Gene Symbol: NCOA7
  Gene Name: nuclear receptor coactivator 7
  Uniprot ID: Q8NI08
  ENSP ID: ENSP00000229634
MVVQKPHGTMEYTAGNQDTLNSIALKFNITPNKLVELNKLFTHTIVPGQVLFVPDANSPSSTLRLSSSSPGATVSPSSSDAEYDKLPDADLARKALKPIERVLSSTSEEDEPGVVKFLKMNCRYFTDGKGVVGGVMIVTPNNIMFDPHKSDPLVIENGCEEYGLICPMEEVVSIALYNDISHMKIKDALPSPGEWEDLASEKDINPFSKFKSINKEKRQQNGEKIMTSDSRPIVPLEKSTGHTPTKPSGSSVSEKLKKLDSSRETSHGSPTVTKLSKEPSDTSSAFESTAKENFLGEDDDFVDLEELSSQTGGGMHKKDTLKECLSLDPEERKKAESQINNSAVEMQVQSALAFLGTENDVELKGALDLETCEKQDIMPEVDKQSGSPESRVENTLNIHEDLDKVKLIEYYLTKNKEGPQVSENLQKTELSDGKSIEPGGIDITLSSSLSQAGDPITEGNKEPDKTWVKKGEPLPVKLNSSTEANVIKEALDSSLESTLDNSCQGAQMDNKSEVQLWLLKRIQVPIEDILPSKEEKSKTPPMFLCIKVGKPMRKSFATHTAAMVQQYGKRRKQPEYWFAVPRERVDHLYTFFVQWSPDVYGKDAKEQGFVVVEKEELNMIDNFFSEPTTKSWEIITVEEAKRRKSTCSYYEDEDEEVLPVLRPHSALLENMHIEQLARRLPARVQGYPWRLAYSTLEHGTSLKTLYRKSASLDSPVLLVIKDMDNQIFGAYATHPFKFSDHYYGTGETFLYTFSPHFKVFKWSGENSYFINGDISSLELGGGGGRFGLWLDADLYHGRSNSCSTFNNDILSKKEDFIVQDLEVWAFD

SEQ ID NO: 58329 - protein, 942 aa, Homo sapiens
  Payload ID: 11420
  Gene Symbol: NCOA7
  Gene Name: nuclear receptor coactivator 7
  Uniprot ID: Q8NI08
  ENSP ID: ENSP00000357341
MDTKEEKKERKQSYFARLKKKKQAKQNAETASAVATRTHTGKEDNNTVVLEPDKCNIAVEEEYMTDEKKKRKSNQLKEIRRTELKRYYSIDDNQNKTHDKKEKKMVVQKPHGTMEYTAGNQDTLNSIALKFNITPNKLVELNKLFTHTIVPGQVLFVPDANSPSSTLRLSSSSPGATVSPSSSDAEYDKLPDADLARKALKPIERVLSSTSEEDEPGVVKFLKMNCRYFTDGKGVVGGVMIVTPNNIMFDPHKSDPLVIENGCEEYGLICPMEEVVSIALYNDISHMKIKDALPSDLPQDLCPLYRPGEWEDLASEKDINPFSKFKSINKEKRQQNGEKIMTSDSRPIVPLEKSTGHTPTKPSGSSVSEKLKKLDSSRETSHGSPTVTKLSKEPSDTSSAFESTAKENFLGEDDDFVDLEELSSQTGGGMHKKDTLKECLSLDPEERKKAESQINNSAVEMQVQSALAFLGTENDVELKGALDLETCEKQDIMPEVDKQSGSPESRVENTLNIHEDLDKVKLIEYYLTKNKEGPQVSENLQKTELSDGKSIEPGGIDITLSSSLSQAGDPITEGNKEPDKTWVKKGEPLPVKLNSSTEANVIKEALDSSLESTLDNSCQGAQMDNKSEVQLWLLKRIQVPIEDILPSKEEKSKTPPMFLCIKVGKPMRKSFATHTAAMVQQYGKRRKQPEYWFAVPRERVDHLYTFFVQWSPDVYGKDAKEQGFVVVEKEELNMIDNFFSEPTTKSWEIITVEEAKRRKSTCSYYEDEDEEVLPVLRPHSALLENMHIEQLARRLPARVQGYPWRLAYSTLEHGTSLKTLYRKSASLDSPVLLVIKDMDNQIFGAYATHPFKFSDHYYGTGETFLYTFSPHFKVFKWSGENSYFINGDISSLELGGGGGRFGLWLDADLYHGRSNSCSTFNNDILSKKEDFIVQDLEVWAFD

SEQ ID NO: 58330 - protein, 942 aa, Homo sapiens; identical to SEQ ID NO: 58329
  Payload ID: 11420
  Gene Symbol: NCOA7
  Gene Name: nuclear receptor coactivator 7
  Uniprot ID: Q8NI08
  ENSP ID: ENSP00000376269

SEQ ID NO: 58331 - protein, 219 aa, Homo sapiens
  Payload ID: 11420
  Gene Symbol: NCOA7
  Gene Name: nuclear receptor coactivator 7
  ENSP ID: ENSP00000398268
MRGQRLPLDIQIFYCARPDEEPFVKIITVEEAKRRKSTCSYYEDEDEEVLPVLRPHSALLENMHIEQLARRLPARVQGYPWRLAYSTLEHGTSLKTLYRKSASLDSPVLLVIKDMDNQIFGAYATHPFKFSDHYYGTGETFLYTFSPHFKVFKWSGENSYFINGDISSLELGGGGGRFGLWLDADLYHGRSNSCSTFNNDILSKKEDFIVQDLEVWAFD

SEQ ID NO: 58332 - protein, 90 aa, Homo sapiens
  Payload ID: 11420
  Gene Symbol: NCOA7
  Gene Name: nuclear receptor coactivator 7
  ENSP ID: ENSP00000403643
MDTKEEKKERKQSYFARLKKKKQAKQNAETASAVATRTHTGKEDNNTVVLEPDKCNIAVEEEYMTDEKKKRKSNQLKEIRRTELKRYYSI

SEQ ID NO: 58333 - protein, 191 aa, Homo sapiens
  Payload ID: 11420
  Gene Symbol: NCOA7
  Gene Name: nuclear receptor coactivator 7
  ENSP ID: ENSP00000406363
MDTKEEKKERKQSYFARLKKKKQAKQNAETASAVATRTHTGKEDNNTVVLEPDKCNIAVEEEYMTDEKKKRKSNQLKEIRRTELKRYYSIDDNQNKTHDKKEKKMVVQKPHGTMEYTAGNQDTLNSIALKFNITPNKLVELNKLFTHTIVPGQVLFVPDANSPSSTLRLSSSSPGATVSPSSSDAEYDKLP

SEQ ID NO: 58334 - protein, 90 aa, Homo sapiens; identical to SEQ ID NO: 58332
  Payload ID: 11420
  Gene Symbol: NCOA7
  Gene Name: nuclear receptor coactivator 7
  ENSP ID: ENSP00000407426

SEQ ID NO: 58335 - protein, 159 aa, Homo sapiens
  Payload ID: 11420
  Gene Symbol: NCOA7
  Gene Name: nuclear receptor coactivator 7
  ENSP ID: ENSP00000407684
MRGQRLPLDIQIFYCARPDEEPFVKIITVEEAKRRKSTCSYYEDEDEEVLPVLRPHSALLENMHIEQLARRLPARVQGYPWRLAYSTLEHGTSLKTLYRKSASLDSPVLLVIKDMDNQIFGAYATHPFKFSDHYYGTGETFLYTFSPHFKGTIWFMARC

SEQ ID NO: 58336 - protein, 117 aa, Homo sapiens
  Payload ID: 11420
  Gene Symbol: NCOA7
  Gene Name: nuclear receptor coactivator 7
  ENSP ID: ENSP00000408211
MDTKEEKKERKQSYFARLKKKKQAKQNAETASAVATRTHTGKEDNNTVVLEPDKCNIAVEEEYMTDEKKKRKSNQLKEIRRTELKRYYSIDDNQNKTHDKKEKKMVVQKPHGTMEYT

SEQ ID NO: 58337 - protein, 2440 aa, Homo sapiens
  Payload ID: 11421
  Gene Symbol: NCOR1
  Gene Name: nuclear receptor corepressor 1
  Uniprot ID: O75376
  ENSP ID: ENSP00000268712
MSSSGYPPNQGAFSTEQSRYPPHSVQYTFPNTRHQQEFAVPDYRSSHLEVSQASQLLQQQQQQQLRRRPSLLSEFHPGSDRPQERRTSYEPFHPGPSPVDHDSLESKRPRLEQVSDSHFQRVSAAVLPLVHPLPEGLRASADAKKDPAFGGKHEAPSSPISGQPCGDDQNASPSKLSKEELIQSMDRVDREIAKVEQQILKLKKKQQQLEEEAAKPPEPEKPVSPPPVEQKHRSIVQIIYDENRKKAEEAHKIFEGLGPKVELPLYNQPSDTKVYHENIKTNQVMRKKLILFFKRRNHARKQREQKICQRYDQLMEAWEKKVDRIENNPRRKAKESKTREYYEKQFPEIRKQREQQERFQRVGQRGAGLSATIARSEHEISEIIDGLSEQENNEKQMRQLSVIPPMMFDAEQRRVKFINMNGLMEDPMKVYKDRQFMNVWTDHEKEIFKDKFIQHPKNFGLIASYLERKSVPDCVLYYYLTKKNENYKALVRRNYGKRRGRNQQIARPSQEEKVEEKEEDKAEKTEKKEEEKKDEEEKDEKEDSKENTKEKDKIDGTAEETEEREQATPRGRKTANSQGRRKGRITRSMTNEAAAASAAAAAATEEPPPPLPPPPEPISTEPVETSRWTEEEMEVAKKGLVEHGRNWAAIAKMVGTKSEAQCKNFYFNYKRRHNLDNLLQQHKQKTSRKPREERDVSQCESVASTVSAQEDEDIEASNEEENPEDSEVEAVKPSEDSPENATSRGNTEPAVELEPTTETAPSTSPSLAVPSTKPAEDESVETQVNDSISAETAEQMDVDQQEHSAEEGSVCDPPPATKADSVDVEVRVPENHASKVEGDNTKERDLDRASEKVEPRDEDLVVAQQINAQRPEPQSDNDSSATCSADEDVDGEPERQRMFPMDSKPSLLNPTGSILVSSPLKPNPLDLPQLQHRAAVIPPMVSCTPCNIPIGTPVSGYALYQRHIKAMHESALLEEQRQRQEQIDLECRSSTSPCGTSKSPNREWEVLQPAPHQVITNLPEGVRLPTTRPTRPPPPLIPSSKTTVASEKPSFIMGGSISQGTPGTYLTSHNQASYTQETPKPSVGSISLGLPRQQESAKSATLPYIKQEEFSPRSQNSQPEGLLVRAQHEGVVRGTAGAIQEGSITRGTPTSKISVESIPSLRGSITQGTPALPQTGIPTEALVKGSISRMPIEDSSPEKGREEAASKGHVIYEGKSGHILSYDNIKNAREGTRSPRTAHEISLKRSYESVEGNIKQGMSMRESPVSAPLEGLICRALPRGSPHSDLKERTVLSGSIMQGTPRATTESFEDGLKYPKQIKRESPPIRAFEGAITKGKPYDGITTIKEMGRSIHEIPRQDILTQESRKTPEVVQSTRPIIEGSISQGTPIKFDNNSGQSAIKHNVKSLITGPSKLSRGMPPLEIVPENIKVVERGKYEDVKAGETVRSRHTSVVSSGPSVLRSTLHEAPKAQLSPGIYDDTSARRTPVSYQNTMSRGSPMMNRTSDVTISSNKSTNHERKSTLTPTQRESIPAKSPVPGVDPVVSHSPFDPHHRGSTAGEVYRSHLPTHLDPAMPFHRALDPAAAAYLFQRQLSPTPGYPSQYQLYAMENTRQTILNDYITSQQMQVNLRPDVARGLSPREQPLGLPYPATRGIIDLTNMPPTILVPHPGGTSTPPMDRITYIPGTQITFPPRPYNSASMSPGHPTHLAAAASAEREREREREKERERERIAAASSDLYLRPGSEQPGRPGSHGYVRSPSPSVRTQETMLQQRPSVFQGTNGTSVITPLDPTAQLRIMPLPAGGPSISQGLPASRYNTAADALAALVDAAASAPQMDVSKTKESKHEAARLEENLRSRSAAVSEQQQLEQKTLEVEKRSVQCLYTSSAFPSGKPQPHSSVVYSEAGKDKGPPPKSRYEEELRTRGKTTITAANFIDVIITRQIASDKDARERGSQSSDSSSSLSSHRYETPSDAIEVISPASSPAPPQEKLQTYQPEVVKANQAENDPTRQYEGPLHHYRPQQESPSPQQQLPPSSQAEGMGQVPRTHRLITLADHICQIITQDFARNQVSSQTPQQPPTSTFQNSPSALVSTPVRTKTSNRYSPESQAQSVHHQRPGSRVSPENLVDKSRGSRPGKSPERSHVSSEPYEPISPPQVPVVHEKQDSLLLLSQRGAEPAEQRNDARSPGSISYLPSFFTKLENTSPMVKSKKQEIFRKLNSSGGGDSDMAAAQPGTEIFNLPAVTTSGSVSSRGHSFADPASNLGLEDIIRKALMGSFDDKVEDHGVVMSQPMGVVPGTANTSVVTSGETRREEGDPSPHSGGVCKPKLISKSNSRKSKSPIPGQGYLGTERPSSVSSVHSEGDYHRQTPGWAWEDRPSSTGSTQFPYNPLTMRMLSSTPPTPIACAPSAVNQAAPHQQNRIWEREPAPLLSAQYETLSDSDD

SEQ ID NO: 58338 - protein, 914 aa, Homo sapiens
  Payload ID: 11421
  Gene Symbol: NCOR1
  Gene Name: nuclear receptor corepressor 1
  Uniprot ID: O75376
  ENSP ID: ENSP00000379189
MSSSGYPPNQGAFSTEQSRYPPHSVQYTFPNTRHQQDPAFGGKHEAPSSPISGQPCGDDQNASPSKLSKEELIQSMDRVDREIAKVEQQILKLKKKQQQLEEEAAKPPEPEKPVSPPPVEQKHRSIVQIIYDENRKKAEEAHKIFEGLGPKVELPLYNQPSDTKVYHENIKTNQVMRKKLILFFKRRNHARKQREQKICQRYDQLMEAWEKKVDRIENNPRRKAKESKTREYYEKQFPEIRKQREQQERFQRVGQRGAGLSATIARSEHEISEIIDGLSEQENNEKQMRQLSVIPPMMFDAEQRRVKFINMNGLMEDPMKVYKDRQFMNVWTDHEKEIFKDKFIQHPKNFGLIASYLERKSVPDCVLYYYLTKKNENYKALVRRNYGKRRGRNQQIARPSQEEKVEEKEEDKAEKTEKKEEEKKDEEEKDEKEDSKENTKEKDKIDGTAEETEEREQATPRGRKTANSQGRRKGRITRSMTNEAAAASAAAAAATEEPPPPLPPPPEPISTEPVETSRWTEEEMEVAKKGLVEHGRNWAAIAKMVGTKSEAQCKNFYFNYKRRHNLDNLLQQHKQKTSRKPREERDVSQCESVASTVSAQEDEDIEASNEEENPEDSEGAENSSDTESAPSPSPVEAVKPSEDSPENATSRGNTEPAVELEPTTETAPSTSPSLAVPSTKPAEDESVETQVNDSISAETAEQMDVDQQEHSAEEGSVCDPPPATKADSVDVEVRVPENHASKVEGDNTKERDLDRASEKVEPRDEDLVVAQQINAQRPEPQSDNDSSATCSADEDVDGEPERQRMFPMDSKPSLLNPTGSILVSSPLKPNPLDLPQLQHRAAVIPPMVSCTPCNIPIGTPVSGYALYQRHIKAMHESALLEEQRQRQEQIDLECRSSTSPCGTSKSPNREWEGR

SEQ ID NO: 58339 - protein, 1071 aa, Homo sapiens
  Payload ID: 11421
  Gene Symbol: NCOR1
  Gene Name: nuclear receptor corepressor 1
  ENSP ID: ENSP00000379190
  MOD_RES (1)..(1): Any amino acid
XSVESIPSLRGSITQGTPIKFDNNSGQSAIKHNVKSLITGPSKLSRGMPPLEIVPENIKVVERGKYEDVKAGETVRSRHTSVVSSGPSVLRSTLHEAPKAQLSPGIYDDTSARRTPVSYQNTMSRGSPMMNRTSDVTISSNKSTNHERKSTLTPTQRESIPAKSPVPGVDPVVSHSPFDPHHRGSTAGEVYRSHLPTHLDPAMPFHRALDPAAAAYLFQRQLSPTPGYPSQYQLYAMENTRQTILNDYITSQQMQVNLRPDVARGLSPREQPLGLPYPATRGIIDLTNMPPTILVPHPGGTSTPPMDRITYIPGTQITFPPRPYNSASMSPGHPTHLAAAASAEREREREREKERERERIAAASSDLYLRPGSEQPGRPGSHGYVRSPSPSVRTQETMLQQRPSVFQGTNGTSVITPLDPTAQLRIMPLPAGGPSISQGLPASRYNTAADALAALVDAAASAPQMDVSKTKESKHEAARLEENLRSRSAAVSEQQQLEQKTLEVEKRSVQCLYTSSAFPSGKPQPHSSVVYSEAGKDKGPPPKSRYEEELRTRGKTTITAANFIDVIITRQIASDKDARERGSQSSDSSSSLSSHRYETPSDAIEVISPASSPAPPQEKLQTYQPEVVKANQAENDPTRQYEGPLHHYRPQQESPSPQQQLPPSSQAEGMGQVPRTHRLITLADHICQIITQDFARNQVSSQTPQQPPTSTFQNSPSALVSTPVRTKTSNRYSPESQAQSVHHQRPGSRVSPENLVDKSRGSRPGKSPERSHVSSEPYEPISPPQVPVVHEKQDSLLLLSQRGAEPAEQRNDARSPGSISYLPSFFTKLENTSPMVKSKKQEIFRKLNSSGGGDSDMAAAQPGTEIFNLPAVTTSGSVSSRGHSFADPASNLGLEDIIRKALMGSFDDKVEDHGVVMSQPMGVVPGTANTSVVTSGETRREEGDPSPHSGGVCKPKLISKSNSRKSKSPIPGQGYLGTERPSSVSSVHSEGDYHRQTPGWAWEDRPSSTGSTQFPYNPLTMRMLSSTPPTPIACAPSAVNQAAPHQQNRIWEREPAPLLSAQYETLSDSDD

SEQ ID NO: 58340 - protein, 2337 aa, Homo sapiens
  Payload ID: 11421
  Gene Symbol: NCOR1
  Gene Name: nuclear receptor corepressor 1
  Uniprot ID: O75376
  ENSP ID: ENSP00000379192
MSSSGYPPNQGAFSTEQSRYPPHSVQYTFPNTRHQQEFAVPDYRSSHLEVSQASQLLQQQQQQQLRRRPSLLSEFHPGSDRPQERRTSYEPFHPGPSPVDHDSLESKRPRLEQVSDSHFQRVSAAVLPLVHPLPEGLRASADAKKDPAFGGKHEAPSSPISGQPCGDDQNASPSKLSKEELIQSMDRVDREIAKVEQQILKLKKKQQQLEEEAAKPPEPEKPVSPPPVEQKHRSIVQIIYDENRKKAEEAHKIFEGLGPKVELPLYNQPSDTKVYHENIKTNQVMRKKLILFFKRRNHARKQREQKICQRYDQLMEAWEKKVDRIENNPRRKAKESKTREYYEKQFPEIRKQREQQERFQRVGQRGAGLSATIARSEHEISEIIDGLSEQENNEKQMRQLSVIPPMMFDAEQRRVKFINMNGLMEDPMKVYKDRQFMNVWTDHEKEIFKDKFIQHPKNFGLIASYLERKSVPDCVLYYYLTKKNENYKALVRRNYGKRRGRNQQIARPSQEEKVEEKEEDKAEKTEKKEEEKKDEEEKDEKEDSKENTKEKDKIDGTAEETEEREQATPRGRKTANSQGRRKGRITRSMTNEAAAASAAAAAATEEPPPPLPPPPEPISTEPVETSRWTEEEMEVAKKGLVEHGRNWAAIAKMVGTKSEAQCKNFYFNYKRRHNLDNLLQQHKQKTSRKPREERDVSQCESVASTVSAQEDEDIEASNEEENPEDSEGAENSSDTESAPSPSPVEAVKPSEDSPENATSRGNTEPAVELEPTTETAPSTSPSLAVPSTKPAEDESVETQVNDSISAETAEQMDVDQQEHSAEEGSVCDPPPATKADSVDVEVRVPENHASKVEGDNTKERDLDRASEKVEPRDEDLVVAQQINAQRPEPQSDNDSSATCSADEDVDGEPERQRMFPMDSKPSLLNPTGSILVSSPLKPNPLDLPQLQHRAAVIPPMVSCTPCNIPIGTPVSGYALYQRHIKAMHESALLEEQRQRQEQIDLECRSSTSPCGTSKSPNREWEVLQPAPHQVITNLPEGVRLPTTRPTRPPPPLIPSSKTTVASEKPSFIMGGSISQGTPGTYLTSHNQASYTQETPKPSVGSISLGLPRQQESAKSATLPYIKQEEFSPRSQNSQPEGLLVRAQHEGVVRGTAGAIQEGSITRGTPTSKISVESIPSLRGSITQGTPALPQTGIPTEALVKGSISRMPIEDSSPEKGREEAASKGHVIYEGKSGHILSYDNIKNAREGTRSPRTAHEISLKRSYESVEGNIKQGMSMRESPVSAPLEGLICRALPRGSPHSDLKERTVLSGSIMQGTPRATTESFEDGLKYPKQIKRESPPIRAFEGAITKGKPYDGITTIKEMGRSIHEIPRQDILTQESRKTPEVVQSTRPIIEGSISQGTPIKFDNNSGQSAIKHNVKSLITGPSKLSRGMPPLEIVPENIKVVERGKYEDVKAGETVRSRHTSVVSSGPSVLRSTLHEAPKAQLSPGIYDDTSARRTPVSYQNTMSRGSPMMNRTSDVTISSNKSTNHERKSTLTPTQRESIPAKSPVPGVDPVVSHSPFDPHHRGSTAGEVYRSHLPTHLDPAMPFHRALDPAAAAYLFQRQLSPTPGYPSQYQLYAMENTRQTILNDYITSQQMQVNLRPDVARGLSPREQPLGLPYPATRGIIDLTNMPPTILVPHPGGTSTPPMDRITYIPGTQITFPPRPYNSASMSPGHPTHLAAAASAEREREREREKERERERIAAASSDLYLRPGSEQPGRPGSHGYVRSPSPSVRTQETMLQQRPSVFQGTNGTSVITPLDPTAQLRIMPLPAGGPSISQGLPASRYNTAADALAALVDAAASAPQMDVSKTKEISSHRYETPSDAIEVISPASSPAPPQEKLQTYQPEVVKANQAENDPTRQYEGPLHHYRPQQESPSPQQQLPPSSQAEGMGQVPRTHRLITLADHICQIITQDFARNQVSSQTPQQPPTSTFQNSPSALVSTPVRTKTSNRYSPESQAQSVHHQRPGSRVSPENLVDKSRGSRPGKSPERSHVSSEPYEPISPPQVPVVHEKQDSLLLLSQRGAEPAEQRNDARSPGSISYLPSFFTKLENTSPMVKSKKQEIFRKLNSSGGGDSDMAAAQPGTEIFNLPAVTTSGSVSSRGHSFADPASNLGLEDIIRKALMGSFDDKVEDHGVVMSQPMGVVPGTANTSVVTSGETRREEGDPSPHSGGVCKPKLISKSNSRKSKSPIPGQGYLGTERPSSVSSVHSEGDYHRQTPGWAWEDRPSSTGSTQFPYNPLTMRMLSSTPPTPIACAPSAVNQAAPHQQNRIWEREPAPLLSAQYETLSDSDD

SEQ ID NO: 58341 - protein, 2343 aa, Homo sapiens
  Payload ID: 11421
  Gene Symbol: NCOR1
  Gene Name: nuclear receptor corepressor 1
  ENSP ID: ENSP00000379198
MSSSGYPPNQGAFSTEQSRYPPHSVQYTFPNTRHQQDPAFGGKHEAPSSPISGQPCGDDQNASPSKLSKEELIQSMDRVDREIAKVEQQILKLKKKQQQLEEEAAKPPEPEKPVSPPPVEQKHRSIVQIIYDENRKKAEEAHKIFEGLGPKVELPLYNQPSDTKVYHENIKTNQVMRKKLILFFKRRNHARKQREQKICQRYDQLMEAWEKKVDRIENNPRRKAKESKTREYYEKQFPEIRKQREQQERFQRVGQRGAGLSATIARSEHEISEIIDGLSEQENNEKQMRQLSVIPPMMFDAEQRRVKFINMNGLMEDPMKVYKDRQFMNVWTDHEKEIFKDKFIQHPKNFGLIASYLERKSVPDCVLYYYLTKKNENYKALVRRNYGKRRGRNQQIARPSQEEKVEEKEEDKAEKTEKKEEEKKDEEEKDEKEDSKENTKEKDKIDGTAEETEEREQATPRGRKTANSQGRRKGRITRSMTNEAAAASAAAAAATEEPPPPLPPPPEPISTEPVETSRWTEEEMEVAKKGLVEHGRNWAAIAKMVGTKSEAQCKNFYFNYKRRHNLDNLLQQHKQKTSRKPREERDVSQCESVASTVSAQEDEDIEASNEEENPEDSEGAENSSDTESAPSPSPVEAVKPSEDSPENATSRGNTEPAVELEPTTETAPSTSPSLAVPSTKPAEDESVETQVNDSISAETAEQMDVDQQEHSAEEGSVCDPPPATKADSVDVEVRVPENHASKVEGDNTKERDLDRASEKVEPRDEDLVVAQQINAQRPEPQSDNDSSATCSADEDVDGEPERQRMFPMDSKPSLLNPTGSILVSSPLKPNPLDLPQLQHRAAVIPPMVSCTPCNIPIGTPVSGYALYQRHIKAMHESALLEEQRQRQEQIDLECRSSTSPCGTSKSPNREWEVLQPAPHQVITNLPEGVRLPTTRPTRPPPPLIPSSKTTVASEKPSFIMGGSISQGTPGTYLTSHNQASYTQETPKPSVGSISLGLPRQQESAKSATLPYIKQEEFSPRSQNSQPEGLLVRAQHEGVVRGTAGAIQEGSITRGTPTSKISVESIPSLRGSITQGTPALPQTGIPTEALVKGSISRMPIEDSSPEKGREEAASKGHVIYEGKSGHILSYDNIKNAREGTRSPRTAHEISLKRSYESVEGNIKQGMSMRESPVSAPLEGLICRALPRGSPHSDLKERTVLSGSIMQGTPRATTESFEDGLKYPKQIKRESPPIRAFEGAITKGKPYDGITTIKEMGRSIHEIPRQDILTQESRKTPEVVQSTRPIIEGSISQGTPIKFDNNSGQSAIKHNVKSLITGPSKLSRGMPPLEIVPENIKVVERGKYEDVKAGETVRSRHTSVVSSGPSVLRSTLHEAPKAQLSPGIYDDTSARRTPVSYQNTMSRGSPMMNRTSDVSSNKSTNHERKSTLTPTQRESIPAKSPVPGVDPVVSHSPFDPHHRGSTAGEVYRSHLPTHLDPAMPFHRALDPAAAYLFQRQLSPTPGYPSQYQLYAMENTRQTILNDYITSQQMQVNLRPDVARGLSPREQPLGLPYPATRGIIDLTNMPPTILVPHPGGTSTPPMDRITYIPGTQITFPPRPYNSASMSPGHPTHLAAAASAEREREREREKERERERIAAASSDLYLRPGSEQPGRPGSHGYVRSPSPSVRTQETMLQQRPSVFQGTNGTSVITPLDPTAQLRIMPLPAGGPSISQGLPASRYNTAADALAALVDAAASAPQMDVSKTKESKHEAARLEENLRSRSAAVSEQQQLEQKTLEVEKRSVQCLYTSSAFPSGKPQPHSSVVYSEAGKDKGPPPKSRYEEELRTRGKTTITAANFIDVIITRQIASDKDARERGSQSSDSSSSLSSHRYETPSDAIEVISPASSPAPPQEKLQTYQPEVVKANQAENDPTRQYEGPLHHYRPQQESPSPQQQLPPSSQAEGMGQVPRTHRLITLADHICQIITQDFARNQVSSQTPQQPPTSTFQNSPSALVSTPVRTKTSNRYSPESQAQSVHHQRPGSRVSPENLVDKSRGSRPGKSPERSHVSSEPYEPISPPQVPVVHEKQDSLLLLSQRGAEPAEQRNDARSPGSISYLPSFFTKLENTSPMVKSKKQEIFRKLNSSGGGDSDMAAAQPGTEIFNLPAVTTSGSVSSRGHSFADPASNLGLEDIIRKALMGSFDDKVEDHGVVMSQPMGVVPGTANTSVVTSGETRREEGDPSPHSGVCKPKLISKSNSRKSKSPIPGQGYLGTERPSSVSSVHSEGDYHRQTPGWAWEDRPSSTGSTQFPYNPLTMRMLSSTPPTPIACAPSAVNQAAPHQQNRIWEREPAPLLSAQYETLSDSDD

SEQ ID NO: 58342 - protein, 537 aa, Homo sapiens
  Payload ID: 11421
  Gene Symbol: NCOR1
  Gene Name: nuclear receptor corepressor 1
  ENSP ID: ENSP00000387727
MSSSGYPPNQGAFSTEQSRYPPHSVQYTFPNTRHQQEFAVPDYRSSHLEVSQASQLLQQQQQQQLRRRPSLLSEFHPGSDRPQERRTSYEPFHPGPSPVDHDSLESKRPRLEQVSDSHFQRVSAAVLPLVHPLPEGLRASADAKKDPAFGGKHEAPSSPISGQPCGDDQNASPSKLSKEELIQSMDRVDREIAKVEQQILKLKKKQQQLEEEAAKPPEPEKPVSPPPVEQKHRSIVQIIYDENRKKAEEAHKIFEGLGPKVELPLYNQPSDTKVYHENIKTGVPARRMMKNQVMRKKLILFFKRRNHARKQREQKICQRYDQLMEAWEKKVDRIENNPRRKAKESKTREYYEKQFPEIRKQREQQERFQRVGQRGAGLSATIARSEHEISEIIDGLSEQENNEKQMRQLSVIPPMMFDAEQRRVKFINMNGLMEDPMKVYKDRQFMNVWTDHEKEIFKDKFIQHPKNFGLIASYLERKSVPDCVLYYYLTKKNENYKALVRRNYGKRRGRNQQIARPSQEEKVEEKEEDKAEKTEKK

SEQ ID NO: 58343 - protein, 92 aa, Homo sapiens
  Payload ID: 11421
  Gene Symbol: NCOR1
  Gene Name: nuclear receptor corepressor 1
  ENSP ID: ENSP00000389839
  MOD_RES (1)..(1): Any amino acid
XRSSTSPCGTSKSPNREWEGKSVAYMPYAEVKRALEQEAQMHNTAARSASPCRLSPREVSKAAPQPDMSAARYSVPPVLQPAPHQVITNLPE

SEQ ID NO: 58344 - protein, 545 aa, Homo sapiens
  Payload ID: 11421
  Gene Symbol: NCOR1
  Gene Name: nuclear receptor corepressor 1
  ENSP ID: ENSP00000407998
MSSSGYPPNQGAFSTEQSRYPPHSVQYTFPNTRHQQEFAVPDYRSSHLEVSQASQLLQQQQQQQLRRRPSLLSEFHPGSDRPQERRTSYEPFHPGPSPVDHDSLESKRPRLEQVSDSHFQRVSAAVLPLVHPLPEGLRASADAKKDPAFGGKHEAPSSPISGQPCGDDQNASPSKLSKEELIQSMDRVDREIAKVEQQILKLKKKQQQLEEEAAKPPEPEKPVSPPPVEQKHRSIVQIIYDENRKKAEEAHKIFEGLGPKVELPLYNQPSDTKVYHENIKTNQVMRKKLILFFKRRNHARKQREQKICQRYDQLMEAWEKKVDRIENNPRRKAKESKTREYYEKQFPEIRKQREQQERFQRVGQRGAGLSATIARSEHEISEIIDGLSEQENNEKQMRQLSVIPPMMFDAEQRRVKFINMNGLMEDPMKVYKDRQFMNVWTDHEKEIFKDKFIQHPKNFGLIASYLERKSVPDCVLYYYLTKKNENYKALVRRNYGKRRGRNQQQIARPSQEEKVEEKEEDKAEKTEKKEEEKKDEEEKDEKEDS

SEQ ID NO: 58345 - protein, 125 aa, Homo sapiens
  Payload ID: 11421
  Gene Symbol: NCOR1
  Gene Name: nuclear receptor corepressor 1
  ENSP ID: ENSP00000410784
MSSSGYPPNQGAFSTEQSRYPPHSVQYTFPNTRHQQEFAVPDYRSSHLEVSQASQLLQQQQQQQLRRRPSLLSEFHPGSDRPQERRTSYEPFHPGPSPVDHDSLESKRPRLEQVSDSHFQRVSAA

SEQ ID NO: 58346 - protein, 183 aa, Homo sapiens
  Payload ID: 11421
  Gene Symbol: NCOR1
  Gene Name: nuclear receptor corepressor 1
  ENSP ID: ENSP00000461959
ENTSPMVKSKKQEIFRKLNSSGGGDSDMAAQPGTEIFNLPAVTTSGSVSSRGHSFADPASNLGLEDIIRKALMGSFDDKVEDHGVVMSQPMGVVPGTANTSVVTSGETRREEGDPSPHSGGVCKPKLISKSNSRKSKSPIPGQGYLGTERPSSVSSVHSEGDYHRQTPGWAWEDRPSSTGSTQ

SEQ ID NO: 58347 - protein, 184 aa, Homo sapiens
  Payload ID: 11421
  Gene Symbol: NCOR1
  Gene Name: nuclear receptor corepressor 1
  ENSP ID: ENSP00000462281
  MOD_RES (1)..(1): Any amino acid
XTQDFARNQVSSQTPQQPPTSTFQNSPSALVSTPVRTKTSNRYSPESQAQSVHHQRPGSRVSPENLVDKSRGRPGKSPERSHVSSEPYEPISPPQVPVVHEKQDSLLLLSQRGAEPAEQRNDARSPGSISYLPSFFTKLENTSPMVKSKKQEIFRKLNSSGGGDSDMAAAQPGTEIFNLPAVTT

SEQ ID NO: 58348 - protein, 546 aa, Homo sapiens
  Payload ID: 11421
  Gene Symbol: NCOR1
  Gene Name: nuclear receptor corepressor 1
  ENSP ID: ENSP00000462308
MSSSGYPPNQGAFSTEQSRYPPHSVQYTFPNTRHQQEFAVPDYRSSHLEVSQASQLLQQQQQQQLRRRPSLLSEFHPGSDRPQERRTSYEPFHPGPSPVDHDSLESKRPRLEQVSDSHFQRVSAAVLPLVHPLPEGLRASADAKKDPAFGGKHEAPSSPISGQPCGDDQNASPSKLSKEELIQSMDRVDREIAKVEQQILKLKKKQQQLEEEAAKPPEPEKPVSPPPVEQKHRSIVQIIYDENRKKAEEAHKIFEGLGPKVELPLYNQPSDTKVYHENIKTGVPARRMMKNQVMRKKLILFFKRRNHARKQREQKICQRYDQLMEAWEKKVDRIENNPRRKAKESKTREYYEKQFPEIRKQREQQERFQRVGQRGAGLSATIARSEHEISEIIDGLSEQENNEKQMRQLSVIPPMMFDAEQRRVKFINMNGLMEDPMKVYKDRQFMNVWTDHEKEIFKDKFIQHPKNFGLIASYLERKSVPDCVLYYYLTKKNENYKALVRRNYGKRRGRNQQQIARPSQEEKVEEKEEDKAEKTEKKEEEKKDEE

SEQ ID NO: 58349 - protein, 88 aa, Homo sapiens
  Payload ID: 11421
  Gene Symbol: NCOR1
  Gene Name: nuclear receptor corepressor 1
  ENSP ID: ENSP00000462794
MSSSGYPPNQGAFSTEQSRYPPHSVQYTFPNTRHQQEFAVPDYRSSHLEVSQASQLLQQQQQQQLRRRPSLLSEFHPGSDSVYFLCMY

SEQ ID NO: 58350 - protein, 217 aa, Homo sapiens
  Payload ID: 11421
  Gene Symbol: NCOR1
  Gene Name: nuclear receptor corepressor 1
  ENSP ID: ENSP00000463169
  MOD_RES (1)..(1): Any amino acid
XDFARNQVSSQTPQQPPTSTFQNSPSALVSTPVRTKTSNRYSPESQAQSVHHQRPGSRVSPENLVDKSRGSRPGKSPERSHVSSEPYEPISPPQVPVVHEKQDSLLLLSQRGAEPAEQRNDARSPGSISYLPSFFTKLENTSPMVKSKKQEIFPAAQPGTEIFNLPAVTTSGSVSSRGHSFADPASNLGLEDIIRKALMGSFDDKVEDHGVVMSQPM

SEQ ID NO: 58351 - protein, 57 aa, Homo sapiens
  Payload ID: 11421
  Gene Symbol: NCOR1
  Gene Name: nuclear receptor corepressor 1
  ENSP ID: ENSP00000474008
RREEGDPSPHSGTAFILVLFCCFSPKKPVYFPNSDASLRHFIYVFMCSESPLRVSVT

SEQ ID NO: 58352 - protein, 2079 aa, Homo sapiens
  Payload ID: 11422
  Gene Symbol: NCOR2
  Gene Name: nuclear receptor corepressor 2
  Uniprot ID: Q9Y618
  ENSP ID: ENSP00000348551
FMQHPKNFGLIASFLERKTVAECVLYYYLTKKNENYKSLVRRSYRRRGKSQQQQQQQQQQQQQQQQQPMPRSSQEEKDEKEKEKEAEKEEEKPEVENDKEDLLKEKTDDTSGEDNDEKEAVASKGRKTANSQGRRKGRITRSMANEANSEEAITPQQSAELASMELNESSRWTEEEMETAKKGLLEHGRNWSAIARMVGSKTVSQCKNFYFNYKKRQNLDEILQQHKLKMEKERNARRKKKKAPAAASEEAAFPPVVEDEEMEASGVSGNEEEMVEEAEALHASGNEVPRGECSGPATVNNSSDTESIPSPHTEAAKDTGQNGPKPPATLGADGPPPGPPTPPPEDIPAPTEPTPASEATGAPTPPPAPPSPSAPPPVVPKEEKEEETAAAPPVEEGEEQKPPAAEELAVDTGKAEEPVKSECTEEAEEGPAKGKDAEAAEATAEGALKAEKKEGGSGRATTAKSSGAPQDSDSSATCSADEVDEAEGGDKNRLLSPRPSLLTPTGDPRANASPQKPLDLKQLKQRAAAIPPIQVTKVHEPPREDAAPTKPAPPAPPPPQNLQPESDAPQQPGSSPRGKSRSPAPPADKEAEKPVFFPAFAAEAQKLPGDPPCWTSGLPFPVPPREVIKASPHAPDPSAFSYAPPGHPLPLGLHDTARPVLPRPPTISNPPPLISSAKHPSVLERQIGAISQGMSVQLHVPYSEHAKAPVGPVTMGLPLPMDPKKLAPFSGVKQEQLSPRGQAGPPESLGVPTAQEASVLRGTALGSVPGGSITKGIPSTRVPSDSAITYRGSITHGTPADVLYKGTITRIIGEDSPSRLDRGREDSLPKGHVIYEGKKGHVLSYEGGMSVTQCSKEDGRSSSGPPHETAAPKRTYDMMEGRVGRAISSASIEGLMGRAIPPERHSPHHLKEQHHIRGSITQGIPRSYVEAQEDYLRREAKLLKREGTPPPPPPSRDLTEAYKTQALGPLKLKPAHEGLVATVKEAGRSIHEIPREELRHTPELPLAPRPLKEGSITQGTPLKYDTGASTTGSKKHDVRSLIGSPGRTFPPVHPLDVMADARALERACYEESLKSRPGTASSSGGSIARGAPVIVPELGKPRQSPLTYEDHGAPFAGHLPRGSPVTTREPTPRLQEGSLSSSKASQDRKLTSTPREIAKSPHSTVPEHHPHPISPYEHLLRGVSGVDLYRSHIPLAFDPTSIPRGIPLDAAAAYYLPRHLAPNPTYPHLYPPYLIRGYPDTAALENRQTIINDYITSQQMHHNAATAMAQRADMLRGLSPRESSLALNYAAGPRGIIDLSQVPHLPVLVPPTPGTPATAMDRLAYLPTAPQPFSSRHSSSPLSPGGPTHLTKPTTTSSSERERDRDRERDRDREREKSILTSTTTVEHAPIWRPGTEQSSGSSGGGGGSSSRPASHSHAHQHSPISPRTQDALQQRPSVLHNTGMKGIITAVEPSTPTVLRSTSTSSPVRPAATFPPATHCPLGGTLDGVYPTLMEPVLLPKEAPRVARPERPRADTGHAFLAKPPARSGLEPASSPSKGSEPRPLVPPVSGHATIARTPAKNLAPHHASPDPPAPPASASDPHREKTQSKPFSIQELELRSLGYHGSSYSPEGVEPVSPVSSPSLTHDKGLPKHLEELDKSHLEGELRPKQPGPVKLGGEAAHLPHLRPLPESQPSSSPLLQTAPGVKGHQRVVTLAQHISEVITQDYTRHHPQQLSAPLPAPLYSFPGASCPVLDLRRPPSDLYLPPPDHGAPARGSPHSEGGKRSPEPNKTSVLGGGEDGIEPVSPPEGMTEPGHSRSAVYPLLYRDGEQTEPSRMGSKSPGNTSQPPAFFSKLTESNSAMVKSKKQEINKKLNTHNRNEPEYNISQPGTEIFNMPAITGTGLMTYRSQAVQEHASTNMGLEAIIRKALMGKYDQWEESPPLSANAFNPLNASASLPAAMPITAADGRSDHTLTSPGGGGKAKVSGRPSSRKAKSPAPGLASGDRPPSVSSVHSEGDCNRRTPLTNRVWEDRPSSAGSTPFPYNPLIMRLQAGVMASPPPPGLPAGSGPLAGPHHAWDEEPKPLLCSQYETLSDSE

SEQ ID NO: 58353 - protein, 2514 aa, Homo sapiens
  Payload ID: 11422
  Gene Symbol: NCOR2
  Gene Name: nuclear receptor corepressor 2
  ENSP ID: ENSP00000384018
MSGSTQPVAQTWRATEPRYPPHSLSYPVQIARTHTDVGLLEYQHHSRDYASHLSPGSIIQPQRRRPSLLSEFQPGNERSQELHLRPESHSYLPELGKSEMEFIESKRPRLELLPDPLLRPSPLLATGQPAGSEDLTKDRSLTGKLEPVSPPSPPHTDPELELVPPRLSKEELIQNMDRVDREITMVEQQISKLKKKQQQLEEEAAKPPEPEKPVSPPPIESKHRSLVQIIYDENRKKAEAAHRILEGLGPQVELPLYNQPSDTRQYHENIKINQAMRKKLILYFKRRNHARKQWEQKFCQRYDQLMEAWEKKVERIENNPRRRAKESKVREYYEKQFPEIRKQRELQERMQSRVGQRGSGLSMSAARSEHEVSEIIDGLSEQENLEKQMRQLAVIPPMLYDADQQRIKFINMNGLMADPMKVYKDRQVMNMWSEQEKETFREKFMQHPKNFGLIASFLERKTVAECVLYYYLTKKNENYKSLVRRSYRRRGKSQQQQQQQQQQQQQQQQQPMPRSSQEEKDEKEKEKEAEKEEEKPEVENDKEDLLKEKTDDTSGEDNDEKEAVASKGRKTANSQGRRKGRITRSMANEANSEEAITPQQSAELASMELNESSRWTEEEMETAKKGLLEHGRNWSAIARMVGSKTVSQCKNFYFNYKKRQNLDEILQQHKLKMEKERNARRKKKKAPAAASEEAAFPPVVEDEEMEASGVSGNEEEMVEEAEALHASGNEVPRGECSGPATVNNSSDTESIPSPHTEAAKDTGQNGPKPPATLGADGPPPGPPTPPPEDIPAPTEPTPASEATGAPTPPPAPPSPSAPPPVVPKEEKEEETAAAPPVEEGEEQKPPAAEELAVDTGKAEEPVKSECTEEAEEGPAKGKDAEAAEATAEGALKAEKKEGGSGRATTAKSSGAPQDSDSSATCSADEVDEAEGGDKNRLLSPRPSLLTPTGDPRANASPQKPLDLKQLKQRAAAIPPIQVTKVHEPPREDAAPTKPAPPAPPPPQNLQPESDAPQQPGSSPRGKSRSPAPPADKEAFAAEAQKLPGDPPCWTSGLPFPVPPREVIKASPHAPDPSAFSYAPPGHPLPLGLHDTARPVLPRPPTISNPPPLISSAKHPSVLERQIGAISQGMSVQLHVPYSEHAKAPVGPVTMGLPLPMDPKKLAPFSGVKQEQLSPRGQAGPPESLGVPTAQEASVLRGTALGSVPGGSITKGIPSTRVPSDSAITYRGSITHGTPADVLYKGTITRIIGEDSPSRLDRGREDSLPKGHVIYEGKKGHVLSYEGGMSVTQCSKEDGRSSSGPPHETAAPKRTYDMMEGRVGRAISSASIEGLMGRAIPPERHSPHHLKEQHHIRGSITQGIPRSYVEAQEDYLRREAKLLKREGTPPPPPPSRDLTEAYKTQALGPLKLKPAHEGLVATVKEAGRSIHEIPREELRHTPELPLAPRPLKEGSITQGTPLKYDTGASTTGSKKHDVRSLIGSPGRTFPPVHPLDVMADARALERACYEESLKSRPGTASSSGGSIARGAPVIVPELGKPRQSPLTYEDHGAPFAGHLPRGSPVTTREPTPRLQEGSLSSSKASQDRKLTSTPREIAKSPHSTVPEHHPHPISPYEHLLRGVSGVDLYRSHIPLAFDPTSIPRGIPLDAAAAYYLPRHLAPNPTYPHLYPPYLIRGYPDTAALENRQTIINDYITSQQMHHNAATAMAQRADMLRGLSPRESSLALNYAAGPRGIIDLSQVPHLPVLVPPTPGTPATAMDRLAYLPTAPQPFSSRHSSSPLSPGGPTHLTKPTTTSSSERERDRDRERDRDREREKSILTSTTTVEHAPIWRPGTEQSSGSSGGGGGSSSRPASHSHAHQHSPISPRTQDALQQRPSVLHNTGMKGIITAVEPSTPTVLRSTSTSSPVRPAATFPPATHCPLGGTLDGVYPTLMEPVLLPKEAPRVARPERPRADTGHAFLAKPPARSGLEPASSPSKGSEPRPLVPPVSGHATIARTPAKNLAPHHASPDPPAPPASASDPHREKTQSKPFSIQELELRSLGYHGSSYSPEGVEPVSPVSSPSLTHDKGLPKHLEELDKSHLEGELRPKQPGPVKLGGEAAHLPHLRPLPESQPSSSPLLQTAPGVKGHQRVVTLAQHISEVITQDYTRHHPQQLSAPLPAPLYSFPGASCPVLDLRRPPSDLYLPPPDHGAPARGSPHSEGGKRSPEPNKTSVLGGGEDGIEPVSPPEGMTEPGHSRSAVYPLLYRDGEQTEPSRMGSKSPGNTSQPPAFFSKLTESNSAMVKSKKQEINKKLNTHNRNEPEYNISQPGTEIFNMPAITGTGLMTYRSQAVQEHASTNMGLEAIIRKALMGKYDQWEESPPLSANAFNPLNASASLPAAMPITAADGRSDHTLTSPGGGGKAKVSGRPSSRKAKSPAPGLASGDRPPSVSSVHSEGDCNRRTPLTNRVWEDRPSSAGSTPFPYNPLIMRLQAGVMASPPPPGLPAGSGPLAGPHHAWDEEPKPLLCSQYETLSDSE

SEQ ID NO: 58354 - protein, 2458 aa, Homo sapiens
  Payload ID: 11422
  Gene Symbol: NCOR2
  Gene Name: nuclear receptor corepressor 2
  ENSP ID: ENSP00000384202
MSGSTQPVAQTWRATEPRYPPHSLSYPVQIARTHTDVGLLEYQHHSRDYASHLSPGSIIQPQRRRPSLLSEFQPGNERSQELHLRPESHSYLPELGKSEMEFIESKRPRLELLPDPLLRPSPLLATGQPAGSEDLTKDRSLTGKLEPVSPPSPPHTDPELELVPPRLSKEELIQNMDRVDREITMVEQQISKLKKKQQQLEEEAAKPPEPEKPVSPPPIESKHRSLVQIIYDENRKKAEAAHRILEGLGPQVELPLYNQPSDTRQYHENIKINQAMRKKLILYFKRRNHARKQWEQKFCQRYDQLMEAWEKKVERIENNPRRRAKESKVREYYEKQFPEIRKQRELQERMQRVGQRGSGLSMSAARSEHEVSEIIDGLSEQENLEKQMRQLAVIPPMLYDADQQRIKFINMNGLMADPMKVYKDRQVMNMWSEQEKETFREKFMQHPKNFGLIASFLERKTVAECVLYYYLTKKNENYKSLVRRSYRRRGKSQQQQQQQQQQQQQQQQQPMPRSSQEEKDEKEKEKEAEKEEEKPEVENDKEDLLKEKTDDTSGEDNDEKEAVASKGRKTANSQGRRKGRITRSMANEANSEEAITPQQSAELASMELNESSRWTEEEMETAKKGLLEHGRNWSAIARMVGSKTVSQCKNFYFNYKKRQNLDEILQQHKLKMEKERNARRKKKKAPAAASEEAAFPPVVEDEEMEASGVSGNEEEMVEEAEATVNNSSDTESIPSPHTEAAKDTGQNGPKPPATLGADGPPPGPPTPPPEDIPAPTEPTPASEATGAPTPPPAPPSPSAPPPVVPKEEKEEETAAAPPVEEGEEQKPPAAEELAVDTGKAEEPVKSECTEEAEEGPAKGKDAEAAEATAEGALKAEKKEGGSGRATTAKSSGAPQDSDSSATCSADEVDEAEGGDKNRLLSPRPSLLTPTGDPRANASPQKPLDLKQLKQRAAAIPPIQVTKVHEPPREDAAPTKPAPPAPPPPQNLQPESDAPQQPGSSPRGKSRSPAPPADKEAEKPVFFPAFAAEAQKLPGDPPCWTSGLPFPVPPREVIKASPHAPDPSAFSYAPPGHPLPLGLHDTARPVLPRPPTISNPPPLISSAKHPSVLERQIGAISQGMSVQLHVPYSEHAKAPVGPVTMGLPLPMDPKKLAPFSGVKQEQLSPRGQAGPPESLGVPTAQEASVLRGTALGSVPGGSITKGIPSTRVPSDSAITYRGSITHGTPADVLYKGTITRIIGEDSPSRLDRGREDSLPKGHVIYEGKKGHVLSYEGGMSVTQCSKEDGRSSSGPPHETAAPKRTYDMMEGRVGRAISSASIEGLMGRAIPPERHSPHHLKEQHHIRGSITQGIPRSYVEAQEDYLRREAKLLKREGTPPPPPPSRDLTEAYKTQALGPLKLKPAHEGLVATVKEAGRSIHEIPREELRHTPELPLAPRPLKEGSITQGTPLKYDTGASTTGSKKHDVRSLIGSPGRTFPPVHPLDVMADARALERACYEESLKSRPGTASSSGGSIARGAPVIVPELGKPRQSPLTYEDHGAPFAGHLPRGSPVTTREPTPRLQEGSLSSSKASQDRKLTSTPREIAKSPHSTVPEHHPHPISPYEHLLRGVSGVDLYRSHIPLAFDPTSIPRGIPLDAAAAYYLPRHLAPNPTYPHLYPPYLIRGYPDTAALENRQTIINDYITSQQMHHNAATAMAQRADMLRGLSPRESSLALNYAAGPRGIIDLSQVPHLPVLVPPTPGTPATAMDRLAYLPTAPQPFSSRHSSSPLSPGGPTHLTKPTTTSSSERERDRDRERDRDREREKSILTSTTTVEHAPIWRPGTEQSSGSSGGGGGSSSRPASHSHAHQHSPISPRTQDALQQRPSVLHNTGMKGIITAVEPSTPTVLRSTSTSSPVRPAATFPPATHCPLGGTLDGVYPTLMEPVLLPKEAPRVARPERPRADTGHAFLAKPPARSGLEPASSPSKGSEPRPLVPPVSGHATIARTPAKNLAPHHASPDPPAPPASASDPHREKTQSKPFSIQELELRSLGYHGSSYSPEGVEPVSPVSSPSLTHDKGLPKHLEELDKSHLEGELRPKQPGPVKLGGEAAHLPHLRPLPESQPSSSPLLQTAPGVKGHQRVVTLAQHISEVITQDYTRHHPQQLSAPLPAPLYSFPGASCPVLDLRRPPSDLYLPPPDHGAPARGSPHSEGGKRSPEPNKTSVLGGGEDGIEPVSPPEGMTEPGHSRSAVYPLLYRDGEQTEPSRMGSKSPGNTSQPPAFFSKLTESNSAMVKSKKQEINKKLNTHNRNEPEYNISQPGTEIFNMPAITGTGLMTYRSQAVQEHASTNMGLEAIIRKALMGGGGKAKVSGRPSSRKAKSPAPGLASGDRPPSVSSVHSEGDCNRRTPLTNRVWEDRPSSAGSTPFPYNPLIMRLQAGVMASPPPPGLPAGSGPLAGPHHAWDEEPKPLLCSQYETLSDSE

SEQ ID NO: 58355 - protein, 2062 aa, Homo sapiens
  Payload ID: 11422
  Gene Symbol: NCOR2
  Gene Name: nuclear receptor corepressor 2
  ENSP ID: ENSP00000385618
FMQHPKNFGLIASFLERKTVAECVLYYYLTKKNENYKSLVRRSYRRRGKSQQQQQQQQQQQQQQQQQPMPRSSQEEKDEKEKEKEAEKEEEKPEVENDKEDLLKEKTDDTSGEDNDEKEAVASKGRKTANSQGRRKGRITRSMANEANSEEAITPQQSAELASMELNESSRWTEEEMETAKKGLLEHGRNWSAIARMVGSKTVSQCKNFYFNYKKRQNLDEILQQHKLKMEKERNARRKKKKAPAAASEEAAFPPVVEDEEMEASGVSGNEEEMVEEAEATVNNSSDTESIPSPHTEAAKDTGQNGPKPPATLGADGPPPGPPTPPPEDIPAPTEPTPASEATGAPTPPPAPPSPSAPPPVVPKEEKEEETAAAPPVEEGEEQKPPAAEELAVDTGKAEEPVKSECTEEAEEGPAKGKDAEAAEATAEGALKAEKKEGGSGRATTAKSSGAPQDSDSSATCSADEVDEAEGGDKNRLLSPRPSLLTPTGDPRANASPQKPLDLKQLKQRAAAIPPIQVTKVHEPPREDAAPTKPAPPAPPPPQNLQPESDAPQQPGSSPRGKSRSPAPPADKEAEKPVFFPAFAAEAQKLPGDPPCWTSGLPFPVPPREVIKASPHAPDPSAFSYAPPGHPLPLGLHDTARPVLPRPPTISNPPPLISSAKHPSVLERQIGAISQGMSVQLHVPYSEHAKAPVGPVTMGLPLPMDPKKLAPFSGVKQEQLSPRGQAGPPESLGVPTAQEASVLRGTALGSVPGGSITKGIPSTRVPSDSAITYRGSITHGTPADVLYKGTITRIIGEDSPSRLDRGREDSLPKGHVIYEGKKGHVLSYEGGMSVTQCSKEDGRSSSGPPHETAAPKRTYDMMEGRVGRAISSASIEGLMGRAIPPERHSPHHLKEQHHIRGSITQGIPRSYVEAQEDYLRREAKLLKREGTPPPPPPSRDLTEAYKTQALGPLKLKPAHEGLVATVKEAGRSIHEIPREELRHTPELPLAPRPLKEGSITQGTPLKYDTGASTTGSKKHDVRSLIGSPGRTFPPVHPLDVMADARALERACYEESLKSRPGTASSSGGSIARGAPVIVPELGKPRQSPLTYEDHGAPFAGHLPRGSPVTTREPTPRLQEGSLSSSKASQDRKLTSTPREIAKSPHSTVPEHHPHPISPYEHLLRGVSGVDLYRSHIPLAFDPTSIPRGIPLDAAAAYYLPRHLAPNPTYPHLYPPYLIRGYPDTAALENRQTIINDYITSQQMHHNAATAMAQRADMLRGLSPRESSLALNYAAGPRGIIDLSQVPHLPVLVPPTPGTPATAMDRLAYLPTAPQPFSSRHSSSPLSPGGPTHLTKPTTTSSSERERDRDRERDRDREREKSILTSTTTVEHAPIWRPGTEQSSGSSGGGGGSSSRPASHSHAHQHSPISPRTQDALQQRPSVLHNTGMKGIITAVEPSTPTVLRSTSTSSPVRPAATFPPATHCPLGGTLDGVYPTLMEPVLLPKEAPRVARPERPRADTGHAFLAKPPARSGLEPASSPSKGSEPRPLVPPVSGHATIARTPAKNLAPHHASPDPPAPPASASDPHREKTQSKPFSIQELELRSLGYHGSSYSPEGVEPVSPVSSPSLTHDKGLPKHLEELDKSHLEGELRPKQPGPVKLGGEAAHLPHLRPLPESQPSSSPLLQTAPGVKGHQRVVTLAQHISEVITQDYTRHHPQQLSAPLPAPLYSFPGASCPVLDLRRPPSDLYLPPPDHGAPARGSPHSEGGKRSPEPNKTSVLGGGEDGIEPVSPPEGMTEPGHSRSAVYPLLYRDGEQTEPSRMGSKSPGNTSQPPAFFSKLTESNSAMVKSKKQEINKKLNTHNRNEPEYNISQPGTEIFNMPAITGTGLMTYRSQAVQEHASTNMGLEAIIRKALMGKYDQWEESPPLSANAFNPLNASASLPAAMPITAADGRSDHTLTSPGGGGKAKVSGRPSSRKAKSPAPGLASGDRPPSVSSVHSEGDCNRRTPLTNRVWEDRPSSAGSTPFPYNPLIMRLQAGVMASPPPPGLPAGSGPLAGPHHAWDEEPKPLLCSQYETLSDSE

SEQ ID NO: 58356 - protein, 129 aa, Homo sapiens
  Payload ID: 11422
  Gene Symbol: NCOR2
  Gene Name: nuclear receptor corepressor 2
  ENSP ID: ENSP00000391389
  MOD_RES (1)..(1): Any amino acid
XHNRNEPEYNISQPGTEIFNMPAITGTGLMTYRSQAVQEHASTNMGLEAIIRKALMGGGGKAKVSGRPSSRKAKSPAPGLASGDRPPSVSSVHSEGDCNRRTPLTNRVWEDRPSSAGGHQVPRHSPTTP

SEQ ID NO: 58357 - protein, 156 aa, Homo sapiens
  Payload ID: 11422
  Gene Symbol: NCOR2
  Gene Name: nuclear receptor corepressor 2
  ENSP ID: ENSP00000396044
  MOD_RES (1)..(1): Any amino acid
XESSLALNYAAGPRGGPTHLTKPTTTSSSERERDRDRERDRDREREKSILTSTTTVEHAPIWRPGTEQSSGSSGGGGGSSSRPASHSHAHQHSPISPRTQDALQQRPSVLHNTGMKGIITAVEPSTPTVLRSTSTSSPVRPAATFPPATHCPLGGT

SEQ ID NO: 58358 - protein, 134 aa, Homo sapiens
  Payload ID: 11422
  Gene Symbol: NCOR2
  Gene Name: nuclear receptor corepressor 2
  ENSP ID: ENSP00000398963
  MOD_RES (1)..(1): Any amino acid
XVLGGGEDGIEPVSPPEGMTEPGHSRSAVYPLLYRDGEQTEPSRMGSKSPGNTSQPPAFFSKLTESNSAMVKSKKQEINKKLNTHNRNEPEYNISQPGTEIFNMPAITGTVLVHKKKFSRLQSLPLNLCQTSPL

SEQ ID NO: 58359 - protein, 2504 aa, Homo sapiens
  Payload ID: 11422
  Gene Symbol: NCOR2
  Gene Name: nuclear receptor corepressor 2
  ENSP ID: ENSP00000400281
MSGSTQPVAQTWRATEPRYPPHSLSYPVQIARTHTDVGLLEYQHHSRDYASHLSPGSIIQPQRRRPSLLSEFQPGNERSQELHLRPESHSYLPELGKSEMEFIESKRPRLELLPDPLLRPSPLLATGQPAGSEDLTKDRSLTGKLEPVSPPSPPHTDPELELVPPRLSKEELIQNMDRVDREITMVEQQISKLKKKQQQLEEEAAKPPEPEKPVSPPPIESKHRSLVQIIYDENRKKAEAAHRILEGLGPQVELPLYNQPSDTRQYHENIKINQAMRKKLILYFKRRNHARKQWEQKFCQRYDQLMEAWEKKVERIENNPRRRAKESKVREYYEKQFPEIRKQRELQERMQRVGQRGSGLSMSAARSEHEVSEIIDGLSEQENLEKQMRQLAVIPPMLYDADQQRIKFINMNGLMADPMKVYKDRQVMNMWSEQEKETFREKFMQHPKNFGLIASFLERKTVAECVLYYYLTKKNENYKSLVRRSYRRRGKSQQQQQQQQQQQQQQQQQPMPRSSQEEKDEKEKEKEAEKEEEKPEVENDKEDLLKEKTDDTSGEDNDEKEAVASKGRKTANSQGRRKGRITRSMANEANSEEAITPQQSAELASMELNESSRWTEEEMETAKKGLLEHGRNWSAIARMVGSKTVSQCKNFYFNYKKRQNLDEILQQHKLKMEKERNARRKKKKAPAAASEEAAFPPVVEDEEMEASGVSGNEEEMVEEAEATVNNSSDTESIPSPHTEAAKDTGQNGPKPPATLGADGPPPGPPTPPPEDIPAPTEPTPASEATGAPTPPPAPPSPSAPPPVVPKEEKEEETAAAPPVEEGEEQKPPAAEELAVDTGKAEEPVKSECTEEAEEGPAKGKDAEAAEATAEGALKAEKKEGGSGRATTAKSSGAPQDSDSSATCSADEVDEAEGGDKNRLLSPRPSLLTPTGDPRANASPQKPLDLKQLKQRAAAIPPIQVTKVHEPPREDAAPTKPAPPAPPPPQNLQPESDAPQQPGSSPRGKSRSPAPPADKEAEKPVFFPAFAAEAQKLPGDPPCWTSGLPFPVPPREVIKASPHAPDPSAFSYAPPGHPLPLGLHDTARPVLPRPPTISNPPPLISSAKHPSVLERQIGAISQGMSVQLHVPYSEHAKAPVGPVTMGLPLPMDPKKLAPFSGVKQEQLSPRGQAGPPESLGVPTAQEASVLRGTALGSVPGGSITKGIPSTRVPSDSAITYRGSITHGTPADVLYKGTITRIIGEDSPSRLDRGREDSLPKGHVIYEGKKGHVLSYEGGMSVTQCSKEDGRSSSGPPHETAAPKRTYDMMEGRVGRAISSASIEGLMGRAIPPERHSPHHLKEQHHIRGSITQGIPRSYVEAQEDYLRREAKLLKREGTPPPPPPSRDLTEAYKTQALGPLKLKPAHEGLVATVKEAGRSIHEIPREELRHTPELPLAPRPLKEGSITQGTPLKYDTGASTTGSKKHDVRSLIGSPGRTFPPVHPLDVMADARALERACYEESLKSRPGTASSSGGSIARGAPVIVPELGKPRQSPLTYEDHGAPFAGHLPRGSPVTTREPTPRLQEGSLSSSKASQDRKLTSTPREIAKSPHSTVPEHHPHPISPYEHLLRGVSGVDLYRSHIPLAFDPTSIPRGIPLDAAAAYYLPRHLAPNPTYPHLYPPYLIRGYPDTAALENRQTIINDYITSQQMHHNAATAMAQRADMLRGLSPRESSLALNYAAGPRGIIDLSQVPHLPVLVPPTPGTPATAMDRLAYLPTAPQPFSSRHSSSPLSPGGPTHLTKPTTTSSSERERDRDRERDRDREREKSILTSTTTVEHAPIWRPGTEQSSGSSGGGGGSSSRPASHSHAHQHSPISPRTQDALQQRPSVLHNTGMKGIITAVEPSTPTVLRSTSTSSPVRPAATFPPATHCPLGGTLDGVYPTLMEPVLLPKEAPRVARPERPRADTGHAFLAKPPARSGLEPASSPSKGSEPRPLVPPVSGHATIARTPAKNLAPHHASPDPPAPPASASDPHREKTQSKPFSIQELELRSLGYHGSSYSPEGVEPVSPVSSPSLTHDKGLPKHLEELDKSHLEGELRPKQPGPVKLGGEAAHLPHLRPLPESQPSSSPLLQTAPGVKGHQRVVTLAQHISEVITQDYTRHHPQQLSAPLPAPLYSFPGASCPVLDLRRPPSDLYLPPPDHGAPARGSPHSEGGKRSPEPNKTSVLGGGEDGIEPVSPPEGMTEPGHSRSAVYPLLYRDGEQTEPSRMGSKSPGNTSQPPAFFSKLTESNSAMVKSKKQEINKKLNTHNRNEPEYNISQPGTEIFNMPAITGTGLMTYRSQAVQEHASTNMGLEAIIRKALMGKYDQWEESPPLSANAFNPLNASASLPAAMPITAADGRSDHTLTSPGGGGKAKVSGRPSSRKAKSPAPGLASGDRPPSVSSVHSEGDCNRRTPLTNRVWEDRPSSAGSTPFPYNPLIMRLQAGVMASPPPPGLPAGSGPLAGPHHAWDEEPKPLLCSQYETLSDSE

SEQ ID NO: 58360 - protein, 225 aa, Homo sapiens
  Payload ID: 11422
  Gene Symbol: NCOR2
  Gene Name: nuclear receptor corepressor 2
  ENSP ID: ENSP00000400687
  MOD_RES (1)..(1): Any amino acid
XRHLAPNPTYPHLYPPYLIRGYPDTAALENRQTIINDYITSQQMHHNAATAMAQRADMLRGLSPRESSLALNYAAGPRGTPATAMDRLAYLPTAPQPFSSRHSSSPLSPGGPTHLTKPTTTSSSERERDRDRERDRDREREKSILTSTTTVEHAPIWRPGTEQSSGSSGGGGGSSSRPASHSHAHQHSPISPRTQDALQQRPSVLHNTGMKGIITAVEPSTPTVL

SEQ ID NO: 58361 - protein, 1451 aa, Homo sapiens
  Payload ID: 11422
  Gene Symbol: NCOR2
  Gene Name: nuclear receptor corepressor 2
  ENSP ID: ENSP00000402808
MSGSTQPVAQTWRATEPRYPPHSLSYPVQIARTHTDVGLLEYQHHSRDYASHLSPGSIIQPQRRRPSLLSEFQPGNERSQELHLRPESHSYLPELGKSEMEFIESKRPRLELLPDPLLRPSPLLATGQPAGSEDLTKDRSLTGKLEPVSPPSPPHTDPELELVPPRLSKEELIQNMDRVDREITMVEQQISKLKKKQQQLEEEAAKPPEPEKPVSPPPIESKHRSLVQIIYDENRKKAEAAHRILEGLGPQVELPLYNQPSDTRQYHENIKINQAMRKKLILYFKRRNHARKQWEQKFCQRYDQLMEAWEKKVERIENNPRRRAKESKVREYYEKQFPEIRKQRELQERMQSRVGQRGSGLSMSAARSEHEVSEIIDGLSEQENLEKQMRQLAVIPPMLYDADQQRIKFINMNGLMADPMKVYKDRQVMNMWSEQEKETFREKFMQHPKNFGLIASFLERKTVAECVLYYYLTKKNENYKSLVRRSYRRRGKSQQQQQQQQQQQQQQQQQPMPRSSQEEKDEKEKEKEAEKEEEKPEVENDKEDLLKEKTDDTSGEDNDEKEAVASKGRKTANSQGRRKGRITRSMANEANSEEAITPQQSAELASMELNESSRWTEEEMETAKKGLLEHGRNWSAIARMVGSKTVSQCKNFYFNYKKRQNLDEILQQHKLKMEKERNARRKKKKAPAAASEEAAFPPVVEDEEMEASGVSGNEEEMVEEAEALHASGNEVPRGECSGPATVNNSSDTESIPSPHTEAAKDTGQNGPKPPATLGADGPPPGPPTPPPEDIPAPTEPTPASEATGAPTPPPAPPSPSAPPPVVPKEEKEEETAAAPPVEEGEEQKPPAAEELAVDTGKAEEPVKSECTEEAEEGPAKGKDAEAAEATAEGALKAEKKEGGSGRATTAKSSGAPQDSDSSATCSADEVDEAEGGDKNRLLSPRPSLLTPTGDPRANASPQKPLDLKQLKQRAAAIPPIQVTKVHEPPREDAAPTKPAPPAPPPPQNLQPESDAPQQPGSSPRGKSRSPAPPADKEAEKPVFFPAFAAEAQKLPGDPPCWTSGLPFPVPPREVIKASPHAPDPSAFSYAPPGHPLPLGLHDTARPVLPRPPTISNPPPLISSAKHPSVLERQIGAISQGMSVQLHVPYSEHAKAPVGPVTMGLPLPMDPKKLAPFSGVKQEQLSPRGQAGPPESLGVPTAQEASVLRGTALGSVPGGSITKGIPSTRVPSDSAITYRGSITHGTPADVLYKGTITRIIGEDSPSRLDRGREDSLPKGHVIYEGKKGHVLSYEGGMSVTQCSKEDGRSSSGPPHETAAPKRTYDMMEGRVGRAISSASIEGLMGRAIPPERHSPHHLKEQHHIRGSITQGIPRSYVEAQEDYLRREAKLLKREGTPPPPPPSRDLTEAYKTQALGPLKLKPAHEGLVATVKEAGRSIHEIPREELRHTPELPLAP

SEQ ID NO: 58362 - protein, 245 aa, Homo sapiens
  Payload ID: 11422
  Gene Symbol: NCOR2
  Gene Name: nuclear receptor corepressor 2
  ENSP ID: ENSP00000403034
QELHLRPESHSYLPELGKSEMEFIESKRPRLELLPDPLLRPSPLLATGQPAGSEDLTKDRSLTGKLEPVSPPSPPHTDPELELVPPRLSKEELIQNMDRVDREITMVEQQISKLKKKQQQLEEEAAKPPEPEKPVSPPPIESKHRSLVQIIYDENRPLYNQPSDTRQYHENIKINQAMRKKLILYFKRRNHARKQWEQKFCQRYDQLMEAWEKKVERIENNPRRRAKESKVREYYEKQFPEIRKQ

SEQ ID NO: 58363 - protein, 493 aa, Homo sapiens
  Payload ID: 11422
  Gene Symbol: NCOR2
  Gene Name: nuclear receptor corepressor 2
  ENSP ID: ENSP00000405367
MSGSTQPVAQTWRATEPRYPPHSLSYPVQIARTHTDVGLLEYQHHSRDYASHLSPGSIIQPQRRRPSLLSEFQPGNERSQELHLRPESHSYLPELGKSEMEFIESKRPRLELLPDPLLRPSPLLATGQPAGSEDLTKDRSLTGKLEPVSPPSPPHTDPELELVPPRLSKEELIQNMDRVDREITMVEQQISKLKKKQQQLEEEAAKPPEPEKPVSPPPIESKHRSLVQIIYDENRKKAEAAHRILEGLGPQVELPLYNQPSDTRQYHENIKINQAMRKKLILYFKRRNHARKQWEQKFCQRYDQLMEAWEKKVERIENNPRRRAKESKVREYYEKQFPEIRKQRELQERMQSRVGQRGSGLSMSAARSEHEVSEIIDGLSEQENLEKQMRQLAVIPPMLYDADQQRIKFINMNGLMADPMKVYKDRQVMNMWSEQEKETFREKFMQHPKNFGLIASFLERKTVAECVLYYYLTKKNENYKSLVRRSYRRRGKS

SEQ ID NO: 58364 - protein, 132 aa, Homo sapiens
  Payload ID: 11422
  Gene Symbol: NCOR2
  Gene Name: nuclear receptor corepressor 2
  ENSP ID: ENSP00000407357
  MOD_RES (1)..(1): Any amino acid
XMGLEAIIRKALMGKYDQWEESPPLSANAFNPLNASASLPAAMPITAADGRSDHTLTSPGGGGKAKVSGRPSSRKAKSPAPGLASGDRPPSVSSVHSEGDCNRRTPLTNRVWEDRPSSAGGHQVPRHSPTTP

SEQ ID NO: 58365 - protein, 162 aa, Homo sapiens
  Payload ID: 11422
  Gene Symbol: NCOR2
  Gene Name: nuclear receptor corepressor 2
  ENSP ID: ENSP00000408247
MFPENLAEGETRMRGCLLEHGRNWSAIARMVGSKTVSQCKNFYFNYKKRQNLDEILQQHKLKMEKERNARRKKKKAPAAASEEAAFPPVVEDEEMEASGVSGNEEEMVEEAEATVNNSSDTESIPSPHTEAAKDTGQNGPKPPATLGADGPPPGPPTPPPED

SEQ ID NO: 58366 - protein, 275 aa, Homo sapiens
  Payload ID: 11422
  Gene Symbol: NCOR2
  Gene Name: nuclear receptor corepressor 2
  ENSP ID: ENSP00000443689
  MOD_RES (1)..(1): Any amino acid
XSQELHLRPESHSYLPELGKSEMEFIESKRPRLELLPDPLLRPSPLLATGQPAGSEDLTKDRSLTGKLEPVSPPSPPHTDPELELVPPRLSKEELIQNMDRVDREITMVEQQISKLKKKQQQLEEEAAKPPEPEKPVSPPPIESKHRSLVQIIYDENRKKAEAAHRILEGLGPQVELPLYNQPSDTRQYHENIKINQAMRKKLILYFKRRNHARKQWEQKFCQRYDQLMEAWEKKVERIENNPRRRAKESKVREYYEKQFPEIRKQRELQERMQR

SEQ ID NO: 58367 - protein, 1158 aa, Homo sapiens
  Payload ID: 11423
  Gene Symbol: NRIP1
  Gene Name: nuclear receptor interacting protein 1
  Uniprot ID: P48552
  ENSP ID: ENSP00000327213
MTHGEELGSDVHQDSIVLTYLEGLLMHQAAGGSGTAVDKKSAGHNEEDQNFNISGSAFPTCQSNGPVLNTHTYQGSGMLHLKKARLLQSSEDWNAAKRKRLSDSIMNLNVKKEALLAGMVDSVPKGKQDSTLLASLLQSFSSRLQTVALSQQIRQSLKEQGYALSHDSLKVEKDLRCYGVASSHLKTLLKKSKVKDQKPDTNLPDVTKNLIRDRFAESPHHVGQSGTKVMSEPLSCAARLQAVASMVEKRASPATSPKPSVACSQLALLLSSEAHLQQYSREHALKTQNANQAASERLAAMARLQENGQKDVGSYQLPKGMSSHLNGQARTSSSKLMASKSSATVFQNPMGIIPSSPKNAGYKNSLERNNIKQAANNSLLLHLLKSQTIPKPMNGHSHSERGSIFEESSTPTTIDEYSDNNPSFTDDSSGDESSYSNCVPIDLSCKHRTEKSESDQPVSLDNFTQSLLNTWDPKVPDVDIKEDQDTSKNSKLNSHQKVTLLQLLLGHKNEENVEKNTSPQGVHNDVSKFNTQNYARTSVIESPSTNRTTPVSTPPLLTSSKAGSPINLSQHSLVIKWNSPPYVCSTQSEKLTNTASNHSMDLTKSKDPPGEKPAQNEGAQNSATFSASKLLQNLAQCGMQSSMSVEEQRPSKQLLTGNTDKPIGMIDRLNSPLLSNKTNAVEENKAFSSQPTGPEPGLSGSEIENLLERRTVLQLLLGNPNKGKSEKKEKTPLRDESTQEHSERALSEQILMVKIKSEPCDDLQIPNTNVHLSHDAKSAPFLGMAPAVQRSAPALPVSEDFKSEPVSPQDFSFSKNGLLSRLLRQNQDSYLADDSDRSHRNNEMALLESKNLCMVPKKRKLYTEPLENPFKKMKNNIVDAANNHSAPEVLYGSLLNQEELKFSRNDLEFKYPAGHGSASESEHRSWARESKSFNVLKQLLLSENCVRDLSPHRSNSVADSKKKGHKNNVTNSKPEFSISSLNGLMYSSTQPSSCMDNRTFSYPGVVKTPVSPTFPEHLGCAGSRPESGLLNGCSMPSEKGPIKWVITDAEKNEYEKDSPRLTKTNPILYYMLQKGGNSVTSRETQDKDIWREASSAESVSQVTAKEELLPTAETKASFFNLRSPYNSHMGNNASRPHSANGEVYGLLGSVLTIKKESE

SEQ ID NO: 58368 - protein, 1158 aa, Homo sapiens; identical to SEQ ID NO: 58367
  Payload ID: 11423
  Gene Symbol: NRIP1
  Gene Name: nuclear receptor interacting protein 1
  Uniprot ID: P48552
  ENSP ID: ENSP00000383060

SEQ ID NO: 58369 - protein, 1158 aa, Homo sapiens; identical to SEQ ID NO: 58367
  Payload ID: 11423
  Gene Symbol: NRIP1
  Gene Name: nuclear receptor interacting protein 1
  Uniprot ID: P48552
  ENSP ID: ENSP00000383063

SEQ ID NO: 58370 - protein, 65 aa, Homo sapiens
  Payload ID: 11423
  Gene Symbol: NRIP1
  Gene Name: nuclear receptor interacting protein 1
  ENSP ID: ENSP00000412114
MTHGEELGSDVHQDSIVLTYLEGLLMHQAAGGSGTAVDKKSAGHNEEDQNFNISGSAFPTCQSNG

SEQ ID NO: 58371 - protein, 281 aa, Homo sapiens
  Payload ID: 11424
  Gene Symbol: NRIP2
  Gene Name: nuclear receptor interacting protein 2
  Uniprot ID: Q9BQI9
  ENSP ID: ENSP00000337501
MLFIFPLSLPWRPSCWKESCSTGQRQAGRSREDSVTPPPSSPWPTPPAGAMSTKQEARRDEGEARTRGQEAQLRDRAHLSQQRRLKQATQFLHKDSADLLPLDSLKRLGTSKDLQPRSVIQRRLVEGNPNWLQGEPPRMQDLIHGQESRRKTSRTEIPALLVNCKCQDQLLRVAVDTGTQYNRISAGCLSRLGLEKRVLKASAGDLAPGPPTQVEQLELQLGQETVVCSAQVVDAESPEFCLGLQTLLSLKCCIDLEHGVLRLKAPFSELPFLPLYQEPGQ

SEQ ID NO: 58372 - protein, 138 aa, Homo sapiens
  Payload ID: 11424
  Gene Symbol: NRIP2
  Gene Name: nuclear receptor interacting protein 2
  ENSP ID: ENSP00000438338
MSTKQEARRDEGEARTRGQEAQLRDRAHLSQQRRLKQATQFLHKDSADLLPLDSLKRLGTSKDLQPRSVIQRRLVEGNPNWLQGEPPRMQDLIHGQESRRKTSRTEIPALLVNCKCQDQLLRVAVDTGTQYNRISAGC

SEQ ID NO: 58373 - protein, 175 aa, Homo sapiens
  Payload ID: 11424
  Gene Symbol: NRIP2
  Gene Name: nuclear receptor interacting protein 2
  ENSP ID: ENSP00000446283
MSTKQEARRDEGEARTRGQEAQLRDRAHLSQQRRLKQATQFLHKDSADLLPLDSLKRLGTSKDLQPRSVIQRRLVEGNPNWLQGEPPRMQDLIHGQESRRKTSRTEIPALLVNCKCQDQLLRVAVDTGTQYNRISAGCLSRLGLEKRVLKASAGDLAPGPPTQVEQLELQLGQET

SEQ ID NO: 58374 - protein, 241 aa, Homo sapiens
  Payload ID: 11425
  Gene Symbol: NRIP3
  Gene Name: nuclear receptor interacting protein 3
  Uniprot ID: Q9NQ35
  ENSP ID: ENSP00000310205
MFYSGLLTEGGRKETDMREAASLRQQRRMKQAVQFIHKDSADLLPLDGLKKLGSSKDMQPHNILQRRLMETNLSKLRSGPRVPWASKTNKLNQAKSEGLKKSEEDDMILVSCQCAGKDVKALVDTGCLYNLISLACVDRLGLKEHVKSHKHEGEKLSLPRHLKVVGQIEHLVITLGSLRLDCPAAVVDDNEKNLSLGLQTLRSLKCIINLDKHRLIMGKTDKEEIPFVETVSLNEDNTSEA

SEQ ID NO: 58375 - protein, 65 aa, Homo sapiens
  Payload ID: 11425
  Gene Symbol: NRIP3
  Gene Name: nuclear receptor interacting protein 3
  ENSP ID: ENSP00000432002
ITLGSLRLDCPAAVVDDNEKNLSLGLQTLRSLKCIINLDKHRLIMGKTDKEEIPFVETVSLNEDK

SEQ ID NO: 58376 - protein, 141 aa, Homo sapiens
  Payload ID: 11425
  Gene Symbol: NRIP3
  Gene Name: nuclear receptor interacting protein 3
  ENSP ID: ENSP00000432451
MFYSGLLTEGGRKETDMREAASLRQQRRMKQAVQFIHKDSADLLPLDGLKKLGSSKDMQPHNILQRRLMETNLSKLRSGPRVPWASKTNKLNQAKSEGLKKSEEDDMILVSCQCAGKDVKALVDTGCLYNLISLACVDRLG

SEQ ID NO: 58377 - protein, 160 aa, Homo sapiens
  Payload ID: 11425
  Gene Symbol: NRIP3
  Gene Name: nuclear receptor interacting protein 3
  ENSP ID: ENSP00000433845
MFYSGLLTEGGRKETDMREAASLRQQRRMKQAVQFIHKDSADLLPLDGLKKLGSSKDMRRLMETNLSKLRSGPRVPWASKTNKLNQAKSEGLKKSEEDDMILVSCQCAGKDVKALVDTGCLYNLISLACVDRLGLKEHVKSHKHEGEKLSLPRHLKVVGQ

SEQ ID NO: 58378 - protein, 55 aa, Homo sapiens
  Payload ID: 11425
  Gene Symbol: NRIP3
  Gene Name: nuclear receptor interacting protein 3
  ENSP ID: ENSP00000435785
  MOD_RES (1)..(1): Any amino acid
XLGLQTLRSLKCIINLDKHRLIMGKTDKEEIPFVETVSLNEDKSREASELSKFIY

SEQ ID NO: 58379 - protein, 105 aa, Homo sapiens
  Payload ID: 11426
  Gene Symbol: NR0B1
  Gene Name: nuclear receptor subfamily 0, group B, member 1
  ENSP ID: ENSP00000368246
MLELAQDRLQFETVEVSEPSMLQKILTTRRRETGGNEPLPVPTLQHHLAPPAEARKVPSASQVQAIKCFLSKCWSLNISTKEYAYLKGTVLFNPGKGKENDCNHH

SEQ ID NO: 58380 - protein, 470 aa, Homo sapiens
  Payload ID: 11426
  Gene Symbol: NR0B1
  Gene Name: nuclear receptor subfamily 0, group B, member 1
  Uniprot ID: P51843
  ENSP ID: ENSP00000368253
MAGENHQWQGSILYNMLMSAKQTRAAPEAPETRLVDQCWGCSCGDEPGVGREGLLGGRNVALLYRCCFCGKDHPRQGSILYSMLTSAKQTYAAPKAPEATLGPCWGCSCGSDPGVGRAGLPGGRPVALLYRCCFCGEDHPRQGSILYSLLTSSKQTHVAPAAPEARPGGAWWDRSYFAQRPGGKEALPGGRATALLYRCCFCGEDHPQQGSTLYCVPTSTNQAQAAPEERPRAPWWDTSSGALRPVALKSPQVVCEAASAGLLKTLRFVKYLPCFQVLPLDQQLVLVRNCWASLLMLELAQDRLQFETVEVSEPSMLQKILTTRRRETGGNEPLPVPTLQHHLAPPAEARKVPSASQVQAIKCFLSKCWSLNISTKEYAYLKGTVLFNPDVPGLQCVKYIQGLQWGTQQILSEHTRMTHQGPHDRFIELNSTLFLLRFINANVIAELFFRPIIGTVSMDDMMLEMLCTKI

SEQ ID NO: 58381 - protein, 257 aa, Homo sapiens
  Payload ID: 11427
  Gene Symbol: NR0B2
  Gene Name: nuclear receptor subfamily 0, group B, member 2
  Uniprot ID: Q15466
  ENSP ID: ENSP00000254227
MSTSQPGACPCQGAASRPAILYALLSSSLKAVPRPRSRCLCRQHRPVQLCAPHRTCREALDVLAKTVAFLRNLPSFWQLPPQDQRRLLQGCWGPLFLLGLAQDAVTFEVAEAPVPSILKKILLEEPSSSGGSGQLPDRPQPSLAAVQWLQCCLESFWSLELSPKEYACLKGTILFNPDVPGLQAASHIGHLQQEAHWVLCEVLEPWCPAAQGRLTRVLLTASTLKSIPTSLLGDLFFRPIIGDVDIAGLLGDMLLLR

SEQ ID NO: 58382 - protein, 614 aa, Homo sapiens
  Payload ID: 11428
  Gene Symbol: NR1D1
  Gene Name: nuclear receptor subfamily 1, group D, member 1
  Uniprot ID: P20393
  ENSP ID: ENSP00000246672
MTTLDSNNNTGGVITYIGSSGSSPSRTSPESLYSDNSNGSFQSLTQGCPTYFPPSPTGSLTQDPARSFGSIPPSLSDDGSPSSSSSSSSSSSSFYNGSPPGSLQVAMEDSSRVSPSKSTSNITKLNGMVLLCKVCGDVASGFHYGVHACEGCKGFFRRSIQQNIQYKRCLKNENCSIVRINRNRCQQCRFKKCLSVGMSRDAVRFGRIPKREKQRMLAEMQSAMNLANNQLSSQCPLETSPTQHPTPGPMGPSPPPAPVPSPLVGFSQFPQQLTPPRSPSPEPTVEDVISQVARAHREIFTYAHDKLGSSPGNFNANHASGSPPATTPHRWENQGCPPAPNDNNTLAAQRHNEALNGLRQAPSSYPPTWPPGPAHHSCHQSNSNGHRLCPTHVYAAPEGKAPANSPRQGNSKNVLLACPMNMYPHGRSGRTVQEIWEDFSMSFTPAVREVVEFAKHIPGFRDLSQHDQVTLLKAGTFEVLMVRFASLFNVKDQTVMFLSRTTYSLQELGAMGMGDLLSAMFDFSEKLNSLALTEEELGLFTAVVLVSADRSGMENSASVEQLQETLLRALRALVLKNRPLETSRFTKLLLKLPDLRTLNNMHSEKLLSFRVDAQ

SEQ ID NO: 58383 - protein, 579 aa, Homo sapiens
  Payload ID: 11429
  Gene Symbol: NR1D2
  Gene Name: nuclear receptor subfamily 1, group D, member 2
  Uniprot ID: Q14995
  ENSP ID: ENSP00000310006
MEVNAGGVIAYISSSSSASSPASCHSEGSENSFQSSSSSVPSSPNSSNSDTNGNPKNGDLANIEGILKNDRIDCSMKTSKSSAPGMTKSHSGVTKFSGMVLLCKVCGDVASGFHYGVHACEGCKGFFRRSIQQNIQYKKCLKNENCSIMRMNRNRCQQCRFKKCLSVGMSRDAVRFGRIPKREKQRMLIEMQSAMKTMMNSQFSGHLQNDTLVEHHEQTALPAQEQLRPKPQLEQENIKSSSPPSSDFAKEEVIGMVTRAHKDTFMYNQEQQENSAESMQPQRGERIPKNMEQYNLNHDHCGNGLSSHFPCSESQQHLNGQFKGRNIMHYPNGHAICIANGHCMNFSNAYTQRVCDRVPIDGFSQNENKNSYLCNTGGRMHLVCPMSKSPYVDPHKSGHEIWEEFSMSFTPAVKEVVEFAKRIPGFRDLSQHDQVNLLKAGTFEVLMVRFASLFDAKERTVTFLSGKKYSVDDLHSMGAGDLLNSMFEFSEKLNALQLSDEEMSLFTAVVLVSADRSGIENVNSVEALQETLIRALRTLIMKNHPNEASIFTKLLLKLPDLRSLNNMHSEELLAFKVHP

SEQ ID NO: 58384 - protein, 408 aa, Homo sapiens
  Payload ID: 11429
  Gene Symbol: NR1D2
  Gene Name: nuclear receptor subfamily 1, group D, member 2
  ENSP ID: ENSP00000373283
MEVNAGGVIAYISSSSSASSPASCHSEGSENSFQSSSSSVPSSPNSSNSDTNGNPKNGDLANIEGILKNDRIDCSMKTSKSSAPGMTKSHSGVTKFSGMVLLCKVCGDVASGFHYGVHACEGCKGFFRRSIQQNIQYKKCLKNENCSIMRMNRNRCQQCRFKKCLSVGMSRDAVRFGRIPKREKQRMLIEMQSAMKTMMNSQFSGHLQNDTLVEHHEQTALPAQEQLRPKPQLEQENIKSSSPPSSDFAKEEVIGMVTRAHKDTFMYNQEQQENSAESMQPQRGERIPKNMEQYNLNHDHCGNGLSSHFPCSESQQHLNGQFKGRNIMHYPNGHAICIANGHCMNFSNAYTQRVCDRVPIDGFSQNENKNSYLCNTGGRMHLYSVHIQPKFHQKQQYHTISSLNHEVL

SEQ ID NO: 58385 - protein, 460 aa, Homo sapiens
  Payload ID: 11430
  Gene Symbol: NR1H2
  Gene Name: nuclear receptor subfamily 1, group H, member 2
  Uniprot ID: P55055
  ENSP ID: ENSP00000253727
MSSPTTSSLDTPLPGNGPPQPGAPSSSPTVKEEGPEPWPGGPDPDVPGTDEASSACSTDWVIPDPEEEPERKRKKGPAPKMLGHELCRVCGDKASGFHYNVLSCEGCKGFFRRSVVRGGARRYACRGGGTCQMDAFMRRKCQQCRLRKCKEAGMREQCVLSEEQIRKKKIRKQQQESQSQSQSPVGPQGSSSSASGPGASPGGSEAGSQGSGEGEGVQLTAAQELMIQQLVAAQLQCNKRSFSDQPKVTPWPLGADPQSRDARQQRFAHFTELAIISVQEIVDFAKQVPGFLQLGREDQIALLKASTIEIMLLETARRYNHETECITFLKDFTYSKDDFHRAGLQVEFINPIFEFSRAMRRLGLDDAEYALLIAINIFSADRPNVQEPGRVEALQQPYVEALLSYTRIKRPQDQLRFPRMLMKLVSLRTLSSVHSEQVFALRLQDKKLPPLLSEIWDVHE

SEQ ID NO: 58386 - protein, 363 aa, Homo sapiens
  Payload ID: 11430
  Gene Symbol: NR1H2
  Gene Name: nuclear receptor subfamily 1, group H, member 2
  Uniprot ID: P55055
  ENSP ID: ENSP00000396151
MSSPTTSSLDTPLPGNGPPQPGAPSSSPTVKEEGPEPWPGGPDPDVPGTDEASSACSTDWGVLSEEQIRKKKIRKQQQESQSQSQSPVGPQGSSSSASGPGASPGGSEAGSQGSGEGEGVQLTAAQELMIQQLVAAQLQCNKRSFSDQPKVTPWPLGADPQSRDARQQRFAHFTELAIISVQEIVDFAKQVPGFLQLGREDQIALLKASTIEIMLLETARRYNHETECITFLKDFTYSKDDFHRAGLQVEFINPIFEFSRAMRRLGLDDAEYALLIAINIFSADRPNVQEPGRVEALQQPYVEALLSYTRIKRPQDQLRFPRMLMKLVSLRTLSSVHSEQVFALRLQDKKLPPLLSEIWDVHE

SEQ ID NO: 58387 - protein, 228 aa, Homo sapiens
  Payload ID: 11430
  Gene Symbol: NR1H2
  Gene Name: nuclear receptor subfamily 1, group H, member 2
  ENSP ID: ENSP00000469778
MSSPTTSSLDTPLPGNGPPQPGAPSSSPTVKEEGPEPWPGGPDPDVPGTDEASSACSTDWVIPDPEEEPERKRKKGPAPKMLGHELCRVCGDKASGFHYNVLSCEGCKGFFRRSVVRGGARRYACRGGGTCQMDAFMRRKCQQCRLRKCKEAGMREQCVLSEEQIRKKKIRKQQQESQSQSQSPVGPQGSSSSASGPGASPGGSEAGSQGSGEGEGVQLTAAQELMIQ

SEQ ID NO: 58388 - protein, 115 aa, Homo sapiens
  Payload ID: 11430
  Gene Symbol: NR1H2
  Gene Name: nuclear receptor subfamily 1, group H, member 2
  ENSP ID: ENSP00000470518
MSSPTTSSLDTPLPGNGPPQPGAPSSSPTVKEEGPEPWPGGPDPDVPGTDEASSACSTDWVIPDPEEEPERKRKKGPAPKMLGHELCRVCGDKASGFHYNVLSCEGCKGFFRRSV

SEQ ID NO: 58389 - protein, 460 aa, Homo sapiens; identical to SEQ ID NO: 58385
  Payload ID: 11430
  Gene Symbol: NR1H2
  Gene Name: nuclear receptor subfamily 1, group H, member 2
  Uniprot ID: P55055
  ENSP ID: ENSP00000471194

SEQ ID NO: 58390 - protein, 430 aa, Homo sapiens
  Payload ID: 11430
  Gene Symbol: NR1H2
  Gene Name: nuclear receptor subfamily 1, group H, member 2
  ENSP ID: ENSP00000471294
MSSPTTSSLDTPLPGNGPPQPGAPSSSPTVKEEGPEPWPGGPDPDVPGTDEASSACSTDWVIPDPEEEPERKRKKGPAPKMLGHELCRVCGDKASGFHYNVLSCEGCKGFFRRSVVRGGARRYACRGGGTCQMDAFMRRKCQQCRLRKCKEAGMREQCVLSEEQIRKKKIRKQQQESQSQSQSPVGPQGSSSSASGPGASPGGSEAGSQGSGEGEGVQLTAAQELMIQQLVAAQLQCNKRSFSDQPKVTEIVDFAKQVPGFLQLGREDQIALLKASTIEIMLLETARRYNHETECITFLKDFTYSKDDFHRAGLQVEFINPIFEFSRAMRRLGLDDAEYALLIAINIFSADRPNVQEPGRVEALQQPYVEALLSYTRIKRPQDQLRFPRMLMKLVSLRTLSSVHSEQVFALRLQDKKLPPLLSEIWDVHE

SEQ ID NO: 58391 - protein, 209 aa, Homo sapiens
  Payload ID: 11430
  Gene Symbol: NR1H2
  Gene Name: nuclear receptor subfamily 1, group H, member 2
  ENSP ID: ENSP00000472138
MSSPTTSSLDTPLPGNGPPQPGAPSSSPTVKEEGPEPWPGGPDPDVPGTDEASSACSTDWVIPDPEEEPERKRKKGPAPKMLGHELCRVCGDKASGFHYNVLSCEGCKGFFRRSVVRGGARRYACRGGGTCQMDAFMRRKCQQCRLRKCKEAGMREQCVLSEEQIRKKKIRKQQQESQSQSQSPVGPQGSSSSASGPGASPGGSEAGSQ

SEQ ID NO: 58392 - protein, 176 aa, Homo sapiens
  Payload ID: 11430
  Gene Symbol: NR1H2
  Gene Name: nuclear receptor subfamily 1, group H, member 2
  ENSP ID: ENSP00000472271
MSSPTTSSLDTPLPGNGPPQPGAPSSSPTVKEEGPEPWPGGPDPDVPGTDEASSACSTDWVIPDPEEEPERKRKKGPAPKMLGHELCRVCGDKASGFHYNVLSCEGCKGFFRRSVASFLKNRSGRRRFGNSSRSHSHSRSHLWGRRAAAAQPLGLGLPLVDLRQAARAPGKARVSS

SEQ ID NO: 58393 - protein, 416 aa, Homo sapiens
  Payload ID: 11430
  Gene Symbol: NR1H2
  Gene Name: nuclear receptor subfamily 1, group H, member 2
  ENSP ID: ENSP00000472526
MSSPTTSSLDTPLPGNGPPQPGAPSSSPTVKEEGPEPWPGGPDPDVPGTDEASSACSTDWVIPDPEEEPERKRKKGPAPKMLGHELCRVCGDKASGFHYNVLSCEGCKGFFRRSVVRGGARRYACRGGGTCQMDAFMRRKCQQCRLRKCKEAGMREQCVLSEEQIRKKKIRKQQQESQSQSQSPVGPQGSSSSASGPGASPGGSEAGSQGSGEGEGVQLTAAQELMIQQLVAAQLQCNKRSFSDQPKVTLGREDQIALLKASTIEIMLLETARRYNHETECITFLKDFTYSKDDFHRAGLQVEFINPIFEFSRAMRRLGLDDAEYALLIAINIFSADRPNVQEPGRVEALQQPYVEALLSYTRIKRPQDQLRFPRMLMKLVSLRTLSSVHSEQVFALRLQDKKLPPLLSEIWDVHE

SEQ ID NO: 58394 - protein, 40 aa, Homo sapiens
  Payload ID: 11430
  Gene Symbol: NR1H2
  Gene Name: nuclear receptor subfamily 1, group H, member 2
  ENSP ID: ENSP00000473099
MSSPTTSSLDTPLPGNGPPQPGAPSSSPTVKEEGPEPWPG

SEQ ID NO: 58395 - protein, 402 aa, Homo sapiens
  Payload ID: 11431
  Gene Symbol: NR1H3
  Gene Name: nuclear receptor subfamily 1, group H, member 3
  Uniprot ID: Q13133
  ENSP ID: ENSP00000378793
MPHSAGGTAGVGLEAAEPTALLTRAEPPSEPTEIRPQKRKKGPAPKMLGNELCSVCGDKASGFHYNVLSCEGCKGFFRRSVIKGAHYICHSGGHCPMDTYMRRKCQECRLRKCRQAGMREECVLSEEQIRLKKLKRQEEEQAHATSLPPRASSPPQILPQLSPEQLGMIEKLVAAQQQCNRRSFSDRLRVTPWPMAPDPHSREARQQRFAHFTELAIVSVQEIVDFAKQLPGFLQLSREDQIALLKTSAIEVMLLETSRRYNPGSESITFLKDFSYNREDFAKAGLQVEFINPIFEFSRAMNELQLNDAEFALLIAISIFSADRPNVQDQLQVERLQHTYVEALHAYVSIHHPHDRLMFPRMLMKLVSLRTLSSVHSEQVFALRLQDKKLPPLLSEIWDVHE

SEQ ID NO: 58396 - protein, 387 aa, Homo sapiens
  Payload ID: 11431
  Gene Symbol: NR1H3
  Gene Name: nuclear receptor subfamily 1, group H, member 3
  Uniprot ID: Q13133
  ENSP ID: ENSP00000384745
MSLWLGAPVPDIPPDSAVELWKPGAQDASSQAQGGSSCILREEARMPHSAGGTAGVGLEAAEPTALLTRAEPPSEPTEIRPQKRKKGPAPKMLGNELCSVCGDKASGFHYNVLSCEGCKGFFRRSVIKGAHYICHSGGHCPMDTYMRRKCQECRLRKCRQAGMREECVLSEEQIRLKKLKRQEEEQAHATSLPPRASSPPQILPQLSPEQLGMIEKLVAAQQQCNRRSFSDRLRVTVMLLETSRRYNPGSESITFLKDFSYNREDFAKAGLQVEFINPIFEFSRAMNELQLNDAEFALLIAISIFSADRPNVQDQLQVERLQHTYVEALHAYVSIHHPHDRLMFPRMLMKLVSLRTLSSVHSEQVFALRLQDKKLPPLLSEIWDVHE

SEQ ID NO: 58397 - protein, 342 aa, Homo sapiens
  Payload ID: 11431
  Gene Symbol: NR1H3
  Gene Name: nuclear receptor subfamily 1, group H, member 3
  ENSP ID: ENSP00000385073
MPHSAGGTAGVGLEAAEPTALLTRAEPPSEPTEIRPQKRKKGPAPKMLGNELCSVCGDKASGFHYNVLSCEGCKGFFRRSVIKGAHYICHSGGHCPMDTYMRRKCQECRLRKCRQAGMREECVLSEEQIRLKKLKRQEEEQAHATSLPPRASSPPQILPQLSPEQLGMIEKLVAAQQQCNRRSFSDRLRVTVMLLETSRRYNPGSESITFLKDFSYNREDFAKAGLQVEFINPIFEFSRAMNELQLNDAEFALLIAISIFSADRPNVQDQLQVERLQHTYVEALHAYVSIHHPHDRLMFPRMLMKLVSLRTLSSVHSEQVFALRLQDKKLPPLLSEIWDVHE

SEQ ID NO: 58398 - protein, 387 aa, Homo sapiens; identical to SEQ ID NO: 58396
  Payload ID: 11431
  Gene Symbol: NR1H3
  Gene Name: nuclear receptor subfamily 1, group H, member 3
  Uniprot ID: Q13133
  ENSP ID: ENSP00000385801

SEQ ID NO: 58399 - protein, 447 aa, Homo sapiens
  Payload ID: 11431
  Gene Symbol: NR1H3
  Gene Name: nuclear receptor subfamily 1, group H, member 3
  Uniprot ID: Q13133
  ENSP ID: ENSP00000387946
MSLWLGAPVPDIPPDSAVELWKPGAQDASSQAQGGSSCILREEARMPHSAGGTAGVGLEAAEPTALLTRAEPPSEPTEIRPQKRKKGPAPKMLGNELCSVCGDKASGFHYNVLSCEGCKGFFRRSVIKGAHYICHSGGHCPMDTYMRRKCQECRLRKCRQAGMREECVLSEEQIRLKKLKRQEEEQAHATSLPPRASSPPQILPQLSPEQLGMIEKLVAAQQQCNRRSFSDRLRVTPWPMAPDPHSREARQQRFAHFTELAIVSVQEIVDFAKQLPGFLQLSREDQIALLKTSAIEVMLLETSRRYNPGSESITFLKDFSYNREDFAKAGLQVEFINPIFEFSRAMNELQLNDAEFALLIAISIFSADRPNVQDQLQVERLQHTYVEALHAYVSIHHPHDRLMFPRMLMKLVSLRTLSSVHSEQVFALRLQDKKLPPLLSEIWDVHE

SEQ ID NO: 58400 - protein, 193 aa, Homo sapiens
  Payload ID: 11431
  Gene Symbol: NR1H3
  Gene Name: nuclear receptor subfamily 1, group H, member 3
  ENSP ID: ENSP00000391005
MSLWLGAPVPDIPPDSAVELWKPGAQDASSQAQGGSSCILREEARMPHSAGGTAGVGLEAAEPTALLTRAEPPSEPTEIRPQKRKKGPAPKMLGNELCSVCGDKASGFHYNVLSCEGCKGFFRRSVIKGAHYICHSGGHCPMDTYMRRKCQECRLRKCRQAGMREECVLSEEQIRLKKLKRQEEEQAHATSLP

SEQ ID NO: 58401 - protein, 68 aa, Homo sapiens
  Payload ID: 11431
  Gene Symbol: NR1H3
  Gene Name: nuclear receptor subfamily 1, group H, member 3
  ENSP ID: ENSP00000396132
MSLWLGAPVPDIPPDSAVELWKPGAQDASSQAQGGSSCILREEARMPHSAGGTAGVGLEAAEPTALLT

SEQ ID NO: 58402 - protein, 212 aa, Homo sapiens
  Payload ID: 11431
  Gene Symbol: NR1H3
  Gene Name: nuclear receptor subfamily 1, group H, member 3
  ENSP ID: ENSP00000403696
MSLWLGAPVPDIPPDSAVELWKPGAQDASSQAQGGSSCILREEARMPHSAGGTAGVGLEAAEPTALLTRAEPPSEPTEIRPQKRKKGPAPKMLGNELCSVCGDKASGFHYNVLSCEGCKGFFRRSVIKGAHYICHSGGHCPMDTYMRRKCQECRLRKCRQAGMREECVLSEEQIRLKKLKRQEEEQAHATSLPPRASSPPQILPQLSPEQLG

SEQ ID NO: 58403 - protein, 202 aa, Homo sapiens
  Payload ID: 11431
  Gene Symbol: NR1H3
  Gene Name: nuclear receptor subfamily 1, group H, member 3
  ENSP ID: ENSP00000403798
MSLWLGAPVPDIPPDSAVELWKPGAQDASSQAQGGSSCILREEARMPHSAGGTAGVGLEAAEPTALLTRAEPPSEPTEIRPQKRKKGPAPKMLGNELCSVCGDKASGFHYNVLSCEGCKGFFRRSVIKGAHYICHSGGHCPMDTYMRRKCQECRLRKCRQAGMREECVLSEEQIRLKKLKRQEEEQAHATSLPPRASSPPQI

SEQ ID NO: 58404 - protein, 114 aa, Homo sapiens
  Payload ID: 11431
  Gene Symbol: NR1H3
  Gene Name: nuclear receptor subfamily 1, group H, member 3
  ENSP ID: ENSP00000406692
MSLWLGAPVPDIPPAQTLRWSCGSQAHRMQAARPREAAAASSERKPGCPTLLGVLQGWGWRLQSPQPCSPGQSPLQNPQRSVHKSGKRGQPPKCWGTSYAACVGTRPRASTTMF

SEQ ID NO: 58405 - protein, 54 aa, Homo sapiens
  Payload ID: 11431
  Gene Symbol: NR1H3
  Gene Name: nuclear receptor subfamily 1, group H, member 3
  ENSP ID: ENSP00000407716
MSLWLGAPVPDIPPESSPESFLVVLASRPDHLSPGSSAWPLQAPAQSSPVWICC

SEQ ID NO: 58406 - protein, 134 aa, Homo sapiens
  Payload ID: 11431
  Gene Symbol: NR1H3
  Gene Name: nuclear receptor subfamily 1, group H, member 3
  ENSP ID: ENSP00000412636
MPHSAGGTAGVGLEAAEPTALLTRAEPPSEPTEIRPQKRKKGPAPKMLGNELCSVCGDKASGFHYNVLSCEGCKGFFRRSVIKGAHYICHSGGHCPMDTYMRRKCQECRLRKCRQAGMREECVLSEEQIRLKKL

SEQ ID NO: 58407 - protein, 77 aa, Homo sapiens
  Payload ID: 11431
  Gene Symbol: NR1H3
  Gene Name: nuclear receptor subfamily 1, group H, member 3
  ENSP ID: ENSP00000413095
MSLWLGAPVPDIPPDSAVELWKPGAQDASSQAQGGSSCILREEARMPHSAGGTAGVGLEAAEPTALLTRAEPPSEPT

SEQ ID NO: 58408 - protein, 205 aa, Homo sapiens
  Payload ID: 11431
  Gene Symbol: NR1H3
  Gene Name: nuclear receptor subfamily 1, group H, member 3
  ENSP ID: ENSP00000415591
MSLWLGAPVPDIPPDSAVELWKPGAQDASSQAQGGSSCILREEARMPHSAGGTAGVGLEAAEPTALLTRAEPPSEPTEIRPQKRKKGPAPKMLGNELCSVCGDKASGFHYNVLSCEGCKGFFRRSVIKGAHYICHSGGHCPMDTYMRRKCQECRLRKCRQAGMREECVLSEEQIRLKKLKRQEEEQAHATSLPPRASSPPQILPQ

SEQ ID NO: 58409 - protein, 447 aa, Homo sapiens; identical to SEQ ID NO: 58399
  Payload ID: 11431
  Gene Symbol: NR1H3
  Gene Name: nuclear receptor subfamily 1, group H, member 3
  Uniprot ID: Q13133
  ENSP ID: ENSP00000420656

SEQ ID NO: 58410 - protein, 296 aa, Homo sapiens
  Payload ID: 11431
  Gene Symbol: NR1H3
  Gene Name: nuclear receptor subfamily 1, group H, member 3
  ENSP ID: ENSP00000432073
MLGNELCSVCGDKASGFHYNVLSCEGCKGFFRRSVIKGAHYICHSGGHCPMDTYMRRKCQECRLRKCRQAGMREECVLSEEQIRLKKLKRQEEEQAHATSLPPRASSPPQILPQLSPEQLGMIEKLVAAQQQCNRRSFSDRLRVTVMLLETSRRYNPGSESITFLKDFSYNREDFAKAGLQVEFINPIFEFSRAMNELQLNDAEFALLIAISIFSADRPNVQDQLQVERLQHTYVEALHAYVSIHHPHDRLMFPRMLMKLVSLRTLSSVHSEQVFALRLQDKKLPPLLSEIWDVHE

SEQ ID NO: 58411 - protein, 466 aa, Homo sapiens
  Payload ID: 11431
  Gene Symbol: NR1H3
  Gene Name: nuclear receptor subfamily 1, group H, member 3
  ENSP ID: ENSP00000433271
MPHSAGGTAGVGLEAAEPTALLTRAEPPSEPTEIRPQKRKKGPAPKMLGNELCSVCGDKASGFHYNVLSCEGCKGFFRRSVIKGAHYICHSGGHCPMDTYMRRKCQECRLRKCRQAGMREECVLSEEQIRLKKLKRQEEEQAHATSLPPRASSPPQILPQLSPEQLGMIEKLVAAQQQCNRRSFSDRLRVTPWPMAPDPHSREARQQRFAHFTELAIVSVQEIVDFAKQLPGFLQLSREDQIALLKTSAIEVAGEGQGMKGEAEWDYLWEGPPDIELGEPNLLGSRDEENRPPWKRPCSKTSPPSPRLRFAACVQVMLLETSRRYNPGSESITFLKDFSYNREDFAKAGLQVEFINPIFEFSRAMNELQLNDAEFALLIAISIFSADRPNVQDQLQVERLQHTYVEALHAYVSIHHPHDRLMFPRMLMKLVSLRTLSSVHSEQVFALRLQDKKLPPLLSEIWDVHE

SEQ ID NO: 58412 - protein, 167 aa, Homo sapiens
  Payload ID: 11431
  Gene Symbol: NR1H3
  Gene Name: nuclear receptor subfamily 1, group H, member 3
  ENSP ID: ENSP00000434650
MPHSAGGTAGVGLEAAEPTALLTRAEPPSEPTGVLSEEQIRLKKLKRQEEEQAHATSLPPRASSPPQILPQLSPEQLGMIEKLVAAQQQCNRRSFSDRLRVTVMLLETSRRYNPGSESITFLKDFSYNREDFAKAGLQVEFINPIFEFSRAMNELQLNDAEFALLIA

SEQ ID NO: 58413 - protein, 453 aa, Homo sapiens
  Payload ID: 11431
  Gene Symbol: NR1H3
  Gene Name: nuclear receptor subfamily 1, group H, member 3
  ENSP ID: ENSP00000477707
MQQTSWNPLGGTCKQPPGRTHSAVELWKPGAQDASSQAQGGSSCILREEARMPHSAGGTAGVGLEAAEPTALLTRAEPPSEPTEIRPQKRKKGPAPKMLGNELCSVCGDKASGFHYNVLSCEGCKGFFRRSVIKGAHYICHSGGHCPMDTYMRRKCQECRLRKCRQAGMREECVLSEEQIRLKKLKRQEEEQAHATSLPPRASSPPQILPQLSPEQLGMIEKLVAAQQQCNRRSFSDRLRVTPWPMAPDPHSREARQQRFAHFTELAIVSVQEIVDFAKQLPGFLQLSREDQIALLKTSAIEVMLLETSRRYNPGSESITFLKDFSYNREDFAKAGLQVEFINPIFEFSRAMNELQLNDAEFALLIAISIFSADRPNVQDQLQVERLQHTYVEALHAYVSIHHPHDRLMFPRMLMKLVSLRTLSSVHSEQVFALRLQDKKLPPLLSEIWDVHE

SEQ ID NO: 58414 - protein, 482 aa, Homo sapiens
  Payload ID: 11432
  Gene Symbol: NR1H4
  Gene Name: nuclear receptor subfamily 1, group H, member 4
  Uniprot ID: Q96RI1
  ENSP ID: ENSP00000188403
MVMQFQGLENPIQISPHCSCTPSGFFMEMMSMKPAKGVLTEQVAGPLGQNLEVEPYSQYSNVQFPQVQPQISSSSYYSNLGFYPQQPEEWYSPGIYELRRMPAETLYQGETEVAEMPVTKKPRMGASAGRIKGDELCVVCGDRASGYHYNALTCEGCKGFFRRSITKNAVYKCKNGGNCVMDMYMRRKCQECRLRKCKEMGMLAECLLTEIQCKSKRLRKNVKQHADQTVNEDSEGRDLRQVTSTTKSCREKTELTPDQQTLLHFIMDSYNKQRMPQEITNKILKEEFSAEENFLILTEMATNHVQVLVEFTKKLPGFQTLDHEDQIALLKGSAVEAMFLRSAEIFNKKLPSGHSDLLEERIRNSGISDEYITPMFSFYKSIGELKMTQEEYALLTAIVILSPDRQYIKDREAVEKLQEPLLDVLQKLCKIHQPENPQHFACLLGRLTELRTFNHHHAEMLMSWRVNDHKFTPLLCEIWDVQ

SEQ ID NO: 58415 - protein, 270 aa, Homo sapiens
  Payload ID: 11432
  Gene Symbol: NR1H4
  Gene Name: nuclear receptor subfamily 1, group H, member 4
  ENSP ID: ENSP00000315442
MGSKMNLIEHSHLPTTDEFSFSENLFGVLTEQVAGPLGQNLEVEPYSQYSNVQFPQVQPQISSSSYYSNLGFYPQQPEEWYSPGIYELRRMPAETLYQGETEVAEMPVTKKPRMGASAGRIKGDELCVVCGDRASGYHYNALTCEGCKGFFRRSITKNAVYKCKNGGNCVMDMYMRRKCQECRLRKCKEMGMLAECLLTEIQCKSKRLRKNVKQHADQTVNEDSEGRDLRQVTSTTKSCRCRRKLNSPQINRLFYILLWIHITNRGCLRK

SEQ ID NO: 58416 - protein, 476 aa, Homo sapiens
  Payload ID: 11432
  Gene Symbol: NR1H4
  Gene Name: nuclear receptor subfamily 1, group H, member 4
  Uniprot ID: Q96RI1
  ENSP ID: ENSP00000376712
MGSKMNLIEHSHLPTTDEFSFSENLFGVLTEQVAGPLGQNLEVEPYSQYSNVQFPQVQPQISSSSYYSNLGFYPQQPEEWYSPGIYELRRMPAETLYQGETEVAEMPVTKKPRMGASAGRIKGDELCVVCGDRASGYHYNALTCEGCKGFFRRSITKNAVYKCKNGGNCVMDMYMRRKCQECRLRKCKEMGMLAECMYTGLLTEIQCKSKRLRKNVKQHADQTVNEDSEGRDLRQVTSTTKSCREKTELTPDQQTLLHFIMDSYNKQRMPQEITNKILKEEFSAEENFLILTEMATNHVQVLVEFTKKLPGFQTLDHEDQIALLKGSAVEAMFLRSAEIFNKKLPSGHSDLLEERIRNSGISDEYITPMFSFYKSIGELKMTQEEYALLTAIVILSPDRQYIKDREAVEKLQEPLLDVLQKLCKIHQPENPQHFACLLGRLTELRTFNHHHAEMLMSWRVNDHKFTPLLCEIWDVQ

SEQ ID NO: 58417 - protein, 57 aa, Homo sapiens
  Payload ID: 11432
  Gene Symbol: NR1H4
  Gene Name: nuclear receptor subfamily 1, group H, member 4
  ENSP ID: ENSP00000446584
MGSKMNLIEHSHLPTTDEFSFSENLFDFLGWFQSLPSTTLWSWTNSLTLHKLLALFK

SEQ ID NO: 58418 - protein, 45 aa, Homo sapiens
  Payload ID: 11432
  Gene Symbol: NR1H4
  Gene Name: nuclear receptor subfamily 1, group H, member 4
  ENSP ID: ENSP00000446760
MGSKMNLIEHSHLPTTDEFSFSENLFGLLRLPWSPSMCSHLRTRP

SEQ ID NO: 58419 - protein, 34 aa, Homo sapiens
  Payload ID: 11432
  Gene Symbol: NR1H4
  Gene Name: nuclear receptor subfamily 1, group H, member 4
  ENSP ID: ENSP00000446861
  MOD_RES (1)..(1): Any amino acid
XSGFFMEMMSMKPAKGLLRLPWSPSMCSHLRTRP

SEQ ID NO: 58420 - protein, 486 aa, Homo sapiens
  Payload ID: 11432
  Gene Symbol: NR1H4
  Gene Name: nuclear receptor subfamily 1, group H, member 4
  Uniprot ID: Q96RI1
  ENSP ID: ENSP00000447149
MVMQFQGLENPIQISPHCSCTPSGFFMEMMSMKPAKGVLTEQVAGPLGQNLEVEPYSQYSNVQFPQVQPQISSSSYYSNLGFYPQQPEEWYSPGIYELRRMPAETLYQGETEVAEMPVTKKPRMGASAGRIKGDELCVVCGDRASGYHYNALTCEGCKGFFRRSITKNAVYKCKNGGNCVMDMYMRRKCQECRLRKCKEMGMLAECMYTGLLTEIQCKSKRLRKNVKQHADQTVNEDSEGRDLRQVTSTTKSCREKTELTPDQQTLLHFIMDSYNKQRMPQEITNKILKEEFSAEENFLILTEMATNHVQVLVEFTKKLPGFQTLDHEDQIALLKGSAVEAMFLRSAEIFNKKLPSGHSDLLEERIRNSGISDEYITPMFSFYKSIGELKMTQEEYALLTAIVILSPDRQYIKDREAVEKLQEPLLDVLQKLCKIHQPENPQHFACLLGRLTELRTFNHHHAEMLMSWRVNDHKFTPLLCEIWDVQ

SEQ ID NO: 58421 - protein, 472 aa, Homo sapiens
  Payload ID: 11432
  Gene Symbol: NR1H4
  Gene Name: nuclear receptor subfamily 1, group H, member 4
  Uniprot ID: Q96RI1
  ENSP ID: ENSP00000448506
MGSKMNLIEHSHLPTTDEFSFSENLFGVLTEQVAGPLGQNLEVEPYSQYSNVQFPQVQPQISSSSYYSNLGFYPQQPEEWYSPGIYELRRMPAETLYQGETEVAEMPVTKKPRMGASAGRIKGDELCVVCGDRASGYHYNALTCEGCKGFFRRSITKNAVYKCKNGGNCVMDMYMRRKCQECRLRKCKEMGMLAECLLTEIQCKSKRLRKNVKQHADQTVNEDSEGRDLRQVTSTTKSCREKTELTPDQQTLLHFIMDSYNKQRMPQEITNKILKEEFSAEENFLILTEMATNHVQVLVEFTKKLPGFQTLDHEDQIALLKGSAVEAMFLRSAEIFNKKLPSGHSDLLEERIRNSGISDEYITPMFSFYKSIGELKMTQEEYALLTAIVILSPDRQYIKDREAVEKLQEPLLDVLQKLCKIHQPENPQHFACLLGRLTELRTFNHHHAEMLMSWRVNDHKFTPLLCEIWDVQ

SEQ ID NO: 58422 - protein, 425 aa, Homo sapiens
  Payload ID: 11432
  Gene Symbol: NR1H4
  Gene Name: nuclear receptor subfamily 1, group H, member 4
  Uniprot ID: Q96RI1
  ENSP ID: ENSP00000448978
MGSKMNLIEHSHLPTTDEFSFSENLFGVLTEQVAGPLGQNLEVEPYSQYSNVQFPQVQPQISSSSYYSNLGFYPQQPEEWYSPGIYELRRMPAETLYQGETEVAEMPVTKKPRMGASAGRIKGDELCVVCGDRASGYHYNALTCEGCKGLLTEIQCKSKRLRKNVKQHADQTVNEDSEGRDLRQVTSTTKSCREKTELTPDQQTLLHFIMDSYNKQRMPQEITNKILKEEFSAEENFLILTEMATNHVQVLVEFTKKLPGFQTLDHEDQIALLKGSAVEAMFLRSAEIFNKKLPSGHSDLLEERIRNSGISDEYITPMFSFYKSIGELKMTQEEYALLTAIVILSPDRQYIKDREAVEKLQEPLLDVLQKLCKIHQPENPQHFACLLGRLTELRTFNHHHAEMLMSWRVNDHKFTPLLCEIWDVQ

SEQ ID NO: 58423 - protein, 473 aa, Homo sapiens
  Payload ID: 11433
  Gene Symbol: NR1I2
  Gene Name: nuclear receptor subfamily 1, group I, member 2
  Uniprot ID: O75469
  ENSP ID: ENSP00000336528
MTVTRTHHFKEGSLRAPAIPLHSAAAELASNHPRGPEANLEVRPKESWNHADFVHCEDTESVPGKPSVNADEEVGGPQICRVCGDKATGYHFNVMTCEGCKGFFRRAMKRNARLRCPFRKGACEITRKTRRQCQACRLRKCLESGMKKEMIMSDEAVEERRALIKRKKSERTGTQPLGVQGLTEEQRMMIRELMDAQMKTFDTTFSHFKNFRLPGVLSSGCELPESLQAPSREEAAKWSQVRKDLCSLKVSLQLRGEDGSVWNYKPPADSGGKEIFSLLPHMADMSTYMFKGIISFAKVISYFRDLPIEDQISLLKGAAFELCQLRFNTVFNAETGTWECGRLSYCLEDTAGGFQQLLLEPMLKFHYMLKKLQLHEEEYVLMQAISLFSPDRPGVLQHRVVDQLQEQFAITLKSYIECNRPQPAHRFLFLKIMAMLTELRSINAQHTQRLLRIQDIHPFATPLMQELFGITGS

SEQ ID NO: 58424 - protein, 434 aa, Homo sapiens
  Payload ID: 11433
  Gene Symbol: NR1I2
  Gene Name: nuclear receptor subfamily 1, group I, member 2
  ENSP ID: ENSP00000377319
LEVRPKESWNHADFVHCEDTESVPGKPSVNADEEVGGPQICRVCGDKATGYHFNVMTCEGCKGFFRRAMKRNARLRCPFRKGACEITRKTRRQCQACRLRKCLESGMKKEMIMSDEAVEERRALIKRKKSERTGTQPLGVQGLTEEQRMMIRELMDAQMKTFDTTFSHFKNFRLPGVLSSGCELPESLQAPSREEAAKWSQVRKDLCSLKVSLQLRGEDGSVWNYKPPADSGGKEIFSLLPHMADMSTYMFKGIISFAKVISYFRDLPIEDQISLLKGAAFELCQLRFNTVFNAETGTWECGRLSYCLEDTAGGFQQLLLEPMLKFHYMLKKLQLHEEEYVLMQAISLFSPDRPGVLQHRVVDQLQEQFAITLKSYIECNRPQPAHRFLFLKIMAMLTELRSINAQHTQRLLRIQDIHPFATPLMQELFGITGS

SEQ ID NO: 58425 - protein, 397 aa, Homo sapiens
  Payload ID: 11433
  Gene Symbol: NR1I2
  Gene Name: nuclear receptor subfamily 1, group I, member 2
  ENSP ID: ENSP00000420297
LEVRPKESWNHADFVHCEDTESVPGKPSVNADEEVGGPQICRVCGDKATGYHFNVMTCEGCKGFFRRAMKRNARLRCPFRKGACEITRKTRRQCQACRLRKCLESGMKKEMIMSDEAVEERRALIKRKKSERTGTQPLGVQGLTEEQRMMIRELMDAQMKTFDTTFSHFKNFRVSLQLRGEDGSVWNYKPPADSGGKEIFSLLPHMADMSTYMFKGIISFAKVISYFRDLPIEDQISLLKGAAFELCQLRFNTVFNAETGTWECGRLSYCLEDTAGGFQQLLLEPMLKFHYMLKKLQLHEEEYVLMQAISLFSPDRPGVLQHRVVDQLQEQFAITLKSYIECNRPQPAHRFLFLKIMAMLTELRSINAQHTQRLLRIQDIHPFATPLMQELFGITGS

SEQ ID NO: 58426 - protein, 357 aa, Homo sapiens
  Payload ID: 11434
  Gene Symbol: NR1I3
  Gene Name: nuclear receptor subfamily 1, group I, member 3
  Uniprot ID: Q14994
  ENSP ID: ENSP00000356958
MASREDELRNCVVCGDQATGYHFNALTCEGCKGFFRRTVSKSIGPTCPFAGSCEVSKTQRRHCPACRLQKCLDAGMRKDMILSAEALALRRAKQAQRRAQQTPVQLSKEQEELIRTLLGAHTRHMGTMFEQFVQFRPPAHLFIHHQPLPTLAPVLPLVTHFADINTFMVLQVIKFTKDLPVFRSLPIEDQISLLKGAAVEICHIVLNTTFCLQTQNFLCGPLRYTIEDGARVSPTVGFQVEFLELLFHFHGTLRKLQLQEPEYVLLAAMALFSPAPYLTDRPGVTQRDEIDQLQEEMALTLQSYIKGQQRRPRDRFLYAKLLGLLAELRSINEAYGYQIQHIQGLSAMMPLLQEICS

SEQ ID NO: 58427 - protein, 357 aa, Homo sapiens; identical to SEQ ID NO: 58426
  Payload ID: 11434
  Gene Symbol: NR1I3
  Gene Name: nuclear receptor subfamily 1, group I, member 3
  Uniprot ID: Q14994
  ENSP ID: ENSP00000356959

SEQ ID NO: 58428 - protein, 324 aa, Homo sapiens
  Payload ID: 11434
  Gene Symbol: NR1I3
  Gene Name: nuclear receptor subfamily 1, group I, member 3
  Uniprot ID: Q14994
  ENSP ID: ENSP00000356960
MLPKRSRRTVSKSIGPTCPFAGSCEVSKTQRRHCPACRLQKCLDAGMRKDMILSAEALALRRAKQAQRRAQQTPVQLSKEQEELIRTLLGAHTRHMGTMFEQFVQFRPPAHLFIHHQPLPTLAPVLPLVTHFADINTFMVLQVIKFTKDLPVFRSLPIEDQISLLKGAAVEICHIVLNTTFCLQTQNFLCGPLRYTIEDGARVGFQVEFLELLFHFHGTLRKLQLQEPEYVLLAAMALFSPAPYLTDRPGVTQRDEIDQLQEEMALTLQSYIKGQQRRPRDRFLYAKLLGLLAELRSINEAYGYQIQHIQGLSAMMPLLQEICS

SEQ ID NO: 58429 - protein, 352 aa, Homo sapiens
  Payload ID: 11434
  Gene Symbol: NR1I3
  Gene Name: nuclear receptor subfamily 1, group I, member 3
  Uniprot ID: Q14994
  ENSP ID: ENSP00000356961
MASREDELRNCVVCGDQATGYHFNALTCEGCKGFFRRTVSKSIGPTCPFAGSCEVSKTQRRHCPACRLQKCLDAGMRKDMILSAEALALRRAKQAQRRAQQTPVQLSKEQEELIRTLLGAHTRHMGTMFEQFVQFRPPAHLFIHHQPLPTLAPVLPLVTHFADINTFMVLQVIKFTKDLPVFRSLPIEDQISLLKGAAVEICHIVLNTTFCLQTQNFLCGPLRYTIEDGARVSPTVGFQVEFLELLFHFHGTLRKLQLQEPEYVLLAAMALFSPDRPGVTQRDEIDQLQEEMALTLQSYIKGQQRRPRDRFLYAKLLGLLAELRSINEAYGYQIQHIQGLSAMMPLLQEICS

SEQ ID NO: 58430 - protein, 348 aa, Homo sapiens
  Payload ID: 11434
  Gene Symbol: NR1I3
  Gene Name: nuclear receptor subfamily 1, group I, member 3
  Uniprot ID: Q14994
  ENSP ID: ENSP00000356962
MASREDELRNCVVCGDQATGYHFNALTCEGCKGFFRRTVSKSIGPTCPFAGSCEVSKTQRRHCPACRLQKCLDAGMRKDMILSAEALALRRAKQAQRRAQQTPVQLSKEQEELIRTLLGAHTRHMGTMFEQFVQFRPPAHLFIHHQPLPTLAPVLPLVTHFADINTFMVLQVIKFTKDLPVFRSLPIEDQISLLKGAAVEICHIVLNTTFCLQTQNFLCGPLRYTIEDGARVGFQVEFLELLFHFHGTLRKLQLQEPEYVLLAAMALFSPDRPGVTQRDEIDQLQEEMALTLQSYIKGQQRRPRDRFLYAKLLGLLAELRSINEAYGYQIQHIQGLSAMMPLLQEICS

SEQ ID NO: 58431 - protein, 309 aa, Homo sapiens
  Payload ID: 11434
  Gene Symbol: NR1I3
  Gene Name: nuclear receptor subfamily 1, group I, member 3
  Uniprot ID: Q14994
  ENSP ID: ENSP00000356963
MASREDELRNCVVCGDQATGYHFNALTCEGCKGFFRRTVSKSIGPTCPFAGSCEVSKTQRRHCPACRLQKCLDAGMRKDMILSAEALALRRAKQAQRRAQQTPVQLSKEQEELIRTLLGAHTRHMGTMFEQFVQFRPPAHLFIHHQPLPTLAPVLPLVTHFADINTFMVLQVIKFTKDLPVFRSLPIEDQISLLKGAAVEICHIVLNTTFCLQTQNFLCGPLRYTIEDGARDRPGVTQRDEIDQLQEEMALTLQSYIKGQQRRPRDRFLYAKLLGLLAELRSINEAYGYQIQHIQGLSAMMPLLQEICS

SEQ ID NO: 58432 - protein, 314 aa, Homo sapiens
  Payload ID: 11434
  Gene Symbol: NR1I3
  Gene Name: nuclear receptor subfamily 1, group I, member 3
  Uniprot ID: Q14994
  ENSP ID: ENSP00000356965
MASREDELRNCVVCGDQATGYHFNALTCEGCKGFFRRTVSKSIGPTCPFAGSCEVSKTQRRHCPACRLQKCLDAGMRKDMILSAEALALRRAKQAQRRAQQTPVQLSKEQEELIRTLLGAHTRHMGTMFEQFVQFRPPAHLFIHHQPLPTLAPVLPLVTHFADINTFMVLQVIKFTKDLPVFRSLPIEDQISLLKGAAVEICHIVLNTTFCLQTQNFLCGPLRYTIEDGARAPYLTDRPGVTQRDEIDQLQEEMALTLQSYIKGQQRRPRDRFLYAKLLGLLAELRSINEAYGYQIQHIQGLSAMMPLLQEICS

SEQ ID NO: 58433 - protein, 315 aa, Homo sapiens
  Payload ID: 11434
  Gene Symbol: NR1I3
  Gene Name: nuclear receptor subfamily 1, group I, member 3
  Uniprot ID: Q14994
  ENSP ID: ENSP00000399361
MLPKRSRRTVSKSIGPTCPFAGSCEVSKTQRRHCPACRLQKCLDAGMRKDMILSAEALALRRAKQAQRRAQQTPVQLSKEQEELIRTLLGAHTRHMGTMFEQFVQFRPPAHLFIHHQPLPTLAPVLPLVTHFADINTFMVLQVIKFTKDLPVFRSLPIEDQISLLKGAAVEICHIVLNTTFCLQTQNFLCGPLRYTIEDGARVSPTVGFQVEFLELLFHFHGTLRKLQLQEPEYVLLAAMALFSPAPYLTDRPGVTQRDEIDQLQEEMALTLQSYIKGQQRRPRDRSPGTPWIHWSGKMLGPKIGPGSKGAQWLQ

SEQ ID NO: 58434 - protein, 339 aa, Homo sapiens
  Payload ID: 11434
  Gene Symbol: NR1I3
  Gene Name: nuclear receptor subfamily 1, group I, member 3
  Uniprot ID: Q14994
  ENSP ID: ENSP00000406493
MASREDELRNCVVCGDQATGYHFNALTCEGCKGFFRRTVSKSIGPTCPFAGSCEVSKTQRRHCPACRLQKCLDAGMRKDMILSAEALALRRAKQAQRRAQQTPVQLSKEQEELIRTLLGAHTRHMGTMFEQFVQFRPPAHLFIHHQPLPTLAPVLPLVTHFADINTFMVLQVIKFTKDLPVFRSLPIEDQISLLKGAAVEICHIVLNTTFCLQTQNFLCGPLRYTIEDGARVSPTVGFQVEFLELLFHFHGTLRKLQLQEPEYVLLAAMALFSPDRPGVTQRDEIDQLQEEMALTLQSYIKGQQRRPRDRSPGTPWIHWSGKMLGPKIGPGSKGAQWLQ

SEQ ID NO: 58435 - protein, 306 aa, Homo sapiens
  Payload ID: 11434
  Gene Symbol: NR1I3
  Gene Name: nuclear receptor subfamily 1, group I, member 3
  Uniprot ID: Q14994
  ENSP ID: ENSP00000407446
MLPKRSRRTVSKSIGPTCPFAGSCEVSKTQRRHCPACRLQKCLDAGMRKDMILSAEALALRRAKQAQRRAQQTPVQLSKEQEELIRTLLGAHTRHMGTMFEQFVQFRPPAHLFIHHQPLPTLAPVLPLVTHFADINTFMVLQVIKFTKDLPVFRSLPIEDQISLLKGAAVEICHIVLNTTFCLQTQNFLCGPLRYTIEDGARVGFQVEFLELLFHFHGTLRKLQLQEPEYVLLAAMALFSPDRPGVTQRDEIDQLQEEMALTLQSYIKGQQRRPRDRSPGTPWIHWSGKMLGPKIGPGSKGAQWLQ

SEQ ID NO: 58436 - protein, 340 aa, Homo sapiens
  Payload ID: 11434
  Gene Symbol: NR1I3
  Gene Name: nuclear receptor subfamily 1, group I, member 3
  Uniprot ID: Q14994
  ENSP ID: ENSP00000412672
MASREDELRNCVVCGDQATGYHFNALTCEGCKGFFRRTVSKSIGPTCPFAGSCEVSKTQRRHCPACRLQKCLDAGMRKDMILSAEALALRRAKQAQRRAQQTPVQLSKEQEELIRTLLGAHTRHMGTMFEQFVQFRPPAHLFIHHQPLPTLAPVLPLVTHFADINTFMVLQVIKFTKDLPVFRSLPIEDQISLLKGAAVEICHIVLNTTFCLQTQNFLCGPLRYTIEDGARVGFQVEFLELLFHFHGTLRKLQLQEPEYVLLAAMALFSPAPYLTDRPGVTQRDEIDQLQEEMALTLQSYIKGQQRRPRDRSPGTPWIHWSGKMLGPKIGPGSKGAQWLQ

SEQ ID NO: 58437 - protein, 147 aa, Homo sapiens
  Payload ID: 11434
  Gene Symbol: NR1I3
  Gene Name: nuclear receptor subfamily 1, group I, member 3
  ENSP ID: ENSP00000421374
MASREDELRNCVVCGDQATGYHFNALTCEGCKGFFRRTVSKSIGPTCPFAGSCEVSKTQRRHCPACRLQKCLDAGMRKDIPCPLKTRSPFSREQLWKSVTSYSIPLSVSKHKTSSAGLFATQLKMEPVTDLELPREMRLISCKRRWH

SEQ ID NO: 58438 - protein, 273 aa, Homo sapiens
  Payload ID: 11434
  Gene Symbol: NR1I3
  Gene Name: nuclear receptor subfamily 1, group I, member 3
  ENSP ID: ENSP00000421588
MRKDMILSAEALALRRAKQAQRRAQQTPVQLSKEQEELIRTLLGAHTRHMGTMFEQFVQFRPPAHLFIHHQPLPTLAPVLPLVTHFADINTFMVLQVIKFTKDLPVFRSLPIEDQISLLKGAAVEICHIVLNTTFCLQTQNFLCGPLRYTIEDGARVGFQVEFLELLFHFHGTLRKLQLQEPEYVLLAAMALFSPDRPGVTQRDEIDQLQEEMALTLQSYIKGQQRRPRDRFLYAKLLGLLAELRSINEAYGYQIQHIQGLSAMMPLLQEICS

SEQ ID NO: 58439 - protein, 118 aa, Homo sapiens
  Payload ID: 11434
  Gene Symbol: NR1I3
  Gene Name: nuclear receptor subfamily 1, group I, member 3
  ENSP ID: ENSP00000422982
MLPKRSRRTVSKSIGPTCPFAGSCEVSKTQRRHCPACRLQKCLDAGMRKDIPCPLKTRSPFSREQLWKSVTSYSIPLSVSKHKTSSAGLFATQLKMEPVTDLELPREMRLISCKRRWH

SEQ ID NO: 58440 - protein, 90 aa, Homo sapiens
  Payload ID: 11434
  Gene Symbol: NR1I3
  Gene Name: nuclear receptor subfamily 1, group I, member 3
  ENSP ID: ENSP00000423007
MLPKRSRRTVSKSIGPTCPFAGSCEVSKTQRRHCPACRLQKCLDAGMRKDTSSSSVHPSPALAHPGPCAASGHTLRRHQHFHGTASHQVY

SEQ ID NO: 58441 - protein, 297 aa, Homo sapiens
  Payload ID: 11434
  Gene Symbol: NR1I3
  Gene Name: nuclear receptor subfamily 1, group I, member 3
  ENSP ID: ENSP00000423089
MLPKRSRRTVSKSIGPTCPFAGSCEVSKTQRRHCPACRLQKCLDAGMRKDMILSAEALALRRAKQAQRRAQQTPVQLSKEQEELIRTLLGAHTRHMGTMFEQFVQFRPPAHLFIHHQPLPTLAPVLPLVTHFADINTFMVLQVIKFTKDLPVFRSLPIEDQISLLKGAAVEICHIVLNTTFCLQTQNFLCGPLRYTIEDGARVGFQVEFLELLFHFHGTLRKLQLQEPEYVLLAAMALFSPDRPGVTQRDEIDQLQEEMALTLQSYIKGQQRRPRDRYGGTLRAWRPHQGRKGLVKH

SEQ ID NO: 58442 - protein, 311 aa, Homo sapiens
  Payload ID: 11434
  Gene Symbol: NR1I3
  Gene Name: nuclear receptor subfamily 1, group I, member 3
  Uniprot ID: Q14994
  ENSP ID: ENSP00000423666
MLPKRSRRTVSKSIGPTCPFAGSCEVSKTQRRHCPACRLQKCLDAGMRKDMILSAEALALRRAKQAQRRAQQTPVQLSKEQEELIRTLLGAHTRHMGTMFEQFVQFRPPAHLFIHHQPLPTLAPVLPLVTHFADINTFMVLQVIKFTKDLPVFRSLPIEDQISLLKGAAVEICHIVLNTTFCLQTQNFLCGPLRYTIEDGARVGFQVEFLELLFHFHGTLRKLQLQEPEYVLLAAMALFSPAPYLTDRPGVTQRDEIDQLQEEMALTLQSYIKGQQRRPRDRSPGTPWIHWSGKMLGPKIGPGSKGAQWLQ

SEQ ID NO: 58443 - protein, 280 aa, Homo sapiens
  Payload ID: 11434
  Gene Symbol: NR1I3
  Gene Name: nuclear receptor subfamily 1, group I, member 3
  Uniprot ID: Q14994
  ENSP ID: ENSP00000424345
MLPKRSRRTVSKSIGPTCPFAGSCEVSKTQRRHCPACRLQKCLDAGMRKDMILSAEALALRRAKQAQRRAQQTPVQLSKEQEELIRTLLGAHTRHMGTMFEQFVQFRPPAHLFIHHQPLPTLAPVLPLVTHFADINTFMVLQVIKFTKDLPVFRSLPIEDQISLLKGAAVEICHIVLNTTFCLQTQNFLCGPLRYTIEDGARDRPGVTQRDEIDQLQEEMALTLQSYIKGQQRRPRDRFLYAKLLGLLAELRSINEAYGYQIQHIQGLSAMMPLLQEICS

SEQ ID NO: 58444 - protein, 274 aa, Homo sapiens
  Payload ID: 11434
  Gene Symbol: NR1I3
  Gene Name: nuclear receptor subfamily 1, group I, member 3
  ENSP ID: ENSP00000424834
MLPKRSRRTVSKSIGPTCPFAGSCEVSKTQRRHCPACRLQKCLDAGMRKDMILSAEALALRRAKQAQRRAQQTPVQLSKEQEELIRTLLGAHTRHMGTMFEQFVQFRPPAHLFIHHQPLPTLAPVLPLVTHFADINTFMVLQVIKFTKDLPVFRSLPIEDQISLLKGAAVEICHIVLNTTFCLQTQNFLCGPLRYTIEDGARVSPTVGFQVEFLELLFHFHGTLRKLQLQEPEYVLLAAMALFSPGEHLPKPRAFCCTTSAQILSSLSPSTQAF

SEQ ID NO: 58445 - protein, 296 aa, Homo sapiens
  Payload ID: 11434
  Gene Symbol: NR1I3
  Gene Name: nuclear receptor subfamily 1, group I, member 3
  Uniprot ID: Q14994
  ENSP ID: ENSP00000424934
MASREDELRNCVVCGDQATGYHFNALTCEGCKGFFRRTVSKSIGPTCPFAGSCEVSKTQRRHCPACRLQKCLDAGMRKDMILSAEALALRRAKQAQRRAQQTPVQLSKEQEELIRTLLGAHTRHMGTMFEQFVQFRPPAHLFIHHQPLPTLAPVLPLVTHFADINTFMVLQVIKFTKDLPVFRSLPIEDQISLLKGAAVEICHIVLNTTFCLQTQNFLCGPLRYTIEDGARDRPGVTQRDEIDQLQEEMALTLQSYIKGQQRRPRDRSPGTPWIHWSGKMLGPKIGPGSKGAQWLQ

SEQ ID NO: 58446 - protein, 267 aa, Homo sapiens
  Payload ID: 11434
  Gene Symbol: NR1I3
  Gene Name: nuclear receptor subfamily 1, group I, member 3
  Uniprot ID: Q14994
  ENSP ID: ENSP00000425417
MLPKRSRRTVSKSIGPTCPFAGSCEVSKTQRRHCPACRLQKCLDAGMRKDMILSAEALALRRAKQAQRRAQQTPVQLSKEQEELIRTLLGAHTRHMGTMFEQFVQFRPPAHLFIHHQPLPTLAPVLPLVTHFADINTFMVLQVIKFTKDLPVFRSLPIEDQISLLKGAAVEICHIVLNTTFCLQTQNFLCGPLRYTIEDGARDRPGVTQRDEIDQLQEEMALTLQSYIKGQQRRPRDRSPGTPWIHWSGKMLGPKIGPGSKGAQWLQ

SEQ ID NO: 58447 - protein, 90 aa, Homo sapiens; identical to SEQ ID NO: 58440
  Payload ID: 11434
  Gene Symbol: NR1I3
  Gene Name: nuclear receptor subfamily 1, group I, member 3
  ENSP ID: ENSP00000425607

SEQ ID NO: 58448 - protein, 90 aa, Homo sapiens; identical to SEQ ID NO: 58440
  Payload ID: 11434
  Gene Symbol: NR1I3
  Gene Name: nuclear receptor subfamily 1, group I, member 3
  ENSP ID: ENSP00000425900

SEQ ID NO: 58449 - protein, 119 aa, Homo sapiens
  Payload ID: 11434
  Gene Symbol: NR1I3
  Gene Name: nuclear receptor subfamily 1, group I, member 3
  ENSP ID: ENSP00000426016
MASREDELRNCVVCGDQATGYHFNALTCEGCKGFFRRTVSKSIGPTCPFAGSCEVSKTQRRHCPACRLQKCLDAGMRKDTSSSSVHPSPALAHPGPCAASGHTLRRHQHFHGTASHQVY

SEQ ID NO: 58450 - protein, 147 aa, Homo sapiens; identical to SEQ ID NO: 58437
  Payload ID: 11434
  Gene Symbol: NR1I3
  Gene Name: nuclear receptor subfamily 1, group I, member 3
  ENSP ID: ENSP00000426292

SEQ ID NO: 58451 - protein, 238 aa, Homo sapiens
  Payload ID: 11434
  Gene Symbol: NR1I3
  Gene Name: nuclear receptor subfamily 1, group I, member 3
  ENSP ID: ENSP00000427034
MASREDELRNCVVCGDQATGYHFNALTCEGCKGFFRRTVSKSIGPTCPFAGSCEVSKTQRRHCPACRLQKCLDAGMRKDMILSAEALALRRAKQAQRRAQQTPVQLSKEQEELIRTLLGAHTRHMGTMFEQFVQFRPPAHLFIHHQPLPTLAPVLPLVTHFADINTFMVLQVIKFTKDLPVFRSLPIEDQISLLKGAAVEICHIVLNTTFCLQTQNFLCGPLRYTIEDGARGEMVLEQ

SEQ ID NO: 58452 - protein, 319 aa, Homo sapiens
  Payload ID: 11434
  Gene Symbol: NR1I3
  Gene Name: nuclear receptor subfamily 1, group I, member 3
  Uniprot ID: Q14994
  ENSP ID: ENSP00000427175
MLPKRSRRTVSKSIGPTCPFAGSCEVSKTQRRHCPACRLQKCLDAGMRKDMILSAEALALRRAKQAQRRAQQTPVQLSKEQEELIRTLLGAHTRHMGTMFEQFVQFRPPAHLFIHHQPLPTLAPVLPLVTHFADINTFMVLQVIKFTKDLPVFRSLPIEDQISLLKGAAVEICHIVLNTTFCLQTQNFLCGPLRYTIEDGARVGFQVEFLELLFHFHGTLRKLQLQEPEYVLLAAMALFSPDRPGVTQRDEIDQLQEEMALTLQSYIKGQQRRPRDRFLYAKLLGLLAELRSINEAYGYQIQHIQGLSAMMPLLQEICS

SEQ ID NO: 58453 - protein, 118 aa, Homo sapiens; identical to SEQ ID NO: 58439
  Payload ID: 11434
  Gene Symbol: NR1I3
  Gene Name: nuclear receptor subfamily 1, group I, member 3
  ENSP ID: ENSP00000427600

SEQ ID NO: 58454 - protein, 119 aa, Homo sapiens; identical to SEQ ID NO: 58449
  Payload ID: 11434
  Gene Symbol: NR1I3
  Gene Name: nuclear receptor subfamily 1, group I, member 3
  ENSP ID: ENSP00000487337

SEQ ID NO: 58455 - protein, 483 aa, Homo sapiens
  Payload ID: 11435
  Gene Symbol: NR2C1
  Gene Name: nuclear receptor subfamily 2, group C, member 1
  Uniprot ID: P13056
  ENSP ID: ENSP00000328843
MATIEEIAHQIIEQQMGEIVTEQQTGQKIQIVTALDHNTQGKQFILTNHDGSTPSKVILARQDSTPGKVFLTTPDAAGVNQLFFTTPDLSAQHLQLLTDNSPDQGPNKVFDLCVVCGDKASGRHYGAVTCEGCKGFFKRSIRKNLVYSCRGSKDCIINKHHRNRCQYCRLQRCIAFGMKQDSVQCERKPIEVSREKSSNCAASTEKIYIRKDLRSPLTATPTFVTDSESTRSTGLLDSGMFMNIHPSGVKTESAVLMTSDKAESCQGDLSTLANVVTSLANLGKTKDLSQNSNEMSMIESLSNDDTSLCEFQEMQTNGDVSRAFDTLAKALNPGESTACQSSVAGMEGSVHLITGDSSINYTEKEGPLLSDSHVAFRLTMPSPMPEYLNVHYIGESASRLLFLSMHWALSIPSFQALGQENSISLVKAYWNELFTLGLAQCWQVMNVATILATFVNCLHNSLQQDAKVIAALIHFTRRAITDL

SEQ ID NO: 58456 - protein, 603 aa, Homo sapiens
  Payload ID: 11435
  Gene Symbol: NR2C1
  Gene Name: nuclear receptor subfamily 2, group C, member 1
  Uniprot ID: P13056
  ENSP ID: ENSP00000333275
MATIEEIAHQIIEQQMGEIVTEQQTGQKIQIVTALDHNTQGKQFILTNHDGSTPSKVILARQDSTPGKVFLTTPDAAGVNQLFFTTPDLSAQHLQLLTDNSPDQGPNKVFDLCVVCGDKASGRHYGAVTCEGCKGFFKRSIRKNLVYSCRGSKDCIINKHHRNRCQYCRLQRCIAFGMKQDSVQCERKPIEVSREKSSNCAASTEKIYIRKDLRSPLTATPTFVTDSESTRSTGLLDSGMFMNIHPSGVKTESAVLMTSDKAESCQGDLSTLANVVTSLANLGKTKDLSQNSNEMSMIESLSNDDTSLCEFQEMQTNGDVSRAFDTLAKALNPGESTACQSSVAGMEGSVHLITGDSSINYTEKEGPLLSDSHVAFRLTMPSPMPEYLNVHYIGESASRLLFLSMHWALSIPSFQALGQENSISLVKAYWNELFTLGLAQCWQVMNVATILATFVNCLHNSLQQDKMSTERRKLLMEHIFKLQEFCNSMVKLCIDGYEYAYLKAIVLFSPDHPSLENMEQIEKFQEKAYVEFQDYITKTYPDDTYRLSRLLLRLPALRLMNATITEELFFKGLIGNIRIDSVIPHILKMEPADYNSQIIGHSI

SEQ ID NO: 58457 - protein, 467 aa, Homo sapiens
  Payload ID: 11435
  Gene Symbol: NR2C1
  Gene Name: nuclear receptor subfamily 2, group C, member 1
  Uniprot ID: P13056
  ENSP ID: ENSP00000376813
MATIEEIAHQIIEQQMGEIVTEQQTGQKIQIVTALDHNTQGKQFILTNHDGSTPSKVILARQDSTPGKVFLTTPDAAGVNQLFFTTPDLSAQHLQLLTDNSPDQGPNKVFDLCVVCGDKASGRHYGAVTCEGCKGFFKRSIRKNLVYSCRGSKDCIINKHHRNRCQYCRLQRCIAFGMKQDSVQCERKPIEVSREKSSNCAASTEKIYIRKDLRSPLTATPTFVTDSESTRSTGLLDSGMFMNIHPSGVKTESAVLMTSDKAESCQGDLSTLANVVTSLANLGKTKDLSQNSNEMSMIESLSNDDTSLCEFQEMQTNGDVSRAFDTLAKALNPGESTACQSSVAGMEGSVHLITGDSSINYTEKEGPLLSDSHVAFRLTMPSPMPEYLNVHYIGESASRLLFLSMHWALSIPSFQALGQENSISLVKAYWNELFTLGLAQCWQVMNVATILATFVNCLHNSLQQAEG

SEQ ID NO: 58458 - protein, 47 aa, Homo sapiens
  Payload ID: 11435
  Gene Symbol: NR2C1
  Gene Name: nuclear receptor subfamily 2, group C, member 1
  ENSP ID: ENSP00000446817
  MOD_RES (1)..(1): Any amino acid
XDLSQNSNEMSMIESLSNDDTSLCEFQEMQTNGDVSSSPCLLLCLST

SEQ ID NO: 58459 - protein, 16 aa, Homo sapiens
  Payload ID: 11435
  Gene Symbol: NR2C1
  Gene Name: nuclear receptor subfamily 2, group C, member 1
  ENSP ID: ENSP00000446906
MATIEEIAHQIIEQQM

SEQ ID NO: 58460 - protein, 73 aa, Homo sapiens
  Payload ID: 11435
  Gene Symbol: NR2C1
  Gene Name: nuclear receptor subfamily 2, group C, member 1
  ENSP ID: ENSP00000450225
  MOD_RES (1)..(1): Any amino acid
XLTMPSPMPEYLNVHYIGESASRLLFLSMHWALSIPSFQALGSSKPRKHGTDREISGKGLCGIPRLYNQNISR

SEQ ID NO: 58461 - protein, 434 aa, Homo sapiens
  Payload ID: 11435
  Gene Symbol: NR2C1
  Gene Name: nuclear receptor subfamily 2, group C, member 1
  ENSP ID: ENSP00000478728
MATIEEIAHQIIEQQMGEIVTEQQTGQKIQIVTALDHNTQGKQFILTNHDGSTPSKVILARQDSTPGKVFLTTPDAAGVNQLFFTTPDLSAQHLQLLTDNSPDQGPNKVFDLCVVCGDKASGRHYGAVTCEGCKGFFKRSIRKNLVYSCRGSKDCIINKHHRNRCQYCRLQRCIAFGMKQDSVQCERKPIEVSREKSSNCAASTEKIYIRKDLRSPLTATPTFVTDSESTRSTGLLDSGMFMNIHPSGVKTESAVLMTSDKAESCQGDLSTLANVVTSLANLGKTKDLSQNSNEMSMIESLSNDDTSLCEFQEMQTNGDVSRAFDTLAKALNPGESTACQSSVAGMEGSVHLITGDSSINYTEKEGPLLSDSHVAFRLTMPSPMPEYLNVHYIGESASRLLFLSMHWALSIPSFQALGKKKIIDGAHLQTTGVL

SEQ ID NO: 58462 - protein, 615 aa, Homo sapiens
  Payload ID: 11436
  Gene Symbol: NR2C2
  Gene Name: nuclear receptor subfamily 2, group C, member 2
  Uniprot ID: P49116
  ENSP ID: ENSP00000320447
MTSPSPRIQIISTDSAVASPQRIQGSEPASGPLSVFTSLNKEKIVTDQQTGQKIQIVTAVDASGSPKQQFILTSPDGAGTGKVILASPETSSAKQLIFTTSDNLVPGRIQIVTDSASVERLLGKTDVQRPQVVEYCVVCGDKASGRHYGAVSCEGCKGFFKRSVRKNLTYSCRSNQDCIINKHHRNRCQFCRLKKCLEMGMKMESVQSERKPFDVQREKPSNCAASTEKIYIRKDLRSPLIATPTFVADKDGARQTGLLDPGMLVNIQQPLIREDGTVLLATDSKAETSQGALGTLANVVTSLANLSESLNNGDTSEIQPEDQSASEITRAFDTLAKALNTTDSSSSPSLADGIDTSGGGSIHVISRDQSTPIIEVEGPLLSDTHVTFKLTMPSPMPEYLNVHYICESASRLLFLSMHWARSIPAFQALGQDCNTSLVRACWNELFTLGLAQCAQVMSLSTILAAIVNHLQNSIQEDKLSGDRIKQVMEHIWKLQEFCNSMAKLDIDGYEYAYLKAIVLFSPDHPGLTSTSQIEKFQEKAQMELQDYVQKTYSEDTYRLARILVRLPALRLMSSNITEELFFTGLIGNVSIDSIIPYILKMETAEYNGQITGASL

SEQ ID NO: 58463 - protein, 596 aa, Homo sapiens
  Payload ID: 11436
  Gene Symbol: NR2C2
  Gene Name: nuclear receptor subfamily 2, group C, member 2
  Uniprot ID: P49116
  ENSP ID: ENSP00000376814
MTSPSPRIQIISTDSAVASPQRIQIVTDQQTGQKIQIVTAVDASGSPKQQFILTSPDGAGTGKVILASPETSSAKQLIFTTSDNLVPGRIQIVTDSASVERLLGKTDVQRPQVVEYCVVCGDKASGRHYGAVSCEGCKGFFKRSVRKNLTYSCRSNQDCIINKHHRNRCQFCRLKKCLEMGMKMESVQSERKPFDVQREKPSNCAASTEKIYIRKDLRSPLIATPTFVADKDGARQTGLLDPGMLVNIQQPLIREDGTVLLATDSKAETSQGALGTLANVVTSLANLSESLNNGDTSEIQPEDQSASEITRAFDTLAKALNTTDSSSSPSLADGIDTSGGGSIHVISRDQSTPIIEVEGPLLSDTHVTFKLTMPSPMPEYLNVHYICESASRLLFLSMHWARSIPAFQALGQDCNTSLVRACWNELFTLGLAQCAQVMSLSTILAAIVNHLQNSIQEDKLSGDRIKQVMEHIWKLQEFCNSMAKLDIDGYEYAYLKAIVLFSPDHPGLTSTSQIEKFQEKAQMELQDYVQKTYSEDTYRLARILVRLPALRLMSSNITEELFFTGLIGNVSIDSIIPYILKMETAEYNGQITGASL

SEQ ID NO: 58464 - protein, 596 aa, Homo sapiens; identical to SEQ ID NO: 58463
  Payload ID: 11436
  Gene Symbol: NR2C2
  Gene Name: nuclear receptor subfamily 2, group C, member 2
  Uniprot ID: P49116
  ENSP ID: ENSP00000384463

SEQ ID NO: 58465 - protein, 596 aa, Homo sapiens; identical to SEQ ID NO: 58463
  Payload ID: 11436
  Gene Symbol: NR2C2
  Gene Name: nuclear receptor subfamily 2, group C, member 2
  Uniprot ID: P49116
  ENSP ID: ENSP00000388387

SEQ ID NO: 58466 - protein, 36 aa, Homo sapiens
  Payload ID: 11436
  Gene Symbol: NR2C2
  Gene Name: nuclear receptor subfamily 2, group C, member 2
  ENSP ID: ENSP00000391473
MTSPSPRIQIISTDSAVASPQRIQGSEPASGPLSVF

SEQ ID NO: 58467 - protein, 205 aa, Homo sapiens
  Payload ID: 11436
  Gene Symbol: NR2C2
  Gene Name: nuclear receptor subfamily 2, group C, member 2
  ENSP ID: ENSP00000401807
MTSPSPRIQIISTDSAVASPQRIQGSEPASGPLSVFTSLNKEKIVTDQQTGQKIQIVTAVDASGSPKQQFILTSPDGAGTGKVILASPETSSAKQLIFTTSDNLVPGRIQIVTDSASVERLLGKTDVQRPQVVEYCVVCGDKASGRHYGAVSCEGCKGFFKRSVRKNLTYSCRSNQDCIINKHHRNRCQFCRLKKCLEMGMKMEC

SEQ ID NO: 58468 - protein, 67 aa, Homo sapiens
  Payload ID: 11436
  Gene Symbol: NR2C2
  Gene Name: nuclear receptor subfamily 2, group C, member 2
  ENSP ID: ENSP00000402272
MTSPSPRIQIISTDSAVASPQRIQIVTDQQTGQKIQIVTAVDASGSPKQQFILTSPDGAGTGKVILA

SEQ ID NO: 58469 - protein, 222 aa, Homo sapiens
  Payload ID: 11436
  Gene Symbol: NR2C2
  Gene Name: nuclear receptor subfamily 2, group C, member 2
  ENSP ID: ENSP00000412473
CESASRLLFLSMHWARSIPAFQALGQDCNTSLVRACWNELFTLGLAQCAQVMSLSTILAAIVNHLQNSIQEDKLSGDRIKQVMEHIWKLQEFCNSMAKLDIDGYEYAYLKAIVLFSPDHPGLTSTSQIEKFQEKAQMELQDYVQKTYSEDTYRSNQTTHSFFPKIFLMCSMISLLLLVSTSTRTCSPESGNGKHGAEEKQNSQRTQPQKVVIWDLLLVAETF

SEQ ID NO: 58470 - protein, 173 aa, Homo sapiens
  Payload ID: 11436
  Gene Symbol: NR2C2
  Gene Name: nuclear receptor subfamily 2, group C, member 2
  ENSP ID: ENSP00000413438
PFYIPRQDCNTSLVRACWNELFTLGLAQCAQVMSLSTILAAIVNHLQNSIQEDKLSGDRIKQVMEHIWKLQEFCNSMAKLDIDGYEYAYLKAIVLFSPDHPGLTSTSQIEKFQEKAQMELQDYVQKTYSEDTYRTCSPESGNGKHGAEEKQNSQRTQPQKVVIWDLLLVAETF

SEQ ID NO: 58471 - protein, 615 aa, Homo sapiens; identical to SEQ ID NO: 58462
  Payload ID: 11436
  Gene Symbol: NR2C2
  Gene Name: nuclear receptor subfamily 2, group C, member 2
  Uniprot ID: P49116
  ENSP ID: ENSP00000483059

SEQ ID NO: 58472 - protein, 422 aa, Homo sapiens
  Payload ID: 11437
  Gene Symbol: NR2E1
  Gene Name: nuclear receptor subfamily 2, group E, member 1
  Uniprot ID: Q9Y466
  ENSP ID: ENSP00000357979
MFRAGAEGAEKEPSPRPECRADPGPGLGFPLGSGLPWPSLLESPGGRILDIPCKVCGDRSSGKHYGVYACDGCSGFFKRSIRRNRTYVCKSGNQGGCPVDKTHRNQCRACRLKKCLEVNMNKDAVQHERGPRTSTIRKQVALYFRGHKEENGAAAHFPSAALPAPAFFTAVTQLEPHGLELAAVSTTPERQTLVSLAQPTPKYPHEVNGTPMYLYEVATESVCESAARLLFMSIKWAKSVPAFSTLSLQDQLMLLEDAWRELFVLGIAQWAIPVDANTLLAVSGMNGDNTDSQKLNKIISEIQALQEVVARFRQLRLDATEFACLKCIVTFKAVPTHSGSELRSFRNAAAIAALQDEAQLTLNSYIHTRYPTQPCRFGKLLLLLPALRSISPSTIEEVFFKKTIGNVPITRLLSDMYKSSDI

SEQ ID NO: 58473 - protein, 385 aa, Homo sapiens
  Payload ID: 11437
  Gene Symbol: NR2E1
  Gene Name: nuclear receptor subfamily 2, group E, member 1
  Uniprot ID: Q9Y466
  ENSP ID: ENSP00000357982
MSKPAGSTSRILDIPCKVCGDRSSGKHYGVYACDGCSGFFKRSIRRNRTYVCKSGNQGGCPVDKTHRNQCRACRLKKCLEVNMNKDAVQHERGPRTSTIRKQVALYFRGHKEENGAAAHFPSAALPAPAFFTAVTQLEPHGLELAAVSTTPERQTLVSLAQPTPKYPHEVNGTPMYLYEVATESVCESAARLLFMSIKWAKSVPAFSTLSLQDQLMLLEDAWRELFVLGIAQWAIPVDANTLLAVSGMNGDNTDSQKLNKIISEIQALQEVVARFRQLRLDATEFACLKCIVTFKAVPTHSGSELRSFRNAAAIAALQDEAQLTLNSYIHTRYPTQPCRFGKLLLLLPALRSISPSTIEEVFFKKTIGNVPITRLLSDMYKSSDI

SEQ ID NO: 58474 - protein, 45 aa, Homo sapiens
  Payload ID: 11437
  Gene Symbol: NR2E1
  Gene Name: nuclear receptor subfamily 2, group E, member 1
  ENSP ID: ENSP00000416908
MNKDAVQHERGPRTSTIRKQVALYFRGHKEENGAAAHFPSAALPA

SEQ ID NO: 58475 - protein, 322 aa, Homo sapiens
  Payload ID: 11438
  Gene Symbol: NR2E3
  Gene Name: nuclear receptor subfamily 2, group E, member 3
  ENSP ID: ENSP00000479254
MCPVDKAHRNQCQACRLKKCLQAGMNQDAVQNERQPRSTAQVHLDSMESNTESRPESLVAPPAPAGRSPRGPTPMSAARALGHHFMASLITAETCAKLEPEDADENIDVTSNDPEFPSSPYSSSSPCGLDSIHETSARLLFMAVKWAKNLPVFSSLPFRDQVILLEEAWSELFLLGAIQWSLPLDSCPLLAPPEASAAGGAQGRLTLASMETRVLQETISRFRALAVDPTEFACMKALVLFKPETRGLKDPEHVEALQDQSQVMLSQHSKAHHPSQPVRFGKLLLLLPSLRFITAERIELLFFRKTIGNTPMEKLLCDMFKN

SEQ ID NO: 58476 - protein, 367 aa, Homo sapiens
  Payload ID: 11438
  Gene Symbol: NR2E3
  Gene Name: nuclear receptor subfamily 2, group E, member 3
  Uniprot ID: Q9Y5X4
  ENSP ID: ENSP00000479962
METRPTALMSSTVAAAAPAAGAASRKESPGRWGLGEDPTGVSPSLQCRVCGDSSSGKHYGIYACNGCSGFFKRSVRRRLIYRCQVGAGMCPVDKAHRNQCQACRLKKCLQAGMNQDAVQNERQPRSTAQVHLDSMESNTESRPESLVAPPAPAGRSPRGPTPMSAARALGHHFMASLITAETCAKLEPEDADENIDVTSNDPEFPSSPYSSSSPCGLDSIHETSARLLFMAVKWAKNLPVFSSLPFRDQVILLEEAWSELFLLGAIQWSLPLDSCPLLAPPEASAAGGAQGRLTLASMETRVLQETISRFRALAVDPTEFACMKALVLFKPETRGLKDPEHVEALQDQSQVMLSQHSKAHHPSQPVR

SEQ ID NO: 58477 - protein, 410 aa, Homo sapiens
  Payload ID: 11438
  Gene Symbol: NR2E3
  Gene Name: nuclear receptor subfamily 2, group E, member 3
  Uniprot ID: Q9Y5X4
  ENSP ID: ENSP00000482504
METRPTALMSSTVAAAAPAAGAASRKESPGRWGLGEDPTGVSPSLQCRVCGDSSSGKHYGIYACNGCSGFFKRSVRRRLIYRCQVGAGMCPVDKAHRNQCQACRLKKCLQAGMNQDAVQNERQPRSTAQVHLDSMESNTESRPESLVAPPAPAGRSPRGPTPMSAARALGHHFMASLITAETCAKLEPEDADENIDVTSNDPEFPSSPYSSSSPCGLDSIHETSARLLFMAVKWAKNLPVFSSLPFRDQVILLEEAWSELFLLGAIQWSLPLDSCPLLAPPEASAAGGAQGRLTLASMETRVLQETISRFRALAVDPTEFACMKALVLFKPETRGLKDPEHVEALQDQSQVMLSQHSKAHHPSQPVRFGKLLLLLPSLRFITAERIELLFFRKTIGNTPMEKLLCDMFKN

SEQ ID NO: 58478 - protein, 423 aa, Homo sapiens
  Payload ID: 11439
  Gene Symbol: NR2F1
  Gene Name: nuclear receptor subfamily 2, group F, member 1
  Uniprot ID: P10589
  ENSP ID: ENSP00000325819
MAMVVSSWRDPQDDVAGGNPGGPNPAAQAARGGGGGAGEQQQQAGSGAPHTPQTPGQPGAPATPGTAGDKGQGPPGSGQSQQHIECVVCGDKSSGKHYGQFTCEGCKSFFKRSVRRNLTYTCRANRNCPIDQHHRNQCQYCRLKKCLKVGMRREAVQRGRMPPTQPNPGQYALTNGDPLNGHCYLSGYISLLLRAEPYPTSRYGSQCMQPNNIMGIENICELAARLLFSAVEWARNIPFFPDLQITDQVSLLRLTWSELFVLNAAQCSMPLHVAPLLAAAGLHASPMSADRVVAFMDHIRIFQEQVEKLKALHVDSAEYSCLKAIVLFTSDACGLSDAAHIESLQEKSQCALEEYVRSQYPNQPSRFGKLLLRLPSLRTVSSSVIEQLFFVRLVGKTPIETLIRDMLLSGSSFNWPYMSIQCS

SEQ ID NO: 58479 - protein, 398 aa, Homo sapiens
  Payload ID: 11439
  Gene Symbol: NR2F1
  Gene Name: nuclear receptor subfamily 2, group F, member 1
  ENSP ID: ENSP00000481517
MAMVVSSWRDPQDDVAGGNPGGPNPAAQTPGQPGAPATPGTAGDKGQGPPGSGQSQQHIECVVCGDKSSGKHYGQFTCEGCKSFFKRSVRRNLTYTCRANRNCPIDQHHRNQCQYCRLKKCLKVGMRREAVQRGRMPPTQPNPGQYALTNGDPLNGHCYLSGYISLLLRAEPYPTSRYGSQCMQPNNIMGIENICELAARLLFSAVEWARNIPFFPDLQITDQVSLLRLTWSELFVLNAAQCSMPLHVAPLLAAAGLHASPMSADRVVAFMDHIRIFQEQVEKLKALHVDSAEYSCLKAIVLFTSDACGLSDAAHIESLQEKSQCALEEYVRSQYPNQPSRFGKLLLRLPSLRTVSSSVIEQLFFVRLVGKTPIETLIRDMLLSGSSFNWPYMSIQCS

SEQ ID NO: 58480 - protein, 414 aa, Homo sapiens
  Payload ID: 11440
  Gene Symbol: NR2F2
  Gene Name: nuclear receptor subfamily 2, group F, member 2
  Uniprot ID: P24468
  ENSP ID: ENSP00000377721
MAMVVSTWRDPQDEVPGSQGSQASQAPPVPGPPPGAPHTPQTPGQGGPASTPAQTAAGGQGGPGGPGSDKQQQQQHIECVVCGDKSSGKHYGQFTCEGCKSFFKRSVRRNLSYTCRANRNCPIDQHHRNQCQYCRLKKCLKVGMRREAVQRGRMPPTQPTHGQFALTNGDPLNCHSYLSGYISLLLRAEPYPTSRFGSQCMQPNNIMGIENICELAARMLFSAVEWARNIPFFPDLQITDQVALLRLTWSELFVLNAAQCSMPLHVAPLLAAAGLHASPMSADRVVAFMDHIRIFQEQVEKLKALHVDSAEYSCLKAIVLFTSDACGLSDVAHVESLQEKSQCALEEYVRSQYPNQPTRFGKLLLRLPSLRTVSSSVIEQLFFVRLVGKTPIETLIRDMLLSGSSFNWPYMAIQ

SEQ ID NO: 58481 - protein, 261 aa, Homo sapiens
  Payload ID: 11440
  Gene Symbol: NR2F2
  Gene Name: nuclear receptor subfamily 2, group F, member 2
  Uniprot ID: P24468
  ENSP ID: ENSP00000377726
MPPTQPTHGQFALTNGDPLNCHSYLSGYISLLLRAEPYPTSRFGSQCMQPNNIMGIENICELAARMLFSAVEWARNIPFFPDLQITDQVALLRLTWSELFVLNAAQCSMPLHVAPLLAAAGLHASPMSADRVVAFMDHIRIFQEQVEKLKALHVDSAEYSCLKAIVLFTSDACGLSDVAHVESLQEKSQCALEEYVRSQYPNQPTRFGKLLLRLPSLRTVSSSVIEQLFFVRLVGKTPIETLIRDMLLSGSSFNWPYMAIQ

SEQ ID NO: 58482 - protein, 261 aa, Homo sapiens; identical to SEQ ID NO: 58481
  Payload ID: 11440
  Gene Symbol: NR2F2
  Gene Name: nuclear receptor subfamily 2, group F, member 2
  Uniprot ID: P24468
  ENSP ID: ENSP00000389853

SEQ ID NO: 58483 - protein, 281 aa, Homo sapiens
  Payload ID: 11440
  Gene Symbol: NR2F2
  Gene Name: nuclear receptor subfamily 2, group F, member 2
  Uniprot ID: P24468
  ENSP ID: ENSP00000401674
MQAVWDLEQGKYGFAVQRGRMPPTQPTHGQFALTNGDPLNCHSYLSGYISLLLRAEPYPTSRFGSQCMQPNNIMGIENICELAARMLFSAVEWARNIPFFPDLQITDQVALLRLTWSELFVLNAAQCSMPLHVAPLLAAAGLHASPMSADRVVAFMDHIRIFQEQVEKLKALHVDSAEYSCLKAIVLFTSDACGLSDVAHVESLQEKSQCALEEYVRSQYPNQPTRFGKLLLRLPSLRTVSSSVIEQLFFVRLVGKTPIETLIRDMLLSGSSFNWPYMAIQ

SEQ ID NO: 58484 - protein, 93 aa, Homo sapiens
  Payload ID: 11440
  Gene Symbol: NR2F2
  Gene Name: nuclear receptor subfamily 2, group F, member 2
  ENSP ID: ENSP00000457112
MPPTQPTHGQFALTNGDPLNCHSYLSGYISLLLRAEPYPTSRFGSQCMQPNNIMGIENICELAARMLFSAVEWARNIPFFPDLQITDQVALLR

SEQ ID NO: 58485 - protein, 404 aa, Homo sapiens
  Payload ID: 11441
  Gene Symbol: NR2F6
  Gene Name: nuclear receptor subfamily 2, group F, member 6
  Uniprot ID: P10588
  ENSP ID: ENSP00000291442
MAMVTGGWGGPGGDTNGVDKAGGYPRAAEDDSASPPGAASDAEPGDEERPGLQVDCVVCGDKSSGKHYGVFTCEGCKSFFKRSIRRNLSYTCRSNRDCQIDQHHRNQCQYCRLKKCFRVGMRKEAVQRGRIPHSLPGAVAASSGSPPGSALAAVASGGDLFPGQPVSELIAQLLRAEPYPAAAGRFGAGGGAAGAVLGIDNVCELAARLLFSTVEWARHAPFFPELPVADQVALLRLSWSELFVLNAAQAALPLHTAPLLAAAGLHAAPMAAERAVAFMDQVRAFQEQVDKLGRLQVDSAEYGCLKAIALFTPDACGLSDPAHVESLQEKAQVALTEYVRAQYPSQPQRFGRLLLRLPALRAVPASLISQLFFMRLVGKTPIETLIRDMLLSGSTFNWPYGSGQ

SEQ ID NO: 58486 - protein, 125 aa, Homo sapiens
  Payload ID: 11441
  Gene Symbol: NR2F6
  Gene Name: nuclear receptor subfamily 2, group F, member 6
  ENSP ID: ENSP00000471686
MRKEAVQRGRIPHSLPGAVAASSGSPPGSALAAVASGGDLFPGQPVSELIAQLLRAEPYPAAAGRFGAGGGAAGAVLGIDNVCELAARLLFSTVEWARHAPFFPELPVADQVALLRLSWSELFVL

SEQ ID NO: 58487 - protein, 778 aa, Homo sapiens
  Payload ID: 11442
  Gene Symbol: NR3C1
  Gene Name: nuclear receptor subfamily 3, group C, member 1 (glucocorticoid receptor)
  Uniprot ID: P04150
  ENSP ID: ENSP00000231509
MDSKESLTPGREENPSSVLAQERGDVMDFYKTLRGGATVKVSASSPSLAVASQSDSKQRRLLVDFPKGSVSNAQQPDLSKAVSLSMGLYMGETETKVMGNDLGFPQQGQISLSSGETDLKLLEESIANLNRSTSVPENPKSSASTAVSAAPTEKEFPKTHSDVSSEQQHLKGQTGTNGGNVKLYTTDQSTFDILQDLEFSSGSPGKETNESPWRSDLLIDENCLLSPLAGEDDSFLLEGNSNEDCKPLILPDTKPKIKDNGDLVLSSPSNVTLPQVKTEKEDFIELCTPGVIKQEKLGTVYCQASFPGANIIGNKMSAISVHGVSTSGGQMYHYDMNTASLSQQQDQKPIFNVIPPIPVGSENWNRCQGSGDDNLTSLGTLNFPGRTVFSNGYSSPSMRPDVSSPPSSSSTATTGPPPKLCLVCSDEASGCHYGVLTCGSCKVFFKRAVEGRQHNYLCAGRNDCIIDKIRRKNCPACRYRKCLQAGMNLEARKTKKKIKGIQQATTGVSQETSENPGNKTIVPATLPQLTPTLVSLLEVIEPEVLYAGYDSSVPDSTWRIMTTLNMLGGRQVIAAVKWAKAIPGFRNLHLDDQMTLLQYSWMFLMAFALGWRSYRQSSANLLCFAPDLIINEQRMTLPCMYDQCKHMLYVSSELHRLQVSYEEYLCMKTLLLLSSVPKDGLKSQELFDEIRMTYIKELGKAIVKREGNSSQNWQRFYQLTKLLDSMHEVVENLLNYCFQTFLDKTMSIEFPEMLAEIITNQIPKYSNGNIKKLLFHQK

SEQ ID NO: 58488 - protein, 777 aa, Homo sapiens
  Payload ID: 11442
  Gene Symbol: NR3C1
  Gene Name: nuclear receptor subfamily 3, group C, member 1 (glucocorticoid receptor)
  Uniprot ID: P04150
  ENSP ID: ENSP00000343205
MDSKESLTPGREENPSSVLAQERGDVMDFYKTLRGGATVKVSASSPSLAVASQSDSKQRRLLVDFPKGSVSNAQQPDLSKAVSLSMGLYMGETETKVMGNDLGFPQQGQISLSSGETDLKLLEESIANLNRSTSVPENPKSSASTAVSAAPTEKEFPKTHSDVSSEQQHLKGQTGTNGGNVKLYTTDQSTFDILQDLEFSSGSPGKETNESPWRSDLLIDENCLLSPLAGEDDSFLLEGNSNEDCKPLILPDTKPKIKDNGDLVLSSPSNVTLPQVKTEKEDFIELCTPGVIKQEKLGTVYCQASFPGANIIGNKMSAISVHGVSTSGGQMYHYDMNTASLSQQQDQKPIFNVIPPIPVGSENWNRCQGSGDDNLTSLGTLNFPGRTVFSNGYSSPSMRPDVSSPPSSSSTATTGPPPKLCLVCSDEASGCHYGVLTCGSCKVFFKRAVEGQHNYLCAGRNDCIIDKIRRKNCPACRYRKCLQAGMNLEARKTKKKIKGIQQATTGVSQETSENPGNKTIVPATLPQLTPTLVSLLEVIEPEVLYAGYDSSVPDSTWRIMTTLNMLGGRQVIAAVKWAKAIPGFRNLHLDDQMTLLQYSWMFLMAFALGWRSYRQSSANLLCFAPDLIINEQRMTLPCMYDQCKHMLYVSSELHRLQVSYEEYLCMKTLLLLSSVPKDGLKSQELFDEIRMTYIKELGKAIVKREGNSSQNWQRFYQLTKLLDSMHEVVENLLNYCFQTFLDKTMSIEFPEMLAEIITNQIPKYSNGNIKKLLFHQK

SEQ ID NO: 58489 - protein, 777 aa, Homo sapiens; identical to SEQ ID NO: 58488
  Payload ID: 11442
  Gene Symbol: NR3C1
  Gene Name: nuclear receptor subfamily 3, group C, member 1 (glucocorticoid receptor)
  Uniprot ID: P04150
  ENSP ID: ENSP00000377977

SEQ ID NO: 58490 - protein, 778 aa, Homo sapiens; identical to SEQ ID NO: 58487
  Payload ID: 11442
  Gene Symbol: NR3C1
  Gene Name: nuclear receptor subfamily 3, group C, member 1 (glucocorticoid receptor)
  Uniprot ID: P04150
  ENSP ID: ENSP00000377979

SEQ ID NO: 58491 - protein, 742 aa, Homo sapiens
  Payload ID: 11442
  Gene Symbol: NR3C1
  Gene Name: nuclear receptor subfamily 3, group C, member 1 (glucocorticoid receptor)
  Uniprot ID: P04150
  ENSP ID: ENSP00000387672
MDSKESLTPGREENPSSVLAQERGDVMDFYKTLRGGATVKVSASSPSLAVASQSDSKQRRLLVDFPKGSVSNAQQPDLSKAVSLSMGLYMGETETKVMGNDLGFPQQGQISLSSGETDLKLLEESIANLNRSTSVPENPKSSASTAVSAAPTEKEFPKTHSDVSSEQQHLKGQTGTNGGNVKLYTTDQSTFDILQDLEFSSGSPGKETNESPWRSDLLIDENCLLSPLAGEDDSFLLEGNSNEDCKPLILPDTKPKIKDNGDLVLSSPSNVTLPQVKTEKEDFIELCTPGVIKQEKLGTVYCQASFPGANIIGNKMSAISVHGVSTSGGQMYHYDMNTASLSQQQDQKPIFNVIPPIPVGSENWNRCQGSGDDNLTSLGTLNFPGRTVFSNGYSSPSMRPDVSSPPSSSSTATTGPPPKLCLVCSDEASGCHYGVLTCGSCKVFFKRAVEGQHNYLCAGRNDCIIDKIRRKNCPACRYRKCLQAGMNLEARKTKKKIKGIQQATTGVSQETSENPGNKTIVPATLPQLTPTLVSLLEVIEPEVLYAGYDSSVPDSTWRIMTTLNMLGGRQVIAAVKWAKAIPGFRNLHLDDQMTLLQYSWMFLMAFALGWRSYRQSSANLLCFAPDLIINEQRMTLPCMYDQCKHMLYVSSELHRLQVSYEEYLCMKTLLLLSSVPKDGLKSQELFDEIRMTYIKELGKAIVKREGNSSQNWQRFYQLTKLLDSMHENVMWLKPESTSHTLI

SEQ ID NO: 58492 - protein, 751 aa, Homo sapiens
  Payload ID: 11442
  Gene Symbol: NR3C1
  Gene Name: nuclear receptor subfamily 3, group C, member 1 (glucocorticoid receptor)
  Uniprot ID: P04150
  ENSP ID: ENSP00000405282
MDSKESLTPGREENPSSVLAQERGDVMDFYKTLRGGATVKVSASSPSLAVASQSDSKQRRLLVDFPKGSVSNAQQPDLSKAVSLSMGLYMGETETKVMGNDLGFPQQGQISLSSGETDLKLLEESIANLNRSTSVPENPKSSASTAVSAAPTEKEFPKTHSDVSSEQQHLKGQTGTNGGNVKLYTTDQSTFDILQDLEFSSGSPGKETNESPWRSDLLIDENCLLSPLAGEDDSFLLEGNSNEDCKPLILPDTKPKIKDNGDLVLSSPSNVTLPQVKTEKEDFIELCTPGVIKQEKLGTVYCQASFPGANIIASLSQQQDQKPIFNVIPPIPVGSENWNRCQGSGDDNLTSLGTLNFPGRTVFSNGYSSPSMRPDVSSPPSSSSTATTGPPPKLCLVCSDEASGCHYGVLTCGSCKVFFKRAVEGQHNYLCAGRNDCIIDKIRRKNCPACRYRKCLQAGMNLEARKTKKKIKGIQQATTGVSQETSENPGNKTIVPATLPQLTPTLVSLLEVIEPEVLYAGYDSSVPDSTWRIMTTLNMLGGRQVIAAVKWAKAIPGFRNLHLDDQMTLLQYSWMFLMAFALGWRSYRQSSANLLCFAPDLIINEQRMTLPCMYDQCKHMLYVSSELHRLQVSYEEYLCMKTLLLLSSVPKDGLKSQELFDEIRMTYIKELGKAIVKREGNSSQNWQRFYQLTKLLDSMHEVVENLLNYCFQTFLDKTMSIEFPEMLAEIITNQIPKYSNGNIKKLLFHQK

SEQ ID NO: 58493 - protein, 145 aa, Homo sapiens
  Payload ID: 11442
  Gene Symbol: NR3C1
  Gene Name: nuclear receptor subfamily 3, group C, member 1 (glucocorticoid receptor)
  ENSP ID: ENSP00000420856
MDSKESLTPGREENPSSVLAQERGDVMDFYKTLRGGATVKVSASSPSLAVASQSDSKQRRLLVDFPKGSVSNAQQPDLSKAVSLSMGLYMGETETKVMGNDLGFPQQGQISLSSGETDLKLLEESIANLNRSTSVPENPKSSAST

SEQ ID NO: 58494 - protein, 778 aa, Homo sapiens; identical to SEQ ID NO: 58487
  Payload ID: 11442
  Gene Symbol: NR3C1
  Gene Name: nuclear receptor subfamily 3, group C, member 1 (glucocorticoid receptor)
  Uniprot ID: P04150
  ENSP ID: ENSP00000422518

SEQ ID NO: 58495 - protein, 145 aa, Homo sapiens; identical to SEQ ID NO: 58493
  Payload ID: 11442
  Gene Symbol: NR3C1
  Gene Name: nuclear receptor subfamily 3, group C, member 1 (glucocorticoid receptor)
  ENSP ID: ENSP00000424747

SEQ ID NO: 58496 - protein, 145 aa, Homo sapiens; identical to SEQ ID NO: 58493
  Payload ID: 11442
  Gene Symbol: NR3C1
  Gene Name: nuclear receptor subfamily 3, group C, member 1 (glucocorticoid receptor)
  ENSP ID: ENSP00000425313

SEQ ID NO: 58497 - protein, 144 aa, Homo sapiens
  Payload ID: 11442
  Gene Symbol: NR3C1
  Gene Name: nuclear receptor subfamily 3, group C, member 1 (glucocorticoid receptor)
  ENSP ID: ENSP00000425374
MDSKESLTPGREENPSSVLAQERGDVMDFYKTLRGGATVKVSASSPSLAVASQSDSKQRRLLVDFPKGSVSNAQQPDLSKAVSLSMGLYMGETETKVMGNDLGFPQQGQISLSSGETDLKLLEESIANLNRSTSVPENPKSSAS

SEQ ID NO: 58498 - protein, 145 aa, Homo sapiens; identical to SEQ ID NO: 58493
  Payload ID: 11442
  Gene Symbol: NR3C1
  Gene Name: nuclear receptor subfamily 3, group C, member 1 (glucocorticoid receptor)
  ENSP ID: ENSP00000426478

SEQ ID NO: 58499 - protein, 777 aa, Homo sapiens; identical to SEQ ID NO: 58488
  Payload ID: 11442
  Gene Symbol: NR3C1
  Gene Name: nuclear receptor subfamily 3, group C, member 1 (glucocorticoid receptor)
  Uniprot ID: P04150
  ENSP ID: ENSP00000427672

SEQ ID NO: 58500 - protein, 984 aa, Homo sapiens
  Payload ID: 11443
  Gene Symbol: NR3C2
  Gene Name: nuclear receptor subfamily 3, group C, member 2
  ENSP ID: ENSP00000341390
METKGYHSLPEGLDMERRWGQVSQAVERSSLGPTERTDENNYMEIVNVSCVSGAIPNNSTQGSSKEKQELLPCLQQDNNRPGILTSDIKTELESKELSATVAESMGLYMDSVRDADYSYEQQNQQGSMSPAKIYQNVEQLVKFYKGNGHRPSTLSCVNTPLRSFMSDSGSSVNGGVMRAVVKSPIMCHEKSPSVCSPLNMTSSVCSPAGINSVSSTTASFGSFPVHSPITQGTPLTCSPNVENRGSRSHSPAHASNVGSPLSSPLSSMKSSISSPPSHCSVKSPVSSPNNVTLRSSVSSPANINNSRCSVSSPSNTNNRSTLSSPAASTVGSICSPVNNAFSYTASGTSAGSSTLRDVVPSPDTQEKGAQEVPFPKTEEVESAISNGVTGQLNIVQYIKPEPDGAFSSSCLGGNSKINSDSSFSVPIKQESTKHSCSGTSFKGNPTVNPFPFMDGSYFSFMDDKDYYSLSGILGPPVPGFDGNCEGSGFPVGIKQEPDDGSYYPEASIPSSAIVGVNSGGQSFHYRIGAQGTISLSRSARDQSFQHLSSFPPVNTLVESWKSHGDLSSRRSDGYPVLEYIPENVSSSTLRSVSTGSSRPSKICLVCGDEASGCHYGVVTCGSCKVFFKRAVEGQHNYLCAGRNDCIIDKIRRKNCPACRLQKCLQAGMNLGARKSKKLGKLKGIHEEQPQQQQPPPPPPPPQSPEEGTTYIAPAKEPSVNTALVPQLSTISRALTPSPVMVLENIEPEIVYAGYDSSKPDTAENLLSTLNRLAGKQMIQVVKWAKVLPGFKNLPLEDQITLIQYSWMCLSSFALSWRSYKHTNSQFLYFAPDLVFNEEKMHQSAMYELCQGMHQISLQFVRLQLTFEEYTIMKVLLLLSTIPKDGLKSQAAFEEMRTNYIKELRKMVTKCPNNSGQSWQRFYQLTKLLDSMHDLVSDLLEFCFYTFRESHALKVEFPAMLVEIISDQLPKVESGNAKPLYFHRK

SEQ ID NO: 58501 - protein, 706 aa, Homo sapiens
  Payload ID: 11443
  Gene Symbol: NR3C2
  Gene Name: nuclear receptor subfamily 3, group C, member 2
  ENSP ID: ENSP00000343907
METKGYHSLPEGLDMERRWGQVSQAVERSSLGPTERTDENNYMEIVNVSCVSGAIPNNSTQGSSKEKQELLPCLQQDNNRPGILTSDIKTELESKELSATVAESMGLYMDSVRDADYSYEQQNQQGSMSPAKIYQNVEQLVKFYKGNGHRPSTLSCVNTPLRSFMSDSGSSVNGGVMRAVVKSPIMCHEKSPSVCSPLNMTSSVCSPAGINSVSSTTASFGSFPVHSPITQGTPLTCSPNVENRGSRSHSPAHASNVGSPLSSPLSSMKSSISSPPSHCSVKSPVSSPNNVTLRSSVSSPANINNSRCSVSSPSNTNNRSTLSSPAASTVGSICSPVNNAFSYTASGTSAGSSTLRDVVPSPDTQEKGAQEVPFPKTEEVESAISNGVTGQLNIVQYIKPEPDGAFSSSCLGGNSKINSDSSFSVPIKQESTKHSCSGTSFKGNPTVNPFPFMDGSYFSFMDDKDYYSLSGILGPPVPGFDGNCEGSGFPVGIKQEPDDGSYYPEASIPSSAIVGVNSGGQSFHYRIGAQGTISLSRSARDQSFQHLSSFPPVNTLVESWKSHGDLSSRRSDGYPVLEYIPENVSSSTLRSVSTGSSRPSKICLVCGDEASGCHYGVVTCGSCKVFFKRAVEGQHNYLCAGRNDCIIDKIRRKNCPACRLQKCLQAGMNLGERRCISLPCMNYARGCTKSAFSSFDCSSPLKNTPS

SEQ ID NO: 58502 - protein, 984 aa, Homo sapiens; identical to SEQ ID NO: 58500
  Payload ID: 11443
  Gene Symbol: NR3C2
  Gene Name: nuclear receptor subfamily 3, group C, member 2
  ENSP ID: ENSP00000350815

SEQ ID NO: 58503 - protein, 988 aa, Homo sapiens
  Payload ID: 11443
  Gene Symbol: NR3C2
  Gene Name: nuclear receptor subfamily 3, group C, member 2
  Uniprot ID: P08235
  ENSP ID: ENSP00000421481
METKGYHSLPEGLDMERRWGQVSQAVERSSLGPTERTDENNYMEIVNVSCVSGAIPNNSTQGSSKEKQELLPCLQQDNNRPGILTSDIKTELESKELSATVAESMGLYMDSVRDADYSYEQQNQQGSMSPAKIYQNVEQLVKFYKGNGHRPSTLSCVNTPLRSFMSDSGSSVNGGVMRAVVKSPIMCHEKSPSVCSPLNMTSSVCSPAGINSVSSTTASFGSFPVHSPITQGTPLTCSPNVENRGSRSHSPAHASNVGSPLSSPLSSMKSSISSPPSHCSVKSPVSSPNNVTLRSSVSSPANINNSRCSVSSPSNTNNRSTLSSPAASTVGSICSPVNNAFSYTASGTSAGSSTLRDVVPSPDTQEKGAQEVPFPKTEEVESAISNGVTGQLNIVQYIKPEPDGAFSSSCLGGNSKINSDSSFSVPIKQESTKHSCSGTSFKGNPTVNPFPFMDGSYFSFMDDKDYYSLSGILGPPVPGFDGNCEGSGFPVGIKQEPDDGSYYPEASIPSSAIVGVNSGGQSFHYRIGAQGTISLSRSARDQSFQHLSSFPPVNTLVESWKSHGDLSSRRSDGYPVLEYIPENVSSSTLRSVSTGSSRPSKICLVCGDEASGCHYGVVTCGSCKVFFKRAVEGKCSWQHNYLCAGRNDCIIDKIRRKNCPACRLQKCLQAGMNLGARKSKKLGKLKGIHEEQPQQQQPPPPPPPPQSPEEGTTYIAPAKEPSVNTALVPQLSTISRALTPSPVMVLENIEPEIVYAGYDSSKPDTAENLLSTLNRLAGKQMIQVVKWAKVLPGFKNLPLEDQITLIQYSWMCLSSFALSWRSYKHTNSQFLYFAPDLVFNEEKMHQSAMYELCQGMHQISLQFVRLQLTFEEYTIMKVLLLLSTIPKDGLKSQAAFEEMRTNYIKELRKMVTKCPNNSGQSWQRFYQLTKLLDSMHDLVSDLLEFCFYTFRESHALKVEFPAMLVEIISDQLPKVESGNAKPLYFHRK

SEQ ID NO: 58504 - protein, 867 aa, Homo sapiens
  Payload ID: 11443
  Gene Symbol: NR3C2
  Gene Name: nuclear receptor subfamily 3, group C, member 2
  Uniprot ID: P08235
  ENSP ID: ENSP00000423510
METKGYHSLPEGLDMERRWGQVSQAVERSSLGPTERTDENNYMEIVNVSCVSGAIPNNSTQGSSKEKQELLPCLQQDNNRPGILTSDIKTELESKELSATVAESMGLYMDSVRDADYSYEQQNQQGSMSPAKIYQNVEQLVKFYKGNGHRPSTLSCVNTPLRSFMSDSGSSVNGGVMRAVVKSPIMCHEKSPSVCSPLNMTSSVCSPAGINSVSSTTASFGSFPVHSPITQGTPLTCSPNVENRGSRSHSPAHASNVGSPLSSPLSSMKSSISSPPSHCSVKSPVSSPNNVTLRSSVSSPANINNSRCSVSSPSNTNNRSTLSSPAASTVGSICSPVNNAFSYTASGTSAGSSTLRDVVPSPDTQEKGAQEVPFPKTEEVESAISNGVTGQLNIVQYIKPEPDGAFSSSCLGGNSKINSDSSFSVPIKQESTKHSCSGTSFKGNPTVNPFPFMDGSYFSFMDDKDYYSLSGILGPPVPGFDGNCEGSGFPVGIKQEPDDGSYYPEASIPSSAIVGVNSGGQSFHYRIGAQGTISLSRSARDQSFQHLSSFPPVNTLVESWKSHGDLSSRRSDGYPVLEYIPENVSSSTLRSVSTGSSRPSKICLVCGDEASGCHYGVVTCGSCKVFFKRAVEGQHNYLCAGRNDCIIDKIRRKNCPACRLQKCLQAGMNLGGFKNLPLEDQITLIQYSWMCLSSFALSWRSYKHTNSQFLYFAPDLVFNEEKMHQSAMYELCQGMHQISLQFVRLQLTFEEYTIMKVLLLLSTIPKDGLKSQAAFEEMRTNYIKELRKMVTKCPNNSGQSWQRFYQLTKLLDSMHDLVSDLLEFCFYTFRESHALKVEFPAMLVEIISDQLPKVESGNAKPLYFHRK

SEQ ID NO: 58505 - protein, 988 aa, Homo sapiens; identical to SEQ ID NO: 58503
  Payload ID: 11443
  Gene Symbol: NR3C2
  Gene Name: nuclear receptor subfamily 3, group C, member 2
  ENSP ID: ENSP00000486719

SEQ ID NO: 58506 - protein, 598 aa, Homo sapiens
  Payload ID: 11444
  Gene Symbol: NR4A1
  Gene Name: nuclear receptor subfamily 4, group A, member 1
  Uniprot ID: P22736
  ENSP ID: ENSP00000243050
MPCIQAQYGTPAPSPGPRDHLASDPLTPEFIKPTMDLASPEAAPAAPTALPSFSTFMDGYTGEFDTFLYQLPGTVQPCSSASSSASSTSSSSATSPASASFKFEDFQVYGCYPGPLSGPVDEALSSSGSDYYGSPCSAPSPSTPSFQPPQLSPWDGSFGHFSPSQTYEGLRAWTEQLPKASGPPQPPAFFSFSPPTGPSPSLAQSPLKLFPSQATHQLGEGESYSMPTAFPGLAPTSPHLEGSGILDTPVTSTKARSGAPGGSEGRCAVCGDNASCQHYGVRTCEGCKGFFKRTVQKNAKYICLANKDCPVDKRRRNRCQFCRFQKCLAVGMVKEVVRTDSLKGRRGRLPSKPKQPPDASPANLLTSLVRAHLDSGPSTAKLDYSKFQELVLPHFGKEDAGDVQQFYDLLSGSLEVIRKWAEKIPGFAELSPADQDLLLESAFLELFILRLAYRSKPGEGKLIFCSGLVLHRLQCARGFGDWIDSILAFSRSLHSLLVDVPAFACLSALVLITDRHGLQEPRRVEELQNRIASCLKEHVAAVAGEPQPASCLSRLLGKLPELRTLCTQGLQRIFYLKLEDLVPPPPIIDKIFMDTLPF

SEQ ID NO: 58507 - protein, 611 aa, Homo sapiens
  Payload ID: 11444
  Gene Symbol: NR4A1
  Gene Name: nuclear receptor subfamily 4, group A, member 1
  Uniprot ID: P22736
  ENSP ID: ENSP00000353427
MWLAKACWSIQSEMPCIQAQYGTPAPSPGPRDHLASDPLTPEFIKPTMDLASPEAAPAAPTALPSFSTFMDGYTGEFDTFLYQLPGTVQPCSSASSSASSTSSSSATSPASASFKFEDFQVYGCYPGPLSGPVDEALSSSGSDYYGSPCSAPSPSTPSFQPPQLSPWDGSFGHFSPSQTYEGLRAWTEQLPKASGPPQPPAFFSFSPPTGPSPSLAQSPLKLFPSQATHQLGEGESYSMPTAFPGLAPTSPHLEGSGILDTPVTSTKARSGAPGGSEGRCAVCGDNASCQHYGVRTCEGCKGFFKRTVQKNAKYICLANKDCPVDKRRRNRCQFCRFQKCLAVGMVKEVVRTDSLKGRRGRLPSKPKQPPDASPANLLTSLVRAHLDSGPSTAKLDYSKFQELVLPHFGKEDAGDVQQFYDLLSGSLEVIRKWAEKIPGFAELSPADQDLLLESAFLELFILRLAYRSKPGEGKLIFCSGLVLHRLQCARGFGDWIDSILAFSRSLHSLLVDVPAFACLSALVLITDRHGLQEPRRVEELQNRIASCLKEHVAAVAGEPQPASCLSRLLGKLPELRTLCTQGLQRIFYLKLEDLVPPPPIIDKIFMDTLPF

SEQ ID NO: 58508 - protein, 598 aa, Homo sapiens; identical to SEQ ID NO: 58506
  Payload ID: 11444
  Gene Symbol: NR4A1
  Gene Name: nuclear receptor subfamily 4, group A, member 1
  Uniprot ID: P22736
  ENSP ID: ENSP00000378301

SEQ ID NO: 58509 - protein, 598 aa, Homo sapiens; identical to SEQ ID NO: 58506
  Payload ID: 11444
  Gene Symbol: NR4A1
  Gene Name: nuclear receptor subfamily 4, group A, member 1
  Uniprot ID: P22736
  ENSP ID: ENSP00000378302

SEQ ID NO: 58510 - protein, 652 aa, Homo sapiens
  Payload ID: 11444
  Gene Symbol: NR4A1
  Gene Name: nuclear receptor subfamily 4, group A, member 1
  ENSP ID: ENSP00000440864
MTSAQYKIKILIEGLHHGQRPGPAPPRQPGSFCWALKADGIMWLAKACWSIQSEMPCIQAQYGTPAPSPGPRDHLASDPLTPEFIKPTMDLASPEAAPAAPTALPSFSTFMDGYTGEFDTFLYQLPGTVQPCSSASSSASSTSSSSATSPASASFKFEDFQVYGCYPGPLSGPVDEALSSSGSDYYGSPCSAPSPSTPSFQPPQLSPWDGSFGHFSPSQTYEGLRAWTEQLPKASGPPQPPAFFSFSPPTGPSPSLAQSPLKLFPSQATHQLGEGESYSMPTAFPGLAPTSPHLEGSGILDTPVTSTKARSGAPGGSEGRCAVCGDNASCQHYGVRTCEGCKGFFKRTVQKNAKYICLANKDCPVDKRRRNRCQFCRFQKCLAVGMVKEVVRTDSLKGRRGRLPSKPKQPPDASPANLLTSLVRAHLDSGPSTAKLDYSKFQELVLPHFGKEDAGDVQQFYDLLSGSLEVIRKWAEKIPGFAELSPADQDLLLESAFLELFILRLAYRSKPGEGKLIFCSGLVLHRLQCARGFGDWIDSILAFSRSLHSLLVDVPAFACLSALVLITDRHGLQEPRRVEELQNRIASCLKEHVAAVAGEPQPASCLSRLLGKLPELRTLCTQGLQRIFYLKLEDLVPPPPIIDKIFMDTLPF

SEQ ID NO: 58511 - protein, 611 aa, Homo sapiens; identical to SEQ ID NO: 58507
  Payload ID: 11444
  Gene Symbol: NR4A1
  Gene Name: nuclear receptor subfamily 4, group A, member 1
  Uniprot ID: P22736
  ENSP ID: ENSP00000449539

SEQ ID NO: 58512 - protein, 325 aa, Homo sapiens
  Payload ID: 11444
  Gene Symbol: NR4A1
  Gene Name: nuclear receptor subfamily 4, group A, member 1
  Uniprot ID: P22736
  ENSP ID: ENSP00000449587
MPCIQAQYGTPAPSPGPRDHLASDPLTPEFIKPTMDLASPEAAPAAPTALPSFSTFMDGYTGEFDTFLYQLPGTVQPCSSASSSASSTSSSSATSPASASFKFEDFQVYGCYPGPLSGPVDEALSSSGSDYYGSPCSAPSPSTPSFQPPQLSPWDGSFGHFSPSQTYEGLRAWTEQLPKASGPPQPPAFFSFSPPTGPSPSLAQSPLKLFPSQATHQLGEGESYSMPTAFPGLAPTSPHLEGSGILDTPVTSTKARSGAPGGSEGRCAVCGDNASCQHYGVRTCEGCKGFFKVPRSPRWGLLLEMERGWPHPIGTCGLPLGSPPS

SEQ ID NO: 58513 - protein, 148 aa, Homo sapiens
  Payload ID: 11444
  Gene Symbol: NR4A1
  Gene Name: nuclear receptor subfamily 4, group A, member 1
  ENSP ID: ENSP00000449858
MPCIQAQYGTPAPSPGPRDHLASDPLTPEFIKPTMDLASPEAAPAAPTALPSFSTFMDGYTGEFDTFLYQLPGTVQPCSSASSSASSTSSSSATSPASASFKFEDFQVAQCRKTPSTSAWLTRTALWTRGGETAASSAASRSAWRWAW

SEQ ID NO: 58514 - protein, 150 aa, Homo sapiens
  Payload ID: 11444
  Gene Symbol: NR4A1
  Gene Name: nuclear receptor subfamily 4, group A, member 1
  ENSP ID: ENSP00000455399
MDLASPEAAPAAPTALPSFSTFMDGYTGEFDTFLYQLPGTVQPCSSASSSASSTSSSSATSPASASFKFEDFQVYGCYPGPLSGPVDEALSSSGSDYYGSPCSAPSPSTPSFQPPQLSPWDGSFGHFSPSQTYEGLRAWTEQLPKASGPP

SEQ ID NO: 58515 - protein, 120 aa, Homo sapiens
  Payload ID: 11444
  Gene Symbol: NR4A1
  Gene Name: nuclear receptor subfamily 4, group A, member 1
  ENSP ID: ENSP00000455767
MLGMYSSSTTCSPVLWRSSASGRRRSLALLSCHRLTRTCCWSRPSWSSSSSAWRTGLSQARASSSSAQAWCYTGCSVPVASGTGLTVSWPSQGPCTACLSMSLPSPASLPLSSSPTGMGC

SEQ ID NO: 58516 - protein, 119 aa, Homo sapiens
  Payload ID: 11444
  Gene Symbol: NR4A1
  Gene Name: nuclear receptor subfamily 4, group A, member 1
  ENSP ID: ENSP00000456633
MWLAKACWSIQSEMPCIQAQYGTPAPSPGPRDHLASDPLTPEFIKPTMDLASPEAAPAAPTALPSFSTFMDGYTGEFDTFLYQLPGTVQPCSSASSSASSTSSSSATSPASASFKFEDF

SEQ ID NO: 58517 - protein, 78 aa, Homo sapiens
  Payload ID: 11444
  Gene Symbol: NR4A1
  Gene Name: nuclear receptor subfamily 4, group A, member 1
  ENSP ID: ENSP00000456776
MWLAKACWSIQSGLPETTRKSPQPILGFSLRAVVWDLFPGSKQIVRRKLVSHDSGGAQAPGSATFGCGASPFHCELNS

SEQ ID NO: 58518 - protein, 302 aa, Homo sapiens
  Payload ID: 11444
  Gene Symbol: NR4A1
  Gene Name: nuclear receptor subfamily 4, group A, member 1
  ENSP ID: ENSP00000457070
MWLAKACWSIQSEMPCIQAQYGTPAPSPGPRDHLASDPLTPEFIKPTMDLASPEAAPAAPTALPSFSTFMDGYTGEFDTFLYQLPGTVQPCSSASSSASSTSSSSATSPASASFKFEDFQVYGCYPGPLSGPVDEALSSSGSDYYGSPCSAPSPSTPSFQPPQLSPWDGSFGHFSPSQTYEGLRAWTEQLPKASGPPQPPAFFSFSPPTGPSPSLAQSPLKLFPSQATHQLGEGESYSMPTAFPGLAPTSPHLEGSGILDTPVTSTKARSGAPGGSEGRCAVCGDNASCQHYGVRTCEGCKG

SEQ ID NO: 58519 - protein, 598 aa, Homo sapiens
  Payload ID: 11445
  Gene Symbol: NR4A2
  Gene Name: nuclear receptor subfamily 4, group A, member 2
  Uniprot ID: P43354
  ENSP ID: ENSP00000344479
MPCVQAQYGSSPQGASPASQSYSYHSSGEYSSDFLTPEFVKFSMDLTNTEITATTSLPSFSTFMDNYSTGYDVKPPCLYQMPLSGQQSSIKVEDIQMHNYQQHSHLPPQSEEMMPHSGSVYYKPSSPPTPTTPGFQVQHSPMWDDPGSLHNFHQNYVATTHMIEQRKTPVSRLSLFSFKQSPPGTPVSSCQMRFDGPLHVPMNPEPAGSHHVVDGQTFAVPNPIRKPASMGFPGLQIGHASQLLDTQVPSPPSRGSPSNEGLCAVCGDNAACQHYGVRTCEGCKGFFKRTVQKNAKYVCLANKNCPVDKRRRNRCQYCRFQKCLAVGMVKEVVRTDSLKGRRGRLPSKPKSPQEPSPPSPPVSLISALVRAHVDSNPAMTSLDYSRFQANPDYQMSGDDTQHIQQFYDLLTGSMEIIRGWAEKIPGFADLPKADQDLLFESAFLELFVLRLAYRSNPVEGKLIFCNGVVLHRLQCVRGFGEWIDSIVEFSSNLQNMNIDISAFSCIAALAMVTERHGLKEPKRVEELQNKIVNCLKDHVTFNNGGLNRPNYLSKLLGKLPELRTLCTQGLQRIFYLKLEDLVPPPAIIDKLFLDTLPF

SEQ ID NO: 58520 - protein, 150 aa, Homo sapiens
  Payload ID: 11445
  Gene Symbol: NR4A2
  Gene Name: nuclear receptor subfamily 4, group A, member 2
  ENSP ID: ENSP00000385379
  MOD_RES (1)..(1): Any amino acid
XSYHSSGEYSSDFLTPEFVKFSMDLTNTEITATTSLPSFSTFMDNYSTGYDVKPPCLYQMPLSGQQSSIKRTVQKNAKYVCLANKNCPVDKRRRNRCQYCRFQKCLAVGMVKEVVRTDSLKGRRGRLPSKPKSPQEPSPPSPPVSLISAL

SEQ ID NO: 58521 - protein, 598 aa, Homo sapiens; identical to SEQ ID NO: 58519
  Payload ID: 11445
  Gene Symbol: NR4A2
  Gene Name: nuclear receptor subfamily 4, group A, member 2
  Uniprot ID: P43354
  ENSP ID: ENSP00000386747

SEQ ID NO: 58522 - protein, 553 aa, Homo sapiens
  Payload ID: 11445
  Gene Symbol: NR4A2
  Gene Name: nuclear receptor subfamily 4, group A, member 2
  ENSP ID: ENSP00000386993
MPCVQAQYGSSPQGASPASQSYSYHSSGEYSSDFLTPEFVKFSMDLTNTEITATTSLPSFSTFMDNYSTGYDVKPPCLYQMPLSGQQSSIKVEDIQMHNYQQHSHLPPQSEEMMPHSGSVYYKPSSPPTPTTPGFQVQHSPMWDDPGSLHNFHQNYVATTHMIEQRKTPVSRLSLFSFKQSPPGTPVSSCQMRFDGPLHVPMNPEPAGSHHVVDGQTFAVPNPIRKPASMGFPGLQIGHASQLLDTQVPSPPSRGSPSNEGLCAVCGDNAACQHYGVRTCEGCKGFFKRTVQKNAKYVCLANKNCPVDKRRRNRCQYCRFQKCLAVGMVKEVVRTDSLKGRRGRLPSKPKSPQEPSPPSPPVSLISALVRAHVDSNPAMTSLDYSRFQANPDYQMSGDDTQHIQQFYDLLTGSMEIIRGWAEKIPGFADLPKADQDLLFESAFLELFVLRLAYRSNPVEEYEHRHFCLLLHCCPGYGHRETRAQGTQESGRTAKQDCKLSQRPRDFQQWGVEPPQLFVQTVGEAPRTSYPLHTGATAHFLPEIGRLGATASNN

SEQ ID NO: 58523 - protein, 106 aa, Homo sapiens
  Payload ID: 11445
  Gene Symbol: NR4A2
  Gene Name: nuclear receptor subfamily 4, group A, member 2
  ENSP ID: ENSP00000388120
MDNYSTGYDVKPPCLYQMPLSGQQSSIKVEDIQMHNYQQHSHLPPQSEEMMPHSGSVYYKPSSPPTPTTPGFQVQHSPMWDDPGSLHNFHQNYVATTHMIEQRKTP

SEQ ID NO: 58524 - protein, 535 aa, Homo sapiens
  Payload ID: 11445
  Gene Symbol: NR4A2
  Gene Name: nuclear receptor subfamily 4, group A, member 2
  Uniprot ID: P43354
  ENSP ID: ENSP00000389986
MDNYSTGYDVKPPCLYQMPLSGQQSSIKVEDIQMHNYQQHSHLPPQSEEMMPHSGSVYYKPSSPPTPTTPGFQVQHSPMWDDPGSLHNFHQNYVATTHMIEQRKTPVSRLSLFSFKQSPPGTPVSSCQMRFDGPLHVPMNPEPAGSHHVVDGQTFAVPNPIRKPASMGFPGLQIGHASQLLDTQVPSPPSRGSPSNEGLCAVCGDNAACQHYGVRTCEGCKGFFKRTVQKNAKYVCLANKNCPVDKRRRNRCQYCRFQKCLAVGMVKEVVRTDSLKGRRGRLPSKPKSPQEPSPPSPPVSLISALVRAHVDSNPAMTSLDYSRFQANPDYQMSGDDTQHIQQFYDLLTGSMEIIRGWAEKIPGFADLPKADQDLLFESAFLELFVLRLAYRSNPVEGKLIFCNGVVLHRLQCVRGFGEWIDSIVEFSSNLQNMNIDISAFSCIAALAMVTERHGLKEPKRVEELQNKIVNCLKDHVTFNNGGLNRPNYLSKLLGKLPELRTLCTQGLQRIFYLKLEDLVPPPAIIDKLFLDTLPF

SEQ ID NO: 58525 - protein, 392 aa, Homo sapiens
  Payload ID: 11445
  Gene Symbol: NR4A2
  Gene Name: nuclear receptor subfamily 4, group A, member 2
  ENSP ID: ENSP00000394671
MDNYSTGYDVKPPCLYQMPLSGQQSSIKVEDIQMHNYQQHSHLPPQSEEMMPHSGSVYYKPSSPPTPTTPGFQVQHSPMWDDPGSLHNFHQNYVATTHMIEQRKTPVSRLSLFSFKQSPPGTPVSSCQMRFDGPLHVPMNPEPAGSHHVVDGQTFAVPNPIRKPASMGFPGLQIGHASQLLDTQVPSPPSRGSPSNEGLCAVCGDNAACQHYGVRTCEGCKGFFKRTVQKNAKYVCLANKNCPVDKRRRNRCQYCRFQKCLAVGMVKEVVRTDSLKGRRGRLPSKPKSPQEPSPPSPPVSLISALVRAHVDSNPAMTSLDYSRFQANPDYQMSGDDTQHIQQFYDLLTGSMEIIRGWAEKIPGFADLPKADQDLLFESAFLELFVLRLAYRI

SEQ ID NO: 58526 - protein, 258 aa, Homo sapiens
  Payload ID: 11445
  Gene Symbol: NR4A2
  Gene Name: nuclear receptor subfamily 4, group A, member 2
  ENSP ID: ENSP00000406808
MPCVQAQYGSSPQGASPASQSYSYHSSGEYSSDFLTPEFVKFSMDLTNTEITATTSLPSFSTFMDNYSTGYDVKPPCLYQMPLSGQQSSIKVEDIQMHNYQQHSHLPPQSEEMMPHSGSVYYKPSSPPTPTTPGFQVQHSPMWDDPGSLHNFHQNYVATTHMIEQRKTPVSRLSLFSFKQSPPGTPVSSCQMRFDGPLHVPMNPEPAGSHHVVDGQTFAVPNPIRKPASMGFPGLQIGHASQLLDTQVPSPPSRGSPS

SEQ ID NO: 58527 - protein, 490 aa, Homo sapiens
  Payload ID: 11445
  Gene Symbol: NR4A2
  Gene Name: nuclear receptor subfamily 4, group A, member 2
  ENSP ID: ENSP00000410952
MDNYSTGYDVKPPCLYQMPLSGQQSSIKVEDIQMHNYQQHSHLPPQSEEMMPHSGSVYYKPSSPPTPTTPGFQVQHSPMWDDPGSLHNFHQNYVATTHMIEQRKTPVSRLSLFSFKQSPPGTPVSSCQMRFDGPLHVPMNPEPAGSHHVVDGQTFAVPNPIRKPASMGFPGLQIGHASQLLDTQVPSPPSRGSPSNEGLCAVCGDNAACQHYGVRTCEGCKGFFKRTVQKNAKYVCLANKNCPVDKRRRNRCQYCRFQKCLAVGMVKEVVRTDSLKGRRGRLPSKPKSPQEPSPPSPPVSLISALVRAHVDSNPAMTSLDYSRFQANPDYQMSGDDTQHIQQFYDLLTGSMEIIRGWAEKIPGFADLPKADQDLLFESAFLELFVLRLAYRSNPVEEYEHRHFCLLLHCCPGYGHRETRAQGTQESGRTAKQDCKLSQRPRDFQQWGVEPPQLFVQTVGEAPRTSYPLHTGATAHFLPEIGRLGATASNN

SEQ ID NO: 58528 - protein, 392 aa, Homo sapiens; identical to SEQ ID NO: 58525
  Payload ID: 11445
  Gene Symbol: NR4A2
  Gene Name: nuclear receptor subfamily 4, group A, member 2
  ENSP ID: ENSP00000415632

SEQ ID NO: 58529 - protein, 637 aa, Homo sapiens
  Payload ID: 11446
  Gene Symbol: NR4A3
  Gene Name: nuclear receptor subfamily 4, group A, member 3
  Uniprot ID: Q92570
  ENSP ID: ENSP00000333122
MHDSIRFGNVDMPCVQAQYSPSPPGSSYAAQTYSSEYTTEIMNPDYTKLTMDLGSTEITATATTSLPSISTFVEGYSSNYELKPSCVYQMQRPLIKVEEGRAPSYHHHHHHHHHHHHHHQQQHQQPSIPPASSPEDEVLPSTSMYFKQSPPSTPTTPAFPPQAGALWDEALPSAPGCIAPGPLLDPPMKAVPTVAGARFPLFHFKPSPPHPPAPSPAGGHHLGYDPTAAAALSLPLGAAAAAGSQAAALESHPYGLPLAKRAAPLAFPPLGLTPSPTASSLLGESPSLPSPPSRSSSSGEGTCAVCGDNAACQHYGVRTCEGCKGFFKRTVQKNAKYVCLANKNCPVDKRRRNRCQYCRFQKCLSVGMVKEVVRTDSLKGRRGRLPSKPKSPLQQEPSQPSPPSPPICMMNALVRALTDSTPRDLDYSRYCPTDQAAAGTDAEHVQQFYNLLTASIDVSRSWAEKIPGFTDLPKEDQTLLIESAFLELFVLRLSIRSNTAEDKFVFCNGLVLHRLQCLRGFGEWLDSIKDFSLNLQSLNLDIQALACLSALSMITERHGLKEPKRVEELCNKITSSLKDHQSKGQALEPTESKVLGALVELRKICTLGLQRIFYLKLEDLVSPPSIIDKLFLDTLPF

SEQ ID NO: 58530 - protein, 443 aa, Homo sapiens
  Payload ID: 11446
  Gene Symbol: NR4A3
  Gene Name: nuclear receptor subfamily 4, group A, member 3
  Uniprot ID: Q92570
  ENSP ID: ENSP00000340301
MPCVQAQYSPSPPGSSYAAQTYSSEYTTEIMNPDYTKLTMDLGSTEITATATTSLPSISTFVEGYSSNYELKPSCVYQMQRPLIKVEEGRAPSYHHHHHHHHHHHHHHQQQHQQPSIPPASSPEDEVLPSTSMYFKQSPPSTPTTPAFPPQAGALWDEALPSAPGCIAPGPLLDPPMKAVPTVAGARFPLFHFKPSPPHPPAPSPAGGHHLGYDPTAAAALSLPLGAAAAAGSQAAALESHPYGLPLAKRAAPLAFPPLGLTPSPTASSLLGESPSLPSPPSRSSSSGEGTCAVCGDNAACQHYGVRTCEGCKGFFKRTVQKNAKYVCLANKNCPVDKRRRNRCQYCRFQKCLSVGMVKEVVRTDSLKGRRGRLPSKPKSPLQQEPSQPSPPSPPICMMNALVRALTDSTPRDLDYSRVSFMISCFQMNDQGLYLWLLVIRVD

SEQ ID NO: 58531 - protein, 626 aa, Homo sapiens
  Payload ID: 11446
  Gene Symbol: NR4A3
  Gene Name: nuclear receptor subfamily 4, group A, member 3
  Uniprot ID: Q92570
  ENSP ID: ENSP00000378531
MPCVQAQYSPSPPGSSYAAQTYSSEYTTEIMNPDYTKLTMDLGSTEITATATTSLPSISTFVEGYSSNYELKPSCVYQMQRPLIKVEEGRAPSYHHHHHHHHHHHHHHQQQHQQPSIPPASSPEDEVLPSTSMYFKQSPPSTPTTPAFPPQAGALWDEALPSAPGCIAPGPLLDPPMKAVPTVAGARFPLFHFKPSPPHPPAPSPAGGHHLGYDPTAAAALSLPLGAAAAAGSQAAALESHPYGLPLAKRAAPLAFPPLGLTPSPTASSLLGESPSLPSPPSRSSSSGEGTCAVCGDNAACQHYGVRTCEGCKGFFKRTVQKNAKYVCLANKNCPVDKRRRNRCQYCRFQKCLSVGMVKEVVRTDSLKGRRGRLPSKPKSPLQQEPSQPSPPSPPICMMNALVRALTDSTPRDLDYSRYCPTDQAAAGTDAEHVQQFYNLLTASIDVSRSWAEKIPGFTDLPKEDQTLLIESAFLELFVLRLSIRSNTAEDKFVFCNGLVLHRLQCLRGFGEWLDSIKDFSLNLQSLNLDIQALACLSALSMITERHGLKEPKRVEELCNKITSSLKDHQSKGQALEPTESKVLGALVELRKICTLGLQRIFYLKLEDLVSPPSIIDKLFLDTLPF

SEQ ID NO: 58532 - protein, 637 aa, Homo sapiens; identical to SEQ ID NO: 58529
  Payload ID: 11446
  Gene Symbol: NR4A3
  Gene Name: nuclear receptor subfamily 4, group A, member 3
  Uniprot ID: Q92570
  ENSP ID: ENSP00000482027

SEQ ID NO: 58533 - protein, 245 aa, Homo sapiens
  Payload ID: 11447
  Gene Symbol: NR5A1
  Gene Name: nuclear receptor subfamily 5, group A, member 1
  ENSP ID: ENSP00000362689
VEEEGDVSNRGVELLQLEPDEDQVRARILGCLQEPTKSRPDQPAAFGLLCRMADQTFISIVDWARRCMVFKELEVADQMTLLQNCWSELLVFDHIYRQVQHGKEGSILLVTGQEVELTTVATQAGSLLHSLVLRAQELVLQLLALQLDRQEFVCLKFIILFSLDLKFLNNHILVKDAQEKANAALLDYTLCHYPHCGDKFQQLLLCLVEVRALSMQAKEYLYHKHLGNEMPRNNLLIEMLQAKQT

SEQ ID NO: 58534 - protein, 461 aa, Homo sapiens
  Payload ID: 11447
  Gene Symbol: NR5A1
  Gene Name: nuclear receptor subfamily 5, group A, member 1
  Uniprot ID: Q13285
  ENSP ID: ENSP00000362690
MDYSYDEDLDELCPVCGDKVSGYHYGLLTCESCKGFFKRTVQNNKHYTCTESQSCKIDKTQRKRCPFCRFQKCLTVGMRLEAVRADRMRGGRNKFGPMYKRDRALKQQKKAQIRANGFKLETGPPMGVPPPPPPAPDYVLPPSLHGPEPKGLAAGPPAGPLGDFGAPALPMAVPGAHGPLAGYLYPAFPGRAIKSEYPEPYASPPQPGLPYGYPEPFSGGPNVPELILQLLQLEPDEDQVRARILGCLQEPTKSRPDQPAAFGLLCRMADQTFISIVDWARRCMVFKELEVADQMTLLQNCWSELLVFDHIYRQVQHGKEGSILLVTGQEVELTTVATQAGSLLHSLVLRAQELVLQLLALQLDRQEFVCLKFIILFSLDLKFLNNHILVKDAQEKANAALLDYTLCHYPHCGDKFQQLLLCLVEVRALSMQAKEYLYHKHLGNEMPRNNLLIEMLQAKQT

SEQ ID NO: 58535 - protein, 177 aa, Homo sapiens
  Payload ID: 11447
  Gene Symbol: NR5A1
  Gene Name: nuclear receptor subfamily 5, group A, member 1
  ENSP ID: ENSP00000393245
MDYSYDEDLDELCPVCGDKVSGYHYGLLTCESCKGFFKRTVQNNKHYTCTESQSCKIDKTQRKRCPFCRFQKCLTVGMRLEAVRADRMRGGRNKFGPMYKRDRALKQQKKAQIRANGFKLETGPPMGVPPPPPPAPDYVLPPSLHGPEPKGLAAGPPAGPLGDFGAPALPMAVPGAH

SEQ ID NO: 58536 - protein, 421 aa, Homo sapiens
  Payload ID: 11447
  Gene Symbol: NR5A1
  Gene Name: nuclear receptor subfamily 5, group A, member 1
  ENSP ID: ENSP00000483309
MDYSYDEDLDELCPVCGDKVSGYHYGLLTCESCKGFFKRTVQNNKHYTCTESQSCKIDKTQRKRCPFCRFQKCLTVGMRLEAVRADRMRGGRNKFGPMYKRDRALKQQKKAQIRANGFKLETGPPMGVPPPPPPAPDYVLPPSLHGPEPKGLAAGPPAGPLGDFGAPALPMAVPGAHGPLAGYLYPAFPGRAIKSEYPEPYASPPQPGLPYGYPEPFSGGPNVPELILQLLQLEPDEDQVRARILGCLQEPTKSRPDQPAAFGLLCRMADQTFISIVDWARRCMVFKELEVELTTVATQAGSLLHSLVLRAQELVLQLLALQLDRQEFVCLKFIILFSLDLKFLNNHILVKDAQEKANAALLDYTLCHYPHCGDKFQQLLLCLVEVRALSMQAKEYLYHKHLGNEMPRNNLLIEMLQAKQT

SEQ ID NO: 58537 - protein, 495 aa, Homo sapiens
  Payload ID: 11448
  Gene Symbol: NR5A2
  Gene Name: nuclear receptor subfamily 5, group A, member 2
  Uniprot ID: O00482
  ENSP ID: ENSP00000236914
MSSNSDTGDLQESLKHGLTPIVSQFKMVNYSYDEDLEELCPVCGDKVSGYHYGLLTCESCKGFFKRTVQNNKRYTCIENQNCQIDKTQRKRCPYCRFQKCLSVGMKLEAVRADRMRGGRNKFGPMYKRDRALKQQKKALIRANGLKLEAMSQVIQAMPSDLTISSAIQNIHSASKGLPLNHAALPPTDYDRSPFVTSPISMTMPPHGSLQGYQTYGHFPSRAIKSEYPDPYTSSPESIMGYSYMDSYQTSSPASIPHLILELLKCEPDEPQVQAKIMAYLQQEQANRSKHEKLSTFGLMCKMADQTLFSIVEWARSSIFFRELKVDDQMKLLQNCWSELLILDHIYRQVVHGKEGSIFLVTGQQVDYSIIASQAGATLNNLMSHAQELVAKLRSLQFDQREFVCLKFLVLFSLDVKNLENFQLVEGVQEQVNAALLDYTMCNYPQQTEKFGQLLLRLPEIRAISMQAEEYLYYKHLNGDVPYNNLLIEMLHAKRA

SEQ ID NO: 58538 - protein, 377 aa, Homo sapiens
  Payload ID: 11448
  Gene Symbol: NR5A2
  Gene Name: nuclear receptor subfamily 5, group A, member 2
  ENSP ID: ENSP00000356326
  MOD_RES (1)..(1): Any amino acid
XDLEELCPVCGDKVSGYHYGLLTCESCKGFFKRTVQNNKRYTCIENQNCQIDKTQRKRCPYCRFQKCLSVGMKLEAVRADRMRGGRNKFGPMYKRDRALKQQKKALIRANGLKLEAMSQVIQAMPSDLTISSAIQNIHSASKGLPLNHAALPPTDYDRSPFVTSPISMTMPPHGSLQGYQTYGHFPSRAIKSEYPDPYTSSPESIMGYSYMDSYQTSSPASIPHLILELLKCEPDEPQVQAKIMAYLQQEQANRSKHEKLSTFGLMCKMADQTLFSIVEWARSSIFFRELKGLTLSPSLECSGTILAHGNLHLLHSSDSPASASRVAGITGVHHNTHLIFVFLVEMGFCHVGQAGLKTPDLRVICLPRPPKVLGLWA

SEQ ID NO: 58539 - protein, 541 aa, Homo sapiens
  Payload ID: 11448
  Gene Symbol: NR5A2
  Gene Name: nuclear receptor subfamily 5, group A, member 2
  Uniprot ID: O00482
  ENSP ID: ENSP00000356331
MSSNSDTGDLQESLKHGLTPIGAGLPDRHGSPIPARGRLVMLPKVETEALGLARSHGEQGQMPENMQVSQFKMVNYSYDEDLEELCPVCGDKVSGYHYGLLTCESCKGFFKRTVQNNKRYTCIENQNCQIDKTQRKRCPYCRFQKCLSVGMKLEAVRADRMRGGRNKFGPMYKRDRALKQQKKALIRANGLKLEAMSQVIQAMPSDLTISSAIQNIHSASKGLPLNHAALPPTDYDRSPFVTSPISMTMPPHGSLQGYQTYGHFPSRAIKSEYPDPYTSSPESIMGYSYMDSYQTSSPASIPHLILELLKCEPDEPQVQAKIMAYLQQEQANRSKHEKLSTFGLMCKMADQTLFSIVEWARSSIFFRELKVDDQMKLLQNCWSELLILDHIYRQVVHGKEGSIFLVTGQQVDYSIIASQAGATLNNLMSHAQELVAKLRSLQFDQREFVCLKFLVLFSLDVKNLENFQLVEGVQEQVNAALLDYTMCNYPQQTEKFGQLLLRLPEIRAISMQAEEYLYYKHLNGDVPYNNLLIEMLHAKRA

SEQ ID NO: 58540 - protein, 71 aa, Homo sapiens
  Payload ID: 11448
  Gene Symbol: NR5A2
  Gene Name: nuclear receptor subfamily 5, group A, member 2
  ENSP ID: ENSP00000414888
  MOD_RES (1)..(1): Any amino acid
XSLKHGLTPIDRGNCRSGCFSFAATLRQRSLLTSCAGLPDRHGSPIPARGRLVMLPKVETEALGLARSHGE

SEQ ID NO: 58541 - protein, 113 aa, Homo sapiens
  Payload ID: 11448
  Gene Symbol: NR5A2
  Gene Name: nuclear receptor subfamily 5, group A, member 2
  ENSP ID: ENSP00000436776
MSSNSDTGDLQESLKHGLTPIDNTENTGTRKMREQHTTISHLFRRAEPPRCAGKESFPAAPRSSGSASGAAARARSGRRRGLRAHGGRALGGSRPRGRSWAPAARSPSWPLPK

SEQ ID NO: 58542 - protein, 469 aa, Homo sapiens
  Payload ID: 11448
  Gene Symbol: NR5A2
  Gene Name: nuclear receptor subfamily 5, group A, member 2
  Uniprot ID: O00482
  ENSP ID: ENSP00000439116
MVNYSYDEDLEELCPVCGDKVSGYHYGLLTCESCKGFFKRTVQNNKRYTCIENQNCQIDKTQRKRCPYCRFQKCLSVGMKLEAVRADRMRGGRNKFGPMYKRDRALKQQKKALIRANGLKLEAMSQVIQAMPSDLTISSAIQNIHSASKGLPLNHAALPPTDYDRSPFVTSPISMTMPPHGSLQGYQTYGHFPSRAIKSEYPDPYTSSPESIMGYSYMDSYQTSSPASIPHLILELLKCEPDEPQVQAKIMAYLQQEQANRSKHEKLSTFGLMCKMADQTLFSIVEWARSSIFFRELKVDDQMKLLQNCWSELLILDHIYRQVVHGKEGSIFLVTGQQVDYSIIASQAGATLNNLMSHAQELVAKLRSLQFDQREFVCLKFLVLFSLDVKNLENFQLVEGVQEQVNAALLDYTMCNYPQQTEKFGQLLLRLPEIRAISMQAEEYLYYKHLNGDVPYNNLLIEMLHAKRA

SEQ ID NO: 58543 - protein, 479 aa, Homo sapiens
  Payload ID: 11449
  Gene Symbol: NR6A1
  Gene Name: nuclear receptor subfamily 6, group A, member 1
  Uniprot ID: Q15406
  ENSP ID: ENSP00000341135
MERDEPPPSGGGGGGGSAGFLEPPAALPPPPRNGFCQDELAELDPGTISVSDDRAEQRTCLICGDRATGLHYGIISCEGCKGFFKRSICNKRVYRCSRDKNCVMSRKQRNRCQYCRLLKCLQMGMNRKAIREDGMPGGRNKSIGPVQISEEEIERIMSGQEFEEEANHWSNHGDSDHSSPGNRASESNQPSPGSTLSSRSVELNGFMAFREQYMGMSVPPHYQYIPHLFSYSGHSPLLPQQARSLDPQSYSLIHQLLSAEDLEPLGTPMLIEDGYAVTQAELFALLCRLADELLFRQIAWIKKLPFFCELSIKDYTCLLSSTWQELILLSSLTVYSKQIFGELADVTAKYSPSDEELHRFSDEGMEVIERLIYLYHKFHQLKVSNEEYACMKAINFLNQDIRGLTSASQLEQLNKRYWYICQDFTEYKYTHQPNRFPDLMMCLPEIRYIAGKMVNVPLEQLPLLFKVVLHSCKTSVGKE

SEQ ID NO: 58544 - protein, 476 aa, Homo sapiens
  Payload ID: 11449
  Gene Symbol: NR6A1
  Gene Name: nuclear receptor subfamily 6, group A, member 1
  Uniprot ID: Q15406
  ENSP ID: ENSP00000362686
MERDEPPPSGGGGGGGSAGFLEPPAALPPPPRNGFCQDELAELDPGTNDRAEQRTCLICGDRATGLHYGIISCEGCKGFFKRSICNKRVYRCSRDKNCVMSRKQRNRCQYCRLLKCLQMGMNRKAIREDGMPGGRNKSIGPVQISEEEIERIMSGQEFEEEANHWSNHGDSDHSSPGNRASESNQPSPGSTLSSSRSVELNGFMAFREQYMGMSVPPHYQYIPHLFSYSGHSPLLPQQARSLDPQSYSLIHQLLSAEDLEPLGTPMLIEDGYAVTQAELFALLCRLADELLFRQIAWIKKLPFFCELSIKDYTCLLSSTWQELILLSSLTVYSKQIFGELADVTAKYSPSDEELHRFSDEGMEVIERLIYLYHKFHQLKVSNEEYACMKAINFLNQDIRGLTSASQLEQLNKRYWYICQDFTEYKYTHQPNRFPDLMMCLPEIRYIAGKMVNVPLEQLPLLFKVVLHSCKTSVGKE

SEQ ID NO: 58545 - protein, 475 aa, Homo sapiens
  Payload ID: 11449
  Gene Symbol: NR6A1
  Gene Name: nuclear receptor subfamily 6, group A, member 1
  Uniprot ID: Q15406
  ENSP ID: ENSP00000413701
MERDEPPPSGGGGGGGSAGFLEPPAALPPPPRNGFCQDELAELDPGTNDRAEQRTCLICGDRATGLHYGIISCEGCKGFFKRSICNKRVYRCSRDKNCVMSRKQRNRCQYCRLLKCLQMGMNRKAIREDGMPGGRNKSIGPVQISEEEIERIMSGQEFEEEANHWSNHGDSDHSSPGNRASESNQPSPGSTLSSRSVELNGFMAFREQYMGMSVPPHYQYIPHLFSYSGHSPLLPQQARSLDPQSYSLIHQLLSAEDLEPLGTPMLIEDGYAVTQAELFALLCRLADELLFRQIAWIKKLPFFCELSIKDYTCLLSSTWQELILLSSLTVYSKQIFGELADVTAKYSPSDEELHRFSDEGMEVIERLIYLYHKFHQLKVSNEEYACMKAINFLNQDIRGLTSASQLEQLNKRYWYICQDFTEYKYTHQPNRFPDLMMCLPEIRYIAGKMVNVPLEQLPLLFKVVLHSCKTSVGKE

SEQ ID NO: 58546 - protein, 480 aa, Homo sapiens
  Payload ID: 11449
  Gene Symbol: NR6A1
  Gene Name: nuclear receptor subfamily 6, group A, member 1
  Uniprot ID: Q15406
  ENSP ID: ENSP00000420267
MERDEPPPSGGGGGGGSAGFLEPPAALPPPPRNGFCQDELAELDPGTISVSDDRAEQRTCLICGDRATGLHYGIISCEGCKGFFKRSICNKRVYRCSRDKNCVMSRKQRNRCQYCRLLKCLQMGMNRKAIREDGMPGGRNKSIGPVQISEEEIERIMSGQEFEEEANHWSNHGDSDHSSPGNRASESNQPSPGSTLSSSRSVELNGFMAFREQYMGMSVPPHYQYIPHLFSYSGHSPLLPQQARSLDPQSYSLIHQLLSAEDLEPLGTPMLIEDGYAVTQAELFALLCRLADELLFRQIAWIKKLPFFCELSIKDYTCLLSSTWQELILLSSLTVYSKQIFGELADVTAKYSPSDEELHRFSDEGMEVIERLIYLYHKFHQLKVSNEEYACMKAINFLNQDIRGLTSASQLEQLNKRYWYICQDFTEYKYTHQPNRFPDLMMCLPEIRYIAGKMVNVPLEQLPLLFKVVLHSCKTSVGKE

SEQ ID NO: 58547 - protein, 232 aa, Homo sapiens
  Payload ID: 11449
  Gene Symbol: NR6A1
  Gene Name: nuclear receptor subfamily 6, group A, member 1
  ENSP ID: ENSP00000420587
METWEVSVSDDRAEQRTCLICGDRATGLHYGIISCEGCKGFFKRSICNKRVYRCSRDKNCVMSRKQRNRCQYCRLLKCLQMGMNRKAIREDGMPGGRNKSIGPVQISEEEIERIMSGQEFEEEANHWSNHGDSDHSSPGNRASESNQPSPGSTLSSSRSVELNGFMAFREQYMGMSVPPHYQYIPHLFSYSGHSPLLPQQARSLDPQSYSLIHQLLSAEDLEPLGTPMLIED

SEQ ID NO: 58548 - protein, 503 aa, Homo sapiens
  Payload ID: 11450
  Gene Symbol: NRF1
  Gene Name: nuclear respiratory factor 1
  Uniprot ID: Q16656
  ENSP ID: ENSP00000223190
MEEHGVTQTEHMATIEAHAVAQQVQQVHVATYTEHSMLSADEDSPSSPEDTSYDDSDILNSTAADEVTAHLAAAGPVGMAAAAAVATGKKRKRPHVFESNPSIRKRQQTRLLRKLRATLDEYTTRVGQQAIVLCISPSKPNPVFKVFGAAPLENVVRKYKSMILEDLESALAEHAPAPQEVNSELPPLTIDGIPVSVDKMTQAQLRAFIPEMLKYSTGRGKPGWGKESCKPIWWPEDIPWANVRSDVRTEEQKQRVSWTQALRTIVKNCYKQHGREDLLYAFEDQQTQTQATATHSIAHLVPSQTVVQTFSNPDGTVSLIQVGTGATVATLADASELPTTVTVAQVNYSAVADGEVEQNWATLQGGEMTIQTTQASEATQAVASLAEAAVAASQEMQQGATVTMALNSEAAAHAVATLAEATLQGGGQIVLSGETAAAVGALTGVQDANGLVQIPVSMYQTVVTSLAQGNGPVQVAMAPVTTRISDSAVTMDGQAVEVVTLEQ

SEQ ID NO: 58549 - protein, 522 aa, Homo sapiens
  Payload ID: 11450
  Gene Symbol: NRF1
  Gene Name: nuclear respiratory factor 1
  Uniprot ID: Q16656
  ENSP ID: ENSP00000309826
MEEHGVTQTEHMATIEAHAVAQQVQQVHVATYTEHSMLSADEDSPSSPEDTSYDDSDILNSTAADEVTAHLAAAGPVGMAAAAAVATGKKRKRPHVFESNPSIRKRQQTRLLRKLRATLDEYTTRVGQQAIVLCISPSKPNPVFKVFGAAPLENVVRKYKSMILEDLESALAEHAPAPQEVNSELPPLTIDGIPVSVDKMTQAQLRAFIPEMLKYSTGRGKPGWGKESCKPIWWPEDIPWANVRSDVRTEEQKQRVSWTQALRTIVKNCYKQHGREDLLYAFEDQQTQTQATATHSIAHLVPSQTVVQTFSNPDGTVSLIQVGTGATVATLADASELPTTVTVAQVNYSAVADGEVEQNWATLQGGEMTIQTTQASEATQAVASLAEAAVAASQEMQQGATVTMALNSEAAAHAVATLAEATLQGGGQIVLSGETAAAVGALTGVQDANGLFMADRAGRKWILTDKATGLVQIPVSMYQTVVTSLAQGNGPVQVAMAPVTTRISDSAVTMDGQAVEVVTLEQ

SEQ ID NO: 58550 - protein, 522 aa, Homo sapiens; identical to SEQ ID NO: 58549
  Payload ID: 11450
  Gene Symbol: NRF1
  Gene Name: nuclear respiratory factor 1
  Uniprot ID: Q16656
  ENSP ID: ENSP00000342351

SEQ ID NO: 58551 - protein, 503 aa, Homo sapiens; identical to SEQ ID NO: 58548
  Payload ID: 11450
  Gene Symbol: NRF1
  Gene Name: nuclear respiratory factor 1
  Uniprot ID: Q16656
  ENSP ID: ENSP00000376922

SEQ ID NO: 58552 - protein, 503 aa, Homo sapiens; identical to SEQ ID NO: 58548
  Payload ID: 11450
  Gene Symbol: NRF1
  Gene Name: nuclear respiratory factor 1
  Uniprot ID: Q16656
  ENSP ID: ENSP00000376924

SEQ ID NO: 58553 - protein, 209 aa, Homo sapiens
  Payload ID: 11450
  Gene Symbol: NRF1
  Gene Name: nuclear respiratory factor 1
  ENSP ID: ENSP00000394877
MEEHGVTQTEHMATIEAHAVAQQVQQVHVATYTEHSMLSADEDSPSSPEDTSYDDSDILNSTAADEVTAHLAAAGPVGMAAAAAVATGKKRKRPHVFESNPSIRKRQQTRLLRKLRATLDEYTTRVGQQAIVLCISPSKPNPVFKVFGAAPLENVVRKYKSMILEDLESALAEHAPAPQEVNSELPPLTIDGIPVSVDKMTQAQLRAFI

SEQ ID NO: 58554 - protein, 619 aa, Homo sapiens
  Payload ID: 11451
  Gene Symbol: NXF1
  Gene Name: nuclear RNA export factor 1
  Uniprot ID: Q9UBU9
  ENSP ID: ENSP00000294172
MADEGKSYSEHDDERVNFPQRKKKGRGPFRWKYGEGNRRSGRGGSGIRSSRLEEDDGDVAMSDAQDGPRVRYNPYTTRPNRRGDTWHDRDRIHVTVRRDRAPPERGGAGTSQDGTSKNWFKITIPYGRKYDKAWLLSMIQSKCSVPFTPIEFHYENTRAQFFVEDASTASALKAVNYKILDRENRRISIIINSSAPPHTILNELKPEQVEQLKLIMSKRYDGSQQALDLKGLRSDPDLVAQNIDVVLNRRSCMAATLRIIEENIPELLSLNLSNNRLYRLDDMSSIVQKAPNLKILNLSGNELKSERELDKIKGLKLEELWLDGNSLCDTFRDQSTYISAIRERFPKLLRLDGHELPPPIAFDVEAPTTLPPCKGSYFGTENLKSLVLHFLQQYYAIYDSGDRQGLLDAYHDGACCSLSIPFIPQNPARSSLAEYFKDSRNVKKLKDPTLRFRLLKHTRLNVVAFLNELPKTQHDVNSFVVDISAQTSTLLCFSVNGVFKEVDGKSRDSLRAFTRTFIAVPASNSGLCIVNDELFVRNASSEEIQRAFAMPAPTPSSSPVPTLSPEQQEMLQAFSTQSGMNLEWSQKCLQDNNWDYTRSAQAFTHLKAKGEIPEVAFMK

SEQ ID NO: 58555 - protein, 115 aa, Homo sapiens
  Payload ID: 11451
  Gene Symbol: NXF1
  Gene Name: nuclear RNA export factor 1
  ENSP ID: ENSP00000431381
MSDAQDGPRVRYNPYTTRPNRRGDTWHDRDRIHVTVRRDRAPPERGGAGTSQDGTSKNWFKITIPYGRKYDKAWLLSMIQSKCSVPFTPIEFHYENTRAQFFVEDASTASALKAV

SEQ ID NO: 58556 - protein, 76 aa, Homo sapiens
  Payload ID: 11451
  Gene Symbol: NXF1
  Gene Name: nuclear RNA export factor 1
  ENSP ID: ENSP00000432530
MADEGKSYSEHDDERVNFPQRKKKGRGPFRWKYGEGNRRSGRGGSGIRSSRLEEDDGDVAMSDAQDGPRQPLYHPT

SEQ ID NO: 58557 - protein, 124 aa, Homo sapiens
  Payload ID: 11451
  Gene Symbol: NXF1
  Gene Name: nuclear RNA export factor 1
  ENSP ID: ENSP00000434301
  MOD_RES (1)..(1): Any amino acid
XISAQTSTLLCFSVNGVFKEVDGKSRDSLRAFTRTFIAVPASNSGSEEIQRAFAMPAPTPSSSPVPTLSPEQQEMLQAFSTQSGMNLEWSQKCLQDNNWDYTRSAQAFTHLKAKGEIPEVAFMK

SEQ ID NO: 58558 - protein, 603 aa, Homo sapiens
  Payload ID: 11451
  Gene Symbol: NXF1
  Gene Name: nuclear RNA export factor 1
  ENSP ID: ENSP00000435742
MADEGKSYSVSTSFFKSPTQFSSNFSLMLPSHREGSFLWIGSGVCMEMASVVKHDDERVNFPQRKKKGRGPFRWKYGEGNRRSGRGGSGIRSSRLEEDDGDVAMSDAQDGPRVRYNPYTTRPNRRGDTWHDRDRIHVTVRRDRAPPERGGAGTSQDGTSKNWFKITIPYGRKYDKAWLLSMIQSKCSVPFTPIEFHYENTRAQFFVEDASTASALKAVNYKILDRENRRISIIINSSAPPHTILNELKPEQVEQLKLIMSKRYDGSQQALDLKGLRSDPDLVAQNIDVVLNRRSCMAATLRIIEENIPELLSLNLSNNRLYRLDDMSSIVQKAPNLKILNLSGNELKSERELDKIKGLKLEELWLDGNSLCDTFRDQSTYISAIRERFPKLLRLDGHELPPPIAFDVEAPTTLPPCKGSYFGTENLKSLVLHFLQQYYAIYDSGDRQGLLDAYHDGACCSLSIPFIPQNPARSSLAEYFKDSRNVKKLKDPTLRFRLLKHTRLNVVAFLNELPKTQHDVNSFVVDISAQTSTLLCFSVNGVFKEVDGKSRDSLRAFTRTFIAVPASNSGLCIVNDELFVRNASSEEIQRAFAMPAPTPSSSPV

SEQ ID NO: 58559 - protein, 619 aa, Homo sapiens; identical to SEQ ID NO: 58554
  Payload ID: 11451
  Gene Symbol: NXF1
  Gene Name: nuclear RNA export factor 1
  Uniprot ID: Q9UBU9
  ENSP ID: ENSP00000436679

SEQ ID NO: 58560 - protein, 63 aa, Homo sapiens
  Payload ID: 11451
  Gene Symbol: NXF1
  Gene Name: nuclear RNA export factor 1
  ENSP ID: ENSP00000437296
MSDAQDGPRVRYNPYTTRPNRRGDTWHDRDRIHVTVRRDRAPPERGGAGTSQDGTSKNWFKIT

SEQ ID NO: 58561 - protein, 356 aa, Homo sapiens
  Payload ID: 11451
  Gene Symbol: NXF1
  Gene Name: nuclear RNA export factor 1
  Uniprot ID: Q9UBU9
  ENSP ID: ENSP00000453885
MADEGKSYSEHDDERVNFPQRKKKGRGPFRWKYGEGNRRSGRGGSGIRSSRLEEDDGDVAMSDAQDGPRVRYNPYTTRPNRRGDTWHDRDRIHVTVRRDRAPPERGGAGTSQDGTSKNWFKITIPYGRKYDKAWLLSMIQSKCSVPFTPIEFHYENTRAQFFVEDASTASALKAVNYKILDRENRRISIIINSSAPPHTILNELKPEQVEQLKLIMSKRYDGSQQALDLKGLRSDPDLVAQNIDVVLNRRSCMAATLRIIEENIPELLSLNLSNNRLYRLDDMSSIVQKAPNLKILNLSGNELKSERELDKIKGLKLEELWLDGNSLCDTFRDQSTYIRSVVACVSPPGDLHPLGG

SEQ ID NO: 58562 - protein, 219 aa, Homo sapiens
  Payload ID: 11451
  Gene Symbol: NXF1
  Gene Name: nuclear RNA export factor 1
  ENSP ID: ENSP00000477375
MIQSKCSVPFTPIEFHYENTRAQFFVEDASTASALKAVNYKILDRENRRISIIINSSAPPHTILNELKPEQVEQLKLIMSKRYDGSQQALDLKGLRSDPDLVAQNIDVVLNRRSCMAATLRIIEENIPELLSLNLSNNRLYRLDDMSSIVQKAPNLKILNLSGNELKSERELDKIKGLKLEELWLDGNSLCDTFRDQSTYIRSVVACVSPPGDLHPLGG

SEQ ID NO: 58563 - protein, 626 aa, Homo sapiens
  Payload ID: 11452
  Gene Symbol: NXF2
  Gene Name: nuclear RNA export factor 2
  Uniprot ID: Q9GZY0
  ENSP ID: ENSP00000474598
MCSTLKKCGTYRTEVAECHDHGSTFQGRKKGGSSFRDNFDKRSCHYEHGGYERPPSHCQENDGSVEMRDVHKDQQLRHTPYSIRCERRMKWHSEDEIRITTWRNRKPPERKMSQNTQDGYTRNWFKVTIPYGIKYDKAWLMNSIQSHCSDRFTPVDFHYVRNRACFFVQDASAASALKDVSYKIYDDENQKICIFVNHSTAPYSVKNKLKPGQMEMLKLTMNKRYNVSQQALDLQNLRFDPDLMGRDIDIILNRRNCMAATLKIIERNFPELLSLNLCNNKLYQLDGLSDITEKAPKVKTLNLSKNKLESAWELGKVKGLKLEELWLEGNPLCSTFSDQSAYVSAIRDCFPKLLRLDGRELSAPVIVDIDSSETMKPCKENFTGSETLKHLVLQFLQQYYSIYDSGDRQGLLGAYHDEACFSLAIPFDPKDSAPSSLCKYFEDSRNMKTLKDPYLKGELLRRTKRDIVDSLSALPKTQHDLSSILVDVWCQTERMLCFSVNGVFKEVEGQSQGSVLAFTRTFIATPGSSSSLCIVNDELFVRDASPQETQSAFSIPVSTLSSSSEPSLSQEQQEMVQAFSAQSGMKLEWSQKCLQDNEWNYTRAGQAFTMLQTEGKIPAEAFKQIS

SEQ ID NO: 58564 - protein, 626 aa, Homo sapiens; identical to SEQ ID NO: 58563
  Payload ID: 11452
  Gene Symbol: NXF2
  Gene Name: nuclear RNA export factor 2
  Uniprot ID: Q9GZY0
  ENSP ID: ENSP00000485586

SEQ ID NO: 58565 - protein, 626 aa, Homo sapiens; identical to SEQ ID NO: 58563
  Payload ID: 11453
  Gene Symbol: NXF2B
  Gene Name: nuclear RNA export factor 2B
  Uniprot ID: Q9GZY0
  ENSP ID: ENSP00000472530

SEQ ID NO: 58566 - protein, 626 aa, Homo sapiens; identical to SEQ ID NO: 58563
  Payload ID: 11453
  Gene Symbol: NXF2B
  Gene Name: nuclear RNA export factor 2B
  Uniprot ID: Q9GZY0
  ENSP ID: ENSP00000474659

SEQ ID NO: 58567 - protein, 409 aa, Homo sapiens
  Payload ID: 11453
  Gene Symbol: NXF2B
  Gene Name: nuclear RNA export factor 2B
  ENSP ID: ENSP00000482525
MKWHSEDEIRITTWRNRKPPERKMSQNTQDGYTRNWFKVTIPYGIKYDKAWLMNSIQSHCSDRFTPVDFHYVRNRACFFVQDASAASALKDVSYKIYDDENQKICIFVNHSTAPYSVKNKLKPGQMEMLKLTMNKRYNVSQQALDLQNLRFDPDLMGRDIDIILNRRNCMAATLKIIERNFPELLSLNLCNNKLYQLDGLSDITEKAPKVKTLNLSKNKLESAWELGKVKGLKLEELWLEGNPLCSTFSDQSAYVSAIRDCFPKLLRLDGRELSAPVIVDIDSSETMKPCKENFTGSETLKHLVLQFLQQYYSIYDSGDRQGLLGAYHDEACFSLAIPFDPKDSAPSSLCKYFEDSRNMKTLKDPYLKGELLRRTKRDIVDSLSALPKTQHDLSSILVDVWCQTVPSGQ

SEQ ID NO: 58568 - protein, 626 aa, Homo sapiens; identical to SEQ ID NO: 58563
  Payload ID: 11453
  Gene Symbol: NXF2B
  Gene Name: nuclear RNA export factor 2B
  Uniprot ID: Q9GZY0
  ENSP ID: ENSP00000484645

SEQ ID NO: 58569 - protein, 531 aa, Homo sapiens
  Payload ID: 11454
  Gene Symbol: NXF3
  Gene Name: nuclear RNA export factor 3
  Uniprot ID: Q9H4D5
  ENSP ID: ENSP00000378504
MSLPSGHTTGHTDQVVQRRARCWDIYQRRFSSRSEPVNPGMHSSSHQQQDGDAAMHGAHMDSPVRYTPYTISPYNRKGSFRKQDQTHVNMEREQKPPERRMEGNMPDGTLGSWFKITVPFGIKYNEKWLLNLIQNECSVPFVPVEFHYENMHASFFVENASIAYALKNVSGKIWDEDNEKISIFVNPAGIPHFVHRELKSEKVEQIKLAMNQQCDVSQEALDIQRLPFYPDMVNRDTKMASNPRKCMAASLDVHEENIPTVMSAGEMDKWKGIEPGEKCADRSPVCTTFSDTSSNINSILELFPKLLCLDGQQSPRATLCGTEAHKRLPTCKGSFFGSEMLKNLVLQFLQQYYLIYDSGDRQGLLSAYHDEACFSLSIPFNPEDSAPSSFCKFFKDSRNIKILKDPYLRGELLKHTKLDIVDSLSALPKTQHDLSSFLVDMWYQTEWMLCFSVNGVFKEVEGQSQGSVLAFTRTFIATPGSSSSLCIVNDKLFVRDTSHQGTQSALFTLVPTAFSSSVPAFSQEQQKMLPS

SEQ ID NO: 58570 - protein, 361 aa, Homo sapiens
  Payload ID: 11454
  Gene Symbol: NXF3
  Gene Name: nuclear RNA export factor 3
  ENSP ID: ENSP00000404017
  MOD_RES (1)..(1): Any amino acid
XNEKWLLNLIQNECSVPFVPVEFHYENMHASFFVENASIAYALKNVSGKIWDEDNEKISIFVNPAGIPHFVHRELKSEKVEQIKLAMNQQCDVSQEALDIQRLPFYPDMVNRDTKMASNPRKCMAASLDVHEENIPTVMSAGEMDKWKGIEPGEKCADRSPVCTTFSDTSSNINSILELFPKLLCLDGQQSPRATLCGTEAHKRLPTCKGSFFGSEMLKNLVLQFLQQYYLIYDSGDRQGLLSAYHDEACFSLSIPFNPEDSAPSSFCKFFKDSRNIKILKDPYLRGELLKHTKLDIVDSLSALPKTQHDLSSFLVDMWYQTEWMLCFSVNGVFKEVSGFCSRLHPDLHCYPWQQFQSVHR

SEQ ID NO: 58571 - protein, 397 aa, Homo sapiens
  Payload ID: 11455
  Gene Symbol: NXF5
  Gene Name: nuclear RNA export factor 5
  Uniprot ID: Q9H1B4
  ENSP ID: ENSP00000263032
MRRNTQDENMRKWFKVTIPYGIKYDKAWLMNSIQSNCSVPFTPVDFHYIRNRACFFVQVASAASALKDVSYKIYDDENQKICIFVSHFTAPYSVKNKLKPGQMEMLKLTMNKRYNVSQQALDLQNLRFDPDLMGRDIDIILNRRNCMAATLKITERNFPELLSLNLCNNKLYQLDGLSDITEKAPKVKTLNLSKNKLESAWELGKVKGLKLEELWLEGNPLCSTFSDQSAYVSAIRDCFPKLLRLDGRELSAPVIVDIDSSETMKPCKENFTGSETLKHLVLQFLQQSNLCKYFKDSRNIKILKDPYLQRKLLKHTKCPRNVDSLSALPETQHDFTSILVDMWYQTVNTCFLPRAGPESQRWWCLLSLKWKDGLRVLILPSCGPSSLPLAAIPVCAS

SEQ ID NO: 58572 - protein, 302 aa, Homo sapiens
  Payload ID: 11455
  Gene Symbol: NXF5
  Gene Name: nuclear RNA export factor 5
  Uniprot ID: Q9H1B4
  ENSP ID: ENSP00000331535
MRRNTQDENMRKWFKVTICIFVSHFTAPYSVKNKLKPGQMEMLKLTMNKRYNVSQQALDLQNLRFDPDLMGRDIDIILNRRNCMAATLKITERNFPELLSLNLCNNKLYQLDGLSDITEKAPKVKTLNLSKNKLESAWELGKVKGLKLEELWLEGNPLCSTFSDQSAYVSAIRDCFPKLLRLDGRELSAPVIVDIDSSETMKPCKENFTGSETLKHLVLQFLQQSNLCKYFKDSRNIKILKDPYLQRKLLKHTKCPRNVDSLSALPETQHDFTSILVDMWYQTVNTCFLPRAGPESQRWVGG

SEQ ID NO: 58573 - protein, 305 aa, Homo sapiens
  Payload ID: 11455
  Gene Symbol: NXF5
  Gene Name: nuclear RNA export factor 5
  Uniprot ID: Q9H1B4
  ENSP ID: ENSP00000354539
MRRNTQDENMRKWFKVTICIFVSHFTAPYSVKNKLKPGQMEMLKLTMNKRYNVSQQALDLQNLRFDPDLMGRDIDIILNRRNCMAATLKITERNFPELLSLNLCNNKLYQLDGLSDITEKAPKVKTLNLSKNKLESAWELGKVKGLKLEELWLEGNPLCSTFSDQSAYVSAIRDCFPKLLRLDGRELSAPVIVDIDSSETMKPCKENFTGSETLKHLVLQFLQQSNLCKYFKDSRNIKILKDPYLQRKLLKHTKCPRNVDSLSALPETQHDFTSILVDMWYQTVNTCFLPRAGPESQSGRMVSGF

SEQ ID NO: 58574 - protein, 368 aa, Homo sapiens
  Payload ID: 11455
  Gene Symbol: NXF5
  Gene Name: nuclear RNA export factor 5
  Uniprot ID: Q9H1B4
  ENSP ID: ENSP00000361889
MRRNTQDENMRKWFKVTIPYGIKYDKAWLMNSIQSNCSVPFTPVDFHYIRNRACFFVQVASAASALKDVSYKIYDDENQKICIFVSHFTAPYSVKNKLKPGQMEMLKLTMNKRYNVSQQALDLQNLRFDPDLMGRDIDIILNRRNCMAATLKITERNFPELLSLNLCNNKLYQLDGLSDITEKAPKVKTLNLSKNKLESAWELGKVKGLKLEELWLEGNPLCSTFSDQSAYVSAIRDCFPKLLRLDGRELSAPVIVDIDSSETMKPCKENFTGSETLKHLVLQFLQQSNLCKYFKDSRNIKILKDPYLQRKLLKHTKCPRNVDSLSALPETQHDFTSILVDMWYQTVNTCFLPRAGPESQSGRMVSGF

SEQ ID NO: 58575 - protein, 168 aa, Homo sapiens
  Payload ID: 11455
  Gene Symbol: NXF5
  Gene Name: nuclear RNA export factor 5
  Uniprot ID: Q9H1B4
  ENSP ID: ENSP00000422976
MRRNTQDENMRKWFKVTIPYGIKYDKAWLMNSIQSNCSVPFTPVDFHYIRNRACFFVQVASAASALKDVSYKIYDDENQKICIFVSHFTAPYSVKNKLKPGQMEMLKLTMNKRYNVSQQALDLQNLRFDPDLMGRDIDIILNRRNCMAATLKITERNFPERRLPKSRP

SEQ ID NO: 58576 - protein, 365 aa, Homo sapiens
  Payload ID: 11455
  Gene Symbol: NXF5
  Gene Name: nuclear RNA export factor 5
  Uniprot ID: Q9H1B4
  ENSP ID: ENSP00000426978
MRRNTQDENMRKWFKVTIPYGIKYDKAWLMNSIQSNCSVPFTPVDFHYIRNRACFFVQVASAASALKDVSYKIYDDENQKICIFVSHFTAPYSVKNKLKPGQMEMLKLTMNKRYNVSQQALDLQNLRFDPDLMGRDIDIILNRRNCMAATLKITERNFPELLSLNLCNNKLYQLDGLSDITEKAPKVKTLNLSKNKLESAWELGKVKGLKLEELWLEGNPLCSTFSDQSAYVSAIRDCFPKLLRLDGRELSAPVIVDIDSSETMKPCKENFTGSETLKHLVLQFLQQSNLCKYFKDSRNIKILKDPYLQRKLLKHTKCPRNVDSLSALPETQHDFTSILVDMWYQTVNTCFLPRAGPESQSLRPL

SEQ ID NO: 58577 - protein, 397 aa, Homo sapiens; identical to SEQ ID NO: 58571
  Payload ID: 11455
  Gene Symbol: NXF5
  Gene Name: nuclear RNA export factor 5
  Uniprot ID: Q9H1B4
  ENSP ID: ENSP00000442401

SEQ ID NO: 58578 - protein, 558 aa, Homo sapiens
  Payload ID: 11456
  Gene Symbol: NSRP1
  Gene Name: nuclear speckle splicing regulatory protein 1
  Uniprot ID: Q9H0G5
  ENSP ID: ENSP00000247026
MAIPGRQYGLILPKKTQQLHPVLQKPSVFGNDSDDDDETSVSESLQREAAKKQAMKQTKLEIQKALAEDATVYEYDSIYDEMQKKKEENNPKLLLGKDRKPKYIHNLLKAVEIRKKEQEKRMEKKIQREREMEKGEFDDKEAFVTSAYKKKLQERAEEEEREKRAAALEACLDVTKQKDLSGFYRHLLNQAVGEEEVPKCSFREARSGIKEEKSRGFSNEVSSKNRIPQEKCILQTDVKVEENPDADSDFDAKSSADDEIEETRVNCRREKVIETPENDFKHHRSQNHSRSPSEERGHSTRHHTKGSRTSRGHEKREDQHQQKQSRDQENHYTDRDYRKERDSHRHREASHRDSHWKRHEQEDKPRARDQRERSDRVWKREKDREKYSQREQERDRQQNDQNRPSEKGEKEEKSKAKEEHMKVRKERYENNDKYRDREKREVGVQSSERNQDRKESSPNSRAKDKFLDQERSNKMRNMAKDKERNQEKPSNSESSLGAKHRLTEEGQEKGKEQERPPEAVSKFAKRNNEETVMSARDRYLARQMARVNAKTYIEKEDD

SEQ ID NO: 58579 - protein, 50 aa, Homo sapiens
  Payload ID: 11456
  Gene Symbol: NSRP1
  Gene Name: nuclear speckle splicing regulatory protein 1
  ENSP ID: ENSP00000378303
MAIPGRQWGFTLVAQAGVQWCNLGSPQPPPPGFKRFSCLSLPNSCNYRPL

SEQ ID NO: 58580 - protein, 42 aa, Homo sapiens
  Payload ID: 11456
  Gene Symbol: NSRP1
  Gene Name: nuclear speckle splicing regulatory protein 1
  ENSP ID: ENSP00000462820
MAIPGRQYGLILPKKTQQLHPVLQKPSVFGNDSDDDDEVFGI

SEQ ID NO: 58581 - protein, 74 aa, Homo sapiens
  Payload ID: 11456
  Gene Symbol: NSRP1
  Gene Name: nuclear speckle splicing regulatory protein 1
  ENSP ID: ENSP00000463722
MAIPGRQYGLILPKKTQQLHPVLQKPSVFGNDSDDDDEMGFHSCCPGWSAMVQSRLTATSTSWVQAIFLPQPPK

SEQ ID NO: 58582 - protein, 92 aa, Homo sapiens
  Payload ID: 11456
  Gene Symbol: NSRP1
  Gene Name: nuclear speckle splicing regulatory protein 1
  ENSP ID: ENSP00000464237
MAIPGRQYGLILPKKTQQLHPVLQKPSVFGNDSDDDDEDLALSPRMECNLCSHNSWQPQPPRPKHASHLSLPSSWDHRHTPPCLANFLIYFL

SEQ ID NO: 58583 - protein, 41 aa, Homo sapiens
  Payload ID: 11456
  Gene Symbol: NSRP1
  Gene Name: nuclear speckle splicing regulatory protein 1
  ENSP ID: ENSP00000464569
MAIPGRQNIVLRSHRKRVWAYFAKENTAVAPCFAKTISVWE

SEQ ID NO: 58584 - protein, 64 aa, Homo sapiens
  Payload ID: 11456
  Gene Symbol: NSRP1
  Gene Name: nuclear speckle splicing regulatory protein 1
  ENSP ID: ENSP00000465442
MKQTKLEIQKALAEDATVYEYDSIYDEMQKKKEENNPKLLLGKDRKPKYIHNLLKAVEIRKKEQ

SEQ ID NO: 58585 - protein, 104 aa, Homo sapiens
  Payload ID: 11456
  Gene Symbol: NSRP1
  Gene Name: nuclear speckle splicing regulatory protein 1
  ENSP ID: ENSP00000466463
MKQTKLEIQKALAEDATVYEYDSIYDEMQKKKEENNPKLLLGKDRKPKYIHNLLKAVEIRKKEQEKRMEKKIQREREMEKGEFDDKEAFVTSAYKKKLQERAEE

SEQ ID NO: 58586 - protein, 41 aa, Homo sapiens; identical to SEQ ID NO: 58583
  Payload ID: 11456
  Gene Symbol: NSRP1
  Gene Name: nuclear speckle splicing regulatory protein 1
  ENSP ID: ENSP00000466640

SEQ ID NO: 58587 - protein, 68 aa, Homo sapiens
  Payload ID: 11456
  Gene Symbol: NSRP1
  Gene Name: nuclear speckle splicing regulatory protein 1
  ENSP ID: ENSP00000467856
  MOD_RES (1)..(1): Any amino acid
XYGLILPKKTQQLHPVLQKPSVFGNDSDDDDEMGFHSCCPGWSAMVQSRLTATSTSWVQAIFLPQPPK

SEQ ID NO: 58588 - protein, 157 aa, Homo sapiens
  Payload ID: 11456
  Gene Symbol: NSRP1
  Gene Name: nuclear speckle splicing regulatory protein 1
  ENSP ID: ENSP00000468327
MKQTKLEIQKALAEDATVYEYDSIYDEMQKKKEENNPKLLLGKDRKPKYIHNLLKAVEIRKKEQEKRMEKKIQREREMEKGEFDDKEAFVTSAYKKKLQERAEEEEREKRAAALEACLDVTKQKDLSGFYRHLLNQAVGEEEVPKCSFREARSGIKE

SEQ ID NO: 58589 - protein, 504 aa, Homo sapiens
  Payload ID: 11456
  Gene Symbol: NSRP1
  Gene Name: nuclear speckle splicing regulatory protein 1
  ENSP ID: ENSP00000477862
MKQTKLEIQKALAEDATVYEYDSIYDEMQKKKEENNPKLLLGKDRKPKYIHNLLKAVEIRKKEQEKRMEKKIQREREMEKGEFDDKEAFVTSAYKKKLQERAEEEEREKRAAALEACLDVTKQKDLSGFYRHLLNQAVGEEEVPKCSFREARSGIKEEKSRGFSNEVSSKNRIPQEKCILQTDVKVEENPDADSDFDAKSSADDEIEETRVNCRREKVIETPENDFKHHRSQNHSRSPSEERGHSTRHHTKGSRTSRGHEKREDQHQQKQSRDQENHYTDRDYRKERDSHRHREASHRDSHWKRHEQEDKPRARDQRERSDRVWKREKDREKYSQREQERDRQQNDQNRPSEKGEKEEKSKAKEEHMKVRKERYENNDKYRDREKREVGVQSSERNQDRKESSPNSRAKDKFLDQERSNKMRNMAKDKERNQEKPSNSESSLGAKHRLTEEGQEKGKEQERPPEAVSKFAKRNNEETVMSARDRYLARQMARVNAKTYIEKEDD

SEQ ID NO: 58590 - protein, 318 aa, Homo sapiens
  Payload ID: 11457
  Gene Symbol: NFYA
  Gene Name: nuclear transcription factor Y, alpha
  Uniprot ID: P23511
  ENSP ID: ENSP00000229418
MEQYTANSNSSTEQIVVQAGQIQQQVQGQPLMVQVSGGQLITSTGQPIMVQAVPGGQGQTIMQVPVSGTQGLQQIQLVPPGQIQIQGGQAVQVQGQQGQTQQIIIQQPQTAVTAGQTQTQQQIAVQGQQVAQTAEGQTIVYQPVNADGTILQQVTVPVSGMITIPAASLAGAQIVQTGANTNTTSSGQGTVTVTLPVAGNVVNSGGMVMMVPGAGSVPAIQRIPLPGAEMLEEEPLYVNAKQYHRILKRRQARAKLEAEGKIPKERRKYLHESRHRHAMARKRGEGGRFFSPKEKDSPHMQDPNQADEEAMTQIIRVS

SEQ ID NO: 58591 - protein, 347 aa, Homo sapiens
  Payload ID: 11457
  Gene Symbol: NFYA
  Gene Name: nuclear transcription factor Y, alpha
  Uniprot ID: P23511
  ENSP ID: ENSP00000345702
MEQYTANSNSSTEQIVVQAGQIQQQQQGGVTAVQLQTEAQVASASGQQVQTLQVVQGQPLMVQVSGGQLITSTGQPIMVQAVPGGQGQTIMQVPVSGTQGLQQIQLVPPGQIQIQGGQAVQVQGQQGQTQQIIIQQPQTAVTAGQTQTQQQIAVQGQQVAQTAEGQTIVYQPVNADGTILQQVTVPVSGMITIPAASLAGAQIVQTGANTNTTSSGQGTVTVTLPVAGNVVNSGGMVMMVPGAGSVPAIQRIPLPGAEMLEEEPLYVNAKQYHRILKRRQARAKLEAEGKIPKERRKYLHESRHRHAMARKRGEGGRFFSPKEKDSPHMQDPNQADEEAMTQIIRVS

SEQ ID NO: 58592 - protein, 207 aa, Homo sapiens
  Payload ID: 11458
  Gene Symbol: NFYB
  Gene Name: nuclear transcription factor Y, beta
  Uniprot ID: P25208
  ENSP ID: ENSP00000240055
MTMDGDSSTTDASQLGISADYIGGSHYVIQPHDDTEDSMNDHEDTNGSKESFREQDIYLPIANVARIMKNAIPQTGKIAKDAKECVQECVSEFISFITSEASERCHQEKRKTINGEDILFAMSTLGFDSYVEPLKLYLQKFREAMKGEKGIGGAVTATDGLSEELTEEAFTNQLPAGLITTDGQQQNVMVYTTSYQQISGVQQIQFS

SEQ ID NO: 58593 - protein, 207 aa, Homo sapiens; identical to SEQ ID NO: 58592
  Payload ID: 11458
  Gene Symbol: NFYB
  Gene Name: nuclear transcription factor Y, beta
  Uniprot ID: P25208
  ENSP ID: ENSP00000447486

SEQ ID NO: 58594 - protein, 131 aa, Homo sapiens
  Payload ID: 11458
  Gene Symbol: NFYB
  Gene Name: nuclear transcription factor Y, beta
  ENSP ID: ENSP00000448250
MNLMDGDSSTTDASQLGISADYIGGSHYVIQPHDDTEDSMNDHEDTNGSKESFREQDIYLPIANVARIMKNAIPQTGKIAKDAKECVQECVSEFISFITSEASERCHQEKRKTINGEDILFAMSTLGFDSY

SEQ ID NO: 58595 - protein, 458 aa, Homo sapiens
  Payload ID: 11459
  Gene Symbol: NFYC
  Gene Name: nuclear transcription factor Y, gamma
  Uniprot ID: Q13952
  ENSP ID: ENSP00000312617
MSTEGGFGGTSSSDAQQSLQSFWPRVMEEIRNLTVKDFRVQELPLARIKKIMKLDEDVKMISAEAPVLFAKAAQIFITELTLRAWIHTEDNKRRTLQRNDIAMAITKFDQFDFLIDIVPRDELKPPKRQEEVRQSVTPAEPVQYYFTLAQQPTAVQVQGQQQGQQTTSSTTTIQPGQIIIAQPQQGQTTPVTMQVGEGQQVQIVQAQPQGQAQQAQSGTGQTMQVMQQIITNTGEIQQIPVQLNAGQLQYIRLAQPVSGTQVVQGQIQTLATNAQQGQRNASQGKPRRCLKETLQITQTEVQQGQQQFSQFTDGQRNSVQQARVSELTGEAEPREVKATGNSTPCTSSLPTTHPPSHRAGASCVCCSQPQQSSTSPPPSDALQWVVVEVSGTPNQLETHRELHAPLPGMTSLSPLHPSQQLYQIQQVTMPAGQDLAQPMFIQSANQPSDGQAPQVTGD

SEQ ID NO: 58596 - protein, 335 aa, Homo sapiens
  Payload ID: 11459
  Gene Symbol: NFYC
  Gene Name: nuclear transcription factor Y, gamma
  Uniprot ID: Q13952
  ENSP ID: ENSP00000361734
MSTEGGFGGTSSSDAQQSLQSFWPRVMEEIRNLTVKDFRVQELPLARIKKIMKLDEDVKMISAEAPVLFAKAAQIFITELTLRAWIHTEDNKRRTLQRNDIAMAITKFDQFDFLIDIVPRDELKPPKRQEEVRQSVTPAEPVQYYFTLAQQPTAVQVQGQQQGQQTTSSTTTIQPGQIIIAQPQQGQTTPVTMQVGEGQQVQIVQAQPQGQAQQAQSGTGQTMQVMQQIITNTGEIQQIPVQLNAGQLQYIRLAQPVSGTQVVQGQIQTLATNAQQITQTEVQQGQQQFSQFTDGQQLYQIQQVTMPAGQDLAQPMFIQSANQPSDGQAPQVTGD

SEQ ID NO: 58597 - protein, 439 aa, Homo sapiens
  Payload ID: 11459
  Gene Symbol: NFYC
  Gene Name: nuclear transcription factor Y, gamma
  Uniprot ID: Q13952
  ENSP ID: ENSP00000361736
MSTEGGFGGTSSSDAQQSLQSFWPRVMEEIRNLTVKDFRVQELPLARIKKIMKLDEDVKMISAEAPVLFAKAAQIFITELTLRAWIHTEDNKRRTLQRNDIAMAITKFDQFDFLIDIVPRDELKPPKRQEEVRQSVTPAEPVQYYFTLAQQPTAVQVQGQQQGQQTTSSTTTIQPGQIIIAQPQQGQTTPVTMQVGEGQQVQIVQAQPQGQAQQAQSGTGQTMQVMQQIITNTGEIQQIPVQLNAGQLQYIRLAQPVSGTQVVQGQIQTLATNAQQITQTEVQQGQQQFSQFTDGQRNSVQQARVSELTGEAEPREVKATGNSTPCTSSLPTTHPPSHRAGASCVCCSQPQQSSTSPPPSDALQWVVVEVSGTPNQLETHRELHAPLPGMTSLSPLHPSQQLYQIQQVTMPAGQDLAQPMFIQSANQPSDGQAPQVTGD

SEQ ID NO: 58598 - protein, 301 aa, Homo sapiens
  Payload ID: 11459
  Gene Symbol: NFYC
  Gene Name: nuclear transcription factor Y, gamma
  Uniprot ID: Q13952
  ENSP ID: ENSP00000361737
MSTEGGFGGTSSSDAQQSLQSFWPRVMEEIRNLTVKDFRVQELPLARIKKIMKLDEDVKMISAEAPVLFAKAAQIFITELTLRAWIHTEDNKRRTLQRNDIAMAITKFDQFDFLIDIVPRDELKPPKRQEEVRQSVTPAEPVQYYFTLAQQPTAVQVQGQQQGQQTTSSTTTIQPGQIIIAQPQQGQTMQVMQQIITNTGEIQQIPVQLNAGQLQYIRLAQPVSGTQVVQGQIQTLATNAQQITQTEVQQGQQQFSQFTDGQQLYQIQQVTMPAGQDLAQPMFIQSANQPSDGQAPQVTGD

SEQ ID NO: 58599 - protein, 335 aa, Homo sapiens; identical to SEQ ID NO: 58596
  Payload ID: 11459
  Gene Symbol: NFYC
  Gene Name: nuclear transcription factor Y, gamma
  Uniprot ID: Q13952
  ENSP ID: ENSP00000361738

SEQ ID NO: 58600 - protein, 313 aa, Homo sapiens
  Payload ID: 11459
  Gene Symbol: NFYC
  Gene Name: nuclear transcription factor Y, gamma
  ENSP ID: ENSP00000361754
MSTEGGFGGTSSSDAQQSLQSFWPRVMEEIRNLTVKDFRVQELPLARIKKIMKLDEDVKMISAEAPVLFAKAAQIFITELTLRAWIHTEDNKRRTLQRNDIAMAITKFDQFDFLIDIVPRDELKPPKRQEEVRQSVTPAEPVQYYFTLAQQPTAVQVQGQQQGQQTTSSTTTIQPGQIIIAQPQQGQTTPVTMQVGEGQQVQIVQAQPQGQAQQAQSGTGQTMQVMQQIITNTGEIQQIPETGLAVSLRLMKCSGLISAHCSFRLPGSSDSPASASRVAGIIGAAECRPAAVYPLSPACIRHSSCAGTDPDTC

SEQ ID NO: 58601 - protein, 354 aa, Homo sapiens
  Payload ID: 11459
  Gene Symbol: NFYC
  Gene Name: nuclear transcription factor Y, gamma
  Uniprot ID: Q13952
  ENSP ID: ENSP00000396620
MSTEGGFGGTSSSDAQQSLQSFWPRVMEEIRNLTVKDFRVQELPLARIKKIMKLDEDVKMISAEAPVLFAKAAQIFITELTLRAWIHTEDNKRRTLQRNDIAMAITKFDQFDFLIDIVPRDELKPPKRQEEVRQSVTPAEPVQYYFTLAQQPTAVQVQGQQQGQQTTSSTTTIQPGQIIIAQPQQGQTTPVTMQVGEGQQVQIVQAQPQGQAQQAQSGTGQTMQVMQQIITNTGEIQQIPVQLNAGQLQYIRLAQPVSGTQVVQGQIQTLATNAQQGQRNASQGKPRRCLKETLQITQTEVQQGQQQFSQFTDGQQLYQIQQVTMPAGQDLAQPMFIQSANQPSDGQAPQVTGD

SEQ ID NO: 58602 - protein, 129 aa, Homo sapiens
  Payload ID: 11459
  Gene Symbol: NFYC
  Gene Name: nuclear transcription factor Y, gamma
  ENSP ID: ENSP00000397647
MSTEGGFGGTSSSDAQQSLQSFWPRVMEEIRNLTVKDFRVQELPLARIKKIMKLDEDVKMISAEAPVLFAKAAQIFITELTLRAWIHTEDNKRRTLQRNDIAMAITKFDQFDFLIDIVPRDELKPPKRQ

SEQ ID NO: 58603 - protein, 335 aa, Homo sapiens; identical to SEQ ID NO: 58596
  Payload ID: 11459
  Gene Symbol: NFYC
  Gene Name: nuclear transcription factor Y, gamma
  Uniprot ID: Q13952
  ENSP ID: ENSP00000404427

SEQ ID NO: 58604 - protein, 297 aa, Homo sapiens
  Payload ID: 11459
  Gene Symbol: NFYC
  Gene Name: nuclear transcription factor Y, gamma
  Uniprot ID: Q13952
  ENSP ID: ENSP00000408315
MSTEGGFGGTSSSDAQQSLQSFWPRVMEEIRNLTVKDFRVQELPLARIKKIMKLDEDVKRNDIAMAITKFDQFDFLIDIVPRDELKPPKRQEEVRQSVTPAEPVQYYFTLAQQPTAVQVQGQQQGQQTTSSTTTIQPGQIIIAQPQQGQTTPVTMQVGEGQQVQIVQAQPQGQAQQAQSGTGQTMQVMQQIITNTGEIQQIPVQLNAGQLQYIRLAQPVSGTQVVQGQIQTLATNAQQITQTEVQQGQQQFSQFTDGQQLYQIQQVTMPAGQDLAQPMFIQSANQPSDGQAPQVTGD

SEQ ID NO: 58605 - protein, 334 aa, Homo sapiens
  Payload ID: 11459
  Gene Symbol: NFYC
  Gene Name: nuclear transcription factor Y, gamma
  Uniprot ID: Q13952
  ENSP ID: ENSP00000408867
MSTEGGFGGTSSSDAQQSLQSFWPRVMEEIRNLTVKDFRVQELPLARIKKIMKLDEDVKMISAEAPVLFAKAAQIFITELTLRAWIHTEDNKRRTLQRNDIAMAITKFDQFDFLIDIVPRDELKPPKRQEEVRQSVTPAEPVQYYFTLAQQPTAVQVQGQQQGQQTTSSTTTIQPGQIIIAQPQQGQTTPVTMQVGEGQQVQIVQAQPQGQAQQAQSGTGQTMQVMQQIITNTGEIQQIPVQLNAGQLQYIRLAQPVSGTQVVQGQIQTLATNAQQITQTEVQQGQQQFSQFTDGQLYQIQQVTMPAGQDLAQPMFIQSANQPSDGQAPQVTGD

SEQ ID NO: 58606 - protein, 179 aa, Homo sapiens
  Payload ID: 11459
  Gene Symbol: NFYC
  Gene Name: nuclear transcription factor Y, gamma
  ENSP ID: ENSP00000409219
MSTEGGFGGTSSSDAQQSLQSFWPRVMEEIRNLTVKDFRVQELPLARIKKIMKLDEDVKMISAEAPVLFAKAAQIFITELTLRAWIHTEDNKRRTLQEEVRQSVTPAEPVQYYFTLAQQPTAVQVQGQQQGQQTTSSTTTIQPGQIIIAQPQQGQTTPVTMQVGEGQQVQIVQAQPQGQ

SEQ ID NO: 58607 - protein, 335 aa, Homo sapiens; identical to SEQ ID NO: 58596
  Payload ID: 11459
  Gene Symbol: NFYC
  Gene Name: nuclear transcription factor Y, gamma
  Uniprot ID: Q13952
  ENSP ID: ENSP00000414299

SEQ ID NO: 58608 - protein, 186 aa, Homo sapiens
  Payload ID: 11459
  Gene Symbol: NFYC
  Gene Name: nuclear transcription factor Y, gamma
  ENSP ID: ENSP00000416403
  MOD_RES (1)..(1): Any amino acid
XPRDELKPPKRQEEVRQSVTPAEPVQYYFTLAQQPTAVQVQGQQQGQQTTSSTTTIQPGQIIIAQPQQGQTTPVTMQVGEGQQVQIVQAQPQGQAQQAQSGTGQTMQVMQQIITNTGEIQQIPVQLNAGQLQYIRLAQPVSGTQVVQGQIQTLAMETFFAFKRQIYSLWRVGGFIATLFSPRDPGN

SEQ ID NO: 58609 - protein, 95 aa, Homo sapiens
  Payload ID: 11459
  Gene Symbol: NFYC
  Gene Name: nuclear transcription factor Y, gamma
  ENSP ID: ENSP00000433413
MSTEGGFGGTSSSDAQQSLQSFWPRVMEEIRNLTVMISAEAPVLFAKAAQIFITELTLRAWIHTEDNKRRTLQRNDIAMAITKFDQFDFLIDIVP

SEQ ID NO: 58610 - protein, 52 aa, Homo sapiens
  Payload ID: 11459
  Gene Symbol: NFYC
  Gene Name: nuclear transcription factor Y, gamma
  ENSP ID: ENSP00000433820
MSTEGGFGGTSSSDAQQSLQSFWPRVMEEIRNLTVKDFRVQELPLARIKKIM

SEQ ID NO: 58611 - protein, 60 aa, Homo sapiens
  Payload ID: 11459
  Gene Symbol: NFYC
  Gene Name: nuclear transcription factor Y, gamma
  ENSP ID: ENSP00000434404
MSTEGGFGGTSSSDAQQSLQSFWPRVMEEIRNLTVKDFRVQELPLARIKKIMKLDEDVKM

SEQ ID NO: 58612 - protein, 141 aa, Homo sapiens
  Payload ID: 11459
  Gene Symbol: NFYC
  Gene Name: nuclear transcription factor Y, gamma
  ENSP ID: ENSP00000436710
MSTEGGFGGTSSSDAQQSLQSFWPRVMEEIRNLTVKDFRVQELPLARIKKIMKLDEDVKMISAEAPVLFAKAAQIFITELTLRAWIHTEDNKRRTLQRNDIAMAITKFDQFDFLIDIVPRDELKPPKRQEVRQSVTPAEPV

SEQ ID NO: 58613 - protein, 233 aa, Homo sapiens
  Payload ID: 11459
  Gene Symbol: NFYC
  Gene Name: nuclear transcription factor Y, gamma
  ENSP ID: ENSP00000480994
MAITKFDQFDFLIDIVPRDELKPPKRQEEVRQSVTPAEPVQYYFTLAQQPTAVQVQGQQQGQQTTSSTTTIQPGQIIIAQPQQGQTTPVTMQVGEGQQVQIVQAQPQGQAQQAQSGTGQTMQVMQQIITNTGEIQQIPVQLNAGQLQYIRLAQPVSGTQVVQGQIQTLATNAQQITQTEVQQGQQQFSQFTDGQQLYQIQQVTMRARTSPSPCSSSQPTSPPTGPPGDRRLRA

SEQ ID NO: 58614 - protein, 833 aa, Homo sapiens
  Payload ID: 11460
  Gene Symbol: NFX1
  Gene Name: nuclear transcription factor, X-box binding 1
  Uniprot ID: Q12986
  ENSP ID: ENSP00000317695
MAEAPPVSGTFKFNTDAAEFIPQEKKNSGLNCGTQRRLDSNRIGRRNYSSPPPCHLSRQVPYDEISAVHQHSYHPSGSKPKSQQTSFQSSPCNKSPKSHGLQNQPWQKLRNEKHHIRVKKAQSLAEQTSDTAGLESSTRSESGTDLREHSPSESEKEVVGADPRGAKPKKATQFVYSYGRGPKVKGKLKCEWSNRTTPKPEDAGPESTKPVGVFHPDSSEASSRKGVLDGYGARRNEQRRYPQKRPPWEVEGARPRPGRNPPKQEGHRHTNAGHRNNMGPIPKDDLNERPAKSTCDSENLAVINKSSRRVDQEKCTVRRQDPQVVSPFSRGKQNHVLKNVETHTGSLIEQLTTEKYECMVCCELVRVTAPVWSCQSCYHVFHLNCIKKWARSPASQADGQSGWRCPACQNVSAHVPNTYTCFCGKVKNPEWSRNEIPHSCGEVCRKKQPGQDCPHSCNLLCHPGPCPPCPAFMTKTCECGRTRHTVRCGQAVSVHCSNPCENILNCGQHQCAELCHGGQCQPCQIILNQVCYCGSTSRDVLCGTDVGKSDGFGDFSCLKICGKDLKCGNHTCSQVCHPQPCQQCPRLPQLVRCCPCGQTPLSQLLELGSSSRKTCMDPVPSCGKVCGKPLPCGSLDFIHTCEKLCHEGDCGPCSRTSVISCRCSFRTKELPCTSLKSEDATFMCDKRCNKKRLCGRHKCNEICCVDKEHKCPLICGRKLRCGLHRCEEPCHRGNCQTCWQASFDELTCHCGASVIYPPVPCGTRPPECTQTCARVHECDHPVYHSCHSEEKCPPCTFLTQKWCMGKHEQSHYWASTQKKRSHYMKKIPAHACL

SEQ ID NO: 58615 - protein, 1024 aa, Homo sapiens
  Payload ID: 11460
  Gene Symbol: NFX1
  Gene Name: nuclear transcription factor, X-box binding 1
  Uniprot ID: Q12986
  ENSP ID: ENSP00000368836
MAEAPPVSGTFKFNTDAAEFIPQEKKNSGLNCGTQRRLDSNRIGRRNYSSPPPCHLSRQVPYDEISAVHQHSYHPSGSKPKSQQTSFQSSPCNKSPKSHGLQNQPWQKLRNEKHHIRVKKAQSLAEQTSDTAGLESSTRSESGTDLREHSPSESEKEVVGADPRGAKPKKATQFVYSYGRGPKVKGKLKCEWSNRTTPKPEDAGPESTKPVGVFHPDSSEASSRKGVLDGYGARRNEQRRYPQKRPPWEVEGARPRPGRNPPKQEGHRHTNAGHRNNMGPIPKDDLNERPAKSTCDSENLAVINKSSRRVDQEKCTVRRQDPQVVSPFSRGKQNHVLKNVETHTGSLIEQLTTEKYECMVCCELVRVTAPVWSCQSCYHVFHLNCIKKWARSPASQADGQSGWRCPACQNVSAHVPNTYTCFCGKVKNPEWSRNEIPHSCGEVCRKKQPGQDCPHSCNLLCHPGPCPPCPAFMTKTCECGRTRHTVRCGQAVSVHCSNPCENILNCGQHQCAELCHGGQCQPCQIILNQVCYCGSTSRDVLCGTDVGKSDGFGDFSCLKICGKDLKCGNHTCSQVCHPQPCQQCPRLPQLVRCCPCGQTPLSQLLELGSSSRKTCMDPVPSCGKVCGKPLPCGSLDFIHTCEKLCHEGDCGPCSRTSVISCRCSFRTKELPCTSLKSEDATFMCDKRCNKKRLCGRHKCNEICCVDKEHKCPLICGRKLRCGLHRCEEPCHRGNCQTCWQASFDELTCHCGASVIYPPVPCGTRPPECTQTCARVHECDHPVYHSCHSEEKCPPCTFLTQKWCMGKHEFRSNIPCHLVDISCGLPCSATLPCGMHKCQRLCHKGECLVDEPCKQPCTTPRADCGHPCMAPCHTSSPCPVTACKAKVELQCECGRRKEMVICSEASSTYQRIAAISMASKITDMQLGGSVEISKLITKKEVHQARLECDEECSALERKKRLAEAFHISEDSDPFNIRSSGSKFSDSLKEDARKDLKFVSDVEKEMETLVEAVNKVEVETSHWTFL

SEQ ID NO: 58616 - protein, 1120 aa, Homo sapiens
  Payload ID: 11460
  Gene Symbol: NFX1
  Gene Name: nuclear transcription factor, X-box binding 1
  Uniprot ID: Q12986
  ENSP ID: ENSP00000368856
MAEAPPVSGTFKFNTDAAEFIPQEKKNSGLNCGTQRRLDSNRIGRRNYSSPPPCHLSRQVPYDEISAVHQHSYHPSGSKPKSQQTSFQSSPCNKSPKSHGLQNQPWQKLRNEKHHIRVKKAQSLAEQTSDTAGLESSTRSESGTDLREHSPSESEKEVVGADPRGAKPKKATQFVYSYGRGPKVKGKLKCEWSNRTTPKPEDAGPESTKPVGVFHPDSSEASSRKGVLDGYGARRNEQRRYPQKRPPWEVEGARPRPGRNPPKQEGHRHTNAGHRNNMGPIPKDDLNERPAKSTCDSENLAVINKSSRRVDQEKCTVRRQDPQVVSPFSRGKQNHVLKNVETHTGSLIEQLTTEKYECMVCCELVRVTAPVWSCQSCYHVFHLNCIKKWARSPASQADGQSGWRCPACQNVSAHVPNTYTCFCGKVKNPEWSRNEIPHSCGEVCRKKQPGQDCPHSCNLLCHPGPCPPCPAFMTKTCECGRTRHTVRCGQAVSVHCSNPCENILNCGQHQCAELCHGGQCQPCQIILNQVCYCGSTSRDVLCGTDVGKSDGFGDFSCLKICGKDLKCGNHTCSQVCHPQPCQQCPRLPQLVRCCPCGQTPLSQLLELGSSSRKTCMDPVPSCGKVCGKPLPCGSLDFIHTCEKLCHEGDCGPCSRTSVISCRCSFRTKELPCTSLKSEDATFMCDKRCNKKRLCGRHKCNEICCVDKEHKCPLICGRKLRCGLHRCEEPCHRGNCQTCWQASFDELTCHCGASVIYPPVPCGTRPPECTQTCARVHECDHPVYHSCHSEEKCPPCTFLTQKWCMGKHEFRSNIPCHLVDISCGLPCSATLPCGMHKCQRLCHKGECLVDEPCKQPCTTPRADCGHPCMAPCHTSSPCPVTACKAKVELQCECGRRKEMVICSEASSTYQRIAAISMASKITDMQLGGSVEISKLITKKEVHQARLECDEECSALERKKRLAEAFHISEDSDPFNIRSSGSKFSDSLKEDARKDLKFVSDVEKEMETLVEAVNKGKNSKKSHSFPPMNRDHRRIIHDLAQVYGLESVSYDSEPKRNVVVTAIRGKSVCPPTTLTGVLEREMQARPPPPIPHHRHQSDKNPGSSNLQKITKEPIIDYFDVQD

SEQ ID NO: 58617 - protein, 911 aa, Homo sapiens
  Payload ID: 11461
  Gene Symbol: NFXL1
  Gene Name: nuclear transcription factor, X-box binding-like 1
  Uniprot ID: Q6ZNB6
  ENSP ID: ENSP00000333113
MEASWRQVAGGRGRSRGRATAAPSGNGVHLRGAGGGREKGSVGAVPSGTSPGGVATTAAAGSRHSPAGSQALQTTAASELMSQKKFEEIKKANQAAARKLVEEQFSSSSEEGDEDFEGKQGKILANTFITYTTQTDGDTRELERTKQYVNEAFQAGAMTCLICIASVKRNQAVWSCSGCFCIFHMPCIQKWAKDSQFLVSSVTDDDFGKKDCPWPCPKCRFEYKRSETPSRYYCYCGKVEDPPLDPWLVPHSCGQVCEREFKPPCGHKCLLLCHPGPCPPCPKMVTTTCYCKKAKPIPRRCSAKEWSCQLPCGQKLLCGQHKCENPCHAGSCQPCPRVSRQKCVCGKKVAERSCASPLWHCDQVCGKTLPCGNHTCEQVCHVGACGECPRSGKRFCPCQKSKFSLPCTEDVPTCGDSCDKVLECGIHRCSQRCHRGPCETCRQEVEKHCRCGKHTKRMPCHKPYLCETKCVKMRDCQKHQCRRKCCPGNCPPCDQNCGRTLGCRNHKCPSVCHRGSCYPCPETVDVKCNCGNTKVTVPCGRERTTRPPKCKEQCSRPPTCHHTSQEKHRCHFGSCPPCHQPCQKVLEKCGHLCPAPCHDQALIKQTGRHQPTGPWEQPSEPAFIQTALPCPPCQVPIPMECLGKHEVSPLPCHAVGPYSCKRVCGRILDCQNHTCMKECHKVTKTDGCTGKNKAGPECLHCEEGCSKSRPLGCLHPCILRCHPGECPPCVQMLRIKCHCKITSLYVECRKITTADVNEKNLLSCCKNQCPKELPCGHRCKEMCHPGECPFNCNQKVKLRCPCKRIKKELQCNKVRENQVSIECDTTCKEMKRKASEIKEAEAKAALEEEKRRQQAELEAFENRLKGRRKKNRKRDEVAVELSLWQKHKYYLISVCGVVVVVFAWYITHDVN

SEQ ID NO: 58618 - protein, 911 aa, Homo sapiens; identical to SEQ ID NO: 58617
  Payload ID: 11461
  Gene Symbol: NFXL1
  Gene Name: nuclear transcription factor, X-box binding-like 1
  Uniprot ID: Q6ZNB6
  ENSP ID: ENSP00000370949

SEQ ID NO: 58619 - protein, 911 aa, Homo sapiens; identical to SEQ ID NO: 58617
  Payload ID: 11461
  Gene Symbol: NFXL1
  Gene Name: nuclear transcription factor, X-box binding-like 1
  Uniprot ID: Q6ZNB6
  ENSP ID: ENSP00000422037

SEQ ID NO: 58620 - protein, 733 aa, Homo sapiens
  Payload ID: 11461
  Gene Symbol: NFXL1
  Gene Name: nuclear transcription factor, X-box binding-like 1
  Uniprot ID: Q6ZNB6
  ENSP ID: ENSP00000425812
MEASWRQVAGGRGRSRGRATAAPSGNGVHLRGAGGGREKGSVGAVPSGTSPGGVATTAAAGSRHSPAGSQALQTTAASELMSQKKFEEIKKANQAAARKLVEEQFSSSSEEGDEDFEGKQGKILANTFITYTTQTDGDTRELERTKQYVNEAFQAGAMTCLICIASVKRNQAVWSCSGCFCIFHMPCIQKWAKDSQFLVSSVTDDDFGKKDCPWPCPKCRFEYKRSETPSRYYCYCGKVEDPPLDPWLVPHSCGQVCEREFKPPCGHKCLLLCHPGPCPPCPKMVTTTCYCKKAKPIPRRCSAKEWSCQLPCGQKLLCGQHKCENPCHAGSCQPCPRVSRQKCVCGKKVAERSCASPLWHCDQVCGKTLPCGNHTCEQVCHVGACGECPRSGKRFCPCQKSKFSLPCTEDVPTCGDSCDKVLECGIHRCSQRCHRGPCETCRQEVEKHCRCGKHTKRMPCHKPYLCETKCVKMRDCQKHQCRRKCCPGNCPPCDQNCGRTLGCRNHKCPSVCHRGSCYPCPETVDVKCNCGNTKVTVPCGRERTTRPPKCKEQCSRPPTCHHTSQEKHRCHFGSCPPCHQPCQKVLEKCGHLCPAPCHDQALIKQTGRHQPTGPWEQPSEPAFIQTALPCPPCQVPIPMECLGKHEVSPLPCHAVGPYSCKRVCGRILDCQNHTCMKECHKVTKTDGCTGKNKIGKLKLCDLSMILQQESSKSESTVPDLLTPSPMCSSTHVI

SEQ ID NO: 58621 - protein, 127 aa, Homo sapiens
  Payload ID: 11462
  Gene Symbol: NUTF2
  Gene Name: nuclear transport factor 2
  Uniprot ID: P61970
  ENSP ID: ENSP00000219169
MGDKPIWEQIGSSFIQHYYQLFDNDRTQLGAIYIDASCLTWEGQQFQGKAAIVEKLSSLPFQKIQHSITAQDHQPTPDSCIISMVVGQLKADEDPIMGFHQMFLLKNINDAWVCTNDMFRLALHNFG

SEQ ID NO: 58622 - protein, 107 aa, Homo sapiens
  Payload ID: 11462
  Gene Symbol: NUTF2
  Gene Name: nuclear transport factor 2
  ENSP ID: ENSP00000456428
MGDKPIWEQIGSSFIQHYYQLFDNDRTQLGAIYIDASCLTWEGQQFQGKAAIVEKLSSLPFQKIQHSITAQDHQPTPDSCIISMVVGQLKADEDPIMGFHQMFLLKN

SEQ ID NO: 58623 - protein, 127 aa, Homo sapiens; identical to SEQ ID NO: 58621
  Payload ID: 11462
  Gene Symbol: NUTF2
  Gene Name: nuclear transport factor 2
  Uniprot ID: P61970
  ENSP ID: ENSP00000457022

SEQ ID NO: 58624 - protein, 127 aa, Homo sapiens; identical to SEQ ID NO: 58621
  Payload ID: 11462
  Gene Symbol: NUTF2
  Gene Name: nuclear transport factor 2
  Uniprot ID: P61970
  ENSP ID: ENSP00000457989

SEQ ID NO: 58625 - protein, 140 aa, Homo sapiens
  Payload ID: 11463
  Gene Symbol: NXT1
  Gene Name: nuclear transport factor 2-like export factor 1
  Uniprot ID: Q9UKK6
  ENSP ID: ENSP00000254998
MASVDFKTYVDQACRAAEEFVNVYYTTMDKRRRLLSRLYMGTATLVWNGNAVSGQESLSEFFEMLPSSEFQISVVDCQPVHDEATPSQTTVLVVICGSVKFEGNKQRDFNQNFILTAQASPSNTVWKIASDCFRFQDWAS

SEQ ID NO: 58626 - protein, 197 aa, Homo sapiens
  Payload ID: 11464
  Gene Symbol: NXT2
  Gene Name: nuclear transport factor 2-like export factor 2
  Uniprot ID: Q9NPJ8
  ENSP ID: ENSP00000218004
MRKYRSHWSQGDREGYQRRSNYYEGPHTSHSSPADRTREEVVTPTLPEHTATRSQMATSLDFKTYVDQACRAAEEFVNIYYETMDKRRRALTRLYLDKATLIWNGNAVSGLDALNNFFDTLPSSEFQVNMLDCQPVHEQATQSQTTVLVVTSGTVKFDGNKQHFFNQNFLLTAQSTPNNTVWKIASDCFRFQDWSSS

SEQ ID NO: 58627 - protein, 114 aa, Homo sapiens
  Payload ID: 11464
  Gene Symbol: NXT2
  Gene Name: nuclear transport factor 2-like export factor 2
  Uniprot ID: Q9NPJ8
  ENSP ID: ENSP00000361175
MDKRRRALTRLYLDKATLIWNGNAVSGLDALNNFFDTLPSSEFQVNMLDCQPVHEQATQSQTTVLVVTSGTVKFDGNKQHFFNQNFLLTAQSTPNNTVWKIASDCFRFQDWSSS

SEQ ID NO: 58628 - protein, 142 aa, Homo sapiens
  Payload ID: 11464
  Gene Symbol: NXT2
  Gene Name: nuclear transport factor 2-like export factor 2
  Uniprot ID: Q9NPJ8
  ENSP ID: ENSP00000361178
MATSLDFKTYVDQACRAAEEFVNIYYETMDKRRRALTRLYLDKATLIWNGNAVSGLDALNNFFDTLPSSEFQVNMLDCQPVHEQATQSQTTVLVVTSGTVKFDGNKQHFFNQNFLLTAQSTPNNTVWKIASDCFRFQDWSSS

SEQ ID NO: 58629 - protein, 114 aa, Homo sapiens; identical to SEQ ID NO: 58627
  Payload ID: 11464
  Gene Symbol: NXT2
  Gene Name: nuclear transport factor 2-like export factor 2
  Uniprot ID: Q9NPJ8
  ENSP ID: ENSP00000361179

SEQ ID NO: 58630 - protein, 856 aa, Homo sapiens
  Payload ID: 11465
  Gene Symbol: NVL
  Gene Name: nuclear VCP-like
  Uniprot ID: O15381
  ENSP ID: ENSP00000281701
MKPRPAGFVDNKLKQRVIQYLTSNKCGKYVDIGVLASDLQRVYSIDYGRRKRNAFRIQVEKVFSIISSEKELKNLTELEDEHLAKRARQGEEDNEYTESYSDDDSSMEDYPDPQSANHMNSSLLSLYRKGNPDSVSNTPEMEQRETTSSTPRISSKTGSIPLKTPAKDSEGGWFIDKTPSVKKDSFFLDLSCEKSNPKKPITEIQDSKDSSLLESDMKRKGKLKNKGSKRKKEDLQEVDGEIEAVLQKKAKARGLEFQISNVKFEDVGGNDMTLKEVCKMLIHMRHPEVYHHLGVVPPRGVLLHGPPGCGKTLLAHAIAGELDLPILKVAAPEIVSGVSGESEQKLRELFEQAVSNAPCIIFIDEIDAITPKREVASKDMERRIVAQLLTCMDDLNNVAATARVLVIGATNRPDSLDPALRRAGRFDREICLGIPDEASRERILQTLCRKLRLPQAFDFCHLAHLTPGFVGADLMALCREAAMCAVNRVLMKLQEQQKKNPEMEDLPSKGVQEERLGTEPTSETQDELQRLLGLLRDQDPLSEEQMQGLCIELNDFIVALSSVQPSAKREGFVTVPNVTWADIGALEDIREELTMAILAPVRNPDQFKALGLVTPAGVLLAGPPGCGKTLLAKAVANESGLNFISVKGPELLNMYVGESERAVRQVFQRAKNSAPCVIFFDEVDALCPRRSDRETGASVRVVNQLLTEMDGLEARQQVFIMAATNRPDIIDPAILRPGRLDKTLFVGLPPPADRLAILKTITKNGTKPPLDADVNLEAIAGDLRCDCYTGADLSALVREASICALRQEMARQKSGNEKGELKVSHKHFEEAFKKVRSSISKKDQIMYERLQESLSR

SEQ ID NO: 58631 - protein, 667 aa, Homo sapiens
  Payload ID: 11465
  Gene Symbol: NVL
  Gene Name: nuclear VCP-like
  Uniprot ID: O15381
  ENSP ID: ENSP00000341362
MKRKGKLKNKGSKRKKEDLQEVDGEIEAVLQKKAKARGLEFQISNVKFEDVGGNDMTLKEVCKMLIHMRHPEVYHHLGVVPPRGVLLHGPPGCGKTLLAHAIAGAECSGMITAHCSFDFSGSNDPPASASQELDLPILKVAAPEIVSGVSGESEQKLRELFEQAVSNAPCIIFIDEIDAITPKREVASKDMERRIVAQLLTCMDDLNNVAATARVLVIGATNRPDSLDPALRRAGRFDREICLGIPDEASRERILQTLCRKLRLPQAFDFCHLAHLTPGFVGADLMALCREAAMCAVNRVLMKLQEQQKKNPEMEDLPSKGVQEERLGTEPTSETQDELQRLLGLLRDQDPLSEEQMQGLCIELNDFIVALSSVQPSAKREGFVTVPNVTWADIGALEDIREELTMAILAPVRNPDQFKALGLVTPAGVLLAGPPGCGKTLLAKAVANESGLNFISVKGPELLNMYVGESERAVRQVFQRAKNSAPCVIFFDEVDALCPRRSDRETGASVRVVNQLLTEMDGLEARQQVFIMAATNRPDIIDPAILRPGRLDKTLFVGLPPPADRLAILKTITKNGTKPPLDADVNLEAIAGDLRCDCYTGADLSALVREASICALRQEMARQKSGNEKGELKVSHKHFEEAFKKVRSSISKKDQIMYERLQESLSR

SEQ ID NO: 58632 - protein, 750 aa, Homo sapiens
  Payload ID: 11465
  Gene Symbol: NVL
  Gene Name: nuclear VCP-like
  Uniprot ID: O15381
  ENSP ID: ENSP00000375747
MEDYPDPQSANHMNSSLLSLYRKGNPDSVSNTPEMEQRETTSSTPRISSKTGSIPLKTPAKDSEGGWFIDKTPSVKKDSFFLDLSCEKSNPKKPITEIQDSKDSSLLESDMKRKGKLKNKGSKRKKEDLQEVDGEIEAVLQKKAKARGLEFQISNVKFEDVGGNDMTLKEVCKMLIHMRHPEVYHHLGVVPPRGVLLHGPPGCGKTLLAHAIAGELDLPILKVAAPEIVSGVSGESEQKLRELFEQAVSNAPCIIFIDEIDAITPKREVASKDMERRIVAQLLTCMDDLNNVAATARVLVIGATNRPDSLDPALRRAGRFDREICLGIPDEASRERILQTLCRKLRLPQAFDFCHLAHLTPGFVGADLMALCREAAMCAVNRVLMKLQEQQKKNPEMEDLPSKGVQEERLGTEPTSETQDELQRLLGLLRDQDPLSEEQMQGLCIELNDFIVALSSVQPSAKREGFVTVPNVTWADIGALEDIREELTMAILAPVRNPDQFKALGLVTPAGVLLAGPPGCGKTLLAKAVANESGLNFISVKGPELLNMYVGESERAVRQVFQRAKNSAPCVIFFDEVDALCPRRSDRETGASVRVVNQLLTEMDGLEARQQVFIMAATNRPDIIDPAILRPGRLDKTLFVGLPPPADRLAILKTITKNGTKPPLDADVNLEAIAGDLRCDCYTGADLSALVREASICALRQEMARQKSGNEKGELKVSHKHFEEAFKKVRSSISKKDQIMYERLQESLSR

SEQ ID NO: 58633 - protein, 171 aa, Homo sapiens
  Payload ID: 11465
  Gene Symbol: NVL
  Gene Name: nuclear VCP-like
  ENSP ID: ENSP00000394884
MAYRSLDVPGPSDPPTAASQVAGITGNPDSVSNTPEMEQRETTSSTPRISSKTGSIPLKTPAKDSEGGWFIDKTPSVKKDSFFLDLSCEKSNPKKPITEIQDSKDSSLLESDMKRKGKLKNKGSKRKKEDLQEVDGEIEAVLQKKAKARGLEFQISNVKFEDVGGNDMTLK

SEQ ID NO: 58634 - protein, 667 aa, Homo sapiens; identical to SEQ ID NO: 58631
  Payload ID: 11465
  Gene Symbol: NVL
  Gene Name: nuclear VCP-like
  Uniprot ID: O15381
  ENSP ID: ENSP00000417213

SEQ ID NO: 58635 - protein, 765 aa, Homo sapiens
  Payload ID: 11465
  Gene Symbol: NVL
  Gene Name: nuclear VCP-like
  Uniprot ID: O15381
  ENSP ID: ENSP00000417826
MKPRPAGFVDNKLKQRVIQYLTSNKCGKYVDIGVLASDLQRVYSIDYGRRKRNAFRIQVEKVFSIISSEKELKNLTELEDEHLAKRARQGEEDNEYTESYSDDDSSMEDYPDPQDSKDSSLLESDMKRKGKLKNKGSKRKKEDLQEVDGEIEAVLQKKAKARGLEFQISNVKFEDVGGNDMTLKEVCKMLIHMRHPEVYHHLGVVPPRGVLLHGPPGCGKTLLAHAIAGELDLPILKVAAPEIVSGVSGESEQKLRELFEQAVSNAPCIIFIDEIDAITPKREVASKDMERRIVAQLLTCMDDLNNVAATARVLVIGATNRPDSLDPALRRAGRFDREICLGIPDEASRERILQTLCRKLRLPQAFDFCHLAHLTPGFVGADLMALCREAAMCAVNRVLMKLQEQQKKNPEMEDLPSKGVQEERLGTEPTSETQDELQRLLGLLRDQDPLSEEQMQGLCIELNDFIVALSSVQPSAKREGFVTVPNVTWADIGALEDIREELTMAILAPVRNPDQFKALGLVTPAGVLLAGPPGCGKTLLAKAVANESGLNFISVKGPELLNMYVGESERAVRQVFQRAKNSAPCVIFFDEVDALCPRRSDRETGASVRVVNQLLTEMDGLEARQQVFIMAATNRPDIIDPAILRPGRLDKTLFVGLPPPADRLAILKTITKNGTKPPLDADVNLEAIAGDLRCDCYTGADLSALVREASICALRQEMARQKSGNEKGELKVSHKHFEEAFKKVRSSISKKDQIMYERLQESLSR

SEQ ID NO: 58636 - protein, 175 aa, Homo sapiens
  Payload ID: 11465
  Gene Symbol: NVL
  Gene Name: nuclear VCP-like
  ENSP ID: ENSP00000418085
MKPRPAGFVDNKLKQRVIQYLTSNKCGKYVDIGVLASDLQRVYSIDYGRRKRNAFRIQVEKVFSIISSEKELKNLTELEDEHLAKRARQGEEDNDVSLCHPGFSALAQSWLTAVLTSQAQAILPPQPHRYTESYSDDDSSMEDYPDPQSANHMNSSLLSLYRKGNPDSVSNTPEM

SEQ ID NO: 58637 - protein, 180 aa, Homo sapiens
  Payload ID: 11465
  Gene Symbol: NVL
  Gene Name: nuclear VCP-like
  ENSP ID: ENSP00000418380
MKPRPAGFVDNKLKQRVIQSANHMNSSLLSLYRKGNPDSVSNTPEMEQRETTSSTPRISSKTGSIPLKTPAKDSEGGWFIDKTPSVKKDSFFLDLSCEKSNPKKPITEIQDSKDSSLLESDMKRKGKLKNKGSKRKKEDLQEVDGEIEAVLQKKAKARGLEFQISNVKFEDVGGNDMTLK

SEQ ID NO: 58638 - protein, 659 aa, Homo sapiens
  Payload ID: 11465
  Gene Symbol: NVL
  Gene Name: nuclear VCP-like
  Uniprot ID: O15381
  ENSP ID: ENSP00000419420
MEDYPDPQDSKDSSLLESDMKRKGKLKNKGSKRKKEDLQEVDGEIEAVLQKKAKARGLEFQISNVKFEDVGGNDMTLKEVCKMLIHMRHPEVYHHLGVVPPRGVLLHGPPGCGKTLLAHAIAGELDLPILKVAAPEIVSGVSGESEQKLRELFEQAVSNAPCIIFIDEIDAITPKREVASKDMERRIVAQLLTCMDDLNNVAATARVLVIGATNRPDSLDPALRRAGRFDREICLGIPDEASRERILQTLCRKLRLPQAFDFCHLAHLTPGFVGADLMALCREAAMCAVNRVLMKLQEQQKKNPEMEDLPSKGVQEERLGTEPTSETQDELQRLLGLLRDQDPLSEEQMQGLCIELNDFIVALSSVQPSAKREGFVTVPNVTWADIGALEDIREELTMAILAPVRNPDQFKALGLVTPAGVLLAGPPGCGKTLLAKAVANESGLNFISVKGPELLNMYVGESERAVRQVFQRAKNSAPCVIFFDEVDALCPRRSDRETGASVRVVNQLLTEMDGLEARQQVFIMAATNRPDIIDPAILRPGRLDKTLFVGLPPPADRLAILKTITKNGTKPPLDADVNLEAIAGDLRCDCYTGADLSALVREASICALRQEMARQKSGNEKGELKVSHKHFEEAFKKVRSSISKKDQIMYERLQESLSR

SEQ ID NO: 58639 - protein, 53 aa, Homo sapiens
  Payload ID: 11465
  Gene Symbol: NVL
  Gene Name: nuclear VCP-like
  ENSP ID: ENSP00000419586
MKPRPAGFVDNKLKQRVIQYLTSNKCGKYVDIGVLASDLQRVYRLWSKKKKCF

SEQ ID NO: 58640 - protein, 184 aa, Homo sapiens
  Payload ID: 11465
  Gene Symbol: NVL
  Gene Name: nuclear VCP-like
  ENSP ID: ENSP00000419828
MKPRPAGFVDNKLKQRVIQYLTSNKCGKYVDIGVLASDLQRVYSIDYGRRKRNAFRIQVEKVFSIISSEKELKNLTELEDEHLAKRARQGEEDNEYTESYSDDDSSMEDYPDPQDSKDSSLLESDMKRKGKLKNKGSKRKKEDLQEVDGEIEAVLQKKAKARGLEFQISNVKFEDVGGNDMTLK

SEQ ID NO: 58641 - protein, 296 aa, Homo sapiens
  Payload ID: 11465
  Gene Symbol: NVL
  Gene Name: nuclear VCP-like
  ENSP ID: ENSP00000419930
MKPRPAGFVDNKLKQRVIQYLTSNKCGKYVDIGVLASDLQRVYSIDYGRRKRNAFRIQVEKVFSIISSEKELKNLTELEDEHLAKRARQGEEDNEYTESYSDDDSSMEDYPDPQSANHMNSSLLSLYRKGNPDSVSNTPEMEQRETTSSTPRISSKTGSIPLKTPAKDSEGGWFIDKTPSVKKDSFFLDLSCEKSNPKKPITEIQDSKDSSLLESDMKRKGKLKNKGSKRKKEDLQEVDGEIEAVLQKKGGLQDAHTHASPGGVPPPGRRAPSWSSPSWTTRLWEDITCTCNCWGT

SEQ ID NO: 58642 - protein, 48 aa, Homo sapiens
  Payload ID: 11465
  Gene Symbol: NVL
  Gene Name: nuclear VCP-like
  ENSP ID: ENSP00000479235
  MOD_RES (1)..(1): Any amino acid
XGADLSALVREASICALRQEMARQKSGNEKVETGFHHVSQDGLDLLTS

SEQ ID NO: 58643 - protein, 134 aa, Homo sapiens
  Payload ID: 11466
  Gene Symbol: NABP1
  Gene Name: nucleic acid binding protein 1
  Uniprot ID: Q96AH0
  ENSP ID: ENSP00000307968
MNRVNDPLIFIRDIKPGLKNLNVVFIVLEIGRVTKTKDGHEVRSCKVADKTGSITISVWDEIGGLIQPGDIIRLTRGYASMWKGCLTLYTGRGGELQKIGDLGAVQAAAMRDSIHYYPGNDLHPDLEEPSSLGV

SEQ ID NO: 58644 - protein, 54 aa, Homo sapiens
  Payload ID: 11466
  Gene Symbol: NABP1
  Gene Name: nucleic acid binding protein 1
  ENSP ID: ENSP00000310819
MWKGCLTLYTGRGGELQKIGDLGAVQAAAMRDSIHYYPGNDLHPDLEEPSSLGV

SEQ ID NO: 58645 - protein, 124 aa, Homo sapiens
  Payload ID: 11466
  Gene Symbol: NABP1
  Gene Name: nucleic acid binding protein 1
  Uniprot ID: Q96AH0
  ENSP ID: ENSP00000386605
MWKGCLTLYTGRGGELQKIGEFCMVYSEVPNFSEPNPDYRGQQNKGAQSEQKNNSMNSNMGTGTFGPVGNGVHTGPESREHQFSHAGRSNGRGLINPQLQGTASNQTVMTTISNGRDPRRAFKR

SEQ ID NO: 58646 - protein, 124 aa, Homo sapiens; identical to SEQ ID NO: 58645
  Payload ID: 11466
  Gene Symbol: NABP1
  Gene Name: nucleic acid binding protein 1
  Uniprot ID: Q96AH0
  ENSP ID: ENSP00000387243

SEQ ID NO: 58647 - protein, 134 aa, Homo sapiens; identical to SEQ ID NO: 58643
  Payload ID: 11466
  Gene Symbol: NABP1
  Gene Name: nucleic acid binding protein 1
  Uniprot ID: Q96AH0
  ENSP ID: ENSP00000390901

SEQ ID NO: 58648 - protein, 168 aa, Homo sapiens
  Payload ID: 11466
  Gene Symbol: NABP1
  Gene Name: nucleic acid binding protein 1
  ENSP ID: ENSP00000397041
  MOD_RES (1)..(1): Any amino acid
XRVTKTKDGHEVRSCKVADKTGSITISVWDEIGGLIQPGDIIRLTRGYASMWKGCLTLYTGRGGELQKIGEFCMVYSEVPNFSEPNPDYRGQQNKGAQSEQKNNSMNSNMGTGNGVHTGPESREHQFSHAGRSNGRGLINPQLQGTASNQTVMTTISNGRDPRRAFKR

SEQ ID NO: 58649 - protein, 204 aa, Homo sapiens
  Payload ID: 11466
  Gene Symbol: NABP1
  Gene Name: nucleic acid binding protein 1
  Uniprot ID: Q96AH0
  ENSP ID: ENSP00000403683
MNRVNDPLIFIRDIKPGLKNLNVVFIVLEIGRVTKTKDGHEVRSCKVADKTGSITISVWDEIGGLIQPGDIIRLTRGYASMWKGCLTLYTGRGGELQKIGEFCMVYSEVPNFSEPNPDYRGQQNKGAQSEQKNNSMNSNMGTGTFGPVGNGVHTGPESREHQFSHAGRSNGRGLINPQLQGTASNQTVMTTISNGRDPRRAFKR

SEQ ID NO: 58650 - protein, 211 aa, Homo sapiens
  Payload ID: 11467
  Gene Symbol: NABP2
  Gene Name: nucleic acid binding protein 2
  Uniprot ID: Q9BQ15
  ENSP ID: ENSP00000267023
MTTETFVKDIKPGLKNLNLIFIVLETGRVTKTKDGHEVRTCKVADKTGSINISVWDDVGNLIQPGDIIRLTKGYASVFKGCLTLYTGRGGDLQKIGEFCMVYSEVPNFSEPNPEYSTQQAPNKAVQNDSNPSASQPTTGPSAASPASENQNGNGLSAPPGPGGGPHPPHTPSHPPSTRITRSQPNHTPAGPPGPSSNPVSNGKETRRSSKR

SEQ ID NO: 58651 - protein, 211 aa, Homo sapiens; identical to SEQ ID NO: 58650
  Payload ID: 11467
  Gene Symbol: NABP2
  Gene Name: nucleic acid binding protein 2
  Uniprot ID: Q9BQ15
  ENSP ID: ENSP00000368862

SEQ ID NO: 58652 - protein, 211 aa, Homo sapiens; identical to SEQ ID NO: 58650
  Payload ID: 11467
  Gene Symbol: NABP2
  Gene Name: nucleic acid binding protein 2
  Uniprot ID: Q9BQ15
  ENSP ID: ENSP00000369545

SEQ ID NO: 58653 - protein, 151 aa, Homo sapiens
  Payload ID: 11467
  Gene Symbol: NABP2
  Gene Name: nucleic acid binding protein 2
  ENSP ID: ENSP00000408616
MTTETFVKDIKPGLKNLNLIFIVLETGRVTKTKDGHEVRTCKVADKTGSINISVWDDVGNLIQPGDIIRLTKGYASVFKGCLTLYTGRGGDLQKIGEFCMVYSEVPNFSEPNPEYSTQQAPNKAVQNDSNPSASQPTTGPSAASPASENQN

SEQ ID NO: 58654 - protein, 144 aa, Homo sapiens
  Payload ID: 11467
  Gene Symbol: NABP2
  Gene Name: nucleic acid binding protein 2
  ENSP ID: ENSP00000413902
MTTETFVKDIKPGLKNLNLIFIVLETGRVTKTKDGHEVRTCKVADKTGSINISVWDDVGNLIQPGDIIRLTKGYASVFKGCLTLYTGRGGDLQKIGEFCMVYSEVPNFSEPNPEYSTQQAPNKAVQNDSNPSASQPTTGPSAAS

SEQ ID NO: 58655 - protein, 461 aa, Homo sapiens
  Payload ID: 11468
  Gene Symbol: NUCB1
  Gene Name: nucleobindin 1
  Uniprot ID: Q02818
  ENSP ID: ENSP00000385211
MPPSGPRGTLLLLPLLLLLLLRAVLAVPLERGAPNKEETPATESPDTGLYYHRYLQEVIDVLETDGHFREKLQAANAEDIKSGKLSRELDFVSHHVRTKLDELKRQEVSRLRMLLKAKMDAEQDPNVQVDHLNLLKQFEHLDPQNQHTFEARDLELLIQTATRDLAQYDAAHHEEFKRYEMLKEHERRRYLESLGEEQRKEAERKLEEQQRRHREHPKVNVPGSQAQLKEVWEELDGLDPNRFNPKTFFILHDINSDGVLDEQELEALFTKELEKVYDPKNEEDDMREMEEERLRMREHVMKNVDTNQDRLVTLEEFLASTQRKEFGDTGEGWETVEMHPAYTEEELRRFEEELAAREAELNAKAQRLSQETEALGRSQGRLEAQKRELQQAVLHMEQRKQQQQQQQGHKAPAAHPEGQLKFHPDTDDVPVPAPAGDQKEVDTSEKKLLERLPEVEVPQHL

SEQ ID NO: 58656 - protein, 461 aa, Homo sapiens; identical to SEQ ID NO: 58655
  Payload ID: 11468
  Gene Symbol: NUCB1
  Gene Name: nucleobindin 1
  Uniprot ID: Q02818
  ENSP ID: ENSP00000385923

SEQ ID NO: 58657 - protein, 267 aa, Homo sapiens
  Payload ID: 11468
  Gene Symbol: NUCB1
  Gene Name: nucleobindin 1
  ENSP ID: ENSP00000389007
MPPSGPRGTLLLLPLLLLLLLRAVLAVPLERGAPNKEETPATESPDTGLYYHRYLQEVIDVLETDGHFREKLQAANAEDIKSGKLSRELDFVSHHVRTKLDELKRQEVSRLRMLLKAKMDAEQDPNVQVDHLNLLKQFEHLDPQNQHTFEARDLELLIQTATRDLAQYDAAHHEEFKRYEMLKEHERRRYLESLGEEQRKEAERKLEEQQRRHREHPKVNVPGSQAQLKEVWEELDGLDPNRDLTHPVLGPLRYLAILFPSDINSDG

SEQ ID NO: 58658 - protein, 295 aa, Homo sapiens
  Payload ID: 11468
  Gene Symbol: NUCB1
  Gene Name: nucleobindin 1
  ENSP ID: ENSP00000389734
  MOD_RES (1)..(1): Any amino acid
XPPSGPRGTLLLLPLLLLLLLRAVLAVPLERGAPNKEETPATESPDTGLYYHRYLQEVIDVLETDGHFREKLQAANAEDIKSGKLSRELDFVSHHVRTKLDELKRQEFEHLDPQNQHTFEARDLELLIQTATRDLAQYDAAHHEEFKRYEMLKEHERRRYLESLGEEQRKEAERKLEEQQRRHREHPKVNVPGSQAQLKEVWEELDGLDPNRFNPKTFFILHDINSDGVLDEQELEALFTKELEKVYDPKNEEDDMREMEEERLRMREHVMKNVDTNQDRLVTLEEFLASTQRKE

SEQ ID NO: 58659 - protein, 110 aa, Homo sapiens
  Payload ID: 11468
  Gene Symbol: NUCB1
  Gene Name: nucleobindin 1
  ENSP ID: ENSP00000397201
MPPSGPRGTLLLLPLLLLLLLRAVLAVPLERGAPNKEETPATESPDTGLYYHRYLQEVIDVLETDGHFREKLQAANAEDIKSGKLSRELDFVSHHVRTKLDELKRQEVSR

SEQ ID NO: 58660 - protein, 75 aa, Homo sapiens
  Payload ID: 11468
  Gene Symbol: NUCB1
  Gene Name: nucleobindin 1
  ENSP ID: ENSP00000397608
MPPSGPRGTLLLLPLLLLLLLRAVLAVPLERGAPNKEETPATESPVSGPALLSSQVFAVVLQLLQTPVPVGRMLQ

SEQ ID NO: 58661 - protein, 124 aa, Homo sapiens
  Payload ID: 11468
  Gene Symbol: NUCB1
  Gene Name: nucleobindin 1
  ENSP ID: ENSP00000410519
MPPSGPRGTLLLLPLLLLLLLRAVLAVPLERGAPNKEETPATESPDTGLYYHRYLQEVIDVLETDGHFREKLQAANAEDIKSGKLSRELDFVSHHVRTKLDELKRQEVSRLRMLLKAKMDAEQD

SEQ ID NO: 58662 - protein, 420 aa, Homo sapiens
  Payload ID: 11469
  Gene Symbol: NUCB2
  Gene Name: nucleobindin 2
  ENSP ID: ENSP00000320168
MRWRTILLQYCFLLITCLLTALEAVPIDIDKTKVQNIHPVESAKIEPPDTGLYYDEYLKQVIDVLETDKHFREKLQKADIEEIKSGRLSKELDLVSHHVRTKLDELKRQEVGRLRMLIKAKLDSLQDIGMDHQALLKQFDHLNHLNPDKFESTDLDMLIKAATSDLEHYDKTRHEEFKKYEMMKEHERREYLKTLNEEKRKEEESKFEEMKKKHENHPKVNHPGSKDQLKEVWEETDGLDPNDFDPKTFFKLHDVNSDGFLDEQELEALFTKELEKVYDPKNEEDDMVEMEEERLRMREHVMNEVDTNKDRLVTLEEFLKATEKKEFLEPDSWETLDQQQFFTEEELKEYENIIALQENELKKKADELQKQKEELQRQHDQLEAQKLEYHQVIQQMEQKKLQQGIPPSGPAGELKFEPRV

SEQ ID NO: 58663 - protein, 390 aa, Homo sapiens
  Payload ID: 11469
  Gene Symbol: NUCB2
  Gene Name: nucleobindin 2
  ENSP ID: ENSP00000408702
MRWRTILLQYCFLLITCLLTALEAVPIDIDKTKVQNIHPVESAKIEPPDTGLYYDEYLKQVIDVLETDKHFREKLQKADIEEIKSGRLSKELDLVSHHVRTKLDELKRQEVGRLRMLIKAKLDSLQDIGMDHQALLKQFDHLNHLNPDKFESTDLDMLIKAATSDLEHYDKTRHEEFKKYEMMKEHERREYLKTLNEEKRKEEESKFEEMKKKHENHPKVNHPGSKDQLKEVWEETDGLDPNDFDPKTFFKLHDVNSDGFLDEQELEALFTKELEKVYDPKNEEDDMVEMEEERLRMREHVMNETLDQQQFFTEEELKEYENIIALQENELKKKADELQKQKEELQRQHDQLEAQKLEYHQVIQQMEQKKLQQGIPPSGPAGELKFEPHI

SEQ ID NO: 58664 - protein, 33 aa, Homo sapiens
  Payload ID: 11469
  Gene Symbol: NUCB2
  Gene Name: nucleobindin 2
  ENSP ID: ENSP00000431136
MRWRTILLQYCFLLITCLLTALEAVPIDIDKTK

SEQ ID NO: 58665 - protein, 34 aa, Homo sapiens
  Payload ID: 11469
  Gene Symbol: NUCB2
  Gene Name: nucleobindin 2
  ENSP ID: ENSP00000431328
MRWRTILLQYCFLLITCLLTALEAVPIDIDKTKV

SEQ ID NO: 58666 - protein, 195 aa, Homo sapiens
  Payload ID: 11469
  Gene Symbol: NUCB2
  Gene Name: nucleobindin 2
  ENSP ID: ENSP00000431334
MRWRTILLQYCFLLITCLLTALEAVPIDIDKTKVQNIHPVESAKIEPPDTGLYYDEYLKQVIDVLETDKHFREKLQKADIEEIKSGRLSKELDLVSHHVRTKLDELKRQEVGRLRMLIKAKLDSLQDIGMDHQALLKQFDHLNHLNPDKFESTDLDMLIKAATSDLEHYDKTRHEEFKKYEMMKEHERREYLKTL

SEQ ID NO: 58667 - protein, 73 aa, Homo sapiens
  Payload ID: 11469
  Gene Symbol: NUCB2
  Gene Name: nucleobindin 2
  ENSP ID: ENSP00000432741
  MOD_RES (1)..(1): Any amino acid
XEERLRMREHVMNEVDTNKDRLVTLEEFLKATEKKEFLEPDSWEVIQQMEQKKLQQGIPPSGPAGELKFEPHI

SEQ ID NO: 58668 - protein, 90 aa, Homo sapiens
  Payload ID: 11469
  Gene Symbol: NUCB2
  Gene Name: nucleobindin 2
  ENSP ID: ENSP00000433194
MRWRTILLQYCFLLITCLLTALEAVPIDIDKTKVQNIHPVESAKIEPPDTGLYYDEYLKQVIDVLETDKHFREKLQKADIEEIKSGRLSK

SEQ ID NO: 58669 - protein, 338 aa, Homo sapiens
  Payload ID: 11469
  Gene Symbol: NUCB2
  Gene Name: nucleobindin 2
  ENSP ID: ENSP00000433542
MRWRTILLQYCFLLITCLLTALEAVPIDIDKTKVQNIHPVESAKIEPPDTGLYYDEYLKQVIDVLETDKHFREKLQKADIEEIKSGRLSKELDLVSHHVRTKLDELKRQEVGRLRMLIKAKLDSLQDIGMDHQALLKQFDHLNHLNPDKFESTDLDMLIKAATSDLEHYDKTRHEEFKKYEMMKEHERREYLKTLNEEKRKEEESKFEEMKKKHENHPKVNHPGSKDQLKEVWEETDGLDPNDFDPKTFFKLHDVNSDGFLDEQELEALFTKELEKVYDPKNEEDDMVEMEEERLRMREHVMNEVDTNKDRLVTLEEFLKATEKKEFLEPDSWESPSI

SEQ ID NO: 58670 - protein, 198 aa, Homo sapiens
  Payload ID: 11469
  Gene Symbol: NUCB2
  Gene Name: nucleobindin 2
  ENSP ID: ENSP00000435160
MRWRTILLQYCFLLITCLLTALEAVPIDIDKTKVQNIHPVESAKIEPPDTGLYYDEYLKQVIDVLETDKHFREKLQKADIEEIKSGRLSKELDLVSHHVRTKLDELKRQEVGRLRMLIKAKLDSLQDIGMDHQALLKQFDHLNHLNPDKFESTDLDMLIKAATSDLEHYDKTRHEEFKKYEMMKEHERREYLKTLNEE

SEQ ID NO: 58671 - protein, 69 aa, Homo sapiens
  Payload ID: 11469
  Gene Symbol: NUCB2
  Gene Name: nucleobindin 2
  ENSP ID: ENSP00000435558
MRWRTILLQYCFLLITCLLTALEAVPIDIDKTKVQNIHPVESAKIEPPDTGLYYDEYLKQVIDVLETDK

SEQ ID NO: 58672 - protein, 198 aa, Homo sapiens
  Payload ID: 11469
  Gene Symbol: NUCB2
  Gene Name: nucleobindin 2
  ENSP ID: ENSP00000435787
  MOD_RES (1)..(1): Any amino acid
XTLNEEKRKEEESKFEEMKKKHENHPKVNHPGSKDQLKEVWEETDGLDPNDFDPKTFFKLHDVNSDGFLDEQELEALFTKELEKVYDPKNEEDDMVEMEEERLRMREHVMNETLDQQQFFTEEELKEYENIIALQENELKKKADELQKQKEELQRQHDQLEAQKLEYHQVIQQMEQKKLQQGIPPSGPAGELKFEPHI

SEQ ID NO: 58673 - protein, 39 aa, Homo sapiens
  Payload ID: 11469
  Gene Symbol: NUCB2
  Gene Name: nucleobindin 2
  ENSP ID: ENSP00000435968
MRWRTILLQYCFLLITCLLTALEAVPIDIDKTKVQNIHP

SEQ ID NO: 58674 - protein, 69 aa, Homo sapiens; identical to SEQ ID NO: 58671
  Payload ID: 11469
  Gene Symbol: NUCB2
  Gene Name: nucleobindin 2
  ENSP ID: ENSP00000436215

SEQ ID NO: 58675 - protein, 420 aa, Homo sapiens
  Payload ID: 11469
  Gene Symbol: NUCB2
  Gene Name: nucleobindin 2
  ENSP ID: ENSP00000436455
MRWRTILLQYCFLLITCLLTALEAVPIDIDKTKVQNIHPVESAKIEPPDTGLYYDEYLKQVIDVLETDKHFREKLQKADIEEIKSGRLSKELDLVSHHVRTKLDELKRQEVGRLRMLIKAKLDSLQDIGMDHQALLKQFDHLNHLNPDKFESTDLDMLIKAATSDLEHYDKTRHEEFKKYEMMKEHERREYLKTLNEEKRKEEESKFEEMKKKHENHPKVNHPGSKDQLKEVWEETDGLDPNDFDPKTFFKLHDVNSDGFLDEQELEALFTKELEKVYDPKNEEDDMVEMEEERLRMREHVMNEVDTNKDRLVTLEEFLKATEKKEFLEPDSWETLDQQQFFTEEELKEYENIIALQENELKKKADELQKQKEELQRQHDQLEAQKLEYHQVIQQMEQKKLQQGIPPSGPAGELKFEPHI

SEQ ID NO: 58676 - protein, 420 aa, Homo sapiens; identical to SEQ ID NO: 58675
  Payload ID: 11469
  Gene Symbol: NUCB2
  Gene Name: nucleobindin 2
  ENSP ID: ENSP00000481959

SEQ ID NO: 58677 - protein, 708 aa, Homo sapiens
  Payload ID: 11470
  Gene Symbol: NOLC1
  Gene Name: nucleolar and coiled-body phosphoprotein 1
  ENSP ID: ENSP00000359024
  MOD_RES (1)..(1): Any amino acid
XDAGIRRVVPSDLYPLVLGFLRDNQLSEVANKFAKATGATQQDANASSLLDIYSFWLKSAKVPERKLQANGPVAKKAKKKASSSDSEDSSEEEEEVQGPPAKKAAVPAKRVGLPPGKAAAKASESSSSEESSDDDDEEDQKKQPVQKGVKPQAKAAKAPPKKAKSSDSDSDSSSEDEPPKNQKPKITPVTVKAQTKAPPKPARAAPKIANGKAASSSSSSSSSSSSDDSEEEKAAATPKKVWTITSVRAETVPKKQVVAKAPVKAATTPTRKSSSSEDSSSDEEEEQKKPMKNKPGPYSSVPPPSAPPPKKSLGTQPPKKAVEKQQPVESSEDSSDESDSSSEEEKKPPTKAVVSKATTKPPPAKKAAESSSDSSDSDSSEDDEAPSKPAGTTKNSSNKPAVTTKSPAVKPAAAPKQPVGGGQKLLTRKADSSSSEEESSSSEEEKTKKMVATTKPKATAKAALSLPAKQAPQGSRDSSSDSDSSSSEEEEEKTSKSAVKKKPQKVAGGAAPSKPASAKKGKAESSNSSSSDDSSEEEEEKLKGKGSPRPQAPKANGTSALTAQNGKAAKNSEEEEEEKKKAAVVVSKSGSLKKRKQNEAAKEAETPQAKKIKLQTPNTFPKRKKGEKRASSPFRRVREEEIEVDSRVADNSFDAKRGAAGDWGERANQVLKFTKGKSFRHEKTKKKRGSYRGGSISVQVNSIKFDSE

SEQ ID NO: 58678 - protein, 709 aa, Homo sapiens
  Payload ID: 11470
  Gene Symbol: NOLC1
  Gene Name: nucleolar and coiled-body phosphoprotein 1
  Uniprot ID: Q14978
  ENSP ID: ENSP00000385410
MADAGIRRVVPSDLYPLVLGFLRDNQLSEVANKFAKATGATQQDANASSLLDIYSFWLKSAKVPERKLQANGPVAKKAKKKASSSDSEDSSEEEEEVQGPPAKKAAVPAKRVGLPPGKAAAKASESSSSEESSDDDDEEDQKKQPVQKGVKPQAKAAKAPPKKAKSSDSDSDSSSEDEPPKNQKPKITPVTVKAQTKAPPKPARAAPKIANGKAASSSSSSSSSSSSDDSEEEKAAATPKKVWTITSVRAETVPKKQVVAKAPVKAATTPTRKSSSSEDSSSDEEEEQKKPMKNKPGPYSSVPPPSAPPPKKSLGTQPPKKAVEKQQPVESSEDSSDESDSSSEEEKKPPTKAVVSKATTKPPPAKKAAESSSDSSDSDSSEDDEAPSKPAGTTKNSSNKPAVTTKSPAVKPAAAPKQPVGGGQKLLTRKADSSSSEEESSSSEEEKTKKMVATTKPKATAKAALSLPAKQAPQGSRDSSSDSDSSSSEEEEEKTSKSAVKKKPQKVAGGAAPSKPASAKKGKAESSNSSSSDDSSEEEEEKLKGKGSPRPQAPKANGTSALTAQNGKAAKNSEEEEEEKKKAAVVVSKSGSLKKRKQNEAAKEAETPQAKKIKLQTPNTFPKRKKGEKRASSPFRRVREEEIEVDSRVADNSFDAKRGAAGDWGERANQVLKFTKGKSFRHEKTKKKRGSYRGGSISVQVNSIKFDSE

SEQ ID NO: 58679 - protein, 73 aa, Homo sapiens
  Payload ID: 11470
  Gene Symbol: NOLC1
  Gene Name: nucleolar and coiled-body phosphoprotein 1
  ENSP ID: ENSP00000473910
MADAGIRRVVPSDLYPLVLGFLRDNQLSEVANKFAKATGATQQDANASSLLDIYSFWLNRSASWEGCSQSIRE

SEQ ID NO: 58680 - protein, 258 aa, Homo sapiens
  Payload ID: 11470
  Gene Symbol: NOLC1
  Gene Name: nucleolar and coiled-body phosphoprotein 1
  ENSP ID: ENSP00000473927
MADAGIRRVVPSDLYPLVLGFLRDNQLSEVANKFAKATGAKGVKPQAKAAKAPPKKAKSSDSDSDSSSEDEPPKNQKPKITPVTVKAQTKAPPKPARAAPKIANGKAASSSSSSSSSSSSDDSEEEKAAATPKKTVPKKQVVAKAPVKAATTPTRKSSSSEDSSSDEEEEQKKPMKNKPGPYSSVPPPSAPPPKKSLGTQPPKKAVEKQQPVESSEDSSDESDSDSSEDDEAPSKPAGTTKNSSNKPAVTTKSPAVKP

SEQ ID NO: 58681 - protein, 281 aa, Homo sapiens
  Payload ID: 11470
  Gene Symbol: NOLC1
  Gene Name: nucleolar and coiled-body phosphoprotein 1
  ENSP ID: ENSP00000474140
  MOD_RES (1)..(1): Any amino acid
XRTPAFAAWFPATCIPSCSASCAITNSQRWPISSPKRQELSAKVPERKLQANGPVAKKAKKKASSSDSEDSSEEEEEVQGPPAKKAAVPAKRVGLPPGKAAAKASESSSSEESSDDDDEEDQKKQPVQKGVKPQAKAAKAPPKKAKSSDSDSDSSSEDEPPKNQKPKITPVTVKAQTKAPPKPARAAPKIANGKAASSSSSSSSSSSSDDSEEEKAAATPKKTVPKKQVVAKAPVKAATTPTRKSSSSEDSSSDEEEEQKKPMKNKPGPYSSVPPPSAPPP

SEQ ID NO: 58682 - protein, 699 aa, Homo sapiens
  Payload ID: 11470
  Gene Symbol: NOLC1
  Gene Name: nucleolar and coiled-body phosphoprotein 1
  Uniprot ID: Q14978
  ENSP ID: ENSP00000474710
MADAGIRRVVPSDLYPLVLGFLRDNQLSEVANKFAKATGATQQDANASSLLDIYSFWLKSAKVPERKLQANGPVAKKAKKKASSSDSEDSSEEEEEVQGPPAKKAAVPAKRVGLPPGKAAAKASESSSSEESSDDDDEEDQKKQPVQKGVKPQAKAAKAPPKKAKSSDSDSDSSSEDEPPKNQKPKITPVTVKAQTKAPPKPARAAPKIANGKAASSSSSSSSSSSSDDSEEEKAAATPKKTVPKKQVVAKAPVKAATTPTRKSSSSEDSSSDEEEEQKKPMKNKPGPYSSVPPPSAPPPKKSLGTQPPKKAVEKQQPVESSEDSSDESDSSSEEEKKPPTKAVVSKATTKPPPAKKAAESSSDSSDSDSSEDDEAPSKPAGTTKNSSNKPAVTTKSPAVKPAAAPKQPVGGGQKLLTRKADSSSSEEESSSSEEEKTKKMVATTKPKATAKAALSLPAKQAPQGSRDSSSDSDSSSSEEEEEKTSKSAVKKKPQKVAGGAAPSKPASAKKGKAESSNSSSSDDSSEEEEEKLKGKGSPRPQAPKANGTSALTAQNGKAAKNSEEEEEEKKKAAVVVSKSGSLKKRKQNEAAKEAETPQAKKIKLQTPNTFPKRKKGEKRASSPFRRVREEEIEVDSRVADNSFDAKRGAAGDWGERANQVLKFTKGKSFRHEKTKKKRGSYRGGSISVQVNSIKFDSE

SEQ ID NO: 58683 - protein, 46 aa, Homo sapiens
  Payload ID: 11470
  Gene Symbol: NOLC1
  Gene Name: nucleolar and coiled-body phosphoprotein 1
  ENSP ID: ENSP00000474924
MADAGIRRVVPSDLYPLVLGFLRDNQLSEVANKFAKATGALEQHLK

SEQ ID NO: 58684 - protein, 700 aa, Homo sapiens
  Payload ID: 11470
  Gene Symbol: NOLC1
  Gene Name: nucleolar and coiled-body phosphoprotein 1
  Uniprot ID: Q14978
  ENSP ID: ENSP00000475080
MADAGIRRVVPSDLYPLVLGFLRDNQLSEVANKFAKATGATQQDANASSLLDIYSFWLNRSAKVPERKLQANGPVAKKAKKKASSSDSEDSSEEEEEVQGPPAKKAAVPAKRVGLPPGKAAAKASESSSSEESSDDDDEEDQKKQPVQKGVKPQAKAAKAPPKKAKSSDSDSDSSSEDEPPKNQKPKITPVTVKAQTKAPPKPARAAPKIANGKAASSSSSSSSSSSSDDSEEEKAAATPKKTVPKKQVVAKAPVKAATTPTRKSSSSEDSSSDEEEEQKKPMKNKPGPYSSVPPPSAPPPKKSLGTQPPKKAVEKQQPVESSEDSSDESDSSSEEEKKPPTKAVVSKATTKPPPAKKAAESSSDSSDSDSSEDDEAPSKPAGTTKNSSNKPAVTTKSPAVKPAAAPKQPVGGGQKLLTRKADSSSSEEESSSSEEEKTKKMVATTKPKATAKAALSLPAKQAPQGSRDSSSDSDSSSSEEEEEKTSKSAVKKKPQKVAGGAAPSKPASAKKGKAESSNSSSSDDSSEEEEEKLKGKGSPRPQAPKANGTSALTAQNGKAAKNSEEEEEEKKKAAVVVSKSGSLKKRKQNEAAKEAETPQAKKIKLQTPNTFPKRKKGEKRASSPFRRVREEEIEVDSRVADNSFDAKRGAAGDWGERANQVLKFTKGKSFRHEKTKKKRGSYRGGSISVQVNSIKFDSE

SEQ ID NO: 58685 - protein, 426 aa, Homo sapiens
  Payload ID: 11471
  Gene Symbol: NUSAP1
  Gene Name: nucleolar and spindle associated protein 1
  Uniprot ID: Q9BXS6
  ENSP ID: ENSP00000260359
MIIPSLEELDSLKYSDLQNLAKSLGLRANLRATKLLKALKGYIKHEARKGNENQDESQTSASSCDETEIQISNQEEAERQPLGHVTKTRRRCKTVRVDPDSQNHEKQESQDLRATAKVPSPPDEHQEAENAVSSGNRDSKVPSEGKKSLYTDESSKPGKNKRTAITTPNFKKLHEAHFKEMESIDQYIERKKKHFEEHNSMNELKQQPINKGGVRTPVPPRGRLSVASTPISQRRSQGRSCGPASQSTLGLKGSLKRSAISAAKTGVRFSAATKDNEHKRSLTKTPARKSAHVTVSGGTPKGEAVLGTHKLKTITGNSAAVITPFKLTTEATQTPVSNKKPVFDLKASLSRPLNYEPHKGKLKPWGQSKENNYLNQHVNRINFYKKTYKQPHLQTKEEQRKKREQERKEKKAKVLGMRRGLILAED

SEQ ID NO: 58686 - protein, 440 aa, Homo sapiens
  Payload ID: 11471
  Gene Symbol: NUSAP1
  Gene Name: nucleolar and spindle associated protein 1
  Uniprot ID: Q9BXS6
  ENSP ID: ENSP00000400746
MIIPSLEELDSLKYSDLQNLAKSLGLRANLRATKLLKALKGYIKHEARKGNENQDESQTSASSCDETEIQISNQEEAERQPLGHVTKTRRRCKTVRVDPDSQQNHSEIKISNPTEFQNHEKQESQDLRATAKVPSPPDEHQEAENAVSSGNRDSKVPSEGKKSLYTDESSKPGKNKRTAITTPNFKKLHEAHFKEMESIDQYIERKKKHFEEHNSMNELKQPINKGGVRTPVPPRGRLSVASTPISQRRSQGRSCGPASQSTLGLKGSLKRSAISAAKTGVRFSAATKDNEHKRSLTKTPARKSAHVTVSGGTPKGEAVLGTHKLKTITGNSAAVITPFKLTTEATQTPVSNKKPVFDLKASLSRPLNYEPHKGKLKPWGQSKENNYLNQHVNRINFYKKTYKQPHLQTKEEQRKKREQERKEKKAKVLGMRRGLILAED

SEQ ID NO: 58687 - protein, 378 aa, Homo sapiens
  Payload ID: 11471
  Gene Symbol: NUSAP1
  Gene Name: nucleolar and spindle associated protein 1
  Uniprot ID: Q9BXS6
  ENSP ID: ENSP00000401014
MIIPSLEELDSLKYSDLQNLAKSLGLRANLRDESQTSASSCDETEIQISNQEEAERQPLGHVTKTRRRCKTVRVDPDSQQNHSEIKISNPTEFQNHEKQESQDLRATAKVPSPPDEHQEAENAVSSGNRDSKVPSEGKKSLYTDESSKPGKNKRTAITTPNFKKLHEAHFKEMESIDQYIERKKKHFEEHNSMNELKQPINKGGVRTPVPPRGRLSVASTPISQRRSQGRSCGPASQSTLGLKGSLKRSAISAAKTGVRFSAATKDNEHKRSLTKTPARKSAHVTVSGGTPKGEAVLGTHKLKTITGNSAAGKLKPWGQSKENNYLNQHVNRINFYKKTYKQPHLQTKEEQRKKREQERKEKKAKVLGMRRGLILAED

SEQ ID NO: 58688 - protein, 76 aa, Homo sapiens
  Payload ID: 11471
  Gene Symbol: NUSAP1
  Gene Name: nucleolar and spindle associated protein 1
  ENSP ID: ENSP00000452725
MIIPSLEELDSLKYSDLQNLAKSLGLRANLRATKLLKALKGYIKHEARKGNENQFHSCCPGWSAMTRSRLTATSTS

SEQ ID NO: 58689 - protein, 441 aa, Homo sapiens
  Payload ID: 11471
  Gene Symbol: NUSAP1
  Gene Name: nucleolar and spindle associated protein 1
  Uniprot ID: Q9BXS6
  ENSP ID: ENSP00000453403
MIIPSLEELDSLKYSDLQNLAKSLGLRANLRATKLLKALKGYIKHEARKGNENQDESQTSASSCDETEIQISNQEEAERQPLGHVTKTRRRCKTVRVDPDSQQNHSEIKISNPTEFQNHEKQESQDLRATAKVPSPPDEHQEAENAVSSGNRDSKVPSEGKKSLYTDESSKPGKNKRTAITTPNFKKLHEAHFKEMESIDQYIERKKKHFEEHNSMNELKQQPINKGGVRTPVPPRGRLSVASTPISQRRSQGRSCGPASQSTLGLKGSLKRSAISAAKTGVRFSAATKDNEHKRSLTKTPARKSAHVTVSGGTPKGEAVLGTHKLKTITGNSAAVITPFKLTTEATQTPVSNKKPVFDLKASLSRPLNYEPHKGKLKPWGQSKENNYLNQHVNRINFYKKTYKQPHLQTKEEQRKKREQERKEKKAKVLGMRRGLILAED

SEQ ID NO: 58690 - protein, 68 aa, Homo sapiens
  Payload ID: 11471
  Gene Symbol: NUSAP1
  Gene Name: nucleolar and spindle associated protein 1
  ENSP ID: ENSP00000453428
  MOD_RES (1)..(1): Any amino acid
XLKALKGYIKHEARKGNENQDSSTSKRKTLCGFYSHQPTTLARPVLWPCKSEYLGSEGVTQALCYLCS

SEQ ID NO: 58691 - protein, 144 aa, Homo sapiens
  Payload ID: 11471
  Gene Symbol: NUSAP1
  Gene Name: nucleolar and spindle associated protein 1
  ENSP ID: ENSP00000453558
QEAENAVSSGNRDSKVPSEGKKSLYTDESSKPGKNKRTAITTPNFKKLHEAHFKEMESIDQYIERKKKHFEEHNSMNELKQPINKGGVRTPVPPRGRLSVASTPISQRRSQGRSCGPASQSTLGLKGSLKRSAISAAKTGVRFK

SEQ ID NO: 58692 - protein, 440 aa, Homo sapiens
  Payload ID: 11471
  Gene Symbol: NUSAP1
  Gene Name: nucleolar and spindle associated protein 1
  Uniprot ID: Q9BXS6
  ENSP ID: ENSP00000453657
MIIPSLEELDSLKYSDLQNLAKSLGLRANLRATKLLKALKGYIKHEARKGNENQDESQTSASSCDETEIQISNQEEAERQPLGHVTKTRRRCKTVRVDPDSQNHSEIKISNPTEFQNHEKQESQDLRATAKVPSPPDEHQEAENAVSSGNRDSKVPSEGKKSLYTDESSKPGKNKRTAITTPNFKKLHEAHFKEMESIDQYIERKKKHFEEHNSMNELKQQPINKGGVRTPVPPRGRLSVASTPISQRRSQGRSCGPASQSTLGLKGSLKRSAISAAKTGVRFSAATKDNEHKRSLTKTPARKSAHVTVSGGTPKGEAVLGTHKLKTITGNSAAVITPFKLTTEATQTPVSNKKPVFDLKASLSRPLNYEPHKGKLKPWGQSKENNYLNQHVNRINFYKKTYKQPHLQTKEEQRKKREQERKEKKAKVLGMRRGLILAED

SEQ ID NO: 58693 - protein, 439 aa, Homo sapiens
  Payload ID: 11471
  Gene Symbol: NUSAP1
  Gene Name: nucleolar and spindle associated protein 1
  Uniprot ID: Q9BXS6
  ENSP ID: ENSP00000454097
MIIPSLEELDSLKYSDLQNLAKSLGLRANLRATKLLKALKGYIKHEARKGNENQDESQTSASSCDETEIQISNQEEAERQPLGHVTKTRRRCKTVRVDPDSQNHSEIKISNPTEFQNHEKQESQDLRATAKVPSPPDEHQEAENAVSSGNRDSKVPSEGKKSLYTDESSKPGKNKRTAITTPNFKKLHEAHFKEMESIDQYIERKKKHFEEHNSMNELKQPINKGGVRTPVPPRGRLSVASTPISQRRSQGRSCGPASQSTLGLKGSLKRSAISAAKTGVRFSAATKDNEHKRSLTKTPARKSAHVTVSGGTPKGEAVLGTHKLKTITGNSAAVITPFKLTTEATQTPVSNKKPVFDLKASLSRPLNYEPHKGKLKPWGQSKENNYLNQHVNRINFYKKTYKQPHLQTKEEQRKKREQERKEKKAKVLGMRRGLILAED

SEQ ID NO: 58694 - protein, 516 aa, Homo sapiens
  Payload ID: 11472
  Gene Symbol: NOC4L
  Gene Name: nucleolar complex associated 4 homolog
  Uniprot ID: Q9BVI4
  ENSP ID: ENSP00000328854
MEREPGAAGVRRALGRRLEAVLASRSEANAVFDILAVLQSEDQEEIQEAVRTCSRLFGALLERGELFVGQLPSEEMVMTGSQGATRKYKVWMRHRYHSCCNRLGELLGHPSFQVKELALSALLKFVQLEGAHPLEKSKWEGNYLFPRELFKLVVGGLLSPEEDQSLLLSQFREYLDYDDTRYHTMQAAVDAVARVTGQHPEVPPAFWNNAFTLLSAVSLPRREPTVSSFYVKRAELWDTWKVAHLKEHRRVFQAMWLSFLKHKLPLSLYKKVLLIVHDAILPQLAQPTLMIDFLTRACDLGGALSLLALNGLFILIHKHNLEYPDFYRKLYGLLDPSVFHVKYRARFFHLADLFLSSSHLPAYLVAAFAKRLARLALTAPPEALLMVLPFICNLLRRHPACRVLVHRPHGPELDADPYDPGEEDPAQSRALESSLWELQALQRHYHPEVSKAASVINQALSMPEVSIAPLLELTAYEIFERDLKKKGPEPVPLEFIPAQGLLGRPGELCAQHFTLS

SEQ ID NO: 58695 - protein, 270 aa, Homo sapiens
  Payload ID: 11472
  Gene Symbol: NOC4L
  Gene Name: nucleolar complex associated 4 homolog
  ENSP ID: ENSP00000438255
MVMTGSQGATRKYKVWMRHRYHSCCNRLGELLGHPSFQVKTLLIRGIIRYVASSTHRRVRSSFSLWLSSSASYSTARIVQPLELALSALLKFVQLEGAHPLEKSKWEGNYLFPRELFKLVVGGLLSPEEDQSLLLSQFREYLDYDDTRYHTMQAAVDAVARVTGQHPEVPPAFWNNAFTLLSAVSLPRREPTVSSFYVKRAELWDTWKVAHLKEHRRVFQAMWLSFLKHKLPLSLYKKVLLIVHDAILPQLAQPTLMIDFLTRACDLGEC

SEQ ID NO: 58696 - protein, 638 aa, Homo sapiens
  Payload ID: 11473
  Gene Symbol: NOL10
  Gene Name: nucleolar protein 10
  Uniprot ID: Q9BSC4
  ENSP ID: ENSP00000263837
MQVSSLNEVKIYSLSCGKSLPEWLSDRKKRALQKKDVDVRRRIELIQDFEMPTVCTTIKVSKDGQYILATGTYKPRVRCYDTYQLSLKFERCLDSEVVTFEILSDDYSKIVFLHNDRYIEFHSQSGFYYKTRIPKFGRDFSYHYPSCDLYFVGASSEVYRLNLEQGRYLNPLQTDAAENNVCDINSVHGLFATGTIEGRVECWDPRTRNRVGLLDCALNSVTADSEINSLPTISALKFNGALTMAVGTTTGQGKIFTSLEPEHDLNDVCLYPNSGMLLTANETPKMGIYYIPVLGPAPRWCSFLDNLTEELEENPESTVYDDYKFVTKKDLENLGLTHLIGSPFLRAYMHGFFMDIRLYHKVKLMVNPFAYEEYRKDKIRQKIEETRAQRVQLKKLPKVNKELALKLIEEEEEKQKSTWKKKVKSLPNILTDDRFKVMFENPDFQVDEESEEFRLLNPLVSKISEKRKKKLRLLEQQELREKEEEEEPEGKPSDAESSESSDDEKAWVEEVRKQRRLLQQEEKVKRQERLKEDQQTVLKPQFYEIKAGEEFRSFKDSATKQKLMNKTLEDRLKIEAKNGTLSVSDTTVGSKQLTFTLKRSEQQKKQQEAEKLHRQERKRLRRSAGHLKSRHKRGRSFH

SEQ ID NO: 58697 - protein, 688 aa, Homo sapiens
  Payload ID: 11473
  Gene Symbol: NOL10
  Gene Name: nucleolar protein 10
  Uniprot ID: Q9BSC4
  ENSP ID: ENSP00000371101
MQVSSLNEVKIYSLSCGKSLPEWLSDRKKRALQKKDVDVRRRIELIQDFEMPTVCTTIKVSKDGQYILATGTYKPRVRCYDTYQLSLKFERCLDSEVVTFEILSDDYSKIVFLHNDRYIEFHSQSGFYYKTRIPKFGRDFSYHYPSCDLYFVGASSEVYRLNLEQGRYLNPLQTDAAENNVCDINSVHGLFATGTIEGRVECWDPRTRNRVGLLDCALNSVTADSEINSLPTISALKFNGALTMAVGTTTGQVLLYDLRSDKPLLVKDHQYGLPIKSVHFQDSLDLILSADSRIVKMWNKNSGKIFTSLEPEHDLNDVCLYPNSGMLLTANETPKMGIYYIPVLGPAPRWCSFLDNLTEELEENPESTVYDDYKFVTKKDLENLGLTHLIGSPFLRAYMHGFFMDIRLYHKVKLMVNPFAYEEYRKDKIRQKIEETRAQRVQLKKLPKVNKELALKLIEEEEEKQKSTWKKKVKSLPNILTDDRFKVMFENPDFQVDEESEEFRLLNPLVSKISEKRKKKLRLLEQQELREKEEEEEPEGKPSDAESSESSDDEKAWVEEVRKQRRLLQQEEKVKRQERLKEDQQTVLKPQFYEIKAGEEFRSFKDSATKQKLMNKTLEDRLKIEAKNGTLSVSDTTVGSKQLTFTLKRSEQQKKQQEAEKLHRQERKRLRRSAGHLKSRHKRGRSFH

SEQ ID NO: 58698 - protein, 252 aa, Homo sapiens
  Payload ID: 11473
  Gene Symbol: NOL10
  Gene Name: nucleolar protein 10
  ENSP ID: ENSP00000403170
IVFLHNDRYIEFHSQSGFYYKTRIPKFGRDFSYHYPSCDLYFVGASSEVYRLNLEQGRYLNPLQTDAAENNVCDINSVHGLFATGTIEGRVECWDPRTRNRVGLLDCALNSVTADSEINSLPTISALKFNGALTMAVGTTTGQVLLYDLRSDKPLLVKDHQYGLPIKSVHFQDSLDLILSADSRIVKMWNKNSGKIFTSLEPEHDLNDVCLYPNSGMLLTANETPKMGIYYIPFSKPVLSSSLNQSLPPAFL

SEQ ID NO: 58699 - protein, 662 aa, Homo sapiens
  Payload ID: 11473
  Gene Symbol: NOL10
  Gene Name: nucleolar protein 10
  Uniprot ID: Q9BSC4
  ENSP ID: ENSP00000439663
MQVSSLNEVKIYSLSCGKSLPEWLSDRKKRALQKKDVDVRRRIELIQDFEMPTVCTTIKVSKDGQYILATVVTFEILSDDYSKIVFLHNDRYIEFHSQSGFYYKTRIPKFGRDFSYHYPSCDLYFVGASSEVYRLNLEQGRYLNPLQTDAAENNVCDINSVHGLFATGTIEGRVECWDPRTRNRVGLLDCALNSVTADSEINSLPTISALKFNGALTMAVGTTTGQVLLYDLRSDKPLLVKDHQYGLPIKSVHFQDSLDLILSADSRIVKMWNKNSGKIFTSLEPEHDLNDVCLYPNSGMLLTANETPKMGIYYIPVLGPAPRWCSFLDNLTEELEENPESTVYDDYKFVTKKDLENLGLTHLIGSPFLRAYMHGFFMDIRLYHKVKLMVNPFAYEEYRKDKIRQKIEETRAQRVQLKKLPKVNKELALKLIEEEEEKQKSTWKKKVKSLPNILTDDRFKVMFENPDFQVDEESEEFRLLNPLVSKISEKRKKKLRLLEQQELREKEEEEEPEGKPSDAESSESSDDEKAWVEEVRKQRRLLQQEEKVKRQERLKEDQQTVLKPQFYEIKAGEEFRSFKDSATKQKLMNKTLEDRLKIEAKNGTLSVSDTTVGSKQLTFTLKRSEQQKKQQEAEKLHRQERKRLRRSAGHLKSRHKRGRSFH

SEQ ID NO: 58700 - protein, 719 aa, Homo sapiens
  Payload ID: 11474
  Gene Symbol: NOL11
  Gene Name: nucleolar protein 11
  Uniprot ID: Q9H8H0
  ENSP ID: ENSP00000253247
MAALEEEFTLSSVVLSAGPEGLLGVEQSDKTDQFLVTDSGRTVILYKVSDQKPLGSWSVKQGQIITCPAVCNFQTGEYVVVHDNKVLRIWNNEDVNLDKVFKATLSAEVYRILSVQGTEPLVLFKEGAVRGLEALLADPQQKIETVISDEEVIKWTKFFVVFRHPVLIFITEKHGNYFAYVQMFNSRILTKYTLLLGQDENSVIKSFTASVDRKFISLMSLSSDGCIYETLIPIRPADPEKNQSLVKSLLLKAVVSGNARNGVALTALDQDHVAVLGSPLAASKECLSVWNIKFQTLQTSKELPQGTSGQLWYYGEHLFMLHGKSLTVIPYKCEVSSLAGALGKLKHSQDPGTHVVSHFVNWETPQGCGLGFQNSEQSRRILRRRKIEVSLQPEVPPSKQLLSTIMKDSEKHIEVEVRKFLALKQTPDFHTVIGDTVTGLLERCKAEPSFYPRNCLMQLIQTHVLSYSLCPDLMEIALKKKDVQLLQLCLQQFPDIPESVTCACLKIFLSIGDDSLQETDVNMESVFDYSINSVHDEKMEEQTEILQNGFNPEEDKCNNCDQELNKKPQDETKESTSCPVVQKRAALLNAILHSAYSETFLLPHLKDIPAQHITLFLKYLYFLYLKCSENATMTLPGIHPPTLNQIMDWICLLLDANFTVVVMMPEAKRLLINLYKLVKSQISVYSELNKIEVSFRELQKLNQEKNNRGLYSIEVLELF

SEQ ID NO: 58701 - protein, 169 aa, Homo sapiens
  Payload ID: 11474
  Gene Symbol: NOL11
  Gene Name: nucleolar protein 11
  Uniprot ID: Q9H8H0
  ENSP ID: ENSP00000463219
MAALEEEFTLSSVVLSAGPEGLLGVEQSDKTDQFLVTDSGRTVILYKVSDQKPLGSWSVKQGQIITCPAVCNFQTGEYVVVHDNKVLRIWNNEDVNLDKVFKATLSAEVYRILSVQGTEPLVLFKEGAVRGLEALLADPQQKIETVISDEEVINMEITLLTCKCLTHVS

SEQ ID NO: 58702 - protein, 85 aa, Homo sapiens
  Payload ID: 11474
  Gene Symbol: NOL11
  Gene Name: nucleolar protein 11
  ENSP ID: ENSP00000463248
  MOD_RES (1)..(1): Any amino acid
XSENATMTLPGIHPPTLNQIMDWICLLLDANFTVVVMMPEAKRLLINLYKLVKSQARTVFCLRPSQCQEKRVSEYLDHHLTDAPG

SEQ ID NO: 58703 - protein, 189 aa, Homo sapiens
  Payload ID: 11474
  Gene Symbol: NOL11
  Gene Name: nucleolar protein 11
  ENSP ID: ENSP00000463662
MAALEEEFTLSSVVLSAGPEGLLGVEQSDKTDQFLVTDSGRTVILYKRFGRTRWFTPVIPELREAQVSDQKPLGSWSVKQGQIITCPAVCNFQTGEYVVVHDNKVLRIWNNEDVNLDKVFKATLSAEVYRILSVQGTEPLVLFKEGAVRGLEALLADPQQKIETVISDEEVIKWTKFFVVFRHPVLIFI

SEQ ID NO: 58704 - protein, 271 aa, Homo sapiens
  Payload ID: 11474
  Gene Symbol: NOL11
  Gene Name: nucleolar protein 11
  ENSP ID: ENSP00000464015
VRGLEALLADPQQKIETVISDEEVIKWTKFFVVFRHPVLIFITEKHGNYFAYVQMFNSRILTKYTLLLGQDENSVIKSFTASVDRKFISLMSLSSDGCIYETLIPIRPADPEKNQSLVKSLLLKAVVSGNARNGVALTALDQDHVAVLGSPLAASKGTHVVSHFVNWETPQGCGLGFQNSEQSRRILRRRKIEVSLQPEVPPSKQLLSTIMKDSEKHIEVEVRKFLALKQTPDFHTVIGDTVTGLLERCKAEPSFYPRNCLMQLIQTHVLS

SEQ ID NO: 58705 - protein, 213 aa, Homo sapiens
  Payload ID: 11475
  Gene Symbol: NOL12
  Gene Name: nucleolar protein 12
  Uniprot ID: Q9UGY1
  ENSP ID: ENSP00000352021
MGRNKKKKRDGDDRRPRLVLSFDEEKRREYLTGFHKRKVERKKAAIEEIKQRLKEEQRKLREERHQEYLKMLAEREEALEEADELDRLVTAKTESVQYDHPNHTVTVTTISDLDLSGARLLGLTPPEGGAGDRSEEEASSTEKPTKALPRKSRDPLLSQRISSLTASLHAHSRKKVKRKHPRRAQDSKKPPRAPRTSKAQRRRLTGKARHSGE

SEQ ID NO: 58706 - protein, 213 aa, Homo sapiens; identical to SEQ ID NO: 58705
  Payload ID: 11475
  Gene Symbol: NOL12
  Gene Name: nucleolar protein 12
  Uniprot ID: Q9UGY1
  ENSP ID: ENSP00000403059

SEQ ID NO: 58707 - protein, 213 aa, Homo sapiens; identical to SEQ ID NO: 58705
  Payload ID: 11475
  Gene Symbol: NOL12
  Gene Name: nucleolar protein 12
  Uniprot ID: Q9UGY1
  ENSP ID: ENSP00000482349

SEQ ID NO: 58708 - protein, 208 aa, Homo sapiens
  Payload ID: 11476
  Gene Symbol: NOL3
  Gene Name: nucleolar protein 3 (apoptosis repressor with CARD domain)
  Uniprot ID: O60936
  ENSP ID: ENSP00000268605
MGNAQERPSETIDRERKRLVETLQADSGLLLDALLARGVLTGPEYEALDALPDAERRVRRLLLLVQGKGEAACQELLRCAQRTAGAPDPAWDWQHVGPGYRDRSYDPPCPGHWTPEAPGSGTTCPGLPRASDPDEAGGPEGSEAVQSGTPEEPEPELEAEASKEAEPEPEPEPELEPEAEAEPEPELEPEPDPEPEPDFEERDESEDS

SEQ ID NO: 58709 - protein, 138 aa, Homo sapiens
  Payload ID: 11476
  Gene Symbol: NOL3
  Gene Name: nucleolar protein 3 (apoptosis repressor with CARD domain)
  ENSP ID: ENSP00000454256
MGNAQERPSETIDRERKRLVETLQADSGLLLDALLARGVLTGPEYEALDALPDAERRVRRLLLLVQGKGEAACQELLRCAQRTAGAPDPAWDWQHVGPGYRDRSYDPPCPGHWTPEAPGSGTTCPGLPRASDPDEAGG

SEQ ID NO: 58710 - protein, 219 aa, Homo sapiens
  Payload ID: 11476
  Gene Symbol: NOL3
  Gene Name: nucleolar protein 3 (apoptosis repressor with CARD domain)
  Uniprot ID: O60936
  ENSP ID: ENSP00000454598
MGNAQERPSETIDRERKRLVETLQADSGLLLDALLARGVLTGPEYEALDALPDAERRVRRLLLLVQGKGEAACQELLRCAQRTAGAPDPAWDWQHATGTAAMTLHAQATGRRRHPARGPHAPGCPELQTLTRPGALRAPRRCNPGPRRSQSQSWKLRPLKRLNRSRSQSQSWNPRLKQNQSRNWSQNRTQSPSPTSRKGTSPKIPEGQSSDRRCPAHAG

SEQ ID NO: 58711 - protein, 216 aa, Homo sapiens
  Payload ID: 11476
  Gene Symbol: NOL3
  Gene Name: nucleolar protein 3 (apoptosis repressor with CARD domain)
  ENSP ID: ENSP00000455808
  MOD_RES (1)..(1): Any amino acid
XGQSVWRGRRTPSSPCWPPGPVLAEPSGGWDRAPTMGNAQERPSETIDRERKRLVETLQADSGLLLDALLARGVLTGPEYEALDALPDAERRATGTAAMTLHAQATGRRRHPARGPHAPGCPELQTLTRPGALRAPRRCNPGPRRSQSQSWKLRPLKRLNRSRSQSQSWNPRLKQNQSRNWSQNRTQSPSPTSRKGTSPKIPEGQSSDRRCPAHAG

SEQ ID NO: 58712 - protein, 270 aa, Homo sapiens
  Payload ID: 11476
  Gene Symbol: NOL3
  Gene Name: nucleolar protein 3 (apoptosis repressor with CARD domain)
  Uniprot ID: O60936
  ENSP ID: ENSP00000457243
MPVLGKAGEERRATADAWGQKEEPEEETGQSVWRGRRTPSSPCWPPGPVLAEPSGGWDRAPTMGNAQERPSETIDRERKRLVETLQADSGLLLDALLARGVLTGPEYEALDALPDAERRVRRLLLLVQGKGEAACQELLRCAQRTAGAPDPAWDWQHVGPGYRDRSYDPPCPGHWTPEAPGSGTTCPGLPRASDPDEAGGPEGSEAVQSGTPEEPEPELEAEASKEAEPEPEPEPELEPEAEAEPEPELEPEPDPEPEPDFEERDESEDS

SEQ ID NO: 58713 - protein, 206 aa, Homo sapiens
  Payload ID: 11476
  Gene Symbol: NOL3
  Gene Name: nucleolar protein 3 (apoptosis repressor with CARD domain)
  ENSP ID: ENSP00000457720
MGNAQERPSETIDRERKRLVETLQADSGLLLDALLARGVLTGPEYEALDALPDAERRVRRLLLLVQGKGEAACQELLRCAQRTAGAPDPAWDWQHVGPGYRDRSYDPPCPGHWTPEAPGSGTTCPGLPRASDPDEAGGPEGSEAVQSGTPEEPEPELEAEASKEAEPEPEPEPELEPEAEAEPEPELEPEPDPEPEPDFEERDESE

SEQ ID NO: 58714 - protein, 174 aa, Homo sapiens
  Payload ID: 11476
  Gene Symbol: NOL3
  Gene Name: nucleolar protein 3 (apoptosis repressor with CARD domain)
  ENSP ID: ENSP00000457732
MGNAQERPSETIDRERKRLVETLQADSGLLLDALLARGVLTGPEYEALDALPDAERRVRRLLLLVQGKGEAACQELLRCAQRTAGAPDPAWDWQHVGPGYRDRSYDPPCPGHWTPEAPGSGTTCPGLPRASDPDEAGGPEGSEAVQSGTPEEPEPELEAEASKEAEPEPEPEPE

SEQ ID NO: 58715 - protein, 106 aa, Homo sapiens
  Payload ID: 11476
  Gene Symbol: NOL3
  Gene Name: nucleolar protein 3 (apoptosis repressor with CARD domain)
  ENSP ID: ENSP00000463685
  MOD_RES (1)..(1): Any amino acid
XSWNPRLKQNQSRNWSQNRTQSPSPTSRKGTSPKVFLKARALTGGAPPMLDRTWDAAGAESDATKARSSPVPLEVNKLRRVGRDLGSLHDSGCLPRNLGWVPLSPR

SEQ ID NO: 58716 - protein, 131 aa, Homo sapiens
  Payload ID: 11476
  Gene Symbol: NOL3
  Gene Name: nucleolar protein 3 (apoptosis repressor with CARD domain)
  ENSP ID: ENSP00000463698
  MOD_RES (1)..(1): Any amino acid
XSSPCWPPGPVLAEPSGGWDRGYRDRSYDPPCPGHWTPEAPGSGTTCPGLPRASDPDEAGGPEGSEAVQSGTPEEPEPELEAEASKEAEPEPEPEPELEPEAEAEPEPELEPEPDPEPEPDFEERDESEDS

SEQ ID NO: 58717 - protein, 638 aa, Homo sapiens
  Payload ID: 11477
  Gene Symbol: NOL4
  Gene Name: nucleolar protein 4
  Uniprot ID: O94818
  ENSP ID: ENSP00000261592
MESERDMYRQFQDWCLRTYGDSGKTKTVTRKKYERIVQLLNGSESSSTDNAKFKFWVKSKGFQLGQPDEVRGGGGGAKQVLYVPVKTTDGVGVDEKLSLRRVAVVEDFFDIIYSMHVETGPNGEQIRKHAGQKRTYKAISESYAFLPREAVTRFLMSCSECQKRMHLNPDGTDHKDNGKPPTLVTSMIDYNMPITMAYMKHMKLQLLNSQQDEDESSIESDEFDMSDSTRMSAVNSDLSSNLEERMQSPQNLHGQQDDDSAAESFNGNETLGHSSIASGGTHSREMGDSNSDGKTGLEQDEQPLNLSDSPLSAQLTSEYRIDDHNSNGKNKYKNLLISDLKMEREARENGSKSPAHSYSSYDSGKNESVDRGAEDLSLNRGDEDEDDHEDHDDSEKVNETDGVEAERLKAFNMFVRLFVDENLDRMVPISKQPKEKIQAIIDSCRRQFPEYQERARKRIRTYLKSCRRMKRSGFEMSRPIPSHLTSAVAESILASACESESRNAAKRMRLERQQDESAPADKQCKPEATQATYSTSAVPGSQDVLYINGNGTYSYHSYRGLGGGLLNLNDASSSGPTDLSMKRQLATSSGSSSSSNSRPQLSPTEINAVRQLVAGYRESAAFLLRSADELENLILQQN

SEQ ID NO: 58718 - protein, 564 aa, Homo sapiens
  Payload ID: 11477
  Gene Symbol: NOL4
  Gene Name: nucleolar protein 4
  Uniprot ID: O94818
  ENSP ID: ENSP00000443472
MADLMQETFLHHATDGVGVDEKLSLRRVAVVEDFFDIIYSMHVETGPNGEQIRKHAGQKRTYKAISESYAFLPREAVTRFLMSCSECQKRMHLNPDGTDHKDNGKPPTLVTSMIDYNMPITMAYMKHMKLQLLNSQQDEDESSIESDEFDMSDSTRMSAVNSDLSSNLEERMQSPQNLHGQQDDDSAAESFNGNETLGHSSIASGGTHSREMGDSNSDGKTGLEQDEQPLNLSDSPLSAQLTSEYRIDDHNSNGKNKYKNLLISDLKMEREARENGSKSPAHSYSSYDSGKNESVDRGAEDLSLNRGDEDEDDHEDHDDSEKVNETDGVEAERLKAFNMFVRLFVDENLDRMVPISKQPKEKIQAIIDSCRRQFPEYQERARKRIRTYLKSCRRMKRSGFEMSRPIPSHLTSAVAESILASACESESRNAAKRMRLERQQDESAPADKQCKPEATQATYSTSAVPGSQDVLYINGNGTYSYHSYRGLGGGLLNLNDASSSGPTDLSMKRQLATSSGSSSSSNSRPQLSPTEINAVRQLVAGYRESAAFLLRSADELENLILQQN

SEQ ID NO: 58719 - protein, 353 aa, Homo sapiens
  Payload ID: 11477
  Gene Symbol: NOL4
  Gene Name: nucleolar protein 4
  Uniprot ID: O94818
  ENSP ID: ENSP00000445733
MGDSNSDGKTGLEQDEQPLNLSDSPLSAQLTSEYRIDDHNSNGKNKYKNLLISDLKMEREARENGSKSPAHSYSSYDSGKNESVDRGAEDLSLNRGDEDEDDHEDHDDSEKVNETDGVEAERLKAFNMFVRLFVDENLDRMVPISKQPKEKIQAIIDSCRRQFPEYQERARKRIRTYLKSCRRMKRSGFEMSRPIPSHLTSAVAESILASACESESRNAAKRMRLERQQDESAPADKQCKPEATQATYSTSAVPGSQDVLYINGNGTYSYHSYRGLGGGLLNLNDASSSGPTDLSMKRQLATSSGSSSSSNSRPQLSPTEINAVRQLVAGYRESAAFLLRSADELENLILQQN

SEQ ID NO: 58720 - protein, 69 aa, Homo sapiens
  Payload ID: 11477
  Gene Symbol: NOL4
  Gene Name: nucleolar protein 4
  ENSP ID: ENSP00000464704
MADLMQETFLHHATDGVGVDEKLSLRRVAVVEDFFDIIYSMHVETGPNGEQIRKHAGQKRTYKAIQKNV

SEQ ID NO: 58721 - protein, 24 aa, Homo sapiens
  Payload ID: 11477
  Gene Symbol: NOL4
  Gene Name: nucleolar protein 4
  ENSP ID: ENSP00000464790
MADLMQETFLHHATGYTTIYPFTC

SEQ ID NO: 58722 - protein, 536 aa, Homo sapiens
  Payload ID: 11477
  Gene Symbol: NOL4
  Gene Name: nucleolar protein 4
  Uniprot ID: O94818
  ENSP ID: ENSP00000465450
MESERDMYRQFQDWCLRTYGDSGKTKTVTRKKYERIVQLLNGSESSSTDNAKFKFWVKSKGFQLGQPDEVRGGGGGAKQVLYVPVKTTDGVGVDEKLSLRRVAVVEDFFDIIYSMHVETGPNGEQIRKHAGQKRTYKAISESYAFLPREAVTRFLMSCSECQKRMHLNPDGTDHKDNGKPPTLVTSMIDYNMPITMAYMKHMKLQLLNSQQDEDESSIESDEFDMSDSTRMSAVNSDLSSNLEERMQSPQNLHGQQDDDSAAESFNGNETLGHSSIASGGTHSREMGDSNSDGKTGLEQDEQPLNLSDSPLSAQLTSEYRIDDHNSNGKNKYKNLLISDLKMEREARENGSKSPAHSYSSYDSGKNESVDRGAEDLSLNRGDEDEDDHEDHDDSEKVNETDGVEAERLKAFNDESAPADKQCKPEATQATYSTSAVPGSQDVLYINGNGTYSYHSYRGLGGGLLNLNDASSSGPTDLSMKRQLATSSGSSSSSNSRPQLSPTEINAVRQLVAGYRESAAFLLRSADELENLILQQN

SEQ ID NO: 58723 - protein, 219 aa, Homo sapiens
  Payload ID: 11477
  Gene Symbol: NOL4
  Gene Name: nucleolar protein 4
  ENSP ID: ENSP00000467015
MDQTMLDDSAAESFNGNETLGHSSIASGGTHSREMGDSNSDGKTGLEQDEQPLNLSDSPLSAQLTSEYRIDDHNSNGKNKYKNLLISDLKMEREARENGSKSPAHSYSSYDSGKNESVDRGAEDLSLNRGDEDEDDHEDHDDSEKVNETDGVEAERLKAFNSRPIPSHLTSAVAESILASACESESRNAAKRMRLERQQDESAPADKQCKPEATQATYS

SEQ ID NO: 58724 - protein, 69 aa, Homo sapiens
  Payload ID: 11477
  Gene Symbol: NOL4
  Gene Name: nucleolar protein 4
  ENSP ID: ENSP00000467326
MADLMQETFLHHATDGVGVDEKLSLRRVAVVEDFFDIIYSMHVETGPNGEQIRKHAGQKRTYKAGPREI

SEQ ID NO: 58725 - protein, 558 aa, Homo sapiens
  Payload ID: 11477
  Gene Symbol: NOL4
  Gene Name: nucleolar protein 4
  ENSP ID: ENSP00000467629
RTYGDSGKTKTVTRKKYERIVQLLNGSESSSTDNAKFKFWVKSKGFQLGQPDEVRGGGGGAKQVLYVPVKTTDGVGVDEKLSLRRVAVVEDFFDIIYSMHVETGPNGEQIRKHAGQKRTYKAISESYAFLPREAVTRFLMSCSECQKRMHLNPDGTDHKDNGKPPTLVTSMIDYNMPITMAYMKHMKLQLLNSQQDEDESSIESDEFDMSDSTRMSAVNSDLSSNLEERMQSPQNLHGQQDDDSAAESFNGNETLGHSSIASGGTHSREMGDSNSDGKTGLEQDEQPLNLSDSPLSAQLTSEYRIDDHNSNGKNKYKNLLISDLKMEREARENGSKSPAHSYSSYDSGKNESVDRGAEDLSLNRGDEDEDDHEDHDDSEKVNETDGVEAERLKAFNSRPIPSHLTSAVAESILASACESESRNAAKRMRLERQQDESAPADKQCKPEATQATYSTSAVPGSQDVLYINGNGTYSYHSYRGLGGGLLNLNDASSSGPTDLSMKRQLATSSGSSSSSNSRPQLSPTEINAVRQLVAGYRESAAFLLRSADELENLILQQN

SEQ ID NO: 58726 - protein, 175 aa, Homo sapiens
  Payload ID: 11478
  Gene Symbol: NOL4L
  Gene Name: nucleolar protein 4-like
  ENSP ID: ENSP00000201961
MGQVVYVPVKTGSGADGLSEPEGISLKRVAVVEDFFDIIYSMHVESSAEPGKAPKHAGQKKTYRAIAETYAFLPREAVTRFLMSCTECQKRMHFNSNGLEPKENEPPSPLVSGIIDYNMPLTSTYLKQMKLRVMNSQEQCLPSGAEDIMSGGPTLEAAEFDDLIGKCLPDRPIAE

SEQ ID NO: 58727 - protein, 91 aa, Homo sapiens
  Payload ID: 11478
  Gene Symbol: NOL4L
  Gene Name: nucleolar protein 4-like
  ENSP ID: ENSP00000317413
MSDSTWMSADPHLASSLSPSQDERMRSPQNLHSQEDGPHRLSHLSQGLNIICSLDTSLRARNPRVSAERNDFSFRGRSRCVTSNSLAKDGY

SEQ ID NO: 58728 - protein, 436 aa, Homo sapiens
  Payload ID: 11478
  Gene Symbol: NOL4L
  Gene Name: nucleolar protein 4-like
  Uniprot ID: Q96MY1
  ENSP ID: ENSP00000352704
MSDSTWMSADPHLASSLSPSQDERMRSPQNLHSQEDDDSSSESGSGNGSSTLNPSTSSSTQGDPAFPEMNGNGAVAPMDFTTAAEDQPINLCDKLPPATALGTASYPSDGCGADGLRSRVKYGVKTTPESPPYSSGSYDSIKTEVSGCPEDLTVGRAPTADDDDDDHDDHEDNDKMNDSEGMDPERLKAFNMFVRLFVDENLDRMVPISKQPKEKIQAIIESCSRQFPEFQERARKRIRTYLKSCRRMKKNGMEMTRPTPPHLTSAMAENILAAACESETRKAAKRMRLEIYQSSQDEPIALDKQHSRDSAAITHSTYSLPASSYSQDPVYANGGLNYSYRGYGALSSNLQPPASLQTGNHSNGPTDLSMKGGASTTSTTPTPTPSSTSTSRPVPTAQLSPTEISAVRQLIAGYRESAAFLLRSADELENLILQQN

SEQ ID NO: 58729 - protein, 113 aa, Homo sapiens
  Payload ID: 11478
  Gene Symbol: NOL4L
  Gene Name: nucleolar protein 4-like
  ENSP ID: ENSP00000364829
MKLRVMNSQEQDETSVSSEDFDMSDSTWMSADPHLASSLSPSQDERMRSPQNLHSQEDGPHRLSHLSQGLNIICSLDTSLRARNPRVSAERNDFSFRGRSRCVTSNSLAKDGY

SEQ ID NO: 58730 - protein, 155 aa, Homo sapiens
  Payload ID: 11478
  Gene Symbol: NOL4L
  Gene Name: nucleolar protein 4-like
  ENSP ID: ENSP00000364830
MHVESSAEPGKAPKHAGQKKTYRAIAETYAFLPREAVTRFLMSCTECQKRMHFNSNGLEPKENEPPSPLVSGIIDYNMPLTSTYLKQMKLRVMNSQEQDETSVSSEDFDMSDSTWMSADPHLASSLSPSQDERMRSPQNLHSQEDGGVCLQGPTA

SEQ ID NO: 58731 - protein, 76 aa, Homo sapiens
  Payload ID: 11478
  Gene Symbol: NOL4L
  Gene Name: nucleolar protein 4-like
  ENSP ID: ENSP00000410774
  MOD_RES (1)..(1): Any amino acid
XQKRMHFNSNGLEPKENEPPSPLVSGIIDYNMPLTSTYLKQMKLRVMNSQEQPSSLSPAPGFVNTVITVLICAHEE

SEQ ID NO: 58732 - protein, 400 aa, Homo sapiens [sequence omitted]

SEQ ID NO: 58733 - protein, 680 aa, Homo sapiens
  Payload ID: 11478
  Gene Symbol: NOL4L
  Gene Name: nucleolar protein 4-like
  ENSP ID: ENSP00000483523
MPKPTLLLRGGWERERSPGDSELGRQFRDWCLRTYGDSAKTKTVTRSKYQRIAEVLQGGGGTGAGSGPAAGEKGKFQFWVRSKGFRLGSGREPKMGQVVYVPVKTGSGADGLSEPEGISLKRVAVVEDFFDIIYSMHVESSAEPGKAPKHAGQKKTYRAIAETYAFLPREAVTRFLMSCTECQKRMHFNSNGLEPKENEPPSPLVSGIIDYNMPLTSTYLKQMKLRVMNSQEQDETSVSSEDFDMSDSTWMSADPHLASSLSPSQDERMRSPQNLHSQEDDDSSSESGSGNGSSTLNPSTSSSTQGDPAFPEMNGNGAVAPMDFTTAAEDQPINLCDKLPPATALGTASYPSDGCGADGLRSRVKYGVKTTPESPPYSSGSYDSIKTEVSGCPEDLTVGRAPTADDDDDDHDDHEDNDKMNDSEGMDPERLKAFNMFVRLFVDENLDRMVPISKQPKEKIQAIIESCSRQFPEFQERARKRIRTYLKSCRRMKKNGMEMTRPTPPHLTSAMAENILAAACESETRKAAKRMRLEIYQSSQDEPIALDKQHSRDSAAITHSTYSLPASSYSQDPVYANGGLNYSYRGYGALSSNLQPPASLQTGNHSNGPTDLSMKGGASTTSTTPTPTPSSTSTSRPVPTAQLSPTEISAVRQLIAGYRESAAFLLRSADELENLILQQN

SEQ ID NO: 58734 - protein, 1146 aa, Homo sapiens
  Payload ID: 11479
  Gene Symbol: NOL6
  Gene Name: nucleolar protein 6 (RNA-associated)
  Uniprot ID: Q9H6R4
  ENSP ID: ENSP00000297990
MGPAPAGEQLRGATGEPEVMEPALEGTGKEGKKASSRKRTLAEPPAKGLLQPVKLSRAELYKEPTNEELNRLRETEILFHSSLLRLQVEELLKEVRLSEKKKDRIDAFLREVNQRVVRVPSVPETELTDQAWLPAGVRVPLHQVPYAVKGCFRFLPPAQVTVVGSYLLGTCIRPDINVDVALTMPREILQDKDGLNQRYFRKRALYLAHLAHHLAQDPLFGSVCFSYTNGCHLKPSLLLRPRGKDERLVTVRLHPCPPPDFFRPCRLLPTKNNVRSAWYRGQSPAGDGSPEPPTPRYNTWVLQDTVLESHLQLLSTILSSAQGLKDGVALLKVWLRQRELDKGQGGFTGFLVSMLVVFLVSTRKIHTTMSGYQVLRSVLQFLATTDLTVNGISLCLSSDPSLPALADFHQAFSVVFLDSSGHLNLCADVTASTYHQVQHEARLSMMLLDSRADDGFHLLLMTPKPMIRAFDHVLHLRPLSRLQAACHRLKLWPELQDNGGDYVSAALGPLTTLLEQGLGARLNLLAHSRPPVPEWDISQDPPKHKDSGTLTLGLLLRPEGLTSVLELGPEADQPEAAKFRQFWGSRSELRRFQDGAIREAVVWEAASMSQKRLIPHQVVTHLLALHADIPETCVHYVGGPLDALIQGLKETSSTGEEALVAAVRCYDDLSRLLWGLEGLPLTVSAVQGAHPVLRYTEVFPPTPVRPAFSFYETLRERSSLLPRLDKPCPAYVEPMTVVCHLEGSGQWPQDAEAVQRVRAAFQLRLAELLTQQHGLQCRATATHTDVLKDGFVFRIRVAYQREPQILKEVQSPEGMISLRDTAASLRLERDTRQLPLLTSALHGLQQQHPAFSGVARLAKRWVRAQLLGEGFADESLDLVAAALFLHPEPFTPPSSPQVGFLRFLFLVSTFDWKNNPLFVNLNNELTVEEQVEIRSGFLAARAQLPVMVIVTPQDRKNSVWTQDGPSAQILQQLVVLAAEALPMLEKQLMDPRGPGDIRTVFRPPLDIYDVLIRLSPRHIPRHRQAVDSPAASFCRGLLSQPGPSSLMPVLGYDPPQLYLTQLREAFGDLALFFYDQHGGEVIGVLWKPTSFQPQPFKASSTKGRMVMSRGGELVMVPNVEAILEDFAVLGEGLVQTVEARSERWTV

SEQ ID NO: 58735 - protein, 699 aa, Homo sapiens
  Payload ID: 11479
  Gene Symbol: NOL6
  Gene Name: nucleolar protein 6 (RNA-associated)
  Uniprot ID: Q9H6R4
  ENSP ID: ENSP00000313978
MGPAPAGEQLRGATGEPEVMEPALEGTGKEGKKASSRKRTLAEPPAKGLLQPVKLSRAELYKEPTNEELNRLRETEILFHSSLLRLQVEELLKEVRLSEKKKDRIDAFLREVNQRVVRVPSVPETELTDQAWLPAGVRVPLHQVPYAVKGCFRFLPPAQVTVVGSYLLGTCIRPDINVDVALTMPREILQDKDGLNQRYFRKRALYLAHLAHHLAQDPLFGSVCFSYTNGCHLKPSLLLRPRGKDERLVTVRLHPCPPPDFFRPCRLLPTKNNVRSAWYRGQSPAGDGSPEPPTPRYNTWVLQDTVLESHLQLLSTILSSAQGLKDGVALLKVWLRQRELDKGQGGFTGFLVSMLVVFLVSTRKIHTTMSGYQVLRSVLQFLATTDLTVNGISLCLSSDPSLPALADFHQAFSVVFLDSSGHLNLCADVTASTYHQVQHEARLSMMLLDSRADDGFHLLLMTPKPMIRAFDHVLHLRPLSRLQAACHRLKLWPELQDNGGDYVSAALGPLTTLLEQGLGARLNLLAHSRPPVPEWDISQDPPKHKDSGTLTLGLLLRPEGLTSVLELGPEADQPEAAKFRQFWGSRSELRRFQDGAIREAVVWEAASMSQKRLIPHQVVTHLLALHADIPETCVHYVGGPLDALIQGLKEASSTKGRMVMSRGGELVMVPNVEAILEDFAVLGEGLVQTVEARSERWTV

SEQ ID NO: 58736 - protein, 200 aa, Homo sapiens
  Payload ID: 11479
  Gene Symbol: NOL6
  Gene Name: nucleolar protein 6 (RNA-associated)
  ENSP ID: ENSP00000368783
MVIVTPQDRKNSVWTQDGPSAQILQQLVVLAAEALPMLEKQLMDPRGPGDIRTVFRPPLDIYDVLIRLSPRHIPRHRQAVDSPAASFCRGLLSQPGPSSLMPVLGYDPPQLYLTQLREAFGDLALFFYDQHGGEVIGVLWKPTSFQPQPFKASSTKGRMVMSRGGELVMVPNVEAILEDFAVLGEGLVQTVEARSERWTV

SEQ ID NO: 58737 - protein, 1008 aa, Homo sapiens
  Payload ID: 11479
  Gene Symbol: NOL6
  Gene Name: nucleolar protein 6 (RNA-associated)
  ENSP ID: ENSP00000368784
MGPAPAGEQLRGATGEPEVMEPALEGTGKEGKKASSRKRTLAEPPAKGLLQPVKLSRAELYKEPTNEELNRLRETEILFHSSLLRLQVEELLKEVRLSEKKKDRIDAFLREVNQRVVRVPSVPETELTDQAWLPAGVRVPLHQVPYAVKGCFRFLPPAQVTVVGSYLLGTCIRPDINVDVALTMPREILQDKDGLNQRYFRKRALYLAHLAHHLAQDPLFGSVCFSYTNGCHLKPSLLLRPRGKDERLVTVRLHPCPPPDFFRPCRLLPTKNNVRSAWYRGQSPAGDGSPEPPTPRYNTWVLQDTVLESHLQLLSTILSSAQGLKDGVALLKVWLRQRELDKGQGGFTGFLVSMLVVFLVSTRKIHTTMSGYQVLRSVLQFLATTDLTVNGISLCLSSDPSLPALADFHQAFSVVFLDSSGHLNLCADVTASTYHQVQHEARLSMMLLDSRADDGFHLLLMTPKPMIRAFDHVLHLRPLSRLQAACHRLKLWPELQDNGGDYVSAALGPLTTLLEQGLGARLNLLAHSRPPVPEWDISQDPPKHKDSGTLTLGLLLRPEGLTSVLELGPEADQPEAAKFRQFWGSRSELRRFQDGAIREAVVWEAASMSQKRLIPHQVVTHLLALHADIPETCVHYVGGPLDALIQGLKETSSTGEEALVAAVRCYDDLSRLLWGLEGLPLTVSAVQGAHPVLRYTEVFPPTPVRPAFSFYETLRERSSLLPRLDKPCPAYVEPMTVVCHLEGSGQWPQDAEAVQRVRAAFQLRLAELLTQQHGLQCRATATHTDVLKDGFVFRIRVAYQREPQILKEVQSPEGMISLRDTAASLRLERDTRQLPLLTSALHGLQQQHPAFSGVARLAKRWVRAQLLGEGFADESLDLVAAALFLHPEPFTPPSSPQVGFLRFLFLVSTFDWKNNPLFVNLNNELTVEEQVEIRSGFLAARAQLPVMVIVTPQDRKNSVWTQDGPSAQILQQLVVLAAEALPMLEKQLMDPRGPGDIRMGPSENVALL

SEQ ID NO: 58738 - protein, 83 aa, Homo sapiens
  Payload ID: 11480
  Gene Symbol: NOL7
  Gene Name: nucleolar protein 7, 27kDa
  ENSP ID: ENSP00000404836
  MOD_RES (1)..(1): Any amino acid
XPEELTFASAQAEAREEERRVRETVRRDKTLLKEKRKRREELFIEQKKRKLLPDTILEKLTTASQTNIKKSPGKVKEGMTILI

SEQ ID NO: 58739 - protein, 257 aa, Homo sapiens
  Payload ID: 11480
  Gene Symbol: NOL7
  Gene Name: nucleolar protein 7, 27kDa
  Uniprot ID: Q9UMY1
  ENSP ID: ENSP00000405674
MVQLRPRASRAPASAEAMVDEGQLASEEEEAEHGLLLGQPSSGAAAEPLEEDEEGDDEFDDEAPEELTFASAQAEAREEERRVRETVRRDKTLLKEKRKRREELFIEQKKRKLLPDTILEKLTTASQTNIKKSPGKVKEVNLQKKNEDCEKGNDSKKVKVQKVQSVSQNKSYLAVRLKDQDLRDSRQQAAQAFIHNSLYGPGTNRTTVNKFLSLANKRLPVKRAAVQFLNNAWGIQKKQNAKRFKRRWMVRKMKTKK

SEQ ID NO: 58740 - protein, 1099 aa, Homo sapiens
  Payload ID: 11481
  Gene Symbol: NOL8
  Gene Name: nucleolar protein 8
  Uniprot ID: Q76FK4
  ENSP ID: ENSP00000351723
MSVLNKTKWKGGTLQIQLAKESFLHRLAQEREAAKAKKEESTTGNANLLEKTGGVDFHMKAVPGTEVPGHKNWVVSKFGRVLPVLHLKNQHKRKIIKYDPSKYCHNLKKIGEDFSNTIPISSLTWELEGGNDPMSKKRRGEFSDFHGPPKKIIKVQKDESSTGSLAMSTRPRRVIERPPLTQQQAAQKRTCDSITPSKSSPVPVSDTQKLKNLPFKTSGLETAKKRNSISDDDTDSEDELRMMIAKEENLQRTTQPSINESESDPFEVVRDDFKSGVHKLHSLIGLGIKNRVSCHDSDDDIMRNDREYDSGDTDEIIAMKKNVAKVKNSTEFSQMEKSTKKTSFKNRENCELSDHCIKLQKRKSNVESALSHGLKSLNRKSPSHSSSSEDADSASELADSEGGEEYNAMMKNCLRVNLTLADLEQLAGSDLKVPNEDTKSDGPETTTQCKFDRGSKSPKTPTGLRRGRQCIRPAEIVASLLEGEENTCGKQKPKENNLKPKFQAFKGVGCLYEKESMKKSLKDSVASNNKDQNSMKHEDPSIISMEDGSPYVNGSLGEVTPCQHAKKANGPNYIQPQKRQTTFESQDRKAVSPSSSEKRSKNPISRPLEGKKSLSLSAKTHNIGFDKDSCHSTTKTEASQEERSDSSGLTSLKKSPKVSSKDTREIKTDFSLSISNSSDVSAKDKHAEDNEKRLAALEARQKAKEVQKKLVHNALANLDGHPEDKPTHIIFGSDSECETEETSTQEQSHPGEEWVKESMGKTSGKLFDSSDDDESDSEDDSNRFKIKPQFEGRAGQKLMDLQSHFGTDDRFRMDSRFLETDSEEEQEEVNEKKTAEEEELAEEKKKALNVVQSVLQINLSNSTNRGSVAAKKFKDIIHYDPTKQDHATYERKRDDKPKESKAKRKKKREEAEKLPEVSKEMYYNIAMDLKEIFQTTKYTSEKEEGTPWNEDCGKEKPEEIQDPAALTSDAEQPSGFTFSFFDSDTKDIKEETYRVETVKPGKIVWQEDPRLQDSSSEEEDVTEETDHRNSSPGEASLLEKETTRFFFFSKNDERLQGSDLFWRGVGSNMSRNSWEARTTNLRMDCRKKHKDAKRKMKPK

SEQ ID NO: 58741 - protein, 86 aa, Homo sapiens
  Payload ID: 11481
  Gene Symbol: NOL8
  Gene Name: nucleolar protein 8
  ENSP ID: ENSP00000354115
MKVNRETKRLYVGGLSQDISEADLQNQFSRFGEVSDVEIITRKDDQGNPQKVFAYINISVAEADLKKSIFHVIQRDSSDEENSSIV

SEQ ID NO: 58742 - protein, 146 aa, Homo sapiens
  Payload ID: 11481
  Gene Symbol: NOL8
  Gene Name: nucleolar protein 8
  ENSP ID: ENSP00000388335
MSVLNKTKWKGGTLQIQLAKESFLHRLAQEREAAKAKKEESTTGNANLLEKTGGVDFHMKAVPGTEVPGHKNWVVSKFGRVLPVLHLKNQHKRKIIKYDPSKYCHNLKKIGEDFSNTIPISSLTWELEGGNDPMSKKRRGEFSDFH

SEQ ID NO: 58743 - protein, 257 aa, Homo sapiens
  Payload ID: 11481
  Gene Symbol: NOL8
  Gene Name: nucleolar protein 8
  ENSP ID: ENSP00000390143
MKVNRETKRLYVGGLSQDISEADLQNQFSRFGEVSDVEIITRKDDQGNPQKVFAYINISVAEADLKKCMSVLNKTKWKGGTLQIQLAKESFLHRLAQEREAAKAKKEESTTGNANLLEKTGGVDFHMKAVPGTEVPGHKNWVVSKFGRVLPVLHLKNQHKRKIIKYDPSKYCHNLKKIGEDFSNTIPISSLTWELEGGNDPMSKKRRGEFSDFHGPPKKIIKVQKDESSTGSLAMSTRPRRVIERPPLTQQQAAQKR

SEQ ID NO: 58744 - protein, 101 aa, Homo sapiens
  Payload ID: 11481
  Gene Symbol: NOL8
  Gene Name: nucleolar protein 8
  ENSP ID: ENSP00000390791
MKVNRETKRLYVGGLSQDISEADLQNQFSRFGEVSDVEIITRKDDQGNPQKVFAYINISVAEADLKKCMSVLNKTKWKGGTLQIQLAKESFLHRRIWIIKT

SEQ ID NO: 58745 - protein, 1167 aa, Homo sapiens
  Payload ID: 11481
  Gene Symbol: NOL8
  Gene Name: nucleolar protein 8
  Uniprot ID: Q76FK4
  ENSP ID: ENSP00000401177
MKVNRETKRLYVGGLSQDISEADLQNQFSRFGEVSDVEIITRKDDQGNPQKVFAYINISVAEADLKKCMSVLNKTKWKGGTLQIQLAKESFLHRLAQEREAAKAKKEESTTGNANLLEKTGGVDFHMKAVPGTEVPGHKNWVVSKFGRVLPVLHLKNQHKRKIIKYDPSKYCHNLKKIGEDFSNTIPISSLTWELEGGNDPMSKKRRGEFSDFHGPPKKIIKVQKDESSTGSLAMSTRPRRVIERPPLTQQQAAQKRTCDSITPSKSSPVPVSDTQKLKNLPFKTSGLETAKKRNSISDDDTDSEDELRMMIAKEENLQRTTQPSINESESDPFEVVRDDFKSGVHKLHSLIGLGIKNRVSCHDSDDDIMRNDREYDSGDTDEIIAMKKNVAKVKNSTEFSQMEKSTKKTSFKNRENCELSDHCIKLQKRKSNVESALSHGLKSLNRKSPSHSSSSEDADSASELADSEGGEEYNAMMKNCLRVNLTLADLEQLAGSDLKVPNEDTKSDGPETTTQCKFDRGSKSPKTPTGLRRGRQCIRPAEIVASLLEGEENTCGKQKPKENNLKPKFQAFKGVGCLYEKESMKKSLKDSVASNNKDQNSMKHEDPSIISMEDGSPYVNGSLGEVTPCQHAKKANGPNYIQPQKRQTTFESQDRKAVSPSSSEKRSKNPISRPLEGKKSLSLSAKTHNIGFDKDSCHSTTKTEASQEERSDSSGLTSLKKSPKVSSKDTREIKTDFSLSISNSSDVSAKDKHAEDNEKRLAALEARQKAKEVQKKLVHNALANLDGHPEDKPTHIIFGSDSECETEETSTQEQSHPGEEWVKESMGKTSGKLFDSSDDDESDSEDDSNRFKIKPQFEGRAGQKLMDLQSHFGTDDRFRMDSRFLETDSEEEQEEVNEKKTAEEEELAEEKKKALNVVQSVLQINLSNSTNRGSVAAKKFKDIIHYDPTKQDHATYERKRDDKPKESKAKRKKKREEAEKLPEVSKEMYYNIAMDLKEIFQTTKYTSEKEEGTPWNEDCGKEKPEEIQDPAALTSDAEQPSGFTFSFFDSDTKDIKEETYRVETVKPGKIVWQEDPRLQDSSSEEEDVTEETDHRNSSPGEASLLEKETTRFFFFSKNDERLQGSDLFWRGVGSNMSRNSWEARTTNLRMDCRKKHKDAKRKMKPK

SEQ ID NO: 58746 - protein, 413 aa, Homo sapiens
  Payload ID: 11481
  Gene Symbol: NOL8
  Gene Name: nucleolar protein 8
  ENSP ID: ENSP00000412471
MKVNRETKRLYVGGLSQDISEADLQNQFSRFGEVSDVEIITRKDDQGNPQKVFAYINISVAEADLKKCMSVLNKTKWKGGTLQIQLAKESFLHRLAQEREAAKAKKEESTTGNANLLEKTGGVDFHMKAVPGTEVPGHKNWVVSKFGRVLPVLHLKNQHKRKIIKYDPSKYCHNLKKIGEDFSNTIPISSLTWELEGGNDPMSKKRRGEFSDFHGPPKKIIKVQKDESSTGSLAMSTRPRRVIERPPLTQQQAAQKRTCDSITPSKSSPVPVSDTQKLKNLPFKTSGLETAKKRNSISDDDTDSEDELRMMIAKEENLQRTTQPSINESESDPFEVVRDDFKSGVHKLHSLIGLGIKNRVSCHDSDDDIMRNDREYDSGDTDEIIAMKKNVAKVKNSTEFSQMEKSTKKTSFK

SEQ ID NO: 58747 - protein, 969 aa, Homo sapiens
  Payload ID: 11481
  Gene Symbol: NOL8
  Gene Name: nucleolar protein 8
  ENSP ID: ENSP00000414112
MKVNRETKRLYVGGLSQDISEADLQNQFSRFGEVSDVEIITRKDDQGNPQKVFAYINISVAEADLKKCMSVLNKTKWKGGTLQIQLAKESFLHRLAQEREAAKAKKEESTTGNANLLEKTGGVDFHMKAVPGTEVPGHKNWVVSKFGRVLPVLHLKNQHKRKIIKYDPSKYCHNLKKIGEDFSNTIPISSLTWELEGGNDPMSKKRRGEFSDFHGPPKKIIKVQKDESSTGSLAMSTRPRRVIERPPLTQQQAAQKRTCDSITPSKSSPVPVSDTQKLKNLPFKTSGLETAKKRNSISDDDTDSEDELRMMIAKEENLQRTTQPSINESESDPFEVVRDDFKSGVHKLHSLIGLGIKNRVSCHDSDDDIMRNDREYDSGDTDEIIAMKKNVAKVKNSTEFSQMEKSTKKTSFKNRENCELSDHCIKLQKRKSNVESALSHGLKSLNRKSPSHSSSSEDADSASELADSEGGEEYNAMMKNCLRVNLTLADLEQLAGSDLKVPNEDTKSDGPETTTQCKFDRGSKSPKTPTGLRRGRQCIRPAEIVASLLEGEENTCGKQKPKENNLKPKFQAFKGVGCLYEKESMKKSLKDSVASNNKDQNSMKHEDPSIISMEDGSPYVNGSLGEVTPCQHAKKANGPNYIQPQKRQTTFESQDRKAVSPSSSEKRSKNPISRPLEGKKSLSLSAKTHNIGFDKDSCHSTTKTEASQEERSDSSGLTSLKKSPKVSSKDTREIKTDFSLSISNSSDVSAKDKHAEDNEKRLAALEARQKAKEVQKKLVHNALANLDGHPEDKPTHIIFGSDSECETEETSTQEQSHPGEEWVKESMGKTSGKLFDSSDDDESDSEDDSNRFKIKPQFEGRAGQKLMDLQSHFGTDDRFRMDSRFLETDSEEEQEEVNEKKTAEEEELAEEKKKALNVVQSVLQINLSNSTNRGSVAAKKFKDIIHYDPTKQDHATYERKRDDKPKESK

SEQ ID NO: 58748 - protein, 86 aa, Homo sapiens; identical to SEQ ID NO: 58741
  Payload ID: 11481
  Gene Symbol: NOL8
  Gene Name: nucleolar protein 8
  ENSP ID: ENSP00000415750

SEQ ID NO: 58749 - protein, 86 aa, Homo sapiens; identical to SEQ ID NO: 58741
  Payload ID: 11481
  Gene Symbol: NOL8
  Gene Name: nucleolar protein 8
  ENSP ID: ENSP00000437615

SEQ ID NO: 58750 - protein, 1085 aa, Homo sapiens
  Payload ID: 11481
  Gene Symbol: NOL8
  Gene Name: nucleolar protein 8
  ENSP ID: ENSP00000439751
MKVNRETKRLYVGGLSQDISEADLQNQFSRFGEVSDVEIITRKDDQGNPQKVFAYINISVAEADLKKCMSVLNKTKWKGGTLQIQLAKESFLHRLAQEREAAKAKKEESTTGNANLLEKTGGVDFHMKAVPGTEVPGHKNWVVSKFGRVLPVLHLKNQHKRKIIKYDPSKYCHNLKKIGEDFSNTIPISSLTWELEGGNDPMSKKRRGEFSDFHGPPKKIIKVQKDESSTGSLAMSTRPRRVIERPPLTQQQAAQKRTCDSITPSKSSPVPVSDTQKLKNLPFKTSGLETAKKRNSISDDDTDSEDELRMMIAKEENLQRTTQPSINESESDPFEVVRDDFKSGVHKLHSLIGLGIKNRVSCHDSDDDIMRNDREYDSGDTDEIIAMKKNVAKVKNSTEFSQMEKSTKKTSFKNRENCELSDHCIKLQKRKSNVESALSHGLKSLNRKSPSHSSSSEDADSASELADSEGGEEYNAMMKNCLRVNLTLADLEQLAGSDLKVPNEDTKSDGPETTTQCKFDRGSKSPKTPTGLRRGRQCIRPAEIVASLLEGEENTCGKQKPKENNLKPKFQAFKGVGCLYEKESMKKSLKDSVASNNKDQNSMKHEDPSIISMEDGSPYVNGSLGEVTPCQHAKKANGPNYIQPQKRQTTFESQDRKAVSPSSSEKRSKNPISRPLEGKKSLSLSAKTHNIGFDKDSCHSTTKTEASQEERSDSSGLTSLKKSPKVSSKDTREIKTDFSLSISNSSDVSAKDKHAEDNEKRLAALEARQKAKEVQKKLVHNALANLDGHPEDKPTHIIFGSDSECETEETSTQEQSHPGEEWVKESMGKTSGKLFDSSDDDESDSEDDSNRFKIKPQFEGRAGQKLMDLQSHFGTDDRFRMDSRFLETDSEEEQEEVNEKKTAEEEELAEEKKKALNVVQSVLQINLSNSTNRGSVAAKKFKDIIHYDPTKQDHATYERKRDDKPKESKAKRKKKREEAEKLPEVSKEMYYNIAMDLKEIFQTTKYTSEKEEGTPWNEDCGKEKPEEIQDPAALTSDAEQPSGFTFSFFDSDTKDIKEDRVSVTQAGVQWCNLGSLADNTNSVVL

SEQ ID NO: 58751 - protein, 130 aa, Homo sapiens
  Payload ID: 11481
  Gene Symbol: NOL8
  Gene Name: nucleolar protein 8
  ENSP ID: ENSP00000439829
MKVNRETKRLYVGGLSQDISEADLQNQFSRFGEVSDVEIITRKDDQGNPQKVFAYINISVAEADLKKCMSVLNKTKWKGGTLQIQLAKESFLHRMVIQRISQRTSSSVLTVNVKQRRHRLRSRAIQERNG

SEQ ID NO: 58752 - protein, 86 aa, Homo sapiens; identical to SEQ ID NO: 58741
  Payload ID: 11481
  Gene Symbol: NOL8
  Gene Name: nucleolar protein 8
  ENSP ID: ENSP00000440342

SEQ ID NO: 58753 - protein, 1099 aa, Homo sapiens; identical to SEQ ID NO: 58740
  Payload ID: 11481
  Gene Symbol: NOL8
  Gene Name: nucleolar protein 8
  Uniprot ID: Q76FK4
  ENSP ID: ENSP00000440709

SEQ ID NO: 58754 - protein, 1167 aa, Homo sapiens; identical to SEQ ID NO: 58745
  Payload ID: 11481
  Gene Symbol: NOL8
  Gene Name: nucleolar protein 8
  Uniprot ID: Q76FK4
  ENSP ID: ENSP00000441140

SEQ ID NO: 58755 - protein, 1129 aa, Homo sapiens
  Payload ID: 11481
  Gene Symbol: NOL8
  Gene Name: nucleolar protein 8
  Uniprot ID: Q76FK4
  ENSP ID: ENSP00000441300
MKVNRETKRLYVGGLSQDISEADLQNQFSRFGEVSDVEIITRKDDQGNPQKVFAYINISVAEADLKKCMSVLNKTKWKGGTLQIQLAKESFLHRLAQEREAAKAKKEESTTGNANLLEKTGGVDFHMKAVPGTEVPGHKNWVVSKFGRVLPVLHLKNQHKRKIIKYDPSKYCHNLKKIGEDFSNTIPISSLTWELEGGNDPMSKKRRGEFSDFHGPPKKIIKVQKDESSTGSLAMSTRPRRVIERPPLTQQQAAQKRTCDSITPSKSSPVPVSDTQKLKNLPFKTSGLETAKKRNSISDDDTDSEDELRMMIAKEENLQRTTQPSINESESDPFEVVRDDFKSGVHKLHSLIGLGIKNRVSCHDSDDDIMRNDREYDSGDTDEIIAMKKNVAKVKNSTEFSQMEKSTKKTSFKNRENCELSDHCIKLQKRKSNVESALSHGLKSLNRKSPSHSSSSEDADSASELADSEGGEEYNAMMKNCLRVNLTLADLEQLAGSDLKVPNEDTKSDGPETTTQCKFDRGSKSPKTPTGLRRGRQCIRPAEIVASLLEGEENTCGKQKPKENNLKPKFQAFKGVGCLYEKESMKKSLKDSVASNNKDQNSMKHEDPSIISMEDGSPYVNGSLGEVTPCQHAKKANGPNYIQPQKRQTTFESQDRKAVSPSSSEKRSKNPISRPLEGKKSLSLSAKTHNIGFDKDSCHSTTKTEASQEERSDSSGLTSLKKSPKVSSKDTREIKTDFSLSISNSSDVSAKDKHAEDNEKRLAALEARQKAKEVQKKLVHNALANLESMGKTSGKLFDSSDDDESDSEDDSNRFKIKPQFEGRAGQKLMDLQSHFGTDDRFRMDSRFLETDSEEEQEEVNEKKTAEEEELAEEKKKALNVVQSVLQINLSNSTNRGSVAAKKFKDIIHYDPTKQDHATYERKRDDKPKESKAKRKKKREEAEKLPEVSKEMYYNIAMDLKEIFQTTKYTSEKEEGTPWNEDCGKEKPEEIQDPAALTSDAEQPSGFTFSFFDSDTKDIKEETYRVETVKPGKIVWQEDPRLQDSSSEEEDVTEETDHRNSSPGEASLLEKETTRFFFFSKNDERLQGSDLFWRGVGSNMSRNSWEARTTNLRMDCRKKHKDAKRKMKPK

SEQ ID NO: 58756 - protein, 145 aa, Homo sapiens
  Payload ID: 11481
  Gene Symbol: NOL8
  Gene Name: nucleolar protein 8
  ENSP ID: ENSP00000442037
MKVNRETKRLYVGGLSQDISEADLQNQFSRFGEVSDVEIITRKDDQGNPQKVFAYINISVAEADLKKCMSVLNKTKWKGGTLQIQLAKESFLHRLAQEREAAKAKKEESTTGNANLLEKTGGVDFHMKAVPGTEVPGHKNWVVSK

SEQ ID NO: 58757 - protein, 52 aa, Homo sapiens
  Payload ID: 11481
  Gene Symbol: NOL8
  Gene Name: nucleolar protein 8
  ENSP ID: ENSP00000442596
MSVLNKTKWKGGTLQIQLAKESFLHRLAQEREAAKAKKEESTTGNANLLEKT

SEQ ID NO: 58758 - protein, 109 aa, Homo sapiens
  Payload ID: 11481
  Gene Symbol: NOL8
  Gene Name: nucleolar protein 8
  ENSP ID: ENSP00000442666
MSVLNKTKWKGGTLQIQLAKESFLHRLAQEREAAKAKKEESTTGNANLLEKTGGVDFHMKAVPGTEVPGHKNWVVSKFGRVLPVLHLKNQHKRKIIKYDPSKYCHNLKK

SEQ ID NO: 58759 - protein, 86 aa, Homo sapiens; identical to SEQ ID NO: 58741
  Payload ID: 11481
  Gene Symbol: NOL8
  Gene Name: nucleolar protein 8
  ENSP ID: ENSP00000444790

SEQ ID NO: 58760 - protein, 86 aa, Homo sapiens; identical to SEQ ID NO: 58741
  Payload ID: 11481
  Gene Symbol: NOL8
  Gene Name: nucleolar protein 8
  ENSP ID: ENSP00000446265

SEQ ID NO: 58761 - protein, 702 aa, Homo sapiens
  Payload ID: 11482
  Gene Symbol: NOL9
  Gene Name: nucleolar protein 9
  Uniprot ID: Q5SY16
  ENSP ID: ENSP00000366934
MADSGLLLKRGSCRSTWLRVRKARPQLILSRRPRRRLGSLRWCGRRRLRWRLLQAQASGVDWREGARQVSRAAAARRPNTATPSPIPSPTPASEPESEPELESASSCHRPLLIPPVRPVGPGRALLLLPVEQGFTFSGICRVTCLYGQVQVFGFTISQGQPAQDIFSVYTHSCLSIHALHYSQPEKSKKELKREARNLLKSHLNLDDRRWSMQNFSPQCSIVLLEHLKTATVNFITSYPGSSYIFVQESPTPQIKPEYLALRSVGIRREKKRKGLQLTESTLSALEELVNVSCEEVDGCPVILVCGSQDVGKSTFNRYLINHLLNSLPCVDYLECDLGQTEFTPPGCISLLNITEPVLGPPFTHLRTPQKMVYYGKPSCKNNYENYIDIVKYVFSAYKRESPLIVNTMGWVSDQGLLLLIDLIRLLSPSHVVQFRSDHSKYMPDLTPQYVDDMDGLYTKSKTKMRNRRFRLAAFADALEFADEEKESPVEFTGHKLIGVYTDFAFRITPRNRESHNKILRDLSILSYLSQLQPPMPKPLSPLHSLTPYQVPFNAVALRITHSDVAPTHILYAVNASWVGLCKIQDDVRGYTNGPILLAQTPICDCLGFGICRGIDMEKRLYHILTPVPPEELRTVNCLLVGAIAIPHCVLKCQRGIEGTVPYVTTDYNFKLPGASEKIGAREPEEAHKEKPYRRPKFCRKMK

SEQ ID NO: 58762 - protein, 293 aa, Homo sapiens
  Payload ID: 11483
  Gene Symbol: NIFK
  Gene Name: nucleolar protein interacting with the FHA domain of MKI67
  Uniprot ID: Q9BYG3
  ENSP ID: ENSP00000285814
MATFSGPAGPILSLNPQEDVEFQKEVAQVRKRITQRKKQEQLTPGVVYVRHLPNLLDETQIFSYFSQFGTVTRFRLSRSKRTGNSKGYAFVEFESEDVAKIVAETMNNYLFGERLLECHFMPPEKVHKELFKDWNIPFKQPSYPSVKRYNRNRTLTQKLRMEERFKKKERLLRKKLAKKGIDYDFPSLILQKTESISKTNRQTSTKGQVLRKKKKKVSGTLDTPEKTVDSQGPTPVCTPTFLERRKSQVAELNDDDKDDEIVFKQPISCVKEEIQETQTPTHSRKKRRRSSNQ

SEQ ID NO: 58763 - protein, 102 aa, Homo sapiens
  Payload ID: 11483
  Gene Symbol: NIFK
  Gene Name: nucleolar protein interacting with the FHA domain of MKI67
  ENSP ID: ENSP00000390174
LRKKLAKKGIDYDFPSLVLRKKKKKVSGTLDTPEKTVDSQGPTPVCTPTFLERRKSQVAELNDDDKDDEIVFKQPISCVKEEIQETQTPTHSRKKRRRSSNQ

SEQ ID NO: 58764 - protein, 166 aa, Homo sapiens
  Payload ID: 11483
  Gene Symbol: NIFK
  Gene Name: nucleolar protein interacting with the FHA domain of MKI67
  ENSP ID: ENSP00000398116
MATFSGPAGPILSLNPQEDVEFQKEVAQVRKRITQFGTVTRFRLSRSKRTGNSKGYAFVEFESEDVAKIVAETMNNYLFGERLLECHFMPPEKVHKELFKDWNIPFKQPSYPSVKRYNRNRTLTQKLRMEERFKKKERLLRKKLAKKGIDYDFPSLILQKTESISK

SEQ ID NO: 58765 - protein, 164 aa, Homo sapiens
  Payload ID: 11483
  Gene Symbol: NIFK
  Gene Name: nucleolar protein interacting with the FHA domain of MKI67
  ENSP ID: ENSP00000406227
MNNYLFGERLLECHFMPPEKVHKELFKDWNIPFKQPSYPSVKRYNRNRTLTQKLRMEERFKKKERLLRKKLAKKGIDYDFPSLILQKTESISKTNRQTSTKGQVLRKKKKKVSGTLDTPEKTVDSQGPTPVCTPTFLERRKSQVAELNDDDKDDEIVFKQPISC

SEQ ID NO: 58766 - protein, 860 aa, Homo sapiens
  Payload ID: 11484
  Gene Symbol: NOM1
  Gene Name: nucleolar protein with MIF4G domain 1
  Uniprot ID: Q5C9Z4
  ENSP ID: ENSP00000275820
MAASRSAGEAGPGGSQGRVVRMKRRGGRGPRRGPAGGGEKALKRLKLAVEEFVHATSEGEAPGGCEGRGAPVSFRPGGRKSRKELRKEKRHLRKARRLQRTAGPEQGPGLGGRSGAEEASGHRQDTEERARPAPSRDPSPPRKPRPSRVKAKATAATAKTRPSAAATAAARKRALLAANEEEDREIRKLERCLGLNKRKKKDGSSSVPLSFARDGLDYILGALESGKNSGLYDSSGEEEEDAGQTLPESDLESDSQDESEEEEEGDVEKEKKAQEAEAQSEDDDEDTEEEQGEEKEKGAQEKRRGKRVRFAEDEEKSENSSEDGDITDKSLCGSGEKYIPPHVRQAEETVDFKKKEELERLKKHVKGLLNRLSEPNMASISGQLEELYMAHSRKDMNDTLTSALMGACVTASAMPSRLMMEHVLLVSILHHTVGIEVGAHFLEAVVRKFDAIYKYGSEGKECDNLFTVIAHLYNFHVVQSLLIFDILKKLIGTFTEKDIELILLMLKNVGFSLRKDDALSLKELITEAQTKASGAGSEFQDQTRIRFMLETMLALKNNDMRKIPGYDPEPVEKLRKLQRALVRNAGSGSETQLRVSWDSVLSAEQTGRWWIVGSAWSGAPMIDNSHHTHLQKQLVGTVSSKILELARKQRMNTDIRRNIFCTIMTSEDFLDAFEKLLKLGLKDQQEREIIHVLMDCCLQEKTYNPFYAFLASKFCEYERRFQMTFQFSIWDKFRDLENLPATNFSNLVHLVAHLLKTKSLSLSILKVVEFSELDKPRVRFLRKVLSILLMETEVEDLSLIFTRVSDNPKLGVLREGLKLFISHFLLKNAQAHRSADEANVLREKADLATKCLQGKASLRM

SEQ ID NO: 58767 - protein, 710 aa, Homo sapiens
  Payload ID: 11485
  Gene Symbol: NCL
  Gene Name: nucleolin
  Uniprot ID: P19338
  ENSP ID: ENSP00000318195
MVKLAKAGKNQGDPKKMAPPPKEVEEDSEDEEMSEDEEDDSSGEEVVIPQKKGKKAAATSAKKVVVSPTKKVAVATPAKKAAVTPGKKAAATPAKKTVTPAKAVTTPGKKGATPGKALVATPGKKGAAIPAKGAKNGKNAKKEDSDEEEDDDSEEDEEDDEDEDEDEDEIEPAAMKAAAAAPASEDEDDEDDEDDEDDDDDEEDDSEEEAMETTPAKGKKAAKVVPVKAKNVAEDEDEEEDDEDEDDDDDEDDEDDDDEDDEEEEEEEEEEPVKEAPGKRKKEMAKQKAAPEAKKQKVEGTEPTTAFNLFVGNLNFNKSAPELKTGISDVFAKNDLAVVDVRIGMTRKFGYVDFESAEDLEKALELTGLKVFGNEIKLEKPKGKDSKKERDARTLLAKNLPYKVTQDELKEVFEDAAEIRLVSKDGKSKGIAYIEFKTEADAEKTFEEKQGTEIDGRSISLYYTGEKGQNQDYRGGKNSTWSGESKTLVLSNLSYSATEETLQEVFEKATFIKVPQNQNGKSKGYAFIEFASFEDAKEALNSCNKREIEGRAIRLELQGPRGSPNARSQPSKTLFVKGLSEDTTEETLKESFDGSVRARIVTDRETGSSKGFGFVDFNSEEDAKAAKEAMEDGEIDGNKVTLDWAKPKGEGGFGGRGGGRGGFGGRGGGRGGRGGFGGRGRGGFGGRGGFRGGRGGGGDHKPQGKKTKFE

SEQ ID NO: 58768 - protein, 296 aa, Homo sapiens
  Payload ID: 11485
  Gene Symbol: NCL
  Gene Name: nucleolin
  ENSP ID: ENSP00000349410
LPYKVTQDELKEVFEDAAEIRLVSKDGKSKGIAYIEFKTEADAEKTFEEKQGTEIDGRSISLYYTGEKGQNQDYRGGKNSTWSDDSRKTDQSSAYVRTTSRTLQHVLGESKTLVLSNLSYSATEETLQEVFEKATFIKVPQNQNGKSKGYAFIEFASFEDAKEALNSCNKREIEGRAIRLELQGPRGSPNARSQPSKTLFVKGLSEDTTEETLKESFDGSVRARIVTDRETGSSKGFGFVDFNSEEDAKAAKEAMEDGEIDGNKVTLDWAKPKGEGGFGGRGGGRGGFGGRGGGRG

SEQ ID NO: 58769 - protein, 166 aa, Homo sapiens [sequence omitted]

SEQ ID NO: 58770 - protein, 141 aa, Homo sapiens [sequence omitted]

SEQ ID NO: 58771 - protein, 170 aa, Homo sapiens [sequence omitted]

SEQ ID NO: 58772 - protein, 151 aa, Homo sapiens [sequence omitted]

SEQ ID NO: 58773 - protein, 294 aa, Homo sapiens
  Payload ID: 11486
  Gene Symbol: NPM1
  Gene Name: nucleophosmin (nucleolar phosphoprotein B23, numatrin)
  Uniprot ID: P06748
  ENSP ID: ENSP00000296930
MEDSMDMDMSPLRPQNYLFGCELKADKDYHFKVDNDENEHQLSLRTVSLGAGAKDELHIVEAEAMNYEGSPIKVTLATLKMSVQPTVSLGGFEITPPVVLRLKCGSGPVHISGQHLVAVEEDAESEDEEEEDVKLLSISGKRSAPGGGSKVPQKKVKLAADEDDDDDDEEDDDEDDDDDDFDDEEAEEKAPVKKSIRDTPAKNAQKSNQNGKDSKPSSTPRSKGQESFKKQEKTPKTPKGPSSVEDIKAKMQASIEKGGSLPKVEAKFINYVKNCFRMTDQEAIQDLWQWRKSL

SEQ ID NO: 58774 - protein, 265 aa, Homo sapiens
  Payload ID: 11486
  Gene Symbol: NPM1
  Gene Name: nucleophosmin (nucleolar phosphoprotein B23, numatrin)
  Uniprot ID: P06748
  ENSP ID: ENSP00000341168
MEDSMDMDMSPLRPQNYLFGCELKADKDYHFKVDNDENEHQLSLRTVSLGAGAKDELHIVEAEAMNYEGSPIKVTLATLKMSVQPTVSLGGFEITPPVVLRLKCGSGPVHISGQHLVAVEEDAESEDEEEEDVKLLSISGKRSAPGGGSKVPQKKVKLAADEDDDDDDEEDDDEDDDDDDFDDEEAEEKAPVKKGQESFKKQEKTPKTPKGPSSVEDIKAKMQASIEKGGSLPKVEAKFINYVKNCFRMTDQEAIQDLWQWRKSL

SEQ ID NO: 58775 - protein, 259 aa, Homo sapiens
  Payload ID: 11486
  Gene Symbol: NPM1
  Gene Name: nucleophosmin (nucleolar phosphoprotein B23, numatrin)
  Uniprot ID: P06748
  ENSP ID: ENSP00000377408
MEDSMDMDMSPLRPQNYLFGCELKADKDYHFKVDNDENEHQLSLRTVSLGAGAKDELHIVEAEAMNYEGSPIKVTLATLKMSVQPTVSLGGFEITPPVVLRLKCGSGPVHISGQHLVAVEEDAESEDEEEEDVKLLSISGKRSAPGGGSKVPQKKVKLAADEDDDDDDEEDDDEDDDDDDFDDEEAEEKAPVKKSIRDTPAKNAQKSNQNGKDSKPSSTPRSKGQESFKKQEKTPKTPKGPSSVEDIKAKMQASIEKAH

SEQ ID NO: 58776 - protein, 59 aa, Homo sapiens
  Payload ID: 11486
  Gene Symbol: NPM1
  Gene Name: nucleophosmin (nucleolar phosphoprotein B23, numatrin)
  ENSP ID: ENSP00000428647
MEDSMDMDMSPLRPQNYLFDYHFKVDNDENEHQLSLRTVSLGAGAKDELHIVEAEAMNY

SEQ ID NO: 58777 - protein, 294 aa, Homo sapiens; identical to SEQ ID NO: 58773
  Payload ID: 11486
  Gene Symbol: NPM1
  Gene Name: nucleophosmin (nucleolar phosphoprotein B23, numatrin)
  Uniprot ID: P06748
  ENSP ID: ENSP00000428755

SEQ ID NO: 58778 - protein, 111 aa, Homo sapiens
  Payload ID: 11486
  Gene Symbol: NPM1
  Gene Name: nucleophosmin (nucleolar phosphoprotein B23, numatrin)
  ENSP ID: ENSP00000429485
MNYEGSPIKVTLATLKMSVQPTVSLGGFEITPPVVLRLKCGSGPVHISGQHLVAVEEDAESEDEEEEDVKLLSISGKRSAPGGGSKVPQKKVKLAADEDDDDDDEEDDDED

SEQ ID NO: 58779 - protein, 214 aa, Homo sapiens
  Payload ID: 11487
  Gene Symbol: NPM2
  Gene Name: nucleophosmin/nucleoplasmin 2
  Uniprot ID: Q86SE8
  ENSP ID: ENSP00000289820
MNLSSASSTEEKAVTTVLWGCELSQERRTWTFRPQLEGKQSCRLLLHTICLGEKAKEEMHRVEILPPANQEDKKMQPVTIASLQASVLPMVSMVGVQLSPPVTFQLRAGSGPVFLSGQERYEASDLTWEEEEEEEGEEEEEEEEDDEDEDADISLEEQSPVKQVKRLVPQKQASVAKKKKLEKEEEEIRASVRDKSPVKKAKATARAKKPGFKK

SEQ ID NO: 58780 - protein, 136 aa, Homo sapiens
  Payload ID: 11487
  Gene Symbol: NPM2
  Gene Name: nucleophosmin/nucleoplasmin 2
  Uniprot ID: Q86SE8
  ENSP ID: ENSP00000370941
MNLSSASSTEEKAVTTVLWGCELSQERRTWTFRPQLEGKQSCRLLLHTICLGEKAKEEMHRVEILPPANQEDKKMQPVTIASLQASVLPMVSMVGVQLSPPVTFQLRAGSGPVFLSGQERYEKKAGKRRRGNKSQR

SEQ ID NO: 58781 - protein, 214 aa, Homo sapiens; identical to SEQ ID NO: 58779
  Payload ID: 11487
  Gene Symbol: NPM2
  Gene Name: nucleophosmin/nucleoplasmin 2
  Uniprot ID: Q86SE8
  ENSP ID: ENSP00000381032

SEQ ID NO: 58782 - protein, 214 aa, Homo sapiens; identical to SEQ ID NO: 58779
  Payload ID: 11487
  Gene Symbol: NPM2
  Gene Name: nucleophosmin/nucleoplasmin 2
  Uniprot ID: Q86SE8
  ENSP ID: ENSP00000427741

SEQ ID NO: 58783 - protein, 137 aa, Homo sapiens
  Payload ID: 11487
  Gene Symbol: NPM2
  Gene Name: nucleophosmin/nucleoplasmin 2
  ENSP ID: ENSP00000428016
MNLSSASSTEEKAVTTVLWGCELSQERRTWTFRPQLEGKQSCRLLLHTICLGEKAKEEMHRVEILPPANQEDKKMQPVTIASLQASVLPMVSMVGVQLSPPVTFQLRAGSGPVFLSGQERYEASDLTWEEEEEEEGE

SEQ ID NO: 58784 - protein, 214 aa, Homo sapiens; identical to SEQ ID NO: 58779
  Payload ID: 11487
  Gene Symbol: NPM2
  Gene Name: nucleophosmin/nucleoplasmin 2
  Uniprot ID: Q86SE8
  ENSP ID: ENSP00000429413

SEQ ID NO: 58785 - protein, 99 aa, Homo sapiens
  Payload ID: 11487
  Gene Symbol: NPM2
  Gene Name: nucleophosmin/nucleoplasmin 2
  ENSP ID: ENSP00000429984
MNLSSASSTEEKAVTTVLWGCELSQERRTWTFRPQLEGKQSCRLLLHTICLGEKAKEEMHRVEILPPANQEDKKMQPVTIASLQASVLPMVSMVGVQLS

SEQ ID NO: 58786 - protein, 136 aa, Homo sapiens; identical to SEQ ID NO: 58780
  Payload ID: 11487
  Gene Symbol: NPM2
  Gene Name: nucleophosmin/nucleoplasmin 2
  Uniprot ID: Q86SE8
  ENSP ID: ENSP00000481018

SEQ ID NO: 58787 - protein, 214 aa, Homo sapiens; identical to SEQ ID NO: 58779
  Payload ID: 11487
  Gene Symbol: NPM2
  Gene Name: nucleophosmin/nucleoplasmin 2
  Uniprot ID: Q86SE8
  ENSP ID: ENSP00000481077

SEQ ID NO: 58788 - protein, 178 aa, Homo sapiens
  Payload ID: 11488
  Gene Symbol: NPM3
  Gene Name: nucleophosmin/nucleoplasmin 3
  Uniprot ID: O75607
  ENSP ID: ENSP00000359128
MAAGTAAALAFLSQESRTRAGGVGGLRVPAPVTMDSFFFGCELSGHTRSFTFKVEEEDDAEHVLALTMLCLTEGAKDECNVVEVVARNHDHQEIAVPVANLKLSCQPMLSLDDFQLQPPVTFRLKSGSGPVRITGRHQIVTMSNDVSEEESEEEEEDSDEEEVELCPILPAKKQGGRP

SEQ ID NO: 58789 - protein, 925 aa, Homo sapiens
  Payload ID: 11489
  Gene Symbol: NUP107
  Gene Name: nucleoporin 107kDa
  Uniprot ID: P57740
  ENSP ID: ENSP00000229179
MDRSGFGEISSPVIREAEVTRTARKQSAQKRVLLQASQDENFGNTTPRNQVIPRTPSSFRQPFTPTSRSLLRQPDISCILGTGGKSPRLTQSSGFFGNLSMVTNLDDSNWAAAFSSQRSGLFTNTEPHSITEDVTISAVMLREDDPGEAASMSMFSDFLQSFLKHSSSTVFDLVEEYENICGSQVNILSKIVSRATPGLQKFSKTASMLWLLQQEMVTWRLLASLYRDRIQSALEEESVFAVTAVNASEKTVVEALFQRDSLVRQSQLVVDWLESIAKDEIGEFSDNIEFYAKSVYWENTLHTLKQRQLTSYVGSVRPLVTELDPDAPIRQKMPLDDLDREDEVRLLKYLFTLIRAGMTEEAQRLCKRCGQAWRAATLEGWKLYHDPNVNGGTELEPVEGNPYRRIWKISCWRMAEDELFNRYERAIYAALSGNLKQLLPVCDTWEDTVWAYFRVMVDSLVEQEIQTSVATLDETEELPREYLGANWTLEKVFEELQATDKKRVLEENQEHYHIVQKFLILGDIDGLMDEFSKWLSKSRNNLPGHLLRFMTHLILFFRTLGLQTKEEVSIEVLKTYIQLLIREKHTNLIAFYTCHLPQDLAVAQYALFLESVTEFEQRHHCLELAKEADLDVATITKTVVENIRKKDNGEFSHHDLAPALDTGTTEEDRLKIDVIDWLVFDPAQRAEALKQGNAIMRKFLASKKHEAAKEVFVKIPQDSIAEIYNQCEEQGMESPLPAEDDNAIREHLCIRAYLEAHETFNEWFKHMNSVPQKPALIPQPTFTEKVAHEHKEKKYEMDFGIWKGHLDALTADVKEKMYNVLLFVDGGWMVDVREDAKEDHERTHQMVLLRKLCLPMLCFLLHTILHSTGQYQECLQLADMVSSERHKLYLVFSKEELRKLLQKLRESSLMLLDQGLDPLGYEIQL

SEQ ID NO: 58790 - protein, 686 aa, Homo sapiens
  Payload ID: 11489
  Gene Symbol: NUP107
  Gene Name: nucleoporin 107kDa
  Uniprot ID: P57740
  ENSP ID: ENSP00000368185
MSMFSDFLQSFLKHSSSTVFDLVEEYENICGSQVNILSKIVSRATPGLQKFSKTASMLWLLQQEMVTWRLLASLYRDRIQSALEEESVFAVTAVNASEKTVVEALFQRDSLVRQSQLVVDWLESIAKDEIGEFSDNIEFYAKSVYWENTLHTLKQRQLTSYVGSVRPLVTELDPDAPIRQKMPLDDLDREDEVRLLKYLFTLIRAGMTEEAQRLCKRCGQAWRAATLEGWKLYHDPNVNGGTELEPVEGNPYRRIWKISCWRMAEDELFNRYERAIYAALSGNLKQLLPVCDTWEDTVWAYFRVMVDSLVEQEIQTSVATLDETEELPREYLGANWTLEKVFEELQATDKKRVLEENQEHYHIVQKFLILGDIDGLMDEFSKWLSKSRNNLPGHLLRFMTHLILFFRTLGLQTKEEVSIEVLKTYIQEDRLKIDVIDWLVFDPAQRAEALKQGNAIMRKFLASKKHEAAKEVFVKIPQDSIAEIYNQCEEQGMESPLPAEDDNAIREHLCIRAYLEAHETFNEWFKHMNSVPQKPALIPQPTFTEKVAHEHKEKKYEMDFGIWKGHLDALTADVKEKMYNVLLFVDGGWMVDVREDAKEDHERTHQMVLLRKLCLPMLCFLLHTILHSTGQYQECLQLADMVSSERHKLYLVFSKEELRKLLQKLRESSLMLLDQGLDPLGYEIQL

SEQ ID NO: 58791 - protein, 85 aa, Homo sapiens
  Payload ID: 11489
  Gene Symbol: NUP107
  Gene Name: nucleoporin 107kDa
  ENSP ID: ENSP00000440116
MVTNLDDSNWAAAFSSQRSGLFTNTEPHSITEDVTISAVMLREDDPGEAASMSMFSDFLQSFLKHSSSTVFDLVEEYENICGSQV

SEQ ID NO: 58792 - protein, 80 aa, Homo sapiens
  Payload ID: 11489
  Gene Symbol: NUP107
  Gene Name: nucleoporin 107kDa
  ENSP ID: ENSP00000441334
ERAIYAALSGNLKQLLPVCDTWEDTVWAYFRVMVDSLVEQEIQTSVATLDETEELPREYLGANWTLEKVFEELQATDKKV

SEQ ID NO: 58793 - protein, 896 aa, Homo sapiens
  Payload ID: 11489
  Gene Symbol: NUP107
  Gene Name: nucleoporin 107kDa
  Uniprot ID: P57740
  ENSP ID: ENSP00000441448
MKILVILHQETRLSLELLAHFDSLVLSTNLLFIVTPTSRSLLRQPDISCILGTGGKSPRLTQSSGFFGNLSMVTNLDDSNWAAAFSSQRSGLFTNTEPHSITEDVTISAVMLREDDPGEAASMSMFSDFLQSFLKHSSSTVFDLVEEYENICGSQVNILSKIVSRATPGLQKFSKTASMLWLLQQEMVTWRLLASLYRDRIQSALEEESVFAVTAVNASEKTVVEALFQRDSLVRQSQLVVDWLESIAKDEIGEFSDNIEFYAKSVYWENTLHTLKQRQLTSYVGSVRPLVTELDPDAPIRQKMPLDDLDREDEVRLLKYLFTLIRAGMTEEAQRLCKRCGQAWRAATLEGWKLYHDPNVNGGTELEPVEGNPYRRIWKISCWRMAEDELFNRYERAIYAALSGNLKQLLPVCDTWEDTVWAYFRVMVDSLVEQEIQTSVATLDETEELPREYLGANWTLEKVFEELQATDKKRVLEENQEHYHIVQKFLILGDIDGLMDEFSKWLSKSRNNLPGHLLRFMTHLILFFRTLGLQTKEEVSIEVLKTYIQLLIREKHTNLIAFYTCHLPQDLAVAQYALFLESVTEFEQRHHCLELAKEADLDVATITKTVVENIRKKDNGEFSHHDLAPALDTGTTEEDRLKIDVIDWLVFDPAQRAEALKQGNAIMRKFLASKKHEAAKEVFVKIPQDSIAEIYNQCEEQGMESPLPAEDDNAIREHLCIRAYLEAHETFNEWFKHMNSVPQKPALIPQPTFTEKVAHEHKEKKYEMDFGIWKGHLDALTADVKEKMYNVLLFVDGGWMVDVREDAKEDHERTHQMVLLRKLCLPMLCFLLHTILHSTGQYQECLQLADMVSSERHKLYLVFSKEELRKLLQKLRESSLMLLDQGLDPLGYEIQL

SEQ ID NO: 58794 - protein, 103 aa, Homo sapiens
  Payload ID: 11489
  Gene Symbol: NUP107
  Gene Name: nucleoporin 107kDa
  ENSP ID: ENSP00000445567
MDRSGFGEISSPVIREAEVTRTARKQSAQKRVLLQASQDENFGNTTPRNQVIPRTPSSFRQPFTPTSRSLLRQPDISCILGTGGKSPRLTQSSGFFGNLSMHP

SEQ ID NO: 58795 - protein, 1156 aa, Homo sapiens
  Payload ID: 11490
  Gene Symbol: NUP133
  Gene Name: nucleoporin 133kDa
  Uniprot ID: Q8WUM0
  ENSP ID: ENSP00000261396
MFPAAPSPRTPGTGSRRGPLAGLGPGSTPRTASRKGLPLGSAVSSPVLFSPVGRRSSLSSRGTPTRMFPHHSITESVNYDVKTFGSSLPVKVMEALTLAEVDDQLTINIDEGGWACLVCKEKLIIWKIALSPITKLSVCKELQLPPSDFHWSADLVALSYSSPSGEAHSTQAVAVMVATREGSIRYWPSLAGEDTYTEAFVDSGGDKTYSFLTAVQGGSFILSSSGSQLIRLIPESSGKIHQHILPQGQGMLSGIGRKVSSLFGILSPSSDLTLSSVLWDRERSSFYSLTSSNISKWELDDSSEKHAYSWDINRALKENITDAIWGSESNYEAIKEGVNIRYLDLKQNCDGLVILAAAWHSADNPCLIYYSLITIEDNGCQMSDAVTVEVTQYNPPFQSEDLILCQLTVPNFSNQTAYLYNESAVYVCSTGTGKFSLPQEKIVFNAQGDSVLGAGACGGVPIIFSRNSGLVSITSRENVSILAEDLEGSLASSVAGPNSESMIFETTTKNETIAQEDKIKLLKAAFLQYCRKDLGHAQMVVDELFSSHSDLDSDSELDRAVTQISVDLMDDYPASDPRWAESVPEEAPGFSNTSLIILHQLEDKMKAHSFLMDFIHQVGLFGRLGSFPVRGTPMATRLLLCEHAEKLSAAIVLKNHHSRLSDLVNTAILIALNKREYEIPSNLTPADVFFREVSQVDTICECLLEHEEQVLRDAPMDSIEWAEVVINVNNILKDMLQAASHYRQNRNSLYRREESLEKEPEYVPWTATSGPGGIRTVIIRQHEIVLKVAYPQADSNLRNIVTEQLVALIDCFLDGYVSQLKSVDKSSNRERYDNLEMEYLQKRSDLLSPLLSLGQYLWAASLAEKYCDFDILVQMCEQTDNQSRLQRYMTQFADQNFSDFLFRWYLEKGKRGKLLSQPISQHGQLANFLQAHEHLSWLHEINSQELEKAHATLLGLANMETRYFAKKKTLLGLSKLAALASDFSEDMLQEKIEEMAEQERFLLHQETLPEQLLAEKQLNLSAMPVLTAPQLIGLYICEENRRANEYDFKKALDLLEYIDEEEDININDLKLEILCKALQRDNWSSSDGKDDPIEVSKDSIFVKILQKLLKDGIQLSEYLPEVKDLLQADQLGSLKSNPYFEFVLKANYEYYVQGQI

SEQ ID NO: 58796 - protein, 1475 aa, Homo sapiens
  Payload ID: 11491
  Gene Symbol: NUP153
  Gene Name: nucleoporin 153kDa
  Uniprot ID: P49790
  ENSP ID: ENSP00000262077
MASGAGGVGGGGGGKIRTRRCHQGPIKPYQQGRQQHQGILSRVTESVKNIVPGWLQRYFNKNEDVCSCSTDTSEVPRWPENKEDHLVYADEESSNITDGRITPEPAVSNTEEPSTTSTASNYPDVLTRPSLHRSHLNFSMLESPALHCQPSTSSAFPIGSSGFSLVKEIKDSTSQHDDDNISTTSGFSSRASDKDITVSKNTSLPPLWSPEAERSHSLSQHTATSSKKPAFNLSAFGTLSPSLGNSSILKTSQLGDSPFYPGKTTYGGAAAAVRQSKLRNTPYQAPVRRQMKAKQLSAQSYGVTSSTARRILQSLEKMSSPLADAKRIPSIVSSPLNSPLDRSGIDITDFQAKREKVDSQYPPVQRLMTPKPVSIATNRSVYFKPSLTPSGEFRKTNQRIDNKCSTGYEKNMTPGQNREQRESGFSYPNFSLPAANGLSSGVGGGGGKMRRERTRFVASKPLEEEEMEVPVLPKISLPITSSSLPTFNFSSPEITTSSPSPINSSQALTNKVQMTSPSSTGSPMFKFSSPIVKSTEANVLPPSSIGFTFSVPVAKTAELSGSSSTLEPIISSSAHHVTTVNSTNCKKTPPEDCEGPFRPAEILKEGSVLDILKSPGFASPKIDSVAAQPTATSPVVYTRPAISSFSSSGIGFGESLKAGSSWQCDTCLLQNKVTDNKCIACQAAKLSPRDTAKQTGIETPNKSGKTTLSASGTGFGDKFKPVIGTWDCDTCLVQNKPEAIKCVACETPKPGTCVKRALTLTVVSESAETMTASSSSCTVTTGTLGFGDKFKRPIGSWECSVCCVSNNAEDNKCVSCMSEKPGSSVPASSSSTVPVSLPSGGSLGLEKFKKPEGSWDCELCLVQNKADSTKCLACESAKPGTKSGFKGFDTSSSSSNSAASSSFKFGVSSSSSGPSQTLTSTGNFKFGDQGGFKIGVSSDSGSINPMSEGFKFSKPIGDFKFGVSSESKPEEVKKDSKNDNFKFGLSSGLSNPVSLTPFQFGVSNLGQEEKKEELPKSSSAGFSFGTGVINSTPAPANTIVTSENKSSFNLGTIETKSASVAPFTCKTSEAKKEEMPATKGGFSFGNVEPASLPSASVFVLGRTEEKQQEPVTSTSLVFGKKADNEEPKCQPVFSFGNSEQTKDENSSKSTFSFSMTKPSEKESEQPAKATFAFGAQTSTTADQGAAKPVFSFLNNSSSSSSTPATSAGGGIFGSSTSSSNPPVATFVFGQSSNPVSSSAFGNTAESSTSQSLLFSQDSKLATTSSTGTAVTPFVFGPGASSNNTTTSGFGFGATTTSSSAGSSFVFGTGPSAPSASPAFGANQTPTFGQSQGASQPNPPGFGSISSSTALFPTGSQPAPPTFGTVSSSSQPPVFGQQPSQSAFGSGTTPNSSSAFQFGSSTTNFNFTNNSPSGVFTFGANSSTPAASAQPSGSGGFPFNQSPAAFTVGSNGKNVFSSSGTSFSGRKIKTAVRRRK

SEQ ID NO: 58797 - protein, 1506 aa, Homo sapiens
  Payload ID: 11491
  Gene Symbol: NUP153
  Gene Name: nucleoporin 153kDa
  Uniprot ID: P49790
  ENSP ID: ENSP00000444029
MASGAGGVGGGGGGKIRTRRCHQGPIKPYQQGRQQHQGILSRVTESVKNIVPGWLQRYFNKNEDVCSCSTDTSEVPRWPENKEDHLVYADEESSNITDGRITPEPAVSNTEEPSTTSTASNYPDVLTRPSLHRSHLNFSMLESPALHCQPSTSSAFPIGSSGFSLVKEIKDSTSQHDDDNISTTSGFSSRASDKDITVSKNTSLPPLWSPEAERSHSLSQHTATSSKKPAFNLSAFGTLSPSLGNSSILKTSQLGDSPFYPGKTTYGGAAAAVRQSKLRNTPYQAPVRRQMKAKQLSAQSYGVTSSTARRILQSLEKMSSPLADAKRIPSIVSSPLNSPLDRSGIDITDFQAKREKVDSQYPPVQRLMTPKPVSIATNRSVYFKPSLTPSGEFRKTNQRIDNKCSTGYEKNMTPGQNREQRESGFSYPNFSLPAANGLSSGVGGGGGKMRRERTRFVASKPLEEERQGLTVLPKLISSSCAQAIIPSWPLKVLRLQEMEVPVLPKISLPITSSSLPTFNFSSPEITTSSPSPINSSQALTNKVQMTSPSSTGSPMFKFSSPIVKSTEANVLPPSSIGFTFSVPVAKTAELSGSSSTLEPIISSSAHHVTTVNSTNCKKTPPEDCEGPFRPAEILKEGSVLDILKSPGFASPKIDSVAAQPTATSPVVYTRPAISSFSSSGIGFGESLKAGSSWQCDTCLLQNKVTDNKCIACQAAKLSPRDTAKQTGIETPNKSGKTTLSASGTGFGDKFKPVIGTWDCDTCLVQNKPEAIKCVACETPKPGTCVKRALTLTVVSESAETMTASSSSCTVTTGTLGFGDKFKRPIGSWECSVCCVSNNAEDNKCVSCMSEKPGSSVPASSSSTVPVSLPSGGSLGLEKFKKPEGSWDCELCLVQNKADSTKCLACESAKPGTKSGFKGFDTSSSSSNSAASSSFKFGVSSSSSGPSQTLTSTGNFKFGDQGGFKIGVSSDSGSINPMSEGFKFSKPIGDFKFGVSSESKPEEVKKDSKNDNFKFGLSSGLSNPVSLTPFQFGVSNLGQEEKKEELPKSSSAGFSFGTGVINSTPAPANTIVTSENKSSFNLGTIETKSASVAPFTCKTSEAKKEEMPATKGGFSFGNVEPASLPSASVFVLGRTEEKQQEPVTSTSLVFGKKADNEEPKCQPVFSFGNSEQTKDENSSKSTFSFSMTKPSEKESEQPAKATFAFGAQTSTTADQGAAKPVFSFLNNSSSSSSTPATSAGGGIFGSSTSSSNPPVATFVFGQSSNPVSSSAFGNTAESSTSQSLLFSQDSKLATTSSTGTAVTPFVFGPGASSNNTTTSGFGFGATTTSSSAGSSFVFGTGPSAPSASPAFGANQTPTFGQSQGASQPNPPGFGSISSSTALFPTGSQPAPPTFGTVSSSSQPPVFGQQPSQSAFGSGTTPNSSSAFQFGSSTTNFNFTNNSPSGVFTFGANSSTPAASAQPSGSGGFPFNQSPAAFTVGSNGKNVFSSSGTSFSGRKIKTAVRRRK

SEQ ID NO: 58798 - protein, 1433 aa, Homo sapiens
  Payload ID: 11491
  Gene Symbol: NUP153
  Gene Name: nucleoporin 153kDa
  Uniprot ID: P49790
  ENSP ID: ENSP00000478627
MASGAGGVGGGGGGKIRTRRCHQGPIKPYQQGRQQHQGILSRVTESVKNIVPGWLQRYFNKNEDVCSCSTDTSEVPRWPENKEDHLVYADEESSNITDGRITPEPAVSNTEEPSTTSTASNYPDVLTRPSLHRSHLNFSMLESPALHCQPSTSSAFPIGSSGFSLVKEIKDSTSQHDDDNISTTSGFSSRASDKDITVSKNTSLPPLWSPEAERSHSLSQHTATSSKKPAFNLSAFGTLSPSLGNSSILKTSQLGDSPFYPGKTTYGGAAAAVRQSKLRNTPYQAPVRRQMKAKQLSAQSYGVTSSTARRILQSLEKMSSPLADAKRIPSIVSSPLNSPLDRSGIDITDFQAKREKVDSQYPPVQRLMTPKPVSIATNRSVYFKPSLTPSGEFRKTNQRIDNKCSTGYEKNMTPGQNREQRESGFSYPNFSLPAANGLSSGVGGGGGKMRRERTRFVASKPLEEEEMEVPVLPKISLPITSSSLPTFNFSSPEITTSSPSPINSSQALTNKVQMTSPSSTGSPMFKFSSPIVKSTEANVLPPSSIGFTFSVPVAKTAELSGSSSTLEPIISSSGFASPKIDSVAAQPTATSPVVYTRPAISSFSSSGIGFGESLKAGSSWQCDTCLLQNKVTDNKCIACQAAKLSPRDTAKQTGIETPNKSGKTTLSASGTGFGDKFKPVIGTWDCDTCLVQNKPEAIKCVACETPKPGTCVKRALTLTVVSESAETMTASSSSCTVTTGTLGFGDKFKRPIGSWECSVCCVSNNAEDNKCVSCMSEKPGSSVPASSSSTVPVSLPSGGSLGLEKFKKPEGSWDCELCLVQNKADSTKCLACESAKPGTKSGFKGFDTSSSSSNSAASSSFKFGVSSSSSGPSQTLTSTGNFKFGDQGGFKIGVSSDSGSINPMSEGFKFSKPIGDFKFGVSSESKPEEVKKDSKNDNFKFGLSSGLSNPVSLTPFQFGVSNLGQEEKKEELPKSSSAGFSFGTGVINSTPAPANTIVTSENKSSFNLGTIETKSASVAPFTCKTSEAKKEEMPATKGGFSFGNVEPASLPSASVFVLGRTEEKQQEPVTSTSLVFGKKADNEEPKCQPVFSFGNSEQTKDENSSKSTFSFSMTKPSEKESEQPAKATFAFGAQTSTTADQGAAKPVFSFLNNSSSSSSTPATSAGGGIFGSSTSSSNPPVATFVFGQSSNPVSSSAFGNTAESSTSQSLLFSQDSKLATTSSTGTAVTPFVFGPGASSNNTTTSGFGFGATTTSSSAGSSFVFGTGPSAPSASPAFGANQTPTFGQSQGASQPNPPGFGSISSSTALFPTGSQPAPPTFGTVSSSSQPPVFGQQPSQSAFGSGTTPNSSSAFQFGSSTTNFNFTNNSPSGVFTFGANSSTPAASAQPSGSGGFPFNQSPAAFTVGSNGKNVFSSSGTSFSGRKIKTAVRRRK

SEQ ID NO: 58799 - protein, 1391 aa, Homo sapiens
  Payload ID: 11492
  Gene Symbol: NUP155
  Gene Name: nucleoporin 155kDa
  Uniprot ID: O75694
  ENSP ID: ENSP00000231498
MPSSLLGAAMPASTSAAALQEALENAGRLIDRQLQEDRMYPDLSELLMVSAPNNPTVSGMSDMDYPLQGPGLLSVPNLPEISSIRRVPLPPELVEQFGHMQCNCMMGVFPPISRAWLTIDSDIFMWNYEDGGDLAYFDGLSETILAVGLVKPKAGIFQPHVRHLLVLATPVDIVILGLSYANLQTGSGVLNDSLSGGMQLLPDPLYSLPTDNTYLLTITSTDNGRIFLAGKDGCLYEVAYQAEAGWFSQRCRKINHSKSSLSFLVPSLLQFTFSEDDPILQIAIDNSRNILYTRSEKGVIQVYDLGQDGQGMSRVASVSQNAIVSAAGNIARTIDRSVFKPIVQIAVIENSESLDCQLLAVTHAGVRLYFSTCPFRQPLARPNTLTLVHVRLPPGFSASSTVEKPSKVHRALYSKGILLMAASENEDNDILWCVNHDTFPFQKPMMETQMTAGVDGHSWALSAIDELKVDKIITPLNKDHIPITDSPVVVQQHMLPPKKFVLLSAQGSLMFHKLRPVDQLRHLLVSNVGGDGEEIERFFKLHQEDQACATCLILACSTAACDREVSAWATRAFFRYGGEAQMRFPTTLPPPSNVGPILGSPVYSSSPVPSGSPYPNPSFLGTPSHGIQPPAMSTPVCALGNPATQATNMSCVTGPEIVYSGKHNGICIYFSRIMGNIWDASLVVERIFKSGNREITAIESSVPCQLLESVLQELKGLQEFLDRNSQFAGGPLGNPNTTAKVQQRLIGFMRPENGNPQQMQQELQRKFHEAQLSEKISLQAIQQLVRKSYQALALWKLLCEHQFTIIVAELQKELQEQLKITTFKDLVIRDKELTGALIASLINCYIRDNAAVDGISLHLQDICPLLYSTDDAICSKANELLQRSRQVQNKTEKERMLRESLKEYQKISNQVDLSNVCAQYRQVRFYEGVVELSLTAAEKKDPQGLGLHFYKHGEPEEDIVGLQAFQERLNSYKCITDTLQELVNQSKAAPQSPSVPKKPGPPVLSSDPNMLSNEEAGHHFEQMLKLSQRSKDELFSIALYNWLIQVDLADKLLQVASPFLEPHLVRMAKVDQNRVRYMDLLWRYYEKNRSFSNAARVLSRLADMHSTEISLQQRLEYIARAILSAKSSTAISSIAADGEFLHELEEKMEVARIQLQIQETLQRQYSHHSSVQDAVSQLDSELMDITKLYGEFADPFKLAECKLAIIHCAGYSDPILVQTLWQDIIEKELSDSVTLSSSDRMHALSLKIVLLGKIYAGTPRFFPLDFIVQFLEQQVCTLNWDVGFVIQTMNEIGVPLPRLLEVYDQLFKSRDPFWNRMKKPLHLLDCIHVLLIRYVENPSQVLNCERRRFTNLCLDAVCGYLVELQSMSSSVAVQAITGNFKSLQAKLERLH

SEQ ID NO: 58800 - protein, 1332 aa, Homo sapiens
  Payload ID: 11492
  Gene Symbol: NUP155
  Gene Name: nucleoporin 155kDa
  Uniprot ID: O75694
  ENSP ID: ENSP00000371265
MSDMDYPLQGPGLLSVPNLPEISSIRRVPLPPELVEQFGHMQCNCMMGVFPPISRAWLTIDSDIFMWNYEDGGDLAYFDGLSETILAVGLVKPKAGIFQPHVRHLLVLATPVDIVILGLSYANLQTGSGVLNDSLSGGMQLLPDPLYSLPTDNTYLLTITSTDNGRIFLAGKDGCLYEVAYQAEAGWFSQRCRKINHSKSSLSFLVPSLLQFTFSEDDPILQIAIDNSRNILYTRSEKGVIQVYDLGQDGQGMSRVASVSQNAIVSAAGNIARTIDRSVFKPIVQIAVIENSESLDCQLLAVTHAGVRLYFSTCPFRQPLARPNTLTLVHVRLPPGFSASSTVEKPSKVHRALYSKGILLMAASENEDNDILWCVNHDTFPFQKPMMETQMTAGVDGHSWALSAIDELKVDKIITPLNKDHIPITDSPVVVQQHMLPPKKFVLLSAQGSLMFHKLRPVDQLRHLLVSNVGGDGEEIERFFKLHQEDQACATCLILACSTAACDREVSAWATRAFFRYGGEAQMRFPTTLPPPSNVGPILGSPVYSSSPVPSGSPYPNPSFLGTPSHGIQPPAMSTPVCALGNPATQATNMSCVTGPEIVYSGKHNGICIYFSRIMGNIWDASLVVERIFKSGNREITAIESSVPCQLLESVLQELKGLQEFLDRNSQFAGGPLGNPNTTAKVQQRLIGFMRPENGNPQQMQQELQRKFHEAQLSEKISLQAIQQLVRKSYQALALWKLLCEHQFTIIVAELQKELQEQLKITTFKDLVIRDKELTGALIASLINCYIRDNAAVDGISLHLQDICPLLYSTDDAICSKANELLQRSRQVQNKTEKERMLRESLKEYQKISNQVDLSNVCAQYRQVRFYEGVVELSLTAAEKKDPQGLGLHFYKHGEPEEDIVGLQAFQERLNSYKCITDTLQELVNQSKAAPQSPSVPKKPGPPVLSSDPNMLSNEEAGHHFEQMLKLSQRSKDELFSIALYNWLIQVDLADKLLQVASPFLEPHLVRMAKVDQNRVRYMDLLWRYYEKNRSFSNAARVLSRLADMHSTEISLQQRLEYIARAILSAKSSTAISSIAADGEFLHELEEKMEVARIQLQIQETLQRQYSHHSSVQDAVSQLDSELMDITKLYGEFADPFKLAECKLAIIHCAGYSDPILVQTLWQDIIEKELSDSVTLSSSDRMHALSLKIVLLGKIYAGTPRFFPLDFIVQFLEQQVCTLNWDVGFVIQTMNEIGVPLPRLLEVYDQLFKSRDPFWNRMKKPLHLLDCIHVLLIRYVENPSQVLNCERRRFTNLCLDAVCGYLVELQSMSSSVAVQAITGNFKSLQAKLERLH

SEQ ID NO: 58801 - protein, 1327 aa, Homo sapiens
  Payload ID: 11492
  Gene Symbol: NUP155
  Gene Name: nucleoporin 155kDa
  ENSP ID: ENSP00000422019
MPSSLLGAAMPASTSAAALQEALENAGRLIDRQLQEDRMYPDLSELLMVSAPNNPTVSGMSDMDYPLQGPGLLSVPNLPEISSIRRVPLPPELVEQFGHMQCNCMMGVFPPISRAWLTIDSDIFMWNYEDGGDLAYFDGLSETILAVGLVKPKAGIFQPHVRHLLVLATPVDIVILGLSYANLQTGSGVLNDSLSGGMQLLPDPLYSLPTDNTYLLTITSTDNGRIFLAGKDGCLYEVAYQAEAGWFSQRCRKINHSKSSLSFLVPSLLQFTFSEDDPILQIAIDNSRNILYTRSEKGVIQVYDLGQDGQGMSRVASVSQNAIVSAAGNIARTIDRSVFKPIVQIAVIENSESLDCQLLAVTHAGVRLYFSTCPFRQPLARPNTLTLVHVRLPPGFSASSTVEKPSKVHRALYSKGILLMAASENEDNDILWCVNHDTFPFQKPMMETQMTAGVDGHSWALSAIDELKVDKIITPLNKDHIPITDSPVVVQQHMLPPKKFVLLSAQGSLMFHKLRPVDQLRHLLVSNVGGDGEEIERFFKLHQEDQACATCLILACSTAACDREVSAWATRAFFRYGGEAQMRFPTTLPPPSNVGPILGSPVYSSSPVPSGSPYPNPSFLGTPSHGIQPPAMSTPVCALGNPATQATNMSCVTGPEIVYSGKHNGICIYFSRIMGNIWDASLVVERIFKSGNREITAIESSVPCQLLESVLQELKGLQEFLDRNSQFAGGPLGNPNTTAKVQQRLIGFMRPENGNPQQMQQELQRKFHEAQLSEKISLQAIQQLVRKSYQALALWKLLCEHQFTIIVAELQKANELLQRSRQVQNKTEKERMLRESLKEYQKISNQVDLSNVCAQYRQVRFYEGVVELSLTAAEKKDPQGLGLHFYKHGEPEEDIVGLQAFQERLNSYKCITDTLQELVNQSKAAPQSPSVPKKPGPPVLSSDPNMLSNEEAGHHFEQMLKLSQRSKDELFSIALYNWLIQVDLADKLLQVASPFLEPHLVRMAKVDQNRVRYMDLLWRYYEKNRSFSNAARVLSRLADMHSTEISLQQRLEYIARAILSAKSSTAISSIAADGEFLHELEEKMEVARIQLQIQETLQRQYSHHSSVQDAVSQLDSELMDITKLYGEFADPFKLAECKLAIIHCAGYSDPILVQTLWQDIIEKELSDSVTLSSSDRMHALSLKIVLLGKIYAGTPRFFPLDFIVQFLEQQVCTLNWDVGFVIQTMNEIGVPLPRLLEVYDQLFKSRDPFWNRMKKPLHLLDCIHVLLIRYVENPSQVLNCERRRFTNLCLDAVCGYLVELQSMSSSVAVQAITGNFKSLQAKLERLH

SEQ ID NO: 58802 - protein, 54 aa, Homo sapiens
  Payload ID: 11492
  Gene Symbol: NUP155
  Gene Name: nucleoporin 155kDa
  ENSP ID: ENSP00000423484
MPSSLLGAAMPASTSAAALQEALENAGRLIDRQLQEDRMYPDLSELLMVSAPSE

SEQ ID NO: 58803 - protein, 1436 aa, Homo sapiens
  Payload ID: 11493
  Gene Symbol: NUP160
  Gene Name: nucleoporin 160kDa
  Uniprot ID: Q12769
  ENSP ID: ENSP00000367721
MLHLSAAPPAPPPEVTATARPCLCSVGRRGDGGKMAAAGALERSFVELSGAERERPRHFREFTVCSIGTANAVAGAVKYSESAGGFYYVESGKLFSVTRNRFIHWKTSGDTLELMEESLDINLLNNAIRLKFQNCSVLPGGVYVSETQNRVIILMLTNQTVHRLLLPHPSRMYRSELVVDSQMQSIFTDIGKVDFTDPCNYQLIPAVPGISPNSTASTAWLSSDGEALFALPCASGGIFVLKLPPYDIPGMVSVVELKQSSVMQRLLTGWMPTAIRGDQSPSDRPLSLAVHCVEHDAFIFALCQDHKLRMWSYKEQMCLMVADMLEYVPVKKDLRLTAGTGHKLRLAYSPTMGLYLGIYMHAPKRGQFCIFQLVSTESNRYSLDHISSLFTSQETLIDFALTSTDIWALWHDAENQTVVKYINFEHNVAGQWNPVFMQPLPEEEIVIRDDQDPREMYLQSLFTPGQFTNEALCKALQIFCRGTERNLDLSWSELKKEVTLAVENELQGSVTEYEFSQEEFRNLQQEFWCKFYACCLQYQEALSHPLALHLNPHTNMVCLLKKGYLSFLIPSSLVDHLYLLPYENLLTEDETTISDDVDIARDVICLIKCLRLIEESVTVDMSVIMEMSCYNLQSPEKAAEQILEDMITIDVENVMEDICSKLQEIRNPIHAIGLLIREMDYETEVEMEKGFNPAQPLNIRMNLTQLYGSNTAGYIVCRGVHKIASTRFLICRDLLILQQLLMRLGDAVIWGTGQLFQAQQDLLHRTAPLLLSYYLIKWGSECLATDVPLDTLESNLQHLSVLELTDSGALMANRFVSSPQTIVELFFQEVARKHIISHLFSQPKAPLSQTGLNWPEMITAITSYLLQLLWPSNPGCLFLECLMGNCQYVQLQDYIQLLHPWCQVNVGSCRFMLGRCYLVTGEGQKALECFCQAASEVGKEEFLDRLIRSEDGEIVSTPRLQYYDKVLRLLDVIGLPELVIQLATSAITEAGDDWKSQATLRTCIFKHHLDLGHNSQAYEALTQIPDSSRQLDCLRQLVVVLCERSQLQDLVEFPYVNLHNEVVGIIESRARAVDLMTHNYYELLYAFHIYRHNYRKAGTVMFEYGMRLGREVRTLRGLEKQGNCYLAALNCLRLIRPEYAWIVQPVSGAVYDRPGASPKRNHDGECTAAPTNRQIEILELEDLEKECSLARIRLTLAQHDPSAVAVAGSSSAEEMVTLLVQAGLFDTAISLCQTFKLPLTPVFEGLAFKCIKLQFGGEAAQAEAWAWLAANQLSSVITTKESSATDEAWRLLSTYLERYKVQNNLYHHCVINKLLSHGVPLPNWLINSYKKVDAAELLRLYLNYDLLEEAVDLVSEYVDAVLGKGHQYFGIEFPLSATAPMVWLPYSSIDQLLQALGENSANSHNIALSQKILDKLEDYQQKVDKATRDLLYRRTL

SEQ ID NO: 58804 - protein, 224 aa, Homo sapiens
  Payload ID: 11493
  Gene Symbol: NUP160
  Gene Name: nucleoporin 160kDa
  Uniprot ID: Q12769
  ENSP ID: ENSP00000431495
MLHLSAAPPAPPPEVTATARPCLCSVGRRGDGGKMAAAGALERSFVELSGAERERPRHFREFTVCSIGTANAVAGAVKYSESAGGFYYVESGKLFSVTRNRFIHWKTSGDTLELMEESLDINLLNNAIRLKFQNCSVLPGGVYVSETQNRVIILMLTNQTVHRLLLPHPSRMYRSVSWLSAISFISQITLGVTNVVLERCLLELKEIWILVIPHQAYFDSYRLK

SEQ ID NO: 58805 - protein, 1123 aa, Homo sapiens
  Payload ID: 11493
  Gene Symbol: NUP160
  Gene Name: nucleoporin 160kDa
  ENSP ID: ENSP00000432367
  MOD_RES (1)..(1): Any amino acid
XGDGGKMAAAGALERSFVELSGAERERPRHFREFTVCSIGTANAVAGAVKYSESAGGFYYVESGKLFSVTRNRFIHWKTSGDTLELMEESLDINLLNNAIRLKFQNCSVLPGGVYVSETQNRVIILMLTNQTVHRLLLPHPSRMYRSELVVDSQMQSIFTDIGKVDFTDPCNYQLIPAVPGISPNSTASTAWLSSDGEALFALPCASGGIFVLKLPPYDIPGMVSVVELKQSSVMQRLLTGWMPTAIRGDQSPSDRPLSLAVHCVEHDAFIFALCQDHKLRMWSYKEQMCLMVADMLEYVPVKKDLRLTAGTGHKLRLAYSPTMGLYLGIYMHAPKRGQFCIFQLVSTESNRYSLDHISSLFTSQETLIDFALTSTDIWALWHDAENQTVVKYINFEHNVAGQWNPVFMQPLPEEEIVIRDDQDPREMYLQSLFTPGQFTNEALCKALQIFCRGTERNLDLSWSELKKEVTLAVENELQGSVTEYEFSQEEFRNLQQEFWCKFYACCLQYQEALSHPLALHLNPHTNMVCLLKKGYLSFLIPSSLVDHLYLLPYENLLTEDETTISDDVDIARDVICLIKCLRLIEESVTVDMSVIMEMSCYNLQSPEKAAEQILEDMITIDVENVMEDICSKLQEIRNPIHAIGLLIREMDYETEVEMEKGFNPAQPLNIRMNLTQLYGSNTAGYIVCRGVHKIASTRFLICRDLLILQQLLMRLGDAVIWGTGQLFQAQQDLLHRTAPLLLSYYLIKWGSECLATDVPLDTLESNLQHLSVLELTDSGALMANRFVSSPQTIVELFFQEVARKHIISHLFSQPKAPLSQTGLNWPEMITAITSYLLQLLWPSNPGCLFLECLMGNCQYVQLQDYIQLLHPWCQVNVGSCRFMLGRCYLVTGEGQKALECFCQAASEVGKEEFLDRLIRSEDGEIVSTPRLQYYDKVLRLLDVIGLPELVIQLATSAITEAGDDWKSQATLRTCIFKHHLDLGHNSQAYEALTQIPDSSRQLDCLRQLVVVLCERSQLQDLVEFPYVNLHNEVVGIIESRARAVDLMTHNYYELLYAFHIYRHNYRKAGTVMFEYGMRLGREVRTLRGLEKQGNCYLAALNCLRLIRPEYAWIVQPVSGAVV

SEQ ID NO: 58806 - protein, 1314 aa, Homo sapiens
  Payload ID: 11493
  Gene Symbol: NUP160
  Gene Name: nucleoporin 160kDa
  ENSP ID: ENSP00000433590
  MOD_RES (1)..(1): Any amino acid
XAAGALERSFVELSGAERERPRHFREFTVCSIGTANAVAGAVKYSESAGGFYYVESGKLFSVTRNRFIHWKTSGDTLELMEESLDINLLNNAIRLKFQNCSVLPGGVYVSETQNRVIILMLTNQTVHRLLLPHPSRMYRSELVVDSQMQSIFTDIGKVDFTDPCNYQLIPAVPGISPNSTASTAWLSSDGEALFALPCASGGIFVLKLPPYDIPGMVSVVELKQSSVMQRLLTGWMPTAIRGDQSPSDRPLSLAVHCVEHDAFIFALCQDHKLRMWSYKEQMCLMVADMLEYVPVKKDLRLTAGTGHKLRLAYSPTMGLYLGIYMHAPKRGQFCIFQLVSTESNRYSLDHISSLFTSQETLIDFALTSTDIWALWHDAENQTVVKYINFEHNVAGQWNPVFMQPLPEEEIVIRDDQDPREMYLQSLFTPGQFTNEALCKALQIFCRGTERNLDLSWSELKKEVTLAVENELQGSVTEYEFSQEEFRNLQQEFWCKFYACCLQYQEALSHPLALHLNPHTNMVCLLKKGYLSFLIPSSLVDHLYLLPYENLLTEDETTISDDVDIARDVICLIKCLRLIEESVTVDMSVIMEMSCYNLQSPEKAAEQILEDMITIDVENVMEDICSKLQEIRNPIHAIGLLIREMDYETEVEMEKGFNPAQPLNIRMNLTQLYGSNTAGYIVCRGVHKIASTRFLICRDLLILQQLLMRLGDAVIWGTGQLFQAQQDLLHRTAPLLLSYYLIKWGSECLATDVPLDTLESNLQHLSVLELTDSGALMANRFVSSPQTIVELFFQEVARKHIISHLFSQPKAPLSQTGLNWPEMITAITSYLLQLLWPSNPGCLFLECLMGNCQYVQLQDYIQLLHPWCQVNVGSCRFMLGRCYLVTGEGQKALECFCQAASEVGKEEFLDRLIRSEDGEIVSTPRLQYYDKVLRLLDVIGLPELVIQLATSAITEAGDDWKSQATLRTCIFKHHLDLGHNSQAYEALTQIPDSSRQLDCLRQLVVVLCERSQLQDLVEFPYVNLHNEVVGIIESRARAVDLMTHNYYELLYAFHIYRHNYRKAGTVMFEYGMRLGREVRTLRGLEKQGNCYLAALNCLRLIRPEYAWIVQPVSGAVYDRPGASPKRNHDGECTAAPTNRQIEILELEDLEKECSLARIRLTLAQHDPSAVAVAGSSSAEEMVTLLVQAGLFDTAISLCQTFKLPLTPVFEGLAFKCIKLQFGGEAAQAEAWAWLAANQLSSVITTKESSATDEAWRLLSTYLERYKVQNNLYHHCVINKLLSHGVPLPNWLINSYKDYQQKVDKATRDLLYRRTL

SEQ ID NO: 58807 - protein, 102 aa, Homo sapiens
  Payload ID: 11493
  Gene Symbol: NUP160
  Gene Name: nucleoporin 160kDa
  ENSP ID: ENSP00000433964
DGGKMAAAGALERSFVELSGAERERPRHFREFTVCSIGTANAVAGAVKYSESAGGFYYVESGKLFSVTRNRFIHWYGVSRGTETEFSNATIAYRLDANSYQG

SEQ ID NO: 58808 - protein, 1749 aa, Homo sapiens
  Payload ID: 11494
  Gene Symbol: NUP188
  Gene Name: nucleoporin 188kDa
  Uniprot ID: Q5SRE5
  ENSP ID: ENSP00000361658
MAAAAGGPCVRSSRELWTILLGRSALRELSQIEAELNKHWRRLLEGLSYYKPPSPSSAEKVKANKDVASPLKELGLRISKFLGLDEEQSVQLLQCYLQEDYRGTRDSVKTVLQDERQSQALILKIADYYYEERTCILRCVLHLLTYFQDERHPYRVEYADCVDKLEKELVSKYRQQFEELYKTEAPTWETHGNLMTERQVSRWFVQCLREQSMLLEIIFLYYAYFEMAPSDLLVLTKMFKEQGFGSRQTNRHLVDETMDPFVDRIGYFSALILVEGMDIESLHKCALDDRRELHQFAQDGLICQDMDCLMLTFGDIPHHAPVLLAWALLRHTLNPEETSSVVRKIGGTAIQLNVFQYLTRLLQSLASGGNDCTTSTACMCVYGLLSFVLTSLELHTLGNQQDIIDTACEVLADPSLPELFWGTEPTSGLGIILDSVCGMFPHLLSPLLQLLRALVSGKSTAKKVYSFLDKMSFYNELYKHKPHDVISHEDGTLWRRQTPKLLYPLGGQTNLRIPQGTVGQVMLDDRAYLVRWEYSYSSWTLFTCEIEMLLHVVSTADVIQHCQRVKPIIDLVHKVISTDLSIADCLLPITSRIYMLLQRLTTVISPPVDVIASCVNCLTVLAARNPAKVWTDLRHTGFLPFVAHPVSSLSQMISAEGMNAGGYGNLLMNSEQPQGEYGVTIAFLRLITTLVKGQLGSTQSQGLVPCVMFVLKEMLPSYHKWRYNSHGVREQIGCLILELIHAILNLCHETDLHSSHTPSLQFLCICSLAYTEAGQTVINIMGIGVDTIDMVMAAQPRSDGAEGQGQGQLLIKTVKLAFSVTNNVIRLKPPSNVVSPLEQALSQHGAHGNNLIAVLAKYIYHKHDPALPRLAIQLLKRLATVAPMSVYACLGNDAAAIRDAFLTRLQSKIEDMRIKVMILEFLTVAVETQPGLIELFLNLEVKDGSDGSKEFSLGMWSCLHAVLELIDSQQQDRYWCPPLLHRAAIAFLHALWQDRRDSAMLVLRTKPKFWENLTSPLFGTLSPPSETSEPSILETCALIMKIICLEIYYVVKGSLDQSLKDTLKKFSIEKRFAYWSGYVKSLAVHVAETEGSSCTSLLEYQMLVSAWRMLLIIATTHADIMHLTDSVVRRQLFLDVLDGTKALLLVPASVNCLRLGSMKCTLLLILLRQWKRELGSVDEILGPLTEILEGVLQADQQLMEKTKAKVFSAFITVLQMKEMKVSDIPQYSQLVLNVCETLQEEVIALFDQTRHSLALGSATEDKDSMETDDCSRSRHRDQRDGVCVLGLHLAKELCEVDEDGDSWLQVTRRLPILPTLLTTLEVSLRMKQNLHFTEATLHLLLTLARTQQGATAVAGAGITQSICLPLLSVYQLSTNGTAQTPSASRKSLDAPSWPGVYRLSMSLMEQLLKTLRYNFLPEALDFVGVHQERTLQCLNAVRTVQSLACLEEADHTVGFILQLSNFMKEWHFHLPQLMRDIQVNLGYLCQACTSLLHSRKMLQHYLQNKNGDGLPSAVAQRVQRPPSAASAAPSSSKQPAADTEASEQQALHTVQYGLLKILSKTLAALRHFTPDVCQILLDQSLDLAEYNFLFALSFTTPTFDSEVAPSFGTLLATVNVALNMLGELDKKKEPLTQAVGLSTQAEGTRTLKSLLMFTMENCFYLLISQAMRYLRDPAVHPRDKQRMKQELSSELSTLLSSLSRYFRRGAPSSPATGVLPSPQGKSTSLSKASPESQEPLIQLVQAFVRHMQR

SEQ ID NO: 58809 - protein, 2012 aa, Homo sapiens
  Payload ID: 11495
  Gene Symbol: NUP205
  Gene Name: nucleoporin 205kDa
  Uniprot ID: Q92621
  ENSP ID: ENSP00000285968
MATPLAVNSAASLWGPYKDIWHKVGNALWRRQPEAVHLLDKILKKHKPDFISLFKNPPKNVQQHEKVQKASTEGVAIQGQQGTRLLPEQLIKEAFILSDLFDIGELAAVELLLAGEHQQPHFPGLTRGLVAVLLYWDGKRCIANSLKALIQSRRGKTWTLELSPELASMTTRFTDELMEQGLTYKVLTLVSQIDVNNEFEKLQRERGLGSEKHRKEVSDLIKECRQSLAESLFAWACQSPLGKEDTLLLIGHLERVTVEANGSLDAVNLALLMALLYCFDISFIEQSTEERDDMIHQLPLLTEKQYIATIHSRLQDSQLWKLPGLQATVRLAWALALRGISQLPDVTALAEFTEADEAMAELAIADNVFLFLMESVVVSEYFYQEEFYIRRVHNLITDFLALMPMKVKQLRNRADEDARMIHMSMQMGNEPPISLRRDLEHLMLLIGELYKKNPFHLELALEYWCPTEPLQTPTIMGSYLGVAHQRPPQRQVVLSKFVRQMGDLLPPTIYIPYLKMLQGLANGPQCAHYCFSLLKVNGSSHVENIQGAGGSPVSWEHFFHSLMLYHEHLRKDLPSADSVQYRHLPSRGITQKEQDGLIAFLQLTSTIITWSENARLALCEHPQWTPVVVILGLLQCSIPPVLKAELLKTLAAFGKSPEIAASLWQSLEYTQILQTVRIPSQRQAIGIEVELNEIESRCEEYPLTRAFCQLISTLVESSFPSNLGAGLRPPGFDPYLQFLRDSVFLRFRTRAYRRAAEKWEVAEVVLEVFYKLLRDYEPQLEDFVDQFVELQGEEIIAYKPPGFSLMYHLLNESPMLELALSLLEEGVKQLDTYAPFPGKKHLEKAVQHCLALLNLTLQKENLFMDLLRESQLALIVCPLEQLLQGINPRTKKADNVVNIARYLYHGNTNPELAFESAKILCCISCNSNIQIKLVGDFTHDQSISQKLMAGFVECLDCEDAEEFVRLEEGSELEKKLVAIRHETRIHILNLLITSLECNPPNLALYLLGFELKKPVSTTNLQDPGVLGCPRTCLHAILNILEKGTEGRTGPVAVRESPQLAELCYQVIYQLCACSDTSGPTMRYLRTSQDFLFSQLQYLPFSNKEYEISMLNQMSWLMKTASIELRVTSLNRQRSHTQRLLHLLLDDMPVKPYSDGEGGIEDENRSVSGFLHFDTATKVRRKILNILDSIDFSQEIPEPLQLDFFDRAQIEQVIANCEHKNLRGQTVCNVKLLHRVLVAEVNALQGMAAIGQRPLLMEEISTVLQYVVGRNKLLQCLHAKRHALESWRQLVEIILTACPQDLIQAEDRQLIIRDILQDVHDKILDDEAAQELMPVVAGAVFTLTAHLSQAVLTEQKETSVLGPAEAHYAFMLDSCFTSPPPEENPLVGFASIGDSSLYIILKKLLDFILKTGGGFQRVRTHLYGSLLYYLQIAQRPDEPDTLEAAKKTMWERLTAPEDVFSKLQRENIAIIESYGAALMEVVCRDACDGHEIGRMLALALLDRIVSVDKQQQWLLYLSNSGYLKVLVDSLVEDDRTLQSLLTPQPPLLKALYTYESKMAFLTRVAKIQQGALELLRSGVIVRLAQCQVYDMRPETDPQSMFGMRDPPMFIPTPVDRYRQILLPALQLCQVILTSSMAQHLQAAGQVLQFLISHSDTIQAILRCQDVSAGSLQELALLTGIISKAALPGILSELDVDVNEGSLMELQGHIGRFQRQCLGLLSRFGGSDRLRQFKFQDDNVEGDKVSKKDEIELAMQQICANVMEYCQSLMLQSSPTFQHAVCLFTPSLSETVNRDGPRQDTQAPVVPYWRLPGLGIIIYLLKQSANDFFSYYDSHRQSVSKLQNVEQLPPDEIKELCQSVMPAGVDKISTAQKYVLARRRLVKVINNRAKLLSLCSFIIETCLFILWRHLEYYLLHCMPTDSQDSLFASRTLFKSRRLQDSFASETNLDFRSGLAIVSQHDLDQLQADAINAFGESLQKKLLDIEGLYSKVRSRYSFIQALVRRIRGLLRISRN

SEQ ID NO: 58810 - protein, 273 aa, Homo sapiens
  Payload ID: 11495
  Gene Symbol: NUP205
  Gene Name: nucleoporin 205kDa
  ENSP ID: ENSP00000475318
  MOD_RES (1)..(1): Any amino acid
XHLYGSLLYYLQIAQRPDEPDTLEAAKKTMWERLTAPEDVFSKLQRENIAIIESYGAALMEVVCRDACDGHEIGRMLALALLDRIVSVDKQQQWLLYLSNSGYLKVLVDSLVEDDRTLQSLLTPQPPLLKALYTYESKMAFLTRVAKIQQGALELLRSGVIVRLAQCQVYDMRPETDPQSMFGMRDPPMFIPTPVDRYRQILLPALQLCQVILTSSMAQHLQAAGQVLQFLISHSDTIQAILRCQDVSAGSLQELALLTGIISKAALPAFYIL

SEQ ID NO: 58811 - protein, 71 aa, Homo sapiens
  Payload ID: 11495
  Gene Symbol: NUP205
  Gene Name: nucleoporin 205kDa
  ENSP ID: ENSP00000475539
  MOD_RES (1)..(1): Any amino acid
XELKKPVSTTNLQDPGVLGCPRTCLHAILNILEKGTEGRTGPVAVRESPQLAELCYQRQSFTMLSRLVSNS

SEQ ID NO: 58812 - protein, 184 aa, Homo sapiens
  Payload ID: 11495
  Gene Symbol: NUP205
  Gene Name: nucleoporin 205kDa
  ENSP ID: ENSP00000475665
  MOD_RES (1)..(1): Any amino acid
XSQKLMAGFVECLDCEDAEEFVRLEEGSELEKKLVAIRHETRIHILNLLITSLECNPPNLALYLLGFELKKPVSTTNLQDPGVLGCPRTCLHAILNILEKGTEGRTGPVAVRESPQLAELCYQLCACSDTSGPTMRYLRTSQDFLFSQLQYLPFSNKEYEISMLNQMSWLMKTASIELRVTSLN

SEQ ID NO: 58813 - protein, 42 aa, Homo sapiens
  Payload ID: 11495
  Gene Symbol: NUP205
  Gene Name: nucleoporin 205kDa
  ENSP ID: ENSP00000475877
  MOD_RES (1)..(1): Any amino acid
XQSVMPAGVDKISTAQKYVLARRRLVKVINNRAKLLSLCSWG

SEQ ID NO: 58814 - protein, 1887 aa, Homo sapiens
  Payload ID: 11496
  Gene Symbol: NUP210
  Gene Name: nucleoporin 210kDa
  Uniprot ID: Q8TEM1
  ENSP ID: ENSP00000254508
MAARGRGLLLLTLSVLLAAGPSAAAAKLNIPKVLLPFTRATRVNFTLEASEGCYRWLSTRPEVASIEPLGLDEQQCSQKAVVQARLTQPARLTSIIFAEDITTGQVLRCDAIVDLIHDIQIVSTTRELYLEDSPLELKIQALDSEGNTFSTLAGLVFEWTIVKDSEADRFSDSHNALRILTFLESTYIPPSYISEMEKAAKQGDTILVSGMKTGSSKLKARIQEAVYKNVRPAEVRLLILENILLNPAYDVYLMVGTSIHYKVQKIRQGKITELSMPSDQYELQLQNSIPGPEGDPARPVAVLAQDTSMVTALQLGQSSLVLGHRSIRMQGASRLPNSTIYVVEPGYLGFTVHPGDRWVLETGRLYEITIEVFDKFSNKVYVSDNIRIETVLPAEFFEVLSSSQNGSYHRIRALKRGQTAIDAALTSVVDQDGGVHILQVPVWNQQEVEIHIPITLYPSILTFPWQPKTGAYQYTIRAHGGSGNFSWSSSSHLVATVTVKGVMTTGSDIGFSVIQAHDVQNPLHFGEMKVYVIEPHSMEFAPCQVEARVGQALELPLRISGLMPGGASEVVTLSDCSHFDLAVEVENQGVFQPLPGRLPPGSEHCSGIRVKAEAQGSTTLLVSYRHGHVHLSAKITIAAYLPLKAVDPSSVALVTLGSSKEMLFEGGPRPWILEPSKFFQNVTAEDTDSIGLALFAPHSSRNYQQHWILVTCQALGEQVIALSVGNKPSLTNPFPAVEPAVVKFVCAPPSRLTLAPVYTSPQLDMSCPLLQQNKQVVPVSSHRNPRLDLAAYDQEGRRFDNFSSLSIQWESTRPVLASIEPELPMQLVSQDDESGQKKLHGLQAILVHEASGTTAITATATGYQESHLSSARTKQPHDPLVPLSASIELILVEDVRVSPEEVTIYNHPGIQAELRIREGSGYFFLNTSTADVVKVAYQEARGVAMVHPLLPGSSTIMIHDLCLVFPAPAKAVVYVSDIQELYIRVVDKVEIGKTVKAYVRVLDLHKKPFLAKYFPFMDLKLRAASPIITLVALDEALDNYTITFLIRGVAIGQTSLTASVTNKAGQRINSAPQQIEVFPPFRLMPRKVTLLIGATMQVTSEGGPQPQSNILFSISNESVALVSAAGLVQGLAIGNGTVSGLVQAVDAETGKVVIISQDLVQVEVLLLRAVRIRAPIMRMRTGTQMPIYVTGITNHQNPFSFGNAVPGLTFHWSVTKRDVLDLRGRHHEASIRLPSQYNFAMNVLGRVKGRTGLRVVVKAVDPTSGQLYGLARELSDEIQVQVFEKLQLLNPEIEAEQILMSPNSYIKLQTNRDGAASLSYRVLDGPEKVPVVHVDEKGFLASGSMIGTSTIEVIAQEPFGANQTIIVAVKVSPVSYLRVSMSPVLHTQNKEALVAVPLGMTVTFTVHFHDNSGDVFHAHSSVLNFATNRDDFVQIGKGPTNNTCVVRTVSVGLTLLRVWDAEHPGLSDFMPLPVLQAISPELSGAMVVGDVLCLATVLTSLEGLSGTWSSSANSILHIDPKTGVAVARAVGSVTVYYEVAGHLRTYKEVVVSVPQRIMARHLHPIQTSFQEATASKVIVAVGDRSSNLRGECTPTQREVIQALHPETLISCQSQFKPAVFDFPSQDVFTVEPQFDTALGQYFCSITMHRLTDKQRKHLSMKKTALVVSASLSSSHFSTEQVGAEVPFSPGLFADQAEILLSNHYTSSEIRVFGAPEVLENLEVKSGSPAVLAFAKEKSFGWPSFITYTVGVLDPAAGSQGPLSTTLTFSSPVTNQAIAIPVTVAFVVDRRGPGPYGASLFQHFLDSYQVMFFTLFALLAGTAVMIIAYHTVCTPRDLAVPAALTPRASPGHSPHYFAASSPTSPNALPPARKASPPSGLWSPAYASH

SEQ ID NO: 58815 - protein, 1736 aa, Homo sapiens
  Payload ID: 11497
  Gene Symbol: NUP210L
  Gene Name: nucleoporin 210kDa-like
  Uniprot ID: Q5VU65
  ENSP ID: ENSP00000271854
MTGCPASSRRRGFGLFFFLRLHRLLLLFLVLRGTLANKLNVPQVLLPFGREPGRVPFLLEAQRGCYTWHSTHHDAVTVEPLYENGTLCSQKAVLIAESTQPIRLSSIILAREIVTDHELRCDVKVDVINSIEIVSRARELYVDDSPLELMVRALDAEGNTFSSLAGMMFEWSIAQDNESAREELSSKIRILKYSEAEYAPPIYIAEMEKEEKQGDVILVSGIRTGAAVVKVRIHEPFYKKVAAALIRLLVLENIFLIPSHDIYLLVGTYIKYQVAKMVQGRVTEVKFPLEHYILELQDHRVALNGSHSEKVAILDDKTAMVTASQLGQTNLVFVHKNVHMRSVSGLPNCTIYVVEPGFLGFTVQPGNRWSLEVGQVYVITVDVFDKSSTKVYISDNLRITYDFPKEYFEEQLTTVNGSYHIVKALKDGVVVINASLTSIIYQNKDIQPIKFLIKHQQEVKIYFPIMLTPKFLAFPHHPMGMLYRYKVQVEGGSGNFTWTSSNETVVIVTTKGVVTAGQVRGNSTVLARDVQNPFRYGEIKIHVLKLNKMELLPFHADVEIGQIIEIPIAMYHINKETKEAMAFTDCSHLSLDLNMDKQGVFTLLKEGIQRPGPMHCSSTHIAAKSLGHTLVTVSVNECDKYLESSATFAAYEPLKALNPVEVALVTWQSVKEMVFEGGPRPWILEPSRFFLELNAEKTEKIGIAQVWLPSKRKQNQYIYRIQCLDLGEQVLTFRIGNHPGVLNPSPAVEVLQVRFICAHPASMSVTPVYKVPAGAQPCPLPQHNKWLIPVSRLRDTVLELAVFDQHRRKFDNFSSLMLEWKSSNETLAHFEDYKSVEMVAKDDGSGQTRLHGHQILKVHQIKGTVLIGVNFVGYSEKKSPKEISNLPRSVDVELLLVDDVTVVPENATIYNHPDVKETFSLVEGSGYFLVNSSEQGVVTITYMEAESSVELVPLHPGFFTLEVYDLCLAFLGPATAHLRVSDIQELELDLIDKVEIDKTVLVTVRVLGSSKRPFQNKYFRNMELKLQLASAIVTLTPMEQQDEYSENYILRATTIGQTTLVAIAKDKMGRKYTSTPRHIEVFPPFRLLPEKMTLIPMNMMQVMSEGGPQPQSIVHFSISNQTVAVVNRRGQVTGKIVGTAVVHGTIQTVNEDTGKVIVFSQDEVQIEVVQLRAVRILAAATRLITATKMPVYVMGVTSTQTPFSFSNANPGLTFHWSMSKRDVLDLVPRHSEVFLQLPVEHNFAMVVHTKAAGRTSIKVTVHCMNSSSGQFEGNLLELSDEVQILVFEKLQLFYPECQPEQILMPINSQLKLHTNREGAAFVSSRVLKCFPNSSVIEEDGEGLLKAGSIAGTAVLEVTSIEPFGVNQTTITGVQVAPVTYLRVSSQPKLYTAQGRTLSAFPLGMSLTFTVQFYNSIGEKFHTHNTQLYLALNRDDLLHIGPGNKNYTYMAQAVNRGLTLVGLWDRRHPGMADYIPVAVEHAIEPDTKLTFVGDIICFSTHLVSQHGEPGIWMISANNILQTDIVTGVGVARSPGTAMIFHDIPGVVKTYREVVVNASSRLMLSYDLKTYLTNTLNSTVFKLFITTGRNGVNLKGFCTPNQALAITKVLLPATLMLCHVQFSNTLLDIPASKVFQVHSDFSMEKDHCEDSAILKRFTGSYQILLLTLFAVLASTASIFLAYNAFLNKIQTVPVVYVPTLGTPQPGFFNSTSSPPHFMSLQPPLAQSRLQHWLWSIRH

SEQ ID NO: 58816 - protein, 669 aa, Homo sapiens
  Payload ID: 11497
  Gene Symbol: NUP210L
  Gene Name: nucleoporin 210kDa-like
  ENSP ID: ENSP00000357541
MGRKYTSTPRHIEVFPPFRLLPEKMTLIPMNMMQVMSEGGPQPQSIVHFSISNQTVAVVNRRGQVTGKIVGTAVVHGTIQTVNEDTGKVIVFSQDEVQIEVVQLRAVRILAAATRLITATKMPVYVMGVTSTQTPFSFSNANPGLTFHWSMSKRDVLDLVPRHSEVFLQLPVEHNFAMVVHTKAAGRTSIKVTVHCMNSSSGQFEGNLLELSDEVQILVFEKLQLFYPECQPEQILMPINSQLKLHTNREGAAFVSSRVLKCFPNSSVIEEDGEGLLKAGSIAGTAVLEVTSIEPFGVNQTTITGVQVAPVTYLRVSSQPKLYTAQGRTLSAFPLGMSLTFTVQFYNSIGEKFHTHNTQLYLALNRDDLLHIGPGNKNYTYMAQAVNRGLTLVGLWDRRHPGMADYIPVAVEHAIEPDTKLTFVGDIICFSTHLVSQHGEPGIWMISANNILQTDIVTGVGVARSPGTAMIFHDIPGVVKTYREVVVNASSRLMLSYDLKTYLTNTLNSTVFKLFITTGRNGVNLKGFCTPNQALAITKVLLPATLMLCHVQFSNTLLDIPASKVFQVHSDFSMEKDHCEDSAILKRFTGSYQILLLTLFAVLASTASIFLAYNAFLNKIQTVPVVYVPTLGTPQPGFFNSTSSPPHFMSLQPPLAQSRLQHWLWSIRH

SEQ ID NO: 58817 - protein, 1888 aa, Homo sapiens
  Payload ID: 11497
  Gene Symbol: NUP210L
  Gene Name: nucleoporin 210kDa-like
  Uniprot ID: Q5VU65
  ENSP ID: ENSP00000357547
MTGCPASSRRRGFGLFFFLRLHRLLLLFLVLRGTLANKLNVPQVLLPFGREPGRVPFLLEAQRGCYTWHSTHHDAVTVEPLYENGTLCSQKAVLIAESTQPIRLSSIILAREIVTDHELRCDVKVDVINSIEIVSRARELYVDDSPLELMVRALDAEGNTFSSLAGMMFEWSIAQDNESAREELSSKIRILKYSEAEYAPPIYIAEMEKEEKQGDVILVSGIRTGAAVVKVRIHEPFYKKVAAALIRLLVLENIFLIPSHDIYLLVGTYIKYQVAKMVQGRVTEVKFPLEHYILELQDHRVALNGSHSEKVAILDDKTAMVTASQLGQTNLVFVHKNVHMRSVSGLPNCTIYVVEPGFLGFTVQPGNRWSLEVGQVYVITVDVFDKSSTKVYISDNLRITYDFPKEYFEEQLTTVNGSYHIVKALKDGVVVINASLTSIIYQNKDIQPIKFLIKHQQEVKIYFPIMLTPKFLAFPHHPMGMLYRYKVQVEGGSGNFTWTSSNETVVIVTTKGVVTAGQVRGNSTVLARDVQNPFRYGEIKIHVLKLNKMELLPFHADVEIGQIIEIPIAMYHINKETKEAMAFTDCSHLSLDLNMDKQGVFTLLKEGIQRPGPMHCSSTHIAAKSLGHTLVTVSVNECDKYLESSATFAAYEPLKALNPVEVALVTWQSVKEMVFEGGPRPWILEPSRFFLELNAEKTEKIGIAQVWLPSKRKQNQYIYRIQCLDLGEQVLTFRIGNHPGVLNPSPAVEVLQVRFICAHPASMSVTPVYKVPAGAQPCPLPQHNKWLIPVSRLRDTVLELAVFDQHRRKFDNFSSLMLEWKSSNETLAHFEDYKSVEMVAKDDGSGQTRLHGHQILKVHQIKGTVLIGVNFVGYSEKKSPKEISNLPRSVDVELLLVDDVTVVPENATIYNHPDVKETFSLVEGSGYFLVNSSEQGVVTITYMEAESSVELVPLHPGFFTLEVYDLCLAFLGPATAHLRVSDIQELELDLIDKVEIDKTVLVTVRVLGSSKRPFQNKYFRNMELKLQLASAIVTLTPMEQQDEYSENYILRATTIGQTTLVAIAKDKMGRKYTSTPRHIEVFPPFRLLPEKMTLIPMNMMQVMSEGGPQPQSIVHFSISNQTVAVVNRRGQVTGKIVGTAVVHGTIQTVNEDTGKVIVFSQDEVQIEVVQLRAVRILAAATRLITATKMPVYVMGVTSTQTPFSFSNANPGLTFHWSMSKRDVLDLVPRHSEVFLQLPVEHNFAMVVHTKAAGRTSIKVTVHCMNSSSGQFEGNLLELSDEVQILVFEKLQLFYPECQPEQILMPINSQLKLHTNREGAAFVSSRVLKCFPNSSVIEEDGEGLLKAGSIAGTAVLEVTSIEPFGVNQTTITGVQVAPVTYLRVSSQPKLYTAQGRTLSAFPLGMSLTFTVQFYNSIGEKFHTHNTQLYLALNRDDLLHIGPGNKNYTYMAQAVNRGLTLVGLWDRRHPGMADYIPVAVEHAIEPDTKLTFVGDIICFSTHLVSQHGEPGIWMISANNILQTDIVTGVGVARSPGTAMIFHDIPGVVKTYREVVVNASSRLMLSYDLKTYLTNTLNSTVFKLFITTGRNGVNLKGFCTPNQALAITKVLLPATLMLCHVQFSNTLLDIPASKVFQVHSDFSMEKGVYVCIIKVRPQSEELLQALSVADTSVYGWATLVSERSKNGMQRILIPFIPAFYINQSELVLSHKQDIGEIRVLGVDRVLRKLEVISSSPVLVVAGHSHSPLTPGLAIYSVRVVNFTSFQQMASPVFINISCVLTSQSEAVVVRAMKDKLGADHCEDSAILKRFTGSYQILLLTLFAVLASTASIFLAYNAFLNKIQTVPVVYVPTLGTPQPGFFNSTSSPPHFMSLQPPLAQSRLQHWLWSIRH

SEQ ID NO: 58818 - protein, 2090 aa, Homo sapiens
  Payload ID: 11498
  Gene Symbol: NUP214
  Gene Name: nucleoporin 214kDa
  Uniprot ID: P35658
  ENSP ID: ENSP00000352400
MGDEMDAMIPEREMKDFQFRALKKVRIFDSPEELPKERSSLLAVSNKYGLVFAGGASGLQIFPTKNLLIQNKPGDDPNKIVDKVQGLLVPMKFPIHHLALSCDNLTLSACMMSSEYGSIIAFFDVRTFSNEAKQQKRPFAYHKLLKDAGGMVIDMKWNPTVPSMVAVCLADGSIAVLQVTETVKVCATLPSTVAVTSVCWSPKGKQLAVGKQNGTVVQYLPTLQEKKVIPCPPFYESDHPVRVLDVLWIGTYVFAIVYAAADGTLETSPDVVMALLPKKEEKHPEIFVNFMEPCYGSCTERQHHYYLSYIEEWDLVLAASAASTEVSILARQSDQINWESWLLEDSSRAELPVTDKSDDSLPMGVVVDYTNQVEITISDEKTLPPAPVLMLLSTDGVLCPFYMINQNPGVKSLIKTPERLSLEGERQPKSPGSTPTTPTSSQAPQKLDASAAAAPASLPPSSPAAPIATFSLLPAGGAPTVFSFGSSSLKSSATVTGEPPSYSSGSDSSKAAPGPGPSTFSFVPPSKASLAPTPAASPVAPSAASFSFGSSGFKPTLESTPVPSVSAPNIAMKPSFPPSTSAVKVNLSEKFTAAATSTPVSSSQSAPPMSPFSSASKPAASGPLSHPTPLSAPPSSVPLKSSVLPSPSGRSAQGSSSPVPSMVQKSPRITPPAAKPGSPQAKSLQPAVAEKQGHQWKDSDPVMAGIGEEIAHFQKELEELKARTSKACFQVGTSEEMKMLRTESDDLHTFLLEIKETTESLHGDISSLKTTLLEGFAGVEEAREQNERNRDSGYLHLLYKRPLDPKSEAQLQEIRRLHQYVKFAVQDVNDVLDLEWDQHLEQKKKQRHLLVPERETLFNTLANNREIINQQRKRLNHLVDSLQQLRLYKQTSLWSLSSAVPSQSSIHSFDSDLESLCNALLKTTIESHTKSLPKVPAKLSPMKQAQLRNFLAKRKTPPVRSTAPASLSRSAFLSQRYYEDLDEVSSTSSVSQSLESEDARTSCKDDEAVVQAPRHAPVVRTPSIQPSLLPHAAPFAKSHLVHGSSPGVMGTSVATSASKIIPQGADSTMLATKTVKHGAPSPSHPISAPQAAAAAALRRQMASQAPAVNTLTESTLKNVPQVVNVQELKNNPATPSTAMGSSVPYSTAKTPHPVLTPVAANQAKQGSLINSLKPSGPTPASGQLSSGDKASGTAKIETAVTSTPSASGQFSKPFSFSPSGTGFNFGIITPTPSSNFTAAQGATPSTKESSQPDAFSSGGGSKPSYEAIPESSPPSGITSASNTTPGEPAASSSRPVAPSGTALSTTSSKLETPPSKLGELLFPSSLAGETLGSFSGLRVGQADDSTKPTNKASSTSLTSTQPTKTSGVPSGFNFTAPPVLGKHTEPPVTSSATTTSVAPPAATSTSSTAVFGSLPVTSAGSSGVISFGGTSLSAGKTSFSFGSQQTNSTVPPSAPPPTTAATPLPTSFPTLSFGSLLSSATTPSLPMSAGRSTEEATSSALPEKPGDSEVSASAASLLEEQQSAQLPQAPPQTSDSVKKEPVLAQPAVSNSGTAASSTSLVALSAEATPATTGVPDARTEAVPPASSFSVPGQTAVTAAAISSAGPVAVETSSTPIASSTTSIVAPGPSAEAAAFGTVTSGSSVFAQPPAASSSSAFNQLTNNTATAPSATPVFGQVAASTAPSLFGQQTGSTASTAAATPQVSSSGFSSPAFGTTAPGVFGQTTFGQASVFGQSASSAASVFSFSQPGFSSVPAFGQPASSTPTSTSGSVFGAASSTSSSSSFSFGQSSPNTGGGLFGQSNAPAFGQSPGFGQGGSVFGGTSAATTTAATSGFSFCQASGFGSSNTGSVFGQAASTGGIVFGQQSSSSSGSVFGSGNTGRGGGFFSGLGGKPSQDAANKNPFSSASGGFGSTATSNTSNLFGNSGAKTFGGFASSSFGEQKPTGTFSSGGGSVASQGFGFSSPNKTGGFGAAPVFGSPPTFGGSPGFGGVPAFGSAPAFTSPLGSTGGKVFGEGTAAASAGGFGFGSSSNTTSFGTLASQNAPTFGSLSQQTSGFGTQSSGFSGFGSGTGGFSFGSNNSSVQGFGGWRS

SEQ ID NO: 58819 - protein, 2080 aa, Homo sapiens
  Payload ID: 11498
  Gene Symbol: NUP214
  Gene Name: nucleoporin 214kDa
  Uniprot ID: P35658
  ENSP ID: ENSP00000396576
MGDEMDAMIPEREMKDFQFRALKKVRIFDSPEELPKERSSLLAVSNKYGLVFAGGASGLQIFPTKNLLIQNKPGDDPNKIVDKVQGLLVPMKFPIHHLALSCDNLTLSACMMSSEYGSIIAFFDVRTFSNEAKQQKRPFAYHKLLKDAGGMVIDMKWNPTVPSMVAVCLADGSIAVLQVTETVKVCATLPSTVAVTSVCWSPKGKQLAVGKQNGTVVQYLPTLQEKKVIPCPPFYESDHPVRVLDVLWIGTYVFAIVYAAADGTLETSPDVVMALLPKKEEKHPEIFVNFMEPCYGSCTERQHHYYLSYIEEWDLVLAASAASTEVSILARQSDQINWESWLLEDSSRAELPVTDKSDDSLPMGVVVDYTNQVEITISDEKTLPPAPVLMLLSTDGVLCPFYMINQNPGVKSLIKTPERLSLEGERQPKSPGSTPTTPTSSQAPQKLDASAAAAPASLPPSSPAAPIATFSLLPAGGAPTVFSFGSSSLKSSATVTGEPPSYSSGSDSSKAAPGPGPSTFSFVPPSKASLAPTPAASPVAPSAASFSFGSSGFKPTLESTPVPSVSAPNIAMKPSFPPSTSAVKVNLSENSSQSAPPMSPFSSASKPAASGPLSHPTPLSAPPSSVPLKSSVLPSPSAGRSAQGSSSPVPSMVQKSPRITPPAAKPGSPQAKSLQPAVAEKQGHQWKDSDPVMAGIGEEIAHFQKELEELKARTSKACFQVGTSEEMKMLRTESDDLHTFLLEIKETTESLHGDISSLKTTLLEGFAGVEEAREQNERNRDSGYLHLLYKRPLDPKSEAQLQEIRRLHQYVKFAVQDVNDVLDLEWDQHLEQKKKQRHLLVPERETLFNTLANNREIINQQRKRLNHLVDSLQQLRLYKQTSLWSLSSAVPSQSSIHSFDSDLESLCNALLKTTIESHTKSLPKVPAKLSPMKQAQLRNFLAKRKTPPVRSTAPASLSRSAFLSQRYYEDLDEVSSTSSVSQSLESEDARTSCKDDEAVVQAPRHAPVVRTPSIQPSLLPHAAPFAKSHLVHGSSPGVMGTSVATSASKIIPQGADSTMLATKTVKHGAPSPSHPISAPQAAAAAALRRQMASQAPAVNTLTESTLKNVPQVVNVQELKNNPATPSTAMGSSVPYSTAKTPHPVLTPVAANQAKQGSLINSLKPSGPTPASGQLSSGDKASGTAKIETAVTSTPSASGQFSKPFSFSPSGTGFNFGIITPTPSSNFTAAQGATPSTKESSQPDAFSSGGGSKPSYEAIPESSPPSGITSASNTTPGEPAASSSRPVAPSGTALSTTSSKLETPPSKLGELLFPSSLAGETLGSFSGLRVGQADDSTKPTNKASSTSLTSTQPTKTSGVPSGFNFTAPPVLGKHTEPPVTSSATTTSVAPPAATSTSSTAVFGSLPVTSAGSSGVISFGGTSLSAGKTSFSFGSQQTNSTVPPSAPPPTTAATPLPTSFPTLSFGSLLSSATTPSLPMSAGRSTEEATSSALPEKPGDSEVSASAASLLEEQQSAQLPQAPPQTSDSVKKEPVLAQPAVSNSGTAASSTSLVALSAEATPATTGVPDARTEAVPPASSFSVPGQTAVTAAAISSAGPVAVETSSTPIASSTTSIVAPGPSAEAAAFGTVTSGSSVFAQPPAASSSSAFNQLTNNTATAPSATPVFGQVAASTAPSLFGQQTGSTASTAAATPQVSSSGFSSPAFGTTAPGVFGQTTFGQASVFGQSASSAASVFSFSQPGFSSVPAFGQPASSTPTSTSGSVFGAASSTSSSSSFSFGQSSPNTGGGLFGQSNAPAFGQSPGFGQGGSVFGGTSAATTTAATSGFSFCQASGFGSSNTGSVFGQAASTGGIVFGQQSSSSSGSVFGSGNTGRGGGFFSGLGGKPSQDAANKNPFSSASGGFGSTATSNTSNLFGNSGAKTFGGFASSSFGEQKPTGTFSSGGGSVASQGFGFSSPNKTGGFGAAPVFGSPPTFGGSPGFGGVPAFGSAPAFTSPLGSTGGKVFGEGTAAASAGGFGFGSSSNTTSFGTLASQNAPTFGSLSQQTSGFGTQSSGFSGFGSGTGGFSFGSNNSSVQGFGGWRS

SEQ ID NO: 58820 - protein, 1519 aa, Homo sapiens
  Payload ID: 11498
  Gene Symbol: NUP214
  Gene Name: nucleoporin 214kDa
  ENSP ID: ENSP00000405014
MKPSFPPSTSAVKVNLSEKFTAAATSTPVSSSQSAPPMSPFSSASKPAASGPLSHPTPLSAPPSSVPLKSSVLPSPSGRSAQGSSSPVPSMVQKSPRITPPAAKPGSPQAKSLQPAVAEKQGHQWKDSDPVMAGIGEEIAHFQKELEELKARTSKACFQVGTSEEMKMLRTESDDLHTFLLEIKETTESLHGDISSLKTTLLEGFAGVEEAREQNERNRDSGYLHLLYKRPLDPKSEAQLQEIRRLHQYVKFAVQDVNDVLDLEWDQHLEQKKKQRHLLVPERETLFNTLANNREIINQQRKRLNHLVDSLQQLRLYKQTSLWSLSSAVPSQSSIHSFDSDLESLCNALLKTTIESHTKSLPKVPAKLSPMKQAQLRNFLAKRKTPPVRSTAPASLSRSAFLSQRYYEDLDEVSSTSSVSQSLESEDARTSCKDDEAVVQAPRHAPVVRTPSIQPSLLPHAAPFAKSHLVHGSSPGVMGTSVATSASKIIPQGADSTMLATKTVKHGAPSPSHPISAPQAAAAAALRRQMASQAPAVNTLTESTLKNVPQVVNVQELKNNPATPSTAMGSSVPYSTAKTPHPVLTPVAANQAKQGSLINSLKPSGPTPASGQLSSGDKASGTAKIETAVTSTPSASGQFSKPFSFSPSGTGFNFGIITPTPSSNFTAAQGATPSTKESSQPDAFSSGGGSKPSYEAIPESSPPSGITSASNTTPGEPAASSSRPVAPSGTALSTTSSKLETPPSKLGELLFPSSLAGETLGSFSGLRVGQADDSTKPTNKASSTSLTSTQPTKTSGVPSGFNFTAPPVLGKHTEPPVTSSATTTSVAPPAATSTSSTAVFGSLPVTSAGSSGVISFGGTSLSAGKTSFSFGSQQTNSTVPPSAPPPTTAATPLPTSFPTLSFGSLLSSATTPSLPMSAGRSTEEATSSALPEKPGDSEVSASAASLLEEQQSAQLPQAPPQTSDSVKKEPVLAQPAVSNSGTAASSTSLVALSAEATPATTGVPDARTEAVPPASSFSVPGQTAVTAAAISSAGPVAVETSSTPIASSTTSIVAPGPSAEAAAFGTVTSGSSVFAQPPAASSSSAFNQLTNNTATAPSATPVFGQVAASTAPSLFGQQTGSTASTAAATPQVSSSGFSSPAFGTTAPGVFGQTTFGQASVFGQSASSAASVFSFSQPGFSSVPAFGQPASSTPTSTSGSVFGAASSTSSSSSFSFGQSSPNTGGGLFGQSNAPAFGQSPGFGQGGSVFGGTSAATTTAATSGFSFCQASGFGSSNTGSVFGQAASTGGIVFGQQSSSSSGSVFGSGNTGRGGGFFSGLGGKPSQDAANKNPFSSASGGFGSTATSNTSNLFGNSGAKTFGGFASSSFGEQKPTGTFSSGGGSVASQGFGFSSPNKTGGFGAAPVFGSPPTFGGSPGFGGVPAFGSAPAFTSPLGSTGGKVFGEGTAAASAGGFGFGSSSNTTSFGTLASQNAPTFGSLSQQTSGFGTQSSGFSGFGSGTGGFSFGSNNSSVQGFGGWRS

SEQ ID NO: 58821 - protein, 967 aa, Homo sapiens
  Payload ID: 11498
  Gene Symbol: NUP214
  Gene Name: nucleoporin 214kDa
  ENSP ID: ENSP00000416934
  MOD_RES (1)..(1): Any amino acid
XKTPHPVLTPVAANQAKQGSLINSLKPSGPTPASGQLSSGDKASGTAKIETAVTSTPSASGQFSKPFSFSPSGTGFNFGIITPTPSSNFTAAQGATPSTKESSQPDAFSSGGGSKPSYEAIPESSPPSGITSASNTTPGEPAASSSRPVAPSGTALSTTSSKLETPPSKLGELLFPSSLAGETLGSFSGLRVGQADDSTKPTNKASSTSLTSTQPTKTSGVPSGFNFTAPPVLGKHTEPPVTSSATTTSVAPPAATSTSSTAVFGSLPVTSAGSSGVISFGGTSLSAGKTSFSFGSQQTNSTVPPSAPPPTTAATPLPTSFPTLSFGSLLSSATTPSLPMSAGRSTEEATSSALPEKPGDSEVSASAASLLEEQQSAQLPQAPPQTSDSVKKEPVLAQPAVSNSGTAASSTSLVALSAEATPATTGVPDARTEAVPPASSFSVPGQTAVTAAAISSAGPVAVETSSTPIASSTTSIVAPGPSAEAAAFGTVTSGSSVFAQPPAASSSSAFNQLTNNTATAPSATPVFGQVAASTAPSLFGQQTGSTASTAAATPQVSSSGFSSPAFGTTAPGVFGQTTFGQASVFGQSASSAASVFSFSQPGFSSVPAFGQPASSTPTSTSGSVFGAASSTSSSSSFSFGQSSPNTGGGLFGQSNAPAFGQSPGFGQGGSVFGGTSAATTTAATSGFSFCQASGFGSSNTGSVFGQAASTGGIVFGQQSSSSSGSVFGSGNTGRGGGFFSGLGGKPSQDAANKNPFSSASGGFGSTATSNTSNLFGNSGAKTFGGFASSSFGEQKPTGTFSSGGGSVASQGFGFSSPNKTGGFGAAPVFGSPPTFGGSPGFGGVPAFGSAPAFTSPLGSTGGKVFGEGTAAASAGGFGSLAMSLSPTLKGRLLLMRPKAGGGREQAAPGRKSNESRSLGHLCMERALTSPLKVWEQQQHHILRHARESECPHFRITVPTDFWFWDPE

SEQ ID NO: 58822 - protein, 145 aa, Homo sapiens
  Payload ID: 11498
  Gene Symbol: NUP214
  Gene Name: nucleoporin 214kDa
  ENSP ID: ENSP00000433606
  MOD_RES (1)..(1): Any amino acid
XGVPAFGSAPAFTSPLGSTGGKVFGEGTAAASAGGFGFGSSSNTTSFGTLASQNAPTFGSLSQQTSGFGTQSSGFSGFGSGTGGLSRVLVAGEAEGVSAGLSIPGTNRILSFFPEKCWSRLFRPTLPSKHIHPERNNRNQNSQGA

SEQ ID NO: 58823 - protein, 78 aa, Homo sapiens
  Payload ID: 11498
  Gene Symbol: NUP214
  Gene Name: nucleoporin 214kDa
  ENSP ID: ENSP00000433654
GEGTAAASAGGFGFGSSSNTTSFGTLASQNAPTFGSLSQQTSGFGTQSSGFSGFGSGTGGFSFGSNNSSVQGFGGWRS

SEQ ID NO: 58824 - protein, 187 aa, Homo sapiens
  Payload ID: 11498
  Gene Symbol: NUP214
  Gene Name: nucleoporin 214kDa
  ENSP ID: ENSP00000434223
  MOD_RES (1)..(1): Any amino acid
XARQSDQINWESWLLEDSSRAELPVTDKSDDSLPMGVVVDYTNQVEITISDEKTLPPAPVLMLLSTDGVLCPFYMINQNPGVKSLIKTPERLSLEGERQPKSPASLAPTPAASPVAPSAASFSFGSSGFKPTLESTPVPSVSAPNIAMKPSFPPSTSAVKVNLSEKFTAAATSTPVSSSQSAPPMSP

SEQ ID NO: 58825 - protein, 495 aa, Homo sapiens
  Payload ID: 11498
  Gene Symbol: NUP214
  Gene Name: nucleoporin 214kDa
  ENSP ID: ENSP00000435364
MKSSLLLRGVHFCFHLPGATPSTKESSQPDAFSSGGGSKPSYEAIPESSPPSGITSASNTTPGEPAASSSRPVAPSGTALSTTSSKLETPPSKLGELLFPSSLAGETLGSFSGLRVGQADDSTKPTNKASSTSLTSTQPTKTSGVPSGFNFTAPPVLGKHTEPPVTSSATTTSVAPPAATSTSSTAVFGSLPVTSAGSSGVISFGGTSLSAGKTSFSFGSQQTNSTVPPSAPPPTTAATPLPTSFPTLSFGSLLSSATTPSLPMSAGRSTEEATSSALPEKPGDSEVSASAASLLEEQQSAQLPQAPPQTSDSVKKEPVLAQPAVSNSGTAASSTSLVALSAEATPATTGVPDARTEAVPPASSFSVPGQTAVTAAAISSAGPVAVETSSTPIASSTTSIVAPGPSAEAAAFGTVTSGSSVFAQPPAASSSSAFNQLTNNTATAPSATPVFGQVAASTAPSLFGQQTGSTASTAAATPQVSSSGFSSPAFGTTAP

SEQ ID NO: 58826 - protein, 113 aa, Homo sapiens
  Payload ID: 11498
  Gene Symbol: NUP214
  Gene Name: nucleoporin 214kDa
  ENSP ID: ENSP00000435583
LQCLAALLLLGDPLGLEGCQHSVQPQPLQALWARREAKCSERALQLPAQEDSGLGAAATPHPSARSRVRMPPLSDHCPNRLLVLGPRVADSLVLDQAQEGSALGQITRKYPPF

SEQ ID NO: 58827 - protein, 52 aa, Homo sapiens
  Payload ID: 11498
  Gene Symbol: NUP214
  Gene Name: nucleoporin 214kDa
  ENSP ID: ENSP00000435874
MKFPIHHLALSCDNLTLSACMMSSEYGSIIAFFDVRTFSNEAKQQKRPFAYH

SEQ ID NO: 58828 - protein, 916 aa, Homo sapiens
  Payload ID: 11498
  Gene Symbol: NUP214
  Gene Name: nucleoporin 214kDa
  ENSP ID: ENSP00000436793
MKSSLLLRGVHFCFHLPGTAKIETAVTSTPSASGQFSKPFSFSPSGTGFNFGIITPTPSSNFTAAQGATPSTKESSQPDAFSSGGGSKPSYEAIPESSPPSGITSASNTTPGEPAASSSRPVAPSGTALSTTSSKLETPPSKLGELLFPSSLAGETLGSFSGLRVGQADDSTKPTNKASSTSLTSTQPTKTSGVPSGFNFTAPPVLGKHTEPPVTSSATTTSVAPPAATSTSSTAVFGSLPVTSAGSSGVISFGGTSLSAGKTSFSFGSQQTNSTVPPSAPPPTTAATPLPTSFPTLSFGSLLSSATTPSLPMSAGRSTEEATSSALPEKPGDSEVSASAASLLEEQQSAQLPQAPPQTSDSVKKEPVLAQPAVSNSGTAASSTSLVALSAEATPATTGVPDARTEAVPPASSFSVPGQTAVTAAAISSAGPVAVETSSTPIASSTTSIVAPGPSAEAAAFGTVTSGSSVFAQPPAASSSSAFNQLTNNTATAPSATPVFGQVAASTAPSLFGQQTGSTASTAAATPQVSSSGFSSPAFGTTAPGVFGQTTFGQASVFGQSASSAASVFSFSQPGFSSVPAFGQPASSTPTSTSGSVFGAASSTSSSSSFSFGQSSPNTGGGLFGQSNAPAFGQSPGFGQGGSVFGGTSAATTTAATSGFSFCQASGFGSSNTGSVFGQAASTGGIVFGQQSSSSSGSVFGSGNTGRGGGFFSGLGGKPSQDAANKNPFSSASGGFGSTATSNTSNLFGNSGAKTFGGFASSSFGEQKPTGTFSSGGGSVASQGFGFSSPNKTGGFGAAPVFGSPPTFGGSPGFGGVPAFGSAPAFTSPLGSTGGKVFGEGTAAASAGGFGFGSSSNTTSFGTLASQNAPTFGSLSQQTSGFGTQSSGFSGFGSGTGGFSFGSNNSSVQGFGGWRS

SEQ ID NO: 58829 - protein, 140 aa, Homo sapiens
  Payload ID: 11498
  Gene Symbol: NUP214
  Gene Name: nucleoporin 214kDa
  ENSP ID: ENSP00000437139
CKDDEAVVQAPRHAPVVRTPSIQPSLLPHAAPFAKSHLVHGSSPGVMGTSVATSASKIIPQGADSTMLATKTVKHGAPSPSHPISAPQAAAAAALRRQMASQAPAVNTLTESTLKNVPQVVNVQELKNNPATPSTAMGGL

SEQ ID NO: 58830 - protein, 326 aa, Homo sapiens
  Payload ID: 11499
  Gene Symbol: NUP35
  Gene Name: nucleoporin 35kDa
  Uniprot ID: Q8NFH5
  ENSP ID: ENSP00000295119
MAAFAVEPQGPALGSEPMMLGSPTSPKPGVNAQFLPGFLMGDLPAPVTPQPRSISGPSVGVMEMRSPLLAGGSPPQPVVPAHKDKSGAPPVRSIYDDISSPGLGSTPLTSRRQPNISVMQSPLVGVTSTPGTGQSMFSPASIGQPRKTTLSPAQLDPFYTQGDSLTSEDHLDDSWVTVFGFPQASASYILLQFAQYGNILKHVMSNTGNWMHIRYQSKLQARKALSKDGRIFGESIMIGVKPCIDKSVMESSDRCALSSPSLAFTPPIKTLGTPTQPGSTPRISTMRPLATAYKASTSDYQVISDRQTPKKDESLVSKAMEYMFGW

SEQ ID NO: 58831 - protein, 152 aa, Homo sapiens
  Payload ID: 11499
  Gene Symbol: NUP35
  Gene Name: nucleoporin 35kDa
  ENSP ID: ENSP00000364066
MAAFAVEPQGPALGSEPMMLGSPTSPKPGVNAQFLPGFLMGDLPAPVTPQPRSISGPSVGVMEMRSPLLAGGSPPQPVVPAHKDKSGAPPVRSIYDDISSPGLGSTPLTSRRQPNISVMQSPLVGVTSTPGTGFLKHLLPTYYYNLHSMGIS

SEQ ID NO: 58832 - protein, 309 aa, Homo sapiens
  Payload ID: 11499
  Gene Symbol: NUP35
  Gene Name: nucleoporin 35kDa
  Uniprot ID: Q8NFH5
  ENSP ID: ENSP00000387305
MMLGSPTSPKPGVNAQFLPGFLMGDLPAPVTPQPRSISGPSVGVMEMRSPLLAGGSPPQPVVPAHKDKSGAPPVRSIYDDISSPGLGSTPLTSRRQPNISVMQSPLVGVTSTPGTGQSMFSPASIGQPRKTTLSPAQLDPFYTQGDSLTSEDHLDDSWVTVFGFPQASASYILLQFAQYGNILKHVMSNTGNWMHIRYQSKLQARKALSKDGRIFGESIMIGVKPCIDKSVMESSDRCALSSPSLAFTPPIKTLGTPTQPGSTPRISTMRPLATAYKASTSDYQVISDRQTPKKDESLVSKAMEYMFGW

SEQ ID NO: 58833 - protein, 53 aa, Homo sapiens
  Payload ID: 11499
  Gene Symbol: NUP35
  Gene Name: nucleoporin 35kDa
  ENSP ID: ENSP00000393130
MMLGSPTSPKPGVNAQFLPGFLMGDLPAPVTPQPRSISGPSVGVMEMRSPLLA

SEQ ID NO: 58834 - protein, 76 aa, Homo sapiens
  Payload ID: 11499
  Gene Symbol: NUP35
  Gene Name: nucleoporin 35kDa
  ENSP ID: ENSP00000403819
MMLGSPTSPKPGVNAQFLPGFLMGDLPAPVTPQPRSISGPSVGVMEMRSPLLAGGSPPQPVVPAHKDKSGAPPVRS

SEQ ID NO: 58835 - protein, 136 aa, Homo sapiens
  Payload ID: 11499
  Gene Symbol: NUP35
  Gene Name: nucleoporin 35kDa
  ENSP ID: ENSP00000412311
MAAFAVEPQGPALGSEPMMLGSPTSPKPGVNAQFLPGFLMGDLPAPVTPQPRSISGPSVGVMEMRSPLLAGGSPPQPVVPAHKDKSGAPPVRSIYDDISSPGLGSTPLTSRRQGPQQGPDQLPRLECSGTVITLQP

SEQ ID NO: 58836 - protein, 115 aa, Homo sapiens
  Payload ID: 11499
  Gene Symbol: NUP35
  Gene Name: nucleoporin 35kDa
  ENSP ID: ENSP00000412554
MMLGSPTSPKPGVNAQFLPGFLMGDLPAPVTPQPRSISGPSVGVMEMRSPLLAGGSPPQPVVPAHKDKSGAPPVRSIYDDISSPGLGSTPLTSRRQPNISVMQSPLVGVTSTPGT

SEQ ID NO: 58837 - protein, 326 aa, Homo sapiens
  Payload ID: 11500
  Gene Symbol: NUP37
  Gene Name: nucleoporin 37kDa
  Uniprot ID: Q8NFH4
  ENSP ID: ENSP00000251074
MKQDASRNAAYTVDCEDYVHVVEFNPFENGDSGNLIAYGGNNYVVIGTCTFQEEEADVEGIQYKTLRTFHHGVRVDGIAWSPETRLDSLPPVIKFCTSAADMKIRLFTSDLQDKNEYKVLEGHTDFINGLVFDPKEGQEIASVSDDHTCRIWNLEGVQTAHFVLHSPGMSVCWHPEETFKLMVAEKNGTIRFYDLLAQQAILSLESEQVPLMSAHWCLKNTFKVGAVAGNDWLIWDITRSSYPQNKRPVHMDRACLFRWSTISENLFATTGYPGKMASQFQIHHLGHPQPILMGSVAVGSGLSWHRTLPLCVIGGDHKLLFWVTEV

SEQ ID NO: 58838 - protein, 31 aa, Homo sapiens
  Payload ID: 11500
  Gene Symbol: NUP37
  Gene Name: nucleoporin 37kDa
  ENSP ID: ENSP00000447284
IWNLEGVQTAHFVLHSPGMSVCWHPEETFKI

SEQ ID NO: 58839 - protein, 326 aa, Homo sapiens; identical to SEQ ID NO: 58837
  Payload ID: 11500
  Gene Symbol: NUP37
  Gene Name: nucleoporin 37kDa
  Uniprot ID: Q8NFH4
  ENSP ID: ENSP00000448054

SEQ ID NO: 58840 - protein, 208 aa, Homo sapiens
  Payload ID: 11500
  Gene Symbol: NUP37
  Gene Name: nucleoporin 37kDa
  ENSP ID: ENSP00000448086
MKQDASRNAAYTVDCEDYVHVVEFNPFENGDSGNLIAYGGNNYVVIGTCTFQEEEADVEGIQYKTLRTFHHGVRVDGIAWSPETRLDSLPPVIKFCTSAADMKIRLFTSDLQDKNEYKVLEGHTDFINGLVFDPKEGQEIASVSDDHTCSYPQNKRPVHMDRACLFRWSTISENLFATTGYPGKMASQFQIHHLGHPQPILMGSVAVG

SEQ ID NO: 58841 - protein, 51 aa, Homo sapiens
  Payload ID: 11500
  Gene Symbol: NUP37
  Gene Name: nucleoporin 37kDa
  ENSP ID: ENSP00000449982
MKQDASRNAAYTVDCEDYVHVVEFNPFENGDSGNLIAYGGNNYVVIGTCTF

SEQ ID NO: 58842 - protein, 380 aa, Homo sapiens
  Payload ID: 11501
  Gene Symbol: NUP43
  Gene Name: nucleoporin 43kDa
  Uniprot ID: Q8NFH3
  ENSP ID: ENSP00000342262
MEEIYAKFVSQKISKTRWRPLPPGSLQTAETFATGSWDNEENYISLWSIGDFGNLDSDGGFEGDHQLLCDIRHHGDVMDLQFFDQERIVAASSTGCVTVFLHHPNNQTLSVNQQWTTAHYHTGPGSPSYSSAPCTGVVCNNPEIVTVGEDGRINLFRADHKEAVRTIDNADSSTLHAVTFLRTPEILTVNSIGQLKIWDFRQQGNEPSQILSLTGDRVPLHCVDRHPNQQHVVATGGQDGMLSIWDVRQGTMPVSLLKAHEAEMWEVHFHPSNPEHLFTCSEDGSLWHWDASTDVPEKSSLFHQGGRSSTFLSHSISNQANVHQSVISSWLSTDPAKDRIEITSLLPSRSLSVNTLDVLGPCLVCGTDAEAIYVTRHLFS

SEQ ID NO: 58843 - protein, 187 aa, Homo sapiens
  Payload ID: 11501
  Gene Symbol: NUP43
  Gene Name: nucleoporin 43kDa
  ENSP ID: ENSP00000356372
MEEIYAKFVSQKISKTRWRPLPPGSLQTAETFATGSWDNEENYISLWSIGDFGNLDSDGGFEGDHQLLCDIRHHGDVMDLQFFDQERIVAASSTGCVTVFLHHPNNQTLSVNQQWTTAHYHTGPGSPSYSSAPCTGVVCNNPEIVTVGEDGRINLFRADHKEAVRTIGLVTECHSTVLIDIPTNSML

SEQ ID NO: 58844 - protein, 284 aa, Homo sapiens
  Payload ID: 11501
  Gene Symbol: NUP43
  Gene Name: nucleoporin 43kDa
  Uniprot ID: Q8NFH3
  ENSP ID: ENSP00000356374
MEEIYAKFVSQKISKTRWRPLPPGSLQTAETFATGSWDNEENYISLWSIGDFGNLDSDGGFEGDHQLLCDIRHHGDVMDLQFFDQERIVAASSTGCVTVFLHHPNNQTLSVNQQWTTAHYHTGPGSPSYSSAPCTGVVCNNPEIVTVGEDGRINLFRADHKEAVRTIVWEVHFHPSNPEHLFTCSEDGSLWHWDASTDVPEKSSLFHQGGRSSTFLSHSISNQANVHQSVISSWLSTDPAKDRIEITSLLPSRSLSVNTLDVLGPCLVCGTDAEAIYVTRHLFS

SEQ ID NO: 58845 - protein, 117 aa, Homo sapiens
  Payload ID: 11501
  Gene Symbol: NUP43
  Gene Name: nucleoporin 43kDa
  ENSP ID: ENSP00000385078
MEEIYAKFVSQKISKTRWRPLPPGSLQTAETFATGSWDNEENYISLWSIGDFGNLDSDGGFEGDHQLLCDIRHHGDVMDLQFFDQERIVAASSTGCVTVFLHHPNNQTMQIVVHSML

SEQ ID NO: 58846 - protein, 178 aa, Homo sapiens
  Payload ID: 11501
  Gene Symbol: NUP43
  Gene Name: nucleoporin 43kDa
  ENSP ID: ENSP00000438031
MEEIYAKFVSQKISKTRWRPLPPGSLQTAETFATGSWDNETKLSVLQENYISLWSIGDFGNLDSDGGFEGDHQLLCDIRHHGDVMDLQFFDQERIVAASSTGCVTVFLHHPNNQTLSVNQQWTTAHYHTGPGSPSYSSAPCTGVVCNNPEIVTVGEDGRINLFRADHKEAVRTIDNAD

SEQ ID NO: 58847 - protein, 468 aa, Homo sapiens
  Payload ID: 11502
  Gene Symbol: NUP50
  Gene Name: nucleoporin 50kDa
  Uniprot ID: Q9UKX7
  ENSP ID: ENSP00000345895
MAKRNAEKELTDRNWDQEDEAEEVGTFSMASEEVLKNRAIKKAKRRNVGFESDTGGAFKGFKGLVVPSGGGRFSGFGSGAGGKPLEGLSNGNNITSAPPFASAKAAADPKVAFGSLAANGPTTLVDKVSNPKTNGDSQQPSSSGLASSKACVGNAYHKQLAALNCSVRDWIVKHVNTNPLCDLTPIFKDYEKYLANIEQQHGNSGRNSESESNKVAAETQSPSLFGSTKLQQESTFLFHGNKTEDTPDKKMEVASEKKTDPSSLGATSASFNFGKKVDSSVLGSLSSVPLTGFSFSPGNSSLFGKDTTQSKPVSSPFPTKPLEGQAEGDSGECKGGDEEENDEPPKVVVTEVKEEDAFYSKKCKLFYKKDNEFKEKGIGTLHLKPTANQKTQLLVRADTNLGNILLNVLIPPNMPCTRTGKNNVLIVCVPNPPIDEKNATMPVTMLIRVKTSEDADELHKILLEKKDA

SEQ ID NO: 58848 - protein, 440 aa, Homo sapiens
  Payload ID: 11502
  Gene Symbol: NUP50
  Gene Name: nucleoporin 50kDa
  Uniprot ID: Q9UKX7
  ENSP ID: ENSP00000379403
MASEEVLKNRAIKKAKRRNVGFESDTGGAFKGFKGLVVPSGGGRFSGFGSGAGGKPLEGLSNGNNITSAPPFASAKAAADPKVAFGSLAANGPTTLVDKVSNPKTNGDSQQPSSSGLASSKACVGNAYHKQLAALNCSVRDWIVKHVNTNPLCDLTPIFKDYEKYLANIEQQHGNSGRNSESESNKVAAETQSPSLFGSTKLQQESTFLFHGNKTEDTPDKKMEVASEKKTDPSSLGATSASFNFGKKVDSSVLGSLSSVPLTGFSFSPGNSSLFGKDTTQSKPVSSPFPTKPLEGQAEGDSGECKGGDEEENDEPPKVVVTEVKEEDAFYSKKCKLFYKKDNEFKEKGIGTLHLKPTANQKTQLLVRADTNLGNILLNVLIPPNMPCTRTGKNNVLIVCVPNPPIDEKNATMPVTMLIRVKTSEDADELHKILLEKKDA

SEQ ID NO: 58849 - protein, 440 aa, Homo sapiens; identical to SEQ ID NO: 58848
  Payload ID: 11502
  Gene Symbol: NUP50
  Gene Name: nucleoporin 50kDa
  Uniprot ID: Q9UKX7
  ENSP ID: ENSP00000385555

SEQ ID NO: 58850 - protein, 30 aa, Homo sapiens
  Payload ID: 11502
  Gene Symbol: NUP50
  Gene Name: nucleoporin 50kDa
  ENSP ID: ENSP00000388426
MAKRNAEKELTDRNWDQEDEAEEGKRRAIN

SEQ ID NO: 58851 - protein, 30 aa, Homo sapiens; identical to SEQ ID NO: 58850
  Payload ID: 11502
  Gene Symbol: NUP50
  Gene Name: nucleoporin 50kDa
  ENSP ID: ENSP00000391987

SEQ ID NO: 58852 - protein, 8 aa, Homo sapiens
  Payload ID: 11502
  Gene Symbol: NUP50
  Gene Name: nucleoporin 50kDa
  ENSP ID: ENSP00000394450
MASEEVLK

SEQ ID NO: 58853 - protein, 76 aa, Homo sapiens
  Payload ID: 11502
  Gene Symbol: NUP50
  Gene Name: nucleoporin 50kDa
  ENSP ID: ENSP00000397960
MAKRNAEKELTDRNWDQEDEAEEVGTFSMASEEVLKNRAIKKAKRRNVGFEVLLLQMALPPWLIKFQIPKLMGTVS

SEQ ID NO: 58854 - protein, 10 aa, Homo sapiens
  Payload ID: 11502
  Gene Symbol: NUP50
  Gene Name: nucleoporin 50kDa
  ENSP ID: ENSP00000398297
MAKRNAEKEL

SEQ ID NO: 58855 - protein, 4 aa, Homo sapiens
  Payload ID: 11502
  Gene Symbol: NUP50
  Gene Name: nucleoporin 50kDa
  ENSP ID: ENSP00000400465
MAKR

SEQ ID NO: 58856 - protein, 45 aa, Homo sapiens
  Payload ID: 11502
  Gene Symbol: NUP50
  Gene Name: nucleoporin 50kDa
  ENSP ID: ENSP00000415062
MAKRNAEKELTDRNWDQEDEAEEVGTFSMASEEVLKNRAIKKAKR

SEQ ID NO: 58857 - protein, 178 aa, Homo sapiens
  Payload ID: 11502
  Gene Symbol: NUP50
  Gene Name: nucleoporin 50kDa
  ENSP ID: ENSP00000416264
MAKRNAEKELTDRNWDQEDEAEEVGTFSMASEEVLKNRAIKKAKRRNVGFESDTGGAFKGFKGLVVPSGGGRFSGFGSGAGGKPLEGLSNGNNITSAPPFASAKAAADPKVAFGGDEEENDEPPKVVVTEVKEEDAFYSKKCKLFYKKDNEFKEKGIGTLHLKPTANQKTQLLVRADT

SEQ ID NO: 58858 - protein, 507 aa, Homo sapiens
  Payload ID: 11503
  Gene Symbol: NUP54
  Gene Name: nucleoporin 54kDa
  Uniprot ID: Q7Z3B4
  ENSP ID: ENSP00000264883
MAFNFGAPSGTSGTAAATAAPAGGFGGFGTTSTTAGSAFSFSAPTNTGTTGLFGGTQNKGFGFGTGFGTTTGTSTGLGTGLGTGLGFGGFNTQQQQQTTLGGLFSQPTQAPTQSNQLINTASALSAPTLLGDERDAILAKWNQLQAFWGTGKGYFNNNIPPVEFTQENPFCRFKAVGYSCMPSNKDEDGLVVLVFNKKETEIRSQQQQLVESLHKVLGGNQTLTVNVEGTKTLPDDQTEVVIYVVERSPNGTSRRVPATTLYAHFEQANIKTQLQQLGVTLSMTRTELSPAQIKQLLQNPPAGVDPIIWEQAKVDNPDSEKLIPVPMVGFKELLRRLKVQDQMTKQHQTRLDIISEDISELQKNQTTSVAKIAQYKRKLMDLSHRTLQVLIKQEIQRKSGYAIQADEEQLRVQLDTIQGELNAPTQFKGRLNELMSQIRMQNHFGAVRSEERYYIDADLLREIKQHLKQQQEGLSHLISIIKDDLEDIKLVEHGLNETIHIRGGVFS

SEQ ID NO: 58859 - protein, 459 aa, Homo sapiens
  Payload ID: 11503
  Gene Symbol: NUP54
  Gene Name: nucleoporin 54kDa
  Uniprot ID: Q7Z3B4
  ENSP ID: ENSP00000421304
MAFNFGAPSGTSGTAAATAAPAGGFGGFGTTSTTAGSAFSFSAPTNTGTTALGGLFSQPTQAPTQSNQLINTASALSAPTLLGDERDAILAKWNQLQAFWGTGKGYFNNNIPPVEFTQENPFCRFKAVGYSCMPSNKDEDGLVVLVFNKKETEIRSQQQQLVESLHKVLGGNQTLTVNVEGTKTLPDDQTEVVIYVVERSPNGTSRRVPATTLYAHFEQANIKTQLQQLGVTLSMTRTELSPAQIKQLLQNPPAGVDPIIWEQAKVDNPDSEKLIPVPMVGFKELLRRLKVQDQMTKQHQTRLDIISEDISELQKNQTTSVAKIAQYKRKLMDLSHRTLQVLIKQEIQRKSGYAIQADEEQLRVQLDTIQGELNAPTQFKGRLNELMSQIRMQNHFGAVRSEERYYIDADLLREIKQHLKQQQEGLSHLISIIKDDLEDIKLVEHGLNETIHIRGGVFS

SEQ ID NO: 58860 - protein, 158 aa, Homo sapiens [sequence omitted]

SEQ ID NO: 58861 - protein, 102 aa, Homo sapiens
  Payload ID: 11503
  Gene Symbol: NUP54
  Gene Name: nucleoporin 54kDa
  ENSP ID: ENSP00000424172
MAFNFGAPSGTSGTAAATAAPAGGFGGFGTTSTTAGSAFSFSAPTNTGTTGLFGGTQNKGFGFGTGFGTTTGTSTGLGTGLGTGLGFGGFNTQQQQQTSSRL

SEQ ID NO: 58862 - protein, 84 aa, Homo sapiens
  Payload ID: 11503
  Gene Symbol: NUP54
  Gene Name: nucleoporin 54kDa
  ENSP ID: ENSP00000424389
MAFNFGAPSGTSGTAAATAAPAGFGGLETANSTASGFNFGGFGLTANPAVNFNIGNFGVSTTSATPFNFGNSLASADLLLLKHF

SEQ ID NO: 58863 - protein, 102 aa, Homo sapiens; identical to SEQ ID NO: 58861
  Payload ID: 11503
  Gene Symbol: NUP54
  Gene Name: nucleoporin 54kDa
  ENSP ID: ENSP00000425243

SEQ ID NO: 58864 - protein, 138 aa, Homo sapiens
  Payload ID: 11503
  Gene Symbol: NUP54
  Gene Name: nucleoporin 54kDa
  ENSP ID: ENSP00000426609
MAFNFGAPSGTSGTAAATAAPAGFGGLETANSTASGFNFGGFGLTANPAVNFNIGNFGVSTTSATPFNFGNSLASAETHSCCLEVGLEDLGQHLQLQVLHSAFLPQLTQALLDSLVVLRTKVLDLVLVLAQQRELVLV

SEQ ID NO: 58865 - protein, 587 aa, Homo sapiens
  Payload ID: 11504
  Gene Symbol: NUP58
  Gene Name: nucleoporin 58kDa
  Uniprot ID: Q9BVL2
  ENSP ID: ENSP00000371137
MSTGFSFGSGTLGSTTVAAGGTSTGGVFSFGTGASSNPSVGLNFGNLGSTSTPATTSAPSSGFGTGLFGSKPATGFTLGGTNTGTPATTSAATTGFSLGFNKPAASATPFALPITSTSASGLTLSSALTSTPAASTGFTLNNLGGTTATTTTASTGLSLGGALAGLGGSLFQSTNTGTSGLGQNALGLTLGTTAATSTAGNEGLGGIDFSSSSDKKSDKTGTRPEDSKALKDENLPPVICQDVENLQKFVKEQKQVQEEISRMSSKAMLKVQEDIKALKQLLSLAANGIQRNTLNIDKLKIETAQELKNAEIALRTQKTPPGLQHEYAAPADYFRILVQQFEVQLQQYRQQIEELENHLATQANNSHITPQDLSMAMQKIYQTFVALAAQLQSIHENVKVLKEQYLGYRKMFLGDAVDVFETRRAEAKKWQNTPRVTTGPTPFSTMPNAAAVAMAATLTQQQQPATGPQPSLGVSFGTPFGSGIGTGLQSSGLGSSNLGGFGTSSGFGCSTTGASTFGFGTTNKPSGSLSAGFGSSSTSGFNFSNPGITASAGLTFGVSNPASAGFGTGGQLLQLKKPPAGNKRGKR

SEQ ID NO: 58866 - protein, 599 aa, Homo sapiens
  Payload ID: 11504
  Gene Symbol: NUP58
  Gene Name: nucleoporin 58kDa
  Uniprot ID: Q9BVL2
  ENSP ID: ENSP00000371155
MSTGFSFGSGTLGSTTVAAGGTSTGGVFSFGTGASSNPSVGLNFGNLGSTSTPATTSAPSSGFGTGLFGSKPATGFTLGGTNTGIATTITTGLTLGTPATTSAATTGFSLGFNKPAASATPFALPITSTSASGLTLSSALTSTPAASTGFTLNNLGGTTATTTTASTGLSLGGALAGLGGSLFQSTNTGTSGLGQNALGLTLGTTAATSTAGNEGLGGIDFSSSSDKKSDKTGTRPEDSKALKDENLPPVICQDVENLQKFVKEQKQVQEEISRMSSKAMLKVQEDIKALKQLLSLAANGIQRNTLNIDKLKIETAQELKNAEIALRTQKTPPGLQHEYAAPADYFRILVQQFEVQLQQYRQQIEELENHLATQANNSHITPQDLSMAMQKIYQTFVALAAQLQSIHENVKVLKEQYLGYRKMFLGDAVDVFETRRAEAKKWQNTPRVTTGPTPFSTMPNAAAVAMAATLTQQQQPATGPQPSLGVSFGTPFGSGIGTGLQSSGLGSSNLGGFGTSSGFGCSTTGASTFGFGTTNKPSGSLSAGFGSSSTSGFNFSNPGITASAGLTFGVSNPASAGFGTGGQLLQLKKPPAGNKRGKR

SEQ ID NO: 58867 - protein, 510 aa, Homo sapiens
  Payload ID: 11504
  Gene Symbol: NUP58
  Gene Name: nucleoporin 58kDa
  ENSP ID: ENSP00000371166
MSTGFSFGSGTLGSTTVAAGGTSTGGVFSFGTGASSNPSVGLNFGNLGSTSTPATTSAPSSGFGTGLFGSKPATGFTLGGTNTGIATTITTGLTLGTPATTSAATTGFSLGFNKPAASATPFALPITSTSASGLTLSSALTSTPAASTGFTLNNLGGTTATTTTASTGLSLGGALAGLGGSLFQSTNTGTSGLGQNALGLTLGTTAATSTAGNEGLGGIDFSSSSDKKSDKTGTRPEDSKALKDENLPPVICQDVENLQKFVKEQKQVQEEISRMSSKAMLKVQEDIKALKQLLSLAANGIQRNTLNIDKLKIETAQELKNAEIALRTQKTPPGLQHEYAAPADYFRILVQQFEVQLQQYRQQIEELENHLATQANNSHITPQDLSMAMQKIYQTFVALAAQLQSIHENVKVLKEQYLGYRKMFLGDAVDVFETRRAEAKKWQNTPRVTTGPTPFSTMPNAAAVAMAATLTQQQQPATGDKWCNVAELKNRTQLSLFVNKLELSCYCVID

SEQ ID NO: 58868 - protein, 463 aa, Homo sapiens
  Payload ID: 11504
  Gene Symbol: NUP58
  Gene Name: nucleoporin 58kDa
  ENSP ID: ENSP00000408147
LNFGNLGSTSTPATTSAPSSGFGTGLFGSKPATGFTLGGTNTGTPATTSAATTGFSLGFNKPAASATPFALPITSTSASGLTLSSALTSTPAASTGFTLNNLGGTTATTTTASTGLSLGGALAGLGGSLFQSTNTGTSGLGQNALGLTLGTTAATSTAGNEGLGGIDFSSSSDKKSDKTGTRPEDSKALKDENLPPVICQDVENLQKFVKEQKQVQEEISRMSSKAMLKVQEDIKALKQLLSLAANGIQRNTLNIDKLKIETAQELKNAEIALRTQKTPPGLQHEYAAPADYFRILVQQFEVQLQQYRQQIEELENHLATQANNSHITPQDLSMAMQKIYQTFVALAAQLQSIHENVKVLKEQYLGYRKMFLGDAVDVFETRRAEAKKWQNTPRVTTGPTPFSTMPNAAAVAMAATLTQQQQPATGDKWCNVAELKNRTQLSLFVNKLELSCYCVIDLLYNEQ

SEQ ID NO: 58869 - protein, 36 aa, Homo sapiens
  Payload ID: 11504
  Gene Symbol: NUP58
  Gene Name: nucleoporin 58kDa
  ENSP ID: ENSP00000418244
MSTGFSFGSGTLGSTTVAAGGTSTGGVFSFGTGASR

SEQ ID NO: 58870 - protein, 62 aa, Homo sapiens
  Payload ID: 11504
  Gene Symbol: NUP58
  Gene Name: nucleoporin 58kDa
  ENSP ID: ENSP00000418341
MSTGFSFGSGTLGSTTVAAGGTSTGGVFSFGTGASSSTTLLRLLSFVEQIFIGQIPMCKALF

SEQ ID NO: 58871 - protein, 485 aa, Homo sapiens
  Payload ID: 11504
  Gene Symbol: NUP58
  Gene Name: nucleoporin 58kDa
  Uniprot ID: Q9BVL2
  ENSP ID: ENSP00000418555
MSTGFSFGSGTLGSTTVAAGGTSTGGVFSFGTGASSNPSVGLNFGNLGSTSTPATTSAPSSGFGTGLFGSKPATGFTLGGTNTGIATTITTGLTLGTPATTSAATTGFSLGFNKPAASATPFALPITSTSASGLTLSSALTSTPAASTGFTLNNLGGTTATTTTASTGLSLGGALAGLGGSLFQSTNTGTSGLGQNALGLTLGTTAATSTAGNEGLGGIDFSSSSDKKSDKTGTRPEDSKALKDENLPPVICQDVENLQKFVKEQKQVQEEISRMSSKAMLKVQEDIKALKQLLSLAANGIQRNTLNIDKLKIETAQELKNAEIALRTQKTPPGLQHEYAAPADYFRILVQQFEVQLQQYRQQIEELENHLATQANNSHITPQDLSMAMQKIYQTFVALAAQLQSIHENVKVLKEQYLGYRKMFLGDAVDVFETRRAEAKKWQNTPRVTTGPTPFSTMPNAAAVAMAATLTQQQQPATGLNAFKL

SEQ ID NO: 58872 - protein, 128 aa, Homo sapiens
  Payload ID: 11504
  Gene Symbol: NUP58
  Gene Name: nucleoporin 58kDa
  ENSP ID: ENSP00000418904
MSTGFSFGSGTLGSTTVAAGGTSTGGVFSFGTGASSNPSVGLNFGNLGSTSTPATTSAPSSGFGTGLFGSKPATGFTLGGTNTGIATTITTGLTLENNTSVYQQSFGLDQLQTQERQPLHLQLQQASV

SEQ ID NO: 58873 - protein, 522 aa, Homo sapiens
  Payload ID: 11505
  Gene Symbol: NUP62
  Gene Name: nucleoporin 62kDa
  Uniprot ID: P37198
  ENSP ID: ENSP00000305503
MSGFNFGGTGAPTGGFTFGTAKTATTTPATGFSFSTSGTGGFNFGAPFQPATSTPSTGLFSLATQTPATQTTGFTFGTATLASGGTGFSLGIGASKLNLSNTAATPAMANPSGFGLGSSNLTNAISSTVTSSQGTAPTGFVFGPSTTSVAPATTSGGFSFTGGSTAQPSGFNIGSAGNSAQPTAPATLPFTPATPAATTAGATQPAAPTPTATITSTGPSLFASIATAPTSSATTGLSLCTPVTTAGAPTAGTQGFSLKAPGAASGTSTTTSTAATATATTTSSSSTTGFALNLKPLAPAGIPSNTAAAVTAPPGPGAAAGAAASSAMTYAQLESLINKWSLELEDQERHFLQQATQVNAWDRTLIENGEKITSLHREVEKVKLDQKRLDQELDFILSQQKELEDLLSPLEELVKEQSGTIYLQHADEEREKTYKLAENIDAQLKRMAQDLKDIIEHLNTSGAPADTSDPLQQICKILNAHMDSLQWIDQNSALLQRKVEEVTKVCEGRRKEQERSFRITFD

SEQ ID NO: 58874 - protein, 522 aa, Homo sapiens; identical to SEQ ID NO: 58873
  Payload ID: 11505
  Gene Symbol: NUP62
  Gene Name: nucleoporin 62kDa
  Uniprot ID: P37198
  ENSP ID: ENSP00000407331

SEQ ID NO: 58875 - protein, 23 aa, Homo sapiens
  Payload ID: 11505
  Gene Symbol: NUP62
  Gene Name: nucleoporin 62kDa
  ENSP ID: ENSP00000468839
MSGFNFGGTGAPTGGFTFGTAKT

SEQ ID NO: 58876 - protein, 75 aa, Homo sapiens
  Payload ID: 11505
  Gene Symbol: NUP62
  Gene Name: nucleoporin 62kDa
  ENSP ID: ENSP00000468842
MSGFNFGGTGAPTGGFTFGTAKTATTTPATGFSFSTSGTGGFNFGAPFQPATSTPSTGLFSLATQTPATQTTGFT

SEQ ID NO: 58877 - protein, 23 aa, Homo sapiens
  Payload ID: 11505
  Gene Symbol: NUP62
  Gene Name: nucleoporin 62kDa
  ENSP ID: ENSP00000468884
MSGFNFGGTGAPTGGFTFGTAKT

SEQ ID NO: 58878 - protein, 134 aa, Homo sapiens
  Payload ID: 11505
  Gene Symbol: NUP62
  Gene Name: nucleoporin 62kDa
  ENSP ID: ENSP00000468930
MSGFNFGGTGAPTGGFTFGTAKTATTTPATGFSFSTSGTGGFNFGAPFQPATSTPSTGLFSLATQTPATQTTGFTFGTATLASGGTGFSLGIGASKLNLSNTAATPAMANPSGFGLGSSNLTNAISSTVTSSQG

SEQ ID NO: 58879 - protein, 446 aa, Homo sapiens
  Payload ID: 11505
  Gene Symbol: NUP62
  Gene Name: nucleoporin 62kDa
  ENSP ID: ENSP00000469283
MSGFNFGGTGAPTGGFTFGTAKTATTTPATGFSFSTSGTGGFNFGAPFQPATSTPSTGLFSLATQTPATQTTGFTFGTATLASGGTGFSLGIGASKLNLSNTAATPAMANPSGFGLGSSNLTNAISSTVTSSQGTAPTGFVFGPSTTSVAPATTSGGFSFTGGSTAQPSGFNIGSAGNSAQPTAPATLPFTPATPAATTAGATQPAAPTPTATITSTGPSLFASIATAPTSSATTGLSLCTPVTTAGAPTAGTQGFSLKAPGAASGTSTTTSTAATATATQVNAWDRTLIENGEKITSLHREVEKVKLDQKRLDQELDFILSQQKELEDLLSPLEELVKEQSGTIYLQHADEEREKTYKLAENIDAQLKRMAQDLKDIIEHLNTSGAPADTSDPLQQICKILNAHMDSLQWIDQNSALLQRKVEEVTKVCEGRRKEQERSFRITFD

SEQ ID NO: 58880 - protein, 36 aa, Homo sapiens
  Payload ID: 11505
  Gene Symbol: NUP62
  Gene Name: nucleoporin 62kDa
  ENSP ID: ENSP00000470157
MSGFNFGGTGAPTGGFTFGTAKTATTTPATGFSFST

SEQ ID NO: 58881 - protein, 99 aa, Homo sapiens
  Payload ID: 11505
  Gene Symbol: NUP62
  Gene Name: nucleoporin 62kDa
  ENSP ID: ENSP00000470624
MSGFNFGGTGAPTGGFTFGTAKTATTTPATGFSFSTSGTGGFNFGAPFQPATSTPSTGLFSLATQTPATQTTGFTFGTATLASGGTGFSLGIGASKLNL

SEQ ID NO: 58882 - protein, 18 aa, Homo sapiens
  Payload ID: 11505
  Gene Symbol: NUP62
  Gene Name: nucleoporin 62kDa
  ENSP ID: ENSP00000471133
MSGFNFGGTGAPTGGFTF

SEQ ID NO: 58883 - protein, 522 aa, Homo sapiens; identical to SEQ ID NO: 58873
  Payload ID: 11505
  Gene Symbol: NUP62
  Gene Name: nucleoporin 62kDa
  Uniprot ID: P37198
  ENSP ID: ENSP00000471191

SEQ ID NO: 58884 - protein, 100 aa, Homo sapiens
  Payload ID: 11505
  Gene Symbol: NUP62
  Gene Name: nucleoporin 62kDa
  ENSP ID: ENSP00000472081
MSGFNFGGTGAPTGGFTFGTAKTATTTPATGFSFSTSGTGGFNFGAPFQPATSTPSTGLFSLATQTPATQTTGFTFGTATLASGGTGFSLGIGASKLNLS

SEQ ID NO: 58885 - protein, 137 aa, Homo sapiens
  Payload ID: 11505
  Gene Symbol: NUP62
  Gene Name: nucleoporin 62kDa
  ENSP ID: ENSP00000472918
MSGFNFGGTGAPTGGFTFGTAKTATTTPATGFSFSTSGTGGFNFGAPFQPATSTPSTGLFSLATQTPATQTTGFTFGTATLASGGTGFSLGIGASKLNLSNTAATPAMANPSGFGLGSSNLTNAISSTVTSSQGTAP

SEQ ID NO: 58886 - protein, 522 aa, Homo sapiens; identical to SEQ ID NO: 58873
  Payload ID: 11505
  Gene Symbol: NUP62
  Gene Name: nucleoporin 62kDa
  Uniprot ID: P37198
  ENSP ID: ENSP00000473192

SEQ ID NO: 58887 - protein, 184 aa, Homo sapiens
  Payload ID: 11506
  Gene Symbol: NUP62CL
  Gene Name: nucleoporin 62kDa C-terminal like
  Uniprot ID: Q9H1M0
  ENSP ID: ENSP00000361544
MQFTSISNSLTSTAAIGLSFTTSTTTTATFTTNTTTTITSGFTVNQNQLLSRGFENLVPYTSTVSVVATPVMTYGHLEGLINEWNLELEDQEKYFLLQATQVNAWDHTLIENGEMIRILHGEVNKVKLDQKRLEQELDFILSQQQELEFLLTYLEESTRDQSGLHYLQDADEEHVEISTRSAEF

SEQ ID NO: 58888 - protein, 136 aa, Homo sapiens
  Payload ID: 11506
  Gene Symbol: NUP62CL
  Gene Name: nucleoporin 62kDa C-terminal like
  ENSP ID: ENSP00000405906
MQFTSISNSLTSTAAIGLSFTTSTTTTATFTTNTTTTITSGFTVNQNQLLSRGFENLVPYTSTVSVVATPVMTYGHLEGLINEWNLELEDQEKYFLLQATQVNAWDHTLIENGEMIRILHGEVNKVKLDQKRLEQE

SEQ ID NO: 58889 - protein, 198 aa, Homo sapiens
  Payload ID: 11506
  Gene Symbol: NUP62CL
  Gene Name: nucleoporin 62kDa C-terminal like
  ENSP ID: ENSP00000408612
  MOD_RES (1)..(1): Any amino acid
XPVMTYGHLEGLINEWNLELEDQEKYFLLQATQVNAWDHTLIENGEMIRILHGEVNKVKLDQKRLEQELDFILSQQQELEFLLTYLEESTRDQSGLHYLQDADEEHVEIYRLAESIDAQLKQMAQDLKDVVNHLNTFESSSDTTDPLHQICRILNAHMDSLQWIDRNSGMLRRKVEVVTRVFEDYRHEEHAHNVNTAF

SEQ ID NO: 58890 - protein, 72 aa, Homo sapiens
  Payload ID: 11506
  Gene Symbol: NUP62CL
  Gene Name: nucleoporin 62kDa C-terminal like
  Uniprot ID: Q9H1M0
  ENSP ID: ENSP00000433269
MQFTSISNSLTSTAAIGLSFTTSTTTTATFTTNTTTTITSGFTVNQNQLLSRGFENLVPYTSTVRFVFYMEK

SEQ ID NO: 58891 - protein, 656 aa, Homo sapiens
  Payload ID: 11507
  Gene Symbol: NUP85
  Gene Name: nucleoporin 85kDa
  Uniprot ID: Q9BW27
  ENSP ID: ENSP00000245544
MEELDGEPTVTLIPGVNSKKNQMYFDWGPGEMLVCETSFNKKEKSEMVPSCPFIYIIRKDVDVYSQILRKLFNESHGIFLGLQRIDEELTGKSRKSQLVRVSKNYRSVIRACMEEMHQVAIAAKDPANGRQFSSQVSILSAMELIWNLCEILFIEVAPAGPLLLHLLDWVRLHVCEVDSLSADVLGSENPSKHDSFWNLVTILVLQGRLDEARQMLSKEADASPASAGICRIMGDLMRTMPILSPGNTQTLTELELKWQHWHEECERYLQDSTFATSPHLESLLKIMLGDEAALLEQKELLSNWYHFLVTRLLYSNPTVKPIDLHYYAQSSLDLFLGGESSPEPLDNILLAAFEFDIHQVIKECSIALSNWWFVAHLTDLLDHCKLLQSHNLYFGSNMREFLLLEYASGLFAHPSLWQLGVDYFDYCPELGRVSLELHIERIPLNTEQKALKVLRICEQRQMTEQVRSICKILAMKAVRNNRLGSALSWSIRAKDAAFATLVSDRFLRDYCERGCFSDLDLIDNLGPAMMLSDRLTFLGKYREFHRMYGEKRFADAASLLLSLMTSRIAPRSFWMTLLTDALPLLEQKQVIFSAEQTYELMRCLEDLTSRRPVHGESDTEQLQDDDIETTKVEMLRLSLARNLARAIIREGSLEGS

SEQ ID NO: 58892 - protein, 259 aa, Homo sapiens
  Payload ID: 11507
  Gene Symbol: NUP85
  Gene Name: nucleoporin 85kDa
  ENSP ID: ENSP00000445855
MREFLLLEYASGLFAHPSLWQLGVDYFDYCPELGRVSLELHIERIPLNTEQKALKVLRICEQRQMTEQVRSICKILAMKAVRNNRLGSALSWSIRAKDAAFATLVSDRFLRDYCERGCFSDLDLIDNLGPAMMLSDRLTFLGKYREFHRMYGEKRFADAASLLLSLMTSRIAPRSFWMTLLTDALPLLEQKQVIFSAEQTYELMRCLEDLTSRRPVHGESDTEQLQDDDIETTKVEMLRLSLARNLARAIIREGSLEGS

SEQ ID NO: 58893 - protein, 169 aa, Homo sapiens
  Payload ID: 11507
  Gene Symbol: NUP85
  Gene Name: nucleoporin 85kDa
  ENSP ID: ENSP00000461919
MEELDGEPTVTLIPGVNSKKNQMYFDWGPGEMLVCETSFNKKEKSEMVPSCPFIYIIRKDVDVYSQILRKLFNESHGIFLGLQRIDEELTGKSRKSQLVRVSKNYRSVIRACMEEMHQVAIAAKDPANGRQFSSQVSILSAMELIWNLCEILFIEVAPGDHLGAAGPAG

SEQ ID NO: 58894 - protein, 98 aa, Homo sapiens
  Payload ID: 11507
  Gene Symbol: NUP85
  Gene Name: nucleoporin 85kDa
  ENSP ID: ENSP00000462364
  MOD_RES (1)..(1): Any amino acid
XSLMTSRIAPRSFWMTLLTDALPLLEQKQVKVIFSAEQTYELMRCLEDLTSRRPVHGESDTEQLQDDDIETTKVEMLRLSLARNLARAIIREGSLEGS

SEQ ID NO: 58895 - protein, 120 aa, Homo sapiens
  Payload ID: 11507
  Gene Symbol: NUP85
  Gene Name: nucleoporin 85kDa
  ENSP ID: ENSP00000462487
MYFDWGPGEMLVCETSFNKKEKSEMVPSCPFIYIIRKDVDVYSQILRKLFNESHGIFLGLQRIDEELTGKSRKSQLVRVSKNYRSVIRACMEEMHQVAIAAKDPANGRQFSSQVSILSAM

SEQ ID NO: 58896 - protein, 611 aa, Homo sapiens
  Payload ID: 11507
  Gene Symbol: NUP85
  Gene Name: nucleoporin 85kDa
  ENSP ID: ENSP00000462749
MEELDGEPTVTLIPGVNSKKNQMYFDWGPGEMLVCETSFNKKEKSEMVPSCPFIYIIRKDVDVYSQILRKLFNESHGIFLGLQRIDEELTGKSRKSQLVRVSKNYRSVIRACMEEMHQVAIAAKDPANGRQFSSQVSILSAMELIWNLCEILFIEVAPAGPLLLHLLDWVRLHVCEVDSLSADVLGSENPSKHDSFWNLPGNTQTLTELELKWQHWHEECERYLQDSTFATSPHLESLLKIMLGDEAALLEQKELLSNWYHFLVTRLLYSNPTVKPIDLHYYAQSSLDLFLGGESSPEPLDNILLAAFEFDIHQVIKECSIALSNWWFVAHLTDLLDHCKLLQSHNLYFGSNMREFLLLEYASGLFAHPSLWQLGVDYFDYCPELGRVSLELHIERIPLNTEQKALKVLRICEQRQMTEQVRSICKILAMKAVRNNRLGSALSWSIRAKDAAFATLVSDRFLRDYCERGCFSDLDLIDNLGPAMMLSDRLTFLGKYREFHRMYGEKRFADAASLLLSLMTSRIAPRSFWMTLLTDALPLLEQKQVIFSAEQTYELMRCLEDLTSRRPVHGESDTEQLQDDDIETTKVEMLRLSLARNLARAIIREGSLEGS

SEQ ID NO: 58897 - protein, 100 aa, Homo sapiens
  Payload ID: 11507
  Gene Symbol: NUP85
  Gene Name: nucleoporin 85kDa
  ENSP ID: ENSP00000462920
  MOD_RES (1)..(1): Any amino acid
XLFIEVAPAGPLLLHLLDWVRLHVCEVDSLSADVLGSENPSKHDSFWNLIMLGDEAALLEQKELLSNWYHFLVTRLLYSNPTVKPIDLHYYAQPGPVSGR

SEQ ID NO: 58898 - protein, 19 aa, Homo sapiens
  Payload ID: 11507
  Gene Symbol: NUP85
  Gene Name: nucleoporin 85kDa
  ENSP ID: ENSP00000463377
LLAAFEFDIHQVIKECSFL

SEQ ID NO: 58899 - protein, 544 aa, Homo sapiens
  Payload ID: 11507
  Gene Symbol: NUP85
  Gene Name: nucleoporin 85kDa
  ENSP ID: ENSP00000463382
MEEMHQVAIAAKDPANGRQFSSQVSILSAMELIWNLCEILFIEVAPAGPLLLHLLDWVRLHVCEVDSLSADVLGSENPSKHDSFWNLVTILVLQGRLDEARQMLSKEADASPASAGICRIMGDLMRTMPILSPGNTQTLTELELKWQHWHEECERYLQDSTFATSPHLESLLKIMLGDEAALLEQKELLSNWYHFLVTRLLYSNPTVKPIDLHYYAQSSLDLFLGGESSPEPLDNILLAAFEFDIHQVIKECSIALSNWWFVAHLTDLLDHCKLLQSHNLYFGSNMREFLLLEYASGLFAHPSLWQLGVDYFDYCPELGRVSLELHIERIPLNTEQKALKVLRICEQRQMTEQVRSICKILAMKAVRNNRLGSALSWSIRAKDAAFATLVSDRFLRDYCERGCFSDLDLIDNLGPAMMLSDRLTFLGKYREFHRMYGEKRFADAASLLLSLMTSRIAPRSFWMTLLTDALPLLEQKQVIFSAEQTYELMRCLEDLTSRRPVHGESDTEQLQDDDIETTKVEMLRLSLARNLARAIIREGSLEGS

SEQ ID NO: 58900 - protein, 114 aa, Homo sapiens
  Payload ID: 11507
  Gene Symbol: NUP85
  Gene Name: nucleoporin 85kDa
  ENSP ID: ENSP00000463437
AMMLSDRLTFLGKYREFHRMYGEKRFADAASLLLSLMTSRIAPRSFWMTLLTDALPLLEQKQVIFSAEQTYELMRCLEDLTSRRPVHGESDTEQLQYGPLVLLSFTSIICWKLL

SEQ ID NO: 58901 - protein, 272 aa, Homo sapiens
  Payload ID: 11507
  Gene Symbol: NUP85
  Gene Name: nucleoporin 85kDa
  ENSP ID: ENSP00000463496
VTILVLQGRLDEARQMLSKEADASPASAGICRIMGDLMRTMPILSPGNTQTLTELELKWQHWHEECERYLQDSTFATSPHLESLLKIMLGDEAALLEQKELLSNWYHFLVTRLLYSNPTVKPIDLHYYAQSSLDLFLGGESSPEPLDNILLAAFEFDIHQVIKECSFGSNMREFLLLEYASGLFAHPSLWQLGVDYFDYCPELGRVSLELHIERIPLNTEQKALKVLRICEQRQMTEQVRSICKILAMKAVRNNRLGSALSWSIRAKDAAFA

SEQ ID NO: 58902 - protein, 302 aa, Homo sapiens
  Payload ID: 11507
  Gene Symbol: NUP85
  Gene Name: nucleoporin 85kDa
  ENSP ID: ENSP00000463542
  MOD_RES (1)..(1): Any amino acid
XHEECERYLQDSTFATSPHLESLLKSSLDLFLGGESSPEPLDNILLAAFEFDIHQVIKECSIALSNWWFVAHLTDLLDHCKLLQSHNLYFGSNMREFLLLEYASGLFAHPSLWQLGVDYFDYCPELGRVSLELHIERIPLNTEQKALKVLRICEQRQMTEQVRSICKILAMKAVRNNRLGSALSWSIRAKDAAFATLVSDRFLRDYCERGCFSDLDLIDNLGPAMMLSDRLTFLGKYREFHRMYGEKRFADAASLLLSLMTSRIAPRSFWMTLLTDALPLLEQKQVIFSAEQTYELMRCLED

SEQ ID NO: 58903 - protein, 191 aa, Homo sapiens
  Payload ID: 11507
  Gene Symbol: NUP85
  Gene Name: nucleoporin 85kDa
  ENSP ID: ENSP00000463715
LDWVRLHVCEVDSLSADVLGSENPSKHDSFWNLGRLDEARQMLSKEADASPASAGICRIMGDLMRTMPILSPGNTQTLTELELKWQHWHEECERYLQDSTFATSPHLESLLKIMLGDEAALLEQKELLSNWYHFLVTRLLYSNPTVKPIDLHYYAQSSLDLFLGGESSPEPLDNILLAAFEFDIHQVIKEC

SEQ ID NO: 58904 - protein, 18 aa, Homo sapiens
  Payload ID: 11507
  Gene Symbol: NUP85
  Gene Name: nucleoporin 85kDa
  ENSP ID: ENSP00000464433
LTDALPLLEQKQQNRLMS

SEQ ID NO: 58905 - protein, 46 aa, Homo sapiens
  Payload ID: 11507
  Gene Symbol: NUP85
  Gene Name: nucleoporin 85kDa
  ENSP ID: ENSP00000464544
  MOD_RES (1)..(1): Any amino acid
XEKRFADAASLLLSLMTSRIAPRSFWMTLLTDALPLLEQKQNRLMS

SEQ ID NO: 58906 - protein, 696 aa, Homo sapiens
  Payload ID: 11508
  Gene Symbol: NUP88
  Gene Name: nucleoporin 88kDa
  ENSP ID: ENSP00000225696
  MOD_RES (1)..(1): Any amino acid
XGLGGELFLWDGEDSSFLVVRLRGPSGGGEEPALSQYQRLLCINPPLFEIYQVLLSPTQHHVALIGIKGLMVLELPKRWGKNSEFEGGKSTVNCSTTPVAERFFTSSTSLTLKHAAWYPSEILDPHVVLLTSDNVIRIYSLREPQTPTNVIILSEAEEESLVLNKGRAYTASLGETAVAFDFGPLAAVPKTLFGQNGKDEVVAYPLYILYENGETFLTYISLLHSPGNIGKLLGPLPMHPAAEDNYGYDACAVLCLPCVPNILVIATESGMLYHCVVLEGEEEDDHTSEKSWDSRIDLIPSLYVFECVELELALKLASGEDDPFDSDFSCPVKLHRDPKCPSRYHCTHEAGVHSVGLTWIHKLHKFLGSDEEDKDSLQELSTEQKCFVEHILCTKPLPCRQPAPIRGFWIVPDILGPTMICITSTYECLIWPLLSTVHPASPPLLCTREDVEVAESPLRVLAETPDSFEKHIRSILQRSVANPAFLNCFTQLRKIKVETLFLRASEKDIAPPPEECLQLLSRATQVFREQYILKQDLAKEEIQRRVKLLCDQKKKQLEDLSYCREERKSLREMAERLADKYEEAKEKQEDIMNRMKKLLHSFHSELPVLSDSERDMKKELQLIPDQLRHLGNAIKQVTMKKDYQQQKMEKVLSLPKPTIILSAYQRKCIQSILKEEGEHIREMVKQINDIRNHVNF

SEQ ID NO: 58907 - protein, 741 aa, Homo sapiens
  Payload ID: 11508
  Gene Symbol: NUP88
  Gene Name: nucleoporin 88kDa
  Uniprot ID: Q99567
  ENSP ID: ENSP00000458954
MAAAEGPVGDGELWQTWLPNHVVFLRLREGLKNQSPTEAEKPASSSLPSSPPPQLLTRNVVFGLGGELFLWDGEDSSFLVVRLRGPSGGGEEPALSQYQRLLCINPPLFEIYQVLLSPTQHHVALIGIKGLMVLELPKRWGKNSEFEGGKSTVNCSTTPVAERFFTSSTSLTLKHAAWYPSEILDPHVVLLTSDNVIRIYSLREPQTPTNVIILSEAEEESLVLNKGRAYTASLGETAVAFDFGPLAAVPKTLFGQNGKDEVVAYPLYILYENGETFLTYISLLHSPGNIGKLLGPLPMHPAAEDNYGYDACAVLCLPCVPNILVIATESGMLYHCVVLEGEEEDDHTSEKSWDSRIDLIPSLYVFECVELELALKLASGEDDPFDSDFSCPVKLHRDPKCPSRYHCTHEAGVHSVGLTWIHKLHKFLGSDEEDKDSLQELSTEQKCFVEHILCTKPLPCRQPAPIRGFWIVPDILGPTMICITSTYECLIWPLLSTVHPASPPLLCTREDVEVAESPLRVLAETPDSFEKHIRSILQRSVANPAFLKASEKDIAPPPEECLQLLSRATQVFREQYILKQDLAKEEIQRRVKLLCDQKKKQLEDLSYCREERKSLREMAERLADKYEEAKEKQEDIMNRMKKLLHSFHSELPVLSDSERDMKKELQLIPDQLRHLGNAIKQVTMKKDYQQQKMEKVLSLPKPTIILSAYQRKCIQSILKEEGEHIREMVKQINDIRNHVNF

SEQ ID NO: 58908 - protein, 153 aa, Homo sapiens
  Payload ID: 11508
  Gene Symbol: NUP88
  Gene Name: nucleoporin 88kDa
  ENSP ID: ENSP00000459370
MVLELPKRWGKNSEFEGGKSTVNCSTTPVAERFFTSSTSLTLKHAAWYPSEILDPHVVLLTSDNVIRIYSLREPQTPTNVIILSEAEEESLVLNKGRAYTASLGETAVAFDFGPLAAVPKTLFGQNGKDEVVAYPLYILYENGETFLTYISLL

SEQ ID NO: 58909 - protein, 128 aa, Homo sapiens
  Payload ID: 11508
  Gene Symbol: NUP88
  Gene Name: nucleoporin 88kDa
  ENSP ID: ENSP00000459979
MAAAEGPVGDGELWQTWLPNHVVFLRLREGLKNQSPTEAEKPASSSLPSSPPPQLLTRNVVFGLGGELFLWDGEDSSFLVVRLRGPSGGGEEPALSQYQAGVQWRHLGSPQPPPSSFKRFFCLSPPRE

SEQ ID NO: 58910 - protein, 110 aa, Homo sapiens
  Payload ID: 11508
  Gene Symbol: NUP88
  Gene Name: nucleoporin 88kDa
  ENSP ID: ENSP00000461334
  MOD_RES (1)..(1): Any amino acid
XIRSILQRSVANPAFLKASEKDIAPPPEECLQLLSRATQVFREQYILKQDLAKEEIQRRVKLLCDQKKKQLEDLSYCREERKSLREMAERLADKYEEAKEKQEDIMNSSL

SEQ ID NO: 58911 - protein, 819 aa, Homo sapiens
  Payload ID: 11509
  Gene Symbol: NUP93
  Gene Name: nucleoporin 93kDa
  Uniprot ID: Q8N1F7
  ENSP ID: ENSP00000310668
MDTEGFGELLQQAEQLAAETEGISELPHVERNLQEIQQAGERLRSRTLTRTSQETADVKASVLLGSRGLDISHISQRLESLSAATTFEPLEPVKDTDIQGFLKNEKDNALLSAIEESRKRTFGMAEEYHRESMLVEWEQVKQRILHTLLASGEDALDFTQESEPSYISDVGPPGRSSLDNIEMAYARQIYIYNEKIVNGHLQPNLVDLCASVAELDDKSISDMWTMVKQMTDVLLTPATDALKNRSSVEVRMEFVRQALAYLEQSYKNYTLVTVFGNLHQAQLGGVPGTYQLVRSFLNIKLPAPLPGLQDGEVEGHPVWALIYYCMRCGDLLAASQVVNRAQHQLGEFKTWFQEYMNSKDRRLSPATENKLRLHYRRALRNNTDPYKRAVYCIIGRCDVTDNQSEVADKTEDYLWLKLNQVCFDDDGTSSPQDRLTLSQFQKQLLEDYGESHFTVNQQPFLYFQVLFLTAQFEAAVAFLFRMERLRCHAVHVALVLFELKLLLKSSGQSAQLLSHEPGDPPCLRRLNFVRLLMLYTRKFESTDPREALQYFYFLRDEKDSQGENMFLRCVSELVIESREFDMILGKLENDGSRKPGVIDKFTSDTKPIINKVASVAENKGLFEEAAKLYDLAKNADKVLELMNKLLSPVVPQISAPQSNKERLKNMALSIAERYRAQGISANKFVDSTFYLLLDLITFFDEYHSGHIDRAFDIIERLKLVPLNQESVEERVAAFRNFSDEIRHNLSEVLLATMNILFTQFKRLKGTSPSSSSRPQRVIEDRDSQLRSQARTLITFAGMIPYRTSGDTNARLVQMEVLMN

SEQ ID NO: 58912 - protein, 696 aa, Homo sapiens
  Payload ID: 11509
  Gene Symbol: NUP93
  Gene Name: nucleoporin 93kDa
  Uniprot ID: Q8N1F7
  ENSP ID: ENSP00000440235
MAEEYHRESMLVEWEQVKQRILHTLLASGEDALDFTQESEPSYISDVGPPGRSSLDNIEMAYARQIYIYNEKIVNGHLQPNLVDLCASVAELDDKSISDMWTMVKQMTDVLLTPATDALKNRSSVEVRMEFVRQALAYLEQSYKNYTLVTVFGNLHQAQLGGVPGTYQLVRSFLNIKLPAPLPGLQDGEVEGHPVWALIYYCMRCGDLLAASQVVNRAQHQLGEFKTWFQEYMNSKDRRLSPATENKLRLHYRRALRNNTDPYKRAVYCIIGRCDVTDNQSEVADKTEDYLWLKLNQVCFDDDGTSSPQDRLTLSQFQKQLLEDYGESHFTVNQQPFLYFQVLFLTAQFEAAVAFLFRMERLRCHAVHVALVLFELKLLLKSSGQSAQLLSHEPGDPPCLRRLNFVRLLMLYTRKFESTDPREALQYFYFLRDEKDSQGENMFLRCVSELVIESREFDMILGKLENDGSRKPGVIDKFTSDTKPIINKVASVAENKGLFEEAAKLYDLAKNADKVLELMNKLLSPVVPQISAPQSNKERLKNMALSIAERYRAQGISANKFVDSTFYLLLDLITFFDEYHSGHIDRAFDIIERLKLVPLNQESVEERVAAFRNFSDEIRHNLSEVLLATMNILFTQFKRLKGTSPSSSSRPQRVIEDRDSQLRSQARTLITFAGMIPYRTSGDTNARLVQMEVLMN

SEQ ID NO: 58913 - protein, 178 aa, Homo sapiens
  Payload ID: 11509
  Gene Symbol: NUP93
  Gene Name: nucleoporin 93kDa
  ENSP ID: ENSP00000454285
MDTEGFGELLQQAEQLAAETEGISELPHVERNLQEIQQAGERLRSRTLTRTSQETADVKASVLLGSRGLDISHISQRLESLSAATTFEPLEPVKDTDIQGFLKNEKDNALLSAIEESRKRTFGMAEEYHRESMLVEWEQVKQRILHTLLASGEDALDFTQESEPSYISDVGPPGRSSL

SEQ ID NO: 58914 - protein, 125 aa, Homo sapiens
  Payload ID: 11509
  Gene Symbol: NUP93
  Gene Name: nucleoporin 93kDa
  ENSP ID: ENSP00000454587
MAEEYHRESMLVEWEQVKQRILHTLLASGEDALDFTQESEPSYISDVGPPGRSSLDNIEMAYARQIYIYNEKIVNGHLQPNLVDLCASVAELDDKSISDMWTMVKQMTDVLLTPATDALKNRSSV

SEQ ID NO: 58915 - protein, 40 aa, Homo sapiens
  Payload ID: 11509
  Gene Symbol: NUP93
  Gene Name: nucleoporin 93kDa
  ENSP ID: ENSP00000454844
MAEEYHRESMLVEWEQVKQRILHTLLASGEDALDFTQESE

SEQ ID NO: 58916 - protein, 132 aa, Homo sapiens
  Payload ID: 11509
  Gene Symbol: NUP93
  Gene Name: nucleoporin 93kDa
  ENSP ID: ENSP00000454935
  MOD_RES (1)..(1): Any amino acid
XEIQQAGERLRSRTLTRTSQETADVKASVLLGSRGLDISHISQRLESLSAATTFEPLEPVKDTDIQGFLKNEKDNALLSAIEESRKRTFGMAEEYHRESMLVEWEQVKQRILHTLLASGEDALDFTQESEVA

SEQ ID NO: 58917 - protein, 16 aa, Homo sapiens
  Payload ID: 11509
  Gene Symbol: NUP93
  Gene Name: nucleoporin 93kDa
  ENSP ID: ENSP00000455181
MAEEYHRESMLVEWEQ

SEQ ID NO: 58918 - protein, 156 aa, Homo sapiens
  Payload ID: 11509
  Gene Symbol: NUP93
  Gene Name: nucleoporin 93kDa
  ENSP ID: ENSP00000455210
MAEEYHRESMLVEWEQVKQRILHTLLASGEDALDFTQESEPSYISDVGPPGRSSLDNIEMAYARQIYIYNEKIVNGHLQPNLVDLCASVAELDDKSISDMWTMVKQMTDVLLTPATDALKNRSSVEVRMEFVRQALAYLEQSYKNYTLVTVFGNLH

SEQ ID NO: 58919 - protein, 229 aa, Homo sapiens
  Payload ID: 11509
  Gene Symbol: NUP93
  Gene Name: nucleoporin 93kDa
  ENSP ID: ENSP00000455230
MDTEGFELDDKSISDMWTMVKQMTDVLLTPATDALKNRSSVEVRMEFVRQALAYLEQSYKNYTLVTVFGNLHQAQLGGVPGTYQLVRSFLNIKLPAPLPGLQDGEVEGHPVWALIYYCMRCGDLLAASQVVNRAQHQLGEFKTWFQEYMNSKDRRLSPATENKLRLHYRRALRNNTDPYKRAVYCIIGRCDVTDNQSEVADKTEDYLWLKLNQVCFDDDGTSSPQDRLT

SEQ ID NO: 58920 - protein, 140 aa, Homo sapiens
  Payload ID: 11509
  Gene Symbol: NUP93
  Gene Name: nucleoporin 93kDa
  ENSP ID: ENSP00000456196
  MOD_RES (1)..(1): Any amino acid
XELMNKLLSPVVPQISAPQSNKERLKNMALSIAERYRAQGISANKFVDSTFYLLLDLITFFDEYHSGHIDRAFDIIERLKLVPLNQESVEERVAAFRNFSDEVSSFFLSCGIPFSPLPPKAFSFPVPNSFKNSSYSNYPD

SEQ ID NO: 58921 - protein, 151 aa, Homo sapiens
  Payload ID: 11509
  Gene Symbol: NUP93
  Gene Name: nucleoporin 93kDa
  ENSP ID: ENSP00000456264
MDTEGFGELLQQAEQLAAETEGISELPHVERNLQEIQQAGERLRSRTLTRTSQETADVKASVLLGSRGLDISHISQRLESLSAATTFEPLEPVKDTDIQGFLKNEKDNALLSAIEESRKRTFGMAEEYHRESMLVEWEQVKQRILHTLLAS

SEQ ID NO: 58922 - protein, 136 aa, Homo sapiens
  Payload ID: 11509
  Gene Symbol: NUP93
  Gene Name: nucleoporin 93kDa
  ENSP ID: ENSP00000457902
MDTEGFGELLQQAEQLAAETEGISELPHVERNLQEIQQAGERLRSRTLTRTSQETADVKASVLLGSRGLDISHISQRLESLSAATTFEPLEPVKDTDIQGFLKNEKDNALLSAIEESRKRTFGMAEEYHRESMLVE

SEQ ID NO: 58923 - protein, 84 aa, Homo sapiens
  Payload ID: 11509
  Gene Symbol: NUP93
  Gene Name: nucleoporin 93kDa
  ENSP ID: ENSP00000457907
LDLITFFDEYHSGHIDRAFDIIERLKLVPLNQESVEERVAAFRNFSDEQLRSQARTLITFAGMIPYRTSGDTNARLVQMEVLMN

SEQ ID NO: 58924 - protein, 696 aa, Homo sapiens; identical to SEQ ID NO: 58912
  Payload ID: 11509
  Gene Symbol: NUP93
  Gene Name: nucleoporin 93kDa
  Uniprot ID: Q8N1F7
  ENSP ID: ENSP00000458039

SEQ ID NO: 58925 - protein, 117 aa, Homo sapiens
  Payload ID: 11509
  Gene Symbol: NUP93
  Gene Name: nucleoporin 93kDa
  ENSP ID: ENSP00000458078
SDTKPIINKVASVAENKGLFEEAAKLYDLAKNADKVLELMNKLLSPVVPQISAPQSNKERLKNMALSIAERYRAQGISANKFVDSTFYLLLDLITFFDEYHSGHIDRAFDVSFRKGV

SEQ ID NO: 58926 - protein, 880 aa, Homo sapiens
  Payload ID: 11509
  Gene Symbol: NUP93
  Gene Name: nucleoporin 93kDa
  ENSP ID: ENSP00000458101
MDTEGFGELLQQAEQLAAETEGISELPHVERNLQEIQQAGERLRSRTLTRTSQETADVKASVLLGSRGLDISHISQRLESLSAATTFEPLEPVKDTDIQGFLKNEKDNALLSAIEESRKRTFGMAEEYHRESMLVEWEQVKQRILHTLLASGEDALDFTQESEPSYISDVGPPGRSSLDNIEMAYARQIYIYNEKIVNGHLQPNLVDLCASVAELDDKSISDMWTMVKQMTDVLLTPATDALKNRSSVEVRMEFVRQALAYLEQSYKNYTLVTVFGNLHQAQLGGVPGTYQLVRSFLNIKLPAPLPGLQDGEVEGHPVWALIYYCMRCGDLLAASQVVNRAQHQLGEFKTWFQEYMNSKDRRLSPATENKLRLHYRRALRNNTDPYKRAVYCIIGRCDVTDNQSEVADKTEDYLWLKLNQVCFDDDGTSSPQDRLTLSQFQKQLLEDYGESHFTVNQQPFLYFQVLFLTAQFEAAVAFLFRMERLRCHAVHVALVLFELKLLLKSSGQSAQLLSHEPGDPPCLRRLNFVRLLMLYTRKFESTDPREALQYFYFLRDEKDSQGENMFLRCVSELVIESREFDMILGKLENDGSRKPGVIDKFTSDTKPIINKVASVAENKGLFEEAAKLYDLAKNADKVLELMNKLLSPVVPQISAPQSNKERLKNMALSIAERYRAQGISANKFVDSTFYLLLDLITFFDEYHSGHIDRAFDIIERLKLVPLNQESVEERVAAFRNFSDEIRHNLSEVLLATMNILFTQFKRLKGTSPSSSSRPQRVIEDRDSGLALLPRLECNDTISAHCNLYLLGSSHPPTSPSQVAGTTATPKSSPHSDYLCWNDTIPNVWGHQCEAGADGGPHELSAMLCGSLGRHTVSTSGTWAH

SEQ ID NO: 58927 - protein, 1800 aa, Homo sapiens
  Payload ID: 11510
  Gene Symbol: NUP98
  Gene Name: nucleoporin 98kDa
  Uniprot ID: P52948
  ENSP ID: ENSP00000316032
MFNKSFGTPFGGGTGGFGTTSTFGQNTGFGTTSGGAFGTSAFGSSNNTGGLFGNSQTKPGGLFGTSSFSQPATSTSTGFGFGTSTGTANTLFGTASTGTSLFSSQNNAFAQNKPTGFGNFGTSTSSGGLFGTTNTTSNPFGSTSGSLFGPSSFTAAPTGTTIKFNPPTGTDTMVKAGVSTNISTKHQCITAMKEYESKSLEELRLEDYQANRKGPQNQVGAGTTTGLFGSSPATSSATGLFSSSTTNSGFAYGQNKTAFGTSTTGFGTNPGGLFGQQNQQTTSLFSKPFGQATTTQNTGFSFGNTSTIGQPSTNTMGLFGVTQASQPGGLFGTATNTSTGTAFGTGTGLFGQTNTGFGAVGSTLFGNNKLTTFGSSTTSAPSFGTTSGGLFGFGTNTSGNSIFGSKPAPGTLGTGLGAGFGTALGAGQASLFGNNQPKIGGPLGTGAFGAPGFNTTTATLGFGAPQAPVALTDPNASAAQQAVLQQHINSLTYSPFGDSPLFRNPMSDPKKKEERLKPTNPAAQKALTTPTHYKLTPRPATRVRPKALQTTGTAKSHLFDGLDDDEPSLANGAFMPKKSIKKLVLKNLNNSNLFSPVNRDSENLASPSEYPENGERFSFLSKPVDENHQQDGDEDSLVSHFYTNPIAKPIPQTPESAGNKHSNSNSVDDTIVALNMRAALRNGLEGSSEETSFHDESLQDDREEIENNSYHMHPAGIILTKVGYYTIPSMDDLAKITNEKGECIVSDFTIGRKGYGSIYFEGDVNLTNLNLDDIVHIRRKEVVVYLDDNQKPPVGEGLNRKAEVTLDGVWPTDKTSRCLIKSPDRLADINYEGRLEAVSRKQGAQFKEYRPETGSWVFKVSHFSKYGLQDSDEEEEEHPSKTSTKKLKTAPLPPASQTTPLQMALNGKPAPPPQSQSPEVEQLGRVVELDSDMVDITQEPVLDTMLEESMPEDQEPVSASTHIASSLGINPHVLQIMKASLLTDEEDVDMALDQRFSRLPSKADTSQEICSPRLPISASHSSKTRSLVGGLLQSKFTSGAFLSPSVSVQECRTPRAASLMNIPSTSSWSVPPPLTSVFTMPSPAPEVPLKTVGTRRQLGLVPREKSVTYGKGKLLMDMALFMGRSFRVGWGPNWTLANSGEQLNGSHELENHQIADSMEFGFLPNPVAVKPLTESPFKVHLEKLSLRQRKPDEDMKLYQTPLELKLKHSTVHVDELCPLIVPNLGVAVIHDYADWVKEASGDLPEAQIVKHWSLTWTLCEALWGHLKELDSQLNEPREYIQILERRRAFSRWLSCTATPQIEEEVSLTQKNSPVEAVFSYLTGKRISEACSLAQQSGDHRLALLLSQFVGSQSVRELLTMQLVDWHQLQADSFIQDERLRIFALLAGKPVWQLSEKKQINVCSQLDWKRSLAIHLWYLLPPTASISRALSMYEEAFQNTSDSDRYACSPLPSYLEGSGCVIAEEQNSQTPLRDVCFHLLKLYSDRHYDLNQLLEPRSITADPLDYRLSWHLWEVLRALNYTHLSAQCEGVLQASYAGQLESEGLWEWAIFVLLHIDNSGIREKAVRELLTRHCQLLETPESWAKETFLTQKLRVPAKWIHEAKAVRAHMESDKHLEALCLFKAEHWNRCHKLIIRHLASDAIINENYDYLKGFLEDLAPPERSSLIQDWETSGLVYLDYIRVIEMLRHIQQVDCSGNDLEQLHIKVTSLCSRIEQIQCYSAKDRLAQSDMAKRVANLLRVVLSLHHPPDRTSDSTPDPQRVPLRLLAPHIGRLPMPEDYAMDELRSLTQSYLRELAVGSL

SEQ ID NO: 58928 - protein, 1726 aa, Homo sapiens
  Payload ID: 11510
  Gene Symbol: NUP98
  Gene Name: nucleoporin 98kDa
  Uniprot ID: P52948
  ENSP ID: ENSP00000347404
MFNKSFGTPFGGGTGGFGTTSTFGQNTGFGTTSGGAFGTSAFGSSNNTGGLFGNSQTKPGGLFGTSSFSQPATSTSTGFGFGTSTGTANTLFGTASTGTSLFSSQNNAFAQNKPTGFGNFGTSTSSGGLFGTTNTTSNPFGSTSGSLFGPSSFTAAPTGTTIKFNPPTGTDTMVKAGVSTNISTKHQCITAMKEYESKSLEELRLEDYQANRKGPQNQVGAGTTTGLFGSSPATSSATGLFSSSTTNSGFAYGQNKTAFGTSTTGFGTNPGGLFGQQNQQTTSLFSKPFGQATTTQNTGFSFGNTSTIGQPSTNTMGLFGVTQASQPGGLFGTATNTSTGTAFGTGTGLFGQTNTGFGAVGSTLFGNNKLTTFGSSTTSAPSFGTTSGGLFGFGTNTSGNSIFGSKPAPGTLGTGLGAGFGTALGAGQASLFGNNQPKIGGPLGTGAFGAPGFNTTTATLGFGAPQAPVALTDPNASAAQQAVLQQHINSLTYSPFGDSPLFRNPMSDPKKKEERLKPTNPAAQKALTTPTHYKLTPRPATRVRPKALQTTGTAKSHLFDGLDDDEPSLANGAFMPKKSIKKLVLKNLNNSNLFSPVNRDSENLASPSEYPENGERFSFLSKPVDENHQQDGDEDSLVSHFYTNPIAKPIPQTPESAGNKHSNSNSVDDTIVALNMRAALRNGLEGSSEETSFHDESLQDDREEIENNSYHMHPAGIILTKVGYYTIPSMDDLAKITNEKGECIVSDFTIGRKGYGSIYFEGDVNLTNLNLDDIVHIRRKEVVVYLDDNQKPPVGEGLNRKAEVTLDGVWPTDKTSRCLIKSPDRLADINYEGRLEAVSRKQGAQFKEYRPETGSWVFKVSHFSKYGLQDSDEEEEEHPSKTSTKKLKTAPLPPASQTTPLQMALNGKPAPPPQSQSPEVEQLGRVVELDSDMVDITQEPVLDTMLEESMPEDQEPVSASTHIASSLGINPHVLQIMKASLLTDEEDVDMALDQRFSRLPSKADTSQEICSPRLPISASHSSKTRSLVGGLLQSKFTSGAFLSPSVSVQECRTPRAASLMNIPSTSSWSVPPPLTSVFTMPSPAPEVPLKTVGTRRQLGLVPREKSVTYGKGKLLMDMALFMGRSFRVGWGPNWTLANSGEQLNGSHELENHQIADSMEFGFLPNPVAVKPLTESPFKVHLEKLSLRQRKPDEDMKLYQTPLELKLKHSTVHVDELCPLIVPNLGVAVIHDYADWVKEASGDLPEAQIVKHWSLTWTLCEALWGHLKELDSQLNEPREYIQILERRRAFSRWLSCTATPQIEEEVSLTQKNSPVEAVFSYLTGKRISEACSLAQQSGDHRLALLLSQFVGSQSVRELLTMQLVDWHQLQADSFIQDERLRIFALLAGKPVWQLSEKKQINVCSQLDWKRSLAIHLWYLLPPTASISRALSMYEEAFQNTSDSDRYACSPLPSYLEGSGCVIAEEQNSQTPLRDVCFHLLKLYSDSIREKAVRELLTRHCQLLETPESWAKETFLTQKLRVPAKWIHEAKAVRAHMESDKHLEALCLFKAEHWNRCHKLIIRHLASDAIINENYDYLKGFLEDLAPPERSSLIQDWETSGLVYLDYIRVIEMLRHIQQVDCSGNDLEQLHIKVTSLCSRIEQIQCYSAKDRLAQSDMAKRVANLLRVVLSLHHPPDRTSDSTPDPQRVPLRLLAPHIGRLPMPEDYAMDELRSLTQSYLRELAVGSL

SEQ ID NO: 58929 - protein, 1817 aa, Homo sapiens
  Payload ID: 11510
  Gene Symbol: NUP98
  Gene Name: nucleoporin 98kDa
  Uniprot ID: P52948
  ENSP ID: ENSP00000352091
MFNKSFGTPFGGGTGGFGTTSTFGQNTGFGTTSGGAFGTSAFGSSNNTGGLFGNSQTKPGGLFGTSSFSQPATSTSTGFGFGTSTGTANTLFGTASTGTSLFSSQNNAFAQNKPTGFGNFGTSTSSGGLFGTTNTTSNPFGSTSGSLFGPSSFTAAPTGTTIKFNPPTGTDTMVKAGVSTNISTKHQCITAMKEYESKSLEELRLEDYQANRKGPQNQVGAGTTTGLFGSSPATSSATGLFSSSTTNSGFAYGQNKTAFGTSTTGFGTNPGGLFGQQNQQTTSLFSKPFGQATTTQNTGFSFGNTSTIGQPSTNTMGLFGVTQASQPGGLFGTATNTSTGTAFGTGTGLFGQTNTGFGAVGSTLFGNNKLTTFGSSTTSAPSFGTTSGGLFGNKPTLTLGTNTNTSNFGFGTNTSGNSIFGSKPAPGTLGTGLGAGFGTALGAGQASLFGNNQPKIGGPLGTGAFGAPGFNTTTATLGFGAPQAPVALTDPNASAAQQAVLQQHINSLTYSPFGDSPLFRNPMSDPKKKEERLKPTNPAAQKALTTPTHYKLTPRPATRVRPKALQTTGTAKSHLFDGLDDDEPSLANGAFMPKKSIKKLVLKNLNNSNLFSPVNRDSENLASPSEYPENGERFSFLSKPVDENHQQDGDEDSLVSHFYTNPIAKPIPQTPESAGNKHSNSNSVDDTIVALNMRAALRNGLEGSSEETSFHDESLQDDREEIENNSYHMHPAGIILTKVGYYTIPSMDDLAKITNEKGECIVSDFTIGRKGYGSIYFEGDVNLTNLNLDDIVHIRRKEVVVYLDDNQKPPVGEGLNRKAEVTLDGVWPTDKTSRCLIKSPDRLADINYEGRLEAVSRKQGAQFKEYRPETGSWVFKVSHFSKYGLQDSDEEEEEHPSKTSTKKLKTAPLPPASQTTPLQMALNGKPAPPPQSQSPEVEQLGRVVELDSDMVDITQEPVLDTMLEESMPEDQEPVSASTHIASSLGINPHVLQIMKASLLTDEEDVDMALDQRFSRLPSKADTSQEICSPRLPISASHSSKTRSLVGGLLQSKFTSGAFLSPSVSVQECRTPRAASLMNIPSTSSWSVPPPLTSVFTMPSPAPEVPLKTVGTRRQLGLVPREKSVTYGKGKLLMDMALFMGRSFRVGWGPNWTLANSGEQLNGSHELENHQIADSMEFGFLPNPVAVKPLTESPFKVHLEKLSLRQRKPDEDMKLYQTPLELKLKHSTVHVDELCPLIVPNLGVAVIHDYADWVKEASGDLPEAQIVKHWSLTWTLCEALWGHLKELDSQLNEPREYIQILERRRAFSRWLSCTATPQIEEEVSLTQKNSPVEAVFSYLTGKRISEACSLAQQSGDHRLALLLSQFVGSQSVRELLTMQLVDWHQLQADSFIQDERLRIFALLAGKPVWQLSEKKQINVCSQLDWKRSLAIHLWYLLPPTASISRALSMYEEAFQNTSDSDRYACSPLPSYLEGSGCVIAEEQNSQTPLRDVCFHLLKLYSDRHYDLNQLLEPRSITADPLDYRLSWHLWEVLRALNYTHLSAQCEGVLQASYAGQLESEGLWEWAIFVLLHIDNSGIREKAVRELLTRHCQLLETPESWAKETFLTQKLRVPAKWIHEAKAVRAHMESDKHLEALCLFKAEHWNRCHKLIIRHLASDAIINENYDYLKGFLEDLAPPERSSLIQDWETSGLVYLDYIRVIEMLRHIQQVDCSGNDLEQLHIKVTSLCSRIEQIQCYSAKDRLAQSDMAKRVANLLRVVLSLHHPPDRTSDSTPDPQRVPLRLLAPHIGRLPMPEDYAMDELRSLTQSYLRELAVGSL

SEQ ID NO: 58930 - protein, 920 aa, Homo sapiens
  Payload ID: 11510
  Gene Symbol: NUP98
  Gene Name: nucleoporin 98kDa
  Uniprot ID: P52948
  ENSP ID: ENSP00000380199
MFNKSFGTPFGGGTGGFGTTSTFGQNTGFGTTSGGAFGTSAFGSSNNTGGLFGNSQTKPGGLFGTSSFSQPATSTSTGFGFGTSTGTANTLFGTASTGTSLFSSQNNAFAQNKPTGFGNFGTSTSSGGLFGTTNTTSNPFGSTSGSLFGPSSFTAAPTGTTIKFNPPTGTDTMVKAGVSTNISTKHQCITAMKEYESKSLEELRLEDYQANRKGPQNQVGAGTTTGLFGSSPATSSATGLFSSSTTNSGFAYGQNKTAFGTSTTGFGTNPGGLFGQQNQQTTSLFSKPFGQATTTQNTGFSFGNTSTIGQPSTNTMGLFGVTQASQPGGLFGTATNTSTGTAFGTGTGLFGQTNTGFGAVGSTLFGNNKLTTFGSSTTSAPSFGTTSGGLFGFGTNTSGNSIFGSKPAPGTLGTGLGAGFGTALGAGQASLFGNNQPKIGGPLGTGAFGAPGFNTTTATLGFGAPQAPVALTDPNASAAQQAVLQQHINSLTYSPFGDSPLFRNPMSDPKKKEERLKPTNPAAQKALTTPTHYKLTPRPATRVRPKALQTTGTAKSHLFDGLDDDEPSLANGAFMPKKSIKKLVLKNLNNSNLFSPVNRDSENLASPSEYPENGERFSFLSKPVDENHQQDGDEDSLVSHFYTNPIAKPIPQTPESAGNKHSNSNSVDDTIVALNMRAALRNGLEGSSEETSFHDESLQDDREEIENNSYHMHPAGIILTKVGYYTIPSMDDLAKITNEKGECIVSDFTIGRKGYGSIYFEGDVNLTNLNLDDIVHIRRKEVVVYLDDNQKPPVGEGLNRKAEVTLDGVWPTDKTSRCLIKSPDRLADINYEGRLEAVSRKQGAQFKEYRPETGSWVFKVSHFSKYGLQDSDEEEEEHPSKTSTKKLKTAPLPPASQTTPLQMALNGKPAPPPQVEKKGQ

SEQ ID NO: 58931 - protein, 937 aa, Homo sapiens
  Payload ID: 11510
  Gene Symbol: NUP98
  Gene Name: nucleoporin 98kDa
  Uniprot ID: P52948
  ENSP ID: ENSP00000380202
MFNKSFGTPFGGGTGGFGTTSTFGQNTGFGTTSGGAFGTSAFGSSNNTGGLFGNSQTKPGGLFGTSSFSQPATSTSTGFGFGTSTGTANTLFGTASTGTSLFSSQNNAFAQNKPTGFGNFGTSTSSGGLFGTTNTTSNPFGSTSGSLFGPSSFTAAPTGTTIKFNPPTGTDTMVKAGVSTNISTKHQCITAMKEYESKSLEELRLEDYQANRKGPQNQVGAGTTTGLFGSSPATSSATGLFSSSTTNSGFAYGQNKTAFGTSTTGFGTNPGGLFGQQNQQTTSLFSKPFGQATTTQNTGFSFGNTSTIGQPSTNTMGLFGVTQASQPGGLFGTATNTSTGTAFGTGTGLFGQTNTGFGAVGSTLFGNNKLTTFGSSTTSAPSFGTTSGGLFGNKPTLTLGTNTNTSNFGFGTNTSGNSIFGSKPAPGTLGTGLGAGFGTALGAGQASLFGNNQPKIGGPLGTGAFGAPGFNTTTATLGFGAPQAPVALTDPNASAAQQAVLQQHINSLTYSPFGDSPLFRNPMSDPKKKEERLKPTNPAAQKALTTPTHYKLTPRPATRVRPKALQTTGTAKSHLFDGLDDDEPSLANGAFMPKKSIKKLVLKNLNNSNLFSPVNRDSENLASPSEYPENGERFSFLSKPVDENHQQDGDEDSLVSHFYTNPIAKPIPQTPESAGNKHSNSNSVDDTIVALNMRAALRNGLEGSSEETSFHDESLQDDREEIENNSYHMHPAGIILTKVGYYTIPSMDDLAKITNEKGECIVSDFTIGRKGYGSIYFEGDVNLTNLNLDDIVHIRRKEVVVYLDDNQKPPVGEGLNRKAEVTLDGVWPTDKTSRCLIKSPDRLADINYEGRLEAVSRKQGAQFKEYRPETGSWVFKVSHFSKYGLQDSDEEEEEHPSKTSTKKLKTAPLPPASQTTPLQMALNGKPAPPPQVEKKGQ

SEQ ID NO: 58932 - protein, 136 aa, Homo sapiens
  Payload ID: 11510
  Gene Symbol: NUP98
  Gene Name: nucleoporin 98kDa
  ENSP ID: ENSP00000380208
  MOD_RES (1)..(1): Any amino acid
XLFSKPFGQATTTQNTGFSFGNTSTIGQPSTNTMGLFGVTQASQPGGLFGTATNTSTGTAFGTGTGLFGQTNTGFGAVGSTLFGNNKLTTFGSSTTSAPSFGTTSGGLFGNKPTLTLGTNTNTSNFGTYKKQVWLS

SEQ ID NO: 58933 - protein, 753 aa, Homo sapiens
  Payload ID: 11510
  Gene Symbol: NUP98
  Gene Name: nucleoporin 98kDa
  ENSP ID: ENSP00000413146
  MOD_RES (1)..(1): Any amino acid
XLEESMPEDQEPVSASTHIASSLGINPHVLQIMKASLLTDEEDVDMALDQRFSRLPSKADTSQEICSPRLPISASHSSKTRSLVGGLLQSKFTSGAFLSPSVSVQECRTPRAASLMNIPSTSSCLTESPFKVHLEKLSLRQRKPDEDMKLYQTPLELKLKHSTVHVDELCPLIVPNLGVAVIHDYADWVKEASGDLPEAQIVKHWSLTWTLCEALWGHLKELDSQLNEPREYIQILERRRAFSRWLSCTATPQIEEEVSLTQKNSPVEAVFSYLTGKRISEACSLAQQSGDHRLALLLSQFVGSQSVRELLTMQLVDWHQLQADSFIQDERLRIFALLAGKPVWQLSEKKQINVCSQLDWKRSLAIHLWYLLPPTASISRALSMYEEAFQNTSDSDRYACSPLPSYLEGSGCVIAEEQNSQTPLRDVCFHLLKLYSDRHYDLNQLLEPRSITADPLDYRLSWHLWEVLRALNYTHLSAQCEGVLQASYAGQLESEGLWEWAIFVLLHIDNSGIREKAVRELLTRHCQLLETPESWAKETFLTQKLRVPAKWIHEAKAVRAHMESDKHLEALCLFKAEHWNRCHKLIIRHLASDAIINENYDYLKGFLEDLAPPERSSLIQDWETSGLVYLDYIRVIEMLRHIQQVDCSGNDLEQLHIKVTSLCSRIEQIQCYSAKDRLAQSDMAKRVANLLRVVLSLHHPPDRTSDSTPDPQRVPLRLLAPHIGRLPMPEDYAMDELRSLTQSYLRELAVGSL

SEQ ID NO: 58934 - protein, 179 aa, Homo sapiens
  Payload ID: 11510
  Gene Symbol: NUP98
  Gene Name: nucleoporin 98kDa
  ENSP ID: ENSP00000432142
  MOD_RES (1)..(1): Any amino acid
XTNTGFGAVGSTLFGNNKLTTFGSSTTSAPSFGTTSGGLFGFGTNTSGNSIFGSKPAPGTLGTGLGAGFGTALTDPNASAAQQAVLQQHINSLTYSPFGDSPLFRNPMSDPKKKEERLKPTNPAAQKALTTPTHYKLTPRPATRVRPKALQTTGTAKSHLFDGLDDDEPSLANGAFMPK

SEQ ID NO: 58935 - protein, 93 aa, Homo sapiens
  Payload ID: 11510
  Gene Symbol: NUP98
  Gene Name: nucleoporin 98kDa
  ENSP ID: ENSP00000432275
  MOD_RES (1)..(1): Any amino acid
XDYLKGFLEDLAPPERSSLIQDWETSGLVYLDYIRVIEMLRHIQQVDCSGNDLEQLHIKVTSLCSRIEQIQCYSAKDRLAQSGTVHTILASWA

SEQ ID NO: 58936 - protein, 75 aa, Homo sapiens
  Payload ID: 11510
  Gene Symbol: NUP98
  Gene Name: nucleoporin 98kDa
  ENSP ID: ENSP00000433226
  MOD_RES (1)..(1): Any amino acid
XYGKGKLLMDMALFMGRSFRVGWGPNWTLANSGEQLNGSHELENHQIADSMEFGFLPNPVAVKPCEALEPDMDTM

SEQ ID NO: 58937 - protein, 232 aa, Homo sapiens
  Payload ID: 11510
  Gene Symbol: NUP98
  Gene Name: nucleoporin 98kDa
  ENSP ID: ENSP00000433515
  MOD_RES (1)..(1): Any amino acid
XVRELLTMQLVDWHQLQADSFIQDERLRIFALLAGKPVWQLSEKKQINVCSQLDWKRSLAIHLWYLLPPTASISRALSMYEEAFQNTSDSDRYACSPLPSYLEGSGCVIAEEQNSQTPLRDVCFHLLKLYSDRHYDLNQLLEPRSITADPLDYRLSWHLWEVLRALNYTHLSAQCEAYVRRLFESCLPGTASCWRPLNLGLKRLSLPRSSVYLPNGSTRPKLCEHTWNLTST

SEQ ID NO: 58938 - protein, 124 aa, Homo sapiens
  Payload ID: 11510
  Gene Symbol: NUP98
  Gene Name: nucleoporin 98kDa
  ENSP ID: ENSP00000434698
MFNKSFGTPFGGGTGGFGTTSTFGQNTGFGTTSGGAFGTSAFGSSNNTGGLFGNSQTKPGGLFGTSSFSQPATSTSTGFGFDFGTSTSSGGLFGTTNTTSNPFGSTSGSLFGPSSFTAAPTGTT

SEQ ID NO: 58939 - protein, 235 aa, Homo sapiens
  Payload ID: 11510
  Gene Symbol: NUP98
  Gene Name: nucleoporin 98kDa
  ENSP ID: ENSP00000436226
  MOD_RES (1)..(1): Any amino acid
XGSSTTSAPSFGFGTNTSGNSIFGSKPAPGTLGTGLGAGFGTALGAGQASLFGNNQPKIGGPLGTGAFGAPGFNTTTATLGFGAPQAPVALTDPNASAAQQAVLQQHINSLTYSPFGDSPLFRNPMSDPKKKEERLKPTNPAAQKALTTPTHYKLTPRPATRVRPKALQTTGTAKSHLFDGLDDDEPSLANGAFMPKKSIKKLVLKNLNNSNLFSPVNRDSENLASPSEYPENGE

SEQ ID NO: 58940 - protein, 423 aa, Homo sapiens
  Payload ID: 11511
  Gene Symbol: NUPL2
  Gene Name: nucleoporin like 2
  Uniprot ID: O15504
  ENSP ID: ENSP00000258742
MAICQFFLQGRCRFGDRCWNEHPGARGAGGGRQQPQQQPSGNNRRGWNTTSQRYSNVIQPSSFSKSTPWGGSRDQEKPYFSSFDSGASTNRKEGFGLSENPFASLSPDEQKDEKKLLEGIVKDMEVWESSGQWMFSVYSPVKKKPNISGFTDISPEELRLEYHNFLTSNNLQSYLNSVQRLINQWRNRVNELKSLNISTKVALLSDVKDGVNQAAPAFGFGSSQAATFMSPGFPVNNSSSDNAQNFSFKTNSGFAAASSGSPAGFGSSPAFGAAASTSSGISTSAPAFGFGKPEVTSAASFSFKSPAASSFGSPGFSGLPASLATGPVRAPVAPAFGGGSSVAGFGSPGSHSHTAFSKPSSDTFGNSSISTSLSASSSIIATDNVLFTPRDKLTVEELEQFQSKKFTLGKIPLKPPPLELLNV

SEQ ID NO: 58941 - protein, 155 aa, Homo sapiens
  Payload ID: 11511
  Gene Symbol: NUPL2
  Gene Name: nucleoporin like 2
  ENSP ID: ENSP00000387330
MAICQFFLQGRCRFGDRCWNEHPGARGAGGGRQQPQQQPSGNNRRGWNTTSQRYSNVIQPSSFSKSTPWGGSRDQEKPYFSSFDSGASTNRKEGFGLSENPFASLSPDEQKDEKKLLEGIVKDMEVWESSGQWMFSVYSPVKKKPNISVPKPFLG

SEQ ID NO: 58942 - protein, 435 aa, Homo sapiens
  Payload ID: 11511
  Gene Symbol: NUPL2
  Gene Name: nucleoporin like 2
  ENSP ID: ENSP00000401475
MAICQFFLQGRCRFGDRCWNEHPGARGAGGGRQQPQQQPSGNNRRGWNTTSQRYSNVIQPSSFSKSTPWGGSRDQEKPYFSSFDSGASTNRKEGFGLSENPFASLSPDEQKDEKKLLEGIVKDMEVWESSGQWMFSVYSPVKKKPNISGFTDISPEELRLEYHNFLTSNNLQSYLNSVQRLINQWRNRVNELKSLNISTKVALKCLWKIYTHLSPKIYGPDCGKFIIFLSDVKDGVNQAAPAFGFGSSQAATFMSPGFPVNNSSSDNAQNFSFKTNSGFAAASSGSPAGFGSSPAFGAAASTSSGISTSAPAFGFGKPEVTSAASFSFKSPAASSFGSPGFSGLPASLATGPVRAPVAPAFGGGSSVAGFGSPGSHSHTAFSKPSSDTFGNSSISTSLSASSSIIATDNVLFTPRDKLTVEELEQFQSKKFTLGK

SEQ ID NO: 58943 - protein, 44 aa, Homo sapiens
  Payload ID: 11511
  Gene Symbol: NUPL2
  Gene Name: nucleoporin like 2
  ENSP ID: ENSP00000406677
MAICQFFLQGRCRFGDRCWNEHPGARGAGGGRQQPQQQPSGKEL

SEQ ID NO: 58944 - protein, 224 aa, Homo sapiens
  Payload ID: 11511
  Gene Symbol: NUPL2
  Gene Name: nucleoporin like 2
  Uniprot ID: O15504
  ENSP ID: ENSP00000415511
MAICQFFLQGRCRFGDRCWNEHPGARGAGGGRQQPQQQPSGNNRRGWNTTSQRYSNVIQPSSFSKSTPWGGSRDQEKPYFSSFDSGASTNRKEGFGLSENPFASLSPDEQKDEKKLLEGIVKDMEVWESSGQWMFSVYSPVKKKPNISGFTDISPEELRLEYHNFLTSNNLQSYLNSVQRLINQWRNRVNELKSLNISTKVALKCLWKIYTHLSPKIYGPDCAL

SEQ ID NO: 58945 - protein, 83 aa, Homo sapiens [sequence omitted]

SEQ ID NO: 58946 - protein, 435 aa, Homo sapiens
  Payload ID: 11512
  Gene Symbol: NXN
  Gene Name: nucleoredoxin
  Uniprot ID: Q6DKJ4
  ENSP ID: ENSP00000337443
MSGFLEELLGEKLVTGGGEEVDVHSLGARGISLLGLYFGCSLSAPCAQLSASLAAFYGRLRGDAAAGPGPGAGAGAAAEPEPRRRLEIVFVSSDQDQRQWQDFVRDMPWLALPYKEKHRKLKLWNKYRISNIPSLIFLDATTGKVVCRNGLLVIRDDPEGLEFPWGPKPFREVIAGPLLRNNGQSLESSSLEGSHVGVYFSAHWCPPCRSLTRVLVESYRKIKEAGQNFEIIFVSADRSEESFKQYFSEMPWLAVPYTDEARRSRLNRLYGIQGIPTLIMLDPQGEVITRQGRVEVLNDEDCREFPWHPKPVLELSDSNAAQLNEGPCLVLFVDSEDDGESEAAKQLIQPIAEKIIAKYKAKEEEAPLLFFVAGEDDMTDSLRDYTNLPEAAPLLTILDMSARAKYVMDVEEITPAIVEAFVNDFLAEKLKPEPI

SEQ ID NO: 58947 - protein, 186 aa, Homo sapiens
  Payload ID: 11512
  Gene Symbol: NXN
  Gene Name: nucleoredoxin
  ENSP ID: ENSP00000446446
MPWLAVPYTDEARRSRLNRLYGIQGIPTLIMLDPQGEVITRQGRVEVLNDEDCREFPWHPKPVLELSDSNAAQLNEGPCLVLFVDSEDDGESEAAKQLIQPIAEKIIAKYKAKEEEAPLLFFVAGEDDMTDSLRDYTNLPEAAPLLTILDMSARAKYVMDVEEITPAIVEAFVNDFLAEKLKPEPI

SEQ ID NO: 58948 - protein, 327 aa, Homo sapiens
  Payload ID: 11512
  Gene Symbol: NXN
  Gene Name: nucleoredoxin
  Uniprot ID: Q6DKJ4
  ENSP ID: ENSP00000461038
MADVSLHRNPATLKLWNKYRISNIPSLIFLDATTGKVVCRNGLLVIRDDPEGLEFPWGPKPFREVIAGPLLRNNGQSLESSSLEGSHVGVYFSAHWCPPCRSLTRVLVESYRKIKEAGQNFEIIFVSADRSEESFKQYFSEMPWLAVPYTDEARRSRLNRLYGIQGIPTLIMLDPQGEVITRQGRVEVLNDEDCREFPWHPKPVLELSDSNAAQLNEGPCLVLFVDSEDDGESEAAKQLIQPIAEKIIAKYKAKEEEAPLLFFVAGEDDMTDSLRDYTNLPEAAPLLTILDMSARAKYVMDVEEITPAIVEAFVNDFLAEKLKPEPI

SEQ ID NO: 58949 - protein, 230 aa, Homo sapiens
  Payload ID: 11512
  Gene Symbol: NXN
  Gene Name: nucleoredoxin
  ENSP ID: ENSP00000461562
  MOD_RES (1)..(1): Any amino acid
XCRNGLLVIRDDPEGLEFPWGPKPFREVIAGPLLRNNGQSLESSSLEGSHVGVYFSAHWCPPCRSLTRVLVESYRKIKEAGQNFEIIFVSADRSEESFKQYFSEMPWLAVPYTDEARRSRLNRLYGIQDSEDDGESEAAKQLIQPIAEKIIAKYKAKEEEAPLLFFVAGEDDMTDSLRDYTNLPEAAPLLTILDMSARAKYVMDVEEITPAIVEAFVNDFLAEKLKPEPI

SEQ ID NO: 58950 - protein, 120 aa, Homo sapiens
  Payload ID: 11512
  Gene Symbol: NXN
  Gene Name: nucleoredoxin
  ENSP ID: ENSP00000485936
MSGFLEELLGEKLVTGGGEEVDVHSLGARGISLLGLYFGCSLSAPCAQLSASLAAFYGRLRGDAAAGPGPGAGAGAAAEPEPRRRLEIVFVSSDQDQRQWQDFVRDMPWLALPYKEKHRK

SEQ ID NO: 58951 - protein, 120 aa, Homo sapiens; identical to SEQ ID NO: 58950
  Payload ID: 11512
  Gene Symbol: NXN
  Gene Name: nucleoredoxin
  ENSP ID: ENSP00000486232

SEQ ID NO: 58952 - protein, 212 aa, Homo sapiens
  Payload ID: 11513
  Gene Symbol: NXNL1
  Gene Name: nucleoredoxin-like 1
  Uniprot ID: Q96CM4
  ENSP ID: ENSP00000305631
MASLFSGRILIRNNSDQDELDTEAEVSRRLENRLVLLFFGAGACPQCQAFVPILKDFFVRLTDEFYVLRAAQLALVYVSQDSTEEQQDLFLKDMPKKWLFLPFEDDLRRDLGRQFSVERLPAVVVLKPDGDVLTRDGADEIQRLGTACFANWQEAAEVLDRNFQLPEDLEDQEPRSLTECLRRHKYRVEKAARGGRDPGGGGGEEGGAGGLF

SEQ ID NO: 58953 - protein, 156 aa, Homo sapiens
  Payload ID: 11514
  Gene Symbol: NXNL2
  Gene Name: nucleoredoxin-like 2
  Uniprot ID: Q5VZ03
  ENSP ID: ENSP00000365014
MVDILGERHLVTCKGATVEAEAALQNKVVALYFAAARCAPSRDFTPLLCDFYTALVAEARRPAPFEVVFVSADGSSQEMLDFMRELHGAWLALPFHDPYRHELRKRYNVTAIPKLVIVKQNGEVITNKGRKQIRERGLACFQDWVEAADIFQNFSV

SEQ ID NO: 58954 - protein, 135 aa, Homo sapiens
  Payload ID: 11514
  Gene Symbol: NXNL2
  Gene Name: nucleoredoxin-like 2
  Uniprot ID: Q5VZ03
  ENSP ID: ENSP00000365015
MVDILGERHLVTCKGATVEAEAALQNKVVALYFAAARCAPSRDFTPLLCDFYTALVAEARRPAPFEVVFVSADGSSQEMLDFMRELHGAWLALPFHDPYRQRSLALLPRLECSGVILAHCNLCLLGSSDSLALAS

SEQ ID NO: 58955 - protein, 135 aa, Homo sapiens [sequence omitted]

SEQ ID NO: 58956 - protein, 228 aa, Homo sapiens
  Payload ID: 11515
  Gene Symbol: NTPCR
  Gene Name: nucleoside-triphosphatase, cancer-related
  ENSP ID: ENSP00000355586
MARHVFLTGPPGVGKTTLIHKASEVLKSSGVPVDGFYTEEVRQGGRRIGFDVVTLSGTRGPLSRVGLEPPPGKRECRVGQYVVDLTSFEQLALPVLRNADCSSGPGQRVCVIDEIGKMELFSQLFIQAVRQTLSTPGTIILGTIPVPKGKPLALVEEIRNRKDVKVFNSPYCVIEDQSKFSSCVSQSTLTEPGWRQKLLQSLLNSEWKKRAPVVPTSVSPPFYLRWIP

SEQ ID NO: 58957 - protein, 190 aa, Homo sapiens
  Payload ID: 11515
  Gene Symbol: NTPCR
  Gene Name: nucleoside-triphosphatase, cancer-related
  Uniprot ID: Q9BSD7
  ENSP ID: ENSP00000355587
MARHVFLTGPPGVGKTTLIHKASEVLKSSGVPVDGFYTEEVRQGGRRIGFDVVTLSGTRGPLSRVGLEPPPGKRECRVGQYVVDLTSFEQLALPVLRNADCSSGPGQRVCVIDEIGKMELFSQLFIQAVRQTLSTPGTIILGTIPVPKGKPLALVEEIRNRKDVKVFNVTKENRNHLLPDIVTCVQSSRK

SEQ ID NO: 58958 - protein, 391 aa, Homo sapiens
  Payload ID: 11516
  Gene Symbol: NAP1L1
  Gene Name: nucleosome assembly protein 1-like 1
  Uniprot ID: P55209
  ENSP ID: ENSP00000261182
MADIDNKEQSELDQDLDDVEEVEEEETGEETKLKARQLTVQMMQNPQILAALQERLDGLVETPTGYIESLPRVVKRRVNALKNLQVKCAQIEAKFYEEVHDLERKYAVLYQPLFDKRFEIINAIYEPTEEECEWKPDEEDEISEELKEKAKIEDEKKDEEKEDPKGIPEFWLTVFKNVDLLSDMVQEHDEPILKHLKDIKVKFSDAGQPMSFVLEFHFEPNEYFTNEVLTKTYRMRSEPDDSDPFSFDGPEIMGCTGCQIDWKKGKNVTLKTIKKKQKHKGRGTVRTVTKTVSNDSFFNFFAPPEVPESGDLDDDAEAILAADFEIGHFLRERIIPRSVLYFTGEAIEDDDDDYDEEGEEADEEGEEEGDEENDPDYDPKKDQNPAECKQQ

SEQ ID NO: 58959 - protein, 391 aa, Homo sapiens; identical to SEQ ID NO: 58958
  Payload ID: 11516
  Gene Symbol: NAP1L1
  Gene Name: nucleosome assembly protein 1-like 1
  Uniprot ID: P55209
  ENSP ID: ENSP00000376947

SEQ ID NO: 58960 - protein, 323 aa, Homo sapiens
  Payload ID: 11516
  Gene Symbol: NAP1L1
  Gene Name: nucleosome assembly protein 1-like 1
  Uniprot ID: P55209
  ENSP ID: ENSP00000409795
MMQNPQILAALQERLDGLVETPTGYIESLPRVVKRRVNALKNLQVKCAQIEAKFYEEVHDLERKYAVLYQPLFDKEELKEKAKIEDEKKDEEKEDPKGIPEFWLTVFKNVDLLSDMVQEHDEPILKHLKDIKVKFSDAGQPMSFVLEFHFEPNEYFTNEVLTKTYRMRSEPDDSDPFSFDGPEIMGCTGCQIDWKKGKNVTLKTIKKKQKHKGRGTVRTVTKTVSNDSFFNFFAPPEVPESGDLDDDAEAILAADFEIGHFLRERIIPRSVLYFTGEAIEDDDDDYDEEGEEADEEGEEEGDEENDPDYDPKKDQNPAECKQQ

SEQ ID NO: 58961 - protein, 208 aa, Homo sapiens
  Payload ID: 11516
  Gene Symbol: NAP1L1
  Gene Name: nucleosome assembly protein 1-like 1
  ENSP ID: ENSP00000437507
MVQEHDEPILKHLKDIKVKFSDAGQPMSFVLEFHFEPNEYFTNEVLTKTYRMRSEPDDSDPFSFDGPEIMGCTGCQIDWKKGKNVTLKTIKKKQKHKGRGTVRTVTKTVSNDSFFNFFAPPEVPESGDLDDDAEAILAADFEIGHFLRERIIPRSVLYFTGEAIEDDDDDYDEEGEEADEEGEEEGDEENDPDYDPKKDQNPAECKQQ

SEQ ID NO: 58962 - protein, 349 aa, Homo sapiens
  Payload ID: 11516
  Gene Symbol: NAP1L1
  Gene Name: nucleosome assembly protein 1-like 1
  ENSP ID: ENSP00000444759
MMQNPQILAALQERLDGLVETPTGYIESLPRVVKRRVNALKNLQVKCAQIEAKFYEEVHDLERKYAVLYQPLFDKRFEIINAIYEPTEEECEWKPDEEDEISELKEKAKIEDEKKDEEKEDPKGIPEFWLTVFKNVDLLSDMVQEHDEPILKHLKDIKVKFSDAGQPMSFVLEFHFEPNEYFTNEVLTKTYRMRSEPDDSDPFSFDGPEIMGCTGCQIDWKKGKNVTLKTIKKKQKHKGRGTVRTVTKTVSNDSFFNFFAPPEVPESGDLDDDAEAILAADFEIGHFLRERIIPRSVLYFTGEAIEDDDDDYDEEGEEADEEGEEEGDEENDPDYDPKKDQNPAECKQQ

SEQ ID NO: 58963 - protein, 383 aa, Homo sapiens
  Payload ID: 11516
  Gene Symbol: NAP1L1
  Gene Name: nucleosome assembly protein 1-like 1
  ENSP ID: ENSP00000445008
MADIDNKEQSELDQDLDDVEEVEEEETGEETKLKARQLTVQMMQNPQILAALQERLDGLVETPTGYIESLPRVVKRRVNALKNLQVKCAQIEAKFYEEVHDLERKYAVLYQPLFDKRFEIINAIYEPTEEECEWKPDEEDEISEELKEKAKIEDEKKDEEKEDPKGIPEFWLTVFKNVDLLSDMVQEHDEPILKHLKDIKVKFSDAGQPMSFVLEFHFEPNEYFTNEVLTKTYRMRSEPDDSDPFSFDGPEIMGCTGCQIDWKKGKNVTLKTIKKKQKHKGRGTVRTVTKTVSNDSFFNFFAPPEVPESGDLDDDAEAILAADFEIGHFLRERIIPRSVLYFTGEAIEDDDDDYDEEGEEADEGYQLFEEVKSCSKLFQRWLQ

SEQ ID NO: 58964 - protein, 177 aa, Homo sapiens
  Payload ID: 11516
  Gene Symbol: NAP1L1
  Gene Name: nucleosome assembly protein 1-like 1
  ENSP ID: ENSP00000446520
  MOD_RES (1)..(1): Any amino acid
XTPTGYIESLPRVVKRRVNALKNLQVKCAQIEAKFYEEVHDLERKYAVLYQPLFDKRFEIINAIYEPTEEECEWKPDEEDEISEELKEKAKIEDEKKDEEKEDPKGIPEFWLTVFKNVDLLSDMVQEHDEPILKHLKDIKVKFSDAGQPMSFVLEFHFEPNEYFTNEVLTKTYRMSS

SEQ ID NO: 58965 - protein, 207 aa, Homo sapiens
  Payload ID: 11516
  Gene Symbol: NAP1L1
  Gene Name: nucleosome assembly protein 1-like 1
  ENSP ID: ENSP00000446756
MADIDNKEQSELDQDLDDVEEVEEEETGEETKLKARQLTVQMMQNPQILAALQERLDGLVETPTGYIESLPRVVKRRVNALKNLQVKCAQIEAKFYEEVHDLERKYAVLYQPLFDKRFEIINAIYEPTEEECEWKPDEEDEISVSTNFILEELKEKAKIEDEKKDEEKEDPKGIPEFWLTVFKNVDLLSDMVQEHDEPILKHLKDIK

SEQ ID NO: 58966 - protein, 209 aa, Homo sapiens
  Payload ID: 11516
  Gene Symbol: NAP1L1
  Gene Name: nucleosome assembly protein 1-like 1
  ENSP ID: ENSP00000446787
MMQNPQILAALQERLDGLVETPTGYIESLPRVVKRRVNALKNLQVKCAQIEAKFYEEVHDLERKYAVLYQPLFDKRFEIINAIYEPTEEECEWKPDEEDEISEELKEKAKIEDEKKDEEKEDPKGIPEFWLTVFKNVDLLSDMVQEHDEPILKHLKDIKVKFSDAGQPMSFVLEFHFEPNEYFTNEVLTKTYRMRSEPDDSDPFSFDGP

SEQ ID NO: 58967 - protein, 198 aa, Homo sapiens
  Payload ID: 11516
  Gene Symbol: NAP1L1
  Gene Name: nucleosome assembly protein 1-like 1
  ENSP ID: ENSP00000446804
TVQMMQNPQILAALQERLDGLVETPTGYIESLPRVVKRRVNALKNLQVKCAQIEAKFYEEVHDLERKYAVLYQPLFDKRFEIINAIYEPTEEECEWKPDEEDEISELKEKAKIEDEKKDEEKEDPKGIPEFWLTVFKNVDLLSDMVQEHDEPILKHLKDIKVKFSDAGQPMSFVLEFHFEPNEYFTNEVLTKTYRMSS

SEQ ID NO: 58968 - protein, 379 aa, Homo sapiens
  Payload ID: 11516
  Gene Symbol: NAP1L1
  Gene Name: nucleosome assembly protein 1-like 1
  ENSP ID: ENSP00000447196
MADIDNKEQSELDQDLDDVEEVEEEETGEETKLKARQLTVQMMQNPQILAALQERLDGLVETPTGYIESLPRVVKRRVNALKNLQVKCAQIEAKFYEEVHDLERKYAVLYQPLFDKRFEIINAIYEPTEEECEWKPDEEDEISIPASCLGEFSTEELKEKAKIEDEKKDEEKEDPKGIPEFWLTVFKNVDLLSDMVQEHDEPILKHLKDIKVKFSDAGQPMSFVLEFHFEPNEYFTNEVLTKTYRMRSEPDDSDPFSFDGPEIMGCTGCQIDWKKGKNVTLKTIKKKQKHKGRGTVRTVTKTVSNDSFFNFFAPPEVPESGDLDDDAEAILAADFEIGHFLRERIIPRSVLYFTGEAIEDDDDDYDEEGEEADEVMFTK

SEQ ID NO: 58969 - protein, 368 aa, Homo sapiens
  Payload ID: 11516
  Gene Symbol: NAP1L1
  Gene Name: nucleosome assembly protein 1-like 1
  Uniprot ID: P55209
  ENSP ID: ENSP00000447793
MADIDNKEQSELDQDLDDVEEVEEEETGEETKLKARQLTVQMMQNPQILAALQERLDGLVETPTGYIESLPRVVKRRVNALKNLQVKCAQIEAKFYEEVHDLERKYAVLYQPLFDKRFEIINAIYEPTEEECEWKPDEEDEISEELKEKAKIEDEKKDEEKEDPKGIPEFWLTVFKNVDLLSDMVQEHDEPILKHLKDIKVKFSDAGQPMSFVLEFHFEPNEYFTNEVLTKTYRMRSEPDDSDPFSFDGPEIMGCTGCQIDWKKGKNVTLKTIKKKQKHKGRGTVRTVTKTVSNDSFFNFFAPPEVPESGDLDDDAEAILAADFEIGHFLRERIIPRSVLYFTGEAIEDDDDDYDEEGEEADEVMFTK

SEQ ID NO: 58970 - protein, 237 aa, Homo sapiens
  Payload ID: 11516
  Gene Symbol: NAP1L1
  Gene Name: nucleosome assembly protein 1-like 1
  ENSP ID: ENSP00000448133
MADIDNKEQSELDQDLDDVEEVEEEETGEETKLKARQLTVQMMQNPQILAALQERLDGLVETPTGYIESLPRVVKRRVNALKNLQVKCAQIEAKFYEEVHDLERKYAVLYQPLFDKEELKEKAKIEDEKKDEEKEDPKGIPEFWLTVFKNVDLLSDMVQEHDEPILKHLKDIKVKFSDAGQPMSFVLEFHFEPNEYFTNEVLTKTYRMRSEPDDSDPFSFDGPEIMGCTGCQIDWKK

SEQ ID NO: 58971 - protein, 328 aa, Homo sapiens
  Payload ID: 11516
  Gene Symbol: NAP1L1
  Gene Name: nucleosome assembly protein 1-like 1
  ENSP ID: ENSP00000448167
MADIDNLPRVVKRRVNALKNLQVKCAQIEAKFYEEVHDLERKYAVLYQPLFDKRFEIINAIYEPTEEECEWKPDEEDEISEELKEKAKIEDEKKDEEKEDPKGIPEFWLTVFKNVDLLSDMVQEHDEPILKHLKDIKVKFSDAGQPMSFVLEFHFEPNEYFTNEVLTKTYRMRSEPDDSDPFSFDGPEIMGCTGCQIDWKKGKNVTLKTIKKKQKHKGRGTVRTVTKTVSNDSFFNFFAPPEVPESGDLDDDAEAILAADFEIGHFLRERIIPRSVLYFTGEAIEDDDDDYDEEGEEADEEGEEEGDEENDPDYDPKKDQNPAECKQQ

SEQ ID NO: 58972 - protein, 114 aa, Homo sapiens
  Payload ID: 11516
  Gene Symbol: NAP1L1
  Gene Name: nucleosome assembly protein 1-like 1
  ENSP ID: ENSP00000448661
MMQNPQILAALQERLDGLVETPTGYIESLPRVVKRRVNALKNLQVKCAQIEAKFYEEVHDLERKYAVLYQPLFDKRFEIINAIYEPTEEECEWKPDEEDEISEELKEKAKIEDE

SEQ ID NO: 58973 - protein, 264 aa, Homo sapiens
  Payload ID: 11516
  Gene Symbol: NAP1L1
  Gene Name: nucleosome assembly protein 1-like 1
  ENSP ID: ENSP00000448764
MADIDNKEQSELDQDLDDVEEVEEEETGEETKLKARQLTVQMMQNPQILAALQERLDGLVETPTGYIESLPRVVKRRVNALKNLQVKCAQIEAKFYEEVHDLERKYAVLYQPLFDKRFEIINAIYEPTEEECEWKPDEEDEISEELKEKAKIEDEKKDEEKEDPKGIPEFWLTVFKNVDLLSDMVQEHDEPILKHLKDIKVKFSDAGQPMSFVLEFHFEPNEYFTNEVLTKTYRMRSEPDDSDPFSFDGPEIMGCTGCQIDWKK

SEQ ID NO: 58974 - protein, 215 aa, Homo sapiens
  Payload ID: 11516
  Gene Symbol: NAP1L1
  Gene Name: nucleosome assembly protein 1-like 1
  ENSP ID: ENSP00000448836
MADIDNKEQSELDQDLDDVEEVEEEETGEETKLKARQLTVQMMQNPQILAALQERLDGLVETPTGYIESLPRVVKRRVNALKNLQVKCAQIEAKFYEEVHDLERKYAVLYQPLFDKAEDCCHFQVKTWRLLSDLPTMNNGRAVTHIQCCEELKEKAKIEDEKKDEEKEDPKGIPEFWLTVFKNVDLLSDMVQEHDEPILKHLKDIKVKFSDAGQP

SEQ ID NO: 58975 - protein, 161 aa, Homo sapiens
  Payload ID: 11516
  Gene Symbol: NAP1L1
  Gene Name: nucleosome assembly protein 1-like 1
  ENSP ID: ENSP00000449333
MADIDNKEQSELDQDLDDVEEVEEEETGEETKLKARQLTVQMMQNPQILAALQERLDGLVETPTGYIERVSFCQPGWSAVVVQSCSIQPRHPRLSLPRVVKRRVNALKNLQVKCAQIEAKFYEEVHDLERKYAVLYQPLFDKRFEIINAIYEPTEEECEWK

SEQ ID NO: 58976 - protein, 327 aa, Homo sapiens
  Payload ID: 11516
  Gene Symbol: NAP1L1
  Gene Name: nucleosome assembly protein 1-like 1
  ENSP ID: ENSP00000449649
MMQNPQILAALQERLDGLVETPTGYIESLPRVVKRRVNALKNLQVKCAQIEAKFYEEVHDLERKYAVLYQPLFDKRFEIINAIYEPTEEECEWKPDEEDEISEELKEKAKIEDEKKDEEKEDPKGIPEFWLTVFKNVDLLSDMVQEHDEPILKHLKDIKVKFSDAGQPMSFVLEFHFEPNEYFTNEVLTKTYRMRSEPDDSDPFSFDGPEIMGCTGCQIDWKKGKNVTLKTIKKKQKHKGRGTVRTVTKTVSNDSFFNFFAPPEVPESGDLDDDAEAILAADFEIGHFLRERIIPRSVLYFTGEAIEDDDDDYDEEGEEADEVMFTK

SEQ ID NO: 58977 - protein, 385 aa, Homo sapiens
  Payload ID: 11516
  Gene Symbol: NAP1L1
  Gene Name: nucleosome assembly protein 1-like 1
  ENSP ID: ENSP00000450236
KEQSELDQDLDDVEEVEEEETGEETKLKARQLTVQMMQNPQILAALQERLDGLVETPTGYIESLPRVVKRRVNALKNLQVKCAQIEAKFYEEVHDLERKYAVLYQPLFDKRFEIINAIYEPTEEECEWKPDEEDEISEELKEKAKIEDEKKDEEKEDPKGIPEFWLTVFKNVDLLSDMVQEHDEPILKHLKDIKVKFSDAGQPMSFVLEFHFEPNEYFTNEVLTKTYRMRSEPDDSDPFSFDGPEIMGCTGCQIDWKKGKNVTLKTIKKKQKHKGRGTVRTVTKTVSNDSFFNFFAPPEVPESGDLDDDAEAILAADFEIGHFLRERIIPRSVLYFTGEAIEDDDDDYDEEGEEADEEGEEEGDEENDPDYDPKKDQNPAECKQQ

SEQ ID NO: 58978 - protein, 391 aa, Homo sapiens; identical to SEQ ID NO: 58958
  Payload ID: 11516
  Gene Symbol: NAP1L1
  Gene Name: nucleosome assembly protein 1-like 1
  Uniprot ID: P55209
  ENSP ID: ENSP00000477538

SEQ ID NO: 58979 - protein, 460 aa, Homo sapiens
  Payload ID: 11517
  Gene Symbol: NAP1L2
  Gene Name: nucleosome assembly protein 1-like 2
  Uniprot ID: Q9ULW6
  ENSP ID: ENSP00000362616
MAESENRKELSESSQEEAGNQIMVEGLGEHLERGEDAAAGLGDDGKCGEEAAAGLGEEGENGEDTAAGSGEDGKKGGDTDEDSEADRPKGLIGYVLDTDFVESLPVKVKYRVLALKKLQTRAANLESKFLREFHDIERKFAEMYQPLLEKRRQIINAIYEPTEEECEYKSDSEDCDDEEMCHEEMYGNEEGMVHEYVDEDDGYEDYYYDYAVEEEEEEEEEDDIEATGEENKEEEDPKGIPDFWLTVLKNVDTLTPLIKKYDEPILKLLTDIKVKLSDPGEPLSFTLEFHFKPNEYFKNELLTKTYVLKSKLAYYDPHPYRGTAIEYSTGCEIDWNEGKNVTLKTIKKKQKHRIWGTIRTVTEDFPKDSFFNFFSPHGITSNGRDGNDDFLLGHNLRTYIIPRSVLFFSGDALESQQEGVVREVNDAIYDKIIYDNWMAAIEEVKACCKNLEALVEDIDR

SEQ ID NO: 58980 - protein, 506 aa, Homo sapiens
  Payload ID: 11518
  Gene Symbol: NAP1L3
  Gene Name: nucleosome assembly protein 1-like 3
  Uniprot ID: Q99457
  ENSP ID: ENSP00000362171
MAEADFKMVSEPVAHGVAEEEMASSTSDSGEESDSSSSSSSTSDSSSSSSTSGSSSGSGSSSSSSGSTSSRSRLYRKKRVPEPSRRARRAPLGTNFVDRLPQAVRNRVQALRNIQDECDKVDTLFLKAIHDLERKYAELNKPLYDRRFQIINAEYEPTEEECEWNSEDEEFSSDEEVQDNTPSEMPPLEGEEEENPKENPEVKAEEKEVPKEIPEVKDEEKEVPKEIPEVKAEEKADSKDCMEATPEVKEDPKEVPQVKADDKEQPKATEAKARAAVRETHKRVPEERLQDSVDLKRARKGKPKREDPKGIPDYWLIVLKNVDKLGPMIQKYDEPILKFLSDVSLKFSKPGQPVSYTFEFHFLPNPYFRNEVLVKTYIIKAKPDHNDPFFSWGWEIEDCKGCKIDWRRGKDVTVTTTQSRTTATGEIEIQPRVVPNASFFNFFSPPEIPMIGKLEPREDAILDEDFEIGQILHDNVILKSIYYYTGEVNGTYYQFGKHYGNKKYRK

SEQ ID NO: 58981 - protein, 499 aa, Homo sapiens
  Payload ID: 11518
  Gene Symbol: NAP1L3
  Gene Name: nucleosome assembly protein 1-like 3
  ENSP ID: ENSP00000476891
MVSEPVAHGVAEEEMASSTSDSGEESDSSSSSSSTSDSSSSSSTSGSSSGSGSSSSSSGSTSSRSRLYRKKRVPEPSRRARRAPLGTNFVDRLPQAVRNRVQALRNIQDECDKVDTLFLKAIHDLERKYAELNKPLYDRRFQIINAEYEPTEEECEWNSEDEEFSSDEEVQDNTPSEMPPLEGEEEENPKENPEVKAEEKEVPKEIPEVKDEEKEVPKEIPEVKAEEKADSKDCMEATPEVKEDPKEVPQVKADDKEQPKATEAKARAAVRETHKRVPEERLQDSVDLKRARKGKPKREDPKGIPDYWLIVLKNVDKLGPMIQKYDEPILKFLSDVSLKFSKPGQPVSYTFEFHFLPNPYFRNEVLVKTYIIKAKPDHNDPFFSWGWEIEDCKGCKIDWRRGKDVTVTTTQSRTTATGEIEIQPRVVPNASFFNFFSPPEIPMIGKLEPREDAILDEDFEIGQILHDNVILKSIYYYTGEVNGTYYQFGKHYGNKKYRK

SEQ ID NO: 58982 - protein, 375 aa, Homo sapiens
  Payload ID: 11519
  Gene Symbol: NAP1L4
  Gene Name: nucleosome assembly protein 1-like 4
  Uniprot ID: Q99733
  ENSP ID: ENSP00000369915
MADHSFSDGVPSDSVEAAKNASNTEKLTDQVMQNPRVLAALQERLDNVPHTPSSYIETLPKAVKRRINALKQLQVRCAHIEAKFYEEVHDLERKYAALYQPLFDKRREFITGDVEPTDAESEWHSENEEEEKLAGDMKSKVVVTEKAAATAEEPDPKGIPEFWFTIFRNVDMLSELVQEYDEPILKHLQDIKVKFSDPGQPMSFVLEFHFEPNDYFTNSVLTKTYKMKSEPDKADPFSFEGPEIVDCDGCTIDWKKGKNVTVKTIKKKQKHKGRGTVRTITKQVPNESFFNFFNPLKASGDGESLDEDSEFTLASDFEIGHFFRERIVPRAVLYFTGEAIEDDDNFEEGEEGEEEELEGDEEGEDEDDAEINPKV

SEQ ID NO: 58983 - protein, 156 aa, Homo sapiens
  Payload ID: 11519
  Gene Symbol: NAP1L4
  Gene Name: nucleosome assembly protein 1-like 4
  ENSP ID: ENSP00000382523
MQNPRVLAALQERLDNVPHTPSSYIETLPKAVKRRINALKQLQVRCAHIEAKFYEEVHDLERKYAALYQPLFDKRREFITGDVEPTDAESEWHSENEEEEKLAGDMKSKVVVTEKAAATAEEPDPKGIPEFWFTIFRNVDMLSELVQEYDEPILKH

SEQ ID NO: 58984 - protein, 278 aa, Homo sapiens
  Payload ID: 11519
  Gene Symbol: NAP1L4
  Gene Name: nucleosome assembly protein 1-like 4
  ENSP ID: ENSP00000387783
MADHSFSDGVPSDSVEAAKNASNTEKLTDQVMQNPRVLAALQERLDNVPHTPSSYIETHEDVVFLTPFFSLPKAVKRRINALKQLQVRCAHIEAKFYEEVHDLERKYAALYQPLFDKRREFITGDVEPTDAESEWHSENEEEEKLAGDMKSKVVVTEKAAATAEEPDPKGIPEFWFTIFRNVDMLSELVQEYDEPILKHLQDIKVKFSDPGQPMSFVLEFHFEPNDYFTNSVLTKTYKMKSEPDKADPFSFEGPEIVDCDGCTIDWKKGKNVTVKTIK

SEQ ID NO: 58985 - protein, 178 aa, Homo sapiens
  Payload ID: 11519
  Gene Symbol: NAP1L4
  Gene Name: nucleosome assembly protein 1-like 4
  ENSP ID: ENSP00000405912
MADHSFSDGVPSDSVEAAKNASNTEKLTDQVMQNPRVLAALQERLDNVPHTPSSYIETLPKAVKRRINALKQLQVRCAHIEAKFYEEVHDLERKYAALYQPLFDKRREFITGDVEPTDAESEWHSENEEEEKLAGDMKSKVVVTEKAAATAEEPDPKGIPEFWFTIFRNVDMLSELVQ

SEQ ID NO: 58986 - protein, 101 aa, Homo sapiens
  Payload ID: 11519
  Gene Symbol: NAP1L4
  Gene Name: nucleosome assembly protein 1-like 4
  ENSP ID: ENSP00000412048
MADHSFSDGVPSDSVEAAKNASNTEKLTDQVMQNPRVLAALQERLDNVPHTPSSYIETHEDVVFLTPFFSLPKAVKRRINALKQLQVRCAHIEAKFYEEVH

SEQ ID NO: 58987 - protein, 204 aa, Homo sapiens
  Payload ID: 11519
  Gene Symbol: NAP1L4
  Gene Name: nucleosome assembly protein 1-like 4
  ENSP ID: ENSP00000431644
EKAAATAEEPDPKGIPEFWFTIFRNVDMLSELVQEYDEPILKHLQDIKVKFSDPGQPMSFVLEFHFEPNDYFTNSVLTKTYKMKSEPDKADPFSFEGPEIVDCDGCTIDWKKGKNVTVKTIKKKQKHKGRGTVRTITKQVPNESFFNFFNPLKASGDGESLDEDSEFTLASDFEIGHFFRERIVPRAVLYFTGEAIEDDDNPDM

SEQ ID NO: 58988 - protein, 128 aa, Homo sapiens
  Payload ID: 11519
  Gene Symbol: NAP1L4
  Gene Name: nucleosome assembly protein 1-like 4
  ENSP ID: ENSP00000431799
MADHSFSDGVPSDSVEAAKNASNTEKLTDQVMQNPRVLAALQERLDNVPHTPSSYIETLPKAVKRRINALKQLQVRCAHIEAKFYEEVHDLERKYAALYQPLFDKRREFITGDVEPTDAESEWHSENE

SEQ ID NO: 58989 - protein, 133 aa, Homo sapiens
  Payload ID: 11519
  Gene Symbol: NAP1L4
  Gene Name: nucleosome assembly protein 1-like 4
  ENSP ID: ENSP00000432126
MADHSFSDGVPSDSVEAAKNASNTEKLTDQVMQNPRVLAALQERLDNVPHTPSSYIETLPKAVKRRINALKQLQVRCAHIEAKFYEEVHDLERKYAALYQPLFDKRREFITGDVEPTDAESEWHSENEEEEKL

SEQ ID NO: 58990 - protein, 78 aa, Homo sapiens
  Payload ID: 11519
  Gene Symbol: NAP1L4
  Gene Name: nucleosome assembly protein 1-like 4
  ENSP ID: ENSP00000433512
MADHSFSDGVPSDSVEAAKNASNTEKLTDQVMQNPRVLAALQERLDNVPHTPSSYIETLPKAVKRRINALKQLQVRCA

SEQ ID NO: 58991 - protein, 140 aa, Homo sapiens
  Payload ID: 11519
  Gene Symbol: NAP1L4
  Gene Name: nucleosome assembly protein 1-like 4
  ENSP ID: ENSP00000434759
MADHSFSDGVPSDSVEAAKNASNTEKLTDQVMQNPRVLAALQERLDNVPHTPSSYIETLPKAVKRRINALKQLQVRCAHIEAKFYEEVHDLERKYAALYQPLFDKRREFITGDVEPTDAESEWHSENEEEEKLAGDMKSK

SEQ ID NO: 58992 - protein, 169 aa, Homo sapiens
  Payload ID: 11519
  Gene Symbol: NAP1L4
  Gene Name: nucleosome assembly protein 1-like 4
  ENSP ID: ENSP00000435327
MADHSFSDGVPSDSVEAAKNASNTEKLTDQVMQNPRVLAALQERLDNVPHTPSSYIETHEDVVFLTPFFSLPKAVKRRINALKQLQVRCAHIEAKFYEEVHDLERKYAALYQPLFDKRREFITGDVEPTDAESEWHSENEEEEKLAGDMKSKVVVTEKAAATAEEPDPK

SEQ ID NO: 58993 - protein, 386 aa, Homo sapiens
  Payload ID: 11519
  Gene Symbol: NAP1L4
  Gene Name: nucleosome assembly protein 1-like 4
  Uniprot ID: Q99733
  ENSP ID: ENSP00000436397
MADHSFSDGVPSDSVEAAKNASNTEKLTDQVMQNPRVLAALQERLDNVPHTPSSYIETLPKAVKRRINALKQLQVRCAHIEAKFYEEVHDLERKYAALYQPLFDKRREFITGDVEPTDAESEWHSENEEEEKLAGDMKSKVVVTEKAAATAEEPDPKGIPEFWFTIFRNVDMLSELVQEYDEPILKHLQDIKVKFSDPGQPMSFVLEFHFEPNDYFTNSVLTKTYKMKSEPDKADPFSFEGPEIVDCDGCTIDWKKGKNVTVKTIKKKQKHKGRGTVRTITKQVPNESFFNFFNPLKASGDGESLDEDSEFTLASDFEIGHFFRERIVPRAVLYFTGEAIEDDDNFEEGEEGEEEELEGDEEGEDEDDAEINPKKEPSQPAECKQQ

SEQ ID NO: 58994 - protein, 154 aa, Homo sapiens
  Payload ID: 11519
  Gene Symbol: NAP1L4
  Gene Name: nucleosome assembly protein 1-like 4
  ENSP ID: ENSP00000436488
MADHSFSDGVPSDSVEAAKNASNTEKLTDQVMQNPRVLAALQERLDNVPHTPSSYIETLPKAVKRRINALKQLQDIKVKFSDPGQPMSFVLEFHFEPNDYFTNSVLTKTYKMKSEPDKADPFSFEGPEIVDCDGCTIDWKKGKNVTVKTIKKKQ

SEQ ID NO: 58995 - protein, 107 aa, Homo sapiens
  Payload ID: 11519
  Gene Symbol: NAP1L4
  Gene Name: nucleosome assembly protein 1-like 4
  ENSP ID: ENSP00000437130
MADHSFSDGVPSDSVEAAKNASNTEKLTDQVMQNPRVLAALQERLDNVPHTPSSYIETLPKAVKRRINALKQLQVRCAHIEAKFYEEVHDLERKYAALYQPLFDKRR

SEQ ID NO: 58996 - protein, 386 aa, Homo sapiens; identical to SEQ ID NO: 58993
  Payload ID: 11519
  Gene Symbol: NAP1L4
  Gene Name: nucleosome assembly protein 1-like 4
  Uniprot ID: Q99733
  ENSP ID: ENSP00000478654

SEQ ID NO: 58997 - protein, 386 aa, Homo sapiens; identical to SEQ ID NO: 58993
  Payload ID: 11519
  Gene Symbol: NAP1L4
  Gene Name: nucleosome assembly protein 1-like 4
  Uniprot ID: Q99733
  ENSP ID: ENSP00000481412

SEQ ID NO: 58998 - protein, 375 aa, Homo sapiens; identical to SEQ ID NO: 58982
  Payload ID: 11519
  Gene Symbol: NAP1L4
  Gene Name: nucleosome assembly protein 1-like 4
  Uniprot ID: Q99733
  ENSP ID: ENSP00000483728

SEQ ID NO: 58999 - protein, 133 aa, Homo sapiens; identical to SEQ ID NO: 58989
  Payload ID: 11519
  Gene Symbol: NAP1L4
  Gene Name: nucleosome assembly protein 1-like 4
  ENSP ID: ENSP00000487825

SEQ ID NO: 59000 - protein, 156 aa, Homo sapiens; identical to SEQ ID NO: 58983
  Payload ID: 11519
  Gene Symbol: NAP1L4
  Gene Name: nucleosome assembly protein 1-like 4
  ENSP ID: ENSP00000487901

SEQ ID NO: 59001 - protein, 386 aa, Homo sapiens; identical to SEQ ID NO: 58993
  Payload ID: 11519
  Gene Symbol: NAP1L4
  Gene Name: nucleosome assembly protein 1-like 4
  Uniprot ID: Q99733
  ENSP ID: ENSP00000487984

SEQ ID NO: 59002 - protein, 204 aa, Homo sapiens; identical to SEQ ID NO: 58987
  Payload ID: 11519
  Gene Symbol: NAP1L4
  Gene Name: nucleosome assembly protein 1-like 4
  ENSP ID: ENSP00000488078

SEQ ID NO: 59003 - protein, 128 aa, Homo sapiens; identical to SEQ ID NO: 58988
  Payload ID: 11519
  Gene Symbol: NAP1L4
  Gene Name: nucleosome assembly protein 1-like 4
  ENSP ID: ENSP00000488208

SEQ ID NO: 59004 - protein, 169 aa, Homo sapiens; identical to SEQ ID NO: 58992
  Payload ID: 11519
  Gene Symbol: NAP1L4
  Gene Name: nucleosome assembly protein 1-like 4
  ENSP ID: ENSP00000488420

SEQ ID NO: 59005 - protein, 178 aa, Homo sapiens; identical to SEQ ID NO: 58985
  Payload ID: 11519
  Gene Symbol: NAP1L4
  Gene Name: nucleosome assembly protein 1-like 4
  ENSP ID: ENSP00000488479

SEQ ID NO: 59006 - protein, 278 aa, Homo sapiens; identical to SEQ ID NO: 58984
  Payload ID: 11519
  Gene Symbol: NAP1L4
  Gene Name: nucleosome assembly protein 1-like 4
  ENSP ID: ENSP00000488498

SEQ ID NO: 59007 - protein, 101 aa, Homo sapiens; identical to SEQ ID NO: 58986
  Payload ID: 11519
  Gene Symbol: NAP1L4
  Gene Name: nucleosome assembly protein 1-like 4
  ENSP ID: ENSP00000488634

SEQ ID NO: 59008 - protein, 107 aa, Homo sapiens; identical to SEQ ID NO: 58995
  Payload ID: 11519
  Gene Symbol: NAP1L4
  Gene Name: nucleosome assembly protein 1-like 4
  ENSP ID: ENSP00000488709

SEQ ID NO: 59009 - protein, 140 aa, Homo sapiens; identical to SEQ ID NO: 58991
  Payload ID: 11519
  Gene Symbol: NAP1L4
  Gene Name: nucleosome assembly protein 1-like 4
  ENSP ID: ENSP00000488770

SEQ ID NO: 59010 - protein, 78 aa, Homo sapiens; identical to SEQ ID NO: 58990
  Payload ID: 11519
  Gene Symbol: NAP1L4
  Gene Name: nucleosome assembly protein 1-like 4
  ENSP ID: ENSP00000488875

SEQ ID NO: 59011 - protein, 182 aa, Homo sapiens
  Payload ID: 11520
  Gene Symbol: NAP1L5
  Gene Name: nucleosome assembly protein 1-like 5
  Uniprot ID: Q96NT1
  ENSP ID: ENSP00000320488
MADSENQGPAEPSQAAAAAEAAAEEVMAEGGAQGGDCDSAAGDPDSAAGQMAEEPQTPAENAPKPKNDFIESLPNSVKCRVLALKKLQKRCDKIEAKFDKEFQALEKKYNDIYKPLLAKIQELTGEMEGCAWTLEGEEEEEEEYEDDEEEGEDEEEEEAAAEAAAGAKHDDAHAEMPDDAKK

SEQ ID NO: 59012 - protein, 107 aa, Homo sapiens
  Payload ID: 11521
  Gene Symbol: NAP1L6
  Gene Name: nucleosome assembly protein 1-like 6
  Uniprot ID: A6NFF2
  ENSP ID: ENSP00000362617
MMEGLGEHSTAGEMGPLLGAVAATASPQSLMEYSSDADFIESLPLVVKYRVYTLKKLQAKCAVLEAKYLREFHSVERKFATIYGPLLEKRRQITNALYEPTKEECER

SEQ ID NO: 59013 - protein, 320 aa, Homo sapiens
  Payload ID: 11522
  Gene Symbol: NUBP1
  Gene Name: nucleotide binding protein 1
  Uniprot ID: P53384
  ENSP ID: ENSP00000283027
MEEVPHDCPGADSAQAGRGASCQGCPNQRLCASGAGATPDTAIEEIKEKMKTVKHKILVLSGKGGVGKSTFSAHLAHGLAEDENTQIALLDIDICGPSIPKIMGLEGEQVHQSGSGWSPVYVEDNLGVMSVGFLLSSPDDAVIWRGPKKNGMIKQFLRDVDWGEVDYLIVDTPPGTSDEHLSVVRYLATAHIDGAVIITTPQEVSLQDVRKEINFCRKVKLPIIGVVENMSGFICPKCKKESQIFPPTTGGAELMCQDLEVPLLGRVPLDPLIGKNCDKGQSFFIDAPDSPATLAYRSIIQRIQEFCNLHQSKEENLISS

SEQ ID NO: 59014 - protein, 309 aa, Homo sapiens
  Payload ID: 11522
  Gene Symbol: NUBP1
  Gene Name: nucleotide binding protein 1
  Uniprot ID: P53384
  ENSP ID: ENSP00000409654
MEEVPHDCPGADSAQAGRGASCQGCPNQRLCASGAGATPDTAIEEIKEKMKTVKHKILVLSGKGGVGKSTFSAHLAHGLAEDENTQIALLDIDICGPSIPKIMGLEGEQYVEDNLGVMSVGFLLSSPDDAVIWRGPKKNGMIKQFLRDVDWGEVDYLIVDTPPGTSDEHLSVVRYLATAHIDGAVIITTPQEVSLQDVRKEINFCRKVKLPIIGVVENMSGFICPKCKKESQIFPPTTGGAELMCQDLEVPLLGRVPLDPLIGKNCDKGQSFFIDAPDSPATLAYRSIIQRIQEFCNLHQSKEENLISS

SEQ ID NO: 59015 - protein, 142 aa, Homo sapiens
  Payload ID: 11522
  Gene Symbol: NUBP1
  Gene Name: nucleotide binding protein 1
  ENSP ID: ENSP00000460288
  MOD_RES (1)..(1): Any amino acid
XMIKQFLRDVDWGEVDYLIVDTPPGTSDEHLSVVRYLATAHIDGAVIITTPQEVSLQDVRKEINFCRKVKLPIIGVVENMSGFICPKCKKESQIFPPTTGGAELMCQDLEVPLLGRVPLDPLIGIQEFCNLHQSKEENLISS

SEQ ID NO: 59016 - protein, 63 aa, Homo sapiens
  Payload ID: 11522
  Gene Symbol: NUBP1
  Gene Name: nucleotide binding protein 1
  ENSP ID: ENSP00000461723
  MOD_RES (1)..(1): Any amino acid
XITTPQEVSLQDVRKEINFCRKVKLPIIGVVENMSGFICPKCKVRIVTKASLFSLTPQIPQPR

SEQ ID NO: 59017 - protein, 168 aa, Homo sapiens
  Payload ID: 11522
  Gene Symbol: NUBP1
  Gene Name: nucleotide binding protein 1
  ENSP ID: ENSP00000461746
MEEVPHDCPGADSAQAGRGASCQGCPNQRLCASGAGATPDTAIEEIKEKMKTVKHKILVLSGKGGVGKSTFSAHLAHGLAEDENTQVHQSGSGWSPVYVEDNLGVMSVGFLLSSPDDAVIWRGPKKNGMIKQFLRDVDWGEVDYLIVDTPPGTSDEHLSVVRYLATAH

SEQ ID NO: 59018 - protein, 271 aa, Homo sapiens
  Payload ID: 11523
  Gene Symbol: NUBP2
  Gene Name: nucleotide binding protein 2
  Uniprot ID: Q9Y5Y2
  ENSP ID: ENSP00000262302
MEAAAEPGNLAGVRHIILVLSGKGGVGKSTISTELALALRHAGKKVGILDVDLCGPSIPRMLGAQGRAVHQCDRGWAPVFLDREQSISLMSVGFLLEKPDEAVVWRGPKKNALIKQFVSDVAWGELDYLVVDTPPGTSDEHMATIEALRPYQPLGALVVTTPQAVSVGDVRRELTFCRKTGLRVMGIVENMSGFTCPHCTECTSVFSRGGGEELAQLAGVPFLGSVPLDPALMRTLEEGHDFIQEFPGSPAFAALTSIAQKILDATPACLP

SEQ ID NO: 59019 - protein, 139 aa, Homo sapiens
  Payload ID: 11523
  Gene Symbol: NUBP2
  Gene Name: nucleotide binding protein 2
  ENSP ID: ENSP00000454576
MEAAAEPGNLAGVRHIILVLSGKGGVGKSTISTELALALRHAGKKAVPLLAGGNPGCGPVWPQYPPHARGAGQGCAPVRPRLGTRLPGPGAEHLAHVCGLPAGEAGRGRGVERPQEKRADKAVCVRRGLGGAGLPGGGH

SEQ ID NO: 59020 - protein, 251 aa, Homo sapiens [sequence omitted]

SEQ ID NO: 59021 - protein, 271 aa, Homo sapiens
  Payload ID: 11523
  Gene Symbol: NUBP2
  Gene Name: nucleotide binding protein 2
  ENSP ID: ENSP00000454982
MEAAAGVWGWGCLFRVPWRRPQAASVGLRTRLHARFSGRLWTWEPLNVPLRGGSEGGRFYASCVEPLTCTLQGPVGDGAACWRQGAWPQRWRREPGNLAGVRHIILVLSGKGGVGKSTISTELALALRHAGKKVGILDVDLCGPSIPRMLGAQGRAVHQCDRGWAPVFLDREQSISLMSVGFLLEKPDEAVVWRGPKKNALIKQFVSDVAWGELDYLVVDTPPGTSDEHMATIEALRPYQPLGALVVTTPQAVSVGDVRRELTFCRKTGLR

SEQ ID NO: 59022 - protein, 58 aa, Homo sapiens
  Payload ID: 11523
  Gene Symbol: NUBP2
  Gene Name: nucleotide binding protein 2
  ENSP ID: ENSP00000455739
  MOD_RES (1)..(1): Any amino acid
XEAAAGEWRARVRSRSRASLGAPPRPFPGRPRCVARLRCDHHRPAWLGRARGRGAGIF

SEQ ID NO: 59023 - protein, 211 aa, Homo sapiens
  Payload ID: 11523
  Gene Symbol: NUBP2
  Gene Name: nucleotide binding protein 2
  ENSP ID: ENSP00000455896
MLGAQGRAVHQCDRGWAPVFLDREQSISLMSVGFLLEKPDEAVVWRGPKKNALIKQFVSDVAWGELDYLVVDTPPGTSDEHMATIEALRPYQPLGALVVTTPQAVSVGDVRRELTFCRKTGLRVMGIVENMSGFTCPHCTECTSVFSRGGGEELAQLAGVPFLGSVPLDPALMRTLEEGHDFIQEFPGSPAFAALTSIAQKILDATPACLP

SEQ ID NO: 59024 - protein, 144 aa, Homo sapiens
  Payload ID: 11523
  Gene Symbol: NUBP2
  Gene Name: nucleotide binding protein 2
  ENSP ID: ENSP00000456199
MLGAQGRAVHQCDRGWAPVFLDREQSISLMSVGFLLEKPDEAVVWRGPKKNALIKQFVSDVAWGELDYLVVDTPPGTSDEHMATIEALRPYQPLGALVVTTPQAVSVGDVRRELTFCRKTGLRVMGIVENMSGFTCPHCTECTS

SEQ ID NO: 59025 - protein, 46 aa, Homo sapiens
  Payload ID: 11523
  Gene Symbol: NUBP2
  Gene Name: nucleotide binding protein 2
  ENSP ID: ENSP00000456284
MEAAAEPGNLAGVRHIILVLSGKGGVGKSTISTELALALRHAGKKR

SEQ ID NO: 59026 - protein, 46 aa, Homo sapiens; identical to SEQ ID NO: 59025
  Payload ID: 11523
  Gene Symbol: NUBP2
  Gene Name: nucleotide binding protein 2
  ENSP ID: ENSP00000456928

SEQ ID NO: 59027 - protein, 130 aa, Homo sapiens
  Payload ID: 11523
  Gene Symbol: NUBP2
  Gene Name: nucleotide binding protein 2
  ENSP ID: ENSP00000460079
MATIEALRPYQPLGALVVTTPQAVSVGDVRRELTFCRKTGLRVMGIVENMSGFTCPHCTECTSVFSRGGGEELAQLAGVPFLGSVPLDPALMRTLEEGHDFIQEFPGSPAFAALTSIAQKILDATPACLP

SEQ ID NO: 59028 - protein, 319 aa, Homo sapiens
  Payload ID: 11524
  Gene Symbol: NUBPL
  Gene Name: nucleotide binding protein-like
  Uniprot ID: Q8TB37
  ENSP ID: ENSP00000281081
MGIWQRLLLFGGVSLRAGGGATAPLGGSRAMVCGRQLSGAGSETLKQRRTQIMSRGLPKQKPIEGVKQVIVVASGKGGVGKSTTAVNLALALAANDSSKAIGLLDVDVYGPSVPKMMNLKGNPELSQSNLMRPLLNYGIACMSMGFLVEESEPVVWRGLMVMSAIEKLLRQVDWGQLDYLVVDMPPGTGDVQLSVSQNIPITGAVIVSTPQDIALMDAHKGAEMFRRVHVPVLGLVQNMSVFQCPKCKHKTHIFGADGARKLAQTLGLEVLGDIPLHLNIREASDTGQPIVFSQPESDEAKAYLRIAVEVVRRLPSPSE

SEQ ID NO: 59029 - protein, 54 aa, Homo sapiens
  Payload ID: 11524
  Gene Symbol: NUBPL
  Gene Name: nucleotide binding protein-like
  ENSP ID: ENSP00000446511
MMRIEVKVKMMLSGAGSETLKQRRTQIMSRGLPKQKPIEGVKQVIVVASGKGGV

SEQ ID NO: 59030 - protein, 133 aa, Homo sapiens
  Payload ID: 11524
  Gene Symbol: NUBPL
  Gene Name: nucleotide binding protein-like
  ENSP ID: ENSP00000447234
MSRGLPKQKPIEGVKQVIVVASGKGGVGKSTTAVNLALALAANDSSKAIGLLDVDVYGPSVPKMMNLKGNPELSQSNLMRPLLNYGIACMSMGFLVEESEPVVWRGLMVMSAIEKLLRQVDWGQLDYLVVDMP

SEQ ID NO: 59031 - protein, 103 aa, Homo sapiens
  Payload ID: 11524
  Gene Symbol: NUBPL
  Gene Name: nucleotide binding protein-like
  ENSP ID: ENSP00000447316
MGIWQRLLLFGGVSLRAGGGATAPLGGSRAMVCGRQLSGAGSETLKQRRTQIMSRGLPKQKPIEGVKQVIVVASGKGGVGKSTTAVETGFHRVNQDGLHLLIS

SEQ ID NO: 59032 - protein, 167 aa, Homo sapiens
  Payload ID: 11524
  Gene Symbol: NUBPL
  Gene Name: nucleotide binding protein-like
  ENSP ID: ENSP00000447618
MGIWQRLLLFGGVSLRAGGGATAPLGGSRAMVCGRQLSGAGSETLKQRRTQIMSRGLPKQKPIEGVKQVIVVASGKGGVGKSTTAVNLALALAANDSVLGLVQNMSVFQCPKCKHKTHIFGADGARKLAQTLGLEVLGDIPLHLNIREASDTGQPIVFSQPESDEAK

SEQ ID NO: 59033 - protein, 130 aa, Homo sapiens
  Payload ID: 11524
  Gene Symbol: NUBPL
  Gene Name: nucleotide binding protein-like
  ENSP ID: ENSP00000447658
VSLRAGGGATAPLGGSRAMVCGRQLSGAGSETLKQRRTQIMSRGLPKQKPIEGVKQVIVVASGKGGVGKSTTAVNLALALAANDSSKAIGLLDVDVYGPSVPKMMNLKGNPELSQSISQRCCRSCSRPPQ

SEQ ID NO: 59034 - protein, 173 aa, Homo sapiens
  Payload ID: 11524
  Gene Symbol: NUBPL
  Gene Name: nucleotide binding protein-like
  Uniprot ID: Q8TB37
  ENSP ID: ENSP00000449918
MGIWQRLLLFGGVSLRAGGGATAPLGGSRAMVCGRQLSGAGSETLKQRRTQIMSRGLPKQKPIEGVKQVIVVASGKGGVGKSTTAVNLALALAANDSSKAIGLLDVDVYGPSVPKMMNLKGNPELSQSNLMRPLLNYGIACMSMGFLVEESEPVVWRGLMVMSAIEKLLRQVL

SEQ ID NO: 59035 - protein, 953 aa, Homo sapiens
  Payload ID: 11525
  Gene Symbol: NOD1
  Gene Name: nucleotide-binding oligomerization domain containing 1
  Uniprot ID: Q9Y239
  ENSP ID: ENSP00000222823
MEEQGHSEMEIIPSESHPHIQLLKSNRELLVTHIRNTQCLVDNLLKNDYFSAEDAEIVCACPTQPDKVRKILDLVQSKGEEVSEFFLYLLQQLADAYVDLRPWLLEIGFSPSLLTQSKVVVNTDPVSRYTQQLRHHLGRDSKFVLCYAQKEELLLEEIYMDTIMELVGFSNESLGSLNSLACLLDHTTGILNEQGETIFILGDAGVGKSMLLQRLQSLWATGRLDAGVKFFFHFRCRMFSCFKESDRLCLQDLLFKHYCYPERDPEEVFAFLLRFPHVALFTFDGLDELHSDLDLSRVPDSSCPWEPAHPLVLLANLLSGKLLKGASKLLTARTGIEVPRQFLRKKVLLRGFSPSHLRAYARRMFPERALQDRLLSQLEANPNLCSLCSVPLFCWIIFRCFQHFRAAFEGSPQLPDCTMTLTDVFLLVTEVHLNRMQPSSLVQRNTRSPVETLHAGRDTLCSLGQVAHRGMEKSLFVFTQEEVQASGLQERDMQLGFLRALPELGPGGDQQSYEFFHLTLQAFFTAFFLVLDDRVGTQELLRFFQEWMPPAGAATTSCYPPFLPFQCLQGSGPAREDLFKNKDHFQFTNLFLCGLLSKAKQKLLRHLVPAAALRRKRKALWAHLFSSLRGYLKSLPRVQVESFNQVQAMPTFIWMLRCIYETQSQKVGQLAARGICANYLKLTYCNACSADCSALSFVLHHFPKRLALDLDNNNLNDYGVRELQPCFSRLTVLRLSVNQITDGGVKVLSEELTKYKIVTYLGLYNNQITDVGARYVTKILDECKGLTHLKLGKNKITSEGGKYLALAVKNSKSISEVGMWGNQVGDEGAKAFAEALRNHPSLTTLSLASNGISTEGGKSLARALQQNTSLEILWLTQNELNDEVAESLAEMLKVNQTLKHLWLIQNQITAKGTAQLADALQSNTGITEICLNGNLIKPEEAKVYEDEKRIICF

SEQ ID NO: 59036 - protein, 59 aa, Homo sapiens
  Payload ID: 11525
  Gene Symbol: NOD1
  Gene Name: nucleotide-binding oligomerization domain containing 1
  ENSP ID: ENSP00000395551
MEEQGHSEMEIIPSESHPHIQLLKSNRELLVTHIRNTQCLVDNLLKNDYFSAEDAEIVC

SEQ ID NO: 59037 - protein, 59 aa, Homo sapiens; identical to SEQ ID NO: 59036
  Payload ID: 11525
  Gene Symbol: NOD1
  Gene Name: nucleotide-binding oligomerization domain containing 1
  ENSP ID: ENSP00000396046

SEQ ID NO: 59038 - protein, 59 aa, Homo sapiens; identical to SEQ ID NO: 59036
  Payload ID: 11525
  Gene Symbol: NOD1
  Gene Name: nucleotide-binding oligomerization domain containing 1
  ENSP ID: ENSP00000399505

SEQ ID NO: 59039 - protein, 45 aa, Homo sapiens
  Payload ID: 11525
  Gene Symbol: NOD1
  Gene Name: nucleotide-binding oligomerization domain containing 1
  ENSP ID: ENSP00000410917
MEEQGHSEMEIIPSESHPHIQLLKSNRELLVTHIRNTQCLVDNLL

SEQ ID NO: 59040 - protein, 779 aa, Homo sapiens
  Payload ID: 11525
  Gene Symbol: NOD1
  Gene Name: nucleotide-binding oligomerization domain containing 1
  ENSP ID: ENSP00000416946
MEEQGHSEMEIIPSESHPHIQLLKSNRELLVTHIRNTQCLVDNLLKNDYFSAEDAEIVCACPTQPDKVRKILDLVQSKGEEVSEFFLYLLQQLADAYVDLRPWLLEIGFSPSLLTQSKVVVNTDPVSRYTQQLRHHLGRDSKFVLCYAQKEELLLEEIYMDTIMELVGFSNESLGSLNSLACLLDHTTGILNEQGETIFILGDAGVGKSMLLQRLQSLWATGRLDAGVKFFFHFRCRMFSCFKESDRLCLQDLLFKHYCYPERDPEEVFAFLLRFPHVALFTFDGLDELHSDLDLSRVPDSSCPWEPAHPLVLLANLLSGKLLKGASKLLTARTGIEVPRQFLRKKVLLRGFSPSHLRAYARRMFPERALQDRLLSQLEANPNLCSLCSVPLFCWIIFRCFQHFRAAFEGSPQLPDCTMTLTDVFLLVTEVHLNRMQPSSLVQRNTRSPVETLHAGRDTLCSLGQVAHRGMEKSLFVFTQEEVQASGLQERDMQLGFLRALPELGPGGDQQSYEFFHLTLQAFFTAFFLVLDDRVGTQELLRFFQEWMPPAGAATTSCYPPFLPFQCLQGSGPAREDLFKNKDHFQFTNLFLCGLLSKAKQKLLRHLVPAAALRRKRKALWAHLFSSLRGYLKSLPRVQVESFNQVQAMPTFIWMLRCIYETQSQKVGQLAARGICANYLKLTYCNACSADCSALSFVLHHFPKRLALDLDNNNLNDYGVRELQPCFSRLTVLRLSVNQITDGGVKVLSEELTKYKIVTYLGLWKSVDTICFKKQGLLK

SEQ ID NO: 59041 - protein, 1040 aa, Homo sapiens
  Payload ID: 11526
  Gene Symbol: NOD2
  Gene Name: nucleotide-binding oligomerization domain containing 2
  Uniprot ID: Q9HC29
  ENSP ID: ENSP00000300589
MGEEGGSASHDEEERASVLLGHSPGCEMCSQEAFQAQRSQLVELLVSGSLEGFESVLDWLLSWEVLSWEDYEGFHLLGQPLSHLARRLLDTVWNKGTWACQKLIAAAQEAQADSQSPKLHGCWDPHSLHPARDLQSHRPAIVRRLHSHVENMLDLAWERGFVSQYECDEIRLPIFTPSQRARRLLDLATVKANGLAAFLLQHVQELPVPLALPLEAATCKKYMAKLRTTVSAQSRFLSTYDGAETLCLEDIYTENVLEVWADVGMAGPPQKSPATLGLEELFSTPGHLNDDADTVLVVGEAGSGKSTLLQRLHLLWAAGQDFQEFLFVFPFSCRQLQCMAKPLSVRTLLFEHCCWPDVGQEDIFQLLLDHPDRVLLTFDGFDEFKFRFTDRERHCSPTDPTSVQTLLFNLLQGNLLKNARKVVTSRPAAVSAFLRKYIRTEFNLKGFSEQGIELYLRKRHHEPGVADRLIRLLQETSALHGLCHLPVFSWMVSKCHQELLLQEGGSPKTTTDMYLLILQHFLLHATPPDSASQGLGPSLLRGRLPTLLHLGRLALWGLGMCCYVFSAQQLQAAQVSPDDISLGFLVRAKGVVPGSTAPLEFLHITFQCFFAAFYLALSADVPPALLRHLFNCGRPGNSPMARLLPTMCIQASEGKDSSVAALLQKAEPHNLQITAAFLAGLLSREHWGLLAECQTSEKALLRRQACARWCLARSLRKHFHSIPPAAPGEAKSVHAMPGFIWLIRSLYEMQEERLARKAARGLNVGHLKLTFCSVGPTECAALAFVLQHLRRPVALQLDYNSVGDIGVEQLLPCLGVCKALYLRDNNISDRGICKLIECALHCEQLQKLALFNNKLTDGCAHSMAKLLACRQNFLALRLGNNYITAAGAQVLAEGLRGNTSLQFLGFWGNRVGDEGAQALAEALGDHQSLRWLSLVGNNIGSVGAQALALMLAKNVMLEELCLEENHLQDEGVCSLAEGLKKNSSLKILKLSNNCITYLGAEALLQALERNDTILEVWLRGNTFSLEEVDKLGCRDTRLLL

SEQ ID NO: 59042 - protein, 146 aa, Homo sapiens
  Payload ID: 11526
  Gene Symbol: NOD2
  Gene Name: nucleotide-binding oligomerization domain containing 2
  ENSP ID: ENSP00000431681
MCSQEAFQAQRSQLVELLVSGSLEGFESVLDWLLSWEVLSWEDYEGFHLLGQPLSHLARRLLDTVWNKGTWACQKLIAAAQEAQADSQSPKLHGCWDPHSLHPARDLQSHRPAIVRRLHSHVENMLDLAWERGFVSQYECDEIRLP

SEQ ID NO: 59043 - protein, 35 aa, Homo sapiens
  Payload ID: 11526
  Gene Symbol: NOD2
  Gene Name: nucleotide-binding oligomerization domain containing 2
  ENSP ID: ENSP00000435149
MGEEGGSASHDEEERASVLLGHSPGKRSRHCPVPA

SEQ ID NO: 59044 - protein, 169 aa, Homo sapiens
  Payload ID: 11526
  Gene Symbol: NOD2
  Gene Name: nucleotide-binding oligomerization domain containing 2
  ENSP ID: ENSP00000437246
  MOD_RES (1)..(1): Any amino acid
XLNVGHLKLTFCSVGPTECAALAFVLQHLRRPVALQLDYNSVGDIGVEQLLPCLGVCKALYLRDNNISDRGICKLIECALHCEQLQKLALGNNYITAAGAQVLAEGLRGNTSLQFLGFWGNRVGDEGAQALAEALGDHQSLRWLSLVGNNIGSVGAQALALMLAKNVML

SEQ ID NO: 59045 - protein, 60 aa, Homo sapiens
  Payload ID: 11526
  Gene Symbol: NOD2
  Gene Name: nucleotide-binding oligomerization domain containing 2
  ENSP ID: ENSP00000462443
  MOD_RES (1)..(1): Any amino acid
XLNVGHLKLTFCSVGPTECAALAFVLQHLRRPVALQLDYNSVGDIGVEQLLPCLGVCKAL

SEQ ID NO: 59046 - protein, 60 aa, Homo sapiens; identical to SEQ ID NO: 59045
  Payload ID: 11526
  Gene Symbol: NOD2
  Gene Name: nucleotide-binding oligomerization domain containing 2
  ENSP ID: ENSP00000463145
  MOD_RES (1)..(1): Any amino acid

SEQ ID NO: 59047 - protein, 60 aa, Homo sapiens; identical to SEQ ID NO: 59045
  Payload ID: 11526
  Gene Symbol: NOD2
  Gene Name: nucleotide-binding oligomerization domain containing 2
  ENSP ID: ENSP00000463423
  MOD_RES (1)..(1): Any amino acid

SEQ ID NO: 59048 - protein, 60 aa, Homo sapiens; identical to SEQ ID NO: 59045
  Payload ID: 11526
  Gene Symbol: NOD2
  Gene Name: nucleotide-binding oligomerization domain containing 2
  ENSP ID: ENSP00000464065
  MOD_RES (1)..(1): Any amino acid

SEQ ID NO: 59049 - protein, 527 aa, Homo sapiens
  Payload ID: 11527
  Gene Symbol: NACC1
  Gene Name: nucleus accumbens associated 1, BEN and BTB (POZ) domain containing
  Uniprot ID: Q96RE7
  ENSP ID: ENSP00000292431
MAQTLQMEIPNFGNSILECLNEQRLQGLYCDVSVVVKGHAFKAHRAVLAASSSYFRDLFNNSRSAVVELPAAVQPQSFQQILSFCYTGRLSMNVGDQFLLMYTAGFLQIQEIMEKGTEFFLKVSSPSCDSQGLHAEEAPSSEPQSPVAQTSGWPACSTPLPLVSRVKTEQQESDSVQCMPVAKRLWDSGQKEAGGGGNGSRKMAKFSTPDLAANRPHQPPPPQQAPVVAAAQPAVAAGAGQPAGGVAAAGGVVSGPSTSERTSPGTSSAYTSDSPGSYHNEEDEEEDGGEEGMDEQYRQICNMYTMYSMMNVGQTAEKVEALPEQVAPESRNRIRVRQDLASLPAELINQIGNRCHPKLYDEGDPSEKLELVTGTNVYITRAQLMNCHVSAGTRHKVLLRRLLASFFDRNTLANSCGTGIRSSTNDPRRKPLDSRVLHAVKYYCQNFAPNFKESEMNAIAADMCTNARRVVRKSWMPKVKVLKAEDDAYTTFISETGKIEPDMMGVEHGFETASHEGEAGPSAEALQ

SEQ ID NO: 59050 - protein, 94 aa, Homo sapiens
  Payload ID: 11527
  Gene Symbol: NACC1
  Gene Name: nucleus accumbens associated 1, BEN and BTB (POZ) domain containing
  ENSP ID: ENSP00000466017
VYITRAQLMNCHNFAPNFKESEMNAIAADMCTNARRVVRKSWMPKVKVLKAEDDAYTTFISETGKIEPDMMGVEHGFETASHEGEAGPSAEALQ

SEQ ID NO: 59051 - protein, 165 aa, Homo sapiens
  Payload ID: 11527
  Gene Symbol: NACC1
  Gene Name: nucleus accumbens associated 1, BEN and BTB (POZ) domain containing
  ENSP ID: ENSP00000467120
MAQTLQMEIPNFGNSILECLNEQRLQGLYCDVSVVVKGHAFKAHRAVLAASSSYFRDLFNNSRSAVVELPAAVQPQSFQQILSFCYTGRLSMNVGDQFLLMYTAGFLQIQEIMEKGTEFFLKVSSPSCDSQGLHAEEAPSSEPQSPVAQTSGWPACSTPLPLVSR

SEQ ID NO: 59052 - protein, 583 aa, Homo sapiens
  Payload ID: 11528
  Gene Symbol: NUDCD1
  Gene Name: NudC domain containing 1
  Uniprot ID: Q96RS6
  ENSP ID: ENSP00000239690
MEVAANCSLRVKRPLLDPRFEGYKLSLEPLPCYQLELDAAVAEVKLRDDQYTLEHMHAFGMYNYLHCDSWYQDSVYYIDTLGRIMNLTVMLDTALGKPREVFRLPTDLTACDNRLCASIHFSSSTWVTLSDGTGRLYVIGTGERGNSASEKWEIMFNEELGDPFIIIHSISLLNAEEHSIATLLLRIEKEELDMKGSGFYVSLEWVTISKKNQDNKKYEIIKRDILRGKSVPHYAAIEPDGNGLMIVSYKSLTFVQAGQDLEENMDEDISEKIKEPLYYWQQTEDDLTVTIRLPEDSTKEDIQIQFLPDHINIVLKDHQFLEGKLYSSIDHESSTWIIKESNSLEISLIKKNEGLTWPELVIGDKQGELIRDSAQCAAIAERLMHLTSEELNPNPDKEKPPCNAQELEECDIFFEESSSLCRFDGNTLKTTHVVNLGSNQYLFSVIVDPKEMPCFCLRHDVDALLWQPHSSKQDDMWEHIATFNALGYVQASKRDKKFFACAPNYSYAALCECLRRVFIYRQPAPMSTVLYNRKEGRQVGQVAKQQVASLETNDPILGFQATNERLFVLTTKNLFLIKVNTEN

SEQ ID NO: 59053 - protein, 554 aa, Homo sapiens
  Payload ID: 11528
  Gene Symbol: NUDCD1
  Gene Name: NudC domain containing 1
  Uniprot ID: Q96RS6
  ENSP ID: ENSP00000410707
MLYLQGWSMPAVAEVKLRDDQYTLEHMHAFGMYNYLHCDSWYQDSVYYIDTLGRIMNLTVMLDTALGKPREVFRLPTDLTACDNRLCASIHFSSSTWVTLSDGTGRLYVIGTGERGNSASEKWEIMFNEELGDPFIIIHSISLLNAEEHSIATLLLRIEKEELDMKGSGFYVSLEWVTISKKNQDNKKYEIIKRDILRGKSVPHYAAIEPDGNGLMIVSYKSLTFVQAGQDLEENMDEDISEKIKEPLYYWQQTEDDLTVTIRLPEDSTKEDIQIQFLPDHINIVLKDHQFLEGKLYSSIDHESSTWIIKESNSLEISLIKKNEGLTWPELVIGDKQGELIRDSAQCAAIAERLMHLTSEELNPNPDKEKPPCNAQELEECDIFFEESSSLCRFDGNTLKTTHVVNLGSNQYLFSVIVDPKEMPCFCLRHDVDALLWQPHSSKQDDMWEHIATFNALGYVQASKRDKKFFACAPNYSYAALCECLRRVFIYRQPAPMSTVLYNRKEGRQVGQVAKQQVASLETNDPILGFQATNERLFVLTTKNLFLIKVNTEN

SEQ ID NO: 59054 - protein, 108 aa, Homo sapiens
  Payload ID: 11528
  Gene Symbol: NUDCD1
  Gene Name: NudC domain containing 1
  ENSP ID: ENSP00000430095
MEVAANCSLRVKRPLLDPRFEGYKLSLEPLPCYQLELDAAVAEVKLRDDQYTLEHMHAFGMYNYLHCDSWYQDSVYYIDTLGRIMNLTVMLILKYLNHSIGYCTHLSD

SEQ ID NO: 59055 - protein, 79 aa, Homo sapiens
  Payload ID: 11528
  Gene Symbol: NUDCD1
  Gene Name: NudC domain containing 1
  ENSP ID: ENSP00000430859
MLYLQGWSMPAVAEVKLRDDQYTLEHMHAFGMYNYLHCDSWYQDSVYYIDTLGRIMNLTVMLILKYLNHSIGYCTHLSD

SEQ ID NO: 59056 - protein, 157 aa, Homo sapiens
  Payload ID: 11529
  Gene Symbol: NUDCD2
  Gene Name: NudC domain containing 2
  Uniprot ID: Q8WVJ2
  ENSP ID: ENSP00000304854
MSAPFEERSGVVPCGTPWGQWYQTLEEVFIEVQVPPGTRAQDIQCGLQSRHVALSVGGREILKGKLFDSTIADEGTWTLEDRKMVRIVLTKTKRDAANCWTSLLESEYAADPWVQDQMQRKLTLERFQKENPGFDFSGAEISGNYTKGGPDFSNLEK

SEQ ID NO: 59057 - protein, 132 aa, Homo sapiens
  Payload ID: 11529
  Gene Symbol: NUDCD2
  Gene Name: NudC domain containing 2
  ENSP ID: ENSP00000430347
MSAPFEERSGVVPCGTPWGQWYQTLEEVFIEVQVPPGTRAQDIQCGLQSRHVALSVGGREILKGKLFDSTIADEGTWTLESEYAADPWVQDQMQRKLTLERFQKENPGFDFSGAEISGNYTKGGPDFSNLEK

SEQ ID NO: 59058 - protein, 361 aa, Homo sapiens
  Payload ID: 11530
  Gene Symbol: NUDCD3
  Gene Name: NudC domain containing 3
  Uniprot ID: Q8IVD9
  ENSP ID: ENSP00000347626
METGAAELYDQALLGILQHVGNVQDFLRVLFGFLYRKTDFYRLLRHPSDRMGFPPGAAQALVLQVFKTFDHMARQDDEKRRQELEEKIRRKEEEEAKTVSAAAAEKEPVPVPVQEIEIDSTTELDGHQEVEKVQPPGPVKEMAHGSQEAEAPGAVAGAAEVPREPPILPRIQEQFQKNPDSYNGAVRENYTWSQDYTDLEVRVPVPKHVVKGKQVSVALSSSSIRVAMLEENGERVLMEGKLTHKINTESSLWSLEPGKCVLVNLSKVGEYWWNAILEGEEPIDIDKINKERSMATVDEEEQAVLDRLTFDYHQKLQGKPQSHELKVHEMLKKGWDAEGSPFRGQRFDPAMFNISPGAVQF

SEQ ID NO: 59059 - protein, 331 aa, Homo sapiens
  Payload ID: 11531
  Gene Symbol: NUDC
  Gene Name: nudC nuclear distribution protein
  Uniprot ID: Q9Y266
  ENSP ID: ENSP00000319664
MGGEQEEERFDGMLLAMAQQHEGGVQELVNTFFSFLRRKTDFFIGGEEGMAEKLITQTFSHHNQLAQKTRREKRARQEAERREKAERAARLAKEAKSETSGPQIKELTDEEAERLQLEIDQKKDAENHEAQLKNGSLDSPGKQDTEEDEEEDEKDKGKLKPNLGNGADLPNYRWTQTLSELDLAVPFCVNFRLKGKDMVVDIQRRHLRVGLKGQPAIIDGELYNEVKVEESSWLIEDGKVVTVHLEKINKMEWWSRLVSSDPEINTKKINPENSKLSDLDSETRSMVEKMMYDQRQKSMGLPTSDEQKKQEILKKFMDQHPEMDFSKAKFN

SEQ ID NO: 59060 - protein, 133 aa, Homo sapiens
  Payload ID: 11531
  Gene Symbol: NUDC
  Gene Name: nudC nuclear distribution protein
  ENSP ID: ENSP00000400981
MAEKLITQTFSHHNQLAQKTRREKRARQEAERREKAERAARLAKEAKSETSGPQIKELTDEEAERLQLEIDQKKDAENHEAQLKNGSLDSPGKQDTEEDEEEDEKDKGKLKPNLGNGADLPNYRWTQTLSELD

SEQ ID NO: 59061 - protein, 186 aa, Homo sapiens
  Payload ID: 11531
  Gene Symbol: NUDC
  Gene Name: nudC nuclear distribution protein
  ENSP ID: ENSP00000404020
MISNYRNGSELVCFNSGVGCFLIGCDWAFTVLVNTFFSFLRRKTDFFIGGEEGMAEKLITQTFSHHNQLAQKTRREKRARQEAERREKAERAARLAKEAKSETSGPQIKELTDEEAERLQLEIDQKKDAENHEAQLKNGSLDSPGKQDTEEDEEEDEKDKGKLKPNLGNGADLPNYRWTQTLSELD

SEQ ID NO: 59062 - protein, 335 aa, Homo sapiens
  Payload ID: 11532
  Gene Symbol: NDE1
  Gene Name: nudE neurodevelopment protein 1
  Uniprot ID: Q9NXR1
  ENSP ID: ENSP00000345892
MEDSGKTFSSEEEEANYWKDLAMTYKQRAENTQEELREFQEGSREYEAELETQLQQIETRNRDLLSENNRLRMELETIKEKFEVQHSEGYRQISALEDDLAQTKAIKDQLQKYIRELEQANDDLERAKRATIMSLEDFEQRLNQAIERNAFLESELDEKENLLESVQRLKDEARDLRQELAVQQKQEKPRTPMPSSVEAERTDTAVQATGSVPSTPIAHRGPSSSLNTPGSFRRGLDDSTGGTPLTPAARISALNIVGDLLRKVGALESKLASCRNLVYDQSPNRTGGPASGRSSKNRDGGERRPSSTSVPLGDKGLDTSCRWLSKSTTRSSSSC

SEQ ID NO: 59063 - protein, 335 aa, Homo sapiens; identical to SEQ ID NO: 59062
  Payload ID: 11532
  Gene Symbol: NDE1
  Gene Name: nudE neurodevelopment protein 1
  Uniprot ID: Q9NXR1
  ENSP ID: ENSP00000379642

SEQ ID NO: 59064 - protein, 335 aa, Homo sapiens; identical to SEQ ID NO: 59062
  Payload ID: 11532
  Gene Symbol: NDE1
  Gene Name: nudE neurodevelopment protein 1
  Uniprot ID: Q9NXR1
  ENSP ID: ENSP00000379643

SEQ ID NO: 59065 - protein, 137 aa, Homo sapiens
  Payload ID: 11532
  Gene Symbol: NDE1
  Gene Name: nudE neurodevelopment protein 1
  ENSP ID: ENSP00000459863
  MOD_RES (1)..(1): Any amino acid
XVQQKQEKPRTPMPSSVEAERTDTAVQATGSVPSTPIAHRGPSSSLNTPGSFRRGLDDSTGGTPLTPAARISALNIVGDLLRKVGVGEAPGIWEAAFTHVFIAAAVSPGGSQDVALGKPRKLKVLVLVGHELPLVVQ

SEQ ID NO: 59066 - protein, 173 aa, Homo sapiens
  Payload ID: 11532
  Gene Symbol: NDE1
  Gene Name: nudE neurodevelopment protein 1
  ENSP ID: ENSP00000459875
ERNAFLESELDEKENLLESVQRLKDEARDLRQELAVQQKQEKPRTPMPSSVEAERTDTAVQATGSVPSTPIAHRGPSSSLNTPGSFRRGLDDSTGGTPLTPAARISALNIVGDLLRKVGALESKLASCRNLVYDQSPNRTGGPASGRSSKNRDGGERRPSSTSVPLGDKGREN

SEQ ID NO: 59067 - protein, 127 aa, Homo sapiens
  Payload ID: 11532
  Gene Symbol: NDE1
  Gene Name: nudE neurodevelopment protein 1
  ENSP ID: ENSP00000459889
MEDSGKTFSSEEEEANYWKDLAMTYKQRAENTQEELREFQEGSREYEAELETQLQQIETRNRDLLSENNRLRMELETIKEKFEVQHSEGYRQISALEDDLAQTKAIKDQLQKYIRELEQANDDLERA

SEQ ID NO: 59068 - protein, 139 aa, Homo sapiens
  Payload ID: 11532
  Gene Symbol: NDE1
  Gene Name: nudE neurodevelopment protein 1
  ENSP ID: ENSP00000459918
ATGSVPSTPIAHRGPSSSLNTPGSFRRGLDDSTGGTPLTPAARISALNIVGDLLRKVGALESKLASCRNLVYDQSPNRTGGPASGRSSKNRDGGERRPSSTSVPLGDKGLGKRLEFGKPPSHMSSSPLPSAQGVVKMLL

SEQ ID NO: 59069 - protein, 126 aa, Homo sapiens
  Payload ID: 11532
  Gene Symbol: NDE1
  Gene Name: nudE neurodevelopment protein 1
  ENSP ID: ENSP00000460436
MEDSGKTFSSEEEEANYWKDLAMTYKQRAENTQEELREFQEGSREYEAELETQLQQIETRNRDLLSENNRLRMELETIKEKFEVQHSEGYRQISALEDDLAQTKAIKDQLQKYIRELEQANDDLER

SEQ ID NO: 59070 - protein, 109 aa, Homo sapiens
  Payload ID: 11532
  Gene Symbol: NDE1
  Gene Name: nudE neurodevelopment protein 1
  ENSP ID: ENSP00000460996
MEDSGKTFSSEEEEANYWKDLAMTYKQRAENTQEELREFQEGSREYEAELETQLQQIETRNRDLLSENNRLRMELETIKVPRRSLNRQCSRWSPLAASSWSLRLNLGEV

SEQ ID NO: 59071 - protein, 192 aa, Homo sapiens
  Payload ID: 11532
  Gene Symbol: NDE1
  Gene Name: nudE neurodevelopment protein 1
  ENSP ID: ENSP00000461729
  MOD_RES (1)..(1): Any amino acid
XDDLERAKRATIMSLEDFEQRLNQAIERNAFLESELDEKENLLESVQRLKDEARDLRQELAVQQKQEKPRTPMPSSVEAERTDTAVQATGSVPSTPIAHRGPSSSLNTPGSFRRGLDDSTGGTPLTPAARISALNIVGDLLRKVGRFNKVNQRVKDSRSGFPTSYKRSWIIGRHWSPNSLPAGTSCTISPQT

SEQ ID NO: 59072 - protein, 153 aa, Homo sapiens
  Payload ID: 11532
  Gene Symbol: NDE1
  Gene Name: nudE neurodevelopment protein 1
  ENSP ID: ENSP00000461748
PSSVEAERTDTAVQATGSVPSTPIAHRGPSSSLNTPGSFRRGLDDSTGGTPLTPAARISALNIVGDLLRKVGALESKLASCRNLVYDQSPNRTGGPASGRSSKNRDGGERRPSSTSVPLGDKGLGKRLEFGKPPSHMSSSPLPSAQGVVKMLL

SEQ ID NO: 59073 - protein, 335 aa, Homo sapiens; identical to SEQ ID NO: 59062
  Payload ID: 11532
  Gene Symbol: NDE1
  Gene Name: nudE neurodevelopment protein 1
  Uniprot ID: Q9NXR1
  ENSP ID: ENSP00000478036

SEQ ID NO: 59074 - protein, 139 aa, Homo sapiens; identical to SEQ ID NO: 59068
  Payload ID: 11532
  Gene Symbol: NDE1
  Gene Name: nudE neurodevelopment protein 1
  ENSP ID: ENSP00000487625

SEQ ID NO: 59075 - protein, 127 aa, Homo sapiens; identical to SEQ ID NO: 59067
  Payload ID: 11532
  Gene Symbol: NDE1
  Gene Name: nudE neurodevelopment protein 1
  ENSP ID: ENSP00000487642

SEQ ID NO: 59076 - protein, 153 aa, Homo sapiens; identical to SEQ ID NO: 59072
  Payload ID: 11532
  Gene Symbol: NDE1
  Gene Name: nudE neurodevelopment protein 1
  ENSP ID: ENSP00000487817

SEQ ID NO: 59077 - protein, 335 aa, Homo sapiens; identical to SEQ ID NO: 59062
  Payload ID: 11532
  Gene Symbol: NDE1
  Gene Name: nudE neurodevelopment protein 1
  Uniprot ID: Q9NXR1
  ENSP ID: ENSP00000488050

SEQ ID NO: 59078 - protein, 335 aa, Homo sapiens; identical to SEQ ID NO: 59062
  Payload ID: 11532
  Gene Symbol: NDE1
  Gene Name: nudE neurodevelopment protein 1
  Uniprot ID: Q9NXR1
  ENSP ID: ENSP00000488199

SEQ ID NO: 59079 - protein, 173 aa, Homo sapiens; identical to SEQ ID NO: 59066
  Payload ID: 11532
  Gene Symbol: NDE1
  Gene Name: nudE neurodevelopment protein 1
  ENSP ID: ENSP00000488454

SEQ ID NO: 59080 - protein, 192 aa, Homo sapiens; identical to SEQ ID NO: 59071
  Payload ID: 11532
  Gene Symbol: NDE1
  Gene Name: nudE neurodevelopment protein 1
  ENSP ID: ENSP00000488637
  MOD_RES (1)..(1): Any amino acid

SEQ ID NO: 59081 - protein, 137 aa, Homo sapiens; identical to SEQ ID NO: 59065
  Payload ID: 11532
  Gene Symbol: NDE1
  Gene Name: nudE neurodevelopment protein 1
  ENSP ID: ENSP00000488694
  MOD_RES (1)..(1): Any amino acid

SEQ ID NO: 59082 - protein, 126 aa, Homo sapiens; identical to SEQ ID NO: 59069
  Payload ID: 11532
  Gene Symbol: NDE1
  Gene Name: nudE neurodevelopment protein 1
  ENSP ID: ENSP00000488828

SEQ ID NO: 59083 - protein, 109 aa, Homo sapiens; identical to SEQ ID NO: 59070
  Payload ID: 11532
  Gene Symbol: NDE1
  Gene Name: nudE neurodevelopment protein 1
  ENSP ID: ENSP00000488895

SEQ ID NO: 59084 - protein, 345 aa, Homo sapiens
  Payload ID: 11533
  Gene Symbol: NDEL1
  Gene Name: nudE neurodevelopment protein 1-like 1
  Uniprot ID: Q9GZM8
  ENSP ID: ENSP00000333982
MDGEDIPDFSSLKEETAYWKELSLKYKQSFQEARDELVEFQEGSRELEAELEAQLVQAEQRNRDLQADNQRLKYEVEALKEKLEHQYAQSYKQVSVLEDDLSQTRAIKEQLHKYVRELEQANDDLERAKRATIVSLEDFEQRLNQAIERNAFLESELDEKESLLVSVQRLKDEARDLRQELAVRERQQEVTRKSAPSSPTLDCEKMDSAVQASLSLPATPVGKGTENTFPSPKAIPNGFGTSPLTPSARISALNIVGDLLRKVGALESKLAACRNFAKDQASRKSYISGNVNCGVLNGNGTKFSRSGHTSFFDKGAVNGFDPAPPPPGLGSSRPSSAPGMLPLSV

SEQ ID NO: 59085 - protein, 269 aa, Homo sapiens
  Payload ID: 11533
  Gene Symbol: NDEL1
  Gene Name: nudE neurodevelopment protein 1-like 1
  ENSP ID: ENSP00000369364
MDGEDIPDFSSLKEETAYWKELSLKYKQSFQEARDELVEFQEGSRELEAELEAQLVQAEQRNRDLQADNQRLKYEVEALKEKLEHQYAQSYKQVSVLEDDLSQTRAIKEQLHKYVRELEQANDDLERAKRATIVSLEDFEQRLNQAIERNAFLESELDEKESLLVSVQRLKDEARDLRQELAVRERQQEVTRKSAPSSPTLDCEKMDSAVQASLSLPATPVGKGTENTFPSPKAIPNGFGTSPLTPSARISALNIVGDLLRKVGGSKRL

SEQ ID NO: 59086 - protein, 328 aa, Homo sapiens
  Payload ID: 11533
  Gene Symbol: NDEL1
  Gene Name: nudE neurodevelopment protein 1-like 1
  Uniprot ID: Q9GZM8
  ENSP ID: ENSP00000384963
MDGEDIPDFSSLKEETAYWKELSLKYKQSFQEARDELVEFQEGSRELEAELEAQLVQAEQRNRDLQADNQRLKYEVEALKEKLEHQYAQSYKQVSVLEDDLSQTRAIKEQLHKYVRELEQANDDLERAKRATIVSLEDFEQRLNQAIERNAFLESELDEKESLLVSVQRLKDEARDLRQELAVRERQQEVTRKSAPSSPTLDCEKMDSAVQASLSLPATPVGKGTENTFPSPKAIPNGFGTSPLTPSARISALNIVGDLLRKVGALESKLAACRNFAKDQASRKSYISGNVNCGVLNGNGTKFSRSGHTSFFDKGQEKVIFPTLFMGQ

SEQ ID NO: 59087 - protein, 145 aa, Homo sapiens
  Payload ID: 11533
  Gene Symbol: NDEL1
  Gene Name: nudE neurodevelopment protein 1-like 1
  ENSP ID: ENSP00000462052
MDGEDIPDFSSLKEETAYWKELSLKYKQSFQEARDELVEFQEGSRELEAELEAQLVQAEQRNRDLQADNQRLKYEVEALKEKLEHQYAQSYKQVSVLEDDLSQTRAIKEQLHKYVRELEQANDDLERAKRATIVSLEDFEQRLNQ

SEQ ID NO: 59088 - protein, 33 aa, Homo sapiens
  Payload ID: 11533
  Gene Symbol: NDEL1
  Gene Name: nudE neurodevelopment protein 1-like 1
  ENSP ID: ENSP00000462458
MDGEDIPDFSSLKEETAYWKELSLKYKQSFQEA

SEQ ID NO: 59089 - protein, 72 aa, Homo sapiens
  Payload ID: 11533
  Gene Symbol: NDEL1
  Gene Name: nudE neurodevelopment protein 1-like 1
  ENSP ID: ENSP00000462759
MDGEDIPDFSSLKEETAYWKELSLKYKQSFQEARDELVEFQEGSRELEAELEAQLVQAEQRNRDLQADNQRL

SEQ ID NO: 59090 - protein, 59 aa, Homo sapiens
  Payload ID: 11533
  Gene Symbol: NDEL1
  Gene Name: nudE neurodevelopment protein 1-like 1
  ENSP ID: ENSP00000463351
MDGEDIPDFSSLKEETAYWKELSLKYKQSFQEARDELVEFQEGSRELEAELEAQLVQAE

SEQ ID NO: 59091 - protein, 158 aa, Homo sapiens
  Payload ID: 11533
  Gene Symbol: NDEL1
  Gene Name: nudE neurodevelopment protein 1-like 1
  ENSP ID: ENSP00000463430
MDGEDIPDFSSLKEETAYWKELSLKYKQSFQEARDELVEFQEGSRELEAELEAQLVQAEQRNRDLQADNQRLKYEVEALKEKLEHQYAQSYKQVSVLEDDLSQTRAIKEQLHKYVRELEQANDDLERAKRATIVSLEDFEQRLNQAIERNAFLESELD

SEQ ID NO: 59092 - protein, 85 aa, Homo sapiens
  Payload ID: 11533
  Gene Symbol: NDEL1
  Gene Name: nudE neurodevelopment protein 1-like 1
  ENSP ID: ENSP00000463492
MDGEDIPDFSSLKEETAYWKELSLKYKQSFQEARDELVEFQEGSRELEAELEAQLVQAACSGGYWALPSPGTLRDINTGYFLFSP

SEQ ID NO: 59093 - protein, 76 aa, Homo sapiens
  Payload ID: 11533
  Gene Symbol: NDEL1
  Gene Name: nudE neurodevelopment protein 1-like 1
  ENSP ID: ENSP00000464154
MDGEDIPDFSSLKEETAYWKELSLKYKQSRRGHLWPVLHALILPHHFGHLEILISCLGLHRTDFTFSSASRKLGMS

SEQ ID NO: 59094 - protein, 196 aa, Homo sapiens
  Payload ID: 11533
  Gene Symbol: NDEL1
  Gene Name: nudE neurodevelopment protein 1-like 1
  ENSP ID: ENSP00000464441
  MOD_RES (1)..(1): Any amino acid
XRNAFLESELDEKESLLVSVQRLKDEARDLRQELAVRERQQEVTRKSAPSSPTLDCEKMDSAVQASLSLPATPVGKGTENTFPSPKAIPNGFGTSPLTPSARISALNIVGDLLRKVGALESKLAACRNFAKDQASRKSYISGNVNCGVLNGNGTKFSRSGHTSFFDKGRAGTTLETLTISESSWDFLPSSIIMAHV

SEQ ID NO: 59095 - protein, 194 aa, Homo sapiens
  Payload ID: 11533
  Gene Symbol: NDEL1
  Gene Name: nudE neurodevelopment protein 1-like 1
  ENSP ID: ENSP00000464634
  MOD_RES (1)..(1): Any amino acid
XLRQELAVRERQQEVTRKSAPSSPTLDCEKMDSAVQASLSLPATPVGKGTENTFPSPKAIPNGFGTSPLTPSARISALNIVGDLLRKVGALESKLAACRNFAKDQASRKSYISGNVNCGVLNGNGTKFSRSGHTSFFDKGCVLTRMNRILTQSWALRACTPCCGGRTLCPTCLISSRFFSSFCSSLVCRSLSNC

SEQ ID NO: 59096 - protein, 179 aa, Homo sapiens
  Payload ID: 11534
  Gene Symbol: NUDT1
  Gene Name: nudix (nucleoside diphosphate linked moiety X)-type motif 1
  Uniprot ID: P36639
  ENSP ID: ENSP00000339503
MSGISPQQMGEPEGSWSGKNPGTMGASRLYTLVLVLQPQRVLLGMKKRGFGAGRWNGFGGKVQEGETIEDGARRELQEESGLTVDALHKVGQIVFEFVGEPELMDVHVFCTDSIQGTPVESDEMRPCWFQLDQIPFKDMWPDDSYWFPLLLQKKKFHGYFKFQGQDTILDYTLREVDTV

SEQ ID NO: 59097 - protein, 156 aa, Homo sapiens
  Payload ID: 11534
  Gene Symbol: NUDT1
  Gene Name: nudix (nucleoside diphosphate linked moiety X)-type motif 1
  Uniprot ID: P36639
  ENSP ID: ENSP00000343439
MGASRLYTLVLVLQPQRVLLGMKKRGFGAGRWNGFGGKVQEGETIEDGARRELQEESGLTVDALHKVGQIVFEFVGEPELMDVHVFCTDSIQGTPVESDEMRPCWFQLDQIPFKDMWPDDSYWFPLLLQKKKFHGYFKFQGQDTILDYTLREVDTV

SEQ ID NO: 59098 - protein, 156 aa, Homo sapiens; identical to SEQ ID NO: 59097
  Payload ID: 11534
  Gene Symbol: NUDT1
  Gene Name: nudix (nucleoside diphosphate linked moiety X)-type motif 1
  Uniprot ID: P36639
  ENSP ID: ENSP00000349148

SEQ ID NO: 59099 - protein, 156 aa, Homo sapiens; identical to SEQ ID NO: 59097
  Payload ID: 11534
  Gene Symbol: NUDT1
  Gene Name: nudix (nucleoside diphosphate linked moiety X)-type motif 1
  Uniprot ID: P36639
  ENSP ID: ENSP00000380239

SEQ ID NO: 59100 - protein, 179 aa, Homo sapiens; identical to SEQ ID NO: 59096
  Payload ID: 11534
  Gene Symbol: NUDT1
  Gene Name: nudix (nucleoside diphosphate linked moiety X)-type motif 1
  Uniprot ID: P36639
  ENSP ID: ENSP00000380241

SEQ ID NO: 59101 - protein, 156 aa, Homo sapiens; identical to SEQ ID NO: 59097
  Payload ID: 11534
  Gene Symbol: NUDT1
  Gene Name: nudix (nucleoside diphosphate linked moiety X)-type motif 1
  Uniprot ID: P36639
  ENSP ID: ENSP00000380242

SEQ ID NO: 59102 - protein, 37 aa, Homo sapiens
  Payload ID: 11534
  Gene Symbol: NUDT1
  Gene Name: nudix (nucleoside diphosphate linked moiety X)-type motif 1
  ENSP ID: ENSP00000405334
MGASRLYTLVLVLQPQRVLLGMKKRGFGAGRWNGFGG

SEQ ID NO: 59103 - protein, 164 aa, Homo sapiens
  Payload ID: 11535
  Gene Symbol: NUDT10
  Gene Name: nudix (nucleoside diphosphate linked moiety X)-type motif 10
  Uniprot ID: Q8NFP7
  ENSP ID: ENSP00000348831
MKCKPNQTRTYDPEGFKKRAACLCFRSEREDEVLLVSSSRYPDRWIVPGGGMEPEEEPGGAAVREVYEEAGVKGKLGRLLGVFEQNQDPKHRTYVYVLTVTELLEDWEDSVSIGRKREWFKVEDAIKVLQCHKPVHAEYLEKLKLGGSPTNGNSMAPSSPDSDP

SEQ ID NO: 59104 - protein, 164 aa, Homo sapiens; identical to SEQ ID NO: 59103
  Payload ID: 11535
  Gene Symbol: NUDT10
  Gene Name: nudix (nucleoside diphosphate linked moiety X)-type motif 10
  Uniprot ID: Q8NFP7
  ENSP ID: ENSP00000365174

SEQ ID NO: 59105 - protein, 164 aa, Homo sapiens
  Payload ID: 11536
  Gene Symbol: NUDT11
  Gene Name: nudix (nucleoside diphosphate linked moiety X)-type motif 11
  Uniprot ID: Q96G61
  ENSP ID: ENSP00000365160
MKCKPNQTRTYDPEGFKKRAACLCFRSEREDEVLLVSSSRYPDRWIVPGGGMEPEEEPGGAAVREVYEEAGVKGKLGRLLGVFEQNQDRKHRTYVYVLTVTELLEDWEDSVSIGRKREWFKVEDAIKVLQCHKPVHAEYLEKLKLGGSPTNGNSMAPSSPDSDP

SEQ ID NO: 59106 - protein, 462 aa, Homo sapiens
  Payload ID: 11537
  Gene Symbol: NUDT12
  Gene Name: nudix (nucleoside diphosphate linked moiety X)-type motif 12
  Uniprot ID: Q9BQG2
  ENSP ID: ENSP00000230792
MSSVKRSLKQEIVTQFHCSAAEGDIAKLTGILSHSPSLLNETSENGWTALMYAARNGHPEIVQFLLEKGCDRSIVNKSRQTALDIAVFWGYKHIANLLATAKGGKKPWFLTNEVEECENYFSKTLLDRKSEKRNNSDWLLAKESHPATVFILFSDLNPLVTLGGNKESFQQPEVRLCQLNYTDIKDYLAQPEKITLIFLGVELEIKDKLLNYAGEVPREEEDGLVAWFALGIDPIAAEEFKQRHENCYFLHPPMPALLQLKEKEAGVVAQARSVLAWHSRYKFCPTCGNATKIEEGGYKRLCLKEDCPSLNGVHNTSYPRVDPVVIMQVIHPDGTKCLLGRQKRFPPGMFTCLAGFIEPGETIEDAVRREVEEESGVKVGHVQYVACQPWPMPSSLMIGCLALAVSTEIKVDKNEIEDARWFTREQVLDVLTKGKQQAFFVPPSRAIAHQLIKHWIRINPNL

SEQ ID NO: 59107 - protein, 444 aa, Homo sapiens
  Payload ID: 11537
  Gene Symbol: NUDT12
  Gene Name: nudix (nucleoside diphosphate linked moiety X)-type motif 12
  ENSP ID: ENSP00000424521
MSSVKRSLKQEIVTQFHCSAAEGDIAKLTGILSHSPSLLNETSENGWTALMCDRSIVNKSRQTALDIAVFWGYKHIANLLATAKGGKKPWFLTNEVEECENYFSKTLLDRKSEKRNNSDWLLAKESHPATVFILFSDLNPLVTLGGNKESFQQPEVRLCQLNYTDIKDYLAQPEKITLIFLGVELEIKDKLLNYAGEVPREEEDGLVAWFALGIDPIAAEEFKQRHENCYFLHPPMPALLQLKEKEAGVVAQARSVLAWHSRYKFCPTCGNATKIEEGGYKRLCLKEDCPSLNGVHNTSYPRVDPVVIMQVIHPDGTKCLLGRQKRFPPGMFTCLAGFIEPGETIEDAVRREVEEESGVKVGHVQYVACQPWPMPSSLMIGCLALAVSTEIKVDKNEIEDARWFTREQVLDVLTKGKQQAFFVPPSRAIAHQLIKHWIRINPNL

SEQ ID NO: 59108 - protein, 263 aa, Homo sapiens
  Payload ID: 11538
  Gene Symbol: NUDT13
  Gene Name: nudix (nucleoside diphosphate linked moiety X)-type motif 13
  Uniprot ID: Q86X67
  ENSP ID: ENSP00000335326
MSLYCGIACRRKFFWCYRLLSTYVTKTRYLFELKEDDDACKKAQQTGAFYLFHSLAPLLQTSAHQYLAPRHSLLELERLLGKFGQDAQRIEDSVLIGCSEQQEAWFALDLGLDSSFSISASLHKPEMETELKGSFIELRKALFQLNARDASLLSTAQALLRWHDAHQFCSRSGQPTKKNVAGSKRVCPSNNIIYYPQIQVNLRELETAAWFSHDEVATALKRKGPYTQQQNGTFPFWLPPKLAISHQLIKEWVEKQTCSSLPA

SEQ ID NO: 59109 - protein, 352 aa, Homo sapiens
  Payload ID: 11538
  Gene Symbol: NUDT13
  Gene Name: nudix (nucleoside diphosphate linked moiety X)-type motif 13
  Uniprot ID: Q86X67
  ENSP ID: ENSP00000349874
MSLYCGIACRRKFFWCYRLLSTYVTKTRYLFELKEDDDACKKAQQTGAFYLFHSLAPLLQTSAHQYLAPRHSLLELERLLGKFGQDAQRIEDSVLIGCSEQQEAWFALDLGLDSSFSISASLHKPEMETELKGSFIELRKALFQLNARDASLLSTAQALLRWHDAHQFCSRSGQPTKKNVAGSKRVCPSNNIIYYPQMAPVAITLVSDGTRCLLARQSSFPKGMYSALAGFCDIGESVEETIRREVAEEVGLEVESLQYYASQHWPFPSGSLMIACHATVKPGQTEIQVNLRELETAAWFSHDEVATALKRKGPYTQQQNGTFPFWLPPKLAISHQLIKEWVEKQTCSSLPA

SEQ ID NO: 59110 - protein, 235 aa, Homo sapiens
  Payload ID: 11538
  Gene Symbol: NUDT13
  Gene Name: nudix (nucleoside diphosphate linked moiety X)-type motif 13
  Uniprot ID: Q86X67
  ENSP ID: ENSP00000362088
MSLYCGIACRRKFFWCYRLLSTYVTKTRYLFELKEDDDACKKAQQTGAFYLFHSLAPLLQTSAHQYLAPRHSLLELERLLGKFGQDAQRIEDSVLIGCSEQQEAWFALDLGLDSSFSISASLHKPEMETELKGSFIELRKALFQLNARDASLLSTAQALLRWHDAHQFCSRSGQPTKKNVAGSKRVCPSNNIIYYPQVKVWKRPSAEKLQKRWDWRWKACSTMHPSIGPSLVAHS

SEQ ID NO: 59111 - protein, 155 aa, Homo sapiens
  Payload ID: 11538
  Gene Symbol: NUDT13
  Gene Name: nudix (nucleoside diphosphate linked moiety X)-type motif 13
  ENSP ID: ENSP00000438223
MAPVAITLVSDGTRCLLARQSSFPKGMYSALAGFCDIGESVEETIRREVAEEVGLEVESLQYYASQHWPFPSGSLMIACHATVKPGQTEIQVNLRELETAAWFSHDEVATALKRKGPYTQQQNGTFPFWLPPKLAISHQLIKEWVEKQTCSSLPA

SEQ ID NO: 59112 - protein, 226 aa, Homo sapiens
  Payload ID: 11538
  Gene Symbol: NUDT13
  Gene Name: nudix (nucleoside diphosphate linked moiety X)-type motif 13
  Uniprot ID: Q86X67
  ENSP ID: ENSP00000440760
METELKGSFIELRKALFQLNARDASLLSTAQALLRWHDAHQFCSRSGQPTKKNVAGSKRVCPSNNIIYYPQMAPVAITLVSDGTRCLLARQSSFPKGMYSALAGFCDIGESVEETIRREVAEEVGLEVESLQYYASQHWPFPSGSLMIACHATVKPGQTEIQVNLRELETAAWFSHDEVATALKRKGPYTQQQNGTFPFWLPPKLAISHQLIKEWVEKQTCSSLPA

SEQ ID NO: 59113 - protein, 241 aa, Homo sapiens
  Payload ID: 11538
  Gene Symbol: NUDT13
  Gene Name: nudix (nucleoside diphosphate linked moiety X)-type motif 13
  ENSP ID: ENSP00000484185
MSLYCGIACRRKFFWCYRLLSTYVTKTRYLFELKEDDDACKKAQQTGAFYLFHSLAPLLQTSAHQYLAPRHSLLELERLLGKFGQDAQRIEDSVLIGCSEQQEAWFALDLGLDSSFSISASLHKPEMETELKGSFIELRKALFQLNARDASLLSTAQALLRWHDAHQFCSRSGQPTKKNVAGSKRVCPSNNIIYYPQMAPVAITLVSDGTRCLLARQSSFPKGMYSALAGFCDIAYRAVLN

SEQ ID NO: 59114 - protein, 222 aa, Homo sapiens
  Payload ID: 11539
  Gene Symbol: NUDT14
  Gene Name: nudix (nucleoside diphosphate linked moiety X)-type motif 14
  Uniprot ID: O95848
  ENSP ID: ENSP00000376349
MERIEGASVGRCAASPYLRPLTLHYRQNGAQKSWDFMKTHDSVTVLLFNSSRRSLVLVKQFRPAVYAGEVERRFPGSLAAVDQDGPRELQPALPGSAGVTVELCAGLVDQPGLSLEEVACKEAWEECGYHLAPSDLRRVATYWSGVGLTGSRQTMFYTEVTDAQRSGPGGGLVEEGELIEVVHLPLEGAQAFADDPDIPKTLGVIFGVSWFLSQVAPNLDLQ

SEQ ID NO: 59115 - protein, 96 aa, Homo sapiens
  Payload ID: 11539
  Gene Symbol: NUDT14
  Gene Name: nudix (nucleoside diphosphate linked moiety X)-type motif 14
  ENSP ID: ENSP00000447933
MERIEGASVGRCAASPYLRPLTLHYRQNGAQKSWDFMKTHDSHPASAASTLTYSAARVSFPAPRLPSCQLEYSRSGSWPDCDPGKLWSRLGLSHPI

SEQ ID NO: 59116 - protein, 164 aa, Homo sapiens [sequence omitted]

SEQ ID NO: 59117 - protein, 227 aa, Homo sapiens
  Payload ID: 11541
  Gene Symbol: NUDT16
  Gene Name: nudix (nucleoside diphosphate linked moiety X)-type motif 16
  Uniprot ID: Q96DE0
  ENSP ID: ENSP00000422375
MAGARRLELGEALALGSGWRHACHALLYAPDPGMLFGRIPLRYAILMQMRFDGRLGFPGGFVDTQDRSLEDGLNRELREELGEAAAAFRVERTDYRSSHVGSGPRVVAHFYAKRLTLEELLAVEAGATRAKDHGLEVGPAWDSVPFPISSSPKAFSPPRKHPWRKVFAPLTLPSPQLSWWSWDRDHLYSELVLPTWAFCKGLSHPLPGEILSRTHSSMSLCCSLLTV

SEQ ID NO: 59118 - protein, 195 aa, Homo sapiens
  Payload ID: 11541
  Gene Symbol: NUDT16
  Gene Name: nudix (nucleoside diphosphate linked moiety X)-type motif 16
  Uniprot ID: Q96DE0
  ENSP ID: ENSP00000429274
MAGARRLELGEALALGSGWRHACHALLYAPDPGMLFGRIPLRYAILMQMRFDGRLGFPGGFVDTQDRSLEDGLNRELREELGEAAAAFRVERTDYRSSHVGSGPRVVAHFYAKRLTLEELLAVEAGATRAKDHGLEVLGLVRVPLYTLRDGVGGLPTFLENSFIGSAREQLLEALQDLGLLQSGSISGLKIPAHH

SEQ ID NO: 59119 - protein, 159 aa, Homo sapiens
  Payload ID: 11541
  Gene Symbol: NUDT16
  Gene Name: nudix (nucleoside diphosphate linked moiety X)-type motif 16
  Uniprot ID: Q96DE0
  ENSP ID: ENSP00000440230
MQMRFDGRLGFPGGFVDTQDRSLEDGLNRELREELGEAAAAFRVERTDYRSSHVGSGPRVVAHFYAKRLTLEELLAVEAGATRAKDHGLEVLGLVRVPLYTLRDGVGGLPTFLENSFIGSAREQLLEAALHGPMKTEMRTLVLGREGRTWECFLIGSER

SEQ ID NO: 59120 - protein, 211 aa, Homo sapiens
  Payload ID: 11542
  Gene Symbol: NUDT16L1
  Gene Name: nudix (nucleoside diphosphate linked moiety X)-type motif 16-like 1
  Uniprot ID: Q9BRJ7
  ENSP ID: ENSP00000306670
MSTAAVPELKQISRVEAMRLGPGWSHSCHAMLYAANPGQLFGRIPMRFSVLMQMRFDGLLGFPGGFVDRRFWSLEDGLNRVLGLGLGCLRLTEADYLSSHLTEGPHRVVAHLYARQLTLEQLHAVEISAVHSRDHGLEVLGLVRVPLYTQKDRVGGFPNFLSNAFVSTAKCQLLFALKVLNMMPEEKLVEALAAATEKQKKALEKLLPASS

SEQ ID NO: 59121 - protein, 247 aa, Homo sapiens
  Payload ID: 11542
  Gene Symbol: NUDT16L1
  Gene Name: nudix (nucleoside diphosphate linked moiety X)-type motif 16-like 1
  Uniprot ID: Q9BRJ7
  ENSP ID: ENSP00000458144
MSTAAVPELKQISRVEAMRLGPGWSHSCHAMLYAANPGQLFGRIPMRFSVLMQMRFDGLLGFPGGFVDRRFWSLEDGLNRVLGLGLGCLRLTEADYLSSHLTEGPHRVVAHLYARQLTLEQLHAVEISAVHSRDHGLEVGPPPGPRPPPRGLALAPWKAPMGNTSPEGPLAGLGRVSLSPAMGWGEGSGAGRPGKEGRGWGPALGLPQGCVTSALLPAIANPGSGGVGSVGRKGWGRSGDCLGSWET

SEQ ID NO: 59122 - protein, 198 aa, Homo sapiens
  Payload ID: 11542
  Gene Symbol: NUDT16L1
  Gene Name: nudix (nucleoside diphosphate linked moiety X)-type motif 16-like 1
  ENSP ID: ENSP00000464821
  MOD_RES (1)..(1): Any amino acid
XSRVEAMRLGPGWSHSCHAMLYAANPGQLFGRIPMRFSVLMRFDGLLGFPGGFVDRRFWSLEDGLNRVLGLGLGCLRLTEADYLSSHLTEGPHRVVAHLYARQLTLEQLHAVEISAVHSRDHGLEVLGLVRVPLYTQKDRVGGFPNFLSNAFVSTAKCQLLFALKVLNMMPEEKLVEALAAATEKQKKALEKLLPASS

SEQ ID NO: 59123 - protein, 171 aa, Homo sapiens
  Payload ID: 11542
  Gene Symbol: NUDT16L1
  Gene Name: nudix (nucleoside diphosphate linked moiety X)-type motif 16-like 1
  ENSP ID: ENSP00000466854
MSTAAVPELKQISRVEAMRLGPGWSHSCHAMLYAANPGQLFGRIPMRFSVLMQMRFDGLLGFPGGFVDRRFWSLEDGLNRVLGLGLGCLRLTEADYLSSHLTEGPHRVVAHLYARQLTLEQLHAVEISAVHSRDHGLEVLNMMPEEKLVEALAAATEKQKKALEKLLPASS

SEQ ID NO: 59124 - protein, 192 aa, Homo sapiens
  Payload ID: 11542
  Gene Symbol: NUDT16L1
  Gene Name: nudix (nucleoside diphosphate linked moiety X)-type motif 16-like 1
  ENSP ID: ENSP00000468346
MSTAAVPELKQISRVEAMRLGPGWSHSCHAMLYAANPGQLFGRIPMRFSVLMQMRFDGLLGFPGGFVDRRFWSLEDGLNRVLGLGLGCLRLTEADYLSSHLTEGPHRVVAHLYARQLTLEQLHAVEISAVHSRDHGLEVGPPPGPRPPPRGLALAPWKAPMGAGPRAGPAVHPEGPSRRLPQLPEQRLREHG

SEQ ID NO: 59125 - protein, 328 aa, Homo sapiens
  Payload ID: 11543
  Gene Symbol: NUDT17
  Gene Name: nudix (nucleoside diphosphate linked moiety X)-type motif 17
  Uniprot ID: P0C025
  ENSP ID: ENSP00000334437
MAEVRVQLLLSRRPESVSFARSVCGLLGAGPGLGTWPIHCSLKRGRLVLSSRPFPGASARLPLQRPPFCPFAALEERPRVPGAELPTDRGVDLGVAVILQSSDKTVLLTRRARTLSVSPNLWVPPGGHVELEEELLDGGLRELWEESGLHLPQGQFSWVPLGLWESAYPPRLSWGLPKYHHIVLYLLVISQESQQQLQARIQPNPNEVSALMWLTPDVAAAVAAAEDGTETPGLLPQDLPPSVLAVELEEDGRARPLVLHMSTLLRMIPTMAEDKERVSTGTKFALKLWLQHLGRTPPPCKSAAYLDPGPAKEEWNMDPLPPNQGSGK

SEQ ID NO: 59126 - protein, 133 aa, Homo sapiens
  Payload ID: 11544
  Gene Symbol: NUDT18
  Gene Name: nudix (nucleoside diphosphate linked moiety X)-type motif 18
  ENSP ID: ENSP00000479883
MASEGLAGALASVLAGQGSSVHSCDSAPAGEPPAPVRLRKNVCYVVLAVFLSEQDEVLLIQEAKRECRGSWYLPAGRMEPGETIVEALQREVKEEAGLHCEPETLLSVEERGPSWVRFVFLARPTGMAHLEAV

SEQ ID NO: 59127 - protein, 323 aa, Homo sapiens
  Payload ID: 11544
  Gene Symbol: NUDT18
  Gene Name: nudix (nucleoside diphosphate linked moiety X)-type motif 18
  Uniprot ID: Q6ZVK8
  ENSP ID: ENSP00000480722
MASEGLAGALASVLAGQGSSVHSCDSAPAGEPPAPVRLRKNVCYVVLAVFLSEQDEVLLIQEAKRECRGSWYLPAGRMEPGETIVEALQREVKEEAGLHCEPETLLSVEERGPSWVRFVFLARPTGGILKTSKEADAESLQAAWYPRTSLPTPLRAHDILHLVELAAQYRQQARHPLILPQELPCDLVCQRLVATFTSAQTVWVLVGTVGMPHLPVTACGLDPMEQRGGMKMAVLRLLQECLTLHHLVVEIKGLLGLQHLGRDHSDGICLNVLVTVAFRSPGIQDEPPKVRGENFSWWKVMEEDLQSQLLQRLQGSSVVPVNR

SEQ ID NO: 59128 - protein, 375 aa, Homo sapiens
  Payload ID: 11545
  Gene Symbol: NUDT19
  Gene Name: nudix (nucleoside diphosphate linked moiety X)-type motif 19
  Uniprot ID: A8MXV4
  ENSP ID: ENSP00000380251
MSSSLRPGPSRWRRAASIVLAAGWSRPETATPPSRPPPAEGFRLLLLQRSPHQGFMPGAHVFSGGVLDAADRSADWLGLFAPHHGPPRFGLGPAPFSRTAFPSLPDTDDHKTDNTGTLPEDVAFRICAVREAFEEAGVLLLRPRTSPPGPAPGPGLALEPPPGLASWRDRVRQDPRHFLRLCAHLDCTPDIWALHNWSAWLTPFLRGTTRRFDTAFFLCCLREPPPVYPDLAEVVGYQWSSPSEATESFLSKEIWLPPPQFYEVRRLANFASLSDLHKFCLGRALEGLERWLPIILLTADGMVHLLPGDELYLEDSDFLENLMSTEKKTEEIMKEGKQFHRIVTYHRHLYDIHVTVQPKYKHVYPKNSVVRKSHL

SEQ ID NO: 59129 - protein, 147 aa, Homo sapiens
  Payload ID: 11546
  Gene Symbol: NUDT2
  Gene Name: nudix (nucleoside diphosphate linked moiety X)-type motif 2
  Uniprot ID: P50583
  ENSP ID: ENSP00000344187
MALRACGLIIFRRCLIPKVDNNAIEFLLLQASDGIHHWTPPKGHVEPGEDDLETALRETQEEAGIEAGQLTIIEGFKRELNYVARNKPKTVIYWLAEVKDYDVEIRLSHEHQAYRWLGLEEACQLAQFKEMKAALQEGHQFLCSIEA

SEQ ID NO: 59130 - protein, 147 aa, Homo sapiens; identical to SEQ ID NO: 59129
  Payload ID: 11546
  Gene Symbol: NUDT2
  Gene Name: nudix (nucleoside diphosphate linked moiety X)-type motif 2
  Uniprot ID: P50583
  ENSP ID: ENSP00000368452

SEQ ID NO: 59131 - protein, 147 aa, Homo sapiens; identical to SEQ ID NO: 59129
  Payload ID: 11546
  Gene Symbol: NUDT2
  Gene Name: nudix (nucleoside diphosphate linked moiety X)-type motif 2
  Uniprot ID: P50583
  ENSP ID: ENSP00000368455

SEQ ID NO: 59132 - protein, 147 aa, Homo sapiens; identical to SEQ ID NO: 59129
  Payload ID: 11546
  Gene Symbol: NUDT2
  Gene Name: nudix (nucleoside diphosphate linked moiety X)-type motif 2
  Uniprot ID: P50583
  ENSP ID: ENSP00000482384

SEQ ID NO: 59133 - protein, 227 aa, Homo sapiens
  Payload ID: 11547
  Gene Symbol: NUDT21
  Gene Name: nudix (nucleoside diphosphate linked moiety X)-type motif 21
  Uniprot ID: O43809
  ENSP ID: ENSP00000300291
MSVVPPNRSQTGWPRGVTQFGNKYIQQTKPLTLERTINLYPLTNYTFGTKEPLYEKDSSVAARFQRMREEFDKIGMRRTVEGVLIVHEHRLPHVLLLQLGTTFFKLPGGELNPGEDEVEGLKRLMTEILGRQDGVLQDWVIDDCIGNWWRPNFEPPQYPYIPAHITKPKEHKKLFLVQLQEKALFAVPKNYKLVAAPLFELYDNAPGYGPIISSLPQLLSRFNFIYN

SEQ ID NO: 59134 - protein, 149 aa, Homo sapiens
  Payload ID: 11547
  Gene Symbol: NUDT21
  Gene Name: nudix (nucleoside diphosphate linked moiety X)-type motif 21
  ENSP ID: ENSP00000454790
MREEFDKIGMRRTVEGVLIVHEHRLPHVLLLQLGTTFFKLPGGELNPGEDEVEGLKRLMTEILGRQDGVLQDWVIDDCIGNWWRPNFEPPQYPYIPAHITKPKEHKKLFLVQLQEKALFAVPKNYKLVAAPLFELYDNAPGYGPIISSL

SEQ ID NO: 59135 - protein, 71 aa, Homo sapiens
  Payload ID: 11547
  Gene Symbol: NUDT21
  Gene Name: nudix (nucleoside diphosphate linked moiety X)-type motif 21
  ENSP ID: ENSP00000457942
MREEFDKIGMRRTVEGVLIVHEHRLPHVLLLQLGTTFFKLPGGELNPGEDEVEGLKRLMTEILGRQDGVLQ

SEQ ID NO: 59136 - protein, 303 aa, Homo sapiens
  Payload ID: 11548
  Gene Symbol: NUDT22
  Gene Name: nudix (nucleoside diphosphate linked moiety X)-type motif 22
  Uniprot ID: Q9BRQ3
  ENSP ID: ENSP00000279206
MDPEVTLLLQCPGGGLPQEQIQAELSPAHDRRPLPGGDEAITAIWETRLKAQPWLFDAPKFRLHSATLAPIGSRGPQLLLRLGLTSYRDFLGTNWSSSAAWLRQQGATDWGDTQAYLADPLGVGAALATADDFLVFLRRSRQVAEAPGLVDVPGGHPEPQALCPGGSPQHQDLAGQLVVHELFSSVLQEICDEVNLPLLTLSQPLLLGIARNETSAGRASAEFYVQCSLTSEQVRKHYLSGGPEAHESTGIFFVETQNVQRLLETEMWAELCPSAKGAIILYNRVQGSPTGAALGSPALLPPL

SEQ ID NO: 59137 - protein, 277 aa, Homo sapiens
  Payload ID: 11548
  Gene Symbol: NUDT22
  Gene Name: nudix (nucleoside diphosphate linked moiety X)-type motif 22
  ENSP ID: ENSP00000401085
MDPEVTLLLQCPGGGLPQEQIQAELSPAHDRRPLPGGDEAITAIWETRLKAQPWLFDAPKFRLHSATLAPIGSRGPQLLLRLGLTSYRDFLGTNWSSSAAWLRQQGATDWGDTQAYLADPLGVGAALATADDFLVFLRRSRQVAEAPGLVDVPGGHPEPQLDLWLSVRERTPDSGSLTLLHCATSDPQGQQALCPGGSPQHQDLAGQLVVHELFSSVLQEICDEVNLPLLTLSQPLLLGIARNETSAGRASAEFYVQCSLTSEQVRKHYLSGGPEAH

SEQ ID NO: 59138 - protein, 270 aa, Homo sapiens
  Payload ID: 11548
  Gene Symbol: NUDT22
  Gene Name: nudix (nucleoside diphosphate linked moiety X)-type motif 22
  Uniprot ID: Q9BRQ3
  ENSP ID: ENSP00000407970
MDPEVTLLLQCPGGGLPQEQIQAELSPAHDRRPLPGGDEAITAIWETRLKAQPWLFDAPKFRLHSATLAPIGSRGPQLLLRLGLTSYRDFLGTNWSSSAAWLRQQGATDWGDTQAYLADPLGVGAALATADDFLVFLRRSRQVAEAPGLVDVPGGHPEPQVNLPLLTLSQPLLLGIARNETSAGRASAEFYVQCSLTSEQVRKHYLSGGPEAHESTGIFFVETQNVQRLLETEMWAELCPSAKGAIILYNRVQGSPTGAALGSPALLPPL

SEQ ID NO: 59139 - protein, 165 aa, Homo sapiens
  Payload ID: 11548
  Gene Symbol: NUDT22
  Gene Name: nudix (nucleoside diphosphate linked moiety X)-type motif 22
  ENSP ID: ENSP00000440166
MDPEVTLLLQCPGGGLPQEQIQAELSPAHDRRPLPGGDEAITAIWETRLKAQPWLFDAPKFRLHSATLAPIGSRGPQLLLRLGLTSYRDFLGTNWSSSAAWLRQQGATDWGDTQAYLADPLGVGAALATADDFLVFLRRSRQVAEAPGLVDVPGGHPEPQVQPDF

SEQ ID NO: 59140 - protein, 165 aa, Homo sapiens; identical to SEQ ID NO: 59139
  Payload ID: 11548
  Gene Symbol: NUDT22
  Gene Name: nudix (nucleoside diphosphate linked moiety X)-type motif 22
  ENSP ID: ENSP00000442014

SEQ ID NO: 59141 - protein, 56 aa, Homo sapiens
  Payload ID: 11548
  Gene Symbol: NUDT22
  Gene Name: nudix (nucleoside diphosphate linked moiety X)-type motif 22
  ENSP ID: ENSP00000443127
STGIFFVETQNVQRLLETEMWAELCPSAKGAIILYNRVQGSPTGAALGSPALLPPL

SEQ ID NO: 59142 - protein, 123 aa, Homo sapiens
  Payload ID: 11548
  Gene Symbol: NUDT22
  Gene Name: nudix (nucleoside diphosphate linked moiety X)-type motif 22
  ENSP ID: ENSP00000444022
MDPEVTLLLQCPGGGLPQEQIQAELSPAHDRRPLPGGDEAITAIWETRLKAQPWLFDAPKFRLHSATLAPIGSRGPQLLLRLGLTSYRDFLGTNWSSSAAWLRQQGATDWGDTQAYLADPLGV

SEQ ID NO: 59143 - protein, 172 aa, Homo sapiens
  Payload ID: 11549
  Gene Symbol: NUDT3
  Gene Name: nudix (nucleoside diphosphate linked moiety X)-type motif 3
  Uniprot ID: O95989
  ENSP ID: ENSP00000476119
MMKLKSNQTRTYDGDGYKKRAACLCFRSESEEEVLLVSSSRHPDRWIVPGGGMEPEEEPSVAAVREVCEEAGVKGTLGRLVGIFENQERKHRTYVYVLIVTEVLEDWEDSVNIGRKREWFKIEDAIKVLQYHKPVQASYFETLRQGYSANNGTPVVATTYSVSAQSSMSGIR

SEQ ID NO: 59144 - protein, 181 aa, Homo sapiens
  Payload ID: 11550
  Gene Symbol: NUDT4
  Gene Name: nudix (nucleoside diphosphate linked moiety X)-type motif 4
  Uniprot ID: Q9NZJ9
  ENSP ID: ENSP00000338352
MMKFKPNQTRTYDREGFKKRAACLCFRSEQEDEVLLVSSSRYPDQWIVPGGGMEPEEEPGGAAVREVYEEAGVKGKLGRLLGIFEQNQDRKHRTYVYVLTVTEILEDWEDSVNIGRKREWFKVEDAIKVLQCHKPVHAEYLEKLKLGCSPANGNSTVPSLPDNNALFVTAAQTSGLPSSVR

SEQ ID NO: 59145 - protein, 180 aa, Homo sapiens
  Payload ID: 11550
  Gene Symbol: NUDT4
  Gene Name: nudix (nucleoside diphosphate linked moiety X)-type motif 4
  Uniprot ID: Q9NZJ9
  ENSP ID: ENSP00000406612
MMKFKPNQTRTYDREGFKKRAACLCFRSEQEDEVLLVSSSRYPDQWIVPGGGMEPEEEPGGAAVREVYEEAGVKGKLGRLLGIFENQDRKHRTYVYVLTVTEILEDWEDSVNIGRKREWFKVEDAIKVLQCHKPVHAEYLEKLKLGCSPANGNSTVPSLPDNNALFVTAAQTSGLPSSVR

SEQ ID NO: 59146 - protein, 129 aa, Homo sapiens
  Payload ID: 11550
  Gene Symbol: NUDT4
  Gene Name: nudix (nucleoside diphosphate linked moiety X)-type motif 4
  Uniprot ID: Q9NZJ9
  ENSP ID: ENSP00000448032
MEPEEEPGGAAVREVYEEAGVKGKLGRLLGIFEQNQDRKHRTYVYVLTVTEILEDWEDSVNIGRKREWFKVEDAIKVLQCHKPVHAEYLEKLKLGCSPANGNSTVPSLPDNNALFVTAAQTSGLPSSVR

SEQ ID NO: 59147 - protein, 95 aa, Homo sapiens
  Payload ID: 11550
  Gene Symbol: NUDT4
  Gene Name: nudix (nucleoside diphosphate linked moiety X)-type motif 4
  ENSP ID: ENSP00000448504
MEPEEEPGGAAVREVYEEAGVKGKLGRLLGIFENQDRKHRTYVYVLTVTEILEDWEDSVNIGRKREWFKVEDAIKVLQCHKPVHAEYLEKLKLGC

SEQ ID NO: 59148 - protein, 112 aa, Homo sapiens
  Payload ID: 11550
  Gene Symbol: NUDT4
  Gene Name: nudix (nucleoside diphosphate linked moiety X)-type motif 4
  ENSP ID: ENSP00000448620
MEPEEEPGGAAVREVYEEAGVKGKLGRLLGIFENQDRKHRTYVYVLTVTEILEDWEDSVNIGRKREWFKVEDAIKVLQCHKPVHAEYLEKLKLGCSPANGNSTVPSLPDNNA

SEQ ID NO: 59149 - protein, 128 aa, Homo sapiens
  Payload ID: 11550
  Gene Symbol: NUDT4
  Gene Name: nudix (nucleoside diphosphate linked moiety X)-type motif 4
  ENSP ID: ENSP00000449552
MEPEEEPGGAAVREVYEEAGVKGKLGRLLGIFENQDRKHRTYVYVLTVTEILEDWEDSVNIGRKREWFKVEDAIKVLQCHKPVHAEYLEKLKLGCSPANGNSTVPSLPDNNALFVTAAQTSGLPSSVR

SEQ ID NO: 59150 - protein, 128 aa, Homo sapiens; identical to SEQ ID NO: 59149
  Payload ID: 11550
  Gene Symbol: NUDT4
  Gene Name: nudix (nucleoside diphosphate linked moiety X)-type motif 4
  ENSP ID: ENSP00000449724

SEQ ID NO: 59151 - protein, 180 aa, Homo sapiens
  Payload ID: 11551
  Gene Symbol: NUDT5
  Gene Name: nudix (nucleoside diphosphate linked moiety X)-type motif 5
  ENSP ID: ENSP00000368209
MESQEPTESSQNGKQYIISEELISEGKWVKLEKTTYMDPTGKTRTWESVKRTTRKEQTADGVAVIPVLQRTLHYECIVLVKQFRPPMGGYCIEFPAGLIDDGETPEAAALRELEEETGYKGDIAECSPAVCMDPGLSNCTIHIVTVTINGDDAENARPKPKPGDGGMFCNSWWPSVYDLV

SEQ ID NO: 59152 - protein, 232 aa, Homo sapiens
  Payload ID: 11551
  Gene Symbol: NUDT5
  Gene Name: nudix (nucleoside diphosphate linked moiety X)-type motif 5
  ENSP ID: ENSP00000368219
MESQEPTESSQNGKQYIISEELISEGKWVKLEKTTYMDPTGKTRRNKEKTTTLLILRTWESVKRTTRKEQTADGVAVIPVLQRTLHYECIVLVKQFRPPMGGYCIEFPAGLIDDGETPEAAALRELEEETGYKGDIAECSPAVCMDPGLSNCTIHIVTVTINGDDAENARPKPKPGDGEFVEVISLPKNDLLQRLDALVAEEHLTVDARVYSYALALKHANAKPFEVPFLKF

SEQ ID NO: 59153 - protein, 186 aa, Homo sapiens
  Payload ID: 11551
  Gene Symbol: NUDT5
  Gene Name: nudix (nucleoside diphosphate linked moiety X)-type motif 5
  ENSP ID: ENSP00000368222
MESQEPTESSQNGKQYIISEELISEGKWVKLEKTTYMDPTGKTRTWESVKRTTRKEQTADGVAVIPVLQRTLHYECIVLVKQFRPPMGGYCIEFPAGLIDDGETPEAAALRELEEETGYKGDIAECSPAVCMDPGLSNCTIHIVTVTINGDDAENARPKPKPGDGEFVEVISLPKNDLLQRLDETL

SEQ ID NO: 59154 - protein, 97 aa, Homo sapiens
  Payload ID: 11551
  Gene Symbol: NUDT5
  Gene Name: nudix (nucleoside diphosphate linked moiety X)-type motif 5
  ENSP ID: ENSP00000407856
MESQEPTESSQNGKQYIISEELISEGKWVKLEKTTYMDPTGKTRTWESVKRTTRKEQTADGRSANLFQPFRKEVSTCDRVAVIPVLQRTLHYECIVL

SEQ ID NO: 59155 - protein, 219 aa, Homo sapiens
  Payload ID: 11551
  Gene Symbol: NUDT5
  Gene Name: nudix (nucleoside diphosphate linked moiety X)-type motif 5
  Uniprot ID: Q9UKK9
  ENSP ID: ENSP00000419628
MESQEPTESSQNGKQYIISEELISEGKWVKLEKTTYMDPTGKTRTWESVKRTTRKEQTADGVAVIPVLQRTLHYECIVLVKQFRPPMGGYCIEFPAGLIDDGETPEAAALRELEEETGYKGDIAECSPAVCMDPGLSNCTIHIVTVTINGDDAENARPKPKPGDGEFVEVISLPKNDLLQRLDALVAEEHLTVDARVYSYALALKHANAKPFEVPFLKF

SEQ ID NO: 59156 - protein, 137 aa, Homo sapiens
  Payload ID: 11551
  Gene Symbol: NUDT5
  Gene Name: nudix (nucleoside diphosphate linked moiety X)-type motif 5
  ENSP ID: ENSP00000436844
  MOD_RES (1)..(1): Any amino acid
XTWESVKRTTRKEQTADGVAVIPVLQRTLHYECIVLVKQFRPPMGGYCIEFPAGLIDDGETPEAAALRELEEETGYKGDIAECSPAVCMDPGLSNCTIHIVTVTINGDDAENARPKPKPGDGGMFCNSWWPSVYDLV

SEQ ID NO: 59157 - protein, 219 aa, Homo sapiens; identical to SEQ ID NO: 59155
  Payload ID: 11551
  Gene Symbol: NUDT5
  Gene Name: nudix (nucleoside diphosphate linked moiety X)-type motif 5
  Uniprot ID: Q9UKK9
  ENSP ID: ENSP00000445116

SEQ ID NO: 59158 - protein, 316 aa, Homo sapiens
  Payload ID: 11552
  Gene Symbol: NUDT6
  Gene Name: nudix (nucleoside diphosphate linked moiety X)-type motif 6
  Uniprot ID: P53370
  ENSP ID: ENSP00000306070
MRQPLSWGRWRAMLARTYGPGPSAGYRWASGAQGYVRNPPVGACDLQGELDRFGGISVRLARLDALDRLDAAAFQKGLQAAVQQWRSEGRTAVWLHIPILQSRFIAPAASLGFCFHHAESDSSTLTLWLREGPSRLPGYASHQVGVAGAVFDESTRKILVVQDRNKLKNMWKFPGGLSEPEEDIGDTAVREVFEETGIKSEFRSVLSIRQQHTNPGAFGKSDMYIICRLKPYSFTINFCQEECLRCEWMDLNDLAKTENTTPITSRVARLLLYGYREGFDKIDLTVEELPAVYTGLFYKLYHKELPENYKTMKGID

SEQ ID NO: 59159 - protein, 147 aa, Homo sapiens
  Payload ID: 11552
  Gene Symbol: NUDT6
  Gene Name: nudix (nucleoside diphosphate linked moiety X)-type motif 6
  Uniprot ID: P53370
  ENSP ID: ENSP00000344011
MWKFPGGLSEPEEDIGDTAVREVFEETGIKSEFRSVLSIRQQHTNPGAFGKSDMYIICRLKPYSFTINFCQEECLRCEWMDLNDLAKTENTTPITSRVARLLLYGYREGFDKIDLTVEELPAVYTGLFYKLYHKELPENYKTMKGID

SEQ ID NO: 59160 - protein, 104 aa, Homo sapiens
  Payload ID: 11552
  Gene Symbol: NUDT6
  Gene Name: nudix (nucleoside diphosphate linked moiety X)-type motif 6
  ENSP ID: ENSP00000420843
MRQPLSWGRWRAMLARTYGPGPSAGYRWASGAQGYVRNPPVGACDLQGELDRFGGISVRLARLDALDRLDAAAFQKGLQGKCAWDEGLPGLQSFSNEITAAPTP

SEQ ID NO: 59161 - protein, 104 aa, Homo sapiens; identical to SEQ ID NO: 59160
  Payload ID: 11552
  Gene Symbol: NUDT6
  Gene Name: nudix (nucleoside diphosphate linked moiety X)-type motif 6
  ENSP ID: ENSP00000422698

SEQ ID NO: 59162 - protein, 50 aa, Homo sapiens
  Payload ID: 11552
  Gene Symbol: NUDT6
  Gene Name: nudix (nucleoside diphosphate linked moiety X)-type motif 6
  ENSP ID: ENSP00000423745
  MOD_RES (1)..(1): Any amino acid
XDLQGELDRFGGISVRLARLDALDRLDAAAFQKGLQVEKYVEVSRRPVRA

SEQ ID NO: 59163 - protein, 147 aa, Homo sapiens; identical to SEQ ID NO: 59159
  Payload ID: 11552
  Gene Symbol: NUDT6
  Gene Name: nudix (nucleoside diphosphate linked moiety X)-type motif 6
  Uniprot ID: P53370
  ENSP ID: ENSP00000424117

SEQ ID NO: 59164 - protein, 238 aa, Homo sapiens
  Payload ID: 11553
  Gene Symbol: NUDT7
  Gene Name: nudix (nucleoside diphosphate linked moiety X)-type motif 7
  Uniprot ID: P0C024
  ENSP ID: ENSP00000268533
MSRLGLPEEPVRNSLLDDAKARLRKYDIGGKYSHLPYNKYSVLLPLVAKEGKLHLLFTVRSEKLRRAPGEVCFPGGKRDPTDMDDAATALREAQEEVGLRPHQVEVVCCLVPCLIDTDTLITPFVGLIDHNFQAQPNPAEVKDVFLVPLAYFLHPQVHDQHYVTRLGHRFINHIFEYTNPEDGVTYQIKGMTANLAVLVAFIILEKKPTFEVQFNLNDVLASSEELFLKVHKKATSRL

SEQ ID NO: 59165 - protein, 185 aa, Homo sapiens
  Payload ID: 11553
  Gene Symbol: NUDT7
  Gene Name: nudix (nucleoside diphosphate linked moiety X)-type motif 7
  Uniprot ID: P0C024
  ENSP ID: ENSP00000387707
MSRLGLPEEPVRNSLLDDAKARLRKYDIGGKYSHLPYNKYSVLLPLVAKEGKLHLLFTVRSEKTDTLITPFVGLIDHNFQAQPNPAEVKDVFLVPLAYFLHPQVHDQHYVTRLGHRFINHIFEYTNPEDGVTYQIKGMTANLAVLVAFIILEKKPTFEVQFNLNDVLASSEELFLKVHKKATSRL

SEQ ID NO: 59166 - protein, 15 aa, Homo sapiens
  Payload ID: 11553
  Gene Symbol: NUDT7
  Gene Name: nudix (nucleoside diphosphate linked moiety X)-type motif 7
  ENSP ID: ENSP00000454617
MSRLGLPEEPVRQIH

SEQ ID NO: 59167 - protein, 120 aa, Homo sapiens
  Payload ID: 11553
  Gene Symbol: NUDT7
  Gene Name: nudix (nucleoside diphosphate linked moiety X)-type motif 7
  ENSP ID: ENSP00000456363
MSRLGLPEEPVRNSLLDDAKARLRKYDIGGKYSHLPYNKYSVLLPLVAKEGKLHLLFTVRSEKLRRAPGEVCFPGGKRDPTDMDDAATALREAQEEVGLRPHQVEVVCCLVPCLIDVRVS

SEQ ID NO: 59168 - protein, 170 aa, Homo sapiens
  Payload ID: 11553
  Gene Symbol: NUDT7
  Gene Name: nudix (nucleoside diphosphate linked moiety X)-type motif 7
  Uniprot ID: P0C024
  ENSP ID: ENSP00000457566
MSRLGLPEEPVRNSLLDDAKARLRKYDIGGKYSHLPYNKYSVLLPLVAKEGKLHLLFTVRSEKLRRAPGEVCFPGGKRDPTDMDDAATALREAQEEVGLRPHQVEVVCCLVPCLIDRWGSRYVDEAGLELLASSDPPTSASQSAGITDRYIDNSICGFNRPQLPGPAESC

SEQ ID NO: 59169 - protein, 223 aa, Homo sapiens
  Payload ID: 11553
  Gene Symbol: NUDT7
  Gene Name: nudix (nucleoside diphosphate linked moiety X)-type motif 7
  ENSP ID: ENSP00000479582
MSRLGLPEEPVRNSLLDDAKARLRKYDIGGKYSHLPYNKYSVLLPLVAKEGKLHLLFTVRSEKPCEVLAPPLPSAMIVSFLRSPQKPSRRQHHAPCTACETTDTLITPFVGLIDHNFQAQPNPAEVKDVFLVPLAYFLHPQVHDQHYVTRLGHRFINHIFEYTNPEDGVTYQIKGMTANLAVLVAFIILEKKPTFEVQFNLNDVLASSEELFLKVHKKATSRL

SEQ ID NO: 59170 - protein, 140 aa, Homo sapiens
  Payload ID: 11554
  Gene Symbol: NUDT8
  Gene Name: nudix (nucleoside diphosphate linked moiety X)-type motif 8
  Uniprot ID: Q8WV74
  ENSP ID: ENSP00000301490
MLPDCLSAEGELRCRRLLAGATARLRARPASAAVLVPLCSVRGVPALLYTLRSSRLTGRHKGDVSFPGGKCDPADQDVVHTALRETREELGLAVPEEHVWGLLRPVYDPQKATVVPVLAGVGPLDPQSLRPNSEEVSWGI

SEQ ID NO: 59171 - protein, 236 aa, Homo sapiens
  Payload ID: 11554
  Gene Symbol: NUDT8
  Gene Name: nudix (nucleoside diphosphate linked moiety X)-type motif 8
  Uniprot ID: Q8WV74
  ENSP ID: ENSP00000365883
MLPDCLSAEGELRCRRLLAGATARLRARPASAAVLVPLCSVRGVPALLYTLRSSRLTGRHKGDVSFPGGKCDPADQDVVHTALRETREELGLAVPEEHVWGLLRPVYDPQKATVVPVLAGVGPLDPQSLRPNSEEVDEVFALPLAHLLQTQNQGYTHFCRGGHFRYTLPVFLHGPHRVWGLTAVITEFALQLLAPGTYQPRLAGLTCSGAEGLARPKQPLASPCQASSTPGLNKGL

SEQ ID NO: 59172 - protein, 350 aa, Homo sapiens
  Payload ID: 11555
  Gene Symbol: NUDT9
  Gene Name: nudix (nucleoside diphosphate linked moiety X)-type motif 9
  Uniprot ID: Q9BW91
  ENSP ID: ENSP00000303575
MAGRLLGKALAAVSLSLALASVTIRSSRCRGIQAFRNSFSSSWFHLNTNVMSGSNGSKENSHNKARTSPYPGSKVERSQVPNEKVGWLVEWQDYKPVEYTAVSVLAGPRWADPQISESNFSPKFNEKDGHVERKSKNGLYEIENGRPRNPAGRTGLVGRGLLGRWGPNHAADPIITRWKRDSSGNKIMHPVSGKHILQFVAIKRKDCGEWAIPGGMVDPGEKISATLKREFGEEALNSLQKTSAEKREIEEKLHKLFSQDHLVIYKGYVDDPRNTDNAWMETEAVNYHDETGEIMDNLMLEAGDDAGKVKWVDINDKLKLYASHSQFIKLVAEKRDAHWSEDSEADCHAL

SEQ ID NO: 59173 - protein, 284 aa, Homo sapiens
  Payload ID: 11555
  Gene Symbol: NUDT9
  Gene Name: nudix (nucleoside diphosphate linked moiety X)-type motif 9
  ENSP ID: ENSP00000410270
MAGRLLGKALAAVSLSLALASVTIRSSRCRGIQAFRNSFSSSWFHLNTNVMSGSNGSKENSHNKARTSPYPGSKVERSQVPNEKVGWLVEWQDYKPVEYTAVSVLAGPRWADPQIRNPAGRTGLVGRGLLGRWGPNHAADPIITRWKRDSSGNKIMHPVSGKHILQFVAIKRKDCGEWAIPGGMVDPGEKISATLKREFGEEALNSLQKTSAEKREIEEKLHKLFSQDHLVIYKGYVDDPRNTDNAWMETEAVNYHDETGEIMDNLMLEAGDDAGKVKWVDIND

SEQ ID NO: 59174 - protein, 300 aa, Homo sapiens
  Payload ID: 11555
  Gene Symbol: NUDT9
  Gene Name: nudix (nucleoside diphosphate linked moiety X)-type motif 9
  Uniprot ID: Q9BW91
  ENSP ID: ENSP00000421811
MSGSNGSKENSHNKARTSPYPGSKVERSQVPNEKVGWLVEWQDYKPVEYTAVSVLAGPRWADPQISESNFSPKFNEKDGHVERKSKNGLYEIENGRPRNPAGRTGLVGRGLLGRWGPNHAADPIITRWKRDSSGNKIMHPVSGKHILQFVAIKRKDCGEWAIPGGMVDPGEKISATLKREFGEEALNSLQKTSAEKREIEEKLHKLFSQDHLVIYKGYVDDPRNTDNAWMETEAVNYHDETGEIMDNLMLEAGDDAGKVKWVDINDKLKLYASHSQFIKLVAEKRDAHWSEDSEADCHAL

SEQ ID NO: 59175 - protein, 77 aa, Homo sapiens
  Payload ID: 11555
  Gene Symbol: NUDT9
  Gene Name: nudix (nucleoside diphosphate linked moiety X)-type motif 9
  ENSP ID: ENSP00000422232
MAGRLLGKALAAVSLSLALASVTIRSSRCRGIQAFRNPAGRTGLVGRGLLGRWGPNHAADPIITRGWWIQERRLVPH

SEQ ID NO: 59176 - protein, 206 aa, Homo sapiens
  Payload ID: 11555
  Gene Symbol: NUDT9
  Gene Name: nudix (nucleoside diphosphate linked moiety X)-type motif 9
  ENSP ID: ENSP00000424702
MSGSNGSKENSHNKARTSPYPGSKVERSQVPNEKVGWLVEWQDYKPVEYTAVSVLAGPRWADPQISESNFSPKFNEKDGHVERKSKNGLYEIENGRPRNPAGRTGLVGRGLLGRWGPNHAADPIITRWKRDSSGNKIMHPVSGKHILQFVAIKRKDCGEWAIPGGMVDPGEKISATLKREFGEEALNSLQKTSAEKREIEEKLHKL

SEQ ID NO: 59177 - protein, 464 aa, Homo sapiens
  Payload ID: 11556
  Gene Symbol: NUF2
  Gene Name: NUF2, NDC80 kinetochore complex component
  Uniprot ID: Q9BZD4
  ENSP ID: ENSP00000271452
METLSFPRYNVAEIVIHIRNKILTGADGKNLTKNDLYPNPKPEVLHMIYMRALQIVYGIRLEHFYMMPVNSEVMYPHLMEGFLPFSNLVTHLDSFLPICRVNDFETADILCPKAKRTSRFLSGIINFIHFREACRETYMEFLWQYKSSADKMQQLNAAHQEALMKLERLDSVPVEEQEEFKQLSDGIQELQQSLNQDFHQKTIVLQEGNSQKKSNISEKTKRLNELKLSVVSLKEIQESLKTKIVDSPEKLKNYKEKMKDTVQKLKNARQEVVEKYEIYGDSVDCLPSCQLEVQLYQKKIQDLSDNREKLASILKESLNLEDQIESDESELKKLKTEENSFKRLMIVKKEKLATAQFKINKKHEDVKQYKRTVIEDCNKVQEKRGAVYERVTTINQEIQKIKLGIQQLKDAAEREKLKSQEIFLNLKTALEKYHDGIEKAAEDSYAKIDEKTAELKRKMFKMST

SEQ ID NO: 59178 - protein, 464 aa, Homo sapiens; identical to SEQ ID NO: 59177
  Payload ID: 11556
  Gene Symbol: NUF2
  Gene Name: NUF2, NDC80 kinetochore complex component
  Uniprot ID: Q9BZD4
  ENSP ID: ENSP00000356875

SEQ ID NO: 59179 - protein, 202 aa, Homo sapiens
  Payload ID: 11556
  Gene Symbol: NUF2
  Gene Name: NUF2, NDC80 kinetochore complex component
  ENSP ID: ENSP00000392652
METLSFPRYNVAEIVIHIRNKILTGADGKNLTKNDLYPNPKPEVLHMIYMRALQIVYGIRLEHFYMMPVNSEVMYPHLMEGFLPFSNLVTHLDSFLPICRVNDFETADILCPKAKRTSRFLSGIINFIHFREACRETYMEFLWQYKSSADKMQQLNAAHQEALMKLERLDSVPVEEQEEFKQLSDGIQELQQSLNQDFHQKT

SEQ ID NO: 59180 - protein, 145 aa, Homo sapiens
  Payload ID: 11556
  Gene Symbol: NUF2
  Gene Name: NUF2, NDC80 kinetochore complex component
  ENSP ID: ENSP00000403252
METLSFPRYNVAEIVIHIRNKILTGADGKNLTKNDLYPNPKPEVLHMIYMRALQIVYGIRLEHFYMMPVNSEVMYPHLMEGFLPFSNLVTHLDSFLPICRVNDFETADILCPKAKRTSRFLSGIINFIHFREACRETYMEFLWQY

SEQ ID NO: 59181 - protein, 124 aa, Homo sapiens
  Payload ID: 11556
  Gene Symbol: NUF2
  Gene Name: NUF2, NDC80 kinetochore complex component
  ENSP ID: ENSP00000433533
METLSFPRYNVAEIVIHIRNKILTGADGKNLTKNDLYPNPKPEVLHMIYMRALQIVYGIRLEHFYMMPVNSEVMYPHLMEGFLPFSNLVTHLDSFLPICRVNDFETADILCPKAKRTSRFLSGI

SEQ ID NO: 59182 - protein, 221 aa, Homo sapiens
  Payload ID: 11556
  Gene Symbol: NUF2
  Gene Name: NUF2, NDC80 kinetochore complex component
  ENSP ID: ENSP00000436473
METLSFPRYNVAEIVIHIRNKILTGADGKNLTKNDLYPNPKPEVLHMIYMRALQIVYGIRLEHFYMMPVNSEVMYPHLMEGFLPFSNLVTHLDSFLPICRVNDFETADILCPKAKRTSRFLSGIINFIHFREACRETYMEFLWQYKSSADKMQQLNAAHQEALMKLERLDSVPVEEQEEFKQLSDGIQELQQSLNQDFHQKTCCKREIPKRSQIFQRKPSV

SEQ ID NO: 59183 - protein, 417 aa, Homo sapiens
  Payload ID: 11556
  Gene Symbol: NUF2
  Gene Name: NUF2, NDC80 kinetochore complex component
  ENSP ID: ENSP00000436888
METLSFPRYNVAEIVIHIRNKILTGADGKNLTKNDLYPNPKPEVLHMIYMRALQIVYGIRLEHFYMMPVNSEVMYPHLMEGFLPFSNLVTHLDSFLPICRVNDFETADILCPKAKRTSRFLSGIINFIHFREACRETYMEFLWQYKSSADKMQQLNAAHQEALMKLERLDSVPVEEQEEFKQLSDGIQELQQSLNQDFHQKTIVLQEGNSQKKSNISEKTKRLNELKLSVVSLKEIQESLKTKIVDSPEKLKNYKEKMKDTVQKLKNARSLNLEDQIESDESELKKLKTEENSFKRLMIVKKEKLATAQFKINKKHEDVKQYKRTVIEDCNKVQEKRGAVYERVTTINQEIQKIKLGIQQLKDAAEREKLKSQEIFLNLKTALEKYHDGIEKAAEDSYAKIDEKTAELKRKMFKMST

SEQ ID NO: 59184 - protein, 651 aa, Homo sapiens
  Payload ID: 11557
  Gene Symbol: NUMB
  Gene Name: numb homolog (Drosophila)
  Uniprot ID: P49757
  ENSP ID: ENSP00000347169
MNKLRQSFRRKKDVYVPEASRPHQWQTDEEGVRTGKCSFPVKYLGHVEVDESRGMHICEDAVKRLKAERKFFKGFFGKTGKKAVKAVLWVSADGLRVVDEKTKDLIVDQTIEKVSFCAPDRNFDRAFSYICRDGTTRRWICHCFMAVKDTGERLSHAVGCAFAACLERKQKREKECGVTATFDASRTTFTREGSFRVTTATEQAEREEIMKQMQDAKKAETDKIVVGSSVAPGNTAPSPSSPTSPTSDATTSLEMNNPHAIPRRHAPIEQLARQGSFRGFPALSQKMSPFKRQLSLRINELPSTMQRKTDFPIKNAVPEVEGEAESISSLCSQITNAFSTPEDPFSSAPMTKPVTVVAPQSPTFQANGTDSAFHVLAKPAHTALAPVAMPVRETNPWAHAPDAANKEIAATCSGTEWGQSSGAASPGLFQAGHRRTPSEADRWLEEVSKSVRAQQPQASAAPLQPVLQPPPPTAISQPASPFQGNAFLTSQPVPVGVVPALQPAFVPAQSYPVANGMPYPAPNVPVVGITPSQMVANVFGTAGHPQAAHPHQSPSLVRQQTFPHYEASSATTSPFFKPPAQHLNGSAAFNGVDDGRLASADRHTEVPTGTCPVDPFEAQWAALENKSKQRTNPSPTNPFSSDLQKTFEIEL

SEQ ID NO: 59185 - protein, 603 aa, Homo sapiens
  Payload ID: 11557
  Gene Symbol: NUMB
  Gene Name: numb homolog (Drosophila)
  Uniprot ID: P49757
  ENSP ID: ENSP00000348644
MNKLRQSFRRKKDVYVPEASRPHQWQTDEEGVRTGKCSFPVKYLGHVEVDESRGMHICEDAVKRLKAERKFFKGFFGKTGKKAVKAVLWVSADGLRVVDEKTKDLIVDQTIEKVSFCAPDRNFDRAFSYICRDGTTRRWICHCFMAVKDTGERLSHAVGCAFAACLERKQKREKECGVTATFDASRTTFTREGSFRVTTATEQAEREEIMKQMQDAKKAETDKIVVGSSVAPGNTAPSPSSPTSPTSDATTSLEMNNPHAIPRRHAPIEQLARQGSFRGFPALSQKMSPFKRQLSLRINELPSTMQRKTDFPIKNAVPEVEGEAESISSLCSQITNAFSTPEDPFSSAPMTKPVTVVAPQSPTFQGTEWGQSSGAASPGLFQAGHRRTPSEADRWLEEVSKSVRAQQPQASAAPLQPVLQPPPPTAISQPASPFQGNAFLTSQPVPVGVVPALQPAFVPAQSYPVANGMPYPAPNVPVVGITPSQMVANVFGTAGHPQAAHPHQSPSLVRQQTFPHYEASSATTSPFFKPPAQHLNGSAAFNGVDDGRLASADRHTEVPTGTCPVDPFEAQWAALENKSKQRTNPSPTNPFSSDLQKTFEIEL

SEQ ID NO: 59186 - protein, 640 aa, Homo sapiens
  Payload ID: 11557
  Gene Symbol: NUMB
  Gene Name: numb homolog (Drosophila)
  Uniprot ID: P49757
  ENSP ID: ENSP00000352563
MNKLRQSFRRKKDVYVPEASRPHQWQTDEEGVRTGKCSFPVKYLGHVEVDESRGMHICEDAVKRLKATGKKAVKAVLWVSADGLRVVDEKTKDLIVDQTIEKVSFCAPDRNFDRAFSYICRDGTTRRWICHCFMAVKDTGERLSHAVGCAFAACLERKQKREKECGVTATFDASRTTFTREGSFRVTTATEQAEREEIMKQMQDAKKAETDKIVVGSSVAPGNTAPSPSSPTSPTSDATTSLEMNNPHAIPRRHAPIEQLARQGSFRGFPALSQKMSPFKRQLSLRINELPSTMQRKTDFPIKNAVPEVEGEAESISSLCSQITNAFSTPEDPFSSAPMTKPVTVVAPQSPTFQANGTDSAFHVLAKPAHTALAPVAMPVRETNPWAHAPDAANKEIAATCSGTEWGQSSGAASPGLFQAGHRRTPSEADRWLEEVSKSVRAQQPQASAAPLQPVLQPPPPTAISQPASPFQGNAFLTSQPVPVGVVPALQPAFVPAQSYPVANGMPYPAPNVPVVGITPSQMVANVFGTAGHPQAAHPHQSPSLVRQQTFPHYEASSATTSPFFKPPAQHLNGSAAFNGVDDGRLASADRHTEVPTGTCPVDPFEAQWAALENKSKQRTNPSPTNPFSSDLQKTFEIEL

SEQ ID NO: 59187 - protein, 603 aa, Homo sapiens; identical to SEQ ID NO: 59185
  Payload ID: 11557
  Gene Symbol: NUMB
  Gene Name: numb homolog (Drosophila)
  Uniprot ID: P49757
  ENSP ID: ENSP00000441258

SEQ ID NO: 59188 - protein, 456 aa, Homo sapiens
  Payload ID: 11557
  Gene Symbol: NUMB
  Gene Name: numb homolog (Drosophila)
  Uniprot ID: P49757
  ENSP ID: ENSP00000446001
MNKLRQSFRRKKDVYVPEASRPHQWQTDEEGVRTGKCSFPVKYLGHVEVDESRGMHICEDAVKRLKAERKFFKGFFGKTGKKAVKAVLWVSADGLRVVDEKTKDLIVDQTIEKVSFCAPDRNFDRAFSYICRDGTTRRWICHCFMAVKDTGERLSHAVGCAFAACLERKQKREKECGVTATFDASRTTFTREGSFRVTTATEQAEREEIMKQMQDAKKGTEWGQSSGAASPGLFQAGHRRTPSEADRWLEEVSKSVRAQQPQASAAPLQPVLQPPPPTAISQPASPFQGNAFLTSQPVPVGVVPALQPAFVPAQSYPVANGMPYPAPNVPVVGITPSQMVANVFGTAGHPQAAHPHQSPSLVRQQTFPHYEASSATTSPFFKPPAQHLNGSAAFNGVDDGRLASADRHTEVPTGTCPVDPFEAQWAALENKSKQRTNPSPTNPFSSDLQKTFEIEL

SEQ ID NO: 59189 - protein, 445 aa, Homo sapiens
  Payload ID: 11557
  Gene Symbol: NUMB
  Gene Name: numb homolog (Drosophila)
  Uniprot ID: P49757
  ENSP ID: ENSP00000450817
MNKLRQSFRRKKDVYVPEASRPHQWQTDEEGVRTGKCSFPVKYLGHVEVDESRGMHICEDAVKRLKATGKKAVKAVLWVSADGLRVVDEKTKDLIVDQTIEKVSFCAPDRNFDRAFSYICRDGTTRRWICHCFMAVKDTGERLSHAVGCAFAACLERKQKREKECGVTATFDASRTTFTREGSFRVTTATEQAEREEIMKQMQDAKKGTEWGQSSGAASPGLFQAGHRRTPSEADRWLEEVSKSVRAQQPQASAAPLQPVLQPPPPTAISQPASPFQGNAFLTSQPVPVGVVPALQPAFVPAQSYPVANGMPYPAPNVPVVGITPSQMVANVFGTAGHPQAAHPHQSPSLVRQQTFPHYEASSATTSPFFKPPAQHLNGSAAFNGVDDGRLASADRHTEVPTGTCPVDPFEAQWAALENKSKQRTNPSPTNPFSSDLQKTFEIEL

SEQ ID NO: 59190 - protein, 640 aa, Homo sapiens; identical to SEQ ID NO: 59186
  Payload ID: 11557
  Gene Symbol: NUMB
  Gene Name: numb homolog (Drosophila)
  Uniprot ID: P49757
  ENSP ID: ENSP00000451117

SEQ ID NO: 59191 - protein, 651 aa, Homo sapiens; identical to SEQ ID NO: 59184
  Payload ID: 11557
  Gene Symbol: NUMB
  Gene Name: numb homolog (Drosophila)
  Uniprot ID: P49757
  ENSP ID: ENSP00000451300

SEQ ID NO: 59192 - protein, 223 aa, Homo sapiens
  Payload ID: 11557
  Gene Symbol: NUMB
  Gene Name: numb homolog (Drosophila)
  ENSP ID: ENSP00000451326
MNKLRQSFRRKKDVYVPEASRPHQWQTDEEGVRTGKCSFPVKTGKKAVKAVLWVSADGLRVVDEKTKDLIVDQTIEKVSFCAPDRNFDRAFSYICRDGTTRRWICHCFMAVKDTGERLSHAVGCAFAACLERKQKREKECGVTATFDASRTTFTREGSFRVTTATEQAEREEIMKQMQDAKKAETDKIVVGSSVAPGNTAPSPSSPTSPTSDATTSLEMNNPH

SEQ ID NO: 59193 - protein, 258 aa, Homo sapiens
  Payload ID: 11557
  Gene Symbol: NUMB
  Gene Name: numb homolog (Drosophila)
  ENSP ID: ENSP00000451374
MNKLRQSFRRKKDVYVPEASRPHQWQTDEEGVRTGKCSFPVKYLGHVEVDESRGMHICEDAVKRLKAERKFFKGFFGKTGKKAVKAVLWVSADGLRVVDEKTKDLIVDQTIEKVSFCAPDRNFDRAFSYICRDGTTRRWICHCFMAVKDTGERLSHAVGCAFAACLERKQKREKECGVTATFDASRTTFTREGSFRVTTATEQAEREEIMKQMQDAKKAETDKIVVGSSVAPGNTAPSPSSPTSPTSDATTSLEMNNP

SEQ ID NO: 59194 - protein, 507 aa, Homo sapiens
  Payload ID: 11557
  Gene Symbol: NUMB
  Gene Name: numb homolog (Drosophila)
  ENSP ID: ENSP00000451513
MAVKDTGERLSHAVGCAFAACLERKQKREKECGVTATFDASRTTFTREGSFRVTTATEQAEREEIMKQMQDAKKAETDKIVVGSSVAPGNTAPSPSSPTSPTSDATTSLEMNNPHAIPRRHAPIEQLARQGSFRGFPALSQKMSPFKRQLSLRINELPSTMQRKTDFPIKNAVPEVEGEAESISSLCSQITNAFSTPEDPFSSAPMTKPVTVVAPQSPTFQANGTDSAFHVLAKPAHTALAPVAMPVRETNPWAHAPDAANKEIAATCSGTEWGQSSGAASPGLFQAGHRRTPSEADRWLEEVSKSVRAQQPQASAAPLQPVLQPPPPTAISQPASPFQGNAFLTSQPVPVGVVPALQPAFVPAQSYPVANGMPYPAPNVPVVGITPSQMVANVFGTAGHPQAAHPHQSPSLVRQQTFPHYEASSATTSPFFKPPAQHLNGSAAFNGVDDGRLASADRHTEVPTGTCPVDPFEAQWAALENKSKQRTNPSPTNPFSSDLQKTFEIEL

SEQ ID NO: 59195 - protein, 80 aa, Homo sapiens
  Payload ID: 11557
  Gene Symbol: NUMB
  Gene Name: numb homolog (Drosophila)
  ENSP ID: ENSP00000451559
MNKLRQSFRRKKDVYVPEASRPHQWQTDEEGVRTGKCSFPVKYLGHVEVDESRGMHICEDAVKRLKATGTLIEPFLTYAV

SEQ ID NO: 59196 - protein, 603 aa, Homo sapiens; identical to SEQ ID NO: 59185
  Payload ID: 11557
  Gene Symbol: NUMB
  Gene Name: numb homolog (Drosophila)
  Uniprot ID: P49757
  ENSP ID: ENSP00000451625

SEQ ID NO: 59197 - protein, 67 aa, Homo sapiens
  Payload ID: 11557
  Gene Symbol: NUMB
  Gene Name: numb homolog (Drosophila)
  ENSP ID: ENSP00000451959
MNKLRQSFRRKKDVYVPEASRPHQWQTDEEGVRTGKCSFPVKYLGHVEVDESRGMHICEDAVKRLKA

SEQ ID NO: 59198 - protein, 494 aa, Homo sapiens
  Payload ID: 11557
  Gene Symbol: NUMB
  Gene Name: numb homolog (Drosophila)
  Uniprot ID: P49757
  ENSP ID: ENSP00000452069
MNKLRQSFRRKKDVYVPEASRPHQWQTDEEGVRTGKCSFPVKYLGHVEVDESRGMHICEDAVKRLKATGKKAVKAVLWVSADGLRVVDEKTKDLIVDQTIEKVSFCAPDRNFDRAFSYICRDGTTRRWICHCFMAVKDTGERLSHAVGCAFAACLERKQKREKECGVTATFDASRTTFTREGSFRVTTATEQAEREEIMKQMQDAKKVPEVEGEAESISSLCSQITNAFSTPEDPFSSAPMTKPVTVVAPQSPTFQGTEWGQSSGAASPGLFQAGHRRTPSEADRWLEEVSKSVRAQQPQASAAPLQPVLQPPPPTAISQPASPFQGNAFLTSQPVPVGVVPALQPAFVPAQSYPVANGMPYPAPNVPVVGITPSQMVANVFGTAGHPQAAHPHQSPSLVRQQTFPHYEASSATTSPFFKPPAQHLNGSAAFNGVDDGRLASADRHTEVPTGTCPVDPFEAQWAALENKSKQRTNPSPTNPFSSDLQKTFEIEL

SEQ ID NO: 59199 - protein, 258 aa, Homo sapiens; identical to SEQ ID NO: 59193
  Payload ID: 11557
  Gene Symbol: NUMB
  Gene Name: numb homolog (Drosophila)
  ENSP ID: ENSP00000452357

SEQ ID NO: 59200 - protein, 592 aa, Homo sapiens
  Payload ID: 11557
  Gene Symbol: NUMB
  Gene Name: numb homolog (Drosophila)
  Uniprot ID: P49757
  ENSP ID: ENSP00000452416
MNKLRQSFRRKKDVYVPEASRPHQWQTDEEGVRTGKCSFPVKYLGHVEVDESRGMHICEDAVKRLKATGKKAVKAVLWVSADGLRVVDEKTKDLIVDQTIEKVSFCAPDRNFDRAFSYICRDGTTRRWICHCFMAVKDTGERLSHAVGCAFAACLERKQKREKECGVTATFDASRTTFTREGSFRVTTATEQAEREEIMKQMQDAKKAETDKIVVGSSVAPGNTAPSPSSPTSPTSDATTSLEMNNPHAIPRRHAPIEQLARQGSFRGFPALSQKMSPFKRQLSLRINELPSTMQRKTDFPIKNAVPEVEGEAESISSLCSQITNAFSTPEDPFSSAPMTKPVTVVAPQSPTFQGTEWGQSSGAASPGLFQAGHRRTPSEADRWLEEVSKSVRAQQPQASAAPLQPVLQPPPPTAISQPASPFQGNAFLTSQPVPVGVVPALQPAFVPAQSYPVANGMPYPAPNVPVVGITPSQMVANVFGTAGHPQAAHPHQSPSLVRQQTFPHYEASSATTSPFFKPPAQHLNGSAAFNGVDDGRLASADRHTEVPTGTCPVDPFEAQWAALENKSKQRTNPSPTNPFSSDLQKTFEIEL

SEQ ID NO: 59201 - protein, 456 aa, Homo sapiens; identical to SEQ ID NO: 59188
  Payload ID: 11557
  Gene Symbol: NUMB
  Gene Name: numb homolog (Drosophila)
  Uniprot ID: P49757
  ENSP ID: ENSP00000452888

SEQ ID NO: 59202 - protein, 505 aa, Homo sapiens
  Payload ID: 11557
  Gene Symbol: NUMB
  Gene Name: numb homolog (Drosophila)
  Uniprot ID: P49757
  ENSP ID: ENSP00000453209
MNKLRQSFRRKKDVYVPEASRPHQWQTDEEGVRTGKCSFPVKYLGHVEVDESRGMHICEDAVKRLKAERKFFKGFFGKTGKKAVKAVLWVSADGLRVVDEKTKDLIVDQTIEKVSFCAPDRNFDRAFSYICRDGTTRRWICHCFMAVKDTGERLSHAVGCAFAACLERKQKREKECGVTATFDASRTTFTREGSFRVTTATEQAEREEIMKQMQDAKKVPEVEGEAESISSLCSQITNAFSTPEDPFSSAPMTKPVTVVAPQSPTFQGTEWGQSSGAASPGLFQAGHRRTPSEADRWLEEVSKSVRAQQPQASAAPLQPVLQPPPPTAISQPASPFQGNAFLTSQPVPVGVVPALQPAFVPAQSYPVANGMPYPAPNVPVVGITPSQMVANVFGTAGHPQAAHPHQSPSLVRQQTFPHYEASSATTSPFFKPPAQHLNGSAAFNGVDDGRLASADRHTEVPTGTCPVDPFEAQWAALENKSKQRTNPSPTNPFSSDLQKTFEIEL

SEQ ID NO: 59203 - protein, 609 aa, Homo sapiens
  Payload ID: 11558
  Gene Symbol: NUMBL
  Gene Name: numb homolog (Drosophila)-like
  Uniprot ID: Q9Y6R0
  ENSP ID: ENSP00000252891
MSRSAAASGGPRRPERHLPPAPCGAPGPPETCRTEPDGAGTMNKLRQSLRRRKPAYVPEASRPHQWQADEDAVRKGTCSFPVRYLGHVEVEESRGMHVCEDAVKKLKAMGRKSVKSVLWVSADGLRVVDDKTKDLLVDQTIEKVSFCAPDRNLDKAFSYICRDGTTRRWICHCFLALKDSGERLSHAVGCAFAACLERKQRREKECGVTAAFDASRTSFAREGSFRLSGGGRPAEREAPDKKKAEAAAAPTVAPGPAQPGHVSPTPATTSPGEKGEAGTPVAAGTTAAAIPRRHAPLEQLVRQGSFRGFPALSQKNSPFKRQLSLRLNELPSTLQRRTDFQVKGTVPEMEPPGAGDSDSINALCTQISSSFASAGAPAPGPPPATTGTSAWGEPSVPPAAAFQPGHKRTPSEAERWLEEVSQVAKAQQQQQQQQQQQQQQQQQQQQAASVAPVPTMPPALQPFPAPVGPFDAAPAQVAVFLPPPHMQPPFVPAYPGLGYPPMPRVPVVGITPSQMVANAFCSAAQLQPQPATLLGKAGAFPPPAIPSAPGSQARPRPNGAPWPPEPAPAPAPELDPFEAQWAALEGKATVEKPSNPFSGDLQKTFEIEL

SEQ ID NO: 59204 - protein, 568 aa, Homo sapiens
  Payload ID: 11558
  Gene Symbol: NUMBL
  Gene Name: numb homolog (Drosophila)-like
  ENSP ID: ENSP00000442759
MNKLRQSLRRRKPAYVPEASRPHQWQADEDAVRKGTCSFPVRYLGHVEVEESRGMHVCEDAVKKLKAMGRKSVKSVLWVSADGLRVVDDKTKDLLVDQTIEKVSFCAPDRNLDKAFSYICRDGTTRRWICHCFLALKDSGERLSHAVGCAFAACLERKQRREKECGVTAAFDASRTSFAREGSFRLSGGGRPAEREAPDKKKAEAAAAPTVAPGPAQPGHVSPTPATTSPGEKGEAGTPVAAGTTAAAIPRRHAPLEQLVRQGSFRGFPALSQKNSPFKRQLSLRLNELPSTLQRRTDFQVKGTVPEMEPPGAGDSDSINALCTQISSSFASAGAPAPGPPPATTGTSAWGEPSVPPAAAFQPGHKRTPSEAERWLEEVSQVAKAQQQQQQQQQQQQQQQQQQQQAASVAPVPTMPPALQPFPAPVGPFDAAPAQVAVFLPPPHMQPPFVPAYPGLGYPPMPRVPVVGITPSQMVANAFCSAAQLQPQPATLLGKAGAFPPPAIPSAPGSQARPRPNGAPWPPEPAPAPAPELDPFEAQWAALEGKATVEKPSNPFSGDLQKTFEIEL

SEQ ID NO: 59205 - protein, 214 aa, Homo sapiens
  Payload ID: 11558
  Gene Symbol: NUMBL
  Gene Name: numb homolog (Drosophila)-like
  ENSP ID: ENSP00000469310
  MOD_RES (1)..(1): Any amino acid
XCEDAVKKLKAMGRKSVKSVLWVSADGLRVVDDKTKDLLVDQTIEKVSFCAPDRNLDKAFSYICRDGTTRRWICHCFLALKDSGERLSHAVGCAFAACLERKQRREKECGVTAAFDASRTSFAREGSFRLSGGGRPAEREAPDKKKEAAAAPTVAPGPAQPGHVSPTPATTSPGEKGEAGTPVAAGTTAAAIPRRHAPLEQLVRQGSFRGFPAL

SEQ ID NO: 59206 - protein, 235 aa, Homo sapiens
  Payload ID: 11558
  Gene Symbol: NUMBL
  Gene Name: numb homolog (Drosophila)-like
  ENSP ID: ENSP00000469736
MNKLRQSLRRRKPAYVPEASRPHQWQADEDAVRKGTCSFPVRYLGHVEVEESRGMHVCEDAVKKLKAMGRKSVKSVLWVSADGLRVVDDKTKDLLVDQTIEKVSFCAPDRNLDKAFSYICRDGTTRRWICHCFLALKDSGERLSHAVGCAFAACLERKQRREKECGVTAAFDASRTSFAREGSFRLSGGGRPAEREAPDKKKAEAAAAPTVAPGPAQPGHVSPTPATTSPGEKGE

SEQ ID NO: 59207 - protein, 115 aa, Homo sapiens
  Payload ID: 11558
  Gene Symbol: NUMBL
  Gene Name: numb homolog (Drosophila)-like
  ENSP ID: ENSP00000470794
MNKLRQSLRRRKPAYVPEASRPHQWQADEDAVRKGTCSFPVRYLGHVEVEESRGMHVCEDAVKKLKAMGRKSVKSVLWVSADGLRVVDDKTKDLLVDQTIEKVSFCAPDRNLDKA

SEQ ID NO: 59208 - protein, 110 aa, Homo sapiens
  Payload ID: 11558
  Gene Symbol: NUMBL
  Gene Name: numb homolog (Drosophila)-like
  ENSP ID: ENSP00000471376
MNKLRQSLRRRKPAYVPEASRPHQWQADEDAVRKGTCSFPVRYLGHVEVEESRGMHVCEDAVKKLKAMGRKSVKSVLWVSADGLRVVDDKTKDLLVDQTIEKVSFCAPDR

SEQ ID NO: 59209 - protein, 568 aa, Homo sapiens; identical to SEQ ID NO: 59204
  Payload ID: 11558
  Gene Symbol: NUMBL
  Gene Name: numb homolog (Drosophila)-like
  ENSP ID: ENSP00000472400

SEQ ID NO: 59210 - protein, 262 aa, Homo sapiens
  Payload ID: 11559
  Gene Symbol: NRM
  Gene Name: nurim (nuclear envelope membrane protein)
  Uniprot ID: Q8IXM6
  ENSP ID: ENSP00000259953
MAPALLLIPAALASFILAFGTGVEFVRFTSLRPLLGGIPESGGPDARQGWLAALQDRSILAPLAWDLGLLLLFVGQHSLMAAERVKAWTSRYFGVLQRSLYVACTALALQLVMRYWEPIPKGPVLWEARAEPWATWVPLLCFVLHVISWLLIFSILLVFDYAELMGLKQVYYHVLGLGEPLALKSPRALRLFSHLRHPVCVELLTVLWVVPTLGTDRLLLAFLLTLYLGLAHGLDQQDLRYLRAQLQRKLHLLSRPQDGEAE

SEQ ID NO: 59211 - protein, 203 aa, Homo sapiens
  Payload ID: 11559
  Gene Symbol: NRM
  Gene Name: nurim (nuclear envelope membrane protein)
  Uniprot ID: Q8IXM6
  ENSP ID: ENSP00000365602
MAPALLLIPAALASFILAFGTGVEFVRFTSLRPLLGGIPESGGPDARQGWLAALQDRSILAPLAWDLGLLLLFVGQHSLMAAERVKAWTSRYFGVLQRSLYVACTALALQVYYHVLGLGEPLALKSPRALRLFSHLRHPVCVELLTVLWVVPTLGTDRLLLAFLLTLYLGLAHGLDQQDLRYLRAQLQRKLHLLSRPQDGEAE

SEQ ID NO: 59212 - protein, 262 aa, Homo sapiens; identical to SEQ ID NO: 59210
  Payload ID: 11559
  Gene Symbol: NRM
  Gene Name: nurim (nuclear envelope membrane protein)
  Uniprot ID: Q8IXM6
  ENSP ID: ENSP00000365603

SEQ ID NO: 59213 - protein, 203 aa, Homo sapiens; identical to SEQ ID NO: 59211
  Payload ID: 11559
  Gene Symbol: NRM
  Gene Name: nurim (nuclear envelope membrane protein)
  Uniprot ID: Q8IXM6
  ENSP ID: ENSP00000373064

SEQ ID NO: 59214 - protein, 262 aa, Homo sapiens; identical to SEQ ID NO: 59210
  Payload ID: 11559
  Gene Symbol: NRM
  Gene Name: nurim (nuclear envelope membrane protein)
  Uniprot ID: Q8IXM6
  ENSP ID: ENSP00000373065

SEQ ID NO: 59215 - protein, 262 aa, Homo sapiens
  Payload ID: 11559
  Gene Symbol: NRM
  Gene Name: nurim (nuclear envelope membrane protein)
  ENSP ID: ENSP00000389894
  MOD_RES (1)..(1): Any amino acid
XESGREATGEGDLSSKLGTQGLEFWRGGRVRTEGAEKGGDRSILNARQGWLAALQDRSILAPLAWDLGLLLLFVGQHSLMAAERVKAWTSRYFGVLQRSLYVACTALALQLVMRYWEPIPKGPVLWEARAEPWATWVPLLCFVLHVISWLLIFSILLVFDYAELMGLKQVYYHVLGLGEPLALKSPRALRLFSHLRHPVCVELLTVLWVVPTLGTDRLLLAFLLTLYLGLAHGLDQQDLRYLRAQLQRKLHLLSRPQDGEAE

SEQ ID NO: 59216 - protein, 203 aa, Homo sapiens; identical to SEQ ID NO: 59211
  Payload ID: 11559
  Gene Symbol: NRM
  Gene Name: nurim (nuclear envelope membrane protein)
  Uniprot ID: Q8IXM6
  ENSP ID: ENSP00000389958

SEQ ID NO: 59217 - protein, 203 aa, Homo sapiens; identical to SEQ ID NO: 59211
  Payload ID: 11559
  Gene Symbol: NRM
  Gene Name: nurim (nuclear envelope membrane protein)
  Uniprot ID: Q8IXM6
  ENSP ID: ENSP00000392502

SEQ ID NO: 59218 - protein, 203 aa, Homo sapiens; identical to SEQ ID NO: 59211
  Payload ID: 11559
  Gene Symbol: NRM
  Gene Name: nurim (nuclear envelope membrane protein)
  Uniprot ID: Q8IXM6
  ENSP ID: ENSP00000394788

SEQ ID NO: 59219 - protein, 262 aa, Homo sapiens; identical to SEQ ID NO: 59215
  Payload ID: 11559
  Gene Symbol: NRM
  Gene Name: nurim (nuclear envelope membrane protein)
  ENSP ID: ENSP00000394862
  MOD_RES (1)..(1): Any amino acid

SEQ ID NO: 59220 - protein, 262 aa, Homo sapiens; identical to SEQ ID NO: 59210
  Payload ID: 11559
  Gene Symbol: NRM
  Gene Name: nurim (nuclear envelope membrane protein)
  Uniprot ID: Q8IXM6
  ENSP ID: ENSP00000397755

SEQ ID NO: 59221 - protein, 262 aa, Homo sapiens; identical to SEQ ID NO: 59215
  Payload ID: 11559
  Gene Symbol: NRM
  Gene Name: nurim (nuclear envelope membrane protein)
  ENSP ID: ENSP00000397892
  MOD_RES (1)..(1): Any amino acid

SEQ ID NO: 59222 - protein, 262 aa, Homo sapiens; identical to SEQ ID NO: 59210
  Payload ID: 11559
  Gene Symbol: NRM
  Gene Name: nurim (nuclear envelope membrane protein)
  Uniprot ID: Q8IXM6
  ENSP ID: ENSP00000398752

SEQ ID NO: 59223 - protein, 203 aa, Homo sapiens; identical to SEQ ID NO: 59211
  Payload ID: 11559
  Gene Symbol: NRM
  Gene Name: nurim (nuclear envelope membrane protein)
  Uniprot ID: Q8IXM6
  ENSP ID: ENSP00000399560

SEQ ID NO: 59224 - protein, 262 aa, Homo sapiens; identical to SEQ ID NO: 59210
  Payload ID: 11559
  Gene Symbol: NRM
  Gene Name: nurim (nuclear envelope membrane protein)
  Uniprot ID: Q8IXM6
  ENSP ID: ENSP00000405789

SEQ ID NO: 59225 - protein, 262 aa, Homo sapiens; identical to SEQ ID NO: 59215
  Payload ID: 11559
  Gene Symbol: NRM
  Gene Name: nurim (nuclear envelope membrane protein)
  ENSP ID: ENSP00000407049
  MOD_RES (1)..(1): Any amino acid

SEQ ID NO: 59226 - protein, 203 aa, Homo sapiens; identical to SEQ ID NO: 59211
  Payload ID: 11559
  Gene Symbol: NRM
  Gene Name: nurim (nuclear envelope membrane protein)
  Uniprot ID: Q8IXM6
  ENSP ID: ENSP00000407111

SEQ ID NO: 59227 - protein, 262 aa, Homo sapiens; identical to SEQ ID NO: 59215
  Payload ID: 11559
  Gene Symbol: NRM
  Gene Name: nurim (nuclear envelope membrane protein)
  ENSP ID: ENSP00000407779
  MOD_RES (1)..(1): Any amino acid

SEQ ID NO: 59228 - protein, 262 aa, Homo sapiens; identical to SEQ ID NO: 59215
  Payload ID: 11559
  Gene Symbol: NRM
  Gene Name: nurim (nuclear envelope membrane protein)
  ENSP ID: ENSP00000408118
  MOD_RES (1)..(1): Any amino acid

SEQ ID NO: 59229 - protein, 262 aa, Homo sapiens; identical to SEQ ID NO: 59210
  Payload ID: 11559
  Gene Symbol: NRM
  Gene Name: nurim (nuclear envelope membrane protein)
  Uniprot ID: Q8IXM6
  ENSP ID: ENSP00000409285

SEQ ID NO: 59230 - protein, 262 aa, Homo sapiens; identical to SEQ ID NO: 59215
  Payload ID: 11559
  Gene Symbol: NRM
  Gene Name: nurim (nuclear envelope membrane protein)
  ENSP ID: ENSP00000412991
  MOD_RES (1)..(1): Any amino acid

SEQ ID NO: 59231 - protein, 262 aa, Homo sapiens; identical to SEQ ID NO: 59210
  Payload ID: 11559
  Gene Symbol: NRM
  Gene Name: nurim (nuclear envelope membrane protein)
  Uniprot ID: Q8IXM6
  ENSP ID: ENSP00000414927

SEQ ID NO: 59232 - protein, 262 aa, Homo sapiens; identical to SEQ ID NO: 59210
  Payload ID: 11559
  Gene Symbol: NRM
  Gene Name: nurim (nuclear envelope membrane protein)
  Uniprot ID: Q8IXM6
  ENSP ID: ENSP00000478812

SEQ ID NO: 59233 - protein, 262 aa, Homo sapiens; identical to SEQ ID NO: 59210
  Payload ID: 11559
  Gene Symbol: NRM
  Gene Name: nurim (nuclear envelope membrane protein)
  Uniprot ID: Q8IXM6
  ENSP ID: ENSP00000481406

SEQ ID NO: 59234 - protein, 262 aa, Homo sapiens; identical to SEQ ID NO: 59210
  Payload ID: 11559
  Gene Symbol: NRM
  Gene Name: nurim (nuclear envelope membrane protein)
  Uniprot ID: Q8IXM6
  ENSP ID: ENSP00000481407

SEQ ID NO: 59235 - protein, 262 aa, Homo sapiens; identical to SEQ ID NO: 59210
  Payload ID: 11559
  Gene Symbol: NRM
  Gene Name: nurim (nuclear envelope membrane protein)
  Uniprot ID: Q8IXM6
  ENSP ID: ENSP00000482593

SEQ ID NO: 59236 - protein, 262 aa, Homo sapiens; identical to SEQ ID NO: 59210
  Payload ID: 11559
  Gene Symbol: NRM
  Gene Name: nurim (nuclear envelope membrane protein)
  Uniprot ID: Q8IXM6
  ENSP ID: ENSP00000482740

SEQ ID NO: 59237 - protein, 262 aa, Homo sapiens; identical to SEQ ID NO: 59210
  Payload ID: 11559
  Gene Symbol: NRM
  Gene Name: nurim (nuclear envelope membrane protein)
  Uniprot ID: Q8IXM6
  ENSP ID: ENSP00000483875

SEQ ID NO: 59238 - protein, 293 aa, Homo sapiens
  Payload ID: 11560
  Gene Symbol: NUS1
  Gene Name: NUS1 dehydrodolichyl diphosphate synthase subunit
  Uniprot ID: Q96E22
  ENSP ID: ENSP00000357480
MTGLYELVWRVLHALLCLHRTLTSWLRVRFGTWNWIWRRCCRAASAAVLAPLGFTLRKPPAVGRNRRHHRHPRGGSCLAAAHHRMRWRADGRSLEKLPVHMGLVITEVEQEPSFSDIASLVVWCMAVGISYISVYDHQGIFKRNNSRLMDEILKQQQELLGLDCSKYSPEFANSNDKDDQVLNCHLAVKVLSPEDGKADIVRAAQDFCQLVAQKQKRPTDLDVDTLASLLSSNGCPDPDLVLKFGPVDSTLGFLPWHIRLTEIVSLPSHLNISYEDFFSALRQYAACEQRLGK

SEQ ID NO: 59239 - protein, 629 aa, Homo sapiens
  Payload ID: 11561
  Gene Symbol: NUTM2A
  Gene Name: NUT family member 2A
  Uniprot ID: Q8IVF1
  ENSP ID: ENSP00000371107
MEVKGPSGRSFCCESEGQFKSCLKRHTPSLLLPSSWKGNSGSCLMAKALHRMSPTPNSCPLPLPLCRMSGVLCSRNLFTFKFSLFQLDSGASGEPGHSLGLTLGFSHCGNCQTAVVSAQPEGMASNGAYPALGPGVTANPGTSLSVFTALPFTTPAPGPAHGPLLVTAGAPPGGPLVLSTLPSTPLVTEQDGCGPSGAGASNVFVQMRTEVGPVKAAQAQTLVLTQAPLVWQAPGALCGGVVCPPPLLLAAAPVVPVMAAQVVGGTQACEGGWSQGLPLPPPPPPAAQLPPIVSQGNAGPWPQGAHGEGSLASSQAKAPPDDSCNPRSVYENFRLWQHYKPLARRHLPQSPDTEALSCFLIPVLRSLARRKPTMTLEEGLWRAMREWQHTSNFDRMIFYEMAEKFLEFEAEEEMQIQKSQWMKGPQCLPPPATPRLEPRGPPAPEVVKQPVYLPSKAGPKAPTACLPPPRPQRPVTKARRPPPRPHRRAETKARLPPPRPQRPAETKVPEEIPPEVVQEYVDIMEELLGPSLGATGEPEKQREEGEVKQPQEEDWTPPDPGLLSYTDKLCSQKDFVTKVEAVIHPQFLEELLSPDPQMDFLALSQELEQEEGLTLAQGAPSDAPGTDRC

SEQ ID NO: 59240 - protein, 878 aa, Homo sapiens
  Payload ID: 11561
  Gene Symbol: NUTM2A
  Gene Name: NUT family member 2A
  Uniprot ID: Q8IVF1
  ENSP ID: ENSP00000371126
MEVKGPSGRSFCCESEGQFKSCLKRHTPSLLLPSSWKGNSGSCLMAKALHRMSPTPNSCPLPLPLCRMSGVLCSRNLFTFKFSLFQLDSGASGEPGHSLGLTLGFSHCGNCQTAVVSAQPEGMASNGAYPALGPGVTANPGTSLSVFTALPFTTPAPGPAHGPLLVTAGAPPGGPLVLSTLPSTPLVTEQDGCGPSGAGASNVFVQMRTEVGPVKAAQAQTLVLTQAPLVWQAPGALCGGVVCPPPLLLAAAPVVPVMAAQVVGGTQACEGGWSQGLPLPPPPPPAAQLPPIVSQGNAGPWPQGAHGEGSLASSQAKAPPDDSCNPRSVYENFRLWQHYKPLARRHLPQSPDTEALSCFLIPVLRSLARRKPTMTLEEGLWRAMREWQHTSNFDRMIFYEMAEKFLEFEAEEEMQIQKSQWMKGPQCLPPPATPRLEPRGPPAPEVVKQPVYLPSKAGPKAPTACLPPPRPQRPVTKARRPPPRPHRRAETKARLPPPRPQRPAETKVPEEIPPEVVQEYVDIMEELLGPSLGATGEPEKQREEGEVKQPQEEDWTPPDPGLLSYTDKLCSQKDFVTKVEAVIHPQFLEELLSPDPQMDFLALSQELEQEEGLTLAQLVEKRLLPLKEKQHARAAPSRGTARLDSSSSKFAAGQGAERDVPVPQQGVGMETCPPQTTARDSQGRGRAHTGMARSKDSVVLLGCQDSPGLRAARPTSPPQDHRPTCPGVGTKDALDLPGGSPVRESHGLAQGSSEEEELPSLAFLLGSQHKLLPWWLPQSPVPASGLLSPEKWGPQGTHQFPSAERRGLNLAPSPANKAKKRPLFGSLSPAEKTPHPGPGLRVSGEQSLTWGLGGPSQSQKRKGDPLVSRKEKKQRCSQ

SEQ ID NO: 59241 - protein, 656 aa, Homo sapiens
  Payload ID: 11562
  Gene Symbol: NUTM2B
  Gene Name: NUT family member 2B
  ENSP ID: ENSP00000344811
  MOD_RES (1)..(1): Any amino acid
XLTQAPLVWQAPGALCGGVVCPPPLLLAAAPVVPVMAAQVVGGTQACEGGWSQGLPLPPPPPPAAQLPPIVSQGNAGPWPQGAHGESSLASSQAKAPPDDSCNPRSVYENFRLWQHYKPLARRHLPQSPDTEALSCFLIPVLRSLARRKPTMTLEEGLWRAMREWQHTSNFDRMIFYEMAEKFLEFEAEEEMQIQKSQWMKGPQCLPPPATPRLEPRGPPAPEVVKQPVYLPSKAGPKAPTACLPPPRPQRPVTKARRPPPRPHRRAETKARLPPPRPQRPAETKVPEEIPPEVVQEYVDIMEELLGPSLGATGEPEKQREEGKVKQPQEEDWTPPDPGLLSYIDKLCSQKDFVTKVEAVIHPQFLEELLSPDPQMDFLALSQDLEQEEGLTLAQLVEKRLPPLKEKQHARAAPSRGTARLDSSSSKFAAGQGAERDVPDPQQGVGMETCPPQMTARDSQGRGRAHTGMARSEDSVVLLGCQDSPGLRAAWPTSPPQDHRPTCPGVGTKDALDLPGGSPVRESHGLAQGSSEEEELPSLAFLLGSQHKLLPWWLPQSPVPASGLLSPEKWGPQGTHQSPSAERRGLNLAPSPANKAKKRPLFGSLSPAEKTPYPGPGLRVSGEQSLTWGLGGPSQSQKRKGDPLVSRKEKKQHCSQ

SEQ ID NO: 59242 - protein, 562 aa, Homo sapiens
  Payload ID: 11562
  Gene Symbol: NUTM2B
  Gene Name: NUT family member 2B
  ENSP ID: ENSP00000361396
MSGVLCSRNLFTFKFSLFQLDSGASGEPGHSLGLTLGFSYCGNCQTAVVSAQPEGMASNGAYPVLGPGVTANPGTSLSVFTALPFTTPAPGPAHGPLLVTAGAPPGGPLVLSTFPSTPLVTEQDGCGPSGAGASNVFVQMRTEVGPVKAAQAQTLVLTQAPLVWQAPGALCGGVVCPPPLLLAAAPVVPVMAAQVVGGTQACEGGWSQGLPLPPPPPPAAQLPPIVSQGNAGPWPQGAHGESSLASSQAKAPPDDSCNPRSVYENFRLWQHYKPLARRHLPQSPDTEALSCFLIPVLRSLARRKPTMTLEEGLWRAMREWQHTSNFDRMIFYEMAEKFLEFEAEEEMQIQKSQWMKGPQCLPPPATPRLEPRGPPAPEVVKQPVYLPSKAGPKAPTACLPPPRPQRPVTKARRPPPRPHRRAETKARLPPPRPQRPAETKVPEEIPPEVVQEYVDIMEELLGPSLGATGEPEKQREEGKVKQPQEEDWTPPDPGLLSYIDKLCSQKDFVTKVEAVIHPQFLEELLSPDPQMDFLALSQDLEQEEGLTLAQGAPSDAPGTDRC

SEQ ID NO: 59243 - protein, 878 aa, Homo sapiens
  Payload ID: 11562
  Gene Symbol: NUTM2B
  Gene Name: NUT family member 2B
  Uniprot ID: A6NNL0
  ENSP ID: ENSP00000394623
MEVKGPSGRSFCCESEGQFKSCLKRHTPSLLLPSSWKGNSGSCLMAEALHRTSPTPNSCPLPLPLCRMSGVLCSRNLFTFKFSLFQLDSGASGEPGHSLGLTLGFSYCGNCQTAVVSAQPEGMASNGAYPVLGPGVTANPGTSLSVFTALPFTTPAPGPAHGPLLVTAGAPPGGPLVLSTFPSTPLVTEQDGCGPSGAGASNVFVQMRTEVGPVKAAQAQTLVLTQAPLVWQAPGALCGGVVCPPPLLLAAAPVVPVMAAQVVGGTQACEGGWSQGLPLPPPPPPAAQLPPIVSQGNAGPWPQGAHGESSLASSQAKAPPDDSCNPRSVYENFRLWQHYKPLARRHLPQSPDTEALSCFLIPVLRSLARRKPTMTLEEGLWRAMREWQHTSNFDRMIFYEMAEKFLEFEAEEEMQIQKSQWMKGPQCLPPPATPRLEPRGPPAPEVVKQPVYLPSKAGPKAPTACLPPPRPQRPVTKARRPPPRPHRRAETKARLPPPRPQRPAETKVPEEIPPEVVQEYVDIMEELLGPSLGATGEPEKQREEGKVKQPQEEDWTPPDPGLLSYIDKLCSQKDFVTKVEAVIHPQFLEELLSPDPQMDFLALSQDLEQEEGLTLAQLVEKRLPPLKEKQHARAAPSRGTARLDSSSSKFAAGQGAERDVPDPQQGVGMETCPPQMTARDSQGRGRAHTGMARSEDSVVLLGCQDSPGLRAAWPTSPPQDHRPTCPGVGTKDALDLPGGSPVRESHGLAQGSSEEEELPSLAFLLGSQHKLLPWWLPQSPVPASGLLSPEKWGPQGTHQSPSAERRGLNLAPSPANKAKKRPLFGSLSPAEKTPYPGPGLRVSGEQSLTWGLGGPSQSQKRKGDPLVSRKEKKQHCSQ

SEQ ID NO: 59244 - protein, 806 aa, Homo sapiens
  Payload ID: 11563
  Gene Symbol: NUTM2D
  Gene Name: NUT family member 2D
  Uniprot ID: Q5VT03
  ENSP ID: ENSP00000371116
MFQEPVYFQIFLFQLDSGASGEPGHSLGLTLGFSHCGNCQTAVVSAQPEGMASNGAYPALGPGVTANPGTSLSVFTALPFTTPAPGPAHGPLLVTAGAPPGGPLVLSNFPSTPLVTEQDGCGPSGAGASNVFVQMRTEVGPVKAAQAQTLVLTQTPLVWQAPGALCGGVVCPPPLLLAAAPVVPVMAAQVVGGTQACEGGWSQGLPLPPPPPPAAQLPPIVSQGNAGPWPQGAHGEGSLASSQAKAPPDDSCNPRSVYENFRLWQHYKPLARRHLPQSPDTEALSCFLIPVLRSLARRKPTMTLEEGLWRAMREWQHTSNFDRMIFYEMAEKFLEFEAEEEMQIQKSQWMKGPQCLPPPATPRLEPRGPPAPEVVKQPVYLPSKAGPKAPTACLPPPRPQRPVTKARRPPPRPHRRAETKARLPPPRPQRPAETKVPEEIPPEVVQEYVDIMEELLGPSLGATGEPEKQREEGEVKQPQEEDWTPPDPGLLSYTDKLCSQKDFVTKVEAVIHPQFLEELLSPDPQMDFLALSQELEQEEGLTLAQLVEKRLLPLKEKQHARAAPSRGTARLDSSSSKFAAGQGAERDVPDPQQGVGMETCPPQTTARDSQGRGRAHTGMARSKDSVVLLGCQDSPGLRAARPTSPPQDHRPTCPGVGTKDALDLPGGSPVRESHGLAQGSSEEEELPSLAFLLGSQHKLLPWWLPQSPVPASGLLSPEKWGPQGTHQSPSAERRGLNLAPSPANKAKKRPLFGSLSPAEKTPHPGPGLRVSGEQSLTWGLGGPSQSQKRKGDPLVSRKEKKQRCSQ

SEQ ID NO: 59245 - protein, 557 aa, Homo sapiens
  Payload ID: 11563
  Gene Symbol: NUTM2D
  Gene Name: NUT family member 2D
  ENSP ID: ENSP00000396080
MFQEPVYFQIFLFQLDSGASGEPGHSLGLTLGFSHCGNCQTAVVSAQPEGMASNGAYPALGPGVTANPGTSLSVFTALPFTTPAPGPAHGPLLVTAGAPPGGPLVLSNFPSTPLVTEQDGCGPSGAGASNVFVQMRTEVGPVKAAQAQTLVLTQTPLVWQAPGALCGGVVCPPPLLLAAAPVVPVMAAQVVGGTQACEGGWSQGLPLPPPPPPAAQLPPIVSQGNAGPWPQGAHGEGSLASSQAKAPPDDSCNPRSVYENFRLWQHYKPLARRHLPQSPDTEALSCFLIPVLRSLARRKPTMTLEEGLWRAMREWQHTSNFDRMIFYEMAEKFLEFEAEEEMQIQKSQWMKGPQCLPPPATPRLEPRGPPAPEVVKQPVYLPSKAGPKAPTACLPPPRPQRPVTKARRPPPRPHRRAETKARLPPPRPQRPAETKVPEEIPPEVVQEYVDIMEELLGPSLGATGEPEKQREEGEVKQPQEEDWTPPDPGLLSYTDKLCSQKDFVTKVEAVIHPQFLEELLSPDPQMDFLALSQELEQEEGLTLAQGAPSDAPGTDRC

SEQ ID NO: 59246 - protein, 152 aa, Homo sapiens
  Payload ID: 11563
  Gene Symbol: NUTM2D
  Gene Name: NUT family member 2D
  ENSP ID: ENSP00000475197
  MOD_RES (1)..(1): Any amino acid
XVPEEIPPEVVQEYVDIMEELLGPSLGATGEPEKQREEGEVKQPQEEDWTPPDPGLLSYTDKLCSQKDFVTKVEAVIHPQFLEELLSPDPQMDFLALSQELEQEEGLTLAQVPQGQEGPGTQGPPDCLIPPAGDARLLGEPLWSGKMQVQRE

SEQ ID NO: 59247 - protein, 877 aa, Homo sapiens
  Payload ID: 11563
  Gene Symbol: NUTM2D
  Gene Name: NUT family member 2D
  ENSP ID: ENSP00000484887
MEVKGPSGRSFCCESEGQFKSCLKRHTPSLLLPSSWKGNSGSCLMAEALHRMSPTPNSCPLPLPLCRMSGVLCSRNLFTFKFSFQLDSGASGEPGHSLGLTLGFSHCGNCQTAVVSAQPEGMASNGAYPALGPGVTANPGTSLSVFTALPFTTPAPGPAHGPLLVTAGAPPGGPLVLSNFPSTPLVTEQDGCGPSGAGASNVFVQMRTEVGPVKAAQAQTLVLTQTPLVWQAPGALCGGVVCPPPLLLAAAPVVPVMAAQVVGGTQACEGGWSQGLPLPPPPPPAAQLPPIVSQGNAGPWPQGAHGEGSLASSQAKAPPDDSCNPRSVYENFRLWQHYKPLARRHLPQSPDTEALSCFLIPVLRSLARRKPTMTLEEGLWRAMREWQHTSNFDRMIFYEMAEKFLEFEAEEEMQIQKSQWMKGPQCLPPPATPRLEPRGPPAPEVVKQPVYLPSKAGPKAPTACLPPPRPQRPVTKARRPPPRPHRRAETKARLPPPRPQRPAETKVPEEIPPEVVQEYVDIMEELLGPSLGATGEPEKQREEGEVKQPQEEDWTPPDPGLLSYTDKLCSQKDFVTKVEAVIHPQFLEELLSPDPQMDFLALSQELEQEEGLTLAQLVEKRLLPLKEKQHARAAPSRGTARLDSSSSKFAAGQGAERDVPDPQQGVGMETCPPQTTARDSQGRGRAHTGMARSKDSVVLLGCQDSPGLRAARPTSPPQDHRPTCPGVGTKDALDLPGGSPVRESHGLAQGSSEEEELPSLAFLLGSQHKLLPWWLPQSPVPASGLLSPEKWGPQGTHQSPSAERRGLNLAPSPANKAKKRPLFGSLSPAEKTPHPGPGLRVSGEQSLTWGLGGPSQSQKRKGDPLVSRKEKKQRCSQ

SEQ ID NO: 59248 - protein, 878 aa, Homo sapiens
  Payload ID: 11564
  Gene Symbol: NUTM2E
  Gene Name: NUT family member 2E
  Uniprot ID: B1AL46
  ENSP ID: ENSP00000407521
MEVKGPSGRSFCCESEGQFKSCLKRHTPSLLLPSSWKGNSGSCLMAEALHRTSPTPNSCPLPLPLCRMSGVLCSRNLFTFKFSLFQLDSGASGEPGHSLGLTLGFSYCGNCQTAVVSAQPEGMASNGAYPVLGPGVTANPGTSLSVFTALPFTTPAPGPAHGPLLVTAGAPPGGPLVLSTFPSTPLVTEQDGCSPSGAGASNVFVQMRTEVGPVKAAQAQTLVLTQAPLVWQAPGALCGGVVCPPPLLLAAAPVVPVMAAQVVGGTQACEGGWSQGLPLPPPPPPAAQLPPIVSQGNAGPWPQGAHGESSLASSQAKAPPDDSCNPRSVYENFRLWQHYKPLARRHLPQSPDTEALSCFLIPVLRSLARRKPTMTLEEGLWRAMREWQHTSNFDRMIFYEMAEKFLEFEAEEEMQIQKSQWMKGPQCLPPPATPRLEPRGPPAPEVVKQPVYLPSKAGPKAQTACLPPPRPQRPVTKARRPPPQPHRRAETKARLPPPRPQRPAETKVPEEIPPEVVQEYVDIMEELLGPSLGATGEPEKQREEGKVKQPQEEDWTPPDPGLLSYIDKLCSQKDFVTKVEAVIHPQFLEELLSPDPQMDFLALSQDLEQEEGLTLAQLVEKRLPPLKEKQHSRAAPSRGTARLDSSSSKFAAGQGAERDVPDPQEGVGMETCPPQTTARDSQGRGRAHTGMARSEDSVVLLGCQDSPGLRAARPTSPPQDHRPTCPGVGTKDALDLPGGSPVRESHGLAQGSSEEEELPSLAFLLGSQHKLLPWWLPQSPVPASGLLSPEKWGPQGTHQSPSAERRGLNLAPSPANKAKKQPLFGSLSPAEKTPHRGPGLRVSGEQSLTWGLGGPSQSQKRKGDPLVSRKEKKQHCSQ

SEQ ID NO: 59249 - protein, 658 aa, Homo sapiens
  Payload ID: 11564
  Gene Symbol: NUTM2E
  Gene Name: NUT family member 2E
  ENSP ID: ENSP00000473558
MEVKGPSGRSFCCESEGQFKSCLKRHTPSLLLPSSWKGNSGSCLMAEALHRTSPTPNSCPLPLPLCRMSGVLCSRNLFTFKFSLFQLDSGASGEPGHSLGLTLGFSYCGNCQTAVVSAQPEGMASNGAYPVLGPGVTANPGTSLSVFTALPFTTPAPGPAHGPLLVTAGAPPGGPLVLSTFPSTPLVTEQDGCSPSGAGASNVFVQMRTEVGPVKAAQAQTLVLTQAPLVWQAPGALCGGVVCPPPLLLAAAPVVPVMAAQVVGGTQACEGGWSQGLPLPPPPPPAAQLPPIVSQGNAGPWPQGAHGESSLASSQAKAPPDDSCNPRSVYENFRLWQHYKPLARRHLPQSPDTEALSCFLIPVLRSLARRKPTMTLEEGLWRAMREWQHTSNFDRMIFYEMAEKFLEFEAEEEMQIQKSQWMKGPQCLPPPATPRLEPRGPPAPEVVKQPVYLPSKAGPKAQTACLPPPRPQRPVTKARRPPPQPHRRAETKARLPPPRPQRPAETKVPEEIPPEVVQEYVDIMEELLGPSLGATGEPEKQREEGKVKQPQEEDWTPPDPGLLSYIDKLCSQKDFVTKVEAVIHPQFLEELLSPDPQMDFLALSQDLEQEEGLTLAQVPQGQEGPGTQGPPDCLIPPAGDARLLGEPLWSGKMQVQRE

SEQ ID NO: 59250 - protein, 756 aa, Homo sapiens
  Payload ID: 11565
  Gene Symbol: NUTM2F
  Gene Name: NUT family member 2F
  Uniprot ID: A1L443
  ENSP ID: ENSP00000253262
MASNGAYPVLGPGVTVNPGTSLSVFTALPFATPAPGPAHRPPLVTAVVPPAGPLVLSAFPSTPLVAGQDGRGPSGAGASNVFVQMRTEVGPVKPPQAQTLILTQAPLVWQAPGTLCGGVMCPPPLLLAAAPGVPVTSAQVVGGTQACEGGWSHGLPLPPPPPAAQVAPIVSPGNARPWPQGAHGEGSLAPSQAKARPDDSCKPKSVYENFRLWQHYKPLARRHLPQSPDTEALSCFLIPVLRSLARRKPTMTLEEGLWQAMREWQHTSNFDRMIFYEMAEKFLEFEAEEEMQIQKSQWMKGPQSLPPPAPPRLEPRGPPAPEVVKQPVYLPSKDGPKAPTACLPPPRPQRPAETKAHLPPPRPQRPAETNAHLPPPRPQRPAETKVPEEIPPEVVQEYVDIMEELLGSHPGDTGEPEGQREKGKVEQPQEEDGITSDPGLLSYIDKLCSQEDFVTKVEAVIHPRFLEELLSPDPQMDFLALSQELEQEEGLTLAQLVEKRLLSLKEKGCGRAAPRHGTARLDSSPSEFAAGQEAAREVPDPQQRVSVETSPPQTAAQDPQGQGRVRTGMARSEDPAVLLGCQDSPRLKAVRPTSPPQDHRPTCPGLGTKDALGLPGESPVKESHGLAKGSSEETELPGMVYVVGSHHRLRPWRLSQSPVPSSGLLSPGGRGPQGALQSPSAQKRGLSPSPSPASKSKKRPLFGSPSPAEKTPHPGPGLRVSGEQSLAWGLGGPSQSQKRKGDPLASRRKKKRHCSQ

SEQ ID NO: 59251 - protein, 741 aa, Homo sapiens
  Payload ID: 11565
  Gene Symbol: NUTM2F
  Gene Name: NUT family member 2F
  ENSP ID: ENSP00000343865
MASNGAYPVLGPGVTVNPGTSLSVFTALPFATPAPGPAHRPPLVTAVVPPAGPLVLSAFPSTPLVAGQDGRGPSGAGASNVFVQMRTEVGPVKPPQAQTLILTQAPLVWQAPGTLCGGVMCPPPLLLAAAPGVPVTSAQVVGGTQACEGGWSHGLPLPPPPPAAQVAPIVSPGNARPWPQGAHGEGSLAPSQAKARPDDSCKPKSVYENFRLWQHYKPLARRHLPQSPDTEALSCFLIPVLRSLARRKPTMTLEEGLWQAMREWQHTSNFDRMIFYEMAEKFLEFEAEEEMQIQKSQWMKGPQSLPPPAPPRLEPRGPPAPEVVKQPVYLPSKDGPKAPTACLPPPRPQRPAETKAHLPPPRPQRPAETKVPEEIPPEVVQEYVDIMEELLGSHPGDTGEPEGQREKGKVEQPQEEDGITSDPGLLSYIDKLCSQEDFVTKVEAVIHPRFLEELLSPDPQMDFLALSQELEQEEGLTLAQLVEKRLLSLKEKGCGRAAPRHGTARLDSSPSEFAAGQEAAREVPDPQQRVSVETSPPQTAAQDPQGQGRVRTGMARSEDPAVLLGCQDSPRLKAVRPTSPPQDHRPTCPGLGTKDALGLPGESPVKESHGLAKGSSEETELPGMVYVVGSHHRLRPWRLSQSPVPSSGLLSPGGRGPQGALQSPSAQKRGLSPSPSPASKSKKRPLFGSPSPAEKTPHPGPGLRVSGEQSLAWGLGGPSQSQKRKGDPLASRRKKKRHCSQ

SEQ ID NO: 59252 - protein, 492 aa, Homo sapiens
  Payload ID: 11566
  Gene Symbol: NUTM2G
  Gene Name: NUT family member 2G
  Uniprot ID: Q5VZR2
  ENSP ID: ENSP00000346670
MASNGAYPVLGPGVTVNPGTSLSVFTALPFATPSPGPTHRPPLVTAVVPPAGPLVLSAFPSTPLVAGQDGRGPSGAGASNVFVQMRTEVGPVKPPQAQTLILTQAPLVWQAPGTLCGGVMCPPPLLLAAAPGVPVTSAQVVGGTQACEGGWSHGLPLPPPPPAAQVAPIVSPGNAGPWPQGAHGEGSLAPSQAKARPDDSCKPKSVYENFRLWQHYKPLARRHLPQSPDTEALSCFLIPVLRSLARRKPTMTLEEGLWRAMREWQHTSNFDRMIFYEMAAKFLEFEAEEEMQIQKSQWMKGPQSLPPPAPPRLEPRGPPAPEVVKQPVYLPSKDGPKAPTACLPPPRPQRPAETKAHLPPPRPPRPAETKVPEEIPPEVVQEYVDIMEELLGSHPGDTGEPEGQREKGKVEQPQEEDGMTSDPGLLSYIDKLCSQEDFVTKVEAVIHPRFLEELLSPDPQMDFLALSQELEQEEGLTLAQGAPSDALGTDRC

SEQ ID NO: 59253 - protein, 741 aa, Homo sapiens
  Payload ID: 11566
  Gene Symbol: NUTM2G
  Gene Name: NUT family member 2G
  Uniprot ID: Q5VZR2
  ENSP ID: ENSP00000361397
MASNGAYPVLGPGVTVNPGTSLSVFTALPFATPSPGPTHRPPLVTAVVPPAGPLVLSAFPSTPLVAGQDGRGPSGAGASNVFVQMRTEVGPVKPPQAQTLILTQAPLVWQAPGTLCGGVMCPPPLLLAAAPGVPVTSAQVVGGTQACEGGWSHGLPLPPPPPAAQVAPIVSPGNAGPWPQGAHGEGSLAPSQAKARPDDSCKPKSVYENFRLWQHYKPLARRHLPQSPDTEALSCFLIPVLRSLARRKPTMTLEEGLWRAMREWQHTSNFDRMIFYEMAAKFLEFEAEEEMQIQKSQWMKGPQSLPPPAPPRLEPRGPPAPEVVKQPVYLPSKDGPKAPTACLPPPRPQRPAETKAHLPPPRPPRPAETKVPEEIPPEVVQEYVDIMEELLGSHPGDTGEPEGQREKGKVEQPQEEDGMTSDPGLLSYIDKLCSQEDFVTKVEAVIHPRFLEELLSPDPQMDFLALSQELEQEEGLTLAQLVEKRLLSLKEKGCGRAAPRHGTARLDSSPSEFAAGQEAAREVPDPQQRVSVETSPPQTAAQDPQGQGRVRTGMARSEDPAVLLGCQDSPRLKAVRPTSPPQDHRPTCPGLGTKDALGLPGESPVKESHGLAKGSSEETELPGMVYVVGSHHRLRPWRLSQSPVPSSGLLSPGGRGPQGALQSPSAQKRGLSPSPSPASKSKKRPLFGSPSPAEKTPHPGPGLRVSGEQSLAWGLGGPSQSQKRKGDPLASRRKKKRHCSQ

SEQ ID NO: 59254 - protein, 1132 aa, Homo sapiens
  Payload ID: 11567
  Gene Symbol: NUTM1
  Gene Name: NUT midline carcinoma, family member 1
  Uniprot ID: Q86Y26
  ENSP ID: ENSP00000329448
MASDGASALPGPDMSMKPSAAPSPSPALPFLPPTSDPPDHPPREPPPQPIMPSVFSPDNPLMLSAFPSSLLVTGDGGPCLSGAGAGKVIVKVKTEGGSAEPSQTQNFILTQTALNSTAPGTPCGGLEGPAPPFVTASNVKTILPSKAVGVSQEGPPGLPPQPPPPVAQLVPIVPLEKAWPGPHGTTGEGGPVATLSKPSLGDRSKISKDVYENFRQWQRYKALARRHLSQSPDTEALSCFLIPVLRSLARLKPTMTLEEGLPLAVQEWEHTSNFDRMIFYEMAERFMEFEAEEMQIQNTQLMNGSQGLSPATPLKLDPLGPLASEVCQQPVYIPKKAASKTRAPRRRQRKAQRPPAPEAPKEIPPEAVKEYVDIMEWLVGTHLATGESDGKQEEEGQQQEEEGMYPDPGLLSYINELCSQKVFVSKVEAVIHPQFLADLLSPEKQRDPLALIEELEQEEGLTLAQLVQKRLMALEEEEDAEAPPSFSGAQLDSSPSGSVEDEDGDGRLRPSPGLQGAGGAACLGKVSSSGKRAREVHGGQEQALDSPRGMHRDGNTLPSPSSWDLQPELAAPQGTPGPLGVERRGSGKVINQVSLHQDGHLGGAGPPGHCLVADRTSEALPLCWQGGFQPESTPSLDAGLAELAPLQGQGLEKQVLGLQKGQQTGGRGVLPQGKEPLAVPWEGSSGAMWGDDRGTPMAQSYDQNPSPRAAGERDDVCLSPGVWLSSEMDAVGLELPVQIEEVIESFQVEKCVTEYQEGCQGLGSRGNISLGPGETLVPGDTESSVIPCGGTVAAAALEKRNYCSLPGPLRANSPPLRSKENQEQSCETVGHPSDLWAEGCFPLLESGDSTLGSSKETLPPTCQGNLLIMGTEDASSLPEASQEAGSRGNSFSPLLETIEPVNILDVKDDCGLQLRVSEDTCPLNVHSYDPQGEGRVDPDLSKPKNLAPLQESQESYTTGTPKATSSHQGLGSTLPRRGTRNAIVPRETSVSKTHRSADRAKGKEKKKKEAEEEDEELSNFAYLLASKLSLSPREHPLSPHHASGGQGSQRASHLLPAGAKGPSKLPYPVAKSGKRALAGGPAPTEKTPHSGAQLGVPREKPLALGVVRPSQPRKRRCDSFVTGRRKKRRRSQ

SEQ ID NO: 59255 - protein, 1150 aa, Homo sapiens
  Payload ID: 11567
  Gene Symbol: NUTM1
  Gene Name: NUT midline carcinoma, family member 1
  Uniprot ID: Q86Y26
  ENSP ID: ENSP00000407031
MFQRSNQDLKLGPYRKFSALSYGASALPGPDMSMKPSAAPSPSPALPFLPPTSDPPDHPPREPPPQPIMPSVFSPDNPLMLSAFPSSLLVTGDGGPCLSGAGAGKVIVKVKTEGGSAEPSQTQNFILTQTALNSTAPGTPCGGLEGPAPPFVTASNVKTILPSKAVGVSQEGPPGLPPQPPPPVAQLVPIVPLEKAWPGPHGTTGEGGPVATLSKPSLGDRSKISKDVYENFRQWQRYKALARRHLSQSPDTEALSCFLIPVLRSLARLKPTMTLEEGLPLAVQEWEHTSNFDRMIFYEMAERFMEFEAEEMQIQNTQLMNGSQGLSPATPLKLDPLGPLASEVCQQPVYIPKKAASKTRAPRRRQRKAQRPPAPEAPKEIPPEAVKEYVDIMEWLVGTHLATGESDGKQEEEGQQQEEEGMYPDPGLLSYINELCSQKVFVSKVEAVIHPQFLADLLSPEKQRDPLALIEELEQEEGLTLAQLVQKRLMALEEEEDAEAPPSFSGAQLDSSPSGSVEDEDGDGRLRPSPGLQGAGGAACLGKVSSSGKRAREVHGGQEQALDSPRGMHRDGNTLPSPSSWDLQPELAAPQGTPGPLGVERRGSGKVINQVSLHQDGHLGGAGPPGHCLVADRTSEALPLCWQGGFQPESTPSLDAGLAELAPLQGQGLEKQVLGLQKGQQTGGRGVLPQGKEPLAVPWEGSSGAMWGDDRGTPMAQSYDQNPSPRAAGERDDVCLSPGVWLSSEMDAVGLELPVQIEEVIESFQVEKCVTEYQEGCQGLGSRGNISLGPGETLVPGDTESSVIPCGGTVAAAALEKRNYCSLPGPLRANSPPLRSKENQEQSCETVGHPSDLWAEGCFPLLESGDSTLGSSKETLPPTCQGNLLIMGTEDASSLPEASQEAGSRGNSFSPLLETIEPVNILDVKDDCGLQLRVSEDTCPLNVHSYDPQGEGRVDPDLSKPKNLAPLQESQESYTTGTPKATSSHQGLGSTLPRRGTRNAIVPRETSVSKTHRSADRAKGKEKKKKEAEEEDEELSNFAYLLASKLSLSPREHPLSPHHASGGQGSQRASHLLPAGAKGPSKLPYPVAKSGKRALAGGPAPTEKTPHSGAQLGVPREKPLALGVVRPSQPRKRRCDSFVTGRRKKRRRSQ

SEQ ID NO: 59256 - protein, 1160 aa, Homo sapiens
  Payload ID: 11567
  Gene Symbol: NUTM1
  Gene Name: NUT midline carcinoma, family member 1
  Uniprot ID: Q86Y26
  ENSP ID: ENSP00000444896
MVVTLGPGPDCLILEASRQPQLVPKPERMASDGASALPGPDMSMKPSAAPSPSPALPFLPPTSDPPDHPPREPPPQPIMPSVFSPDNPLMLSAFPSSLLVTGDGGPCLSGAGAGKVIVKVKTEGGSAEPSQTQNFILTQTALNSTAPGTPCGGLEGPAPPFVTASNVKTILPSKAVGVSQEGPPGLPPQPPPPVAQLVPIVPLEKAWPGPHGTTGEGGPVATLSKPSLGDRSKISKDVYENFRQWQRYKALARRHLSQSPDTEALSCFLIPVLRSLARLKPTMTLEEGLPLAVQEWEHTSNFDRMIFYEMAERFMEFEAEEMQIQNTQLMNGSQGLSPATPLKLDPLGPLASEVCQQPVYIPKKAASKTRAPRRRQRKAQRPPAPEAPKEIPPEAVKEYVDIMEWLVGTHLATGESDGKQEEEGQQQEEEGMYPDPGLLSYINELCSQKVFVSKVEAVIHPQFLADLLSPEKQRDPLALIEELEQEEGLTLAQLVQKRLMALEEEEDAEAPPSFSGAQLDSSPSGSVEDEDGDGRLRPSPGLQGAGGAACLGKVSSSGKRAREVHGGQEQALDSPRGMHRDGNTLPSPSSWDLQPELAAPQGTPGPLGVERRGSGKVINQVSLHQDGHLGGAGPPGHCLVADRTSEALPLCWQGGFQPESTPSLDAGLAELAPLQGQGLEKQVLGLQKGQQTGGRGVLPQGKEPLAVPWEGSSGAMWGDDRGTPMAQSYDQNPSPRAAGERDDVCLSPGVWLSSEMDAVGLELPVQIEEVIESFQVEKCVTEYQEGCQGLGSRGNISLGPGETLVPGDTESSVIPCGGTVAAAALEKRNYCSLPGPLRANSPPLRSKENQEQSCETVGHPSDLWAEGCFPLLESGDSTLGSSKETLPPTCQGNLLIMGTEDASSLPEASQEAGSRGNSFSPLLETIEPVNILDVKDDCGLQLRVSEDTCPLNVHSYDPQGEGRVDPDLSKPKNLAPLQESQESYTTGTPKATSSHQGLGSTLPRRGTRNAIVPRETSVSKTHRSADRAKGKEKKKKEAEEEDEELSNFAYLLASKLSLSPREHPLSPHHASGGQGSQRASHLLPAGAKGPSKLPYPVAKSGKRALAGGPAPTEKTPHSGAQLGVPREKPLALGVVRPSQPRKRRCDSFVTGRRKKRRRSQ

SEQ ID NO: 59257 - protein, 1132 aa, Homo sapiens; identical to SEQ ID NO: 59254
  Payload ID: 11567
  Gene Symbol: NUTM1
  Gene Name: NUT midline carcinoma, family member 1
  Uniprot ID: Q86Y26
  ENSP ID: ENSP00000478903

SEQ ID NO: 59258 - protein, 481 aa, Homo sapiens
  Payload ID: 11568
  Gene Symbol: NYX
  Gene Name: nyctalopin
  Uniprot ID: Q9GZU5
  ENSP ID: ENSP00000340328
MKGRGMLVLLLHAVVLGLPSAWAVGACARACPAACACSTVERGCSVRCDRAGLLRVPAELPCEAVSIDLDRNGLRFLGERAFGTLPSLRRLSLRHNNLSFITPGAFKGLPRLAELRLAHNGDLRYLHARTFAALSRLRRLDLAACRLFSVPERLLAELPALRELAAFDNLFRRVPGALRGLANLTHAHLERGRIEAVASSSLQGLRRLRSLSLQANRVRAVHAGAFGDCGVLEHLLLNDNLLAELPADAFRGLRRLRTLNLGGNALDRVARAWFADLAELELLYLDRNSIAFVEEGAFQNLSGLLALHLNGNRLTVLAWVAFQPGFFLGRLFLFRNPWCCDCRLEWLRDWMEGSGRVTDVPCASPGSVAGLDLSQVTFGRSSDGLCVDPEELNLTTSSPGPSPEPAATTVSRFSSLLSKLLAPRVPVEEAANTTGGLANASLSDSLSSRGVGGAGRQPWFLLASCLLPSVAQHVVFGLQMD

SEQ ID NO: 59259 - protein, 481 aa, Homo sapiens; identical to SEQ ID NO: 59258
  Payload ID: 11568
  Gene Symbol: NYX
  Gene Name: nyctalopin
  Uniprot ID: Q9GZU5
  ENSP ID: ENSP00000367465

SEQ ID NO: 59260 - protein, 1898 aa, Homo sapiens
  Payload ID: 11569
  Gene Symbol: NYNRIN
  Gene Name: NYN domain and retroviral integrase containing
  Uniprot ID: Q9P2P1
  ENSP ID: ENSP00000371994
MLLSGGDPPAQEWFMVQTKSKPRVQRQRLQVQRIFRVKLNAFQSRPDTPYFWLQLEGPRENMGKAKEYLKGLCSPELWKEVRYPPILHCAFLGAQGLFLDCLCWSTLAYLVPGPPGSLMVGGLTESFIMTQNWLEELVGRLRWGPAPLLTPRGIWEAEVTRAFGALVWIRGDQHAGDLLQLPPAVQELLLSLVRDAAGKEDIIEWLSRFGISDSHSDPEVLICPPQQQKEAPAMVSVGESPGPFVDMGTLQNRGPENSKRLSSLGATGSLITAQSTPQEAANQLVRVGSNNQDGMDSAQEEGTVQATSSQDSTNHTQALLKQRQVQKIEDKLLFQPPVSALGVCPPWKAWTPGPAFGPLWPGAIAATFWRINELHSLHLAWLLSQACFNFPFWQRPLGPIQLKLPGQNPLPLNLEWKQKELAPLPSAESPAGRPDGGLGGEAALQNCPRPEISPKVTSLLVVPGSSDVKDKVSSDLPQIGPPLTSTPQLQAGGEPGDQGSMQLDFKGLEEGPAPVLPTGQGKPVAQGGLTDQSVPGAQTVPETLKVPMAAAVPKAENPSRTQVPSAAPKLPTSRMMLAVHTEPAAPEVPLAPTKPTAQLMATAQKTVVNQPVLVAQVEPTTPKTPQAQKMPVAKTSPAGPKTPKAQAGPAATVSKAPAASKAPAAPKVPVTPRVSRAPKTPAAQKVPTDAGPTLDVARLLSEVQPTSRASVSLLKGQGQAGRQGPQSSGTLALSSKHQFQMEGLLGAWEGAPRQPPRHLQANSTVTSFQRYHEALNTPFELNLSGEPGNQGLRRVVIDGSSVAMVHGLQHFFSCRGIAMAVQFFWNRGHREVTVFVPTWQLKKNRRVRESHFLTKLHSLKMLSITPSQLENGKKITTYDYRFMVKLAEETDGIIVTNEQIHILMNSSKKLMVKDRLLPFTFAGNLFMVPDDPLGRDGPTLDEFLKKPNRLDTDIGNFLKVWKTLPPSSASVTELSDDADSGPLESLPNMEEVREEKEERQDEEQRQGQGTQKAAEEDDLDSSLASVFRVECPSLSEEILRCLSLHDPPDGALDIDLLPGAASPYLGIPWDGKAPCQQVLAHLAQLTIPSNFTALSFFMGFMDSHRDAIPDYEALVGPLHSLLKQKPDWQWDQEHEEAFLALKRALVSALCLMAPNSQLPFRLEVTVSHVALTAILHQEHSGRKHPIAYTSKPLLPDEESQGPQSGGDSPYAVAWALKHFSRCIGDTPVVLDLSYASRTTADPEVREGRRVSKAWLIRWSLLVQDKGKRALELALLQGLLGENRLLTPAASMPRFFQVLPPFSDLSTFVCIHMSGYCFYREDEWCAGFGLYVLSPTSPPVSLSFSCSPYTPTYAHLAAVACGLERFGQSPLPVVFLTHCNWIFSLLWELLPLWRARGFLSSDGAPLPHPSLLSYIISLTSGLSSLPFIYRTSYRGSLFAVTVDTLAKQGAQGGGQWWSLPKDVPAPTVSPHAMGKRPNLLALQLSDSTLADIIARLQAGQKLSGSSPFSSAFNSLSLDKESGLLMFKGDKKPRVWVVPTQLRRDLIFSVHDIPLGAHQRPEETYKKLRLLGWWPGMQEHVKDYCRSCLFCIPRNLIGSELKVIESPWPLRSTAPWSNLQIEVVGPVTISEEGHKHVLIVADPNTRWVEAFPLKPYTHTAVAQVLLQHVFARWGVPVRLEAAQGPQFARHVLVSCGLALGAQVASLSRDLQFPCLTSSGAYWEFKRALKEFIFLHGKKWAASLPLLHLAFRASSTDATPFKVLTGGESRLTEPLWWEMSSANIEGLKMDVFLLQLVGELLELHWRVADKASEKAENRRFKRESQEKEWNVGDQVLLLSLPRNGSSAKWVGPFYIGDRLSLSLYRIWGFPTPEKLGCIYPSSLMKAFAKSGTPLSFKVLEQ

SEQ ID NO: 59261 - protein, 238 aa, Homo sapiens
  Payload ID: 11570
  Gene Symbol: MGMT
  Gene Name: O-6-methylguanine-DNA methyltransferase
  Uniprot ID: P16455
  ENSP ID: ENSP00000302111
MLGQPAPLERFASRRPQVLAVRTVCDLVLGKMDKDCEMKRTTLDSPLGKLELSGCEQGLHEIKLLGKGTSAADAVEVPAPAAVLGGPEPLMQCTAWLNAYFHQPEAIEEFPVPALHHPVFQQESFTRQVLWKLLKVVKFGEVISYQQLAALAGNPKAARAVGGAMRGNPVPILIPCHRVVCSSGAVGNYSGGLAVKEWLLAHEGHRLGKPGLGGSSGLAGAWLKGAGATSGSPPAGRN

SEQ ID NO: 59262 - protein, 86 aa, Homo sapiens
  Payload ID: 11571
  Gene Symbol: OARD1
  Gene Name: O-acyl-ADP-ribose deacylase 1
  ENSP ID: ENSP00000362247
MASSLNEDPEGSRITYVKGDLFACPKTDSLAHCISEDCRMGAGIAVLFKKKFGGVQELLNQQKKSGEVAVLKRDGRYIYYLDWMWS

SEQ ID NO: 59263 - protein, 152 aa, Homo sapiens
  Payload ID: 11571
  Gene Symbol: OARD1
  Gene Name: O-acyl-ADP-ribose deacylase 1
  Uniprot ID: Q9Y530
  ENSP ID: ENSP00000416829
MASSLNEDPEGSRITYVKGDLFACPKTDSLAHCISEDCRMGAGIAVLFKKKFGGVQELLNQQKKSGEVAVLKRDGRYIYYLITKKRASHKPTYENLQKSLEAMKSHCLKNGVTDLSMPRIGCGLDRLQWENVSAMIEEVFEATDIKITVYTL

SEQ ID NO: 59264 - protein, 88 aa, Homo sapiens
  Payload ID: 11571
  Gene Symbol: OARD1
  Gene Name: O-acyl-ADP-ribose deacylase 1
  ENSP ID: ENSP00000417333
MASSLNEDPEGSRITYVKGDLFACPKTDSLAHCISEDCRMGAGIAVLFKKKFGGVQELLNQREFWKPLTWFALARAPFNLLHFNKICV

SEQ ID NO: 59265 - protein, 77 aa, Homo sapiens
  Payload ID: 11571
  Gene Symbol: OARD1
  Gene Name: O-acyl-ADP-ribose deacylase 1
  ENSP ID: ENSP00000418098
MASSLNEDPEGSRITYVKGDLFACPKTDSLAHCISEDCRMGAGIAVLFKKKFGGVQELLNQRLDVVLIVCNGKMYLR

SEQ ID NO: 59266 - protein, 86 aa, Homo sapiens; identical to SEQ ID NO: 59262
  Payload ID: 11571
  Gene Symbol: OARD1
  Gene Name: O-acyl-ADP-ribose deacylase 1
  ENSP ID: ENSP00000418400

SEQ ID NO: 59267 - protein, 88 aa, Homo sapiens; identical to SEQ ID NO: 59264
  Payload ID: 11571
  Gene Symbol: OARD1
  Gene Name: O-acyl-ADP-ribose deacylase 1
  ENSP ID: ENSP00000418966

SEQ ID NO: 59268 - protein, 113 aa, Homo sapiens
  Payload ID: 11571
  Gene Symbol: OARD1
  Gene Name: O-acyl-ADP-ribose deacylase 1
  ENSP ID: ENSP00000419175
MGAGIAVLFKKKFGGVQELLNQQKKSGEVAVLKRDGRYIYYLITKKRASHKPTYENLQKSLEAMKSHCLKNGVTDLSMPRIGCGLDRLQWENVSAMIEEVFEATDIKITVYTL

SEQ ID NO: 59269 - protein, 77 aa, Homo sapiens; identical to SEQ ID NO: 59265
  Payload ID: 11571
  Gene Symbol: OARD1
  Gene Name: O-acyl-ADP-ribose deacylase 1
  ENSP ID: ENSP00000419875

SEQ ID NO: 59270 - protein, 152 aa, Homo sapiens; identical to SEQ ID NO: 59263
  Payload ID: 11571
  Gene Symbol: OARD1
  Gene Name: O-acyl-ADP-ribose deacylase 1
  Uniprot ID: Q9Y530
  ENSP ID: ENSP00000420193

SEQ ID NO: 59271 - protein, 131 aa, Homo sapiens
  Payload ID: 11571
  Gene Symbol: OARD1
  Gene Name: O-acyl-ADP-ribose deacylase 1
  ENSP ID: ENSP00000420414
MASSLNEDPEGSRITYVKGDLFACPKTDSLAHCISEDCRMGAGIAVLFKKKFGGVQELLNQQKKSGEVAVLKRDGRYIYYLITKKRASHKPTYENLQKSLEAMKSHCLKNGVTDLSMPRIGCGLDRLQWEN

SEQ ID NO: 59272 - protein, 77 aa, Homo sapiens
  Payload ID: 11571
  Gene Symbol: OARD1
  Gene Name: O-acyl-ADP-ribose deacylase 1
  ENSP ID: ENSP00000420472
  MOD_RES (1)..(1): Any amino acid
XISEDCRMGAGIAVLFKKKFGGVQELLNQQKKSGEVAVLKRDGRYIYYLVLFQVLGIWQKNKANENPCCDDLWSLRN

SEQ ID NO: 59273 - protein, 152 aa, Homo sapiens; identical to SEQ ID NO: 59263
  Payload ID: 11571
  Gene Symbol: OARD1
  Gene Name: O-acyl-ADP-ribose deacylase 1
  Uniprot ID: Q9Y530
  ENSP ID: ENSP00000420484

SEQ ID NO: 59274 - protein, 152 aa, Homo sapiens; identical to SEQ ID NO: 59263
  Payload ID: 11571
  Gene Symbol: OARD1
  Gene Name: O-acyl-ADP-ribose deacylase 1
  Uniprot ID: Q9Y530
  ENSP ID: ENSP00000420601

SEQ ID NO: 59275 - protein, 86 aa, Homo sapiens; identical to SEQ ID NO: 59262
  Payload ID: 11571
  Gene Symbol: OARD1
  Gene Name: O-acyl-ADP-ribose deacylase 1
  ENSP ID: ENSP00000487484

SEQ ID NO: 59276 - protein, 396 aa, Homo sapiens
  Payload ID: 11572
  Gene Symbol: OLA1
  Gene Name: Obg-like ATPase 1
  Uniprot ID: Q9NTK5
  ENSP ID: ENSP00000284719
MPPKKGGDGIKPPPIIGRFGTSLKIGIVGLPNVGKSTFFNVLTNSQASAENFPFCTIDPNESRVPVPDERFDFLCQYHKPASKIPAFLNVVDIAGLVKGAHNGQGLGNAFLSHISACDGIFHLTRAFEDDDITHVEGSVDPIRDIEIIHEELQLKDEEMIGPIIDKLEKVAVRGGDKKLKPEYDIMCKVKSWVIDQKKPVRFYHDWNDKEIEVLNKHLFLTSKPMVYLVNLSEKDYIRKKNKWLIKIKEWVDKYDPGALVIPFSGALELKLQELSAEERQKYLEANMTQSALPKIIKAGFAALQLEYFFTAGPDEVRAWTIRKGTKAPQAAGKIHTDFEKGFIMAEVMKYEDFKEEGSENAVKAAGKYRQQGRNYIVEDGDIIFFKFNTPQQPKKK

SEQ ID NO: 59277 - protein, 238 aa, Homo sapiens
  Payload ID: 11572
  Gene Symbol: OLA1
  Gene Name: Obg-like ATPase 1
  Uniprot ID: Q9NTK5
  ENSP ID: ENSP00000340167
MIGPIIDKLEKVAVRGGDKKLKPEYDIMCKVKSWVIDQKKPVRFYHDWNDKEIEVLNKHLFLTSKPMVYLVNLSEKDYIRKKNKWLIKIKEWVDKYDPGALVIPFSGALELKLQELSAEERQKYLEANMTQSALPKIIKAGFAALQLEYFFTAGPDEVRAWTIRKGTKAPQAAGKIHTDFEKGFIMAEVMKYEDFKEEGSENAVKAAGKYRQQGRNYIVEDGDIIFFKFNTPQQPKKK

SEQ ID NO: 59278 - protein, 416 aa, Homo sapiens
  Payload ID: 11572
  Gene Symbol: OLA1
  Gene Name: Obg-like ATPase 1
  ENSP ID: ENSP00000386350
MSRTFSAKGGRDLVEGPQYLMPPKKGGDGIKPPPIIGRFGTSLKIGIVGLPNVGKSTFFNVLTNSQASAENFPFCTIDPNESRVPVPDERFDFLCQYHKPASKIPAFLNVVDIAGLVKGAHNGQGLGNAFLSHISACDGIFHLTRAFEDDDITHVEGSVDPIRDIEIIHEELQLKDEEMIGPIIDKLEKVAVRGGDKKLKPEYDIMCKVKSWVIDQKKPVRFYHDWNDKEIEVLNKHLFLTSKPMVYLVNLSEKDYIRKKNKWLIKIKEWVDKYDPGALVIPFSGALELKLQELSAEERQKYLEANMTQSALPKIIKAGFAALQLEYFFTAGPDEVRAWTIRKGTKAPQAAGKIHTDFEKGFIMAEVMKYEDFKEEGSENAVKAAGKYRQQGRNYIVEDGDIIFFKFNTPQQPKKK

SEQ ID NO: 59279 - protein, 103 aa, Homo sapiens
  Payload ID: 11572
  Gene Symbol: OLA1
  Gene Name: Obg-like ATPase 1
  ENSP ID: ENSP00000404864
MIGPIIDKLEKVAVRGGDKKLKPEYDIMCKVKSWVIDQKKPVRFYHDWNDKEIEVLNKHLFLTSKPMVYLVNLSEKDYIRKKNKWLIKIKEWVDKYDPGALVI

SEQ ID NO: 59280 - protein, 278 aa, Homo sapiens
  Payload ID: 11572
  Gene Symbol: OLA1
  Gene Name: Obg-like ATPase 1
  Uniprot ID: Q9NTK5
  ENSP ID: ENSP00000410385
MPPKKGGDGIKPPPIIGRFGTSLKIGIVGLPNVGKSTFFNVLTNSQASAENFPFCTIDPNESRVPVPDERFDFLCQYHKPASKIPAFLNVVDIAGLVKGAHNGQGLGNAFLSHISACDGIFHLTRAFEDDDITHVEGSVDPIRDIEIIHEELQLKDEEMIGPIIDKLEKVAVRGGDKKLKPEYDIMCKVKSWVIDQKKPVRFYHDWNDKEIEVLNKHLFLTSKPMVYLVNLSEKDYIRKKNKWLLESTDNKAEIILLKMEILSSSNLTHLNNRRRNKI

SEQ ID NO: 59281 - protein, 116 aa, Homo sapiens
  Payload ID: 11572
  Gene Symbol: OLA1
  Gene Name: Obg-like ATPase 1
  ENSP ID: ENSP00000414568
MPPKKGGDGIKPPPIIGRFGTSLKIGIVGLPNVGKSTFFNVLTNSQASAENFPFCTIDPNESRVPVPDERFDFLCQYHKPASKIPAFLNVVDIAGLVKGAHNGQGLGNAFLSHISA

SEQ ID NO: 59282 - protein, 6620 aa, Homo sapiens
  Payload ID: 11573
  Gene Symbol: OBSCN
  Gene Name: obscurin, cytoskeletal calmodulin and titin-interacting RhoGEF
  Uniprot ID: Q5VST9
  ENSP ID: ENSP00000284548
MDQPQFSGAPRFLTRPKAFVVSVGKDATLSCQIVGNPTPQVSWEKDQQPVAAGARFRLAQDGDLYRLTILDLALGDSGQYVCRARNAIGEAFAAVGLQVDAEAACAEQAPHFLLRPTSIRVREGSEATFRCRVGGSPRPAVSWSKDGRRLGEPDGPRVRVEELGEASALRIRAARPRDGGTYEVRAENPLGAASAAAALVVDSDAADTASRPGTSTAALLAHLQRRREAMRAEGAPASPPSTGTRTCTVTEGKHARLSCYVTGEPKPETVWKKDGQLVTEGRRHVVYEDAQENFVLKILFCKQSDRGLYTCTASNLVGQTYSSVLVVVREPAVPFKKRLQDLEVREKESATFLCEVPQPSTEAAWFKEETRLWASAKYGIEEEGTERRLTVRNVSADDDAVYICETPEGSRTVAELAVQGNLLRKLPRKTAVRVGDTAMFCVELAVPVGPVHWLRNQEEVVAGGRVAISAEGTRHTLTISQCCLEDVGQVAFMAGDCQTSTQFCVSAPRKPPLQPPVDPVVKARMESSVILSWSPPPHGERPVTIDGYLVEKKKLGTYTWIRCHEAEWVATPELTVADVAEEGNFQFRVSALNSFGQSPYLEFPGTVHLAPKLAVRTPLKAVQAVEGGEVTFSVDLTVASAGEWFLDGQALKASSVYEIHCDRTRHTLTIREVPASLHGAQLKFVANGIESSIRMEVRAAPGLTANKPPAAAAREVLARLHEEAQLLAELSDQAAAVTWLKDGRTLSPGPKYEVQASAGRRVLLVRDVARDDAGLYECVSRGGRIAYQLSVQGLARFLHKDMAGSCVDAVAGGPAQFECETSEAHVHVHWYKDGMELGHSGERFLQEDVGTRHRLVAATVTRQDEGTYSCRVGEDSVDFRLRVSEPKVVFAKEQLARRKLQAEAGASATLSCEVAQAQTEVTWYKDGKKLSSSSKVCMEATGCTRRLVVQQAGQADAGEYSCEAGGQRLSFHLDVKEPKVVFAKDQVAHSEVQAEAGASATLSCEVAQAQTEVMWYKDGKKLSSSLKVHVEAKGCRRRLVVQQAGKTDAGDYSCEARGQRVSFRLHITEPKMMFAKEQSVHNEVQAEAGASAMLSCEVAQAQTEVTWYKDGKKLSSSSKVGMEVKGCTRRLVLPQAGKADAGEYSCEAGGQRVSFHLHITEPKGVFAKEQSVHNEVQAEAGTTAMLSCEVAQPQTEVTWYKDGKKLSSSSKVRMEVKGCTRRLVVQQVGKADAGEYSCEAGGQRVSFQLHITEPKAVFAKEQLVHNEVRTEAGASATLSCEVAQAQTEVTWYKDGKKLSSSSKVRIEAAGCMRQLVVQQAGQADAGEYTCEAGGQRLSFHLDVSEPKAVFAKEQLAHRKVQAEAGAIATLSCEVAQAQTEVTWYKDGKKLSSSSKVRMEAVGCTRRLVVQQACQADTGEYSCEAGGQRLSFSLDVAEPKVVFAKEQPVHREVQAQAGASTTLSCEVAQAQTEVMWYKDGKKLSFSSKVRMEAVGCTRRLVVQQAGQAVAGEYSCEAGSQRLSFHLHVAEPKAVFAKEQPASREVQAEAGTSATLSCEVAQAQTEVTWYKDGKKLSSSSKVRMEAVGCTRRLVVQEAGQADAGEYSCKAGDQRLSFHLHVAEPKVVFAKEQPAHREVQAEAGASATLSCEVAQAQTEVTWYKDGKKLSSSSKVRVEAVGCTRRLVVQQAGQAEAGEYSCEAGGQQLSFRLQVAELEPQISERPCRREPLVVKEHEDIILTATLATPSAATVTWLKDGVEIRRSKRHETASQGDTHTLTVHGAQVLDSAIYSCRVGAEGQDFPVQVEEVAAKFCRLLEPVCGELGGTVTLACELSPACAEVVWRCGNTQLRVGKRFQMVAEGPVRSLTVLGLRAEDAGEYVCESRDDHTSAQLTVSVPRVVKFMSGLSTVVAEEGGEATFQCVVSPSDVAVVWFRDGALLQPSEKFAISQSGASHSLTISDLVLEDAGQITVEAEGASSSAALRVREAPVLFKKKLEPQTVEERSSVTLEVELTRPWPELRWTRNATALAPGKNVEIHAEGARHRLVLHNVGFADRGFFGCETPDDKTQAKLTVEMRQVRLVRGLQAVEAREQGTATMEVQLSHADVDGSWTRDGLRFQQGPTCHLAVRGPMHTLTLSGLRPEDSGLMVFKAEGVHTSARLVVTELPVSFSRPLQDVVTTEKEKVTLECELSRPNVDVRWLKDGVELRAGKTMAIAAQGACRSLTIYRCEFADQGVYVCDAHDAQSSASVKVQGRTYTLIYRRVLAEDAGEIQFVAENAESRAQLRVKELPVTLVRPLRDKIAMEKHRGVLECQVSRASAQVRWFKGSQELQPGPKYELVSDGLYRKLIISDVHAEDEDTYTCDAGDVKTSAQFFVEEQSITIVRGLQDVTVMEPAPAWFECETSIPSVRPPKWLLGKTVLQAGGNVGLEQEGTVHRLMLRRTCSTMTGPVHFTVGKSRSSARLVVSDIPVVLTRPLEPKTGRELQSVVLSCDFRPAPKAVQWYKDDTPLSPSEKFKMSLEGQMAELRILRLMPADAGVYRCQAGSAHSSTEVTVEAREVTVTGPLQDAEATEEGWASFSCELSHEDEEVEWSLNGMPLYNDSFHEISHKGRRHTLVLKSIQRADAGIVRASSLKVSTSARLEVRVKPVVFLKALDDLSAEERGTLALQCEVSDPEAHVVWRKDGVQLGPSDKYDFLHTAGTRGLVVHDVSPEDAGLYTCHVGSEETRARVRVHDLHVGITKRLKTMEVLEGESCSFECVLSHESASDPAMWTVGGKTVGSSSRFQATRQGRKYILVVREAAPSDAGEVVFSVRGLTSKASLIVRERPAAIIKPLEDQWVAPGEDVELRCELSRAGTPVHWLKDRKAIRKSQKYDVVCEGTMAMLVIRGASLKDAGEYTCEVEASKSTASLHVEEKANCFTEELTNLQVEEKGTAVFTCKTEHPAATVTWRKGLLELRASGKHQPSQEGLTLRLTISALEKADSDTYTCDIGQAQSRAQLLVQGRRVHIIEDLEDVDVQEGSSATFRCRISPANYEPVHWFLDKTPLHANELNEIDAQPGGYHVLTLRQLALKDSGTIYFEAGDQRASAALRVTEKPSVFSRELTDATITEGEDLTLVCETSTCDIPVCWTKDGKTLRGSARCQLSHEGHRAQLLITGATLQDSGRYKCEAGGACSSSIVRVHARPVRFQEALKDLEVLEGGAATLRCVLSSVAAPVKWCYGNNVLRPGDKYSLRQEGAMLELVVRNLRPQDSGRYSCSFGDQTTSATLTVTALPAQFIGKLRNKEATEGATATLRCELSKAAPVEWRKGSETLRDGDRYCLRQDGAMCELQIRGLAMVDAAEYSCVCGEERTSASLTIRPMPAHFIGRLRHQESIEGATATLRCELSKAAPVEWRKGRESLRDGDRHSLRQDGAVCELQICGLAVADAGEYSCVCGEERTSATLTVKALPAKFTEGLRNEEAVEGATAMLWCELSKVAPVEWRKGPENLRDGDRYILRQEGTRCELQICGLAMADAGEYLCVCGQERTSATLTIRALPARFIEDVKNQEAREGATAVLQCELNSAAPVEWRKGSETLRDGDRYSLRQDGTKCELQIRGLAMADTGEYSCVCGQERTSAMLTVRALPIKFTEGLRNEEATEGATAVLRCELSKMAPVEWWKGHETLRDGDRHSLRQDGARCELQIRGLVAEDAGEYLCMCGKERTSAMLTVRAMPSKFIEGLRNEEATEGDTATLWCELSKAAPVEWRKGHETLRDGDRHSLRQDGSRCELQIRGLAVVDAGEYSCVCGQERTSATLTVRALPARFIEDVKNQEAREGATAVLQCELSKAAPVEWRKGSETLRGGDRYSLRQDGTRCELQIHGLSVADTGEYSCVCGQERTSATLTVRAPQPVFREPLQSLQAEEGSTATLQCELSEPTATVVWSKGGLQLQANGRREPRLQGCTAELVLQDLQREDTGEYTCTCGSQATSATLTVTAAPVRFLRELQHQEVDEGGTAHLCCELSRAGASVEWRKGSLQLFPCAKYQMVQDGAAAELLVRGVEQEDAGDYTCDTGHTQSMASLSVRVPRPKFKTRLQSLEQETGDIARLCCQLSDAESGAVVQWLKEGVELHAGPKYEMRSQGATRELLIHQLEAKDTGEYACVTGGQKTAASLRVTEPEVTIVRGLVDAEVTADEDVEFSCEVSRAGATGVQWCLQGLPLQSNEVTEVAVRDGRIHTLRLKGVTPEDAGTVSFHLGNHASSAQLTVRAPEVTILEPLQDVQLSEGQDASFQCRLSRASGQEARWALGGVPLQANEMNDITVEQGTLHLLTLHKVTLEDAGTVSFHVGTCSSEAQLKVTAKNTVVRGLENVEALEGGEALFECQLSQPEVAAHTWLLDDEPVHTSENAEVVFFENGLRHLLLLKNLRPQDSCRVTFLAGDMVTSAFLTVRGWRLEILEPLKNAAVRAGAQACFTCTLSEAVPVGEASWYINGAAVQPDDSDWTVTADGSHHALLLRSAQPHHAGEVTFACRDAVASARLTVLGLPDPPEDAEVVARSSHTVTLSWAAPMSDGGGGLCGYRVEVKEGATGQWRLCHELVPGPECVVDGLAPGETYRFRVAAVGPVGAGEPVHLPQTVRLAEPPKPVPPQPSAPESRQVAAGEDVSLELEVVAEAGEVIWHKGMERIQPGGRFEVVSQGRQQMLVIKGFTAEDQGEYHCGLAQGSICPAAATFQVALSPASVDEAPQPSLPPEAAQEGDLHLLWEALARKRRMSREPTLDSISELPEEDGRSQRLPQEAEEVAPDLSEGYSTADELARTGDADLSHTSSDDESRAGTPSLVTYLKKAGRPGTSPLASKVGAPAAPSVKPQQQQEPLAAVRPPLGDLSTKDLGDPSMDKAAVKIQAAFKGYKVRKEMKQQEGPMFSHTFGDTEAQVGDALRLECVVASKADVRARWLKDGVELTDGRHHHIDQLGDGTCSLLITGLDRADAGCYTCQVSNKFGQVTHSACVVVSGSESEAESSSGGELDDAFRRAARRLHRLFRTKSPAEVSDEELFLSADEGPAEPEEPADWQTYREDEHFICIRFEALTEARQAVTRFQEMFATLGIGVEIKLVEQGPRRVEMCISKETPAPVVPPEPLPSLLTSDAAPVFLTELQNQEVQDGYPVSFDCVVTGQPMPSVRWFKDGKLLEEDDHYMINEDQQGGHQLIITAVVPADMGVYRCLAENSMGVSSTKAELRVDLTSTDYDTAADATESSSYFSAQGYLSSREQEGTESTTDEGQLPQVVEELRDLQVAPGTRLAKFQLKVKGYPAPRLYWFKDGQPLTASAHIRMTDKKILHTLEIISVTREDSGQYAAYISNAMGAAYSSARLLVRGPDEPEEKPASDVHEQLVPPRMLERFTPKKVKKGSSITFSVKVEGRPVPTVHWLREEAERGVLWIGPDTPGYTVASSAQQHSLVLLDVGRQHQGTYTCIASNAAGQALCSASLHVSGLPKVEEQEKVKEALISTFLQGTTQAISAQGLETASFADLGGQRKEEPLAAKEALGHLSLAEVGTEEFLQKLTSQITEMVSAKITQAKLQVPGGDSDEDSKTPSASPRHGRSRPSSSIQESSSESEDGDARGEIFDIYVVTADYLPLGAEQDAITLREGQYVEVLDAAHPLRWLVRTKPTKSSPSRQGWVSPAYLDRRLKLSPEWGAAEAPEFPGEAVSEDEYKARLSSVIQELLSSEQAFVEELQFLQSHHLQHLERCPHVPIAVAGQKAVIFRNVRDIGRFHSSFLQELQQCDTDDDVAMCFIKNQAAFEQYLEFLVGRVQAESVVVSTAIQEFYKKYAEEALLAGDPSQPPPPPLQHYLEQPVERVQRYQALLKELIRNKARNRQNCALLEQAYAVVSALPQRAENKLHVSLMENYPGTLQALGEPIRQGHFIVWEGAPGARMPWKGHNRHVFLFRNHLVICKPRRDSRTDTVSYVFRNMMKLSSIDLNDQVEGDDRAFEVWQEREDSVRKYLLQARTAIIKSSWVKEICGIQQRLALPVWRPPDFEEELADCTAELGETVKLACRVTGTPKPVISWYKDGKAVQVDPHHILIEDPDGSCALILDSLTGVDSGQYMCFAASAAGNCSTLGKILVQVPPRFVNKVRASPFVEGEDAQFTCTIEGAPYPQIRWYKDGALLTTGNKFQTLSEPRSGLLVLVIRAASKEDLGLYECELVNRLGSARASAELRIQSPMLQAQEQCHREQLVAAVEVTEQETKVPKKTVIIEETITTVVKSPRGQRRSPSKSPSRSPSRCSASPLRPGLLAPDLLYLPGAGQPRRPEAEPGQKPVVPTLYVTEAEAHSPALPGLSGPQPKWVEVEETIEVRVKKMGPQGVSPTTEVPRSSSGHLFTLPGATPGGDPNSNNSNNKLLAQEAWAQGTAMVGVREPLVFRVDARGSVDWAASGMGSLEEEGTMEEAGEEEGEDGDAFVTEESQDTHSLGDRDPKILTHNGRMLTLADLEDYVPGEGETFHCGGPGPGAPDDPPCEVSVIQREIGEPTVGQPVLLSVGHALGPRGPLGLFRPEPRGASPPGPQVRSLEGTSFLLREAPARPVGSAPWTQSFCTRIRRSADSGQSSFTTELSTQTVNFGTVGETVTLHICPDRDGDEAAQP

SEQ ID NO: 59283 - protein, 858 aa, Homo sapiens
  Payload ID: 11573
  Gene Symbol: OBSCN
  Gene Name: obscurin, cytoskeletal calmodulin and titin-interacting RhoGEF
  ENSP ID: ENSP00000355667
AGKTMAIAAQGACRSLTIYRCEFADQGVYVCDAHDAQSSASVKVQGRNIQIVRPLEDVEVMEKDGATFSCEVSHDEVPGQWFWEGSKLRPTDNVRIRQEGRTYTLIYRRVLAEDAGEIQFVAENAESRAQLRVKELPVTLVRPLRDKIAMEKHRGVLECQVSRASAQVRWFKGSQELQPGPKYELVSDGLYRKLIISDVHAEDEDTYTCDAGDVKTSAQFFVEEQSITIVRGLQDVTVMEPAPAWFECETSIPSVRPPKWLLGKTVLQAGGNVGLEQEGTVHRLMLRRTCSTMTGPVHFTVGKSRSSARLVVSDIPVVLTRPLEPKTGRELQSVVLSCDFRPAPKAVQWYKDDTPLSPSEKFKMSLEGQMAELRILRLMPADAGVYRCQAGSAHSSTEVTVEAREVTVTGPLQDAEATEEGWASFSCELSHEDEEVEWSLNGMPLYNDSFHEISHKGRRHTLVLKSIQRADAGIVRASSLKVSTSARLEVRVKPVVFLKALDDLSAEERGTLALQCEVSDPEAHVVWRKDGVQLGPSDKYDFLHTAGTRGLVVHDVSPEDAGLYTCHVGSEETRARVRVHDLHVGITKRLKTMEVLEGESCSFECVLSHESASDPAMWTVGGKTVGSSSRFQATRQGRKYILVVREAAPSDAGEVVFSVRGLTSKASLIVRERPAAIIKPLEDQWVAPGEDVELRCELSRAGTPVHWLKDRKAIRKSQKYDVVCEGTMAMLVIRGASLKDAGEYTCEVEASKSTASLHVEEKANCFTEELTNLQVEEKGTAVFTCKTEHPAATVTWRKGLLELRASGKHQPSQEGLTLRLTISALEKADSDTYTCDIGQAQSRAQLLVQGEAAKCARA

SEQ ID NO: 59284 - protein, 8925 aa, Homo sapiens
  Payload ID: 11573
  Gene Symbol: OBSCN
  Gene Name: obscurin, cytoskeletal calmodulin and titin-interacting RhoGEF
  ENSP ID: ENSP00000355668
MDQPQFSGAPRFLTRPKAFVVSVGKDATLSCQIVGNPTPQVSWEKDQQPVAAGARFRLAQDGDLYRLTILDLALGDSGQYVCRARNAIGEAFAAVGLQVDAEAACAEQAPHFLLRPTSIRVREGSEATFRCRVGGSPRPAVSWSKDGRRLGEPDGPRVRVEELGEASALRIRAARPRDGGTYEVRAENPLGAASAAAALVVDSDAADTASRPGTSTAALLAHLQRRREAMRAEGAPASPPSTGTRTCTVTEGKHARLSCYVTGEPKPETVWKKDGQLVTEGRRHVVYEDAQENFVLKILFCKQSDRGLYTCTASNLVGQTYSSVLVVVREPAVPFKKRLQDLEVREKESATFLCEVPQPSTEAAWFKEETRLWASAKYGIEEEGTERRLTVRNVSADDDAVYICETPEGSRTVAELAVQGNLLRKLPRKTAVRVGDTAMFCVELAVPVGPVHWLRNQEEVVAGGRVAISAEGTRHTLTISQCCLEDVGQVAFMAGDCQTSTQFCVSAPRKPPLQPPVDPVVKARMESSVILSWSPPPHGERPVTIDGYLVEKKKLGTYTWIRCHEAEWVATPELTVADVAEEGNFQFRVSALNSFGQSPYLEFPGTVHLAPKLAVRTPLKAVQAVEGGEVTFSVDLTVASAGEWFLDGQALKASSVYEIHCDRTRHTLTIREVPASLHGAQLKFVANGIESSIRMEVRAAPGLTANKPPAAAAREVLARLHEEAQLLAELSDQAAAVTWLKDGRTLSPGPKYEVQASAGRRVLLVRDVARDDAGLYECVSRGGRIAYQLSVQGLARFLHKDMAGSCVDAVAGGPAQFECETSEAHVHVHWYKDGMELGHSGERFLQEDVGTRHRLVAATVTRQDEGTYSCRVGEDSVDFRLRVSEPKAVFAKEQPACREVQAEVGASATLSCEVAQDQMEVTWYKDGKKLSSSSKVHVEAVGCMRRLVVQQVGQADSGEYSCEARGQRVSFRLDVAEPKVVFAKEQLARRKLQAEAGASATLSCEVAQAQTEVTWYKDGKKLSSSSKVCMEATGCTRRLVVQQAGQADAGEYSCEAGGQRLSFHLDVKEPKVVFAKDQVAHSEVQAEAGASATLSCEVAQAQTEVMWYKDGKKLSSSLKVHVEAKGCRRRLVVQQAGKTDAGDYSCEARGQRVSFRLHITEPKMMFAKEQSVHNEVQAEAGASAMLSCEVAQAQTEVTWYKDGKKLSSSSKVGMEVKGCTRRLVLPQAGKADAGEYSCEAGGQRVSFHLHITEPKGVFAKEQSVHNEVQAEAGTTAMLSCEVAQPQTEVTWYKDGKKLSSSSKVRMEVKGCTRRLVVQQVGKADAGEYSCEAGGQRVSFQLHITEPKAVFAKEQLVHNEVRTEAGASATLSCEVAQAQTEVTWYKDGKKLSSSSKVRIEAAGCMRQLVVQQAGQADAGEYTCEAGGQRLSFHLDVSEPKAVFAKEQLAHRKVQAEAGAIATLSCEVAQAQTEVTWYKDGKKLSSSSKVRMEAVGCTRRLVVQQACQADTGEYSCEAGGQRLSFSLDVAEPKVVFAKEQPVHREVQAQAGASTTLSCEVAQAQTEVMWYKDGKKLSFSSKVRMEAVGCTRRLVVQQAGQAVAGEYSCEAGSQRLSFHLHVAEPKAVFAKEQPAHREVQAEAGASATLSCEVAQAQTEVTWYKDGKKLSSSLKVHVEAAGCTRRLVVQQAGQADTGEYSCEAGGQQLSFRLQVAEPKAVFAKEQPASREVQAEAGTSATLSCEVAQAQTEVTWYKDGKKLSSSSKVRMEAVGCTRRLVVQEAGQADAGEYSCKAGDQRLSFHLHVAEPKVVFAKEQPAHREVQAEAGASATLSCEVAQAQTEVTWYKDGKKLSSSSKVRVEAVGCTRRLVVQQAGQAEAGEYSCEAGGQQLSFRLQVAEPKAVFAKEQVVFAKDQPVHREVQAEAGTSTMLSCEVAQAQTEVMWYKDGKKLSSSSKMRVEAVGCTRRLVVQEAGQADAGEYSCEAGGQRLSFHLHVAEPKVVFAKEQPACREVQAEAGASATLSCEVAQGQMEVTWYKDGKKLSSSSKVHMEASGYTRRLVVQQAGQADAGEYSCEAGGQRLSFRLHVAELEPQISERPCRREPLVVKEHEDIILTATLATPSAATVTWLKDGVEIRRSKRHETASQGDTHTLTVHGAQVLDSAIYSCRVGAEGQDFPVQVEEVAAKFCRLLEPVCGELGGTVTLACELSPACAEVVWRCGNTQLRVGKRFQMVAEGPVRSLTVLGLRAEDAGEYVCESRDDHTSAQLTVSVPRVVKFMSGLSTVVAEEGGEATFQCVVSPSDVAVVWFRDGALLQPSEKFAISQSGASHSLTISDLVLEDAGQITVEAEGASSSAALRVREAPVLFKKKLEPQTVEERSSVTLEVELTRPWPELRWTRNATALAPGKNVEIHAEGARHRLVLHNVGFADRGFFGCETPDDKTQAKLTVEMRQVRLVRGLQAVEAREQGTATMEVQLSHADVDGSWTRDGLRFQQGPTCHLAVRGPMHTLTLSGLRPEDSGLMVFKAEGVHTSARLVVTELPVSFSRPLQDVVTTEKEKVTLECELSRPNVDVRWLKDGVELRAGKTMAIAAQGACRSLTIYRCEFADQGVYVCDAHDAQSSASVKVQGRNIQIVRPLEDVEVMEKDGATFSCEVSHDEVPGQWFWEGSKLRPTDNVRIRQEGRTYTLIYRRVLAEDAGEIQFVAENAESRAQLRVKELPVTLVRPLRDKIAMEKHRGVLECQVSRASAQVRWFKGSQELQPGPKYELVSDGLYRKLIISDVHAEDEDTYTCDAGDVKTSAQFFVEEQSITIVRGLQDVTVMEPAPAWFECETSIPSVRPPKWLLGKTVLQAGGNVGLEQEGTVHRLMLRRTCSTMTGPVHFTVGKSRSSARLVVSDIPVVLTRPLEPKTGRELQSVVLSCDFRPAPKAVQWYKDDTPLSPSEKFKMSLEGQMAELRILRLMPADAGVYRCQAGSAHSSTEVTVEAREVTVTGPLQDAEATEEGWASFSCELSHEDEEVEWSLNGMPLYNDSFHEISHKGRRHTLVLKSIQRADAGIVRASSLKVSTSARLEVRVKPVVFLKALDDLSAEERGTLALQCEVSDPEAHVVWRKDGVQLGPSDKYDFLHTAGTRGLVVHDVSPEDAGLYTCHVGSEETRARVRVHDLHVGITKRLKTMEVLEGESCSFECVLSHESASDPAMWTVGGKTVGSSSRFQATRQGRKYILVVREAAPSDAGEVVFSVRGLTSKASLIVRERPAAIIKPLEDQWVAPGEDVELRCELSRAGTPVHWLKDRKAIRKSQKYDVVCEGTMAMLVIRGASLKDAGEYTCEVEASKSTASLHVEEKANCFTEELTNLQVEEKGTAVFTCKTEHPAATVTWRKGLLELRASGKHQPSQEGLTLRLTISALEKADSDTYTCDIGQAQSRAQLLVQGRRVHIIEDLEDVDVQEGSSATFRCRISPANYEPVHWFLDKTPLHANELNEIDAQPGGYHVLTLRQLALKDSGTIYFEAGDQRASAALRVTEKPSVFSRELTDATITEGEDLTLVCETSTCDIPVCWTKDGKTLRGSARCQLSHEGHRAQLLITGATLQDSGRYKCEAGGACSSSIVRVHARPVRFQEALKDLEVLEGGAATLRCVLSSVAAPVKWCYGNNVLRPGDKYSLRQEGAMLELVVRNLRPQDSGRYSCSFGDQTTSATLTVTALPAQFIGKLRNKEATEGATATLRCELSKAAPVEWRKGSETLRDGDRYCLRQDGAMCELQIRGLAMVDAAEYSCVCGEERTSASLTIRPMPAHFIGRLRHQESIEGATATLRCELSKAAPVEWRKGRESLRDGDRHSLRQDGAVCELQICGLAVADAGEYSCVCGEERTSATLTVKALPAKFTEGLRNEEAVEGATAMLWCELSKVAPVEWRKGPENLRDGDRYILRQEGTRCELQICGLAMADAGEYLCVCGQERTSATLTIRALPARFIEDVKNQEAREGATAVLQCELNSAAPVEWRKGSETLRDGDRYSLRQDGTKCELQIRGLAMADTGEYSCVCGQERTSAMLTVRALPIKFTEGLRNEEATEGATAVLRCELSKMAPVEWWKGHETLRDGDRHSLRQDGARCELQIRGLVAEDAGEYLCMCGKERTSAMLTVRAMPSKFIEGLRNEEATEGDTATLWCELSKAAPVEWRKGHETLRDGDRHSLRQDGSRCELQIRGLAVVDAGEYSCVCGQERTSATLTVRALPARFIEDVKNQEAREGATAVLQCELSKAAPVEWRKGSETLRGGDRYSLRQDGTRCELQIHGLSVADTGEYSCVCGQERTSATLTVRALPARFTQDLKTKEASEGATATLQCELSKVAPVEWKKGPETLRDGGRYSLKQDGTRCELQIHDLSVADAGEYSCMCGQERTSATLTVRALPARFTEGLRNEEAMEGATATLQCELSKAAPVEWRKGLEALRDGDKYSLRQDGAVCELQIHGLAMADNGVYSCVCGQERTSATLTVRALPARFIEDMRNQKATEGATVTLQCKLRKAAPVEWRKGPNTLKDGDRYSLKQDGTSCELQIRGLVIADAGEYSCICEQERTSATLTVRALPARFIEDVRNHEATEGATAVLQCELSKAAPVEWRKGSETLRDGDRYSLRQDGTRCELQIRGLAVEDTGEYLCVCGQERTSATLTVRALPARFIDNMTNQEAREGATATLHCELSKVAPVEWRKGPETLRDGDRHSLRQDGTRCELQIRGLSVADAGEYSCVCGQERTSATLTIRALPAKFTKGLRNEEATEGATAMLQCELSKVAPVEWRKGPETLRDGDRYNLRQDGTRCELQIHGLSVADTGEYSCVCGQEKTSATLTVKAPQPVFREPLQSLQAEEGSTATLQCELSEPTATVVWSKGGLQLQANGRREPRLQGCTAELVLQDLQREDTGEYTCTCGSQATSATLTVTAAPVRFLRELQHQEVDEGGTAHLCCELSRAGASVEWRKGSLQLFPCAKYQMVQDGAAAELLVRGVEQEDAGDYTCDTGHTQSMASLSVRVPRPKFKTRLQSLEQETGDIARLCCQLSDAESGAVVQWLKEGVELHAGPKYEMRSQGATRELLIHQLEAKDTGEYACVTGGQKTAASLRVTEPEVTIVRGLVDAEVTADEDVEFSCEVSRAGATGVQWCLQGLPLQSNEVTEVAVRDGRIHTLRLKGVTPEDAGTVSFHLGNHASSAQLTVRAPEVTILEPLQDVQLSEGQDASFQCRLSRASGQEARWALGGVPLQANEMNDITVEQGTLHLLTLHKVTLEDAGTVSFHVGTCSSEAQLKVTAKNTVVRGLENVEALEGGEALFECQLSQPEVAAHTWLLDDEPVHTSENAEVVFFENGLRHLLLLKNLRPQDSCRVTFLAGDMVTSAFLTVRGWRLEILEPLKNAAVRAGAQACFTCTLSEAVPVGEASWYINGAAVQPDDSDWTVTADGSHHALLLRSAQPHHAGEVTFACRDAVASARLTVLGLPDPPEDAEVVARSSHTVTLSWAAPMSDGGGGLCGYRVEVKEGATGQWRLCHELVPGPECVVDGLAPGETYRFRVAAVGPVGAGEPVHLPQTVRLAEPPKPVPPQPSAPESRQVAAGEDVSLELEVVAEAGEVIWHKGMERIQPGGRFEVVSQGRQQMLVIKGFTAEDQGEYHCGLAQGSICPAAATFQVALSPASVDEAPQPSLPPEAAQEGDLHLLWEALARKRRMSREPTLDSISELPEEDGRSQRLPQEAEEVAPDLSEGYSTADELARTGDADLSHTSSDDESRAGTPSLVTYLKKAGRPGTSPLASKVGAPAAPSVKPQQQQEPLAAVRPPLGDLSTKDLGDPSMDKAAVKIQAAFKGYKVRKEMKQQEGPMFSHTFGDTEAQVGDALRLECVVASKADVRARWLKDGVELTDGRHHHIDQLGDGTCSLLITGLDRADAGCYTCQVSNKFGQVTHSACVVVSGSESEAESSSGGELDDAFRRAARRLHRLFRTKSPAEVSDEELFLSADEGPAEPEEPADWQTYREDEHFICIRFEALTEARQAVTRFQEMFATLGIGVEIKLVEQGPRRVEMCISKETPAPVVPPEPLPSLLTSDAAPVFLTELQNQEVQDGYPVSFDCVVTGQPMPSVRWFKDGKLLEEDDHYMINEDQQGGHQLIITAVVPADMGVYRCLAENSMGVSSTKAELRVDLTSTDYDTAADATESSSYFSAQGYLSSREQEGTESTTDEGQLPQVVEELRDLQVAPGTRLAKFQLKVKGYPAPRLYWFKDGQPLTASAHIRMTDKKILHTLEIISVTREDSGQYAAYISNAMGAAYSSARLLVRGPDEPEEKPASDVHEQLVPPRMLERFTPKKVKKGSSITFSVKVEGRPVPTVHWLREEAERGVLWIGPDTPGYTVASSAQQHSLVLLDVGRQHQGTYTCIASNAAGQALCSASLHVSGLPKVEEQEKVKEALISTFLQGTTQAISAQGLETASFADLGGQRKEEPLAAKEALGHLSLAEVGTEEFLQKLTSQITEMVSAKITQAKLQVPGGDSDEDSKTPSASPRHGRSRPSSSIQESSSESEDGDARGEIFDIYVVTADYLPLGAEQDAITLREGQYVEVLDAAHPLRWLVRTKPTKSSPSRQGWVSPAYLDRRLKLSPEWGAAEAPEFPGEAVSEDEYKARLSSVIQELLSSEQAFVEELQFLQSHHLQHLERCPHVPIAVAGQKAVIFRNVRDIGRFHSSFLQELQQCDTDDDVAMCFIKNQAAFEQYLEFLVGRVQAESVVVSTAIQEFYKKYAEEALLAGDPSQPPPPPLQHYLEQPVERVQRYQALLKELIRNKARNRQNCALLEQAYAVVSALPQRAENKLHVSLMENYPGTLQALGEPIRQGHFIVWEGAPGARMPWKGHNRHVFLFRNHLVICKPRRDSRTDTVSYVFRNMMKLSSIDLNDQVEGDDRAFEVWQEREDSVRKYLLQARTAIIKSSWVKEICGIQQRLALPVWRPPDFEEELADCTAELGETVKLACRVTGTPKPVISWYKDGKAVQVDPHHILIEDPDGSCALILDSLTGVDSGQYMCFAASAAGNCSTLGKILVQVPPRFVNKVRASPFVEGEDAQFTCTIEGAPYPQIRWYKDGALLTTGNKFQTLSEPRSGLLVLVIRAASKEDLGLYECELVNRLGSARASAELRIQSPMLQAQEQCHREQLVAAVEDTTLERADQEVTSVLKRLLGPKAPGPSTGDLTGPGPCPRGAPALQETGSQPPVTGTSEAPAVPPRVPQPLLHEGPEQEPEAIARAQEWTVPIRMEGAAWPGAGTGELLWDVHSHVVRETTQRTYTYQAIDTHTARPPSMQVTIEDVQAQTGGTAQFEAIIEGDPQPSVTWYKDSVQLVDSTRLSQQQEGTTYSLVLRHVASKDAGVYTCLAQNTGGQVLCKAELLVLGGDNEPDSEKQSHRRKLHSFYEVKEEIGRGVFGFVKRVQHKGNKILCAAKFIPLRSRTRAQAYRERDILAALSHPLVTGLLDQFETRKTLILILELCSSEELLDRLYRKGVVTEAEVKVYIQQLVEGLHYLHSHGVLHLDIKPSNILMVHPAREDIKICDFGFAQNITPAELQFSQYGSPEFVSPEIIQQNPVSEASDIWAMGVISYLSLTCSSPFAGESDRATLLNVLEGRVSWSSPMAAHLSEDAKDFIKATLQRAPQARPSAAQCLSHPWFLKSMPAEEAHFINTKQLKFLLARSRWQRSLMSYKSILVMRSIPELLRGPPDSPSLGVARHLCRDTGGSSSSSSSSDNELAPFARAKSLPPSPVTHSPLLHPRGFLRPSASLPEEAEASERSTEAPAPPASPEGAGPPAAQGCVPRHSVIRSLFYHQAGESPEHGALAPGSRRHPARRRHLLKGGYIAGALPGLREPLMEHRVLEEEAAREEQATLLAKAPSFETALRLPASGTHLAPGHSHSLEHDSPSTPRPSSEACGEAQRLPSAPSGGAPIRDMGHPQGSKQLPSTGGHPGTAQPERPSPDSPWGQPAPFCHPKQGSAPQEGCSPHPAVAPCPPGSFPPGSCKEAPLVPSSPFLGQPQAPPAPAKASPPLDSKMGPGDISLPGRPKPGPCSSPGSASQASSSQVSSLRVGSSQVGTEPGPSLDAEGWTQEAEDLSDSTPTLQRPQEQATMRKFSLGGRGGYAGVAGYGTFAFGGDAGGMLGQGPMWARIAWAVSQSEEEEQEEARAESQSEEQQEARAESPLPQVSARPVPEVGRAPTRSSPEPTPWEDIGQVSLVQIRDLSGDAEAADTISLDISEVDPAYLNLSDLYDIKYLPFEFMIFRKVPKSAQPEPPSPMAEEELAEFPEPTWPWPGELGPHAGLEITEESEDVDALLAEAAVGRKRKWSSPSRSLFHFPGRHLPLDEPAELGLRERVKASVEHISRILKGRPEGLEKEGPPRKKPGLASFRLSGLKSWDRAPTFLRELSDETVVLGQSVTLACQVSAQPAAQATWSKDGAPLESSSRVLISATLKNFQLLTILVVVAEDLGVYTCSVSNALGTVTTTGVLRKAERPSSSPCPDIGEVYADGVLLVWKPVESYGPVTYIVQCSLEGGSWTTLASDIFDCCYLTSKLSRGGTYTFRTACVSKAGMGPYSSPSEQVLLGGPSHLASEEESQGRSAQPLPSTKTFAFQTQIQRGRFSVVRQCWEKASGRALAAKIIPYHPKDKTAVLREYEALKGLRHPHLAQLHAAYLSPRHLVLILELCSGPELLPCLAERASYSESEVKDYLWQMLSATQYLHNQHILHLDLRSENMIITEYNLLKVVDLGNAQSLSQEKVLPSDKFKDYLETMAPELLEGQGAVPQTDIWAIGVTAFIMLSAEYPVSSEGARDLQRGLRKGLVRLSRCYAGLSGGAVAFLRSTLCAQPWGRPCASSCLQCPWLTEEGPACSRPAPVTFPTARLRVFVRNREKRRALLYKRHNLAQVR

SEQ ID NO: 59285 - protein, 7968 aa, Homo sapiens
  Payload ID: 11573
  Gene Symbol: OBSCN
  Gene Name: obscurin, cytoskeletal calmodulin and titin-interacting RhoGEF
  Uniprot ID: Q5VST9
  ENSP ID: ENSP00000409493
MDQPQFSGAPRFLTRPKAFVVSVGKDATLSCQIVGNPTPQVSWEKDQQPVAAGARFRLAQDGDLYRLTILDLALGDSGQYVCRARNAIGEAFAAVGLQVDAEAACAEQAPHFLLRPTSIRVREGSEATFRCRVGGSPRPAVSWSKDGRRLGEPDGPRVRVEELGEASALRIRAARPRDGGTYEVRAENPLGAASAAAALVVDSDAADTASRPGTSTAALLAHLQRRREAMRAEGAPASPPSTGTRTCTVTEGKHARLSCYVTGEPKPETVWKKDGQLVTEGRRHVVYEDAQENFVLKILFCKQSDRGLYTCTASNLVGQTYSSVLVVVREPAVPFKKRLQDLEVREKESATFLCEVPQPSTEAAWFKEETRLWASAKYGIEEEGTERRLTVRNVSADDDAVYICETPEGSRTVAELAVQGNLLRKLPRKTAVRVGDTAMFCVELAVPVGPVHWLRNQEEVVAGGRVAISAEGTRHTLTISQCCLEDVGQVAFMAGDCQTSTQFCVSAPRKPPLQPPVDPVVKARMESSVILSWSPPPHGERPVTIDGYLVEKKKLGTYTWIRCHEAEWVATPELTVADVAEEGNFQFRVSALNSFGQSPYLEFPGTVHLAPKLAVRTPLKAVQAVEGGEVTFSVDLTVASAGEWFLDGQALKASSVYEIHCDRTRHTLTIREVPASLHGAQLKFVANGIESSIRMEVRAAPGLTANKPPAAAAREVLARLHEEAQLLAELSDQAAAVTWLKDGRTLSPGPKYEVQASAGRRVLLVRDVARDDAGLYECVSRGGRIAYQLSVQGLARFLHKDMAGSCVDAVAGGPAQFECETSEAHVHVHWYKDGMELGHSGERFLQEDVGTRHRLVAATVTRQDEGTYSCRVGEDSVDFRLRVSEPKVVFAKEQLARRKLQAEAGASATLSCEVAQAQTEVTWYKDGKKLSSSSKVCMEATGCTRRLVVQQAGQADAGEYSCEAGGQRLSFHLDVKEPKVVFAKDQVAHSEVQAEAGASATLSCEVAQAQTEVMWYKDGKKLSSSLKVHVEAKGCRRRLVVQQAGKTDAGDYSCEARGQRVSFRLHITEPKMMFAKEQSVHNEVQAEAGASAMLSCEVAQAQTEVTWYKDGKKLSSSSKVGMEVKGCTRRLVLPQAGKADAGEYSCEAGGQRVSFHLHITEPKGVFAKEQSVHNEVQAEAGTTAMLSCEVAQPQTEVTWYKDGKKLSSSSKVRMEVKGCTRRLVVQQVGKADAGEYSCEAGGQRVSFQLHITEPKAVFAKEQLVHNEVRTEAGASATLSCEVAQAQTEVTWYKDGKKLSSSSKVRIEAAGCMRQLVVQQAGQADAGEYTCEAGGQRLSFHLDVSEPKAVFAKEQLAHRKVQAEAGAIATLSCEVAQAQTEVTWYKDGKKLSSSSKVRMEAVGCTRRLVVQQACQADTGEYSCEAGGQRLSFSLDVAEPKVVFAKEQPVHREVQAQAGASTTLSCEVAQAQTEVMWYKDGKKLSFSSKVRMEAVGCTRRLVVQQAGQAVAGEYSCEAGSQRLSFHLHVAEPKAVFAKEQPASREVQAEAGTSATLSCEVAQAQTEVTWYKDGKKLSSSSKVRMEAVGCTRRLVVQEAGQADAGEYSCKAGDQRLSFHLHVAEPKVVFAKEQPAHREVQAEAGASATLSCEVAQAQTEVTWYKDGKKLSSSSKVRVEAVGCTRRLVVQQAGQAEAGEYSCEAGGQQLSFRLQVAELEPQISERPCRREPLVVKEHEDIILTATLATPSAATVTWLKDGVEIRRSKRHETASQGDTHTLTVHGAQVLDSAIYSCRVGAEGQDFPVQVEEVAAKFCRLLEPVCGELGGTVTLACELSPACAEVVWRCGNTQLRVGKRFQMVAEGPVRSLTVLGLRAEDAGEYVCESRDDHTSAQLTVSVPRVVKFMSGLSTVVAEEGGEATFQCVVSPSDVAVVWFRDGALLQPSEKFAISQSGASHSLTISDLVLEDAGQITVEAEGASSSAALRVREAPVLFKKKLEPQTVEERSSVTLEVELTRPWPELRWTRNATALAPGKNVEIHAEGARHRLVLHNVGFADRGFFGCETPDDKTQAKLTVEMRQVRLVRGLQAVEAREQGTATMEVQLSHADVDGSWTRDGLRFQQGPTCHLAVRGPMHTLTLSGLRPEDSGLMVFKAEGVHTSARLVVTELPVSFSRPLQDVVTTEKEKVTLECELSRPNVDVRWLKDGVELRAGKTMAIAAQGACRSLTIYRCEFADQGVYVCDAHDAQSSASVKVQGRTYTLIYRRVLAEDAGEIQFVAENAESRAQLRVKELPVTLVRPLRDKIAMEKHRGVLECQVSRASAQVRWFKGSQELQPGPKYELVSDGLYRKLIISDVHAEDEDTYTCDAGDVKTSAQFFVEEQSITIVRGLQDVTVMEPAPAWFECETSIPSVRPPKWLLGKTVLQAGGNVGLEQEGTVHRLMLRRTCSTMTGPVHFTVGKSRSSARLVVSDIPVVLTRPLEPKTGRELQSVVLSCDFRPAPKAVQWYKDDTPLSPSEKFKMSLEGQMAELRILRLMPADAGVYRCQAGSAHSSTEVTVEAREVTVTGPLQDAEATEEGWASFSCELSHEDEEVEWSLNGMPLYNDSFHEISHKGRRHTLVLKSIQRADAGIVRASSLKVSTSARLEVRVKPVVFLKALDDLSAEERGTLALQCEVSDPEAHVVWRKDGVQLGPSDKYDFLHTAGTRGLVVHDVSPEDAGLYTCHVGSEETRARVRVHDLHVGITKRLKTMEVLEGESCSFECVLSHESASDPAMWTVGGKTVGSSSRFQATRQGRKYILVVREAAPSDAGEVVFSVRGLTSKASLIVRERPAAIIKPLEDQWVAPGEDVELRCELSRAGTPVHWLKDRKAIRKSQKYDVVCEGTMAMLVIRGASLKDAGEYTCEVEASKSTASLHVEEKANCFTEELTNLQVEEKGTAVFTCKTEHPAATVTWRKGLLELRASGKHQPSQEGLTLRLTISALEKADSDTYTCDIGQAQSRAQLLVQGRRVHIIEDLEDVDVQEGSSATFRCRISPANYEPVHWFLDKTPLHANELNEIDAQPGGYHVLTLRQLALKDSGTIYFEAGDQRASAALRVTEKPSVFSRELTDATITEGEDLTLVCETSTCDIPVCWTKDGKTLRGSARCQLSHEGHRAQLLITGATLQDSGRYKCEAGGACSSSIVRVHARPVRFQEALKDLEVLEGGAATLRCVLSSVAAPVKWCYGNNVLRPGDKYSLRQEGAMLELVVRNLRPQDSGRYSCSFGDQTTSATLTVTALPAQFIGKLRNKEATEGATATLRCELSKAAPVEWRKGSETLRDGDRYCLRQDGAMCELQIRGLAMVDAAEYSCVCGEERTSASLTIRPMPAHFIGRLRHQESIEGATATLRCELSKAAPVEWRKGRESLRDGDRHSLRQDGAVCELQICGLAVADAGEYSCVCGEERTSATLTVKALPAKFTEGLRNEEAVEGATAMLWCELSKVAPVEWRKGPENLRDGDRYILRQEGTRCELQICGLAMADAGEYLCVCGQERTSATLTIRALPARFIEDVKNQEAREGATAVLQCELNSAAPVEWRKGSETLRDGDRYSLRQDGTKCELQIRGLAMADTGEYSCVCGQERTSAMLTVRALPIKFTEGLRNEEATEGATAVLRCELSKMAPVEWWKGHETLRDGDRHSLRQDGARCELQIRGLVAEDAGEYLCMCGKERTSAMLTVRAMPSKFIEGLRNEEATEGDTATLWCELSKAAPVEWRKGHETLRDGDRHSLRQDGSRCELQIRGLAVVDAGEYSCVCGQERTSATLTVRALPARFIEDVKNQEAREGATAVLQCELSKAAPVEWRKGSETLRGGDRYSLRQDGTRCELQIHGLSVADTGEYSCVCGQERTSATLTVRAPQPVFREPLQSLQAEEGSTATLQCELSEPTATVVWSKGGLQLQANGRREPRLQGCTAELVLQDLQREDTGEYTCTCGSQATSATLTVTAAPVRFLRELQHQEVDEGGTAHLCCELSRAGASVEWRKGSLQLFPCAKYQMVQDGAAAELLVRGVEQEDAGDYTCDTGHTQSMASLSVRVPRPKFKTRLQSLEQETGDIARLCCQLSDAESGAVVQWLKEGVELHAGPKYEMRSQGATRELLIHQLEAKDTGEYACVTGGQKTAASLRVTEPEVTIVRGLVDAEVTADEDVEFSCEVSRAGATGVQWCLQGLPLQSNEVTEVAVRDGRIHTLRLKGVTPEDAGTVSFHLGNHASSAQLTVRAPEVTILEPLQDVQLSEGQDASFQCRLSRASGQEARWALGGVPLQANEMNDITVEQGTLHLLTLHKVTLEDAGTVSFHVGTCSSEAQLKVTAKNTVVRGLENVEALEGGEALFECQLSQPEVAAHTWLLDDEPVHTSENAEVVFFENGLRHLLLLKNLRPQDSCRVTFLAGDMVTSAFLTVRGWRLEILEPLKNAAVRAGAQACFTCTLSEAVPVGEASWYINGAAVQPDDSDWTVTADGSHHALLLRSAQPHHAGEVTFACRDAVASARLTVLGLPDPPEDAEVVARSSHTVTLSWAAPMSDGGGGLCGYRVEVKEGATGQWRLCHELVPGPECVVDGLAPGETYRFRVAAVGPVGAGEPVHLPQTVRLAEPPKPVPPQPSAPESRQVAAGEDVSLELEVVAEAGEVIWHKGMERIQPGGRFEVVSQGRQQMLVIKGFTAEDQGEYHCGLAQGSICPAAATFQVALSPASVDEAPQPSLPPEAAQEGDLHLLWEALARKRRMSREPTLDSISELPEEDGRSQRLPQEAEEVAPDLSEGYSTADELARTGDADLSHTSSDDESRAGTPSLVTYLKKAGRPGTSPLASKVGAPAAPSVKPQQQQEPLAAVRPPLGDLSTKDLGDPSMDKAAVKIQAAFKGYKVRKEMKQQEGPMFSHTFGDTEAQVGDALRLECVVASKADVRARWLKDGVELTDGRHHHIDQLGDGTCSLLITGLDRADAGCYTCQVSNKFGQVTHSACVVVSGSESEAESSSGGELDDAFRRAARRLHRLFRTKSPAEVSDEELFLSADEGPAEPEEPADWQTYREDEHFICIRFEALTEARQAVTRFQEMFATLGIGVEIKLVEQGPRRVEMCISKETPAPVVPPEPLPSLLTSDAAPVFLTELQNQEVQDGYPVSFDCVVTGQPMPSVRWFKDGKLLEEDDHYMINEDQQGGHQLIITAVVPADMGVYRCLAENSMGVSSTKAELRVDLTSTDYDTAADATESSSYFSAQGYLSSREQEGTESTTDEGQLPQVVEELRDLQVAPGTRLAKFQLKVKGYPAPRLYWFKDGQPLTASAHIRMTDKKILHTLEIISVTREDSGQYAAYISNAMGAAYSSARLLVRGPDEPEEKPASDVHEQLVPPRMLERFTPKKVKKGSSITFSVKVEGRPVPTVHWLREEAERGVLWIGPDTPGYTVASSAQQHSLVLLDVGRQHQGTYTCIASNAAGQALCSASLHVSGLPKVEEQEKVKEALISTFLQGTTQAISAQGLETASFADLGGQRKEEPLAAKEALGHLSLAEVGTEEFLQKLTSQITEMVSAKITQAKLQVPGGDSDEDSKTPSASPRHGRSRPSSSIQESSSESEDGDARGEIFDIYVVTADYLPLGAEQDAITLREGQYVEVLDAAHPLRWLVRTKPTKSSPSRQGWVSPAYLDRRLKLSPEWGAAEAPEFPGEAVSEDEYKARLSSVIQELLSSEQAFVEELQFLQSHHLQHLERCPHVPIAVAGQKAVIFRNVRDIGRFHSSFLQELQQCDTDDDVAMCFIKNQAAFEQYLEFLVGRVQAESVVVSTAIQEFYKKYAEEALLAGDPSQPPPPPLQHYLEQPVERVQRYQALLKELIRNKARNRQNCALLEQAYAVVSALPQRAENKLHVSLMENYPGTLQALGEPIRQGHFIVWEGAPGARMPWKGHNRHVFLFRNHLVICKPRRDSRTDTVSYVFRNMMKLSSIDLNDQVEGDDRAFEVWQEREDSVRKYLLQARTAIIKSSWVKEICGIQQRLALPVWRPPDFEEELADCTAELGETVKLACRVTGTPKPVISWYKDGKAVQVDPHHILIEDPDGSCALILDSLTGVDSGQYMCFAASAAGNCSTLGKILVQVPPRFVNKVRASPFVEGEDAQFTCTIEGAPYPQIRWYKDGALLTTGNKFQTLSEPRSGLLVLVIRAASKEDLGLYECELVNRLGSARASAELRIQSPMLQAQEQCHREQLVAAVEDTTLERADQEVTSVLKRLLGPKAPGPSTGDLTGPGPCPRGAPALQETGSQPPVTGTSEAPAVPPRVPQPLLHEGPEQEPEAIARAQEWTVPIRMEGAAWPGAGTGELLWDVHSHVVRETTQRTYTYQAIDTHTARPPSMQVTIEDVQAQTGGTAQFEAIIEGDPQPSVTWYKDSVQLVDSTRLSQQQEGTTYSLVLRHVASKDAGVYTCLAQNTGGQVLCKAELLVLGGDNEPDSEKQSHRRKLHSFYEVKEEIGRGVFGFVKRVQHKGNKILCAAKFIPLRSRTRAQAYRERDILAALSHPLVTGLLDQFETRKTLILILELCSSEELLDRLYRKGVVTEAEVKVYIQQLVEGLHYLHSHGVLHLDIKPSNILMVHPAREDIKICDFGFAQNITPAELQFSQYGSPEFVSPEIIQQNPVSEASDIWAMGVISYLSLTCSSPFAGESDRATLLNVLEGRVSWSSPMAAHLSEDAKDFIKATLQRAPQARPSAAQCLSHPWFLKSMPAEEAHFINTKQLKFLLARSRWQRSLMSYKSILVMRSIPELLRGPPDSPSLGVARHLCRDTGGSSSSSSSSDNELAPFARAKSLPPSPVTHSPLLHPRGFLRPSASLPEEAEASERSTEAPAPPASPEGAGPPAAQGCVPRHSVIRSLFYHQAGESPEHGALAPGSRRHPARRRHLLKGGYIAGALPGLREPLMEHRVLEEEAAREEQATLLAKAPSFETALRLPASGTHLAPGHSHSLEHDSPSTPRPSSEACGEAQRLPSAPSGGAPIRDMGHPQGSKQLPSTGGHPGTAQPERPSPDSPWGQPAPFCHPKQGSAPQEGCSPHPAVAPCPPGSFPPGSCKEAPLVPSSPFLGQPQAPPAPAKASPPLDSKMGPGDISLPGRPKPGPCSSPGSASQASSSQVSSLRVGSSQVGTEPGPSLDAEGWTQEAEDLSDSTPTLQRPQEQATMRKFSLGGRGGYAGVAGYGTFAFGGDAGGMLGQGPMWARIAWAVSQSEEEEQEEARAESQSEEQQEARAESPLPQVSARPVPEVGRAPTRSSPEPTPWEDIGQVSLVQIRDLSGDAEAADTISLDISEVDPAYLNLSDLYDIKYLPFEFMIFRKVPKSAQPEPPSPMAEEELAEFPEPTWPWPGELGPHAGLEITEESEDVDALLAEAAVGRKRKWSSPSRSLFHFPGRHLPLDEPAELGLRERVKASVEHISRILKGRPEGLEKEGPPRKKPGLASFRLSGLKSWDRAPTFLRELSDETVVLGQSVTLACQVSAQPAAQATWSKDGAPLESSSRVLISATLKNFQLLTILVVVAEDLGVYTCSVSNALGTVTTTGVLRKAERPSSSPCPDIGEVYADGVLLVWKPVESYGPVTYIVQCSLEGGSWTTLASDIFDCCYLTSKLSRGGTYTFRTACVSKAGMGPYSSPSEQVLLGGPSHLASEEESQGRSAQPLPSTKTFAFQTQIQRGRFSVVRQCWEKASGRALAAKIIPYHPKDKTAVLREYEALKGLRHPHLAQLHAAYLSPRHLVLILELCSGPELLPCLAERASYSESEVKDYLWQMLSATQYLHNQHILHLDLRSENMIITEYNLLKVVDLGNAQSLSQEKVLPSDKFKDYLETMAPELLEGQGAVPQTDIWAIGVTAFIMLSAEYPVSSEGARDLQRGLRKGLVRLSRCYAGLSGGAVAFLRSTLCAQPWGRPCASSCLQCPWLTEEGPACSRPAPVTFPTARLRVFVRNREKRRALLYKRHNLAQVR

SEQ ID NO: 59286 - protein, 68 aa, Homo sapiens
  Payload ID: 11573
  Gene Symbol: OBSCN
  Gene Name: obscurin, cytoskeletal calmodulin and titin-interacting RhoGEF
  ENSP ID: ENSP00000455500
  MOD_RES (1)..(1): Any amino acid
XGSSSWLQWKSLSKRLKSPRKPSSCKCRRVPNLPSDCSASCMPLTCLDHACVAQPPACCLSAHITCTL

SEQ ID NO: 59287 - protein, 8923 aa, Homo sapiens
  Payload ID: 11573
  Gene Symbol: OBSCN
  Gene Name: obscurin, cytoskeletal calmodulin and titin-interacting RhoGEF
  ENSP ID: ENSP00000455507
MDQPQFSGAPRFLTRPKAFVVSVGKDATLSCQIVGNPTPQVSWEKDQQPVAAGARFRLAQDGDLYRLTILDLALGDSGQYVCRARNAIGEAFAAVGLQVDAEAACAEQAPHFLLRPTSIRVREGSEATFRCRVGGSPRPAVSWSKDGRRLGEPDGPRVRVEELGEASALRIRAARPRDGGTYEVRAENPLGAASAAAALVVDSDAADTASRPGTSTAALLAHLQRRREAMRAEGAPASPPSTGTRTCTVTEGKHARLSCYVTGEPKPETVWKKDGQLVTEGRRHVVYEDAQENFVLKILFCKQSDRGLYTCTASNLVGQTYSSVLVVVREPAVPFKKRLQDLEVREKESATFLCEVPQPSTEAAWFKEETRLWASAKYGIEEEGTERRLTVRNVSADDDAVYICETPEGSRTVAELAVQGNLLRKLPRKTAVRVGDTAMFCVELAVPVGPVHWLRNQEEVVAGGRVAISAEGTRHTLTISQCCLEDVGQVAFMAGDCQTSTQFCVSAPRKPPLQPPVDPVVKARMESSVILSWSPPPHGERPVTIDGYLVEKKKLGTYTWIRCHEAEWVATPELTVADVAEEGNFQFRVSALNSFGQSPYLEFPGTVHLAPKLAVRTPLKAVQAVEGGEVTFSVDLTVASAGEWFLDGQALKASSVYEIHCDRTRHTLTIREVPASLHGAQLKFVANGIESSIRMEVRAAPGLTANKPPAAAAREVLARLHEEAQLLAELSDQAAAVTWLKDGRTLSPGPKYEVQASAGRRVLLVRDVARDDAGLYECVSRGGRIAYQLSVQGLARFLHKDMAGSCVDAVAGGPAQFECETSEAHVHVHWYKDGMELGHSGERFLQEDVGTRHRLVAATVTRQDEGTYSCRVGEDSVDFRLRVSEPKAVFAKEQPACREVQAEVGASATLSCEVAQDQMEVTWYKDGKKLSSSSKVHVEAVGCMRRLVVQQVGQADSGEYSCEARGQRVSFRLDVAEPKVVFAKEQLARRKLQAEAGASATLSCEVAQAQTEVTWYKDGKKLSSSSKVCMEATGCTRRLVVQQAGQADAGEYSCEAGGQRLSFHLDVKEPKVVFAKDQVAHSEVQAEAGASATLSCEVAQAQTEVMWYKDGKKLSSSLKVHVEAKGCRRRLVVQQAGKTDAGDYSCEARGQRVSFRLHITEPKMMFAKEQSVHNEVQAEAGASAMLSCEVAQAQTEVTWYKDGKKLSSSSKVGMEVKGCTRRLVLPQAGKADAGEYSCEAGGQRVSFHLHITEPKGVFAKEQSVHNEVQAEAGTTAMLSCEVAQPQTEVTWYKDGKKLSSSSKVRMEVKGCTRRLVVQQVGKADAGEYSCEAGGQRVSFQLHITEPKAVFAKEQLVHNEVRTEAGASATLSCEVAQAQTEVTWYKDGKKLSSSSKVRIEAAGCMRQLVVQQAGQADAGEYTCEAGGQRLSFHLDVSEPKAVFAKEQLAHRKVQAEAGAIATLSCEVAQAQTEVTWYKDGKKLSSSSKVRMEAVGCTRRLVVQQACQADTGEYSCEAGGQRLSFSLDVAEPKVVFAKEQPVHREVQAQAGASTTLSCEVAQAQTEVMWYKDGKKLSFSSKVRMEAVGCTRRLVVQQAGQAVAGEYSCEAGSQRLSFHLHVAEPKAVFAKEQPAHREVQAEAGASATLSCEVAQAQTEVTWYKDGKKLSSSLKVHVEAAGCTRRLVVQQAGQADTGEYSCEAGGQQLSFRLQVAEPKAVFAKEQPASREVQAEAGTSATLSCEVAQAQTEVTWYKDGKKLSSSSKVRMEAVGCTRRLVVQEAGQADAGEYSCKAGDQRLSFHLHVAEPKVVFAKEQPAHREVQAEAGASATLSCEVAQAQTEVTWYKDGKKLSSSSKVRVEAVGCTRRLVVQQAGQAEAGEYSCEAGGQQLSFRLQVAEPKAVFAKEQVVFAKDQPVHREVQAEAGTSTMLSCEVAQAQTEVMWYKDGKKLSSSSKMRVEAVGCTRRLVVQEAGQADAGEYSCEAGGQRLSFHLHVAEPKVVFAKEQPACREVQAEAGASATLSCEVAQGQMEVTWYKDGKKLSSSSKVHMEASGYTRRLVVQQAGQADAGEYSCEAGGQRLSFRLHVAELEPQISERPCRREPLVVKEHEDIILTATLATPSAATVTWLKDGVEIRRSKRHETASQGDTHTLTVHGAQVLDSAIYSCRVGAEGQDFPVQVEEVAAKFCRLLEPVCGELGGTVTLACELSPACAEVVWRCGNTQLRVGKRFQMVAEGPVRSLTVLGLRAEDAGEYVCESRDDHTSAQLTVSVPRVVKFMSGLSTVVAEEGGEATFQCVVSPSDVAVVWFRDGALLQPSEKFAISQSGASHSLTISDLVLEDAGQITVEAEGASSSAALRVREAPVLFKKKLEPQTVEERSSVTLEVELTRPWPELRWTRNATALAPGKNVEIHAEGARHRLVLHNVGFADRGFFGCETPDDKTQAKLTVEMRQVRLVRGLQAVEAREQGTATMEVQLSHADVDGSWTRDGLRFQQGPTCHLAVRGPMHTLTLSGLRPEDSGLMVFKAEGVHTSARLVVTELPVSFSRPLQDVVTTEKEKVTLECELSRPNVDVRWLKDGVELRAGKTMAIAAQGACRSLTIYRCEFADQGVYVCDAHDAQSSASVKVQGRNIQIVRPLEDVEVMEKDGATFSCEVSHDEVPGQWFWEGSKLRPTDNVRIRQEGRTYTLIYRRVLAEDAGEIQFVAENAESRAQLRVKELPVTLVRPLRDKIAMEKHRGVLECQVSRASAQVRWFKGSQELQPGPKYELVSDGLYRKLIISDVHAEDEDTYTCDAGDVKTSAQFFVEEQSITIVRGLQDVTVMEPAPAWFECETSIPSVRPPKWLLGKTVLQAGGNVGLEQEGTVHRLMLRRTCSTMTGPVHFTVGKSRSSARLVVSDIPVVLTRPLEPKTGRELQSVVLSCDFRPAPKAVQWYKDDTPLSPSEKFKMSLEGQMAELRILRLMPADAGVYRCQAGSAHSSTEVTVEAREVTVTGPLQDAEATEEGWASFSCELSHEDEEVEWSLNGMPLYNDSFHEISHKGRRHTLVLKSIQRADAGIVRASSLKVSTSARLEVRVKPVVFLKALDDLSAEERGTLALQCEVSDPEAHVVWRKDGVQLGPSDKYDFLHTAGTRGLVVHDVSPEDAGLYTCHVGSEETRARVRVHDLHVGITKRLKTMEVLEGESCSFECVLSHESASDPAMWTVGGKTVGSSSRFQATRQGRKYILVVREAAPSDAGEVVFSVRGLTSKASLIVRERPAAIIKPLEDQWVAPGEDVELRCELSRAGTPVHWLKDRKAIRKSQKYDVVCEGTMAMLVIRGASLKDAGEYTCEVEASKSTASLHVEEKANCFTEELTNLQVEEKGTAVFTCKTEHPAATVTWRKGLLELRASGKHQPSQEGLTLRLTISALEKADSDTYTCDIGQAQSRAQLLVQGRRVHIIEDLEDVDVQEGSSATFRCRISPANYEPVHWFLDKTPLHANELNEIDAQPGGYHVLTLRQLALKDSGTIYFEAGDQRASAALRVTEKPSVFSRELTDATITEGEDLTLVCETSTCDIPVCWTKDGKTLRGSARCQLSHEGHRAQLLITGATLQDSGRYKCEAGGACSSSIVRVHARPVRFQEALKDLEVLEGGAATLRCVLSSVAAPVKWCYGNNVLRPGDKYSLRQEGAMLELVVRNLRPQDSGRYSCSFGDQTTSATLTVTALPAQFIGKLRNKEATEGATATLRCELSKAAPVEWRKGSETLRDGDRYCLRQDGAMCELQIRGLAMVDAAEYSCVCGEERTSASLTIRPMPAHFIGRLRHQESIEGATATLRCELSKAAPVEWRKGRESLRDGDRHSLRQDGAVCELQICGLAVADAGEYSCVCGEERTSATLTVKALPAKFTEGLRNEEAVEGATAMLWCELSKVAPVEWRKGPENLRDGDRYILRQEGTRCELQICGLAMADAGEYLCVCGQERTSATLTIRALPARFIEDVKNQEAREGATAVLQCELNSAAPVEWRKGSETLRDGDRYSLRQDGTKCELQIRGLAMADTGEYSCVCGQERTSAMLTVRALPIKFTEGLRNEEATEGATAVLRCELSKMAPVEWWKGHETLRDGDRHSLRQDGARCELQIRGLVAEDAGEYLCMCGKERTSAMLTVRAMPSKFIEGLRNEEATEGDTATLWCELSKAAPVEWRKGHETLRDGDRHSLRQDGSRCELQIRGLAVVDAGEYSCVCGQERTSATLTVRALPARFIEDVKNQEAREGATAVLQCELSKAAPVEWRKGSETLRGGDRYSLRQDGTRCELQIHGLSVADTGEYSCVCGQERTSATLTVRALPARFTQDLKTKEASEGATATLQCELSKVAPVEWKKGPETLRDGGRYSLKQDGTRCELQIHDLSVADAGEYSCMCGQERTSATLTVRALPARFTEGLRNEEAMEGATATLQCELSKAAPVEWRKGLEALRDGDKYSLRQDGAVCELQIHGLAMADNGVYSCVCGQERTSATLTVRALPARFIEDMRNQKATEGATVTLQCKLRKAAPVEWRKGPNTLKDGDRYSLKQDGTSCELQIRGLVIADAGEYSCICEQERTSATLTVRALPARFIEDVRNHEATEGATAVLQCELSKAAPVEWRKGSETLRDGDRYSLRQDGTRCELQIRGLAVEDTGEYLCVCGQERTSATLTVRALPARFIDNMTNQEAREGATATLHCELSKVAPVEWRKGPETLRDGDRHSLRQDGTRCELQIRGLSVADAGEYSCVCGQERTSATLTIRALPAKFTKGLRNEEATEGATAMLQCELSKVAPVEWRKGPETLRDGDRYNLRQDGTRCELQIHGLSVADTGEYSCVCGQEKTSATLTVKAPQPVFREPLQSLQAEEGSTATLQCELSEPTATVVWSKGGLQLQANGRREPRLQGCTAELVLQDLQREDTGEYTCTCGSQATSATLTVTAAPVRFLRELQHQEVDEGGTAHLCCELSRAGASVEWRKGSLQLFPCAKYQMVQDGAAAELLVRGVEQEDAGDYTCDTGHTQSMASLSVRVPRPKFKTRLQSLEQETGDIARLCCQLSDAESGAVVQWLKEGVELHAGPKYEMRSQGATRELLIHQLEAKDTGEYACVTGGQKTAASLRVTEPEVTIVRGLVDAEVTADEDVEFSCEVSRAGATGVQWCLQGLPLQSNEVTEVAVRDGRIHTLRLKGVTPEDAGTVSFHLGNHASSAQLTVRAPEVTILEPLQDVQLSEGQDASFQCRLSRASGQEARWALGGVPLQANEMNDITVEQGTLHLLTLHKVTLEDAGTVSFHVGTCSSEAQLKVTAKNTVVRGLENVEALEGGEALFECQLSQPEVAAHTWLLDDEPVHTSENAEVVFFENGLRHLLLLKNLRPQDSCRVTFLAGDMVTSAFLTVRGWRLEILEPLKNAAVRAGAQACFTCTLSEAVPVGEASWYINGAAVQPDDSDWTVTADGSHHALLLRSAQPHHAGEVTFACRDAVASARLTVLGLPDPPEDAEVVARSSHTVTLSWAAPMSDGGGGLCGYRVEVKEGATGQWRLCHELVPGPECVVDGLAPGETYRFRVAAVGPVGAGEPVHLPQTVRLAEPPKPVPPQPSAPESRQVAAGEDVSLELEVVAEAGEVIWHKGMERIQPGGRFEVVSQGRQQMLVIKGFTAEDQGEYHCGLAQGSICPAAATFQVALSPASVDEAPQPSLPPEAAQEGDLHLLWEALARKRRMSREPTLDSISELPEEDGRSQRLPQEAEEVAPDLSEGYSTADELARTGDADLSHTSSDDESRAGTPSLVTYLKKAGRPGTSPLASKVGAPAAPSVKPQQQQEPLAAVRPPLGDLSTKDLGDPSMDKAAVKIQAAFKGYKVRKEMKQQEGPMFSHTFGDTEAQVGDALRLECVVASKADVRARWLKDGVELTDGRHHHIDQLGDGTCSLLITGLDRADAGCYTCQVSNKFGQVTHSACVVVSGSESEAESSSGGELDDAFRRAARRLHRLFRTKSPAEVSDEELFLSADEGPAEPEEPADWQTYREDEHFICIRFEALTEARQAVTRFQEMFATLGIGVEIKLVEQGPRRVEMCISKETPAPVVPPEPLPSLLTSDAAPVFLTELQNQEVQDGYPVSFDCVVTGQPMPSVRWFKDGKLLEEDDHYMINEDQQGGHQLIITAVVPADMGVYRCLAENSMGVSSTKAELRVDLTSTDYDTAADATESSSYFSAQGYLSSREQEGTESTTDEGQLPQVVEELRDLQVAPGTRLAKFQLKVKGYPAPRLYWFKDGQPLTASAHIRMTDKKILHTLEIISVTREDSGQYAAYISNAMGAAYSSARLLVRGPDEPEEKPASDVHEQLVPPRMLERFTPKKVKKGSSITFSVKVEGRPVPTVHWLREEAERGVLWIGPDTPGYTVASSAQQHSLVLLDVGRQHQGTYTCIASNAAGQALCSASLHVSGLPKVEEQEKVKEALISTFLQGTTQAISAQGLETASFADLGGQRKEEPLAAKEALGHLSLAEVGTEEFLQKLTSQITEMVSAKITQAKLQVPGGDSDEDSKTPSASPRHGRSRPSSSIQESSSESEDGDARGEIFDIYVVTADYLPLGAEQDAITLREGQYVEVLDAAHPLRWLVRTKPTKSSPSRQGWVSPAYLDRRLKLSPEWGAAEAPEFPGEAVSEDEYKARLSSVIQELLSSEQAFVEELQFLQSHHLQHLERCPHVPIAVAGQKAVIFRNVRDIGRFHSSFLQELQQCDTDDDVAMCFIKNQAAFEQYLEFLVGRVQAESVVVSTAIQEFYKKYAEEALLAGDPSQPPPPPLQHYLEQPVERVQRYQALLKELIRNKARNRQNCALLEQAYAVVSALPQRAENKLHVSLMENYPGTLQALGEPIRQGHFIVWEGAPGARMPWKGHNRHVFLFRNHLVICKPRRDSRTDTVSYVFRNMMKLSSIDLNDQVEGDDRAFEVWQEREDSVRKYLLQARTAIIKSSWVKEICGIQQRLALPVWRPPDFEEELADCTAELGETVKLACRVTGTPKPVISWYKDGKAVQVDPHHILIEDPDGSCALILDSLTGVDSGQYMCFAASAAGNCSTLGKILVQVPPRFVNKVRASPFVEGEDAQFTCTIEGAPYPQIRWYKDGALLTTGNKFQTLSEPRSGLLVLVIRAASKEDLGLYECELVNRLGSARASAELRIQSPMLQAQEQCHREQLVAAVEDTTLERADQEVTSVLKRLLGPKAPGPSTGDLTGPGPCPRGAPALQETGSQPPVTGTSEAPAVPPRVPQPLLHEGPEQEPEAIARAQEWTVPIRMEGAAWPGAGTGELLWDVHSHVVRETTQRTYTYQAIDTHTARPPSMQVTIEDVQAQTGGTAQFEAIIEGDPQPSVTWYKDSVQLVDSTRLSQQQEGTTYSLVLRHVASKDAGVYTCLAQNTGGQVLCKAELLVLGGDNEPDSEKQSHRRKLHSFYEVKEEIGRGVFGFVKRVQHKGNKILCAAKFIPLRSRTRAQAYRERDILAALSHPLVTGLLDQFETRKTLILILELCSSEELLDRLYRKGVVTEAEVKVYIQQLVEGLHYLHSHGVLHLDIKPSNILMVHPAREDIKICDFGFAQNITPAELQFSQYGSPEFVSPEIIQQNPVSEASDIWAMGVISYLSLTCSSPFAGESDRATLLNVLEGRVSWSSPMAAHLSEDAKDFIKATLQRAPQARPSAAQCLSHPWFLKSMPAEEAHFINTKQLKFLLARSRWQRSLMSYKSILVMRSIPELLRGPPDSPSLGVARHLCRDTGGSSSSSSSSDNELAPFARAKSLPPSPVTHSPLLHPRGFLRPSASLPEEAEASERSTEAPAPPASPEGAGPPAAQGCVPRHSVIRSLFYHQAGESPEHGALAPGSRRHPARRRHLLKGGYIAGALPGLREPLMEHRVLEEEAAREEQATLLAKAPSFETALRLPASGTHLAPGHSHSLEHDSPSTPRPSSEACGEAQRLPSAPSGGAPIRDMGHPQGSKQLPSTGGHPGTAQPERPSPDSPWGQPAPFCHPKQGSAPQEGCSPHPAVAPCPPGSFPPGSCKEAPLVPSSPFLGQPQAPPAPAKASPPLDSKMGPGDISLPGRPKPGPCSSPGSASQASSSQVSSLRVGSSQVGTEPGPSLDAEGWTQEAEDLSDSTPTLQRPQEQATMRKFSLGGRGGYAGVAGYGTFAFGGDAGGMLGQGPMWARIAWAVSQSEEEEQEEARAESQSEEQQEARAESPLPQVSARPVPEVGRAPTRSSPEPTPWEDIGQVSLVQIRDLSGDAEAADTISLDISEVDPAYLNLSDLYDIKYLPFEFMIFRKVPKSAQPEPPSPMAEEELAEFPEPTWPWPGELGPHAGLEITEESEDVDALLAEAAVGRKRKWSSPSRSLFHFPGRHLPLDEPAELGLRERVKASVEHISRILKGRPEGLEKEGPPRKKPGLASFRLSGLKSWDRAPTFLRELSDETVVLGQSVTLACQVSAQPAAQATWSKDGAPLESSSRVLISATLKNFQLLTILVVVAEDLGVYTCSVSNALGTVTTTGVLRKAERPSSSPCPDIGEVYADGVLLVWKPVESYGPVTYIVQCSLEGGSWTTLASDIFDCCYLTSKLSRGGTYTFRTACVSKAGMGPYSSPSEQVLLGGPSHLASEEESQGRSAQPLPSTKTFAFQTQIQRGRFSVVRQCWEKASGRALAAKIIPYHPKDKTAVLREYEALKGLRHPHLAQLHAAYLSPRHLVLILELCSGPELLPCLAERASYSESEVKDYLWQMLSATQYLHNQHILHLDLRSENMIITEYNLLKVVDLGNAQSLSQEKVLPSDKFKDYLETMELLEGQGAVPQTDIWAIGVTAFIMLSAEYPVSSEGARDLQRGLRKGLVRLSRCYAGLSGGAVAFLRSTLCAQPWGRPCASSCLQCPWLTEEGPACSRPAPVTFPTARLRVFVRNREKRRALLYKRHNLAQVR

SEQ ID NO: 59288 - protein, 1593 aa, Homo sapiens
  Payload ID: 11573
  Gene Symbol: OBSCN
  Gene Name: obscurin, cytoskeletal calmodulin and titin-interacting RhoGEF
  ENSP ID: ENSP00000455688
  MOD_RES (1)..(1): Any amino acid
XRARVRVHDLHVGITKRLKTMEVLEGESCSFECVLSHESASDPAMWTVGGKTVGSSSRFQATRQGRKYILVVREAAPSDAGEVVFSVRGLTSKASLIVRERPAAIIKPLEDQWVAPGEDVELRCELSRAGTPVHWLKDRKAIRKSQKYDVVCEGTMAMLVIRGASLKDAGEYTCEVEASKSTASLHVEEKANCFTEELTNLQVEEKGTAVFTCKTEHPAATVTWRKGLLELRASGKHQPSQEGLTLRLTISALEKADSDTYTCDIGQAQSRAQLLVQGRRVHIIEDLEDVDVQEGSSATFRCRISPANYEPVHWFLDKTPLHANELNEIDAQPGGYHVLTLRQLALKDSGTIYFEAGDQRASAALRVTEKPSVFSRELTDATITEGEDLTLVCETSTCDIPVCWTKDGKTLRGSARCQLSHEGHRAQLLITGATLQDSGRYKCEAGGACSSSIVRVHARPVRFQEALKDLEVLEGGAATLRCVLSSVAAPVKWCYGNNVLRPGDKYSLRQEGAMLELVVRNLRPQDSGRYSCSFGDQTTSATLTVTALPAQFIGKLRNKEATEGATATLRCELSKAAPVEWRKGSETLRDGDRYCLRQDGAMCELQIRGLAMVDAAEYSCVCGEERTSASLTIRPMPAHFIGRLRHQESIEGATATLRCELSKAAPVEWRKGRESLRDGDRHSLRQDGAVCELQICGLAVADAGEYSCVCGEERTSATLTVKALPAKFTEGLRNEEAVEGATAMLWCELSKVAPVEWRKGPENLRDGDRYILRQEGTRCELQICGLAMADAGEYLCVCGQERTSATLTIRALPARFIEDVKNQEAREGATAVLQCELNSAAPVEWRKGSETLRDGDRYSLRQDGTKCELQIRGLAMADTGEYSCVCGQERTSAMLTVRALPIKFTEGLRNEEATEGATAVLRCELSKMAPVEWWKGHETLRDGDRHSLRQDGARCELQIRGLVAEDAGEYLCMCGKERTSAMLTVRAMPSKFIEGLRNEEATEGDTATLWCELSKAAPVEWRKGHETLRDGDRHSLRQDGSRCELQIRGLAVVDAGEYSCVCGQERTSATLTVRALPARFIEDVKNQEAREGATAVLQCELSKAAPVEWRKGSETLRGGDRYSLRQDGTRCELQIHGLSVADTGEYSCVCGQERTSATLTVRALPARFTQDLKTKEASEGATATLQCELSKVAPVEWKKGPETLRDGGRYSLKQDGTRCELQIHDLSVADAGEYSCMCGQERTSATLTVRALPARFTEGLRNEEAMEGATATLQCELSKAAPVEWRKGLEALRDGDKYSLRQDGAVCELQIHGLAMADNGVYSCVCGQERTSATLTVRALPARFIEDMRNQKATEGATVTLQCKLRKAAPVEWRKGPNTLKDGDRYSLKQDGTSCELQIRGLVIADAGEYSCICEQERTSATLTVRALPARFIEDVRNHEATEGATAVLQCELSKAAPVEWRKGSETLRDGDRYSLRQDGTRCELQIRGLAVEDTGEYLCVCGQERTSATLTVRALPARFIDNMTNQEAREGATATLHCELSKVAPVEWRKGPETLRDGDRHSLRQENCLNPGGRGCSEPRSCHCTPAWVIEQ

SEQ ID NO: 59289 - protein, 612 aa, Homo sapiens
  Payload ID: 11574
  Gene Symbol: OBSL1
  Gene Name: obscurin-like 1
  ENSP ID: ENSP00000289656
MRGRVRTVANVTVKGPILKRLPRKLDVLEGENAVLLVETLEAGVEGRWSRDGEELPVICQSSSGHMHALVLPGVTREDAGEVTFSLGNSRTTTLLRVKCVKHSPPGPPILAEMFKGHKNTVLLTWKPPEPAPETPFIYRLERQEVGSEDWIQCFSIEKAGAVEVPGDCVPSEGDYRFRICTVSGHGRSPHVVFHGSAHLVPTARLVAGLEDVQVYDGEDAVFSLDLSTIIQGTWFLNGEELKSNEPEGQVEPGALRYRIEQKGLQHRLILHAVKHQDSGALVGFSCPGVQDSAALTIQESPVHILSPQDRVSLTFTTSERVVLTCELSRVDFPATWYKDGQKVEESELLVVKMDGRKHRLILPEAKVQDSGEFECRTEGVSAFFGVTVQDPPVHIVDPREHVFVHAITSECVMLACEVDREDAPVRWYKDGQEVEESDFVVLENEGPHRRLVLPATQPSDGGEFQCVAGDECAYFTVTITDVSSWIVYPSGKVYVAAVRLERVVLTCELCRPWAEVRWTKDGEEVVESPALLLQKEDTVRRLVLPAVQLEDSGEYLCEIDDESASFTVTVTESYQSQDSSNNNPELCVLLKKPKTRRLWSRFPPWRRTAGTE

SEQ ID NO: 59290 - protein, 1025 aa, Homo sapiens
  Payload ID: 11574
  Gene Symbol: OBSL1
  Gene Name: obscurin-like 1
  Uniprot ID: O75147
  ENSP ID: ENSP00000362980
MKASSGDQGSPPCFLRFPRPVRVVSGAEAELKCVVLGEPPPVVVWEKGGQQLAASERLSFPADGAEHGLLLTAALPTDAGVYVCRARNAAGEAYAAAAVTVLEPPASDPELQPAERPLPSPGSGEGAPVFLTGPRSQWVLRGAEVVLTCRAGGLPEPTLYWEKDGMALDEVWDSSHFALQPGRAEDGPGASLALRILAARLPDSGVYVCHARNAHGHAQAGALLQVHQPPESPPADPDEAPAPVVEPLKCAPKTFWVNEGKHAKFRCYVMGKPEPEIEWHWEGRPLLPDRRRLMYRDRDGGFVLKVLYCQAKDRGLYVCAARNSAGQTLSAVQLHVKEPRLRFTRPLQDVEGREHGIAVLECKVPNSRIPTAWFREDQRLLPCRKYEQIEEGTVRRLIIHRLKADDDGIYLCEMRGRVRTVANVTVKGPILKRLPRKLDVLEGENAVLLVETLEAGVEGRWSRDGEELPVICQSSSGHMHALVLPGVTREDAGEVTFSLGNSRTTTLLRVKCVKHSPPGPPILAEMFKGHKNTVLLTWKPPEPAPETPFIYRLERQEVGSEDWIQCFSIEKAGAVEVPGDCVPSEGDYRFRICTVSGHGRSPHVVFHGSAHLVPTARLVAGLEDVQVYDGEDAVFSLDLSTIIQGTWFLNGEELKSNEPEGQVEPGALRYRIEQKGLQHRLILHAVKHQDSGALVGFSCPGVQDSAALTIQESPVHILSPQDRVSLTFTTSERVVLTCELSRVDFPATWYKDGQKVEESELLVVKMDGRKHRLILPEAKVQDSGEFECRTEGVSAFFGVTVQDPPVHIVDPREHVFVHAITSECVMLACEVDREDAPVRWYKDGQEVEESDFVVLENEGPHRRLVLPATQPSDGGEFQCVAGDECAYFTVTITDVSSWIVYPSGKVYVAAVRLERVVLTCELCRPWAEVRWTKDGEEVVESPALLLQKEDTVRRLVLPAVQLEDSGEYLCEIDDESASFTVTVTESYQSQDSSNNNPELCVLLKKPKTRRLWSRFPPWRRTAGTE

SEQ ID NO: 59291 - protein, 1804 aa, Homo sapiens
  Payload ID: 11574
  Gene Symbol: OBSL1
  Gene Name: obscurin-like 1
  ENSP ID: ENSP00000362983
MKASSGDQGSPPCFLRFPRPVRVVSGAEAELKCVVLGEPPPVVVWEKGGQQLAASERLSFPADGAEHGLLLTAALPTDAGVYVCRARNAAGEAYAAAAVTVLEPPASDPELQPAERPLPSPGSGEGAPVFLTGPRSQWVLRGAEVVLTCRAGGLPEPTLYWEKDGMALDEVWDSSHFALQPGRAEDGPGASLALRILAARLPDSGVYVCHARNAHGHAQAGALLQVHQPPESPPADPDEAPAPVVEPLKCAPKTFWVNEGKHAKFRCYVMGKPEPEIEWHWEGRPLLPDRRRLMYRDRDGGFVLKVLYCQAKDRGLYVCAARNSAGQTLSAVQLHVKEPRLRFTRPLQDVEGREHGIAVLECKVPNSRIPTAWFREDQRLLPCRKYEQIEEGTVRRLIIHRLKADDDGIYLCEMRGRVRTVANVTVKGPILKRLPRKLDVLEGENAVLLVETLEAGVEGRWSRDGEELPVICQSSSGHMHALVLPGVTREDAGEVTFSLGNSRTTTLLRVKCVKHSPPGPPILAEMFKGHKNTVLLTWKPPEPAPETPFIYRLERQEVGSEDWIQCFSIEKAGAVEVPGDCVPSEGDYRFRICTVSGHGRSPHVVFHGSAHLVPTARLVAGLEDVQVYDGEDAVFSLDLSTIIQGTWFLNGEELKSNEPEGQVEPGALRYRIEQKGLQHRLILHAVKHQDSGALVGFSCPGVQDSAALTIQESPVHILSPQDRVSLTFTTSERVVLTCELSRVDFPATWYKDGQKVEESELLVVKMDGRKHRLILPEAKVQDSGEFECRTEGVSAFFGVTVQDPPVHIVDPREHVFVHAITSECVMLACEVDREDAPVRWYKDGQEVEESDFVVLENEGPHRRLVLPATQPSDGGEFQCVAGDECAYFTVTITDVSSWIVYPSGKVYVAAVRLERVVLTCELCRPWAEVRWTKDGEEVVESPALLLQKEDTVRRLVLPAVQLEDSGEYLCEIDDESASFTVTVTEPPVRIIYPRDEVTLIAVTLECVVLMCELSREDAPVRWYKDGLEVEESEALVLERDGPRCRLVLPAAQPEDGGEFVCDAGDDSAFFTVTVTAPPERIVHPAARSLDLHFGAPGRVELRCEVAPAGSQVRWYKDGLEVEASDALQLGAEGPTRTLTLPHAQPEDAGEYVCETRHEAITFNVILAEPPVQFLALETTPSPLCVAPGEPVVLSCELSRAGAPVVWSHNGRPVQEGEGLELHAEGPRRVLCIQAAGPAHAGLYTCQSGAAPGAPSLSFTVQVAEPLLVKLVSELTPLTVHEGDDATFRCEVSPPDADVTWLRNGAVVTPGPQVEMAQNGSSRILTLRGCQLGDAGTVTLRAGSTATSARLHVRETELLFLRRLQDVRAEEGQDVCLEVETGRVGAAGAVRWVRGGQPLPHDSRLSMAQDGHIHRLFIHGVILADQGTYGCESHHDRTLARLSVRPRQLRVLRPLEDVTISEGGSATFQLELSQEGVTGEWARGGVQLYPGPKCHIHSDGHRHRLVLNGLGLADSGCVSFTADSLRCAARLIVREVPVTIVRGPHDLEVTEGDTATFECELSQALADVTWEKDGNALTPSPRLRLQALGTRRLLQLRRCGPSDAGTYSCAVGTARAGPVRLTVRERTVAVLSELRSVSAREGDGATFECTVSEVETTGRWELGGRPLRPGARVRIRQEGKKHILVLSELRAEDAGEVRFQAGPAQSLALLEVEALPLQMCRHPPREKTVLVGRRAVLEVTVSRSGGHVCWLREGAELCPGDKYEMRSHGPTHSLVIHDVRPEDQGTYCCQAGQDSTHTRLLVEGN

SEQ ID NO: 59292 - protein, 1896 aa, Homo sapiens
  Payload ID: 11574
  Gene Symbol: OBSL1
  Gene Name: obscurin-like 1
  Uniprot ID: O75147
  ENSP ID: ENSP00000385636
MKASSGDQGSPPCFLRFPRPVRVVSGAEAELKCVVLGEPPPVVVWEKGGQQLAASERLSFPADGAEHGLLLTAALPTDAGVYVCRARNAAGEAYAAAAVTVLEPPASDPELQPAERPLPSPGSGEGAPVFLTGPRSQWVLRGAEVVLTCRAGGLPEPTLYWEKDGMALDEVWDSSHFALQPGRAEDGPGASLALRILAARLPDSGVYVCHARNAHGHAQAGALLQVHQPPESPPADPDEAPAPVVEPLKCAPKTFWVNEGKHAKFRCYVMGKPEPEIEWHWEGRPLLPDRRRLMYRDRDGGFVLKVLYCQAKDRGLYVCAARNSAGQTLSAVQLHVKEPRLRFTRPLQDVEGREHGIAVLECKVPNSRIPTAWFREDQRLLPCRKYEQIEEGTVRRLIIHRLKADDDGIYLCEMRGRVRTVANVTVKGPILKRLPRKLDVLEGENAVLLVETLEAGVEGRWSRDGEELPVICQSSSGHMHALVLPGVTREDAGEVTFSLGNSRTTTLLRVKCVKHSPPGPPILAEMFKGHKNTVLLTWKPPEPAPETPFIYRLERQEVGSEDWIQCFSIEKAGAVEVPGDCVPSEGDYRFRICTVSGHGRSPHVVFHGSAHLVPTARLVAGLEDVQVYDGEDAVFSLDLSTIIQGTWFLNGEELKSNEPEGQVEPGALRYRIEQKGLQHRLILHAVKHQDSGALVGFSCPGVQDSAALTIQESPVHILSPQDRVSLTFTTSERVVLTCELSRVDFPATWYKDGQKVEESELLVVKMDGRKHRLILPEAKVQDSGEFECRTEGVSAFFGVTVQDPPVHIVDPREHVFVHAITSECVMLACEVDREDAPVRWYKDGQEVEESDFVVLENEGPHRRLVLPATQPSDGGEFQCVAGDECAYFTVTITDVSSWIVYPSGKVYVAAVRLERVVLTCELCRPWAEVRWTKDGEEVVESPALLLQKEDTVRRLVLPAVQLEDSGEYLCEIDDESASFTVTVTEPPVRIIYPRDEVTLIAVTLECVVLMCELSREDAPVRWYKDGLEVEESEALVLERDGPRCRLVLPAAQPEDGGEFVCDAGDDSAFFTVTVTAPPERIVHPAARSLDLHFGAPGRVELRCEVAPAGSQVRWYKDGLEVEASDALQLGAEGPTRTLTLPHAQPEDAGEYVCETRHEAITFNVILAEPPVQFLALETTPSPLCVAPGEPVVLSCELSRAGAPVVWSHNGRPVQEGEGLELHAEGPRRVLCIQAAGPAHAGLYTCQSGAAPGAPSLSFTVQVAEPPVRVVAPEAAQTRVRSTPGGDLELVVHLSGPGGPVRWYKDGERLASQGRVQLEQAGARQVLRVQGARSGDAGEYLCDAPQDSRIFLVSVEEPLLVKLVSELTPLTVHEGDDATFRCEVSPPDADVTWLRNGAVVTPGPQVEMAQNGSSRILTLRGCQLGDAGTVTLRAGSTATSARLHVRETELLFLRRLQDVRAEEGQDVCLEVETGRVGAAGAVRWVRGGQPLPHDSRLSMAQDGHIHRLFIHGVILADQGTYGCESHHDRTLARLSVRPRQLRVLRPLEDVTISEGGSATFQLELSQEGVTGEWARGGVQLYPGPKCHIHSDGHRHRLVLNGLGLADSGCVSFTADSLRCAARLIVREVPVTIVRGPHDLEVTEGDTATFECELSQALADVTWEKDGNALTPSPRLRLQALGTRRLLQLRRCGPSDAGTYSCAVGTARAGPVRLTVRERTVAVLSELRSVSAREGDGATFECTVSEVETTGRWELGGRPLRPGARVRIRQEGKKHILVLSELRAEDAGEVRFQAGPAQSLALLEVEALPLQMCRHPPREKTVLVGRRAVLEVTVSRSGGHVCWLREGAELCPGDKYEMRSHGPTHSLVIHDVRPEDQGTYCCQAGQDSTHTRLLVEGN

SEQ ID NO: 59293 - protein, 445 aa, Homo sapiens
  Payload ID: 11574
  Gene Symbol: OBSL1
  Gene Name: obscurin-like 1
  ENSP ID: ENSP00000403665
  MOD_RES (1)..(1): Any amino acid
XVLMCELSREDAPVRWYKDGLEVEESEALVLERDGPRCRLVLPAAQPEDGGEFVCDAGDDSAFFTVTVTAPPERIVHPAARSLDLHFGAPGRVELRCEVAPAGSQVRWYKDGLEVEASDALQLGAEGPTRTLTLPHAQPEDAGEYVCETRHEAITFNVILAEPPVQFLALETTPSPLCVAPGEPVVLSCELSRAGAPVVWSHNGRPVQEGEGLELHAEGPRRVLCIQAAGPAHAGLYTCQSGAAPGAPSLSFTVQVAEPLLVKLVSELTPLTVHEGDDATFRCEVSPPDADVTWLRNGAVVTPGPQVEMAQNGSSRILTLRGCQLGDAGTVTLRAGSTATSARLHVRETELLFLRRLQDVRAEEGQDVCLEVETGRVGAAGAVRWVRGGQPLPHDSRLSMAQDGHIHRLFIHGVILADQGTYGCESHHDRTLARLSVRRECPVLS

SEQ ID NO: 59294 - protein, 1543 aa, Homo sapiens
  Payload ID: 11574
  Gene Symbol: OBSL1
  Gene Name: obscurin-like 1
  Uniprot ID: O75147
  ENSP ID: ENSP00000474519
MKASSGDQGSPPCFLRFPRPVRVVSGAEAELKCVVLGEPPPVVVWEKGGQQLAASERLSFPADGAEHGLLLTAALPTDAGVYVCRARNAAGEAYAAAAVTVLEPPASDPELQPAERPLPSPGSGEGAPVFLTGPRSQWVLRGAEVVLTCRAGGLPEPTLYWEKDGMALDEVWDSSHFALQPGRAEDGPGASLALRILAARLPDSGVYVCHARNAHGHAQAGALLQVHQPPESPPADPDEAPAPVVEPLKCAPKTFWVNEGKHAKFRCYVMGKPEPEIEWHWEGRPLLPDRRRLMYRDRDGGFVLKVLYCQAKDRGLYVCAARNSAGQTLSAVQLHVKEPRLRFTRPLQDVEGREHGIAVLECKVPNSRIPTAWFREDQRLLPCRKYEQIEEGTVRRLIIHRLKADDDGIYLCEMRGRVRTVANVTVKGPILKRLPRKLDVLEGENAVLLVETLEAGVEGRWSRDGEELPVICQSSSGHMHALVLPGVTREDAGEVTFSLGNSRTTTLLRVKCVKHSPPGPPILAEMFKGHKNTVLLTWKPPEPAPETPFIYRLERQEVGSEDWIQCFSIEKAGAVEVPGDCVPSEGDYRFRICTVSGHGRSPHVVFHGSAHLVPTARLVAGLEDVQVYDGEDAVFSLDLSTIIQGTWFLNGEELKSNEPEGQVEPGALRYRIEQKGLQHRLILHAVKHQDSGALVGFSCPGVQDSAALTIQESPVHILSPQDRVSLTFTTSERVVLTCELSRVDFPATWYKDGQKVEESELLVVKMDGRKHRLILPEAKVQDSGEFECRTEGVSAFFGVTVQDPPVHIVDPREHVFVHAITSECVMLACEVDREDAPVRWYKDGQEVEESDFVVLENEGPHRRLVLPATQPSDGGEFQCVAGDECAYFTVTITDVSSWIVYPSGKVYVAAVRLERVVLTCELCRPWAEVRWTKDGEEVVESPALLLQKEDTVRRLVLPAVQLEDSGEYLCEIDDESASFTVTVTEPPVRIIYPRDEVTLIAVTLECVVLMCELSREDAPVRWYKDGLEVEESEALVLERDGPRCRLVLPAAQPEDGGEFVCDAGDDSAFFTVTVTAPPERIVHPAARSLDLHFGAPGRVELRCEVAPAGSQVRWYKDGLEVEASDALQLGAEGPTRTLTLPHAQPEDAGEYVCETRHEAITFNVILAEPPVQFLALETTPSPLCVAPGEPVVLSCELSRAGAPVVWSHNGRPVQEGEGLELHAEGPRRVLCIQAAGPAHAGLYTCQSGAAPGAPSLSFTVQVAEPPVRVVAPEAAQTRVRSTPGGDLELVVHLSGPGGPVRWYKDGERLASQGRVQLEQAGARQVLRVQGARSGDAGEYLCDAPQDSRIFLVSVEEPLLVKLVSELTPLTVHEGDDATFRCEVSPPDADVTWLRNGAVVTPGPQVEMAQNGSSRILTLRGCQLGDAGTVTLRAGSTATSARLHVRETELLFLRRLQDVRAEEGQDVCLEVETGRVGAAGAVRWVRGGQPLPHDSRLSMAQDGHIHRLFIHGVILADQGTYGCESHHDRTLARLSVRRECPVLS

SEQ ID NO: 59295 - protein, 412 aa, Homo sapiens
  Payload ID: 11574
  Gene Symbol: OBSL1
  Gene Name: obscurin-like 1
  ENSP ID: ENSP00000475126
  MOD_RES (1)..(1): Any amino acid
XEDTVRRLVLPAVQLEDSGEYLCEIDDESASFTVTVTEPPVRIIYPRDEVTLIAVTLECVVLMCELSREDAPVRWYKDGLEVEESEALVLERDGPRCRLVLPAAQPEDGGEFVCDAGDDSAFFTVTVTEPPVQFLALETTPSPLCVAPGEPVVLSCELSRAGAPVVWSHNGRPVQEGEGLELHAEGPRRVLCIQAAGPAHAGLYTCQSGAAPGAPSLSFTVQVAEPLLVKLVSELTPLTVHEGDDATFRCEVSPPDADVTWLRNGAVVTPGPQVEMAQNGSSRILTLRGCQLGDAGTVTLRAGSTATSARLHVRETELLFLRRLQDVRAEEGQDVCLEVETGRVGAAGAVRWVRGGQPLPHDSRLSMAQDGHIHRLFIHGVILADQGTYGCESHHDRTLARLSVRRECPVLS

SEQ ID NO: 59296 - protein, 522 aa, Homo sapiens
  Payload ID: 11575
  Gene Symbol: OCLN
  Gene Name: occludin
  Uniprot ID: Q16625
  ENSP ID: ENSP00000347379
MSSRPLESPPPYRPDEFKPNHYAPSNDIYGGEMHVRPMLSQPAYSFYPEDEILHFYKWTSPPGVIRILSMLIIVMCIAIFACVASTLAWDRGYGTSLLGGSVGYPYGGSGFGSYGSGYGYGYGYGYGYGGYTDPRAAKGFMLAMAAFCFIAALVIFVTSVIRSEMSRTRRYYLSVIIVSAILGIMVFIATIVYIMGVNPTAQSSGSLYGSQIYALCNQFYTPAATGLYVDQYLYHYCVVDPQEAIAIVLGFMIIVAFALIIFFAVKTRRKMDRYDKSNILWDKEHIYDEQPPNVEEWVKNVSAGTQDVPSPPSDYVERVDSPMAYSSNGKVNDKRFYPESSYKSTPVPEVVQELPLTSPVDDFRQPRYSSGGNFETPSKRAPAKGRAGRSKRTEQDHYETDYTTGGESCDELEEDWIREYPPITSDQQRQLYKRNFDTGLQEYKSLQSELDEINKELSRLDKELDDYREESEEYMAAADEYNRLKQVKGSADYKSKKNHCKQLKSKLSHIKKMVGDYDRQKT

SEQ ID NO: 59297 - protein, 522 aa, Homo sapiens; identical to SEQ ID NO: 59296
  Payload ID: 11575
  Gene Symbol: OCLN
  Gene Name: occludin
  Uniprot ID: Q16625
  ENSP ID: ENSP00000379719

SEQ ID NO: 59298 - protein, 271 aa, Homo sapiens
  Payload ID: 11575
  Gene Symbol: OCLN
  Gene Name: occludin
  Uniprot ID: Q16625
  ENSP ID: ENSP00000445940
MIIVAFALIIFFAVKTRRKMDRYDKSNILWDKEHIYDEQPPNVEEWVKNVSAGTQDVPSPPSDYVERVDSPMAYSSNGKVNDKRFYPESSYKSTPVPEVVQELPLTSPVDDFRQPRYSSGGNFETPSKRAPAKGRAGRSKRTEQDHYETDYTTGGESCDELEEDWIREYPPITSDQQRQLYKRNFDTGLQEYKSLQSELDEINKELSRLDKELDDYREESEEYMAAADEYNRLKQVKGSADYKSKKNHCKQLKSKLSHIKKMVGDYDRQKT

SEQ ID NO: 59299 - protein, 522 aa, Homo sapiens
  Payload ID: 11575
  Gene Symbol: OCLN
  Gene Name: occludin
  ENSP ID: ENSP00000480303
MSSRPLESPPPYRPDEFKPNHYAPSNDIYGGEMHVRPMLSQPAYSFYPEDEILHFYKWTSPPGVIRILSMLIIVMCIAIFACVASTLAWDRGYGTSLLGGSVGYPYGGSGFGSYGSGYGYGYGYGYGYGGYTDPRAAKGFMLAMAAFCFIAALVIFVTSVIRSEMSRTRRYYLSVIIVSAILGIMVFIATIVYIMGVNPTAQSSGSLYGSQIYALCNQFYTPAATGLYVDQYLYHYCVVDPQEAIAIVLGFMIIVAFALIIFFAVKTRRKMDRYDKSNILWDKEHIYDEQPPNVEEWVKNVSAGTQDVPSPPSDYVERVDSPMAYSSNGKVNDKRFYPESSYKSTPVPEVVQELPLTSPVDDFRQPRYSSGGNFETPSKRAPAKGRAGRSKRTEQDHYETDYTTGGESCDELEEDWIREYPPITSDQQRQLYKRNFDTGLQEYKSLQSELDEINKELSRLDKELDDYREESEEYMAAADEYNRLKQVKGSADYKSKKNHCKQLNSKLSHIKKMVGDYDRQKT

SEQ ID NO: 59300 - protein, 522 aa, Homo sapiens; identical to SEQ ID NO: 59299
  Payload ID: 11575
  Gene Symbol: OCLN
  Gene Name: occludin
  ENSP ID: ENSP00000480674

SEQ ID NO: 59301 - protein, 522 aa, Homo sapiens; identical to SEQ ID NO: 59299
  Payload ID: 11575
  Gene Symbol: OCLN
  Gene Name: occludin
  ENSP ID: ENSP00000481921

SEQ ID NO: 59302 - protein, 130 aa, Homo sapiens
  Payload ID: 11575
  Gene Symbol: OCLN
  Gene Name: occludin
  ENSP ID: ENSP00000483480
MSSRPLESPPPYRPDEFKPNHYAPSNDIYGGEMHVRPMLSQPAYSFYPEDEILHFYKWTSPPGVIRILSMLIIVMCIAIFACVASTLAWDRGYGTSLLGGHCHCTGVHDYCGFCFNNFLCCENSKKDGQV

SEQ ID NO: 59303 - protein, 264 aa, Homo sapiens
  Payload ID: 11576
  Gene Symbol: OCEL1
  Gene Name: occludin/ELL domain containing 1
  Uniprot ID: Q9H607
  ENSP ID: ENSP00000215061
MHNPDGSASPTADPGSELQTLGQAARRPPPPRAGHDAPRRTRPSARKPLSCFSRRPMPTREPPKTRGSRGHLHTHPPGPGPPLQGLAPRGLKTSAPRPPCQPQPGPHKAKTKKIVFEDELLSQALLGAKKPIGAIPKGHKPRPHPVPDYELKYPPVSSERERSRYVAVFQDQYGEFLELQHEVGCAQAKLRQLEALLSSLPPPQSQKEAQVAARVWREFEMKRMDPGFLDKQARCHYLKGKLRHLKTQIQKFDDQGDSEGSVYF

SEQ ID NO: 59304 - protein, 244 aa, Homo sapiens
  Payload ID: 11576
  Gene Symbol: OCEL1
  Gene Name: occludin/ELL domain containing 1
  ENSP ID: ENSP00000469261
  MOD_RES (1)..(1): Any amino acid
XNPDGSASPTADPGSELQTLGQAARRPPPPRAGHDAPRRTRPSARKPLSCFSRRPMPTREPPKTRGSRGHLHTHPPGPGPPLQGLAPRGLKTSAPRPPCQPQPGPHKAKTKKIVFEDELLSQALLGAKKPIGAIPKGHKPRPHPVPDYELKYPPVSSERERSRYVAVFQDQYGEFLELQHEVGCAQAKLRQLEALLSSLPPPQSQKEAQVAARVWREFEMKRMLPLPGVAFSWIANASSVWTQL

SEQ ID NO: 59305 - protein, 68 aa, Homo sapiens
  Payload ID: 11576
  Gene Symbol: OCEL1
  Gene Name: occludin/ELL domain containing 1
  ENSP ID: ENSP00000469624
KEAQVAARVWREFEMKRMDPGFLDKQRDAWGCRSLAFLGISQLFLLQLPLPGVAFSWIANASSVWTQL

SEQ ID NO: 59306 - protein, 84 aa, Homo sapiens
  Payload ID: 11576
  Gene Symbol: OCEL1
  Gene Name: occludin/ELL domain containing 1
  ENSP ID: ENSP00000470258
  MOD_RES (1)..(1): Any amino acid
XILTRLGLGPRCRDWRPEASKPAPPALRASPSRDPTRQRPRRLCLRMSCSPRPSWAPRSLLEPSLRGISLGPTQCPTMSLSTRQ

SEQ ID NO: 59307 - protein, 208 aa, Homo sapiens
  Payload ID: 11576
  Gene Symbol: OCEL1
  Gene Name: occludin/ELL domain containing 1
  ENSP ID: ENSP00000470270
MPTREPPKTRGSRGHLHTHPPGPGPPLQGLAPRGLKTSAPRPPCQPQPGPHKAKTKKIVFEDELLSQALLGAKKPIGAIPKGHKPRPHPVPDYELKYPPVSSERERSRYVAVFQDQYGEFLELQHEVGCAQAKLRQLEALLSSLPPPQSQKEAQVAARVWREFEMKRMDPGFLDKQARCHYLKGKLRHLKTQIQKFDDQGDSEGSVYF

SEQ ID NO: 59308 - protein, 95 aa, Homo sapiens
  Payload ID: 11576
  Gene Symbol: OCEL1
  Gene Name: occludin/ELL domain containing 1
  ENSP ID: ENSP00000470883
  MOD_RES (1)..(1): Any amino acid
XKEAQVAARVWREFEMKRMDPGFLDKQARCHYLKGKLRHLKTQIQKFDDQGDSEGSVSPYQGSLSPGLQMPLQFGLSSDSPSSRKAFQDFLLWVL

SEQ ID NO: 59309 - protein, 165 aa, Homo sapiens
  Payload ID: 11576
  Gene Symbol: OCEL1
  Gene Name: occludin/ELL domain containing 1
  ENSP ID: ENSP00000471201
MHNPDGSASPTADPGSELQTLGQAARRPPPPRAGHDAPRRTRPSARKPLSCFSRRPMPTREPPKTRGSRGHLHTHPPGPGPPLQGLAPRGLKTSAPRPPCQPQPGPHKAKTKKIVFEDELLSQALLGAKKPIGAIPKGHKPRPHPVPDYELRRPKLQPGFGGSLR

SEQ ID NO: 59310 - protein, 246 aa, Homo sapiens
  Payload ID: 11576
  Gene Symbol: OCEL1
  Gene Name: occludin/ELL domain containing 1
  ENSP ID: ENSP00000471311
  MOD_RES (1)..(1): Any amino acid
XRTRPSARKPLSCFSRRPMPTREPPKTRGSRGHLHTHPPGPGPPLQGLAPRGLKTSAPRPPCQPQPGPHKAKTKKIVFEDELLSQALLGAKKPIGAIPKGHKPRPHPVPDYELKYPPVSSERERSRYVAVFQDQYGEFLELQHEVGCAQAKLRQLEALLSSLPPPQSQKEAQVAARVWREFEMKRMAGVQWYDLSSLQPQRPGFKRFSCLSWDHRRPPPCLANFCICSRDGVSPCWPGWSRTPDLK

SEQ ID NO: 59311 - protein, 52 aa, Homo sapiens
  Payload ID: 11576
  Gene Symbol: OCEL1
  Gene Name: occludin/ELL domain containing 1
  ENSP ID: ENSP00000471742
RASPSRDPTRQRPRRLCLRMSCSPRPSWAPRSLLEPSLRGISLGPTQCPTMS

SEQ ID NO: 59312 - protein, 245 aa, Homo sapiens
  Payload ID: 11577
  Gene Symbol: OCIAD1
  Gene Name: OCIA domain containing 1
  Uniprot ID: Q9NX40
  ENSP ID: ENSP00000264312
MNGRADFREPNAEVPRPIPHIGPDYIPTEEERRVFAECNDESFWFRSVPLAATSMLITQGLISKGILSSHPKYGSIPKLILACIMGYFAGKLSYVKTCQEKFKKLENSPLGEALRSGQARRSSPPGHYYQKSKYDSSVSGQSSFVTSPAADNIEMLPHYEPIPFSSSMNESAPTGITDHIVQGPDPNLEESPKRKNITYEELRNKNRESYEVSLTQKTDPSVRPMHERVPKKEVKVNKYGDTWDE

SEQ ID NO: 59313 - protein, 245 aa, Homo sapiens; identical to SEQ ID NO: 59312
  Payload ID: 11577
  Gene Symbol: OCIAD1
  Gene Name: OCIA domain containing 1
  Uniprot ID: Q9NX40
  ENSP ID: ENSP00000370882

SEQ ID NO: 59314 - protein, 187 aa, Homo sapiens
  Payload ID: 11577
  Gene Symbol: OCIAD1
  Gene Name: OCIA domain containing 1
  Uniprot ID: Q9NX40
  ENSP ID: ENSP00000379725
MNGRADFREPNAEVPRPIPHIGPDYIPTEEERRVFAECNDESFWFRSVPLAATSMLITQGLISKGILSSHPKYGSIPKLILACIMGYFAGKLSYVKTCQEKFKKLENSPLGEALRSGQARRSSPPGHYYQKSKYDSSVSGQSSFVTSPAADNIEMLPHYEPIPFSSSMNESAPTGITDHIVQGRNFS

SEQ ID NO: 59315 - protein, 194 aa, Homo sapiens
  Payload ID: 11577
  Gene Symbol: OCIAD1
  Gene Name: OCIA domain containing 1
  Uniprot ID: Q9NX40
  ENSP ID: ENSP00000399656
MNGRADFREPNAEVPRPIPHIGPDYIPTEEERRVFAECNDESFWFRSVPLAATSMLITQGLISKGILSSHPKYGSIPKLILACIMGYFAGKLSYVKTCQEKFKKLENSPLGEALRSGQARRSSPPGHYYQKSKYDSSVSGQSSFVTSPAADNIEMLPHYEPIPFSSSMNESAPTGITDHIVQVKVNKYGDTWDE

SEQ ID NO: 59316 - protein, 194 aa, Homo sapiens; identical to SEQ ID NO: 59315
  Payload ID: 11577
  Gene Symbol: OCIAD1
  Gene Name: OCIA domain containing 1
  Uniprot ID: Q9NX40
  ENSP ID: ENSP00000416943

SEQ ID NO: 59317 - protein, 119 aa, Homo sapiens
  Payload ID: 11577
  Gene Symbol: OCIAD1
  Gene Name: OCIA domain containing 1
  ENSP ID: ENSP00000420881
MLITQGLISKGILSSHPKYGSIPKLILACIMGYFAGKLSYVKTCQEKFKKLENSPLGEALRSGQARRSSPPGHYYQKSKYDSSVSGQSSFVTSPAADNIEMLPHYEPIPFSSSMNESAP

SEQ ID NO: 59318 - protein, 97 aa, Homo sapiens
  Payload ID: 11577
  Gene Symbol: OCIAD1
  Gene Name: OCIA domain containing 1
  ENSP ID: ENSP00000420917
MNGRADFREPNAEVPRPIPHIGPDYIPTEEERRVFAECNDESFWFRSVPLAATSMLITQGLISKGILSSHPKYGSIPKLILACIMGYFAGKLSYVKT

SEQ ID NO: 59319 - protein, 46 aa, Homo sapiens
  Payload ID: 11577
  Gene Symbol: OCIAD1
  Gene Name: OCIA domain containing 1
  ENSP ID: ENSP00000421572
MNGRADFREPNAEVPRPIPHIGPDYIPTEEERRVFAECNDESFWFR

SEQ ID NO: 59320 - protein, 29 aa, Homo sapiens
  Payload ID: 11577
  Gene Symbol: OCIAD1
  Gene Name: OCIA domain containing 1
  ENSP ID: ENSP00000421582
MNGRADFREPNAEVPRPIPHIGPDYIPTE

SEQ ID NO: 59321 - protein, 73 aa, Homo sapiens
  Payload ID: 11577
  Gene Symbol: OCIAD1
  Gene Name: OCIA domain containing 1
  ENSP ID: ENSP00000422171
MNGRADFREPNAEVPRPIPHIGPDYIPTEEERRVFAECNDESFWFRSVPLAATSMLITQGLISKGILSSHPKY

SEQ ID NO: 59322 - protein, 245 aa, Homo sapiens; identical to SEQ ID NO: 59312
  Payload ID: 11577
  Gene Symbol: OCIAD1
  Gene Name: OCIA domain containing 1
  Uniprot ID: Q9NX40
  ENSP ID: ENSP00000423002

SEQ ID NO: 59323 - protein, 168 aa, Homo sapiens
  Payload ID: 11577
  Gene Symbol: OCIAD1
  Gene Name: OCIA domain containing 1
  ENSP ID: ENSP00000423126
MNGRADFREPNAEVPRPIPPVPLAATSMLITQGLISKGILSSHPKYGSIPKLILACIMGYFAGKLSYVKTCQEKFKKLENSPLGEALRSGQARRSSPPGHYYQKSKYDSSVSGQSSFVTSPAADNIEMLPHYEPIPFSSSMNESAPTGITDHIVQGPDPNLEESPKRK

SEQ ID NO: 59324 - protein, 110 aa, Homo sapiens
  Payload ID: 11577
  Gene Symbol: OCIAD1
  Gene Name: OCIA domain containing 1
  ENSP ID: ENSP00000423381
MNGRADFREPNAEVPRPIPHIGPDYIPTEEERRVFAECNDESFWFRSVPLAATSMLITQGLISKGILSSHPKYGSIPKLILACIMGYFAGKLSYVKTCQEKFKKLENSPL

SEQ ID NO: 59325 - protein, 112 aa, Homo sapiens
  Payload ID: 11577
  Gene Symbol: OCIAD1
  Gene Name: OCIA domain containing 1
  ENSP ID: ENSP00000423845
MNGRADFREPNAEVPRPIPHIGPDYIPTEEERRVFAECNDESFWFRSVPLAATSMLITQGLISKGILSSHPKYGSIPKLILACIMGYFAGKLSYVKTCQEKFKKLENSPLGE

SEQ ID NO: 59326 - protein, 245 aa, Homo sapiens; identical to SEQ ID NO: 59312
  Payload ID: 11577
  Gene Symbol: OCIAD1
  Gene Name: OCIA domain containing 1
  Uniprot ID: Q9NX40
  ENSP ID: ENSP00000423909

SEQ ID NO: 59327 - protein, 218 aa, Homo sapiens
  Payload ID: 11577
  Gene Symbol: OCIAD1
  Gene Name: OCIA domain containing 1
  ENSP ID: ENSP00000424041
MNGRADFREPNAEVPRPIPPVPLAATSMLITQGLISKGILSSHPKYGSIPKLILACIMGYFAGKLSYVKTCQEKFKKLENSPLGEALRSGQARRSSPPGHYYQKSKYDSSVSGQSSFVTSPAADNIEMLPHYEPIPFSSSMNESAPTGITDHIVQGPDPNLEESPKRKNITYEELRNKNRESYEVSLTQKTDPSVRPMHERVPKKEVKVNKYGDTWDE

SEQ ID NO: 59328 - protein, 80 aa, Homo sapiens
  Payload ID: 11577
  Gene Symbol: OCIAD1
  Gene Name: OCIA domain containing 1
  ENSP ID: ENSP00000424252
MNGRADFREPNAEVPRPIPHIGPDYIPTEEERRVFAECNDESFWFRSVPLAATSMLITQGLISKGILSSHPKYGSIPKLI

SEQ ID NO: 59329 - protein, 179 aa, Homo sapiens
  Payload ID: 11577
  Gene Symbol: OCIAD1
  Gene Name: OCIA domain containing 1
  ENSP ID: ENSP00000425356
MLITQGLISKGILSSHPKYGSIPKLILACIMGYFAGKLSYVKTCQEKFKKLENSPLGEALRSGQARRSSPPGHYYQKSKYDSSVSGQSSFVTSPAADNIEMLPHYEPIPFSSSMNESAPTGITDHIVQGPDPNLEESPKRKNITYEELRNKNRESYEVSLTQKTDPSVRPMHERVPKKE

SEQ ID NO: 59330 - protein, 97 aa, Homo sapiens; identical to SEQ ID NO: 59318
  Payload ID: 11577
  Gene Symbol: OCIAD1
  Gene Name: OCIA domain containing 1
  ENSP ID: ENSP00000425633

SEQ ID NO: 59331 - protein, 103 aa, Homo sapiens
  Payload ID: 11577
  Gene Symbol: OCIAD1
  Gene Name: OCIA domain containing 1
  ENSP ID: ENSP00000425968
MLITQGLISKGILSSHPKYGSIPKLILACIMGYFAGKLSYVKTCQEKFKKLENSPLGEALRSGQARRSSPPGHYYQKSKYDSSVSGQSSFVTSPAADNIEMLP

SEQ ID NO: 59332 - protein, 171 aa, Homo sapiens
  Payload ID: 11577
  Gene Symbol: OCIAD1
  Gene Name: OCIA domain containing 1
  ENSP ID: ENSP00000426386
MNGRADFREPNAEVPRPIPHIGPDYIPTEEERRVFAECNDESFWFRSVPLAATSMLITQGLISKGILSSHPKYGSIPKLILACIMGYFAGKLSYVKTCQEKFKKLENSPLGEALRSGQARRSSPPGHYYQKSKYDSSVSGQSSFVTSPAADNIEMLPHYEPIPFSSSMNES

SEQ ID NO: 59333 - protein, 80 aa, Homo sapiens; identical to SEQ ID NO: 59328
  Payload ID: 11577
  Gene Symbol: OCIAD1
  Gene Name: OCIA domain containing 1
  ENSP ID: ENSP00000426902

SEQ ID NO: 59334 - protein, 140 aa, Homo sapiens
  Payload ID: 11577
  Gene Symbol: OCIAD1
  Gene Name: OCIA domain containing 1
  ENSP ID: ENSP00000427363
MLITQGLISKGILSSHPKYGSIPKLILACIMGYFAGKLSYVKTCQEKFKKLENSPLGEALRSGQARRSSPPGHYYQKSKYDSSVSGQSSFVTSPAADNIEMLPHYEPIPFSSSMNESAPTGITDHIVQVKVNKYGDTWDE

SEQ ID NO: 59335 - protein, 172 aa, Homo sapiens
  Payload ID: 11577
  Gene Symbol: OCIAD1
  Gene Name: OCIA domain containing 1
  ENSP ID: ENSP00000427389
MNGRADFREPNAEVPRPIPHIGPDYIPTEEERRVFAECNDESFWFRSVPLAATSMLITQGLISKGILSSHPKYGSIPKLILACIMGYFAGKLSYVKTCQEKFKKLENSPLGEALRSGQARRSSPPGHYYQKSKYDSSVSGQSSFVTSPAADNIEMLPHYEPIPFSSSMNESA

SEQ ID NO: 59336 - protein, 99 aa, Homo sapiens
  Payload ID: 11578
  Gene Symbol: OCIAD2
  Gene Name: OCIA domain containing 2
  Uniprot ID: Q56VL3
  ENSP ID: ENSP00000273860
MASASARGNQDKDAHFPPPSKQSLLFCPKSKLHIHRAEISKIMRECQEESFWKRALPFSLVSMLVTQGLVYQGYLAANSRFGSLPKVARTASLPVRNAK

SEQ ID NO: 59337 - protein, 88 aa, Homo sapiens
  Payload ID: 11578
  Gene Symbol: OCIAD2
  Gene Name: OCIA domain containing 2
  ENSP ID: ENSP00000370873
MASASARGNQDKDAHFPPPSKQSLLFCPKSKLHIHRAEISKIMRECQEESFWKRALPFSLVSMLVTQGLVYQGYLAANSRFGSLPKVA

SEQ ID NO: 59338 - protein, 154 aa, Homo sapiens
  Payload ID: 11578
  Gene Symbol: OCIAD2
  Gene Name: OCIA domain containing 2
  Uniprot ID: Q56VL3
  ENSP ID: ENSP00000423014
MASASARGNQDKDAHFPPPSKQSLLFCPKSKLHIHRAEISKIMRECQEESFWKRALPFSLVSMLVTQGLVYQGYLAANSRFGSLPKVALAGLLGFGLGKVSYIGVCQSKFHFFEDQLRGAGFGPQHNRHCLLTCEECKIKHGLSEKGDSQPSAS

SEQ ID NO: 59339 - protein, 61 aa, Homo sapiens
  Payload ID: 11578
  Gene Symbol: OCIAD2
  Gene Name: OCIA domain containing 2
  ENSP ID: ENSP00000425452
MASASARGNQDKDAHFPPPSKQSLLFCPKSKLHIHRAEISKIMRECQEESFWKRACLSPRD

SEQ ID NO: 59340 - protein, 99 aa, Homo sapiens; identical to SEQ ID NO: 59336
  Payload ID: 11578
  Gene Symbol: OCIAD2
  Gene Name: OCIA domain containing 2
  Uniprot ID: Q56VL3
  ENSP ID: ENSP00000483997

SEQ ID NO: 59341 - protein, 893 aa, Homo sapiens
  Payload ID: 11579
  Gene Symbol: OCRL
  Gene Name: oculocerebrorenal syndrome of Lowe
  Uniprot ID: Q01968
  ENSP ID: ENSP00000349635
MEPPLPVGAQPLATVEGMEMKGPLREPCALTLAQRNGQYELIIQLHEKEQHVQDIIPINSHFRCVQEAEETLLIDIASNSGCKIRVQGDWIRERRFEIPDEEHCLKFLSAVLAAQKAQSQLLVPEQKDSSSWYQKLDTKDKPSVFSGLLGFEDNFSSMNLDKKINSQNQPTGIHREPPPPPFSVNKMLPREKEASNKEQPKVTNTMRKLFVPNTQSGQREGLIKHILAKREKEYVNIQTFRFFVGTWNVNGQSPDSGLEPWLNCDPNPPDIYCIGFQELDLSTEAFFYFESVKEQEWSMAVERGLHSKAKYKKVQLVRLVGMMLLIFARKDQCRYIRDIATETVGTGIMGKMGNKGGVAVRFVFHNTTFCIVNSHLAAHVEDFERRNQDYKDICARMSFVVPNQTLPQLNIMKHEVVIWLGDLNYRLCMPDANEVKSLINKKDLQRLLKFDQLNIQRTQKKAFVDFNEGEIKFIPTYKYDSKTDRWDSSGKCRVPAWCDRILWRGTNVNQLNYRSHMELKTSDHKPVSALFHIGVKVVDERRYRKVFEDSVRIMDRMENDFLPSLELSRREFVFENVKFRQLQKEKFQISNNGQVPCHFSFIPKLNDSQYCKPWLRAEPFEGYLEPNETVDISLDVYVSKDSVTILNSGEDKIEDILVLHLDRGKDYFLTISGNYLPSCFGTSLEALCRMKRPIREVPVTKLIDLEKSLLQMVPLDEGASERPLQVPKEIWLLVDHLFKYACHQEDLFQTPGMQEELQQIIDCLDTSIPETIPGSNHSVAEALLIFLEALPEPVICYELYQRCLDSAYDPRICRQVISQLPRCHRNVFRYLMAFLRELLKFSEYNSVNANMIATLFTSLLLRPPPNLMARQTPSDRQRAIQFLLGFLLGSEED

SEQ ID NO: 59342 - protein, 901 aa, Homo sapiens
  Payload ID: 11579
  Gene Symbol: OCRL
  Gene Name: oculocerebrorenal syndrome of Lowe
  Uniprot ID: Q01968
  ENSP ID: ENSP00000360154
MEPPLPVGAQPLATVEGMEMKGPLREPCALTLAQRNGQYELIIQLHEKEQHVQDIIPINSHFRCVQEAEETLLIDIASNSGCKIRVQGDWIRERRFEIPDEEHCLKFLSAVLAAQKAQSQLLVPEQKDSSSWYQKLDTKDKPSVFSGLLGFEDNFSSMNLDKKINSQNQPTGIHREPPPPPFSVNKMLPREKEASNKEQPKVTNTMRKLFVPNTQSGQREGLIKHILAKREKEYVNIQTFRFFVGTWNVNGQSPDSGLEPWLNCDPNPPDIYCIGFQELDLSTEAFFYFESVKEQEWSMAVERGLHSKAKYKKVQLVRLVGMMLLIFARKDQCRYIRDIATETVGTGIMGKMGNKGGVAVRFVFHNTTFCIVNSHLAAHVEDFERRNQDYKDICARMSFVVPNQTLPQLNIMKHEVVIWLGDLNYRLCMPDANEVKSLINKKDLQRLLKFDQLNIQRTQKKAFVDFNEGEIKFIPTYKYDSKTDRWDSSGKCRVPAWCDRILWRGTNVNQLNYRSHMELKTSDHKPVSALFHIGVKVVDERRYRKVFEDSVRIMDRMENDFLPSLELSRREFVFENVKFRQLQKEKFQISNNGQVPCHFSFIPKLNDSQYCKPWLRAEPFEGYLEPNETVDISLDVYVSKDSVTILNSGEDKIEDILVLHLDRGKDYFLTISGNYLPSCFGTSLEALCRMKRPIREVPVTKLIDLEEDSFLEKEKSLLQMVPLDEGASERPLQVPKEIWLLVDHLFKYACHQEDLFQTPGMQEELQQIIDCLDTSIPETIPGSNHSVAEALLIFLEALPEPVICYELYQRCLDSAYDPRICRQVISQLPRCHRNVFRYLMAFLRELLKFSEYNSVNANMIATLFTSLLLRPPPNLMARQTPSDRQRAIQFLLGFLLGSEED

SEQ ID NO: 59343 - protein, 814 aa, Homo sapiens
  Payload ID: 11580
  Gene Symbol: OCA2
  Gene Name: oculocutaneous albinism II
  Uniprot ID: Q04671
  ENSP ID: ENSP00000261276
MHLEGRDGRRYPGAPAVELLQTSVPSGLAELVAGKRRLPRGAGGADPSHSCPRGAAGQSSWAPAGQEFASFLTKGRSHSSLPQMSSSRSKDSCFTENTPLLRNSLQEKGSRCIPVYHPEFITAEESWEDSSADWERRYLLSREVSGLSASASSEKGDLLDSPHIRLRLSKLRRCVQWLKVMGLFAFVVLCSILFSLYPDQGKLWQLLALSPLENYSVNLSSHVDSTLLQVDLAGALVASGPSRPGREEHIVVELTQADALGSRWRRPQQVTHNWTVYLNPRRSEHSVMSRTFEVLTRETVSISIRASLQQTQAVPLLMAHQYLRGSVETQVTIATAILAGVYALIIFERPSLTHVVEWIDFETLALLFGMMILVAIFSETGFFDYCAVKAYRLSRGRVWAMIIMLCLIAAVLSAFLDNVTTMLLFTPVTIRLCEVLNLDPRQVLIAEVIFTNIGGAATAIGDPPNVIIVSNQELRKMGLDFAGFTAHMFIGICLVLLVCFPLLRLLYWNRKLYNKEPSEIVELKHEIHVWRLTAQRISPASREETAVRRLLLGKVLALEHLLARRLHTFHRQISQEDKNWETNIQELQKKHRISDGILLAKCLTVLGFVIFMFFLNSFVPGIHLDLGWIAILGAIWLLILADIHDFEIILHRVEWATLLFFAALFVLMEALAHLHLIEYVGEQTALLIKMVPEEQRLIAAIVLVVWVSALASSLIDNIPFTATMIPVLLNLSHDPEVGLPAPPLMYALAFGACLGGNGTLIGASANVVCAGIAEQHGYGFSFMEFFRLGFPMMVVSCTVGMCYLLVAHVVVGWN

SEQ ID NO: 59344 - protein, 838 aa, Homo sapiens
  Payload ID: 11580
  Gene Symbol: OCA2
  Gene Name: oculocutaneous albinism II
  Uniprot ID: Q04671
  ENSP ID: ENSP00000346659
MHLEGRDGRRYPGAPAVELLQTSVPSGLAELVAGKRRLPRGAGGADPSHSCPRGAAGQSSWAPAGQEFASFLTKGRSHSSLPQMSSSRSKDSCFTENTPLLRNSLQEKGSRCIPVYHPEFITAEESWEDSSADWERRYLLSREVSGLSASASSEKGDLLDSPHIRLRLSKLRRCVQWLKVMGLFAFVVLCSILFSLYPDQGKLWQLLALSPLENYSVNLSSHVDSTLLQVDLAGALVASGPSRPGREEHIVVELTQADALGSRWRRPQQVTHNWTVYLNPRRSEHSVMSRTFEVLTRETVSISIRASLQQTQAVPLLMAHQYLRGSVETQVTIATAILAGVYALIIFEIVHRTLAAMLGSLAALAALAVIGDRPSLTHVVEWIDFETLALLFGMMILVAIFSETGFFDYCAVKAYRLSRGRVWAMIIMLCLIAAVLSAFLDNVTTMLLFTPVTIRLCEVLNLDPRQVLIAEVIFTNIGGAATAIGDPPNVIIVSNQELRKMGLDFAGFTAHMFIGICLVLLVCFPLLRLLYWNRKLYNKEPSEIVELKHEIHVWRLTAQRISPASREETAVRRLLLGKVLALEHLLARRLHTFHRQISQEDKNWETNIQELQKKHRISDGILLAKCLTVLGFVIFMFFLNSFVPGIHLDLGWIAILGAIWLLILADIHDFEIILHRVEWATLLFFAALFVLMEALAHLHLIEYVGEQTALLIKMVPEEQRLIAAIVLVVWVSALASSLIDNIPFTATMIPVLLNLSHDPEVGLPAPPLMYALAFGACLGGNGTLIGASANVVCAGIAEQHGYGFSFMEFFRLGFPMMVVSCTVGMCYLLVAHVVVGWN

SEQ ID NO: 59345 - protein, 218 aa, Homo sapiens
  Payload ID: 11580
  Gene Symbol: OCA2
  Gene Name: oculocutaneous albinism II
  ENSP ID: ENSP00000414425
MHLEGRDGRRYPGAPAVELLQTSVPSGLAELVAGKRRLPRGAGGADPSHSCPRGAAGQSSWAPAGQEFASFLTKGRSHSSLPQMSSSRSKDSCFTENTPLLRNSLQEKGSRCIPVYHPEFITAEESWEDSSADWERRYLLSREVSGLSASASSEKGDLLDSPHIRLRLSKLRRCVQWLKVMGLFAFVVLCSVTHNWTVYLNPRRSEHSVMSRTFEVLT

SEQ ID NO: 59346 - protein, 264 aa, Homo sapiens
  Payload ID: 11580
  Gene Symbol: OCA2
  Gene Name: oculocutaneous albinism II
  ENSP ID: ENSP00000415431
MHLEGRDGRRYPGAPAVELLQTSVPSGLAELVAGKRRLPRGAGGADPSHSCPRGAAGQSSWAPAGQEFASFLTKGRSHSSLPQMSSSRSKDSCFTENTPLLRNSLQEKGSRCIPVYHPEFITAEESWEDSSADWERRYLLSREVSGLSASASSEKGDLLDSPHIRLRLSKLRRCVQWLKVMGLFAFVVLCSILFSLYPDQGKLWQLLALSPLENYSVNLSSHVDSTLLQVDLAGALVASGPSRPGREEHIVVELTQADALGSRW

SEQ ID NO: 59347 - protein, 132 aa, Homo sapiens
  Payload ID: 11580
  Gene Symbol: OCA2
  Gene Name: oculocutaneous albinism II
  ENSP ID: ENSP00000484219
MSRTFEVLTRETVSISIRASLQQTQAVPLLMAHQYLRGSVETQVTIATAILAGVYALIIFEIVHRTLAAMLGSLAALAALAVIGDRPSLTHVVEWIDFETLALLFGMMILVAIFSETGFFDYCAVKAYRLSR

SEQ ID NO: 59348 - protein, 748 aa, Homo sapiens
  Payload ID: 11580
  Gene Symbol: OCA2
  Gene Name: oculocutaneous albinism II
  ENSP ID: ENSP00000488119
MHLEGRDGRRYPGAPAVELLQTSVPSGLAELVAGKRRLPRGAGGADPSHSCPRGAAGQSSWAPAGQEFASFLTKGRSHSSLPQMSSSRSKDSCFTENTPLLRNSLQEKGSRCIPVYHPEFITAEESWEDSSADWERRYLLSREVSGLSASASSEKGDLLDSPHIRLRLSKLRRCVQWLKVMGLFAFVVLCSILFSLYPDQGKLWQLLALSPLENYSVNLSSHVDSTLLQVDLAGALVASGPSRPGREEHIVVELTQADALGSRWRRPQQVTHNWTVYLNPRRSEHSVMSRTFEVLTRETVSISIRASLQQTQAVPLLMAHQYLRGSVETQVTIATAILAGVYALIIFEIVHRTLAAMLGSLAALAALAVIGDRPSLTHVVEWIDFETLALLFGMMILVAIFSETGFFDYCAVKAYRLSRGRVWAMIIMLCLIAAVLSAFLDNVTTMLLFTPVTIRLCEVLNLDPRQVLIAEVIFTNIGGAATAIGDPPNVIIVSNQELRKMGLDFAGFTAHMFIGICLVLLVCFPLLRLLYWNRKLYNKEPSEIVELKHEIHVWRLTAQRISPASREETAVRRLLLGKVLALEHLLARRLHTFHRQISQEDKNWETNIQELQKKHRISDGILLAKCLTVLGFVIFMFFLNSFVPGIHLDLGWIAILGAIWLLILADIHDFEIILHRVEWATLLFFAALFVLMEALAHLHLIEYVGEQTALLIKMVPEEQRLIAAIVLVVWVSALASSLIDNIPFTATM

SEQ ID NO: 59349 - protein, 218 aa, Homo sapiens; identical to SEQ ID NO: 59345
  Payload ID: 11580
  Gene Symbol: OCA2
  Gene Name: oculocutaneous albinism II
  ENSP ID: ENSP00000488215

SEQ ID NO: 59350 - protein, 724 aa, Homo sapiens
  Payload ID: 11580
  Gene Symbol: OCA2
  Gene Name: oculocutaneous albinism II
  ENSP ID: ENSP00000488458
MHLEGRDGRRYPGAPAVELLQTSVPSGLAELVAGKRRLPRGAGGADPSHSCPRGAAGQSSWAPAGQEFASFLTKGRSHSSLPQMSSSRSKDSCFTENTPLLRNSLQEKGSRCIPVYHPEFITAEESWEDSSADWERRYLLSREVSGLSASASSEKGDLLDSPHIRLRLSKLRRCVQWLKVMGLFAFVVLCSILFSLYPDQGKLWQLLALSPLENYSVNLSSHVDSTLLQVDLAGALVASGPSRPGREEHIVVELTQADALGSRWRRPQQVTHNWTVYLNPRRSEHSVMSRTFEVLTRETVSISIRASLQQTQAVPLLMAHQYLRGSVETQVTIATAILAGVYALIIFERPSLTHVVEWIDFETLALLFGMMILVAIFSETGFFDYCAVKAYRLSRGRVWAMIIMLCLIAAVLSAFLDNVTTMLLFTPVTIRLCEVLNLDPRQVLIAEVIFTNIGGAATAIGDPPNVIIVSNQELRKMGLDFAGFTAHMFIGICLVLLVCFPLLRLLYWNRKLYNKEPSEIVELKHEIHVWRLTAQRISPASREETAVRRLLLGKVLALEHLLARRLHTFHRQISQEDKNWETNIQELQKKHRISDGILLAKCLTVLGFVIFMFFLNSFVPGIHLDLGWIAILGAIWLLILADIHDFEIILHRVEWATLLFFAALFVLMEALAHLHLIEYVGEQTALLIKMVPEEQRLIAAIVLVVWVSALASSLIDNIPFTATM

SEQ ID NO: 59351 - protein, 264 aa, Homo sapiens; identical to SEQ ID NO: 59346
  Payload ID: 11580
  Gene Symbol: OCA2
  Gene Name: oculocutaneous albinism II
  ENSP ID: ENSP00000488768

SEQ ID NO: 59352 - protein, 44 aa, Homo sapiens
  Payload ID: 11581
  Gene Symbol: OCLM
  Gene Name: oculomedin
  Uniprot ID: Q9Y5M6
  ENSP ID: ENSP00000460371
MGMYPPLLLKIYLSRHISILFYLKILYKSGIIWLSWYSFILLVL

SEQ ID NO: 59353 - protein, 266 aa, Homo sapiens
  Payload ID: 11582
  Gene Symbol: OSR1
  Gene Name: odd-skipped related transciption factor 1
  Uniprot ID: Q8TAX0
  ENSP ID: ENSP00000272223
MGSKTLPAPVPIHPSLQLTNYSFLQAVNGLPTVPSDHLPNLYGFSALHAVHLHQWTLGYPAMHLPRSSFSKVPGTVSSLVDARFQLPAFPWFPHVIQPKPEITAGGSVPALKTKPRFDFANLALAATQEDPAKLGRGEGPGSPAGGLGALLDVTKLSPEKKPTRGRLPSKTKKEFVCKFCGRHFTKSYNLLIHERTHTDERPYTCDICHKAFRRQDHLRDHRYIHSKEKPFKCQECGKGFCQSRTLAVHKTLHSQVKELKTSKIKC

SEQ ID NO: 59354 - protein, 312 aa, Homo sapiens
  Payload ID: 11583
  Gene Symbol: OSR2
  Gene Name: odd-skipped related transciption factor 2
  Uniprot ID: Q8N2R0
  ENSP ID: ENSP00000297565
MGSKALPAPIPLHPSLQLTNYSFLQAVNTFPATVDHLQGLYGLSAVQTMHMNHWTLGYPNVHEITRSTITEMAAAQGLVDARFPFPALPFTTHLFHPKQGAIAHVLPALHKDRPRFDFANLAVAATQEDPPKMGDLSKLSPGLGSPISGLSKLTPDRKPSRGRLPSKTKKEFICKFCGRHFTKSYNLLIHERTHTDERPYTCDICHKAFRRQDHLRDHRYIHSKEKPFKCQECGKGFCQSRTLAVHKTLHMQESPHKCPTCGRTFNQRSNLKTHLLTHTDIKPYSCEQCGKVFRRNCDLRRHSLTHTPRQDF

SEQ ID NO: 59355 - protein, 276 aa, Homo sapiens
  Payload ID: 11583
  Gene Symbol: OSR2
  Gene Name: odd-skipped related transciption factor 2
  Uniprot ID: Q8N2R0
  ENSP ID: ENSP00000402862
MGSKALPAPIPLHPSLQLTNYSFLQAVNTFPATVDHLQGLYGLSAVQTMHMNHWTLGYPNVHEITRSTITEMAAAQGLVDARFPFPALPFTTHLFHPKQGAIAHVLPALHKDRPRFDFANLAVAATQEDPPKMGDLSKLSPGLGSPISGLSKLTPDRKPSRGRLPSKTKKEFICKFCGRHFTKSYNLLIHERTHTDERPYTCDICHKAFRRQDHLRDHRYIHSKEKPFKCQECGKGFCQSRTLAVHKTLHMQTSSPTAASSAAKCSGETVICGGTA

SEQ ID NO: 59356 - protein, 433 aa, Homo sapiens
  Payload ID: 11583
  Gene Symbol: OSR2
  Gene Name: odd-skipped related transciption factor 2
  Uniprot ID: Q8N2R0
  ENSP ID: ENSP00000414657
MGLRAEEGKRKPPRSVRGEVSPSQGPLAQEDEARRLRSCTPACHPGKRGKGGHRARRQRSAWDLTTHPLTHRSQELRGAAATEGFLYVLLSHWVFVGAPRPPASDSWKKGLVPSAPPASRKMGSKALPAPIPLHPSLQLTNYSFLQAVNTFPATVDHLQGLYGLSAVQTMHMNHWTLGYPNVHEITRSTITEMAAAQGLVDARFPFPALPFTTHLFHPKQGAIAHVLPALHKDRPRFDFANLAVAATQEDPPKMGDLSKLSPGLGSPISGLSKLTPDRKPSRGRLPSKTKKEFICKFCGRHFTKSYNLLIHERTHTDERPYTCDICHKAFRRQDHLRDHRYIHSKEKPFKCQECGKGFCQSRTLAVHKTLHMQESPHKCPTCGRTFNQRSNLKTHLLTHTDIKPYSCEQCGKVFRRNCDLRRHSLTHTPRQDF

SEQ ID NO: 59357 - protein, 213 aa, Homo sapiens
  Payload ID: 11583
  Gene Symbol: OSR2
  Gene Name: odd-skipped related transciption factor 2
  ENSP ID: ENSP00000429910
MGSKALPAPIPLHPSLQLTNYSFLQAVNTFPATVDHLQGLYGLSAVQTMHMNHWTLGYPNVHEITRSTITEMAAAQGLVDARFPFPALPFTTHLFHPKQGAIAHVLPALHKDRPRFDFANLAVAATQEDPPKMGDLSKLSPGLGSPISGLSKLTPDRKPSRGRLPSKTKKEFICKFCGRHFTKSYNLLIHERTHTDERPYTCDICHKAFRRQD

SEQ ID NO: 59358 - protein, 288 aa, Homo sapiens
  Payload ID: 11583
  Gene Symbol: OSR2
  Gene Name: odd-skipped related transciption factor 2
  ENSP ID: ENSP00000430041
MGSKALPAPIPLHPSLQLTNYSFLQAVNTFPATVDHLQGLYGLSAVQTMHMNHWTLGYPNVHEITRSTITEMAAAQGLVDARFPFPALPFTTHLFHPKQGAIAHVLPALHKDRPRFDFANLAVAATQEDPPKMGDLSKLSPGLGSPISGLSKLTPDRKPSRGRLPSKTKKEFICKFCGRHFTKSYNLLIHERTHTDERPYTCDICHKAFRRQDHLRDHRYIHSKEKPFKCQECGKGFCQSRTLAVHKTLHMQVSLFSCLKTVAGSCYHYCFAKGVQWQTLSLKRLYLD

SEQ ID NO: 59359 - protein, 270 aa, Homo sapiens
  Payload ID: 11583
  Gene Symbol: OSR2
  Gene Name: odd-skipped related transciption factor 2
  ENSP ID: ENSP00000430074
MKRAGFALARRLAIRGFLYVLLSHWVFVGAPRPPASDSWKKGLVPSAPPASRKMGSKALPAPIPLHPSLQLTNYSFLQAVNTFPATVDHLQGLYGLSAVQTMHMNHWTLGYPNVHEITRSTITEMAAAQGLVDARFPFPALPFTTHLFHPKQGAIAHVLPALHKDRPRFDFANLAVAATQEDPPKMGDLSKLSPGLGSPISGLSKLTPDRKPSRGRLPSKTKKEFICKFCGRHFTKSYNLLIHERTHTDERPYTCDICHKAFRRQDHLRD

SEQ ID NO: 59360 - protein, 312 aa, Homo sapiens; identical to SEQ ID NO: 59354
  Payload ID: 11583
  Gene Symbol: OSR2
  Gene Name: odd-skipped related transciption factor 2
  Uniprot ID: Q8N2R0
  ENSP ID: ENSP00000430780

SEQ ID NO: 59361 - protein, 279 aa, Homo sapiens
  Payload ID: 11584
  Gene Symbol: ODAM
  Gene Name: odontogenic, ameloblast asssociated
  Uniprot ID: A1E959
  ENSP ID: ENSP00000379401
MKIIILLGFLGATLSAPLIPQRLMSASNSNELLLNLNNGQLLPLQLQGPLNSWIPPFSGILQQQQQAQIPGLSQFSLSALDQFAGLLPNQIPLTGEASFAQGAQAGQVDPLQLQTPPQTQPGPSHVMPYVFSFKMPQEQGQMFQYYPVYMVLPWEQPQQTVPRSPQQTRQQQYEEQIPFYAQFGYIPQLAEPAISGGQQQLAFDPQLGTAPEIAVMSTGEEIPYLQKEAINFRHDSAGVFMPSTSPKPSTTNVFTSAVDQTITPELPEEKDKTDSLREP

SEQ ID NO: 59362 - protein, 30 aa, Homo sapiens
  Payload ID: 11584
  Gene Symbol: ODAM
  Gene Name: odontogenic, ameloblast asssociated
  ENSP ID: ENSP00000422100
QTPPQTQPGPSHVMPYVFSFKMPQEQGQNI

SEQ ID NO: 59363 - protein, 253 aa, Homo sapiens
  Payload ID: 11584
  Gene Symbol: ODAM
  Gene Name: odontogenic, ameloblast asssociated
  ENSP ID: ENSP00000423070
MKIIILLGFLGATLSAPLLLNLNNGQLLPLQLQGPLNSWIPPFSGILQQQQQAQIPGLSQFSLSALDQFAGLLPNQIPLTGEASFAQGAQAGQVDPLQLQTPPQTQPGPSHVMPYVFSFKMPQEQGQMFQYYPVYMVLPWEQPQQTVPRSPQQTRQQQYEEQIPFYAQFGYIPQLAEPAISGGQQQLAFDPQLGTAPEIAVMSTGEEIPYLQKEAINFRHDSAGVFMPSTSPKPSTTNVFTSAVDQTITPELP

SEQ ID NO: 59364 - protein, 216 aa, Homo sapiens
  Payload ID: 11584
  Gene Symbol: ODAM
  Gene Name: odontogenic, ameloblast asssociated
  ENSP ID: ENSP00000426106
GPLNSWIPPFSGILQQQQQAQIPGLSQFSLSALDQFAGLLPNQIPLTGEASFAQGAQAGQVDPLQLQTPPQTQPGPSHVMPYVFSFKMPQEQGQMFQYYPVYMVLPWEQPQQTVPRSPQQTRQQQYEEQAISGGQQQLAFDPQLGTAPEIAVMSTGEEIPYLQKEAINFRHDSAGVFMPSTSPKPSTTNVFTSAVDQTITPELPEEKDKTDSLREP

SEQ ID NO: 59365 - protein, 147 aa, Homo sapiens
  Payload ID: 11585
  Gene Symbol: OBP2A
  Gene Name: odorant binding protein 2A
  ENSP ID: ENSP00000340950
MKTLFLGVTLGLAAALSFTLEEEDEGGSVHPEENPDAEDGGAWQIQRLWGQEAHIPAGAARDGRLRLLLQRPAPWGPALHGKACGICSLQGRAAVPTLAHLATSPAGRNPNTNLEALEEFKKLVQHKGLSEEDIFMPLQTGSCVLEH

SEQ ID NO: 59366 - protein, 228 aa, Homo sapiens
  Payload ID: 11585
  Gene Symbol: OBP2A
  Gene Name: odorant binding protein 2A
  ENSP ID: ENSP00000342097
MKTLFLGVTLGLAAALSFTLEEEDITGTWYVKAMVVDKDFPEDRRPRKVSPVKVTALGGGNLEATFTFMREDRCIQKKILMRKTEEPGKFSAYGGRKLIYLQELPGTDDYVFYCKDQRRGGLRYMGKLVASAPCRAVPLSPPWLTWPPHLQVGILIPTWRPWKNLRNWCSTRDSRRRTFSCPCRREAAFSNTRQPPGLHLQSPPYHQTQSPDHLDLPSSHDPSLLPPT

SEQ ID NO: 59367 - protein, 170 aa, Homo sapiens
  Payload ID: 11585
  Gene Symbol: OBP2A
  Gene Name: odorant binding protein 2A
  Uniprot ID: Q9NY56
  ENSP ID: ENSP00000360841
MKTLFLGVTLGLAAALSFTLEEEDITGTWYVKAMVVDKDFPEDRRPRKVSPVKVTALGGGNLEATFTFMREDRCIQKKILMRKTEEPGKFSAYGGRKLIYLQELPGTDDYVFYCKDQRRGGLRYMGKLVGRNPNTNLEALEEFKKLVQHKGLSEEDIFMPLQTGSCVLEH

SEQ ID NO: 59368 - protein, 146 aa, Homo sapiens
  Payload ID: 11585
  Gene Symbol: OBP2A
  Gene Name: odorant binding protein 2A
  ENSP ID: ENSP00000436685
MKTLFLGVTLGLAAALSFTLEEEDITGTWYVKAMVVDKDFPEDRRPRKVSPVKVTALGGGNLEATFTFMREDRCIQKKILMRKTEEPGKFSAYGGRKLIYLQELPGTDDYVFYCKDQRRGGLRYMGKLVGPCRCPHLGSPGHLTCR

SEQ ID NO: 59369 - protein, 170 aa, Homo sapiens; identical to SEQ ID NO: 59367
  Payload ID: 11585
  Gene Symbol: OBP2A
  Gene Name: odorant binding protein 2A
  Uniprot ID: Q9NY56
  ENSP ID: ENSP00000441028

SEQ ID NO: 59370 - protein, 85 aa, Homo sapiens
  Payload ID: 11585
  Gene Symbol: OBP2A
  Gene Name: odorant binding protein 2A
  ENSP ID: ENSP00000443986
MKTLFLGVTLGLAAALSFTLEEEDEGGSVHPEENPDAEDGGAWQIQRLWGQEAHIPAGAARDGRLRLLLQRPAPWGPALHGKACG

SEQ ID NO: 59371 - protein, 220 aa, Homo sapiens
  Payload ID: 11585
  Gene Symbol: OBP2A
  Gene Name: odorant binding protein 2A
  ENSP ID: ENSP00000481115
MKTLFLGVTLGLAAALSFTLEEEDITGTWYVKAMVVDKDFPEDRRPRKVSPVKVTALGGGNLEATFTFMREDRCIQKKILMRKTEEPGKFSAYGGRKLIYLQELPGTDDYVFYCKDQRRGGLRYMGKLVASAPCRAVPLSPPWLTWPPHLQVGILIPTWRPWKNLRNWCSTRDSRRRTFSCPCRREAAFSNTRVTPGSAPPEPTLPPDTEPGPPGPTLQP

SEQ ID NO: 59372 - protein, 220 aa, Homo sapiens [sequence omitted]

SEQ ID NO: 59373 - protein, 170 aa, Homo sapiens
  Payload ID: 11586
  Gene Symbol: OBP2B
  Gene Name: odorant binding protein 2B
  Uniprot ID: Q9NPH6
  ENSP ID: ENSP00000361104
MKTLFLGVTLGLAAALSFTLEEEDITGTWYVKAMVVDKDFPEDRRPRKVSPVKVTALGGGKLEATFTFMREDRCIQKKILMRKTEEPGKYSAYGGRKLMYLQELPRRDHYIFYCKDQHHGGLLHMGKLVGRNSDTNREALEEFKKLVQRKGLSEEDIFTPLQTGSCVPEH

SEQ ID NO: 59374 - protein, 165 aa, Homo sapiens
  Payload ID: 11586
  Gene Symbol: OBP2B
  Gene Name: odorant binding protein 2B
  Uniprot ID: Q9NPH6
  ENSP ID: ENSP00000434927
MKTLFLGVTLGLAAALSFTLEEEDITGTWYVKAMVVDKDFPEDRRPRKVSPVKVTALGGGKLEATFTFMREDRCIQKKILMRKTEEPGKYSACLSAVEMDQITPALWEALAIDTLRKLRIGTRRPRIRWGQEAHVPAGAAQEGPLHLLLQRPAPWGPAPHGKACG

SEQ ID NO: 59375 - protein, 170 aa, Homo sapiens; identical to SEQ ID NO: 59373
  Payload ID: 11586
  Gene Symbol: OBP2B
  Gene Name: odorant binding protein 2B
  Uniprot ID: Q9NPH6
  ENSP ID: ENSP00000484615

SEQ ID NO: 59376 - protein, 170 aa, Homo sapiens; identical to SEQ ID NO: 59373
  Payload ID: 11587
  Gene Symbol:
  Gene Name: Odorant-binding protein 2b  [Source:UniProtKB/Swiss-Prot
  Acc:Q9NPH6]
  Uniprot ID: Q9NPH6
  ENSP ID: ENSP00000486108

SEQ ID NO: 59377 - protein, 165 aa, Homo sapiens; identical to SEQ ID NO: 59374
  Payload ID: 11587
  Gene Symbol:
  Gene Name: Odorant-binding protein 2b  [Source:UniProtKB/Swiss-Prot
  Acc:Q9NPH6]
  Uniprot ID: Q9NPH6
  ENSP ID: ENSP00000486815

SEQ ID NO: 59378 - protein, 220 aa, Homo sapiens [sequence omitted]

SEQ ID NO: 59379 - protein, 170 aa, Homo sapiens; identical to SEQ ID NO: 59373
  Payload ID: 11587
  Gene Symbol:
  Gene Name: Odorant-binding protein 2b  [Source:UniProtKB/Swiss-Prot
  Acc:Q9NPH6]
  Uniprot ID: Q9NPH6
  ENSP ID: ENSP00000487521

SEQ ID NO: 59380 - protein, 318 aa, Homo sapiens
  Payload ID: 11588
  Gene Symbol: OLAH
  Gene Name: oleoyl-ACP hydrolase
  Uniprot ID: Q9NV23
  ENSP ID: ENSP00000367462
MERGDQPKRTRNENIFNCLYKNPEATFKLICFPWMGGGSTHFAKWGQDTHDLLEETASHHVAKAGLKLRRSSDPPASAYPCAGVSHRRREPPCLAKILGLFWILIFFMHSLRLPGRESRVEEPLENDISQLVDEVVCALQPVIQDKPFAFFGHSMGSYIAFRTALGLKENNQPEPLHLFLSSATPVHSKAWHRIPKDDELSEEQISHYLMEFGGTPKHFAEAKEFVKQCSPIIRADLNIVRSCTSNVPSKAVLSCDLTCFVGSEDIAKDMEAWKDVTSGNAKIYQLPGGHFYLLDPANEKLIKNYIIKCLEVSSISNF

SEQ ID NO: 59381 - protein, 137 aa, Homo sapiens
  Payload ID: 11588
  Gene Symbol: OLAH
  Gene Name: oleoyl-ACP hydrolase
  ENSP ID: ENSP00000367470
MERGDQPKRTRQATPCATRLFLHPRGSDTLPLNENIFNCLYKNPEATFKLICFPWMGGGSTHFAKWGQDTHDLLEVHSLRLPGRESRVEEPLENDISQLVDEVVCALQPVIQDKPFAFFGHRYLISVLKDFRGVSSI

SEQ ID NO: 59382 - protein, 265 aa, Homo sapiens
  Payload ID: 11588
  Gene Symbol: OLAH
  Gene Name: oleoyl-ACP hydrolase
  Uniprot ID: Q9NV23
  ENSP ID: ENSP00000367473
MERGDQPKRTRNENIFNCLYKNPEATFKLICFPWMGGGSTHFAKWGQDTHDLLEVHSLRLPGRESRVEEPLENDISQLVDEVVCALQPVIQDKPFAFFGHSMGSYIAFRTALGLKENNQPEPLHLFLSSATPVHSKAWHRIPKDDELSEEQISHYLMEFGGTPKHFAEAKEFVKQCSPIIRADLNIVRSCTSNVPSKAVLSCDLTCFVGSEDIAKDMEAWKDVTSGNAKIYQLPGGHFYLLDPANEKLIKNYIIKCLEVSSISNF

SEQ ID NO: 59383 - protein, 143 aa, Homo sapiens
  Payload ID: 11588
  Gene Symbol: OLAH
  Gene Name: oleoyl-ACP hydrolase
  ENSP ID: ENSP00000399290
MERGDQPKRTRNENIFNCLYKNPEATFKLICFPWMGGGSTHFAKWGQDTHDLLEVHSLRLPGRESRVEEPLENDISQLVDEVVCALQPVIQDKPFAFFGHSMGSYIAFRTALGLKENNQPEPLHLFLSSATPVHSKAWHRIPK

SEQ ID NO: 59384 - protein, 96 aa, Homo sapiens
  Payload ID: 11588
  Gene Symbol: OLAH
  Gene Name: oleoyl-ACP hydrolase
  ENSP ID: ENSP00000399449
MERGDQPKRTRNENIFNCLYKNPEATFKLICFPWMGGGSTHFAKWGQDTHDLLEETASHHVAKAGLKLRRSSDPPASAYPCAGVSHRRREPPCLAK

SEQ ID NO: 59385 - protein, 181 aa, Homo sapiens
  Payload ID: 11588
  Gene Symbol: OLAH
  Gene Name: oleoyl-ACP hydrolase
  ENSP ID: ENSP00000399663
MERGDQPKRTRNENIFNCLYKNPEATFKLICFPWMGGGSTHFAKWGQDTHDLLEVHSLRLPGRESRVEEPLENDISQLVDEVVCALQPVIQDKPFAFFGHSMGSYIAFRTALGLKENNQPEPLHLFLSSATPVHSKAWHRIPKDDELSEEQISHYLMEFGGTPKHFAEAKEFVKQCSPIIR

SEQ ID NO: 59386 - protein, 467 aa, Homo sapiens
  Payload ID: 11589
  Gene Symbol: OLFM1
  Gene Name: olfactomedin 1
  Uniprot ID: Q99784
  ENSP ID: ENSP00000252854
MPGRWRWQRDMHPARKLLSLLFLILMGTELTQVLPTNPEESWQVYSSAQDSEGRCICTVVAPQQTMCSRDARTKQLRQLLEKVQNMSQSIEVLDRRTQRDLQYVEKMENQMKGLESKFKQVEESHKQHLARQFKAIKAKMDELRPLIPVLEEYKADAKLVLQFKEEVQNLTSVLNELQEEIGAYDYDELQSRVSNLEERLRACMQKLACGKLTGISDPVTVKTSGSRFGSWMTDPLAPEGDNRVWYMDGYHNNRFVREYKSMVDFMNTDNFTSHRLPHPWSGTGQVVYNGSIYFNKFQSHIIIRFDLKTETILKTRSLDYAGYNNMYHYAWGGHSDIDLMVDESGLWAVYATNQNAGNIVVSRLDPVSLQTLQTWNTSYPKRSAGEAFIICGTLYVTNGYSGGTKVHYAYQTNASTYEYIDIPFQNKYSHISMLDYNPKDRALYAWNNGHQILYNVTLFHVIRSDEL

SEQ ID NO: 59387 - protein, 135 aa, Homo sapiens
  Payload ID: 11589
  Gene Symbol: OLFM1
  Gene Name: olfactomedin 1
  Uniprot ID: Q99784
  ENSP ID: ENSP00000277415
MPGRWRWQRDMHPARKLLSLLFLILMGTELTQVLPTNPEESWQVYSSAQDSEGRCICTVVAPQQTMCSRDARTKQLRQLLEKVQNMSQSIEVLDRRTQRDLQYVEKMENQMKGLESKFKQVEESHKQHLARQFKG

SEQ ID NO: 59388 - protein, 163 aa, Homo sapiens
  Payload ID: 11589
  Gene Symbol: OLFM1
  Gene Name: olfactomedin 1
  ENSP ID: ENSP00000340318
MEGPGGSGFHLRLEAFCKCKSPINVFDPVRPALQVGLTRVLPTNPEESWQVYSSAQDSEGRCICTVVAPQQTMCSRDARTKQLRQLLEKVQNMSQSIEVLDRRTQRDLQYVEKMENQMKGLESKFKQVEESHKQHLARQFKAIKAKMDELRPLIPVLEEYKAD

SEQ ID NO: 59389 - protein, 485 aa, Homo sapiens
  Payload ID: 11589
  Gene Symbol: OLFM1
  Gene Name: olfactomedin 1
  Uniprot ID: Q99784
  ENSP ID: ENSP00000360858
MSVPLLKIGVVLSTMAMITNWMSQTLPSLVGLNTTKLSAAGGGTLDRSTGVLPTNPEESWQVYSSAQDSEGRCICTVVAPQQTMCSRDARTKQLRQLLEKVQNMSQSIEVLDRRTQRDLQYVEKMENQMKGLESKFKQVEESHKQHLARQFKAIKAKMDELRPLIPVLEEYKADAKLVLQFKEEVQNLTSVLNELQEEIGAYDYDELQSRVSNLEERLRACMQKLACGKLTGISDPVTVKTSGSRFGSWMTDPLAPEGDNRVWYMDGYHNNRFVREYKSMVDFMNTDNFTSHRLPHPWSGTGQVVYNGSIYFNKFQSHIIIRFDLKTETILKTRSLDYAGYNNMYHYAWGGHSDIDLMVDESGLWAVYATNQNAGNIVVSRLDPVSLQTLQTWNTSYPKRSAGEAFIICGTLYVTNGYSGGTKVHYAYQTNASTYEYIDIPFQNKYSHISMLDYNPKDRALYAWNNGHQILYNVTLFHVIRSDEL

SEQ ID NO: 59390 - protein, 458 aa, Homo sapiens
  Payload ID: 11589
  Gene Symbol: OLFM1
  Gene Name: olfactomedin 1
  Uniprot ID: Q99784
  ENSP ID: ENSP00000360861
MGEAPGREGRGPCPQLESPRRRRVLPTNPEESWQVYSSAQDSEGRCICTVVAPQQTMCSRDARTKQLRQLLEKVQNMSQSIEVLDRRTQRDLQYVEKMENQMKGLESKFKQVEESHKQHLARQFKAIKAKMDELRPLIPVLEEYKADAKLVLQFKEEVQNLTSVLNELQEEIGAYDYDELQSRVSNLEERLRACMQKLACGKLTGISDPVTVKTSGSRFGSWMTDPLAPEGDNRVWYMDGYHNNRFVREYKSMVDFMNTDNFTSHRLPHPWSGTGQVVYNGSIYFNKFQSHIIIRFDLKTETILKTRSLDYAGYNNMYHYAWGGHSDIDLMVDESGLWAVYATNQNAGNIVVSRLDPVSLQTLQTWNTSYPKRSAGEAFIICGTLYVTNGYSGGTKVHYAYQTNASTYEYIDIPFQNKYSHISMLDYNPKDRALYAWNNGHQILYNVTLFHVIRSDEL

SEQ ID NO: 59391 - protein, 167 aa, Homo sapiens
  Payload ID: 11589
  Gene Symbol: OLFM1
  Gene Name: olfactomedin 1
  ENSP ID: ENSP00000360864
MPGRWRWQRDMHPARKLLSLLFLILMGTELTQNKRENKAEKMGGPESERKTTGEKTLNELPLFCLEAHAGSLALPRMCSPNPNPAVGLCRPAYPQSPSPGAAQTISQSLLERFCMASRRGFLGPRKAWWRVVVVHCCWTDAFIHVHTHTHTCTHRGADTCREEPTRS

SEQ ID NO: 59392 - protein, 129 aa, Homo sapiens
  Payload ID: 11589
  Gene Symbol: OLFM1
  Gene Name: olfactomedin 1
  ENSP ID: ENSP00000360866
MPGRWRWQRDMHPARKLLSLLFLILMGTELTQDSAAPDSLLRSSKGSTRGSLAAIVIWRGKSESRIAKTPGIFRGGGTLVLPPTHTPEWLILPLGITLPLGAPETGGGDCAAETWKGSQRAGQLCALLA

SEQ ID NO: 59393 - protein, 153 aa, Homo sapiens
  Payload ID: 11589
  Gene Symbol: OLFM1
  Gene Name: olfactomedin 1
  Uniprot ID: Q99784
  ENSP ID: ENSP00000376717
MSVPLLKIGVVLSTMAMITNWMSQTLPSLVGLNTTKLSAAGGGTLDRSTGVLPTNPEESWQVYSSAQDSEGRCICTVVAPQQTMCSRDARTKQLRQLLEKVQNMSQSIEVLDRRTQRDLQYVEKMENQMKGLESKFKQVEESHKQHLARQFKG

SEQ ID NO: 59394 - protein, 99 aa, Homo sapiens
  Payload ID: 11589
  Gene Symbol: OLFM1
  Gene Name: olfactomedin 1
  ENSP ID: ENSP00000437906
  MOD_RES (1)..(1): Any amino acid
XSHKQHLARQFKAIKAKMDELRPLIPVLEEYKADAKLVLQFKEEVQNLTSVLNELQEEIGAYDYDELQSRVSNLEERLRACMQKLGVVHGRLSQQPLRT

SEQ ID NO: 59395 - protein, 208 aa, Homo sapiens
  Payload ID: 11589
  Gene Symbol: OLFM1
  Gene Name: olfactomedin 1
  ENSP ID: ENSP00000443806
MSQSIEVLDRRTQRDLQYVEKMENQMKGLESKFKQVEESHKQHLARQFKAIKAKMDELRPLIPVLEEYKADAKLVLQFKEEVQNLTSVLNELQEEIGAYDYDELQSRVSNLEERLRACMQKLACGKLTGISDPVTVKTSGSRFGSWMTDPLAPEGDNRVWYMDGYHNNRFVREYKSMVDFMNTDNFTSHRLPHPWSGTGQVVYNGSIY

SEQ ID NO: 59396 - protein, 129 aa, Homo sapiens
  Payload ID: 11589
  Gene Symbol: OLFM1
  Gene Name: olfactomedin 1
  ENSP ID: ENSP00000444296
MCSRDARTKQLRQLLEKVQNMSQSIEVLDRRTQRDLQYVEKMENQMKGLESKFKQVEESHKQHLARQFKAIKAKMDELRPLIPVLEEYKADAKLVLQFKEEVQNLTSVLNELQEEIGAYDYDELQSRVS

SEQ ID NO: 59397 - protein, 168 aa, Homo sapiens
  Payload ID: 11589
  Gene Symbol: OLFM1
  Gene Name: olfactomedin 1
  ENSP ID: ENSP00000479508
MPGRWRWQRDMHPARKLLSLLFLILMGTELTQNKRENKAEKMGGPESERKTTGEKTLNELPLFCLEAHAGSLALPRMCSPNPNPAVGLCRPAYPQSPSPGAAQTISQSLLERFCMASRRVFLAPGRPGGGWWLCTVAGQMHSFMCTHTHTHAHTGEQIPAEKSQPGPD

SEQ ID NO: 59398 - protein, 454 aa, Homo sapiens
  Payload ID: 11590
  Gene Symbol: OLFM2
  Gene Name: olfactomedin 2
  Uniprot ID: O95897
  ENSP ID: ENSP00000264833
MWPLTVPPPLLLLLCSGLAGQTLFQNPEEGWQLYTSAQAPDGKCICTAVIPAQSTCSRDGRSRELRQLMEKVQNVSQSMEVLELRTYRDLQYVRGMETLMRSLDARLRAADGSLSAKSFQELKDRMTELLPLSSVLEQYKADTRTIVRLREEVRNLSGSLAAIQEEMGAYGYEDLQQRVMALEARLHACAQKLGCGKLTGVSNPITVRAMGSRFGSWMTDTMAPSADSRVWYMDGYYKGRRVLEFRTLGDFIKGQNFIQHLLPQPWAGTGHVVYNGSLFYNKYQSNVVVKYHFRSRSVLVQRSLPGAGYNNTFPYSWGGFSDMDFMVDESGLWAVYTTNQNAGNIVVSRLDPHTLEVMRSWDTGYPKRSAGEAFMICGVLYVTNSHLAGAKVYFAYFTNTSSYEYTDVPFHNQYSHISMLDYNPRERALYTWNNGHQVLYNVTLFHVISTSGDP

SEQ ID NO: 59399 - protein, 376 aa, Homo sapiens
  Payload ID: 11590
  Gene Symbol: OLFM2
  Gene Name: olfactomedin 2
  ENSP ID: ENSP00000464877
MEVLELRTYRDLQYVRGMETLMRSLDARLRAADGSLSAKSFQELKDRMTELLPLSSVLEQYKADTRTIVRLREEVRNLSGSLAAIQEEMGAYGYEDLQQRVMALEARLHACAQKLGCGKLTGVSNPITVRAMGSRFGSWMTDTMAPSADSRVWYMDGYYKGRRVLEFRTLGDFIKGQNFIQHLLPQPWAGTGHVVYNGSLFYNKYQSNVVVKYHFRSRSVLVQRSLPGAGYNNTFPYSWGGFSDMDFMVDESGLWAVYTTNQNAGNIVVSRLDPHTLEVMRSWDTGYPKRSAGEAFMICGVLYVTNSHLAGAKVYFAYFTNTSSYEYTDVPFHNQYSHISMLDYNPRERALYTWNNGHQVLYNVTLFHVISTSGDP

SEQ ID NO: 59400 - protein, 335 aa, Homo sapiens
  Payload ID: 11590
  Gene Symbol: OLFM2
  Gene Name: olfactomedin 2
  ENSP ID: ENSP00000465809
MSVPLLKIGAVLSTMAMVTNWMSQTLPSLVGLNGTVSRAGASEKITLFQNPEEGWQLYTSAQAPDGKCICTAVIPAQSTCSRDGRSRELRQLMEKVQNVSQSMEVLELRTYRDLQYVRGMETLMRSLDARLRAADGSLSAKSFQELKDRMTELLPLSSVLEQYKADTRTIVRLREEVRNLSGSLAAIQEEMGAYGYEDLQQRVMALEARLHACAQKLGCGKLTGVSNPITVRAMGSRFGSWMTDTMAPSADSRVWYMDGYYKGRRVLEFRTLGDFIKGQNFIQHLLPQPWAGTGHVVYNGSLFYNKYQSNVVVKYHFRSRSVLVQRSLPGAGYNN

SEQ ID NO: 59401 - protein, 78 aa, Homo sapiens
  Payload ID: 11590
  Gene Symbol: OLFM2
  Gene Name: olfactomedin 2
  ENSP ID: ENSP00000466018
MEVLELRTYRDLQYVRGMETLMRSLDARLRAADGSLSAKSFQELKDRMTELLPLSSVLEQYKADTRTIVRLREEAVGS

SEQ ID NO: 59402 - protein, 478 aa, Homo sapiens
  Payload ID: 11591
  Gene Symbol: OLFM3
  Gene Name: olfactomedin 3
  Uniprot ID: Q96PB7
  ENSP ID: ENSP00000345192
MSPPLLKLGAVLSTMAMISNWMSQTLPSLVGLNTTRLSTPDTLTQISPKEGWQVYSSAQDPDGRCICTVVAPEQNLCSRDAKSRQLRQLLEKVQNMSQSIEVLNLRTQRDFQYVLKMETQMKGLKAKFRQIEDDRKTLMTKHFQELKEKMDELLPLIPVLEQYKTDAKLITQFKEEIRNLSAVLTGIQEEIGAYDYEELHQRVLSLETRLRDCMKKLTCGKLMKITGPVTVKTSGTRFGAWMTDPLASEKNNRVWYMDSYTNNKIVREYKSIADFVSGAESRTYNLPFKWAGTNHVVYNGSLYFNKYQSNIIIKYSFDMGRVLAQRSLEYAGFHNVYPYTWGGFSDIDLMADEIGLWAVYATNQNAGNIVISQLNQDTLEVMKSWSTGYPKRSAGESFMICGTLYVTNSHLTGAKVYYSYSTKTSTYEYTDIPFHNQYFHISMLDYNARDRALYAWNNGHQVLFNVTLFHIIKTEDDT

SEQ ID NO: 59403 - protein, 458 aa, Homo sapiens
  Payload ID: 11591
  Gene Symbol: OLFM3
  Gene Name: olfactomedin 3
  Uniprot ID: Q96PB7
  ENSP ID: ENSP00000359121
MQATSNLLNLLLLSLFAGLDPSKTQISPKEGWQVYSSAQDPDGRCICTVVAPEQNLCSRDAKSRQLRQLLEKVQNMSQSIEVLNLRTQRDFQYVLKMETQMKGLKAKFRQIEDDRKTLMTKHFQELKEKMDELLPLIPVLEQYKTDAKLITQFKEEIRNLSAVLTGIQEEIGAYDYEELHQRVLSLETRLRDCMKKLTCGKLMKITGPVTVKTSGTRFGAWMTDPLASEKNNRVWYMDSYTNNKIVREYKSIADFVSGAESRTYNLPFKWAGTNHVVYNGSLYFNKYQSNIIIKYSFDMGRVLAQRSLEYAGFHNVYPYTWGGFSDIDLMADEIGLWAVYATNQNAGNIVISQLNQDTLEVMKSWSTGYPKRSAGESFMICGTLYVTNSHLTGAKVYYSYSTKTSTYEYTDIPFHNQYFHISMLDYNARDRALYAWNNGHQVLFNVTLFHIIKTEDDT

SEQ ID NO: 59404 - protein, 140 aa, Homo sapiens
  Payload ID: 11591
  Gene Symbol: OLFM3
  Gene Name: olfactomedin 3
  Uniprot ID: Q96PB7
  ENSP ID: ENSP00000443471
MSQSIEVLNLRTQRDFQYVLKMETQMKGLKAKFRQIEDDRKTLMTKHFQELKEKMDELLPLIPVLEQYKTDAKLITQFKEEIRNLSAVLTGIQEEIGAYDYEELHQRVLSLETRLRDCMKKLIDLKKRKEEEKRQQKGEA

SEQ ID NO: 59405 - protein, 510 aa, Homo sapiens
  Payload ID: 11592
  Gene Symbol: OLFM4
  Gene Name: olfactomedin 4
  Uniprot ID: Q6UX06
  ENSP ID: ENSP00000219022
MRPGLSFLLALLFFLGQAAGDLGDVGPPIPSPGFSSFPGVDSSSSFSSSSRSGSSSSRSLGSGGSVSQLFSNFTGSVDDRGTCQCSVSLPDTTFPVDRVERLEFTAHVLSQKFEKELSKVREYVQLISVYEKKLLNLTVRIDIMEKDTISYTELDFELIKVEVKEMEKLVIQLKESFGGSSEIVDQLEVEIRNMTLLVEKLETLDKNNVLAIRREIVALKTKLKECEASKDQNTPVVHPPPTPGSCGHGGVVNISKPSVVQLNWRGFSYLYGAWGRDYSPQHPNKGLYWVAPLNTDGRLLEYYRLYNTLDDLLLYINARELRITYGQGSGTAVYNNNMYVNMYNTGNIARVNLTTNTIAVTQTLPNAAYNNRFSYANVAWQDIDFAVDENGLWVIYSTEASTGNMVISKLNDTTLQVLNTWYTKQYKPSASNAFMVCGVLYATRTMNTRTEEIFYYYDTNTGKEGKLDIVMHKMQEKVQSINYNPFDQKLYVYNDGYLLNYDLSVLQKPQ

SEQ ID NO: 59406 - protein, 402 aa, Homo sapiens
  Payload ID: 11593
  Gene Symbol: OLFML1
  Gene Name: olfactomedin-like 1
  Uniprot ID: Q6UWY5
  ENSP ID: ENSP00000332511
MMVALRGASALLVLFLAAFLPPPQCTQDPAMVHYIYQRFRVLEQGLEKCTQATRAYIQEFQEFSKNISVMLGRCQTYTSEYKSAVGNLALRVERAQREIDYIQYLREADECIESEDKTLAEMLLQEAEEEKKIRTLLNASCDNMLMGIKSLKIVKKMMDTHGSWMKDAVYNSPKVYLLIGSRNNTVWEFANIRAFMEDNTKPAPRKQILTLSWQGTGQVIYKGFLFFHNQATSNEIIKYNLQKRTVEDRMLLPGGVGRALVYQHSPSTYIDLAVDEHGLWAIHSGPGTHSHLVLTKIEPGTLGVEHSWDTPCRSQDAEASFLLCGVLYVVYSTGGQGPHRITCIYDPLGTISEEDLPNLFFPKRPRSHSMIHYNPRDKQLYAWNEGNQIIYKLQTKRKLPLK

SEQ ID NO: 59407 - protein, 68 aa, Homo sapiens
  Payload ID: 11593
  Gene Symbol: OLFML1
  Gene Name: olfactomedin-like 1
  ENSP ID: ENSP00000431558
MMVALRGASALLVLFLAAFLPPPQCTQDPAMVHYIYQRFRVLEGWKNVPKQRGHTFKNSKSSQKIYLS

SEQ ID NO: 59408 - protein, 402 aa, Homo sapiens; identical to SEQ ID NO: 59406
  Payload ID: 11593
  Gene Symbol: OLFML1
  Gene Name: olfactomedin-like 1
  Uniprot ID: Q6UWY5
  ENSP ID: ENSP00000433455

SEQ ID NO: 59409 - protein, 56 aa, Homo sapiens
  Payload ID: 11593
  Gene Symbol: OLFML1
  Gene Name: olfactomedin-like 1
  ENSP ID: ENSP00000434813
MMVALRGASALLVLFLAAFLPPPQCTQDPAMVHYIYQRFRVLEQGLEKCTQAVTTC

SEQ ID NO: 59410 - protein, 438 aa, Homo sapiens
  Payload ID: 11594
  Gene Symbol: OLFML2A
  Gene Name: olfactomedin-like 2A
  Uniprot ID: Q68BL7
  ENSP ID: ENSP00000288815
MSKRDKAGKDTARGKGKDISKYGSVQKSFADRGLPKPPKEKLLQVEKLRKESGKGSFLQPTAKPRALAQQQAVIRGFTYYKAGKQEVTEAVADNTLQGTSWLEQLPPKVEGRSNSAEPNSAEQDEAEPRSSERVDLASGTPTSIPATTTTATTTPTPTTSLLPTEPPSGPEVSSQGREASCEGTLRAVDPPVRHHSYGRHEGAWMKDPAARDDRIYVTNYYYGNSLVEFRNLENFKQGRWSNMYKLPYNWIGTGHVVYQGAFYYNRAFTKNIIKYDLRQRFVASWALLPDVVYEDTTPWKWRGHSDIDFAVDESGLWVIYPAVDDRDEAQPEVIVLSRLDPGDLSVHRETTWKTRLRRNSYGNCFLVCGILYAVDTYNQQEGQVAYAFDTHTGTDARPQLPFLNEHAYTTQIDYNPKERVLYAWDNGHQLTYTLHFVV

SEQ ID NO: 59411 - protein, 318 aa, Homo sapiens
  Payload ID: 11594
  Gene Symbol: OLFML2A
  Gene Name: olfactomedin-like 2A
  ENSP ID: ENSP00000336425
MAAAALPPRPLLLLPLVLLLSGRPTRADSKVFGDLDQVRMTSEGSDCRCKCIMRPLSKDACSRVRSGRARVEDFYTVETVSSGTDCRCSCTAPPSSLNPCENEWKMEKLKKQAPELLKSIKANLSRENEVVKDSVRHLSEQLRHYENHSAIMLGIKKELSRLGLQLLQKDAAAAPATPATGTGSKAQDTARGKGKDISKYGSVQKSFADRGLPKPPKEKLLQVEKLRKESGKGSFLQPTAKPRALAQQQAVIRGFTYYKAGKQEVTEAVADNTLQGTSWLEQLPPKVEGRSNSAEPNSAEQDEAEPRSSERVDLASGT

SEQ ID NO: 59412 - protein, 652 aa, Homo sapiens
  Payload ID: 11594
  Gene Symbol: OLFML2A
  Gene Name: olfactomedin-like 2A
  Uniprot ID: Q68BL7
  ENSP ID: ENSP00000362682
MAAAALPPRPLLLLPLVLLLSGRPTRADSKVFGDLDQVRMTSEGSDCRCKCIMRPLSKDACSRVRSGRARVEDFYTVETVSSGTDCRCSCTAPPSSLNPCENEWKMEKLKKQAPELLKLQSMVDLLEGTLYSMDLMKVHAYVHKVASQMNTLEESIKANLSRENEVVKDSVRHLSEQLRHYENHSAIMLGIKKELSRLGLQLLQKDAAAAPATPATGTGSKAQDTARGKGKDISKYGSVQKSFADRGLPKPPKEKLLQVEKLRKESGKGSFLQPTAKPRALAQQQAVIRGFTYYKAGKQEVTEAVADNTLQGTSWLEQLPPKVEGRSNSAEPNSAEQDEAEPRSSERVDLASGTPTSIPATTTTATTTPTPTTSLLPTEPPSGPEVSSQGREASCEGTLRAVDPPVRHHSYGRHEGAWMKDPAARDDRIYVTNYYYGNSLVEFRNLENFKQGRWSNMYKLPYNWIGTGHVVYQGAFYYNRAFTKNIIKYDLRQRFVASWALLPDVVYEDTTPWKWRGHSDIDFAVDESGLWVIYPAVDDRDEAQPEVIVLSRLDPGDLSVHRETTWKTRLRRNSYGNCFLVCGILYAVDTYNQQEGQVAYAFDTHTGTDARPQLPFLNEHAYTTQIDYNPKERVLYAWDNGHQLTYTLHFVV

SEQ ID NO: 59413 - protein, 750 aa, Homo sapiens
  Payload ID: 11595
  Gene Symbol: OLFML2B
  Gene Name: olfactomedin-like 2B
  Uniprot ID: Q68BL8
  ENSP ID: ENSP00000294794
MAKPRLLVLYFALIVVPAWVSSIVLTGTSEPPDAQTVAPAEDETLQNEADNQENVLSQLLGDYDKVKAMSEGSDCQCKCVVRPLGRDACQRINAGASRKEDFYTVETITSGSSCKCACVAPPSALNPCEGDFRLQKLREADSQDLKLSTIIDMLEGAFYGLDLLKLHSVTTKLVGRVDKLEEEVSKNLTKENEQIKEDMEEIRTEMNKRGKENCSENILDSMPDIRSALQRDAAAAYAHPEYEERFLQEETVSQQINSIELLQTRPLALPEVVKSQRPLQRQVHLRGRPASQPTVIRGITYYKAKVSEEENDIEEQQDEFFSGDNGVDLLIEDQLLRHNGLMTSVTRRPAATRQGHSTAVTSDLNARTAPWSSALPQPSTSDPSIANHASVGPTLQTTSVSPDPTRESVLQPSPQVPATTVAHTATQQPAAPAPPAVSPREALMEAMHTVPVPPTTVRTDSLGKDAPAGWGTTPASPTLSPEEEDDIRNVIGRCKDTLSTITGPTTQNTYGRNEGAWMKDPLAKDERIYVTNYYYGNTLVEFRNLENFKQGRWSNSYKLPYSWIGTGHVVYNGAFYYNRAFTRNIIKYDLKQRYVAAWAMLHDVAYEEATPWRWQGHSDVDFAVDENGLWLIYPALDDEGFSQEVIVLSKLNAADLSTQKETTWRTGLRRNFYGNCFVICGVLYAVDSYNQRNANISYAFDTHTNTQIVPRLLFENEYSYTTQIDYNPKDRLLYAWDNGHQVTYHVIFAY

SEQ ID NO: 59414 - protein, 233 aa, Homo sapiens
  Payload ID: 11595
  Gene Symbol: OLFML2B
  Gene Name: olfactomedin-like 2B
  Uniprot ID: Q68BL8
  ENSP ID: ENSP00000356915
MKDPLAKDERIYVTNYYYGNTLVEFRNLENFKQGRWSNSYKLPYSWIGTGHVVYNGAFYYNRAFTRNIIKYDLKQRYVAAWAMLHDVAYEEATPWRWQGHSDVDFAVDENGLWLIYPALDDEGFSQEVIVLSKLNAADLSTQKETTWRTGLRRNFYGNCFVICGVLYAVDSYNQRNANISYAFDTHTNTQIVPRLLFENEYSYTTQIDYNPKDRLLYAWDNGHQVTYHVIFAY

SEQ ID NO: 59415 - protein, 751 aa, Homo sapiens
  Payload ID: 11595
  Gene Symbol: OLFML2B
  Gene Name: olfactomedin-like 2B
  ENSP ID: ENSP00000356917
MAKPRLLVLYFALIVVPAWVSSIVLTGTSEPPDAQTVAPAEDETLQNEADNQENVLSQLLGDYDKVKAMSEGSDCQCKCVVRPLGRDACQRINAGASRKEDFYTVETITSGSSCKCACVAPPSALNPCEGDFRLQKLREADSQDLKLSTIIDMLEGAFYGLDLLKLHSVTTKLVGRVDKLEEEVSKNLTKENEQIKEDMEEIRTEMNKRGKENCSENILDSMPDIRSALQRDAAAAYAHPEQYEERFLQEETVSQQINSIELLQTRPLALPEVVKSQRPLQRQVHLRGRPASQPTVIRGITYYKAKVSEEENDIEEQQDEFFSGDNGVDLLIEDQLLRHNGLMTSVTRRPAATRQGHSTAVTSDLNARTAPWSSALPQPSTSDPSIANHASVGPTLQTTSVSPDPTRESVLQPSPQVPATTVAHTATQQPAAPAPPAVSPREALMEAMHTVPVPPTTVRTDSLGKDAPAGWGTTPASPTLSPEEEDDIRNVIGRCKDTLSTITGPTTQNTYGRNEGAWMKDPLAKDERIYVTNYYYGNTLVEFRNLENFKQGRWSNSYKLPYSWIGTGHVVYNGAFYYNRAFTRNIIKYDLKQRYVAAWAMLHDVAYEEATPWRWQGHSDVDFAVDENGLWLIYPALDDEGFSQEVIVLSKLNAADLSTQKETTWRTGLRRNFYGNCFVICGVLYAVDSYNQRNANISYAFDTHTNTQIVPRLLFENEYSYTTQIDYNPKDRLLYAWDNGHQVTYHVIFAY

SEQ ID NO: 59416 - protein, 88 aa, Homo sapiens
  Payload ID: 11595
  Gene Symbol: OLFML2B
  Gene Name: olfactomedin-like 2B
  ENSP ID: ENSP00000435212
TWRTGLRRNFYGNCFVICGVLYAVDSYNQRNANISYAFDTHTNTQIVPRLLFENEYSYTTQIDYNPKDRLLYAWDNGHQVTYHVIFAY

SEQ ID NO: 59417 - protein, 90 aa, Homo sapiens
  Payload ID: 11595
  Gene Symbol: OLFML2B
  Gene Name: olfactomedin-like 2B
  ENSP ID: ENSP00000436707
ETTWRTGLRRNFYGNCFVICGVLYAVDSYNQRNANISYAFDTHTNTQIVPRLLFENEYSYTTQIDYNPKDRLLYAWDNGHQVTYHVIFAY

SEQ ID NO: 59418 - protein, 406 aa, Homo sapiens
  Payload ID: 11596
  Gene Symbol: OLFML3
  Gene Name: olfactomedin-like 3
  Uniprot ID: Q9NRN5
  ENSP ID: ENSP00000322273
MGPSTPLLILFLLSWSGPLQGQQHHLVEYMERRLAALEERLAQCQDQSSRHAAELRDFKNKMLPLLEVAEKEREALRTEADTISGRVDRLEREVDYLETQNPALPCVEFDEKVTGGPGTKGKGRRNEKYDMVTDCGYTISQVRSMKILKRFGGPAGLWTKDPLGQTEKIYVLDGTQNDTAFVFPRLRDFTLAMAARKASRVRVPFPWVGTGQLVYGGFLYFARRPPGRPGGGGEMENTLQLIKFHLANRTVVDSSVFPAEGLIPPYGLTADTYIDLAADEEGLWAVYATREDDRHLCLAKLDPQTLDTEQQWDTPCPRENAEAAFVICGTLYVVYNTRPASRARIQCSFDASGTLTPERAALPYFPRRYGAHASLRYNPRERQLYAWDDGYQIVYKLEMRKKEEEV

SEQ ID NO: 59419 - protein, 386 aa, Homo sapiens
  Payload ID: 11596
  Gene Symbol: OLFML3
  Gene Name: olfactomedin-like 3
  Uniprot ID: Q9NRN5
  ENSP ID: ENSP00000358564
MAQWHCSQRTQAGGHGVGERLAQCQDQSSRHAAELRDFKNKMLPLLEVAEKEREALRTEADTISGRVDRLEREVDYLETQNPALPCVEFDEKVTGGPGTKGKGRRNEKYDMVTDCGYTISQVRSMKILKRFGGPAGLWTKDPLGQTEKIYVLDGTQNDTAFVFPRLRDFTLAMAARKASRVRVPFPWVGTGQLVYGGFLYFARRPPGRPGGGGEMENTLQLIKFHLANRTVVDSSVFPAEGLIPPYGLTADTYIDLAADEEGLWAVYATREDDRHLCLAKLDPQTLDTEQQWDTPCPRENAEAAFVICGTLYVVYNTRPASRARIQCSFDASGTLTPERAALPYFPRRYGAHASLRYNPRERQLYAWDDGYQIVYKLEMRKKEEEV

SEQ ID NO: 59420 - protein, 345 aa, Homo sapiens
  Payload ID: 11596
  Gene Symbol: OLFML3
  Gene Name: olfactomedin-like 3
  ENSP ID: ENSP00000376977
MLPLLEVAEKEREALRTEADTISGRVDRLEREVDYLETQNPALPCVEFDEKVTGGPGTKGKGRRNEKYDMVTDCGYTISQVRSMKILKRFGGPAGLWTKDPLGQTEKIYVLDGTQNDTAFVFPRLRDFTLAMAARKASRVRVPFPWVGTGQLVYGGFLYFARRPPGRPGGGGEMENTLQLIKFHLANRTVVDSSVFPAEGLIPPYGLTADTYIDLAADEEGLWAVYATREDDRHLCLAKLDPQTLDTEQQWDTPCPRENAEAAFVICGTLYVVYNTRPASRARIQCSFDASGTLTPERAALPYFPRRYGAHASLRYNPRERQLYAWDDGYQIVYKLEMRKKEEEV

SEQ ID NO: 59421 - protein, 163 aa, Homo sapiens
  Payload ID: 11597
  Gene Symbol: OMP
  Gene Name: olfactory marker protein
  Uniprot ID: P47874
  ENSP ID: ENSP00000436376
MAEDRPQQPQLDMPLVLDQGLTRQMRLRVESLKQRGEKRQDGEKLLQPAESVYRLNFTQQQRLQFERWNVVLDKPGKVTITGTSQNWTPDLTNLMTRQLLDPTAIFWRKEDSDAIDWNEADALEFGERLSDLAKIRKVMYFLVTFGEGVEPANLKASVVFNQL

SEQ ID NO: 59422 - protein, 314 aa, Homo sapiens
  Payload ID: 11598
  Gene Symbol:
  Gene Name: Olfactory receptor 10A6  [Source:UniProtKB/Swiss-Prot
  Acc:Q8NH74]
  Uniprot ID: Q8NH74
  ENSP ID: ENSP00000478945
MERQNQSCVVEFILLGFSNYPELQGQLFVAFLVIYLVTLIGNAIIIVIVSLDQSLHVPMYLFLLNLSVVDLSFSAVIMPEMLVVLSTEKTTISFGGCFAQMYFILLFGGAECFLLGAMAYDRFAAICHPLNYQMIMNKGVFMKLIIFSWALGFMLGTVQTSWVSSFPFCGLNEINHISCETPAVLELACADTFLFEIYAFTGTFLIILVPFLLILLSYIRVLFAILKMPSTTGRQKAFSTCAAHLTSVTLFYGTASMTYLQPKSGYSPETKKVMSLSYSLLTPLLNLLIYSLRNSEMKRALMKLWRRRVVLHTI

SEQ ID NO: 59423 - protein, 314 aa, Homo sapiens; identical to SEQ ID NO: 59422
  Payload ID: 11598
  Gene Symbol:
  Gene Name: Olfactory receptor 10A6  [Source:UniProtKB/Swiss-Prot
  Acc:Q8NH74]
  Uniprot ID: Q8NH74
  ENSP ID: ENSP00000485518

SEQ ID NO: 59424 - protein, 314 aa, Homo sapiens; identical to SEQ ID NO: 59422
  Payload ID: 11598
  Gene Symbol:
  Gene Name: Olfactory receptor 10A6  [Source:UniProtKB/Swiss-Prot
  Acc:Q8NH74]
  Uniprot ID: Q8NH74
  ENSP ID: ENSP00000485676

SEQ ID NO: 59425 - protein, 314 aa, Homo sapiens; identical to SEQ ID NO: 59422
  Payload ID: 11598
  Gene Symbol:
  Gene Name: Olfactory receptor 10A6  [Source:UniProtKB/Swiss-Prot
  Acc:Q8NH74]
  Uniprot ID: Q8NH74
  ENSP ID: ENSP00000486077

SEQ ID NO: 59426 - protein, 314 aa, Homo sapiens; identical to SEQ ID NO: 59422
  Payload ID: 11598
  Gene Symbol:
  Gene Name: Olfactory receptor 10A6  [Source:UniProtKB/Swiss-Prot
  Acc:Q8NH74]
  Uniprot ID: Q8NH74
  ENSP ID: ENSP00000486810

SEQ ID NO: 59427 - protein, 314 aa, Homo sapiens; identical to SEQ ID NO: 59422
  Payload ID: 11598
  Gene Symbol:
  Gene Name: Olfactory receptor 10A6  [Source:UniProtKB/Swiss-Prot
  Acc:Q8NH74]
  Uniprot ID: Q8NH74
  ENSP ID: ENSP00000487179

SEQ ID NO: 59428 - protein, 326 aa, Homo sapiens
  Payload ID: 11599
  Gene Symbol:
  Gene Name: Olfactory receptor 10X1  [Source:UniProtKB/Swiss-Prot
  Acc:Q8NGY0]
  Uniprot ID: Q8NGY0
  ENSP ID: ENSP00000485062
MVLNVYCCFFQISDIQTMKINQTILKEFILVGFSVYPHVQTFLFVVFFCLYLLTLAGNLIIMGLTWVDRSLHTPMYLFLSALSFSETCYTLTIVPKMLEDLLAKDRSISVTGCSLQMCFFLGLGGTNCIILTLMGYDRFLAICNPLRYPLLMTNIVCGQLVASACTAGFFISLTETALIFRDSFCRPNLVKHFFCHMLAVIRLSCIDSNHTEFIITLISVSGLLGTLLLIILTDVFIISTVLRIPSAEGKQKAFTTCASHLTVVIIHFGFASIVYLKPEASGDDTLIAVPYTVITPFLSPIIFSLRNKDMKNAFRRMMGNTVALKK

SEQ ID NO: 59429 - protein, 326 aa, Homo sapiens; identical to SEQ ID NO: 59428
  Payload ID: 11599
  Gene Symbol:
  Gene Name: Olfactory receptor 10X1  [Source:UniProtKB/Swiss-Prot
  Acc:Q8NGY0]
  Uniprot ID: Q8NGY0
  ENSP ID: ENSP00000485609

SEQ ID NO: 59430 - protein, 316 aa, Homo sapiens
  Payload ID: 11600
  Gene Symbol:
  Gene Name: Olfactory receptor 2T11  [Source:UniProtKB/Swiss-Prot
  Acc:Q8NH01]
  Uniprot ID: Q8NH01
  ENSP ID: ENSP00000485254
MTNTSSSDFTLLGLLVNSEAAGIVFTVILAVFLGAVTANLVMIFLIQVDSRLHTPMYFLLSQLSIMDTLFICTTVPKLLADMVSKEKIISFVACGIQIFLYLTMIGSEFFLLGLMAYDCYVAVCNPLRYPVLMNRKKCLLLAAGAWFGGSLDGFLLTPITMNVPYCGSRSINHFFCEIPAVLKLACADTSLYETLMYICCVLMLLIPISIISTSYSLILLTIHRMPSAEGRKKAFTTCSSHLTVVSIFYGAAFYTYVLPQSFHTPEQDKVVSAFYTIVTPMLNPLIYSLRNKDVIGAFKKVFACCSSAQKVATSDA

SEQ ID NO: 59431 - protein, 316 aa, Homo sapiens; identical to SEQ ID NO: 59430
  Payload ID: 11600
  Gene Symbol:
  Gene Name: Olfactory receptor 2T11  [Source:UniProtKB/Swiss-Prot
  Acc:Q8NH01]
  Uniprot ID: Q8NH01
  ENSP ID: ENSP00000485455

SEQ ID NO: 59432 - protein, 310 aa, Homo sapiens
  Payload ID: 11601
  Gene Symbol:
  Gene Name: Olfactory receptor 4C16  [Source:UniProtKB/Swiss-Prot
  Acc:Q8NGL9]
  Uniprot ID: Q8NGL9
  ENSP ID: ENSP00000485295
MQLNNNVTEFILLGLTQDPFWKKIVFVIFLRLYLGTLLGNLLIIISVKTSQALKNPMFFFLFYLSLSDTCLSTSITPRMIVDALLKKTTISFSECMIQVFSSHVFGCLEIFILILTAVDRYVDICKPLHYMTIISQWVCGVLMAVAWVGSCVHSLVQIFLALSLPFCGPNVINHCFCDLQPLLKQACSETYVVNLLLVSNSGAICAVSYVMLIFSYVIFLHSLRNHSAEVIKKALSTCVSHIIVVILFFGPCIFMYTCLATVFPMDKMIAVFYTVGTSFLNPVIYTLKNTEVKSAMRKLWSKKLITDDKR

SEQ ID NO: 59433 - protein, 310 aa, Homo sapiens; identical to SEQ ID NO: 59432
  Payload ID: 11601
  Gene Symbol:
  Gene Name: Olfactory receptor 4C16  [Source:UniProtKB/Swiss-Prot
  Acc:Q8NGL9]
  Uniprot ID: Q8NGL9
  ENSP ID: ENSP00000485647

SEQ ID NO: 59434 - protein, 313 aa, Homo sapiens
  Payload ID: 11602
  Gene Symbol:
  Gene Name: Olfactory receptor 4M2  [Source:UniProtKB/Swiss-Prot
  Acc:Q8NGB6]
  Uniprot ID: Q8NGB6
  ENSP ID: ENSP00000329467
METANYTKVTEFVLTGLSQTPEVQLVLFVIFLSFYLFILPGNILIICTISLDPHLTSPMYFLLANLAFLDIWYSSITAPEMLIDFFVERKIISFDECIAQLFFLHFAGASEMFLLTVMAFDLYTAICRPLHYATIMNQRLCCILVALSWRGGFIHSIIQVALIVRLPFCGPNELDSYFCDITQVVRIACANTFPEELVMICSSGLISVVCLIALLMSYAFLLALLKKLSGSGENTNRAVSTCYSHITIVVLMFGPSIYIYARPFDSFSLDKVVSVFNTLIFPLHNPIIYTLRNKEVKAAMRKLVTKYILCKEK

SEQ ID NO: 59435 - protein, 303 aa, Homo sapiens
  Payload ID: 11603
  Gene Symbol:
  Gene Name: Olfactory receptor 4X2  [Source:UniProtKB/Swiss-Prot
  Acc:Q8NGF9]
  Uniprot ID: Q8NGF9
  ENSP ID: ENSP00000307751
MTEFIFLVLSPNQEVQRVCFVIFLFLYTAIVLGNFLIVLTVMTSRSLGSPMYFFLSYLSFMEICYSSATAPKLISDLLAERKVISWWGCMAQLFFLHFFGGTEIFLLTVMAYDHYVAICKPLSYTTIMNWQVCTVLVGIAWVGGFMHSFAQILLIFHLLFCGPNVINHYFCDLVPLLKLACSDTFLIGLLIVANGGTLSVISFGVLLASYMVILLHLRTWSSEGWCKALSTCGSHFAVVILFFGPCVFNSLRPSTTLPIDKMVAVFYTVITAILNPVIYSLRNAEMRKAMKRLWIRTLRLNEK

SEQ ID NO: 59436 - protein, 303 aa, Homo sapiens; identical to SEQ ID NO: 59435
  Payload ID: 11603
  Gene Symbol:
  Gene Name: Olfactory receptor 4X2  [Source:UniProtKB/Swiss-Prot
  Acc:Q8NGF9]
  Uniprot ID: Q8NGF9
  ENSP ID: ENSP00000485431

SEQ ID NO: 59437 - protein, 319 aa, Homo sapiens
  Payload ID: 11604
  Gene Symbol:
  Gene Name: Olfactory receptor 51F1  [Source:UniProtKB/Swiss-Prot
  Acc:A6NGY5]
  Uniprot ID: A6NGY5
  ENSP ID: ENSP00000369744
MLQNQDTMEILSNSTSKFPTFLLTGIPGLESAHVWISIPFCCFYAIALSGNSVILFVIITQQSLHEPMYYFLFRLSATDLGLTVSSLSTTLGILWFEAREISLYSCIVQMFFLHGFTFMESGVLVATAFDRYVAICDPLRYTTILTNSRIIQMGLLMITRAIVLILPLLLLLKPLYFCRMNALSHSYCYHPDVIQLACSDIRANSICGLIDLILTTGIDTPCIVLSYILIIHSVLRIASPEEWHKVFSTCVSHVGAVAFFYIHMLSLSLVYRYGRSAPRVVHSVMANVYLLLPPVLNPIIDSVKTKQIRKAMLSLLLTK

SEQ ID NO: 59438 - protein, 312 aa, Homo sapiens
  Payload ID: 11604
  Gene Symbol:
  Gene Name: Olfactory receptor 51F1  [Source:UniProtKB/Swiss-Prot
  Acc:A6NGY5]
  ENSP ID: ENSP00000485387
MEILSNSTSKFPTFLLTGIPGLESAHVWISIPFCCFYAIALSGNSVILFVIITQQSLHEPMYYFLFRLSATDLGLTVSSLSTTLGILWFEAREISLYSCIVQMFFLHGFTFMESGVLVATAFDRYVAICDPLRYTTILTNSRIIQMGLLMITRAIVLILPLLLLLKPLYFCRMNALSHSYCYHPDVIQLACSDIRANSICGLIDLILTTGIDTPCIVLSYILIIHSVLRIASPEEWHKVFSTCVSHVGAVAFFYIHMLSLSLVYRYGRSAPRVVHSVMANVYLLLPPVLNPIIDSVKTKQIRKAMLSLLLTK

SEQ ID NO: 59439 - protein, 315 aa, Homo sapiens
  Payload ID: 11605
  Gene Symbol:
  Gene Name: Olfactory receptor 52R1  [Source:UniProtKB/Swiss-Prot
  Acc:Q8NGF1]
  Uniprot ID: Q8NGF1
  ENSP ID: ENSP00000485292
MVLASGNSSSHPVSFILLGIPGLESFQLWIAFPFCATYAVAVVGNITLLHVIRIDHTLHEPMYLFLAMLAITDLVLSSSTQPKMLAIFWFHAHEIQYHACLIQVFFIHAFSSVESGVLMAMALDCYVAICFPLRHSSILTPSVVIKLGTIVMLRGLLWVSPFCFMVSRMPFCQHQAIPQSYCEHMAVLKLVCADTSISRGNGLFVAFSVAGFDMIVIGMSYVMILRAVLQLPSGEARLKAFSTRSSHICVILALYIPALFSFLTYRFGHDVPRVVHILFANLYLLIPPMLNPIIYGVRTKQIGDRVIQGCCGNIP

SEQ ID NO: 59440 - protein, 315 aa, Homo sapiens; identical to SEQ ID NO: 59439
  Payload ID: 11605
  Gene Symbol:
  Gene Name: Olfactory receptor 52R1  [Source:UniProtKB/Swiss-Prot
  Acc:Q8NGF1]
  Uniprot ID: Q8NGF1
  ENSP ID: ENSP00000485549

SEQ ID NO: 59441 - protein, 310 aa, Homo sapiens
  Payload ID: 11606
  Gene Symbol:
  Gene Name: Olfactory receptor 5AR1  [Source:UniProtKB/Swiss-Prot
  Acc:Q8NGP9]
  Uniprot ID: Q8NGP9
  ENSP ID: ENSP00000302639
MDKENSSMVTEFIFMGITQDPQMEIIFFVVFLIVYLVNVVGNIGMIILITTDTQLHTPMYFFLCNLSFVDLGYSSAIAPRMLADFLTNHKVISFSSCATQFAFFVGFVDAECYVLAAMAYGRFVAICRPLHYSTFMSKQVCLALMLGSYLAGLVSLVAHTTLTFSLSYCGSNIINHFFCEIPPLLALSCSDTYISEILLFSLCGFIEFSTILIIFISYTFILVAIIRMRSAEGRLKAFSTCGSHLTGITLFYGTVMFMYLRPTSSYSLDQDKWASVFYTVIIPMLNPLIYSLRNKDVKAAFKKLIGKKSQ

SEQ ID NO: 59442 - protein, 310 aa, Homo sapiens; identical to SEQ ID NO: 59441
  Payload ID: 11606
  Gene Symbol:
  Gene Name: Olfactory receptor 5AR1  [Source:UniProtKB/Swiss-Prot
  Acc:Q8NGP9]
  Uniprot ID: Q8NGP9
  ENSP ID: ENSP00000485240

SEQ ID NO: 59443 - protein, 311 aa, Homo sapiens
  Payload ID: 11607
  Gene Symbol:
  Gene Name: Olfactory receptor 5L1  [Source:UniProtKB/Swiss-Prot
  Acc:Q8NGL2]
  Uniprot ID: Q8NGL2
  ENSP ID: ENSP00000485319
MGKENCTTVAEFILLGLSDVPELRVCLFLLFLLIYGVTLLANLGMIALIQVSSRLHTPMYFFLSHLSSVDFCYSSIIVPKMLANIFNKDKAISFLGCMVQFYLFCTCVVTEVFLLAVMAYDRFVAICNPLLYTVTMSWKVRVELASCCYFCGTVCSLIHLCLALRIPFYRSNVINHFFCDLPPVLSLACSDITVNETLLFLVATLNESVTIMIILTSYLLILTTILKMGSAEGRHKAFSTCASHLTAITVFHGTVLSIYCRPSSGNSGDADKVATVFYTVVIPMLNSVIYSLRNKDVKEALRKVMGSKIHS

SEQ ID NO: 59444 - protein, 311 aa, Homo sapiens; identical to SEQ ID NO: 59443
  Payload ID: 11607
  Gene Symbol:
  Gene Name: Olfactory receptor 5L1  [Source:UniProtKB/Swiss-Prot
  Acc:Q8NGL2]
  Uniprot ID: Q8NGL2
  ENSP ID: ENSP00000485509

SEQ ID NO: 59445 - protein, 324 aa, Homo sapiens
  Payload ID: 11608
  Gene Symbol:
  Gene Name: Olfactory receptor 5R1  [Source:UniProtKB/Swiss-Prot
  Acc:Q8NH85]
  Uniprot ID: Q8NH85
  ENSP ID: ENSP00000485063
MAEVNIIYVTVFILKGITNRPELQAPCFGVFLVIYLVTVLGNLGLITLIKIDTRLHTPMYYFLSHLAFVDLCYSSAITPKMMVNFVVERNTIPFHACATQLGCFLTFMITECFLLASMAYDCYVAICSPLHYSTLMSRRVCIQLVAVPYIYSFLVALFHTVITFRLTYCGPNLINHFYCDDLPFLALSCSDTHMKEILIFAFAGFDMISSSSIVLTSYIFIIAAILRIRSTQGQHKAISTCGSHMVTVTIFYGTLIFMYLQPKSNHSLDTDKMASVFYTVVIPMLNPLIYSLRNKEVKDASKKALDKGCENLQILTFLKIRKLY

SEQ ID NO: 59446 - protein, 324 aa, Homo sapiens; identical to SEQ ID NO: 59445
  Payload ID: 11608
  Gene Symbol:
  Gene Name: Olfactory receptor 5R1  [Source:UniProtKB/Swiss-Prot
  Acc:Q8NH85]
  Uniprot ID: Q8NH85
  ENSP ID: ENSP00000485324

SEQ ID NO: 59447 - protein, 317 aa, Homo sapiens
  Payload ID: 11609
  Gene Symbol:
  Gene Name: Olfactory receptor 6Q1  [Source:UniProtKB/Swiss-Prot
  Acc:Q8NGQ2]
  Uniprot ID: Q8NGQ2
  ENSP ID: ENSP00000307734
MQPYTKNWTQVTEFVMMGFAGIHEAHLLFFILFLTMYLFTLVENLAIILVVGLDHRLRRPMYFFLTHLSCLEIWYTSVTVPKMLAGFIGVDGGKNISYADCLSQLFIFTFLGATECFLLAAMAYDRYVAICMPLHYGAFVSWGTCIRLAAACWLVGFLTPILPIYLLSQLTFYGPNVIDHFSCDASPLLALSCSDVTWKETVDFLVSLAVLLASSMVIAVSYGNIVWTLLHIRSAAERWKAFSTCAAHLTVVSLFYGTLFFMYVQTKVTSSINFNKVVSVFYSVVTPMLNPLIYSLRNKEVKGALGRVFSLNFWKGQ

SEQ ID NO: 59448 - protein, 317 aa, Homo sapiens; identical to SEQ ID NO: 59447
  Payload ID: 11609
  Gene Symbol:
  Gene Name: Olfactory receptor 6Q1  [Source:UniProtKB/Swiss-Prot
  Acc:Q8NGQ2]
  Uniprot ID: Q8NGQ2
  ENSP ID: ENSP00000485102

SEQ ID NO: 59449 - protein, 309 aa, Homo sapiens
  Payload ID: 11610
  Gene Symbol:
  Gene Name: Olfactory receptor 8B4  [Source:UniProtKB/Swiss-Prot
  Acc:Q96RC9]
  Uniprot ID: Q96RC9
  ENSP ID: ENSP00000348449
MTLRNSSSVTEFILVGLSEQPELQLPLFLLFLGIYVFTVVGNLGLITLIGINPSLHTPMYFFLFNLSFIDLCYSCVFTPKMLNDFVSESIISYVGCMTQLFFFCFFVNSECYVLVSMAYDRYVAICNPLLYMVTMSPRVCFLLMFGSYVVGFAGAMAHTGSMLRLTFCDSNVIDHYLCDVLPLLQLSCTSTHVSELVFFIVVGVITMLSSISIVISYALILSNILCIPSAEGRSKAFSTWGSHIIAVALFFGSGTFTYLTTSFPGSMNHGRFASVFYTNVVPMLNPSIYSLRNKDDKLALGKTLKRVLF

SEQ ID NO: 59450 - protein, 309 aa, Homo sapiens; identical to SEQ ID NO: 59449
  Payload ID: 11610
  Gene Symbol:
  Gene Name: Olfactory receptor 8B4  [Source:UniProtKB/Swiss-Prot
  Acc:Q96RC9]
  Uniprot ID: Q96RC9
  ENSP ID: ENSP00000485485

SEQ ID NO: 59451 - protein, 309 aa, Homo sapiens
  Payload ID: 11611
  Gene Symbol: OR1A1
  Gene Name: olfactory receptor, family 1, subfamily A, member 1
  Uniprot ID: Q9P1Q5
  ENSP ID: ENSP00000305207
MRENNQSSTLEFILLGVTGQQEQEDFFYILFLFIYPITLIGNLLIVLAICSDVRLHNPMYFLLANLSLVDIFFSSVTIPKMLANHLLGSKSISFGGCLTQMYFMIALGNTDSYILAAMAYDRAVAISRPLHYTTIMSPRSCIWLIAGSWVIGNANALPHTLLTASLSFCGNQEVANFYCDITPLLKLSCSDIHFHVKMMYLGVGIFSVPLLCIIVSYIRVFSTVFQVPSTKGVLKAFSTCGSHLTVVSLYYGTVMGTYFRPLTNYSLKDAVITVMYTAVTPMLNPFIYSLRNRDMKAALRKLFNKRISS

SEQ ID NO: 59452 - protein, 309 aa, Homo sapiens
  Payload ID: 11612
  Gene Symbol: OR1A2
  Gene Name: olfactory receptor, family 1, subfamily A, member 2
  Uniprot ID: Q9Y585
  ENSP ID: ENSP00000371377
MKKENQSFNLDFILLGVTSQQEQNNVFFVIFLCIYPITLTGNLLIILAICADIRLHNPMYFLLANLSLVDIIFSSVTIPKVLANHLLGSKFISFGGCLMQMYFMIALAKADSYTLAAMAYDRAVAISCPLHYTTIMSPRSCILLIAGSWVIGNTSALPHTLLTASLSFCGNQEVANFYCDIMPLLKLSCSDVHFNVKMMYLGVGVFSLPLLCIIVSYVQVFSTVFQVPSTKSLFKAFCTCGSHLTVVFLYYGTTMGMYFRPLTSYSPKDAVITVMYVAVTPALNPFIYSLRNWDMKAALQKLFSKRISS

SEQ ID NO: 59453 - protein, 318 aa, Homo sapiens
  Payload ID: 11613
  Gene Symbol: OR1B1
  Gene Name: olfactory receptor, family 1, subfamily B, member 1 (gene/pseudogene)
  Uniprot ID: Q8NGR6
  ENSP ID: ENSP00000303151
MMSFAPNASHSPVFLLLGFSRANISYTLLFFLFLAIYLTTILGNVTLVLLISWDSRLHSPMYYLLRGLSVIDMGLSTVTLPQLLAHLVSHYPTIPAARCLAQFFFFYAFGVTDTLVIAVMALDRYVAICDPLHYALVMNHQRCACLLALSWVVSILHTMLRVGLVLPLCWTGDAGGNVNLPHFFCDHRPLLRASCSDIHSNELAIFFEGGFLMLGPCALIVLSYVRIGAAILRLPSAAGRRRAVSTCGSHLTMVGFLYGTIICVYFQPPFQNSQYQDMVASVMYTAITPLANPFVYSLHNKDVKGALCRLLEWVKVDP

SEQ ID NO: 59454 - protein, 314 aa, Homo sapiens
  Payload ID: 11614
  Gene Symbol: OR1C1
  Gene Name: olfactory receptor, family 1, subfamily C, member 1
  Uniprot ID: Q15619
  ENSP ID: ENSP00000386138
MEKRNLTVVREFVLLGLPSSAEQQHLLSVLFLCMYLATTLGNMLIIATIGFDSHLHSPMYFFLSNLAFVDICFTSTTVPQMVVNILTGTKTISFAGCLTQLFFFVSFVNMDSLLLCVMAYDRYVAICHPLHYTARMNLCLCVQLVAGLWLVTYLHALLHTVLIAQLSFCASNIIHHFFCDLNPLLQLSCSDVSFNVMIIFAVGGLLALTPLVCILVSYGLIFSTVLKITSTQGKQRAVSTCSCHLSVVVLFYGTAIAVYFSPSSPHMPESDTLSTIMYSMVAPMLNPFIYTLRNRDMKRGLQKMLLKCTVFQQQ

SEQ ID NO: 59455 - protein, 312 aa, Homo sapiens
  Payload ID: 11615
  Gene Symbol: OR1D2
  Gene Name: olfactory receptor, family 1, subfamily D, member 2
  Uniprot ID: P34982
  ENSP ID: ENSP00000327585
MDGGNQSEGSEFLLLGMSESPEQQRILFWMFLSMYLVTVVGNVLIILAISSDSRLHTPVYFFLANLSFTDLFFVTNTIPKMLVNLQSHNKAISYAGCLTQLYFLVSLVALDNLILAVMAYDRYVAICCPLHYTTAMSPKLCILLLSLCWVLSVLYGLIHTLLMTRVTFCGSRKIHYIFCEMYVLLRMACSNIQINHTVLIATGCFIFLIPFGFVIISYVLIIRAILRIPSVSKKYKAFSTCASHLGAVSLFYGTLCMVYLKPLHTYSVKDSVATVMYAVVTPMMNPFIYSLRNKDMHGALGRLLDKHFKRLT

SEQ ID NO: 59456 - protein, 312 aa, Homo sapiens
  Payload ID: 11616
  Gene Symbol: OR1D5
  Gene Name: olfactory receptor, family 1, subfamily D, member 5
  Uniprot ID: P58170
  ENSP ID: ENSP00000459028
MDGDNQSENSQFLLLGISESPEQQRILFWMFLSMYLVTVLGNVLIILAISSDSHLHTPMYFFLANLSFTDLFFVTNTIPKMLVNFQSQNKAISYAGCLTQLYFLVSLVTLDNLILAVMAYDRYVATCCPLHYVTAMSPGLCVLLLSLCWGLSVLYGLLLTFLLTRVTFCGPREIHYLFCDMYILLWLACSNTHIIHTALIATGCFIFLTPLGFMTTSYVRIVRTILQMPSASKKYKTFSTCASHLGVVSLFYGTLAMVYLQPLHTYSMKDSVATVMYAVLTPMMNPFIYRLRNKDMHGAPGRVLWRPFQRPK

SEQ ID NO: 59457 - protein, 314 aa, Homo sapiens
  Payload ID: 11617
  Gene Symbol: OR1E1
  Gene Name: olfactory receptor, family 1, subfamily E, member 1
  Uniprot ID: P30953
  ENSP ID: ENSP00000313384
MMGQNQTSISDFLLLGLPIQPEQQNLCYALFLAMYLTTLLGNLLIIVLIRLDSHLHTPMYLFLSNLSFSDLCFSSVTIPKLLQNMQNQDPSIPYADCLTQMYFFLLFGDLESFLLVAMAYDRYVAICFPLHYTAIMSPMLCLALVALSWVLTTFHAMLHTLLMARLCFCADNVIPHFFCDMSALLKLAFSDTRVNEWVIFIMGGLILVIPFLLILGSYARIVSSILKVPSSKGICKAFSTCGSHLSVVSLFYGTVIGLYLCSSANSSTLKDTVMAMMYTVVTPMLNPFIYSLRNRDMKGALSRVIHQKKTFFSL

SEQ ID NO: 59458 - protein, 323 aa, Homo sapiens
  Payload ID: 11618
  Gene Symbol: OR1E2
  Gene Name: olfactory receptor, family 1, subfamily E, member 2
  Uniprot ID: P47887
  ENSP ID: ENSP00000248384
MMGQNQTSISDFLLLGLPIQPEQQNLCYALFLAMYLTTLLGNLLIIVLIRLDSHLHTPVYLFLSNLSFSDLCFSSVTMPKLLQNMQNQDPSIPYADCLTQMYFFLYFSDLESFLLVAMAYDRYVAICFPMHYTAICFLLHYTAIMSPMLCLSVVALSWVLTTFHAMLHTLLMARLCFCADNVIPHFFCDMSALLKLACSDTRVNEWVIFIMGGLILVIPFLLILGSYARIVSSILKVPSSKGICKAFSTCGSHLSVVSLFYGTVIGLYLCPSANSSTLKDTVMAMMYTVVTPMLTPFIYSLRNRDMKGALERVICKRKNPFLL

SEQ ID NO: 59459 - protein, 312 aa, Homo sapiens
  Payload ID: 11619
  Gene Symbol: OR1F1
  Gene Name: olfactory receptor, family 1, subfamily F, member 1
  Uniprot ID: O43749
  ENSP ID: ENSP00000305424
MSGTNQSSVSEFLLLGLSRQPQQQHLLFVFFLSMYLATVLGNLLIILSVSIDSCLHTPMYFFLSNLSFVDICFSFTTVPKMLANHILETQTISFCGCLTQMYFVFMFVDMDNFLLAVMAYDHFVAVCHPLHYTAKMTHQLCALLVAGLWVVANLNVLLHTLLMAPLSFCADNAITHFFCDVTPLLKLSCSDTHLNEVIILSEGALVMITPFLCILASYMHITCTVLKVPSTKGRWKAFSTCGSHLAVVLLFYSTIIAVYFNPLSSHSAEKDTMATVLYTVVTPMLNPFIYSLRNRYLKGALKKVVGRVVFSV

SEQ ID NO: 59460 - protein, 313 aa, Homo sapiens
  Payload ID: 11620
  Gene Symbol: OR1G1
  Gene Name: olfactory receptor, family 1, subfamily G, member 1
  Uniprot ID: P47890
  ENSP ID: ENSP00000331545
MEGKNLTSISECFLLGFSEQLEEQKPLFGSFLFMYLVTVAGNLLIILVIITDTQLHTPMYFFLANLSLADACFVSTTVPKMLANIQIQSQAISYSGCLLQLYFFMLFVMLEAFLLAVMAYDCYVAICHPLHYILIMSPGLCIFLVSASWIMNALHSLLHTLLMNSLSFCANHEIPHFFCDINPLLSLSCTDPFTNELVIFITGGLTGLICVLCLIISYTNVFSTILKIPSAQGKRKAFSTCSSHLSVVSLFFGTSFCVDFSSPSTHSAQKDTVASVMYTVVTPMLNPFIYSLRNQEIKSSLRKLIWVRKIHSP

SEQ ID NO: 59461 - protein, 355 aa, Homo sapiens
  Payload ID: 11621
  Gene Symbol: OR1I1
  Gene Name: olfactory receptor, family 1, subfamily I, member 1
  Uniprot ID: O60431
  ENSP ID: ENSP00000209540
MEPEKQTEISEFFLQGLSEKPEHQTLLFTMFLSTYLVTIIGNALIILAIITDSHLHTPMYFFLFNLSLVDTLLSSTTVPKMLANIQAQSRAIPFVGCLTQMYAFHLFGTMDSFLLAVMAIDRFVAIVHPQRYLVLMCSPVCGLLLGASWMITNLQSLIHTCLMAQLTFCAGSEISHFFCDLMPLLKLSGSDTHTNELVIFAFGIVVGTSPFSCILLSYIRIFWTVFKIPSTRGKWKAFSTCGLHLTVVSLSYGTIFAVYLQPTSPSSSQKDKAAALMCGVFIPMLNPFIYSIRNKDMKAALGKLIGKVAVPCPRPEQLLDVYHVPGSLLAARDTEMHPIPYPGGVQSLAGNRDME

SEQ ID NO: 59462 - protein, 322 aa, Homo sapiens
  Payload ID: 11622
  Gene Symbol: OR1J1
  Gene Name: olfactory receptor, family 1, subfamily J, member 1
  Uniprot ID: Q8NGS3
  ENSP ID: ENSP00000259357
MSPENQSSVSEFLLLGLPIRPEQQAVFFALFLGMYLTTVLGNLLIMLLIQLDSHLHTPMYFFLSHLALTDISFSSVTVPKMLMNMQTQHLAVFYKGCISQTYFFIFFADLDSFLITSMAYDRYVAICHPLHYATIMTQSQCVMLVAGSWVIACACALLHTLLLAQLSFCADHIIPHYFCDLGALLKLSCSDTSLNQLAIFTAALTAIMLPFLCILVSYGHIGVTILQIPSTKGICKALSTCGSHLSVVTIYYRTIIGLYFLPPSSNTNDKNIIASVIYTAVTPMLNPFIYSLRNKDIKGALRKLLSRSGAVAHACNLNTLGG

SEQ ID NO: 59463 - protein, 313 aa, Homo sapiens
  Payload ID: 11623
  Gene Symbol: OR1J2
  Gene Name: olfactory receptor, family 1, subfamily J, member 2
  Uniprot ID: Q8NGS2
  ENSP ID: ENSP00000335575
MSPENQSSVSEFLLLGLPIRPEQQAVFFTLFLGMYLTTVLGNLLIMLLIQLDSHLHTPMYFFLSHLALTDISFSSVTVPKMLMDMRTKYKSILYEECISQMYFFIFFTDLDSFLITSMAYDRYVAICHPLHYTVIMREELCVFLVAVSWILSCASSLSHTLLLTRLSFCAANTIPHVFCDLAALLKLSCSDIFLNELVMFTVGVVVITLPFMCILVSYGYIGATILRVPSTKGIHKALSTCGSHLSVVSLYYGSIFGQYLFPTVSSSIDKDVIVALMYTVVTPMLNPFIYSLRNRDMKEALGKLFSRATFFSW

SEQ ID NO: 59464 - protein, 313 aa, Homo sapiens
  Payload ID: 11624
  Gene Symbol: OR1J4
  Gene Name: olfactory receptor, family 1, subfamily J, member 4
  Uniprot ID: Q8NGS1
  ENSP ID: ENSP00000343521
MKRENQSSVSEFLLLDLPIWPEQQAVFFTLFLGMYLITVLGNLLIILLIRLDSHLHTPMFFFLSHLALTDISLSSVTVPKMLLSMQTQDQSILYAGCVTQMYFFIFFTDLDNFLLTSMAYDRYVAICHPLRYTTIMKEGLCNLLVTVSWILSCTNALSHTLLLAQLSFCADNTIPHFFCDLVALLKLSCSDISLNELVIFTVGQAVITLPLICILISYGHIGVTILKAPSTKGIFKALSTCGSHLSVVSLYYGTIIGLYFLPSSSASSDKDVIASVMYTVITPLLNPFIYSLRNRDIKGALERLFNRATVLSQ

SEQ ID NO: 59465 - protein, 316 aa, Homo sapiens
  Payload ID: 11625
  Gene Symbol: OR1K1
  Gene Name: olfactory receptor, family 1, subfamily K, member 1
  Uniprot ID: Q8NGR3
  ENSP ID: ENSP00000277309
MEAANESSEGISFVLLGLTTSPGQQRPLFVLFLLLYVASLLGNGLIVAAIQASPALHAPMYFLLAHLSFADLCFASVTVPKMLANLLAHDHSISLAGCLTQMYFFFALGVTDSCLLAAMAYDCYVAIRHPLPYATRMSRAMCAALVGMAWLVSHVHSLLYILLMARLSFCASHQVPHFFCDHQPLLRLSCSDTHHIQLLIFTEGAAVVVTPFLLILASYGAIAAAVLQLPSASGRLRAVSTCGSHLAVVSLFYGTVIAVYFQATSRREAEWGRVATVMYTVVTPMLNPIIYSLWNRDVQGALRALLIGRRISASDS

SEQ ID NO: 59466 - protein, 310 aa, Homo sapiens
  Payload ID: 11626
  Gene Symbol: OR1L1
  Gene Name: olfactory receptor, family 1, subfamily L, member 1
  ENSP ID: ENSP00000310773
MGRNNLTRPSEFILLGLSSRPEDQKPLFAVFLPIYLITVIGNLLIILAIRSDTRLQTPMYFFLSILSFVDICYVTVIIPKMLVNFLSETKTISYSECLTQMYFFLAFGNTDSYLLAAMAIDRYVAICNPFHYITIMSHRCCVLLLVLSFCIPHFHSLLHILLTNQLIFCASNVIHHFFCDDQPVLKLSCSSHFVKEITVMTEGLAVIMTPFSCIIISYLRILITVLKIPSAAGKRKAFSTCGSHLTVVTLFYGSISYLYFQPLSNYTVKDQIATIIYTVLTPMLNPFIYSLRNKDMKQGLAKLMHRMKCQ

SEQ ID NO: 59467 - protein, 360 aa, Homo sapiens
  Payload ID: 11626
  Gene Symbol: OR1L1
  Gene Name: olfactory receptor, family 1, subfamily L, member 1
  Uniprot ID: Q8NH94
  ENSP ID: ENSP00000362790
MERNHNPDNCNVLNFFFADKKNKRRNFGQIVSDVGRICYSVSLSLGEPTTMGRNNLTRPSEFILLGLSSRPEDQKPLFAVFLPIYLITVIGNLLIILAIRSDTRLQTPMYFFLSILSFVDICYVTVIIPKMLVNFLSETKTISYSECLTQMYFFLAFGNTDSYLLAAMAIDRYVAICNPFHYITIMSHRCCVLLLVLSFCIPHFHSLLHILLTNQLIFCASNVIHHFFCDDQPVLKLSCSSHFVKEITVMTEGLAVIMTPFSCIIISYLRILITVLKIPSAAGKRKAFSTCGSHLTVVTLFYGSISYLYFQPLSNYTVKDQIATIIYTVLTPMLNPFIYSLRNKDMKQGLAKLMHRMKCQ

SEQ ID NO: 59468 - protein, 324 aa, Homo sapiens
  Payload ID: 11627
  Gene Symbol: OR1L3
  Gene Name: olfactory receptor, family 1, subfamily L, member 3
  Uniprot ID: Q8NH93
  ENSP ID: ENSP00000302863
MGMSNLTRLSEFILLGLSSRSEDQRPLFALFLIIYLVTLMGNLLIILAIHSDPRLQNPMYFFLSILSFADICYTTVIVPKMLVNFLSEKKTISYAECLAQMYFFLVFGNIDSYLLAAMAINRCVAICNPFHYVTVMNRRCCVLLLAFPITFSYFHSLLHVLLVNRLTFCTSNVIHHFFCDVNPVLKLSCSSTFVNEIVAMTEGLASVMAPFVCIIISYLRILIAVLKIPSAAGKHKAFSTCSSHLTVVILFYGSISYVYLQPLSSYTVKDRIATINYTVLTSVLNPFIYSLRNKDMKRGLQKLINKIKSQMSRFSTKTNKICGP

SEQ ID NO: 59469 - protein, 311 aa, Homo sapiens
  Payload ID: 11628
  Gene Symbol: OR1L4
  Gene Name: olfactory receptor, family 1, subfamily L, member 4
  Uniprot ID: Q8NGR5
  ENSP ID: ENSP00000259466
METKNYSSSTSGFILLGLSSNPKLQKPLFAIFLIMYLLTAVGNVLIILAIYSDPRLHTPMYFFLSNLSFMDICFTTVIVPKMLVNFLSETKIISYVGCLIQMYFFMAFGNTDSYLLASMAIDRLVAICNPLHYDVVMKPWHCLLMLLGSCSISHLHSLFRVLLMSRLSFCASHIIKHFFCDTQPVLKLSCSDTSSSQMVVMTETLAVIVTPFLCTIFSYLQIIVTVLRIPSAAGKWKAFSTCGSHLTVVVLFYGSVIYVYFRPLSMYSVMKGRVATVMYTVVTPMLNPFIYSLRNKDMKRGLKKLRHRIYS

SEQ ID NO: 59470 - protein, 311 aa, Homo sapiens
  Payload ID: 11629
  Gene Symbol: OR1L6
  Gene Name: olfactory receptor, family 1, subfamily L, member 6
  ENSP ID: ENSP00000304235
MEIKNYSSSTSGFILLGLSSNPQLQKPLFAIFLIMYLLAAVGNVLIIPAIYSDPRLHTPMYFFLSNLSFMDICFTTVIVPKMLVNFLSETKVISYVGCLAQMYFFMAFGNTDSYLLASMAIDRLVAICNPLHYDVVMKPRHCLLMLLGSCSISHLHSLFRVLLMSRLSFCASHIIKHFFCDTQPVLKLSCSDTSSSQMVVMTETLAVIVTPFLCIIFSYLRIMVTVLRIPSAAGKWKAFSTCGSHLTAVALFYGSIIYVYFRPLSMYSVVRDRVATVMYTVVTPMLNPFIYSLRNKDMKRGLKKLQDRIYR

SEQ ID NO: 59471 - protein, 347 aa, Homo sapiens
  Payload ID: 11629
  Gene Symbol: OR1L6
  Gene Name: olfactory receptor, family 1, subfamily L, member 6
  Uniprot ID: Q8NGR2
  ENSP ID: ENSP00000362788
MSYFYRLKLMKEAVLVKLPFTSLPLLLQTLSRKSRDMEIKNYSSSTSGFILLGLSSNPQLQKPLFAIFLIMYLLAAVGNVLIIPAIYSDPRLHTPMYFFLSNLSFMDICFTTVIVPKMLVNFLSETKVISYVGCLAQMYFFMAFGNTDSYLLASMAIDRLVAICNPLHYDVVMKPRHCLLMLLGSCSISHLHSLFRVLLMSRLSFCASHIIKHFFCDTQPVLKLSCSDTSSSQMVVMTETLAVIVTPFLCIIFSYLRIMVTVLRIPSAAGKWKAFSTCGSHLTAVALFYGSIIYVYFRPLSMYSVVRDRVATVMYTVVTPMLNPFIYSLRNKDMKRGLKKLQDRIYR

SEQ ID NO: 59472 - protein, 309 aa, Homo sapiens
  Payload ID: 11630
  Gene Symbol: OR1L8
  Gene Name: olfactory receptor, family 1, subfamily L, member 8
  Uniprot ID: Q8NGR8
  ENSP ID: ENSP00000306607
MERINHTSSVSEFILLGLSSRPEDQKTLFVLFLIVYLVTITGNLLIILAIRFNPHLQTPMYFFLSFLSLTDICFTTSVVPKMLMNFLSEKKTISYAGCLTQMYFLYALGNSDSCLLAVMAFDRYVAVCDPFHYVTTMSHHHCVLLVAFSCSFPHLHSLLHTLLLNRLTFCDSNVIHHFLCDLSPVLKLSCSSIFVNEIVQMTEAPIVLVTRFLCIAFSYIRILTTVLKIPSTSGKRKAFSTCGFYLTVVTLFYGSIFCVYLQPPSTYAVKDHVATIVYTVLSSMLNPFIYSLRNKDLKQGLRKLMSKRS

SEQ ID NO: 59473 - protein, 313 aa, Homo sapiens
  Payload ID: 11631
  Gene Symbol: OR1M1
  Gene Name: olfactory receptor, family 1, subfamily M, member 1
  Uniprot ID: Q8NGA1
  ENSP ID: ENSP00000401966
MEPRNQTSASQFILLGLSEKPEQETLLFSLFFCMYLVMVVGNLLIILAISIDSHLHTPMYFFLANLSLVDFCLATNTIPKMLVSLQTGSKAISYPCCLIQMYFFHFFGIVDSVIIAMMAYDRFVAICHPLHYAKIMSLRLCRLLVGALWAFSCFISLTHILLMARLVFCGSHEVPHYFCDLTPILRLSCTDTSVNRIFILIVAGMVIATPFVCILASYARILVAIMKVPSAGGRKKAFSTCSSHLSVVALFYGTTIGVYLCPSSVLTTVKEKASAVMYTAVTPMLNPFIYSLRNRDLKGALRKLVNRKITSSS

SEQ ID NO: 59474 - protein, 311 aa, Homo sapiens
  Payload ID: 11632
  Gene Symbol: OR1N1
  Gene Name: olfactory receptor, family 1, subfamily N, member 1
  Uniprot ID: Q8NGS0
  ENSP ID: ENSP00000306974
MENQSSISEFFLRGISAPPEQQQSLFGIFLCMYLVTLTGNLLIILAIGSDLHLHTPMYFFLANLSFVDMGLTSSTVTKMLVNIQTRHHTISYTGCLTQMYFFLMFGDLDSFFLAAMAYDRYVAICHPLCYSTVMRPQVCALMLALCWVLTNIVALTHTFLMARLSFCVTGEIAHFFCDITPVLKLSCSDTHINEMMVFVLGGTVLIVPFLCIVTSYIHIVPAILRVRTRGGVGKAFSTCSSHLCVVCVFYGTLFSAYLCPPSIASEEKDIAAAAMYTIVTPMLNPFIYSLRNKDMKGALKRLFSHRSIVSS

SEQ ID NO: 59475 - protein, 312 aa, Homo sapiens
  Payload ID: 11632
  Gene Symbol: OR1N1
  Gene Name: olfactory receptor, family 1, subfamily N, member 1
  ENSP ID: ENSP00000480866
VMENQSSISEFFLRGISAPPEQQQSLFGIFLCMYLVTLTGNLLIILAIGSDLHLHTPMYFFLANLSFVDMGLTSSTVTKMLVNIQTRHHTISYTGCLTQMYFFLMFGDLDSFFLAAMAYDRYVAICHPLCYSTVMRPQVCALMLALCWVLTNIVALTHTFLMARLSFCVTGEIAHFFCDITPVLKLSCSDTHINEMMVFVLGGTVLIVPFLCIVTSYIHIVPAILRVRTRGGVGKAFSTCSSHLCVVCVFYGTLFSAYLCPPSIASEEKDIAAAAMYTIVTPMLNPFIYSLRNKDMKGALKRLFSHRSIVSS

SEQ ID NO: 59476 - protein, 330 aa, Homo sapiens
  Payload ID: 11633
  Gene Symbol: OR1N2
  Gene Name: olfactory receptor, family 1, subfamily N, member 2
  Uniprot ID: Q8NGR9
  ENSP ID: ENSP00000362792
MEGFYLRRSHELQGMGKPGRVNQTTVSDFLLLGLSEWPEEQPLLFGIFLGMYLVTMVGNLLIILAISSDPHLHTPMYFFLANLSLTDACFTSASIPKMLANIHTQSQIISYSGCLAQLYFLLMFGGLDNCLLAVMAYDRYVAICQPLHYSTSMSPQLCALMLGVCWVLTNCPALMHTLLLTRVAFCAQKAIPHFYCDPSALLKLACSDTHVNELMIITMGLLFLTVPLLLIVFSYVRIFWAVFVISSPGGRWKAFSTCGSHLTVVLLFYGSLMGVYLLPPSTYSTERESRAAVLYMVIIPTLNPFIYSLRNRDMKEALGKLFVSGKTFFL

SEQ ID NO: 59477 - protein, 308 aa, Homo sapiens
  Payload ID: 11633
  Gene Symbol: OR1N2
  Gene Name: olfactory receptor, family 1, subfamily N, member 2
  ENSP ID: ENSP00000483293
GRVNQTTVSDFLLLGLSEWPEEQPLLFGIFLGMYLVTMVGNLLIILAISSDPHLHTPMYFFLANLSLTDACFTSASIPKMLANIHTQSQIISYSGCLAQLYFLLMFGGLDNCLLAVMAYDRYVAICQPLHYSTSMSPQLCALMLGVCWVLTNCPALMHTLLLTRVAFCAQKAIPHFYCDPSALLKLACSDTHVNELMIITMGLLFLTVPLLLIVFSYVRIFWAVFVISSPGGRWKAFSTCGSHLTVVLLFYGSLMGVYLLPPSTYSTERESRAAVLYMVIIPTLNPFIYSLRNRDMKEALGKLFRKRS

SEQ ID NO: 59478 - protein, 314 aa, Homo sapiens
  Payload ID: 11634
  Gene Symbol: OR1Q1
  Gene Name: olfactory receptor, family 1, subfamily Q, member 1
  Uniprot ID: Q15612
  ENSP ID: ENSP00000297913
MDNSNWTSVSHFVLLGISTHPEEQIPLFLVFSLMYAINISGNLAIITLILSAPRLHIPMYIFLSNLALTDICFTSTTVPKMLQIIFSPTKVISYTGCLAQTYFFICFAVMENFILAVMAYDRYIAICHPFHYTMILTRMLCVKMVVMCHALSHLHAMLHTFLIGQLIFCADNRIPHFFCDLYALMKISCTSTYLNTLMIHTEGAVVISGALAFITASYACIILVVLRIPSAKGRWKTFSTCGSHLTVVAIFYGTLSWVYFRPLSSYSVTKGRIITVVYTVVTPMLNPFIYSLRNGDVKGGFMKWMSRMQTFFFR

SEQ ID NO: 59479 - protein, 325 aa, Homo sapiens
  Payload ID: 11635
  Gene Symbol: OR1S1
  Gene Name: olfactory receptor, family 1, subfamily S, member 1 (gene/pseudogene)
  Uniprot ID: Q8NH92
  ENSP ID: ENSP00000311688
MKTFSSFLQIGRNMHQGNQTTITEFILLGFFKQDEHQNLLFVLFLGMYLVTVIGNGLIIVAISLDTYLHTPMYLFLANLSFADISSISNSVPKMLVNIQTKSQSISYESCITQMYFSIVFVVIDNLLLGTMAYDHFVAICHPLNYTILMRPRFGILLTVISWFLSNIIALTHTLLLIQLLFCNHNTLPHFFCDLAPLLKLSCSDTLINELVLFIVGLSVIIFPFTLSFFSYVCIIRAVLRVSSTQGKWKAFSTCGSHLTVVLLFYGTIVGVYFFPSSTHPEDTDKIGAVLFTVVTPMINPFIYSLRNKDMKGALRKLINRKISSL

SEQ ID NO: 59480 - protein, 325 aa, Homo sapiens; identical to SEQ ID NO: 59479
  Payload ID: 11635
  Gene Symbol: OR1S1
  Gene Name: olfactory receptor, family 1, subfamily S, member 1 (gene/pseudogene)
  Uniprot ID: Q8NH92
  ENSP ID: ENSP00000485156

SEQ ID NO: 59481 - protein, 325 aa, Homo sapiens; identical to SEQ ID NO: 59479
  Payload ID: 11635
  Gene Symbol: OR1S1
  Gene Name: olfactory receptor, family 1, subfamily S, member 1 (gene/pseudogene)
  Uniprot ID: Q8NH92
  ENSP ID: ENSP00000485365

SEQ ID NO: 59482 - protein, 325 aa, Homo sapiens
  Payload ID: 11636
  Gene Symbol: OR1S2
  Gene Name: olfactory receptor, family 1, subfamily S, member 2
  Uniprot ID: Q8NGQ3
  ENSP ID: ENSP00000305469
MKTLCSFLQISRNMHQENQTTITEFILLGLSNQAEHQNLLFVLFLSMYVVTVVGNGLIIVAISLDIYLHTPMYLFLAYLSFADISSISNSVPKMLVNIQTNSQSISYESCITQMYFSIVFVVTDNLLLGTMAFDHFVAICHPLNYTTFMRARFGTLLTVISWFLSNIIALTHTLLLIQLLFCDHNTLPHFFCDLAPLLKLSCSDTMINELVLFIVGLSVIIFPFVLIFFSYVCIIRAVLGVSSTQGKWKAFSTCGSHLTIALLFYGTTVGVYFFPSSTHPEDTDKIGAVLFTVVTPMMNPFIYSLRNKDMKGALRKLINRKISSL

SEQ ID NO: 59483 - protein, 303 aa, Homo sapiens
  Payload ID: 11637
  Gene Symbol: OR10A2
  Gene Name: olfactory receptor, family 10, subfamily A, member 2
  Uniprot ID: Q9H208
  ENSP ID: ENSP00000303862
MSFSSLPTEIQSLLFLTFLTIYLVTLMGNCLIILVTLADPMLHSPMYFFLRNLSFLEIGFNLVIVPKMLGTLLAQDTTISFLGCATQMYFFFFFGVAECFLLATMAYDRYVAICSPLHYPVIMNQRTRAKLAAASWFPGFPVATVQTTWLFSFPFCGTNKVNHFFCDSPPVLRLVCADTALFEIYAIVGTILVVMIPCLLILCSYTHIAAAILKIPSAKGKNKAFSTCSSHLLVVSLFYISLSLTYFRPKSNNSPEGKKLLSLSYTVMTPMLNPIIYSLRNNEVKNALSRTVSKALALRNCIP

SEQ ID NO: 59484 - protein, 314 aa, Homo sapiens
  Payload ID: 11638
  Gene Symbol: OR10A3
  Gene Name: olfactory receptor, family 10, subfamily A, member 3
  Uniprot ID: P58181
  ENSP ID: ENSP00000353988
MKRQNQSCVVEFILLGFSNFPELQVQLFGVFLVIYVVTLMGNAIITVIISLNQSLHVPMYLFLLNLSVVEVSFSAVITPEMLVVLSTEKTMISFVGCFAQMYFILLFGGTECFLLGAMAYDRFAAICHPLNYPVIMNRGVFMKLVIFSWISGIMVATVQTTWVFSFPFCGPNEINHLFCETPPVLELVCADTFLFEIYAFTGTILIVMVPFLLILLSYIRVLFAILKMPSTTGRQKAFSTCASHLTSVTLFYGTANMTYLQPKSGYSPETKKLISLAYTLLTPLLNPLIYSLRNSEMKRTLIKLWRRKVILHTF

SEQ ID NO: 59485 - protein, 314 aa, Homo sapiens; identical to SEQ ID NO: 59484
  Payload ID: 11638
  Gene Symbol: OR10A3
  Gene Name: olfactory receptor, family 10, subfamily A, member 3
  Uniprot ID: P58181
  ENSP ID: ENSP00000484096

SEQ ID NO: 59486 - protein, 314 aa, Homo sapiens; identical to SEQ ID NO: 59484
  Payload ID: 11638
  Gene Symbol: OR10A3
  Gene Name: olfactory receptor, family 10, subfamily A, member 3
  Uniprot ID: P58181
  ENSP ID: ENSP00000487530

SEQ ID NO: 59487 - protein, 315 aa, Homo sapiens
  Payload ID: 11639
  Gene Symbol: OR10A4
  Gene Name: olfactory receptor, family 10, subfamily A, member 4
  Uniprot ID: Q9H209
  ENSP ID: ENSP00000369157
MMWENWTIVSEFVLVSFSALSTELQALLFLLFLTIYLVTLMGNVLIILVTIADSALQSPMYFFLRNLSFLEIGFNLVIVPKMLGTLIIQDTTISFLGCATQMYFFFFFGAAECCLLATMAYDRYVAICDPLHYPVIMGHISCAQLAAASWFSGFSVATVQTTWIFSFPFCGPNRVNHFFCDSPPVIALVCADTSVFELEALTATVLFILFPFLLILGSYVRILSTIFRMPSAEGKHQAFSTCSAHLLVVSLFYSTAILTYFRPQSSASSESKKLLSLSSTVVTPMLNPIIYSSRNKEVKAALKRLIHRTLGSQKL

SEQ ID NO: 59488 - protein, 317 aa, Homo sapiens
  Payload ID: 11640
  Gene Symbol: OR10A5
  Gene Name: olfactory receptor, family 10, subfamily A, member 5
  Uniprot ID: Q9H207
  ENSP ID: ENSP00000299454
MAIGNWTEISEFILMSFSSLPTEIQSLLFLTFLTIYLVTLKGNSLIILVTLADPMLHSPMYFFLRNLSFLEIGFNLVIVPKMLGTLLAQDTTISFLGCATQMYFFFFFGVAECFLLATMAYDRYVAICSPLHYPVIMNQRTRAKLAAASWFPGFPVATVQTTWLFSFPFCGTNKVNHFFCDSPPVLKLVCADTALFEIYAIVGTILVVMIPCLLILCSYTRIAAAILKIPSAKGKHKAFSTCSSHLLVVSLFYISSSLTYFWPKSNNSPESKKLLSLSYTVVTPMLNPIIYSLRNSEVKNALSRTFHKVLALRNCIP

SEQ ID NO: 59489 - protein, 314 aa, Homo sapiens; identical to SEQ ID NO: 59422
  Payload ID: 11641
  Gene Symbol: OR10A6
  Gene Name: olfactory receptor, family 10, subfamily A, member 6 (gene/pseudogene)
  Uniprot ID: Q8NH74
  ENSP ID: ENSP00000312470

SEQ ID NO: 59490 - protein, 316 aa, Homo sapiens
  Payload ID: 11642
  Gene Symbol: OR10A7
  Gene Name: olfactory receptor, family 10, subfamily A, member 7
  Uniprot ID: Q8NGE5
  ENSP ID: ENSP00000326718
MICENHTRVTEFILLGFTNNPEMQVSLFIFFLAIYTVTLLGNFLIVTVTSVDLALQTPMYFFLQNLSLLEVCFTLVMVPKMLVDLVSPRKIISFVGCGTQMYFFFFFGSSECFLLSMMAYDRFVAICNPLHYSVIMNRSLCLWMAIGSWMSGVPVSMLQTAWMMALPFCGPNAVDHFFCDGPPVLKLVTVDTTMYEMQALASTLLFIMFPFCLILVSYTRIIITILRMSSATGRQKAFSTCSSHLIVVSLFYGTASLTYLRPKSNQSPESKKLVSLSYTVITPMLNPIIYGLRNNEVKGAVKRTITQKVLQKLDVF

SEQ ID NO: 59491 - protein, 325 aa, Homo sapiens
  Payload ID: 11643
  Gene Symbol: OR10AC1
  Gene Name: olfactory receptor, family 10, subfamily AC, member 1 (gene/pseudogene)
  ENSP ID: ENSP00000476380
MDSPSNATVPCGFLLQGFSEFPHLRPVLFLLLLGVHLATLGGNLLILVAVASMPSRQPMLLFLCQLSAIELCYTLVVVPRSLVDLSTPGPPQGQPYLLPELRLSDADVCGSGRGRVLPAGRHGLPLRGHLPPVALRGRGDPRAVRATGSGLLPQGTGGVRGAHGGHLPPAFLRLPPAAALLLRHHGAAAPGLHAELRRRAASAGRLPGAAAAALGAHPGLLWRHRRRPAPPALPQRPGQGRLHLRLAPGSHLPALRLRHLHVRAAQGQLLPAPGPHPGAGLHQRHAAAVPTHLQPAQPRDHRRPEQGAGAPAARPSSRRGSARAL

SEQ ID NO: 59492 - protein, 317 aa, Homo sapiens
  Payload ID: 11644
  Gene Symbol: OR10AD1
  Gene Name: olfactory receptor, family 10, subfamily AD, member 1
  Uniprot ID: Q8NGE0
  ENSP ID: ENSP00000308689
MLRNGSIVTEFILVGFQQSSTSTRALLFALFLALYSLTMAMNGLIIFITSWTDPKLNSPMYFFLGHLSLLDVCFITTTIPQMLIHLVVRDHIVSFVCCMTQMYFVFCVGVAECILLAFMAYDRYVAICYPLNYVPIISQKVCVRLVGTAWFFGLINGIFLEYISFREPFRRDNHIESFFCEAPIVIGLSCGDPQFSLWAIFADAIVVILSPMVLTVTSYVHILATILSKASSSGRGKTFSTCASHLTVVIFLYTSAMFSYMNPHSTHGPDKDKPFSLLYTIITPMCNPIIYSFRNKEIKEAMVRALGRTRLAQPQSV

SEQ ID NO: 59493 - protein, 301 aa, Homo sapiens
  Payload ID: 11645
  Gene Symbol: OR10AG1
  Gene Name: olfactory receptor, family 10, subfamily AG, member 1
  Uniprot ID: Q8NH19
  ENSP ID: ENSP00000311477
MEFVLLGFSDIPNLHWMLFSIFLLMYLMILMCNGIIILLIKIHPALQTPMYFFLSNFSLLEICYVTIIIPRMLMDIWTQKGNISLFACATQMCFFLMLGGTECLLLTVMAYDRYVAICKPLQYPLVMNHKVCIQLIIASWTITIPVVIGETCQIFLLPFCGTNTINHFFCDIPPILKLACGNIFVNEITVHVVAVVFITVPFLLIVVSYGKIISNILKLSSARGKAKAFSTCSSHLIVVILFFGAGTITYLQPKPHQFQRMGKLISLFYTILIPTLNPIIYTLRNKDIMVALRKLLAKLLT

SEQ ID NO: 59494 - protein, 312 aa, Homo sapiens
  Payload ID: 11646
  Gene Symbol: OR10C1
  Gene Name: olfactory receptor, family 10, subfamily C, member 1 (gene/pseudogene)
  Uniprot ID: Q96KK4
  ENSP ID: ENSP00000366343
MSANTSMVTEFLLLGFSHLADLQGLLFSVFLTIYLLTVAGNFLIVVLVSTDAALQSPMYFFLRTLSALEIGYTSVTVPLLLHHLLTGRRHISRSGCALQMFFFLFFGATECCLLAAMAYDRYAAICEPLRYPLLLSHRVCLQLAGSAWACGVLVGLGHTPFIFSLPFCGPNTIPQFFCEIQPVLQLVCGDTSLNELQIILATALLILCPFGLILGSYGRILVTIFRIPSVAGRRKAFSTCSSHLIMVSLFYGTALFIYIRPKASYDPATDPLVSLFYAVVTPILNPIIYSLRNTEVKAALKRTIQKTVPMEI

SEQ ID NO: 59495 - protein, 312 aa, Homo sapiens; identical to SEQ ID NO: 59494
  Payload ID: 11646
  Gene Symbol: OR10C1
  Gene Name: olfactory receptor, family 10, subfamily C, member 1 (gene/pseudogene)
  Uniprot ID: Q96KK4
  ENSP ID: ENSP00000375393

SEQ ID NO: 59496 - protein, 312 aa, Homo sapiens
  Payload ID: 11646
  Gene Symbol: OR10C1
  Gene Name: olfactory receptor, family 10, subfamily C, member 1 (gene/pseudogene)
  Uniprot ID: Q96KK4
  ENSP ID: ENSP00000402486
MSANTSMVTEFLLLGFSHLADLQGLLFSVFLTIYLLTVAGNFLIVVLVSTDAALQSPMYFFLRTLSALEIGYTSVTVPLLLHHLLTGRRHISRSGCALQMFFFLFFGATECCLLAAMAYDRYAAICEPLRYPLLLSHRVCLQLAGSAWACGVLVGLGHTPFIFSLPFCGPNTIPQFFCEIQPVLQLVCGDTSLNELQIILATALLILCPFGLILGSYGRILVTIFRIPSVAGRRKAFSTCSSHLIVVSLFYGTALFIYIRPKASYDPATDPLVSLFYAVVTPILNPIIYSLRNTEVKAALKRTIQKTVPMEI

SEQ ID NO: 59497 - protein, 312 aa, Homo sapiens
  Payload ID: 11646
  Gene Symbol: OR10C1
  Gene Name: olfactory receptor, family 10, subfamily C, member 1 (gene/pseudogene)
  ENSP ID: ENSP00000404869
MSANTSMVTEFLLLGFSHLADLQGLLFSVFLTIYLLTVAGNFLIVVLVSTDAALQSPMYLFLRTLSALEIGYTSVTVPLLLHHLLTGRRHISRSGCALQMFFFLFFGATECCLLAAMAYDRYAAICEPLRYPLLLSHRVCLQLAGSAWACGVLVGLGHTPFIFSLPFCGPNTIQQFFCEIQPVLQLVCGDTSLNELQIILATALLILCPFGLILGSYGRILVTIFRIPSVAGRRKAFSTCSSHLIVVSLFYGTALFIYIRPKASYDPATDPLVSLFYAVVTPILNPIIYSLRNTEVKAALKRTIQKTVPMEI

SEQ ID NO: 59498 - protein, 312 aa, Homo sapiens; identical to SEQ ID NO: 59496
  Payload ID: 11646
  Gene Symbol: OR10C1
  Gene Name: olfactory receptor, family 10, subfamily C, member 1 (gene/pseudogene)
  Uniprot ID: Q96KK4
  ENSP ID: ENSP00000408961

SEQ ID NO: 59499 - protein, 312 aa, Homo sapiens; identical to SEQ ID NO: 59496
  Payload ID: 11646
  Gene Symbol: OR10C1
  Gene Name: olfactory receptor, family 10, subfamily C, member 1 (gene/pseudogene)
  Uniprot ID: Q96KK4
  ENSP ID: ENSP00000412512

SEQ ID NO: 59500 - protein, 312 aa, Homo sapiens; identical to SEQ ID NO: 59494
  Payload ID: 11646
  Gene Symbol: OR10C1
  Gene Name: olfactory receptor, family 10, subfamily C, member 1 (gene/pseudogene)
  Uniprot ID: Q96KK4
  ENSP ID: ENSP00000419119

SEQ ID NO: 59501 - protein, 312 aa, Homo sapiens; identical to SEQ ID NO: 59496
  Payload ID: 11646
  Gene Symbol: OR10C1
  Gene Name: olfactory receptor, family 10, subfamily C, member 1 (gene/pseudogene)
  ENSP ID: ENSP00000425554

SEQ ID NO: 59502 - protein, 314 aa, Homo sapiens
  Payload ID: 11646
  Gene Symbol: OR10C1
  Gene Name: olfactory receptor, family 10, subfamily C, member 1 (gene/pseudogene)
  ENSP ID: ENSP00000447194
GRMSANTSMVTEFLLLGFSHLADLQGLLFSVFLTIYLLTVAGNFLIVVLVSTDAALQSPMYFFLRTLSALEIGYTSVTVPLLLHHLLTGRRHISRSGCALQMFFFLFFGATECCLLAAMAYDRYAAICEPLRYPLLLSHRVCLQLAGSAWACGVLVGLGHTPFIFSLPFCGPNTIPQFFCEIQPVLQLVCGDTSLNELQIILATALLILCPFGLILGSYGRILVTIFRIPSVAGRRKAFSTCSSHLIVVSLFYGTALFIYIRPKASYDPATDPLVSLFYAVVTPILNPIIYSLRNTEVKAALKRTIQKTVPMEI

SEQ ID NO: 59503 - protein, 314 aa, Homo sapiens; identical to SEQ ID NO: 59502
  Payload ID: 11646
  Gene Symbol: OR10C1
  Gene Name: olfactory receptor, family 10, subfamily C, member 1 (gene/pseudogene)
  ENSP ID: ENSP00000448011

SEQ ID NO: 59504 - protein, 314 aa, Homo sapiens; identical to SEQ ID NO: 59502
  Payload ID: 11646
  Gene Symbol: OR10C1
  Gene Name: olfactory receptor, family 10, subfamily C, member 1 (gene/pseudogene)
  ENSP ID: ENSP00000448262

SEQ ID NO: 59505 - protein, 314 aa, Homo sapiens; identical to SEQ ID NO: 59502
  Payload ID: 11646
  Gene Symbol: OR10C1
  Gene Name: olfactory receptor, family 10, subfamily C, member 1 (gene/pseudogene)
  ENSP ID: ENSP00000448371

SEQ ID NO: 59506 - protein, 314 aa, Homo sapiens
  Payload ID: 11646
  Gene Symbol: OR10C1
  Gene Name: olfactory receptor, family 10, subfamily C, member 1 (gene/pseudogene)
  ENSP ID: ENSP00000448774
GRMSANTSMVTEFLLLGFSHLADLQGLLFSVFLTIYLLTVAGNFLIVVLVSTDAALQSPMYFFLRTLSALEIGYTSVTVPLLLHHLLTGRRHISRSGCALQMFFFLFFGATECCLLAAMAYDRYAAICEPLRYPLLLSHRVCLQLAGSAWACGVLVGLGHTPFIFSLPFCGPNTIPQFFCEIQPVLQLVCGDTSLNELQIILATALLILCPFGLILGSYGRILVTIFRIPSVAGRRKAFSTCSSHLIMVSLFYGTALFIYIRPKASYDPATDPLVSLFYAVVTPILNPIIYSLRNTEVKAALKRTIQKTVPMEI

SEQ ID NO: 59507 - protein, 314 aa, Homo sapiens
  Payload ID: 11646
  Gene Symbol: OR10C1
  Gene Name: olfactory receptor, family 10, subfamily C, member 1 (gene/pseudogene)
  ENSP ID: ENSP00000449846
GRMSANTSMVTEFLLLGFSHLADLQGLLFSVFLTIYLLTVAGNFLIVVLVSTDAALQSPMYLFLRTLSALEIGYTSVTVPLLLHHLLTGRRHISRSGCALQMFFFLFFGATECCLLAAMAYDRYAAICEPLRYPLLLSHRVCLQLAGSAWACGVLVGLGHTPFIFSLPFCGPNTIQQFFCEIQPVLQLVCGDTSLNELQIILATALLILCPFGLILGSYGRILVTIFRIPSVAGRRKAFSTCSSHLIVVSLFYGTALFIYIRPKASYDPATDPLVSLFYAVVTPILNPIIYSLRNTEVKAALKRTIQKTVPMEI

SEQ ID NO: 59508 - protein, 314 aa, Homo sapiens; identical to SEQ ID NO: 59506
  Payload ID: 11646
  Gene Symbol: OR10C1
  Gene Name: olfactory receptor, family 10, subfamily C, member 1 (gene/pseudogene)
  ENSP ID: ENSP00000450100

SEQ ID NO: 59509 - protein, 314 aa, Homo sapiens; identical to SEQ ID NO: 59506
  Payload ID: 11646
  Gene Symbol: OR10C1
  Gene Name: olfactory receptor, family 10, subfamily C, member 1 (gene/pseudogene)
  ENSP ID: ENSP00000481429

SEQ ID NO: 59510 - protein, 312 aa, Homo sapiens; identical to SEQ ID NO: 59494
  Payload ID: 11646
  Gene Symbol: OR10C1
  Gene Name: olfactory receptor, family 10, subfamily C, member 1 (gene/pseudogene)
  ENSP ID: ENSP00000485032

SEQ ID NO: 59511 - protein, 312 aa, Homo sapiens
  Payload ID: 11647
  Gene Symbol: OR10D3
  Gene Name: olfactory receptor, family 10, subfamily D, member 3 (non-functional)
  Uniprot ID: Q8NH80
  ENSP ID: ENSP00000323895
MEVKNCCMVTEFILLGIPHTEGLEMTLFVLFLPFYACTLLGNVSILVAVMSSARLHTPMYFFLGNLSVFDMGFSSVTCPKMLLYLMGLSRLISYKDCVCQLFFFHFLGSIECFLFTVMAYDRFTAICYPLRYTVIMNPRICVALAVGTWLLGCIHSSILTSLTFTLPYCGPNEVDHFFCDIPALLPLACADTSLAQRVSFTNVGLISLVCFLLILLSYTRITISILSIRTTEGRRRAFSTCSAHLIAILCAYGPIITVYLQPTPNPMLGTVVQILMNLVGPMLNPLIYTLRNKEVKTALKTILHRTGHVPES

SEQ ID NO: 59512 - protein, 310 aa, Homo sapiens
  Payload ID: 11648
  Gene Symbol: OR10G2
  Gene Name: olfactory receptor, family 10, subfamily G, member 2
  Uniprot ID: Q8NGC3
  ENSP ID: ENSP00000445383
MGKTKNTSLDAVVTDFILLGLSHPPNLRSLLFLVFFIIYILTQLGNLLILLTMWADPKLCARPMYILLGVLSFLDMWLSSVTVPLLILDFTPSIKAIPFGGCVAQLYFFHFLGSTQCFLYTLMAYDRYLAICQPLRYPVLMNGRLCTVLVAGAWVAGSMHGSIQATLTFRLPYCGPNQVDYFICDIPAVLRLACADTTVNELVTFVDVGVVAASCFMLILLSYANIVNAILKIRTTDGRRRAFSTCGSHLIVVTVYYVPCIFIYLRAGSKDPLDGAAAVFYTVVTPLLNPLIYTLRNQEVKSALKRITAG

SEQ ID NO: 59513 - protein, 313 aa, Homo sapiens
  Payload ID: 11649
  Gene Symbol: OR10G3
  Gene Name: olfactory receptor, family 10, subfamily G, member 3
  Uniprot ID: Q8NGC4
  ENSP ID: ENSP00000302437
MERINSTLLTAFILTGIPYPLRLRTLFFVFFFLIYILTQLGNLLILITVWADPRLHARPMYIFLGVLSVIDMSISSIIVPRLMMNFTLGVKPIPFGGCVAQLYFYHFLGSTQCFLYTLMAYDRYLAICQPLRYPVLMTAKLSALLVAGAWMAGSIHGALQAILTFRLPYCGPNQVDYFFCDIPAVLRLACADTTVNELVTFVDIGVVVASCFSLILLSYIQIIQAILRIHTADGRRRAFSTCGAHVTVVTVYYVPCAFIYLRPETNSPLDGAAALVPTAITPFLNPLIYTLRNQEVKLALKRMLRSPRTPSEV

SEQ ID NO: 59514 - protein, 311 aa, Homo sapiens
  Payload ID: 11650
  Gene Symbol: OR10G4
  Gene Name: olfactory receptor, family 10, subfamily G, member 4
  Uniprot ID: Q8NGN3
  ENSP ID: ENSP00000325076
MSNASLVTAFILTGLPHAPGLDALLFGIFLVVYVLTVLGNLLILLVIRVDSHLHTPMYYFLTNLSFIDMWFSTVTVPKMLMTLVSPSGRAISFHSCVAQLYFFHFLGSTECFLYTVMSYDRYLAISYPLRYTSMMSGSRCALLATGTWLSGSLHSAVQTILTFHLPYCGPNQIQHYFCDAPPILKLACADTSANVMVIFVDIGIVASGCFVLIVLSYVSIVCSILRIRTSDGRRRAFQTCASHCIVVLCFFVPCVVIYLRPGSMDAMDGVVAIFYTVLTPLLNPVVYTLRNKEVKKAVLKLRDKVAHPQRK

SEQ ID NO: 59515 - protein, 332 aa, Homo sapiens
  Payload ID: 11651
  Gene Symbol: OR10G6
  Gene Name: olfactory receptor, family 10, subfamily G, member 6
  Uniprot ID: Q8NH81
  ENSP ID: ENSP00000477445
MLEGVEHLLLLLLLTDVNSKELQSGNQTSVSHFILVGLHHPPQLGAPLFLAFLVIYLLTVSGNGLIILTVLVDIRLHRPMCLFLCHLSFLDMTISCAIVPKMLAGFLLGSRIISFGGCVIQLFSFHFLGCTECFLYTLMAYDRFLAICKPLHYATIMTHRVCNSLALGTWLGGTIHSLFQTSFVFRLPFCGPNRVDYIFCDIPAMLRLACADTAINELVTFADIGFLALTCFMLILTSYGYIVAAILRIPSADGRRNAFSTCAAHLTVVIVYYVPCTFIYLRPCSQEPLDGVVAVFYTVITPLLNSIIYTLCNKEMKAALQRLGGHKEVQPH

SEQ ID NO: 59516 - protein, 311 aa, Homo sapiens
  Payload ID: 11652
  Gene Symbol: OR10G7
  Gene Name: olfactory receptor, family 10, subfamily G, member 7
  Uniprot ID: Q8NGN6
  ENSP ID: ENSP00000329689
MSNATLLTAFILTGLPHAPGLDAPLFGIFLVVYVLTVLGNLLILLVIRVDSHLHTPMYYFLTNLSFIDMWFSTVTVPKMLMTLVSPSGRTISFHSCVAQLYFFHFLGSTECFLYTVMSYDRYLAISYPLRYTNMMTGRSCALLATGTWLSGSLHSAVQTILTFHLPYCGPNQIQHYFCDAPPILKLACADTSANEMVIFVNIGLVASGCFVLIVLSYVSIVCSILRIRTSEGRHRAFQTCASHCIVVLCFFGPGLFIYLRPGSRDALHGVVAVFYTTLTPLFNPVVYTLRNKEVKKALLKLKNGSVFAQGE

SEQ ID NO: 59517 - protein, 311 aa, Homo sapiens
  Payload ID: 11653
  Gene Symbol: OR10G8
  Gene Name: olfactory receptor, family 10, subfamily G, member 8
  Uniprot ID: Q8NGN5
  ENSP ID: ENSP00000389072
MSNASLLTAFILMGLPHAPALDAPLFGVFLVVYVLTVLGNLLILLVIRVDSHLHTTMYYFLTNLSFIDMWFSTVTVPKLLMTLVFPSGRAISFHSCMAQLYFFHFLGGTECFLYRVMSCDRYLAISYPLRYTSMMTGRSCTLLATSTWLSGSLHSAVQAILTFHLPYCGPNWIQHYLCDAPPILKLACADTSAIETVIFVTVGIVASGCFVLIVLSYVSIVCSILRIRTSEGKHRAFQTCASHCIVVLCFFGPGLFIYLRPGSRKAVDGVVAVFYTVLTPLLNPVVYTLRNKEVKKALLKLKDKVAHSQSK

SEQ ID NO: 59518 - protein, 311 aa, Homo sapiens
  Payload ID: 11654
  Gene Symbol: OR10G9
  Gene Name: olfactory receptor, family 10, subfamily G, member 9
  Uniprot ID: Q8NGN4
  ENSP ID: ENSP00000364164
MSKTSLVTAFILTGLPHAPGLDAPLFGIFLVVYVLTVLGNLLILLVIRVDSHLHTPMYYFLTNLSFIDMWFSTVTVPKMLMTLVSPSGRAISFHSCVAQLYFFHFLGSTECFLYTVMSYDRYLAISYPLRYTSMMSGSRCALLATSTWLSGSLHSAVQTILTFHLPYCGPNQIQHYLCDAPPILKLACADTSANEMVIFVDIGLVASGCFLLIVLSYVSIVCSILRIHTSEGRHRAFQTCASHCIVVLCFFVPCVFIYLRPGSRDVVDGVVAIFYTVLTPLLNPVVYTLRNKEVKKAVLKLRDKVAHSQGE

SEQ ID NO: 59519 - protein, 318 aa, Homo sapiens
  Payload ID: 11655
  Gene Symbol: OR10H1
  Gene Name: olfactory receptor, family 10, subfamily H, member 1
  Uniprot ID: Q9Y4A9
  ENSP ID: ENSP00000335596
MQRANHSTVTQFILVGFSVFPHLQLMLFLLFLLMYLFTLLGNLLIMATVWSERSLHTPMYLFLCALSVSEILYTVAIIPRMLADLLSTQRSIAFLACASQMFFSFSFGFTHSFLLTVMGYDRYVAICHPLRYNVLMSPRGCACLVGCSWAGGLVMGMVVTSAIFHLAFCGHKEIHHFACHVPPLLKLACGDDVLVVAKGVGLVCITALLGCFLLILLSYAFIVAAILKIPSAEGRNKAFSTCASHLTVVVVHYGFASVIYLKPKSPQSLEGDTLMGITYTVLTPFLSPIIFSLRNKELKVAMKKTFFSKLYPEKNVMM

SEQ ID NO: 59520 - protein, 315 aa, Homo sapiens
  Payload ID: 11656
  Gene Symbol: OR10H2
  Gene Name: olfactory receptor, family 10, subfamily H, member 2
  Uniprot ID: O60403
  ENSP ID: ENSP00000306095
MLGLNHTSMSEFILVGFSAFPHLQLMLFLLFLLMYLFTLLGNLLIMATVWSERSLHTPMYLFLCVLSVSEILYTVAIIPRMLADLLSTQRSIAFLACASQMFFSFSFGFTHSFLLTVMGYDRYVAICHPLRYNVLMSPRGCACLVGCSWAGGSVMGMVVTSAIFQLTFCGSHEIQHFLCHVPPLLKLACGNNVPAVALGVGLVCIMALLGCFLLILLSYAFIVADILKIPSAEGRNKAFSTCASHLIVVIVHYGFASVIYLKPKGPHSQEGDTLMATTYAVLTPFLSPIIFSLRNKELKVAMKRTFLSTLYSSGT

SEQ ID NO: 59521 - protein, 316 aa, Homo sapiens
  Payload ID: 11657
  Gene Symbol: OR10H3
  Gene Name: olfactory receptor, family 10, subfamily H, member 3
  Uniprot ID: O60404
  ENSP ID: ENSP00000307130
MPGQNYRTISEFILSGFSAFPQQLLPVLFLLYLLMFLFTLLGNLLIMATVWIERRLHTPMYLFLCALSISEILFTVAITPRMLADLLFTHRSITFVACAIQMFFSFMFGFTHSFLLMVMGYDHYVTICHPLHYNMLMSPRGCAHLVAWTWAGGSVMGMMVTMMVFHLTFCGSNVIHHFLCHVLSLLKLACGSKTSSVIMGVMLVCVTALIGCLFLIILSFVFIVAAILRIPSAEGRHKTFSTCVSHLTVVVMHYSFASLIYLKPKGLHSMYSDALMATTYTVFTPFLSPIIFSLRNKELKNAINKNFCRRFCPLSS

SEQ ID NO: 59522 - protein, 316 aa, Homo sapiens
  Payload ID: 11658
  Gene Symbol: OR10H4
  Gene Name: olfactory receptor, family 10, subfamily H, member 4
  Uniprot ID: Q8NGA5
  ENSP ID: ENSP00000318834
MPSQNYSIISEFNLFGFSAFPQHLLPILFLLYLLMFLFTLLGNLLIMATIWIEHRLHTPMYLFLCTLSVSEILFTVAITPRMLADLLSTHHSITFVACANQMFFSFMFGFTHSFLLLVMGYDRYVAICHPLRYNVLMSPRDCAHLVACTWAGGSVMGMMVTTIVFHLTFCGSNVIHHFFCHVLSLLKLACENKTSSVIMGVMLVCVTALIGCLFLIILSYVFIVAAILRIPSAEGRHKTFSTCVSHLTVVVTHYSFASFIYLKPKGLHSMYSDALMATTYTVFTPFLSPIIFSLRNKELKNAINKNFYRKFCPPSS

SEQ ID NO: 59523 - protein, 315 aa, Homo sapiens
  Payload ID: 11659
  Gene Symbol: OR10H5
  Gene Name: olfactory receptor, family 10, subfamily H, member 5
  Uniprot ID: Q8NGA6
  ENSP ID: ENSP00000310704
MQGLNHTSVSEFILVGFSAFPHLQLMLFLLFLLMYLFTLLGNLLIMATVWSERSLHMPMYLFLCALSITEILYTVAIIPRMLADLLSTQRSIAFLACASQMFFSFSFGFTHSFLLTVMGYDRYVAICHPLRYNVLMSLRGCTCRVGCSWAGGLVMGMVVTSAIFHLAFCGHKEIHHFFCHVPPLLKLACGDDVLVVAKGVGLVCITALLGCFLLILLSYAFIVAAILKIPSAEGRNKAFSTCASHLTVVVVHYGFASVIYLKPKGPQSPEGDTLMGITYTVLTPFLSPIIFSLRNKELKVAMKKTCFTKLFPQNC

SEQ ID NO: 59524 - protein, 320 aa, Homo sapiens
  Payload ID: 11660
  Gene Symbol: OR10J1
  Gene Name: olfactory receptor, family 10, subfamily J, member 1
  Uniprot ID: P30954
  ENSP ID: ENSP00000399078
MLLCFRFGNQSMKRENFTLITDFVFQGFSSFHEQQITLFGVFLALYILTLAGNIIIVTIIRMDLHLHTPMYFFLSMLSTSETVYTLVILPRMLSSLVGMSQPISLAGCATQMFFFVTFGITNCFLLTAMGYDRYVAICNPLRYMVIMNKRLRIQLVLGACSIGLIVAITQVTSVFRLPFCARKVPHFFCDIRPVMKLSCIDTTVNEILTLIISVLVLVVPMGLVFISYVLIISTILKIASVEGRKKAFATCASHLTVVIVHYSCASIAYLKPKSENTREHDQLISVTYTVITPLLNPVVYTLRNKEVKDALCRAVGGKFS

SEQ ID NO: 59525 - protein, 329 aa, Homo sapiens
  Payload ID: 11661
  Gene Symbol: OR10J3
  Gene Name: olfactory receptor, family 10, subfamily J, member 3
  Uniprot ID: Q5JRS4
  ENSP ID: ENSP00000331789
MPKLNSTFVTEFLFEGFSSFRRQHKLVFFVVFLTLYLLTLSGNVIIMTIIRLDHHLHTPMYFFLCMLSISETCYTVAIIPHMLSGLLNPHQPIATQSCATQLFFYLTFGINNCFLLTVMGYDRYVAICNPLRYSVIMGKRACIQLASGSLGIGLGMAIVQVTSVFGLPFCDAFVISHFFCDVRHLLKLACTDTTVNEIINFVVSVCVLVLPMGLVFISYVLIISTILKIASAEGQKKAFATCASHLTVVIIHYGCASIIYLKPKSQSSLGQDRLISVTYTHHSPTEPCCVQPEEQGGQRCSAQSRGAKNSVSLMKRGCEGFSFAFINMY

SEQ ID NO: 59526 - protein, 305 aa, Homo sapiens
  Payload ID: 11662
  Gene Symbol: OR10J4
  Gene Name: olfactory receptor, family 10, subfamily J, member 4 (gene/pseudogene)
  ENSP ID: ENSP00000475611
MPRPNFMAVTEFTFEGFSIFEWHHRLILFVIFLVLYVLTLASNAIILIVIRLNHQLHTPMYFFLSVLSISETYYTVAINPQMLSGLLSPQQTISIPGCAAQLFFYLTFGVNKCFLLTAMGYDHYVAICNPLQYSVIMGKKACIQLVSGSWNIGLSTAIIQVSSVFSLPFCDANLISHFFCDIRPIMKLACADTTIKELLLCSSVSVSLFCPWYSSSPMSLSPPSSRLHQLRAGERPLLLVPHTSQWSLSTMAVLLSSTNPNPKIPCRTDLSLHTLLLLLCTLLYTAGTKRSRMPCSELWAESLSL

SEQ ID NO: 59527 - protein, 309 aa, Homo sapiens
  Payload ID: 11663
  Gene Symbol: OR10J5
  Gene Name: olfactory receptor, family 10, subfamily J, member 5
  Uniprot ID: Q8NHC4
  ENSP ID: ENSP00000334441
MKRKNFTEVSEFIFLGFSSFGKHQITLFVVFLTVYILTLVANIIIVTIICIDHHLHTPMYFFLSMLASSETVYTLVIVPRMLLSLIFHNQPISLAGCATQMFFFVILATNNCFLLTAMGYDRYVAICRPLRYTVIMSKGLCAQLVCGSFGIGLTMAVLHVTAMFNLPFCGTVVDHFFCDIYPVMKLSCIDTTINEIINYGVSSFVIFVPIGLIFISYVLVISSILQIASAEGRKKTFATCVSHLTVVIVHCGCASIAYLKPKSESSIEKDLVLSVTYTIITPLLNPVVYSLRNKEVKDALCRVVGRNIS

SEQ ID NO: 59528 - protein, 313 aa, Homo sapiens
  Payload ID: 11664
  Gene Symbol: OR10K1
  Gene Name: olfactory receptor, family 10, subfamily K, member 1
  Uniprot ID: Q8NGX5
  ENSP ID: ENSP00000289451
MEQVNKTVVREFVVLGFSSLARLQQLLFVIFLLLYLFTLGTNAIIISTIVLDRALHTPMYFFLAILSCSEICYTFVIVPKMLVDLLSQKKTISFLGCAIQMFSFLFFGSSHSFLLAAMGYDRYMAICNPLRYSVLMGHGVCMGLMAAACACGFTVSLVTTSLVFHLPFHSSNQLHHFFCDISPVLKLASQHSGFSQLVIFMLGVFALVIPLLLILVSYIRIISAILKIPSSVGRYKTFSTCASHLIVVTVHYSCASFIYLRPKTNYTSSQDTLISVSYTILTPLFNPMIYSLRNKEFKSALRRTIGQTFYPLS

SEQ ID NO: 59529 - protein, 312 aa, Homo sapiens
  Payload ID: 11665
  Gene Symbol: OR10K2
  Gene Name: olfactory receptor, family 10, subfamily K, member 2
  Uniprot ID: Q6IF99
  ENSP ID: ENSP00000324251
MERVNETVVREVIFLGFSSLARLQQLLFVIFLLLYLFTLGTNAIIISTIVLDRALHIPMYFFLAILSCSEICYTFIIVPKMLVDLLSQKKTISFLGCAIQMFSFLFLGCSHSFLLAVMGYDRYIAICNPLRYSVLMGHGVCMGLVAAACACGFTVAQIITSLVFHLPFYSSNQLHHFFCDIAPVLKLASHHNHFSQIVIFMLCTLVLAIPLLLILVSYVHILSAILQFPSTLGRCKAFSTCVSHLIIVTVHYGCASFIYLRPQSNYSSSQDALISVSYTIITPLFNPMIYSLRNKEFKSALCKIVRRTISLL

SEQ ID NO: 59530 - protein, 313 aa, Homo sapiens
  Payload ID: 11666
  Gene Symbol: OR10P1
  Gene Name: olfactory receptor, family 10, subfamily P, member 1
  Uniprot ID: Q8NGE3
  ENSP ID: ENSP00000308082
MAGENHTTLPEFLLLGFSDLKALQGPLFWVVLLVYLVTLLGNSLIILLTQVSPALHSPMYFFLRQLSVVELFYTTDIVPRTLANLGSPHPQAISFQGCAAQMYVFIVLGISECCLLTAMAYDRYVAICQPLRYSTLLSPRACMAMVGTSWLTGIITATTHASLIFSLPFRSHPIIPHFLCDILPVLRLASAGKHRSEISVMTATIVFIMIPFSLIVTSYIRILGAILAMASTQSRRKVFSTCSSHLLVVSLFFGTASITYIRPQAGSSVTTDRVLSLFYTVITPMLNPIIYTLRNKDVRRALRHLVKRQRPSP

SEQ ID NO: 59531 - protein, 319 aa, Homo sapiens
  Payload ID: 11667
  Gene Symbol: OR10Q1
  Gene Name: olfactory receptor, family 10, subfamily Q, member 1
  Uniprot ID: Q8NGQ4
  ENSP ID: ENSP00000314324
MPVGKLVFNQSEPTEFVFRAFTTATEFQVLLFLLFLLLYLMILCGNTAIIWVVCTHSTLRTPMYFFLSNLSFLELCYTTVVVPLMLSNILGAQKPISLAGCGAQMFFFVTLGSTDCFLLAIMAYDRYVAICHPLHYTLIMTRELCTQMLGGALGLALFPSLQLTALIFTLPFCGHHQEINHFLCDVPPVLRLACADIRVHQAVLYVVSILVLTIPFLLICVSYVFITCAILSIRSAEGRRRAFSTCSFHLTVVLLQYGCCSLVYLRPRSSTSEDEDSQIALVYTFVTPLLNPLLYSLRNKDVKGALRSAIIRKAASDAN

SEQ ID NO: 59532 - protein, 335 aa, Homo sapiens
  Payload ID: 11668
  Gene Symbol: OR10R2
  Gene Name: olfactory receptor, family 10, subfamily R, member 2
  Uniprot ID: Q8NGX6
  ENSP ID: ENSP00000357134
MPQILIFTYLNMFYFFPPLQILAENLTMVTEFLLLGFSSLGEIQLALFVVFLFLYLVILSGNVTIISVIHLDKSLHTPMYFFLGILSTSETFYTFVILPKMLINLLSVARTISFNCCALQMFFFLGFAITNCLLLGVMGYDRYAAICHPLHYPTLMSWQVCGKLAAACAIGGFLASLTVVNLVFSLPFCSANKVNHYFCDISAVILLACTNTDVNEFVIFICGVLVLVVPFLFICVSYLCILRTILKIPSAEGRRKAFSTCASHLSVVIVHYGCASFIYLRPTANYVSNKDRLVTVTYTIVTPLLNPMVYSLRNKDVQLAIRKVLGKKGSLKLYN

SEQ ID NO: 59533 - protein, 331 aa, Homo sapiens
  Payload ID: 11669
  Gene Symbol: OR10S1
  Gene Name: olfactory receptor, family 10, subfamily S, member 1
  Uniprot ID: Q8NGN2
  ENSP ID: ENSP00000431914
MTSRSVCEKMTMTTENPNQTVVSHFFLEGLRYTAKHSSLFFLLFLLIYSITVAGNLLILLTVGSDSHLSLPMYHFLGHLSFLDACLSTVTVPKVMAGLLTLDGKVISFEGCAVQLYCFHFLASTECFLYTVMAYDRYLAICQPLHYPVAMNRRMCAEMAGITWAIGATHAAIHTSLTFRLLYCGPCHIAYFFCDIPPVLKLACTDTTINELVMLASIGIVAAGCLILIVISYIFIVAAVLRIRTAQGRQRAFSPCTAQLTGVLLYYVPPVCIYLQPRSSEAGAGAPAVFYTIVTPMLNPFIYTLRNKEVKHALQRLLCSSFRESTAGSPPP

SEQ ID NO: 59534 - protein, 314 aa, Homo sapiens
  Payload ID: 11670
  Gene Symbol: OR10T2
  Gene Name: olfactory receptor, family 10, subfamily T, member 2
  Uniprot ID: Q8NGX3
  ENSP ID: ENSP00000334115
MRGFNKTTVVTQFILVGFSSLGELQLLLFVIFLLLYLTILVANVTIMAVIRFSWTLHTPMYGFLFILSFSESCYTFVIIPQLLVHLLSDTKTISFMACATQLFFFLGFACTNCLLIAVMGYDRYVAICHPLRYTLIINKRLGLELISLSGATGFFIALVATNLICDMRFCGPNRVNHYFCDMAPVIKLACTDTHVKELALFSLSILVIMVPFLLILISYGFIVNTILKIPSAEGKKAFVTCASHLTVVFVHYGCASIIYLRPKSKSASDKDQLVAVTYTVVTPLLNPLVYSLRNKEVKTALKRVLGMPVATKMS

SEQ ID NO: 59535 - protein, 309 aa, Homo sapiens
  Payload ID: 11671
  Gene Symbol: OR10V1
  Gene Name: olfactory receptor, family 10, subfamily V, member 1
  Uniprot ID: Q8NGI7
  ENSP ID: ENSP00000302199
MEGINKTAKMQFFFRPFSPDPEVQMLIFVVFLMMYLTSLGGNATIAVIVQINHSLHTPMYFFLANLAVLEIFYTSSITPLALANLLSMGKTPVSITGCGTQMFFFVFLGGADCVLLVVMAYDQFIAICHPLRYRLIMSWSLCVELLVGSLVLGFLLSLPLTILIFHLPFCHNDEIYHFYCDMPAVMRLACADTRVHKTALYIISFIVLSIPLSLISISYVFIVVAILRIRSAEGRQQAYSTCSSHILVVLLQYGCTSFIYLSPSSSYSPEMGRVVSVAYTFITPILNPLIYSLRNKELKDALRKALRKF

SEQ ID NO: 59536 - protein, 305 aa, Homo sapiens
  Payload ID: 11672
  Gene Symbol: OR10W1
  Gene Name: olfactory receptor, family 10, subfamily W, member 1
  Uniprot ID: Q8NGF6
  ENSP ID: ENSP00000378516
MEFVFLAYPSCPELHILSFLGVSLVYGLIITGNILIVVSIHTETCLCTSMYYFLGSLSGIEICYTAVVVPHILANTLQSEKTITLLGCATQMAFFIALGSADCFLLAAMAYDRYVAICHPLQYPLLMTLTLCVHLVVASVISGLFLSLQLVAFIFSLPFCQAQGIEHFFCDVPPVMHVVCAQSHIHEQSVLVAAILAIAVPFFLITTSYTFIVAALLKIHSAAGRHRAFSTCSSHLTVVLLQYGCCAFMYLCPSSSYNPKQDRFISLVYTLGTPLLNPLIYALRNSEMKGAVGRVLTRNCLSQNS

SEQ ID NO: 59537 - protein, 326 aa, Homo sapiens; identical to SEQ ID NO: 59428
  Payload ID: 11673
  Gene Symbol: OR10X1
  Gene Name: olfactory receptor, family 10, subfamily X, member 1 (gene/pseudogene)
  Uniprot ID: Q8NGY0
  ENSP ID: ENSP00000357132

SEQ ID NO: 59538 - protein, 313 aa, Homo sapiens
  Payload ID: 11674
  Gene Symbol: OR10Z1
  Gene Name: olfactory receptor, family 10, subfamily Z, member 1
  Uniprot ID: Q8NGY1
  ENSP ID: ENSP00000354707
MGQTNVTSWRDFVFLGFSSSGELQLLLFALFLSLYLVTLTSNVFIIIAIRLDSHLHTPMYLFLSFLSFSETCYTLGIIPRMLSGLAGGDQAISYVGCAAQMFFSASWACTNCFLLAAMGFDRYVAICAPLHYASHMNPTLCAQLVITSFLTGYLFGLGMTLVIFHLSFCSSHEIQHFFCDTPPVLSLACGDTGPSELRIFILSLLVLLVSFFFITISYAYILAAILRIPSAEGQKKAFSTCASHLTVVIIHYGCASFVYLRPKASYSLERDQLIAMTYTVVTPLLNPIVYSLRNRAIQTALRNAFRGRLLGKG

SEQ ID NO: 59539 - protein, 315 aa, Homo sapiens
  Payload ID: 11675
  Gene Symbol: OR11A1
  Gene Name: olfactory receptor, family 11, subfamily A, member 1
  Uniprot ID: Q9GZK7
  ENSP ID: ENSP00000366352
MEIVSTGNETITEFVLLGFYDIPELHFLFFIVFTAVYVFIIIGNMLIIVAVVSSQRLHKPMYIFLANLSFLDILYTSAVMPKMLEGFLQEATISVAGCLLQFFIFGSLATAECLLLAVMAYDRYLAICYPLHYPLLMGPRRYMGLVVTTWLSGFVVDGLVVALVAQLRFCGPNHIDQFYCDFMLFVGLACSDPRVAQVTTLILSVFCLTIPFGLILTSYARIVVAVLRVPAGASRRRAFSTCSSHLAVVTTFYGTLMIFYVAPSAVHSQLLSKVFSLLYTVVTPLFNPVIYTMRNKEVHQALRKILCIKQTETLD

SEQ ID NO: 59540 - protein, 315 aa, Homo sapiens; identical to SEQ ID NO: 59539
  Payload ID: 11675
  Gene Symbol: OR11A1
  Gene Name: olfactory receptor, family 11, subfamily A, member 1
  Uniprot ID: Q9GZK7
  ENSP ID: ENSP00000366353

SEQ ID NO: 59541 - protein, 315 aa, Homo sapiens; identical to SEQ ID NO: 59539
  Payload ID: 11675
  Gene Symbol: OR11A1
  Gene Name: olfactory receptor, family 11, subfamily A, member 1
  Uniprot ID: Q9GZK7
  ENSP ID: ENSP00000366354

SEQ ID NO: 59542 - protein, 315 aa, Homo sapiens; identical to SEQ ID NO: 59539
  Payload ID: 11675
  Gene Symbol: OR11A1
  Gene Name: olfactory receptor, family 11, subfamily A, member 1
  Uniprot ID: Q9GZK7
  ENSP ID: ENSP00000373043

SEQ ID NO: 59543 - protein, 315 aa, Homo sapiens; identical to SEQ ID NO: 59539
  Payload ID: 11675
  Gene Symbol: OR11A1
  Gene Name: olfactory receptor, family 11, subfamily A, member 1
  Uniprot ID: Q9GZK7
  ENSP ID: ENSP00000373141

SEQ ID NO: 59544 - protein, 315 aa, Homo sapiens; identical to SEQ ID NO: 59539
  Payload ID: 11675
  Gene Symbol: OR11A1
  Gene Name: olfactory receptor, family 11, subfamily A, member 1
  Uniprot ID: Q9GZK7
  ENSP ID: ENSP00000383532

SEQ ID NO: 59545 - protein, 315 aa, Homo sapiens; identical to SEQ ID NO: 59539
  Payload ID: 11675
  Gene Symbol: OR11A1
  Gene Name: olfactory receptor, family 11, subfamily A, member 1
  Uniprot ID: Q9GZK7
  ENSP ID: ENSP00000383550

SEQ ID NO: 59546 - protein, 315 aa, Homo sapiens; identical to SEQ ID NO: 59539
  Payload ID: 11675
  Gene Symbol: OR11A1
  Gene Name: olfactory receptor, family 11, subfamily A, member 1
  Uniprot ID: Q9GZK7
  ENSP ID: ENSP00000392324

SEQ ID NO: 59547 - protein, 315 aa, Homo sapiens; identical to SEQ ID NO: 59539
  Payload ID: 11675
  Gene Symbol: OR11A1
  Gene Name: olfactory receptor, family 11, subfamily A, member 1
  Uniprot ID: Q9GZK7
  ENSP ID: ENSP00000398659

SEQ ID NO: 59548 - protein, 315 aa, Homo sapiens; identical to SEQ ID NO: 59539
  Payload ID: 11675
  Gene Symbol: OR11A1
  Gene Name: olfactory receptor, family 11, subfamily A, member 1
  Uniprot ID: Q9GZK7
  ENSP ID: ENSP00000399062

SEQ ID NO: 59549 - protein, 315 aa, Homo sapiens; identical to SEQ ID NO: 59539
  Payload ID: 11675
  Gene Symbol: OR11A1
  Gene Name: olfactory receptor, family 11, subfamily A, member 1
  Uniprot ID: Q9GZK7
  ENSP ID: ENSP00000399592

SEQ ID NO: 59550 - protein, 315 aa, Homo sapiens; identical to SEQ ID NO: 59539
  Payload ID: 11675
  Gene Symbol: OR11A1
  Gene Name: olfactory receptor, family 11, subfamily A, member 1
  Uniprot ID: Q9GZK7
  ENSP ID: ENSP00000400331

SEQ ID NO: 59551 - protein, 315 aa, Homo sapiens; identical to SEQ ID NO: 59539
  Payload ID: 11675
  Gene Symbol: OR11A1
  Gene Name: olfactory receptor, family 11, subfamily A, member 1
  Uniprot ID: Q9GZK7
  ENSP ID: ENSP00000400657

SEQ ID NO: 59552 - protein, 315 aa, Homo sapiens; identical to SEQ ID NO: 59539
  Payload ID: 11675
  Gene Symbol: OR11A1
  Gene Name: olfactory receptor, family 11, subfamily A, member 1
  Uniprot ID: Q9GZK7
  ENSP ID: ENSP00000403427

SEQ ID NO: 59553 - protein, 315 aa, Homo sapiens
  Payload ID: 11675
  Gene Symbol: OR11A1
  Gene Name: olfactory receptor, family 11, subfamily A, member 1
  Uniprot ID: Q9GZK7
  ENSP ID: ENSP00000404787
MEIVSTGNETITEFVLLGFYDIPELHFLFFIVFTAVYVFIIIGNMLIIVAVVSSQRLHKPMYIFLANLSFLDILYTSAVMPKMLEGFLQEATISVAGCLLQFFIFGSLATAECLLLAVMAYDRYLAICYPLHYPLLMGPRRYMGLVVTTWLSGFVVDGLVVALVTQLRFCGPNHIDQFYCDFMLFVGLACSDPRVAQVTTLILSVFCLTIPFGLILTSYARIVVAVLRVPAGASRRRAFSTCSSHLAVVTTFYGTLMIFYVAPSAVHSQLLSKVFSLLYTVVTPLFNPVIYTMRNKEVHQALRKILCIKQTETLD

SEQ ID NO: 59554 - protein, 315 aa, Homo sapiens; identical to SEQ ID NO: 59553
  Payload ID: 11675
  Gene Symbol: OR11A1
  Gene Name: olfactory receptor, family 11, subfamily A, member 1
  Uniprot ID: Q9GZK7
  ENSP ID: ENSP00000409994

SEQ ID NO: 59555 - protein, 315 aa, Homo sapiens; identical to SEQ ID NO: 59539
  Payload ID: 11675
  Gene Symbol: OR11A1
  Gene Name: olfactory receptor, family 11, subfamily A, member 1
  Uniprot ID: Q9GZK7
  ENSP ID: ENSP00000412097

SEQ ID NO: 59556 - protein, 315 aa, Homo sapiens; identical to SEQ ID NO: 59539
  Payload ID: 11675
  Gene Symbol: OR11A1
  Gene Name: olfactory receptor, family 11, subfamily A, member 1
  Uniprot ID: Q9GZK7
  ENSP ID: ENSP00000447215

SEQ ID NO: 59557 - protein, 315 aa, Homo sapiens; identical to SEQ ID NO: 59539
  Payload ID: 11675
  Gene Symbol: OR11A1
  Gene Name: olfactory receptor, family 11, subfamily A, member 1
  Uniprot ID: Q9GZK7
  ENSP ID: ENSP00000447222

SEQ ID NO: 59558 - protein, 315 aa, Homo sapiens; identical to SEQ ID NO: 59553
  Payload ID: 11675
  Gene Symbol: OR11A1
  Gene Name: olfactory receptor, family 11, subfamily A, member 1
  Uniprot ID: Q9GZK7
  ENSP ID: ENSP00000447267

SEQ ID NO: 59559 - protein, 315 aa, Homo sapiens; identical to SEQ ID NO: 59539
  Payload ID: 11675
  Gene Symbol: OR11A1
  Gene Name: olfactory receptor, family 11, subfamily A, member 1
  Uniprot ID: Q9GZK7
  ENSP ID: ENSP00000447627

SEQ ID NO: 59560 - protein, 315 aa, Homo sapiens; identical to SEQ ID NO: 59539
  Payload ID: 11675
  Gene Symbol: OR11A1
  Gene Name: olfactory receptor, family 11, subfamily A, member 1
  Uniprot ID: Q9GZK7
  ENSP ID: ENSP00000447745

SEQ ID NO: 59561 - protein, 315 aa, Homo sapiens; identical to SEQ ID NO: 59539
  Payload ID: 11675
  Gene Symbol: OR11A1
  Gene Name: olfactory receptor, family 11, subfamily A, member 1
  Uniprot ID: Q9GZK7
  ENSP ID: ENSP00000447956

SEQ ID NO: 59562 - protein, 315 aa, Homo sapiens; identical to SEQ ID NO: 59539
  Payload ID: 11675
  Gene Symbol: OR11A1
  Gene Name: olfactory receptor, family 11, subfamily A, member 1
  Uniprot ID: Q9GZK7
  ENSP ID: ENSP00000450263

SEQ ID NO: 59563 - protein, 345 aa, Homo sapiens
  Payload ID: 11676
  Gene Symbol: OR11G2
  Gene Name: olfactory receptor, family 11, subfamily G, member 2
  Uniprot ID: Q8NGC1
  ENSP ID: ENSP00000349930
MHFLSQNDLNINLIPHLCLHRHSVIAGAFTIHRHMKIFNSPSNSSTFTGFILLGFPCPREGQILLFVLFTVVYLLTLMGNGSIICAVHWDQRLHAPMYILLANFSFLEICYVTSTVPSMLANFLSDTKIISFSGCFLQFYFFFSLGSTECFFLAVMAFDRYLAICRPLRYPTIMTRRLCTNLVVNCWVLGFIWFLIPIVNISQMSFCGSRIIDHFLCDPAPLLTLTCKKGPVIELVFSVLSPLPVFMLFLFIVGSYALVVRAVLRVPSAAGRRKAFSTCGSHLAVVSLFYGSVLVMYGSPPSKNEAGKQKTVTLFYSVVTPLLNPVIYSLRNKDMRKALKKFWGT

SEQ ID NO: 59564 - protein, 326 aa, Homo sapiens
  Payload ID: 11677
  Gene Symbol: OR11H1
  Gene Name: olfactory receptor, family 11, subfamily H, member 1
  Uniprot ID: Q8NG94
  ENSP ID: ENSP00000252835
MCPLTLQVTGLMNVSEPNSSFAFVNEFILQGFSCEWTIQIFLFSLFTTTYALTITGNGAIAFVLWCDRRLHTPMYMFLGNFSFLEIWYVSSTVPKMLVNFLSEKKNISFAGCFLQFYFFFSLGTSECLLLTVMAFDQYLAICRPLLYPNIMTGHLYAKLVILCWVCGFLWFLIPIVLISQMPFCGPNIIDHVVCDPGPRFALDCVSAPRIQLFCYTLSSLVIFGNFLFIIGSYTLVLKAMLGMPSSTGRHKAFSTCGSHLAVVSLCYSSLMVMYVSPGLGHSTGMQKIETLFYAMVTPLFNPLIYSLQNKEIKAALRKVLGSSNII

SEQ ID NO: 59565 - protein, 326 aa, Homo sapiens
  Payload ID: 11678
  Gene Symbol: OR11H12
  Gene Name: olfactory receptor, family 11, subfamily H, member 12
  Uniprot ID: B2RN74
  ENSP ID: ENSP00000449002
MCPLTLQVTGLMNVSEPNSSFAFVNEFILQGFTCEWTIQIFLFSLFTTTYALTITGNGAIAFVLWCDWRLHTPMYMFLGNFSFLEIWYVSSTVPKMLVNFLSEKKNISFAGCFLQFYFFFSLGTSECLLLTVMAFDQYLAICRPLLYPNIMTGHLCAKLVILCWVCGFLWFLIPIVLISQMPFCGPNIIDHVVCDPGPRFALDCVSAPRIQLFCYTLSSLVIFGNFLFIIGSYTLVLKAVLGMPSSTGRHKAFSTCGSHLAVVSLCYSSLMVMYVSPGLGHSTGMQKIETLFYAMVTPLFNPLIYSLQNKEIKAALRKVLGSSNII

SEQ ID NO: 59566 - protein, 326 aa, Homo sapiens
  Payload ID: 11679
  Gene Symbol: OR11H2
  Gene Name: olfactory receptor, family 11, subfamily H, member 2
  Uniprot ID: Q8NH07
  ENSP ID: ENSP00000485150
MCPLTLHVTGLMNVSEPNSSFAFVNEFILQGFSCEWTIQIFLFSLFTTIYALTITGNGAIAFVLWCDRRLHTPMYMFLGNFSFLEIWYVSSTVPKMLVNFLSEKKNISFAGCFLQFYFFFSLGTSECLLLTVMAFDQYLAICRPLLYPNIMTGHLYAKLVILCWVCGFLWFLIPIVLISQKPFCGPNIIDHVVCDPGPLFALDCVSAPRIQLFCYTLSSLVIFGNFLFIIGSYTLVLKAVLGMPSSTGRHKAFSTCGSHLAVVSLCYSPLMVMYVSPGLGHSTGMQKIETLFYAMVTPLFNPLIYSLQNKEIKAALRKVLGSSNII

SEQ ID NO: 59567 - protein, 324 aa, Homo sapiens
  Payload ID: 11680
  Gene Symbol: OR11H4
  Gene Name: olfactory receptor, family 11, subfamily H, member 4
  Uniprot ID: Q8NGC9
  ENSP ID: ENSP00000318997
MSFFFVDLRPMNRSATHIVTEFILLGFPGCWKIQIFLFSLFLVIYVLTLLGNGAIIYAVRCNPLLHTPMYFLLGNFAFLEIWYVSSTIPNMLVNILSKTKAISFSGCFLQFYFFFSLGTTECLFLAVMAYDRYLAICHPLQYPAIMTVRFCGKLVSFCWLIGFLGYPIPIFYISQLPFCGPNIIDHFLCDMDPLMALSCAPAPITECIFYTQSSLVLFFTSMYILRSYILLLTAVFQVPSAAGRRKAFSTCGSHLVVVSLFYGTVMVMYVSPTYGIPTLLQKILTLVYSVTTPLFNPLIYTLRNKDMKLALRNVLFGMRIRQNS

SEQ ID NO: 59568 - protein, 330 aa, Homo sapiens
  Payload ID: 11681
  Gene Symbol: OR11H6
  Gene Name: olfactory receptor, family 11, subfamily H, member 6
  Uniprot ID: Q8NGC7
  ENSP ID: ENSP00000319071
MFFIIHSLVTSVFLTALGPQNRTMHFVTEFVLLGFHGQREMQSCFFSFILVLYLLTLLGNGAIVCAVKLDRRLHTPMYILLGNFAFLEIWYISSTVPNMLVNILSEIKTISFSGCFLQFYFFFSLGTTECFFLSVMAYDRYLAICRPLHYPSIMTGKFCIILVCVCWVGGFLCYPVPIVLISQLPFCGPNIIDHLVCDPGPLFALACISAPSTELICYTFNSMIIFGPFLSILGSYTLVIRAVLCIPSGAGRTKAFSTCGSHLMVVSLFYGTLMVMYVSPTSGNPAGMQKIITLVYTAMTPFLNPLIYSLRNKDMKDALKRVLGLTVSQN

SEQ ID NO: 59569 - protein, 312 aa, Homo sapiens
  Payload ID: 11682
  Gene Symbol: OR11H7
  Gene Name: olfactory receptor, family 11, subfamily H, member 7 (gene/pseudogene)
  ENSP ID: ENSP00000451021
MNNSQISTVTQFVLLGFPGPWKIQIIFFSMILLVYIFTLTGNMAIICAVRWDHRLHTPMYVLLANFSFLEIWYVTCTVPNMLVNFFSKTKTISFSGCFTQFHFFFSLGTTECFFLCVMAYDRYLAICHPLHYPSIMTGQLCGILVSLCWLIGFLGHSISIFFIFQLPFCGPNIIDHFLCDVDPLMALSSAPTHIIGHVFHSVSSLFINLTMVYILGSYTLVLRTVLVPSSAGWQKAISTCGSHLVVVSLFYGAIMLMYVSPTPGNSVAMHKLITLIYSVVTPVLNPLIYSLRNKDMKYALHHVFCGMRIIQR

SEQ ID NO: 59570 - protein, 322 aa, Homo sapiens
  Payload ID: 11683
  Gene Symbol: OR11L1
  Gene Name: olfactory receptor, family 11, subfamily L, member 1
  Uniprot ID: Q8NGX0
  ENSP ID: ENSP00000348033
MEPQNTSTVTNFQLLGFQNLLEWQALLFVIFLLIYCLTIIGNVVIITVVSQGLRLHSPMYMFLQHLSFLEVWYTSTTVPLLLANLLSWGQAISFSACMAQLYFFVFLGATECFLLAFMAYDRYLAICSPLRYPFLMHRGLCARLVVVSWCTGVSTGFLPSLMISRLDFCGRNQINHFFCDLPPLMQLSCSRVYITEVTIFILSIAVLCICFFLTLGPYVFIVSSILRIPSTSGRRKTFSTCGSHLAVVTLYYGTMISMYVCPSPHLLPEINKIISVFYTVVTPLLNPVIYSLRNKDFKEAVRKVMRRKCGILWSTSKRKFLY

SEQ ID NO: 59571 - protein, 238 aa, Homo sapiens
  Payload ID: 11684
  Gene Symbol: OR12D1
  Gene Name: olfactory receptor, family 12, subfamily D, member 1 (gene/pseudogene)
  ENSP ID: ENSP00000475351
MLNTTSVTEFLLLGVTDIQELQPFLFVVFLTIYFISVAGNGAILMIVISDPRLHSPMYFFLGNLSCLDICYSSVTLPKMLQNFLSAHKAISFLGCISQLHFFHFLGSTEAMLLAVMAFDRFVAICKPLRYTVIMNPQLCTQMAITIWMIGFFHALLHSLMTSRLNFCGSNRIYHFFCDVKPLLKLSLISGCSVLSQGQSPWAPSFSHYSPISTLSPISSSRLILLACSAKHCPLVPPT

SEQ ID NO: 59572 - protein, 307 aa, Homo sapiens
  Payload ID: 11685
  Gene Symbol: OR12D2
  Gene Name: olfactory receptor, family 12, subfamily D, member 2 (gene/pseudogene)
  Uniprot ID: P58182
  ENSP ID: ENSP00000366345
MLNTTSVTEFLLLGVTDIQELQPFLFVVFLTIYFISVTGNGAVLMIVISDPRLHSLMYFFLGNLSYLDICYSTVTLPKMLQNFLSTHKAISFLGCISQLHFFHFLGSTESMLFAVMAFDLSVAICKPLRYTVIMNPQLCTQMAITIWVIGFFHALLHSVMTSRLNFCGSNRIHHFLCDIKPLLKLACGNTELNQWLLSTVTGTIAMGPFFLTLLSYFYIITYLFFKTRSCSMLCKALSTCASHFMVVILFYAPVLFTYIHPALESFMDQDRIVAIMYTVVTPVLNPLIYTLRNKEVKGALGRVIRRL

SEQ ID NO: 59573 - protein, 307 aa, Homo sapiens
  Payload ID: 11685
  Gene Symbol: OR12D2
  Gene Name: olfactory receptor, family 12, subfamily D, member 2 (gene/pseudogene)
  Uniprot ID: P58182
  ENSP ID: ENSP00000373047
MLNTTSVTEFLLLGVTDIQELQPFLFVVFLTIYFISVTGNGAVLMIVISDPRLHSLMYFFLGNLSYLDICYSTVTLPKMLQNFLSTHKAISFLGCISQLHFFHSLGSTESMLFAVMAFDLSVAICKPLRYTVIMNPQLCTQMAITIWVIGFFHALLHSVMTSRLNFCGSNRIHHFLCDIKPLLKLACGNTELNQWLLSTVTGTIAMGPFFLTLLSYFYIITYLFFKTRSCSMLCKALSTCASHFMVVILFYAPVLFTYIHPALESFMDQDRIVAIMYTVVTPVLNPLIYTLRNKEVKGALGRVIRRL

SEQ ID NO: 59574 - protein, 307 aa, Homo sapiens
  Payload ID: 11685
  Gene Symbol: OR12D2
  Gene Name: olfactory receptor, family 12, subfamily D, member 2 (gene/pseudogene)
  ENSP ID: ENSP00000390448
MLNTTSVTEFLLLGVTDIQELQPFLFVVFLTIYFISVTGNGAVLMIFISDPRLHSPMYFFLGNLSYLDICYSTVTLPKMLQNFLSTHKAISFLGCISQLHFFHFLGSTESMLLAVMAFDRSVAICKPLRYTVIMNPQLCTQMAITIWVIGFFHALLHSIMTSRLNFCGSNRIHHFLCDIKPLLKLACGNTELNQWLLSTVTGTIAMGPFFLTLLSYFYIITYLFFKTRSCSMLCKALSTCASHFMVVILFYAPVLFTYIHPALESFMDQDRIVAIMYTVVTPVLNPLIYTLRNKEVKGALGRVIRRL

SEQ ID NO: 59575 - protein, 307 aa, Homo sapiens
  Payload ID: 11685
  Gene Symbol: OR12D2
  Gene Name: olfactory receptor, family 12, subfamily D, member 2 (gene/pseudogene)
  ENSP ID: ENSP00000400571
MLNTTSVTEFLLLGVTDIQELQPFLFVVFLTIYFISVTGNGAVLMIFISDPRLHSPMYFFLGNLSYLDICYSTVTLPKMLQNFLSTHKAISFLGCISQLHFFHFLGSTESMLLAVMAFDRCVAICKPLRYTVIMNPQLCTQMAITIWVIGFFHALLHSIMTSRLNFCGSNRIHHFLCDIKPLLKLACGNTELNQWLLSTVTGTIAMGPFFLTLLSYFYIITYLFFKTRSCSMLCKALSTCASHFMVVILFYAPVLFTYIHPALESFMDQDRIVAIMYTVVTPVLNPLIYTLRNKEVKGALGRVIRRL

SEQ ID NO: 59576 - protein, 307 aa, Homo sapiens; identical to SEQ ID NO: 59572
  Payload ID: 11685
  Gene Symbol: OR12D2
  Gene Name: olfactory receptor, family 12, subfamily D, member 2 (gene/pseudogene)
  Uniprot ID: P58182
  ENSP ID: ENSP00000414137

SEQ ID NO: 59577 - protein, 307 aa, Homo sapiens; identical to SEQ ID NO: 59572
  Payload ID: 11685
  Gene Symbol: OR12D2
  Gene Name: olfactory receptor, family 12, subfamily D, member 2 (gene/pseudogene)
  Uniprot ID: P58182
  ENSP ID: ENSP00000415065

SEQ ID NO: 59578 - protein, 307 aa, Homo sapiens; identical to SEQ ID NO: 59573
  Payload ID: 11685
  Gene Symbol: OR12D2
  Gene Name: olfactory receptor, family 12, subfamily D, member 2 (gene/pseudogene)
  Uniprot ID: P58182
  ENSP ID: ENSP00000485068

SEQ ID NO: 59579 - protein, 307 aa, Homo sapiens; identical to SEQ ID NO: 59573
  Payload ID: 11685
  Gene Symbol: OR12D2
  Gene Name: olfactory receptor, family 12, subfamily D, member 2 (gene/pseudogene)
  Uniprot ID: P58182
  ENSP ID: ENSP00000485112

SEQ ID NO: 59580 - protein, 316 aa, Homo sapiens
  Payload ID: 11686
  Gene Symbol: OR12D3
  Gene Name: olfactory receptor, family 12, subfamily D, member 3
  Uniprot ID: Q9UGF7
  ENSP ID: ENSP00000373048
MENVTTMNEFLLLGLTGVQELQPFFFGIFLIIYLINLIGNGSILVMVVLEPQLHSPMYFFLGNLSCLDISYSSVTLPKLLVNLVCSRRAISFLGCITQLHFFHFLGSTEAILLAIMAFDRFVAICNPLRYTVIMNPQVCILLAAAAWLISFFYALMHSVMTAHLSFCGSQKLNHFFYDVKPLLELACSDTLLNQWLLSIVTGSISMGAFFLTLLSCFYVIGFLLFKNRSCRILHKALSTCASHFMVVCLFYGPVGFTYIRPASATSMIQDRIMAIMYSAVTPVLNPLIYTLRNKEVMMALKKIFGRKLFKDWQQHH

SEQ ID NO: 59581 - protein, 316 aa, Homo sapiens; identical to SEQ ID NO: 59580
  Payload ID: 11686
  Gene Symbol: OR12D3
  Gene Name: olfactory receptor, family 12, subfamily D, member 3
  Uniprot ID: Q9UGF7
  ENSP ID: ENSP00000380023

SEQ ID NO: 59582 - protein, 316 aa, Homo sapiens; identical to SEQ ID NO: 59580
  Payload ID: 11686
  Gene Symbol: OR12D3
  Gene Name: olfactory receptor, family 12, subfamily D, member 3
  Uniprot ID: Q9UGF7
  ENSP ID: ENSP00000393734

SEQ ID NO: 59583 - protein, 316 aa, Homo sapiens; identical to SEQ ID NO: 59580
  Payload ID: 11686
  Gene Symbol: OR12D3
  Gene Name: olfactory receptor, family 12, subfamily D, member 3
  Uniprot ID: Q9UGF7
  ENSP ID: ENSP00000421215

SEQ ID NO: 59584 - protein, 316 aa, Homo sapiens
  Payload ID: 11686
  Gene Symbol: OR12D3
  Gene Name: olfactory receptor, family 12, subfamily D, member 3
  ENSP ID: ENSP00000421346
MENVTTMNEFLLLGLTGVQELQPFFFGIFLIIYLINLIGNGSILVMVVLEPQLHSPMYFFLGNLSCLDISYSSVTLPKLLVNLVCSRRAISFLGCIIQLHFFHFLGSTEAILLAIMAFDRFVAICNPLRYTVIMNPQVCILLAAAAWLISFFYALMHSVMTAHLSFCGSQKLNHFFYDVKPLLELACSDTLLNQWLLSIVTGSISMGAFFLTLLSCFYVIGFLLFKNRSCRILHKALSTCASHFMVVCLFYGPVGFTYIRPASATSMIQDRIMAIMYSAVTPVLNPLIYTLRNKEVMMALKKIFGRKLFKDWQQHH

SEQ ID NO: 59585 - protein, 316 aa, Homo sapiens; identical to SEQ ID NO: 59584
  Payload ID: 11686
  Gene Symbol: OR12D3
  Gene Name: olfactory receptor, family 12, subfamily D, member 3
  ENSP ID: ENSP00000424840

SEQ ID NO: 59586 - protein, 316 aa, Homo sapiens; identical to SEQ ID NO: 59584
  Payload ID: 11686
  Gene Symbol: OR12D3
  Gene Name: olfactory receptor, family 12, subfamily D, member 3
  ENSP ID: ENSP00000447118

SEQ ID NO: 59587 - protein, 316 aa, Homo sapiens; identical to SEQ ID NO: 59580
  Payload ID: 11686
  Gene Symbol: OR12D3
  Gene Name: olfactory receptor, family 12, subfamily D, member 3
  Uniprot ID: Q9UGF7
  ENSP ID: ENSP00000447204

SEQ ID NO: 59588 - protein, 316 aa, Homo sapiens; identical to SEQ ID NO: 59580
  Payload ID: 11686
  Gene Symbol: OR12D3
  Gene Name: olfactory receptor, family 12, subfamily D, member 3
  Uniprot ID: Q9UGF7
  ENSP ID: ENSP00000447580

SEQ ID NO: 59589 - protein, 316 aa, Homo sapiens; identical to SEQ ID NO: 59584
  Payload ID: 11686
  Gene Symbol: OR12D3
  Gene Name: olfactory receptor, family 12, subfamily D, member 3
  ENSP ID: ENSP00000448923

SEQ ID NO: 59590 - protein, 316 aa, Homo sapiens; identical to SEQ ID NO: 59580
  Payload ID: 11686
  Gene Symbol: OR12D3
  Gene Name: olfactory receptor, family 12, subfamily D, member 3
  Uniprot ID: Q9UGF7
  ENSP ID: ENSP00000449350

SEQ ID NO: 59591 - protein, 328 aa, Homo sapiens
  Payload ID: 11687
  Gene Symbol: OR13A1
  Gene Name: olfactory receptor, family 13, subfamily A, member 1
  Uniprot ID: Q8NGR1
  ENSP ID: ENSP00000363522
MKLWMESHLIVPETRPSPRMMSNQTLVTEFILQGFSEHPEYRVFLFSCFLFLYSGALTGNVLITLAITFNPGLHAPMYFFLLNLATMDIICTSSIMPKALASLVSEESSISYGGCMAQLYFLTWAASSELLLLTVMAYDRYAAICHPLHYSSMMSKVFCSGLATAVWLLCAVNTAIHTGLMLRLDFCGPNVIIHFFCEVPPLLLLSCSSTYVNGVMIVLADAFYGIVNFLMTIASYGFIVSSILKVKTAWGRQKAFSTCSSHLTVVCMYYTAVFYAYISPVSGYSAGKSKLAGLLYTVLSPTLNPLIYTLRNKEVKAALRKLFPFFRN

SEQ ID NO: 59592 - protein, 328 aa, Homo sapiens; identical to SEQ ID NO: 59591
  Payload ID: 11687
  Gene Symbol: OR13A1
  Gene Name: olfactory receptor, family 13, subfamily A, member 1
  Uniprot ID: Q8NGR1
  ENSP ID: ENSP00000438657

SEQ ID NO: 59593 - protein, 328 aa, Homo sapiens; identical to SEQ ID NO: 59591
  Payload ID: 11687
  Gene Symbol: OR13A1
  Gene Name: olfactory receptor, family 13, subfamily A, member 1
  Uniprot ID: Q8NGR1
  ENSP ID: ENSP00000451950

SEQ ID NO: 59594 - protein, 328 aa, Homo sapiens; identical to SEQ ID NO: 59591
  Payload ID: 11687
  Gene Symbol: OR13A1
  Gene Name: olfactory receptor, family 13, subfamily A, member 1
  Uniprot ID: Q8NGR1
  ENSP ID: ENSP00000480319

SEQ ID NO: 59595 - protein, 328 aa, Homo sapiens; identical to SEQ ID NO: 59591
  Payload ID: 11687
  Gene Symbol: OR13A1
  Gene Name: olfactory receptor, family 13, subfamily A, member 1
  Uniprot ID: Q8NGR1
  ENSP ID: ENSP00000483252

SEQ ID NO: 59596 - protein, 328 aa, Homo sapiens; identical to SEQ ID NO: 59591
  Payload ID: 11687
  Gene Symbol: OR13A1
  Gene Name: olfactory receptor, family 13, subfamily A, member 1
  Uniprot ID: Q8NGR1
  ENSP ID: ENSP00000484353

SEQ ID NO: 59597 - protein, 318 aa, Homo sapiens
  Payload ID: 11688
  Gene Symbol: OR13C2
  Gene Name: olfactory receptor, family 13, subfamily C, member 2
  Uniprot ID: Q8NGS9
  ENSP ID: ENSP00000438815
MEWENHTILVEFFLKGLSGHPRLELLFFVLIFIMYVVILLGNGTLILISILDPHLHTPMYFFLGNLSFLDICYTTTSIPSTLVSFLSERKTISLSGCAVQMFLGLAMGTTECVLLGMMAFDRYVAICNPLRYPIIMSKDAYVPMAAGSWIIGAVNSAVQSVFVVQLPFCRNNIINHFTCEILAVMKLACADISDNEFIMLVATTLFILTPLLLIIVSYTLIIVSIFKISSSEGRSKASSTCSAHLTVVIIFYGTILFMYMKPKSKETLNSDDLDATDKIISMFYGVMTPMMNPLIYSLRNKDVKEAVKHLLNRRFFSK

SEQ ID NO: 59598 - protein, 347 aa, Homo sapiens
  Payload ID: 11689
  Gene Symbol: OR13C3
  Gene Name: olfactory receptor, family 13, subfamily C, member 3
  Uniprot ID: Q8NGS6
  ENSP ID: ENSP00000363913
MIVQLICTVCFLAVNTFHVRSSFDFLKADDMGEINQTLVSEFLLLGLSGYPKIEIVYFALILVMYLVILIGNGVLIIASIFDSHFHTPMYFFLGNLSFLDICYTSSSVPSTLVSLISKKRNISFSGCAVQMFFGFAMGSTECLLLGMMAFDRYVAICNPLRYPIILSKVAYVLMASVSWLSGGINSAVQTLLAMRLPFCGNNIINHFACEILAVLKLACADISLNIITMVISNMAFLVLPLMVIFFSYMFILYTILQMNSATGRRKAFSTCSAHLTVVIIFYGTIFFMYAKPKSQDLIGEEKLQALDKLISLFYGVVTPMLNPILYSLRNKDVKAAVKYLLNKKPIH

SEQ ID NO: 59599 - protein, 318 aa, Homo sapiens
  Payload ID: 11690
  Gene Symbol: OR13C4
  Gene Name: olfactory receptor, family 13, subfamily C, member 4
  Uniprot ID: Q8NGS5
  ENSP ID: ENSP00000277216
MDKINQTFVREFILLGLSGYPKLEIIFFALILVMYVVILIGNGVLIIASILDSRLHMPMYFFLGNLSFLDICYTTSSIPSTLVSLISKKRNISFSGCAVQMFFGFAMGSTECFLLGMMAFDRYVAICNPLRYPIIMNKVVYVLLTSVSWLSGGINSTVQTSLAMRWPFCGNNIINHFLCEILAVLKLACSDISVNIVTLAVSNIAFLVLPLLVIFFSYMFILYTILRTNSATGRHKAFSTCSAHLTVVIIFYGTIFFMYAKPKSQDLLGKDNLQATEGLVSMFYGVVTPMLNPIIYSLRNKDVKAAIKYLLSRKAINQ

SEQ ID NO: 59600 - protein, 318 aa, Homo sapiens
  Payload ID: 11691
  Gene Symbol: OR13C5
  Gene Name: olfactory receptor, family 13, subfamily C, member 5
  Uniprot ID: Q8NGS8
  ENSP ID: ENSP00000363911
MEWENHTILVEFFLKGLSGHPRLELLFFVLIFIMYVVILLGNGTLILISILDPHLHTPMYFFLGNLSFLDICYTTTSIPSTLVSFLSERKTISLSGCAVQMFLSLAMGTTECVLLGVMAFDRYVAICNPLRYPIIMSKDAYVPMAAGSWIIGAVNSAVQTVFVVQLPFCRNNIINHFTCEILAVMKLACADISGNEFILLVTTTLFLLTPLLLIIVSYTLIILSIFKISSSEGRSKPSSTCSARLTVVITFCGTIFLMYMKPKSQETLNSDDLDATDKLIFIFYRVMTPMMNPLIYSLRNKDVKEAVKHLLRRKNFNK

SEQ ID NO: 59601 - protein, 307 aa, Homo sapiens
  Payload ID: 11692
  Gene Symbol: OR13C7
  Gene Name: olfactory receptor, family 13, subfamily C, member 7 (gene/pseudogene)
  ENSP ID: ENSP00000477333
MVSANQTASVTEFILLGLSAHPKLEKTFFVLILLMYLVILLGNGVLILMTVSNSHLHMPMYFFLGNLSFLDICYTTSSVPLILDSFLTPRKTISFSACAVQMFLSFAMGATECVLLSMMAFDRYVAICNPLRYPVVMSKAAYMPIRLPAPGLEALLPWCRHPLQGCPSVETTSSTTSPVRFWLSSWPVLISLSMSVWEPMSSWGSRFCSSLSPMSSSLPPSGSPQLRGGKRPSPPALPTSQSWSSSMGPSSSCMGSPSLRTRWGQTSKTLQTNSFPFSMGWPPCSTPSSTAGTRMRLLGTYFRNALP

SEQ ID NO: 59602 - protein, 320 aa, Homo sapiens
  Payload ID: 11693
  Gene Symbol: OR13C8
  Gene Name: olfactory receptor, family 13, subfamily C, member 8
  Uniprot ID: Q8NGS7
  ENSP ID: ENSP00000334068
MERTNDSTSTEFFLVGLSAHPKLQTVFFVLILWMYLMILLGNGVLISVIIFDSHLHTPMYFFLCNLSFLDVCYTSSSVPLILASFLAVKKKVSFSGCMVQMFISFAMGATECMILGTMALDRYVAICYPLRYPVIMSKGAYVAMAAGSWVTGLVDSVVQTAFAMQLPFCANNVIKHFVCEILAILKLACADISINVISMTGSNLIVLVIPLLVISISYIFIVATILRIPSTEGKHKAFSTCSAHLTVVIIFYGTIFFMYAKPESKASVDSGNEDIIEALISLFYGVMTPMLNPLIYSLRNKDVKAAVKNILCRKNFSDGK

SEQ ID NO: 59603 - protein, 318 aa, Homo sapiens
  Payload ID: 11694
  Gene Symbol: OR13C9
  Gene Name: olfactory receptor, family 13, subfamily C, member 9
  Uniprot ID: Q8NGT0
  ENSP ID: ENSP00000259362
MEWENQTILVEFFLKGHSVHPRLELLFFVLIFIMYVVILLGNGTLILISILDPHLHTPMYFFLGNLSFLDICYTTTSIPSTLVSFLSERKTISFSGCAVQMFLGLAMGTTECVLLGMMAFDRYVAICNPLRYPIIMSKNAYVPMAVGSWFAGIVNSAVQTTFVVQLPFCRKNVINHFSCEILAVMKLACADISGNEFLMLVATILFTLMPLLLIVISYSLIISSILKIHSSEGRSKAFSTCSAHLTVVIIFYGTILFMYMKPKSKETLNSDDLDATDKIISMFYGVMTPMMNPLIYSLRNKDVKEAVKHLPNRRFFSK

SEQ ID NO: 59604 - protein, 346 aa, Homo sapiens
  Payload ID: 11695
  Gene Symbol: OR13D1
  Gene Name: olfactory receptor, family 13, subfamily D, member 1
  Uniprot ID: Q8NGV5
  ENSP ID: ENSP00000317357
MYRFTDFDVSNISIYLNHVLFYTTQQAGDLEHMETRNYSAMTEFFLVGLSQYPELQLFLFLLCLIMYMIILLGNSLLIIITILDSRLHTPMYFFLGNLSFLDICYTSSSIPPMLIIFMSERKSISFIGCALQMVVSLGLGSTECVLLAVMAYDHYVAICNPLRYSIIMNGVLYVQMAAWSWIIGCLTSLLQTVLTMMLPFCGNNVIDHITCEILALLKLVCSDITINVLIMTVTNIVSLVILLLLIFISYVFILSSILRINCAEGRKKAFSTCSAHSIVVILFYGSALFMYMKPKSKNTNTSDEIIGLSYGVVSPMLNPIIYSLRNKEVKEAVKKVLSRHLHLLKM

SEQ ID NO: 59605 - protein, 319 aa, Homo sapiens
  Payload ID: 11696
  Gene Symbol: OR13F1
  Gene Name: olfactory receptor, family 13, subfamily F, member 1
  Uniprot ID: Q8NGS4
  ENSP ID: ENSP00000334452
MFPANWTSVKVFFFLGFFHYPKVQVIIFAVCLLMYLITLLGNIFLISITILDSHLHTPMYLFLSNLSFLDIWYSSSALSPMLANFVSGRNTISFSGCATQMYLSLAMGSTECVLLPMMAYDRYVAICNPLRYPVIMNRRTCVQIAAGSWMTGCLTAMVEMMSVLPLSLCGNSIINHFTCEILAILKLVCVDTSLVQLIMLVISVLLLPMPMLLICISYAFILASILRISSVEGRSKAFSTCTAHLMVVVLFYGTALSMHLKPSAVDSQEIDKFMALVYAGQTPMLNPIIYSLRNKEVKVALKKLLIRNHFNTAFISILK

SEQ ID NO: 59606 - protein, 307 aa, Homo sapiens
  Payload ID: 11697
  Gene Symbol: OR13G1
  Gene Name: olfactory receptor, family 13, subfamily G, member 1
  Uniprot ID: Q8NGZ3
  ENSP ID: ENSP00000352717
MNHSVVTEFIILGLTKKPELQGIIFLFFLIVYLVAFLGNMLIIIAKIYNNTLHTPMYVFLLTLAVVDIICTTSIIPKMLGTMLTSENTISYAGCMSQLFLFTWSLGAEMVLFTTMAYDRYVAICFPLHYSTIMNHHMCVALLSMVMAIAVTNSWVHTALIMRLTFCGPNTIDHFFCEIPPLLALSCSPVRINEVMVYVADITLAIGDFILTCISYGFIIVAILRIRTVEGKRKAFSTCSSHLTVVTLYYSPVIYTYIRPASSYTFERDKVVAALYTLVTPTLNPMVYSFQNREMQAGIRKVFAFLKH

SEQ ID NO: 59607 - protein, 308 aa, Homo sapiens
  Payload ID: 11698
  Gene Symbol: OR13H1
  Gene Name: olfactory receptor, family 13, subfamily H, member 1
  Uniprot ID: Q8NG92
  ENSP ID: ENSP00000340748
MAMDNVTAVFQFLLIGISNYPQWRDTFFTLVLIIYLSTLLGNGFMIFLIHFDPNLHTPIYFFLSNLSFLDLCYGTASMPQALVHCFSTHPYLSYPRCLAQTSVSLALATAECLLLAAMAYDRVVAISNPLRYSVVMNGPVCVCLVATSWGTSLVLTAMLILSLRLHFCGANVINHFACEILSLIKLTCSDTSLNEFMILITSIFTLLLPFGFVLLSYIRIAMAIIRIRSLQGRLKAFTTCGSHLTVVTIFYGSAISMYMKTQSKSYPDQDKFISVFYGALTPMLNPLIYSLRKKDVKRAIRKVMLKRT

SEQ ID NO: 59608 - protein, 312 aa, Homo sapiens
  Payload ID: 11699
  Gene Symbol: OR13J1
  Gene Name: olfactory receptor, family 13, subfamily J, member 1
  Uniprot ID: Q8NGT2
  ENSP ID: ENSP00000367219
MEPLNRTEVSEFFLKGFSGYPALEHLLFPLCSAMYLVTLLGNTAIMAVSVLDIHLHTPVYFFLGNLSTLDICYTPTFVPLMLVHLLSSRKTISFAVCAIQMCLSLSTGSTECLLLAITAYDRYLAICQPLRYHVLMSHRLCVLLMGAAWVLCLLKSVTEMVISMRLPFCGHHVVSHFTCKILAVLKLACGNTSVSEDFLLAGSILLLPVPLAFICLSYLLILATILRVPSAARCCKAFSTCLAHLAVVLLFYGTIIFMYLKPKSKEAHISDEVFTVLYAMVTTMLNPTIYSLRNKEVKEAARKVWGRSRASR

SEQ ID NO: 59609 - protein, 309 aa, Homo sapiens
  Payload ID: 11700
  Gene Symbol: OR14A16
  Gene Name: olfactory receptor, family 14, subfamily A, member 16
  Uniprot ID: Q8NHC5
  ENSP ID: ENSP00000350248
MANLTIVTEFILMGFSTNKNMCILHSILFLLIYLCALMGNVLIIMITTLDHHLHTPVYFFLKNLSFLDLCLISVTAPKSIANSLIHNNSISFLGCVSQVFLLLSSASAELLLLTVMSFDRYTAICHPLHYDVIMDRSTCVQRATVSWLYGGLIAVMHTAGTFSLSYCGSNMVHQFFCDIPQLLAISCSENLIREIALILINVVLDFCCFIVIIITYVHVFSTVKKIPSTEGQSKAYSICLPHLLVVLFLSTGFIAYLKPASESPSILDAVISVFYTMLPPTFNPIIYSLRNKAIKVALGMLIKGKLTKK

SEQ ID NO: 59610 - protein, 314 aa, Homo sapiens
  Payload ID: 11701
  Gene Symbol: OR14A2
  Gene Name: olfactory receptor, family 14, subfamily A, member 2
  Uniprot ID: Q96R54
  ENSP ID: ENSP00000355441
MANVTLVTGFLLMGFSNIQKLRILYGVLFLLIYLAALMSNLLIITLITLDVKLQTPMYFFLKNLSFLDVFLVSVPIPKFIVNNLTHNNSISILGCAFQLLLMTSFSAGEIFILTAMSYDRYVAICCPLNYEVIMNTGVCVLMASVSWAIGGLFGTAYTAGTFSMPFCGSSVIPQFFCDVPSLLRISCSETLMVIYAGIGVGACLSISCFICIVISYIYIFSTVLKIPTTKGQSKAFSTCFPHLTVFTVFIITAYFVYLKPPSNSPSVIDRLLSVIYTVMPPVFNPVTYSLRNNDMKCALIRLLQKTYGQEAYFI

SEQ ID NO: 59611 - protein, 312 aa, Homo sapiens
  Payload ID: 11702
  Gene Symbol: OR14C36
  Gene Name: olfactory receptor, family 14, subfamily C, member 36
  Uniprot ID: Q8NHC7
  ENSP ID: ENSP00000324534
MPNSTTVMEFLLMRFSDVWTLQILHSASFFMLYLVTLMGNILIVTVTTCDSSLHMPMYFFLRNLSILDACYISVTVPTSCVNSLLDSTTISKAGCVAQVFLVVFFVYVELLFLTIMAHDRYVAVCQPLHYPVIVNSRICIQMTLASLLSGLVYAGMHTGSTFQLPFCRSNVIHQFFCDIPSLLKLSCSDTFSNEVMIVVSALGVGGGCFIFIIRSYIHIFSTVLGFPRGADRTKAFSTCIPHILVVSVFLSSCSSVYLRPPAIPAATQDLILSGFYSIMPPLFNPIIYSLRNKQIKVAIKKIMKRIFYSENV

SEQ ID NO: 59612 - protein, 311 aa, Homo sapiens
  Payload ID: 11703
  Gene Symbol: OR14I1
  Gene Name: olfactory receptor, family 14, subfamily I, member 1
  Uniprot ID: A6ND48
  ENSP ID: ENSP00000339726
MDNLTKVTEFLLMEFSGIWELQVLHAGLFLLIYLAVLVGNLLIIAVITLDQHLHTPMYFFLKNLSVLDLCYISVTVPKSIRNSLTRRSSISYLGCVAQVYFFSAFASAELAFLTVMSYDRYVAICHPLQYRAVMTSGGCYQMAVTTWLSCFSYAAVHTGNMFREHVCRSSVIHQFFRDIPHVLALVSCEVFFVEFLTLALSSCLVLGCFILMMISYFQIFSTVLRIPSGQSRAKAFSTCSPQLIVIMLFLTTGLFAALGPIAKALSIQDLVIALTYTVLPPFLNPIIYSLRNKEIKTAMWRLFVKIYFLQK

SEQ ID NO: 59613 - protein, 321 aa, Homo sapiens
  Payload ID: 11704
  Gene Symbol: OR14J1
  Gene Name: olfactory receptor, family 14, subfamily J, member 1
  Uniprot ID: Q9UGF5
  ENSP ID: ENSP00000230221
MVNLTSMSGFLLMGFSDERKLQILHALVFLVTYLLALTGNLLIITIITVDRRLHSPMYYFLKHLSLLDLCFISVTVPQSIANSLMGNGYISLVQCILQVFFFIALASSEVAILTVMSYDRYAAICQPLHYETIMDPRACRHAVIAVWIAGGLSGLMHAAINFSIPLCGKRVIHQFFCDVPQMLKLACSYEFINEIALAAFTTSAAFICLISIVLSYIRIFSTVLRIPSAEGRTKVFSTCLPHLFVATFFLSAAGFEFLRLPSDSSSTVDLVFSVFYTVIPPTLNPVIYSLRNDSMKAALRKMLSKEELPQRKMCLKAMFKL

SEQ ID NO: 59614 - protein, 321 aa, Homo sapiens; identical to SEQ ID NO: 59613
  Payload ID: 11704
  Gene Symbol: OR14J1
  Gene Name: olfactory receptor, family 14, subfamily J, member 1
  Uniprot ID: Q9UGF5
  ENSP ID: ENSP00000366365

SEQ ID NO: 59615 - protein, 321 aa, Homo sapiens
  Payload ID: 11704
  Gene Symbol: OR14J1
  Gene Name: olfactory receptor, family 14, subfamily J, member 1
  Uniprot ID: Q9UGF5
  ENSP ID: ENSP00000389802
MVNLTSTSGFLLMGFSDERKLQILHALVFLVTYLLALTGNLLIITIITVDRRLHSPMYYFLKHLSLLDLCFISVTVPQSIANSLMGNGYISLVQCILQVFFFIALASSEVAILTVMSYDRYAAICQPLHYETIMDPRACRHAVIAVWIAGGLSGLMHAAINFSIPLCGKRVIHQFFCDVPQMLKLACSYEFINEIALAAFTTSAAFICLISIVLSYIRIFSTVLRIPSAEGRTKVFSTCLPHLFVATFFLSAAGFEFLRLPSDSSSTVDLVFSVFYTVIPPTLNPVIYSLRNDSMKAALRKMLSKEELPQRKMCLKAMFKL

SEQ ID NO: 59616 - protein, 321 aa, Homo sapiens; identical to SEQ ID NO: 59613
  Payload ID: 11704
  Gene Symbol: OR14J1
  Gene Name: olfactory receptor, family 14, subfamily J, member 1
  Uniprot ID: Q9UGF5
  ENSP ID: ENSP00000398851

SEQ ID NO: 59617 - protein, 321 aa, Homo sapiens; identical to SEQ ID NO: 59615
  Payload ID: 11704
  Gene Symbol: OR14J1
  Gene Name: olfactory receptor, family 14, subfamily J, member 1
  Uniprot ID: Q9UGF5
  ENSP ID: ENSP00000400501

SEQ ID NO: 59618 - protein, 321 aa, Homo sapiens; identical to SEQ ID NO: 59615
  Payload ID: 11704
  Gene Symbol: OR14J1
  Gene Name: olfactory receptor, family 14, subfamily J, member 1
  Uniprot ID: Q9UGF5
  ENSP ID: ENSP00000403553

SEQ ID NO: 59619 - protein, 321 aa, Homo sapiens; identical to SEQ ID NO: 59615
  Payload ID: 11704
  Gene Symbol: OR14J1
  Gene Name: olfactory receptor, family 14, subfamily J, member 1
  Uniprot ID: Q9UGF5
  ENSP ID: ENSP00000408647

SEQ ID NO: 59620 - protein, 314 aa, Homo sapiens
  Payload ID: 11705
  Gene Symbol: OR14K1
  Gene Name: olfactory receptor, family 14, subfamily K, member 1
  Uniprot ID: Q8NGZ2
  ENSP ID: ENSP00000283225
MTNQTQMMEFLLVRFTENWVLLRLHALLFSLIYLTAVLMNLVIILLMILDHRLHMAMYFFLRHLSFLDLCLISATVPKSILNSVASTDSISFLGCVLQLFLVVLLAGSEIGILTAMSYDRYAAICCPLHCEAVMSRGLCVQLMALSWLNRGALGLLYTAGTFSLNFYGSDELHQFFCDVPALLKLTCSKEHAIISVSVAIGVCYAFSCLVCIVVSYVYIFSAVLRISQRQRQSKAFSNCVPHLIVVTVFLVTGAVAYLKPGSDAPSILDLLVSVFYSVAPPTLNPVIYCLKNKDIKSALSKVLWNVRSSGVMKR

SEQ ID NO: 59621 - protein, 310 aa, Homo sapiens
  Payload ID: 11706
  Gene Symbol: OR2A1
  Gene Name: olfactory receptor, family 2, subfamily A, member 1
  Uniprot ID: Q8NGT9
  ENSP ID: ENSP00000386175
MGENQTMVTEFLLLGFLLGPRIQMLLFGLFSLFYIFTLLGNGAILGLISLDSRLHTPMYFFLSHLAVVDIAYTRNTVPQMLANLLHPAKPISFAGCMTQTFLCLSFGHSECLLLVLMSYDRYVAICHPLRYSVIMTWRVCITLAVTSWTCGSLLALAHVVLILRLPFSGPHEINHFFCEILSVLRLACADTWLNQVVIFAACVFFLVGPPSLVLVSYSHILAAILRIQSGEGRRKAFSTCSSHLCVVGLFFGSAIIMYMAPKSRHPEEQQKVFFLFYSFFNPTLNPLIYSLRNGEVKGALRRALGKESHS

SEQ ID NO: 59622 - protein, 310 aa, Homo sapiens
  Payload ID: 11707
  Gene Symbol: OR2A12
  Gene Name: olfactory receptor, family 2, subfamily A, member 12
  Uniprot ID: Q8NGT7
  ENSP ID: ENSP00000386174
MESNQTWITEVILLGFQVDPALELFLFGFFLLFYSLTLMGNGIILGLIYLDSRLHTPMYVFLSHLAIVDMSYASSTVPKMLANLVMHKKVISFAPCILQTFLYLAFAITECLILVMMCYDRYVAICHPLQYTLIMNWRVCTVLASTCWIFSFLLALVHITLILRLPFCGPQKINHFFCQIMSVFKLACADTRLNQVVLFAGSAFILVGPLCLVLVSYLHILVAILRIQSGEGRRKAFSTCSSHLCVVGLFFGSAIVMYMAPKSSHSQERRKILSLFYSLFNPILNPLIYSLRNAEVKGALKRVLWKQRSM

SEQ ID NO: 59623 - protein, 310 aa, Homo sapiens
  Payload ID: 11708
  Gene Symbol: OR2A14
  Gene Name: olfactory receptor, family 2, subfamily A, member 14
  Uniprot ID: Q96R47
  ENSP ID: ENSP00000386137
MEGNKTWITDITLPRFQVGPALEILLCGLFSAFYTLTLLGNGVIFGIICLDCKLHTPMYFFLSHLAIVDISYASNYVPKMLTNLMNQESTISFFPCIMQTFLYLAFAHVECLILVVMSYDRYADICHPLRYNSLMSWRVCTVLAVASWVFSFLLALVPLVLILSLPFCGPHEINHFFCEILSVLKLACADTWLNQVVIFAACVFILVGPLCLVLVSYLRILAAILRIQSGEGRRKAFSTCSSHLCVVGLFFGSAIVTYMAPKSRHPEEQQKVLSLFYSLFNPMLNPLIYSLRNAEVKGALRRALRKERLT

SEQ ID NO: 59624 - protein, 308 aa, Homo sapiens
  Payload ID: 11708
  Gene Symbol: OR2A14
  Gene Name: olfactory receptor, family 2, subfamily A, member 14
  ENSP ID: ENSP00000486470
MEGNQTWITDITLLGFQVGPALAILLCGLFSVFYTLTLLGNGVIFGIICLDSKLHTPMYFFLSHLAIIDMSYASNNVPKMLANLMNQKRTISFVPCIMQTFLYLAFAVTECLILVVMSYDRYVAICHPFQYTVIMSWRVCTVLAVASWVFSFLLALVPLVLILSLPFCGPHEINHFFCEILSVLKLACADTWLNQVVIFAACVFILVGPLCLVLVSYLRILAAILRIQSGEGRRKAFSTCSSHLCVVGLFFGSAIVTYMAPKSRHPEEQQKVLSLFYSLFNPMLNPLIYSLRNAEVKGALRRALRKER

SEQ ID NO: 59625 - protein, 318 aa, Homo sapiens
  Payload ID: 11709
  Gene Symbol: OR2A2
  Gene Name: olfactory receptor, family 2, subfamily A, member 2
  Uniprot ID: Q6IF42
  ENSP ID: ENSP00000386209
MEGNQTWITDITLLGFQVGPALAILLCGLFSVFYTLTLLGNGVIFGIICLDSKLHTPMYFFLSHLAIIDMSYASNNVPKMLANLMNQKRTISFVPCIMQTFLYLAFAVTECLILVVMSYDRYVAICHPFQYTVIMSWRVCTILVLTSWSCGFALSLVHEILLLRLPFCGPRDVNHLFCEILSVLKLACADTWVNQVVIFATCVFVLVGPLSLILVSYMHILGAILKIQTKEGRIKAFSTCSSHLCVVGLFFGIAMVVYMVPDSNQREEQEKMLSLFHSVFNPMLNPLIYSLRNAQLKGALHRALQRKRSMRTVYGLCL

SEQ ID NO: 59626 - protein, 310 aa, Homo sapiens
  Payload ID: 11710
  Gene Symbol: OR2A25
  Gene Name: olfactory receptor, family 2, subfamily A, member 25
  Uniprot ID: A4D2G3
  ENSP ID: ENSP00000386167
MGGNQTSITEFLLLGFPIGPRIQMLLFGLFSLFYIFILLGNGTILGLISLDSRLHTPMYFFLSHLAVVDIACACSTVPQMLVNLLHPAKPISFAGCMTQMFLFLSFAHTECLLLVVMSYDRYVAICHPLRYSTIMTWKVCITLALTSWILGVLLALVHLVLLLPLSFCGPQKLNHFFCEIMAVLKLACADTHINEVMVLAGAVSVLVGAFFSTVISYVHILCAILKIQSGEGCQKAFSICSSHLCVVGLFYGTAIIMYVEPQYESPKEQKKYLLLFHSLFNPMLNPLIYSLRNKEVQGTLKRMLEKKRTS

SEQ ID NO: 59627 - protein, 310 aa, Homo sapiens
  Payload ID: 11711
  Gene Symbol: OR2A4
  Gene Name: olfactory receptor, family 2, subfamily A, member 4
  Uniprot ID: O95047
  ENSP ID: ENSP00000319546
MGDNITSIREFLLLGFPVGPRIQMLLFGLFSLFYVFTLLGNGTILGLISLDSRLHAPMYFFLSHLAVVDIAYACNTVPRMLVNLLHPAKPISFAGRMMQTFLFSTFAVTECLLLVVMSYDLYVAICHPLRYLAIMTWRVCITLAVTSWTTGVLLSLIHLVLLLPLPFCRPQKIYHFFCEILAVLKLACADTHINENMVLAGAISGLVGPLSTIVVSYMCILCAILQIQSREVQRKAFRTCFSHLCVIGLVYGTAIIMYVGPRYGNPKEQKKYLLLFHSLFNPMLNPLICSLRNSEVKNTLKRVLGVERAL

SEQ ID NO: 59628 - protein, 310 aa, Homo sapiens; identical to SEQ ID NO: 59621
  Payload ID: 11712
  Gene Symbol: OR2A42
  Gene Name: olfactory receptor, family 2, subfamily A, member 42
  Uniprot ID: Q8NGT9
  ENSP ID: ENSP00000375334

SEQ ID NO: 59629 - protein, 311 aa, Homo sapiens
  Payload ID: 11713
  Gene Symbol: OR2A5
  Gene Name: olfactory receptor, family 2, subfamily A, member 5
  Uniprot ID: Q96R48
  ENSP ID: ENSP00000386208
MTKNQTWVTEFILLGFPLSLRIQMLLSGLFSLLYVFTLLGNGAILGLIWLDSRLHTPMYFFLSHLAIIDISYASNNVPKMLTNLGLNKRKTISFVPCTMQTFLYMAFAHTECLILVMMSYDRYMAICHPLQYSVIMRWGVCTVLAVTSWACGSLLALVHVVLILRLPFCGPHEINHFFCEILSVLKLACADTWLNQVVIFAASVFILVGPLCLVLVSYSRILAAILRIQSGEGRRKAFSTCSSHLCMVGLFFGSAIVMYMAPKSRHPEEQQKVLSLFYSLFNPMLNPLIYSLRNAEVKGALKRVLWKQRSK

SEQ ID NO: 59630 - protein, 310 aa, Homo sapiens
  Payload ID: 11714
  Gene Symbol: OR2A7
  Gene Name: olfactory receptor, family 2, subfamily A, member 7
  Uniprot ID: Q96R45
  ENSP ID: ENSP00000420502
MGDNITSITEFLLLGFPVGPRIQMLLFGLFSLFYVFTLLGNGTILGLISLDSRLHAPMYFFLSHLAVVDIAYACNTVPRMLVNLLHPAKPISFAGRMMQTFLFSTFAVTECLLLVVMSYDLYVAICHPLRYLAIMTWRVCITLAVTSWTTGVLLSLIHLVLLLPLPFCRPQKIYHFFCEILAVLKLACADTHINENMVLAGAISGLVGPLSTIVVSYMCILCAILQIQSREVQRKAFCTCFSHLCVIGLFYGTAIIMYVGPRYGNPKEQKKYLLLFHSLFNPMLNPLICSLRNSEVKNTLKRVLGVERAL

SEQ ID NO: 59631 - protein, 323 aa, Homo sapiens
  Payload ID: 11715
  Gene Symbol: OR2AE1
  Gene Name: olfactory receptor, family 2, subfamily AE, member 1
  Uniprot ID: Q8NHA4
  ENSP ID: ENSP00000313936
MWQKNQTSLADFILEGLFDDSLTHLFLFSLTMVVFLIAVSGNTLTILLICIDPQLHTPMYFLLSQLSLMDLMHVSTIILKMATNYLSGKKSISFVGCATQHFLYLCLGGAECFLLAVMSYDRYVAICHPLRYAVLMNKKVGLMMAVMSWLGASVNSLIHMAILMHFPFCGPRKVYHFYCEFPAVVKLVCGDITVYETTVYISSILLLLPIFLISTSYVFILQSVIQMRSSGSKRNAFATCGSHLTVVSLWFGACIFSYMRPRSQCTLLQNKVGSVFYSIITPTLNSLIYTLRNKDVAKALRRVLRRDVITQCIQRLQLWLPRV

SEQ ID NO: 59632 - protein, 316 aa, Homo sapiens
  Payload ID: 11716
  Gene Symbol: OR2AG1
  Gene Name: olfactory receptor, family 2, subfamily AG, member 1 (gene/pseudogene)
  Uniprot ID: Q9H205
  ENSP ID: ENSP00000307447
MELWNFTLGSGFILVGILNDSGSPELLCATITILYLLALISNGLLLLAITMEARLHMPMYLLLGQLSLMDLLFTSVVTPKALADFLRRENTISFGGCALQMFLALTMGGAEDLLLAFMAYDRYVAICHPLTYMTLMSSRACWLMVATSWILASLSALIYTVYTMHYPFCRAQEIRHLLCEIPHLLKVACADTSRYELMVYVMGVTFLIPSLAAILASYTQILLTVLHMPSNEGRKKALVTCSSHLTVVGMFYGAATFMYVLPSSFHSTRQDNIISVFYTIVTPALNPLIYSLRNKEVMRALRRVLGKYMLPAHSTL

SEQ ID NO: 59633 - protein, 316 aa, Homo sapiens; identical to SEQ ID NO: 59632
  Payload ID: 11716
  Gene Symbol: OR2AG1
  Gene Name: olfactory receptor, family 2, subfamily AG, member 1 (gene/pseudogene)
  Uniprot ID: Q9H205
  ENSP ID: ENSP00000485214

SEQ ID NO: 59634 - protein, 316 aa, Homo sapiens; identical to SEQ ID NO: 59632
  Payload ID: 11716
  Gene Symbol: OR2AG1
  Gene Name: olfactory receptor, family 2, subfamily AG, member 1 (gene/pseudogene)
  Uniprot ID: Q9H205
  ENSP ID: ENSP00000485326

SEQ ID NO: 59635 - protein, 316 aa, Homo sapiens
  Payload ID: 11717
  Gene Symbol: OR2AG2
  Gene Name: olfactory receptor, family 2, subfamily AG, member 2
  Uniprot ID: A6NM03
  ENSP ID: ENSP00000342697
MELRNSTLGSGFILVGILNDSGSPELLYATFTILYMLALTSNGLLLLAITIEARLHMPMYLLLGQLSLMDLLFTSVVTPKALADFLRRENTISFGGCALQMFLALTMGSAEDLLLAFMAYDRYVAICHPLKYMTLMSPRVCWIMVATSWILASLIAIGHTMYTMHLPFCVSWEIRHLLCEIPPLLKLACADTSRYELIIYVTGVTFLLLPISAIVASYTLVLFTVLRMPSNEGRKKALVTCSSHLIVVGMFYGAATFMYVLPSSFHSPKQDNIISVFYTIVTPALNPLIYSLRNKEVMRALRRVLGKYILLAHSTL

SEQ ID NO: 59636 - protein, 328 aa, Homo sapiens
  Payload ID: 11718
  Gene Symbol: OR2AJ1
  Gene Name: olfactory receptor, family 2, subfamily AJ, member 1
  Uniprot ID: Q8NGZ0
  ENSP ID: ENSP00000325078
MGHQNHTFSSDFILLGLFSSSPTSVVFFLVLFVIFIMSVTENTLMILLIRSDSRLHTPMYFLLSHLSLMDILHVSNIVPKMVTNFLSGSRTISFAGCGFQVFLSLTLLGGECLLLAAMSCDRYVAICHPLRYPILMKEYASALMAGGSWLIGVFNSTVHTAYALQFPFCGSRAIDHFFCEVPAMLKLSCADTTRYERGVCVSAVIFLLIPFSLISASYGQIILTVLQMKSSEARKKSFSTCSFHMIVVTMYYGPFIFTYMRPKSYHTPGQDKFLAIFYTILTPTLNPFIYSFRNKDVLAVMKNMLKSNFLHKKMNRKIPECVFCLFLC

SEQ ID NO: 59637 - protein, 335 aa, Homo sapiens
  Payload ID: 11719
  Gene Symbol: OR2AK2
  Gene Name: olfactory receptor, family 2, subfamily AK, member 2
  Uniprot ID: Q8NG84
  ENSP ID: ENSP00000355436
MNISDVISFDILVSAMKTGNQSFGTDFLLVGLFQYGWINSLLFVVIATLFTVALTGNIMLIHLIRLNTRLHTPMYFLLSQLSIVDLMYISTTVPKMAVSFLSQSKTIRFLGCEIQTYVFLALGGTEALLLGFMSYDRYVAICHPLHYPMLMSKKICCLMVACAWASGSINAFIHTLYVFQLPFCRSRLINHFFCEVPALLSLVCQDTSQYEYTVLLSGLIILLLPFLAILASYARVLIVVFQMSSGKGQAKAVSTCSSHLIVASLFYATTLFTYTRPHSLRSPSRDKAVAVFYTIVTPLLNPFIYSLRNKEVTGAVRRLLGYWICCRKYDFRSLY

SEQ ID NO: 59638 - protein, 309 aa, Homo sapiens
  Payload ID: 11720
  Gene Symbol: OR2AP1
  Gene Name: olfactory receptor, family 2, subfamily AP, member 1
  Uniprot ID: Q8NGE2
  ENSP ID: ENSP00000323423
MKNKTVLTEFILLGLTDVPELQVAVFTFLFLAYLLSILGNLTILILTLLDSHLQTPMYFFLRNFSFLEISFTNIFIPRVLISITTGNKSISFAGCFTQYFFAMFLGATEFYLLAAMSYDRYVAICKPLHYTTIMSSRICIQLIFCSWLGGLMAIIPTITLMSQQDFCASNRLNHYFCDYEPLLELSCSDTSLIEKVVFLVASVTLVVTLVLVILSYAFIIKTILKLPSAQQRTKAFSTCSSHMIVISLSYGSCMFMYINPSAKEGDTFNKGVALLITSVAPLLNPFIYTLRNQQVKQPFKDMVKKLLNL

SEQ ID NO: 59639 - protein, 320 aa, Homo sapiens
  Payload ID: 11721
  Gene Symbol: OR2AT4
  Gene Name: olfactory receptor, family 2, subfamily AT, member 4
  Uniprot ID: A6NND4
  ENSP ID: ENSP00000304846
MDATACNESVDGSPVFYLLGIPSLPETFFLPVFFIFLLFYLLILMGNALILVAVVAEPSLHKPMYFFLINLSTLDILFTTTTVPKMLSLFLLGDRFLSFSSCLLQMYLFQSFTCSEAFILVVMAYDRYVAICHPLHYPVLMNPQTNATLAASAWLTALLLPIPAVVRTSQMAYNSIAYIYHCFCDHLAVVQASCSDTTPQTLMGFCIAMVVSFLPLLLVLLSYVHILASVLRISSLEGRAKAFSTCSSHLLVVGTYYSSIAIAYVAYRADLPLDFHIMGNVVYAILTPILNPLIYTLRNRDVKAAITKIMSQDPGCDRSI

SEQ ID NO: 59640 - protein, 317 aa, Homo sapiens
  Payload ID: 11722
  Gene Symbol: OR2B11
  Gene Name: olfactory receptor, family 2, subfamily B, member 11
  Uniprot ID: Q5JQS5
  ENSP ID: ENSP00000325682
MKSDNHSFLGDSPKAFILLGVSDRPWLELPLFVVLLLSYVLAMLGNVAIILASRVDPQLHSPMYIFLSHLSFLDLCYTTTTVPQMLVNMGSSQKTISYGGCTVQYAVFHWLGCTECIVLAAMALDRYVAICKPLHYAVLMHRALCQQLVALAWLSGFGNSFVQVVLTVQLPFCGRQVLNNFFCEVPAVIKLSCADTAVNDTILAVLVAFFVLVPLALILLSYGFIARAVLRIQSSKGRHKAFGTCSSHLMIVSLFYLPAIYMYLQPPSSYSQEQGKFISLFYSIITPTLNPFTYTLRNKDMKGALRRLLARIWRLCG

SEQ ID NO: 59641 - protein, 357 aa, Homo sapiens
  Payload ID: 11723
  Gene Symbol: OR2B2
  Gene Name: olfactory receptor, family 2, subfamily B, member 2
  Uniprot ID: Q9GZK3
  ENSP ID: ENSP00000304419
MNWVNKSVPQEFILLVFSDQPWLEIPPFVMFLFSYILTIFGNLTIILVSHVDFKLHTPMYFFLSNLSLLDLCYTTSTVPQMLVNICNTRKVISYGGCVAQLFIFLALGSTECLLLAVMCFDRFVAICRPLHYSIIMHQRLCFQLAAASWISGFSNSVLQSTWTLKMPLCGHKEVDHFFCEVPALLKLSCVDTTANEAELFFISVLFLLIPVTLILISYAFIVQAVLRIQSAEGQRKAFGTCGSHLIVVSLFYGTAISMYLQPPSPSSKDRGKMVSLFCGIIAPMLNPLIYTLRNKEVKEAFKRLVAKSLLNQEIRNMQMISFAKDTVLTYLTNFSASCPIFVITIENYCNLPQRKFP

SEQ ID NO: 59642 - protein, 313 aa, Homo sapiens
  Payload ID: 11724
  Gene Symbol: OR2B3
  Gene Name: olfactory receptor, family 2, subfamily B, member 3
  Uniprot ID: O76000
  ENSP ID: ENSP00000366378
MNWENESSPKEFILLGFSDRAWLQMPLFVVLLISYTITIFGNVSIMMVCILDPKLHTPMYFFLTNLSILDLCYTTTTVPHMLVNIGCNKKTISYAGCVAHLIIFLALGATECLLLAVMSFDRYVAVCRPLHYVVIMNYWFCLRMAAFSWLIGFGNSVLQSSLTLNMPRCGHQEVDHFFCEVPALLKLSCADTKPIEAELFFFSVLILLIPVTLILISYGFIAQAVLKIRSAEGRQKAFGTCGSHMIVVSLFYGTAIYMYLQPPSSTSKDWGKMVSLFYGIITSMLNSLIYSLRNKDMKEAFKRLMPRIFFCKK

SEQ ID NO: 59643 - protein, 313 aa, Homo sapiens; identical to SEQ ID NO: 59642
  Payload ID: 11724
  Gene Symbol: OR2B3
  Gene Name: olfactory receptor, family 2, subfamily B, member 3
  Uniprot ID: O76000
  ENSP ID: ENSP00000373149

SEQ ID NO: 59644 - protein, 313 aa, Homo sapiens; identical to SEQ ID NO: 59642
  Payload ID: 11724
  Gene Symbol: OR2B3
  Gene Name: olfactory receptor, family 2, subfamily B, member 3
  Uniprot ID: O76000
  ENSP ID: ENSP00000388604

SEQ ID NO: 59645 - protein, 313 aa, Homo sapiens; identical to SEQ ID NO: 59642
  Payload ID: 11724
  Gene Symbol: OR2B3
  Gene Name: olfactory receptor, family 2, subfamily B, member 3
  Uniprot ID: O76000
  ENSP ID: ENSP00000393235

SEQ ID NO: 59646 - protein, 313 aa, Homo sapiens; identical to SEQ ID NO: 59642
  Payload ID: 11724
  Gene Symbol: OR2B3
  Gene Name: olfactory receptor, family 2, subfamily B, member 3
  Uniprot ID: O76000
  ENSP ID: ENSP00000394571

SEQ ID NO: 59647 - protein, 313 aa, Homo sapiens; identical to SEQ ID NO: 59642
  Payload ID: 11724
  Gene Symbol: OR2B3
  Gene Name: olfactory receptor, family 2, subfamily B, member 3
  Uniprot ID: O76000
  ENSP ID: ENSP00000394593

SEQ ID NO: 59648 - protein, 313 aa, Homo sapiens; identical to SEQ ID NO: 59642
  Payload ID: 11724
  Gene Symbol: OR2B3
  Gene Name: olfactory receptor, family 2, subfamily B, member 3
  Uniprot ID: O76000
  ENSP ID: ENSP00000399881

SEQ ID NO: 59649 - protein, 313 aa, Homo sapiens; identical to SEQ ID NO: 59642
  Payload ID: 11724
  Gene Symbol: OR2B3
  Gene Name: olfactory receptor, family 2, subfamily B, member 3
  Uniprot ID: O76000
  ENSP ID: ENSP00000403571

SEQ ID NO: 59650 - protein, 313 aa, Homo sapiens
  Payload ID: 11725
  Gene Symbol: OR2B6
  Gene Name: olfactory receptor, family 2, subfamily B, member 6
  Uniprot ID: P58173
  ENSP ID: ENSP00000244623
MNWVNDSIIQEFILLGFSDRPWLEFPLLVVFLISYTVTIFGNLTIILVSRLDTKLHTPMYFFLTNLSLLDLCYTTCTVPQMLVNLCSIRKVISYRGCVAQLFIFLALGATEYLLLAVMSFDRFVAICRPLHYSVIMHQRLCLQLAAASWVTGFSNSVWLSTLTLQLPLCDPYVIDHFLCEVPALLKLSCVETTANEAELFLVSELFHLIPLTLILISYAFIVRAVLRIQSAEGRQKAFGTCGSHLIVVSLFYSTAVSVYLQPPSPSSKDQGKMVSLFYGIIAPMLNPLIYTLRNKEVKEGFKRLVARVFLIKK

SEQ ID NO: 59651 - protein, 312 aa, Homo sapiens
  Payload ID: 11726
  Gene Symbol: OR2C1
  Gene Name: olfactory receptor, family 2, subfamily C, member 1
  Uniprot ID: O95371
  ENSP ID: ENSP00000307726
MDGVNDSSLQGFVLMGISDHPQLEMIFFIAILFSYLLTLLGNSTIILLSRLEARLHTPMYFFLSNLSSLDLAFATSSVPQMLINLWGPGKTISYGGCITQLYVFLWLGATECILLVVMAFDRYVAVCRPLRYTAIMNPQLCWLLAVIACLGGLGNSVIQSTFTLQLPLCGHRRVEGFLCEVPAMIKLACGDTSLNQAVLNGVCTFFTAVPLSIIVISYCLIAQAVLKIRSAEGRRKAFNTCLSHLLVVFLFYGSASYGYLLPAKNSKQDQGKFISLFYSLVTPMVNPLIYTLRNMEVKGALRRLLGKGREVG

SEQ ID NO: 59652 - protein, 320 aa, Homo sapiens
  Payload ID: 11727
  Gene Symbol: OR2C3
  Gene Name: olfactory receptor, family 2, subfamily C, member 3
  Uniprot ID: Q8N628
  ENSP ID: ENSP00000355443
MMEIANVSSPEVFVLLGFSTRPSLETVLFIVVLSFYMVSILGNGIIILVSHTDVHLHTPMYFFLANLPFLDMSFTTSIVPQLLANLWGPQKTISYGGCVVQFYISHWLGATECVLLATMSYDRYAAICRPLHYTVIMHPQLCLGLALASWLGGLTTSMVGSTLTMLLPLCGNNCIDHFFCEMPLIMQLACVDTSLNEMEMYLASFVFVVLPLGLILVSYGHIARAVLKIRSAEGRRKAFNTCSSHVAVVSLFYGSIIFMYLQPAKSTSHEQGKFIALFYTVVTPALNPLIYTLRNTEVKSALRHMVLENCCGSAGKLAQI

SEQ ID NO: 59653 - protein, 320 aa, Homo sapiens; identical to SEQ ID NO: 59652
  Payload ID: 11727
  Gene Symbol: OR2C3
  Gene Name: olfactory receptor, family 2, subfamily C, member 3
  Uniprot ID: Q8N628
  ENSP ID: ENSP00000479757

SEQ ID NO: 59654 - protein, 308 aa, Homo sapiens
  Payload ID: 11728
  Gene Symbol: OR2D2
  Gene Name: olfactory receptor, family 2, subfamily D, member 2
  Uniprot ID: Q9H210
  ENSP ID: ENSP00000299459
MRQINQTQVTEFLLLGLSDGPHTEQLLFIVLLGVYLVTVLGNLLLISLVHVDSQLHTPMYFFLCNLSLADLCFSTNIVPQALVHLLSRKKVIAFTLCAARLLFFLIFGCTQCALLAVMSYDRYVAICNPLRYPNIMTWKVCVQLATGSWTSGILVSVVDTTFILRLPYRGSNSIAHFFCEAPALLILASTDTHASEMAIFLMGVVILLIPVFLILVSYGRIIVTVVKMKSTVGSLKAFSTCGSHLMVVILFYGSAIITYMTPKSSKQQEKSVSVFYAIVTPMLNPLIYSLRNKDVKAALRKVATRNFP

SEQ ID NO: 59655 - protein, 330 aa, Homo sapiens
  Payload ID: 11729
  Gene Symbol: OR2D3
  Gene Name: olfactory receptor, family 2, subfamily D, member 3
  Uniprot ID: Q8NGH3
  ENSP ID: ENSP00000320560
MCSFFLCQTGKQAKISMGEENQTFVSKFIFLGLSQDLQTQILLFILFLIIYLLTVLGNQLIIILIFLDSRLHTPMYFFLRNLSFADLCFSTSIVPQVLVHFLVKRKTISFYGCMTQIIVFLLVGCTECALLAVMSYDRYVAVCKPLYYSTIMTQRVCLWLSFRSWASGALVSLVDTSFTFHLPYWGQNIINHYFCEPPALLKLASIDTYSTEMAIFSMGVVILLAPVSLILGSYWNIISTVIQMQSGEGRLKAFSTCGSHLIVVVLFYGSGIFTYMRPNSKTTKELDKMISVFYTAVTPMLNPIIYSLRNKDVKGALRKLVGRKCFSHRQ

SEQ ID NO: 59656 - protein, 317 aa, Homo sapiens; identical to SEQ ID NO: 969
  Payload ID: 11730
  Gene Symbol: OR2F1
  Gene Name: olfactory receptor, family 2, subfamily F, member 1 (gene/pseudogene)
  Uniprot ID: Q13607
  ENSP ID: ENSP00000376633

SEQ ID NO: 59657 - protein, 317 aa, Homo sapiens; identical to SEQ ID NO: 969
  Payload ID: 11730
  Gene Symbol: OR2F1
  Gene Name: olfactory receptor, family 2, subfamily F, member 1 (gene/pseudogene)
  Uniprot ID: Q13607
  ENSP ID: ENSP00000485483

SEQ ID NO: 59658 - protein, 317 aa, Homo sapiens
  Payload ID: 11731
  Gene Symbol: OR2F2
  Gene Name: olfactory receptor, family 2, subfamily F, member 2
  Uniprot ID: O95006
  ENSP ID: ENSP00000386222
MEIDNQTWVREFILLGLSSDWCTQISLFSLFLVTYLMTVLGNCLIVLLIRLDSRLHTPMYFFLTNLSLVDVSYATSVVPQLLAHFLAEHKAIPFQSCAAQLFFSLALGGIEFVLLAVMAYDRHVAVSDRLRYSAIMHGGLCARLAITSWVSGSINSLVQTAITFQLPMCTNKFIDHISCELLAVVRLACVDTSSNEAAIMVSSIVLLMTPFCLVLLSYIRIISTILKIQSREGRKKAFHTCASHLTVVALCYGTTIFTYIQPHSGPSVLQEKLISVFYAIVMPLLNPVIYSLRNKEVKGAWHKLLEKFSGLTSKLGT

SEQ ID NO: 59659 - protein, 317 aa, Homo sapiens
  Payload ID: 11732
  Gene Symbol: OR2G2
  Gene Name: olfactory receptor, family 2, subfamily G, member 2
  Uniprot ID: Q8NGZ5
  ENSP ID: ENSP00000326349
MGMVRHTNESNLAGFILLGFSDYPQLQKVLFVLILILYLLTILGNTTIILVSRLEPKLHMPMYFFLSHLSFLYRCFTSSVIPQLLVNLWEPMKTIAYGGCLVHLYNSHALGSTECVLPAVMSCDRYVAVCRPLHYTVLMHIHLCMALASMAWLSGIATTLVQSTLTLQLPFCGHRQVDHFICEVPVLIKLACVGTTFNEAELFVASILFLIVPVSFILVSSGYIAHAVLRIKSATRRQKAFGTCFSHLTVVTIFYGTIIFMYLQPAKSRSRDQGKFVSLFYTVVTRMLNPLIYTLRIKEVKGALKKVLAKALGVNIL

SEQ ID NO: 59660 - protein, 309 aa, Homo sapiens
  Payload ID: 11733
  Gene Symbol: OR2G3
  Gene Name: olfactory receptor, family 2, subfamily G, member 3
  Uniprot ID: Q8NGZ4
  ENSP ID: ENSP00000326301
MGLGNESSLMDFILLGFSDHPRLEAVLFVFVLFFYLLTLVGNFTIIIISYLDPPLHTPMYFFLSNLSLLDICFTTSLAPQTLVNLQRPKKTITYGGCVAQLYISLALGSTECILLADMALDRYIAVCKPLHYVVIMNPRLCQQLASISWLSGLASSLIHATFTLQLPLCGNHRLDHFICEVPALLKLACVDTTVNELVLFVVSVLFVVIPPALISISYGFITQAVLRIKSVEARHKAFSTCSSHLTVVIIFYGTIIYVYLQPSDSYAQDQGKFISLFYTMVTPTLNPIIYTLRNKDMKEALRKLLSGKL

SEQ ID NO: 59661 - protein, 316 aa, Homo sapiens
  Payload ID: 11734
  Gene Symbol: OR2G6
  Gene Name: olfactory receptor, family 2, subfamily G, member 6
  Uniprot ID: Q5TZ20
  ENSP ID: ENSP00000341291
MEETNNSSEKGFLLLGFSDQPQLERFLFAIILYFYVLSLLGNTALILVCCLDSRLHTPMYFFLSNLSCVDICFTTSVAPQLLVTMNKKDKTMSYGGCVAQLYVAMGLGSSECILLAVMAYDRYAAVCRPLRYIAIMHPRFCASLAGGAWLSGLITSLIQCSLTVQLPLCGHRTLDHIFCEVPVLIKLACVDTTFNEAELFVASVVFLIVPVLLILVSYGFITQAVLRIKSAAGRQKAFGTCSSHLVVVIIFYGTIIFMYLQPANRRSKNQGKFVSLFYTIVTPLLNPIIYTLRNKDVKGALRTLILGSAAGQSHKD

SEQ ID NO: 59662 - protein, 316 aa, Homo sapiens
  Payload ID: 11735
  Gene Symbol: OR2H1
  Gene Name: olfactory receptor, family 2, subfamily H, member 1
  Uniprot ID: Q9GZK4
  ENSP ID: ENSP00000366336
MVNQSSPMGFLLLGFSEHPALERTLFVVVFTSYLLTLVGNTLIILLSVLYPRLHSPMYFFLSDLSFLDLCFTTSCVPQMLVNLWGPKKTISFLGCSVQLFIFLSLGTTECILLTVMAFDRYVAVCQPLHYATIIHPRLCWQLASVAWVMSLVQSIVQTPSTLHLPFCPHQQIDDFLCEVPSLIRLSCGDTSYNEIQLAVSSVIFVVVPLSLILASYGATAQAVLRINSATAWRKAFGTCSSHLTVVTLFYSSVIAVYLQPKNPYAQGRGKFFGLFYAVGTPSLNPLVYTLRNKEIKRALRRLLGKERDSRESWRAA

SEQ ID NO: 59663 - protein, 316 aa, Homo sapiens; identical to SEQ ID NO: 59662
  Payload ID: 11735
  Gene Symbol: OR2H1
  Gene Name: olfactory receptor, family 2, subfamily H, member 1
  Uniprot ID: Q9GZK4
  ENSP ID: ENSP00000366337

SEQ ID NO: 59664 - protein, 316 aa, Homo sapiens; identical to SEQ ID NO: 59662
  Payload ID: 11735
  Gene Symbol: OR2H1
  Gene Name: olfactory receptor, family 2, subfamily H, member 1
  Uniprot ID: Q9GZK4
  ENSP ID: ENSP00000366340

SEQ ID NO: 59665 - protein, 316 aa, Homo sapiens; identical to SEQ ID NO: 59662
  Payload ID: 11735
  Gene Symbol: OR2H1
  Gene Name: olfactory receptor, family 2, subfamily H, member 1
  Uniprot ID: Q9GZK4
  ENSP ID: ENSP00000373042

SEQ ID NO: 59666 - protein, 316 aa, Homo sapiens; identical to SEQ ID NO: 59662
  Payload ID: 11735
  Gene Symbol: OR2H1
  Gene Name: olfactory receptor, family 2, subfamily H, member 1
  Uniprot ID: Q9GZK4
  ENSP ID: ENSP00000373140

SEQ ID NO: 59667 - protein, 316 aa, Homo sapiens; identical to SEQ ID NO: 59662
  Payload ID: 11735
  Gene Symbol: OR2H1
  Gene Name: olfactory receptor, family 2, subfamily H, member 1
  Uniprot ID: Q9GZK4
  ENSP ID: ENSP00000380010

SEQ ID NO: 59668 - protein, 316 aa, Homo sapiens; identical to SEQ ID NO: 59662
  Payload ID: 11735
  Gene Symbol: OR2H1
  Gene Name: olfactory receptor, family 2, subfamily H, member 1
  Uniprot ID: Q9GZK4
  ENSP ID: ENSP00000383527

SEQ ID NO: 59669 - protein, 316 aa, Homo sapiens; identical to SEQ ID NO: 59662
  Payload ID: 11735
  Gene Symbol: OR2H1
  Gene Name: olfactory receptor, family 2, subfamily H, member 1
  Uniprot ID: Q9GZK4
  ENSP ID: ENSP00000383529

SEQ ID NO: 59670 - protein, 316 aa, Homo sapiens; identical to SEQ ID NO: 59662
  Payload ID: 11735
  Gene Symbol: OR2H1
  Gene Name: olfactory receptor, family 2, subfamily H, member 1
  Uniprot ID: Q9GZK4
  ENSP ID: ENSP00000383530

SEQ ID NO: 59671 - protein, 316 aa, Homo sapiens; identical to SEQ ID NO: 59662
  Payload ID: 11735
  Gene Symbol: OR2H1
  Gene Name: olfactory receptor, family 2, subfamily H, member 1
  Uniprot ID: Q9GZK4
  ENSP ID: ENSP00000383547

SEQ ID NO: 59672 - protein, 316 aa, Homo sapiens; identical to SEQ ID NO: 59662
  Payload ID: 11735
  Gene Symbol: OR2H1
  Gene Name: olfactory receptor, family 2, subfamily H, member 1
  Uniprot ID: Q9GZK4
  ENSP ID: ENSP00000383548

SEQ ID NO: 59673 - protein, 316 aa, Homo sapiens; identical to SEQ ID NO: 59662
  Payload ID: 11735
  Gene Symbol: OR2H1
  Gene Name: olfactory receptor, family 2, subfamily H, member 1
  Uniprot ID: Q9GZK4
  ENSP ID: ENSP00000383549

SEQ ID NO: 59674 - protein, 316 aa, Homo sapiens; identical to SEQ ID NO: 59662
  Payload ID: 11735
  Gene Symbol: OR2H1
  Gene Name: olfactory receptor, family 2, subfamily H, member 1
  Uniprot ID: Q9GZK4
  ENSP ID: ENSP00000388844

SEQ ID NO: 59675 - protein, 316 aa, Homo sapiens; identical to SEQ ID NO: 59662
  Payload ID: 11735
  Gene Symbol: OR2H1
  Gene Name: olfactory receptor, family 2, subfamily H, member 1
  Uniprot ID: Q9GZK4
  ENSP ID: ENSP00000389230

SEQ ID NO: 59676 - protein, 316 aa, Homo sapiens; identical to SEQ ID NO: 59662
  Payload ID: 11735
  Gene Symbol: OR2H1
  Gene Name: olfactory receptor, family 2, subfamily H, member 1
  Uniprot ID: Q9GZK4
  ENSP ID: ENSP00000392619

SEQ ID NO: 59677 - protein, 316 aa, Homo sapiens; identical to SEQ ID NO: 59662
  Payload ID: 11735
  Gene Symbol: OR2H1
  Gene Name: olfactory receptor, family 2, subfamily H, member 1
  Uniprot ID: Q9GZK4
  ENSP ID: ENSP00000394698

SEQ ID NO: 59678 - protein, 316 aa, Homo sapiens; identical to SEQ ID NO: 59662
  Payload ID: 11735
  Gene Symbol: OR2H1
  Gene Name: olfactory receptor, family 2, subfamily H, member 1
  Uniprot ID: Q9GZK4
  ENSP ID: ENSP00000395567

SEQ ID NO: 59679 - protein, 316 aa, Homo sapiens; identical to SEQ ID NO: 59662
  Payload ID: 11735
  Gene Symbol: OR2H1
  Gene Name: olfactory receptor, family 2, subfamily H, member 1
  Uniprot ID: Q9GZK4
  ENSP ID: ENSP00000395850

SEQ ID NO: 59680 - protein, 316 aa, Homo sapiens; identical to SEQ ID NO: 59662
  Payload ID: 11735
  Gene Symbol: OR2H1
  Gene Name: olfactory receptor, family 2, subfamily H, member 1
  Uniprot ID: Q9GZK4
  ENSP ID: ENSP00000395934

SEQ ID NO: 59681 - protein, 316 aa, Homo sapiens; identical to SEQ ID NO: 59662
  Payload ID: 11735
  Gene Symbol: OR2H1
  Gene Name: olfactory receptor, family 2, subfamily H, member 1
  Uniprot ID: Q9GZK4
  ENSP ID: ENSP00000396414

SEQ ID NO: 59682 - protein, 316 aa, Homo sapiens; identical to SEQ ID NO: 59662
  Payload ID: 11735
  Gene Symbol: OR2H1
  Gene Name: olfactory receptor, family 2, subfamily H, member 1
  Uniprot ID: Q9GZK4
  ENSP ID: ENSP00000396944

SEQ ID NO: 59683 - protein, 316 aa, Homo sapiens; identical to SEQ ID NO: 59662
  Payload ID: 11735
  Gene Symbol: OR2H1
  Gene Name: olfactory receptor, family 2, subfamily H, member 1
  Uniprot ID: Q9GZK4
  ENSP ID: ENSP00000397171

SEQ ID NO: 59684 - protein, 316 aa, Homo sapiens; identical to SEQ ID NO: 59662
  Payload ID: 11735
  Gene Symbol: OR2H1
  Gene Name: olfactory receptor, family 2, subfamily H, member 1
  Uniprot ID: Q9GZK4
  ENSP ID: ENSP00000398695

SEQ ID NO: 59685 - protein, 316 aa, Homo sapiens; identical to SEQ ID NO: 59662
  Payload ID: 11735
  Gene Symbol: OR2H1
  Gene Name: olfactory receptor, family 2, subfamily H, member 1
  Uniprot ID: Q9GZK4
  ENSP ID: ENSP00000405714

SEQ ID NO: 59686 - protein, 316 aa, Homo sapiens; identical to SEQ ID NO: 59662
  Payload ID: 11735
  Gene Symbol: OR2H1
  Gene Name: olfactory receptor, family 2, subfamily H, member 1
  Uniprot ID: Q9GZK4
  ENSP ID: ENSP00000407739

SEQ ID NO: 59687 - protein, 316 aa, Homo sapiens; identical to SEQ ID NO: 59662
  Payload ID: 11735
  Gene Symbol: OR2H1
  Gene Name: olfactory receptor, family 2, subfamily H, member 1
  Uniprot ID: Q9GZK4
  ENSP ID: ENSP00000408584

SEQ ID NO: 59688 - protein, 316 aa, Homo sapiens; identical to SEQ ID NO: 59662
  Payload ID: 11735
  Gene Symbol: OR2H1
  Gene Name: olfactory receptor, family 2, subfamily H, member 1
  Uniprot ID: Q9GZK4
  ENSP ID: ENSP00000409651

SEQ ID NO: 59689 - protein, 316 aa, Homo sapiens; identical to SEQ ID NO: 59662
  Payload ID: 11735
  Gene Symbol: OR2H1
  Gene Name: olfactory receptor, family 2, subfamily H, member 1
  Uniprot ID: Q9GZK4
  ENSP ID: ENSP00000410401

SEQ ID NO: 59690 - protein, 316 aa, Homo sapiens; identical to SEQ ID NO: 59662
  Payload ID: 11735
  Gene Symbol: OR2H1
  Gene Name: olfactory receptor, family 2, subfamily H, member 1
  Uniprot ID: Q9GZK4
  ENSP ID: ENSP00000410659

SEQ ID NO: 59691 - protein, 316 aa, Homo sapiens; identical to SEQ ID NO: 59662
  Payload ID: 11735
  Gene Symbol: OR2H1
  Gene Name: olfactory receptor, family 2, subfamily H, member 1
  Uniprot ID: Q9GZK4
  ENSP ID: ENSP00000411617

SEQ ID NO: 59692 - protein, 316 aa, Homo sapiens; identical to SEQ ID NO: 59662
  Payload ID: 11735
  Gene Symbol: OR2H1
  Gene Name: olfactory receptor, family 2, subfamily H, member 1
  Uniprot ID: Q9GZK4
  ENSP ID: ENSP00000412463

SEQ ID NO: 59693 - protein, 316 aa, Homo sapiens; identical to SEQ ID NO: 59662
  Payload ID: 11735
  Gene Symbol: OR2H1
  Gene Name: olfactory receptor, family 2, subfamily H, member 1
  Uniprot ID: Q9GZK4
  ENSP ID: ENSP00000413910

SEQ ID NO: 59694 - protein, 312 aa, Homo sapiens
  Payload ID: 11736
  Gene Symbol: OR2H2
  Gene Name: olfactory receptor, family 2, subfamily H, member 2
  Uniprot ID: O95918
  ENSP ID: ENSP00000366146
MVNQSSTPGFLLLGFSEHPGLERTLFVVVLTSYLLTLVGNTLIILLSALDPKLHSPMYFFLSNLSFLDLCFTTSCVPQMLVNLWGPKKTISFLDCSVQIFIFLSLGTTECILLTVMAFDRYVAVCQPLHYATIIHPRLCWQLASVAWVIGLVESVVQTPSTLHLPFCPDRQVDDFVCEVPALIRLSCEDTSYNEIQVAVASVFILVVPLSLILVSYGAITWAVLRINSAKGRRKAFGTCSSHLTVVTLFYSSVIAVYLQPKNPYAQERGKFFGLFYAVGTPSLNPLIYTLRNKEVTRAFRRLLGKEMGLTQS

SEQ ID NO: 59695 - protein, 312 aa, Homo sapiens
  Payload ID: 11736
  Gene Symbol: OR2H2
  Gene Name: olfactory receptor, family 2, subfamily H, member 2
  Uniprot ID: O95918
  ENSP ID: ENSP00000373038
MVNQSSTPGFLLLGFSEHPGLERTLFVVVFTSYLLTLVGNTLIILLSVLDPKLHSPMYFFLSNLSFLDLCFTTSCVPQMLVNLWGPKKTISFLDCSVQIFIFLSLGTTECILLTVMAFDRYVAVCQPLHYATIIHPRLCWQLASVAWVIGLVESVVQTPSTLHLPFCPDRQVDDFVCEVPALIRLSCEDTSYNEIQVAVASVFILVVPLSLILVSYGAITWAVLRINSAKGRRKAFGTCSSHLTVVTLFYSSVIAVYLQPKNPYAQERGKFFGLFYAVGTPSLNPLIYTLRNKEVTRAFRRLLGKEMGLTQS

SEQ ID NO: 59696 - protein, 312 aa, Homo sapiens; identical to SEQ ID NO: 59694
  Payload ID: 11736
  Gene Symbol: OR2H2
  Gene Name: olfactory receptor, family 2, subfamily H, member 2
  Uniprot ID: O95918
  ENSP ID: ENSP00000373136

SEQ ID NO: 59697 - protein, 312 aa, Homo sapiens
  Payload ID: 11736
  Gene Symbol: OR2H2
  Gene Name: olfactory receptor, family 2, subfamily H, member 2
  Uniprot ID: O95918
  ENSP ID: ENSP00000403604
MVNQSSTPGFLLLGFSEHPGLERTLFVVVFTSYLLTLVGNTLIILLSALDPKLHSPMYFFLSNLSFLDLCFTTSCVPQMLVNLWGPKKTISFLDCSVQIFIFLSLGTTECILLTVMAFDRYVAVCQPLHYATIIHPRLCWQLASVAWVIGLVESVVQTPSTLHLPFCPDRQVDDFVCEVPALIRLSCEDTSYNEIQVAVASVFILVVPLSLILVSYGAITWAVLRINSAKGRRKAFGTCSSHLTVVTLFYSSVIAVYLQPKNPYAQERGKFFGLFYAVGTPSLNPLIYTLRNKEVTRAFRRLLGKEMGLTQS

SEQ ID NO: 59698 - protein, 312 aa, Homo sapiens; identical to SEQ ID NO: 59695
  Payload ID: 11736
  Gene Symbol: OR2H2
  Gene Name: olfactory receptor, family 2, subfamily H, member 2
  Uniprot ID: O95918
  ENSP ID: ENSP00000409339

SEQ ID NO: 59699 - protein, 312 aa, Homo sapiens; identical to SEQ ID NO: 59694
  Payload ID: 11736
  Gene Symbol: OR2H2
  Gene Name: olfactory receptor, family 2, subfamily H, member 2
  Uniprot ID: O95918
  ENSP ID: ENSP00000410227

SEQ ID NO: 59700 - protein, 312 aa, Homo sapiens; identical to SEQ ID NO: 59695
  Payload ID: 11736
  Gene Symbol: OR2H2
  Gene Name: olfactory receptor, family 2, subfamily H, member 2
  Uniprot ID: O95918
  ENSP ID: ENSP00000414688

SEQ ID NO: 59701 - protein, 312 aa, Homo sapiens
  Payload ID: 11737
  Gene Symbol: OR2J1
  Gene Name: olfactory receptor, family 2, subfamily J, member 1 (gene/pseudogene)
  Uniprot ID: Q9GZK6
  ENSP ID: ENSP00000366376
MLMKKNASFEDFFLLLGFSNWPHLEVVLFVVILIFYLITLIGNLFIIILSYLDSHLHTPMYFFLSNLSFLDLCYTTSSIPQLLVNLWGPEKTISYAGCTVQLYFVLALGTAECVLLVVMSYDRYAAVCRPLHYTVLMHPRFCRLLAAASWVSGFTTSALHSSFTFWIPLCRHRLVDHFFCEVPALLRLSCVDTQANELTLMVMSSIFVLIPLILILTSYGAIARAVLSMQSTTGLQKVLRTCGAHLMVVSLFFIPVMCMYLQPPSENSQDQGKFIALFYTVVTPSLNPLIYTFRNKDVRGAVKRLMGWEWGM

SEQ ID NO: 59702 - protein, 312 aa, Homo sapiens
  Payload ID: 11737
  Gene Symbol: OR2J1
  Gene Name: olfactory receptor, family 2, subfamily J, member 1 (gene/pseudogene)
  Uniprot ID: Q9GZK6
  ENSP ID: ENSP00000414527
MLMKKNASFEDFFILLGFSNWPHLEVVLFVVILIFYLITLIGNLFIIILSYLDSHLHTPMYFFLSNLSFLDLCYTTSSIPQLLVNLWGPEKTISYAGCTVQLYFVLALGTAECVLLVVMSYDRYAAVCRPLHYTVLMHPRFCRLLAAASWVSGFTTSALHSSFTFWIPLCRHRLVDHFFCEVPALLRLSCVDTQANELTLMVMSSIFVLIPLILILTSYGAIARAVLSMQSTTGLQKVLRTCGAHLMVVSLFFIPVMCMYLQPPSENSQDQGKFIALFYTVVTPSLNPLIYTFRNKDVRGAVKRLMGWEWGM

SEQ ID NO: 59703 - protein, 312 aa, Homo sapiens
  Payload ID: 11738
  Gene Symbol: OR2J2
  Gene Name: olfactory receptor, family 2, subfamily J, member 2
  Uniprot ID: O76002
  ENSP ID: ENSP00000351519
MMIKKNASSEDFFILLGFSNWPQLEVVLFVVILIFYLMTLTGNLFIIILSYVDSHLHTPMYFFLSNLSFLDLCYTTSSIPQLLVNLRGPEKTISYAGCMVQLYFVLALGIAECVLLVVMSYDRYVAVCRPLHYTVLMHPRFCHLLVAASWVIGFTISALHSSFTFWVPLCGHRLVDHFFCEVPALLRLSCVDTHANELTLMVMSSIFVLIPLILILTTYGAIARAVLSMQSTTGLQKVFRTCGAHLMVVSLFFIPVMCMYLQPPSENSPDQGKFIALFYTVVTPSLNPLIYTLRNKHVKGAAKRLLGWEWGK

SEQ ID NO: 59704 - protein, 312 aa, Homo sapiens
  Payload ID: 11738
  Gene Symbol: OR2J2
  Gene Name: olfactory receptor, family 2, subfamily J, member 2
  Uniprot ID: O76002
  ENSP ID: ENSP00000366372
MMIKKNASSEDFFILLGFSNWPQLEVVLFVVILIFYLMTLTGNLFIIILSYVDSHLHTPMYFFLSNLSFLDLCYTTSSIPQLLVNLRGPEKTISYAGCMVQLYFVLALGITECVLLVVMSYDRYVAVCRPLHYTVLMHPRFCHLLVAASWVIGFTISALHSSFTFWVPLCGHRLVDHFFCEVPALLRLSCVDTHANELTLMVMSSIFVLIPLILILTTYGAIARAVLSMQSTTGLQKVFRTCGAHLMVVSLFFIPVMCMYLQPPSENSPDQGKFIALFYTVVTPSLNPLIYTLRNKHVKGAAKRLLGWEWGK

SEQ ID NO: 59705 - protein, 312 aa, Homo sapiens
  Payload ID: 11738
  Gene Symbol: OR2J2
  Gene Name: olfactory receptor, family 2, subfamily J, member 2
  Uniprot ID: O76002
  ENSP ID: ENSP00000392497
MMIKKNASSEDFFILLGFSNWPQLEVVLFVVILIFYLMTLTGNLFIIILSYVDSHLHTPMYFFLSNLSFLDLCHTTSSIPQLLVNLRGPEKTISYAGCMVQLYFVLALGIAECVLLVVMSYDRYVAVCRPLHYTVLMHPRFCHLLAAASWVIGFTISALHSSFTFWVPLCGHRLVDHFFCEVPALLRLSCVDTHANELTLMVMSSIFVLIPLILILTAYGAIARAVLSMQSTTGLQKVFRTCGAHLMVVSLFFIPVMCMYLQPPSENSPDQGKFIALFYTVVTPSLNPLIYTLRNKHVKGAAKRLLGWEWGK

SEQ ID NO: 59706 - protein, 312 aa, Homo sapiens; identical to SEQ ID NO: 59703
  Payload ID: 11738
  Gene Symbol: OR2J2
  Gene Name: olfactory receptor, family 2, subfamily J, member 2
  Uniprot ID: O76002
  ENSP ID: ENSP00000396524

SEQ ID NO: 59707 - protein, 312 aa, Homo sapiens; identical to SEQ ID NO: 59705
  Payload ID: 11738
  Gene Symbol: OR2J2
  Gene Name: olfactory receptor, family 2, subfamily J, member 2
  Uniprot ID: O76002
  ENSP ID: ENSP00000398238

SEQ ID NO: 59708 - protein, 312 aa, Homo sapiens; identical to SEQ ID NO: 59705
  Payload ID: 11738
  Gene Symbol: OR2J2
  Gene Name: olfactory receptor, family 2, subfamily J, member 2
  Uniprot ID: O76002
  ENSP ID: ENSP00000403186

SEQ ID NO: 59709 - protein, 312 aa, Homo sapiens; identical to SEQ ID NO: 59705
  Payload ID: 11738
  Gene Symbol: OR2J2
  Gene Name: olfactory receptor, family 2, subfamily J, member 2
  Uniprot ID: O76002
  ENSP ID: ENSP00000408988

SEQ ID NO: 59710 - protein, 312 aa, Homo sapiens; identical to SEQ ID NO: 59705
  Payload ID: 11738
  Gene Symbol: OR2J2
  Gene Name: olfactory receptor, family 2, subfamily J, member 2
  Uniprot ID: O76002
  ENSP ID: ENSP00000416299

SEQ ID NO: 59711 - protein, 311 aa, Homo sapiens
  Payload ID: 11739
  Gene Symbol: OR2J3
  Gene Name: olfactory receptor, family 2, subfamily J, member 3
  Uniprot ID: O76001
  ENSP ID: ENSP00000366374
MNDDGKVNASSEGYFILVGFSNWPHLEVVIFVVVLIFYLMTLIGNLFIIILSYLDSHLHTPMYFFLSNLSFLDLCYTTSSIPQLLVNLWGPEKTISYAGCMIQLYFVLALGTTECVLLVVMSYDRYAAVCRPLHYTVLMHPRFCHLLAVASWVSGFTNSALHSSFTFWVPLCGHRQVDHFFCEVPALLRLSCVDTHVNELTLMITSSIFVLIPLILILTSYGAIVRAILRMQSTTGLQKVFGTCGAHLMAVSLFFIPAMCMYLQPPSGNSQDQGKFIALFYTVVTPSLNPLIYTLRNKVVRGAVKRLMGWE

SEQ ID NO: 59712 - protein, 311 aa, Homo sapiens
  Payload ID: 11739
  Gene Symbol: OR2J3
  Gene Name: olfactory receptor, family 2, subfamily J, member 3
  Uniprot ID: O76001
  ENSP ID: ENSP00000373147
MNDDGKVNASSEGYFILVGFSNWPHLEVVIFVVVLIFYLMTLIGNLFIIILSYLDSHLHTPMYFFLSNLSFLDLCYTTSSIPQLLVNLWGPEKTISYAGCMIQLYFVLALGTTECVLLVVMSYDRYAAVCRPLHYTVLMHPRFCHLLAVASWVSGFTNSALHSSFTFWVPLCGHRQVDHFFCEVPALLRLSCVDTHVNELTLMITSSIFVLIPLILILTSYGAIVRAVLRMQSTTGLQKVFGTCGAHLMAVSLFFIPAMCIYLQPPSGNSQDQGKFIALFYTVVTPSLNPLIYTLRNKVVRGAVKRLMGWE

SEQ ID NO: 59713 - protein, 311 aa, Homo sapiens; identical to SEQ ID NO: 59712
  Payload ID: 11739
  Gene Symbol: OR2J3
  Gene Name: olfactory receptor, family 2, subfamily J, member 3
  Uniprot ID: O76001
  ENSP ID: ENSP00000388205

SEQ ID NO: 59714 - protein, 311 aa, Homo sapiens; identical to SEQ ID NO: 59712
  Payload ID: 11739
  Gene Symbol: OR2J3
  Gene Name: olfactory receptor, family 2, subfamily J, member 3
  Uniprot ID: O76001
  ENSP ID: ENSP00000388392

SEQ ID NO: 59715 - protein, 311 aa, Homo sapiens; identical to SEQ ID NO: 59712
  Payload ID: 11739
  Gene Symbol: OR2J3
  Gene Name: olfactory receptor, family 2, subfamily J, member 3
  Uniprot ID: O76001
  ENSP ID: ENSP00000390144

SEQ ID NO: 59716 - protein, 258 aa, Homo sapiens
  Payload ID: 11739
  Gene Symbol: OR2J3
  Gene Name: olfactory receptor, family 2, subfamily J, member 3
  ENSP ID: ENSP00000393371
MNDDGKVNASSEGYFILVGFSNWPHLEVVIFVVVLIFYLMTLIGNLFIIILSYLDSHLHTPMYFFLSNLSFLDLCYTTSSIPQLLVNLWGPEKTISYAGCMIQLYFVLALGTTECVLLVVMSYDRYAAVCRPLHYTVLMHPRFCHLLAVASWVSGFTNSALHSSFTFWVPLCGHRQVDHFFCEVPALLRLSCVDTHVNELTLMITSSIFVLIPLILILTSYGAIVQAVLRMQSTTGLQKVFGTCGAHLMAVSLFFIPA

SEQ ID NO: 59717 - protein, 311 aa, Homo sapiens; identical to SEQ ID NO: 59712
  Payload ID: 11739
  Gene Symbol: OR2J3
  Gene Name: olfactory receptor, family 2, subfamily J, member 3
  Uniprot ID: O76001
  ENSP ID: ENSP00000400546

SEQ ID NO: 59718 - protein, 311 aa, Homo sapiens; identical to SEQ ID NO: 59712
  Payload ID: 11739
  Gene Symbol: OR2J3
  Gene Name: olfactory receptor, family 2, subfamily J, member 3
  Uniprot ID: O76001
  ENSP ID: ENSP00000408783

SEQ ID NO: 59719 - protein, 311 aa, Homo sapiens
  Payload ID: 11739
  Gene Symbol: OR2J3
  Gene Name: olfactory receptor, family 2, subfamily J, member 3
  ENSP ID: ENSP00000480572
MNDDGKVNASSEGYFILVGFSNWPHLEVVIFVVVLIFYLMTLIGNLFIIILSYLDSHLHTPMYFFLSNLSFLDLCYTTSSIPQLLVNLWGPEKTISYAGCMIQLYFVLALGTTECVLLVVMSYDRYAAVCRPLHYTVLMHPRFCHLLAVASWVSGFTNSALHSSFTFWVPLCGHRQVDHFFCEVPALLRLSCVDTHVNELTLMITSSIFVLIPLILILTSYGAIVQAVLRMQSTTGLQKVFGTCGAHLMAVSLFFIPAMCMYLQPPSGNSQDQGKFIALFYTVVTPSLNPLIYTLRNKDVRGVVKRLRGWE

SEQ ID NO: 59720 - protein, 316 aa, Homo sapiens
  Payload ID: 11740
  Gene Symbol: OR2K2
  Gene Name: olfactory receptor, family 2, subfamily K, member 2
  ENSP ID: ENSP00000305055
MQGENFTIWSIFFLEGFSQYPGLEVVLFVFSLVMYLTTLLGNSTLILITILDSRLKTPMYLFLGNLSFMDICYTSASVPTLLVNLLSSQKTIIFSGCAVQMYLSLAMGSTECVLLAVMAYDRYVAICNPLRYSIIMNRCVCARMATVSWVTGCLTALLETSFALQIPLCGNLIDHFTCEILAVLKLACTSSLLMNTIMLVVSILLLPIPMLLVCISYIFILSTILRITSAEGRNKAFSTCGAHLTVVILYYGAALSMYLKPSSSNAQKIDKIISLLYGVLTPMLNPIIYSLRNKEVKDAMKKLLGKITLHQTHEHL

SEQ ID NO: 59721 - protein, 345 aa, Homo sapiens
  Payload ID: 11740
  Gene Symbol: OR2K2
  Gene Name: olfactory receptor, family 2, subfamily K, member 2
  Uniprot ID: Q8NGT1
  ENSP ID: ENSP00000363550
MNITLYSFLYVLRLNEGNSTGRNIDERKKMQGENFTIWSIFFLEGFSQYPGLEVVLFVFSLVMYLTTLLGNSTLILITILDSRLKTPMYLFLGNLSFMDICYTSASVPTLLVNLLSSQKTIIFSGCAVQMYLSLAMGSTECVLLAVMAYDRYVAICNPLRYSIIMNRCVCARMATVSWVTGCLTALLETSFALQIPLCGNLIDHFTCEILAVLKLACTSSLLMNTIMLVVSILLLPIPMLLVCISYIFILSTILRITSAEGRNKAFSTCGAHLTVVILYYGAALSMYLKPSSSNAQKIDKIISLLYGVLTPMLNPIIYSLRNKEVKDAMKKLLGKITLHQTHEHL

SEQ ID NO: 59722 - protein, 312 aa, Homo sapiens
  Payload ID: 11741
  Gene Symbol: OR2L13
  Gene Name: olfactory receptor, family 2, subfamily L, member 13
  Uniprot ID: Q8N349
  ENSP ID: ENSP00000350836
MEKWNHTSNDFILLGLLPPNQTGIFLLCLIILIFFLASVGNSAMIHLIHVDPRLHTPMYFLLSQLSLMDLMYISTTVPKMAYNFLSGQKGISFLGCGVQSFFFLTMACSEGLLLTSMAYDRYLAICHSLYYPIRMSKMMCVKMIGGSWTLGSINSLAHTVFALHIPYCRSRAIDHFFCDVPAMLLLACTDTWVYEYMVFVSTSLFLLFPFIGITSSCGRVLFAVYHMHSKEGRKKAFTTISTHLTVVIFYYAPFVYTYLRPRNLRSPAEDKILAVFYTILTPMLNPIIYSLRNKEVLGAMRRVFGIFSFLKE

SEQ ID NO: 59723 - protein, 312 aa, Homo sapiens; identical to SEQ ID NO: 59722
  Payload ID: 11741
  Gene Symbol: OR2L13
  Gene Name: olfactory receptor, family 2, subfamily L, member 13
  Uniprot ID: Q8N349
  ENSP ID: ENSP00000355434

SEQ ID NO: 59724 - protein, 312 aa, Homo sapiens
  Payload ID: 11742
  Gene Symbol: OR2L2
  Gene Name: olfactory receptor, family 2, subfamily L, member 2
  Uniprot ID: Q8NH16
  ENSP ID: ENSP00000355435
MENYNQTSTDFILLGLFPQSRIGLFVFTLIFLIFLMALIGNLSMILLIFLDIHLHTPMYFLLSQLSLIDLNYISTIVPKMVYDFLYGNKSISFTGCGIQSFFFLTLAVAEGLLLTSMAYDRYVAICFPLHYPIRISKRVCVMMITGSWMISSINSCAHTVYALCIPYCKSRAINHFFCDVPAMLTLACTDTWVYESTVFLSSTIFLVLPFTGIACSYGRVLLAVYRMHSAEGRKKAYSTCSTHLTVVSFYYAPFAYTYVRPRSLRSPTEDKILAVFYTILTPMLNPIIYSLRNKEVMGALTQVIQKIFSVKM

SEQ ID NO: 59725 - protein, 312 aa, Homo sapiens
  Payload ID: 11743
  Gene Symbol: OR2L3
  Gene Name: olfactory receptor, family 2, subfamily L, member 3
  Uniprot ID: Q8NG85
  ENSP ID: ENSP00000353044
MENYNQTSTDFILLGFFPPSRIGLFLFILIVFIFLMALIGNLSMILLIFLDTHLHTPMYFLLSQLSLIDLNYISTIVPKMASDFLSGNKSISFTGCGIQSFFFSALGGAEALLLASMAYDRYIAICFPLHYPIRMSKRMCVLMITGSWIIGSINACAHTVYVLHIPYCQSRAINHFFCDVPAMVTLACMDTWVYEGTVFLSTTIFLVFPFIAISCSYGRVLLAVYHMKSAEGRKKAYLTCSTHLTVVTFYYAPFVYTYLRPRSLRSPTEDKVLAVFYTTLTPMLNPIIYSLRNKEVMGALTRVSQRICSGKM

SEQ ID NO: 59726 - protein, 312 aa, Homo sapiens
  Payload ID: 11744
  Gene Symbol: OR2L5
  Gene Name: olfactory receptor, family 2, subfamily L, member 5
  Uniprot ID: Q8NG80
  ENSP ID: ENSP00000347428
MENYNQTSTDFILLGLFPPSKIGLFLFILFVLIFLMALIGNLSMILLIFLDTHLHTPMYFLLSQLSLIDLNYISTIVPKMASDFLYGNKSISFIGCGIQSFFFMTFAGAEALLLTSMAYDRYVAICFPLHYPIRMSKRMYVLMITGSWMIGSINSCAHTVYAFRIPYCKSRAINHFFCDVPAMLTLACTDTWVYEYTVFLSSTIFLVFPFTGIACSYGWVLLAVYRMHSAEGRKKAYSTCSTHLTVVTFYYAPFAYTYLCPRSLRSLTEDKVLAVFYTILTPMLNPIIYSLRNKEVMGALTRVIQNIFSVKM

SEQ ID NO: 59727 - protein, 312 aa, Homo sapiens
  Payload ID: 11745
  Gene Symbol: OR2L8
  Gene Name: olfactory receptor, family 2, subfamily L, member 8 (gene/pseudogene)
  Uniprot ID: Q8NGY9
  ENSP ID: ENSP00000349719
MENYNQTSTDFILLGLFPPSRIDLFFFILIVFIFLMALIGNLSMILLIFLDTHLHTPMYFLLSQLSLIDLNYISTIVPKMASDFLHGNKSISFTGCGIQSFFFLALGGAEALLLASMAYDRYIAICFPLHYLIRMSKRVCVLMITGSWIIGSINACAHTVYVLHIPYCRSRAINHFFCDVPAMVTLACMDTWVYEGTVFLSATIFLVFPFIGISCSYGQVLFAVYHMKSAEGRKKAYLTCSTHLTVVTFYYAPFVYTYLRPRSLRSPTEDKVLAVFYTILTPMLNPIIYSLRNKEVMGALTRVSQRICSVKM

SEQ ID NO: 59728 - protein, 347 aa, Homo sapiens
  Payload ID: 11746
  Gene Symbol: OR2M2
  Gene Name: olfactory receptor, family 2, subfamily M, member 2
  Uniprot ID: Q96R28
  ENSP ID: ENSP00000352710
MAWENQTFNSDFILLGIFNHSPPHTFLFFLVLGIFLVAFMGNSVMVLLIYLDTQLHTPMYFLLSQLSLMDLMLICTTVPKMAFNYLSGSKSISMAGCVTQIFFYISLSGSECFLLAVMAYDRYIAICHPLRYTNLMNPKICGLMATFSWILGSTDGIIDAVATFSFSFCGSREIAHFFCEFPSLLILSCNDTSIFEEVIFICCIVMLVFPVAIIIASYARVILAVIHMGSGEGRCKAFTTCSSHLMVVGMYYGAALFMYIRPTSDHSPTQDKMVSVFYTILTPMLNPLIYSLRNKEVTRAFMKILGKGKSESELPHKLYVLLFAKFFFLISIFFYDVKILALIMYIA

SEQ ID NO: 59729 - protein, 312 aa, Homo sapiens
  Payload ID: 11747
  Gene Symbol: OR2M3
  Gene Name: olfactory receptor, family 2, subfamily M, member 3
  Uniprot ID: Q8NG83
  ENSP ID: ENSP00000389625
MARENSTFNSDFILLGIFNHSPTHTFLFFLVLAIFSVAFMGNSVMVLLIYLDTQLHTPMYLLLSQLSLMDLMLICTTVPKMAFNYLSGSKSISMAGCATQIFFYTSLLGSECFLLAVMAYDRYTAICHPLRYTNLMSPKICGLMTAFSWILGSTDGIIDVVATFSFSYCGSREIAHFFCDFPSLLILSCSDTSIFEKILFICCIVMIVFPVAIIIASYARVILAVIHMGSGEGRRKAFTTCSSHLLVVGMYYGAALFMYIRPTSDRSPTQDKMVSVFYTILTPMLNPLIYSLRNKEVTRAFMKILGKGKSGE

SEQ ID NO: 59730 - protein, 311 aa, Homo sapiens
  Payload ID: 11748
  Gene Symbol: OR2M4
  Gene Name: olfactory receptor, family 2, subfamily M, member 4
  Uniprot ID: Q96R27
  ENSP ID: ENSP00000306688
MVWENQTFNSIFILLGIFNHSPTHTFLFSLVLGIFSLALMENISMVLLIYIEKQLHTPMYFLLSQLSLMDLMLICTTLPKMIFSYLSGKKSISLAGCGTQIFFYVSLLGAECFLLAVMAYDRYVAICHPLQYTILMNPKLCVFMTVASWTLGSLDGIIVLAAVLSFSYCSSLEIHHFFCDVAALLPLSCTETSAFERLLVICCVVMLIFPVSVIILSYSHVLRAVIHMGSGESRRKAFTTCSSHLSVVGLYYGAAMFMYMRPASKHTPDQDKMVSAFYTILTPMLNPLIYSLRNKEVFRALQKVLKKRKLI

SEQ ID NO: 59731 - protein, 312 aa, Homo sapiens
  Payload ID: 11749
  Gene Symbol: OR2M5
  Gene Name: olfactory receptor, family 2, subfamily M, member 5
  Uniprot ID: A3KFT3
  ENSP ID: ENSP00000355432
MAWENQTFNSDFILLGIFNHSPTHTFLFFLVLAIFSVAFMGNSVMVLLIYLDTQLHTPMYFLLSQLFLMDLMLICSTVPKMAFNYLSGSKSISMAGCATQIFFYVSLLGSECFLLAVMSYDRYIAICHPLRYTNLMRPKICGLMTAFSWILGSMDAIIDAVATFSFSYCGSREIAHFFCDFPSLLILSCNDTSIFEKVLFICCIVMIVFPVAIIIASYARVILAVIHMGSGEGRRKAFTTCSSHLMVVGMYYGAGLFMYIRPTSDRSPMQDKLVSVFYTILTPMLNPLIYSLRNKEVTRALRKVLGKGKCGE

SEQ ID NO: 59732 - protein, 312 aa, Homo sapiens
  Payload ID: 11750
  Gene Symbol: OR2M7
  Gene Name: olfactory receptor, family 2, subfamily M, member 7
  Uniprot ID: Q8NG81
  ENSP ID: ENSP00000324557
MAWENQTFNSDFLLLGIFNHSPTHTFLFFLVLAIFSVAFMGNSIMVLLIYLDTQLHTPMYFLLSQLSLMDLMLICTTVPKMAFNYLSGSKSISMAGCATQIFFYISLLGSECFLLAVMSYDRYTAICHPLRYTNLMRPKICGLMTAFSWILGSTDGIIDAVATFSFSYCGSREIAHFCCDFPSLLILSCNDTSIFEEVIFICCIVMLVFPVAIIITSYARVILAVIHMGSGEGRRKAFTTCSSHLMVVGMYYGAGLFMCIQPTSHHSPMQDKMVSVFYTIVTPMLNPLIYSLRNKEVTRALMKILGKGKSGD

SEQ ID NO: 59733 - protein, 319 aa, Homo sapiens
  Payload ID: 11751
  Gene Symbol: OR2S2
  Gene Name: olfactory receptor, family 2, subfamily S, member 2 (gene/pseudogene)
  Uniprot ID: Q9NQN1
  ENSP ID: ENSP00000344040
MEKANETSPVMGFVLLRLSAHPELEKTFFVLILLMYLVILLGNGVLILVTILDSRLHTPMYFFLGNLSFLDICFTTSSVPLVLDSFLTPQETISFSACAVQMALSFAMAGTECLLLSMMAFDRYVAICNPLRYSVIMSKAAYMPMAASSWAIGGAASVVHTSLAIQLPFCGDNVINHFTCEILAVLKLACADISINVISMEVTNVIFLGVPVLFISFSYVFIITTILRIPSAEGRKKVFSTCSAHLTVVIVFYGTLFFMYGKPKSKDSMGADKEDLSDKLIPLFYGVVTPMLNPIIYSLRNKDVKAAVRRLLRPKGFTQ

SEQ ID NO: 59734 - protein, 319 aa, Homo sapiens; identical to SEQ ID NO: 59733
  Payload ID: 11751
  Gene Symbol: OR2S2
  Gene Name: olfactory receptor, family 2, subfamily S, member 2 (gene/pseudogene)
  Uniprot ID: Q9NQN1
  ENSP ID: ENSP00000485066

SEQ ID NO: 59735 - protein, 319 aa, Homo sapiens; identical to SEQ ID NO: 59733
  Payload ID: 11751
  Gene Symbol: OR2S2
  Gene Name: olfactory receptor, family 2, subfamily S, member 2 (gene/pseudogene)
  Uniprot ID: Q9NQN1
  ENSP ID: ENSP00000485516

SEQ ID NO: 59736 - protein, 369 aa, Homo sapiens
  Payload ID: 11752
  Gene Symbol: OR2T1
  Gene Name: olfactory receptor, family 2, subfamily T, member 1
  Uniprot ID: O43869
  ENSP ID: ENSP00000355430
MWQEYYFLNVFFPLLKVCCLTINSHVVILLPWECYHLIWKILPYIGTTVGSMEEYNTSSTDFTFMGLFNRKETSGLIFAIISIIFFTALMANGVMIFLIQTDLRLHTPMYFLLSHLSLIDMMYISTIVPKMLVNYLLDQRTISFVGCTAQHFLYLTLVGAEFFLLGLMAYDRYVAICNPLRYPVLMSRRVCWMIIAGSWFGGSLDGFLLTPITMSFPFCNSREINHFFCEAPAVLKLACADTALYETVMYVCCVLMLLIPFSVVLASYARILTTVQCMSSVEGRKKAFATCSSHMTVVSLFYGAAMYTYMLPHSYHKPAQDKVLSVFYTILTPMLNPLIYSLRNKDVTGALKRALGRFKGPQRVSGGVF

SEQ ID NO: 59737 - protein, 369 aa, Homo sapiens; identical to SEQ ID NO: 59736
  Payload ID: 11752
  Gene Symbol: OR2T1
  Gene Name: olfactory receptor, family 2, subfamily T, member 1
  Uniprot ID: O43869
  ENSP ID: ENSP00000479603

SEQ ID NO: 59738 - protein, 369 aa, Homo sapiens; identical to SEQ ID NO: 59736
  Payload ID: 11752
  Gene Symbol: OR2T1
  Gene Name: olfactory receptor, family 2, subfamily T, member 1
  Uniprot ID: O43869
  ENSP ID: ENSP00000482752

SEQ ID NO: 59739 - protein, 312 aa, Homo sapiens
  Payload ID: 11753
  Gene Symbol: OR2T10
  Gene Name: olfactory receptor, family 2, subfamily T, member 10
  Uniprot ID: Q8NGZ9
  ENSP ID: ENSP00000329210
MRLANQTLGGDFFLLGIFSQISHPGRLCLLIFSIFLMAVSWNITLILLIHIDSSLHTPMYFFINQLSLIDLTYISVTVPKMLVNQLAKDKTISVLGCGTQMYFYLQLGGAECCLLAAMAYDRYVAICHPLRYSVLMSHRVCLLLASGCWFVGSVDGFMLTPIAMSFPFCRSHEIQHFFCEVPAVLKLSCSDTSLYKIFMYLCCVIMLLIPVTVISVSYYYIILTIHKMNSVEGRKKAFTTCSSHITVVSLFYGAAIYNYMLPSSYQTPEKDMMSSFFYTILTPVLNPIIYSFRNKDVTRALKKMLSVQKPPY

SEQ ID NO: 59740 - protein, 316 aa, Homo sapiens; identical to SEQ ID NO: 59430
  Payload ID: 11754
  Gene Symbol: OR2T11
  Gene Name: olfactory receptor, family 2, subfamily T, member 11 (gene/pseudogene)
  Uniprot ID: Q8NH01
  ENSP ID: ENSP00000328934

SEQ ID NO: 59741 - protein, 320 aa, Homo sapiens
  Payload ID: 11755
  Gene Symbol: OR2T12
  Gene Name: olfactory receptor, family 2, subfamily T, member 12
  Uniprot ID: Q8NG77
  ENSP ID: ENSP00000324583
MEMRNTTPDFILLGLFNHTRAHQVLFMMLLATVLTSLFSNALMILLIHWDHRLHRPMYFLLSQLSLMDMMLVSTTVPKMAADYLTGNKAISRAGCGVQIFFLPTLGGGECFLLAAMAYDRYAAVCHPLRYPTLMSWQLCLRMTMSSWLLGAADGLLQAVATLSFPYCGAHEIDHFFCEAPVLVRLACADTSVFENAMYICCVLMLLVPFSLILSSYGLILAAVLLMRSTEARKKAFATCSSHVAVVGLFYGAGIFTYMRPKSHRSTNHDKVVSAFYTMFTPLLNPLIYSVRNSEVKEALKRWLGTCVNLKHQQNEAHRSR

SEQ ID NO: 59742 - protein, 324 aa, Homo sapiens
  Payload ID: 11756
  Gene Symbol: OR2T2
  Gene Name: olfactory receptor, family 2, subfamily T, member 2
  Uniprot ID: Q6IF00
  ENSP ID: ENSP00000343062
MGMEGLLQNSTNFVLTGLITHPAFPGLLFAIVFSIFVVAITANLVMILLIHMDSRLHTPMYFLLSQLSIMDTIYICITVPKMLQDLLSKDKTISFLGCAVQIFLYLTLIGGEFFLLGLMAYDRYVAVCNPLRYPLLMNRRVCLFMVVGSWVGGSLDGFMLTPVTMSFPFCRSREINHFFCEIPAVLKLSCTDTSLYETLMYACCVLMLLIPLSVISVSYTHILLTVHRMNSAEGRRKAFATCSSHIMVVSVFYGAAFYTNVLPHSYHTPEKDKVVSAFYTILTPMLNPLIYSLRNKDVAAALRKVLGRCGSSQSIRVATVIRKG

SEQ ID NO: 59743 - protein, 324 aa, Homo sapiens; identical to SEQ ID NO: 59742
  Payload ID: 11756
  Gene Symbol: OR2T2
  Gene Name: olfactory receptor, family 2, subfamily T, member 2
  Uniprot ID: Q6IF00
  ENSP ID: ENSP00000481002

SEQ ID NO: 59744 - protein, 324 aa, Homo sapiens; identical to SEQ ID NO: 59742
  Payload ID: 11756
  Gene Symbol: OR2T2
  Gene Name: olfactory receptor, family 2, subfamily T, member 2
  Uniprot ID: Q6IF00
  ENSP ID: ENSP00000482837

SEQ ID NO: 59745 - protein, 317 aa, Homo sapiens
  Payload ID: 11757
  Gene Symbol: OR2T27
  Gene Name: olfactory receptor, family 2, subfamily T, member 27
  Uniprot ID: Q8NH04
  ENSP ID: ENSP00000342008
MEQSNYSVYADFILLGLFSNARFPWLLFALILLVFLTSIASNVVKIILIHIDSRLHTPMYFLLSQLSLRDILYISTIVPKMLVDQVMSQRAISFAGCTAQHFLYLTLAGAEFFLLGLMSYDRYVAICNPLHYPVLMSRKICWLIVAAAWLGGSIDGFLLTPVTMQFPFCASREINHFFCEVPALLKLSCTDTSAYETAMYVCCIMMLLIPFSVISGSYTRILITVYRMSEAEGRGKAVATCSSHMVVVSLFYGAAMYTYVLPHSYHTPEQDKAVSAFYTILTPMLNPLIYSLRNKDVTGALQKVVGRCVSSGKVTTF

SEQ ID NO: 59746 - protein, 315 aa, Homo sapiens
  Payload ID: 11758
  Gene Symbol: OR2T29
  Gene Name: olfactory receptor, family 2, subfamily T, member 29
  Uniprot ID: Q8NH02
  ENSP ID: ENSP00000331774
MANITRMANHTGRLDFILMGLFRQSKHPALLSVVIFVVFLKALSGNAVLILLIHCDAHLHSPMYFFISQLSLMDMAYISVTVPKMLLDQVMGVNKVSAPECGMQMFLYLTLAGSEFFLLATMAYDRYVAICHPLRYPVLMNHRVCLFLASGCWFLGSVDGFMLTPITMSFPFCRSWEIHHFFCEVPAVTILSCSDTSLYETLMYLCCVLMLLIPVTIISSSYLLILLTVHRMNSAEGRKKAFATCSSHLTVVILFYGAAVYTYMLPSSYHTPEKDMMVSVFYTILTPVLNPLIYSLRNKDVMGALKKMLTVRFVL

SEQ ID NO: 59747 - protein, 318 aa, Homo sapiens
  Payload ID: 11759
  Gene Symbol: OR2T3
  Gene Name: olfactory receptor, family 2, subfamily T, member 3
  Uniprot ID: Q8NH03
  ENSP ID: ENSP00000352604
MCSGNQTSQNQTASTDFTLTGLFAESKHAALLYTVTFLLFLMALTGNALLILLIHSEPRLHTPMYFFISQLALMDLMYLCVTVPKMLVGQVTGDDTISPSGCGIQMFFYLTLAGAEVFLLAAMAYDRYAAVCRPLHYPLLMNQRVCQLLVSACWVLGMVDGLLLTPITMSFPFCQSRKILSFFCETPALLKLSCSDVSLYKTLMYLCCILMLLAPIMVISSSYTLILHLIHRMNSAAGHRKALATCSSHMIIVLLLFGASFYTYMLPSSYHTAEQDMMVSAFYTIFTPVLNPLIYSLRNKDVTRALRSMMQSRMNQEK

SEQ ID NO: 59748 - protein, 318 aa, Homo sapiens; identical to SEQ ID NO: 59747
  Payload ID: 11759
  Gene Symbol: OR2T3
  Gene Name: olfactory receptor, family 2, subfamily T, member 3
  Uniprot ID: Q8NH03
  ENSP ID: ENSP00000478611

SEQ ID NO: 59749 - protein, 318 aa, Homo sapiens; identical to SEQ ID NO: 59747
  Payload ID: 11759
  Gene Symbol: OR2T3
  Gene Name: olfactory receptor, family 2, subfamily T, member 3
  Uniprot ID: Q8NH03
  ENSP ID: ENSP00000480124

SEQ ID NO: 59750 - protein, 320 aa, Homo sapiens
  Payload ID: 11760
  Gene Symbol: OR2T33
  Gene Name: olfactory receptor, family 2, subfamily T, member 33
  Uniprot ID: Q8NG76
  ENSP ID: ENSP00000324687
MEMRNTTPDFILLGLFNHTRAHQVLFMMVLSIVLTSLFGNSLMILLIHWDHRLHTPMYFLLSQLSLMDMMLVSTTVPKMAADYLTGSKAISRAGCGVQIFFLPTLGGGECFLLAAMAYDRYAAVCHPLRYPTLMSWQLCLRMTMSCWLLGAADGLLQAVVTLSFPYCGAHEIDHFFCETPVLVRLACADTSVFENAMYICCVLMLLVPFSLILSSYGLILAAVLHMRSTEARKKAFATCSSHVAVVGLFYGAAIFTYMRPKSHRSTNHDKVVSAFYTMFTPLLNPLIYSVKNSEVKGALKRWLGTCVNIKHQQNEAHRSR

SEQ ID NO: 59751 - protein, 318 aa, Homo sapiens
  Payload ID: 11761
  Gene Symbol: OR2T34
  Gene Name: olfactory receptor, family 2, subfamily T, member 34
  Uniprot ID: Q8NGX1
  ENSP ID: ENSP00000330904
MCSGNQTSQNQTASTDFTLTGLFAESKHAALLYTVTFLLFLMALTGNALLILLIHSEPRLHTPMYFFISQLALMDLMYLCVTVPKMLVGQVTGDDTISPSGCGIQMFFHLTLAGAEVFLLAAMAYDRYAAVCRPLHYPLLMNQRVCQLLVSACWVLGMVDGLLLTPITMSFPFCQSRKILSFFCETPALLKLSCSDVSLYKMLTYLCCILMLLTPIMVISSSYTLILHLIHRMNSAAGRRKALATCSSHMIIVLLLFGASFYTYMLRSSYHTAEQDMMVSAFYTIFTPVLNPLIYSLRNKDVTRALRSMMQSRMNQEK

SEQ ID NO: 59752 - protein, 323 aa, Homo sapiens
  Payload ID: 11762
  Gene Symbol: OR2T35
  Gene Name: olfactory receptor, family 2, subfamily T, member 35
  Uniprot ID: Q8NGX2
  ENSP ID: ENSP00000324369
MGMEGLLQNSTNFVLTGLITHPAFPGLLFAVVFSIFVVAITANLVMILLIHMDSRLHTPMYFLLSQLSIMDTIYICITVPKMLQDLLSKDKTISFLGCAVQIFYLTLIGGEFFLLGLMAYDRYVAVCNPLRYPLLMNRRVCLFMVVGSWVGGSLDGFMLTPVTMSFPFCRSREINHFFCEIPAVLKLSCTDTSLYETLMYACCVLMLLIPLSVISVSYTHILLTVHRMNSAEGRRKAFATCSSHIMVVSVFYGAAFYTNVLPHSYHTPEKDKVVSAFYTILTPMLNPLIYSLRNKDVAAALRKVLGRCGSSQSIRVATVIRKG

SEQ ID NO: 59753 - protein, 348 aa, Homo sapiens
  Payload ID: 11763
  Gene Symbol: OR2T4
  Gene Name: olfactory receptor, family 2, subfamily T, member 4
  Uniprot ID: Q8NH00
  ENSP ID: ENSP00000355431
MDNITWMASHTGWSDFILMGLFRQSKHPMANITWMANHTGWSDFILLGLFRQSKHPALLCVVIFVVFLMALSGNAVLILLIHCDAHLHTPMYFFISQLSLMDMAYISVTVPKMLLDQVMGVNKISAPECGMQMFFYVTLAGSEFFLLATMAYDRYVAICHPLRYPVLMNHRVCLFLSSGCWFLGSVDGFTFTPITMTFPFRGSREIHHFFCEVPAVLNLSCSDTSLYEIFMYLCCVLMLLIPVVIISSSYLLILLTIHGMNSAEGRKKAFATCSSHLTVVILFYGAAIYTYMLPSSYHTPEKDMMVSVFYTILTPVVNPLIYSLRNKDVMGALKKMLTVEPAFQKAME

SEQ ID NO: 59754 - protein, 348 aa, Homo sapiens; identical to SEQ ID NO: 59753
  Payload ID: 11763
  Gene Symbol: OR2T4
  Gene Name: olfactory receptor, family 2, subfamily T, member 4
  Uniprot ID: Q8NH00
  ENSP ID: ENSP00000478105

SEQ ID NO: 59755 - protein, 348 aa, Homo sapiens; identical to SEQ ID NO: 59753
  Payload ID: 11763
  Gene Symbol: OR2T4
  Gene Name: olfactory receptor, family 2, subfamily T, member 4
  Uniprot ID: Q8NH00
  ENSP ID: ENSP00000484014

SEQ ID NO: 59756 - protein, 315 aa, Homo sapiens
  Payload ID: 11764
  Gene Symbol: OR2T5
  Gene Name: olfactory receptor, family 2, subfamily T, member 5
  Uniprot ID: Q6IEZ7
  ENSP ID: ENSP00000355429
MANITRMANHTGKLDFILMGLFRRSKHPALLSVVIFVVFLKALSGNAVLILLIHCDAHLHSPMYFFISQLSLMDMAYISVTVPKMLLDQVMGVNKVSAPECGMQMFLYLTLAGSEFFLLATMAYDRYVAICHPLRYPVLMNHRVCLFLASGCWFLGSVDGFMLTPITMSFPFCRSWEIHHFFCEVPAVTILSCSDTSLYETLMYLCCVLMLLIPVTIISSSYLLILLTVHRMNSAEGRKKAFATCSSHLTVVILFYGAAVYTYMLPSSYHTPEKDMMVSVFYTILTPVLNPLIYSLRNKDVMGALKKMLTVRFVL

SEQ ID NO: 59757 - protein, 315 aa, Homo sapiens; identical to SEQ ID NO: 59756
  Payload ID: 11764
  Gene Symbol: OR2T5
  Gene Name: olfactory receptor, family 2, subfamily T, member 5
  Uniprot ID: Q6IEZ7
  ENSP ID: ENSP00000480545

SEQ ID NO: 59758 - protein, 315 aa, Homo sapiens; identical to SEQ ID NO: 59756
  Payload ID: 11764
  Gene Symbol: OR2T5
  Gene Name: olfactory receptor, family 2, subfamily T, member 5
  Uniprot ID: Q6IEZ7
  ENSP ID: ENSP00000480714

SEQ ID NO: 59759 - protein, 308 aa, Homo sapiens
  Payload ID: 11765
  Gene Symbol: OR2T6
  Gene Name: olfactory receptor, family 2, subfamily T, member 6
  Uniprot ID: Q8NHC8
  ENSP ID: ENSP00000347965
MNENNETLTRGFTLMGLFTHNKCSGFFFGVICAVFFMAMIANGVMIFLINIDPHLHTPMYFLLSHLSVIDTLYISTIVPKMLVDYLMGEGTISFIACTAQCFLYMGFMGAEFFLLGLMAYDRYVAICNPLRYPVLISWRVCWMILASSWFGGALDSFLLTPITMSLPFCASHQINHFFCEAPTMLRLACGDKTTYETVMYVCCVAMLLIPFSVVTASYTRILITVHQMTSAEGRKKAFATCSSHMMVVTLFYGAALYTYTLPQSYHTPIKDKVFSAFYTILTPLLNPLIYSLRNRDVMGALKRVVARC

SEQ ID NO: 59760 - protein, 308 aa, Homo sapiens; identical to SEQ ID NO: 59759
  Payload ID: 11765
  Gene Symbol: OR2T6
  Gene Name: olfactory receptor, family 2, subfamily T, member 6
  Uniprot ID: Q8NHC8
  ENSP ID: ENSP00000478358

SEQ ID NO: 59761 - protein, 308 aa, Homo sapiens; identical to SEQ ID NO: 59759
  Payload ID: 11765
  Gene Symbol: OR2T6
  Gene Name: olfactory receptor, family 2, subfamily T, member 6
  Uniprot ID: Q8NHC8
  ENSP ID: ENSP00000481800

SEQ ID NO: 59762 - protein, 308 aa, Homo sapiens
  Payload ID: 11766
  Gene Symbol: OR2T7
  Gene Name: olfactory receptor, family 2, subfamily T, member 7
  Uniprot ID: P0C7T2
  ENSP ID: ENSP00000486110
MPTLSFWVCSATPVSPGFFALILLVFVTSIASNVVKIILIHIDSRLHTPMYFLLSQLSLRDILYISTIVPKMLVDQVMSQRAISFAGCTAQHFLYLTLAGAEFFLLGLMSCDRYVAICNPLHYPDLMSRKICWLIVAAAWLGGSIDGFLLTPVTMQFPFCASREINHFFCEVPALLKLSCTDTSAYETAMYVCCIMMLLIPFSVISGSYTRILITVYRMSEAEGRRKAVATCSSHMVVVSLFYGAAMYTYVLPHSYHTPEQDKAVSAFYTILTPMLNPLIYSLRNKDVTGALQKVVGRCVSSGKVTTF

SEQ ID NO: 59763 - protein, 308 aa, Homo sapiens; identical to SEQ ID NO: 59762
  Payload ID: 11766
  Gene Symbol: OR2T7
  Gene Name: olfactory receptor, family 2, subfamily T, member 7
  Uniprot ID: P0C7T2
  ENSP ID: ENSP00000486319

SEQ ID NO: 59764 - protein, 312 aa, Homo sapiens
  Payload ID: 11767
  Gene Symbol: OR2T8
  Gene Name: olfactory receptor, family 2, subfamily T, member 8
  Uniprot ID: A6NH00
  ENSP ID: ENSP00000326225
MENGSYTSYFILLGLFNHTRAHQVLFMMVLSIVLTSLFGNSLMILLIHWDHRLHTPMYFLLSQLSLMDVMLVSTTVPKMAADYLTGSKAISRAGCGAQIFFLPTLGGGECFLLAAMAYDRYAAVCHPLRYPTLMSWQLCLRMNLSCWLLGAADGLLQAVATLSFPYCGAHEIDHFFCETPVLVRLACADTSVFENAMYICCVLMLLVPFSLILSSYGLILAAVLHMRSTEARKKAFATCSSHVAVVGLFYGAAIFTYMRPKSHRSTNHDKVVSAFYTMFTPLLNPLIYSVKNSEVKGALTRCMGRCVALSRE

SEQ ID NO: 59765 - protein, 315 aa, Homo sapiens
  Payload ID: 11768
  Gene Symbol: OR2V1
  Gene Name: olfactory receptor, family 2, subfamily V, member 1
  Uniprot ID: Q8NHB1
  ENSP ID: ENSP00000404102
MGRWVNQSYTDGFFLLGIFSHSQTDLVLFSAVMVVFTVALCGNVLLIFLIYLDAGLHTPMYFFLSQLSLMDLMLVCNIVPKMAANFLSGRKSISFVGCGIQIGFFVSLVGSEGLLLGLMAYDRYVAVSHPLHYPILMNQRVCLQITGSSWAFGIIDGVIQMVAAMGLPYCGSRSVDHFFCEVQALLKLACADTSLFDTLLFACCVFMLLLPFSIIMASYACILGAVLRIRSAQAWKKALATCSSHLTAVTLFYGAAMFMYLRPRRYRAPSHDKVASIFYTVLTPMLNPLIYSLRNGEVMGALRKGLDRCRIGSQH

SEQ ID NO: 59766 - protein, 315 aa, Homo sapiens
  Payload ID: 11769
  Gene Symbol: OR2V2
  Gene Name: olfactory receptor, family 2, subfamily V, member 2
  Uniprot ID: Q96R30
  ENSP ID: ENSP00000332185
METWVNQSYTDGFFLLGIFSHSTADLVLFSVVMAVFTVALCGNVLLIFLIYMDPHLHTPMYFFLSQLSLMDLMLVCTNVPKMAANFLSGRKSISFVGCGIQIGLFVCLVGSEGLLLGLMAYDRYVAISHPLHYPILMNQRVCLQITGSSWAFGIIDGLIQMVVVMNFPYCGLRKVNHFFCEMLSLLKLACVDTSLFEKVIFACCVFMLLFPFSIIVASYAHILGTVLQMHSAQAWKKALATCSSHLTAVTLFYGAAMFIYLRPRHYRAPSHDKVASIFYTVLTPMLNPLIYSLRNREVMGALRKGLDRCRIGSQH

SEQ ID NO: 59767 - protein, 320 aa, Homo sapiens
  Payload ID: 11770
  Gene Symbol: OR2W1
  Gene Name: olfactory receptor, family 2, subfamily W, member 1
  Uniprot ID: Q9Y3N9
  ENSP ID: ENSP00000366380
MDQSNYSSLHGFILLGFSNHPKMEMILSGVVAIFYLITLVGNTAIILASLLDSQLHTPMYFFLRNLSFLDLCFTTSIIPQMLVNLWGPDKTISYVGCIIQLYVYMWLGSVECLLLAVMSYDRFTAICKPLHYFVVMNPHLCLKMIIMIWSISLANSVVLCTLTLNLPTCGNNILDHFLCELPALVKIACVDTTTVEMSVFALGIIIVLTPLILILISYGYIAKAVLRTKSKASQRKAMNTCGSHLTVVSMFYGTIIYMYLQPGNRASKDQGKFLTLFYTVITPSLNPLIYTLRNKDMKDALKKLMRFHHKSTKIKRNCKS

SEQ ID NO: 59768 - protein, 320 aa, Homo sapiens; identical to SEQ ID NO: 59767
  Payload ID: 11770
  Gene Symbol: OR2W1
  Gene Name: olfactory receptor, family 2, subfamily W, member 1
  Uniprot ID: Q9Y3N9
  ENSP ID: ENSP00000373150

SEQ ID NO: 59769 - protein, 320 aa, Homo sapiens; identical to SEQ ID NO: 59767
  Payload ID: 11770
  Gene Symbol: OR2W1
  Gene Name: olfactory receptor, family 2, subfamily W, member 1
  Uniprot ID: Q9Y3N9
  ENSP ID: ENSP00000388144

SEQ ID NO: 59770 - protein, 320 aa, Homo sapiens; identical to SEQ ID NO: 59767
  Payload ID: 11770
  Gene Symbol: OR2W1
  Gene Name: olfactory receptor, family 2, subfamily W, member 1
  Uniprot ID: Q9Y3N9
  ENSP ID: ENSP00000389825

SEQ ID NO: 59771 - protein, 320 aa, Homo sapiens; identical to SEQ ID NO: 59767
  Payload ID: 11770
  Gene Symbol: OR2W1
  Gene Name: olfactory receptor, family 2, subfamily W, member 1
  Uniprot ID: Q9Y3N9
  ENSP ID: ENSP00000392635

SEQ ID NO: 59772 - protein, 320 aa, Homo sapiens; identical to SEQ ID NO: 59767
  Payload ID: 11770
  Gene Symbol: OR2W1
  Gene Name: olfactory receptor, family 2, subfamily W, member 1
  Uniprot ID: Q9Y3N9
  ENSP ID: ENSP00000401866

SEQ ID NO: 59773 - protein, 320 aa, Homo sapiens; identical to SEQ ID NO: 59767
  Payload ID: 11770
  Gene Symbol: OR2W1
  Gene Name: olfactory receptor, family 2, subfamily W, member 1
  Uniprot ID: Q9Y3N9
  ENSP ID: ENSP00000405025

SEQ ID NO: 59774 - protein, 320 aa, Homo sapiens; identical to SEQ ID NO: 59767
  Payload ID: 11770
  Gene Symbol: OR2W1
  Gene Name: olfactory receptor, family 2, subfamily W, member 1
  Uniprot ID: Q9Y3N9
  ENSP ID: ENSP00000412537

SEQ ID NO: 59775 - protein, 314 aa, Homo sapiens
  Payload ID: 11771
  Gene Symbol: OR2W3
  Gene Name: olfactory receptor, family 2, subfamily W, member 3
  Uniprot ID: Q7Z3T1
  ENSP ID: ENSP00000353516
MDGTNGSTQTHFILLGFSDRPHLERILFVVILIAYLLTLVGNTTIILVSRLDPHLHTPMYFFLAHLSFLDLSFTTSSIPQLLYNLNGCDKTISYMGCAIQLFLFLGLGGVECLLLAVMAYDRCVAICKPLHYMVIMNPRLCRGLVSVTWGCGVANSLAMSPVTLRLPRCGHHEVDHFLREMPALIRMACVSTVAIEGTVFVLAVGVVLSPLVFILLSYSYIVRAVLQIRSASGRQKAFGTCGSHLTVVSLFYGNIIYMYMQPGASSSQDQGMFLMLFYNIVTPLLNPLIYTLRNREVKGALGRLLLGKRELGKE

SEQ ID NO: 59776 - protein, 311 aa, Homo sapiens
  Payload ID: 11772
  Gene Symbol: OR2Y1
  Gene Name: olfactory receptor, family 2, subfamily Y, member 1
  Uniprot ID: Q8NGV0
  ENSP ID: ENSP00000312403
MGSFNTSFEDGFILVGFSDWPQLEPILFVFIFIFYSLTLFGNTIIIALSWLDLRLHTPMYFFLSHLSLLDLCFTTSTVPQLLINLCGVDRTITRGGCVAQLFIYLALGSTECVLLVVMAFDRYAAVCRPLHYMAIMHPHLCQTLAIASWGAGFVNSLIQTGLAMAMPLCGHRLNHFFCEMPVFLKLACADTEGTEAKMFVARVIVVAVPAALILGSYVHIAHAVLRVKSTAGRRKAFGTCGSHLLVVFLFYGSAIYTYLQSIHNYSEREGKFVALFYTIITPILNPLIYTLRNKDVKGALWKVLWRGRDSG

SEQ ID NO: 59777 - protein, 314 aa, Homo sapiens
  Payload ID: 11773
  Gene Symbol: OR2Z1
  Gene Name: olfactory receptor, family 2, subfamily Z, member 1
  Uniprot ID: Q8NG97
  ENSP ID: ENSP00000316284
MGDVNQSVASDFILVGLFSHSGSRQLLFSLVAVMFVIGLLGNTVLLFLIRVDSRLHTPMYFLLSQLSLFDIGCPMVTIPKMASDFLRGEGATSYGGGAAQIFFLTLMGVAEGVLLVLMSYDRYVAVCQPLQYPVLMRRQVCLLMMGSSWVVGVLNASIQTSITLHFPYCASRIVDHFFCEVPALLKLSCADTCAYEMALSTSGVLILMLPLSLIATSYGHVLQAVLSMRSEEARHKAVTTCSSHITVVGLFYGAAVFMYMVPCAYHSPQQDNVVSLFYSLVTPTLNPLIYSLRNPEVWMALVKVLSRAGLRQMC

SEQ ID NO: 59778 - protein, 315 aa, Homo sapiens
  Payload ID: 11774
  Gene Symbol: OR3A1
  Gene Name: olfactory receptor, family 3, subfamily A, member 1
  Uniprot ID: P47881
  ENSP ID: ENSP00000313803
MQPESGANGTVIAEFILLGLLEAPGLQPVVFVLFLFAYLVTVRGNLSILAAVLVEPKLHTPMYFFLGNLSVLDVGCISVTVPSMLSRLLSRKRAVPCGACLTQLFFFHLFVGVDCFLLTAMAYDRFLAICRPLTYSTRMSQTVQRMLVAASWACAFTNALTHTVAMSTLNFCGPNVINHFYCDLPQLFQLSCSSTQLNELLLFAVGFIMAGTPMALIVISYIHVAAAVLRIRSVEGRKKAFSTCGSHLTVVAIFYGSGIFNYMRLGSTKLSDKDKAVGIFNTVINPMLNPIIYSFRNPDVQSAIWRMLTGRRSLA

SEQ ID NO: 59779 - protein, 321 aa, Homo sapiens
  Payload ID: 11774
  Gene Symbol: OR3A1
  Gene Name: olfactory receptor, family 3, subfamily A, member 1
  ENSP ID: ENSP00000484269
VSLQELMQPESGANGTVIAEFILLGLLEAPGLQPVVFVLFLFAYLVTVRGNLSILAAVLVEPKLHTPMYFFLGNLSVLDVGCISVTVPSMLSRLLSRKRAVPCGACLTQLFFFHLFVGVDCFLLTAMAYDRFLAICRPLTYSTRMSQTVQRMLVAASWACAFTNALTHTVAMSTLNFCGPNVINHFYCDLPQLFQLSCSSTQLNELLLFAVGFIMAGTPMALIVISYIHVAAAVLRIRSVEGRKKAFSTCGSHLTVVAIFYGSGIFNYMRLGSTKLSDKDKAVGIFNTVINPMLNPIIYSFRNPDVQSAIWRMLTGRRSLA

SEQ ID NO: 59780 - protein, 321 aa, Homo sapiens
  Payload ID: 11775
  Gene Symbol: OR3A2
  Gene Name: olfactory receptor, family 3, subfamily A, member 2
  Uniprot ID: P47893
  ENSP ID: ENSP00000386180
MSLQKLMEPEAGTNRTAVAEFILLGLVQTEEMQPVVFVLLLFAYLVTTGGNLSILAAVLVEPKLHAPMYFFLGNLSVLDVGCITVTVPAMLGRLLSHKSTISYDACLSQLFFFHLLAGMDCFLLTAMAYDRLLAICQPLTYSTRMSQTVQRMLVAASLACAFTNALTHTVAMSTLNFCGPNEVNHFYCDLPQLFQLSCSSTQLNELLLFAVGFIMAGTPLVLIITAYSHVAAAVLRIRSVEGRKKAFSTCGSHLTVVCLFFGRGIFNYMRLGSEEASDKDKGVGVFNTVINPMLNPLIYSLRNPDVQGALWQIFLGRRSLT

SEQ ID NO: 59781 - protein, 321 aa, Homo sapiens
  Payload ID: 11776
  Gene Symbol: OR3A3
  Gene Name: olfactory receptor, family 3, subfamily A, member 3
  Uniprot ID: P47888
  ENSP ID: ENSP00000291231
MSLQKLMEPEAGTNRTAVAEFILLGLVQTEEMQPVVFVLLLFAYLVTTGGNLSILAAVLVEPKLHAPMYFFLGNLSVLDVGCITVTVPAMLGRLLSHKSTISYDACLSQLFFFHLLAGMDCFLLTAMAYDRLLAICQPLTYSTRMSQTVQRMLVAASWACAFTNALTHTVAMSTLNFCGPNEVNHFYCDLPQLFQLSCSSTQLNELLLFVAAAFMAVAPLVFISVSYAHVVAAVLQIRSAEGRKKAFSTCGSHLTVVGIFYGTGVFSYMRLGSVESSDKDKGVGVFMTVINPMLNPLIYSLRNTDVQGALCQLLVGKRSLT

SEQ ID NO: 59782 - protein, 344 aa, Homo sapiens
  Payload ID: 11777
  Gene Symbol: OR4A15
  Gene Name: olfactory receptor, family 4, subfamily A, member 15
  Uniprot ID: Q8NGL6
  ENSP ID: ENSP00000325065
MELLTNNLKFITDPFVCRLRHLSPTPSEEHMKNKNNVTEFILLGLTQNPEGQKVLFVTFLLIYMVTIMGNLLIIVTIMASQSLGSPMYFFLASLSFIDTVYSTAFAPKMIVDLLSEKKTISFQGCMAQLFMDHLFAGAEVILLVVMAYDRYMAICKPLHELITMNRRVCVLMLLAAWIGGFLHSLVQFLFIYQLPFCGPNVIDNFLCDLYPLLKLACTNTYVTGLSMIANGGAICAVTFFTILLSYGVILHSLKTQSLEGKRKAFYTCASHVTVVILFFVPCIFLYARPNSTFPIDKSMTVVLTFITPMLNPLIYTLKNAEMKSAMRKLWSKKVSLAGKWLYHS

SEQ ID NO: 59783 - protein, 328 aa, Homo sapiens
  Payload ID: 11778
  Gene Symbol: OR4A16
  Gene Name: olfactory receptor, family 4, subfamily A, member 16
  Uniprot ID: Q8NH70
  ENSP ID: ENSP00000325128
MRPSSNVTEFVLLGLTQDPDVKKTLFVMFLLIYIVTMVGNLLIWVTTIGSPSLGSLMYFFLAYLSLMDAIYSTAMSPKLMIDLLCDKIAISLSACMGQLFIEHLLGGAEVFLLVVMAYDRYVAISKPLHYLNIMNRLVCILLLVVAMIGGFVHSVVQIVFLYSLPICGPNVIDHSVCDMYPLLELLCLDTYFIGLTVVANGGIICMVIFTFLLISCGVILNFLKTYSQEERHKALPTCISHIIVVALVFVPCIFMYVRPVSNFPFDKLMTVFYSIITLMLNPLIYSLRQSEMKNAMKNLWCEKLSIVRKRVSPTLNIFIPSSKATNRR

SEQ ID NO: 59784 - protein, 309 aa, Homo sapiens
  Payload ID: 11779
  Gene Symbol: OR4A47
  Gene Name: olfactory receptor, family 4, subfamily A, member 47
  Uniprot ID: Q6IF82
  ENSP ID: ENSP00000412752
MEPRKNVTDFVLLGFTQNPKEQKVLFVMFLLFYILTMVGNLLIVVTVTVSETLGSPMYFFLAGLSFIDIIYSSSISPRLISGLFFGNNSISFQSCMAQLFIEHIFGGSEVFLLLVMAYDCYVAICKPLHYLVIMRQWVCVVLLVVSWVGGFLHSVFQLSIIYGLPFCGPNVIDHFFCDMYPLLKLVCTDTHAIGLLVVANGGLACTIVFLLLLISYGVILHSLKNLSQKGRQKALSTCSSHMTVVVFFFVPCIFMYARPARTFPIDKSVSVFYTVITPMLNPLIYTLRNSEMTSAMKKLWRRDLISSST

SEQ ID NO: 59785 - protein, 315 aa, Homo sapiens
  Payload ID: 11780
  Gene Symbol: OR4A5
  Gene Name: olfactory receptor, family 4, subfamily A, member 5
  Uniprot ID: Q8NH83
  ENSP ID: ENSP00000367664
MRQNNNITEFVLLGFSQDPGVQKALFVMFLLTYLVTVVGNLLIVVDIIASPSLGSPMYFFLACLSFIDAAYSTTISPKLIVGLFCDKKTISFQGCMGQLFIDHFFGGAEVFLLVVMACDRYVAICKPLHYLTIMNRQVCFLLLVVAMIGGFVHSAFQIVVYSLPFCGPNVIVHFSCDMHPLLELACTDTYFIGLTVVVNSGAICMVIFNLLLISYGVILSSLKTYSQEKRGKALSTCSSGSTVVVLFFVPCIFIYVRPVSNFPTDKFMTVFYTIITHMLSPLIYTLRNSEMRNAIEKLLGKKLTIFIIGGVSVLM

SEQ ID NO: 59786 - protein, 314 aa, Homo sapiens
  Payload ID: 11781
  Gene Symbol: OR4A8
  Gene Name: olfactory receptor, family 4, subfamily A, member 8 (gene/pseudogene)
  ENSP ID: ENSP00000476467
MRQNNNITEFVLLGFSQYPDVQNALFVMFLLIYIVTMVGNLLIVVSIIASPFLGSPVYFFLACLSFIDAVYSTTISPVLIVDLLCDKKTISFPACMGQLFIEHLFGDTDVFLLVVMAYDRYVATCKPLRYLTIMNQVCILLLVVAVTGGFLHSVFQILVVYSLPFCGPNVIYHFFCNIYPLLDLECTDTYFVGLAVVFNGGAICMVIFTLLLISYGVILNSLKTYSPEGRHKAPFICSSHFIMVILFFVPCIFLYVRPVSNFPIDKFLTVFYSVITPKLNPFIYMLRNSEMRNAIENLLGYQSGKTGFRCSKLN

SEQ ID NO: 59787 - protein, 309 aa, Homo sapiens
  Payload ID: 11782
  Gene Symbol: OR4B1
  Gene Name: olfactory receptor, family 4, subfamily B, member 1
  Uniprot ID: Q8NGF8
  ENSP ID: ENSP00000311605
MASTSNVTELIFTGLFQDPAVQSVCFVVFLPVYLATVVGNGLIVLTVSISKSLDSPMYFFLSCLSLVEISYSSTIAPKFIIDLLAKIKTISLEGCLTQIFFFHFFGVAEILLIVVMAYDCYVAICKPLHYMNIISRQLCHLLVAGSWLGGFCHSIIQILVIIQLPFCGPNVIDHYFCDLQPLFKLACTDTFMEGVIVLANSGLFSVFSFLILVSSYIVILVNLRNHSAEGRHKALSTCASHITVVILFFGPAIFLYMRPSSTFTEDKLVAVFYTVITPMLNPIIYTLRNAEVKIAIRRLWSKKENPGRE

SEQ ID NO: 59788 - protein, 310 aa, Homo sapiens
  Payload ID: 11783
  Gene Symbol: OR4C11
  Gene Name: olfactory receptor, family 4, subfamily C, member 11
  Uniprot ID: Q6IEV9
  ENSP ID: ENSP00000306651
MQQNNSVPEFILLGLTQDPLRQKIVFVIFLIFYMGTVVGNMLIIVTIKSSRTLGSPMYFFLFYLSFADSCFSTSTAPRLIVDALSEKKIITYNECMTQVFALHLFGCMEIFVLILMAVDRYVAICKPLRYPTIMSQQVCIILIVLAWIGSLIHSTAQIILALRLPFCGPYLIDHYCCDLQPLLKLACMDTYMINLLLVSNSGAICSSSFMILIISYIVILHSLRNHSAKGKKKALSACTSHIIVVILFFGPCIFIYTRPPTTFPMDKMVAVFYTIGTPFLNPLIYTLRNAEVKNAMRKLWHGKIISENKG

SEQ ID NO: 59789 - protein, 309 aa, Homo sapiens
  Payload ID: 11784
  Gene Symbol: OR4C12
  Gene Name: olfactory receptor, family 4, subfamily C, member 12
  Uniprot ID: Q96R67
  ENSP ID: ENSP00000334418
MEKKKNVTEFILIGLTQNPIMEKVTFVVFLVLYMITLSGNLLIVVTITTSQALSSPMYFFLTHLSLIDTVYSSSSAPKLIVDSFQEKKIISFNGCMAQAYAEHIFGATEIILLTVMACDCYVAICKPLNYTTIMSHSLCILLVAVAWVGGFLHATIQILFTVWLPFCGPNVIGHFMCDLYPLLKLVCIDTHTLGLFVAVNSGFICLLNFLILVVSYVIILRSLKNNSLEGRCKALSTCISHIIVVVLFFVPCIFVYLRSVTTLPIDKAVAVFYTMVVPMLNPVVYTLRNAEVKSAIRKLWRKKVTSDND

SEQ ID NO: 59790 - protein, 309 aa, Homo sapiens
  Payload ID: 11785
  Gene Symbol: OR4C13
  Gene Name: olfactory receptor, family 4, subfamily C, member 13
  Uniprot ID: Q8NGP0
  ENSP ID: ENSP00000452277
MANRNNVTEFILLGLTENPKMQKIIFVVFSVIYINAMIGNVLIVVTITASPSLRSPMYFFLAYLSFIDACYSSVNTPKLITDSLYENKTILFNGCMTQVFGEHFFRGVEVILLTVMAYDHYVAICKPLHYTTVMKQHVCSLLVGVSWVGGFLHATIQILFICQLPFCGPNVIDHFMCDLYTLINLACTNTHTLGLFIAANSGFICLLNCLLLLVSCVVILYSLKTHSLEARHEALSTCVSHITVVILSFIPCIFVYMRPPATLPIDKAVAVFYTMITSMLNPLIYTLRNAQMKNAIRKLCSRKAISSVK

SEQ ID NO: 59791 - protein, 370 aa, Homo sapiens
  Payload ID: 11786
  Gene Symbol: OR4C15
  Gene Name: olfactory receptor, family 4, subfamily C, member 15
  Uniprot ID: Q8NGM1
  ENSP ID: ENSP00000324958
MFSMTTEALNNFALGCTNLLMTMIPQIDLKQIFLCPNCRLYMIPVGAFIFSLGNMQNQSFVTEFVLLGLSQNPNVQEIVFVVFLFVYIATVGGNMLIVVTILSSPALLVSPMYFFLGFLSFLDACFSSVITPKMIVDSLYVTKTISFEGCMMQLFAEHFFAGVEVIVLTAMAYDRYVAICKPLHYSSIMNRRLCGILMGVAWTGGLLHSMIQILFTFQLPFCGPNVINHFMCDLYPLLELACTDTHIFGLMVVINSGFICIINFSLLLVSYAVILLSLRTHSSEGRWKALSTCGSHIAVVILFFVPCIFVYTRPPSAFSLDKMAAIFYIILNPLLNPLIYTFRNKEVKQAMRRIWNRLMVVSDEKENIKL

SEQ ID NO: 59792 - protein, 310 aa, Homo sapiens; identical to SEQ ID NO: 59432
  Payload ID: 11787
  Gene Symbol: OR4C16
  Gene Name: olfactory receptor, family 4, subfamily C, member 16 (gene/pseudogene)
  Uniprot ID: Q8NGL9
  ENSP ID: ENSP00000324913

SEQ ID NO: 59793 - protein, 329 aa, Homo sapiens
  Payload ID: 11788
  Gene Symbol: OR4C3
  Gene Name: olfactory receptor, family 4, subfamily C, member 3
  Uniprot ID: Q8NH37
  ENSP ID: ENSP00000321419
MQLVLLLMFLLVFIGNTAPAFSVTLESMDIPQNITEFFMLGLSQNSEVQRVLFVVFLLIYVVTVCGNMLIVVTITSSPTLASPVYFFLANLSFIDTFYSSSMAPKLIADSLYEGRTISYECCMAQLFGAHFLGGVEIILLTVMAYDRYVAICKPLHNTTIMTRHLCAMLVGVAWLGGFLHSLVQLLLVLWLPFCGPNVINHFACDLYPLLEVACTNTYVIGLLVVANSGLICLLNFLMLAASYIVILYSLRSHSADGRCKALSTCGAHFIVVALFFVPCIFTYVHPFSTLPIDKNMALFYGILTPMLNPLIYTLRNEEVKNAMRKLFTW

SEQ ID NO: 59794 - protein, 199 aa, Homo sapiens [sequence omitted]

SEQ ID NO: 59795 - protein, 309 aa, Homo sapiens
  Payload ID: 11789
  Gene Symbol: OR4C46
  Gene Name: olfactory receptor, family 4, subfamily C, member 46
  Uniprot ID: A6NHA9
  ENSP ID: ENSP00000329056
MENRNNMTEFVLLGLTENPKMQKIIFVVFFVIYIITVVGYVLIVVTITASPSLGSPMYLSLAYLSFIDACYSSVNTPNLITHSLYGKKAILFNGCMTQVFGEHFFGGAEGILLTVMAYDHYVAICKPLHYMTIMNQCVCALLMGVVWMGGFLHATIQILFIFQLPFCGPNVIDHFMCDLNPLLNLACTDTHMLELFIAANSGFICLLNFALLLVSYVVILCSLRTHSLEARHKALSTCVSHITVVILFFVPCIFVYMRPAATLPIDKAVAIFYTMITPMLNPLIYTLKNAQMKNAIRKLCSRKDISGDK

SEQ ID NO: 59796 - protein, 326 aa, Homo sapiens
  Payload ID: 11790
  Gene Symbol: OR4C5
  Gene Name: olfactory receptor, family 4, subfamily C, member 5 (gene/pseudogene)
  Uniprot ID: Q8NGB2
  ENSP ID: ENSP00000321338
MYVSNCNPCAIHRKINYPNTKLDFEQVNNITEFILLGLTQNAEAQKLLFAVFTLIYFLTMVDNLIIVVTITTSPALDSPVYFFLSFFSFIDGCSSSTMAPKMIFDLLTEKKTISFSGCMTQLFVEHFFGGVEIILLVVMAYDCYVAICKPLYYLITMNRQVCGLLVAMAWVGGFLHALIQMLLIVWLPFCGPNVIDHFICDLFPLLKLSCTDTHVFGLFVAANSGLMCMLIFSILITSYVLILCSQRKALSTCAFHITVVVLFFVPCILVYLRPMITFPIDKAVSVFYTVVTPMLNPLIYTLRNTEVKNAMKQLWSQIIWGNNLCD

SEQ ID NO: 59797 - protein, 309 aa, Homo sapiens
  Payload ID: 11791
  Gene Symbol: OR4C6
  Gene Name: olfactory receptor, family 4, subfamily C, member 6
  Uniprot ID: Q8NH72
  ENSP ID: ENSP00000324769
MENQNNVTEFILLGLTENLELWKIFSAVFLVMYVATVLENLLIVVTIITSQSLRSPMYFFLTFLSLLDVMFSSVVAPKVIVDTLSKSTTISLKGCLTQLFVEHFFGGVGIILLTVMAYDRYVAICKPLHYTIIMSPRVCCLMVGGAWVGGFMHAMIQLLFMYQIPFCGPNIIDHFICDLFQLLTLACTDTHILGLLVTLNSGMMCVAIFLILIASYTVILCSLKSYSSKGRHKALSTCSSHLTVVVLFFVPCIFLYMRPVVTHPIDKAMAVSDSIITPMLNPLIYTLRNAEVKSAMKKLWMKWEALAGK

SEQ ID NO: 59798 - protein, 310 aa, Homo sapiens
  Payload ID: 11792
  Gene Symbol: OR4D1
  Gene Name: olfactory receptor, family 4, subfamily D, member 1
  Uniprot ID: Q15615
  ENSP ID: ENSP00000365451
MEPQNTTQVSMFVLLGFSQTQELQKFLFLLFLLVYVTTIVGNLLIMVTVTFDCRLHTPMYFLLRNLALIDLCYSTVTSPKMLVDFLHETKTISYQGCMAQIFFFHLLGGGTVFFLSVMAYDRYIAISQPLRYVTIMNTQLCVGLVVAAWVGGFVHSIVQLALILPLPFCGPNILDNFYCDVPQVLRLACTDTSLLEFLMISNSGLLVIIWFLLLLISYTVILVMLRSHSGKARRKAASTCTTHIIVVSMIFIPCIYIYTWPFTPFLMDKAVSISYTVMTPMLNPMIYTLRNQDMKAAMRRLGKCLVICRE

SEQ ID NO: 59799 - protein, 311 aa, Homo sapiens
  Payload ID: 11793
  Gene Symbol: OR4D10
  Gene Name: olfactory receptor, family 4, subfamily D, member 10
  Uniprot ID: Q8NGI6
  ENSP ID: ENSP00000436424
MEMENCTRVKEFIFLGLTQNREVSLVLFLFLLLVYVTTLLGNLLIMVTVTCESRLHTPMYFLLHNLSIADICFSSITVPKVLVDLLSERKTISFNHCFTQMFLFHLIGGVDVFSLSVMALDRYVAISKPLHYATIMSRDHCIGLTVAAWLGGFVHSIVQISLLLPLPFCGPNVLDTFYCDVHRVLKLAHTDIFILELLMISNNGLLTTLWFFLLLVSYIVILSLPKSQAGEGRRKAISTCTSHITVVTLHFVPCIYVYARPFTALPMDKAISVTFTVISPLLNPLIYTLRNHEMKSAMRRLKRRLVPSDRK

SEQ ID NO: 59800 - protein, 311 aa, Homo sapiens
  Payload ID: 11794
  Gene Symbol: OR4D11
  Gene Name: olfactory receptor, family 4, subfamily D, member 11
  Uniprot ID: Q8NGI4
  ENSP ID: ENSP00000320077
MELGNVTRVKEFIFLGLTQSQDQSLVLFLFLCLVYMTTLLGNLLIMVTVTCESRLHTPMYFLLRNLAILDICFSSTTAPKVLLDLLSKKKTISYTSCMTQIFLFHLLGGADIFSLSVMAFDCYMAISKPLHYVTIMSRGQCTALISASWMGGFVHSIVQISLLLPLPFCGPNVLDTFYCDVPQVLKLTCTDTFALEFLMISNNGLVTTLWFIFLLVSYTVILMTLRSQAGGGRRKAISTCTSHITVVTLHFVPCIYVYARPFTALPTEKAISVTFTVISPLLNPLIYTLRNQEMKSAMRRLKRRLVPSERE

SEQ ID NO: 59801 - protein, 307 aa, Homo sapiens
  Payload ID: 11795
  Gene Symbol: OR4D2
  Gene Name: olfactory receptor, family 4, subfamily D, member 2
  Uniprot ID: P58180
  ENSP ID: ENSP00000441354
METGNLTWVSDFVFLGLSQTRELQRFLFLMFLFVYITTVMGNILIIITVTSDSQLHTPMYFLLRNLAVLDLCFSSVTAPKMLVDLLSEKKTISYQGCMGQIFFFHFLGGAMVFFLSVMAFDRLIAISRPLRYVTVMNTQLWVGLVVATWVGGFVHSIVQLALMLPLPFCGPNILDNFYCDVPQVLRLACTDTSLLEFLKISNSGLLDVVWFFLLLMSYLFILVMLRSHPGEARRKAASTCTTHIIVVSMIFVPSIYLYARPFTPFPMDKLVSIGHTVMTPMLNPMIYTLRNQDMQAAVRRLGRHRLV

SEQ ID NO: 59802 - protein, 318 aa, Homo sapiens
  Payload ID: 11796
  Gene Symbol: OR4D5
  Gene Name: olfactory receptor, family 4, subfamily D, member 5
  Uniprot ID: Q8NGN0
  ENSP ID: ENSP00000305970
MNPANHSQVAGFVLLGLSQVWELRFVFFTVFSAVYFMTVVGNLLIVVIVTSDPHLHTTMYFLLGNLSFLDFCYSSITAPRMLVDLLSGNPTISFGGCLTQLFFFHFIGGIKIFLLTVMAYDRYIAISQPLHYTLIMNQTVCALLMAASWVGGFIHSIVQIALTIQLPFCGPDKLDNFYCDVPQLIKLACTDTFVLELLMVSNNGLVTLMCFLVLLGSYTALLVMLRSHSREGRSKALSTCASHIAVVTLIFVPCIYVYTRPFRTFPMDKAVSVLYTIVTPMLNPAIYTLRNKEVIMAMKKLWRRKKDPIGPLEHRPLH

SEQ ID NO: 59803 - protein, 314 aa, Homo sapiens
  Payload ID: 11797
  Gene Symbol: OR4D6
  Gene Name: olfactory receptor, family 4, subfamily D, member 6
  Uniprot ID: Q8NGJ1
  ENSP ID: ENSP00000300127
MDQINHTNVKEFFFLELTRSRELEFFLFVVFFAVYVATVLGNALIVVTITCESRLHTPMYFLLRNKSVLDIVFSSITVPKFLVDLLSDRKTISYNDCMAQIFFFHFAGGADIFFLSVMAYDRYLAIAKPLHYVTMMRKEVWVALVVASWVSGGLHSIIQVILMLPFPFCGPNTLDAFYCYVLQVVKLACTDTFALELFMISNNGLVTLLWFLLLLGSYTVILVMLRSHSGEGRNKALSTCTSHMLVVTLHFVPCVYIYCRPFMTLPMDTTISINNTVITPMLNPIIYSLRNQEMKSAMQRLQRRLGPSESRKWG

SEQ ID NO: 59804 - protein, 314 aa, Homo sapiens
  Payload ID: 11798
  Gene Symbol: OR4D9
  Gene Name: olfactory receptor, family 4, subfamily D, member 9
  Uniprot ID: Q8NGE8
  ENSP ID: ENSP00000328563
MDQRNYTRVKEFTFLGITQSRELSQVLFTFLFLVYMTTLMGNFLIMVTVTCESHLHTPMYFLLRNLSILDICFSSITAPKVLIDLLSETKTISFSGCVTQMFFFHLLGGADVFSLSVMAFDRYIAISKPLHYMTIMSRGRCTGLIVASWVGGFVHSIAQISLLLPLPFCGPNVLDTFYCDVPQVLKLACTDTFTLELLMISNNGLVSWFVFFFLLISYTVILMMLRSHTGEGRRKAISTCTSHITVVTLHFVPCIYVYARPFTALPTDTAISVTFTVISPLLNPIIYTLRNQEMKLAMRKLKRRLGQSERILIQ

SEQ ID NO: 59805 - protein, 313 aa, Homo sapiens
  Payload ID: 11799
  Gene Symbol: OR4E2
  Gene Name: olfactory receptor, family 4, subfamily E, member 2
  Uniprot ID: Q8NGC2
  ENSP ID: ENSP00000386195
MDSLNQTRVTEFVFLGLTDNRVLEMLFFMAFSAIYMLTLSGNILIIIATVFTPSLHTPMYFFLSNLSFIDICHSSVTVPKMLEGLLLERKTISFDNCITQLFFLHLFACAEIFLLIIMAYDRYVAICTPLHYPNVMNMRVCIQLVFALWLGGTVHSLGQTFLTIRLPYCGPNIIDSYFCDVPLVIKLACTDTYLTGILIVTNSGTISLSCFLAVVTSYMVILVSLRKHSAEGRRKALSTCSAHFMVVALFFGPCIFIYTRPDTSFSIDKVVSVFYTVVTPLLNPFIYTLRNEEVKSAMKQLRQRQVFFTKSYT

SEQ ID NO: 59806 - protein, 312 aa, Homo sapiens
  Payload ID: 11800
  Gene Symbol: OR4F15
  Gene Name: olfactory receptor, family 4, subfamily F, member 15
  Uniprot ID: Q8NGB8
  ENSP ID: ENSP00000333184
MNGMNHSVVSEFVFMGLTNSREIQLLLFVFSLLFYFASMMGNLVIVFTVTMDAHLHSPMYFLLANLSIIDMAFCSITAPKMICDIFKKHKAISFRGCITQIFFSHALGGTEMVLLIAMAFDRYMAICKPLHYLTIMSPRMCLYFLATSSIIGLIHSLVQLVFVVDLPFCGPNIFDSFYCDLPRLLRLACTNTQELEFMVTVNSGLISVGSFVLLVISYIFILFTVWKHSSGGLAKALSTLSAHVTVVILFFGPLMFFYTWPSPTSHLDKYLAIFDAFITPFLNPVIYTFRNKDMKVAMRRLCSRLAHFTKIL

SEQ ID NO: 59807 - protein, 309 aa, Homo sapiens
  Payload ID: 11800
  Gene Symbol: OR4F15
  Gene Name: olfactory receptor, family 4, subfamily F, member 15
  ENSP ID: ENSP00000481880
MDEANHSVVSEFVFLGLSDSRKIQLLLFLFFSVFYVSSLMGNLLIVLTVTSDPRLQSPMYFLLANLSIINLVFCSSTAPKMIYDLFRKHKTISFGGCVVQIFFIHAVGGTEMVLLIAMAFDRYVAICKPLHYLTIMSPRMCLYFLATSSIIGLIHSLVQLVFVVDLPFCGPNIFDSFYCDLPRLLRLACTNTQELEFMVTVNSGLISVGSFVLLVISYIFILFTVWKHSSGGLAKALSTLSAHVTVVILFFGPLMFFYTWPSPTSHLDKYLAIFDAFITPFLNPVIYTFRNKDMKVAMRRLCSRLAFYK

SEQ ID NO: 59808 - protein, 312 aa, Homo sapiens
  Payload ID: 11801
  Gene Symbol: OR4F16
  Gene Name: olfactory receptor, family 4, subfamily F, member 16
  Uniprot ID: Q6IEY1
  ENSP ID: ENSP00000329982
MDGENHSVVSEFLFLGLTHSWEIQLLLLVFSSVLYVASITGNILIVFSVTTDPHLHSPMYFLLASLSFIDLGACSVTSPKMIYDLFRKRKVISFGGCIAQIFFIHVVGGVEMVLLIAMAFDRYVALCKPLHYLTIMSPRMCLSFLAVAWTLGVSHSLFQLAFLVNLAFCGPNVLDSFYCDLPRLLRLACTDTYRLQFMVTVNSGFICVGTFFILLISYVFILFTVWKHSSGGSSKALSTLSAHSTVVLLFFGPPMFVYTRPHPNSQMDKFLAIFDAVLTPFLNPVVYTFRNKEMKAAIKRVCKQLVIYKRIS

SEQ ID NO: 59809 - protein, 305 aa, Homo sapiens
  Payload ID: 11802
  Gene Symbol: OR4F17
  Gene Name: olfactory receptor, family 4, subfamily F, member 17
  Uniprot ID: Q8NGA8
  ENSP ID: ENSP00000315047
MVTEFIFLGLSDSQGLQTFLFMLFFVFYGGIVFGNLLIVITVVSDSHLHSPMYFLLANLSLIDLSLSSVTAPKMITDFFSQRKVISFKGCLVQIFLLHFFGGSEMVILIAMGFDRYIAICKPLHYTTIMCGNACVGIMAVAWGIGFLHSVSQLAFAVHLPFCGPNEVDSFYCDLPRVIKLACTDTYRLDIMVIANSGVLTVCSFVLLIISYTIILMTIQHRPLDKSSKALSTLTAHITVVLLFFGPCVFIYAWPFPIKSLDKFLAVFYSVITPLLNPIIYTLRNKDMKTAIRQLRKWDAHSSVKF

SEQ ID NO: 59810 - protein, 305 aa, Homo sapiens; identical to SEQ ID NO: 59809
  Payload ID: 11802
  Gene Symbol: OR4F17
  Gene Name: olfactory receptor, family 4, subfamily F, member 17
  Uniprot ID: Q8NGA8
  ENSP ID: ENSP00000467301

SEQ ID NO: 59811 - protein, 312 aa, Homo sapiens
  Payload ID: 11803
  Gene Symbol: OR4F21
  Gene Name: olfactory receptor, family 4, subfamily F, member 21
  Uniprot ID: O95013
  ENSP ID: ENSP00000318878
MDGENHSVVSEFLFLGLTHSWEIQLLLLVFSSVLYVASITGNIFIVFSVTTDPHLHSPMYFLLASLSFIDLGACSVTSPKMIYDLFRKRKVISFGGCIAQIFFIHVIGGVEMVLLIAMAFDRYVALCKPLHYLTIMSPRMCLSFLAVAWTLGVSHSLFQLAFLVNLAFCGPNVLDSFYCDLPRLLRLACTDTYRLQFMVTVNSGFICVGTFFILLISYVFILFTVWKHSSGGSSKALSTLSAHSTVVLLFFGPPMFVYTRPHPNSQMDKFLAIFDAVLTPFLNPVVYTFRNKEMKAAIKRVCKQLVIYKKIS

SEQ ID NO: 59812 - protein, 312 aa, Homo sapiens; identical to SEQ ID NO: 59808
  Payload ID: 11804
  Gene Symbol: OR4F29
  Gene Name: olfactory receptor, family 4, subfamily F, member 29
  Uniprot ID: Q6IEY1
  ENSP ID: ENSP00000409316

SEQ ID NO: 59813 - protein, 312 aa, Homo sapiens; identical to SEQ ID NO: 59808
  Payload ID: 11805
  Gene Symbol: OR4F3
  Gene Name: olfactory receptor, family 4, subfamily F, member 3
  Uniprot ID: Q6IEY1
  ENSP ID: ENSP00000394282

SEQ ID NO: 59814 - protein, 305 aa, Homo sapiens
  Payload ID: 11806
  Gene Symbol: OR4F4
  Gene Name: olfactory receptor, family 4, subfamily F, member 4
  Uniprot ID: Q96R69
  ENSP ID: ENSP00000317482
MVTEFIFLGLSDSQELQTFLFMLFFVFYGGIVFGNLLIVITVVSDSHLHSPMYFLLANLSLIDLSLSSVTAPKMITDFFSQRKVISFKGCLVQIFLLHFFGGSEMVILIAMGFDRYIAICKPLHYTTIMCGNACVGIMAVAWGIGFLHSVSQLAFAVHLPFCGPNEVDSFYCDLPRVIKLACTDTYRLDIMVIANSGVLTVCSFVLLIISYTIILMTIQHCPLDKSSKALSTLTAHITVVLLFFGPCVFIYAWPFPIKSLDKFLAVFYSVITPLLNPIIYTLRNKDMKTAIRRLRKWDAHSSVKF

SEQ ID NO: 59815 - protein, 305 aa, Homo sapiens
  Payload ID: 11807
  Gene Symbol: OR4F5
  Gene Name: olfactory receptor, family 4, subfamily F, member 5
  Uniprot ID: Q8NH21
  ENSP ID: ENSP00000334393
MVTEFIFLGLSDSQELQTFLFMLFFVFYGGIVFGNLLIVITVVSDSHLHSPMYFLLANLSLIDLSLSSVTAPKMITDFFSQRKVISFKGCLVQIFLLHFFGGSEMVILIAMGFDRYIAICKPLHYTTIMCGNACVGIMAVTWGIGFLHSVSQLAFAVHLLFCGPNEVDSFYCDLPRVIKLACTDTYRLDIMVIANSGVLTVCSFVLLIISYTIILMTIQHRPLDKSSKALSTLTAHITVVLLFFGPCVFIYAWPFPIKSLDKFLAVFYSVITPLLNPIIYTLRNKDMKTAIRQLRKWDAHSSVKF

SEQ ID NO: 59816 - protein, 312 aa, Homo sapiens
  Payload ID: 11808
  Gene Symbol: OR4F6
  Gene Name: olfactory receptor, family 4, subfamily F, member 6
  Uniprot ID: Q8NGB9
  ENSP ID: ENSP00000327525
MDEANHSVVSEFVFLGLSDSRKIQLLLFLFFSVFYVSSLMGNLLIVLTVTSDPRLQSPMYFLLANLSIINLVFCSSTAPKMIYDLFRKHKTISFGGCVVQIFFIHAVGGTEMVLLIAMAFDRYVAICKPLHYLTIMNPQRCILFLVISWIIGIIHSVIQLAFVVDLLFCGPNELDSFFCDLPRFIKLACIETYTLGFMVTANSGFISLASFLILIISYIFILVTVQKKSSGGIFKAFSMLSAHVIVVVLVFGPLIFFYIFPFPTSHLDKFLAIFDAVITPVLNPVIYTFRNKEMMVAMRRRCSQFVNYSKIF

SEQ ID NO: 59817 - protein, 311 aa, Homo sapiens
  Payload ID: 11809
  Gene Symbol: OR4K1
  Gene Name: olfactory receptor, family 4, subfamily K, member 1
  Uniprot ID: Q8NGD4
  ENSP ID: ENSP00000285600
MAHTNESMVSEFVLLGLSNSWGLQLFFFAIFSIVYVTSVLGNVLIIVIISFDSHLNSPMYFLLSNLSFIDICQSNFATPKMLVDFFIERKTISFEGCMAQIFVLHSFVGSEMMLLVAMAYDRFIAICKPLHYSTIMNRRLCVIFVSISWAVGVLHSVSHLAFTVDLPFCGPNEVDSFFCDLPLVIELACMDTYEMEIMTLTNSGLISLSCFLALIISYTIILIGVRCRSSSGSSKALSTLTAHITVVILFFGPCIYFYIWPFSRLPVDKFLSVFYTVCTPLLNPIIYSLRNEDVKAAMWKLRNRHVNSWKN

SEQ ID NO: 59818 - protein, 304 aa, Homo sapiens
  Payload ID: 11810
  Gene Symbol: OR4K13
  Gene Name: olfactory receptor, family 4, subfamily K, member 13
  Uniprot ID: Q8NH42
  ENSP ID: ENSP00000319322
MERANHSVVSEFILLGLSKSQNLQILFFLGFSVVFVGIVLGNLLILVTVTFDSLLHTPMYFLLSNLSCIDMILASFATPKMIVDFLRERKTISWWGCYSQMFFMHLLGGSEMMLLVAMAIDRYVAICKPLHYMTIMSPRVLTGLLLSSYAVGFVHSSSQMAFMLTLPFCGPNVIDSFFCDLPLVIKLACKDTYILQLLVIADSGLLSLVCFLLLLVSYGVIIFSVRYRAASRSSKAFSTLSAHITVVTLFFAPCVFIYVWPFSRYSVDKILSVFYTIFTPLLNPIIYTLRNQEVKAAIKKRLCI

SEQ ID NO: 59819 - protein, 310 aa, Homo sapiens
  Payload ID: 11811
  Gene Symbol: OR4K14
  Gene Name: olfactory receptor, family 4, subfamily K, member 14
  Uniprot ID: Q8NGD5
  ENSP ID: ENSP00000305011
MDPQNYSLVSEFVLHGLCTSRHLQNFFFIFFFGVYVAIMLGNLLILVTVISDPCLHSSPMYFLLGNLAFLDMWLASFATPKMIRDFLSDQKLISFGGCMAQIFFLHFTGGAEMVLLVSMAYDRYVAICKPLHYMTLMSWQTCIRLVLASWVVGFVHSISQVAFTVNLPYCGPNEVDSFFCDLPLVIKLACMDTYVLGIIMISDSGLLSLSCFLLLLISYTVILLAIRQRAAGSTSKALSTCSAHIMVVTLFFGPCIFVYVRPFSRFSVDKLLSVFYTIFTPLLNPIIYTLRNEEMKAAMKKLQNRRVTFQ

SEQ ID NO: 59820 - protein, 348 aa, Homo sapiens
  Payload ID: 11812
  Gene Symbol: OR4K15
  Gene Name: olfactory receptor, family 4, subfamily K, member 15
  Uniprot ID: Q8NH41
  ENSP ID: ENSP00000304077
MLTSLTDLCFSPIQVAEIKSLPKSMNETNHSRVTEFVLLGLSSSRELQPFLFLTFSLLYLAILLGNFLIILTVTSDSRLHTPMYFLLANLSFIDVCVASFATPKMIADFLVERKTISFDACLAQIFFVHLFTGSEMVLLVSMAYDRYVAICKPLHYMTVMSRRVCVVLVLISWFVGFIHTTSQLAFTVNLPFCGPNKVDSFFCDLPLVTKLACIDTYVVSLLIVADSGFLSLSSFLLLVVSYTVILVTVRNRSSASMAKARSTLTAHITVVTLFFGPCIFIYVWPFSSYSVDKVLAVFYTIFTLILNPVIYTLRNKEVKAAMSKLKSRYLKPSQVSVVIRNVLFLETK

SEQ ID NO: 59821 - protein, 343 aa, Homo sapiens
  Payload ID: 11813
  Gene Symbol: OR4K17
  Gene Name: olfactory receptor, family 4, subfamily K, member 17
  Uniprot ID: Q8NGC6
  ENSP ID: ENSP00000319197
MALYFSLILHGMSDLFFLSTGHPRASCRMEAMKLLNQSQVSEFILLGLTSSQDVEFLLFALFSVIYVVTVLGNLLIIVTVFNTPNLNTPMYFLLGNLSFVDMTLASFATPKVILNLLKKQKVISFAGCFTQIFLLHLLGGVEMVLLVSMAFDRYVAICKPLHYMTIMNKKVCVLLVVTSWLLGLLHSGFQIPFAVNLPFCGPNVVDSIFCDLPLVTKLACIDIYFVQVVIVANSGIISLSCFIILLISYSLILITIKNHSPTGQSKARSTLTAHITVVILFFGPCIFIYIWPFGNHSVDKFLAVFYTIITPILNPIIYTLRNKEMKISMKKLWRAFVNSREDT

SEQ ID NO: 59822 - protein, 314 aa, Homo sapiens
  Payload ID: 11814
  Gene Symbol: OR4K2
  Gene Name: olfactory receptor, family 4, subfamily K, member 2
  Uniprot ID: Q8NGD2
  ENSP ID: ENSP00000298642
MDVGNKSTMSEFVLLGLSNSWELQMFFFMVFSLLYVATMVGNSLIVITVIVDPHLHSPMYFLLTNLSIIDMSLASFATPKMITDYLTGHKTISFDGCLTQIFFLHLFTGTEIILLMAMSFDRYIAICKPLHYASVISPQVCVALVVASWIMGVMHSMSQVIFALTLPFCGPYEVDSFFCDLPVVFQLACVDTYVLGLFMISTSGIIALSCFIVLFNSYVIVLVTVKHHSSRGSSKALSTCTAHFIVVFLFFGPCIFIYMWPLSSFLTDKILSVFYTIFTPTLNPIIYTLRNQEVKIAMRKLKNRFLNFNKAMPS

SEQ ID NO: 59823 - protein, 323 aa, Homo sapiens
  Payload ID: 11815
  Gene Symbol: OR4K5
  Gene Name: olfactory receptor, family 4, subfamily K, member 5
  Uniprot ID: Q8NGD3
  ENSP ID: ENSP00000319511
MDKSNSSVVSEFVLLGLCSSQKLQLFYFCFFSVLYTVIVLGNLLIILTVTSDTSLHSPMYFLLGNLSFVDICQASFATPKMIADFLSAHETISFSGCIAQIFFIHLFTGGEMVLLVSMAYDRYVAICKPLYYVVIMSRRTCTVLVMISWAVSLVHTLSQLSFTVNLPFCGPNVVDSFFCDLPRVTKLACLDSYIIEILIVVNSGILSLSTFSLLVSSYIIILVTVWLKSSAAMAKAFSTLASHIAVVILFFGPCIFIYVWPFTISPLDKFLAIFYTVFTPVLNPIIYTLRNRDMKAAVRKIVNHYLRPRRISEMSLVVRTSFH

SEQ ID NO: 59824 - protein, 312 aa, Homo sapiens
  Payload ID: 11816
  Gene Symbol: OR4L1
  Gene Name: olfactory receptor, family 4, subfamily L, member 1
  Uniprot ID: Q8NH43
  ENSP ID: ENSP00000319217
MDLKNGSLVTEFILLGFFGRWELQIFFFVTFSLIYGATVMGNILIMVTVTCRSTLHSPLYFLLGNLSFLDMCLSTATTPKMIIDLLTDHKTISVWGCVTQMFFMHFFGGAEMTLLIIMAFDRYVAICKPLHYRTIMSHKLLKGFAILSWIIGFLHSISQIVLTMNLPFCGHNVINNIFCDLPLVIKLACIETYTLELFVIADSGLLSFTCFILLLVSYIVILVSVPKKSSHGLSKALSTLSAHIIVVTLFFGPCIFIYVWPFSSLASNKTLAVFYTVITPLLNPSIYTLRNKKMQEAIRKLRFQYVSSAQNF

SEQ ID NO: 59825 - protein, 313 aa, Homo sapiens
  Payload ID: 11817
  Gene Symbol: OR4M1
  Gene Name: olfactory receptor, family 4, subfamily M, member 1
  Uniprot ID: Q8NGD0
  ENSP ID: ENSP00000319654
METANYTKVTEFVLTGLSQTREVQLVLFVIFLSFYLFILPGNILIICTIRLDPHLTSPMYFLLANLALLDIWYSSITAPKMLIDFFVERKIISFGGCIAQLFFLHFVGASEMFLLTVMAYDRYAAICRPLHYATIMNRRLCCILVALSWMGGFIHSIIQVALIVRLPFCGPNELDSYFCDITQVVRIACANTFPEELVMICSSGLISVVCFIALLMSYAFLLALLKKHSGSGENTNRAMSTCYSHITIVVLMFGPSIYIYARPFDSFSLDKVVSVFHTVIFPLLNPIIYTLRNKEVKAAMRKVVTKYILCEEK

SEQ ID NO: 59826 - protein, 313 aa, Homo sapiens
  Payload ID: 11818
  Gene Symbol: OR4M2
  Gene Name: olfactory receptor, family 4, subfamily M, member 2
  Uniprot ID: Q8NGB6
  ENSP ID: ENSP00000483239
METANYTKVTEFVLTGLSQTPEVQLVLFVIFLSFYLFILPGNILIICTISLDPHLTSPMYFLLANLAFLDIWYSSITAPEMLIDFFVERKIISFDGCIAQLFFLHFAGASEMFLLTVMAFDLYTAICRPLHYATIMNQRLCCILVALSWRGGFIHSIIQVALIVRLPFCGPNELDSYFCDITQVVRIACANTFPEELVMICSSGLISVVCLIALLMSYAFLLALFKKLSGSGENTNRAMSTCYSHITIVVLMFGPSIYIYARPFDSFSLDKVVSVFNTLIFPLRNPIIYTLRNKEVKAAMRKLVTKYILCKEK

SEQ ID NO: 59827 - protein, 307 aa, Homo sapiens
  Payload ID: 11819
  Gene Symbol: OR4N2
  Gene Name: olfactory receptor, family 4, subfamily N, member 2
  Uniprot ID: Q8NGD1
  ENSP ID: ENSP00000319601
MESENRTVIREFILLGLTQSQDIQLLVFVLVLIFYFIILPGNFLIIFTIKSDPGLTAPLYFFLGNLAFLDASYSFIVAPRMLVDFLSAKKIISYRGCITQLFFLHFLGGGEGLLLVVMAFDRYIAICRPLHYPTVMNPRTCYAMMLALWLGGFVHSIIQVVLILRLPFCGPNQLDNFFCDVPQVIKLACTDTFVVELLMVFNSGLMTLLCFLGLLASYAVILCRIRGSSSEAKNKAMSTCITHIIVIFFMFGPGIFIYTRPFRAFPADKVVSLFHTVIFPLLNPVIYTLRNQEVKASMKKVFNKHIA

SEQ ID NO: 59828 - protein, 21 aa, Homo sapiens
  Payload ID: 11819
  Gene Symbol: OR4N2
  Gene Name: olfactory receptor, family 4, subfamily N, member 2
  ENSP ID: ENSP00000451462
MESENRTVIREFILLGLTQSQ

SEQ ID NO: 59829 - protein, 146 aa, Homo sapiens
  Payload ID: 11819
  Gene Symbol: OR4N2
  Gene Name: olfactory receptor, family 4, subfamily N, member 2
  ENSP ID: ENSP00000452022
MESENRTVIREFILLGLTQSQDIQLLVFVLVLIFYFIILPGNFLIIFTIKSDPGLTAPLYFFLGNLAFLDASYSFIVAPRMLVDFLSAKKIISYRGCITQLFFLHFLGGGEGLLLVVMAFDRYIAICRPLHYPTVMNPRTCYAMML

SEQ ID NO: 59830 - protein, 316 aa, Homo sapiens
  Payload ID: 11820
  Gene Symbol: OR4N4
  Gene Name: olfactory receptor, family 4, subfamily N, member 4
  Uniprot ID: Q8N0Y3
  ENSP ID: ENSP00000332500
MKIANNTVVTEFILLGLTQSQDIQLLVFVLILIFYLIILPGNFLIIFTIRSDPGLTAPLYLFLGNLAFLDASYSFIVAPRMLVDFLSEKKVISYRGCITQLFFLHFLGGGEGLLLVVMAFDRYIAICRPLHCSTVMNPRACYAMMLALWLGGFVHSIIQVVLILRLPFCGPNQLDNFFCDVRQVIKLACTDMFVVELLMVFNSGLMTLLCFLGLLASYAVILCHVRRAASEGKNKAMSTCTTRVIIILLMFGPAIFIYMCPFRALPADKMVSLFHTVIFPLMNPMIYTLRNQEVKTSMKRLLSRHVVCQVDFIIRN

SEQ ID NO: 59831 - protein, 308 aa, Homo sapiens
  Payload ID: 11821
  Gene Symbol: OR4N5
  Gene Name: olfactory receptor, family 4, subfamily N, member 5
  Uniprot ID: Q8IXE1
  ENSP ID: ENSP00000332110
METQNLTVVTEFILLGLTQSQDAQLLVFVLVLIFYLIILPGNFLIIFTIKSDPGLTAPLYFFLGNLALLDASYSFIVVPRMLVDFLSEKKVISYRSCITQLFFLHFLGAGEMFLLVVMAFDRYIAICRPLHYSTIMNPRACYALSLVLWLGGFIHSIVQVALILHLPFCGPNQLDNFFCDVPQVIKLACTNTFVVELLMVSNSGLLSLLCFLGLLASYAVILCRIREHSSEGKSKAISTCTTHIIIIFLMFGPAIFIYTCPFQAFPADKVVSLFHTVIFPLMNPVIYTLRNQEVKASMRKLLSQHMFC

SEQ ID NO: 59832 - protein, 312 aa, Homo sapiens
  Payload ID: 11822
  Gene Symbol: OR4P4
  Gene Name: olfactory receptor, family 4, subfamily P, member 4
  Uniprot ID: Q8NGL7
  ENSP ID: ENSP00000324831
MEKSNNSTLFILLGFSQNKNIEVLCFVLFLFCYIAIWMGNLLIMISITCTQLIHQPMYFFLNYLSLSDLCYTSTVTPKLMVDLLAERKTISYNNCMIQLFTTHFFGGIEIFILTGMAYDRYVAICKPLHYTIIMSRQKCNTIIIVCCTGGFIHSASQFLLTIFVPFCGPNEIDHYFCDVYPLLKLACSNIHMIGLLVIANSGLIALVTFVVLLLSYVFILYTIRAYSAERRSKALATCSSHVIVVVLFFAPALFIYIRPVTTFSEDKVFALFYTIIAPMFNPLIYTLRNTEMKNAMRKVWCCQILLKRNQLF

SEQ ID NO: 59833 - protein, 310 aa, Homo sapiens
  Payload ID: 11823
  Gene Symbol: OR4Q2
  Gene Name: olfactory receptor, family 4, subfamily Q, member 2 (gene/pseudogene)
  ENSP ID: ENSP00000438013
MDKNQTEVMREFFLSGFSQTPSIEAGLFVLFLFFYMSIWVGNVLIMVTVASDKYLNSSPMYFLLGNLSFLDLCYSTVTTPKLLADFFNHEKLISYDQCIVQLFFLHFVGAAEMFLLTVMAYDRYVAICRPLHYTTVMSRGLCCVLVAASWMGGFVHSTVQTILTVHLPFCGPNQVENFFLCSPCHQTCLCHFCHIAHGIQWVDLHHLLCGADFLLHHYPSQDSLQGRKAKGTLHVCLSPHGGNTVFWTLYFHLRSSFLYIFCGQDGVCTLQCYYPNAKPPHLHTSEQRGKVSHAEALGQKWAYLEKAGDM

SEQ ID NO: 59834 - protein, 307 aa, Homo sapiens
  Payload ID: 11823
  Gene Symbol: OR4Q2
  Gene Name: olfactory receptor, family 4, subfamily Q, member 2 (gene/pseudogene)
  ENSP ID: ENSP00000484287
MDKNQTEVMREFFLSGFSQTPSIEAGLFVLFLFFYMSIWVGNVLIMVTVASDKYLNSSPMYFLLGNLSFLDLCYSTVTTPKLLADFFNHEKLISYDQCIVQLFFLHFVGAAEMFLLTVMAYDRYVAICRPLHYTTVMSRGLCCVLVAASWMGGFVHSTVQTILTVHLPFCGPNQVTFFCDVPPVIKLACADTFVIELLMVSNSGLISTISFVVLISSYTTILVKIRSKEGRRKALSTCASHLMVVTLFFGPCIFIYARPFSTFSVDKMVSVLYNVITPMLNPLIYTLRNKEVKSAMQKLWVKIITFQ

SEQ ID NO: 59835 - protein, 313 aa, Homo sapiens
  Payload ID: 11824
  Gene Symbol: OR4Q3
  Gene Name: olfactory receptor, family 4, subfamily Q, member 3
  Uniprot ID: Q8NH05
  ENSP ID: ENSP00000330049
MKKEQDSNVTEFVLLGLSSSWELQLFLFLLFLFFYIAIVLGNLLIVVTVQAHAHLLQSPMYYFLGHLSFIDLCLSCVTVPKMLGDFLQQGKSISFSGCLAQIYFLHFLGASEMFLLTVMAYDRYVAICNPLRYLTVMNPQLCLWLVLACWCGGFIHSIMQVILVIQLPFCGPNELDNFYCDVPQVIKLACMDTYVVEVLVIANSGLLSLVCFLVLLFSYAIILITLRTHFCQGQNKVFSTCASHLTVVSLIFVPCVFIYLRPFCSFSVDKIFSLFYTVITPMLNPLIYTLRNTDMKTAMKKLRIKPCGIPLPC

SEQ ID NO: 59836 - protein, 309 aa, Homo sapiens
  Payload ID: 11825
  Gene Symbol: OR4S1
  Gene Name: olfactory receptor, family 4, subfamily S, member 1
  Uniprot ID: Q8NGB4
  ENSP ID: ENSP00000321447
MGAKNNVTEFVLFGLFESREMQHTCFVVFFLFHVLTVLGNLLVIITINARKTLKSPMYFFLSQLSFADICYPSTTIPKMIADTFVEHKIISFNGCMTQLFSAHFFGGTEIFLLTAMAYDRYVAICRPLHYTAIMDCRKCGLLAGASWLAGFLHSILQTLLTVQLPFCGPNEIDNFFCDVHPLLKLACADTYMVGLIVVANSGMISLASFFILIISYVIILLNLRSQSSEDRRKAVSTCGSHVITVLLVLMPPMFMYIRPSTTLAADKLIILFNIVMPPLLNPLIYTLRNNDVKNAMRKLFRVKRSLGEK

SEQ ID NO: 59837 - protein, 311 aa, Homo sapiens
  Payload ID: 11826
  Gene Symbol: OR4S2
  Gene Name: olfactory receptor, family 4, subfamily S, member 2
  Uniprot ID: Q8NH73
  ENSP ID: ENSP00000310337
MEKINNVTEFIFWGLSQSPEIEKVCFVVFSFFYIIILLGNLLIMLTVCLSNLFKSPMYFFLSFLSFVDICYSSVTAPKMIVDLLAKDKTISYVGCMLQLFGVHFFGCTEIFILTVMAYDRYVAICKPLHYMTIMNRETCNKMLLGTWVGGFLHSIIQVALVVQLPFCGPNEIDHYFCDVHPVLKLACTETYIVGVVVTANSGTIALGSFVILLISYSIILVSLRKQSAEGRRKALSTCGSHIAMVVIFFGPCTFMYMRPDTTFSEDKMVAVFYTIITPMLNPLIYTLRNAEVKNAMKKLWGRNVFLEAKGK

SEQ ID NO: 59838 - protein, 305 aa, Homo sapiens
  Payload ID: 11827
  Gene Symbol: OR4X1
  Gene Name: olfactory receptor, family 4, subfamily X, member 1 (gene/pseudogene)
  Uniprot ID: Q8NH49
  ENSP ID: ENSP00000321506
MVATNNVTEIIFVGFSQNWSEQRVISVMFLLMYTAVVLGNGLIVVTILASKVLTSPMYFFLSYLSFVEICYCSVMAPKLIFDSFIKRKVISLKGCLTQMFSLHFFGGTEAFLLMVMAYDRYVAICKPLHYMAIMNQRMCGLLVRIAWGGGLLHSVGQTFLIFQLPFCGPNIMDHYFCDVHPVLELACADTFFISLLIITNGGSISVVSFFVLMASYLIILHFLRSHNLEGQHKALSTCASHVTVVDLFFIPCSLVYIRPCVTLPADKIVAVFYTVVTPLLNPVIYSFRNAEVKNAMRRFIGGKVI

SEQ ID NO: 59839 - protein, 305 aa, Homo sapiens; identical to SEQ ID NO: 59838
  Payload ID: 11827
  Gene Symbol: OR4X1
  Gene Name: olfactory receptor, family 4, subfamily X, member 1 (gene/pseudogene)
  Uniprot ID: Q8NH49
  ENSP ID: ENSP00000485255

SEQ ID NO: 59840 - protein, 305 aa, Homo sapiens; identical to SEQ ID NO: 59838
  Payload ID: 11827
  Gene Symbol: OR4X1
  Gene Name: olfactory receptor, family 4, subfamily X, member 1 (gene/pseudogene)
  Uniprot ID: Q8NH49
  ENSP ID: ENSP00000485503

SEQ ID NO: 59841 - protein, 303 aa, Homo sapiens; identical to SEQ ID NO: 59435
  Payload ID: 11828
  Gene Symbol: OR4X2
  Gene Name: olfactory receptor, family 4, subfamily X, member 2 (gene/pseudogene)
  Uniprot ID: Q8NGF9
  ENSP ID: ENSP00000485191

SEQ ID NO: 59842 - protein, 315 aa, Homo sapiens
  Payload ID: 11829
  Gene Symbol: OR5A1
  Gene Name: olfactory receptor, family 5, subfamily A, member 1
  Uniprot ID: Q8NGJ0
  ENSP ID: ENSP00000303096
MSITKAWNSSSVTMFILLGFTDHPELQALLFVTFLGIYLTTLAWNLALIFLIRGDTHLHTPMYFFLSNLSFIDICYSSAVAPNMLTDFFWEQKTISFVGCAAQFFFFVGMGLSECLLLTAMAYDRYAAISSPLLYPTIMTQGLCTRMVVGAYVGGFLSSLIQASSIFRLHFCGPNIINHFFCDLPPVLALSCSDTFLSQVVNFLVVVTVGGTSFLQLLISYGYIVSAVLKIPSAEGRWKACNTCASHLMVVTLLFGTALFVYLRPSSSYLLGRDKVVSVFYSLVIPMLNPLIYSLRNKEIKDALWKVLERKKVFS

SEQ ID NO: 59843 - protein, 324 aa, Homo sapiens
  Payload ID: 11830
  Gene Symbol: OR5A2
  Gene Name: olfactory receptor, family 5, subfamily A, member 2
  Uniprot ID: Q8NGI9
  ENSP ID: ENSP00000303834
MAVGRNNTIVTKFILLGLSDHPQMKIFLFMLFLGLYLLTLAWNLSLIALIKMDSHLHMPMYFFLSNLSFLDICYVSSTAPKMLSDIITEQKTISFVGCATQYFVFCGMGLTECFLLAAMAYDRYAAICNPLLYTVLISHTLCLKMVVGAYVGGFLSSFIETYSVYQHDFCGPYMINHFFCDLPPVLALSCSDTFTSEVVTFIVSVVVGIVSVLVVLISYGYIVAAVVKISSATGRTKAFSTCASHLTAVTLFYGSGFFMYMRPSSSYSLNRDKVVSIFYALVIPVVNPIIYSFRNKEIKNAMRKAMERDPGISHGGPFIFMTLG

SEQ ID NO: 59844 - protein, 299 aa, Homo sapiens
  Payload ID: 11831
  Gene Symbol: OR5AC1
  Gene Name: olfactory receptor, family 5, subfamily AC, member 1 (gene/pseudogene)
  ENSP ID: ENSP00000475160
MAEENKILVTHFVLTGLTDHPGLQAPLFLVFLVIYLITLVGNLGLMALIWKDPHLHTPIYLFLGSLAFADACTSSSVTSKMLINFFIKESYAIHGVCHPVLLFWFQCNHRMLPAGSDGLPLCSHMQSLALSSGDVQPLYSVYRYFIFYWFSAFSDSCGFVIINFLQVQYYTLFLLNFTAVQNFLHQSYSYTSDFHLFSIYTSLHFYDSYRLLLLYSLCHPEKEVEGKQSLLYLQCPSALCLFVLRHPLLHVCEFVWISCRSGQNVFFILHNNNSFTKSFYLQPKEQRGYRCPEKNHEEI

SEQ ID NO: 59845 - protein, 309 aa, Homo sapiens
  Payload ID: 11832
  Gene Symbol: OR5AC2
  Gene Name: olfactory receptor, family 5, subfamily AC, member 2
  Uniprot ID: Q9NZP5
  ENSP ID: ENSP00000351466
MDISEGNKTLVTEFVLTGLTDRPWLHVLFFVVFLVVYLITMVGNLGLIVLIWNDPHLHMPMYLFLGGLAFSDACTSTSITPRMLVNFLDKTAMISLAECITQFYFFASSATTECFLLVMMAYDRYVAICNPLLYPVMMSNKLSAQLLSISYVIGFLHPLVHVSLLLRLTFCRFNIIHYFYCEILQLFKISCNGPSINALMIFIFGAFIQIPTLMTIIISYTRVLFDILKKKSEKGRSKAFSTCGAHLLSVSLYYGTLIFMYVRPASGLAEDQDKVYSLFYTIIIPLLNPFIYSLRNKKVMHALRRVIRK

SEQ ID NO: 59846 - protein, 309 aa, Homo sapiens
  Payload ID: 11833
  Gene Symbol: OR5AK2
  Gene Name: olfactory receptor, family 5, subfamily AK, member 2
  Uniprot ID: Q8NH90
  ENSP ID: ENSP00000322784
MTLGNSTEVTEFYLLGFGAQHEFWCILFIVFLLIYVTSIMGNSGIILLINTDSRFQTLTYFFLQHLAFVDICYTSAITPKMLQSFTEEKNLMLFQGCVIQFLVYATFATSDCYLLAMMAVDPYVAICKPLHYTVIMSRTVCIRLVAGSYIMGSINASVQTGFTCSLSFCKSNSINHFFCDVPPILALSCSNVDINIMLLVVFVGSNLIFTGLVVIFSYIYIMATILKMSSSAGRKKSFSTCASHLTAVTIFYGTLSYMYLQSHSNNSQENMKVAFIFYGTVIPMLNPLIYSLRNKEVKEALKVIGKKLF

SEQ ID NO: 59847 - protein, 311 aa, Homo sapiens
  Payload ID: 11834
  Gene Symbol: OR5AN1
  Gene Name: olfactory receptor, family 5, subfamily AN, member 1
  Uniprot ID: Q8NGI8
  ENSP ID: ENSP00000320302
MTGGGNITEITYFILLGFSDFPRIIKVLFTIFLVIYITSLAWNLSLIVLIRMDSHLHTPMYFFLSNLSFIDVCYISSTVPKMLSNLLQEQQTITFVGCIIQYFIFSTMGLSESCLMTAMAYDRYAAICNPLLYSSIMSPTLCVWMVLGAYMTGLTASLFQIGALLQLHFCGSNVIRHFFCDMPQLLILSCTDTFFVQVMTAILTMFFGIASALVIMISYGYIGISIMKITSAKGRSKAFNTCASHLTAVSLFYTSGIFVYLSSSSGGSSSFDRFASVFYTVVIPMLNPLIYSLRNKEIKDALKRLQKRKCC

SEQ ID NO: 59848 - protein, 316 aa, Homo sapiens
  Payload ID: 11835
  Gene Symbol: OR5AP2
  Gene Name: olfactory receptor, family 5, subfamily AP, member 2
  Uniprot ID: Q8NGF4
  ENSP ID: ENSP00000303111
MRLMKEVRGRNQTEVTEFLLLGLSDNPDLQGVLFALFLLIYMANMVGNLGMIVLIKIDLCLHTPMYFFLSSLSFVDASYSSSVTPKMLVNLMAENKAISFHGCAAQFYFFGSFLGTECFLLAMMAYDRYAAIWNPLLYPVLVSGRICFLLIATSFLAGCGNAAIHTGMTFRLSFCGSNRINHFYCDTPPLLKLSCSDTHFNGIVIMAFSSFIVISCVMIVLISYLCIFIAVLKMPSLEGRHKAFSTCASYLMAVTIFFGTILFMYLRPTSSYSMEQDKVVSVFYTVIIPVLNPLIYSLKNKDVKKALKKILWKHIL

SEQ ID NO: 59849 - protein, 317 aa, Homo sapiens
  Payload ID: 11835
  Gene Symbol: OR5AP2
  Gene Name: olfactory receptor, family 5, subfamily AP, member 2
  ENSP ID: ENSP00000442701
MMRLMKEVRGRNQTEVTEFLLLGLSDNPDLQGVLFALFLLIYMANMVGNLGMIVLIKIDLCLHTPMYFFLSSLSFVDASYSSSVTPKMLVNLMAENKAISFHGCAAQFYFFGSFLGTECFLLAMMAYDRYAAIWNPLLYPVLVSGRICFLLIATSFLAGCGNAAIHTGMTFRLSFCGSNRINHFYCDTPPLLKLSCSDTHFNGIVIMAFSSFIVISCVMIVLISYLCIFIAVLKMPSLEGRHKAFSTCASYLMAVTIFFGTILFMYLRPTSSYSMEQDKVVSVFYTVIIPVLNPLIYSLKNKDVKKALKKILWKHIL

SEQ ID NO: 59850 - protein, 310 aa, Homo sapiens; identical to SEQ ID NO: 59441
  Payload ID: 11836
  Gene Symbol: OR5AR1
  Gene Name: olfactory receptor, family 5, subfamily AR, member 1 (gene/pseudogene)
  Uniprot ID: Q8NGP9
  ENSP ID: ENSP00000485424

SEQ ID NO: 59851 - protein, 324 aa, Homo sapiens
  Payload ID: 11837
  Gene Symbol: OR5AS1
  Gene Name: olfactory receptor, family 5, subfamily AS, member 1
  Uniprot ID: Q8N127
  ENSP ID: ENSP00000324111
MLESNYTMPTEFLFVGFTDYLPLRVTLFLVFLLVYTLTMVGNILLIILVNINSSLQIPMYYFLSNLSFLDISCSTAITPKMLANFLASRKSISPYGCALQMFFFASFADAECLILAAMAYDRYAAICNPLLYTTLMSRRVCVCFIVLAYFSGSTTSLVHVCLTFRLSFCGSNIVNHFFCDIPPLLALSCTDTQINQLLLFALCSFIQTSTFVVIFISYFCILITVLSIKSSGGRSKTFSTCASHLIAVTLFYGALLFMYLQPTTSYSLDTDKVVAVFYTVVFPMFNPIIYSFRNKDVKNALKKLLERIGYSNEWYLNRLRIVNI

SEQ ID NO: 59852 - protein, 362 aa, Homo sapiens
  Payload ID: 11838
  Gene Symbol: OR5AU1
  Gene Name: olfactory receptor, family 5, subfamily AU, member 1
  Uniprot ID: Q8NGC0
  ENSP ID: ENSP00000302057
MTEFHLQSQMPSIRLIFRRLSLGRIKPSQSPRCSTSFMVVPSFSIAEHWRRMKGANLSQGMEFELLGLTTDPQLQRLLFVVFLGMYTATLLGNLVMFLLIHVSATLHTPMYSLLKSLSFLDFCYSSTVVPQTLVNFLAKRKVISYFGCMTQMFFYAGFATSECYLIAAMAYDRYAAICNPLLYSTIMSPEVCASLIVGSYSAGFLNSLIHTGCIFSLKFCGAHVVTHFFCDGPPILSLSCVDTSLCEILLFIFAGFNLLSCTLTILISYFLILNTILKMSSAQGRFKAFSTCASHLTAICLFFGTTLFMYLRPRSSYSLTQDRTVAVIYTVVIPVLNPLMYSLRNKDVKKALIKVWGRKTME

SEQ ID NO: 59853 - protein, 314 aa, Homo sapiens
  Payload ID: 11839
  Gene Symbol: OR5B12
  Gene Name: olfactory receptor, family 5, subfamily B, member 12
  Uniprot ID: Q96R08
  ENSP ID: ENSP00000306657
MENNTEVTEFILVGLTDDPELQIPLFIVFLFIYLITLVGNLGMIELILLDSCLHTPMYFFLSNLSLVDFGYSSAVTPKVMVGFLTGDKFILYNACATQFFFFVAFITAESFLLASMAYDRYAALCKPLHYTTTMTTNVCACLAIGSYICGFLNASIHTGNTFRLSFCRSNVVEHFFCDAPPLLTLSCSDNYISEMVIFFVVGFNDLFSILVILISYLFIFITIMKMRSPEGRQKAFSTCASHLTAVSIFYGTGIFMYLRPNSSHFMGTDKMASVFYAIVIPMLNPLVYSLRNKEVKSAFKKTVGKAKASIGFIF

SEQ ID NO: 59854 - protein, 314 aa, Homo sapiens
  Payload ID: 11840
  Gene Symbol: OR5B17
  Gene Name: olfactory receptor, family 5, subfamily B, member 17
  Uniprot ID: Q8NGF7
  ENSP ID: ENSP00000349945
MENNTEVSEFILLGLTNAPELQVPLFIMFTLIYLITLTGNLGMIILILLDSHLHTPMYFFLSNLSLAGIGYSSAVTPKVLTGLLIEDKAISYSACAAQMFFCAVFATVENYLLSSMAYDRYAAVCNPLHYTTTMTTRVCACLAIGCYVIGFLNASIQIGDTFRLSFCMSNVIHHFFCDKPAVITLTCSEKHISELILVLISSFNVFFALLVTLISYLFILITILKRHTGKGYQKPLSTCGSHLIAIFLFYITVIIMYIRPSSSHSMDTDKIASVFYTMIIPMLSPIVYTLRNKDVKNAFMKVVEKAKYSLDSVF

SEQ ID NO: 59855 - protein, 309 aa, Homo sapiens
  Payload ID: 11841
  Gene Symbol: OR5B2
  Gene Name: olfactory receptor, family 5, subfamily B, member 2
  Uniprot ID: Q96R09
  ENSP ID: ENSP00000303076
MENCTEVTKFILLGLTSVPELQIPLFILFTFIYLLTLCGNLGMMLLILMDSCLHTPMYFFLSNLSLVDFGYSSAVTPKVMAGFLRGDKVISYNACAVQMFFFVALATVENYLLASMAYDRYAAVCKPLHYTTTMTASVGACLALGSYVCGFLNASFHIGGIFSLSFCKSNLVHHFFCDVPAVMALSCSDKHTSEVILVFMSSFNIFFVLLVIFISYLFIFITILKMHSAKGHQKALSTCASHFTAVSVFYGTVIFIYLQPSSSHSMDTDKMASVFYAMIIPMLNPVVYSLRNREVQNAFKKVLRRQKFL

SEQ ID NO: 59856 - protein, 309 aa, Homo sapiens
  Payload ID: 11842
  Gene Symbol: OR5B21
  Gene Name: olfactory receptor, family 5, subfamily B, member 21
  Uniprot ID: A6NL26
  ENSP ID: ENSP00000353537
MENSTEVTEFILLGLTDDPNLQIPLLLAFLFIYLITLLGNGGMMVIIHSDSHLHTPMYFFLSNLSLVDLGYSSAVAPKTVAALRSGDKAISYDGCAAQFFFFVGFATVECYLLASMAYDRHAAVCRPLHYTTTMTAGVCALLATGSYVSGFLNASIHAAGTFRLSFCGSNEINHFFCDIPPLLALSCSDTRISKLVVFVAGFNVFFTLLVILISYFFICITIQRMHSAEGQKKVFSTCASHLTALSIFYGTIIFMYLQPNSSQSVDTDKIASVFYTVVIPMLNPLIYSLRNKEVKSALWKILNKLYPQY

SEQ ID NO: 59857 - protein, 314 aa, Homo sapiens
  Payload ID: 11843
  Gene Symbol: OR5B3
  Gene Name: olfactory receptor, family 5, subfamily B, member 3
  Uniprot ID: Q8NH48
  ENSP ID: ENSP00000308270
MENKTEVTQFILLGLTNDSELQVPLFITFPFIYIITLVGNLGIIVLIFWDSCLHNPMYFFLSNLSLVDFCYSSAVTPIVMAGFLIEDKVISYNACAAQMYIFVAFATVENYLLASMAYDRYAAVCKPLHYTTTMTTTVCARLAIGSYLCGFLNASIHTGDTFSLSFCKSNEVHHFFCDIPAVMVLSCSDRHISELVLIYVVSFNIFIALLVILISYTFIFITILKMHSASVYQKPLSTCASHFIAVGIFYGTIIFMYLQPSSSHSMDTDKMAPVFYTMVIPMLNPLVYSLRNKEVKSAFKKVVEKAKLSVGWSV

SEQ ID NO: 59858 - protein, 320 aa, Homo sapiens
  Payload ID: 11844
  Gene Symbol: OR5C1
  Gene Name: olfactory receptor, family 5, subfamily C, member 1
  Uniprot ID: Q8NGR4
  ENSP ID: ENSP00000362784
MNSENLTRAAVAPAEFVLLGITNRWDLRVALFLTCLPVYLVSLLGNMGMALLIRMDARLHTPMYFFLANLSLLDACYSSAIGPKMLVDLLLPRATIPYTACALQMFVFAGLADTECCLLAAMAYDRYVAIRNPLLYTTAMSQRLCLALLGASGLGGAVSAFVHTTLTFRLSFCRSRKINSFFCDIPPLLAISCSDTSLNELLLFAICGFIQTATVLAITVSYGFIAGAVIHMRSVEGSRRAASTGGSHLTAVAMMYGTLIFMYLRPSSSYALDTDKMASVFYTLVIPSLNPLIYSLRNKEVKEALRQTWSRFHCPGQGSQ

SEQ ID NO: 59859 - protein, 314 aa, Homo sapiens
  Payload ID: 11845
  Gene Symbol: OR5D13
  Gene Name: olfactory receptor, family 5, subfamily D, member 13 (gene/pseudogene)
  Uniprot ID: Q8NGL4
  ENSP ID: ENSP00000354800
MMASERNQSSTPTFILLGFSEYPEIQVPLFLVFLFVYTVTVVGNLGMIIIIRLNSKLHTIMCFFLSHLSLTDFCFSTVVTPKLLENLVVEYRTISFSGCIMQFCFACIFGVTETFMLAAMAYDRFVAVCKPLLYTTIMSQKLCALLVAGSYTWGIVCSLILTYFLLDLSFCESTFINNFICDHSVIVSASYSDPYISQRLCFIIAIFNEVSSLIIILTSYMLIFTTIMKMRSASGRQKTFSTCASHLTAITIFHGTILFLYCVPNPKTSSLIVTVASVFYTVAIPMLNPLIYSLRNKDINNMFEKLVVTKLIYH

SEQ ID NO: 59860 - protein, 314 aa, Homo sapiens
  Payload ID: 11846
  Gene Symbol: OR5D14
  Gene Name: olfactory receptor, family 5, subfamily D, member 14
  Uniprot ID: Q8NGL3
  ENSP ID: ENSP00000334456
MMMVLRNLSMEPTFALLGFTDYPKLQIPLFLVFLLMYVITVVGNLGMIIIIKINPKFHTPMYFFLSHLSFVDFCYSSIVTPKLLENLVMADKSIFYFSCMMQYFLSCTAVVTESFLLAVMAYDRFVAICNPLLYTVAMSQRLCALLVAGSYLWGMFGPLVLLCYALRLNFSGPNVINHFFCEYTALISVSGSDILIPHLLLFSFATFNEMCTLLIILTSYVFIFVTVLKIRSVSGRHKAFSTWASHLTSITIFHGTILFLYCVPNSKNSRQTVKVASVFYTVVNPMLNPLIYSLRNKDVKDAFWKLIHTQVPFH

SEQ ID NO: 59861 - protein, 328 aa, Homo sapiens
  Payload ID: 11847
  Gene Symbol: OR5D16
  Gene Name: olfactory receptor, family 5, subfamily D, member 16
  Uniprot ID: Q8NGK9
  ENSP ID: ENSP00000367649
MFLTERNTTSEATFTLLGFSDYLELQIPLFFVFLAVYGFSVVGNLGMIVIIKINPKLHTPMYFFLNHLSFVDFCYSSIIAPMMLVNLVVEDRTISFSGCLVQFFFFCTFVVTELILFAVMAYDHFVAICNPLLYTVAISQKLCAMLVVVLYAWGVACSLTLACSALKLSFHGFNTINHFFCELSSLISLSYPDSYLSQLLLFTVATFNEISTLLIILTSYAFIIVTTLKMPSASGHRKVFSTCASHLTAITIFHGTILFLYCVPNSKNSRHTVKVASVFYTVVIPLLNPLIYSLRNKDVKDAIRKIINTKYFHIKHRHWYPFNFVIEQ

SEQ ID NO: 59862 - protein, 313 aa, Homo sapiens
  Payload ID: 11848
  Gene Symbol: OR5D18
  Gene Name: olfactory receptor, family 5, subfamily D, member 18
  Uniprot ID: Q8NGL1
  ENSP ID: ENSP00000335025
MLLTDRNTSGTTFTLLGFSDYPELQVPLFLVFLAIYNVTVLGNIGLIVIIKINPKLHTPMYFFLSQLSFVDFCYSSIIAPKMLVNLVVKDRTISFLGCVVQFFFFCTFVVTESFLLAVMAYDRFVAICNPLLYTVNMSQKLCVLLVVGSYAWGVSCSLELTCSALKLCFHGFNTINHFFCEFSSLLSLSCSDTYINQWLLFFLATFNEISTLLIVLTSYAFIVVTILKMRSVSGRRKAFSTCASHLTAITIFHGTILFLYCVPNSKNSRHTVKVASVFYTVVIPMLNPLIYSLRNKDVKDTVTEILDTKVFSY

SEQ ID NO: 59863 - protein, 314 aa, Homo sapiens
  Payload ID: 11849
  Gene Symbol: OR5F1
  Gene Name: olfactory receptor, family 5, subfamily F, member 1
  Uniprot ID: O95221
  ENSP ID: ENSP00000278409
MTRKNYTSLTEFVLLGLADTLELQIILFLFFLVIYTLTVLGNLGMILLIRIDSQLHTPMYFFLANLSFVDVCNSTTITPKMLADLLSEKKTISFAGCFLQMYFFISLATTECILFGLMAYDRYAAICRPLLYSLIMSRTVYLKMAAGAFAAGLLNFMVNTSHVSSLSFCDSNVIHHFFCDSPPLFKLSCSDTILKESISSILAGVNIVGTLLVILSSYSYVLFSIFSMHSGEGRHRAFSTCASHLTAIILFYATCIYTYLRPSSSYSLNQDKVASVFYTVVIPMLNPLIYSLRSKEVKKALANVISRKRTSSFL

SEQ ID NO: 59864 - protein, 293 aa, Homo sapiens
  Payload ID: 11850
  Gene Symbol: OR5G3
  Gene Name: olfactory receptor, family 5, subfamily G, member 3 (gene/pseudogene)
  ENSP ID: ENSP00000477337
NQTVVTEFLLLGLTDHPYQKIVLFFMFLFVYLITLGGNLGMITLIWIDPRLHTPMYFFLRHLSFVDICSSSSVVPKMLCNIFAEKKDITFLGCAAQMWFFGLFEAAECFLWLPWHMTGMWPSASPCCIRSLCLSRSVCSWWGLMPWLLAPLIQFSLFAYPFVVQILSITFSVIFFHCFPHVQTPGINLCCLSWLELEYSVVSSWSPIFASPSRSRLLMGSKKLSSPVFLTLRLSPSCMGLFSFMFGQVQVPPWVSIKFLYFILWSPWLTPLFTAGIRRKMHSEEKLRGKNLLV

SEQ ID NO: 59865 - protein, 296 aa, Homo sapiens
  Payload ID: 11850
  Gene Symbol: OR5G3
  Gene Name: olfactory receptor, family 5, subfamily G, member 3 (gene/pseudogene)
  ENSP ID: ENSP00000485881
MEDKNQTVVTEFLLLGLTDHPYQKIVLFFMFLFVYLITLGGNLGMITLIWIDPRLHTPMYFFLRHLSFVDICSSSSVVPKMLCNIFAEKKDITFLGCAAQMWFFGLFEAAECFLWLPWHMTGMWPSASPCCIRSLCLSRSVCSWWGLMPWLLAPLIQFSLFAYPFVVQILSITFSVIFFHCFPHVQTPGINLCCLSWLELEYSVVSSWSPIFASPSRSRLLMGSKKLSSPVFLTLRLSPSCMGLFSFMFGQVQVPPWVSIKFLYFILWSPWLTPLFTAGIRRKMHSEEKLRGKNLL

SEQ ID NO: 59866 - protein, 313 aa, Homo sapiens
  Payload ID: 11851
  Gene Symbol: OR5H1
  Gene Name: olfactory receptor, family 5, subfamily H, member 1
  Uniprot ID: A6NKK0
  ENSP ID: ENSP00000346575
MEEENATLLTEFVLTGFLYQPQWKIPLFLAFLVIYLITIMGNLGLIAVIWKDPHLHIPMYLLLGNLAFVDAWISSTVTPKMLNNFLAKSKMISLSECKIQFFSFAISVTTECFLLATMAYDRYVAICKPLLYPAIMTNGLCIRLLILSYVGGILHALIHEGFLFRLTFCNSNIVHHIYCDTIPLSKISCTDSSINFLMVFIFSGSIQVFSIVTILVSYTFVLFAILKKKSDKGVRKAFSTCGAHLFSVSLYYGPLLFIYVGPASPQADDQDMVEPLFYTVIIPLLNPIIYSLRNKQVTVSFTKMLKKHVKVSY

SEQ ID NO: 59867 - protein, 310 aa, Homo sapiens
  Payload ID: 11852
  Gene Symbol: OR5H14
  Gene Name: olfactory receptor, family 5, subfamily H, member 14
  Uniprot ID: A6NHG9
  ENSP ID: ENSP00000401706
MEEENATLLTEFVLTGFLYQPQWKIPLFLAFLVIYLITIMGNLGLIAVIWKDPHLHIPMYLLLGNLAFVDALLSSSVTLKMLINFLAKSKMISLSECKIQLFSFAISVTTECFLLATMAYDRYVAICKPLLYPAIMTNGLCIRLLILSYVGGLLHALIHEGFLFRLTFCNSNIIQHFYCDIIPLLKISYTDSSINFLMVFIFAGSIQVFTIGTVLISYIFVLYTILKKKSVKGMRKAFSTCGAHLLSVSLYYGPLAFMYMGSASPQADDQDMMESLFYTVIVPLLNPMIYSLRNKQVIASFTKMFKRNDV

SEQ ID NO: 59868 - protein, 313 aa, Homo sapiens
  Payload ID: 11853
  Gene Symbol: OR5H15
  Gene Name: olfactory receptor, family 5, subfamily H, member 15
  Uniprot ID: A6NDH6
  ENSP ID: ENSP00000373195
MEEENATLLTEFVLTGFLYQPQWKIPLFLAFLVIYLITIMGNLGLIAVIWKDPHLHIPMYLLLGNLAFVDAWISSTVTPKMLNNFLAKSKMISLSECKIQFFSIAIGVTTECFLLATMAYDRYVAICKPLLYPAIMTNGLCIRLLILSYIAGILHALIHEGFLFRLTFCNSNIVHHIYCDTIPLSKISCTDSSINFLMVFIFSGSIQVFSIVTILISYTFVLFTVLEKKSDKGVRKAFSTCGAHLFSVCLYYGPLLLMYVGPASPQADGQNMVEPLFYTVIIPLLNPIIYSLRNKQVIVSFIKMLKRNVKVSY

SEQ ID NO: 59869 - protein, 310 aa, Homo sapiens
  Payload ID: 11853
  Gene Symbol: OR5H15
  Gene Name: olfactory receptor, family 5, subfamily H, member 15
  ENSP ID: ENSP00000480705
MEEENATLLTEFVLTGFLYQPQWKIPLFLAFLVIYLITIMGNLGLIAVIWKDPHLHIPMYLLLGNLAFVDAWISSTVTPKMLNNFLAKSKMISLSECKIQFFSIAIGVTTECFLLATMAYDRYVAICKPLLYPAIMTNGLCIRLLILSYIAGILHALIHEGFLFRLTFCNSNIVHHIYCDTIPLSKISCTDSSINFLMVFIFSGSIQVFTIGTVLVSYTFVLSTILKKKSVKGIRKDFSTCGAHILPVSLYYGPLAFMYVGSASQRADDQDMMESLFYTVIVPLLNPMIYSLRNKQVIDSFTKMFKGNNV

SEQ ID NO: 59870 - protein, 314 aa, Homo sapiens
  Payload ID: 11854
  Gene Symbol: OR5H2
  Gene Name: olfactory receptor, family 5, subfamily H, member 2
  Uniprot ID: Q8NGV7
  ENSP ID: ENSP00000347418
MSNEDMEQDNTTLLTEFVLTGLTYQPEWKMPLFLVFLVIYLITIVWNLGLIALIWNDPQLHIPMYFFLGSLAFVDAWISSTVTPKMLVNFLAKNRMISLSECMIQFFSFAFGGTTECFLLATMAYDRYVAICKPLLYPVIMNNSLCIRLLAFSFLGGFLHALIHEVLIFRLTFCNSNIIHHFYCDIIPLFMISCTDPSINFLMVFILSGSIQVFTIVTVLNSYTFALFTILKKKSVRGVRKAFSTCGAHLLSVSLYYGPLIFMYLRPASPQADDQDMIDSVFYTIIIPLLNPIIYSLRNKQVIDSFTKMVKRNV

SEQ ID NO: 59871 - protein, 325 aa, Homo sapiens
  Payload ID: 11855
  Gene Symbol: OR5H6
  Gene Name: olfactory receptor, family 5, subfamily H, member 6 (gene/pseudogene)
  Uniprot ID: Q8NGV6
  ENSP ID: ENSP00000373196
MFLYLCFIFQRTCSEEMEEENATLLTEFVLTGFLHQPDCKIPLFLAFLVIYLITIMGNLGLIVLIWKDPHLHIPMYLFLGSLAFVDASLSSTVTPKMLINFLAKSKMISLSECMVQFFSLVTTVTTECFLLATMAYDRYVAICKALLYPVIMTNELCIQLLVLSFIGGLLHALIHEAFSFRLTFCNSNIIQHFYCDIIPLLKISCTDSSINFLMVFIFAGSVQVFTIGTILISYTIILFTILEKKSIKGIRKAVSTCGAHLLSVSLYYGPLTFKYLGSASPQADDQDMMESLFYTVIVPLLNPMIYSLRNKQVIASFTKMFKSNV

SEQ ID NO: 59872 - protein, 325 aa, Homo sapiens; identical to SEQ ID NO: 59871
  Payload ID: 11855
  Gene Symbol: OR5H6
  Gene Name: olfactory receptor, family 5, subfamily H, member 6 (gene/pseudogene)
  Uniprot ID: Q8NGV6
  ENSP ID: ENSP00000485045

SEQ ID NO: 59873 - protein, 325 aa, Homo sapiens; identical to SEQ ID NO: 59871
  Payload ID: 11855
  Gene Symbol: OR5H6
  Gene Name: olfactory receptor, family 5, subfamily H, member 6 (gene/pseudogene)
  Uniprot ID: Q8NGV6
  ENSP ID: ENSP00000485611

SEQ ID NO: 59874 - protein, 308 aa, Homo sapiens
  Payload ID: 11856
  Gene Symbol: OR5H8
  Gene Name: olfactory receptor, family 5, subfamily H, member 8 (gene/pseudogene)
  ENSP ID: ENSP00000476186
MDDENATLLTEFVLTGLTYQSEWKIPLFLAFLVIYLITIMANLGLIAVIWKDSHLHIPMYLFLGSLAFVDAWLSSSVTPKMLISFLAKSMIISVSECKIQFFSFGISGTTECFLLATMAYDRYVAICKPLLYPVIMTNGLCIWLLVLSFIGGFLHALIHEGILFRLTFCNSNIIHHFYCDIIPLLKISCTDPSINFLMLFILSGSIQVFTILTVLVSYTFVLFTILKKKVCQRHKESLFHLWSPSLICFFILWPPSLHVCAPCISTSRSRYGGVSILHCHNSFLKSHYLQPEKASHRFTDKNIKRKCL

SEQ ID NO: 59875 - protein, 314 aa, Homo sapiens
  Payload ID: 11857
  Gene Symbol: OR5I1
  Gene Name: olfactory receptor, family 5, subfamily I, member 1
  Uniprot ID: Q13606
  ENSP ID: ENSP00000301532
MEFTDRNYTLVTEFILLGFPTRPELQIVLFLMFLTLYAIILIGNIGLMLLIRIDPHLQTPMYFFLSNLSFVDLCYFSDIVPKMLVNFLSENKSISYYGCALQFYFFCTFADTESFILAAMAYDRYVAICNPLLYTVVMSRGICMRLIVLSYLGGNMSSLVHTSFAFILKYCDKNVINHFFCDLPPLLKLSCTDTTINEWLLSTYGSSVEIICFIIIIISYFFILLSVLKIRSFSGRKKTFSTCASHLTSVTIYQGTLLFIYSRPSYLYSPNTDKIISVFYTIFIPVLNPLIYSLRNKDVKDAAEKVLRSKVDSS

SEQ ID NO: 59876 - protein, 312 aa, Homo sapiens
  Payload ID: 11858
  Gene Symbol: OR5J2
  Gene Name: olfactory receptor, family 5, subfamily J, member 2
  Uniprot ID: Q8NH18
  ENSP ID: ENSP00000310788
MADDNFTVVTEFILLGLTDHAELKAVLFVVFLVIYAITLLRNLGMILLIQITSKLHTPMYFLLSCLSFVDACYSSAIAPKMLVNLLVVKATISFSACMVQHLCFGVFITTEGFLLSVMAYDRYVAIVSPLLYTVAMSDRKCVELVTGSWIGGIVNTLIHTISLRRLSFCRLNAVSHFFCDIPSLLKLSCSDTSMNELLLLTFSGVIAMATFLTVIISYIFIAFASLRIHSASGRQQAFSTCASHLTAVTIFYGTLIFSYIQPSSQYFVEQEKVVSMFYTLGIPMLNLLIHSLRNKDVKEAVKRAIEMKHFLC

SEQ ID NO: 59877 - protein, 308 aa, Homo sapiens
  Payload ID: 11859
  Gene Symbol: OR5K1
  Gene Name: olfactory receptor, family 5, subfamily K, member 1
  Uniprot ID: Q8NHB7
  ENSP ID: ENSP00000373193
MAEENHTMKNEFILTGFTDHPELKTLLFVVFFAIYLITVVGNISLVALIFTHRRLHTPMYIFLGNLALVDSCCACAITPKMLENFFSENKRISLYECAVQFYFLCTVETADCFLLAAMAYDRYVAICNPLQYHIMMSKKLCIQMTTGAFIAGNLHSMIHVGLVFRLVFCGSNHINHFYCDILPLYRLSCVDPYINELVLFIFSGSVQVFTIGSVLISYLYILLTIFKMKSKEGRAKAFSTCASHFLSVSLFYGSLFFMYVRPNLLEEGDKDIPAAILFTIVVPLLNPFIYSLRNREVISVLRKILMKK

SEQ ID NO: 59878 - protein, 316 aa, Homo sapiens
  Payload ID: 11860
  Gene Symbol: OR5K2
  Gene Name: olfactory receptor, family 5, subfamily K, member 2
  Uniprot ID: Q8NHB8
  ENSP ID: ENSP00000393889
MVEENHTMKNEFILTGFTDHPELKTLLFVVFFAIYLITVVGNISLVALIFTHCRLHTPMYIFLGNLALVDSCCACAITPKMLENFFSEGKRISLYECAVQFYFLCTVETADCFLLAAVAYDRYVAICNPLQYHIMMSKKLCIQMTTGAFIAGNLHSMIHVGLVFRLVFCGLNHINHFYCDTLPLYRLSCVDPFINELVLFIFSGSVQVFTIGSVLISYLYILLTIFRMKSKEGRAKAFSTCASHFSSVSLFYGSIFFLYIRPNLLEEGGNDIPAAILFTIVVPLLNPFIYSLRNKEVISVLRKILLKIKSQGSVNK

SEQ ID NO: 59879 - protein, 321 aa, Homo sapiens
  Payload ID: 11861
  Gene Symbol: OR5K3
  Gene Name: olfactory receptor, family 5, subfamily K, member 3
  Uniprot ID: A6NET4
  ENSP ID: ENSP00000373194
MNKENHSLIAEFILTGFTYHPKLKTVLFVVFFAIYLITMVGNIGLVALIYIEQRLHTPMYIFLGNLVLMDSCCSSAITPKMLENFFSEDKRITLYECMAQFYFLCLAETTDCFLLAAMAYDCYVAICNPLQYHTMMSKTLCIQMTAGAYLAGNLHPMIEVEFLLRLTFCGSHQINHFFCDVLPLYRLSCINPYINELVLFILAGSIQIFTIVLVSYFYILFTIFTMKSKEGRGKALSTCASHFLSVSIFCDSLLFMYARPGAVNEGDKDIPVAIFYTLVIPLLNPFIYSLRNKEVINIMKKIMKKRKFCHILKQMSSPLAT

SEQ ID NO: 59880 - protein, 321 aa, Homo sapiens
  Payload ID: 11862
  Gene Symbol: OR5K4
  Gene Name: olfactory receptor, family 5, subfamily K, member 4
  Uniprot ID: A6NMS3
  ENSP ID: ENSP00000347003
MARENHSLAAEFILIGFTNYPELKTLLFVVFSAIYLVTMVGNLGLVALIYVERRLLTPMYIFLGNLALMDSCCSCAVTPKMLENFFSEDRIISLYECMAQFYFLCLAETTDCFLLATMAYDRYVAICHPLQYHTMMSKTLCIRMTTGAFKAGNLHSMIHVGLLLRLTFCRSNKIHHFFCDILPLYRLSCTDPSINELMIYIFSIPIQIFTIATVLISYLCILLTVFKMKSKEGRGKAFSTCASHFLSVSIFYICLLMYIGPSEEGDKDTPVAIFYAIVIPLLNPFIYSLRNKEVINVLKKIMRNYNILKQTCSIANLFLIY

SEQ ID NO: 59881 - protein, 311 aa, Homo sapiens; identical to SEQ ID NO: 59443
  Payload ID: 11863
  Gene Symbol: OR5L1
  Gene Name: olfactory receptor, family 5, subfamily L, member 1 (gene/pseudogene)
  Uniprot ID: Q8NGL2
  ENSP ID: ENSP00000335529

SEQ ID NO: 59882 - protein, 311 aa, Homo sapiens
  Payload ID: 11864
  Gene Symbol: OR5L2
  Gene Name: olfactory receptor, family 5, subfamily L, member 2
  Uniprot ID: Q8NGL0
  ENSP ID: ENSP00000367650
MGKENCTTVAEFILLGLSDVPELRVCLFLLFLLIYGVTLLANLGMTALIQVSSRLHTPVYFFLSHLSFVDFCYSSIIVPKMLANIFNKDKAISFLGCMVQFYLFCTCGVTEVFLLAVMAYDRFVAICNPLLYMVTMSQKLRVELTSCCYFCGTVCSLIHSSLALRILFYRSNVINHFFCDLPPLLSLACSDVTVNETLLFLVATLNESVTIMIILTSYLLILTTILKIHSAESRHKAFSTCASHLTAITVSHGTILYIYCRPSSGNSGDVDKVATVFYTVVIPMLNPLIYSLRNKDVNKALRKVMGSKIHS

SEQ ID NO: 59883 - protein, 315 aa, Homo sapiens
  Payload ID: 11865
  Gene Symbol: OR5M1
  Gene Name: olfactory receptor, family 5, subfamily M, member 1
  Uniprot ID: Q8NGP8
  ENSP ID: ENSP00000435416
MFSPNHTIVTEFILLGLTDDPVLEKILFGVFLAIYLITLAGNLCMILLIRTNSHLQTPMYFFLGHLSFVDICYSSNVTPNMLHNFLSEQKTISYAGCFTQCLLFIALVITEFYILASMALDRYVAICSPLHYSSRMSKNICVCLVTIPYMYGFLSGFSQSLLTFHLSFCGSLEINHFYCADPPLIMLACSDTRVKKMAMFVVAGFNLSSSLFIILLSYLFIFAAIFRIRSAEGRHKAFSTCASHLTIVTLFYGTLFCMYVRPPSEKSVEESKITAVFYTFLSPMLNPLIYSLRNTDVILAMQQMIRGKSFHKIAV

SEQ ID NO: 59884 - protein, 315 aa, Homo sapiens
  Payload ID: 11866
  Gene Symbol: OR5M10
  Gene Name: olfactory receptor, family 5, subfamily M, member 10
  Uniprot ID: Q6IEU7
  ENSP ID: ENSP00000436004
MLSPNHTIVTEFILLGLTDDPVLEKILFGVFLAIYLITLAGNLCMILLIRTNSQLQTPMYFFLGHLSFVDICYSSNVTPNMLHNFLSEQKTISYAGCFTQCLLFIALVITEFYFLASMALDRYVAICSPLHYSSRMSKNICISLVTVPYMYGFLNGLSQTLLTFHLSFCGSLEINHFYCADPPLIMLACSDTRVKKMAMFVVAGFTLSSSLFIILLSYLFIFAAIFRIRSAEGRHKAFSTCASHLTIVTLFYGTLFCMYVRPPSEKSVEESKIIAVFYTFLSPMLNPLIYSLRNRDVILAIQQMIRGKSFCKIAV

SEQ ID NO: 59885 - protein, 305 aa, Homo sapiens
  Payload ID: 11867
  Gene Symbol: OR5M11
  Gene Name: olfactory receptor, family 5, subfamily M, member 11
  Uniprot ID: Q96RB7
  ENSP ID: ENSP00000432417
MSNTNGSAITEFILLGLTDCPELQSLLFVLFLVVYLVTLLGNLGMIMLMRLDSRLHTPMYFFLTNLAFVDLCYTSNATPQMSTNIVSEKTISFAGCFTQCYIFIALLLTEFYMLAAMAYDRYVAIYDPLRYSVKTSRRVCICLATFPYVYGFSDGLFQAILTFRLTFCRSSVINHFYCADPPLIKLSCSDTYVKEHAMFISAGFNLSSSLTIVLVSYAFILAAILRIKSAEGRHKAFSTCGSHMMAVTLFYGTLFCMYIRPPTDKTVEESKIIAVFYTFVSPVLNPLIYSLRNKDVKQALKNVLR

SEQ ID NO: 59886 - protein, 307 aa, Homo sapiens
  Payload ID: 11868
  Gene Symbol: OR5M3
  Gene Name: olfactory receptor, family 5, subfamily M, member 3
  Uniprot ID: Q8NGP4
  ENSP ID: ENSP00000312208
MLNFTDVTEFILLGLTSRREWQVLFFIIFLVVYIITMVGNIGMMVLIKVSPQLNNPMYFFLSHLSFVDVWFSSNVTPKMLENLLSDKKTITYAGCLVQCFFFIALVHVEIFILAAMAFDRYMAIGNPLLYGSKMSRVVCIRLITFPYIYGFLTSLAATLWTYGLYFCGKIEINHFYCADPPLIKMACAGTFVKEYTMIILAGINFTYSLTVIIISYLFILIAILRMRSAEGRQKAFSTCGSHLTAVIIFYGTLIFMYLRRPTEESVEQGKMVAVFYTTVIPMLNPMIYSLRNKDVKKAMMKVISRSC

SEQ ID NO: 59887 - protein, 311 aa, Homo sapiens
  Payload ID: 11869
  Gene Symbol: OR5M8
  Gene Name: olfactory receptor, family 5, subfamily M, member 8
  Uniprot ID: Q8NGP6
  ENSP ID: ENSP00000323354
MRRNCTLVTEFILLGLTSRRELQILLFTLFLAIYMVTVAGNLGMIVLIQANAWLHMPMYFFLSHLSFVDLCFSSNVTPKMLEIFLSEKKSISYPACLVQCYLFIALVHVEIYILAVMAFDRYMAICNPLLYGSRMSKSVCSFLITVPYVYGALTGLMETMWTYNLAFCGPNEINHFYCADPPLIKLACSDTYNKELSMFIVAGWNLSFSLFIICISYLYIFPAILKIRSTEGRQKAFSTCGSHLTAVTIFYATLFFMYLRPPSKESVEQGKMVAVFYTTVIPMLNLIIYSLRNKNVKEALIKELSMKIYFS

SEQ ID NO: 59888 - protein, 310 aa, Homo sapiens
  Payload ID: 11870
  Gene Symbol: OR5M9
  Gene Name: olfactory receptor, family 5, subfamily M, member 9
  Uniprot ID: Q8NGP3
  ENSP ID: ENSP00000279791
MPNFTDVTEFTLLGLTCRQELQVLFFVVFLAVYMITLLGNIGMIILISISPQLQSPMYFFLSHLSFADVCFSSNVTPKMLENLLSETKTISYVGCLVQCYFFIAVVHVEVYILAVMAFDRYMAGCNPLLYGSKMSRTVCVRLISVPYVYGFSVSLICTLWTYGLYFCGNFEINHFYCADPPLIQIACGRVHIKEITMIVIAGINFTYSLSVVLISYTLIVVAVLRMRSADGRRKAFSTCGSHLTAVSMFYGTPIFMYLRRPTEESVEQGKMVAVFYTTVIPMLNPMIYSLRNKDVKEAVNKAITKTYVRQ

SEQ ID NO: 59889 - protein, 322 aa, Homo sapiens
  Payload ID: 11871
  Gene Symbol: OR5P2
  Gene Name: olfactory receptor, family 5, subfamily P, member 2
  Uniprot ID: Q8WZ92
  ENSP ID: ENSP00000331823
MNSLKDGNHTALTGFILLGLTDDPILRVILFMIILSGNLSIIILIRISSQLHHPMYFFLSHLAFADMAYSSSVTPNMLVNFLVERNTVSYLGCAIQLGSAAFFATVECVLLAAMAYDRFVAICSPLLYSTKMSTQVSVQLLLVVYIAGFLIAVSYTTSFYFLLFCGPNQVNHFFCDFAPLLELSCSDISVSTVVLSFSSGSIIVVTVCVIAVCYIYILITILKMRSTEGHHKAFSTCTSHLTVVTLFYGTITFIYVMPNFSYSTDQNKVVSVLYTVVIPMLNPLIYSLRNKEIKGALKRELVRKILSHDACYFSRTSNNDIT

SEQ ID NO: 59890 - protein, 322 aa, Homo sapiens; identical to SEQ ID NO: 59889
  Payload ID: 11871
  Gene Symbol: OR5P2
  Gene Name: olfactory receptor, family 5, subfamily P, member 2
  Uniprot ID: Q8WZ92
  ENSP ID: ENSP00000480613

SEQ ID NO: 59891 - protein, 322 aa, Homo sapiens; identical to SEQ ID NO: 59889
  Payload ID: 11871
  Gene Symbol: OR5P2
  Gene Name: olfactory receptor, family 5, subfamily P, member 2
  Uniprot ID: Q8WZ92
  ENSP ID: ENSP00000486671

SEQ ID NO: 59892 - protein, 311 aa, Homo sapiens
  Payload ID: 11872
  Gene Symbol: OR5P3
  Gene Name: olfactory receptor, family 5, subfamily P, member 3
  Uniprot ID: Q8WZ94
  ENSP ID: ENSP00000332068
MGTGNDTTVVEFTLLGLSEDTTVCAILFLVFLGIYVVTLMGNISIIVLIRRSHHLHTPMYIFLCHLAFVDIGYSSSVTPVMLMSFLRKETSLPVAGCVAQLCSVVTFGTAECFLLAAMAYDRYVAICSPLLYSTCMSPGVCIILVGMSYLGGCVNAWTFIGCLLRLSFCGPNKVNHFFCDYSPLLKLACSHDFTFEIIPAISSGSIIVATVCVIAISYIYILITILKMHSTKGRHKAFSTCTSHLTAVTLFYGTITFIYVMPKSSYSTDQNKVVSVFYTVVIPMLNPLIYSLRNKEIKGALKRELRIKIFS

SEQ ID NO: 59893 - protein, 311 aa, Homo sapiens; identical to SEQ ID NO: 59892
  Payload ID: 11872
  Gene Symbol: OR5P3
  Gene Name: olfactory receptor, family 5, subfamily P, member 3
  Uniprot ID: Q8WZ94
  ENSP ID: ENSP00000482237

SEQ ID NO: 59894 - protein, 311 aa, Homo sapiens; identical to SEQ ID NO: 59892
  Payload ID: 11872
  Gene Symbol: OR5P3
  Gene Name: olfactory receptor, family 5, subfamily P, member 3
  Uniprot ID: Q8WZ94
  ENSP ID: ENSP00000486070

SEQ ID NO: 59895 - protein, 324 aa, Homo sapiens; identical to SEQ ID NO: 59445
  Payload ID: 11873
  Gene Symbol: OR5R1
  Gene Name: olfactory receptor, family 5, subfamily R, member 1 (gene/pseudogene)
  Uniprot ID: Q8NH85
  ENSP ID: ENSP00000308595

SEQ ID NO: 59896 - protein, 326 aa, Homo sapiens
  Payload ID: 11874
  Gene Symbol: OR5T1
  Gene Name: olfactory receptor, family 5, subfamily T, member 1
  Uniprot ID: Q8NG75
  ENSP ID: ENSP00000323612
MSGLPSDMDLYKLQLNNFTEVTMFILISFTEEFDVQVFLFLLFLAIYLFTLIGNLGLVVPIIGDFWLHSPMYYFLGVLSFLDVCYSTVVTPKMLVNFLAKNKSISFLGCATQMFLACTFGTTECFLLAAMAYDRYVAIYNPLLYSVSMSPRVYVPLITASYVASILHATIHTVATFSLSFCGSNEIRHVFCNMPPLLAISCSDTHVIQLLFFYFVGSIEIVTILIVLISYGFILLAILKMQSAEGRRKVFSTCGAHLTGVTIYHGTILFMYVRPSSSYTSDNDMIVSIFYTIVIPMLNPIIYSLRNKDVKEAIKRLLVRNWFINKL

SEQ ID NO: 59897 - protein, 326 aa, Homo sapiens; identical to SEQ ID NO: 59896
  Payload ID: 11874
  Gene Symbol: OR5T1
  Gene Name: olfactory receptor, family 5, subfamily T, member 1
  Uniprot ID: Q8NG75
  ENSP ID: ENSP00000459132

SEQ ID NO: 59898 - protein, 359 aa, Homo sapiens
  Payload ID: 11875
  Gene Symbol: OR5T2
  Gene Name: olfactory receptor, family 5, subfamily T, member 2
  Uniprot ID: Q8NGG2
  ENSP ID: ENSP00000323688
MSYSIYKSTVNIPLSHGVVHSFCHNMNCNFMHIFKFVLDFNMKNVTEVTLFVLKGFTDNLELQTIFFFLFLAIYLFTLMGNLGLILVVIRDSQLHKPMYYFLSMLSSVDACYSSVITPNMLVDFTTKNKVISFLGCVAQVFLACSFGTTECFLLAAMAYDRYVAIYNPLLYSVSMSPRVYMPLINASYVAGILHATIHTVATFSLSFCGANEIRRVFCDIPPLLAISYSDTHTNQLLLFYFVGSIELVTILIVLISYGLILLAILKMYSAEGRRKVFSTCGAHLTGVSIYYGTILFMYVRPSSSYASDHDMIVSIFYTIVIPLLNPVIYSLRNKDVKDSMKKMFGKNQVINKVYFHTKK

SEQ ID NO: 59899 - protein, 359 aa, Homo sapiens; identical to SEQ ID NO: 59898
  Payload ID: 11875
  Gene Symbol: OR5T2
  Gene Name: olfactory receptor, family 5, subfamily T, member 2
  Uniprot ID: Q8NGG2
  ENSP ID: ENSP00000460931

SEQ ID NO: 59900 - protein, 340 aa, Homo sapiens
  Payload ID: 11876
  Gene Symbol: OR5T3
  Gene Name: olfactory receptor, family 5, subfamily T, member 3
  Uniprot ID: Q8NGG3
  ENSP ID: ENSP00000305403
MDSTFTGYNLYNLQVKTEMDKLSSGLDIYRNPLKNKTEVTMFILTGFTDDFELQVFLFLLFFAIYLFTLIGNLGLVVLVIEDSWLHNPMYYFLSVLSFLDACYSTVVTPKMLVNFLAKNKSISFIGCATQMLLFVTFGTTECFLLAAMAYDHYVAIYNPLLYSVSMSPRVYVPLITASYVAGILHATIHIVATFSLSFCGSNEIRHVFCDMPPLLAISCSDTHTNQLLLFYFVGSIEIVTILIVLISCDFILLSILKMHSAKGRQKAFSTCGSHLTGVTIYHGTILVSYMRPSSSYASDHDIIVSIFYTIVIPKLNPIIYSLRNKEVKKAVKKMLKLVYK

SEQ ID NO: 59901 - protein, 340 aa, Homo sapiens; identical to SEQ ID NO: 59900
  Payload ID: 11876
  Gene Symbol: OR5T3
  Gene Name: olfactory receptor, family 5, subfamily T, member 3
  Uniprot ID: Q8NGG3
  ENSP ID: ENSP00000459586

SEQ ID NO: 59902 - protein, 321 aa, Homo sapiens
  Payload ID: 11877
  Gene Symbol: OR5V1
  Gene Name: olfactory receptor, family 5, subfamily V, member 1
  Uniprot ID: Q9UGF6
  ENSP ID: ENSP00000230223
MERKNQTAITEFIILGFSNLNEWQFLLFTIFFLTYFCTLGGNILIILTTVTDPHLHTPMYYFLGNLAFIDICYTTSNVPQMMVHLLSKKKSISYVGCVVQLFAFVFFVGSECLLLAAMAYDRYIAICNPLRYSVILSKVLCNQLAASCWAAGFLNSVVHTVLTFCLPFCGNNQINYFFCDIPPLLILSCGNTSVNELALLSTGVFIGWTPFLCIVLSYICIISTILRIQSSEGRRKAFSTCASHLAIVFLFYGSAIFTYVRPISTYSLKKDRLVSVLYSVVTPMLNPIIYTLRNKDIKEAVKTIGSKWQPPISSLDSKLTY

SEQ ID NO: 59903 - protein, 321 aa, Homo sapiens
  Payload ID: 11877
  Gene Symbol: OR5V1
  Gene Name: olfactory receptor, family 5, subfamily V, member 1
  Uniprot ID: Q9UGF6
  ENSP ID: ENSP00000366359
MERKNQTAITEFIILGFSNLNELQFLLFTIFFLTYFCTLGGNILIILTTVTDPHLHTPMYYFLGNLAFIDICYTTSNVPQMMVHLLSKKKSISYVGCVVQLFAFVFFVGSECLLLAAMAYDRYIAICNPLRYSVILSKVLCNQLAASCWAAGFLNSVVHTVLTFCLPFCGNNQINYFFCDIPPLLILSCGNTSVNELALLSTGVFIGWTPFLCIVLSYICIISTILRIQSSEGRRKAFSTCASHLAIVFLFYGSAIFTYVRPISTYSLKKDRLVSVLYSVVTPMLNPIIYTLRNKDIKEAVKTIGSKWQPPISSLDSKLTY

SEQ ID NO: 59904 - protein, 321 aa, Homo sapiens; identical to SEQ ID NO: 59902
  Payload ID: 11877
  Gene Symbol: OR5V1
  Gene Name: olfactory receptor, family 5, subfamily V, member 1
  Uniprot ID: Q9UGF6
  ENSP ID: ENSP00000383534

SEQ ID NO: 59905 - protein, 321 aa, Homo sapiens; identical to SEQ ID NO: 59903
  Payload ID: 11877
  Gene Symbol: OR5V1
  Gene Name: olfactory receptor, family 5, subfamily V, member 1
  Uniprot ID: Q9UGF6
  ENSP ID: ENSP00000404109

SEQ ID NO: 59906 - protein, 321 aa, Homo sapiens; identical to SEQ ID NO: 59903
  Payload ID: 11877
  Gene Symbol: OR5V1
  Gene Name: olfactory receptor, family 5, subfamily V, member 1
  Uniprot ID: Q9UGF6
  ENSP ID: ENSP00000404163

SEQ ID NO: 59907 - protein, 321 aa, Homo sapiens; identical to SEQ ID NO: 59903
  Payload ID: 11877
  Gene Symbol: OR5V1
  Gene Name: olfactory receptor, family 5, subfamily V, member 1
  Uniprot ID: Q9UGF6
  ENSP ID: ENSP00000404990

SEQ ID NO: 59908 - protein, 321 aa, Homo sapiens; identical to SEQ ID NO: 59903
  Payload ID: 11877
  Gene Symbol: OR5V1
  Gene Name: olfactory receptor, family 5, subfamily V, member 1
  Uniprot ID: Q9UGF6
  ENSP ID: ENSP00000407363

SEQ ID NO: 59909 - protein, 321 aa, Homo sapiens
  Payload ID: 11877
  Gene Symbol: OR5V1
  Gene Name: olfactory receptor, family 5, subfamily V, member 1
  Uniprot ID: Q9UGF6
  ENSP ID: ENSP00000412591
MERKNQTAITEFIILGFSNLNELQFLLFTIFFLTYFCTLGGNILMILTTVTDPHLHTPMYYFLGNLAFIDICYTTSNVPQMMVHLLSKKKSISYVGCVVQLFAFVFFVGSECLLLAAMAYDRYIAICNPLRYSVILSKVLCNQLAASCWAAGFLNSVVHTVLTFCLPFCGNNQINYFFCDIPPLLILSCGNTSVNELALLSTGVFIGWTPFLCIVLSYICIISTILRIQSSEGRRKAFSTCASHLAIVFLFYGSAIFTYVRPISTYSLKKDRLVSVLYSVVTPMLNPIIYTLRNKDIKEAVKTIGSKWQPPISSLDSKLTY

SEQ ID NO: 59910 - protein, 321 aa, Homo sapiens; identical to SEQ ID NO: 59909
  Payload ID: 11877
  Gene Symbol: OR5V1
  Gene Name: olfactory receptor, family 5, subfamily V, member 1
  Uniprot ID: Q9UGF6
  ENSP ID: ENSP00000415545

SEQ ID NO: 59911 - protein, 321 aa, Homo sapiens; identical to SEQ ID NO: 59903
  Payload ID: 11877
  Gene Symbol: OR5V1
  Gene Name: olfactory receptor, family 5, subfamily V, member 1
  Uniprot ID: Q9UGF6
  ENSP ID: ENSP00000443309

SEQ ID NO: 59912 - protein, 321 aa, Homo sapiens; identical to SEQ ID NO: 59903
  Payload ID: 11877
  Gene Symbol: OR5V1
  Gene Name: olfactory receptor, family 5, subfamily V, member 1
  Uniprot ID: Q9UGF6
  ENSP ID: ENSP00000446579

SEQ ID NO: 59913 - protein, 321 aa, Homo sapiens; identical to SEQ ID NO: 59909
  Payload ID: 11877
  Gene Symbol: OR5V1
  Gene Name: olfactory receptor, family 5, subfamily V, member 1
  Uniprot ID: Q9UGF6
  ENSP ID: ENSP00000449041

SEQ ID NO: 59914 - protein, 321 aa, Homo sapiens; identical to SEQ ID NO: 59903
  Payload ID: 11877
  Gene Symbol: OR5V1
  Gene Name: olfactory receptor, family 5, subfamily V, member 1
  Uniprot ID: Q9UGF6
  ENSP ID: ENSP00000450230

SEQ ID NO: 59915 - protein, 310 aa, Homo sapiens
  Payload ID: 11878
  Gene Symbol: OR5W2
  Gene Name: olfactory receptor, family 5, subfamily W, member 2
  Uniprot ID: Q8NH69
  ENSP ID: ENSP00000342448
MDWENCSSLTDFFLLGITNNPEMKVTLFAVFLAVYIINFSANLGMIVLIRMDYQLHTPMYFFLSHLSFCDLCYSTATGPKMLVDLLAKNKSIPFYGCALQFLVFCIFADSECLLLSVMAFDRYKAIINPLLYTVNMSSRVCYLLLTGVYLVGIADALIHMTLAFRLCFCGSNEINHFFCDIPPLLLLSRSDTQVNELVLFTVFGFIELSTISGVFISYCYIILSVLEIHSAEGRFKALSTCTSHLSAVAIFQGTLLFMYFRPSSSYSLDQDKMTSLFYTLVVPMLNPLIYSLRNKDVKEALKKLKNKILF

SEQ ID NO: 59916 - protein, 313 aa, Homo sapiens
  Payload ID: 11879
  Gene Symbol: OR51A2
  Gene Name: olfactory receptor, family 51, subfamily A, member 2
  Uniprot ID: Q8NGJ7
  ENSP ID: ENSP00000369729
MSIINTSYVEITTFFLVGMPGLEYAHIWISIPICSMYLIAILGNGTILFIIKTEPSLHGPMYYFLSMLAMSDLGLSLSSLPTVLSIFLFNAPETSSSACFAQEFFIHGFSVLESSVLLIMSFDRFLAIHNPLRYTSILTTVRVAQIGIVFSFKSMLLVLPFPFTLRSLRYCKKNQLSHSYCLHQDVMKLACSDNRIDVIYGFFGALCLMVDFILIAVSYTLILKTVPGIASKKEELKALNTCVSHICAVIIFYLPIINLAVVHRFAGHVSPLINVLMANVLLLVPPLMKPIVYCVKTKQIRVRVVAKLCQWKI

SEQ ID NO: 59917 - protein, 313 aa, Homo sapiens
  Payload ID: 11880
  Gene Symbol: OR51A4
  Gene Name: olfactory receptor, family 51, subfamily A, member 4
  Uniprot ID: Q8NGJ6
  ENSP ID: ENSP00000369731
MSIINTSYVEITTFFLVGMPGLEYAHIWISIPICSMYLIAILGNGTILFIIKTEPSLHEPMYYFLSMLAMSDLGLSLSSLPTVLSIFLFNAPEISSNACFAQEFFIHGFSVLESSVLLIMSFDRFLAIHNPLRYTSILTTVRVAQIGIVFSFKSMLLVLPFPFTLRNLRYCKKNQLSHSYCLHQDVMKLACSDNRIDVIYGFFGALCLMVDFILIAVSYTLILKTVLGIASKKEQLKALNTCVSHICAVIIFYLPIINLAVVHRFARHVSPLINVLMANVLLLVPPLTNPIVYCVKTKQIRVRVVAKLCQRKI

SEQ ID NO: 59918 - protein, 312 aa, Homo sapiens
  Payload ID: 11881
  Gene Symbol: OR51A7
  Gene Name: olfactory receptor, family 51, subfamily A, member 7
  Uniprot ID: Q8NH64
  ENSP ID: ENSP00000352305
MSVLNNSEVKLFLLIGIPGLEHAHIWFSIPICLMYLLAIMGNCTILFIIKTEPSLHEPMYYFLAMLAVSDMGLSLSSLPTMLRVFLFNAMGISPNACFAQEFFIHGFTVMESSVLLIMSLDRFLAIHNPLRYSSILTSNRVAKMGLILAIRSILLVIPFPFTLRRLKYCQKNLLSHSYCLHQDTMKLACSDNKTNVIYGFFIALCTMLDLALIVLSYVLILKTILSIASLAERLKALNTCVSHICAVLTFYVPIITLAAMHHFAKHKSPLVVILIADMFLLVPPLMNPIVYCVKTRQIWEKILGKLLNVCGR

SEQ ID NO: 59919 - protein, 312 aa, Homo sapiens
  Payload ID: 11882
  Gene Symbol: OR51B2
  Gene Name: olfactory receptor, family 51, subfamily B, member 2 (gene/pseudogene)
  Uniprot ID: Q9Y5P1
  ENSP ID: ENSP00000327540
MWPNITAAPFLLTGFPGLEAAHHWISIPFFAVYVCILLGNGMLLYLIKHDHSLHEPMYYFLTMLAGTDLMVTLTTMPTVMGILWVNHREISSVGCFLQAYFIHSLSVVESGSLLAMAYDCFIAIRNPLRYASILTNTRVIALGVGVFLRGFVSILPVILRLFSFSYCKSHVITRAFCLHQEIMRLACADITFNRLYPVILISLTIFLDCLIILFSYILILNTVIGIASGEERAKALNTCISHISCVLIFYVTVMGLTFIYRFGKNVPEVVHIIMSYIYFLFPPLMNPVIYSIKTKQIQYGIIRLLSKHRFSS

SEQ ID NO: 59920 - protein, 312 aa, Homo sapiens; identical to SEQ ID NO: 59919
  Payload ID: 11882
  Gene Symbol: OR51B2
  Gene Name: olfactory receptor, family 51, subfamily B, member 2 (gene/pseudogene)
  Uniprot ID: Q9Y5P1
  ENSP ID: ENSP00000485407

SEQ ID NO: 59921 - protein, 312 aa, Homo sapiens; identical to SEQ ID NO: 59919
  Payload ID: 11882
  Gene Symbol: OR51B2
  Gene Name: olfactory receptor, family 51, subfamily B, member 2 (gene/pseudogene)
  Uniprot ID: Q9Y5P1
  ENSP ID: ENSP00000485415

SEQ ID NO: 59922 - protein, 310 aa, Homo sapiens
  Payload ID: 11883
  Gene Symbol: OR51B4
  Gene Name: olfactory receptor, family 51, subfamily B, member 4
  Uniprot ID: Q9Y5P0
  ENSP ID: ENSP00000369573
MWYNNSAGPFLLTGFLGSEAVHYRISMSFFVIYFSVLFGNGTLLVLIWNDHSLHEPMYYFLAMLADTDLGMTFTTMPTVLGVLLLDQREIAHAACFTQSFIHSLAIVESGILLVLAYDCFIAIRTPLRYNCILTNSRVMNIGLGVLMRGFMSILPIILSLYCYPYCGSRALLHTFCLHQDVIKLACADITFNHIYPIIQTSLTVFLDALIIIFSYILILKTVMGIASGQEEAKSLNTCVSHISCVLVFHITVMGLSFIHRFGKHAPHVVPITMSYVHFLFPPFVNPIIYSIKTKQIQRSIIRLFSGQSRA

SEQ ID NO: 59923 - protein, 312 aa, Homo sapiens
  Payload ID: 11884
  Gene Symbol: OR51B5
  Gene Name: olfactory receptor, family 51, subfamily B, member 5
  Uniprot ID: Q9H339
  ENSP ID: ENSP00000300773
MSSSGSSHPFLLTGFPGLEEAHHWISVFFLFMYISILFGNGTLLLLIKEDHNLHEPMYFFLAMLAATDLGLALTTMPTVLGVLWLDHREIGSAACFSQAYFIHSLSFLESGILLAMAYDRFIAICNPLRYTSVLTNTRVVKIGLGVLMRGFVSVVPPIRPLYFFLYCHSHVLSHAFCLHQDVIKLACADTTFNRLYPAVLVVFIFVLDYLIIFISYVLILKTVLSIASREERAKALITCVSHICCVLVFYVTVIGLSLIHRFGKQVPHIVHLIMSYAYFLFPPLMNPITYSVKTKQIQNAILHLFTTHRIGT

SEQ ID NO: 59924 - protein, 312 aa, Homo sapiens
  Payload ID: 11885
  Gene Symbol: OR51B6
  Gene Name: olfactory receptor, family 51, subfamily B, member 6
  Uniprot ID: Q9H340
  ENSP ID: ENSP00000369568
MGLNKSASTFQLTGFPGMEKAHHWIFIPLLAAYISILLGNGTLLFLIRNDHNLHEPMYYFLAMLAATDLGVTLTTMPTVLGVLWLDHREIGHGACFSQAYFIHTLSVMESGVLLAMAYDCFITIRSPLRYTSILTNTQVMKIGVRVLTRAGLSIMPIVVRLHWFPYCRSHVLSHAFCLHQDVIKLACADITFNRLYPVVVLFAMVLLDFLIIFFSYILILKTVMGIGSGGERAKALNTCVSHICCILVFYVTVVCLTFIHRFGKHVPHVVHITMSYIHFLFPPFMNPFIYSIKTKQIQSGILRLFSLPHSRA

SEQ ID NO: 59925 - protein, 324 aa, Homo sapiens
  Payload ID: 11886
  Gene Symbol: OR51D1
  Gene Name: olfactory receptor, family 51, subfamily D, member 1
  Uniprot ID: Q8NGF3
  ENSP ID: ENSP00000350222
MQKPQLLVPIIATSNGNLVHAAYFLLVGIPGLGPTIHFWLAFPLCFMYALATLGNLTIVLIIRVERRLHEPMYLFLAMLSTIDLVLSSITMPKMASLFLMGIQEIEFNICLAQMFLIHALSAVESAVLLAMAFDRFVAICHPLRHASVLTGCTVAKIGLSALTRGFVFFFPLPFILKWLSYCQTHTVTHSFCLHQDIMKLSCTDTRVNVVYGLFIILSVMGVDSLFIGFSYILILWAVLELSSRRAALKAFNTCISHLCAVLVFYVPLIGLSVVHRLGGPTSLLHVVMANTYLLLPPVVNPLVYGAKTKEICSRVLCMFSQGGK

SEQ ID NO: 59926 - protein, 318 aa, Homo sapiens
  Payload ID: 11887
  Gene Symbol: OR51E1
  Gene Name: olfactory receptor, family 51, subfamily E, member 1
  Uniprot ID: Q8TCB6
  ENSP ID: ENSP00000380155
MMVDPNGNESSATYFILIGLPGLEEAQFWLAFPLCSLYLIAVLGNLTIIYIVRTEHSLHEPMYIFLCMLSGIDILISTSSMPKMLAIFWFNSTTIQFDACLLQMFAIHSLSGMESTVLLAMAFDRYVAICHPLRHATVLTLPRVTKIGVAAVVRGAALMAPLPVFIKQLPFCRSNILSHSYCLHQDVMKLACDDIRVNVVYGLIVIISAIGLDSLLISFSYLLILKTVLGLTREAQAKAFGTCVSHVCAVFIFYVPFIGLSMVHRFSKRRDSPLPVILANIYLLVPPVLNPIVYGVKTKEIRQRILRLFHVATHASEP

SEQ ID NO: 59927 - protein, 72 aa, Homo sapiens
  Payload ID: 11887
  Gene Symbol: OR51E1
  Gene Name: olfactory receptor, family 51, subfamily E, member 1
  ENSP ID: ENSP00000431593
MMVDPNGNESSATYFILIGLPGLEEAQFWLAFPLCSLYLIAVLASGVTLRCPSSWPISICWFLLCSTQLSME

SEQ ID NO: 59928 - protein, 320 aa, Homo sapiens
  Payload ID: 11888
  Gene Symbol: OR51E2
  Gene Name: olfactory receptor, family 51, subfamily E, member 2
  Uniprot ID: Q9H255
  ENSP ID: ENSP00000380153
MSSCNFTHATFVLIGIPGLEKAHFWVGFPLLSMYVVAMFGNCIVVFIVRTERSLHAPMYLFLCMLAAIDLALSTSTMPKILALFWFDSREISFEACLTQMFFIHALSAIESTILLAMAFDRYVAICHPLRHAAVLNNTVTAQIGIVAVVRGSLFFFPLPLLIKRLAFCHSNVLSHSYCVHQDVMKLAYADTLPNVVYGLTAILLVMGVDVMFISLSYFLIIRTVLQLPSKSERAKAFGTCVSHIGVVLAFYVPLIGLSVVHRFGNSLHPIVRVVMGDIYLLLPPVINPIIYGAKTKQIRTRVLAMFKISCDKDLQAVGGK

SEQ ID NO: 59929 - protein, 83 aa, Homo sapiens
  Payload ID: 11888
  Gene Symbol: OR51E2
  Gene Name: olfactory receptor, family 51, subfamily E, member 2
  ENSP ID: ENSP00000432644
MSSCNFTHATFVLIGIPGLEKAHFWVGFPLLSMYVVAMFGNCIVVFIVRTERSLHAPMYLFLCMLAAIDLALSTSTMPKILAL

SEQ ID NO: 59930 - protein, 312 aa, Homo sapiens; identical to SEQ ID NO: 59438
  Payload ID: 11889
  Gene Symbol: OR51F1
  Gene Name: olfactory receptor, family 51, subfamily F, member 1 (gene/pseudogene)
  ENSP ID: ENSP00000345163

SEQ ID NO: 59931 - protein, 342 aa, Homo sapiens
  Payload ID: 11890
  Gene Symbol: OR51F2
  Gene Name: olfactory receptor, family 51, subfamily F, member 2
  Uniprot ID: Q8NH61
  ENSP ID: ENSP00000323952
MTETSLSSQCFPMSVLNNTIAEPLIFLLMGIPGLKATQYWISIPFCLLYVVAVSGNSMILFVVLCERSLHKPMYYFLSMLSATDLSLSLCTLSTTLGVFWFEAREINLNACIAQMFFLHGFTFMESGVLLAMAFDRFVAICYPLRYTTILTNARIAKIGMSMLIRNVAVMLPVMLFVKRLSFCSSMVLSHSYCYHVDLIQLSCTDNRINSILGLFALLSTTGFDCPCILLSYILIIRSVLSIASSEERRKAFNTCTSHISAVSIFYLPLISLSLVHRYGHSAPPFVHIIMANVFLLIPPVLNPIIYSVKIKQIQKAIIKVLIQKHSKSNHQLFLIRDKAIYE

SEQ ID NO: 59932 - protein, 321 aa, Homo sapiens
  Payload ID: 11891
  Gene Symbol: OR51G1
  Gene Name: olfactory receptor, family 51, subfamily G, member 1 (gene/pseudogene)
  Uniprot ID: Q8NGK1
  ENSP ID: ENSP00000322546
MTILLNSSLQRATFFLTGFQGLEGLHGWISIPFCFIYLTVILGNLTILHVICTDATLHGPMYYFLGMLAVTDLGLCLSTLPTVLGIFWFDTREIGIPACFTQLFFIHTLSSMESSVLLSMSIDRYVAVCNPLHDSTVLTPACIVKMGLSSVLRSALLILPLPFLLKRFQYCHSHVLAHAYCLHLEIMKLACSSIIVNHIYGLFVVACTVGVDSLLIFLSYALILRTVLSIASHQERLRALNTCVSHICAVLLFYIPMIGLSLVHRFGEHLPRVVHLFMSYVYLLVPPLMNPIIYSIKTKQIRQRIIKKFQFIKSLRCFWKD

SEQ ID NO: 59933 - protein, 314 aa, Homo sapiens
  Payload ID: 11892
  Gene Symbol: OR51G2
  Gene Name: olfactory receptor, family 51, subfamily G, member 2
  Uniprot ID: Q8NGK0
  ENSP ID: ENSP00000322593
MTLGSLGNSSSSVSATFLLSGIPGLERMHIWISIPLCFMYLVSIPGNCTILFIIKTERSLHEPMYLFLSMLALIDLGLSLCTLPTVLGIFWVGAREISHDACFAQLFFIHCFSFLESSVLLSMAFDRFVAICHPLHYVSILTNTVIGRIGLVSLGRSVALIFPLPFMLKRFPYCGSPVLSHSYCLHQEVMKLACADMKANSIYGMFVIVSTVGIDSLLILFSYALILRTVLSIASRAERFKALNTCVSHICAVLLFYTPMIGLSVIHRFGKQAPHLVQVVMGFMYLLFPPVMNPIVYSVKTKQIRDRVTHAFCY

SEQ ID NO: 59934 - protein, 302 aa, Homo sapiens
  Payload ID: 11893
  Gene Symbol: OR51H1
  Gene Name: olfactory receptor, family 51, subfamily H, member 1
  Uniprot ID: Q8NH63
  ENSP ID: ENSP00000322724
MTNLNASQANHRNFILTGIPGTPDKNPWLAFPLGFLYTLTLLGNGTILAVIKVEPSLHEPTYYFLSILALTDVSLSMSTLPSMLSIYWFNAPQIVFDACIMQMFFIHVFGIVESGVLVSMAFDRFVAIRNPLHYVSILTHDVIRKTGIAVLTRAVCVVFPVPFLIKCLPFCHSNVLSHSYCLHQNMMRLACASTRINSLYGLIVVIFTLGLDVLLTLLSYVLTLKTVLGIVSRGERLKTLSTCLSHMSTVLLFYVPFMGAASMIHRFWEHLSPVVHMVMADIYLLLPPVLNPIVYSVKTKQI

SEQ ID NO: 59935 - protein, 314 aa, Homo sapiens
  Payload ID: 11894
  Gene Symbol: OR51I1
  Gene Name: olfactory receptor, family 51, subfamily I, member 1
  Uniprot ID: Q9H343
  ENSP ID: ENSP00000369559
MLGLNGTPFQPATLQLTGIPGIQTGLTWVALIFCILYMISIVGNLSILTLVFWEPALHQPMYYFLSMLALNDLGVSFSTLPTVISTFCFNYNHVAFNACLVQMFFIHTFSFMESGILLAMSLDRFVAICYPLRYVTVLTHNRILAMGLGILTKSFTTLFPFPFVVKRLPFCKGNVLHHSYCLHPDLMKVACGDIHVNNIYGLLVIIFTYGMDSTFILLSYALILRAMLVIISQEQRLKALNTCMSHICAVLAFYVPIIAVSMIHRFWKSAPPVVHVMMSNVYLFVPPMLNPIIYSVKTKEIRKGILKFFHKSQA

SEQ ID NO: 59936 - protein, 312 aa, Homo sapiens
  Payload ID: 11895
  Gene Symbol: OR51I2
  Gene Name: olfactory receptor, family 51, subfamily I, member 2
  Uniprot ID: Q9H344
  ENSP ID: ENSP00000341987
MGLFNVTHPAFFLLTGIPGLESSHSWLSGPLCVMYAVALGGNTVILQAVRVEPSLHEPMYYFLSMLSFSDVAISMATLPTVLRTFCLNARNITFDACLIQMFLIHFFSMMESGILLAMSFDRYVAICDPLRYATVLTTEVIAAMGLGAAARSFITLFPLPFLIKRLPICRSNVLSHSYCLHPDMMRLACADISINSIYGLFVLVSTFGMDLFFIFLSYVLILRSVMATASREERLKALNTCVSHILAVLAFYVPMIGVSTVHRFGKHVPCYIHVLMSNVYLFVPPVLNPLIYSAKTKEIRRAIFRMFHHIKI

SEQ ID NO: 59937 - protein, 316 aa, Homo sapiens
  Payload ID: 11896
  Gene Symbol: OR51J1
  Gene Name: olfactory receptor, family 51, subfamily J, member 1 (gene/pseudogene)
  Uniprot ID: Q9H342
  ENSP ID: ENSP00000332473
MKISNNSLGFLPTTFILVGIPGLESEHLWISVPFSLIYIIIFLGNGIILHVIRTDIALHQPMYLFLAMLALAEVRVSASTLPTVLGIFLFGNTEISLEACLFPDVLHPFFIHDGASCAAGHVFGPLYSHLQPTELHSYPDTAQGLWHRSYYRTEKHYAHGSVAHSLMASALLWPQCPLTFLLSAPQSYLSCGNISVNNIYGIFIVTSTFGLDSLLIVISYGLILHTVLGIATGEGRKKALNTCGSHVCAVLAYYVPMIGLSIVHRLGHRVSPLLQAMMANAYLFFPPVVNPIVYSIKTKEIHGAIVRMLLEKRRRV

SEQ ID NO: 59938 - protein, 315 aa, Homo sapiens
  Payload ID: 11897
  Gene Symbol: OR51L1
  Gene Name: olfactory receptor, family 51, subfamily L, member 1
  Uniprot ID: Q8NGJ5
  ENSP ID: ENSP00000322156
MGDWNNSDAVEPIFILRGFPGLEYVHSWLSILFCLAYLVAFMGNVTILSVIWIESSLHQPMYYFISILAVNDLGMSLSTLPTMLAVLWLDAPEIQASACYAQLFFIHTFTFLESSVLLAMAFDRFVAICHPLHYPTILTNSVIGKIGLACLLRSLGVVLPTPLLLRHYHYCHGNALSHAFCLHQDVLRLSCTDARTNSIYGLCVVIATLGVDSIFILLSYVLILNTVLDIASREEQLKALNTCVSHICVVLIFFVPVIGVSMVHRFGKHLSPIVHILMADIYLLLPPVLNPIVYSVRTKQIRLGILHKFVLRRRF

SEQ ID NO: 59939 - protein, 326 aa, Homo sapiens
  Payload ID: 11898
  Gene Symbol: OR51M1
  Gene Name: olfactory receptor, family 51, subfamily M, member 1
  Uniprot ID: Q9H341
  ENSP ID: ENSP00000333196
MSVQYSLSPQFMLLSNITQFSPIFYLTSFPGLEGIKHWIFIPFFFMYMVAISGNCFILIIIKTNPRLHTPMYYLLSLLALTDLGLCVSTLPTTMGIFWFNSHSIYFGACQIQMFCIHSFSFMESSVLLMMSFDRLVAICHPLRYSVIITGQQVVRAGLIVIFRGPVATIPIVLLLKAFPYCGSVVLSHSFCLHQEVIQLACTDITFNNLYGLMVVVFTVMLDLVLIALSYGLILHTVAGLASQEEQRRAFQTCTAPLCAVLVFFVPMMGLSLVHRFGKHAPPAIHLLMANVYLFVPPMLNPIIYSIKTKEIHRAIIKFLGLKKASK

SEQ ID NO: 59940 - protein, 317 aa, Homo sapiens
  Payload ID: 11899
  Gene Symbol: OR51Q1
  Gene Name: olfactory receptor, family 51, subfamily Q, member 1 (gene/pseudogene)
  Uniprot ID: Q8NH59
  ENSP ID: ENSP00000300778
MSQVTNTTQEGIYFILTDIPGFEASHIWISIPVCCLYTISIMGNTTILTVIRTEPSVHQRMYLFLSMLALTDLGLTLTTLPTVMQLLWFNVRRISSEACFAQFFFLHGFSFMESSVLLAMSVDCYVAICCPLHYASILTNEVIGRTGLAIICCCVLAVLPSLFLLKRLPFCHSHLLSRSYCLHQDMIRLVCADIRLNSWYGFALALLIIIVDPLLIVISYTLILKNILGTATWAERLRALNNCLSHILAVLVLYIPMVGVSMTHRFAKHASPLVHVIMANIYLLAPPVMNPIIYSVKNKQIQWGMLNFLSLKNMHSR

SEQ ID NO: 59941 - protein, 323 aa, Homo sapiens
  Payload ID: 11900
  Gene Symbol: OR51S1
  Gene Name: olfactory receptor, family 51, subfamily S, member 1
  Uniprot ID: Q8NGJ8
  ENSP ID: ENSP00000322754
MSTLPTQIAPNSSTSMAPTFLLVGMPGLSGAPSWWTLPLIAVYLLSALGNGTILWIIALQPALHRPMHFFLFLLSVSDIGLVTALMPTLLGIALAGAHTVPASACLLQMVFIHVFSVMESSVLLAMSIDRALAICRPLHYPALLTNGVISKISLAISFRCLGLHLPLPFLLAYMPYCLPQVLTHSYCLHPDVARLACPEAWGAAYSLFVVLSAMGLDPLLIFFSYGLIGKVLQGVESREDRWKAGQTCAAHLSAVLLFYIPMILLALINHPELPITQHTHTLLSYVHFLLPPLINPILYSVKMKEIRKRILNRLQPRKVGGAQ

SEQ ID NO: 59942 - protein, 327 aa, Homo sapiens
  Payload ID: 11901
  Gene Symbol: OR51T1
  Gene Name: olfactory receptor, family 51, subfamily T, member 1
  Uniprot ID: Q8NGJ9
  ENSP ID: ENSP00000322679
MAIFNNTTSSSSNFLLTAFPGLECAHVWISIPVCCLYTIALLGNSMIFLVIITKRRLHKPMYYFLSMLAAVDLCLTITTLPTVLGVLWFHAREISFKACFIQMFFVHAFSLLESSVLVAMAFDRFVAICNPLNYATILTDRMVLVIGLVICIRPAVFLLPLLVAINTVSFHGGHELSHPFCYHPEVIKYTYSKPWISSFWGLFLQLYLNGTDVLFILFSYVLILRTVLGIVARKKQQKALSTCVCHICAVTIFYVPLISLSLAHRLFHSTPRVLCSTLANIYLLLPPVLNPIIYSLKTKTIRQAMFQLLQSKGSWGFNVRGLRGRWD

SEQ ID NO: 59943 - protein, 354 aa, Homo sapiens
  Payload ID: 11901
  Gene Symbol: OR51T1
  Gene Name: olfactory receptor, family 51, subfamily T, member 1
  ENSP ID: ENSP00000369738
MTNKMYAIYIKNLNYFSFLIVQCLQPTMAIFNNTTSSSSNFLLTAFPGLECAHVWISIPVCCLYTIALLGNSMIFLVIITKRRLHKPMYYFLSMLAAVDLCLTITTLPTVLGVLWFHAREISFKACFIQMFFVHAFSLLESSVLVAMAFDRFVAICNPLNYATILTDRMVLVIGLVICIRPAVFLLPLLVAINTVSFHGGHELSHPFCYHPEVIKYTYSKPWISSFWGLFLQLYLNGTDVLFILFSYVLILRTVLGIVARKKQQKALSTCVCHICAVTIFYVPLISLSLAHRLFHSTPRVLCSTLANIYLLLPPVLNPIIYSLKTKTIRQAMFQLLQSKGSWGFNVRGLRGRWD

SEQ ID NO: 59944 - protein, 321 aa, Homo sapiens
  Payload ID: 11902
  Gene Symbol: OR51V1
  Gene Name: olfactory receptor, family 51, subfamily V, member 1
  Uniprot ID: Q9H2C8
  ENSP ID: ENSP00000321729
MFLSSRMITSVSPSTSTNSSFLLTGFSGMEQQYPWLSIPFSSIYAMVLLGNCMVLHVIWTEPSLHQPMFYFLSMLALTDLCMGLSTVYTVLGILWGIIREISLDSCIAQSYFIHGLSFMESSVLLTMAFDRYIAICNPLRYSSILTNSRIIKIGLTIIGRSFFFITPPIICLKFFNYCHFHILSHSFCLHQDLLRLACSDIRFNSYYALMLVICILLLDAILILFSYILILKSVLAVASQEERHKLFQTCISHICAVLVFYIPIISLTMVHRFGKHLSPVAHVLIGNIYILFPPLMNPIIYSVKTQQIHTRMLRLFSLKRY

SEQ ID NO: 59945 - protein, 312 aa, Homo sapiens
  Payload ID: 11903
  Gene Symbol: OR52A1
  Gene Name: olfactory receptor, family 52, subfamily A, member 1
  Uniprot ID: Q9UKL2
  ENSP ID: ENSP00000333684
MSISNITVYMPSVLTLVGIPGLESVQCWIGIPFCAIYLIAMIGNSLLLSIIKSERSLHEPLYIFLGMLGATDIALASSIMPKMLGIFWFNVPEIYFDSCLLQMWFIHTLQGIESGILVAMALDRYVAICYPLRHANIFTHQLVIQIGTMVVLRAAILVAPCLVLIKCRFQFYHTTVISHSYCEHMAIVKLAAANVQVNKIYGLFVAFTVAGFDLTFITLSYIQIFITVFRLPQKEARFKAFNTCIAHICVFLQFYLLAFFSFFTHRFGSHISPYIHILFSSIYLLVPPFLNPLVYGAKTTQIRIHVVKMFCS

SEQ ID NO: 59946 - protein, 312 aa, Homo sapiens; identical to SEQ ID NO: 59945
  Payload ID: 11903
  Gene Symbol: OR52A1
  Gene Name: olfactory receptor, family 52, subfamily A, member 1
  Uniprot ID: Q9UKL2
  ENSP ID: ENSP00000369725

SEQ ID NO: 59947 - protein, 316 aa, Homo sapiens
  Payload ID: 11904
  Gene Symbol: OR52A5
  Gene Name: olfactory receptor, family 52, subfamily A, member 5
  Uniprot ID: Q9H2C5
  ENSP ID: ENSP00000303469
MPTFNGSVFMPSAFILIGIPGLESVQCWIGIPFSAMYLIGVIGNSLILVIIKYENSLHIPMYIFLAMLAATDIALNTCILPKMLGIFWFHLPEISFDACLFQMWLIHSFQAIESGILLAMALDRYVAICIPLRHATIFSQQFLTHIGLGVTLRAAILIIPSLGLIKCCLKHYRTTVISHSYCEHMAIVKLATEDIRVNKIYGLFVAFAILGFDIIFITLSYVQIFITVFQLPQKEARFKAFNTCIAHICVFLQFYLLAFFSFFTHRFGSHIPPYIHILLSNLYLLVPPFLNPIVYGVKTKQIRDHIVKVFFFKKVT

SEQ ID NO: 59948 - protein, 323 aa, Homo sapiens
  Payload ID: 11905
  Gene Symbol: OR52B2
  Gene Name: olfactory receptor, family 52, subfamily B, member 2
  Uniprot ID: Q96RD2
  ENSP ID: ENSP00000432011
MSHTNVTIFHPAVFVLPGIPGLEAYHIWLSIPLCLIYITAVLGNSILIVVIVMERNLHVPMYFFLSMLAVMDILLSTTTVPKALAIFWLQAHNIAFDACVTQGFFVHMMFVGESAILLAMAFDRFVAICAPLRYTTVLTWPVVGRIALAVITRSFCIIFPVIFLLKRLPFCLTNIVPHSYCEHIGVARLACADITVNIWYGFSVPIVMVILDVILIAVSYSLILRAVFRLPSQDARHKALSTCGSHLCVILMFYVPSFFTLLTHHFGRNIPQHVHILLANLYVAVPPMLNPIVYGVKTKQIREGVAHRFFDIKTWCCTSPLGS

SEQ ID NO: 59949 - protein, 314 aa, Homo sapiens; identical to SEQ ID NO: 1014
  Payload ID: 11906
  Gene Symbol: OR52B4
  Gene Name: olfactory receptor, family 52, subfamily B, member 4 (gene/pseudogene)
  Uniprot ID: Q8NGK2
  ENSP ID: ENSP00000386160

SEQ ID NO: 59950 - protein, 314 aa, Homo sapiens; identical to SEQ ID NO: 1014
  Payload ID: 11906
  Gene Symbol: OR52B4
  Gene Name: olfactory receptor, family 52, subfamily B, member 4 (gene/pseudogene)
  Uniprot ID: Q8NGK2
  ENSP ID: ENSP00000485530

SEQ ID NO: 59951 - protein, 335 aa, Homo sapiens
  Payload ID: 11907
  Gene Symbol: OR52B6
  Gene Name: olfactory receptor, family 52, subfamily B, member 6
  Uniprot ID: Q8NGF0
  ENSP ID: ENSP00000341581
MAQVRALHKIMALFSANSIGAMNNSDTRIAGCFLTGIPGLEQLHIWLSIPFCIMYITALEGNGILICVILSQAILHEPMYIFLSMLASADVLLSTTTMPKALANLWLGYSLISFDGCLTQMFFIHFLFIHSAVLLAMAFDRYVAICSPLRYVTILTSKVIGKIVTAALSHSFIIMFPSIFLLEHLHYCQINIIAHTFCEHMGIAHLSCSDISINVWYGLAAALLSTGLDIMLITVSYIHILQAVFRLLSQDARSKALSTCGSHICVILLFYVPALFSVFAYRFGGRSVPCYVHILLASLYVVIPPMLNPVIYGVRTKPILEGAKQMFSNLAKGSK

SEQ ID NO: 59952 - protein, 318 aa, Homo sapiens
  Payload ID: 11908
  Gene Symbol: OR52D1
  Gene Name: olfactory receptor, family 52, subfamily D, member 1
  Uniprot ID: Q9H346
  ENSP ID: ENSP00000326232
MSDSNLSDNHLPDTFFLTGIPGLEAAHFWIAIPFCAMYLVALVGNAALILVIAMDNALHAPMYLFLCLLSLTDLALSSTTVPKMLAILWLHAGEISFGGCLAQMFCVHSIYALESSILLAMAFDRYVAICNPLRYTTILNHAVIGRIGFVGLFRSVAIVSPFIFLLRRLPYCGHRVMTHTYCEHMGIARLACANITVNIVYGLTVALLAMGLDSILIAISYGFILHAVFHLPSHDAQHKALSTCGSHIGIILVFYIPAFFSFLTHRFGHHEVPKHVHIFLANLYVLVPPVLNPILYGARTKEIRSRLLKLLHLGKTSI

SEQ ID NO: 59953 - protein, 325 aa, Homo sapiens
  Payload ID: 11909
  Gene Symbol: OR52E2
  Gene Name: olfactory receptor, family 52, subfamily E, member 2
  Uniprot ID: Q8NGJ4
  ENSP ID: ENSP00000322088
MFLPNDTQFHPSSFLLLGIPGLETLHIWIGFPFCAVYMIALIGNFTILLVIKTDSSLHQPMFYFLAMLATTDVGLSTATIPKMLGIFWINLRGIIFEACLTQMFFIHNFTLMESAVLVAMAYDSYVAICNPLQYSAILTNKVVSVIGLGVFVRALIFVIPSILLILRLPFCGNHVIPHTYCEHMGLAHLSCASIKINIIYGLCAICNLVFDITVIALSYVHILCAVFRLPTHEARLKSLSTCGSHVCVILAFYTPALFSFMTHRFGRNVPRYIHILLANLYVVVPPMLNPVIYGVRTKQIYKCVKKILLQEQGMEKEEYLIHTRF

SEQ ID NO: 59954 - protein, 312 aa, Homo sapiens
  Payload ID: 11910
  Gene Symbol: OR52E4
  Gene Name: olfactory receptor, family 52, subfamily E, member 4
  Uniprot ID: Q8NGH9
  ENSP ID: ENSP00000321426
MPSINDTHFYPPFFLLLGIPGLDTLHIWISFPFCIVYLIAIVGNMTILFVIKTEHSLHQPMFYFLAMLSMIDLGLSTSTIPKMLGIFWFNLQEISFGGCLLQMFFIHMFTGMETVLLVVMAYDRFVAICNPLQYTMILTNKTISILASVVVGRNLVLVTPFVFLILRLPFCGHNIVPHTYCEHRGLAGLACAPIKINIIYGLMVISYIIVDVILIASSYVLILRAVFRLPSQDVRLKAFNTCGSHVCVMLCFYTPAFFSFMTHRFGQNIPHYIHILLANLYVVVPPALNPVIYGVRTKQIREQIVKIFVQKE

SEQ ID NO: 59955 - protein, 327 aa, Homo sapiens
  Payload ID: 11911
  Gene Symbol: OR52E5
  Gene Name: olfactory receptor, family 52, subfamily E, member 5
  Uniprot ID: Q8NH55
  ENSP ID: ENSP00000480583
MLHTNNTQFHPSTFLVVGVPGLEDVHVWIGFPFFAVYLTALLGNIIILFVIQTEQSLHQPMFYFLAMLAGTDLGLSTATIPKMLGIFWFNLGEIAFGACITQMYTIHICTGLESVVLTVTGIDRYIAICNPLRYSMILTNKVIAILGIVIIVRTLVFVTPFTFLILRLPFCGVRIIPHTYCEHMGLAKLACASINVIYGLIAFSVGYIDISVIGFSYVQILRAVFHLPAWDARPKALSTCGSHVCVMLAFYLPALFSFMTHRFGHNIPHYIHILLANLYVVFPPALNSVIYGVKTKQIREQVLRILNPKSFWHFDPKRIFHNNSVRQ

SEQ ID NO: 59956 - protein, 313 aa, Homo sapiens
  Payload ID: 11912
  Gene Symbol: OR52E6
  Gene Name: olfactory receptor, family 52, subfamily E, member 6
  Uniprot ID: Q96RD3
  ENSP ID: ENSP00000328878
MPIANDTQFHTSSFLLLGIPGLEDVHIWIGFPFFSVYLIALLGNAAIFFVIQTEQSLHEPMYYCLAMLDSIDLSLSTATIPKMLGIFWFNIKEISFGGYLSQMFFIHFFTVMESIVLVAMAFDRYIAICKPLWYTMILTSKIISLIAGIAVLRSLYMVIPLVFLLLRLPFCGHRIIPHTYCEHMGIARLACASIKVNIMFGLGSISLLLLDVLLIILSHIRILYAVFCLPSWEARLKALNTCGSHIGVILAFSTPAFFSFFTHCFGHDIPQYIHIFLANLYVVVPPTLNPVIYGVRTKHIRETVLRIFFKTDH

SEQ ID NO: 59957 - protein, 317 aa, Homo sapiens
  Payload ID: 11912
  Gene Symbol: OR52E6
  Gene Name: olfactory receptor, family 52, subfamily E, member 6
  ENSP ID: ENSP00000369279
MEKRMPIANDTQFHTSSFLLLGIPGLEDVHIWIGFPFFSVYLIALLGNAAIFFVIQTEQSLHEPMYYCLAMLDSIDLSLSTATIPKMLGIFWFNIKEISFGGYLSQMFFIHFFTVMESIVLVAMAFDRYIAICKPLWYTMILTSKIISLIAGIAVLRSLYMVIPLVFLLLRLPFCGHRIIPHTYCEHMGIARLACASIKVNIMFGLGSISLLLLDVLLIILSHIRILYAVFCLPSWEARLKALNTCGSHIGVILAFSTPAFFSFFTHCFGHDIPQYIHIFLANLYVVVPPTLNPVIYGVRTKHIRETVLRIFFKTDH

SEQ ID NO: 59958 - protein, 317 aa, Homo sapiens
  Payload ID: 11913
  Gene Symbol: OR52E8
  Gene Name: olfactory receptor, family 52, subfamily E, member 8
  Uniprot ID: Q6IFG1
  ENSP ID: ENSP00000444054
MAGRMSTSNHTQFHPSSFLLLGIPGLEDVHIWIGVPFFFVYLVALLGNTALLFVIQTEQSLHEPMYYFLAMLDSIDLGLSTATIPKMLGIFWFNTKEISFGGCLSHMFFIHFFTAMESIVLVAMAFDRYIAICKPLRYTMILTSKIISLIAGIAVLRSLYMVVPLVFLLLRLPFCGHRIIPHTYCEHMGIARLACASIKVNIRFGLGNISLLLLDVILIILSYVRILYAVFCLPSWEARLKALNTCGSHIGVILAFFTPAFFSFLTHRFGHNIPQYIHIILANLYVVVPPALNPVIYGVRTKQIRERVLRIFLKTNH

SEQ ID NO: 59959 - protein, 320 aa, Homo sapiens
  Payload ID: 11914
  Gene Symbol: OR52H1
  Gene Name: olfactory receptor, family 52, subfamily H, member 1
  Uniprot ID: Q8NGJ2
  ENSP ID: ENSP00000326259
MPSASAMIIFNLSSYNPGPFILVGIPGLEQFHVWIGIPFCIIYIVAVVGNCILLYLIVVEHSLHEPMFFFLSMLAMTDLILSTAGVPKALSIFWLGAREITFPGCLTQMFFLHYNFVLDSAILMAMAFDHYVAICSPLRYTTILTPKTIIKSAMGISFRSFCIILPDVFLLTCLPFCRTRIIPHTYCEHIGVAQLACADISINFWYGFCVPIMTVISDVILIAVSYAHILCAVFGLPSQDACQKALGTCGSHVCVILMFYTPAFFSILAHRFGHNVSRTFHIMFANLYIVIPPALNPMVYGVKTKQIRDKVILLFSKGTG

SEQ ID NO: 59960 - protein, 349 aa, Homo sapiens [sequence omitted]

SEQ ID NO: 59961 - protein, 324 aa, Homo sapiens
  Payload ID: 11915
  Gene Symbol: OR52I1
  Gene Name: olfactory receptor, family 52, subfamily I, member 1
  Uniprot ID: Q8NGK6
  ENSP ID: ENSP00000436453
MLGPAYNHTMETPASFLLVGIPGLQSSHLWLAISLSAMYITALLGNTLIVTAIWMDSTRHEPMYCFLCVLAAVDIVMASSVVPKMVSIFCSGDSSISFSACFTQMFFVHLATAVETGLLLTMAFDRYVAICKPLHYKRILTPQVMLGMSMAVTIRAVTFMTPLSWMMNHLPFCGSNVVVHSYCKHIALARLACADPVPSSLYSLIGSSLMVGSDVAFIAASYILILRAVFDLSSKTAQLKALSTCGSHVGVMALYYLPGMASIYAAWLGQDIVPLHTQVLLADLYVIIPATLNPIIYGMRTKQLLEGIWSYLMHFLFDHSNLGS

SEQ ID NO: 59962 - protein, 350 aa, Homo sapiens
  Payload ID: 11916
  Gene Symbol: OR52I2
  Gene Name: olfactory receptor, family 52, subfamily I, member 2
  Uniprot ID: Q8NH67
  ENSP ID: ENSP00000308764
MCQQILRDCILLIHHLCINRKKVSLVMLGPAYNHTMETPASFLLVGIPGLQSSHLWLAISLSAMYIIALLGNTIIVTAIWMDSTRHEPMYCFLCVLAAVDIVMASSVVPKMVSIFCSGDSSISFSACFTQMFFVHLATAVETGLLLTMAFDRYVAICKPLHYKRILTPQVMLGMSMAITIRAIIAITPLSWMVSHLPFCGSNVVVHSYCEHIALARLACADPVPSSLYSLIGSSLMVGSDVAFIAASYILILKAVFGLSSKTAQLKALSTCGSHVGVMALYYLPGMASIYAAWLGQDVVPLHTQVLLADLYVIIPATLNPIIYGMRTKQLRERIWSYLMHVLFDHSNLGS

SEQ ID NO: 59963 - protein, 311 aa, Homo sapiens
  Payload ID: 11917
  Gene Symbol: OR52J3
  Gene Name: olfactory receptor, family 52, subfamily J, member 3
  Uniprot ID: Q8NH60
  ENSP ID: ENSP00000369728
MFYHNKSIFHPVTFFLIGIPGLEDFHMWISGPFCSVYLVALLGNATILLVIKVEQTLREPMFYFLAILSTIDLALSTTSVPRMLGIFWFDAHEINYGACVAQMFLIHAFTGMEAEVLLAMAFDRYVAVCAPLHYATILTSQVLVGISMCIVIRPVLLTLPMVYLIYRLPFCQAHIIAHSYCEHMGIAKLSCGNIRINGIYGLFVVSFFVLNLVLIGISYVYILRAVFRLPSHDAQLKALSTCGAHVGVICVFYIPSVFSFLTHRFGHQIPGYIHILVANLYLIIPPSLNPIIYGVRTKQIRERVLYVFTKK

SEQ ID NO: 59964 - protein, 314 aa, Homo sapiens
  Payload ID: 11918
  Gene Symbol: OR52K1
  Gene Name: olfactory receptor, family 52, subfamily K, member 1
  Uniprot ID: Q8NGK4
  ENSP ID: ENSP00000302422
MLPSNITSTHPAVFLLVGIPGLEHLHAWISIPFCFAYTLALLGNCTLLFIIQADAALHEPMYLFLAMLATIDLVLSSTTLPKMLAIFWFRDQEINFFACLVQMFFLHSFSIMESAVLLAMAFDRYVAICKPLHYTTVLTGSLITKIGMAAVARAVTLMTPLPFLLRRFHYCRGPVIAHCYCEHMAVVRLACGDTSFNNIYGIAVAMFIVVLDLLFVILSYVFILQAVLQLASQEARYKAFGTCVSHIGAILSTYTPVVISSVMHRVARHAAPRVHILLAIFYLLFPPMVNPIIYGVKTKQIREYVLSLFQRKNM

SEQ ID NO: 59965 - protein, 314 aa, Homo sapiens
  Payload ID: 11919
  Gene Symbol: OR52K2
  Gene Name: olfactory receptor, family 52, subfamily K, member 2
  Uniprot ID: Q8NGK3
  ENSP ID: ENSP00000318956
MSASNITLTHPTAFLLVGIPGLEHLHIWISIPFCLAYTLALLGNCTLLLIIQADAALHEPMYLFLAMLAAIDLVLSSSALPKMLAIFWFRDREINFFACLAQMFFLHSFSIMESAVLLAMAFDRYVAICKPLHYTKVLTGSLITKIGMAAVARAVTLMTPLPFLLRCFHYCRGPVIAHCYCEHMAVVRLACGDTSFNNIYGIAVAMFIVVLDLLLVILSYIFILQAVLLLASQEARYKAFGTCVSHIGAILAFYTTVVISSVMHRVARHAAPHVHILLANFYLLFPPMVNPIIYGVKTKQIRESILGVFPRKDM

SEQ ID NO: 59966 - protein, 329 aa, Homo sapiens
  Payload ID: 11920
  Gene Symbol: OR52L1
  Gene Name: olfactory receptor, family 52, subfamily L, member 1
  Uniprot ID: Q8NGH7
  ENSP ID: ENSP00000330338
MTLVSFFSFLSKPLIMLLSNSSWRLSQPSFLLVGIPGLEESQHWIALPLGILYLLALVGNVTILFIIWMDPSLHQSMYLFLSMLAAIDLVLASSTAPKALAVLLVHAHEIGYIVCLIQMFFIHAFSSMESGVLVAMALDRYVAICHPLHHSTILHPGVIGRIGMVVLVRGLLLLIPFPILLGTLIFCQATIIGHAYCEHMAVVKLACSETTVNRAYGLTMALLVIGLDVLAIGVSYAHILQAVLKVPGSEARLKAFSTCGSHICVILVFYVPGIFSFLTHRFGHHVPHHVHVLLATRYLLMPPALNPLVYGVKTQQIRQRVLRVFTQKD

SEQ ID NO: 59967 - protein, 317 aa, Homo sapiens
  Payload ID: 11921
  Gene Symbol: OR52M1
  Gene Name: olfactory receptor, family 52, subfamily M, member 1
  Uniprot ID: Q8NGK5
  ENSP ID: ENSP00000353343
MLTFHNVCSVPSSFWLTGIPGLESLHVWLSIPFGSMYLVAVVGNVTILAVVKIERSLHQPMYFFLCMLAAIDLVLSTSTIPKLLGIFWFGACDIGLDACLGQMFLIHCFATVESGIFLAMAFDRYVAICNPLRHSMVLTYTVVGRLGLVSLLRGVLYIGPLPLMIRLRLPLYKTHVISHSYCEHMAVVALTCGDSRVNNVYGLSIGFLVLILDSVAIAASYVMIFRAVMGLATPEARLKTLGTCASHLCAILIFYVPIAVSSLIHRFGQCVPPPVHTLLANFYLLIPPILNPIVYAVRTKQIRESLLQIPRIEMKIR

SEQ ID NO: 59968 - protein, 320 aa, Homo sapiens
  Payload ID: 11922
  Gene Symbol: OR52N1
  Gene Name: olfactory receptor, family 52, subfamily N, member 1
  Uniprot ID: Q8NH53
  ENSP ID: ENSP00000322823
MSFLNGTSLTPASFILNGIPGLEDVHLWISFPLCTMYSIAITGNFGLMYLIYCDEALHRPMYVFLALLSFTDVLMCTSTLPNTLFILWFNLKEIDFKACLAQMFFVHTFTGMESGVLMLMALDHCVAICFPLRYATILTNSVIAKAGFLTFLRGVMLVIPSTFLTKRLPYCKGNVIPHTYCDHMSVAKISCGNVRVNAIYGLIVALLIGGFDILCITISYTMILQAVVSLSSADARQKAFSTCTAHFCAIVLTYVPAFFTFFTHHFGGHTIPLHIHIIMANLYLLMPPTMNPIVYGVKTRQVRESVIRFFLKGKDNSHNF

SEQ ID NO: 59969 - protein, 321 aa, Homo sapiens
  Payload ID: 11923
  Gene Symbol: OR52N2
  Gene Name: olfactory receptor, family 52, subfamily N, member 2
  Uniprot ID: Q8NGI0
  ENSP ID: ENSP00000322801
MSGDNSSSLTPGFFILNGVPGLEATHIWISLPFCFMYIIAVVGNCGLICLISHEEALHRPMYYFLALLSFTDVTLCTTMVPNMLCIFWFNLKEIDFNACLAQMFFVHMLTGMESGVLMLMALDRYVAICYPLRYATILTNPVIAKAGLATFLRNVMLIIPFTLLTKRLPYCRGNFIPHTYCDHMSVAKVSCGNFKVNAIYGLMVALLIGVFDICCISVSYTMILQAVMSLSSADARHKAFSTCTSHMCSIVITYVAAFFTFFTHRFVGHNIPNHIHIIVANLYLLLPPTMNPIVYGVKTKQIQEGVIKFLLGDKVSFTYDK

SEQ ID NO: 59970 - protein, 321 aa, Homo sapiens
  Payload ID: 11924
  Gene Symbol: OR52N4
  Gene Name: olfactory receptor, family 52, subfamily N, member 4 (gene/pseudogene)
  Uniprot ID: Q8NGI2
  ENSP ID: ENSP00000323224
MLTLNKTDLIPASFILNGVPGLEDTQLWISFPFCSMYVVAMVGNCGLLYLIHYEDALHKPMYYFLAMLSFTDLVMCSSTIPKALCIFWFHLKDIGFDECLVQMFFTHTFTGMESGVLMLMALDRYVAICYPLRYSTILTNPVIAKVGTATFLRGVLLIIPFTFLTKLLPYCRGNILPHTYCDHMSVAKLSCGNVKVNAIYGLMVALLIWGFDILCITNSYTMILRAVVSLSSADARQKAFNTCTAHICAIVFSYTPAFFSFFSHRFGEHIIPPSCHIIVANIYLLLPPTMNPIVYGVKTKQIRDCVIRILSGSKDTKSYSM

SEQ ID NO: 59971 - protein, 324 aa, Homo sapiens
  Payload ID: 11925
  Gene Symbol: OR52N5
  Gene Name: olfactory receptor, family 52, subfamily N, member 5
  Uniprot ID: Q8NH56
  ENSP ID: ENSP00000322866
MPLFNSLCWFPTIHVTPPSFILNGIPGLERVHVWISLPLCTMYIIFLVGNLGLVYLIYYEESLHHPMYFFFGHALSLIDLLTCTTTLPNALCIFWFSLKEINFNACLAQMFFVHGFTGVESGVLMLMALDRYVAICYPLRYATTLTNPIIAKAELATFLRGVLLMIPFPFLVKRLPFCQSNIISHTYCDHMSVVKLSCASIKVNVIYGLMVALLIGVFDICCISLSYTLILKAAISLSSSDARQKAFSTCTAHISAIIITYVPAFFTFFAHRFGGHTIPPSLHIIVANLYLLLPPTLNPIVYGVKTKQIRKSVIKFFQGDKGAG

SEQ ID NO: 59972 - protein, 315 aa, Homo sapiens; identical to SEQ ID NO: 59439
  Payload ID: 11926
  Gene Symbol: OR52R1
  Gene Name: olfactory receptor, family 52, subfamily R, member 1 (gene/pseudogene)
  Uniprot ID: Q8NGF1
  ENSP ID: ENSP00000348368

SEQ ID NO: 59973 - protein, 320 aa, Homo sapiens
  Payload ID: 11927
  Gene Symbol: OR52W1
  Gene Name: olfactory receptor, family 52, subfamily W, member 1
  Uniprot ID: Q6IF63
  ENSP ID: ENSP00000309673
MAETLQLNSTFLHPNFFILTGFPGLGSAQTWLTLVFGPIYLLALLGNGALPAVVWIDSTLHQPMFLLLAILAATDLGLATSIAPGLLAVLWLGPRSVPYAVCLVQMFFVHALTAMESGVLLAMACDRAAAIGRPLHYPVLVTKACVGYAALALALKAVAIVVPFPLLVAKFEHFQAKTIGHTYCAHMAVVELVVGNTQATNLYGLALSLAISGMDILGITGSYGLIAHAVLQLPTREAHAKAFGTCSSHICVILAFYIPGLFSYLTHRFGHHTVPKPVHILLSNIYLLLPPALNPLIYGARTKQIRDRLLETFTFRKSPL

SEQ ID NO: 59974 - protein, 298 aa, Homo sapiens
  Payload ID: 11928
  Gene Symbol: OR52Z1
  Gene Name: olfactory receptor, family 52, subfamily Z, member 1 (gene/pseudogene)
  ENSP ID: ENSP00000484570
MGIPGLEGLHTWISIPFSFMYIVAVAGNIFLIFLIMTERSLHEPMYLFLSMLASADFLLATAAAPKVLAILWFHSMDISFGSCVSQMFFIHFIFVAESAILLAMAFDRYVAICYPLRYTILTSSAVRKIGIAAVVRSFFICCPFIFLVYRLTYCGRNIIPHSYCEHIARLACGNINVNIIYGLTVALLSTGLDIVLIIISYTMILHSVFQISSWAARFKALSTCGSHICVIFMFYTPAFFSFLAHRFGGKTIPHHIHILVGSLYVLVPPMLNPIIYGVKTKQIKDRVILLFSPISVCC

SEQ ID NO: 59975 - protein, 318 aa, Homo sapiens
  Payload ID: 11929
  Gene Symbol: OR56A1
  Gene Name: olfactory receptor, family 56, subfamily A, member 1
  Uniprot ID: Q8NGH5
  ENSP ID: ENSP00000321246
MIQPMASPSNSSTVPVSEFLLICFPNFQSWQHWLSLPLSLLFLLAMGANTTLLITIQLEASLHQPLYYLLSLLSLLDIVLCLTVIPKVLAIFWYDLRSISFPACFLQMFIMNSFLPMESCTFMVMAYDRYVAICHPLRYPSIITNQFVAKASVFIVVRNALLTAPIPILTSLLHYCGENVIENCICANLSVSRLSCDNFTLNRIYQFVAGWTLLGSDLFLIFLSYTFILRAVLRFKAEGAAVKALSTCGSHFILILFFSTILLVVVLTNVARKKVPMDILILLNVLHHLIPPALNPIVYGVRTKEIKQGIQKLLQRGR

SEQ ID NO: 59976 - protein, 315 aa, Homo sapiens
  Payload ID: 11930
  Gene Symbol: OR56A3
  Gene Name: olfactory receptor, family 56, subfamily A, member 3
  Uniprot ID: Q8NH54
  ENSP ID: ENSP00000331572
MTTHRNDTLSTEASDFLLNCFVRSPSWQHWLSLPLSLLFLLAVGANTTLLMTIWLEASLHQPLYYLLSLLSLLDIVLCLTVIPKVLTIFWFDLRPISFPACFLQMYIMNCFLAMESCTFMVMAYDRYVAICHPLRYPSIITDHFVVKAAMFILTRNVLMTLPIPILSAQLRYCGRNVIENCICANMSVSRLSCDDVTINHLYQFAGGWTLLGSDLILIFLSYTFILRAVLRLKAEGAVAKALSTCGSHFMLILFFSTILLVFVLTHVAKKKVSPDVPVLLNVLHHVIPAALNPIIYGVRTQEIKQGMQRLLKKGC

SEQ ID NO: 59977 - protein, 365 aa, Homo sapiens
  Payload ID: 11931
  Gene Symbol: OR56A4
  Gene Name: olfactory receptor, family 56, subfamily A, member 4
  Uniprot ID: Q8NGH8
  ENSP ID: ENSP00000328215
MMTVILKTLLGQIQGLSGNPHSTTSRMYFLCFCTSLLRFKVHWVSRLIRKLYMASPSNDSTAPVSEFLLICFPNFQSWQHWLSLPLSLLFLLAMGANTTLLITIQLEASLHQPLYYLLSLLSLLDIVLCLTVIPKVLAIFWFDLRSISFPACFLQMFIMNSFLTMESCTFMVMAYDRYVAICHPLRYPSIITDQFVARAVVFVIARNAFVSLPVPMLSARLRYCAGNIIKNCICSNLSVSKLSCDDITFNQLYQFVAGWTLLGSDLILIVISYSFILKVVLRIKAEGAVAKALSTCGSHFILILFFSTVLLVLVITNLARKRIPPDVPILLNILHHLIPPALNPIVYGVRTKEIKQGIQNLLKRL

SEQ ID NO: 59978 - protein, 246 aa, Homo sapiens
  Payload ID: 11932
  Gene Symbol: OR56A5
  Gene Name: olfactory receptor, family 56, subfamily A, member 5
  ENSP ID: ENSP00000478523
LSLLDIVLCLTVIPKVLAIFWFDLRSISFPACFLQVFIMNSFLTMESCTFMIMAYDRYVAICKPLQYSSIITDQFVARAAIFVVARNGLLTMPIPILSSRLRYCAGHIIKNCICTNVSVSKLSCDDITLNQSYQFVIGWTLLGSDLILIVLSYFFILKTVLRIKGEGDMAKALGTCGSHFILILFFTTVLLVLVITNLARKRIPPDVPILLNILHHLIPPALNPIVYGVRTKEIKQGIQNLLRRLC

SEQ ID NO: 59979 - protein, 313 aa, Homo sapiens
  Payload ID: 11932
  Gene Symbol: OR56A5
  Gene Name: olfactory receptor, family 56, subfamily A, member 5
  Uniprot ID: P0C7T3
  ENSP ID: ENSP00000481594
MTLPSNNSTSPVFEFFLICFPSFQSWQHWLSLPLSLLFLLAMGANATLLITIYLEASLHQPLYYLLSLLSLLDIVLCLTVIPKVLAIFWFDLRSISFPACFLQVFIMNSFLTMESCTFMIMAYDRYVAICKPLQYSSIITDQFVARAAIFVVARNGLLTMPIPILSSRLRYCAGHIIKNCICTNVSVSKLSCDDITLNQSYQFVIGWTLLGSDLILIVLSYFFILKTVLRIKGEGDMAKALGTCGSHFILILFFTTVLLVLVITNLARKRIPPDVPILLNILHHLIPPALNPIVYGVRTKEIKQGIQNLLRRL

SEQ ID NO: 59980 - protein, 324 aa, Homo sapiens
  Payload ID: 11933
  Gene Symbol: OR56B1
  Gene Name: olfactory receptor, family 56, subfamily B, member 1
  Uniprot ID: Q8NGI3
  ENSP ID: ENSP00000322939
MNHMSASLKISNSSKFQVSEFILLGFPGIHSWQHWLSLPLALLYLSALAANTLILIIIWQNPSLQQPMYIFLGILCMVDMGLATTIIPKILAIFWFDAKVISLPECFAQIYAIHFFVGMESGILLCMAFDRYVAICHPLRYPSIVTSSLILKATLFMVLRNGLFVTPVPVLAAQRDYCSKNEIEHCLCSNLGVTSLACDDRRPNSICQLVLAWLGMGSDLSLIILSYILILYSVLRLNSAEAAAKALSTCSSHLTLILFFYTIVVVISVTHLTEMKATLIPVLLNVLHNIIPPSLNPTVYALQTKELRAAFQKVLFALTKEIRS

SEQ ID NO: 59981 - protein, 319 aa, Homo sapiens
  Payload ID: 11934
  Gene Symbol: OR56B4
  Gene Name: olfactory receptor, family 56, subfamily B, member 4
  Uniprot ID: Q8NH76
  ENSP ID: ENSP00000321196
MDTSTSVTYDSSLQISQFILMGLPGIHEWQHWLSLPLTLLYLLALGANLLIIITIQHETVLHEPMYHLLGILAVVDIGLATTIMPKILAIFWFDAKAISLPMCFAQIYAIHCFFCIESGIFLCMAVDRYIAICRPLQYPSIVTKAFVFKATGFIMLRNGLLTIPVPILAAQRHYCSRNEIEHCLCSNLGVISLACDDITVNKFYQLMLAWVLVGSDMALVFSSYAVILHSVLRLNSAEAMSKALSTCSSHLILILFHTGIIVLSVTHLAEKKIPLIPVFLNVLHNVIPPALNPLACALRMHKLRLGFQRLLGLGQDVSK

SEQ ID NO: 59982 - protein, 327 aa, Homo sapiens
  Payload ID: 11935
  Gene Symbol: OR6A2
  Gene Name: olfactory receptor, family 6, subfamily A, member 2
  Uniprot ID: O95222
  ENSP ID: ENSP00000330384
MEWRNHSGRVSEFVLLGFPAPAPLQVLLFALLLLAYVLVLTENTLIIMAIRNHSTLHKPMYFFLANMSFLEIWYVTVTIPKMLAGFVGSKQDHGQLISFEGCMTQLYFFLGLGCTECVLLAVMAYDRYMAICYPLHYPVIVSGRLCVQMAAGSWAGGFGISMVKVFLISGLSYCGPNIINHFFCDVSPLLNLSCTDMSTAELTDFILAIFILLGPLSVTGASYVAITGAVMHIPSAAGRYKAFSTCASHLTVVIIFYAASIFIYARPKALSAFDTNKLVSVLYAVIVPLLNPIIYCLRNQEVKRALCCTLHLYQHQDPDPKKASRNV

SEQ ID NO: 59983 - protein, 311 aa, Homo sapiens
  Payload ID: 11936
  Gene Symbol: OR6B1
  Gene Name: olfactory receptor, family 6, subfamily B, member 1
  Uniprot ID: O95007
  ENSP ID: ENSP00000386151
MELENQTRVTKFILVGFPGSLSMRAAMFLIFLVAYILTVAENVIIILLVLQNRPLHKPMYFFLANLSFLETWYISVTVPKLLFSFWSVNNSISFTLCMIQLYFFIALMCTECVLLAAMAYDRYVAICRPLHYPTIMSHGLCFRLALGSWAIGFGISLAKIYFISCLSFCGPNVINHFFCDISPVLNLSCTDMSITELVDFILALVIFLFPLFITVLSYGCILATILCMPTGKQKAFSTCASHLVVVTIFYSAIIFMYARPRVIHAFNMNKIISIFYAIVTPSLNPFIYCLRNREVKEALKKLAYCQASRSD

SEQ ID NO: 59984 - protein, 312 aa, Homo sapiens
  Payload ID: 11937
  Gene Symbol: OR6B2
  Gene Name: olfactory receptor, family 6, subfamily B, member 2
  Uniprot ID: Q6IFH4
  ENSP ID: ENSP00000384563
MSGENVTKVSTFILVGLPTAPGLQYLLFLLFLLTYLFVLVENLAIILIVWSSTSLHRPMYYFLSSMSFLEIWYVSDITPKMLEGFLLQQKRISFVGCMTQLYFFSSLVCTECVLLASMAYDRYVAICHPLRYHVLVTPGLCLQLVGFSFVSGFTISMIKVCFISSVTFCGSNVLNHFFCDISPILKLACTDFSTAELVDFILAFIILVFPLLATILSYWHITLAVLRIPSATGCWRAFSTCASHLTVVTVFYTALLFMYVRPQAIDSQSSNKLISAVYTVVTPIINPLIYCLRNKEFKDALKKALGLGQTSH

SEQ ID NO: 59985 - protein, 331 aa, Homo sapiens
  Payload ID: 11938
  Gene Symbol: OR6B3
  Gene Name: olfactory receptor, family 6, subfamily B, member 3
  Uniprot ID: Q8NGW1
  ENSP ID: ENSP00000322435
MSGENVTRVGTFILVGFPTAPGLQYLLFLLFLLTYLFVLVENLAIILTVWSSTSLHRPMYYFLSSMSFLEIWYVSDITPKMLEGFLLQQKRISFVGCMTQLYFFSSLVCTECVLLASMAYDRYVAICHPLRYHVLVTPGLCLQLVGFSFVSGFTISMIKVCFISSVTFCGSNVLNHFFCDISPILKLACTDFSTAELVDFILAFIILVFPLLATMLSYAHITLAVLRIPSATGCWRAFFTCASHLTVVTVFYTALLFMYVRPQAIDSRSSNKLISVLYTVITPILNPLIYCLRNKEFKNALKKAFGLTSCAVEGRLSSLLELHLQIHSQPL

SEQ ID NO: 59986 - protein, 312 aa, Homo sapiens
  Payload ID: 11939
  Gene Symbol: OR6C1
  Gene Name: olfactory receptor, family 6, subfamily C, member 1
  Uniprot ID: Q96RD1
  ENSP ID: ENSP00000368990
MRNHTEITEFILLGLTDDPNFQVVIFVFLLITYMLSITGNLTLITITLLDSHLQTPMYFFLRNFSILEISFTTVSIPKFLGNIISGDKTISFNNCIVQLFFFILLGVTEFYLLAAMSYDRYVAICKPLHCLSIMNRRVCTLLVFTSWLVSFLIIFPALMLLLKLHYCRSNIIDHFTCDYFPLLQLACSDTKFLEVMGFSCAAFTLMFTLALIFLSYIYIIRTILRIPSTSQRTKAFSTCSSHMVVVSISYGSCIFMYIKPSAKDRVSLSKGVAILNTSVAPMMNPFIYSLRNQQVKQAFINMARKTVFFTST

SEQ ID NO: 59987 - protein, 312 aa, Homo sapiens
  Payload ID: 11940
  Gene Symbol: OR6C2
  Gene Name: olfactory receptor, family 6, subfamily C, member 2
  Uniprot ID: Q9NZP2
  ENSP ID: ENSP00000323606
MKNHTVIRTFILLGLTGDPHLQVLLFIFLFLTYMLSVTGNLTIITLTLVDHHLKTPMYFFLRNFSFLEVSFTTVCIPRFLYNISMGDNTITYNACASQIFFVILFGATEFFLLAAMSYDRYVAICKPLHYVVIMNNRVCTLLVLCCWVAGLMIIVPPLSLGLQLEFCDSNAIDHFSCDAGPLLKISCSDTWVIEQMVILMAVFALIITLVCVILSYLYIVRTILKFPSVQQRKKAFSTCSSHMIVVSIAYGSCIFIYIKPSAKDEVAINKGVSVLTTSVAPLLNPFIYTLRNKQVKQAFSDSIKRIAFLSKK

SEQ ID NO: 59988 - protein, 311 aa, Homo sapiens
  Payload ID: 11941
  Gene Symbol: OR6C3
  Gene Name: olfactory receptor, family 6, subfamily C, member 3
  Uniprot ID: Q9NZP0
  ENSP ID: ENSP00000368989
MNHTMVTEFVLLGLSDDPDLQIVIFLFLFITYILSVTGNLTIITLTFVDSHLQTPMYFFLRNFSFLEISFTTVCIPRFLGAIITRNKTISYNNCAAQLFFFIFMGVTEFYILTAMSYDRYVAICKPLHYTSIMNRKLCTLLVLCAWLSGFLTIFPPLMLLLQLDYCASNVIDHFACDYFPLLQLSCSDTWLLEVIGFYFALVTLLFTLALVILSYMYIIRTILRIPSASQRKKAFSTCSSHMIVISISYGSCIFMYANPSAKEKASLTKGIAILNTSVAPMLNPFIYTLRNQQVKQAFKNVVHKVVFYANQ

SEQ ID NO: 59989 - protein, 309 aa, Homo sapiens
  Payload ID: 11942
  Gene Symbol: OR6C4
  Gene Name: olfactory receptor, family 6, subfamily C, member 4
  Uniprot ID: Q8NGE1
  ENSP ID: ENSP00000377799
MKNRTMFGEFILLGLTNQPELQVMIFIFLFLTYMLSILGNLTIITLTLLDPHLQTPMYFFLRNFSFLEISFTSIFIPRFLTSMTTGNKVISFAGCLTQYFFAIFLGATEFYLLASMSYDRYVAICKPLHYLTIMSSRVCIQLVFCSWLGGFLAILPPIILMTQVDFCVSNILNHYYCDYGPLVELACSDTSLLELMVILLAVVTLMVTLVLVTLSYTYIIRTILRIPSAQQRTKAFSTCSSHMIVISLSYGSCMFMYINPSAKEGGAFNKGIAVLITSVTPLLNPFIYTLRNQQVKQAFKDSVKKIVKL

SEQ ID NO: 59990 - protein, 314 aa, Homo sapiens
  Payload ID: 11943
  Gene Symbol: OR6C6
  Gene Name: olfactory receptor, family 6, subfamily C, member 6
  Uniprot ID: A6NF89
  ENSP ID: ENSP00000351211
MKNKSMEIEFILLGLTDDPQLQIVIFLFLFLNYTLSLMGNLIIIILTLLDPRLKTPMYFFLRNFSFLEVIFTTVCIPRFLITIVTRDKTISYNNCATQLFFILLPGVTEFYLLAAMSYDRYVAICKPLHYPIIMSSKVCYQLVLSSWVTGFLIIFPPLVMGLKLDFCASKTIDHFMCETSPILQISCTDTHVLELMSFTLAVVTLVVTLVLVILSYTCIIKTILKFSSAQQRNKAFSTCTSHMIVVSMTYGSCIFMYIKPSAKERVTVSKGVALLYTSIAPLLNPFIYTLRNQQVKEVFWDVLQKNLCFSKRPF

SEQ ID NO: 59991 - protein, 312 aa, Homo sapiens
  Payload ID: 11944
  Gene Symbol: OR6C65
  Gene Name: olfactory receptor, family 6, subfamily C, member 65
  Uniprot ID: A6NJZ3
  ENSP ID: ENSP00000368986
MPNMTSIREFILLGFTDNPELQVVIFFFMLITYLLSVSGNMIIIMLTLSNIHLKTPMYFFLRNFSFLEISFTTVFIPRFLINIATGDTTISYNASMAQVFFLILLGSTEFFLLAVMSYDRYVAICKPLHYTTIMSNKVCNWLVISSWLAGFLIIFPPVIMGLQLDFCDSSTIDHFICDSSPMLLIACTDTQFLELMAFLLAVFTLMVTLALVVLSYTLILKTILKIPSAQQRKKAFSTCSSHMIVVSVSYGSCIFMCVKTSAKEGMALSKGVAVLNTSVAPMLNPFIYTLRNQQVKQALREFTKKILSLNKQ

SEQ ID NO: 59992 - protein, 312 aa, Homo sapiens
  Payload ID: 11945
  Gene Symbol: OR6C68
  Gene Name: olfactory receptor, family 6, subfamily C, member 68
  Uniprot ID: A6NDL8
  ENSP ID: ENSP00000448811
MRKHTAITTFILLGLTEDPQLQVLLFMFLFITYMLSVTGKLTIIALTMLDPHLKTPMYFFLQNLSFLEISFTATCVPRFLYSISTGNKIITYNACVIQLFFADLFGVTEFFLLATMSYDRYVAICKPLHYMAIMSNKVCKTMVICCWMAALMIILPPLSLGFHLEFCDSNVINHFGCDALPILKIPCSDTSLIEQMVVASAVLTFIITLVCVVLSYTYIIRTILKFPSVQQKKKAFSTCSSHITVVSITYGSCIFIYIKPSAKEEVNINKGVSVLISSISPMLNSFIYTLRNEQVKQAFHDSLKKIAFRLKK

SEQ ID NO: 59993 - protein, 312 aa, Homo sapiens
  Payload ID: 11946
  Gene Symbol: OR6C70
  Gene Name: olfactory receptor, family 6, subfamily C, member 70
  Uniprot ID: A6NIJ9
  ENSP ID: ENSP00000329153
MKNHTRQIEFILLGLTDNSQLQIVIFLFLLLNCVLSMIGNFTIIALILLDSQLKTPMYFFLRNFSFLEISFTTACIPRFLITIVTREKTISCNGCISQLFFYIFLGVTEFFLLAALSYDRYVAICKPLRYMSIMSNKVCYQLVFSSWVTGFLIIFTPLILGLNLDFCASNIIDHFICDISLILQLSCSDTHLLELIAFLLAVMTLIVTLFLVILSYSYIIKTILKFPSAQQKKKAFSTCSSHMIVVSITYGSCMFIYIKPSANERVALSKGVTVLNTSVAPLLNPFIYTLRNQQVKQAFKAVFRKIFSASDK

SEQ ID NO: 59994 - protein, 312 aa, Homo sapiens
  Payload ID: 11947
  Gene Symbol: OR6C74
  Gene Name: olfactory receptor, family 6, subfamily C, member 74
  Uniprot ID: A6NCV1
  ENSP ID: ENSP00000342836
MRNHTTVANFILLGLTDDPQLQVIIFLLLFFTYMLSITGNLTIITLTLLDLHLKTPMYFFLRNFSFLEVSFTTVYIPKFLVSMATGDKTISYNDCAAQLFFTILLGATEFFLLAAMSYERYVAICKPLHYTTIMSSRVCSLLVFASWMAGFLIIFPPLLMGLQLDFCAANTVDHFFCDVSPILQLSCTDTDIIELMMLLSAILTLLVTLVLVILSYTNIIRTILKIPSSQQRKKAFSTCSSHMVVVSISYGSCIFMYVKPSAKERVSLNKGIALLSTSVAPMLNPFIYTLRNKQVKDVFKHTVKKIELFSMK

SEQ ID NO: 59995 - protein, 312 aa, Homo sapiens
  Payload ID: 11948
  Gene Symbol: OR6C75
  Gene Name: olfactory receptor, family 6, subfamily C, member 75
  Uniprot ID: A6NL08
  ENSP ID: ENSP00000368987
MRNSTAVTDFILLGLTSDPQWQVVLFIFLLVTYMLSVTGNLIIITLTLSDPHLQTPMYFFLRNFSFLEISFTSVCIPRFLVTVVTGNRTISYNGCVAQLFFFIFLGVTEFYLLAAMSYDRCMAICKPLHYTIIMSTRVCTLLVFSSWLAGFLIIFPPVMLLLQLDFCASNVIDHFICDSSPMLQLSCTNTHFLELMAFFLAVVTLMVTLTLVILSYTNIIRTILKIPSMSQRKKAFSTCSSHMIVVSISYSSCIFMYIKTSARERVTLSKGVAVLNTSVAPLLNPFIYTLRNKQVKQAFKSMVQKMIFSLNK

SEQ ID NO: 59996 - protein, 312 aa, Homo sapiens
  Payload ID: 11949
  Gene Symbol: OR6C76
  Gene Name: olfactory receptor, family 6, subfamily C, member 76
  Uniprot ID: A6NM76
  ENSP ID: ENSP00000328402
MKNRTSVTDFILLGLTDNPQLQVVIFSFLFLTYVLSVTGNLTIISLTLLDSHLKTPMYFFLRNFSLEISFTSVCNPRFLISILTGDKSISYNACAAQLFFFIFLGSTEFFLLASMSYDCYVAICKPLHYTTIMSDRICYQLIISSWLAGFLVIFPPLAMGLQLDFCDSNVIDHFTCDSAPLLQISCTDTSTLELMSFILALFTLISTLILVILSYTYIIRTILRIPSAQQRKKAFSTCSSHVIVVSISYGSCIFMYVKTSAKEGVALTKGVAILNTSVAPMLNPFIYTLRNQQVKQAFKDVLRKISHKKKKH

SEQ ID NO: 59997 - protein, 308 aa, Homo sapiens
  Payload ID: 11950
  Gene Symbol: OR6F1
  Gene Name: olfactory receptor, family 6, subfamily F, member 1
  Uniprot ID: Q8NGZ6
  ENSP ID: ENSP00000305640
MDTGNKTLPQDFLLLGFPGSQTLQLSLFMLFLVMYILTVSGNVAILMLVSTSHQLHTPMYFFLSNLSFLEIWYTTAAVPKALAILLGRSQTISFTSCLLQMYFVFSLGCTEYFLLAAMAYDRCLAICYPLHYGAIMSSLLSAQLALGSWVCGFVAIAVPTALISGLSFCGPRAINHFFCDIAPWIALACTNTQAVELVAFVIAVVVILSSCLITFVSYVYIISTILRIPSASGRSKAFSTCSSHLTVVLIWYGSTVFLHVRTSIKDALDLIKAVHVLNTVVTPVLNPFIYTLRNKEVRETLLKKWKGK

SEQ ID NO: 59998 - protein, 347 aa, Homo sapiens
  Payload ID: 11951
  Gene Symbol: OR6J1
  Gene Name: olfactory receptor, family 6, subfamily J, member 1 (gene/pseudogene)
  Uniprot ID: Q8NGC5
  ENSP ID: ENSP00000437629
MGNWTAAVTEFVLLGFSLSREVELLLLVLLLPTFLLTLLGNLLIISTVLSCSRLHTPMYFFLCNLSILDILFTSVISPKVLANLGSRDKTISFAGCITQCYFYFFLGTVEFLLLTVMSYDRYATICCPLRYTTIMRPSVCIGTVVFSWVGGFLSVLFPTILISQLPFCGSNIINHFFCDSGPLLALACADTTAIELMDFMLSSMVILCCIVLVAYSYTYIILTIVRIPSASGRKKAFNTCASHLTIVIISSGITVFIYVTPSQKEYLEINKIPLVLSSVVTPFLNPFIYTLRNDTVQGVLRDVWVRVRGVFEKRMRAVLRSRLSSNKDHQGRACSSPPCVYSVKLQC

SEQ ID NO: 59999 - protein, 324 aa, Homo sapiens
  Payload ID: 11952
  Gene Symbol: OR6K2
  Gene Name: olfactory receptor, family 6, subfamily K, member 2
  Uniprot ID: Q8NGY2
  ENSP ID: ENSP00000352626
MESPNRTTIQEFIFSAFPYSWVKSVVCFVPLLFIYAFIVVGNLVIITVVQLNTHLHTPMYTFISALSFLEIWYTTATIPKMLSSLLSERSISFNGCLLQMYFFHSTGICEVCLLTVMAFDHYLAICSPLHYPSIMTPKLCTQLTLSCCVCGFITPLPEIAWISTLPFCGSNHLEHIFCDFLPVLRLACTDTRAIVMIQVVDVIHAVEIITAVMLIFMSYDGIVAVILRIHSAGGRRTAFSTCVSHFIVFSLFFGSVTLMYLRFSATYSLFWDIAIALAFAVLSPFFNPIIYSLRNKEIKEAIKKHIGQAKIFFSVRPGTSSKIF

SEQ ID NO: 60000 - protein, 315 aa, Homo sapiens
  Payload ID: 11953
  Gene Symbol: OR6K3
  Gene Name: olfactory receptor, family 6, subfamily K, member 3
  ENSP ID: ENSP00000357127
MESGNQSTVTEFIFTGFPQLQDGSLLYFFPLLFIYTFIIIDNLLIFSAVRLDTHLHNPMYNFISIFSFLEIWYTTATIPKMLSNLISEKKAISMTGCILQMYFFHSLENSEGILLTTMAIDRYVAICNPLRYQMIMTPRLCAQLSAGSCLFGFLILLPEIVMISTLPFCGPNQIHQIFCDLVPVLSLACTDTSMILIEDVIHAVTIIITFLIIALSYVRIVTVILRIPSSEGRQKAFSTCAGHLMVFPIFFGSVSLMYLRFSDTYPPVLDTAIALMFTVLAPFFNPIIYSLRNKDMNNAIKKLFCLQKVLNKPGG

SEQ ID NO: 60001 - protein, 331 aa, Homo sapiens
  Payload ID: 11953
  Gene Symbol: OR6K3
  Gene Name: olfactory receptor, family 6, subfamily K, member 3
  Uniprot ID: Q8NGY3
  ENSP ID: ENSP00000357128
MCWTMPSPFTGSSTRNMESGNQSTVTEFIFTGFPQLQDGSLLYFFPLLFIYTFIIIDNLLIFSAVRLDTHLHNPMYNFISIFSFLEIWYTTATIPKMLSNLISEKKAISMTGCILQMYFFHSLENSEGILLTTMAIDRYVAICNPLRYQMIMTPRLCAQLSAGSCLFGFLILLPEIVMISTLPFCGPNQIHQIFCDLVPVLSLACTDTSMILIEDVIHAVTIIITFLIIALSYVRIVTVILRIPSSEGRQKAFSTCAGHLMVFPIFFGSVSLMYLRFSDTYPPVLDTAIALMFTVLAPFFNPIIYSLRNKDMNNAIKKLFCLQKVLNKPGG

SEQ ID NO: 60002 - protein, 343 aa, Homo sapiens
  Payload ID: 11954
  Gene Symbol: OR6K6
  Gene Name: olfactory receptor, family 6, subfamily K, member 6
  Uniprot ID: Q8NGW6
  ENSP ID: ENSP00000357126
MKQYSVGNQHSNYRSLLFPFLCSQMTQLTASGNQTMVTEFLFSMFPHAHRGGLLFFIPLLLIYGFILTGNLIMFIVIQVGMALHTPLYFFISVLSFLEICYTTTTIPKMLSCLISEQKSISVAGCLLQMYFFHSLGITESCVLTAMAIDRYIAICNPLRYPTIMIPKLCIQLTVGSCFCGFLLVLPEIAWISTLPFCGSNQIHQIFCDFTPVLSLACTDTFLVVIVDAIHAAEIVASFLVIALSYIRIIIVILGMHSAEGHHKAFSTCAAHLAVFLLFFGSVAVMYLRFSATYSVFWDTAIAVTFVILAPFFNPIIYSLKNKDMKEAIGRLFHYQKRAGWAGK

SEQ ID NO: 60003 - protein, 313 aa, Homo sapiens
  Payload ID: 11955
  Gene Symbol: OR6M1
  Gene Name: olfactory receptor, family 6, subfamily M, member 1
  Uniprot ID: Q8NGM8
  ENSP ID: ENSP00000311038
MGNWSTVTEITLIAFPALLEIRISLFVVLVVTYTLTATGNITIISLIWIDHRLQTPMYFFLSNLSFLDILYTTVITPKLLACLLGEEKTISFAGCMIQTYFYFFLGTVEFILLAVMSFDRYMAICDPLHYTVIMNSRACLLLVLGCWVGAFLSVLFPTIVVTRLPYCRKEINHFFCDIAPLLQVACINTHLIEKINFLLSALVILSSLAFTTGSYVYIISTILRIPSTQGRQKAFSTCASHITVVSIAHGSNIFVYVRPNQNSSLDYDKVAAVLITVVTPLLNPFIYSLRNEKVQEVLRETVNRIMTLIQRKT

SEQ ID NO: 60004 - protein, 312 aa, Homo sapiens
  Payload ID: 11956
  Gene Symbol: OR6N1
  Gene Name: olfactory receptor, family 6, subfamily N, member 1
  Uniprot ID: Q8NGY5
  ENSP ID: ENSP00000335535
MDTGNWSQVAEFIILGFPHLQGVQIYLFLLLLLIYLMTVLGNLLIFLVVCLDSRLHTPMYHFVSILSFSELGYTAATIPKMLANLLSEKKTISFSGCLLQIYFFHSLGATECYLLTAMAYDRYLAICRPLHYPTLMTPTLCAEIAIGCWLGGLAGPVVEISLISRLPFCGPNRIQHVFCDFPPVLSLACTDTSINVLVDFVINSCKILATFLLILCSYVQIICTVLRIPSAAGKRKAISTCASHFTVVLIFYGSILSMYVQLKKSYSLDYDQALAVVYSVLTPFLNPFIYSLRNKEIKEAVRRQLKRIGILA

SEQ ID NO: 60005 - protein, 317 aa, Homo sapiens
  Payload ID: 11957
  Gene Symbol: OR6N2
  Gene Name: olfactory receptor, family 6, subfamily N, member 2
  Uniprot ID: Q8NGY6
  ENSP ID: ENSP00000344101
MDQYNHSSLAEFVFLGFASVGYVRGWLFVLLLLAYLFTICGNMLIFSVIRLDAALHTPMYHFVSVLSFLELWYTATTIPKMLSNILSEKKTISFAGCLLQTYFFHSLGASECYLLTAMAYDRYLAICRPLHYPIIMTTTLCAKMAAACWTCGFLCPISEVILASQLPFCAYNEIQHIFCDFPPLLSLACKDTSANILVDFAINAFIILITFFFIMISYARIIGAVLKIKTASGRKKAFSTCASHLAVVLIFFGSIIFMYVRLKKSYSLTLDRTLAIVYSVLTPMVNPIIYSLRNKEIIKAIKRTIFQKGDKASLAHL

SEQ ID NO: 60006 - protein, 317 aa, Homo sapiens
  Payload ID: 11958
  Gene Symbol: OR6P1
  Gene Name: olfactory receptor, family 6, subfamily P, member 1
  Uniprot ID: Q8NGX9
  ENSP ID: ENSP00000334721
MRNLSGGHVEEFVLVGFPTTPPLQLLLFVLFFAIYLLTLLENALIVFTIWLAPSLHRPMYFFLGHLSFLELWYINVTIPRLLAAFLTQDGRVSYVGCMTQLYFFIALACTECVLLAVMAYDRYLAICGPLLYPSLMPSSLATRLAAASWGSGFFSSMMKLLFISQLSYCGPNIINHFFCDISPLLNLTCSDKEQAELVDFLLALVMILLPLLAVVSSYTAIIAAILRIPTSRGRHKAFSTCAAHLAVVVIYYSSTLFTYARPRAMYTFNHNKIISVLYTIIVPFFNPAIYCLRNKEVKEAFRKTVMGRCHYPRDVQD

SEQ ID NO: 60007 - protein, 317 aa, Homo sapiens; identical to SEQ ID NO: 59447
  Payload ID: 11959
  Gene Symbol: OR6Q1
  Gene Name: olfactory receptor, family 6, subfamily Q, member 1 (gene/pseudogene)
  Uniprot ID: Q8NGQ2
  ENSP ID: ENSP00000485678

SEQ ID NO: 60008 - protein, 331 aa, Homo sapiens
  Payload ID: 11960
  Gene Symbol: OR6S1
  Gene Name: olfactory receptor, family 6, subfamily S, member 1
  Uniprot ID: Q8NH40
  ENSP ID: ENSP00000313110
MSPDGNHSSDPTEFVLAGLPNLNSARVELFSVFLLVYLLNLTGNVLIVGVVRADTRLQTPMYFFLGNLSCLEILLTSVIIPKMLSNFLSRQHTISFAACITQFYFYFFLGASEFLLLAVMSADRYLAICHPLRYPLLMSGAVCFRVALACWVGGLVPVLGPTVAVALLPFCKQGAVVQHFFCDSGPLLRLACTNTKKLEETDFVLASLVIVSSLLITAVSYGLIVLAVLSIPSASGRQKAFSTCTSHLIVVTLFYGSAIFLYVRPSQSGSVDTNWAVTVITTFVTPLLNPFIYALRNEQVKEALKDMFRKVVAGVLGNLLLDKCLSEKAVK

SEQ ID NO: 60009 - protein, 323 aa, Homo sapiens
  Payload ID: 11961
  Gene Symbol: OR6T1
  Gene Name: olfactory receptor, family 6, subfamily T, member 1
  Uniprot ID: Q8NGN1
  ENSP ID: ENSP00000325203
MNPENWTQVTSFVLLGFPSSHLIQFLVFLGLMVTYIVTATGKLLIIVLSWIDQRLHIQMYFFLRNFSFLELLLVTVVVPKMLVVILTGDHTISFVSCIIQSYLYFFLGTTDFFLLAVMSLDRYLAICRPLRYETLMNGHVCSQLVLASWLAGFLWVLCPTVLMASLPFCGPNGIDHFFRDSWPLLRLSCGDTHLLKLVAFMLSTLVLLGSLALTSVSYACILATVLRAPTAAERRKAFSTCASHLTVVVIIYGSSIFLYIRMSEAQSKLLNKGASVLSCIITPLLNPFIFTLRNDKVQQALREALGWPRLTAVMKLRVTSQRK

SEQ ID NO: 60010 - protein, 313 aa, Homo sapiens
  Payload ID: 11962
  Gene Symbol: OR6V1
  Gene Name: olfactory receptor, family 6, subfamily V, member 1
  Uniprot ID: Q8N148
  ENSP ID: ENSP00000396085
MANLSQPSEFVLLGFSSFGELQALLYGPFLMLYLLAFMGNTIIIVMVIADTHLHTPMYFFLGNFSLLEILVTMTAVPRMLSDLLVPHKVITFTGCMVQFYFHFSLGSTSFLILTDMALDRFVAICHPLRYGTLMSRAMCVQLAGAAWAAPFLAMVPTVLSRAHLDYCHGDVINHFFCDNEPLLQLSCSDTRLLEFWDFLMALTFVLSSFLVTLISYGYIVTTVLRIPSASSCQKAFSTCGSHLTLVFIGYSSTIFLYVRPGKAHSVQVRKVVALVTSVLTPFLNPFILTFCNQTVKTVLQGQMQRLKGLCKAQ

SEQ ID NO: 60011 - protein, 313 aa, Homo sapiens; identical to SEQ ID NO: 60010
  Payload ID: 11962
  Gene Symbol: OR6V1
  Gene Name: olfactory receptor, family 6, subfamily V, member 1
  Uniprot ID: Q8N148
  ENSP ID: ENSP00000483439

SEQ ID NO: 60012 - protein, 312 aa, Homo sapiens
  Payload ID: 11963
  Gene Symbol: OR6X1
  Gene Name: olfactory receptor, family 6, subfamily X, member 1
  Uniprot ID: Q8NH79
  ENSP ID: ENSP00000333724
MRNGTVITEFILLGFPVIQGLQTPLFIAIFLTYILTLAGNGLIIATVWAEPRLQIPMYFFLCNLSFLEIWYTTTVIPKLLGTFVVARTVICMSCCLLQAFFHFFVGTTEFLILTIMSFDRYLTICNPLHHPTIMTSKLCLQLALSSWVVGFTIVFCQTMLLIQLPFCGNNVISHFYCDVGPSLKAACIDTSILELLGVIATILVIPGSLLFNMISYIYILSAILRIPSATGHQKTFSTCASHLTVVSLLYGAVLFMYLRPTAHSSFKINKVVSVLNTILTPLLNPFIYTIRNKEVKGALRKAMTCPKTGHAK

SEQ ID NO: 60013 - protein, 325 aa, Homo sapiens
  Payload ID: 11964
  Gene Symbol: OR6Y1
  Gene Name: olfactory receptor, family 6, subfamily Y, member 1
  Uniprot ID: Q8NGX8
  ENSP ID: ENSP00000304807
MTTIILEVDNHTVTTRFILLGFPTRPAFQLLFFSIFLATYLLTLLENLLIILAIHSDGQLHKPMYFFLSHLSFLEMWYVTVISPKMLVDFLSHDKSISFNGCMTQLYFFVTFVCTEYILLAIMAFDRYVAICNPLRYPVIMTNQLCGTLAGGCWFCGLMTAMIKMVFIAQLHYCGMPQINHYFCDISPLLNVSCEDASQAEMVDFFLALMVIAIPLCVVVASYAAILATILRIPSAQGRQKAFSTCASHLTVVILFYSMTLFTYARPKLMYAYNSNKVVSVLYTVIVPLLNPIIYCLRNHEVKAALRKTIHCRGSGPQGNGAFSS

SEQ ID NO: 60014 - protein, 309 aa, Homo sapiens
  Payload ID: 11965
  Gene Symbol: OR7A10
  Gene Name: olfactory receptor, family 7, subfamily A, member 10
  Uniprot ID: O76100
  ENSP ID: ENSP00000248058
MKSWNNTIILEFLLLGISEEPELQAFLFGLFLSMYLVTVLGNLLIILATISDSHLHTPMYFFLSNLSFVDICFVSTTVPKMLVNIQTHNKVITYAGCITQMCFFLLFVGLDNFLLTVMAYDRFVAICHPLHYMVIMNPQLCGLLVLASWIMSVLNSMLQSLMVLPLPFCTHMEIPHFFCEINQVVHLACSDTFLNDIVMYFAVALLGGGPLTGILYSYSKIVSSIRAISSAQGKYKAFSTCASHLSVVSLFYGTCLGVYLSSAATHNSHTGAAASVMYTVVTPMLNPFIYSLRNKHIKGAMKTFFRGKQ

SEQ ID NO: 60015 - protein, 309 aa, Homo sapiens
  Payload ID: 11966
  Gene Symbol: OR7A17
  Gene Name: olfactory receptor, family 7, subfamily A, member 17
  Uniprot ID: O14581
  ENSP ID: ENSP00000328144
MEPENDTGISEFVLLGLSEEPELQPFLFGLFLSMYLVTVLGNLLIILATISDSHLHTPMYFFLSNLSFADICFISTTIPKMLINIQTQSRVITYAGCITQMCFFVLFGGLDSLLLAVMAYDRFVAICHPLHYTVIMNPRLCGLLVLASWMIAALNSLSQSLMVLWLSFCTDLEIPHFFCELNQVIHLACSDTFLNDMGMYFAAGLLAGGPLVGILCSYSKIVSSIRAISSAQGKYKAFSTCASHLSVVSLFCCTGLGVYLTSAATHNSHTSATASVMYTVATPMLNPFIYSLRNKDIKRALKMSFRGKQ

SEQ ID NO: 60016 - protein, 319 aa, Homo sapiens
  Payload ID: 11967
  Gene Symbol: OR7A5
  Gene Name: olfactory receptor, family 7, subfamily A, member 5
  Uniprot ID: Q15622
  ENSP ID: ENSP00000316955
MEPGNDTQISEFLLLGFSQEPGLQPFLFGLFLSMYLVTVLGNLLIILATISDSHLHTPMYFFLSNLSFADICVTSTTIPKMLMNIQTQNKVITYIACLMQMYFFILFAGFENFLLSVMAYDRFVAICHPLHYMVIMNPHLCGLLVLASWTMSALYSLLQILMVVRLSFCTALEIPHFFCELNQVIQLACSDSFLNHMVIYFTVALLGGGPLTGILYSYSKIISSIHAISSAQGKYKAFSTCASHLSVVSLFYGAILGVYLSSAATRNSHSSATASVMYTVVTPMLNPFIYSLRNKDIKRALGIHLLWGTMKGQFFKKCP

SEQ ID NO: 60017 - protein, 319 aa, Homo sapiens; identical to SEQ ID NO: 60016
  Payload ID: 11967
  Gene Symbol: OR7A5
  Gene Name: olfactory receptor, family 7, subfamily A, member 5
  Uniprot ID: Q15622
  ENSP ID: ENSP00000471977

SEQ ID NO: 60018 - protein, 320 aa, Homo sapiens
  Payload ID: 11968
  Gene Symbol: OR7C1
  Gene Name: olfactory receptor, family 7, subfamily C, member 1
  Uniprot ID: O76099
  ENSP ID: ENSP00000248073
METGNQTHAQEFLLLGFSATSEIQFILFGLFLSMYLVTFTGNLLIILAICSDSHLHTPMYFFLSNLSFADLCFTSTTVPKMLLNILTQNKFITYAGCLSQIFFFTSFGCLDNLLLTVMAYDRFVAVCHPLHYTVIMNPQLCGLLVLGSWCISVMGSLLETLTVLRLSFCTEMEIPHFFCDLLEVLKLACSDTFINNVVIYFATGVLGVISFTGIFFSYYKIVFSILRISSAGRKHKAFSTCGSHLSVVTLFYGTGFGVYLSSAATPSSRTSLVASVMYTMVTPMLNPFIYSLRNTDMKRALGRLLSRATFFNGDITAGLS

SEQ ID NO: 60019 - protein, 319 aa, Homo sapiens
  Payload ID: 11969
  Gene Symbol: OR7C2
  Gene Name: olfactory receptor, family 7, subfamily C, member 2
  Uniprot ID: O60412
  ENSP ID: ENSP00000248072
MERGNQTEVGNFLLLGFAEDSDMQLLLHGLFLSMYLVTIIGNLLIILTISSDSHLHTPMYFFLSNLSFADICFTSTTVPKMLVNIQTQSKMITFAGCLTQIFFFIAFGCLDNLLLTMTAYDRFVAICYPLHYTVIMNPRLCGLLVLGSWCISVMGSLLETLTILRLSFCTNMEIPHFFCDPSEVLKLACSDTFINNIVMYFVTIVLGVFPLCGILFSYSQIFSSVLRVSARGQHKAFSTCGSHLSVVSLFYGTGLGVYLSSAVTPPSRTSLAASVMYTMVTPMLNPFIYSLRNKDMKGSLGRLLLRATSLKEGTIAKLS

SEQ ID NO: 60020 - protein, 312 aa, Homo sapiens
  Payload ID: 11970
  Gene Symbol: OR7D2
  Gene Name: olfactory receptor, family 7, subfamily D, member 2
  Uniprot ID: Q96RA2
  ENSP ID: ENSP00000345563
MEAGNQTGFLEFILLGLSEDPELQPFIFGLFLSMYLVTVLGNLLIILAISSDSHLHTPMYFFLSNLSWVDICFSTCIVPKMLVNIQTENKAISYMDCLTQVYFSMFFPILDTLLLTVMAYDRFVAVCHPLHYMIIMNPHLCGLLVFVTWLIGVMTSLLHISLMMHLIFCKDFEIPHFFCELTYILQLACSDTFLNSTLIYFMTGVLGVFPLLGIIFSYSRIASSIRKMSSSGGKQKALSTCGSHLSVVSLFYGTGIGVHFTSAVTHSSQKISVASVMYTVVTPMLNPFIYSLRNKDVKGALGSLLSRAASCL

SEQ ID NO: 60021 - protein, 312 aa, Homo sapiens
  Payload ID: 11971
  Gene Symbol: OR7D4
  Gene Name: olfactory receptor, family 7, subfamily D, member 4
  Uniprot ID: Q8NG98
  ENSP ID: ENSP00000310488
MEAENLTELSKFLLLGLSDDPELQPVLFGLFLSMYLVTVLGNLLIILAVSSDSHLHTPMYFFLSNLSFVDICFISTTVPKMLVSIQARSKDISYMGCLTQVYFLMMFAGMDTFLLAVMAYDRFVAICHPLHYTVIMNPCLCGLLVLASWFIIFWFSLVHILLMKRLTFSTGTEIPHFFCEPAQVLKVACSNTLLNNIVLYVATALLGVFPVAGILFSYSQIVSSLMGMSSTKGKYKAFSTCGSHLCVVSLFYGTGLGVYLSSAVTHSSQSSSTASVMYAMVTPMLNPFIYSLRNKDVKGALERLLSRADSCP

SEQ ID NO: 60022 - protein, 339 aa, Homo sapiens
  Payload ID: 11972
  Gene Symbol: OR7E24
  Gene Name: olfactory receptor, family 7, subfamily E, member 24
  Uniprot ID: Q6IFN5
  ENSP ID: ENSP00000387523
MSYFPILFFFFLKRCPSYTEPQNLTGVSEFLLLGLSEDPELQPVLAGLFLSMYLVTVLGNLLIILAVSSDSHLHTPMYFFLSNLSLADIGFTSTTVPKMIVDMQTHSRVISYEGCLTQMSFFVLFACMDDMLLSVMAYDRFVAICHPLHYRIIMNPRLCGFLILLSFFISLLDSQLHNLIMLQLTCFKDVDISNFFCDPSQLLHLRCSDTFINEMVIYFMGAIFGCLPISGILFSYYKIVSPILRVPTSDGKYKAFSTCGSHLAVVCLFYGTGLVGYLSSAVLPSPRKSMVASVMYTVVTPMLNPFIYSLRNKDIQSALCRLHGRIIKSHHLHPFCYMG

SEQ ID NO: 60023 - protein, 311 aa, Homo sapiens
  Payload ID: 11973
  Gene Symbol: OR7G1
  Gene Name: olfactory receptor, family 7, subfamily G, member 1
  Uniprot ID: Q8NGA0
  ENSP ID: ENSP00000444134
MGPRNQTAVSEFLLMKVTEDPELKLIPFSLFLSMYLVTILGNLLILLAVISDSHLHTPMYFLLFNLSFTDICLTTTTVPKILVNIQAQNQSITYTGCLTQICLVLVFAGLESCFLAVMAYDRYVAICHPLRYTVLMNVHFWGLLILLSMFMSTMDALVQSLMVLQLSFCKNVEIPLFFCEVVQVIKLACSDTLINNILIYFASSVFGAIPLSGIIFSYSQIVTSVLRMPSARGKYKAFSTCGCHLSVFSLFYGTAFGVYISSAVAESSRITAVASVMYTVVPQMMNPFIYSLRNKEMKKALRKLIGRLFPF

SEQ ID NO: 60024 - protein, 345 aa, Homo sapiens
  Payload ID: 11974
  Gene Symbol: OR7G2
  Gene Name: olfactory receptor, family 7, subfamily G, member 2
  Uniprot ID: Q8NG99
  ENSP ID: ENSP00000303822
MPMQLLLTDFIIFSIRFIINSMEARNQTAISKFLLLGLIEDPELQPVLFSLFLSMYLVTILGNLLILLAVISDSHLHTPMYFFLSNLSFLDICLSTTTIPKMLVNIQAQNRSITYSGCLTQICFVLFFAGLENCLLAAMAYDRYVAICHPLRYTVIMNPRLCGLLILLSLLTSVVNALLLSLMVLRLSFCTDLEIPLFFCELAQVIQLTCSDTLINNILIYFAACIFGGVPLSGIILSYTQITSCVLRMPSASGKHKAVSTCGSHLSIVLLFYGAGLGVYISSVVTDSPRKTAVASVMYSVFPQMVNPFIYSLRNKDMKGTLRKFIGRIPSLLWCAICFGFRFLE

SEQ ID NO: 60025 - protein, 312 aa, Homo sapiens
  Payload ID: 11975
  Gene Symbol: OR7G3
  Gene Name: olfactory receptor, family 7, subfamily G, member 3
  Uniprot ID: Q8NG95
  ENSP ID: ENSP00000302867
MKAGNFSDTPEFFLLGLSGDPELQPILFMLFLSMYLATMLGNLLIILAVNSDSHLHTPMYFLLSILSLVDICFTSTTMPKMLVNIQAQAQSINYTGCLTQICFVLVFVGLENGILVMMAYDRFVAICHPLRYNVIMNPKLCGLLLLLSFIVSVLDALLHTLMVLQLTFCIDLEIPHFFCELAHILKLACSDVLINNILVYLVTSLLGVVPLSGIIFSYTRIVSSVMKIPSAGGKYKAFSICGSHLIVVSLFYGTGFGVYLSSGATHSSRKGAIASVMYTVVTPMLNPLIYSLRNKDMLKALRKLISRIPSFH

SEQ ID NO: 60026 - protein, 326 aa, Homo sapiens
  Payload ID: 11976
  Gene Symbol: OR8A1
  Gene Name: olfactory receptor, family 8, subfamily A, member 1
  Uniprot ID: Q8NGG7
  ENSP ID: ENSP00000284287
MGFLSPMHPCRPPTQRRMAAGNHSTVTEFILKGLTKRADLQLPLFLLFLGIYLVTIVGNLGMITLICLNSQLHTPMYYFLSNLSLMDLCYSSVITPKMLVNFVSEKNIISYAGCMSQLYFFLVFVIAECYMLTVMAYDRYVAICHPLLYNIIMSHHTCLLLVAVVYAIGLIGSTIETGLMLKLPYCEHLISHYFCDILPLMKLSCSSTYDVEMTVFFSAGFNIIVTSLTVLVSYTFILSSILGISTTEGRSKAFSTCSSHLAAVGMFYGSTAFMYLKPSTISSLTQENVASVFYTTVIPMLNPLIYSLRNKEVKAAVQKTLRGKLF

SEQ ID NO: 60027 - protein, 310 aa, Homo sapiens
  Payload ID: 11977
  Gene Symbol: OR8B12
  Gene Name: olfactory receptor, family 8, subfamily B, member 12
  Uniprot ID: Q8NGG6
  ENSP ID: ENSP00000307159
MAAKNSSVTEFILEGLTHQPGLRIPLFFLFLGFYTVTVVGNLGLITLIGLNSHLHTPMYFFLFNLSLIDFCFSTTITPKMLMSFVSRKNIISFTGCMTQLFFFCFFVVSESFILSAMAYDRYVAICNPLLYTVTMSCQVCLLLLLGAYGMGFAGAMAHTGSIMNLTFCADNLVNHFMCDILPLLELSCNSSYMNELVVFIVVAVDVGMPIVTVFISYALILSSILHNSSTEGRSKAFSTCSSHIIVVSLFFGSGAFMYLKPLSILPLEQGKVSSLFYTIIVPVLNPLIYSLRNKDVKVALRRTLGRKIFS

SEQ ID NO: 60028 - protein, 313 aa, Homo sapiens
  Payload ID: 11978
  Gene Symbol: OR8B2
  Gene Name: olfactory receptor, family 8, subfamily B, member 2
  Uniprot ID: Q96RD0
  ENSP ID: ENSP00000364152
MLARNNSLVTEFILAGLTDHPEFRQPLFFLFLVIYIVTMVGNLGLITLFGLNSHLHTPMYYFLFNLSFIDLCYSSVFTPKMLMNFVSKKNIISNVGCMTRLFFFLFFVISECYMLTSMAYDRYVAICNPLLYKVTMSHQVCSMLTFAAYIMGLAGATAHTGCMLRLTFCSANIINHYLCDILPLLQLSCTSTYVNEVVVLIVVGTNITVPSCTILISYVFIVTSILHIKSTQGRSKAFSTCSSHVIALSLFFGSAAFMYIKYSSGSMEQGKVSSVFYTNVVPMLNPLIYSLRNKDVKVALRKALIKIQRRNIF

SEQ ID NO: 60029 - protein, 313 aa, Homo sapiens
  Payload ID: 11979
  Gene Symbol: OR8B3
  Gene Name: olfactory receptor, family 8, subfamily B, member 3
  Uniprot ID: Q8NGG8
  ENSP ID: ENSP00000346611
MLARNNSLVTEFILAGLTDHPEFQQPLFFLFLVVYIVTMVGNLGLIILFGLNSHLHTPMYYFLFNLSFIDLCYSSVFTPKMLMNFVSKKNIISYVGCMTQLFFFLFFVISECYMLTSMAYDRYVAICNPLLYKVTMSHQVCSMLTFAAYIMGLAGATAHTGCMLRLTFCSANIINHYLCDILPLLQLSCTSTYVNEVVVLIVVGINIMVPSCTILISYVFIVTSILHIKSTQGRSKAFSTCSSHVIALSLFFGSAAFMYIKYSSGSMEQGKVSSVFYTNVVPMLNPLIYSLRNKDVKVALRKALIKIQRRNIF

SEQ ID NO: 60030 - protein, 309 aa, Homo sapiens; identical to SEQ ID NO: 59449
  Payload ID: 11980
  Gene Symbol: OR8B4
  Gene Name: olfactory receptor, family 8, subfamily B, member 4 (gene/pseudogene)
  Uniprot ID: Q96RC9
  ENSP ID: ENSP00000485212

SEQ ID NO: 60031 - protein, 311 aa, Homo sapiens
  Payload ID: 11981
  Gene Symbol: OR8B8
  Gene Name: olfactory receptor, family 8, subfamily B, member 8
  Uniprot ID: Q15620
  ENSP ID: ENSP00000330280
MAAENSSFVTQFILAGLTDQPGVQIPLFFLFLGFYVVTVVGNLGLITLIRLNSHLHTPMYFFLYNLSFIDFCYSSVITPKMLMSFVLKKNSISYAGCMTQLFFFLFFVVSESFILSAMAYDRYVAICNPLLYMVTMSPQVCFLLLLGVYGMGFAGAMAHTACMMGVTFCANNLVNHYMCDILPLLECACTSTYVNELVVFVVVGIDIGVPTVTIFISYALILSSIFHIDSTEGRSKAFSTCSSHIIAVSLFFGSGAFMYLKPFSLLAMNQGKVSSLFYTTVVPMLNPLIYSLRNKDVKVALKKILNKNAFS

SEQ ID NO: 60032 - protein, 308 aa, Homo sapiens
  Payload ID: 11982
  Gene Symbol: OR8D1
  Gene Name: olfactory receptor, family 8, subfamily D, member 1
  Uniprot ID: Q8WZ84
  ENSP ID: ENSP00000350474
MTMENYSMAAQFVLDGLTQQAELQLPLFLLFLGIYVVTVVGNLGMILLIAVSPLLHTPMYYFLSSLSFVDFCYSSVITPKMLVNFLGKKNTILYSECMVQLFFFVVFVVAEGYLLTAMAYDRYVAICSPLLYNAIMSSWVCSLLVLAAFFLGFLSALTHTSAMMKLSFCKSHIINHYFCDVLPLLNLSCSNTHLNELLLFIIAGFNTLVPTLAVAVSYAFILYSILHIRSSEGRSKAFGTCSSHLMAVVIFFGSITFMYFKPPSSNSLDQEKVSSVFYTTVIPMLNPLIYSLRNKDVKKALRKVLVGK

SEQ ID NO: 60033 - protein, 311 aa, Homo sapiens
  Payload ID: 11983
  Gene Symbol: OR8D2
  Gene Name: olfactory receptor, family 8, subfamily D, member 2 (gene/pseudogene)
  Uniprot ID: Q9GZM6
  ENSP ID: ENSP00000350022
MATSNHSSGAEFILAGLTQRPELQLPLFLLFLGIYVVTVVGNLGMIFLIALSSQLYPPVYYFLSHLSFIDLCYSSVITPKMLVNFVPEENIISFLECITQLYFFLIFVIAEGYLLTAMEYDRYVAICRPLLYNIVMSHRVCSIMMAVVYSLGFLWATVHTTRMSVLSFCRSHTVSHYFCDILPLLTLSCSSTHINEILLFIIGGVNTLATTLAVLISYAFIFSSILGIHSTEGQSKAFGTCSSHLLAVGIFFGSITFMYFKPPSSTTMEKEKVSSVFYITIIPMLNPLIYSLRNKDVKNALKKMTRGRQSS

SEQ ID NO: 60034 - protein, 311 aa, Homo sapiens; identical to SEQ ID NO: 60033
  Payload ID: 11983
  Gene Symbol: OR8D2
  Gene Name: olfactory receptor, family 8, subfamily D, member 2 (gene/pseudogene)
  Uniprot ID: Q9GZM6
  ENSP ID: ENSP00000485536

SEQ ID NO: 60035 - protein, 311 aa, Homo sapiens; identical to SEQ ID NO: 60033
  Payload ID: 11983
  Gene Symbol: OR8D2
  Gene Name: olfactory receptor, family 8, subfamily D, member 2 (gene/pseudogene)
  Uniprot ID: Q9GZM6
  ENSP ID: ENSP00000485661

SEQ ID NO: 60036 - protein, 314 aa, Homo sapiens
  Payload ID: 11984
  Gene Symbol: OR8D4
  Gene Name: olfactory receptor, family 8, subfamily D, member 4
  Uniprot ID: Q8NGM9
  ENSP ID: ENSP00000325381
MGVKNHSTVTEFLLSGLTEQAELQLPLFCLFLGIYTVTVVGNLSMISIIRLNRQLHTPMYYFLSSLSFLDFCYSSVITPKMLSGFLCRDRSISYSGCMIQLFFFCVCVISECYMLAAMACDRYVAICSPLLYRVIMSPRVCSLLVAAVFSVGFTDAVIHGGCILRLSFCGSNIIKHYFCDIVPLIKLSCSSTYIDELLIFVIGGFNMVATSLTIIISYAFILTSILRIHSKKGRCKAFSTCSSHLTAVLMFYGSLMSMYLKPASSSSLTQEKVSSVFYTTVILMLNPLIYSLRNNEVRNALMKLLRRKISLSPG

SEQ ID NO: 60037 - protein, 311 aa, Homo sapiens
  Payload ID: 11985
  Gene Symbol: OR8G1
  Gene Name: olfactory receptor, family 8, subfamily G, member 1 (gene/pseudogene)
  Uniprot ID: Q15617
  ENSP ID: ENSP00000476313
MSGENNSSVTEFILAGLSEQPELQLPLFLLFLGIYVVTVVGNLGMTTLIWLSSHLHTPMYYFLSSLSFIDFCHSTVITPKMLVNFVTEKNIISYPECMTQLYFFLVFAIAECHMLAAMAYDRYMAICSPLLYSVIISNKACFSLILGVYIIGLVCASVHTGCMFRVQFCKFDLINHYFCDLLPLLKLSCSSIYVNKLLILCVGAFNILVPSLTILCSYIFIIASILHIRSTEGRSKAFSTCSSHMLAVVIFFGSAAFMYLQPSSISSMDQGKVSSVFYTIIVPMLNPLIYSLRNKDVHVSLKKMLQRRTLL

SEQ ID NO: 60038 - protein, 346 aa, Homo sapiens
  Payload ID: 11986
  Gene Symbol: OR8G5
  Gene Name: olfactory receptor, family 8, subfamily G, member 5
  Uniprot ID: Q8NG78
  ENSP ID: ENSP00000477014
MIIYKQGITFLQKENNNTIHLNTMFFLSPAETHQRMAAENHSFVTKFILVGLTEKSELQLPLFLVFLGIYVVTVLGNLGMITLIGLSSHLHTPMYCFLSSLSFIDFCHSTVITPKMLVNFVTEKNIISYPECMTQLYFFLVFAIAECHMLAAMAYDGYVAICSPLLYSIIISNKACFSLILVVYVIGLICASAHIGCMFRVQFCKFDVINHYFCDLISILKLSCSSTYINELLILIFSGINILVPSLTILSSYIFIIASILRIRYTEGRSKAFSTCSSHISAVSVFFGSAAFMYLQPSSVSSMDQGKVSSVFYTIVVPMLNPLIYSLRNKDVHVALKKTLGKRTFL

SEQ ID NO: 60039 - protein, 311 aa, Homo sapiens
  Payload ID: 11987
  Gene Symbol: OR8H1
  Gene Name: olfactory receptor, family 8, subfamily H, member 1
  Uniprot ID: Q8NGG4
  ENSP ID: ENSP00000323595
MGRRNNTNVPDFILTGLSDSEEVQMALFILFLLIYLITMLGNVGMILIIRLDLQLHTPMYFFLTHLSFIDLSYSTVITPKTLANLLTSNYISFMGCFAQMFFFVFLGAAECFLLSSMAYDRYVAICSPLRYPVIMSKRLCCALVTGPYVISFINSFVNVVWMSRLHFCDSNVVRHFFCDTSPILALSCMDTYDIEIMIHILAGSTLMVSLITISASYVSILSTILKINSTSGKQKALSTCASHLLGVTIFYGTMIFTYLKPRKSYSLGRDQVASVFYTIVIPMLNPLIYSLRNKEVKNALIRVMQRRQDSR

SEQ ID NO: 60040 - protein, 309 aa, Homo sapiens
  Payload ID: 11987
  Gene Symbol: OR8H1
  Gene Name: olfactory receptor, family 8, subfamily H, member 1
  ENSP ID: ENSP00000460360
NNTNVPDFILTGLSDSEEVQMALFILFLLIYLITMLGNVGMILIIRLDLQLHTPMYFFLTHLSFIDLSYSTVITPKTLANLLTSNYISFMGCFAQMFFFVFLGAAECFLLSSMAYDRYVAICSPLRYPVIMSKRLCCALVTGPYVISFINSFVNVVWMSRLHFCDSNVVRHFFCDTSPILALSCMDTYDIEIMIHILAGSTLMVSLITISASYVSILSTILKINSTSGKQKALSTCASHLLGVTIFYGTMIFTYLKPRKSYSLGRDQVASVFYTIVIPMLNPLIYSLRNKEVKNALIRVMQRIWYVLGL

SEQ ID NO: 60041 - protein, 309 aa, Homo sapiens; identical to SEQ ID NO: 60040
  Payload ID: 11987
  Gene Symbol: OR8H1
  Gene Name: olfactory receptor, family 8, subfamily H, member 1
  ENSP ID: ENSP00000483372

SEQ ID NO: 60042 - protein, 311 aa, Homo sapiens; identical to SEQ ID NO: 60039
  Payload ID: 11987
  Gene Symbol: OR8H1
  Gene Name: olfactory receptor, family 8, subfamily H, member 1
  Uniprot ID: Q8NGG4
  ENSP ID: ENSP00000486842

SEQ ID NO: 60043 - protein, 312 aa, Homo sapiens
  Payload ID: 11988
  Gene Symbol: OR8H2
  Gene Name: olfactory receptor, family 8, subfamily H, member 2
  Uniprot ID: Q8N162
  ENSP ID: ENSP00000323982
MMGRRNNTNVADFILMGLTLSEEIQMALFMLFLLIYLITMLGNVGMILIIRLDLQLHTPMYFFLTHLSFIDLSYSTVVTPKTLANLLTSNYISFTGCFAQMFFFAFLGTAECYLLSSMAHDRYAAICSPLHYTVIMSKRLCLALITGPYVIGFIDSFVNVVSMSRLHFYDSNVIHHFFCDTSPILALSCTDTYNTEILIFIIVGSTLMVSLFTISASYVFILFTILKINSTSGKQKAFSTCVSHLLGVTIFYSTLIFTYLKPRKSYSLGRDQVASVFYTIVIPVLNPLIYSLRNKEVKNAVIRVMQRRQDSR

SEQ ID NO: 60044 - protein, 311 aa, Homo sapiens
  Payload ID: 11988
  Gene Symbol: OR8H2
  Gene Name: olfactory receptor, family 8, subfamily H, member 2
  ENSP ID: ENSP00000482661
MGRRNNTNVADFILMGLTLSEEIQMALFMLFLLIYLITMLGNVGMILIIRLDLQLHTPMYFFLTHLSFIDLSYSTVVTPKTLANLLTSNYISFTGCFAQMFFFAFLGTAECYLLSSMAHDRYAAICSPLHYTVIMSKRLCLALITGPYVIGFIDSFVNVVSMSRLHFYDSNVIHHFFCDTSPILALSCTDTYNTEILIFIIVGSTLMVSLFTISASYVFILFTILKINSTSGKQKAFSTCVSHLLGVTIFYSTLIFTYLKPRKSYSLGRDQVASVFYTIVIPVLNPLIYSLRNKEVKNAVIRVMQRRQDSR

SEQ ID NO: 60045 - protein, 312 aa, Homo sapiens
  Payload ID: 11989
  Gene Symbol: OR8H3
  Gene Name: olfactory receptor, family 8, subfamily H, member 3
  Uniprot ID: Q8N146
  ENSP ID: ENSP00000323928
MMGRRNDTNVADFILTGLSDSEEVQMALFMLFLLIYLITMLGNVGMLLIIRLDLQLHTPMYFFLTHLSFIDLSYSTVVTPKTLANLLTSNYISFTGCFAQMFCFVFLGTAECYLLSSMAYDRYAAICSPLHYTVIMPKRLCLALITGPYVIGFMDSFVNVVSMSRLHFCDSNIIHHFFCDTSPILALSCTDTDNTEMLIFIIAGSTLMVSLITISASYVSILSTILKINSTSGKQKAFSTCVSHLLGVTIFYGTMIFTYLKPRKSYSLGRDQVAPVFYTIVIPMLNPLIYSLRNREVKNALIRVMQRRQDSR

SEQ ID NO: 60046 - protein, 310 aa, Homo sapiens
  Payload ID: 11990
  Gene Symbol: OR8I2
  Gene Name: olfactory receptor, family 8, subfamily I, member 2
  Uniprot ID: Q8N0Y5
  ENSP ID: ENSP00000303864
MAGNNFTEVTVFILSGFANHPELQVSLFLMFLFIYLFTVLGNLGLITLIRMDSQLHTPMYFFLSNLAFIDIFYSSTVTPKALVNFQSNRRSISFVGCFVQMYFFVGLVCCECFLLGSMAYNRYIAICNPLLYSVVMSQKVSNWLGVMPYVIGFTSSLISVWVISSLAFCDSSINHFFCDTTALLALSCVDTFGTEMVSFVLAGFTLLSSLLIITVTYIIIISAILRIQSAAGRQKAFSTCASHLMAVTIFYGSLIFTYLQPDNTSSLTQAQVASVFYTIVIPMLNPLIYSLRNKDVKNALLRVIHRKLFP

SEQ ID NO: 60047 - protein, 184 aa, Homo sapiens
  Payload ID: 11990
  Gene Symbol: OR8I2
  Gene Name: olfactory receptor, family 8, subfamily I, member 2
  ENSP ID: ENSP00000482751
MAGNNFTEVTVFILSGFANHPELQVSLFLMFLFIYLFTVLGNLGLITLIRMDSQLHTPMYFFLSNLAFIDIFYSSTVTPKALVNFQSNRRSISFVGCFVQMYFFVGLVCCECFLLGSMAYNRYIAICNPLLYSVVMSQKVSNWLGVMPYVIGFTSSLISVWVISSLAFCDSSINHFFCDTTALL

SEQ ID NO: 60048 - protein, 316 aa, Homo sapiens
  Payload ID: 11991
  Gene Symbol: OR8J1
  Gene Name: olfactory receptor, family 8, subfamily J, member 1
  Uniprot ID: Q8NGP2
  ENSP ID: ENSP00000304060
MAPENFTRVTEFILTGVSSCPELQIPLFLVFLVLYGLTMAGNLGIITLTSVDSRLQTPMYFFLQHLALINLGNSTVIAPKMLINFLVKKKTTSFYECATQLGGFLFFIVSEVIMLALMAYDRYVAICNPLLYMVVVSRRLCLLLVSLTYLYGFSTAIVVSSYVFSVSYCSSNIINHFYCDNVPLLALSCSDTYLPETVVFISAATNVVGSLIIVLVSYFNIVLSILKICSSEGRKKAFSTCASHMMAVTIFYGTLLFMYVQPRSNHSLDTDDKMASVFYTLVIPMLNPLIYSLRNKDVKTALQRFMTNLCYSFKTM

SEQ ID NO: 60049 - protein, 316 aa, Homo sapiens; identical to SEQ ID NO: 60048
  Payload ID: 11991
  Gene Symbol: OR8J1
  Gene Name: olfactory receptor, family 8, subfamily J, member 1
  Uniprot ID: Q8NGP2
  ENSP ID: ENSP00000460206

SEQ ID NO: 60050 - protein, 314 aa, Homo sapiens
  Payload ID: 11992
  Gene Symbol: OR8J2
  Gene Name: olfactory receptor, family 8, subfamily J, member 2 (gene/pseudogene)
  ENSP ID: ENSP00000477259
MASGNLTWVTEFILVGVSDDPELQIPLFLVFLVLYLLTVAGNLGIITLTSVDPQLQTPMYFFLHLAIINLCNSTVVAPKMLVNFLVTKKTISYYGCAAQLGGFLVFIVAEIFTLAAMAYDRYVAIWSPLLYAVVVSPKVCRLLVSLTYLQSLITALTVSSCVFSVSYCSSNIINHFYCDDVPLLALSCSDTYIPETAVFIFSGTNLLFSMIVVLISYFNIVITILRIRSSEGRQKAFSTCASHMIAVVVFYGTLLFMYLQPRSNHSLDTDKMASVFYTLVIPVLNPLIYSLRNKNVKDALKRFLDNPCRSLKLM

SEQ ID NO: 60051 - protein, 314 aa, Homo sapiens; identical to SEQ ID NO: 60050
  Payload ID: 11992
  Gene Symbol: OR8J2
  Gene Name: olfactory receptor, family 8, subfamily J, member 2 (gene/pseudogene)
  ENSP ID: ENSP00000485975

SEQ ID NO: 60052 - protein, 315 aa, Homo sapiens
  Payload ID: 11993
  Gene Symbol: OR8J3
  Gene Name: olfactory receptor, family 8, subfamily J, member 3
  Uniprot ID: Q8NGG0
  ENSP ID: ENSP00000301529
MAPENFTRVTEFILTGVSSCPELQIPLFLVFLVLYVLTMAGNLGIITLTSVDSRLQNPMYFFLRHLAIINLGNSTVIAPKMLMNFLVKKKTTSFYECATQLGGFLFFIVSEVMMLAVMAYDRYVAICNPLLYMVVVSRRLCLLLVSLTYLYGFSTAIVVSPCIFSVSYCSSNIINHFYCDIAPLLALSCSDTYIPETIVFISAATNLVFSMITVLVSYFNIVLSILRIRSPEGRKKAFSTCASHMIAVTVFYGTMLFMYLQPQTNHSLDTDKMASVFYTLVIPMLNPLIYSLRNNDVNVALKKFMENPCYSFKSM

SEQ ID NO: 60053 - protein, 319 aa, Homo sapiens
  Payload ID: 11994
  Gene Symbol: OR8K1
  Gene Name: olfactory receptor, family 8, subfamily K, member 1
  Uniprot ID: Q8NGG5
  ENSP ID: ENSP00000279783
MNHVVKHNHTAVTKVTEFILMGITDNPGLQAPLFGLFLIIYLVTVIGNLGMVILTYLDSKLHTPMYFFLRHLSITDLGYSTVIAPKMLVNFIVHKNTISYNWYATQLAFFEIFIISELFILSAMAYDRYVAICKPLLYVIIMAEKVLWVLVIVPYLYSTFVSLFLTIKLFKLSFCGSNIISYFYCDCIPLMSILCSDTNELELIILIFSGCNLLFSLSIVLISYMFILVAILRMNSRKGRYKAFSTCSSHLTVVIMFYGTLLFIYLQPKSSHTLAIDKMASVFYTLLIPMLNPLIYSLRNKEVKDALKRTLTNRFKIPI

SEQ ID NO: 60054 - protein, 319 aa, Homo sapiens; identical to SEQ ID NO: 60053
  Payload ID: 11994
  Gene Symbol: OR8K1
  Gene Name: olfactory receptor, family 8, subfamily K, member 1
  Uniprot ID: Q8NGG5
  ENSP ID: ENSP00000461384

SEQ ID NO: 60055 - protein, 312 aa, Homo sapiens
  Payload ID: 11995
  Gene Symbol: OR8K3
  Gene Name: olfactory receptor, family 8, subfamily K, member 3 (gene/pseudogene)
  Uniprot ID: Q8NH51
  ENSP ID: ENSP00000323555
MEQHNLTTVNEFILTGITDIAELQAPLFALFLMIYVISVMGNLGMIVLTKLDSRLQTPMYFFLRHLAFMDLGYSTTVGPKMLVNFVVDKNIISYYFCATQLAFFLVFIGSELFILSAMSYDLYVAICNPLLYTVIMSRRVCQVLVAIPYLYCTFISLLVTIKIFTLSFCGYNVISHFYCDSLPLLPLLCSNTHEIELIILIFAAIDLISSLLIVLLSYLLILVAILRMNSAGRQKAFSTCGAHLTVVIVFYGTLLFMYVQPKSSHSFDTDKVASIFYTLVIPMLNPLIYSLRNKDVKYALRRTWNNLCNIFV

SEQ ID NO: 60056 - protein, 312 aa, Homo sapiens; identical to SEQ ID NO: 60055
  Payload ID: 11995
  Gene Symbol: OR8K3
  Gene Name: olfactory receptor, family 8, subfamily K, member 3 (gene/pseudogene)
  Uniprot ID: Q8NH51
  ENSP ID: ENSP00000460880

SEQ ID NO: 60057 - protein, 312 aa, Homo sapiens; identical to SEQ ID NO: 60055
  Payload ID: 11995
  Gene Symbol: OR8K3
  Gene Name: olfactory receptor, family 8, subfamily K, member 3 (gene/pseudogene)
  Uniprot ID: Q8NH51
  ENSP ID: ENSP00000485070

SEQ ID NO: 60058 - protein, 312 aa, Homo sapiens; identical to SEQ ID NO: 60055
  Payload ID: 11995
  Gene Symbol: OR8K3
  Gene Name: olfactory receptor, family 8, subfamily K, member 3 (gene/pseudogene)
  Uniprot ID: Q8NH51
  ENSP ID: ENSP00000485634

SEQ ID NO: 60059 - protein, 307 aa, Homo sapiens
  Payload ID: 11996
  Gene Symbol: OR8K5
  Gene Name: olfactory receptor, family 8, subfamily K, member 5
  Uniprot ID: Q8NH50
  ENSP ID: ENSP00000323853
MGQHNLTVLTEFILMELTRRPELQIPLFGVFLVIYLITVVGNLTMIILTKLDSHLHTPMYFSIRHLAFVDLGNSTVICPKVLANFVVDRNTISYYACAAQLAFFLMFIISEFFILSAMAYDRYVAICNPLLYYVIMSQRLCHVLVGIQYLYSTFQALMFTIKIFTLTFCGSNVISHFYCDDVPLLPMLCSNAQEIELLSILFSVFNLISSFLIVLVSYMLILLAICQMHSAEGRKKAFSTCGSHLTVVVVFYGSLLFMYMQPNSTHFFDTDKMASVFYTLVIPMLNPLIYSLRNEEVKNAFYKLFEN

SEQ ID NO: 60060 - protein, 359 aa, Homo sapiens
  Payload ID: 11997
  Gene Symbol: OR8S1
  Gene Name: olfactory receptor, family 8, subfamily S, member 1
  Uniprot ID: Q8NH09
  ENSP ID: ENSP00000310632
MALGNHSTITEFLLLGLSADPNIRALLFVLFLGIYLLTIMENLMLLLMIRADSCLHKPMYFFLSHLSFVDLCFSSVIVPKMLENLLSQRKTISVEGCLAQVFFVFVTAGTEACLLSGMAYDRHAAICRPLLYGQIMGKQLYMHLVWGSWGLGFLDALINVLLAVNMVFCEAKIIHHYSYEMPSLLPLSCSDISRSLIALLCSTLLHGLGNFLLVFLSYTRIISTILSISSTSGRSKAFSTCSAHLTAVTLYYGSGLLRHLMPNSGSPIELIFSVQYTVVTPMLNSLIYSLKNKEVKGERSLRDSSHLPQLHKGQARWKRPAFTEGRREPGHPELSIPVTPQPQGACACSALRAAPTALP

SEQ ID NO: 60061 - protein, 309 aa, Homo sapiens
  Payload ID: 11998
  Gene Symbol: OR8U1
  Gene Name: olfactory receptor, family 8, subfamily U, member 1
  Uniprot ID: Q8NH10
  ENSP ID: ENSP00000304188
MAHINCTQATEFILVGLTDHQELKMPLFVLFLSIYLFTVVGNLGLILLIRADTSLNTPMYFFLSNLAFVDFCYSSVITPKMLGNFLYKQNVISFDACATQLGCFLTFMISESLLLASMAYDRYVAICNPLLYMVVMTPGICIQLVAVPYSYSFLMALFHTILTFRLSYCHSNIVNHFYCDDMPLLRLTCSDTRFKQLWIFACAGIMFISSLLIVFVSYMFIISAILRMHSAEGRQKAFSTCGSHMLAVTIFYGTLIFMYLQPSSSHALDTDKMASVFYTVIIPMLNPLIYSLQNKEVKEALKKIIINKN

SEQ ID NO: 60062 - protein, 309 aa, Homo sapiens
  Payload ID: 11998
  Gene Symbol: OR8U1
  Gene Name: olfactory receptor, family 8, subfamily U, member 1
  Uniprot ID: P0C7N5
  ENSP ID: ENSP00000487204
MTQINCTQVTEFILVGLTDRQELKMPLFVLFLSIYLFTVVGNLGLILLIRTDEKLNTPMYFFLSNLAFVDFCYSSVITPKMLGNFLYKQNSISFNACAAQLGCFLAFMTAECLLLASMAYDRYVAICNPLMYMVVMSPGICIQLVAAPHSYSILVALFHTILTFRLSYCHSNIVNHFYCDDMPLLRLTCSDTRFKQLWIFACAGIMFISSLLIVFVSYMFIISAILRMHSAEGRQKAFSTCGSHMLAVTIFYGTLIFMYLQPSSSHALDTDKMASVFYTVIIPMLNPLIYSLQNKEVKEALKKIIINKN

SEQ ID NO: 60063 - protein, 309 aa, Homo sapiens [sequence omitted]

SEQ ID NO: 60064 - protein, 319 aa, Homo sapiens
  Payload ID: 11999
  Gene Symbol: OR8U8
  Gene Name: olfactory receptor, family 8, subfamily U, member 8
  ENSP ID: ENSP00000486165
MAHINCTQATEFILVGLTDRQELKMPLFVLFLSIYLFTVVGNLGLILLIRADTSLNTPMYFFLSNLAFVDFCYSSVITPKMLGNFLYKQNVISFDACATQLGCFLTFMISESLLLASMAYDRYVAICNPLLYMVVMTPGICIQLVAVPYSYSFLMALFHTILTFCLSYCHSNIVNHFYCDDMPLLRLTCSDTRFKQLWILACAGITFICSVLIVFVSYMFIIFAILRMSSAEGRRKAFSTCSSHMLAVTIFYGTLIFMYLQPSSSHSLDADKMASVFYTVIIPMLNPLIYSLRNKDVKDALKKVIINRNHAFIFLKLRK

SEQ ID NO: 60065 - protein, 310 aa, Homo sapiens
  Payload ID: 12000
  Gene Symbol: OR9A2
  Gene Name: olfactory receptor, family 9, subfamily A, member 2
  Uniprot ID: Q8NGT5
  ENSP ID: ENSP00000316518
MMDNHSSATEFHLLGFPGSQGLHHILFAIFFFFYLVTLMGNTVIIVIVCVDKRLQSPMYFFLSHLSTLEILVTTIIVPMMLWGLLFLGCRQYLSLHVSLNFSCGTMEFALLGVMAVDRYVAVCNPLRYNIIMNSSTCIWVVIVSWVFGFLSEIWPIYATFQFTFRKSNSLDHFYCDRGQLLKLSCDNTLLTEFILFLMAVFILIGSLIPTIVSYTYIISTILKIPSASGRRKAFSTFASHFTCVVIGYGSCLFLYVKPKQTQGVEYNKIVSLLVSVLTPFLNPFIFTLRNDKVKEALRDGMKRCCQLLKD

SEQ ID NO: 60066 - protein, 310 aa, Homo sapiens; identical to SEQ ID NO: 60065
  Payload ID: 12000
  Gene Symbol: OR9A2
  Gene Name: olfactory receptor, family 9, subfamily A, member 2
  Uniprot ID: Q8NGT5
  ENSP ID: ENSP00000479412

SEQ ID NO: 60067 - protein, 314 aa, Homo sapiens
  Payload ID: 12001
  Gene Symbol: OR9A4
  Gene Name: olfactory receptor, family 9, subfamily A, member 4
  Uniprot ID: Q8NGU2
  ENSP ID: ENSP00000448789
MLMNYSSATEFYLLGFPGSEELHHILFAIFFFFYLVTLMGNTVIIMIVCVDKRLQSPMYFFLGHLSALEILVTTIIVPVMLWGLLLPGMQTIYLSACVVQLFLYLAVGTTEFALLGAMAVDRYVAVCNPLRYNIIMNRHTCNFVVLVSWVFGFLFQIWPVYVMFQLTYCKSNVVNNFFCDRGQLLKLSCNNTLFTEFILFLMAVFVLFGSLIPTIVSNAYIISTILKIPSSSGRRKSFSTCASHFTCVVIGYGSCLFLYVKPKQTQAADYNWVVSLMVSVVTPFLNPFIFTLRNDKVIEALRDGVKRCCQLFRN

SEQ ID NO: 60068 - protein, 305 aa, Homo sapiens
  Payload ID: 12002
  Gene Symbol: OR9G1
  Gene Name: olfactory receptor, family 9, subfamily G, member 1
  Uniprot ID: Q8NH87
  ENSP ID: ENSP00000309012
MQRSNHTVTEFILLGFTTDPGMQLGLFVVFLGVYSLTVVGNSTLIVLICNDSCLHTPMYFFTGNLSFLDLWYSSVYTPKILVTCISEDKSISFAGCLCQFFFSAGLAYSECYLLAAVAYDRYVAISKPLLYAQAMSIKLCALLVAVSYCGGFINSSIITKKTFSFNFCRENIIDDFFCDLLPLVELACGEKGGYKIMMYFLLASNVICPAVLILASYLFIITSVLRISSSKGYLKAFSTCSSHLTSVTLYYGSILYIYALPRSSYSFDMDKIVSTFYTVVFPMLNLMIYSLRNKDVKEALKKLLP

SEQ ID NO: 60069 - protein, 305 aa, Homo sapiens
  Payload ID: 12002
  Gene Symbol: OR9G1
  Gene Name: olfactory receptor, family 9, subfamily G, member 1
  ENSP ID: ENSP00000461395
MQRSNHTVTEFILLGFTTDPGMQLGLFVVFLGVYSLTVVGNSTLIVLICNDSRLHTPMYFFIGNLSFLDLWYSSVYTPKILVTCISEDKSISFAGCLGQFFFSAGLAYSECYLLAAVAYDRYVAISKPLLYAQAMSIKLCALLVAVSYCGGFINSSIITKKTFSFNFCRENIIDDFFCDLLPLVELACGEKGGYKIMMYFLLASNVICPAVLILASYLFIITSVLRISSSQGRLKAFSTCSSHLTSVTLYYGSILYIYALPRSSYSFDMDKIVSTFYTVVFPMLNLMIYSLRNKDVKEALKKLLP

SEQ ID NO: 60070 - protein, 327 aa, Homo sapiens
  Payload ID: 12003
  Gene Symbol: OR9G4
  Gene Name: olfactory receptor, family 9, subfamily G, member 4
  Uniprot ID: Q8NGQ1
  ENSP ID: ENSP00000307515
MIFPSHDSQAFTSVDMEVGNCTILTEFILLGFSADSQWQPILFGVFLMLYLITLSGNMTLVILIRTDSHLHTPMYFFIGNLSFLDFWYTSVYTPKILASCVSEDKRISLAGCGAQLFFSCVVAYTECYLLAAMAYDRHAAICNPLLYSGTMSTALCTGLVAGSYIGGFLNAIAHTANTFRLHFCGKNIIDHFFCDAPPLVKMSCTNTRVYEKVLLGVVGFTVLSSILAILISYVNILLAILRIHSASGRHKAFSTCASHLISVMLFYGSLLFMYSRPSSTYSLERDKVAALFYTVINPLLNPLIYSLRNKDIKEAFRKATQTIQPQT

SEQ ID NO: 60071 - protein, 327 aa, Homo sapiens; identical to SEQ ID NO: 60070
  Payload ID: 12003
  Gene Symbol: OR9G4
  Gene Name: olfactory receptor, family 9, subfamily G, member 4
  Uniprot ID: Q8NGQ1
  ENSP ID: ENSP00000459325

SEQ ID NO: 60072 - protein, 305 aa, Homo sapiens
  Payload ID: 12004
  Gene Symbol: OR9G9
  Gene Name: olfactory receptor, family 9, subfamily G, member 9
  ENSP ID: ENSP00000458970
MQRSNHTVTEFILLGFTTDPGMQLGLFVVFLGVYSLTVVGNSTLIVLICNDSHLHTPMYFVVGNLSFLDLWYSSVYTPKILVICISEDKSISFAGCLCQFFFSAGLAYSECCLLAAMAYDRYVAISKPLLYAQAMSIKLCALLVAVSYCGGFINSSIITKKTFSFNFCCENIIDDFFCDLLPLVKLACGEKGGYKFLMYFLLASNVICPAVLILASYLFIITSVLRISSSQGRLKAFSTCSSHLTSVTLYYGSILYIYALPRSSYSFDMDKIVSTFYTEVLPMLNPMIYSLRNKDVKEALKKLLP

SEQ ID NO: 60073 - protein, 314 aa, Homo sapiens
  Payload ID: 12005
  Gene Symbol: OR9I1
  Gene Name: olfactory receptor, family 9, subfamily I, member 1
  Uniprot ID: Q8NGQ6
  ENSP ID: ENSP00000302606
MAKNNLTRVTEFILMGFMDHPKLEIPLFLVFLSFYLVTLLGNVGMIMLIQVDVKLYTPMYFFLSHLSLLDACYTSVITPQILATLATGKTVISYGHCAAQFFLFTICAGTECFLLAVMAYDRYAAIRNPLLYTVAMNPRLCWSLVVGAYVCGVSGAILRTTCTFTLSFCKDNQINFFFCDLPPLLKLACSDTANIEIVIIFFGNFVILANASVILISYLLIIKTILKVKSSGGRAKTFSTCASHITAVALFFGALIFMYLQSGSGKSLEEDKVVSVFYTVVIPMLNPLIYSLRNKDVKDAFRKVARRLQVSLSM

SEQ ID NO: 60074 - protein, 335 aa, Homo sapiens
  Payload ID: 12006
  Gene Symbol: OR9K2
  Gene Name: olfactory receptor, family 9, subfamily K, member 2
  Uniprot ID: Q8NGE7
  ENSP ID: ENSP00000307598
MLGSKPRVHLYILPCASQQVSTMGDRGTSNHSEMTDFILAGFRVRPELHILLFLLFLFVYAMILLGNVGMMTIIMTDPRLNTPMYFFLGNLSFIDLFYSSVIEPKAMINFWSENKSISFAGCVAQLFLFALLIVTEGFLLAAMAYDRFIAICNPLLYSVQMSTRLCTQLVAGSYFCGCISSVIQTSMTFTLSFCASRAVDHFYCDSRPLQRLSCSDLFIHRMISFSLSCIIILPTIIVIIVSYMYIVSTVLKIHSTEGHKKAFSTCSSHLGVVSVLYGAVFFMYLTPDRFPELSKVASLCYSLVTPMLNPLIYSLRNKDVQEALKKFLEKKNIIL

SEQ ID NO: 60075 - protein, 310 aa, Homo sapiens
  Payload ID: 12007
  Gene Symbol: OR9Q1
  Gene Name: olfactory receptor, family 9, subfamily Q, member 1
  Uniprot ID: Q8NGQ5
  ENSP ID: ENSP00000334934
MAEMNLTLVTEFLLIAFTEYPEWALPLFLLFLFMYLITVLGNLEMIILILMDHQLHAPMYFLLSHLAFMDVCYSSITVPQMLAVLLEHGAALSYTRCAAQFFLFTFFGSIDCYLLALMAYDRYLAVCQPLLYVTILTQQARLSLVAGAYVAGLISALVRTVSAFTLSFCGTSEIDFIFCDLPPLLKLTCGESYTQEVLIIMFAIFVIPASMVVILVSYLFIIVAIMGIPAGSQAKTFSTCTSHLTAVSLFFGTLIFMYLRGNSDQSSEKNRVVSVLYTEVIPMLNPLIYSLRNKEVKEALRKILNRAKLS

SEQ ID NO: 60076 - protein, 310 aa, Homo sapiens; identical to SEQ ID NO: 60075
  Payload ID: 12007
  Gene Symbol: OR9Q1
  Gene Name: olfactory receptor, family 9, subfamily Q, member 1
  Uniprot ID: Q8NGQ5
  ENSP ID: ENSP00000479549

SEQ ID NO: 60077 - protein, 314 aa, Homo sapiens
  Payload ID: 12008
  Gene Symbol: OR9Q2
  Gene Name: olfactory receptor, family 9, subfamily Q, member 2
  Uniprot ID: Q8NGE9
  ENSP ID: ENSP00000308714
MAERNYTVVTEFFLTAFTEHLQWRVPLFLIFLSFYLATMLGNTGMILLIRGDRRLHTPMYFFLSHLSLVDICYSSAIIPQMLAVLWEHGTTISQARCAAQFFLFTFFASIDCYLLAIMAYDRYTAVCQPLLYVTIITEKARWGLVTGAYVAGFFSAFVRTVTAFTLSFCGNNEINFIFCDLPPLLKLSCGDSYTQEVVIIVFALFVMPACILVILVSYLFIIVAILQIHSAGGRAKTFSTCASHLTAVALFFGTLIFMYLRDNTGQSSEGDRVVSVLYTVVTPMLNPLIYSLRNKEVKEATRKALSKSKPARRP

SEQ ID NO: 60078 - protein, 323 aa, Homo sapiens
  Payload ID: 12009
  Gene Symbol: OLIG2
  Gene Name: oligodendrocyte lineage transcription factor 2
  Uniprot ID: Q13516
  ENSP ID: ENSP00000331040
MDSDASLVSSRPSSPEPDDLFLPARSKGSSGSAFTGGTVSSSTPSDCPPELSAELRGAMGSAGAHPGDKLGGSGFKSSSSSTSSSTSSAAASSTKKDKKQMTEPELQQLRLKINSRERKRMHDLNIAMDGLREVMPYAHGPSVRKLSKIATLLLARNYILMLTNSLEEMKRLVSEIYGGHHAGFHPSACGGLAHSAPLPAATAHPAAAAHAAHHPAVHHPILPPAAAAAAAAAAAAAVSSASLPGSGLPSVGSIRPPHGLLKSPSAAAAAPLGGGGGGSGASGGFQHWGGMPCPCSMCQVPPPHHHVSAMGAGSLPRLTSDAK

SEQ ID NO: 60079 - protein, 323 aa, Homo sapiens; identical to SEQ ID NO: 60078
  Payload ID: 12009
  Gene Symbol: OLIG2
  Gene Name: oligodendrocyte lineage transcription factor 2
  Uniprot ID: Q13516
  ENSP ID: ENSP00000371794

SEQ ID NO: 60080 - protein, 62 aa, Homo sapiens
  Payload ID: 12009
  Gene Symbol: OLIG2
  Gene Name: oligodendrocyte lineage transcription factor 2
  ENSP ID: ENSP00000391183
MDSDASLVSSRPSSPEPDDLFLPARSKGSSGSAFTGGTVSSSTPSDCPPELSAELRGAMGSA

SEQ ID NO: 60081 - protein, 440 aa, Homo sapiens
  Payload ID: 12010
  Gene Symbol: OMG
  Gene Name: oligodendrocyte myelin glycoprotein
  Uniprot ID: P23515
  ENSP ID: ENSP00000247271
MEYQILKMSLCLFILLFLTPGILCICPLQCICTERHRHVDCSGRNLSTLPSGLQENIIHLNLSYNHFTDLHNQLTQYTNLRTLDISNNRLESLPAHLPRSLWNMSAANNNIKLLDKSDTAYQWNLKYLDVSKNMLEKVVLIKNTLRSLEVLNLSSNKLWTVPTNMPSKLHIVDLSNNSLTQILPGTLINLTNLTHLYLHNNKFTFIPDQSFDQLFQLQEITLYNNRWSCDHKQNITYLLKWMMETKAHVIGTPCSTQISSLKEHNMYPTPSGFTSSLFTVSGMQTVDTINSLSVVTQPKVTKIPKQYRTKETTFGATLSKDTTFTSTDKAFVPYPEDTSTETINSHEAAAATLTIHLQDGMVTNTSLTSSTKSSPTPMTLSITSGMPNNFSEMPQQSTTLNLWREETTTNVKTPLPSVANAWKVNASFLLLLNVVVMLAV

SEQ ID NO: 60082 - protein, 271 aa, Homo sapiens
  Payload ID: 12011
  Gene Symbol: OLIG1
  Gene Name: oligodendrocyte transcription factor 1
  Uniprot ID: Q8TAK6
  ENSP ID: ENSP00000371785
MYYAVSQARVNAVPGTMLRPQRPGDLQLGASLYELVGYRQPPSSSSSSTSSTSSTSSSSTTAPLLPKAAREKPEAPAEPPGPGPGSGAHPGGSARPDAKEEQQQQLRRKINSRERKRMQDLNLAMDALREVILPYSAAHCQGAPGRKLSKIATLLLARNYILLLGSSLQELRRALGEGAGPAAPRLLLAGLPLLAAAPGSVLLAPGAVGPPDALRPAKYLSLALDEPPCGQFALPGGGAGGPGLCTCAVCKFPHLVPASLGLAAVQAQFSK

SEQ ID NO: 60083 - protein, 32 aa, Homo sapiens
  Payload ID: 12011
  Gene Symbol: OLIG1
  Gene Name: oligodendrocyte transcription factor 1
  ENSP ID: ENSP00000414840
  MOD_RES (1)..(1): Any amino acid
XGPGLCTCAVCKFPHLVPASLGLAAVQAQFSK

SEQ ID NO: 60084 - protein, 272 aa, Homo sapiens
  Payload ID: 12012
  Gene Symbol: OLIG3
  Gene Name: oligodendrocyte transcription factor 3
  Uniprot ID: Q7RTU3
  ENSP ID: ENSP00000356708
MNSDSSSVSSRASSPDMDEMYLRDHHHRHHHHQESRLNSVSSTQGDMMQKMPGESLSRAGAKAAGESSKYKIKKQLSEQDLQQLRLKINGRERKRMHDLNLAMDGLREVMPYAHGPSVRKLSKIATLLLARNYILMLTSSLEEMKRLVGEIYGGHHSAFHCGTVGHSAGHPAHAANSVHPVHPILGGALSSGNASSPLSAASLPAIGTIRPPHSLLKAPSTPPALQLGSGFQHWAGLPCPCTICQMPPPPHLSALSTANMARLSAESKDLLK

SEQ ID NO: 60085 - protein, 141 aa, Homo sapiens
  Payload ID: 12013
  Gene Symbol: OPALIN
  Gene Name: oligodendrocytic myelin paranodal and inner loop protein
  Uniprot ID: Q96PE5
  ENSP ID: ENSP00000360214
MSFSLNFTLPANTTSSPVTGGKETDCGPSLGLAAGIPLLVATALLVALLFTLIHRRRSSIEAMEESDRPCEISEIDDNPKISENPRRSPTHEKNTMGAQEAHIYVKTVAGSEEPVHDRYRPTIEMERRRGLWWLVPRLSLE

SEQ ID NO: 60086 - protein, 129 aa, Homo sapiens
  Payload ID: 12013
  Gene Symbol: OPALIN
  Gene Name: oligodendrocytic myelin paranodal and inner loop protein
  ENSP ID: ENSP00000377448
MTSSPVTGGKETDCGPSLGLAAGIPLLVATALLVALLFTLIHRRRSSIEAMEESDRPCEISEIDDNPKISENPRRSPTHEKNTMGAQEAHIYVKTVAGSEEPVHDRYRPTIEMERRRGLWWLVPRLSLE

SEQ ID NO: 60087 - protein, 118 aa, Homo sapiens
  Payload ID: 12013
  Gene Symbol: OPALIN
  Gene Name: oligodendrocytic myelin paranodal and inner loop protein
  Uniprot ID: Q96PE5
  ENSP ID: ENSP00000377449
MDCGPSLGLAAGIPLLVATALLVALLFTLIHRRRSSIEAMEESDRPCEISEIDDNPKISENPRRSPTHEKNTMGAQEAHIYVKTVAGSEEPVHDRYRPTIEMERRRGLWWLVPRLSLE

SEQ ID NO: 60088 - protein, 130 aa, Homo sapiens
  Payload ID: 12013
  Gene Symbol: OPALIN
  Gene Name: oligodendrocytic myelin paranodal and inner loop protein
  Uniprot ID: Q96PE5
  ENSP ID: ENSP00000398025
MSFSLNFTLPANTDCGPSLGLAAGIPLLVATALLVALLFTLIHRRRSSIEAMEESDRPCEISEIDDNPKISENPRRSPTHEKNTMGAQEAHIYVKTVAGSEEPVHDRYRPTIEMERRRGLWWLVPRLSLE

SEQ ID NO: 60089 - protein, 79 aa, Homo sapiens
  Payload ID: 12013
  Gene Symbol: OPALIN
  Gene Name: oligodendrocytic myelin paranodal and inner loop protein
  ENSP ID: ENSP00000445125
MEESDRPCEISEIDDNPKISENPRRSPTHEKNTMGAQEAHIYVKTVAGSEEPVHDRYRPTIEMERRRGLWWLVPRLSLE

SEQ ID NO: 60090 - protein, 131 aa, Homo sapiens
  Payload ID: 12013
  Gene Symbol: OPALIN
  Gene Name: oligodendrocytic myelin paranodal and inner loop protein
  Uniprot ID: Q96PE5
  ENSP ID: ENSP00000484599
MRMTSSPVTGGKETDCGPSLGLAAGIPLLVATALLVALLFTLIHRRRSSIEAMEESDRPCEISEIDDNPKISENPRRSPTHEKNTMGAQEAHIYVKTVAGSEEPVHDRYRPTIEMERRRGLWWLVPRLSLE

SEQ ID NO: 60091 - protein, 368 aa, Homo sapiens
  Payload ID: 12014
  Gene Symbol: OBFC1
  Gene Name: oligonucleotide/oligosaccharide-binding fold containing 1
  Uniprot ID: Q9H668
  ENSP ID: ENSP00000224950
MQPGSSRCEEETPSLLWGLDPVFLAFAKLYIRDILDMKESRQVPGVFLYNGHPIKQVDVLGTVIGVRERDAFYSYGVDDSTGVINCICWKKLNTESVSAAPSAARELSLTSQLKKLQETIEQKTKIEIGDTIRVRGSIRTYREEREIHATTYYKVDDPVWNIQIARMLELPTIYRKVYDQPFHSSALEKEEALSNPGALDLPSLTSLLSEKAKEFLMENRVQSFYQQELEMVESLLSLANQPVIHSASSDQVNFKKDTTSKAIHSIFKNAIQLLQEKGLVFQKDDGFDNLYYVTREDKDLHRKIHRIIQQDCQKPNHMEKGCHFLHILACARLSIRPGLSEAVLQQVLELLEDQSDIVSTMEHYYTAF

SEQ ID NO: 60092 - protein, 368 aa, Homo sapiens; identical to SEQ ID NO: 60091
  Payload ID: 12014
  Gene Symbol: OBFC1
  Gene Name: oligonucleotide/oligosaccharide-binding fold containing 1
  Uniprot ID: Q9H668
  ENSP ID: ENSP00000358779

SEQ ID NO: 60093 - protein, 802 aa, Homo sapiens
  Payload ID: 12015
  Gene Symbol: OPHN1
  Gene Name: oligophrenin 1
  Uniprot ID: O60890
  ENSP ID: ENSP00000347710
MGHPPLEFSDCYLDSPDFRERLKCYEQELERTNKFIKDVIKDGNALISAMRNYSSAVQKFSQTLQSFQFDFIGDTLTDDEINIAESFKEFAELLNEVENERMMMVHNASDLLIKPLENFRKEQIGFTKERKKKFEKDGERFYSLLDRHLHLSSKKKESQLQEADLQVDKERHNFFESSLDYVYQIQEVQESKKFNIVEPVLAFLHSLFISNSLTVELTQDFLPYKQQLQLSLQNTRNHFSSTREEMEELKKRMKEAPQTCKLPGQPTIEGYLYTQEKWALGISWVKYYCQYEKETKTLTMTPMEQKPGAKQGPLDLTLKYCVRRKTESIDKRFCFDIETNERPGTITLQALSEANRRLWMEAMDGKEPIYHSPITKQQEMELNEVGFKFVRKCINIIETKGIKTEGLYRTVGSNIQVQKLLNAFFDPKCPGDVDFHNSDWDIKTITSSLKFYLRNLSEPVMTYRLHKELVSAAKSDNLDYRLGAIHSLVYKLPEKNREMLELLIRHLVNVCEHSKENLMTPSNMGVIFGPTLMRAQEDTVAAMMNIKFQNIVVEILIEHFGKIYLGPPEESAAPPVPPPRVTARRHKPITISKRLLRERTVFYTSSLDESEDEIQHQTPNGTITSSIEPPKPPQHPKLPIQRSGETDPGRKSPSRPILDGKLEPCPEVDVGKLVSRLQDGGTKITPKATNGPMPGSGPTKTPSFHIKRPAPRPLAHHKEGDADSFSKVRPPGEKPTIIRPPVRPPDPPCRAATPQKPEPKPDIVAGNAGEITSSVVASRTRFFETASRKTGSSQGRLPGDES

SEQ ID NO: 60094 - protein, 149 aa, Homo sapiens
  Payload ID: 12016
  Gene Symbol: OSTC
  Gene Name: oligosaccharyltransferase complex subunit (non-catalytic)
  Uniprot ID: Q9NRP0
  ENSP ID: ENSP00000354676
METLYRVPFLVLECPNLKLKKPPWLHMPSAMTVYALVVVSYFLITGGIIYDVIVEPPSVGSMTDEHGHQRPVAFLAYRVNGQYIMEGLASSFLFTMGGLGFIILDRSNAPNIPKLNRFLLLFIGFVCVLLSFFMARVFMRMKLPGYLMG

SEQ ID NO: 60095 - protein, 171 aa, Homo sapiens
  Payload ID: 12016
  Gene Symbol: OSTC
  Gene Name: oligosaccharyltransferase complex subunit (non-catalytic)
  Uniprot ID: Q9NRP0
  ENSP ID: ENSP00000426167
METLYRVPFLVLECPNLKLKKPPWLHMPSAMTVYALVVVSYFLITGGIIYDVIVEPPSVGSMTDEHGHQRPVAFLAYRVNGQYIMEGLASSFLFTMGGLGFIILDRSNAPNIPKLNRFLLLFIGFVCVLLSFFMARVFMRMKLPRSLALLPRLECSGVISAHYKLCLPGAI

SEQ ID NO: 60096 - protein, 83 aa, Homo sapiens
  Payload ID: 12016
  Gene Symbol: OSTC
  Gene Name: oligosaccharyltransferase complex subunit (non-catalytic)
  ENSP ID: ENSP00000478564
METLYRVPFLVLECPNLKLKKPPWLHMPSAMTVYALVVVSYFLITGGIIYDVIVEPPSVGSMTDEHGHQRPVAFLAYRGYLMG

SEQ ID NO: 60097 - protein, 37 aa, Homo sapiens
  Payload ID: 12017
  Gene Symbol: OST4
  Gene Name: oligosaccharyltransferase complex subunit 4 (non-catalytic)
  Uniprot ID: P0C6T2
  ENSP ID: ENSP00000454411
MITDVQLAIFANMLGVSLFLLVVLYHYVAVNNPKKQE

SEQ ID NO: 60098 - protein, 37 aa, Homo sapiens; identical to SEQ ID NO: 60097
  Payload ID: 12017
  Gene Symbol: OST4
  Gene Name: oligosaccharyltransferase complex subunit 4 (non-catalytic)
  Uniprot ID: P0C6T2
  ENSP ID: ENSP00000455716

SEQ ID NO: 60099 - protein, 37 aa, Homo sapiens; identical to SEQ ID NO: 60097
  Payload ID: 12017
  Gene Symbol: OST4
  Gene Name: oligosaccharyltransferase complex subunit 4 (non-catalytic)
  Uniprot ID: P0C6T2
  ENSP ID: ENSP00000457935

SEQ ID NO: 60100 - protein, 1036 aa, Homo sapiens
  Payload ID: 12018
  Gene Symbol: OGT
  Gene Name: O-linked N-acetylglucosamine (GlcNAc) transferase
  Uniprot ID: O15294
  ENSP ID: ENSP00000362805
MASSVGNVADSTGLAELAHREYQAGDFEAAERHCMQLWRQEPDNTGVLLLLSSIHFQCRRLDRSAHFSTLAIKQNPLLAEAYSNLGNVYKERGQLQEAIEHYRHALRLKPDFIDGYINLAAALVAAGDMEGAVQAYVSALQYNPDLYCVRSDLGNLLKALGRLEEAKACYLKAIETQPNFAVAWSNLGCVFNAQGEIWLAIHHFEKAVTLDPNFLDAYINLGNVLKEARIFDRAVAAYLRALSLSPNHAVVHGNLACVYYEQGLIDLAIDTYRRAIELQPHFPDAYCNLANALKEKGSVAEAEDCYNTALRLCPTHADSLNNLANIKREQGNIEEAVRLYRKALEVFPEFAAAHSNLASVLQQQGKLQEALMHYKEAIRISPTFADAYSNMGNTLKEMQDVQGALQCYTRAIQINPAFADAHSNLASIHKDSGNIPEAIASYRTALKLKPDFPDAYCNLAHCLQIVCDWTDYDERMKKLVSIVADQLEKNRLPSVHPHHSMLYPLSHGFRKAIAERHGNLCLDKINVLHKPPYEHPKDLKLSDGRLRVGYVSSDFGNHPTSHLMQSIPGMHNPDKFEVFCYALSPDDGTNFRVKVMAEANHFIDLSQIPCNGKAADRIHQDGIHILVNMNGYTKGARNELFALRPAPIQAMWLGYPGTSGALFMDYIITDQETSPAEVAEQYSEKLAYMPHTFFIGDHANMFPHLKKKAVIDFKSNGHIYDNRIVLNGIDLKAFLDSLPDVKIVKMKCPDGGDNADSSNTALNMPVIPMNTIAEAVIEMINRGQIQITINGFSISNGLATTQINNKAATGEEVPRTIIVTTRSQYGLPEDAIVYCNFNQLYKIDPSTLQMWANILKRVPNSVLWLLRFPAVGEPNIQQYAQNMGLPQNRIIFSPVAPKEEHVRRGQLADVCLDTPLCNGHTTGMDVLWAGTPMVTMPGETLASRVAASQLTCLGCLELIAKNRQEYEDIAVKLGTDLEYLKKVRGKVWKQRISSPLFNTKQYTMELERLYLQMWEHYAAGNKPDHMIKPVEVTESA

SEQ ID NO: 60101 - protein, 1046 aa, Homo sapiens
  Payload ID: 12018
  Gene Symbol: OGT
  Gene Name: O-linked N-acetylglucosamine (GlcNAc) transferase
  Uniprot ID: O15294
  ENSP ID: ENSP00000362824
MASSVGNVADSTEPTKRMLSFQGLAELAHREYQAGDFEAAERHCMQLWRQEPDNTGVLLLLSSIHFQCRRLDRSAHFSTLAIKQNPLLAEAYSNLGNVYKERGQLQEAIEHYRHALRLKPDFIDGYINLAAALVAAGDMEGAVQAYVSALQYNPDLYCVRSDLGNLLKALGRLEEAKACYLKAIETQPNFAVAWSNLGCVFNAQGEIWLAIHHFEKAVTLDPNFLDAYINLGNVLKEARIFDRAVAAYLRALSLSPNHAVVHGNLACVYYEQGLIDLAIDTYRRAIELQPHFPDAYCNLANALKEKGSVAEAEDCYNTALRLCPTHADSLNNLANIKREQGNIEEAVRLYRKALEVFPEFAAAHSNLASVLQQQGKLQEALMHYKEAIRISPTFADAYSNMGNTLKEMQDVQGALQCYTRAIQINPAFADAHSNLASIHKDSGNIPEAIASYRTALKLKPDFPDAYCNLAHCLQIVCDWTDYDERMKKLVSIVADQLEKNRLPSVHPHHSMLYPLSHGFRKAIAERHGNLCLDKINVLHKPPYEHPKDLKLSDGRLRVGYVSSDFGNHPTSHLMQSIPGMHNPDKFEVFCYALSPDDGTNFRVKVMAEANHFIDLSQIPCNGKAADRIHQDGIHILVNMNGYTKGARNELFALRPAPIQAMWLGYPGTSGALFMDYIITDQETSPAEVAEQYSEKLAYMPHTFFIGDHANMFPHLKKKAVIDFKSNGHIYDNRIVLNGIDLKAFLDSLPDVKIVKMKCPDGGDNADSSNTALNMPVIPMNTIAEAVIEMINRGQIQITINGFSISNGLATTQINNKAATGEEVPRTIIVTTRSQYGLPEDAIVYCNFNQLYKIDPSTLQMWANILKRVPNSVLWLLRFPAVGEPNIQQYAQNMGLPQNRIIFSPVAPKEEHVRRGQLADVCLDTPLCNGHTTGMDVLWAGTPMVTMPGETLASRVAASQLTCLGCLELIAKNRQEYEDIAVKLGTDLEYLKKVRGKVWKQRISSPLFNTKQYTMELERLYLQMWEHYAAGNKPDHMIKPVEVTESA

SEQ ID NO: 60102 - protein, 156 aa, Homo sapiens
  Payload ID: 12018
  Gene Symbol: OGT
  Gene Name: O-linked N-acetylglucosamine (GlcNAc) transferase
  ENSP ID: ENSP00000399729
MLSFQGLAELAHREYQAGDFEAAERHCMQLWRQEPDNTGVLLLLSSIHFQCRRLDRSAHFSTLAIKQNPLLAEAYSNLGNVYKERGQLQEAIEHYRHALRLKPDFIDGYINLAAALVAAGDMEGAVQAYVSALQYNPDLYCVRSDLGNLLKALGRL

SEQ ID NO: 60103 - protein, 524 aa, Homo sapiens
  Payload ID: 12019
  Gene Symbol: OMA1
  Gene Name: OMA1 zinc metallopeptidase
  Uniprot ID: Q96E52
  ENSP ID: ENSP00000360270
MSFICGLQSAARNHVFFRFNSLSNWRKCNTLASTSRGCHQVQVNHIVNKYQGLGVNQCDRWSFLPGNFHFYSTFNNKRTGGLSSTKSKEIWRITSKCTVWNDAFSRQLLIKEVTAVPSLSVLHPLSPASIRAIRNFHTSPRFQAAPVPLLLMILKPVQKLFAIIVGRGIRKWWQALPPNKKEVVKENIRKNKWKLFLGLSSFGLLFVVFYFTHLEVSPITGRSKLLLLGKEQFRLLSELEYEAWMEEFKNDMLTEKDARYLAVKEVLCHLIECNKDVPGISQINWVIHVVDSPIINAFVLPNGQMFVFTGFLNSVTDIHQLSFLLGHEIAHAVLGHAAEKAGMVHLLDFLGMIFLTMIWAICPRDSLALLCQWIQSKLQEYMFNRPYSRKLEAEADKIGLLLAAKACADIRASSVFWQQMEFVDSLHGQPKMPEWLSTHPSHGNRVEYLDRLIPQALKIREMCNCPPLSNPDPRLLFKLSTKHFLEESEKEDLNITKKQKMDTLPIQKQEQIPLTYIVEKRTGS

SEQ ID NO: 60104 - protein, 328 aa, Homo sapiens
  Payload ID: 12019
  Gene Symbol: OMA1
  Gene Name: OMA1 zinc metallopeptidase
  ENSP ID: ENSP00000391941
  MOD_RES (1)..(1): Any amino acid
XLFAIIVGRGIRKWWQALPPNKKEVVKENIRKNKWKLFLGLSSFGLLFVVFYFTHLEVSPITGRSKLLLLGKEQFRLLSELEYEAWMEEFKNDMLTEKDARYLAVKEVLCHLIECNKDVPGISQINWVIHVVDSPIINAFVLPNGQMFVFTGFLNSVTDIHQLSFLLGHEIAHAVLGHAAEKAGMVHLLDFLGMIFLTMIWAICPRDSLALLCQWIQSKLQEYMFNRPYSRKLEAEADKIGLLLAAKACADIRASSVFWQQMEFVDSLHGQPKMPEWLSTHPSHGNRVEYLDRLIPQLVREEKFIEQPEQIAELTLNSFIQNTEICRS

SEQ ID NO: 60105 - protein, 183 aa, Homo sapiens
  Payload ID: 12019
  Gene Symbol: OMA1
  Gene Name: OMA1 zinc metallopeptidase
  ENSP ID: ENSP00000392978
MSFICGLQSAARNHVFFRFNSLSNWRKCNTLASTSRGCHQVQVNHIVNKYQGLGVNQCDRWSFLPGNFHFYSTFNNKRTGGLSSTKSKEIWRITSKCTVWNDAFSRQLLIKEVTAVPSLSVLHPLSPASIRAIRNFHTSPRFQAAPVPLLLMILKPVQKLFAIIVGRGIRKWWQALPPNKKEV

SEQ ID NO: 60106 - protein, 325 aa, Homo sapiens
  Payload ID: 12019
  Gene Symbol: OMA1
  Gene Name: OMA1 zinc metallopeptidase
  ENSP ID: ENSP00000395053
MSFICGLQSAARNHVFFRFNSLSNWRKCNTLASTSRGCHQVQVNHIVNKYQGLGVNQCDRWSFLPGNFHFYSTFNNKRTGGLSSTKSKEIWRITSKCTVWNDAFSRQLLIKEVTAVPSLSVLHPLSPASIRAIRNFHTSPRFQAAPVPLLLMILKPVQKLFAIIVGRGIRKWWQALPPNKKEVVKENIRKNKWKLFLGLSSFGLLFVVFYFTHLEVSPITGRSKLLLLGKEQFRLLSELEYEAWMEEFKNDMLTEKDARYLAVKEVLCHLIECNKDVPGISQINWVIHVVDSPIINAFVLPNGQMFVFTGFLNSVTDIHQLSFLL

SEQ ID NO: 60107 - protein, 255 aa, Homo sapiens
  Payload ID: 12019
  Gene Symbol: OMA1
  Gene Name: OMA1 zinc metallopeptidase
  ENSP ID: ENSP00000409589
MSFICGLQSAARNHVFFRFNSLSNWRKCNTLASTSRGCHQVQVNHIVNKYQGLGVNQCDRWSFLPGNFHFYSTFNNKRTGGLSSTKSKEIWRITSKCTVWNDAFSRQLLIKEVTAVPSLSVLHPLSPASIRAIRNFHTSPRFQAAPVPLLLMILKPVQKLFAIIVGRGIRKWWQALPPNKKEVVKENIRKNKWKLFLGLSSFGLLFVVFYFTHLEVSPITGRSKLLLLGKEQFRLLSELEYEAWMEEFKNDMLTE

SEQ ID NO: 60108 - protein, 252 aa, Homo sapiens
  Payload ID: 12019
  Gene Symbol: OMA1
  Gene Name: OMA1 zinc metallopeptidase
  ENSP ID: ENSP00000416495
MSFICGLQSAARNHVFFRFNSLSNWRKCNTLASTSRGCHQVQVNHIVNKYQGLGVNQCDRWSFLPGNFHFYSTFNNKRTGGLSSTKSKEIWRITSKCTVWNDAFSRQLLIKEVTAVPSLSVLHPLSPASIRAIRNFHTSPRFQAAPVPLLLMILKPVQKLFAIIVGRGIRKWWQALPPNKKEVVKENIRKNKWKLFLGLSSFGLLFVVFYFTHLEVSPITGRSKLLLLGKEQFRLLSELEYEAWMEEFKNDM

SEQ ID NO: 60109 - protein, 87 aa, Homo sapiens
  Payload ID: 12019
  Gene Symbol: OMA1
  Gene Name: OMA1 zinc metallopeptidase
  ENSP ID: ENSP00000474081
MSFICGLQSAARNHVFFRFNSLSNWRKCNTLASTSRGCHQVQVNHIVNKYQGLGVNQCDRWSFLPGNFHFYSTFNNKRTGGLSSTKS

SEQ ID NO: 60110 - protein, 109 aa, Homo sapiens
  Payload ID: 12020
  Gene Symbol: OCM
  Gene Name: oncomodulin
  Uniprot ID: P0CE72
  ENSP ID: ENSP00000242104
MSITDVLSADDIAAALQECRDPDTFEPQKFFQTSGLSKMSANQVKDVFRFIDNDQSGYLDEEELKFFLQKFESGARELTESETKSLMAAADNDGDGKIGAEEFQEMVHS

SEQ ID NO: 60111 - protein, 109 aa, Homo sapiens; identical to SEQ ID NO: 60110
  Payload ID: 12020
  Gene Symbol: OCM
  Gene Name: oncomodulin
  Uniprot ID: P0CE72
  ENSP ID: ENSP00000401365

SEQ ID NO: 60112 - protein, 109 aa, Homo sapiens
  Payload ID: 12021
  Gene Symbol: OCM2
  Gene Name: oncomodulin 2
  Uniprot ID: P0CE71
  ENSP ID: ENSP00000257627
MSITDVLSADDIAAALQECQDPDTFEPQKFFQTSGLSKMSASQVKDVFRFIDNDQSGYLDEEELKFFLQKFESGARELTESETKSLMAAADNDGDGKIGAEEFQEMVHS

SEQ ID NO: 60113 - protein, 545 aa, Homo sapiens
  Payload ID: 12022
  Gene Symbol: OIT3
  Gene Name: oncoprotein induced transcript 3
  Uniprot ID: Q8WWZ8
  ENSP ID: ENSP00000333900
MPPFLLLTCLFITGTSVSPVALDPCSAYISLNEPWRNTDHQLDESQGPPLCDNHVNGEWYHFTGMAGDAMPTFCIPENHCGTHAPVWLNGSHPLEGDGIVQRQACASFNGNCCLWNTTVEVKACPGGYYVYRLTKPSVCFHVYCGHFYDICDEDCHGSCSDTSECTCAPGTVLGPDRQTCFDENECEQNNGGCSEICVNLKNSYRCECGVGRVLRSDGKTCEDVEGCHNNNGGCSHSCLGSEKGYQCECPRGLVLSEDNHTCQVPVLCKSNAIEVNIPRELVGGLELFLTNTSCRGVSNGTHVNILFSLKTCGTVVDVVNDKIVASNLVTGLPKQTPGSSGDFIIRTSKLLIPVTCEFPRLYTISEGYVPNLRNSPLEIMSRNHGIFPFTLEIFKDNEFEEPYREALPTLKLRDSLYFGIEPVVHVSGLESLVESCFATPTSKIDEVLKYYLIRDGCVSDDSVKQYTSRDHLAKHFQVPVFKFVGKDHKEVFLHCRVLVCGVLDERSRCAQGCHRRMRRGAGGEDSAGLQGQTLTGGPIRIDWED

SEQ ID NO: 60114 - protein, 321 aa, Homo sapiens
  Payload ID: 12022
  Gene Symbol: OIT3
  Gene Name: oncoprotein induced transcript 3
  Uniprot ID: Q8WWZ8
  ENSP ID: ENSP00000479787
MPPFLLLTCLFITGTSVSPVALDPCSAYISLNEPWRNTDHQLDESQGPPLCDNHVNGEWYHFTGMAGDAMPTFCIPENHCGTHAPVWLNGSHPLEGDGIVQRQACASFNGNCCLWNTTVEVKACPGGYYVYRLTKPSVCFHVYCGHFYDICDEDCHGSCSDTSECTCAPGTVLGPDRQTCFDENECEQNNGGCSEICVNLKNSYRCECGVGRVLRSDGKTCEDVEGCHNNNGGCSHSCLGSEKGYQCECPRGLVLSEDNHTCQVPVLCKSNAIEVNIPRELVGGLELFLTNTSCRGVSNGTHVNILFSLKTCGTVVDLCFR

SEQ ID NO: 60115 - protein, 252 aa, Homo sapiens
  Payload ID: 12023
  Gene Symbol: OSM
  Gene Name: oncostatin M
  Uniprot ID: P13725
  ENSP ID: ENSP00000215781
MGVLLTQRTLLSLVLALLFPSMASMAAIGSCSKEYRVLLGQLQKQTDLMQDTSRLLDPYIRIQGLDVPKLREHCRERPGAFPSEETLRGLGRRGFLQTLNATLGCVLHRLADLEQRLPKAQDLERSGLNIEDLEKLQMARPNILGLRNNIYCMAQLLDNSDTAEPTKAGRGASQPPTPTPASDAFQRKLEGCRFLHGYHRFMHSVGRVFSKWGESPNRSRRHSPHQALRKGVRRTRPSRKGKRLMTRGQLPR

SEQ ID NO: 60116 - protein, 231 aa, Homo sapiens
  Payload ID: 12023
  Gene Symbol: OSM
  Gene Name: oncostatin M
  ENSP ID: ENSP00000383893
MASMAAIGSCSKEYRVLLGQLQKQTDLMQDTSRLLDPYIRIQGLDVPKLREHCRERPGAFPSEETLRGLGRRGFLQTLNATLGCVLHRLADLEQRLPKAQDLERSGLNIEDLEKLQMARPNILGLRNNIYCMAQLLDNSDTAEPTKAGRGASQPPTPTPASDAFQRKLEGCRFLHGYHRFMHSVGRVFSKWGESPNRSRRHSPHQALRKGVRRTRPSRKGKRLMTRGQLPR

SEQ ID NO: 60117 - protein, 20 aa, Homo sapiens
  Payload ID: 12023
  Gene Symbol: OSM
  Gene Name: oncostatin M
  ENSP ID: ENSP00000384543
MGVLLTQRTLLNTYPRPGCS

SEQ ID NO: 60118 - protein, 979 aa, Homo sapiens
  Payload ID: 12024
  Gene Symbol: OSMR
  Gene Name: oncostatin M receptor
  Uniprot ID: Q99650
  ENSP ID: ENSP00000274276
MALFAVFQTTFFLTLLSLRTYQSEVLAERLPLTPVSLKVSTNSTRQSLHLQWTVHNLPYHQELKMVFQIQISRIETSNVIWVGNYSTTVKWNQVLHWSWESELPLECATHFVRIKSLVDDAKFPEPNFWSNWSSWEEVSVQDSTGQDILFVFPKDKLVEEGTNVTICYVSRNIQNNVSCYLEGKQIHGEQLDPHVTAFNLNSVPFIRNKGTNIYCEASQGNVSEGMKGIVLFVSKVLEEPKDFSCETEDFKTLHCTWDPGTDTALGWSKQPSQSYTLFESFSGEKKLCTHKNWCNWQITQDSQETYNFTLIAENYLRKRSVNILFNLTHRVYLMNPFSVNFENVNATNAIMTWKVHSIRNNFTYLCQIELHGEGKMMQYNVSIKVNGEYFLSELEPATEYMARVRCADASHFWKWSEWSGQNFTTLEAAPSEAPDVWRIVSLEPGNHTVTLFWKPLSKLHANGKILFYNVVVENLDKPSSSELHSIPAPANSTKLILDRCSYQICVIANNSVGASPASVIVISADPENKEVEEERIAGTEGGFSLSWKPQPGDVIGYVVDWCDHTQDVLGDFQWKNVGPNTTSTVISTDAFRPGVRYDFRIYGLSTKRIACLLEKKTGYSQELAPSDNPHVLVDTLTSHSFTLSWKDYSTESQPGFIQGYHVYLKSKARQCHPRFEKAVLSDGSECCKYKIDNPEEKALIVDNLKPESFYEFFITPFTSAGEGPSATFTKVTTPDEHSSMLIHILLPMVFCVLLIMVMCYLKSQWIKETCYPDIPDPYKSSILSLIKFKENPHLIIMNVSDCIPDAIEVVSKPEGTKIQFLGTRKSLTETELTKPNYLYLLPTEKNHSGPGPCICFENLTYNQAASDSGSCGHVPVSPKAPSMLGLMTSPENVLKALEKNYMNSLGEIPAGETSLNYVSQLASPMFGDKDSLPTNPVEAPHCSEYKMQMAVSLRLALPPPTENSSLSSITLLDPGEHYC

SEQ ID NO: 60119 - protein, 342 aa, Homo sapiens
  Payload ID: 12024
  Gene Symbol: OSMR
  Gene Name: oncostatin M receptor
  Uniprot ID: Q99650
  ENSP ID: ENSP00000422023
MALFAVFQTTFFLTLLSLRTYQSEVLAERLPLTPVSLKVSTNSTRQSLHLQWTVHNLPYHQELKMVFQIQISRIETSNVIWVGNYSTTVKWNQVLHWSWESELPLECATHFVRIKSLVDDAKFPEPNFWSNWSSWEEVSVQDSTGQDILFVFPKDKLVEEGTNVTICYVSRNIQNNVSCYLEGKQIHGEQLDPHVTAFNLNSVPFIRNKGTNIYCEASQGNVSEGMKGIVLFVSKVLEEPKDFSCETEDFKTLHCTWDPGTDTALGWSKQPSQSYTLFESFSGEKKLCTHKNWCNWQITQDSQETYNFTLIAENYLRKRSVNILFNLTHRGETRVVTAHRGH

SEQ ID NO: 60120 - protein, 35 aa, Homo sapiens
  Payload ID: 12024
  Gene Symbol: OSMR
  Gene Name: oncostatin M receptor
  ENSP ID: ENSP00000422372
  MOD_RES (1)..(1): Any amino acid
XIKETCYPDIPDPYKSSILSLIKFKISSKVWLNRR

SEQ ID NO: 60121 - protein, 188 aa, Homo sapiens
  Payload ID: 12024
  Gene Symbol: OSMR
  Gene Name: oncostatin M receptor
  ENSP ID: ENSP00000423913
LEPATEYMARVRCADASHFWKWSEWSGQNFTTLEAAPSEAPDVWRIVSLEPGNHTVTLFWKPLSKLHANGKILFYNVVVENLDKPSSSELHSIPAPANSTKLILDRCSYQICVIANNSVGASPASVIVISADPENSVSTCFSGTVPSVWGEGDFSHGSGHFCPGDSSTYMGNYLKFIQVTATLTNSHH

SEQ ID NO: 60122 - protein, 62 aa, Homo sapiens
  Payload ID: 12024
  Gene Symbol: OSMR
  Gene Name: oncostatin M receptor
  ENSP ID: ENSP00000426729
  MOD_RES (1)..(1): Any amino acid
XSMLIHILLPMVFCVLLIMVMCYLKSQWIKETCYPDIPDPYKSSILSLIKFKISSKVWLNRR

SEQ ID NO: 60123 - protein, 465 aa, Homo sapiens
  Payload ID: 12025
  Gene Symbol: ONECUT1
  Gene Name: one cut homeobox 1
  Uniprot ID: Q9UBC0
  ENSP ID: ENSP00000302630
MNAQLTMEAIGELHGVSHEPVPAPADLLGGSPHARSSVAHRGSHLPPAHPRSMGMASLLDGGSGGGDYHHHHRAPEHSLAGPLHPTMTMACETPPGMSMPTTYTTLTPLQPLPPISTVSDKFPHHHHHHHHHHHPHHHQRLAGNVSGSFTLMRDERGLASMNNLYTPYHKDVAGMGQSLSPLSSSGLGSIHNSQQGLPHYAHPGAAMPTDKMLTPNGFEAHHPAMLGRHGEQHLTPTSAGMVPINGLPPHHPHAHLNAQGHGQLLGTAREPNPSVTGAQVSNGSNSGQMEEINTKEVAQRITTELKRYSIPQAIFAQRVLCRSQGTLSDLLRNPKPWSKLKSGRETFRRMWKWLQEPEFQRMSALRLAACKRKEQEHGKDRGNTPKKPRLVFTDVQRRTLHAIFKENKRPSKELQITISQQLGLELSTVSNFFMNARRRSLDKWQDEGSSNSGNSSSSSSTCTKA

SEQ ID NO: 60124 - protein, 66 aa, Homo sapiens
  Payload ID: 12025
  Gene Symbol: ONECUT1
  Gene Name: one cut homeobox 1
  ENSP ID: ENSP00000453718
MESQKSFIKHAKGKNKNMGRIEATHPKSPGWSSQMSSVELYMQYSRKISVHPKNCKSPFPSSWGWS

SEQ ID NO: 60125 - protein, 182 aa, Homo sapiens
  Payload ID: 12025
  Gene Symbol: ONECUT1
  Gene Name: one cut homeobox 1
  ENSP ID: ENSP00000476168
  MOD_RES (1)..(1): Any amino acid
XLYTPYHKDVAGMGQSLSPLSSSGLGSIHNSQQGLPHYAHPGAAMPTDKMLTPNGFEAHHPAMLGRHGEQHLTPTSAGMVPINGLPPHHPHAHLNAQGHGQLLGTAREPNPSVTGAQAIFAQRVLCRSQGTLSDLLRNPKPWSKLKSGRETFRRMWKWLQEPEFQRMSALRLAGTAREARTA

SEQ ID NO: 60126 - protein, 504 aa, Homo sapiens
  Payload ID: 12026
  Gene Symbol: ONECUT2
  Gene Name: one cut homeobox 2
  Uniprot ID: O95948
  ENSP ID: ENSP00000419185
MKAAYTAYRCLTKDLEGCAMNPELTMESLGTLHGPAGGGSGGGGGGGGGGGGGGPGHEQELLASPSPHHAGRGAAGSLRGPPPPPTAHQELGTAAAAAAAASRSAMVTSMASILDGGDYRPELSIPLHHAMSMSCDSSPPGMGMSNTYTTLTPLQPLPPISTVSDKFHHPHPHHHPHHHHHHHHQRLSGNVSGSFTLMRDERGLPAMNNLYSPYKEMPGMSQSLSPLAATPLGNGLGGLHNAQQSLPNYGPPGHDKMLSPNFDAHHTAMLTRGEQHLSRGLGTPPAAMMSHLNGLHHPGHTQSHGPVLAPSRERPPSSSSGSQVATSGQLEEINTKEVAQRITAELKRYSIPQAIFAQRVLCRSQGTLSDLLRNPKPWSKLKSGRETFRRMWKWLQEPEFQRMSALRLAACKRKEQEPNKDRNNSQKKSRLVFTDLQRRTLFAIFKENKRPSKEMQITISQQLGLELTTVSNFFMNARRRSLEKWQDDLSTGGSSSTSSTCTKA

SEQ ID NO: 60127 - protein, 494 aa, Homo sapiens
  Payload ID: 12027
  Gene Symbol: ONECUT3
  Gene Name: one cut homeobox 3
  Uniprot ID: O60422
  ENSP ID: ENSP00000371786
MELSLESLGGLHSVAHAQAGELLSPGHARSAAAQHRGLVAPGRPGLVAGMASLLDGGGGGGGGGAGGAGGAGSAGGGADFRGELAGPLHPAMGMACEAPGLGGTYTTLTPLQHLPPLAAVADKFHQHAAAAAVAGAHGGHPHAHPHPAAAPPPPPPPQRLAASVSGSFTLMRDERAALASVGHLYGPYGKELPAMGSPLSPLPNALPPALHGAPQPPPPPPPPPLAAYGPPGHLAGDKLLPPAAFEPHAALLGRAEDALARGLPGGGGGTGSGGAGSGSAAGLLAPLGGLAAAGAHGPHGGGGGPGGSGGGPSAGAAAEEINTKEVAQRITAELKRYSIPQAIFAQRILCRSQGTLSDLLRNPKPWSKLKSGRETFRRMWKWLQEPEFQRMSALRLAACKRKEQEQQKERALQPKKQRLVFTDLQRRTLIAIFKENKRPSKEMQVTISQQLGLELNTVSNFFMNARRRCMNRWAEEPSTAPGGPAGATATFSKA

SEQ ID NO: 60128 - protein, 149 aa, Homo sapiens
  Payload ID: 12028
  Gene Symbol: OOEP
  Gene Name: oocyte expressed protein
  Uniprot ID: A6NGQ2
  ENSP ID: ENSP00000359384
MVDDAGAAESQRGKQTPAHSLEQLRRLPLPPPQIRIRPWWFPVQELRDPLVFYLEAWLADELFGPDRAIIPEMEWTSQALLTVDIVDSGNLVEITVFGRPRVQNRVKSMLLCLAWFHREHRARAEKMKHLEKNLKAHASDPHSPQDPVA

SEQ ID NO: 60129 - protein, 94 aa, Homo sapiens
  Payload ID: 12028
  Gene Symbol: OOEP
  Gene Name: oocyte expressed protein
  ENSP ID: ENSP00000359388
MFSTVTHKGPDRAIIPEMEWTSQALLTVDIVDSGNLVEITVFGRPRVQNRVKSMLLCLAWFHREHRARAEKMKHLEKNLKAHASDPHSPQDPVA

SEQ ID NO: 60130 - protein, 67 aa, Homo sapiens
  Payload ID: 12028
  Gene Symbol: OOEP
  Gene Name: oocyte expressed protein
  ENSP ID: ENSP00000397430
MFSTVTHKGPDRAIIPEMEWTSQALLTVDIVDSGNLVEITVFGRPRVQNRVKSMLLCLAWFHREHRA

SEQ ID NO: 60131 - protein, 158 aa, Homo sapiens
  Payload ID: 12029
  Gene Symbol: OOSP2
  Gene Name: oocyte secreted protein 2
  Uniprot ID: Q86WS3
  ENSP ID: ENSP00000278855
MALEVLMLLAVLIWTGAENLHVKISCSLDWLMVSVIPVAESRNLYIFADELHLGMGCPANRIHTYVYEFIYLVRDCGIRTRVVSEETLLFQTELYFTPRNIDHDPQEIHLECSTSRKSVWLTPVSTENEIKLDPSPFIADFQTTAEELGLLSSSPNLL

SEQ ID NO: 60132 - protein, 86 aa, Homo sapiens
  Payload ID: 12029
  Gene Symbol: OOSP2
  Gene Name: oocyte secreted protein 2
  ENSP ID: ENSP00000433831
MVSVIPVAESRNLYIFADELHLGMGCPANRIHTYVYEFIYLVRDCGIRTRVVSEETLLFQTELYFTPRNIDHDPQEIHLECSTSSV

SEQ ID NO: 60133 - protein, 229 aa, Homo sapiens
  Payload ID: 12030
  Gene Symbol: OIP5
  Gene Name: Opa interacting protein 5
  Uniprot ID: O43482
  ENSP ID: ENSP00000220514
MAAQPLRHRSRCATPPRGDFCGGTERAIDQASFTTSMEWDTQVVKGSSPLGPAGLGAEEPAAGPQLPSWLQPERCAVFQCAQCHAVLADSVHLAWDLSRSLGAVVFSRVTNNVVLEAPFLVGIEGSLKGSTYNLLFCGSCGIPVGFHLYSTHAALAALRGHFCLSSDKMVCYLLKTKAIVNASEMDIQNVPLSEKIAELKEKIVLTHNRLKSLMKILSEVTPDQSKPEN

SEQ ID NO: 60134 - protein, 162 aa, Homo sapiens
  Payload ID: 12030
  Gene Symbol: OIP5
  Gene Name: Opa interacting protein 5
  ENSP ID: ENSP00000452851
  MOD_RES (1)..(1): Any amino acid
XRAIDQASFTTSMEWDTQVVKGSSPLGPAGLGAEEPAAGPQLPSWLQPERCAVFQCAQCHAVLADSVHLAWDLSRSLGAVVFSRVTNNVVLEAPFLVGIEGSLKGSYLLKTKAIVNASEMDIQNVPLSEKIAELKEKIVLTHNRLKSLMKILSEVTPDQSKP

SEQ ID NO: 60135 - protein, 370 aa, Homo sapiens
  Payload ID: 12031
  Gene Symbol: OPRL1
  Gene Name: opiate receptor-like 1
  Uniprot ID: P41146
  ENSP ID: ENSP00000336764
MEPLFPAPFWEVIYGSHLQGNLSLLSPNHSLLPPHLLLNASHGAFLPLGLKVTIVGLYLAVCVGGLLGNCLVMYVILRHTKMKTATNIYIFNLALADTLVLLTLPFQGTDILLGFWPFGNALCKTVIAIDYYNMFTSTFTLTAMSVDRYVAICHPIRALDVRTSSKAQAVNVAIWALASVVGVPVAIMGSAQVEDEEIECLVEIPTPQDYWGPVFAICIFLFSFIVPVLVISVCYSLMIRRLRGVRLLSGSREKDRNLRRITRLVLVVVAVFVGCWTPVQVFVLAQGLGVQPSSETAVAILRFCTALGYVNSCLNPILYAFLDENFKACFRKFCCASALRRDVQVSDRVRSIAKDVALACKTSETVPRPA

SEQ ID NO: 60136 - protein, 370 aa, Homo sapiens; identical to SEQ ID NO: 60135
  Payload ID: 12031
  Gene Symbol: OPRL1
  Gene Name: opiate receptor-like 1
  Uniprot ID: P41146
  ENSP ID: ENSP00000336843

SEQ ID NO: 60137 - protein, 370 aa, Homo sapiens; identical to SEQ ID NO: 60135
  Payload ID: 12031
  Gene Symbol: OPRL1
  Gene Name: opiate receptor-like 1
  Uniprot ID: P41146
  ENSP ID: ENSP00000347848

SEQ ID NO: 60138 - protein, 293 aa, Homo sapiens
  Payload ID: 12031
  Gene Symbol: OPRL1
  Gene Name: opiate receptor-like 1
  ENSP ID: ENSP00000478920
  MOD_RES (1)..(1): Any amino acid
XHTKMKTATNIYIFNLALADTLVLLTLPFQGTDILLGFWPFGNALCKTVIAIDYYNMFTSTFTLTAMSVDRYVAICHPIRALDVRTSSKAQAVNVAIWALASVVGVPVAIMGSAQVEDEEIECLVEIPTPQDYWGPVFAICIFLFSFIVPVLVISVCYSLMIRRLRGVRLLSGSREKDRNLRRITRLVLVVVAVFVGCWTPVQVFVLAQGLGVQPSSETAVAILRFCTALGYVNSCLNPILYAFLDENFKACFRKFCCASALRRDVQVSDRVRSIAKDVALACKTSETVPRPA

SEQ ID NO: 60139 - protein, 293 aa, Homo sapiens; identical to SEQ ID NO: 60138
  Payload ID: 12031
  Gene Symbol: OPRL1
  Gene Name: opiate receptor-like 1
  ENSP ID: ENSP00000485794
  MOD_RES (1)..(1): Any amino acid

SEQ ID NO: 60140 - protein, 293 aa, Homo sapiens; identical to SEQ ID NO: 60138
  Payload ID: 12031
  Gene Symbol: OPRL1
  Gene Name: opiate receptor-like 1
  ENSP ID: ENSP00000487083
  MOD_RES (1)..(1): Any amino acid

SEQ ID NO: 60141 - protein, 345 aa, Homo sapiens
  Payload ID: 12032
  Gene Symbol: OPCML
  Gene Name: opioid binding protein/cell adhesion molecule-like
  Uniprot ID: Q14982
  ENSP ID: ENSP00000330862
MGVCGYLFLPWKCLVVVSLRLLFLVPTGVPVRSGDATFPKAMDNVTVRQGESATLRCTIDDRVTRVAWLNRSTILYAGNDKWSIDPRVIILVNTPTQYSIMIQNVDVYDEGPYTCSVQTDNHPKTSRVHLIVQVPPQIMNISSDITVNEGSSVTLLCLAIGRPEPTVTWRHLSVKEGQGFVSEDEYLEISDIKRDQSGEYECSALNDVAAPDVRKVKITVNYPPYISKAKNTGVSVGQKGILSCEASAVPMAEFQWFKEETRLATGLDGMRIENKGRMSTLTFFNVSEKDYGNYTCVATNKLGNTNASITLYGPGAVIDGVNSASRALACLWLSGTLLAHFFIKF

SEQ ID NO: 60142 - protein, 304 aa, Homo sapiens
  Payload ID: 12032
  Gene Symbol: OPCML
  Gene Name: opioid binding protein/cell adhesion molecule-like
  Uniprot ID: Q14982
  ENSP ID: ENSP00000363910
MDNVTVRQGESATLRCTIDDRVTRVAWLNRSTILYAGNDKWSIDPRVIILVNTPTQYSIMIQNVDVYDEGPYTCSVQTDNHPKTSRVHLIVQVPPQIMNISSDITVNEGSSVTLLCLAIGRPEPTVTWRHLSVKEGQGFVSEDEYLEISDIKRDQSGEYECSALNDVAAPDVRKVKITVNYPPYISKAKNTGVSVGQKGILSCEASAVPMAEFQWFKEETRLATGLDGMRIENKGRMSTLTFFNVSEKDYGNYTCVATNKLGNTNASITLYGPGAVIDGVNSASRALACLWLSGTLLAHFFIKF

SEQ ID NO: 60143 - protein, 338 aa, Homo sapiens
  Payload ID: 12032
  Gene Symbol: OPCML
  Gene Name: opioid binding protein/cell adhesion molecule-like
  Uniprot ID: Q14982
  ENSP ID: ENSP00000434750
MYHPAYWVVFSATTALLFIPGVPVRSGDATFPKAMDNVTVRQGESATLRCTIDDRVTRVAWLNRSTILYAGNDKWSIDPRVIILVNTPTQYSIMIQNVDVYDEGPYTCSVQTDNHPKTSRVHLIVQVPPQIMNISSDITVNEGSSVTLLCLAIGRPEPTVTWRHLSVKEGQGFVSEDEYLEISDIKRDQSGEYECSALNDVAAPDVRKVKITVNYPPYISKAKNTGVSVGQKGILSCEASAVPMAEFQWFKEETRLATGLDGMRIENKGRMSTLTFFNVSEKDYGNYTCVATNKLGNTNASITLYGPGAVIDGVNSASRALACLWLSGTLLAHFFIKF

SEQ ID NO: 60144 - protein, 354 aa, Homo sapiens
  Payload ID: 12032
  Gene Symbol: OPCML
  Gene Name: opioid binding protein/cell adhesion molecule-like
  Uniprot ID: Q14982
  ENSP ID: ENSP00000445496
MGVCGYLFLPWKCLVVVSLRLLFLVPTGVPVRSGDATFPKAMDNVTVRQGESATLRCTIDDRVTRVAWLNRSTILYAGNDKWSIDPRVIILVNTPTQYSIMIQNVDVYDEGPYTCSVQTDNHPKTSRVHLIVQVPPQIMNISSDITVNEGSSVTLLCLAIGRPEPTVTWRHLSVKEGQGFVSEDEYLEISDIKRDQSGEYECSALNDVAAPDVRKVKITVNYPPYISKAKNTGVSVGQKGILSCEASAVPMAEFQWFKEETRLATGLDGMRIENKGRMSTLTFFNVSEKDYGNYTCVATNKLGNTNASITLYEISPSSAVAGPGAVIDGVNSASRALACLWLSGTLLAHFFIKF

SEQ ID NO: 60145 - protein, 345 aa, Homo sapiens; identical to SEQ ID NO: 60141
  Payload ID: 12032
  Gene Symbol: OPCML
  Gene Name: opioid binding protein/cell adhesion molecule-like
  Uniprot ID: Q14982
  ENSP ID: ENSP00000482061

SEQ ID NO: 60146 - protein, 677 aa, Homo sapiens
  Payload ID: 12033
  Gene Symbol: OGFR
  Gene Name: opioid growth factor receptor
  Uniprot ID: Q9NZT2
  ENSP ID: ENSP00000290291
MDDPDCDSTWEEDEEDAEDAEDEDCEDGEAAGARDADAGDEDEESEEPRAARPSSFQSRMTGSRNWRATRDMCRYRHNYPDLVERDCNGDTPNLSFYRNEIRFLPNGCFIEDILQNWTDNYDLLEDNHSYIQWLFPLREPGVNWHAKPLTLREVEVFKSSQEIQERLVRAYELMLGFYGIRLEDRGTGTVGRAQNYQKRFQNLNWRSHNNLRITRILKSLGELGLEHFQAPLVRFFLEETLVRRELPGVRQSALDYFMFAVRCRHQRRQLVHFAWEHFRPRCKFVWGPQDKLRRFKPSSLPHPLEGSRKVEEEGSPGDPDHEASTQGRTCGPEHSKGGGRVDEGPQPRSVEPQDAGPLERSQGDEAGGHGEDRPEPLSPKESKKRKLELSRREQPPTEPGPQSASEVEKIALNLEGCALSQGSLRTGTQEVGGQDPGEAVQPCRQPLGARVADKVRKRRKVDEGAGDSAAVASGGAQTLALAGSPAPSGHPKAGHSENGVEEDTEGRTGPKEGTPGSPSETPGPSPAGPAGDEPAESPSETPGPRPAGPAGDEPAESPSETPGPRPAGPAGDEPAESPSETPGPSPAGPTRDEPAESPSETPGPRPAGPAGDEPAESPSETPGPRPAGPAGDEPAESPSETPGPSPAGPTRDEPAKAGEAAELQDAEVESSAKSGKP

SEQ ID NO: 60147 - protein, 625 aa, Homo sapiens
  Payload ID: 12033
  Gene Symbol: OGFR
  Gene Name: opioid growth factor receptor
  ENSP ID: ENSP00000359491
MRLPERHGGPQGSLCLMDPCCPLSLALQDLVERDCNGDTPNLSFYRNEIRFLPNGCFIEDILQNWTDNYDLLEDNHSYIQWLFPLREPGVNWHAKPLTLREVEVFKSSQEIQERLVRAYELMLGFYGIRLEDRGTGTVGRAQNYQKRFQNLNWRSHNNLRITRILKSLGELGLEHFQAPLVRFFLEETLVRRELPGVRQSALDYFMFAVRCRHQRRQLVHFAWEHFRPRCKFVWGPQDKLRRFKPSSLPHPLEGSRKVEEEGSPGDPDHEASTQGRTCGPEHSKGGGRVDEGPQPRSVEPQDAGPLERSQGDEAGGHGEDRPEPLSPKESKKRKLELSRREQPPTEPGPQSASEVEKIALNLEGCALSQGSLRTGTQEVGGQDPGEAVQPCRQPLGARVADKVRKRRKVDEGAGDSAAVASGGAQTLALAGSPAPSGHPKAGHSENGVEEDTEGRTGPKEGTPGSPSETPGPSPAGPAGDEPAESPSETPGPRPAGPAGDEPAESPSETPGPRPAGPAGDEPAESPSETPGPSPAGPTRDEPAESPSETPGPRPAGPAGDEPAESPSETPGPRPAGPAGDEPAESPSETPGPSPAGPTRDEPAKAGEAAELQDAEVESSAKSGKP

SEQ ID NO: 60148 - protein, 94 aa, Homo sapiens
  Payload ID: 12033
  Gene Symbol: OGFR
  Gene Name: opioid growth factor receptor
  ENSP ID: ENSP00000395168
MTGSRNWRATRDMCRYRHNYPDLVERDCNGDTPNLSFYRNEIRFLPNGCFIEDILQNWTDNYDLLEDNHSYIQWLFPLREPGVNWHAKPLTLRE

SEQ ID NO: 60149 - protein, 390 aa, Homo sapiens
  Payload ID: 12033
  Gene Symbol: OGFR
  Gene Name: opioid growth factor receptor
  ENSP ID: ENSP00000483055
MDDPDCDSTWEEDEEDAEDAEDEDCEDGEAAGARDADAGDEDEESEEPRAARPSSFQSRMTGSRNWRATRDMCRYRHNYPDLVERDCNGDTPNLSFYRNEIRFLPNGCFIEDILQNWTDNYDLLEDNHSYIQWLFPLREPGVNWHAKPLTLREVEVFKSSQEIQERLVRAYELMLGFYGIRLEDRGTGTVGRAQNYQKRFQNLNWRSHNNLRITRILKSLGELGLEHFQAPLVRFFLEETLVRRELPGVRQSALDYFMFAVRCRHQRRQLVHFAWEHFRPRCKFVWGPQDKLRRFKPSSLPHPLEGSRKVEEEGPAGDEPAESPSETPGPSPAGPTRDEPAKAGEAEASGLAVSSHPALPCAPVFVNPFWSGGRRAGLLLSLIPSKAFSE

SEQ ID NO: 60150 - protein, 451 aa, Homo sapiens
  Payload ID: 12034
  Gene Symbol: OGFRL1
  Gene Name: opioid growth factor receptor-like 1
  Uniprot ID: Q5TC84
  ENSP ID: ENSP00000359464
MGNLLGGVSFREPTTVEDCDSTWQTDSEPEPEEPGPGGGSEGPGQESEQPAQPPEQAGGRPGASPAPDEDAEAAGAEQGGDSTEATAKPKRSFYAARDLYKYRHQYPNFKDIRYQNDLSNLRFYKNKIPFKPDGVYIEEVLSKWKGDYEKLEHNHTYIQWLFPLREQGLNFYAKELTTYEIEEFKKTKEAIRRFLLAYKMMLEFFGIKLTDKTGNVARAVNWQERFQHLNESQHNYLRITRILKSLGELGYESFKSPLVKFILHEALVENTIPNIKQSALEYFVYTIRDRRERRKLLRFAQKHYTPSENFIWGPPRKEQSEGSKAQKMSSPLASSHNSQTSMHKKAKDSKNSSSAVHLNSKTAEDKKVAPKEPVEETDRPSPEPSNEAAKPRNTEKDSNAENMNSQPEKTVTTPTEKKESVSPENNEEGGNDNQDNENPGNTNCHDVVLVQ

SEQ ID NO: 60151 - protein, 372 aa, Homo sapiens
  Payload ID: 12035
  Gene Symbol: OPRD1
  Gene Name: opioid receptor, delta 1
  Uniprot ID: P41143
  ENSP ID: ENSP00000234961
MEPAPSAGAELQPPLFANASDAYPSACPSAGANASGPPGARSASSLALAIAITALYSAVCAVGLLGNVLVMFGIVRYTKMKTATNIYIFNLALADALATSTLPFQSAKYLMETWPFGELLCKAVLSIDYYNMFTSIFTLTMMSVDRYIAVCHPVKALDFRTPAKAKLINICIWVLASGVGVPIMVMAVTRPRDGAVVCMLQFPSPSWYWDTVTKICVFLFAFVVPILIITVCYGLMLLRLRSVRLLSGSKEKDRSLRRITRMVLVVVGAFVVCWAPIHIFVIVWTLVDIDRRDPLVVAALHLCIALGYANSSLNPVLYAFLDENFKRCFRQLCRKPCGRPDPSSFSRAREATARERVTACTPSDGPGGGAAA

SEQ ID NO: 60152 - protein, 324 aa, Homo sapiens
  Payload ID: 12035
  Gene Symbol: OPRD1
  Gene Name: opioid receptor, delta 1
  ENSP ID: ENSP00000477970
MEPAPSAGAELQPPLFANASDAYPSACPSAGANASGPPGARSASSLALAIAITALYSAVCAVGLLGNVLVMFGIVRYTKMKTATNIYIFNLALADALATSTLPFQSAKYLMETWPFGELLCKAVLSIDYYNMFTSIFTLTMMSVDRYIAVCHPVKALDFRTPAKAKLINICIWVLASGVGVPIMVMAVTRPRDGAVVCMLQFPSPSWYWDTVTKICVFLFAFVVCWAPIHIFVIVWTLVDIDRRDPLVVAALHLCIALGYANSSLNPVLYAFLDENFKRCFRQLCRKPCGRPDPSSFSRAREATARERVTACTPSDGPGGGAAA

SEQ ID NO: 60153 - protein, 380 aa, Homo sapiens
  Payload ID: 12036
  Gene Symbol: OPRK1
  Gene Name: opioid receptor, kappa 1
  Uniprot ID: P41145
  ENSP ID: ENSP00000265572
MDSPIQIFRGEPGPTCAPSACLPPNSSAWFPGWAEPDSNGSAGSEDAQLEPAHISPAIPVIITAVYSVVFVVGLVGNSLVMFVIIRYTKMKTATNIYIFNLALADALVTTTMPFQSTVYLMNSWPFGDVLCKIVISIDYYNMFTSIFTLTMMSVDRYIAVCHPVKALDFRTPLKAKIINICIWLLSSSVGISAIVLGGTKVREDVDVIECSLQFPDDDYSWWDLFMKICVFIFAFVIPVLIIIVCYTLMILRLKSVRLLSGSREKDRNLRRITRLVLVVVAVFVVCWTPIHIFILVEALGSTSHSTAALSSYYFCIALGYTNSSLNPILYAFLDENFKRCFRDFCFPLKMRMERQSTSRVRNTVQDPAYLRDIDGMNKPV

SEQ ID NO: 60154 - protein, 116 aa, Homo sapiens
  Payload ID: 12036
  Gene Symbol: OPRK1
  Gene Name: opioid receptor, kappa 1
  ENSP ID: ENSP00000428231
MDSPIQIFRGEPGPTCAPSACLPPNSSAWFPGWAEPDSNGSAGSEDAQLEPAHISPAIPVIITAVYSVVFVVGLVGNSLVMFVIIRLEFQWKTTKPCDELRDPKGTGVKPGREALD

SEQ ID NO: 60155 - protein, 380 aa, Homo sapiens; identical to SEQ ID NO: 60153
  Payload ID: 12036
  Gene Symbol: OPRK1
  Gene Name: opioid receptor, kappa 1
  Uniprot ID: P41145
  ENSP ID: ENSP00000429706

SEQ ID NO: 60156 - protein, 291 aa, Homo sapiens
  Payload ID: 12036
  Gene Symbol: OPRK1
  Gene Name: opioid receptor, kappa 1
  Uniprot ID: P41145
  ENSP ID: ENSP00000430923
MKTATNIYIFNLALADALVTTTMPFQSTVYLMNSWPFGDVLCKIVISIDYYNMFTSIFTLTMMSVDRYIAVCHPVKALDFRTPLKAKIINICIWLLSSSVGISAIVLGGTKVREDVDVIECSLQFPDDDYSWWDLFMKICVFIFAFVIPVLIIIVCYTLMILRLKSVRLLSGSREKDRNLRRITRLVLVVVAVFVVCWTPIHIFILVEALGSTSHSTAALSSYYFCIALGYTNSSLNPILYAFLDENFKRCFRDFCFPLKMRMERQSTSRVRNTVQDPAYLRDIDGMNKPV

SEQ ID NO: 60157 - protein, 366 aa, Homo sapiens
  Payload ID: 12036
  Gene Symbol: OPRK1
  Gene Name: opioid receptor, kappa 1
  ENSP ID: ENSP00000478453
MDSPIQIFRGEPGPTCAPSACLPPNSSAGSEDAQLEPAHISPAIPVIITAVYSVVFVVGLVGNSLVMFVIIRYTKMKTATNIYIFNLALADALVTTTMPFQSTVYLMNSWPFGDVLCKIVISIDYYNMFTSIFTLTMMSVDRYIAVCHPVKALDFRTPLKAKIINICIWLLSSSVGISAIVLGGTKVREDVDVIECSLQFPDDDYSWWDLFMKICVFIFAFVIPVLIIIVCYTLMILRLKSVRLLSGSREKDRNLRRITRLVLVVVAVFVVCWTPIHIFILVEALGSTSHSTAALSSYYFCIALGYTNSSLNPILYAFLDENFKRCFRDFCFPLKMRMERQSTSRVRNTVQDPAYLRDIDGMNKPV

SEQ ID NO: 60158 - protein, 291 aa, Homo sapiens; identical to SEQ ID NO: 60156
  Payload ID: 12036
  Gene Symbol: OPRK1
  Gene Name: opioid receptor, kappa 1
  Uniprot ID: P41145
  ENSP ID: ENSP00000483000

SEQ ID NO: 60159 - protein, 446 aa, Homo sapiens
  Payload ID: 12037
  Gene Symbol: OPRM1
  Gene Name: opioid receptor, mu 1
  Uniprot ID: P35372
  ENSP ID: ENSP00000229768
MDSSAAPTNASNCTDALAYSSCSPAPSPGSWVNLSHLDGNLSDPCGPNRTDLGGRDSLCPPTGSPSMITAITIMALYSIVCVVGLFGNFLVMYVIVRYTKMKTATNIYIFNLALADALATSTLPFQSVNYLMGTWPFGTILCKIVISIDYYNMFTSIFTLCTMSVDRYIAVCHPVKALDFRTPRNAKIINVCNWILSSAIGLPVMFMATTKYRQGSIDCTLTFSHPTWYWENLLKICVFIFAFIMPVLIITVCYGLMILRLKSVRMLSGSKEKDRNLRRITRMVLVVVAVFIVCWTPIHIYVIIKALVTIPETTFQTVSWHFCIALGYTNSCLNPVLYAFLDENFKRCFREFCIPTSSNIEQQNSTRIRQNTRDHPSTANTVDRTNHQCLPIPSLSCWALEQGCLVVYPGPLQGPLVRYDLPAILHSSCLRGNTAPSPSGGAFLLS

SEQ ID NO: 60160 - protein, 400 aa, Homo sapiens
  Payload ID: 12037
  Gene Symbol: OPRM1
  Gene Name: opioid receptor, mu 1
  Uniprot ID: P35372
  ENSP ID: ENSP00000328264
MDSSAAPTNASNCTDALAYSSCSPAPSPGSWVNLSHLDGNLSDPCGPNRTDLGGRDSLCPPTGSPSMITAITIMALYSIVCVVGLFGNFLVMYVIVRYTKMKTATNIYIFNLALADALATSTLPFQSVNYLMGTWPFGTILCKIVISIDYYNMFTSIFTLCTMSVDRYIAVCHPVKALDFRTPRNAKIINVCNWILSSAIGLPVMFMATTKYRQGSIDCTLTFSHPTWYWENLLKICVFIFAFIMPVLIITVCYGLMILRLKSVRMLSGSKEKDRNLRRITRMVLVVVAVFIVCWTPIHIYVIIKALVTIPETTFQTVSWHFCIALGYTNSCLNPVLYAFLDENFKRCFREFCIPTSSNIEQQNSTRIRQNTRDHPSTANTVDRTNHQLENLEAETAPLP

SEQ ID NO: 60161 - protein, 418 aa, Homo sapiens
  Payload ID: 12037
  Gene Symbol: OPRM1
  Gene Name: opioid receptor, mu 1
  Uniprot ID: P35372
  ENSP ID: ENSP00000338381
MDSSAAPTNASNCTDALAYSSCSPAPSPGSWVNLSHLDGNLSDPCGPNRTDLGGRDSLCPPTGSPSMITAITIMALYSIVCVVGLFGNFLVMYVIVRYTKMKTATNIYIFNLALADALATSTLPFQSVNYLMGTWPFGTILCKIVISIDYYNMFTSIFTLCTMSVDRYIAVCHPVKALDFRTPRNAKIINVCNWILSSAIGLPVMFMATTKYRQGSIDCTLTFSHPTWYWENLLKICVFIFAFIMPVLIITVCYGLMILRLKSVRMLSGSKEKDRNLRRITRMVLVVVAVFIVCWTPIHIYVIIKALVTIPETTFQTVSWHFCIALGYTNSCLNPVLYAFLDENFKRCFREFCIPTSSNIEQQNSTRIRQNTRDHPSTANTVDRTNHQPPLAVSMAQIFTRYPPPTHREKTCNDYMKR

SEQ ID NO: 60162 - protein, 476 aa, Homo sapiens
  Payload ID: 12037
  Gene Symbol: OPRM1
  Gene Name: opioid receptor, mu 1
  ENSP ID: ENSP00000353598
MSDAQLGPLRLTLLSVSARTGFCKKQQELWQRRKEAAEALGTRKVSVLLATSHSGARPAVSTMDSSAAPTNASNCTDALAYSSCSPAPSPGSWVNLSHLDGNLSDPCGPNRTDLGGRDSLCPPTGSPSMITAITIMALYSIVCVVGLFGNFLVMYVIVRYTKMKTATNIYIFNLALADALATSTLPFQSVNYLMGTWPFGTILCKIVISIDYYNMFTSIFTLCTMSVDRYIAVCHPVKALDFRTPRNAKIINVCNWILSSAIGLPVMFMATTKYRQGSIDCTLTFSHPTWYWENLLKICVFIFAFIMPVLIITVCYGLMILRLKSVRMLSGSKEKDRNLRRITRMVLVVVAVFIVCWTPIHIYVIIKALVTIPETTFQTVSWHFCIALGYTNSCLNPVLYAFLDENFKRCFREFCIPTSSNIEQQNSTRIRQNTRDHPSTANTVDRTNHQNYYIIHRCCCNTPLISQKPVLLWFCD

SEQ ID NO: 60163 - protein, 493 aa, Homo sapiens
  Payload ID: 12037
  Gene Symbol: OPRM1
  Gene Name: opioid receptor, mu 1
  Uniprot ID: P35372
  ENSP ID: ENSP00000394624
MCLHRRVPSEETYSLDRFAQNPPLFPPPSLPASESRMAHAPLLQRCGAARTGFCKKQQELWQRRKEAAEALGTRKVSVLLATSHSGARPAVSTMDSSAAPTNASNCTDALAYSSCSPAPSPGSWVNLSHLDGNLSDPCGPNRTDLGGRDSLCPPTGSPSMITAITIMALYSIVCVVGLFGNFLVMYVIVRYTKMKTATNIYIFNLALADALATSTLPFQSVNYLMGTWPFGTILCKIVISIDYYNMFTSIFTLCTMSVDRYIAVCHPVKALDFRTPRNAKIINVCNWILSSAIGLPVMFMATTKYRQGSIDCTLTFSHPTWYWENLLKICVFIFAFIMPVLIITVCYGLMILRLKSVRMLSGSKEKDRNLRRITRMVLVVVAVFIVCWTPIHIYVIIKALVTIPETTFQTVSWHFCIALGYTNSCLNPVLYAFLDENFKRCFREFCIPTSSNIEQQNSTRIRQNTRDHPSTANTVDRTNHQLENLEAETAPLP

SEQ ID NO: 60164 - protein, 403 aa, Homo sapiens
  Payload ID: 12037
  Gene Symbol: OPRM1
  Gene Name: opioid receptor, mu 1
  Uniprot ID: P35372
  ENSP ID: ENSP00000399359
MDSSAAPTNASNCTDALAYSSCSPAPSPGSWVNLSHLDGNLSDPCGPNRTDLGGRDSLCPPTGSPSMITAITIMALYSIVCVVGLFGNFLVMYVIVRYTKMKTATNIYIFNLALADALATSTLPFQSVNYLMGTWPFGTILCKIVISIDYYNMFTSIFTLCTMSVDRYIAVCHPVKALDFRTPRNAKIINVCNWILSSAIGLPVMFMATTKYRQGSIDCTLTFSHPTWYWENLLKICVFIFAFIMPVLIITVCYGLMILRLKSVRMLSGSKEKDRNLRRITRMVLVVVAVFIVCWTPIHIYVIIKALVTIPETTFQTVSWHFCIALGYTNSCLNPVLYAFLDENFKRCFREFCIPTSSNIEQQNSTRIRQNTRDHPSTANTVDRTNHQGPPAKFVADQLAGSS

SEQ ID NO: 60165 - protein, 420 aa, Homo sapiens
  Payload ID: 12037
  Gene Symbol: OPRM1
  Gene Name: opioid receptor, mu 1
  Uniprot ID: P35372
  ENSP ID: ENSP00000403549
MDSSAAPTNASNCTDALAYSSCSPAPSPGSWVNLSHLDGNLSDPCGPNRTDLGGRDSLCPPTGSPSMITAITIMALYSIVCVVGLFGNFLVMYVIVRYTKMKTATNIYIFNLALADALATSTLPFQSVNYLMGTWPFGTILCKIVISIDYYNMFTSIFTLCTMSVDRYIAVCHPVKALDFRTPRNAKIINVCNWILSSAIGLPVMFMATTKYRQGSIDCTLTFSHPTWYWENLLKICVFIFAFIMPVLIITVCYGLMILRLKSVRMLSGSKEKDRNLRRITRMVLVVVAVFIVCWTPIHIYVIIKALVTIPETTFQTVSWHFCIALGYTNSCLNPVLYAFLDENFKRCFREFCIPTSSNIEQQNSTRIRQNTRDHPSTANTVDRTNHQVELNLDCHCENAKPWPLSYNAGQSPFPFPGRV

SEQ ID NO: 60166 - protein, 406 aa, Homo sapiens
  Payload ID: 12037
  Gene Symbol: OPRM1
  Gene Name: opioid receptor, mu 1
  Uniprot ID: P35372
  ENSP ID: ENSP00000410497
MDSSAAPTNASNCTDALAYSSCSPAPSPGSWVNLSHLDGNLSDPCGPNRTDLGGRDSLCPPTGSPSMITAITIMALYSIVCVVGLFGNFLVMYVIVRYTKMKTATNIYIFNLALADALATSTLPFQSVNYLMGTWPFGTILCKIVISIDYYNMFTSIFTLCTMSVDRYIAVCHPVKALDFRTPRNAKIINVCNWILSSAIGLPVMFMATTKYRQGSIDCTLTFSHPTWYWENLLKICVFIFAFIMPVLIITVCYGLMILRLKSVRMLSGSKEKDRNLRRITRMVLVVVAVFIVCWTPIHIYVIIKALVTIPETTFQTVSWHFCIALGYTNSCLNPVLYAFLDENFKRCFREFCIPTSSNIEQQNSTRIRQNTRDHPSTANTVDRTNHQKIDLFQKSSLLNCEHTKG

SEQ ID NO: 60167 - protein, 392 aa, Homo sapiens
  Payload ID: 12037
  Gene Symbol: OPRM1
  Gene Name: opioid receptor, mu 1
  Uniprot ID: P35372
  ENSP ID: ENSP00000411903
MDSSAAPTNASNCTDALAYSSCSPAPSPGSWVNLSHLDGNLSDPCGPNRTDLGGRDSLCPPTGSPSMITAITIMALYSIVCVVGLFGNFLVMYVIVRYTKMKTATNIYIFNLALADALATSTLPFQSVNYLMGTWPFGTILCKIVISIDYYNMFTSIFTLCTMSVDRYIAVCHPVKALDFRTPRNAKIINVCNWILSSAIGLPVMFMATTKYRQGSIDCTLTFSHPTWYWENLLKICVFIFAFIMPVLIITVCYGLMILRLKSVRMLSGSKEKDRNLRRITRMVLVVVAVFIVCWTPIHIYVIIKALVTIPETTFQTVSWHFCIALGYTNSCLNPVLYAFLDENFKRCFREFCIPTSSNIEQQNSTRIRQNTRDHPSTANTVDRTNHQVRSL

SEQ ID NO: 60168 - protein, 397 aa, Homo sapiens
  Payload ID: 12037
  Gene Symbol: OPRM1
  Gene Name: opioid receptor, mu 1
  Uniprot ID: P35372
  ENSP ID: ENSP00000413752
MDSSAAPTNASNCTDALAYSSCSPAPSPGSWVNLSHLDGNLSDPCGPNRTDLGGRDSLCPPTGSPSMITAITIMALYSIVCVVGLFGNFLVMYVIVRYTKMKTATNIYIFNLALADALATSTLPFQSVNYLMGTWPFGTILCKIVISIDYYNMFTSIFTLCTMSVDRYIAVCHPVKALDFRTPRNAKIINVCNWILSSAIGLPVMFMATTKYRQGSIDCTLTFSHPTWYWENLLKICVFIFAFIMPVLIITVCYGLMILRLKSVRMLSGSKEKDRNLRRITRMVLVVVAVFIVCWTPIHIYVIIKALVTIPETTFQTVSWHFCIALGYTNSCLNPVLYAFLDENFKRCFREFCIPTSSNIEQQNSTRIRQNTRDHPSTANTVDRTNHQRERRQKSDW

SEQ ID NO: 60169 - protein, 402 aa, Homo sapiens
  Payload ID: 12037
  Gene Symbol: OPRM1
  Gene Name: opioid receptor, mu 1
  Uniprot ID: P35372
  ENSP ID: ENSP00000428018
MDSSAAPTNASNCTDALAYSSCSPAPSPGSWVNLSHLDGNLSDPCGPNRTDLGGRDSLCPPTGSPSMITAITIMALYSIVCVVGLFGNFLVMYVIVRYTKMKTATNIYIFNLALADALATSTLPFQSVNYLMGTWPFGTILCKIVISIDYYNMFTSIFTLCTMSVDRYIAVCHPVKALDFRTPRNAKIINVCNWILSSAIGLPVMFMATTKYRQGSIDCTLTFSHPTWYWENLLKICVFIFAFIMPVLIITVCYGLMILRLKSVRMLSGSKEKDRNLRRITRMVLVVVAVFIVCWTPIHIYVIIKALVTIPETTFQTVSWHFCIALGYTNSCLNPVLYAFLDENFKRCFREFCIPTSSNIEQQNSTRIRQNTRDHPSTANTVDRTNHQIRDPISNLPRVSVF

SEQ ID NO: 60170 - protein, 300 aa, Homo sapiens
  Payload ID: 12037
  Gene Symbol: OPRM1
  Gene Name: opioid receptor, mu 1
  Uniprot ID: P35372
  ENSP ID: ENSP00000429373
MKTATNIYIFNLALADALATSTLPFQSVNYLMGTWPFGTILCKIVISIDYYNMFTSIFTLCTMSVDRYIAVCHPVKALDFRTPRNAKIINVCNWILSSAIGLPVMFMATTKYRQGSIDCTLTFSHPTWYWENLLKICVFIFAFIMPVLIITVCYGLMILRLKSVRMLSGSKEKDRNLRRITRMVLVVVAVFIVCWTPIHIYVIIKALVTIPETTFQTVSWHFCIALGYTNSCLNPVLYAFLDENFKRCFREFCIPTSSNIEQQNSTRIRQNTRDHPSTANTVDRTNHQLENLEAETAPLP

SEQ ID NO: 60171 - protein, 300 aa, Homo sapiens; identical to SEQ ID NO: 60170
  Payload ID: 12037
  Gene Symbol: OPRM1
  Gene Name: opioid receptor, mu 1
  Uniprot ID: P35372
  ENSP ID: ENSP00000429719

SEQ ID NO: 60172 - protein, 389 aa, Homo sapiens
  Payload ID: 12037
  Gene Symbol: OPRM1
  Gene Name: opioid receptor, mu 1
  Uniprot ID: P35372
  ENSP ID: ENSP00000430097
MDSSAAPTNASNCTDALAYSSCSPAPSPGSWVNLSHLDGNLSDPCGPNRTDLGGRDSLCPPTGSPSMITAITIMALYSIVCVVGLFGNFLVMYVIVRYTKMKTATNIYIFNLALADALATSTLPFQSVNYLMGTWPFGTILCKIVISIDYYNMFTSIFTLCTMSVDRYIAVCHPVKALDFRTPRNAKIINVCNWILSSAIGLPVMFMATTKYRQGSIDCTLTFSHPTWYWENLLKICVFIFAFIMPVLIITVCYGLMILRLKSVRMLSGSKEKDRNLRRITRMVLVVVAVFIVCWTPIHIYVIIKALVTIPETTFQTVSWHFCIALGYTNSCLNPVLYAFLDENFKRCFREFCIPTSSNIEQQNSTRIRQNTRDHPSTANTVDRTNHQS

SEQ ID NO: 60173 - protein, 162 aa, Homo sapiens
  Payload ID: 12037
  Gene Symbol: OPRM1
  Gene Name: opioid receptor, mu 1
  ENSP ID: ENSP00000430247
MVQARTGFCKKQQELWQRRKEAAEALGTRKVSVLLATSHSGARPAVSTMDSSAAPTNASNCTDALAYSSCSPAPSPGSWVNLSHLDGNLSDPCGPNRTDLGGRDSLCPPTGSPSMITAITIMALYSIVCVVGLFGNFLVMYVIVRYTKMKTATNIYIFNLAL

SEQ ID NO: 60174 - protein, 319 aa, Homo sapiens
  Payload ID: 12037
  Gene Symbol: OPRM1
  Gene Name: opioid receptor, mu 1
  Uniprot ID: P35372
  ENSP ID: ENSP00000430260
MMRAKSISTKAGKPSRYTKMKTATNIYIFNLALADALATSTLPFQSVNYLMGTWPFGTILCKIVISIDYYNMFTSIFTLCTMSVDRYIAVCHPVKALDFRTPRNAKIINVCNWILSSAIGLPVMFMATTKYRQGSIDCTLTFSHPTWYWENLLKICVFIFAFIMPVLIITVCYGLMILRLKSVRMLSGSKEKDRNLRRITRMVLVVVAVFIVCWTPIHIYVIIKALVTIPETTFQTVSWHFCIALGYTNSCLNPVLYAFLDENFKRCFREFCIPTSSNIEQQNSTRIRQNTRDHPSTANTVDRTNHQLENLEAETAPLP

SEQ ID NO: 60175 - protein, 186 aa, Homo sapiens
  Payload ID: 12037
  Gene Symbol: OPRM1
  Gene Name: opioid receptor, mu 1
  Uniprot ID: P35372
  ENSP ID: ENSP00000430575
MDSSAAPTNASNCTDALAYSSCSPAPSPGSWVNLSHLDGNLSDPCGPNRTDLGGRDSLCPPTGSPSMITAITIMALYSIVCVVGLFGNFLVMYVIVRFHRLYTNILSSNLVLGKPAEDLCFHLRLHYASAHHYRVLWTDDLAPQECPHALWLQRKGQESSKDHQDGAGGGGCVHRLLDSHSHLRHH

SEQ ID NO: 60176 - protein, 300 aa, Homo sapiens; identical to SEQ ID NO: 60170
  Payload ID: 12037
  Gene Symbol: OPRM1
  Gene Name: opioid receptor, mu 1
  Uniprot ID: P35372
  ENSP ID: ENSP00000430876

SEQ ID NO: 60177 - protein, 402 aa, Homo sapiens; identical to SEQ ID NO: 60169
  Payload ID: 12037
  Gene Symbol: OPRM1
  Gene Name: opioid receptor, mu 1
  Uniprot ID: P35372
  ENSP ID: ENSP00000431048

SEQ ID NO: 60178 - protein, 364 aa, Homo sapiens
  Payload ID: 12038
  Gene Symbol: OPN1LW
  Gene Name: opsin 1 (cone pigments), long-wave-sensitive
  Uniprot ID: P04000
  ENSP ID: ENSP00000358967
MAQQWSLQRLAGRHPQDSYEDSTQSSIFTYTNSNSTRGPFEGPNYHIAPRWVYHLTSVWMIFVVTASVFTNGLVLAATMKFKKLRHPLNWILVNLAVADLAETVIASTISIVNQVSGYFVLGHPMCVLEGYTVSLCGITGLWSLAIISWERWMVVCKPFGNVRFDAKLAIVGIAFSWIWAAVWTAPPIFGWSRYWPHGLKTSCGPDVFSGSSYPGVQSYMIVLMVTCCIIPLAIIMLCYLQVWLAIRAVAKQQKESESTQKAEKEVTRMVVVMIFAYCVCWGPYTFFACFAAANPGYAFHPLMAALPAYFAKSATIYNPVIYVFMNRQFRNCILQLFGKKVDDGSELSSASKTEVSSVSSVSPA

SEQ ID NO: 60179 - protein, 164 aa, Homo sapiens
  Payload ID: 12038
  Gene Symbol: OPN1LW
  Gene Name: opsin 1 (cone pigments), long-wave-sensitive
  ENSP ID: ENSP00000402493
ITGLWSLAIISWERWMVVCKPFGNVRFDAKLAIVGIAFSWIWAAVWTAPPIFGWSRYWPHGLKTSCGPDVFSGSSYPGVQSYMIVLMVTCCIIPLAIIMLCYLQVWLAIRAVAKQQKESESTQKAEKEFRNCILQLFGKKVDDGSELSSASKTEVSSVSSVSPA

SEQ ID NO: 60180 - protein, 164 aa, Homo sapiens
  Payload ID: 12039
  Gene Symbol: OPN1MW
  Gene Name: opsin 1 (cone pigments), medium-wave-sensitive
  ENSP ID: ENSP00000469055
  MOD_RES (1)..(1): Any amino acid
XTGLWSLAIISWERWMVVCKPFGNVRFDAKLAIVGIAFSWIWAAVWTAPPIFGWSRYWPHGLKTSCGPDVFSGSSYPGVQSYMIVLMVTCCITPLSIIVLCYLQVWLAIRAVAKQQKESESTQKAEKEFRNCILQLFGKKVDDGSELSSASKTEVSSVSSVSPA

SEQ ID NO: 60181 - protein, 364 aa, Homo sapiens
  Payload ID: 12039
  Gene Symbol: OPN1MW
  Gene Name: opsin 1 (cone pigments), medium-wave-sensitive
  Uniprot ID: P04001
  ENSP ID: ENSP00000472316
MAQQWSLQRLAGRHPQDSYEDSTQSSIFTYTNSNSTRGPFEGPNYHIAPRWVYHLTSVWMIFVVIASVFTNGLVLAATMKFKKLRHPLNWILVNLAVADLAETVIASTISVVNQVYGYFVLGHPMCVLEGYTVSLCGITGLWSLAIISWERWMVVCKPFGNVRFDAKLAIVGIAFSWIWAAVWTAPPIFGWSRYWPHGLKTSCGPDVFSGSSYPGVQSYMIVLMVTCCITPLSIIVLCYLQVWLAIRAVAKQQKESESTQKAEKEVTRMVVVMVLAFCFCWGPYAFFACFAAANPGYPFHPLMAALPAFFAKSATIYNPVIYVFMNRQFRNCILQLFGKKVDDGSELSSASKTEVSSVSSVSPA

SEQ ID NO: 60182 - protein, 364 aa, Homo sapiens; identical to SEQ ID NO: 60181
  Payload ID: 12040
  Gene Symbol: OPN1MW2
  Gene Name: opsin 1 (cone pigments), medium-wave-sensitive 2
  Uniprot ID: P04001
  ENSP ID: ENSP00000358945

SEQ ID NO: 60183 - protein, 164 aa, Homo sapiens; identical to SEQ ID NO: 60180
  Payload ID: 12040
  Gene Symbol: OPN1MW2
  Gene Name: opsin 1 (cone pigments), medium-wave-sensitive 2
  ENSP ID: ENSP00000403023
  MOD_RES (1)..(1): Any amino acid

SEQ ID NO: 60184 - protein, 364 aa, Homo sapiens; identical to SEQ ID NO: 60181
  Payload ID: 12041
  Gene Symbol: OPN1MW3
  Gene Name: opsin 1 (cone pigments), medium-wave-sensitive 3
  Uniprot ID: P04001
  ENSP ID: ENSP00000469970

SEQ ID NO: 60185 - protein, 348 aa, Homo sapiens
  Payload ID: 12042
  Gene Symbol: OPN1SW
  Gene Name: opsin 1 (cone pigments), short-wave-sensitive
  Uniprot ID: P03999
  ENSP ID: ENSP00000249389
MRKMSEEEFYLFKNISSVGPWDGPQYHIAPVWAFYLQAAFMGTVFLIGFPLNAMVLVATLRYKKLRQPLNYILVNVSFGGFLLCIFSVFPVFVASCNGYFVFGRHVCALEGFLGTVAGLVTGWSLAFLAFERYIVICKPFGNFRFSSKHALTVVLATWTIGIGVSIPPFFGWSRFIPEGLQCSCGPDWYTVGTKYRSESYTWFLFIFCFIVPLSLICFSYTQLLRALKAVAAQQQESATTQKAEREVSRMVVVMVGSFCVCYVPYAAFAMYMVNNRNHGLDLRLVTIPSFFSKSACIYNPIIYCFMNKQFQACIMKMVCGKAMTDESDTCSSQKTEVSTVSSTQVGPN

SEQ ID NO: 60186 - protein, 402 aa, Homo sapiens
  Payload ID: 12043
  Gene Symbol: OPN3
  Gene Name: opsin 3
  Uniprot ID: Q9H1Y3
  ENSP ID: ENSP00000355512
MYSGNRSGGHGYWDGGGAAGAEGPAPAGTLSPAPLFSPGTYERLALLLGSIGLLGVGNNLLVLVLYYKFQRLRTPTHLLLVNISLSDLLVSLFGVTFTFVSCLRNGWVWDTVGCVWDGFSGSLFGIVSIATLTVLAYERYIRVVHARVINFSWAWRAITYIWLYSLAWAGAPLLGWNRYILDVHGLGCTVDWKSKDANDSSFVLFLFLGCLVVPLGVIAHCYGHILYSIRMLRCVEDLQTIQVIKILKYEKKLAKMCFLMIFTFLVCWMPYIVICFLVVNGHGHLVTPTISIVSYLFAKSNTVYNPVIYVFMIRKFRRSLLQLLCLRLLRCQRPAKDLPAAGSEMQIRPIVMSQKDGDRPKKKVTFNSSSIIFIITSDESLSVDDSDKTNGSKVDVIQVRPL

SEQ ID NO: 60187 - protein, 478 aa, Homo sapiens
  Payload ID: 12044
  Gene Symbol: OPN4
  Gene Name: opsin 4
  Uniprot ID: Q9UHM6
  ENSP ID: ENSP00000241891
MNPPSGPRVPPSPTQEPSCMATPAPPSWWDSSQSSISSLGRLPSISPTAPGTWAAAWVPLPTVDVPDHAHYTLGTVILLVGLTGMLGNLTVIYTFCRSRSLRTPANMFIINLAVSDFLMSFTQAPVFFTSSLYKQWLFGETGCEFYAFCGALFGISSMITLTAIALDRYLVITRPLATFGVASKRRAAFVLLGVWLYALAWSLPPFFGWSAYVPEGLLTSCSWDYMSFTPAVRAYTMLLCCFVFFLPLLIIIYCYIFIFRAIRETGRALQTFGACKGNGESLWQRQRLQSECKMAKIMLLVILLFVLSWAPYSAVALVAFAGYAHVLTPYMSSVPAVIAKASAIHNPIIYAITHPKYRVAIAQHLPCLGVLLGVSRRHSRPYPSYRSTHRSTLTSHTSNLSWISIRRRQESLGSESEVGWTHMEAAAVWGAAQQANGRSLYGQGLEDLEAKAPPRPQGHEAETPGKTKGLIPSQDPRM

SEQ ID NO: 60188 - protein, 489 aa, Homo sapiens
  Payload ID: 12044
  Gene Symbol: OPN4
  Gene Name: opsin 4
  Uniprot ID: Q9UHM6
  ENSP ID: ENSP00000361141
MNPPSGPRVPPSPTQEPSCMATPAPPSWWDSSQSSISSLGRLPSISPTAPGTWAAAWVPLPTVDVPDHAHYTLGTVILLVGLTGMLGNLTVIYTFCRAVLRGVTVMMQSRSLRTPANMFIINLAVSDFLMSFTQAPVFFTSSLYKQWLFGETGCEFYAFCGALFGISSMITLTAIALDRYLVITRPLATFGVASKRRAAFVLLGVWLYALAWSLPPFFGWSAYVPEGLLTSCSWDYMSFTPAVRAYTMLLCCFVFFLPLLIIIYCYIFIFRAIRETGRALQTFGACKGNGESLWQRQRLQSECKMAKIMLLVILLFVLSWAPYSAVALVAFAGYAHVLTPYMSSVPAVIAKASAIHNPIIYAITHPKYRVAIAQHLPCLGVLLGVSRRHSRPYPSYRSTHRSTLTSHTSNLSWISIRRRQESLGSESEVGWTHMEAAAVWGAAQQANGRSLYGQGLEDLEAKAPPRPQGHEAETPGKTKGLIPSQDPRM

SEQ ID NO: 60189 - protein, 495 aa, Homo sapiens
  Payload ID: 12044
  Gene Symbol: OPN4
  Gene Name: opsin 4
  ENSP ID: ENSP00000393132
MNPPSGPRVPPSPTQEPSCMATPAPPSWWDSSQSSISSLGRLPSISPTAPGTWAAAWVPLPTVDVPDHAHYTLGTVILLVGLTGMLGNLTVIYTFCRAVLRGVTVMMQSRSLRTPANMFIINLAVSDFLMSFTQAPVFFTSSLYKQWLFGETGCEFYAFCGALFGISSMITLTAIALDRYLVITRPLATFGVASKRRAAFVLLGVWLYALAWSLPPFFGWSAYVPEGLLTSCSWDYMSFTPAVRAYTMLLCCFVFFLPLLIIIYCYIFIFRAIRETGRALQTFGACKGNGESLWQRQRLQSECKMAKIMLLVILLFVLSWAPYSAVALVAFAGYAHVLTPYMSSVPAVIAKASAIHNPIIYAITHPKYRVAIAQHLPCLGVLLGVSRRHSRPYPSYRSTHRSTLTSHTSNLSWISIRRRQESLGSESEVGWTHMEAAAVWGAAQQANGRSLYGQGLEDLEAKAPPRPQGHEAETPGKRRASSGRSQRPERQRAAP

SEQ ID NO: 60190 - protein, 354 aa, Homo sapiens
  Payload ID: 12045
  Gene Symbol: OPN5
  Gene Name: opsin 5
  Uniprot ID: Q6U736
  ENSP ID: ENSP00000360255
MALNHTALPQDERLPHYLRDGDPFASKLSWEADLVAGFYLTIIGILSTFGNGYVLYMSSRRKKKLRPAEIMTINLAVCDLGISVVGKPFTIISCFCHRWVFGWIGCRWYGWAGFFFGCGSLITMTAVSLDRYLKICYLSYGVWLKRKHAYICLAAIWAYASFWTTMPLVGLGDYVPEPFGTSCTLDWWLAQASVGGQVFILNILFFCLLLPTAVIVFSYVKIIAKVKSSSKEVAHFDSRIHSSHVLEMKLTKVAMLICAGFLIAWIPYAVVSVWSAFGRPDSIPIQLSVVPTLLAKSAAMYNPIIYQVIDYKFACCQTGGLKATKKKSLEGFRLHTVTTVRKSSAVLEIHEEWE

SEQ ID NO: 60191 - protein, 353 aa, Homo sapiens
  Payload ID: 12045
  Gene Symbol: OPN5
  Gene Name: opsin 5
  ENSP ID: ENSP00000377302
MALNHTALPQDERLPHYLRDGDPFASKLSWEADLVAGFYLTIIGILSTFGNGYVLYMSSRRKKKLRPAEIMTINLAVCDLGISVVGKPFTIISCFCHRWVFGWIGCRWYGWAGFFFGCGSLITMTAVSLDRYLKICYLSYGVWLKRKHAYICLAAIWAYASFWTTMPLVGLGDYVPEPFGTSCTLDWWLAQASVGGQVFILNILFFCLLLPTAVIVFSYVKIIAKVKSSSKEVAHFDSRIHSSHVLEMKLTKVAMLICAGFLIAWIPYAVVSVWSAFGRPDSIPIQLSVVPTLLAKSAAMYNPIIYQVIDYKFACCQTGGLKATKKKSLEGFRLHTVTTVRKSSAVLEIHEEV

SEQ ID NO: 60192 - protein, 382 aa, Homo sapiens
  Payload ID: 12045
  Gene Symbol: OPN5
  Gene Name: opsin 5
  ENSP ID: ENSP00000426991
MALNHTALPQDERLPHYLRDGDPFASKLSWEADLVAGFYLTIIGILSTFGNGYVLYMSSRRKKKLRPAEIMTINLAVCDLGISVVGKPFTIISCFCHRWVFGWIGCRWYGWAGFFFGCGSLITMTAVSLDRYLKICYLSYGVWLKRKHAYICLAAIWAYASFWTTMPLVGLGDYVPEPFGTSCTLDWWLAQASVGGQVFILNILFFCLLLPTAVIVFSYVKIIAKVKSSSKEVAHFDSRIHSSHVLEMKLTKVAMLICAGFLIAWIPYAVVSVWSAFGRPDSIPIQLSVVPTLLAKSAAMYNPIIYQVIDYKFACCQTGGLKATKKKSLEGFRLHTVTTVRKSSAVLEIHEEGRNKSASPNNLDADSHSNDDDCGKKYEPIF

SEQ ID NO: 60193 - protein, 978 aa, Homo sapiens
  Payload ID: 12046
  Gene Symbol: OPA1
  Gene Name: optic atrophy 1 (autosomal dominant)
  ENSP ID: ENSP00000354429
MWRLRRAAVACEVCQSLVKHSSGIKGSLPLQKLHLVSRSIYHSHHPTLKLQRPQLRTSFQQFSSLTNLPLRKLKFSPIKYGYQPRRNFWPARLATRLLKLRYLILGSAVGGGYTAKKTFDQWKDMIPDLSEYKWIVPDIVWEIDEYIDFEKIRKALPSSEDLVKLAPDFDKIVESLSLLKDFFTSGHKLVSEVIGASDLLLLLGSPEETAFRATDRGSESDKHFRKVSDKEKIDQLQEELLHTQLKYQRILERLEKENKELRKLVLQKDDKGIHHRKLKKSLIDMYSEVLDVLSDYDASYNTQDHLPRVVVVGDQSAGKTSVLEMIAQARIFPRGSGEMMTRSPVKVTLSEGPHHVALFKDSSREFDLTKEEDLAALRHEIELRMRKNVKEGCTVSPETISLNVKGPGLQRMVLVDLPGVINTVTSGMAPDTKETIFSISKAYMQNPNAIILCIQDGSVDAERSIVTDLVSQMDPHGRRTIFVLTKVDLAEKNVASPSRIQQIIEGKLFPMKALGYFAVVTGKGNSSESIEAIREYEEEFFQNSKLLKTSMLKAHQVTTRNLSLAVSDCFWKMVRESVEQQADSFKATRFNLETEWKNNYPRLRELDRNELFEKAKNEILDEVISLSQVTPKHWEEILQQSLWERVSTHVIENIYLPAAQTMNSGTFNTTVDIKLKQWTDKQLPNKAVEVAWETLQEEFSRFMTEPKGKEHDDIFDKLKEAVKEESIKRHKWNDFAEDSLRVIQHNALEDRSISDKQQWDAAIYFMEEALQARLKDTENAIENMVGPDWKKRWLYWKNRTQEQCVHNETKNELEKMLKCNEEHPAYLASDEITTVRKNLESRGVEVDPSLIKDTWHQVYRRHFLKTALNHCNLCRRGFYYYQRHFVDSELECNDVVLFWRIQRMLAITANTLRQQLTNTEVRRLEKNVKEVLEDFAEDGEKKIKLLTGKRVQLAEDLKKVREIQEKLDAFIEALHQEK

SEQ ID NO: 60194 - protein, 997 aa, Homo sapiens
  Payload ID: 12046
  Gene Symbol: OPA1
  Gene Name: optic atrophy 1 (autosomal dominant)
  Uniprot ID: O60313
  ENSP ID: ENSP00000354681
MWRLRRAAVACEVCQSLVKHSSGIKGSLPLQKLHLVSRSIYHSHHPTLKLQRPQLRTSFQQFSSLTNLPLRKLKFSPIKYGYQPRRNFWPARLATRLLKLRYLILGSAVGGGYTAKKTFDQWKDMIPDLSEYKWIVPDIVWEIDEYIDFEKIRKALPSSEDLVKLAPDFDKIVESLSLLKDFFTSGSPEETAFRATDRGSESDKHFRKGLLGELILLQQQIQEHEEEARRAAGQYSTSYAQQKRKVSDKEKIDQLQEELLHTQLKYQRILERLEKENKELRKLVLQKDDKGIHHRKLKKSLIDMYSEVLDVLSDYDASYNTQDHLPRVVVVGDQSAGKTSVLEMIAQARIFPRGSGEMMTRSPVKVTLSEGPHHVALFKDSSREFDLTKEEDLAALRHEIELRMRKNVKEGCTVSPETISLNVKGPGLQRMVLVDLPGVINTVTSGMAPDTKETIFSISKAYMQNPNAIILCIQDGSVDAERSIVTDLVSQMDPHGRRTIFVLTKVDLAEKNVASPSRIQQIIEGKLFPMKALGYFAVVTGKGNSSESIEAIREYEEEFFQNSKLLKTSMLKAHQVTTRNLSLAVSDCFWKMVRESVEQQADSFKATRFNLETEWKNNYPRLRELDRNELFEKAKNEILDEVISLSQVTPKHWEEILQQSLWERVSTHVIENIYLPAAQTMNSGTFNTTVDIKLKQWTDKQLPNKAVEVAWETLQEEFSRFMTEPKGKEHDDIFDKLKEAVKEESIKRHKWNDFAEDSLRVIQHNALEDRSISDKQQWDAAIYFMEEALQARLKDTENAIENMVGPDWKKRWLYWKNRTQEQCVHNETKNELEKMLKCNEEHPAYLASDEITTVRKNLESRGVEVDPSLIKDTWHQVYRRHFLKTALNHCNLCRRGFYYYQRHFVDSELECNDVVLFWRIQRMLAITANTLRQQLTNTEVRRLEKNVKEVLEDFAEDGEKKIKLLTGKRVQLAEDLKKVREIQEKLDAFIEALHQEK

SEQ ID NO: 60195 - protein, 961 aa, Homo sapiens
  Payload ID: 12046
  Gene Symbol: OPA1
  Gene Name: optic atrophy 1 (autosomal dominant)
  ENSP ID: ENSP00000354781
MWRLRRAAVACEVCQSLVKHSSGIKGSLPLQKLHLVSRSIYHSHHPTLKLQRPQLRTSFQQFSSLTNLPLRKLKFSPIKYGYQPRRNFWPARLATRLLKLRYLILGSAVGGGYTAKKTFDQWKDMIPDLSEYKWIVPDIVWEIDEYIDFGSPEETAFRATDRGSESDKHFRKGLLGELILLQQQIQEHEEEARRAAGQYSTSYAQQKRKVSDKEKIDQLQEELLHTQLKYQRILERLEKENKELRKLVLQKDDKGIHHRKLKKSLIDMYSEVLDVLSDYDASYNTQDHLPRVVVVGDQSAGKTSVLEMIAQARIFPRGSGEMMTRSPVKVTLSEGPHHVALFKDSSREFDLTKEEDLAALRHEIELRMRKNVKEGCTVSPETISLNVKGPGLQRMVLVDLPGVINTVTSGMAPDTKETIFSISKAYMQNPNAIILCIQDGSVDAERSIVTDLVSQMDPHGRRTIFVLTKVDLAEKNVASPSRIQQIIEGKLFPMKALGYFAVVTGKGNSSESIEAIREYEEEFFQNSKLLKTSMLKAHQVTTRNLSLAVSDCFWKMVRESVEQQADSFKATRFNLETEWKNNYPRLRELDRNELFEKAKNEILDEVISLSQVTPKHWEEILQQSLWERVSTHVIENIYLPAAQTMNSGTFNTTVDIKLKQWTDKQLPNKAVEVAWETLQEEFSRFMTEPKGKEHDDIFDKLKEAVKEESIKRHKWNDFAEDSLRVIQHNALEDRSISDKQQWDAAIYFMEEALQARLKDTENAIENMVGPDWKKRWLYWKNRTQEQCVHNETKNELEKMLKCNEEHPAYLASDEITTVRKNLESRGVEVDPSLIKDTWHQVYRRHFLKTALNHCNLCRRGFYYYQRHFVDSELECNDVVLFWRIQRMLAITANTLRQQLTNTEVRRLEKNVKEVLEDFAEDGEKKIKLLTGKRVQLAEDLKKVREIQEKLDAFIEALHQEK

SEQ ID NO: 60196 - protein, 979 aa, Homo sapiens
  Payload ID: 12046
  Gene Symbol: OPA1
  Gene Name: optic atrophy 1 (autosomal dominant)
  ENSP ID: ENSP00000355311
MWRLRRAAVACEVCQSLVKHSSGIKGSLPLQKLHLVSRSIYHSHHPTLKLQRPQLRTSFQQFSSLTNLPLRKLKFSPIKYGYQPRRNFWPARLATRLLKLRYLILGSAVGGGYTAKKTFDQWKDMIPDLSEYKWIVPDIVWEIDEYIDFGHKLVSEVIGASDLLLLLGSPEETAFRATDRGSESDKHFRKGLLGELILLQQQIQEHEEEARRAAGQYSTSYAQQKRKVSDKEKIDQLQEELLHTQLKYQRILERLEKENKELRKLVLQKDDKGIHHRKLKKSLIDMYSEVLDVLSDYDASYNTQDHLPRVVVVGDQSAGKTSVLEMIAQARIFPRGSGEMMTRSPVKVTLSEGPHHVALFKDSSREFDLTKEEDLAALRHEIELRMRKNVKEGCTVSPETISLNVKGPGLQRMVLVDLPGVINTVTSGMAPDTKETIFSISKAYMQNPNAIILCIQDGSVDAERSIVTDLVSQMDPHGRRTIFVLTKVDLAEKNVASPSRIQQIIEGKLFPMKALGYFAVVTGKGNSSESIEAIREYEEEFFQNSKLLKTSMLKAHQVTTRNLSLAVSDCFWKMVRESVEQQADSFKATRFNLETEWKNNYPRLRELDRNELFEKAKNEILDEVISLSQVTPKHWEEILQQSLWERVSTHVIENIYLPAAQTMNSGTFNTTVDIKLKQWTDKQLPNKAVEVAWETLQEEFSRFMTEPKGKEHDDIFDKLKEAVKEESIKRHKWNDFAEDSLRVIQHNALEDRSISDKQQWDAAIYFMEEALQARLKDTENAIENMVGPDWKKRWLYWKNRTQEQCVHNETKNELEKMLKCNEEHPAYLASDEITTVRKNLESRGVEVDPSLIKDTWHQVYRRHFLKTALNHCNLCRRGFYYYQRHFVDSELECNDVVLFWRIQRMLAITANTLRQQLTNTEVRRLEKNVKEVLEDFAEDGEKKIKLLTGKRVQLAEDLKKVREIQEKLDAFIEALHQEK

SEQ ID NO: 60197 - protein, 1015 aa, Homo sapiens
  Payload ID: 12046
  Gene Symbol: OPA1
  Gene Name: optic atrophy 1 (autosomal dominant)
  ENSP ID: ENSP00000355324
MWRLRRAAVACEVCQSLVKHSSGIKGSLPLQKLHLVSRSIYHSHHPTLKLQRPQLRTSFQQFSSLTNLPLRKLKFSPIKYGYQPRRNFWPARLATRLLKLRYLILGSAVGGGYTAKKTFDQWKDMIPDLSEYKWIVPDIVWEIDEYIDFEKIRKALPSSEDLVKLAPDFDKIVESLSLLKDFFTSGHKLVSEVIGASDLLLLLGSPEETAFRATDRGSESDKHFRKGLLGELILLQQQIQEHEEEARRAAGQYSTSYAQQKRKVSDKEKIDQLQEELLHTQLKYQRILERLEKENKELRKLVLQKDDKGIHHRKLKKSLIDMYSEVLDVLSDYDASYNTQDHLPRVVVVGDQSAGKTSVLEMIAQARIFPRGSGEMMTRSPVKVTLSEGPHHVALFKDSSREFDLTKEEDLAALRHEIELRMRKNVKEGCTVSPETISLNVKGPGLQRMVLVDLPGVINTVTSGMAPDTKETIFSISKAYMQNPNAIILCIQDGSVDAERSIVTDLVSQMDPHGRRTIFVLTKVDLAEKNVASPSRIQQIIEGKLFPMKALGYFAVVTGKGNSSESIEAIREYEEEFFQNSKLLKTSMLKAHQVTTRNLSLAVSDCFWKMVRESVEQQADSFKATRFNLETEWKNNYPRLRELDRNELFEKAKNEILDEVISLSQVTPKHWEEILQQSLWERVSTHVIENIYLPAAQTMNSGTFNTTVDIKLKQWTDKQLPNKAVEVAWETLQEEFSRFMTEPKGKEHDDIFDKLKEAVKEESIKRHKWNDFAEDSLRVIQHNALEDRSISDKQQWDAAIYFMEEALQARLKDTENAIENMVGPDWKKRWLYWKNRTQEQCVHNETKNELEKMLKCNEEHPAYLASDEITTVRKNLESRGVEVDPSLIKDTWHQVYRRHFLKTALNHCNLCRRGFYYYQRHFVDSELECNDVVLFWRIQRMLAITANTLRQQLTNTEVRRLEKNVKEVLEDFAEDGEKKIKLLTGKRVQLAEDLKKVREIQEKLDAFIEALHQEK

SEQ ID NO: 60198 - protein, 243 aa, Homo sapiens
  Payload ID: 12046
  Gene Symbol: OPA1
  Gene Name: optic atrophy 1 (autosomal dominant)
  ENSP ID: ENSP00000376231
MWRLRRAAVACEVCQSLVKHSSGIKGSLPLQKLHLVSRSIYHSHHPTLKLQRPQLRTSFQQFSSLTNLPLRKLKFSPIKYGYQPRRNFWPARLATRLLKLRYLILGSAVGGGYTAKKTFDQWKDMIPDLSEYKWIVPDIVWEIDEYIDFEKIRKALPSSEDLVKLAPDFDKIVESLSLLKDFFTSGHKLVSEVIGASDLLLLLGSPEETAFRATDRGSESDKHFRKGLLGELILLQQQIQEHE

SEQ ID NO: 60199 - protein, 166 aa, Homo sapiens
  Payload ID: 12046
  Gene Symbol: OPA1
  Gene Name: optic atrophy 1 (autosomal dominant)
  ENSP ID: ENSP00000376232
MWRLRRAAVACEVCQSLVKHSSGIKGSLPLQKLHLVSRSIYHSHHPTLKLQRPQLRTSFQQFSSLTNLPLRKLKFSPIKYGYQPRRNFWPARLATRLLKLRYLILGSAVGGGYTAKKTFDQWKDMIPDLSEYKWIVPDIVWEIDEYIDFGSPEETAFRATDRGSES

SEQ ID NO: 60200 - protein, 960 aa, Homo sapiens
  Payload ID: 12046
  Gene Symbol: OPA1
  Gene Name: optic atrophy 1 (autosomal dominant)
  Uniprot ID: O60313
  ENSP ID: ENSP00000376233
MWRLRRAAVACEVCQSLVKHSSGIKGSLPLQKLHLVSRSIYHSHHPTLKLQRPQLRTSFQQFSSLTNLPLRKLKFSPIKYGYQPRRNFWPARLATRLLKLRYLILGSAVGGGYTAKKTFDQWKDMIPDLSEYKWIVPDIVWEIDEYIDFEKIRKALPSSEDLVKLAPDFDKIVESLSLLKDFFTSGSPEETAFRATDRGSESDKHFRKVSDKEKIDQLQEELLHTQLKYQRILERLEKENKELRKLVLQKDDKGIHHRKLKKSLIDMYSEVLDVLSDYDASYNTQDHLPRVVVVGDQSAGKTSVLEMIAQARIFPRGSGEMMTRSPVKVTLSEGPHHVALFKDSSREFDLTKEEDLAALRHEIELRMRKNVKEGCTVSPETISLNVKGPGLQRMVLVDLPGVINTVTSGMAPDTKETIFSISKAYMQNPNAIILCIQDGSVDAERSIVTDLVSQMDPHGRRTIFVLTKVDLAEKNVASPSRIQQIIEGKLFPMKALGYFAVVTGKGNSSESIEAIREYEEEFFQNSKLLKTSMLKAHQVTTRNLSLAVSDCFWKMVRESVEQQADSFKATRFNLETEWKNNYPRLRELDRNELFEKAKNEILDEVISLSQVTPKHWEEILQQSLWERVSTHVIENIYLPAAQTMNSGTFNTTVDIKLKQWTDKQLPNKAVEVAWETLQEEFSRFMTEPKGKEHDDIFDKLKEAVKEESIKRHKWNDFAEDSLRVIQHNALEDRSISDKQQWDAAIYFMEEALQARLKDTENAIENMVGPDWKKRWLYWKNRTQEQCVHNETKNELEKMLKCNEEHPAYLASDEITTVRKNLESRGVEVDPSLIKDTWHQVYRRHFLKTALNHCNLCRRGFYYYQRHFVDSELECNDVVLFWRIQRMLAITANTLRQQLTNTEVRRLEKNVKEVLEDFAEDGEKKIKLLTGKRVQLAEDLKKVREIQEKLDAFIEALHQEK

SEQ ID NO: 60201 - protein, 183 aa, Homo sapiens
  Payload ID: 12046
  Gene Symbol: OPA1
  Gene Name: optic atrophy 1 (autosomal dominant)
  ENSP ID: ENSP00000398358
LASDEITTVRKNLESRGVEVDPSLIKDTWHQVYRRHFLKTALNHCNLCRRGFYYYQRHFVDSELECNDVVLFWRIQRMLAITANTLRQQLTNTEVRRLEKNVKEVLEDFAEDGEKKIKLLTGKRVQLAEDLKKLQGTGLSTVAHACNPSTLGGQDGWKTRNVLFPQLGLNTTHQATTWRRTQH

SEQ ID NO: 60202 - protein, 84 aa, Homo sapiens
  Payload ID: 12046
  Gene Symbol: OPA1
  Gene Name: optic atrophy 1 (autosomal dominant)
  ENSP ID: ENSP00000399877
MIPDLSEYKWIVPDIVWEIDEYIDFEKIRKALPSSEDLVKLAPDFDKIVESLSLLKDFFTSGSPEETAFRATDRGSESDKHFRK

SEQ ID NO: 60203 - protein, 185 aa, Homo sapiens
  Payload ID: 12046
  Gene Symbol: OPA1
  Gene Name: optic atrophy 1 (autosomal dominant)
  ENSP ID: ENSP00000409084
  MOD_RES (1)..(1): Any amino acid
XYLILGSAVGGGYTAKKTFDQWKDMIPDLSEYKWIVPDIVWEIDEYIDFEKIRKALPSSEDLVKLAPDFDKIVESLSLLKDFFTSGHKLVSEVIGASDLLLLLGSPEETAFRATDRGSESDKHFRKVSDKEKIDQLQEELLHTQLKYQRILERLEKENKELRKLVLQKDDKGIHHRKLKKSLIDM

SEQ ID NO: 60204 - protein, 131 aa, Homo sapiens
  Payload ID: 12046
  Gene Symbol: OPA1
  Gene Name: optic atrophy 1 (autosomal dominant)
  ENSP ID: ENSP00000411699
  MOD_RES (1)..(1): Any amino acid
XLEKNVKEVLEDFAEDGEKKIKLLTGKRVQLAEDLTRTQHYTPGHHMAPHPALTLLLPCLGSDIRARLLFVMESLLLSSALTLCARCLSISSFPPASLCPTPDRFLPHLKPDHAFVEIPSLPCLCFASLHQ

SEQ ID NO: 60205 - protein, 179 aa, Homo sapiens
  Payload ID: 12047
  Gene Symbol: OPA3
  Gene Name: optic atrophy 3 (autosomal recessive, with chorea and spastic paraplegia)
  Uniprot ID: Q9H6K4
  ENSP ID: ENSP00000263275
MVVGAFPMAKLLYLGIRQVSKPLANRIKEAARRSEFFKTYICLPPAQLYHWVEMRTKMRIMGFRGTVIKPLNEEAAAELGAELLGEATIFIVGGGCLVLEYWRHQAQQRHKEEEQRAAWNALRDEVGHLALALEALQAQVQAAPPQGALEELRTELQEVRAQLCNPGRSASHAVPASKK

SEQ ID NO: 60206 - protein, 180 aa, Homo sapiens
  Payload ID: 12047
  Gene Symbol: OPA3
  Gene Name: optic atrophy 3 (autosomal recessive, with chorea and spastic paraplegia)
  Uniprot ID: Q9H6K4
  ENSP ID: ENSP00000319817
MVVGAFPMAKLLYLGIRQVSKPLANRIKEAARRSEFFKTYICLPPAQLYHWLEMRTKMRIMGFNAAAIKPLNEGAAAELGAELLGEGIIFITACSCLMLEYWRHQLQQRRKEKERRVAREALRGEVGHLGLALEELQAQVQATSTQLALEELRAQLQEVRAHLCLRDPPPAPPVAPASEK

SEQ ID NO: 60207 - protein, 126 aa, Homo sapiens
  Payload ID: 12047
  Gene Symbol: OPA3
  Gene Name: optic atrophy 3 (autosomal recessive, with chorea and spastic paraplegia)
  ENSP ID: ENSP00000442839
MRTKMRIMGFRGTVIKPLNEEAAAELGAELLGEATIFIVGGGCLVLEYWRHQAQQRHKEEEQRAAWNALRDEVGHLALALEALQAQVQAAPPQGALEELRTELQEVRAQLCNPGRSASHAVPASKK

SEQ ID NO: 60208 - protein, 332 aa, Homo sapiens
  Payload ID: 12048
  Gene Symbol: OPTC
  Gene Name: opticin
  Uniprot ID: Q9UBM4
  ENSP ID: ENSP00000356191
MRLLAFLSLLALVLQETGTASLPRKERKRREEQMPREGDSFEVLPLRNDVLNPDNYGEVIDLSNYEELTDYGDQLPEVKVTSLAPATSISPAKSTTAPGTPSSNPTMTRPTTAGLLLSSQPNHGLPTCLVCVCLGSSVYCDDIDLEDIPPLPRRTAYLYARFNRISRIRAEDFKGLTKLKRIDLSNNLISSIDNDAFRLLHALQDLILPENQLEALPVLPSGIEFLDVRLNRLQSSGIQPAAFRAMEKLQFLYLSDNLLDSIPGPLPLSLRSVHLQNNLIETMQRDVFCDPEEHKHTRRQLEDIRLDGNPINLSLFPSAYFCLPRLPIGRFT

SEQ ID NO: 60209 - protein, 174 aa, Homo sapiens
  Payload ID: 12048
  Gene Symbol: OPTC
  Gene Name: opticin
  ENSP ID: ENSP00000399491
MRLLAFLSLLALVLQETGTASLPRKERKRREEQMPREGDSFEVLPLRNDVLNPDNYGEVIDLSNYEELTDYGDQLPEVKVTSLAPATSISPAKSTTAPGTPSSNPTMTRPTTAGLLLSSQPNHEDIPPLPRRTAYLYARFNRISRIRAEDFKGLTKLKRIDLSNNLISSIDNDA

SEQ ID NO: 60210 - protein, 577 aa, Homo sapiens
  Payload ID: 12049
  Gene Symbol: OPTN
  Gene Name: optineurin
  Uniprot ID: Q96CV9
  ENSP ID: ENSP00000263036
MSHQPLSCLTEKEDSPSESTGNGPPHLAHPNLDTFTPEELLQQMKELLTENHQLKEAMKLNNQAMKGRFEELSAWTEKQKEERQFFEIQSKEAKERLMALSHENEKLKEELGKLKGKSERSSEDPTDDSRLPRAEAEQEKDQLRTQVVRLQAEKADLLGIVSELQLKLNSSGSSEDSFVEIRMAEGEAEGSVKEIKHSPGPTRTVSTGTALSKYRSRSADGAKNYFEHEELTVSQLLLCLREGNQKVERLEVALKEAKERVSDFEKKTSNRSEIETQTEGSTEKENDEEKGPETVGSEVEALNLQVTSLFKELQEAHTKLSEAELMKKRLQEKCQALERKNSAIPSELNEKQELVYTNKKLELQVESMLSEIKMEQAKTEDEKSKLTVLQMTHNKLLQEHNNALKTIEELTRKESEKVDRAVLKELSEKLELAEKALASKQLQMDEMKQTIAKQEEDLETMTILRAQMEVYCSDFHAERAAREKIHEEKEQLALQLAVLLKENDAFEDGGRQSLMEMQSRHGARTSDSDQQAYLVQRGAEDRDWRQQRNIPIHSCPKCGEVLPDIDTLQIHVMDCII

SEQ ID NO: 60211 - protein, 577 aa, Homo sapiens; identical to SEQ ID NO: 60210
  Payload ID: 12049
  Gene Symbol: OPTN
  Gene Name: optineurin
  Uniprot ID: Q96CV9
  ENSP ID: ENSP00000368021

SEQ ID NO: 60212 - protein, 577 aa, Homo sapiens; identical to SEQ ID NO: 60210
  Payload ID: 12049
  Gene Symbol: OPTN
  Gene Name: optineurin
  Uniprot ID: Q96CV9
  ENSP ID: ENSP00000368022

SEQ ID NO: 60213 - protein, 571 aa, Homo sapiens
  Payload ID: 12049
  Gene Symbol: OPTN
  Gene Name: optineurin
  Uniprot ID: Q96CV9
  ENSP ID: ENSP00000368027
MSHQPLSCLTEKEDSPSESTGNGPPHLAHPNLDTFTPEELLQQMKELLTENHQLKEAMKLNNQAMKGRFEELSAWTEKQKEERQFFEIQSKEAKERLMALSHENEKLKEELGKLKGKSERSSEDPTDDSRLPRAEAEQEKDQLRTQVVRLQAEKADLLGIVSELQLKLNSSGSSEDSFVEIRMAEGEAEGSVKEIKHSPGPTRTVSTGTSRSADGAKNYFEHEELTVSQLLLCLREGNQKVERLEVALKEAKERVSDFEKKTSNRSEIETQTEGSTEKENDEEKGPETVGSEVEALNLQVTSLFKELQEAHTKLSEAELMKKRLQEKCQALERKNSAIPSELNEKQELVYTNKKLELQVESMLSEIKMEQAKTEDEKSKLTVLQMTHNKLLQEHNNALKTIEELTRKESEKVDRAVLKELSEKLELAEKALASKQLQMDEMKQTIAKQEEDLETMTILRAQMEVYCSDFHAERAAREKIHEEKEQLALQLAVLLKENDAFEDGGRQSLMEMQSRHGARTSDSDQQAYLVQRGAEDRDWRQQRNIPIHSCPKCGEVLPDIDTLQIHVMDCII

SEQ ID NO: 60214 - protein, 577 aa, Homo sapiens; identical to SEQ ID NO: 60210
  Payload ID: 12049
  Gene Symbol: OPTN
  Gene Name: optineurin
  Uniprot ID: Q96CV9
  ENSP ID: ENSP00000368032

SEQ ID NO: 60215 - protein, 571 aa, Homo sapiens; identical to SEQ ID NO: 60213
  Payload ID: 12049
  Gene Symbol: OPTN
  Gene Name: optineurin
  Uniprot ID: Q96CV9
  ENSP ID: ENSP00000368040

SEQ ID NO: 60216 - protein, 126 aa, Homo sapiens
  Payload ID: 12049
  Gene Symbol: OPTN
  Gene Name: optineurin
  ENSP ID: ENSP00000400356
  MOD_RES (1)..(1): Any amino acid
XGEAEGSVKEIKHSPGPTRTVSTGTALSKYRSRSADGAKNYFEHEELTVSQLLLCLREGNQKVERLEVALKEAKERVSDFEKKTSNRSEIETQTEGSTEKENDEEKGPETTGFHHVGQDGLDLLTS

SEQ ID NO: 60217 - protein, 62 aa, Homo sapiens
  Payload ID: 12049
  Gene Symbol: OPTN
  Gene Name: optineurin
  ENSP ID: ENSP00000414747
MSHQPLSCLTEKEDSPSESTGNGPPHLAHPNLDTFTPEELLQQMKELLTENHQLKEPCGQVD

SEQ ID NO: 60218 - protein, 107 aa, Homo sapiens
  Payload ID: 12049
  Gene Symbol: OPTN
  Gene Name: optineurin
  ENSP ID: ENSP00000481473
  MOD_RES (1)..(1): Any amino acid
XAEQEKDQLRTQVVRLQAEKADLLGIVSELQLKLNSSGSSEDSFVEIRMAEGEAEGSVKEIKHSPGPTRTVSTGTYVKEDSGCQADRLGRLVTGCLSPEVKCCDLRK

SEQ ID NO: 60219 - protein, 58 aa, Homo sapiens
  Payload ID: 12049
  Gene Symbol: OPTN
  Gene Name: optineurin
  ENSP ID: ENSP00000484961
MSHQPLSCLTEKEDSPSESTGNGPPHLAHPNLDTFTPEELLQQMKELLTENHQLKGPH

SEQ ID NO: 60220 - protein, 318 aa, Homo sapiens; identical to SEQ ID NO: 59453
  Payload ID: 12050
  Gene Symbol:
  Gene Name: OR1B1
  ENSP ID: ENSP00000485111

SEQ ID NO: 60221 - protein, 318 aa, Homo sapiens; identical to SEQ ID NO: 59453
  Payload ID: 12050
  Gene Symbol:
  Gene Name: OR1B1
  ENSP ID: ENSP00000485577

SEQ ID NO: 60222 - protein, 312 aa, Homo sapiens; identical to SEQ ID NO: 59727
  Payload ID: 12051
  Gene Symbol:
  Gene Name: OR2L8
  ENSP ID: ENSP00000485287

SEQ ID NO: 60223 - protein, 321 aa, Homo sapiens; identical to SEQ ID NO: 59932
  Payload ID: 12052
  Gene Symbol:
  Gene Name: OR51G1
  ENSP ID: ENSP00000485265

SEQ ID NO: 60224 - protein, 321 aa, Homo sapiens; identical to SEQ ID NO: 59932
  Payload ID: 12052
  Gene Symbol:
  Gene Name: OR51G1
  ENSP ID: ENSP00000485612

SEQ ID NO: 60225 - protein, 305 aa, Homo sapiens
  Payload ID: 12053
  Gene Symbol:
  Gene Name: OR52E1
  ENSP ID: ENSP00000476576
MNTTLFHPYSFLLLGIPGLESMHLWVGFPFFAVFLTAVLGNITILFVIQTDSSLHHPMFYFLAILSSIDPGLSTSTIPKMLGTFWFTLREISFEGCLTQMFFIHLCTGMESAVLVAMAYDCYVAICDPLCYTLVLTNKVVSVMALAIFLRPLVFVIPFVLFILRLPFCGHQIIPHTYGEHMGIARLSCASIRVNIIYGLCAISILVFDIIAIVISYVQILCAVFLLSSHDARLKAFSTCGSHVCVMLTFYMPAFFSFMTIGLVGIYLTLSTFFWLISMSFHLLSTLFMVSEPNRLEHKCKCFSIN

SEQ ID NO: 60226 - protein, 318 aa, Homo sapiens
  Payload ID: 12054
  Gene Symbol:
  Gene Name: OR5AL1
  ENSP ID: ENSP00000477393
MCALKGFLEENFYTYSVAKGNHSTVYEFILLGLTDNAELQVTLFGIFLVVYLASFMGNFGLIMLIQISPQLHTPMYFFLSHLAFVDFSFTSSVAPNTLVNFLCEVKSITFYACAIQVCCFITFVVCELYLLSIMAYDRYVAICNPLLYVILIPRKLYTDCHVCVWIHCGTCTDSGDILLVFLFQRDQPLLPCSISGSGLFHSCQRADVVNHCWVQYSLLSSNCADFLWFHFLCHPEDTFCRETESIFYQCFPSDLHHNILWNNHFYVPAAQVKPFPEYGSCFCVCGSDSYIKPTDLFKKSGGKKCTKENYRKVMFGCQ

SEQ ID NO: 60227 - protein, 314 aa, Homo sapiens; identical to SEQ ID NO: 59859
  Payload ID: 12055
  Gene Symbol:
  Gene Name: OR5D13
  ENSP ID: ENSP00000485050

SEQ ID NO: 60228 - protein, 314 aa, Homo sapiens; identical to SEQ ID NO: 59859
  Payload ID: 12055
  Gene Symbol:
  Gene Name: OR5D13
  ENSP ID: ENSP00000485428

SEQ ID NO: 60229 - protein, 89 aa, Homo sapiens
  Payload ID: 12056
  Gene Symbol: ORAI1
  Gene Name: ORAI calcium release-activated calcium modulator 1
  ENSP ID: ENSP00000477953
MSLNEHSMQALSWRKLYLSRAKLKASSRTSALLSGFAMVSSGRPALPPLLSRLLPPAAPTGLSGRAGRARVRGRAGRNRGGNGGGAAGR

SEQ ID NO: 60230 - protein, 301 aa, Homo sapiens
  Payload ID: 12056
  Gene Symbol: ORAI1
  Gene Name: ORAI calcium release-activated calcium modulator 1
  Uniprot ID: Q96D31
  ENSP ID: ENSP00000480616
MHPEPAPPPSRSSPELPPSGGSTTSGSRRSRRRSGDGEPPGAPPPPPSAVTYPDWIGQSYSEVMSLNEHSMQALSWRKLYLSRAKLKASSRTSALLSGFAMVAMVEVQLDADHDYPPGLLIAFSACTTVLVAVHLFALMISTCILPNIEAVSNVHNLNSVKESPHERMHRHIELAWAFSTVIGTLLFLAEVVLLCWVKFLPLKKQPGQPRPTSKPPASGAAANVSTSGITPGQAAAIASTTIMVPFGLIFIVFAVHFYRSLVSHKTDRQFQELNELAEFARLQDQLDHRGDHPLTPGSHYA

SEQ ID NO: 60231 - protein, 238 aa, Homo sapiens
  Payload ID: 12056
  Gene Symbol: ORAI1
  Gene Name: ORAI calcium release-activated calcium modulator 1
  ENSP ID: ENSP00000482568
MSLNEHSMQALSWRKLYLSRAKLKASSRTSALLSGFAMVAMVEVQLDADHDYPPGLLIAFSACTTVLVAVHLFALMISTCILPNIEAVSNVHNLNSVKESPHERMHRHIELAWAFSTVIGTLLFLAEVVLLCWVKFLPLKKQPGQPRPTSKPPASGAAANVSTSGITPGQAAAIASTTIMVPFGLIFIVFAVHFYRSLVSHKTDRQFQELNELAEFARLQDQLDHRGDHPLTPGSHYA

SEQ ID NO: 60232 - protein, 254 aa, Homo sapiens
  Payload ID: 12057
  Gene Symbol: ORAI2
  Gene Name: ORAI calcium release-activated calcium modulator 2
  Uniprot ID: Q96SN7
  ENSP ID: ENSP00000348752
MSAELNVPIDPSAPACPEPGHKGMDYRDWVRRSYLELVTSNHHSVQALSWRKLYLSRAKLKASSRTSALLSGFAMVAMVEVQLETQYQYPRPLLIAFSACTTVLVAVHLFALLISTCILPNVEAVSNIHNLNSISESPHERMHPYIELAWGFSTVLGILLFLAEVVLLCWIKFLPVDARRQPGPPPGPGSHTGWQAALVSTIIMVPVGLIFVVFTIHFYRSLVRHKTERHNREIEELHKLKVQLDGHERSLQVL

SEQ ID NO: 60233 - protein, 254 aa, Homo sapiens; identical to SEQ ID NO: 60232
  Payload ID: 12057
  Gene Symbol: ORAI2
  Gene Name: ORAI calcium release-activated calcium modulator 2
  Uniprot ID: Q96SN7
  ENSP ID: ENSP00000385489

SEQ ID NO: 60234 - protein, 212 aa, Homo sapiens
  Payload ID: 12057
  Gene Symbol: ORAI2
  Gene Name: ORAI calcium release-activated calcium modulator 2
  ENSP ID: ENSP00000417407
MSAELNVPIDPSAPACPEPGHKGMDYRDWVRRSYLELVTSNHHSVQALSWRKLYLSRAKLKASSRTSALLSGFAMVAMVEVQLETQYQYPRPLLIAFSACTTVLVAVHLFALLISTCILPNVEAVSNIHNLNSISESPHERMHPYIELAWGFSTVLGILLFLAEVVLLCWIKFLPVDARRQPGPPPGPGSHTGWQAALVSTIIMVPVGLIFV

SEQ ID NO: 60235 - protein, 254 aa, Homo sapiens; identical to SEQ ID NO: 60232
  Payload ID: 12057
  Gene Symbol: ORAI2
  Gene Name: ORAI calcium release-activated calcium modulator 2
  Uniprot ID: Q96SN7
  ENSP ID: ENSP00000417928

SEQ ID NO: 60236 - protein, 254 aa, Homo sapiens; identical to SEQ ID NO: 60232
  Payload ID: 12057
  Gene Symbol: ORAI2
  Gene Name: ORAI calcium release-activated calcium modulator 2
  Uniprot ID: Q96SN7
  ENSP ID: ENSP00000418140

SEQ ID NO: 60237 - protein, 97 aa, Homo sapiens
  Payload ID: 12057
  Gene Symbol: ORAI2
  Gene Name: ORAI calcium release-activated calcium modulator 2
  ENSP ID: ENSP00000418464
MSAELNVPIDPSAPACPEPGHKGMDYRDWVRRSYLELVTSNHHSVQALSWRKLYLSRAKLKASSRTSALLSGFAMVAMVEVQLETQYQYPRPLLIAF

SEQ ID NO: 60238 - protein, 30 aa, Homo sapiens
  Payload ID: 12057
  Gene Symbol: ORAI2
  Gene Name: ORAI calcium release-activated calcium modulator 2
  ENSP ID: ENSP00000419416
MSAELNVPIDPSAPACPEPGHKGMDYRDWV

SEQ ID NO: 60239 - protein, 229 aa, Homo sapiens
  Payload ID: 12057
  Gene Symbol: ORAI2
  Gene Name: ORAI calcium release-activated calcium modulator 2
  ENSP ID: ENSP00000420178
MSAELNVPIDPSAPACPEPGHKGMDYRDWVRRSYLELVTSNHHSVQALSWRKLYLSRAKLKASSRTSALLSGFAMVAMVEVQLETQYQYPRPLLIAFSACTTVLVAVHLFALLISTCILPNVEAVSNIHNLNSISESPHERMHPYIELAWGFSTVLGILLFLAEVVLLCWIKFLPVDARRQPGPPPGPGSHTGWQAALVSTIIMVPVGLIFVVFTIHFYRSLVRHKTER

SEQ ID NO: 60240 - protein, 254 aa, Homo sapiens; identical to SEQ ID NO: 60232
  Payload ID: 12057
  Gene Symbol: ORAI2
  Gene Name: ORAI calcium release-activated calcium modulator 2
  Uniprot ID: Q96SN7
  ENSP ID: ENSP00000478113

SEQ ID NO: 60241 - protein, 295 aa, Homo sapiens [sequence omitted]

SEQ ID NO: 60242 - protein, 77 aa, Homo sapiens
  Payload ID: 12058
  Gene Symbol: ORAI3
  Gene Name: ORAI calcium release-activated calcium modulator 3
  ENSP ID: ENSP00000457025
MKGGEGDAGEQAPLNPEGESPAGSATYREFVHRGYLDLMGASQHSLRALSWRRLYLSRAKLKASSRTSALLSGFAMR

SEQ ID NO: 60243 - protein, 98 aa, Homo sapiens
  Payload ID: 12058
  Gene Symbol: ORAI3
  Gene Name: ORAI calcium release-activated calcium modulator 3
  ENSP ID: ENSP00000457221
MKGGEGDAGEQAPLNPEGESPAGSATYREFVHRGYLDLMGASQHSLRALSWRRLYLSRAKLKASSRTSALLSGFAMGTPGDGATGGHESPKGVVVGVG

SEQ ID NO: 60244 - protein, 280 aa, Homo sapiens
  Payload ID: 12058
  Gene Symbol: ORAI3
  Gene Name: ORAI calcium release-activated calcium modulator 3
  ENSP ID: ENSP00000457388
MKGGEGDAGEQAPLNPEGESPAGSATYREFVHRGYLDLMGASQHSLRALSWRRLYLSRAKLKASSRTSALLSGFAMVAMVEVQLESDHEYPPGLLVAFSACTTVLVAVHLFALMVSTCLLPHIEAVSNIHNLNSVHQSPHQRLHRYVELAWGFSTALGTFLFLAEVVLVGWVKFVPIGAPLDTPTPMVPTSRVPGTLAPVATSLSPASNLPRSSASAAPSQAEPACPPRQACGGGGAHGPGWQAAMASTAIMGFSPSVCPLGFASYSAPGLASVEGSCSR

SEQ ID NO: 60245 - protein, 137 aa, Homo sapiens
  Payload ID: 12059
  Gene Symbol: ORAOV1
  Gene Name: oral cancer overexpressed 1
  Uniprot ID: Q8WV07
  ENSP ID: ENSP00000279147
MAGSQDIFDAIVMADERFHGEGYREGYEEGSSLGVMEGRQHGTLHGAKIGSEIGCYQGFAFAWKCLLHSCTTEKDSRKMKVLESLIGMIQKFPYDDPTYDKLHEDLDKIRGKFKQFCSLLNVQPDFKISAEGSGLSF

SEQ ID NO: 60246 - protein, 70 aa, Homo sapiens
  Payload ID: 12059
  Gene Symbol: ORAOV1
  Gene Name: oral cancer overexpressed 1
  ENSP ID: ENSP00000409643
MAGSQDIFDAIVMADERFHGEGYREGYEEGSSLGVMEGRQHGTLHGAKIGSEQKDEGLRIIDWNDPEIPL

SEQ ID NO: 60247 - protein, 76 aa, Homo sapiens
  Payload ID: 12059
  Gene Symbol: ORAOV1
  Gene Name: oral cancer overexpressed 1
  ENSP ID: ENSP00000437367
MAGSQDIFDAIVMADERFHGEGYREGYEEGSSLGVMEGRQHGTLHGAKIGSEIGCYQGFAFAWKCLLHSCTTEKDR

SEQ ID NO: 60248 - protein, 78 aa, Homo sapiens
  Payload ID: 12059
  Gene Symbol: ORAOV1
  Gene Name: oral cancer overexpressed 1
  ENSP ID: ENSP00000441984
MAGSQDIFDAIVMADESRKMKVLESLIGMIQKFPYDDPTYDKLHEDLDKIRGKFKQFCSLLNVQPDFKISAEGSGLSF

SEQ ID NO: 60249 - protein, 36 aa, Homo sapiens
  Payload ID: 12059
  Gene Symbol: ORAOV1
  Gene Name: oral cancer overexpressed 1
  ENSP ID: ENSP00000443669
MAGSQDIFDAIVMADERAPGEPLVLRQWGSCELPPG

SEQ ID NO: 60250 - protein, 43 aa, Homo sapiens
  Payload ID: 12059
  Gene Symbol: ORAOV1
  Gene Name: oral cancer overexpressed 1
  ENSP ID: ENSP00000443936
MAGSQDIFDAIVMADERSGATKVLLLHGNVYCTVAPLRRTAER

SEQ ID NO: 60251 - protein, 124 aa, Homo sapiens
  Payload ID: 12059
  Gene Symbol: ORAOV1
  Gene Name: oral cancer overexpressed 1
  ENSP ID: ENSP00000444112
MAGSQDIFDAIVMADERFHGEGYREGYEEGSSLGVMEGRQHGTLHGAKIGSEIGCYQGFAFAWKCLLHSCTTEKDSRKMKVLESLIGMIQKFPYDDPTYDKLHEDLDKIRGKFKQVRALCVSSC

SEQ ID NO: 60252 - protein, 137 aa, Homo sapiens; identical to SEQ ID NO: 60245
  Payload ID: 12059
  Gene Symbol: ORAOV1
  Gene Name: oral cancer overexpressed 1
  Uniprot ID: Q8WV07
  ENSP ID: ENSP00000446129

SEQ ID NO: 60253 - protein, 221 aa, Homo sapiens
  Payload ID: 12059
  Gene Symbol: ORAOV1
  Gene Name: oral cancer overexpressed 1
  ENSP ID: ENSP00000446428
MAGSQDIFDAIVMADERFHGEGYREGYEEGSSLGVMEGRQHGTLHGAKIGSEIGCYQGFAFAWKCLLHSCTTEKDSRKMKVLESLIGMIQKFPYDDPTYDKLHEDLDKIRGKFKQTGLSPSAVMVRPPSYVELPVTCWCWEAPRCNQKCTDPAARRPDPQTCASQDRLRCAPCTCHQPLASRYTQHPGLVPLPHHDRQSVPQGPRVVQTDAAARMVEQQTM

SEQ ID NO: 60254 - protein, 62 aa, Homo sapiens
  Payload ID: 12059
  Gene Symbol: ORAOV1
  Gene Name: oral cancer overexpressed 1
  ENSP ID: ENSP00000455359
  MOD_RES (1)..(1): Any amino acid
XRKMKVLESLIGMIQKFPYDDPTYDKLHEDLDKIRGKFKQFCSLLNVQPDFKISAEGSGLSF

SEQ ID NO: 60255 - protein, 1012 aa, Homo sapiens
  Payload ID: 12060
  Gene Symbol: OFD1
  Gene Name: oral-facial-digital syndrome 1
  Uniprot ID: O75665
  ENSP ID: ENSP00000344314
MMAQSNMFTVADVLSQDELRKKLYQTFKDRGILDTLKTQLRNQLIHELMHPVLSGELQPRSISVEGSSLLIGASNSLVADHLQRCGYEYSLSVFFPESGLAKEKVFTMQDLLQLIKINPTSSLYKSLVSGSDKENQKGFLMHFLKELAEYHQAKESCNMETQTSSTFNRDSLAEKLQLIDDQFADAYPQRIKFESLEIKLNEYKREIEEQLRAEMCQKLKFFKDTEIAKIKMEAKKKYEKELTMFQNDFEKACQAKSEALVLREKSTLERIHKHQEIETKEIYAQRQLLLKDMDLLRGREAELKQRVEAFELNQKLQEEKHKSITEALRRQEQNIKSFEETYDRKLKNELLKYQLELKDDYIIRTNRLIEDERKNKEKAVHLQEELIAINSKKEELNQSVNRVKELELELESVKAQSLAITKQNHMLNEKVKEMSDYSLLKEEKLELLAQNKLLKQQLEESRNENLRLLNRLAQPAPELAVFQKELRKAEKAIVVEHEEFESCRQALHKQLQDEIEHSAQLKAQILGYKASVKSLTTQVADLKLQLKQTQTALENEVYCNPKQSVIDRSVNGLINGNVVPCNGEISGDFLNNPFKQENVLARMVASRITNYPTAWVEGSSPDSDLEFVANTKARVKELQQEAERLEKAFRSYHRRVIKNSAKSPLAAKSPPSLHLLEAFKNITSSSPERHIFGEDRVVSEQPQVGTLEERNDVVEALTGSAASRLRGGTSSRRLSSTPLPKAKRSLESEMYLEGLGRSHIASPSPCPDRMPLPSPTESRHSLSIPPVSSPPEQKVGLYRRQTELQDKSEFSDVDKLAFKDNEEFESSFESAGNMPRQLEMGGLSPAGDMSHVDAAAAAVPLSYQHPSVDQKQIEEQKEEEKIREQQVKERRQREERRQSNLQEVLERERRELEKLYQERKMIEESLKIKIKKELEMENELEMSNQEIKDKSAHSENPLEKYMKIIQQEQDQESADKSSKKMVQEGSLVDTLQSSDKVESLTGFSHEELDDSW

SEQ ID NO: 60256 - protein, 972 aa, Homo sapiens
  Payload ID: 12060
  Gene Symbol: OFD1
  Gene Name: oral-facial-digital syndrome 1
  Uniprot ID: O75665
  ENSP ID: ENSP00000369923
MMAQSNMFTVADVLSQDELRKKLYQTFKDRGILDTLKTQLRNQLIHELMHPVLSGELQPRSISVEGSSLLIGASNSLVADHLQRCGYEYSLSVFFPESGLAKEKVFTMQDLLQLIKINPTSSLYKSLVSGSDKENQKGFLMHFLKELAEYHQAKESCNMETQTSSTFNRDSLAEKLQLIDDQFADAYPQRIKFESLEIKLNEYKREIEEQLRAEMCQKLKFFKDTEIAKIKMEAKKKYEKELTMFQNDFEKACQAKSEALVLREKSTLERIHKHQEIETKEIYAQRQLLLKDMDLLRGREAELKQRVEAFELYQLELKDDYIIRTNRLIEDERKNKEKAVHLQEELIAINSKKEELNQSVNRVKELELELESVKAQSLAITKQNHMLNEKVKEMSDYSLLKEEKLELLAQNKLLKQQLEESRNENLRLLNRLAQPAPELAVFQKELRKAEKAIVVEHEEFESCRQALHKQLQDEIEHSAQLKAQILGYKASVKSLTTQVADLKLQLKQTQTALENEVYCNPKQSVIDRSVNGLINGNVVPCNGEISGDFLNNPFKQENVLARMVASRITNYPTAWVEGSSPDSDLEFVANTKARVKELQQEAERLEKAFRSYHRRVIKNSAKSPLAAKSPPSLHLLEAFKNITSSSPERHIFGEDRVVSEQPQVGTLEERNDVVEALTGSAASRLRGGTSSRRLSSTPLPKAKRSLESEMYLEGLGRSHIASPSPCPDRMPLPSPTESRHSLSIPPVSSPPEQKVGLYRRQTELQDKSEFSDVDKLAFKDNEEFESSFESAGNMPRQLEMGGLSPAGDMSHVDAAAAAVPLSYQHPSVDQKQIEEQKEEEKIREQQVKERRQREERRQSNLQEVLERERRELEKLYQERKMIEESLKIKIKKELEMENELEMSNQEIKDKSAHSENPLEKYMKIIQQEQDQESADKSSKKMVQEGSLVDTLQSSDKVESLTGFSHEELDDSW

SEQ ID NO: 60257 - protein, 872 aa, Homo sapiens
  Payload ID: 12060
  Gene Symbol: OFD1
  Gene Name: oral-facial-digital syndrome 1
  ENSP ID: ENSP00000369941
MHFLKELAEYHQAKESCNMETQTSSTFNRDSLAEKLQLIDDQFADAYPQRIKFESLEIKLNEYKREIEEQLRAEMCQKLKFFKDTEIAKIKMEAKKKYEKELTMFQNDFEKACQAKSEALVLREKSTLERIHKHQEIETKEIYAQRQLLLKDMDLLRGREAELKQRVEAFELNQKLQEEKHKSITEALRRQEQNIKSFEETYDRKLKNELLKYQLELKDDYIIRTNRLIEDERKNKEKAVHLQEELIAINSKKEELNQSVNRVKELELELESVKAQSLAITKQNHMLNEKVKEMSDYSLLKEEKLELLAQNKLLKQQLEESRNENLRLLNRLAQPAPELAVFQKELRKAEKAIVVEHEEFESCRQALHKQLQDEIEHSAQLKAQILGYKASVKSLTTQVADLKLQLKQTQTALENEVYCNPKQSVIDRSVNGLINGNVVPCNGEISGDFLNNPFKQENVLARMVASRITNYPTAWVEGSSPDSDLEFVANTKARVKELQQEAERLEKAFRSYHRRVIKNSAKSPLAAKSPPSLHLLEAFKNITSSSPERHIFGEDRVVSEQPQVGTLEERNDVVEALTGSAASRLRGGTSSRRLSSTPLPKAKRSLESEMYLEGLGRSHIASPSPCPDRMPLPSPTESRHSLSIPPVSSPPEQKVGLYRRQTELQDKSEFSDVDKLAFKDNEEFESSFESAGNMPRQLEMGGLSPAGDMSHVDAAAAAVPLSYQHPSVDQKQIEEQKEEEKIREQQVKERRQREERRQSNLQEVLERERRELEKLYQERKMIEESLKIKIKKELEMENELEMSNQEIKDKSAHSENPLEKYMKIIQQEQDQESADKSSKKMVQEGSLVDTLQSSDKVESLTGFSHEELDDSW

SEQ ID NO: 60258 - protein, 338 aa, Homo sapiens [sequence omitted]

SEQ ID NO: 60259 - protein, 379 aa, Homo sapiens
  Payload ID: 12061
  Gene Symbol: OSCP1
  Gene Name: organic solute carrier partner 1
  Uniprot ID: Q8WVF1
  ENSP ID: ENSP00000235532
MSVRTLPLLFLNLGGEMLYILDQRLRAQNIPGDKARKVLNDIISTMFNRKFMEELFKPQELYSKKALRTVYERLAHASIMKLNQASMDKLYDLMTMAFKYQVLLCPRPKDVLLVTFNHLDTIKGFIRDSPTILQQVDETLRQLTEIYGGLSAGEFQLIRQTLLIFFQDLHIRVSMFLKDKVQNNNGRFVLPVSGPVPWGTEVPGLIRMFNNKGEEVKRIEFKHGGNYVPAPKEGSFELYGDRVLKLGTNMYSVNQPVETHVSGSSKNLASWTQESIAPNPLAKEELNFLARLMGGMEIKKPSGPEPGFRLNLFTTDEEEEQAALTRPEELSYEVINIQATQDQQRSEELARIMGEFEITEQPRLSTSKGDDLLAMMDEL

SEQ ID NO: 60260 - protein, 223 aa, Homo sapiens
  Payload ID: 12061
  Gene Symbol: OSCP1
  Gene Name: organic solute carrier partner 1
  Uniprot ID: Q8WVF1
  ENSP ID: ENSP00000346216
MSVRTLPLLFLNLGGEMLYILDQRLRAQNIPGDKARKVLNDIISTMFNRKFMEELFKPQELYSKKALRTVYERLAHASIMKLNQASMDKLYDLMTMAFKYQVLLCPRPKDVLLVTFNHLDTIKGFIRDSPTILQQVDETLRQLTEIYGGLSAGEFQLIRQTLLIFFQDLHIRRECFWKHMQETVHSAQCCLPGVGNYMEDRRRRLTFHYVYPFENFEFCTWAK

SEQ ID NO: 60261 - protein, 389 aa, Homo sapiens
  Payload ID: 12061
  Gene Symbol: OSCP1
  Gene Name: organic solute carrier partner 1
  Uniprot ID: Q8WVF1
  ENSP ID: ENSP00000349052
MSVRTLPLLFLNLGGEMLYILDQRLRAQNIPGDKARKDEWTEVDRKRVLNDIISTMFNRKFMEELFKPQELYSKKALRTVYERLAHASIMKLNQASMDKLYDLMTMAFKYQVLLCPRPKDVLLVTFNHLDTIKGFIRDSPTILQQVDETLRQLTEIYGGLSAGEFQLIRQTLLIFFQDLHIRVSMFLKDKVQNNNGRFVLPVSGPVPWGTEVPGLIRMFNNKGEEVKRIEFKHGGNYVPAPKEGSFELYGDRVLKLGTNMYSVNQPVETHVSGSSKNLASWTQESIAPNPLAKEELNFLARLMGGMEIKKPSGPEPGFRLNLFTTDEEEEQAALTRPEELSYEVINIQATQDQQRSEELARIMGEFEITEQPRLSTSKGDDLLAMMDEL

SEQ ID NO: 60262 - protein, 334 aa, Homo sapiens
  Payload ID: 12061
  Gene Symbol: OSCP1
  Gene Name: organic solute carrier partner 1
  ENSP ID: ENSP00000390820
MFNRKFMEELFKPQELYSKKALRTVYERLAHASIMKLNQASMDKLYDLMTMAFKYQVLLCPRPKDVLLVTFNHLDTIKGFIRDSPTILQQVDETLRQLTEIYGGLSAGEFQLIRQTLLIFFQDLHIRVSMFLKDKVQNNNGRFVLPVSGPVPWGTEVPGLIRMFNNKGEEVKRIEFKHGGNYVPAPKEGSFELYGDRVLKLGTNMYSVNQPVETHVSGSSKNLASWTQESIAPNPLAKEELNFLARLMGGMEIKKPSGPEPGFRLNLFTTDEEEEQAALTRPEELSYEVINIQATQDQQRSEELARIMGEFEITEQPRLSTSKGDDLLAMMDEL

SEQ ID NO: 60263 - protein, 255 aa, Homo sapiens
  Payload ID: 12061
  Gene Symbol: OSCP1
  Gene Name: organic solute carrier partner 1
  ENSP ID: ENSP00000396417
PGDKARKVLNDIISTMFNRKFMEELFKPQELYSKKALRTVYERLAHASIMKLNQASMDKLYDLMTMAFKYQVLLCPRPKDVLLVTFNHLDTIKGFIRDSPTILQQVDETLRQLTEIYGGLSAGEFQLIRQTLLIFFQDLHIRVSMFLKDKVQNNNGRFVLPVSGPVPWGTEVPGLIRMFNNKGEEVKRIEFKHGGNYVPAPKEGSFELYGDRVLKLGTNMYSVNQPVETHVSGSSKNLASWTQTSSANQARRVIL

SEQ ID NO: 60264 - protein, 94 aa, Homo sapiens
  Payload ID: 12061
  Gene Symbol: OSCP1
  Gene Name: organic solute carrier partner 1
  ENSP ID: ENSP00000426981
  MOD_RES (1)..(1): Any amino acid
XSSKNLASWTQESIAPNPLAKEELNFLARLMGGMEIKKPSGPEPGFRLNLFTTDEEEEQAALTRPEELSYEVINIQATQSLFSNLATIQGGLTG

SEQ ID NO: 60265 - protein, 13 aa, Homo sapiens
  Payload ID: 12061
  Gene Symbol: OSCP1
  Gene Name: organic solute carrier partner 1
  ENSP ID: ENSP00000434268
  MOD_RES (1)..(1): Any amino acid
XNIPGDKARKDFD

SEQ ID NO: 60266 - protein, 861 aa, Homo sapiens
  Payload ID: 12062
  Gene Symbol: ORC1
  Gene Name: origin recognition complex, subunit 1
  Uniprot ID: Q13415
  ENSP ID: ENSP00000360621
MAHYPTRLKTRKTYSWVGRPLLDRKLHYQTYREMCVKTEGCSTEIHIQIGQFVLIEGDDDENPYVAKLLELFEDDSDPPPKKRARVQWFVRFCEVPACKRHLLGRKPGAQEIFWYDYPACDSNINAETIIGLVRVIPLAPKDVVPTNLKNEKTLFVKLSWNEKKFRPLSSELFAELNKPQESAAKCQKPVRAKSKSAESPSWTPAEHVAKRIESRHSASKSRQTPTHPLTPRARKRLELGNLGNPQMSQQTSCASLDSPGRIKRKVAFSEITSPSKRSQPDKLQTLSPALKAPEKTRETGLSYTEDDKKASPEHRIILRTRIAASKTIDIREERTLTPISGGQRSSVVPSVILKPENIKKRDAKEAKAQNEATSTPHRIRRKSSVLTMNRIRQQLRFLGNSKSDQEEKEILPAAEISDSSSDEEEASTPPLPRRAPRTVSRNLRSSLKSSLHTLTKVPKKSLKPRTPRCAAPQIRSRSLAAQEPASVLEEARLRLHVSAVPESLPCREQEFQDIYNFVESKLLDHTGGCMYISGVPGTGKTATVHEVIRCLQQAAQANDVPPFQYIEVNGMKLTEPHQVYVQILQKLTGQKATANHAAELLAKQFCTRGSPQETTVLLVDELDLLWTHKQDIMYNLFDWPTHKEARLVVLAIANTMDLPERIMMNRVSSRLGLTRMCFQPYTYSQLQQILRSRLKHLKAFEDDAIQLVARKVAALSGDARRCLDICRRATEICEFSQQKPDSPGLVTIAHSMEAVDEMFSSSYITAIKNSSVLEQSFLRAILAEFRRSGLEEATFQQIYSQHVALCRMEGLPYPTMSETMAVCSHLGSCRLLLVEPSRNDLLLRVRLNVSQDDVLYALKDE

SEQ ID NO: 60267 - protein, 861 aa, Homo sapiens; identical to SEQ ID NO: 60266
  Payload ID: 12062
  Gene Symbol: ORC1
  Gene Name: origin recognition complex, subunit 1
  Uniprot ID: Q13415
  ENSP ID: ENSP00000360623

SEQ ID NO: 60268 - protein, 577 aa, Homo sapiens
  Payload ID: 12063
  Gene Symbol: ORC2
  Gene Name: origin recognition complex, subunit 2
  Uniprot ID: Q13416
  ENSP ID: ENSP00000234296
MSKPELKEDKMLEVHFVGDDDVLNHILDREGGAKLKKERAQLLVNPKKIIKKPEYDLEEDDQEVLKDQNYVEIMGRDVQESLKNGSATGGGNKVYSFQNRKHSEKMAKLASELAKTPQKSVSFSLKNDPEITINVPQSSKGHSASDKVQPKNNDKSEFLSTAPRSLRKRLIVPRSHSDSESEYSASNSEDDEGVAQEHEEDTNAVIFSQKIQAQNRVVSAPVGKETPSKRMKRDKTSDLVEEYFEAHSSSKVLTSDRTLQKLKRAKLDQQTLRNLLSKVSPSFSAELKQLNQQYEKLFHKWMLQLHLGFNIVLYGLGSKRDLLERFRTTMLQDSIHVVINGFFPGISVKSVLNSITEEVLDHMGTFRSILDQLDWIVNKFKEDSSLELFLLIHNLDSQMLRGEKSQQIIGQLSSLHNIYLIASIDHLNAPLMWDHAKQSLFNWLWYETTTYSPYTEETSYENSLLVKQSGSLPLSSLTHVLRSLTPNARGIFRLLIKYQLDNQDNPSYIGLSFQDFYQQCREAFLVNSDLTLRAQLTEFRDHKLIRTKKGTDGVEYLLIPVDNGTLTDFLEKEEEEA

SEQ ID NO: 60269 - protein, 109 aa, Homo sapiens
  Payload ID: 12063
  Gene Symbol: ORC2
  Gene Name: origin recognition complex, subunit 2
  ENSP ID: ENSP00000386390
MSKPELKEDKMLEVHFVGDDDVLNHILDREGGAKLKKERAQLLVNPKKIIKKPEYDLEEDDQEVLKDQNYVEIMGRDVQESLKNGSATGGGNKVYSFQNRKHSEKMAKL

SEQ ID NO: 60270 - protein, 72 aa, Homo sapiens
  Payload ID: 12063
  Gene Symbol: ORC2
  Gene Name: origin recognition complex, subunit 2
  ENSP ID: ENSP00000396641
MSKPELKEDKMLEVHFVGDDDVLNHILDREGGAKLKKERAQLLVNPKKIIKKPEYDLEEDDQEVLKDQNYVE

SEQ ID NO: 60271 - protein, 712 aa, Homo sapiens
  Payload ID: 12064
  Gene Symbol: ORC3
  Gene Name: origin recognition complex, subunit 3
  Uniprot ID: Q9UBD5
  ENSP ID: ENSP00000257789
MATSSMSKGCFVFKPNSKKRKISLPIEDYFNKGKNEPEDSKLRFETYQLIWQQMKSENERLQEELNKNLFDNLIEFLQKSHSGFQKNSRDLGGQIKLREIPTAALVLGVNVTDHDLTFGSLTEALQNNVTPYVVSLQAKDCPDMKHFLQKLISQLMDCCVDIKSKEEESVHVTQRKTHYSMDSLSSWYMTVTQKTDPKMLSKKRTTSSQWQSPPVVVILKDMESFATKVLQDFIIISSQHLHEFPLILIFGIATSPIIIHRLLPHAVSSLLCIELFQSLSCKEHLTTVLDKLLLTTQFPFKINEKVLQVLTNIFLYHDFSVQNFIKGLQLSLLEHFYSQPLSVLCCNLPEAKRRINFLSNNQCENIRRLPSFRRYVEKQASEKQVALLTNERYLKEETQLLLENLHVYHMNYFLVLRCLHKFTSSLPKYPLGRQIRELYCTCLEKNIWDSEEYASVLQLLRMLAKDELMTILEKCFKVFKSYCENHLGSTAKRIEEFLAQFQSLDAETKEEEDASGSQPKGLQKTDLYHLQKSLLEMKELRRSKKQTKFEVLRENVVNFIDCLVREYLLPPETQPLHEVVYFSAAHALREHLNAAPRIALHTALNNPYYYLKNEALKSEEGCIPNIAPDICIAYKLHLECSRLINLVDWSEAFATVVTAAEKMDANSATSEEMNEIIHARFIRAVSELELLGFIKPTKQKTDHVARLTWGGC

SEQ ID NO: 60272 - protein, 711 aa, Homo sapiens
  Payload ID: 12064
  Gene Symbol: ORC3
  Gene Name: origin recognition complex, subunit 3
  Uniprot ID: Q9UBD5
  ENSP ID: ENSP00000376586
MATSSMSKGCFVFKPNSKKRKISLPIEDYFNKGKNEPEDSKLRFETYQLIWQQMKSENERLQEELNKNLFDNLIEFLQKSHSGFQKNSRDLGGQIKLREIPTAALVLGVNVTDHDLTFGSLTEALQNNVTPYVVSLQAKDCPDMKHFLQKLISQLMDCCVDIKSKEEESVHVTQRKTHYSMDSLSSWYMTVTQKTDPKMLSKKRTTSSQWQSPPVVVILKDMESFATKVLQDFIIISSQHLHEFPLILIFGIATSPIIIHRLLPHAVSSLLCIELFQSLSCKEHLTTVLDKLLLTTQFPFKINEKVLQVLTNIFLYHDFSVQNFIKGLQLSLLEHFYSQPLSVLCCNLPEAKRRINFLSNNQCENIRRLPSFRRYVEKQASEKQVALLTNERYLKEETQLLLENLHVYHMNYFLVLRCLHKFTSSLPKYPLGRQIRELYCTCLEKNIWDSEEYASVLQLLRMLAKDELMTILEKCFKVFKSYCENHLGSTAKRIEEFLAQFQSLDETKEEEDASGSQPKGLQKTDLYHLQKSLLEMKELRRSKKQTKFEVLRENVVNFIDCLVREYLLPPETQPLHEVVYFSAAHALREHLNAAPRIALHTALNNPYYYLKNEALKSEEGCIPNIAPDICIAYKLHLECSRLINLVDWSEAFATVVTAAEKMDANSATSEEMNEIIHARFIRAVSELELLGFIKPTKQKTDHVARLTWGGC

SEQ ID NO: 60273 - protein, 568 aa, Homo sapiens
  Payload ID: 12064
  Gene Symbol: ORC3
  Gene Name: origin recognition complex, subunit 3
  Uniprot ID: Q9UBD5
  ENSP ID: ENSP00000444695
MKHFLQKLISQLMDCCVDIKSKEEESVHVTQRKTHYSMDSLSSWYMTVTQKTDPKMLSKKRTTSSQWQSPPVVVILKDMESFATKVLQDFIIISSQHLHEFPLILIFGIATSPIIIHRLLPHAVSSLLCIELFQSLSCKEHLTTVLDKLLLTTQFPFKINEKVLQVLTNIFLYHDFSVQNFIKGLQLSLLEHFYSQPLSVLCCNLPEAKRRINFLSNNQCENIRRLPSFRRYVEKQASEKQVALLTNERYLKEETQLLLENLHVYHMNYFLVLRCLHKFTSSLPKYPLGRQIRELYCTCLEKNIWDSEEYASVLQLLRMLAKDELMTILEKCFKVFKSYCENHLGSTAKRIEEFLAQFQSLDETKEEEDASGSQPKGLQKTDLYHLQKSLLEMKELRRSKKQTKFEVLRENVVNFIDCLVREYLLPPETQPLHEVVYFSAAHALREHLNAAPRIALHTALNNPYYYLKNEALKSEEGCIPNIAPDICIAYKLHLECSRLINLVDWSEAFATVVTAAEKMDANSATSEEMNEIIHARFIRAVSELELLGFIKPTKQKTDHVARLTWGGC

SEQ ID NO: 60274 - protein, 32 aa, Homo sapiens
  Payload ID: 12064
  Gene Symbol: ORC3
  Gene Name: origin recognition complex, subunit 3
  ENSP ID: ENSP00000475988
MLAKDELMTILEKCFKVFKSYCENHLGSTAKR

SEQ ID NO: 60275 - protein, 436 aa, Homo sapiens
  Payload ID: 12065
  Gene Symbol: ORC4
  Gene Name: origin recognition complex, subunit 4
  Uniprot ID: O43929
  ENSP ID: ENSP00000264169
MSSRKSKSNSLIHTECLSQVQRILRERFCRQSPHSNLFGVQVQYKHLSELLKRTALHGESNSVLIIGPRGSGKTMLINHALKELMEIEEVSENVLQVHLNGLLQINDKIALKEITRQLNLENVVGDKVFGSFAENLSFLLEALKKGDRTSSCPVIFILDEFDLFAHHKNQTLLYNLFDISQSAQTPIAVIGLTCRLDILELLEKRVKSRFSHRQIHLMNSFGFPQYVKIFKEQLSLPAEFPDKVFAEKWNENVQYLSEDRSVQEVLQKHFNISKNLRSLHMLLMLALNRVTASHPFMTAVDLMEASQLCSMDSKANIVHGLSVLEICLIIAMKHLNDIYEEEPFNFQMVYNEFQKFVQRKAHSVYNFEKPVVMKAFEHLQQLELIKPMERTSGNSQREYQLMKLLLDNTQIMNALQKYPNCPTDVRQWATSSLSWL

SEQ ID NO: 60276 - protein, 436 aa, Homo sapiens; identical to SEQ ID NO: 60275
  Payload ID: 12065
  Gene Symbol: ORC4
  Gene Name: origin recognition complex, subunit 4
  Uniprot ID: O43929
  ENSP ID: ENSP00000376597

SEQ ID NO: 60277 - protein, 128 aa, Homo sapiens
  Payload ID: 12065
  Gene Symbol: ORC4
  Gene Name: origin recognition complex, subunit 4
  ENSP ID: ENSP00000391484
MSSRKSKSNSLIHTECLSQVQRILRERFCRQSPHSNLFGVQVQYKHLSELLKRTALHGESNSVLIIGPRGSGKTMLINHALKELMEIEEVSENVLQVHLNGLLQINDKIALKEITRQLNLENVVGDKV

SEQ ID NO: 60278 - protein, 127 aa, Homo sapiens
  Payload ID: 12065
  Gene Symbol: ORC4
  Gene Name: origin recognition complex, subunit 4
  ENSP ID: ENSP00000403105
MSSRKSKSNSLIHTECLSQVQRILRERFCRQSPHSNLFGVQVQYKHLSELLKRTALHGESNSVLIIGPRGSGKTMLINHALKELMEIEEVSENVLQVHLNGLLQINDKIALKEITRQLNLENVVGDK

SEQ ID NO: 60279 - protein, 145 aa, Homo sapiens
  Payload ID: 12065
  Gene Symbol: ORC4
  Gene Name: origin recognition complex, subunit 4
  ENSP ID: ENSP00000413939
MSSRKSKSNSLIHTECLSQVQRILRERFCRQSPHSNLFGVQVQYKHLSELLKRTALHGESNSVLIIGPRGSGKTMLINHALKELMEIEEVSENVLQVHLNGLLQINDKIALKEITRQLNLENVVGDKVFGSFAENLSFLLEALKK

SEQ ID NO: 60280 - protein, 362 aa, Homo sapiens
  Payload ID: 12065
  Gene Symbol: ORC4
  Gene Name: origin recognition complex, subunit 4
  Uniprot ID: O43929
  ENSP ID: ENSP00000438326
MLINHALKELMEIEEVSENVLQVHLNGLLQINDKIALKEITRQLNLENVVGDKVFGSFAENLSFLLEALKKGDRTSSCPVIFILDEFDLFAHHKNQTLLYNLFDISQSAQTPIAVIGLTCRLDILELLEKRVKSRFSHRQIHLMNSFGFPQYVKIFKEQLSLPAEFPDKVFAEKWNENVQYLSEDRSVQEVLQKHFNISKNLRSLHMLLMLALNRVTASHPFMTAVDLMEASQLCSMDSKANIVHGLSVLEICLIIAMKHLNDIYEEEPFNFQMVYNEFQKFVQRKAHSVYNFEKPVVMKAFEHLQQLELIKPMERTSGNSQREYQLMKLLLDNTQIMNALQKYPNCPTDVRQWATSSLSWL

SEQ ID NO: 60281 - protein, 352 aa, Homo sapiens
  Payload ID: 12065
  Gene Symbol: ORC4
  Gene Name: origin recognition complex, subunit 4
  Uniprot ID: O43929
  ENSP ID: ENSP00000441502
MEIEEVSENVLQVHLNGLLQINDKIALKEITRQLNLENVVGDKVFGSFAENLSFLLEALKKGDRTSSCPVIFILDEFDLFAHHKNQTLLYNLFDISQSAQTPIAVIGLTCRLDILELLEKRVKSRFSHRQIHLMNSFGFPQYVKIFKEQLSLPAEFPDKVFAEKWNENVQYLSEDRSVQEVLQKHFNISKNLRSLHMLLMLALNRVTASHPFMTAVDLMEASQLCSMDSKANIVHGLSVLEICLIIAMKHLNDIYEEEPFNFQMVYNEFQKFVQRKAHSVYNFEKPVVMKAFEHLQQLELIKPMERTSGNSQREYQLMKLLLDNTQIMNALQKYPNCPTDVRQWATSSLSWL

SEQ ID NO: 60282 - protein, 436 aa, Homo sapiens; identical to SEQ ID NO: 60275
  Payload ID: 12065
  Gene Symbol: ORC4
  Gene Name: origin recognition complex, subunit 4
  Uniprot ID: O43929
  ENSP ID: ENSP00000441953

SEQ ID NO: 60283 - protein, 435 aa, Homo sapiens
  Payload ID: 12066
  Gene Symbol: ORC5
  Gene Name: origin recognition complex, subunit 5
  Uniprot ID: O43913
  ENSP ID: ENSP00000297431
MPHLENVVLCRESQVSILQSLFGERHHFSFPSIFIYGHTASGKTYVTQTLLKTLELPHVFVNCVECFTLRLLLEQILNKLNHLSSSEDGCSTEITCETFNDFVRLFKQVTTAENLKDQTVYIVLDKAEYLRDMEANLLPGFLRLQELADRNVTVLFLSEIVWEKFRPNTGCFEPFVLYFPDYSIGNLQKILSHDHPPEYSADFYAAYINILLGVFYTVCRDLKELRHLAVLNFPKYCEPVVKGEASERDTRKLWRNIEPHLKKAMQTVYLREISSSQWEKLQKDDTDPGQLKGLSAHTHVELPYYSKFILIAAYLASYNPARTDKRFFLKHHGKIKKTNFLKKHEKTSNHLLGPKPFPLDRLLAILYSIVDSRVAPTANIFSQITSLVTLQLLTLVGHDDQLDGPKYKCTVSLDFIRAIARTVNFDIIKYLYDFL

SEQ ID NO: 60284 - protein, 66 aa, Homo sapiens
  Payload ID: 12066
  Gene Symbol: ORC5
  Gene Name: origin recognition complex, subunit 5
  ENSP ID: ENSP00000387465
MPHLENVVLCRESQVSILQSLFGERHHFSFPSIFIYGHTASGKTYVTQTLLKTLEGLRQALRICCL

SEQ ID NO: 60285 - protein, 66 aa, Homo sapiens; identical to SEQ ID NO: 60284
  Payload ID: 12066
  Gene Symbol: ORC5
  Gene Name: origin recognition complex, subunit 5
  ENSP ID: ENSP00000393208

SEQ ID NO: 60286 - protein, 324 aa, Homo sapiens
  Payload ID: 12066
  Gene Symbol: ORC5
  Gene Name: origin recognition complex, subunit 5
  Uniprot ID: O43913
  ENSP ID: ENSP00000395747
MPHLENVVLCRESQVSILQSLFGERHHFSFPSIFIYGHTASGKTYVTQTLLKTLELPHVFVNCVECFTLRLLLEQILNKLNHLSSSEDGCSTEITCETFNDFVRLFKQVTTAENLKDQTVYIVLDKAEYLRDMEANLLPGFLRLQELADRNVTVLFLSEIVWEKFRPNTGCFEPFVLYFPDYSIGNLQKILSHDHPPEYSADFYAAYINILLGVFYTVCRDLKELRHLAVLNFPKYCEPVVKGEASERDTRKLWRNIEPHLKKAMQTVYLREISSSQWEKLQKDDTDPGQLKGIRGSIETVTGDTSSANYQDTKVNTKEHSVRK

SEQ ID NO: 60287 - protein, 66 aa, Homo sapiens; identical to SEQ ID NO: 60284
  Payload ID: 12066
  Gene Symbol: ORC5
  Gene Name: origin recognition complex, subunit 5
  ENSP ID: ENSP00000486840

SEQ ID NO: 60288 - protein, 252 aa, Homo sapiens
  Payload ID: 12067
  Gene Symbol: ORC6
  Gene Name: origin recognition complex, subunit 6
  Uniprot ID: Q9Y5N6
  ENSP ID: ENSP00000219097
MGSELIGRLAPRLGLAEPDMLRKAEEYLRLSRVKCVGLSARTTETSSAVMCLDLAASWMKCPLDRAYLIKLSGLNKETYQSCLKSFECLLGLNSNIGIRDLAVQFSCIEAVNMASKILKSYESSLPQTQQVDLDLSRPLFTSAALLSACKILKLKVDKNKMVATSGVKKAIFDRLCKQLEKIGQQVDREPGDVATPPRKRKKIVVEAPAKEMEKVEEMPHKPQKDEDLTQDYEEWKRKILENAASAQKATAE

SEQ ID NO: 60289 - protein, 36 aa, Homo sapiens
  Payload ID: 12067
  Gene Symbol: ORC6
  Gene Name: origin recognition complex, subunit 6
  ENSP ID: ENSP00000454299
MGSELIGRLAPRLGLAEPDMLRPAVQSCAWTLQLPG

SEQ ID NO: 60290 - protein, 203 aa, Homo sapiens
  Payload ID: 12067
  Gene Symbol: ORC6
  Gene Name: origin recognition complex, subunit 6
  ENSP ID: ENSP00000456981
MCLDLAASWMKCPLDRAYLIKLSGLNKETYQSCLKSFECLLGLNSNIGIRDLAVQFSCIEAVNMASKILKSYESSLPQTQQVDLDLSRPLFTSAALLSACKILKLKVDKNKMVATSGVKKAIFDRLCKQLEKIGQQVDREPGDVATPPRKRKKIVVEAPAKEMEKVEEMPHKPQKDEDLTQDYEEWKRKILENAASAQKATAE

SEQ ID NO: 60291 - protein, 167 aa, Homo sapiens
  Payload ID: 12067
  Gene Symbol: ORC6
  Gene Name: origin recognition complex, subunit 6
  ENSP ID: ENSP00000457282
MGSELIGRLAPRLGLAEPDMLRKAEEYLRLSRVKCVGLSARTTETSSAVMCLDLAASWMKCPLDRAYLIKLSGLNKETYQSCLKSFECLLGLNSNIGIRDLAVQFSCIEAVNMASKILKSYESSLPQTQQVDLDLSRPLFTSAALLSACKRTWRCSYSTTEEKEDSG

SEQ ID NO: 60292 - protein, 153 aa, Homo sapiens
  Payload ID: 12068
  Gene Symbol: ORMDL1
  Gene Name: ORMDL sphingolipid biosynthesis regulator 1
  Uniprot ID: Q9P0S3
  ENSP ID: ENSP00000326869
MNVGVAHSEVNPNTRVMNSRGMWLTYALGVGLLHIVLLSIPFFSVPVAWTLTNIIHNLGMYVFLHAVKGTPFETPDQGKARLLTHWEQLDYGVQFTSSRKFFTISPIILYFLASFYTKYDPTHFILNTASLLSVLIPKMPQLHGVRIFGINKY

SEQ ID NO: 60293 - protein, 153 aa, Homo sapiens; identical to SEQ ID NO: 60292
  Payload ID: 12068
  Gene Symbol: ORMDL1
  Gene Name: ORMDL sphingolipid biosynthesis regulator 1
  Uniprot ID: Q9P0S3
  ENSP ID: ENSP00000376160

SEQ ID NO: 60294 - protein, 153 aa, Homo sapiens; identical to SEQ ID NO: 60292
  Payload ID: 12068
  Gene Symbol: ORMDL1
  Gene Name: ORMDL sphingolipid biosynthesis regulator 1
  Uniprot ID: Q9P0S3
  ENSP ID: ENSP00000376161

SEQ ID NO: 60295 - protein, 109 aa, Homo sapiens
  Payload ID: 12068
  Gene Symbol: ORMDL1
  Gene Name: ORMDL sphingolipid biosynthesis regulator 1
  ENSP ID: ENSP00000386253
MNVGVAHSEVNPNTRVMNSRGMWLTYALGVGLLHIVLLSIPFFSVPVAWTLTNIIHNLGMYVFLHAVKGTPFETPDQGKARLLTHWEQLDYGVQFTSSRKFFTISPIIL

SEQ ID NO: 60296 - protein, 108 aa, Homo sapiens
  Payload ID: 12068
  Gene Symbol: ORMDL1
  Gene Name: ORMDL sphingolipid biosynthesis regulator 1
  ENSP ID: ENSP00000402074
MNVGVAHSEVNPNTRVMNSRGMWLTYALGVGLLHIVLLSIPFFSVPVAWTLTNIIHNLGMYVFLHAVKGTPFETPDQGKARLLTHWEQLDYGVQFTSSRKFFTISPII

SEQ ID NO: 60297 - protein, 108 aa, Homo sapiens; identical to SEQ ID NO: 60296
  Payload ID: 12068
  Gene Symbol: ORMDL1
  Gene Name: ORMDL sphingolipid biosynthesis regulator 1
  ENSP ID: ENSP00000407234

SEQ ID NO: 60298 - protein, 153 aa, Homo sapiens
  Payload ID: 12069
  Gene Symbol: ORMDL2
  Gene Name: ORMDL sphingolipid biosynthesis regulator 2
  Uniprot ID: Q53FV1
  ENSP ID: ENSP00000243045
MNVGVAHSEVNPNTRVMNSRGIWLAYIILVGLLHMVLLSIPFFSIPVVWTLTNVIHNLATYVFLHTVKGTPFETPDQGKARLLTHWEQMDYGLQFTSSRKFLSISPIVLYLLASFYTKYDAAHFLINTASLLSVLLPKLPQFHGVRVFGINKY

SEQ ID NO: 60299 - protein, 119 aa, Homo sapiens
  Payload ID: 12069
  Gene Symbol: ORMDL2
  Gene Name: ORMDL sphingolipid biosynthesis regulator 2
  ENSP ID: ENSP00000447834
MVLLSIPFFSIPVVWTLTNVIHNLATYVFLHTVKGTPFETPDQGKARLLTHWEQMDYGLQFTSSRKFLSISPIVLYLLASFYTKYDAAHFLINTASLLSVLLPKLPQFHGVRVFGINKY

SEQ ID NO: 60300 - protein, 153 aa, Homo sapiens; identical to SEQ ID NO: 60298
  Payload ID: 12069
  Gene Symbol: ORMDL2
  Gene Name: ORMDL sphingolipid biosynthesis regulator 2
  Uniprot ID: Q53FV1
  ENSP ID: ENSP00000448788

SEQ ID NO: 60301 - protein, 65 aa, Homo sapiens
  Payload ID: 12069
  Gene Symbol: ORMDL2
  Gene Name: ORMDL sphingolipid biosynthesis regulator 2
  ENSP ID: ENSP00000449461
MDYGLQFTSSRKFLSISPIVLYLLASFYTKYDAAHFLINTASLLSVLLPKLPQFHGVRVFGINKY

SEQ ID NO: 60302 - protein, 153 aa, Homo sapiens
  Payload ID: 12070
  Gene Symbol: ORMDL3
  Gene Name: ORMDL sphingolipid biosynthesis regulator 3
  Uniprot ID: Q8N138
  ENSP ID: ENSP00000304858
MNVGTAHSEVNPNTRVMNSRGIWLSYVLAIGLLHIVLLSIPFVSVPVVWTLTNLIHNMGMYIFLHTVKGTPFETPDQGKARLLTHWEQMDYGVQFTASRKFLTITPIVLYFLTSFYTKYDQIHFVLNTVSLMSVLIPKLPQLHGVRIFGINKY

SEQ ID NO: 60303 - protein, 153 aa, Homo sapiens; identical to SEQ ID NO: 60302
  Payload ID: 12070
  Gene Symbol: ORMDL3
  Gene Name: ORMDL sphingolipid biosynthesis regulator 3
  Uniprot ID: Q8N138
  ENSP ID: ENSP00000377724

SEQ ID NO: 60304 - protein, 102 aa, Homo sapiens
  Payload ID: 12070
  Gene Symbol: ORMDL3
  Gene Name: ORMDL sphingolipid biosynthesis regulator 3
  ENSP ID: ENSP00000462961
  MOD_RES (1)..(1): Any amino acid
XNLIHNMGMYIFLHTVKGTPFETPDQGKARLLTHWEQMDYGVQFTASRKFLTITPIVLYFLTSFYTKYDQIHFVLNTVSLMSVLIPKLPQLHGVRIFGINKY

SEQ ID NO: 60305 - protein, 129 aa, Homo sapiens
  Payload ID: 12070
  Gene Symbol: ORMDL3
  Gene Name: ORMDL sphingolipid biosynthesis regulator 3
  ENSP ID: ENSP00000464298
MNVGTAHSEVNPNTRVMNSRGIWLSYVLAIGLLHIVLLSIPFVSVPVVWTLTNLIHNMGMYIFLHTVKGTPFETPDQGKARLLTHWEQMDYGVQFTASRKFLTITPIVLYFLTSFYTKYDQIHFVLNTV

SEQ ID NO: 60306 - protein, 137 aa, Homo sapiens
  Payload ID: 12070
  Gene Symbol: ORMDL3
  Gene Name: ORMDL sphingolipid biosynthesis regulator 3
  Uniprot ID: Q8N138
  ENSP ID: ENSP00000464455
MNVGTAHSEVNPNTRVMNSRGIWLSYVLAIGLLHIVLLSIPFGMYIFLHTVKGTPFETPDQGKARLLTHWEQMDYGVQFTASRKFLTITPIVLYFLTSFYTKYDQIHFVLNTVSLMSVLIPKLPQLHGVRIFGINKY

SEQ ID NO: 60307 - protein, 153 aa, Homo sapiens; identical to SEQ ID NO: 60302
  Payload ID: 12070
  Gene Symbol: ORMDL3
  Gene Name: ORMDL sphingolipid biosynthesis regulator 3
  Uniprot ID: Q8N138
  ENSP ID: ENSP00000464693

SEQ ID NO: 60308 - protein, 439 aa, Homo sapiens
  Payload ID: 12071
  Gene Symbol: OAT
  Gene Name: ornithine aminotransferase
  Uniprot ID: P04181
  ENSP ID: ENSP00000357838
MFSKLAHLQRFAVLSRGVHSSVASATSVATKKTVQGPPTSDDIFEREYKYGAHNYHPLPVALERGKGIYLWDVEGRKYFDFLSSYSAVNQGHCHPKIVNALKSQVDKLTLTSRAFYNNVLGEYEEYITKLFNYHKVLPMNTGVEAGETACKLARKWGYTVKGIQKYKAKIVFAAGNFWGRTLSAISSSTDPTSYDGFGPFMPGFDIIPYNDLPALERALQDPNVAAFMVEPIQGEAGVVVPDPGYLMGVRELCTRHQVLFIADEIQTGLARTGRWLAVDYENVRPDIVLLGKALSGGLYPVSAVLCDDDIMLTIKPGEHGSTYGGNPLGCRVAIAALEVLEEENLAENADKLGIILRNELMKLPSDVVTAVRGKGLLNAIVIKETKDWDAWKVCLRLRDNGLLAKPTHGDIIRFAPPLVIKEDELRESIEIINKTILSF

SEQ ID NO: 60309 - protein, 301 aa, Homo sapiens
  Payload ID: 12071
  Gene Symbol: OAT
  Gene Name: ornithine aminotransferase
  Uniprot ID: P04181
  ENSP ID: ENSP00000439042
MNTGVEAGETACKLARKWGYTVKGIQKYKAKIVFAAGNFWGRTLSAISSSTDPTSYDGFGPFMPGFDIIPYNDLPALERALQDPNVAAFMVEPIQGEAGVVVPDPGYLMGVRELCTRHQVLFIADEIQTGLARTGRWLAVDYENVRPDIVLLGKALSGGLYPVSAVLCDDDIMLTIKPGEHGSTYGGNPLGCRVAIAALEVLEEENLAENADKLGIILRNELMKLPSDVVTAVRGKGLLNAIVIKETKDWDAWKVCLRLRDNGLLAKPTHGDIIRFAPPLVIKEDELRESIEIINKTILSF

SEQ ID NO: 60310 - protein, 354 aa, Homo sapiens
  Payload ID: 12072
  Gene Symbol: OTC
  Gene Name: ornithine carbamoyltransferase
  Uniprot ID: P00480
  ENSP ID: ENSP00000039007
MLFNLRILLNNAAFRNGHNFMVRNFRCGQPLQNKVQLKGRDLLTLKNFTGEEIKYMLWLSADLKFRIKQKGEYLPLLQGKSLGMIFEKRSTRTRLSTETGFALLGGHPCFLTTQDIHLGVNESLTDTARVLSSMADAVLARVYKQSDLDTLAKEASIPIINGLSDLYHPIQILADYLTLQEHYSSLKGLTLSWIGDGNNILHSIMMSAAKFGMHLQAATPKGYEPDASVTKLAEQYAKENGTKLLLTNDPLEAAHGGNVLITDTWISMGQEEEKKKRLQAFQGYQVTMKTAKVAASDWTFLHCLPRKPEEVDDEVFYSPRSLVFPEAENRKWTIMAVMVSLLTDYSPQLQKPKF

SEQ ID NO: 60311 - protein, 461 aa, Homo sapiens
  Payload ID: 12073
  Gene Symbol: ODC1
  Gene Name: ornithine decarboxylase 1
  Uniprot ID: P11926
  ENSP ID: ENSP00000234111
MNNFGNEEFDCHFLDEGFTAKDILDQKINEVSSSDDKDAFYVADLGDILKKHLRWLKALPRVTPFYAVKCNDSKAIVKTLAATGTGFDCASKTEIQLVQSLGVPPERIIYANPCKQVSQIKYAANNGVQMMTFDSEVELMKVARAHPKAKLVLRIATDDSKAVCRLSVKFGATLRTSRLLLERAKELNIDVVGVSFHVGSGCTDPETFVQAISDARCVFDMGAEVGFSMYLLDIGGGFPGSEDVKLKFEEITGVINPALDKYFPSDSGVRIIAEPGRYYVASAFTLAVNIIAKKIVLKEQTGSDDEDESSEQTFMYYVNDGVYGSFNCILYDHAHVKPLLQKRPKPDEKYYSSSIWGPTCDGLDRIVERCDLPEMHVGDWMLFENMGAYTVAAASTFNGFQRPTIYYVMSGPAWQLMQQFQNPDFPPEVEEQDASTLPVSCAWESGMKRHRAACASASINV

SEQ ID NO: 60312 - protein, 461 aa, Homo sapiens; identical to SEQ ID NO: 60311
  Payload ID: 12073
  Gene Symbol: ODC1
  Gene Name: ornithine decarboxylase 1
  Uniprot ID: P11926
  ENSP ID: ENSP00000385333

SEQ ID NO: 60313 - protein, 68 aa, Homo sapiens
  Payload ID: 12073
  Gene Symbol: ODC1
  Gene Name: ornithine decarboxylase 1
  ENSP ID: ENSP00000390691
MNNFGNEEFDCHFLDEGFTAKDILDQKINEVSSSDDKDAFYVADLGDILKKHLRWLKALPRVTPFYAV

SEQ ID NO: 60314 - protein, 226 aa, Homo sapiens
  Payload ID: 12074
  Gene Symbol: OAZ1
  Gene Name: ornithine decarboxylase antizyme 1
  ENSP ID: ENSP00000463955
MVKSSLQRILNSHCFAREKEGDKPSATIHASRTMPLLSLHSRGGSSSERVSLHCCSNPGPGPRWCSDAPHPPLKIPGGRGNSQRDHNLSANLFYSDDRLNVTEELTSNDKTRILNVQSRLTDAKRINWRTVLSGGSLYIEIPGGALPEGSKDSFAVLLEFAEEQLRADHVFICFHKNREDRAALLRTFSFLGFEIVRPGHPLVPKRPDACFMAYTFERESSGEEEE

SEQ ID NO: 60315 - protein, 52 aa, Homo sapiens
  Payload ID: 12074
  Gene Symbol: OAZ1
  Gene Name: ornithine decarboxylase antizyme 1
  ENSP ID: ENSP00000467452
MVKSSLQRILNSHCFAREKEGDKPSATIHASRTMPLLSLHSRGGSSSERMIG

SEQ ID NO: 60316 - protein, 208 aa, Homo sapiens
  Payload ID: 12074
  Gene Symbol: OAZ1
  Gene Name: ornithine decarboxylase antizyme 1
  ENSP ID: ENSP00000468437
MARDAPGEAAHVDGTQGFSAGAAGELGVAHSDSPAAPWEDPRRFPGRRVPLPGARVPAAVVGEPAGSRSSFPDCVPRVPGSPSTAVVTRVRGLGGAPDAPHPPLKIPGGRGNSQRDHNLSANLFYSDDRLNVTEELTSNDKTRILNVQSRLTDAKRINWRTVLSGGSLYIEIPGGALPEGSKDSFAVLLEFAEEQLRADHVFICFHKN

SEQ ID NO: 60317 - protein, 228 aa, Homo sapiens
  Payload ID: 12074
  Gene Symbol: OAZ1
  Gene Name: ornithine decarboxylase antizyme 1
  Uniprot ID: P54368
  ENSP ID: ENSP00000473381
MVKSSLQRILNSHCFAREKEGDKPSATIHASRTMPLLSLHSRGGSSSESSRVSLHCCSNPGPGPRWCSDAPHPPLKIPGGRGNSQRDHNLSANLFYSDDRLNVTEELTSNDKTRILNVQSRLTDAKRINWRTVLSGGSLYIEIPGGALPEGSKDSFAVLLEFAEEQLRADHVFICFHKNREDRAALLRTFSFLGFEIVRPGHPLVPKRPDACFMAYTFERESSGEEEE

SEQ ID NO: 60318 - protein, 136 aa, Homo sapiens
  Payload ID: 12075
  Gene Symbol: OAZ2
  Gene Name: ornithine decarboxylase antizyme 2
  ENSP ID: ENSP00000462192
MINTQDSSILPLSNCPQLQCCRHIVPGPLWCSDAPHPLSKIPGGRGGGRDPSLSALIYKGRKRTWCWGKAWAFESGRPGFESHLCHSLSLEPWDEKLTVTQDLPVNDGKPHIVHFQYEVTEVKVSSWDAVLSSQSL

SEQ ID NO: 60319 - protein, 129 aa, Homo sapiens
  Payload ID: 12075
  Gene Symbol: OAZ2
  Gene Name: ornithine decarboxylase antizyme 2
  ENSP ID: ENSP00000462354
MINTQDSSILPLSNCPQLQCCRHIVPGPLWCSDAPHPLSKIPGGRGGGRDPSLSALIYKDEKLTVTQDLPVNDGKPHIVHFQYEVTEVKVSSWDAVLSSQSLFVEIPDGLLADGSKEGSTPEDLQLLGL

SEQ ID NO: 60320 - protein, 189 aa, Homo sapiens
  Payload ID: 12075
  Gene Symbol: OAZ2
  Gene Name: ornithine decarboxylase antizyme 2
  Uniprot ID: O95190
  ENSP ID: ENSP00000463013
MINTQDSSILPLSNCPQLQCCRHIVPGPLWCSDAPHPLSKIPGGRGGGRDPSLSALIYKDEKLTVTQDLPVNDGKPHIVHFQYEVTEVKVSSWDAVLSSQSLFVEIPDGLLADGSKEGLLALLEFAEEKMKVNYVFICFRKGREDRAPLLKTFSFLGFEIVRPGHPCVPSRPDVMFMVYPLDQNLSDED

SEQ ID NO: 60321 - protein, 60 aa, Homo sapiens
  Payload ID: 12075
  Gene Symbol: OAZ2
  Gene Name: ornithine decarboxylase antizyme 2
  ENSP ID: ENSP00000463729
MKVNYVFICFRKGREDRAPLLKTFSFLGFEIVRPGHPCVPSRPDVMFMVYPLDQNLSDED

SEQ ID NO: 60322 - protein, 190 aa, Homo sapiens
  Payload ID: 12076
  Gene Symbol: OAZ3
  Gene Name: ornithine decarboxylase antizyme 3
  ENSP ID: ENSP00000313922
MTVPWRPGKRRITYKEEEDLTLQPRSCLQCSESLVGLQEGKSTEQGNHDQLKELYSAGNLTVLATDPLLHQDPVQLDFHFRLTSQTSAHWHGLLCDRRLFLDIPYQALDQGNRESLTATLEYVEEKTNVDSVFVNFQNDRNDRGALLRAFSYMGFEVVRPDHPALPPLDNVIFMVYPLERDVGHLPSEPP

SEQ ID NO: 60323 - protein, 235 aa, Homo sapiens
  Payload ID: 12076
  Gene Symbol: OAZ3
  Gene Name: ornithine decarboxylase antizyme 3
  ENSP ID: ENSP00000383784
LPCKRCRPSVYSLSYIKRGKTRNYLYPIWSPYAYYLYCYKYRITLREKMLPRCYKSITYKEEEDLTLQPRSCLQCSESLVGLQEGKSTEQGNHDQLKELYSAGNLTVLATDPLLHQDPVQLDFHFRLTSQTSAHWHGLLCDRRLFLDIPYQALDQGNRESLTATLEYVEEKTNVDSVFVNFQNDRNDRGALLRAFSYMGFEVVRPDHPALPPLDNVIFMVYPLERDVGHLPSEPP

SEQ ID NO: 60324 - protein, 203 aa, Homo sapiens
  Payload ID: 12076
  Gene Symbol: OAZ3
  Gene Name: ornithine decarboxylase antizyme 3
  ENSP ID: ENSP00000415904
MRPEGGPRRRRQERPPPVLPAARRITYKEEEDLTLQPRSCLQCSESLVGLQEGKSTEQGNHDQLKELYSAGNLTVLATDPLLHQDPVQLDFHFRLTSQTSAHWHGLLCDRRLFLDIPYQALDQGNRESLTATLEYVEEKTNVDSVFVNFQNDRNDRGALLRAFSYMGFEVVRPDHPALPPLDNVIFMVYPLERDVGHLPSEPP

SEQ ID NO: 60325 - protein, 124 aa, Homo sapiens
  Payload ID: 12076
  Gene Symbol: OAZ3
  Gene Name: ornithine decarboxylase antizyme 3
  ENSP ID: ENSP00000463055
LPCKRCRPSVYSLSYIKRGKTRNYLYPIWSPYAYYLYCYKYRITLREKMLPRCYKSITYKEEEDLTLQPRSCLQCSESLVGLQEGKSTEQGNHDQLKELYSFDCNPGVRGREDKCGLCVCELPE

SEQ ID NO: 60326 - protein, 123 aa, Homo sapiens
  Payload ID: 12076
  Gene Symbol: OAZ3
  Gene Name: ornithine decarboxylase antizyme 3
  ENSP ID: ENSP00000463692
  MOD_RES (1)..(1): Any amino acid
XGKSTEQGNHDQLKELYSTSAHWHGLLCDRRLFLDIPYQALDQGNRESLTATLEYVEEKTNVDSVFVNFQNDRNDRGALLRAFSYMGFEVVRPDHPALPPLDNVIFMVYPLERDVGHLPSEPP

SEQ ID NO: 60327 - protein, 190 aa, Homo sapiens
  Payload ID: 12076
  Gene Symbol: OAZ3
  Gene Name: ornithine decarboxylase antizyme 3
  Uniprot ID: Q9UMX2
  ENSP ID: ENSP00000486158
MTVPWRPGKRRITYKEEEDLTLQPRPASSAPESLVGLQEGKSTEQGNHDQLKELYSAGNLTVLATDPLLHQDPVQLDFHFRLTSQTSAHWHGLLCDRRLFLDIPYQALDQGNRESLTATLEYVEEKTNVDSVFVNFQNDRNDRGALLRAFSYMGFEVVRPDHPALPPLDNVIFMVYPLERDVGHLPSEPP

SEQ ID NO: 60328 - protein, 79 aa, Homo sapiens
  Payload ID: 12076
  Gene Symbol: OAZ3
  Gene Name: ornithine decarboxylase antizyme 3
  ENSP ID: ENSP00000489350
MTVPWRPGKRRITYKEEEDLTLQPRSCLQCSESLVGLQEGKSTEQGNHDQLKELYSFDCNPGVRGREDKCGLCVCELPE

SEQ ID NO: 60329 - protein, 105 aa, Homo sapiens
  Payload ID: 12076
  Gene Symbol: OAZ3
  Gene Name: ornithine decarboxylase antizyme 3
  ENSP ID: ENSP00000489420
LQPRSCLQCSESLVGLQEGKSTEQGNHDQLKELYSAGNLTVLATDPLLHQDPVQLDFHFRLTSQTSAHWHGLLCDRRLFLDIPYQALDQGNRERCPAAGLQLHGL

SEQ ID NO: 60330 - protein, 231 aa, Homo sapiens
  Payload ID: 12077
  Gene Symbol: OFCC1
  Gene Name: orofacial cleft 1 candidate 1
  ENSP ID: ENSP00000325053
FRRDKFQQKALKQTKQKKSKSAEFLMVKEDREATEGTGNPAFNMSSPDLSACQTAEKKVIRHDMPDRTLAAHQQKFRLPASAEPKGNEYGRNYFDPLMDEEINPRQCATEVSREDDDRIFYNRLTKLFDESRQGEPQDESGREETLNSEAPGSSNKSHEIHKEASEATTAHLEEFQRSQKTIILLGSSPLEQEIRSTSLHCMEDEMSHPWILLLKVTAVIRSRRYYREQRF

SEQ ID NO: 60331 - protein, 122 aa, Homo sapiens
  Payload ID: 12077
  Gene Symbol: OFCC1
  Gene Name: orofacial cleft 1 candidate 1
  Uniprot ID: Q8IZS5
  ENSP ID: ENSP00000417429
TKQKKSKSAEFLMVKEDREATEGTGNPAFNMSSPDLSACQTAEKKVIRHDMPDRTLAAHQQKFRLPASAEPKGNEYGRNYFDPLMDEEINPRQCATEVSREGFEIRRGRPQRIHSYVTFKDW

SEQ ID NO: 60332 - protein, 4 aa, Homo sapiens
  Payload ID: 12077
  Gene Symbol: OFCC1
  Gene Name: orofacial cleft 1 candidate 1
  ENSP ID: ENSP00000417933
MERE

SEQ ID NO: 60333 - protein, 187 aa, Homo sapiens
  Payload ID: 12077
  Gene Symbol: OFCC1
  Gene Name: orofacial cleft 1 candidate 1
  ENSP ID: ENSP00000418013
  MOD_RES (1)..(1): Any amino acid
XSKSAEFLMVKEDREATEGTGNPAFNMSSPDLSACQTAEKKVIRHDMPDRTLAAHQQKFRLPASAEPKGNEYGRNYFDPLMDEEINPRQCATEVSREGAPSKEKWSIPKKIGPCSMDYDPNLLEEDDELHSQGDSLTDHSVKGKSTVWRIGEAEDYSQDISYLEELEEHRFSVCCSSVADSRYGDFF

SEQ ID NO: 60334 - protein, 208 aa, Homo sapiens
  Payload ID: 12077
  Gene Symbol: OFCC1
  Gene Name: orofacial cleft 1 candidate 1
  Uniprot ID: Q8IZS5
  ENSP ID: ENSP00000418251
MWITSLITMKDEDIFDLAGDPQDSLIPGPSPTPKQNPVCNEAFFGHQTFSLRETGLKSVHCQGQEAENMEREKFQQKALKQTKQKKSKSAEFLMVKEDREATEGTGNPAFNMSSPDLSACQTAEKKVIRHDMPDRTLAAHQQKFRLPASAEPKGNEYGRNYFDPLMDEEINPRQCATEVSREDESGREETLNSEAPGSSNKSHEIHKE

SEQ ID NO: 60335 - protein, 22 aa, Homo sapiens
  Payload ID: 12077
  Gene Symbol: OFCC1
  Gene Name: orofacial cleft 1 candidate 1
  ENSP ID: ENSP00000418286
MRETGLKSVHCQGQEAENMERE

SEQ ID NO: 60336 - protein, 106 aa, Homo sapiens
  Payload ID: 12077
  Gene Symbol: OFCC1
  Gene Name: orofacial cleft 1 candidate 1
  ENSP ID: ENSP00000418453
  MOD_RES (1)..(1): Any amino acid
XKQTKQKKSKSAEFLMVKEDREATEGTGNPAFNMSSPDLSACQTAEKKVIRHDMPDRTLAAHQQKFRLPASAEPKGNEYGRNYFDPLMDEEINPRQCATEVSREAF

SEQ ID NO: 60337 - protein, 300 aa, Homo sapiens
  Payload ID: 12077
  Gene Symbol: OFCC1
  Gene Name: orofacial cleft 1 candidate 1
  ENSP ID: ENSP00000419718
MEREKFQQKALKQTKQKKSKSAEFLMVKEDREATEGTGNPAFNMSSPDLSACQTAEKKVIRHDMPDRTLAAHQQKFRLPASAEPKGNEYGRNYFDPLMDEEINPRQCATEVSREVCLMAKGEKAESGVDNTAGLSEKETQKNPRAPMDEADVKSAAHSSQGSIPKKIGPCSMDYDPNLLEEDDELHSQGDSLTDHSVKGKSTVWRIGEAEDYSQDISYLEELEEHRFSVCCSSVADSRYGDFFKHLHFVLVSASSELQLSQWQSQGFWYIILLMFFLWFLRLYLHYLGQWLFLQAISTPV

SEQ ID NO: 60338 - protein, 218 aa, Homo sapiens
  Payload ID: 12077
  Gene Symbol: OFCC1
  Gene Name: orofacial cleft 1 candidate 1
  ENSP ID: ENSP00000419759
TKQKKSKSAEFLMVKEDREATEGTGNPAFNMSSPDLSACQTAEKKVIRHDMPDRTLAAHQQKFRLPASAEPKGNEYGRNYFDPLMDEEINPRQCATEVSREDDDRIFYNRLTKLFDESRQGEPQDESGREETLNSEAPGSSNKSHEIHKEASEATTAHLEEFQRSQKTIILLGSSPLEQEIRSTSLHCMEDEMSHPWILLLKVTAVIRSRRYYREQRF

SEQ ID NO: 60339 - protein, 118 aa, Homo sapiens
  Payload ID: 12077
  Gene Symbol: OFCC1
  Gene Name: orofacial cleft 1 candidate 1
  ENSP ID: ENSP00000420421
  MOD_RES (1)..(1): Any amino acid
XDDDRIFYNRLTKLFDESRQGEPQDESGREETLNSEAPGSSNKSHEIHKEASEATTAHLEEFQRSQKTIILLGSSPLEQEIRSTSLHCMEDEMSHPWILLLKVTAVIRSRRYYREQRF

SEQ ID NO: 60340 - protein, 311 aa, Homo sapiens
  Payload ID: 12077
  Gene Symbol: OFCC1
  Gene Name: orofacial cleft 1 candidate 1
  ENSP ID: ENSP00000473634
  MOD_RES (1)..(1): Any amino acid
XHCQGQEAENMEREKFQQKALKQTKQKKSKSAEFLMVKEDREATEGTGNPAFNMSSPDLSACQTAEKKVIRHDMPDRTLAAHQQKFRLPASAEPKGNEYGRNYFDPLMDEEINPRQCATEVSREDESGREETLNSEAPGSSNKSHEIHKEASEATTAHLEEFQRSQKTIILLGSSPLEQDLKFEGEGLNEYIPMSLLKTGKTFEKTPSQPFIADLNICKKDSAAQLGTLTEVTNDSKGAAGPRWKFLRNSRTPPFVENEQSQPPQPLQIQIRCLRGLKDKAPPGSYVLKVSKCPCLVDWEAVSCSGGKRSN

SEQ ID NO: 60341 - protein, 235 aa, Homo sapiens
  Payload ID: 12077
  Gene Symbol: OFCC1
  Gene Name: orofacial cleft 1 candidate 1
  ENSP ID: ENSP00000480108
MEREKFQQKALKQTKQKKSKSAEFLMVKEDREATEGTGNPAFNMSSPDLSACQTAEKKVIRHDMPDRTLAAHQQKFRLPASAEPKGTFTGNEYGRNYFDPLMDEEINPRQCATEVSREDDDRIFYNRLTKLFDESRQGEPQDESGREETLNSEAPGSSNKSHEIHKEASEATTAHLEEFQRSQKTIILLGSSPLEQEIRSTSLHCMEDEMSHPWILLLKVTAVIRSRRYYREQRF

SEQ ID NO: 60342 - protein, 235 aa, Homo sapiens
  Payload ID: 12077
  Gene Symbol: OFCC1
  Gene Name: orofacial cleft 1 candidate 1
  ENSP ID: ENSP00000484598
FRRDKFQQKALKQTKQKKSKSAEFLMVKEDREATEGTGNPAFNMSSPDLSACQTAEKKVIRHDMPDRTLAAHQQKFRLPASAEPKGTMPGNEYGRNYFDPLMDEEINPRQCATEVSREDDDRIFYNRLTKLFDESRQGEPQDESGREETLNSEAPGSSNKSHEIHKEASEATTAHLEEFQRSQKTIILLGSSPLEQEIRSTSLHCMEDEMSHPWILLLKVTAVIRSRRYYREQRF

SEQ ID NO: 60343 - protein, 201 aa, Homo sapiens
  Payload ID: 12078
  Gene Symbol: ORM1
  Gene Name: orosomucoid 1
  Uniprot ID: P02763
  ENSP ID: ENSP00000259396
MALSWVLTVLSLLPLLEAQIPLCANLVPVPITNATLDRITGKWFYIASAFRNEEYNKSVQEIQATFFYFTPNKTEDTIFLREYQTRQDQCIYNTTYLNVQRENGTISRYVGGQEHFAHLLILRDTKTYMLAFDVNDEKNWGLSVYADKPETTKEQLGEFYEALDCLRIPKSDVVYTDWKKDKCEPLEKQHEKERKQEEGES

SEQ ID NO: 60344 - protein, 201 aa, Homo sapiens
  Payload ID: 12079
  Gene Symbol: ORM2
  Gene Name: orosomucoid 2
  Uniprot ID: P19652
  ENSP ID: ENSP00000394936
MALSWVLTVLSLLPLLEAQIPLCANLVPVPITNATLDRITGKWFYIASAFRNEEYNKSVQEIQATFFYFTPNKTEDTIFLREYQTRQNQCFYNSSYLNVQRENGTVSRYEGGREHVAHLLFLRDTKTLMFGSYLDDEKNWGLSFYADKPETTKEQLGEFYEALDCLCIPRSDVMYTDWKKDKCEPLEKQHEKERKQEEGES

SEQ ID NO: 60345 - protein, 354 aa, Homo sapiens
  Payload ID: 12080
  Gene Symbol: OTX1
  Gene Name: orthodenticle homeobox 1
  Uniprot ID: P32242
  ENSP ID: ENSP00000282549
MMSYLKQPPYGMNGLGLAGPAMDLLHPSVGYPATPRKQRRERTTFTRSQLDVLEALFAKTRYPDIFMREEVALKINLPESRVQVWFKNRRAKCRQQQQSGSGTKSRPAKKKSSPVRESSGSESSGQFTPPAVSSSASSSSSASSSSANPAAAAAAGLGGNPVAAASSLSTPAASSIWSPASISPGSAPASVSVPEPLAAPSNTSCMQRSVAAGAATAAASYPMSYGQGGSYGQGYPTPSSSYFGGVDCSSYLAPMHSHHHPHQLSPMAPSSMAGHHHHHPHAHHPLSQSSGHHHHHHHHHHQGYGGSGLAFNSADCLDYKEPGAAAASSAWKLNFNSPDCLDYKDQASWRFQVL

SEQ ID NO: 60346 - protein, 354 aa, Homo sapiens; identical to SEQ ID NO: 60345
  Payload ID: 12080
  Gene Symbol: OTX1
  Gene Name: orthodenticle homeobox 1
  Uniprot ID: P32242
  ENSP ID: ENSP00000355631

SEQ ID NO: 60347 - protein, 101 aa, Homo sapiens
  Payload ID: 12080
  Gene Symbol: OTX1
  Gene Name: orthodenticle homeobox 1
  ENSP ID: ENSP00000385782
MMSYLKQPPYGMNGLGLAGPAMDLLHPSVGYPVRLSFAKAEIWACQGPARVLYRGSTWPPMTRGAPACPRSHSAEAAAGAHHLHAFTAGRARGALRQDSLP

SEQ ID NO: 60348 - protein, 297 aa, Homo sapiens
  Payload ID: 12081
  Gene Symbol: OTX2
  Gene Name: orthodenticle homeobox 2
  Uniprot ID: P32243
  ENSP ID: ENSP00000343819
MMSYLKQPPYAVNGLSLTTSGMDLLHPSVGYPGPWASCPAATPRKQRRERTTFTRAQLDVLEALFAKTRYPDIFMREEVALKINLPESRVQVWFKNRRAKCRQQQQQQQNGGQNKVRPAKKKTSPAREVSSESGTSGQFTPPSSTSVPTIASSSAPVSIWSPASISPLSDPLSTSSSCMQRSYPMTYTQASGYSQGYAGSTSYFGGMDCGSYLTPMHHQLPGPGATLSPMGTNAVTSHLNQSPASLSTQGYGASSLGFNSTTDCLDYKDQTASWKLNFNADCLDYKDQTSSWKFQVL

SEQ ID NO: 60349 - protein, 289 aa, Homo sapiens
  Payload ID: 12081
  Gene Symbol: OTX2
  Gene Name: orthodenticle homeobox 2
  Uniprot ID: P32243
  ENSP ID: ENSP00000386185
MMSYLKQPPYAVNGLSLTTSGMDLLHPSVGYPATPRKQRRERTTFTRAQLDVLEALFAKTRYPDIFMREEVALKINLPESRVQVWFKNRRAKCRQQQQQQQNGGQNKVRPAKKKTSPAREVSSESGTSGQFTPPSSTSVPTIASSSAPVSIWSPASISPLSDPLSTSSSCMQRSYPMTYTQASGYSQGYAGSTSYFGGMDCGSYLTPMHHQLPGPGATLSPMGTNAVTSHLNQSPASLSTQGYGASSLGFNSTTDCLDYKDQTASWKLNFNADCLDYKDQTSSWKFQVL

SEQ ID NO: 60350 - protein, 35 aa, Homo sapiens
  Payload ID: 12081
  Gene Symbol: OTX2
  Gene Name: orthodenticle homeobox 2
  ENSP ID: ENSP00000450468
MMSYLKQPPYAVNGLSLTTSGMDLLHPSVGYPGMV

SEQ ID NO: 60351 - protein, 163 aa, Homo sapiens
  Payload ID: 12081
  Gene Symbol: OTX2
  Gene Name: orthodenticle homeobox 2
  ENSP ID: ENSP00000451272
MMSYLKQPPYAVNGLSLTTSGMDLLHPSVGYPATPRKQRRERTTFTRAQLDVLEALFAKTRYPDIFMREEVALKINLPESRVQVWFKNRRAKCRQQQQQQQNGGQNKVRPAKKKTSPAREVSSESGTSGQFTPPSSTSVPTIASSSAPVSIWSPASISPLSDP

SEQ ID NO: 60352 - protein, 238 aa, Homo sapiens
  Payload ID: 12081
  Gene Symbol: OTX2
  Gene Name: orthodenticle homeobox 2
  ENSP ID: ENSP00000451357
MMSYLKQPPYAVNGLSLTTSGMDLLHPSVGYPGPWASCPAATPRKQRRERTTFTRAQLDVLEALFAKTRYPDIFMREEVALKINLPESRVQVWFKNRRAKCRQQQQQQQNGGQNKVRPAKKKTSPAREVSSESGTSGQFTPPSSTSVPTIASSSAPVSIWSPASISPLSDPLSTSSSCMQRSYPMTYTQASGYSQGYAGSTSYFGGMDCGSYLTPMHHQLPGPGATLSPMGTNAVTSH

SEQ ID NO: 60353 - protein, 289 aa, Homo sapiens; identical to SEQ ID NO: 60349
  Payload ID: 12081
  Gene Symbol: OTX2
  Gene Name: orthodenticle homeobox 2
  Uniprot ID: P32243
  ENSP ID: ENSP00000452336

SEQ ID NO: 60354 - protein, 35 aa, Homo sapiens; identical to SEQ ID NO: 60350
  Payload ID: 12081
  Gene Symbol: OTX2
  Gene Name: orthodenticle homeobox 2
  ENSP ID: ENSP00000474486

SEQ ID NO: 60355 - protein, 325 aa, Homo sapiens
  Payload ID: 12082
  Gene Symbol: OTP
  Gene Name: orthopedia homeobox
  Uniprot ID: Q5XKR4
  ENSP ID: ENSP00000302814
MLSHADLLDARLGMKDAAELLGHREAVKCRLGVGGSDPGGHPGDLAPNSDPVEGATLLPGEDITTVGSTPASLAVSAKDPDKQPGPQGGPNPSQAGQQQGQQKQKRHRTRFTPAQLNELERSFAKTHYPDIFMREELALRIGLTESRVQVWFQNRRAKWKKRKKTTNVFRAPGTLLPTPGLPQFPSAAAAAAAAMGDSLCSFHANDTRWAAAAMPGVSQLPLPPALGRQQAMAQSLSQCSLAAGPPPNSMGLSNSLAGSNGAGLQSHLYQPAFPGMVPASLPGPSNVSGSPQLCSSPDSSDVWRGTSIASLRRKALEHTVSMSFT

SEQ ID NO: 60356 - protein, 335 aa, Homo sapiens
  Payload ID: 12083
  Gene Symbol: OSGEP
  Gene Name: O-sialoglycoprotein endopeptidase
  Uniprot ID: Q9NPF4
  ENSP ID: ENSP00000206542
MPAVLGFEGSANKIGVGVVRDGKVLANPRRTYVTPPGTGFLPGDTARHHRAVILDLLQEALTESGLTSQDIDCIAYTKGPGMGAPLVSVAVVARTVAQLWNKPLVGVNHCIGHIEMGRLITGATSPTVLYVSGGNTQVIAYSEHRYRIFGETIDIAVGNCLDRFARVLKISNDPSPGYNIEQMAKRGKKLVELPYTVKGMDVSFSGILSFIEDVAHRMLATGECTPEDLCFSLQETVFAMLVEITERAMAHCGSQEALIVGGVGCNVRLQEMMATMCQERGARLFATDERFCIDNGAMIAQAGWEMFRAGHRTPLSDSGVTQRYRTDEVEVTWRD

SEQ ID NO: 60357 - protein, 111 aa, Homo sapiens
  Payload ID: 12083
  Gene Symbol: OSGEP
  Gene Name: O-sialoglycoprotein endopeptidase
  ENSP ID: ENSP00000450464
  MOD_RES (1)..(1): Any amino acid
XFLPGDTARHHRAVILDLLQEALTESGLTSQDIDCIAYTKGPGMGAPLVSVAVVARTVAQLWNKPLVGVNHCIGHIEMGRLITGATSPTVLYVSGGNTQTWGFMDFLITLR

SEQ ID NO: 60358 - protein, 149 aa, Homo sapiens
  Payload ID: 12083
  Gene Symbol: OSGEP
  Gene Name: O-sialoglycoprotein endopeptidase
  ENSP ID: ENSP00000451580
MPAVLGFEGSANKIGVGVVRDGKVLANPRRTYVTPPGTGFLPGDTARHHRAVILDLLQEALTESGLTSQDIDCIAYTKGPGMGAPLVSVAVVARTVAQLWNKPLVGVNHCIGHIEMGRLITGATSPTVLYVIAYSEHRYRIFGETIDIA

SEQ ID NO: 60359 - protein, 414 aa, Homo sapiens
  Payload ID: 12084
  Gene Symbol: OSGEPL1
  Gene Name: O-sialoglycoprotein endopeptidase-like 1
  Uniprot ID: Q9H4B0
  ENSP ID: ENSP00000264151
MLILTKTAGVFFKPSKRKVYEFLRSFNFHPGTLFLHKIVLGIETSCDDTAAAVVDETGNVLGEAIHSQTEVHLKTGGIVPPAAQQLHRENIQRIVQEALSASGVSPSDLSAIATTIKPGLALSLGVGLSFSLQLVGQLKKPFIPIHHMEAHALTIRLTNKVEFPFLVLLISGGHCLLALVQGVSDFLLLGKSLDIAPGDMLDKVARRLSLIKHPECSTMSGGKAIEHLAKQGNRFHFDIKPPLHHAKNCDFSFTGLQHVTDKIIMKKEKEEGIEKGQILSSAADIAATVQHTMACHLVKRTHRAILFCKQRDLLPQNNAVLVASGGVASNFYIRRALEILTNATQCTLLCPPPRLCTDNGIMIAWNGIERLRAGLGILHDIEGIRYEPKCPLGVDISKEVGEASIKVPQLKMEI

SEQ ID NO: 60360 - protein, 364 aa, Homo sapiens
  Payload ID: 12084
  Gene Symbol: OSGEPL1
  Gene Name: O-sialoglycoprotein endopeptidase-like 1
  Uniprot ID: Q9H4B0
  ENSP ID: ENSP00000428859
MLILTKTAGVFFKPSKRKVYEFLRSFNFHPGTLFLHKIVLGIETSCDDTAAAVVDETGNVLGEAIHSQTEVHLKTGGIVPPAAQQLHRENIQRIVQEALSASGVSPSDLSAIATTIKPGLALSLGVGLSFSLQLVGQLKKPFIPIHHMEAHALTIRLTNKVEFPFLVLLISGGHCLLALVQGVSDFLLLGKSLDIAPGDMLDKVARRLSLIKHPECSTMSGGKAIEHLAKQGNRFHFDIKPPLHHAKNCDFSFTGLQHVTDKIIMKKEKEEGIEKGQILSSAADIAATVQHTMACHLVKRTHRAILFCKQRDLLPQNNAVLVASGGVASNFYIRRALEILTNATQCTLLCPPPRLCTDNGIMIA

SEQ ID NO: 60361 - protein, 203 aa, Homo sapiens
  Payload ID: 12084
  Gene Symbol: OSGEPL1
  Gene Name: O-sialoglycoprotein endopeptidase-like 1
  ENSP ID: ENSP00000429385
MLILTKTAGVFFKPSKRKVYEFLRSFNFHPGTLFLHKIVLGIETSCDDTAAAVVDETGNVLGEAIHSQTEVHLKTGGIVPPAAQQLHRENIQRIVQEALSASGVSPSDLSAIATTIKPGLALSLGVGLSFSLQLVGQLKKPFIPIHHMEAHALTIRLTNKVEFPFLVLLISGGHCLLALVQGVSDFLLLGKSLDIAPGDMLDK

SEQ ID NO: 60362 - protein, 414 aa, Homo sapiens; identical to SEQ ID NO: 60359
  Payload ID: 12084
  Gene Symbol: OSGEPL1
  Gene Name: O-sialoglycoprotein endopeptidase-like 1
  Uniprot ID: Q9H4B0
  ENSP ID: ENSP00000429697

SEQ ID NO: 60363 - protein, 174 aa, Homo sapiens
  Payload ID: 12084
  Gene Symbol: OSGEPL1
  Gene Name: O-sialoglycoprotein endopeptidase-like 1
  ENSP ID: ENSP00000430062
MEAHALTIRLTNKVEFPFLVLLISGGHCLLALVQGVSDFLLLGKSLDIAPGDMLDKVARRLSLIKHPECSTMSGGKAIEHLAKQGNRFHFDIKPPLHHAKNCDFSFTGLQHVTDKIIMKKEKEEGIEKGQILSSAADIAATVQHTMACHLVKRTHRAILFCKQRDLLPQNNAVL

SEQ ID NO: 60364 - protein, 222 aa, Homo sapiens
  Payload ID: 12084
  Gene Symbol: OSGEPL1
  Gene Name: O-sialoglycoprotein endopeptidase-like 1
  ENSP ID: ENSP00000430879
MLILTKTAGVFFKPSKRKVYEFLRSFNFHPGTLFLHKIVLGIETSCDDTAAAVVDETGNVLGEAIHSQTEVHLKTGGIVPPAAQQLHRENIQRIVQEALSASGVSPSDLSAIATTIKPGLALSLGVGLSFSLQLVGQLKKPFIPIHHMEAHALTIRLTNKVEFPFLVLLISGGHCLLALVQGVSDFLLLGKSLDIAPGDMLDKVARRLSLIKHPECSTMSGG

SEQ ID NO: 60365 - protein, 252 aa, Homo sapiens
  Payload ID: 12085
  Gene Symbol: OSCAR
  Gene Name: osteoclast associated, immunoglobulin-like receptor
  ENSP ID: ENSP00000304523
MALVLILQLLTLFPPASYHPKPWLGAQPATVVTPGVNVTLRCRAPQPAWRFGLFKPGEIAPLLFRDVSSELAEFFLEEVTPAQGGSYRCCYRRPDWGPGVWSQPSDVLELLVTEELPRPSLVALPGPVVGPGANVSLRCAGRLRNMSFVLYREGVAAPLQYRHSAQPWADFTLLGARAPGTYSCYYHTPSAPYVLSQRSEVLVISWEDSGSSDYTRGNLVRLGLAGLVLISLGALVTFDWRSQNRAPAGIRP

SEQ ID NO: 60366 - protein, 267 aa, Homo sapiens
  Payload ID: 12085
  Gene Symbol: OSCAR
  Gene Name: osteoclast associated, immunoglobulin-like receptor
  ENSP ID: ENSP00000348927
MALVLILQLLTLWPLCHTDITPSVAIIVPPASYHPKPWLGAQPATVVTPGVNVTLRCRAPQPAWRFGLFKPGEIAPLLFRDVSSELAEFFLEEVTPAQGGSYRCCYRRPDWGPGVWSQPSDVLELLVTEELPRPSLVALPGPVVGPGANVSLRCAGRLRNMSFVLYREGVAAPLQYRHSAQPWADFTLLGARAPGTYSCYYHTPSAPYVLSQRSEVLVISWEDSGSSDYTRGNLVRLGLAGLVLISLGALVTFDWRSQNRAPAGIRP

SEQ ID NO: 60367 - protein, 263 aa, Homo sapiens
  Payload ID: 12085
  Gene Symbol: OSCAR
  Gene Name: osteoclast associated, immunoglobulin-like receptor
  ENSP ID: ENSP00000351145
MALVLILQLLTLWPLCHTDITPSVPPASYHPKPWLGAQPATVVTPGVNVTLRCRAPQPAWRFGLFKPGEIAPLLFRDVSSELAEFFLEEVTPAQGGSYRCCYRRPDWGPGVWSQPSDVLELLVTEELPRPSLVALPGPVVGPGANVSLRCAGRLRNMSFVLYREGVAAPLQYRHSAQPWADFTLLGARAPGTYSCYYHTPSAPYVLSQRSEVLVISWEDSGSSDYTRGNLVRLGLAGLVLISLGALVTFDWRSQNRAPAGIRP

SEQ ID NO: 60368 - protein, 286 aa, Homo sapiens
  Payload ID: 12085
  Gene Symbol: OSCAR
  Gene Name: osteoclast associated, immunoglobulin-like receptor
  ENSP ID: ENSP00000352671
MALVLILQLLTLWPLCHTDITPSVAIIVPPASYHPKPWLGAQPATVVTPGVNVTLRCRAPQPAWRFGLFKPGEIAPLLFRDVSSELAEFFLEEVTPAQGGSYRCCYRRPDWGPGVWSQPSDVLELLVTEELPRPSLVALPGPVVGPGANVSLRCAGRLRNMSFVLYREGVAAPLQYRHSAQPWADFTLLGARAPGTYSCYYHTPSAPYVLSQRSEVLVISWEGEGPEARPASSAPGMQAPGPPPSDPGAQAPSLSSFRPRGLVLQPLLPQTQDSWDPAPPPSDPGV

SEQ ID NO: 60369 - protein, 282 aa, Homo sapiens
  Payload ID: 12085
  Gene Symbol: OSCAR
  Gene Name: osteoclast associated, immunoglobulin-like receptor
  Uniprot ID: Q8IYS5
  ENSP ID: ENSP00000365808
MALVLILQLLTLWPLCHTDITPSVPPASYHPKPWLGAQPATVVTPGVNVTLRCRAPQPAWRFGLFKPGEIAPLLFRDVSSELAEFFLEEVTPAQGGSYRCCYRRPDWGPGVWSQPSDVLELLVTEELPRPSLVALPGPVVGPGANVSLRCAGRLRNMSFVLYREGVAAPLQYRHSAQPWADFTLLGARAPGTYSCYYHTPSAPYVLSQRSEVLVISWEGEGPEARPASSAPGMQAPGPPPSDPGAQAPSLSSFRPRGLVLQPLLPQTQDSWDPAPPPSDPGV

SEQ ID NO: 60370 - protein, 161 aa, Homo sapiens
  Payload ID: 12085
  Gene Symbol: OSCAR
  Gene Name: osteoclast associated, immunoglobulin-like receptor
  ENSP ID: ENSP00000375640
MALVLILQLLTLWPLCHTDITPSAGRILSGGGDSSPRGKLPLLLPKARLGAGCLVPAQRCPGAAGDRGAAAAVAGGAARAGGGSWRQREPALRGPPAEHELRAVPRGRGGPAAVPPLRAALGRLHAAGRPRPRHLQLLLSHALRALRAVAAQRGAGHQLGR

SEQ ID NO: 60371 - protein, 271 aa, Homo sapiens
  Payload ID: 12085
  Gene Symbol: OSCAR
  Gene Name: osteoclast associated, immunoglobulin-like receptor
  Uniprot ID: Q8IYS5
  ENSP ID: ENSP00000375641
MALVLILQLLTLFPPASYHPKPWLGAQPATVVTPGVNVTLRCRAPQPAWRFGLFKPGEIAPLLFRDVSSELAEFFLEEVTPAQGGSYRCCYRRPDWGPGVWSQPSDVLELLVTEELPRPSLVALPGPVVGPGANVSLRCAGRLRNMSFVLYREGVAAPLQYRHSAQPWADFTLLGARAPGTYSCYYHTPSAPYVLSQRSEVLVISWEGEGPEARPASSAPGMQAPGPPPSDPGAQAPSLSSFRPRGLVLQPLLPQTQDSWDPAPPPSDPGV

SEQ ID NO: 60372 - protein, 271 aa, Homo sapiens
  Payload ID: 12085
  Gene Symbol: OSCAR
  Gene Name: osteoclast associated, immunoglobulin-like receptor
  Uniprot ID: Q8IYS5
  ENSP ID: ENSP00000477825
MALVLILQLLTLFPPASYHPKPWLGAQPATVVTPGVNVTLRCRAPQPAWRFGLFKPGEIAPLLFRDVSSELAEFFLEEVTPAQGGIYRCCYRRPDWGPGVWSQPSDVLELLVTEELPRPSLVALPGPVVGPGANVSLRCAGRLRNMSFVLYREGVAAPLQYRHSAQPWADFTLLGARAPGTYSCYYHTPSAPYVLSQRSEVLVISWEGEGPEARPASSAPGMQAPGPPPSDPGAQAPSLSSFRPRGLVLQPLLPQTQDSWDPAPPPSDPGV

SEQ ID NO: 60373 - protein, 286 aa, Homo sapiens
  Payload ID: 12085
  Gene Symbol: OSCAR
  Gene Name: osteoclast associated, immunoglobulin-like receptor
  Uniprot ID: Q8IYS5
  ENSP ID: ENSP00000477845
MALVLILQLLTLWPLCHTDITPSVAIIVPPASYHPKPWLGAQPATVVTPGVNVTLRCRAPQPAWRFGLFKPGEIAPLLFRDVSSELAEFFLEEVTPAQGGIYRCCYRRPDWGPGVWSQPSDVLELLVTEELPRPSLVALPGPVVGPGANVSLRCAGRLRNMSFVLYREGVAAPLQYRHSAQPWADFTLLGARAPGTYSCYYHTPSAPYVLSQRSEVLVISWEGEGPEARPASSAPGMQAPGPPPSDPGAQAPSLSSFRPRGLVLQPLLPQTQDSWDPAPPPSDPGV

SEQ ID NO: 60374 - protein, 267 aa, Homo sapiens
  Payload ID: 12085
  Gene Symbol: OSCAR
  Gene Name: osteoclast associated, immunoglobulin-like receptor
  ENSP ID: ENSP00000477994
MALVLILQLLTLWPLCHTDITPSVAIIVPPASYHPKPWLGAQPATVVTPGVNVTLRCRAPQPAWRFGLFKPGEIAPLLFRDVSSELAEFFLEEVTPAQGGIYRCCYRRPDWGPGVWSQPSDVLELLVTEELPRPSLVALPGPVVGPGANVSLRCAGRLRNMSFVLYREGVAAPLQYRHSAQPWADFTLLGARAPGTYSCYYHTPSAPYVLSQRSEVLVISWEDSGSSDYTRGNLVRLGLAGLVLISLGALVTFDWRSQNRAPAGIRP

SEQ ID NO: 60375 - protein, 267 aa, Homo sapiens; identical to SEQ ID NO: 60374
  Payload ID: 12085
  Gene Symbol: OSCAR
  Gene Name: osteoclast associated, immunoglobulin-like receptor
  ENSP ID: ENSP00000478027

SEQ ID NO: 60376 - protein, 271 aa, Homo sapiens; identical to SEQ ID NO: 60372
  Payload ID: 12085
  Gene Symbol: OSCAR
  Gene Name: osteoclast associated, immunoglobulin-like receptor
  Uniprot ID: Q8IYS5
  ENSP ID: ENSP00000478099

SEQ ID NO: 60377 - protein, 282 aa, Homo sapiens
  Payload ID: 12085
  Gene Symbol: OSCAR
  Gene Name: osteoclast associated, immunoglobulin-like receptor
  Uniprot ID: Q8IYS5
  ENSP ID: ENSP00000478216
MALVLILQLLTLWPLCHTDITPSVPPASYHPKPWLGAQPATVVTPGVNVTLRCRAPQPAWRFGLFKPGEIAPLLFRDVSSELAEFFLEEVTPAQGGIYRCCYRRPDWGPGVWSQPSDVLELLVTEELPRPSLVALPGPVVGPGANVSLRCAGRLRNMSFVLYREGVAAPLQYRHSAQPWADFTLLGARAPGTYSCYYHTPSAPYVLSQRSEVLVISWEGEGPEARPASSAPGMQAPGPPPSDPGAQAPSLSSFRPRGLVLQPLLPQTQDSWDPAPPPSDPGV

SEQ ID NO: 60378 - protein, 286 aa, Homo sapiens; identical to SEQ ID NO: 60373
  Payload ID: 12085
  Gene Symbol: OSCAR
  Gene Name: osteoclast associated, immunoglobulin-like receptor
  ENSP ID: ENSP00000478224

SEQ ID NO: 60379 - protein, 268 aa, Homo sapiens
  Payload ID: 12085
  Gene Symbol: OSCAR
  Gene Name: osteoclast associated, immunoglobulin-like receptor
  ENSP ID: ENSP00000478230
MALVLILQLLTLWPLCHTDITPSAAPFIVPPASYHPKPWLGAQPATVVTPGVNVTLRCRAPQPAWRFGLFKPGEIAPLLFRDVSSELAEFFLEEVTPAQGGIYRCCYRRPDWGPGVWSQPSDVLELLVTEELPRPSLVALPGPVVGPGANVSLRCAGRLRNMSFVLYREGVAAPLQYRHSAQPWADFTLLGARAPGTYSCYYHTPSAPYVLSQRSEVLVISWEDSGSSDYTRGNLVRLGLAGLVLISLGALVTFDWRSQNRAPAGIRP

SEQ ID NO: 60380 - protein, 271 aa, Homo sapiens; identical to SEQ ID NO: 60372
  Payload ID: 12085
  Gene Symbol: OSCAR
  Gene Name: osteoclast associated, immunoglobulin-like receptor
  ENSP ID: ENSP00000478382

SEQ ID NO: 60381 - protein, 286 aa, Homo sapiens; identical to SEQ ID NO: 60373
  Payload ID: 12085
  Gene Symbol: OSCAR
  Gene Name: osteoclast associated, immunoglobulin-like receptor
  ENSP ID: ENSP00000478594

SEQ ID NO: 60382 - protein, 286 aa, Homo sapiens; identical to SEQ ID NO: 60368
  Payload ID: 12085
  Gene Symbol: OSCAR
  Gene Name: osteoclast associated, immunoglobulin-like receptor
  ENSP ID: ENSP00000479089

SEQ ID NO: 60383 - protein, 271 aa, Homo sapiens; identical to SEQ ID NO: 60372
  Payload ID: 12085
  Gene Symbol: OSCAR
  Gene Name: osteoclast associated, immunoglobulin-like receptor
  ENSP ID: ENSP00000479317

SEQ ID NO: 60384 - protein, 268 aa, Homo sapiens; identical to SEQ ID NO: 60379
  Payload ID: 12085
  Gene Symbol: OSCAR
  Gene Name: osteoclast associated, immunoglobulin-like receptor
  ENSP ID: ENSP00000479593

SEQ ID NO: 60385 - protein, 271 aa, Homo sapiens; identical to SEQ ID NO: 60371
  Payload ID: 12085
  Gene Symbol: OSCAR
  Gene Name: osteoclast associated, immunoglobulin-like receptor
  Uniprot ID: Q8IYS5
  ENSP ID: ENSP00000479628

SEQ ID NO: 60386 - protein, 268 aa, Homo sapiens; identical to SEQ ID NO: 60379
  Payload ID: 12085
  Gene Symbol: OSCAR
  Gene Name: osteoclast associated, immunoglobulin-like receptor
  ENSP ID: ENSP00000479650

SEQ ID NO: 60387 - protein, 286 aa, Homo sapiens; identical to SEQ ID NO: 60373
  Payload ID: 12085
  Gene Symbol: OSCAR
  Gene Name: osteoclast associated, immunoglobulin-like receptor
  Uniprot ID: Q8IYS5
  ENSP ID: ENSP00000479849

SEQ ID NO: 60388 - protein, 286 aa, Homo sapiens; identical to SEQ ID NO: 60373
  Payload ID: 12085
  Gene Symbol: OSCAR
  Gene Name: osteoclast associated, immunoglobulin-like receptor
  Uniprot ID: Q8IYS5
  ENSP ID: ENSP00000479954

SEQ ID NO: 60389 - protein, 282 aa, Homo sapiens; identical to SEQ ID NO: 60377
  Payload ID: 12085
  Gene Symbol: OSCAR
  Gene Name: osteoclast associated, immunoglobulin-like receptor
  Uniprot ID: Q8IYS5
  ENSP ID: ENSP00000480193

SEQ ID NO: 60390 - protein, 271 aa, Homo sapiens; identical to SEQ ID NO: 60372
  Payload ID: 12085
  Gene Symbol: OSCAR
  Gene Name: osteoclast associated, immunoglobulin-like receptor
  ENSP ID: ENSP00000480424

SEQ ID NO: 60391 - protein, 282 aa, Homo sapiens; identical to SEQ ID NO: 60377
  Payload ID: 12085
  Gene Symbol: OSCAR
  Gene Name: osteoclast associated, immunoglobulin-like receptor
  ENSP ID: ENSP00000480863

SEQ ID NO: 60392 - protein, 282 aa, Homo sapiens; identical to SEQ ID NO: 60377
  Payload ID: 12085
  Gene Symbol: OSCAR
  Gene Name: osteoclast associated, immunoglobulin-like receptor
  Uniprot ID: Q8IYS5
  ENSP ID: ENSP00000480900

SEQ ID NO: 60393 - protein, 268 aa, Homo sapiens; identical to SEQ ID NO: 60379
  Payload ID: 12085
  Gene Symbol: OSCAR
  Gene Name: osteoclast associated, immunoglobulin-like receptor
  ENSP ID: ENSP00000481050

SEQ ID NO: 60394 - protein, 267 aa, Homo sapiens; identical to SEQ ID NO: 60374
  Payload ID: 12085
  Gene Symbol: OSCAR
  Gene Name: osteoclast associated, immunoglobulin-like receptor
  Uniprot ID: Q8IYS5
  ENSP ID: ENSP00000481147

SEQ ID NO: 60395 - protein, 268 aa, Homo sapiens; identical to SEQ ID NO: 60379
  Payload ID: 12085
  Gene Symbol: OSCAR
  Gene Name: osteoclast associated, immunoglobulin-like receptor
  ENSP ID: ENSP00000481207

SEQ ID NO: 60396 - protein, 282 aa, Homo sapiens; identical to SEQ ID NO: 60377
  Payload ID: 12085
  Gene Symbol: OSCAR
  Gene Name: osteoclast associated, immunoglobulin-like receptor
  ENSP ID: ENSP00000481257

SEQ ID NO: 60397 - protein, 286 aa, Homo sapiens; identical to SEQ ID NO: 60373
  Payload ID: 12085
  Gene Symbol: OSCAR
  Gene Name: osteoclast associated, immunoglobulin-like receptor
  ENSP ID: ENSP00000481261

SEQ ID NO: 60398 - protein, 161 aa, Homo sapiens
  Payload ID: 12085
  Gene Symbol: OSCAR
  Gene Name: osteoclast associated, immunoglobulin-like receptor
  ENSP ID: ENSP00000481561
MALVLILQLLTLWPLCHTDITPSAGRILSGGGDSSPRGNLPLLLPKARLGAGCLVPAQRCPGAAGDRGAAAAVAGGAARAGGGSWRQREPALRGPPAEHELRAVPRGRGGPAAVPPLRAALGRLHAAGRPRPRHLQLLLSHALRALRAVAAQRGAGHQLGR

SEQ ID NO: 60399 - protein, 282 aa, Homo sapiens; identical to SEQ ID NO: 60377
  Payload ID: 12085
  Gene Symbol: OSCAR
  Gene Name: osteoclast associated, immunoglobulin-like receptor
  ENSP ID: ENSP00000481647

SEQ ID NO: 60400 - protein, 282 aa, Homo sapiens; identical to SEQ ID NO: 60377
  Payload ID: 12085
  Gene Symbol: OSCAR
  Gene Name: osteoclast associated, immunoglobulin-like receptor
  ENSP ID: ENSP00000481785

SEQ ID NO: 60401 - protein, 286 aa, Homo sapiens; identical to SEQ ID NO: 60373
  Payload ID: 12085
  Gene Symbol: OSCAR
  Gene Name: osteoclast associated, immunoglobulin-like receptor
  Uniprot ID: Q8IYS5
  ENSP ID: ENSP00000481805

SEQ ID NO: 60402 - protein, 267 aa, Homo sapiens; identical to SEQ ID NO: 60374
  Payload ID: 12085
  Gene Symbol: OSCAR
  Gene Name: osteoclast associated, immunoglobulin-like receptor
  Uniprot ID: Q8IYS5
  ENSP ID: ENSP00000481926

SEQ ID NO: 60403 - protein, 268 aa, Homo sapiens; identical to SEQ ID NO: 60379
  Payload ID: 12085
  Gene Symbol: OSCAR
  Gene Name: osteoclast associated, immunoglobulin-like receptor
  ENSP ID: ENSP00000482136

SEQ ID NO: 60404 - protein, 267 aa, Homo sapiens; identical to SEQ ID NO: 60374
  Payload ID: 12085
  Gene Symbol: OSCAR
  Gene Name: osteoclast associated, immunoglobulin-like receptor
  ENSP ID: ENSP00000482359

SEQ ID NO: 60405 - protein, 271 aa, Homo sapiens; identical to SEQ ID NO: 60372
  Payload ID: 12085
  Gene Symbol: OSCAR
  Gene Name: osteoclast associated, immunoglobulin-like receptor
  Uniprot ID: Q8IYS5
  ENSP ID: ENSP00000482402

SEQ ID NO: 60406 - protein, 282 aa, Homo sapiens; identical to SEQ ID NO: 60377
  Payload ID: 12085
  Gene Symbol: OSCAR
  Gene Name: osteoclast associated, immunoglobulin-like receptor
  ENSP ID: ENSP00000482414

SEQ ID NO: 60407 - protein, 268 aa, Homo sapiens; identical to SEQ ID NO: 60379
  Payload ID: 12085
  Gene Symbol: OSCAR
  Gene Name: osteoclast associated, immunoglobulin-like receptor
  ENSP ID: ENSP00000482428

SEQ ID NO: 60408 - protein, 271 aa, Homo sapiens; identical to SEQ ID NO: 60372
  Payload ID: 12085
  Gene Symbol: OSCAR
  Gene Name: osteoclast associated, immunoglobulin-like receptor
  ENSP ID: ENSP00000482460

SEQ ID NO: 60409 - protein, 267 aa, Homo sapiens; identical to SEQ ID NO: 60374
  Payload ID: 12085
  Gene Symbol: OSCAR
  Gene Name: osteoclast associated, immunoglobulin-like receptor
  ENSP ID: ENSP00000482545

SEQ ID NO: 60410 - protein, 286 aa, Homo sapiens; identical to SEQ ID NO: 60373
  Payload ID: 12085
  Gene Symbol: OSCAR
  Gene Name: osteoclast associated, immunoglobulin-like receptor
  ENSP ID: ENSP00000482610

SEQ ID NO: 60411 - protein, 286 aa, Homo sapiens; identical to SEQ ID NO: 60373
  Payload ID: 12085
  Gene Symbol: OSCAR
  Gene Name: osteoclast associated, immunoglobulin-like receptor
  ENSP ID: ENSP00000482734

SEQ ID NO: 60412 - protein, 267 aa, Homo sapiens; identical to SEQ ID NO: 60374
  Payload ID: 12085
  Gene Symbol: OSCAR
  Gene Name: osteoclast associated, immunoglobulin-like receptor
  Uniprot ID: Q8IYS5
  ENSP ID: ENSP00000482791

SEQ ID NO: 60413 - protein, 268 aa, Homo sapiens; identical to SEQ ID NO: 60379
  Payload ID: 12085
  Gene Symbol: OSCAR
  Gene Name: osteoclast associated, immunoglobulin-like receptor
  ENSP ID: ENSP00000482805

SEQ ID NO: 60414 - protein, 267 aa, Homo sapiens; identical to SEQ ID NO: 60374
  Payload ID: 12085
  Gene Symbol: OSCAR
  Gene Name: osteoclast associated, immunoglobulin-like receptor
  Uniprot ID: Q8IYS5
  ENSP ID: ENSP00000482997

SEQ ID NO: 60415 - protein, 267 aa, Homo sapiens; identical to SEQ ID NO: 60374
  Payload ID: 12085
  Gene Symbol: OSCAR
  Gene Name: osteoclast associated, immunoglobulin-like receptor
  ENSP ID: ENSP00000483090

SEQ ID NO: 60416 - protein, 268 aa, Homo sapiens [sequence omitted]

SEQ ID NO: 60417 - protein, 263 aa, Homo sapiens
  Payload ID: 12085
  Gene Symbol: OSCAR
  Gene Name: osteoclast associated, immunoglobulin-like receptor
  Uniprot ID: Q8IYS5
  ENSP ID: ENSP00000483744
MALVLILQLLTLWPLCHTDITPSVPPASYHPKPWLGAQPATVVTPGVNVTLRCRAPQPAWRFGLFKPGEIAPLLFRDVSSELAEFFLEEVTPAQGGIYRCCYRRPDWGPGVWSQPSDVLELLVTEELPRPSLVALPGPVVGPGANVSLRCAGRLRNMSFVLYREGVAAPLQYRHSAQPWADFTLLGARAPGTYSCYYHTPSAPYVLSQRSEVLVISWEDSGSSDYTRGNLVRLGLAGLVLISLGALVTFDWRSQNRAPAGIRP

SEQ ID NO: 60418 - protein, 271 aa, Homo sapiens; identical to SEQ ID NO: 60372
  Payload ID: 12085
  Gene Symbol: OSCAR
  Gene Name: osteoclast associated, immunoglobulin-like receptor
  Uniprot ID: Q8IYS5
  ENSP ID: ENSP00000484125

SEQ ID NO: 60419 - protein, 282 aa, Homo sapiens; identical to SEQ ID NO: 60377
  Payload ID: 12085
  Gene Symbol: OSCAR
  Gene Name: osteoclast associated, immunoglobulin-like receptor
  ENSP ID: ENSP00000484323

SEQ ID NO: 60420 - protein, 267 aa, Homo sapiens; identical to SEQ ID NO: 60366
  Payload ID: 12085
  Gene Symbol: OSCAR
  Gene Name: osteoclast associated, immunoglobulin-like receptor
  ENSP ID: ENSP00000484401

SEQ ID NO: 60421 - protein, 271 aa, Homo sapiens; identical to SEQ ID NO: 60372
  Payload ID: 12085
  Gene Symbol: OSCAR
  Gene Name: osteoclast associated, immunoglobulin-like receptor
  ENSP ID: ENSP00000484567

SEQ ID NO: 60422 - protein, 267 aa, Homo sapiens; identical to SEQ ID NO: 60374
  Payload ID: 12085
  Gene Symbol: OSCAR
  Gene Name: osteoclast associated, immunoglobulin-like receptor
  ENSP ID: ENSP00000484602

SEQ ID NO: 60423 - protein, 268 aa, Homo sapiens; identical to SEQ ID NO: 60379
  Payload ID: 12085
  Gene Symbol: OSCAR
  Gene Name: osteoclast associated, immunoglobulin-like receptor
  ENSP ID: ENSP00000484695

SEQ ID NO: 60424 - protein, 286 aa, Homo sapiens; identical to SEQ ID NO: 60373
  Payload ID: 12085
  Gene Symbol: OSCAR
  Gene Name: osteoclast associated, immunoglobulin-like receptor
  ENSP ID: ENSP00000484755

SEQ ID NO: 60425 - protein, 271 aa, Homo sapiens; identical to SEQ ID NO: 60372
  Payload ID: 12085
  Gene Symbol: OSCAR
  Gene Name: osteoclast associated, immunoglobulin-like receptor
  ENSP ID: ENSP00000484878

SEQ ID NO: 60426 - protein, 252 aa, Homo sapiens
  Payload ID: 12085
  Gene Symbol: OSCAR
  Gene Name: osteoclast associated, immunoglobulin-like receptor
  Uniprot ID: Q8IYS5
  ENSP ID: ENSP00000484977
MALVLILQLLTLFPPASYHPKPWLGAQPATVVTPGVNVTLRCRAPQPAWRFGLFKPGEIAPLLFRDVSSELAEFFLEEVTPAQGGIYRCCYRRPDWGPGVWSQPSDVLELLVTEELPRPSLVALPGPVVGPGANVSLRCAGRLRNMSFVLYREGVAAPLQYRHSAQPWADFTLLGARAPGTYSCYYHTPSAPYVLSQRSEVLVISWEDSGSSDYTRGNLVRLGLAGLVLISLGALVTFDWRSQNRAPAGIRP

SEQ ID NO: 60427 - protein, 214 aa, Homo sapiens
  Payload ID: 12086
  Gene Symbol: OSTF1
  Gene Name: osteoclast stimulating factor 1
  Uniprot ID: Q92882
  ENSP ID: ENSP00000340836
MSKPPPKPVKPGQVKVFRALYTFEPRTPDELYFEEGDIIYITDMSDTNWWKGTSKGRTGLIPSNYVAEQAESIDNPLHEAAKRGNLSWLRECLDNRVGVNGLDKAGSTALYWACHGGHKDIVEMLFTQPNIELNQQNKLGDTALHAAAWKGYADIVQLLLAKGARTDLRNIEKKLAFDMATNAACASLLKKKQGTDAVRTLSNAEDYLDDEDSD

SEQ ID NO: 60428 - protein, 566 aa, Homo sapiens
  Payload ID: 12087
  Gene Symbol: OCSTAMP
  Gene Name: osteoclast stimulatory transmembrane protein
  Uniprot ID: Q9BR26
  ENSP ID: ENSP00000279028
MPGHPGAAEQLVKTGWRSWHLGFWKALAPLQAAWDAFSQPVPASCGQLLTQLLLCASLAAAAAGLVYHWLASLLLYPPGPSAMVATVCGLLVFLSLGLVPPVRCLFALSVPTLGMEQGRRLLLSYSTATLAIAVVPNVLANVGAAGQVLRCVTEGSLESLLNTTHQLHAASRALGPTGQAGSRGLTFEAQDNGSAFYLHMLRVTQQVLEDFSGLESLARAAALGTQRVVTGLFMLGLLVESAWYLHCYLTDLRFDNIYATQQLTQRLAQAQATHLLAPPPTWLLQAAQLRLSQEELLSCLLRLGLLALLLVATAVAVATDHVAFLLAQATVDWAQKLPTVPITLTVKYDVAYTVLGFIPFLFNQLAPESPFLSVHSSYQWELRLTSARCPLLPARRPRAAAPLAAGALQLLAGSTVLLEAYARRLRHAIAASFFTAQEARRVRHLHARLQRRHDRHQGQQLPLGDPSCVPTPRPACKPPAWIDYRLDALRTESSEGEGKELWSCRDLSCNLGPVPPPCVTLGKSLHLSEPRFLHLHNDSIFTIDVTYFPRRDVVRMEGNTGHDRPG

SEQ ID NO: 60429 - protein, 133 aa, Homo sapiens
  Payload ID: 12088
  Gene Symbol: OSTN
  Gene Name: osteocrin
  Uniprot ID: P61366
  ENSP ID: ENSP00000342356
MLDWRLASAHFILAVTLTLWSSGKVLSVDVTTTEAFDSGVIDVQSTPTVREEKSATDLTAKLLLLDELVSLENDVIETKKKRSFSGFGSPLDRLSAGSVDHKGKQRKVVDHPKRRFGIPMDRIGRNRLSNSRG

SEQ ID NO: 60430 - protein, 111 aa, Homo sapiens
  Payload ID: 12088
  Gene Symbol: OSTN
  Gene Name: osteocrin
  ENSP ID: ENSP00000416576
MLDWRLASAHFILAVTLTLWSSGKVLSVDVTTTEAFDSGVIDVQSTPTVREEKSATDLTAKLLLLDELVSLENDVIETKKKRSFSGFGSPLDRLSAGSVDHKGKQRCNFLG

SEQ ID NO: 60431 - protein, 298 aa, Homo sapiens
  Payload ID: 12089
  Gene Symbol: OGN
  Gene Name: osteoglycin
  Uniprot ID: P20774
  ENSP ID: ENSP00000262551
MKTLQSTLLLLLLVPLIKPAPPTQQDSRIIYDYGTDNFEESIFSQDYEDKYLDGKNIKEKETVIIPNEKSLQLQKDEAITPLPPKKENDEMPTCLLCVCLSGSVYCEEVDIDAVPPLPKESAYLYARFNKIKKLTAKDFADIPNLRRLDFTGNLIEDIEDGTFSKLSLLEELSLAENQLLKLPVLPPKLTLFNAKYNKIKSRGIKANAFKKLNNLTFLYLDHNALESVPLNLPESLRVIHLQFNNIASITDDTFCKANDTSYIRDRIEEIRLEGNPIVLGKHPNSFICLKRLPIGSYF

SEQ ID NO: 60432 - protein, 298 aa, Homo sapiens; identical to SEQ ID NO: 60431
  Payload ID: 12089
  Gene Symbol: OGN
  Gene Name: osteoglycin
  Uniprot ID: P20774
  ENSP ID: ENSP00000364711

SEQ ID NO: 60433 - protein, 268 aa, Homo sapiens
  Payload ID: 12089
  Gene Symbol: OGN
  Gene Name: osteoglycin
  ENSP ID: ENSP00000396709
MLAKISTTWKLFLKLLGPEILLSSLKSRHSFSHSPSHLGLMHRHEHLLRKTTKNFKTATTTLQSTLLLLLLVPLIKPAPPTQQDSRIIYDYGTDNFEESIFSQDYEDKYLDGKNIKEKETVIIPNEKSLQLQKDEAITPLPPKKENDEMPTCLLCVCLSGSVYCEEVDIDAVPPLPKESAYLYARFNKIKKLTAKDFADIPNLRRLDFTGNLIEDIEDGTFSKLSLLEELSLAENQLLKLPVLPPKLTLFNAKYNKIKSRGIKANAFK

SEQ ID NO: 60434 - protein, 421 aa, Homo sapiens
  Payload ID: 12090
  Gene Symbol: OMD
  Gene Name: osteomodulin
  Uniprot ID: Q99983
  ENSP ID: ENSP00000364700
MGFLSPIYVIFFFFGVKVHCQYETYQWDEDYDQEPDDDYQTGFPFRQNVDYGVPFHQYTLGCVSECFCPTNFPSSMYCDNRKLKTIPNIPMHIQQLYLQFNEIEAVTANSFINATHLKEINLSHNKIKSQKIDYGVFAKLPNLLQLHLEHNNLEEFPFPLPKSLERLLLGYNEISKLQTNAMDGLVNLTMLDLCYNYLHDSLLKDKIFAKMEKLMQLNLCSNRLESMPPGLPSSLMYLSLENNSISSIPEKYFDKLPKLHTLRMSHNKLQDIPYNIFNLPNIVELSVGHNKLKQAFYIPRNLEHLYLQNNEIEKMNLTVMCPSIDPLHYHHLTYIRVDQNKLKEPISSYIFFCFPHIHTIYYGEQRSTNGQTIQLKTQVFRRFPDDDDESEDHDDPDNAHESPEQEGAEGHFDLHYYENQE

SEQ ID NO: 60435 - protein, 334 aa, Homo sapiens
  Payload ID: 12091
  Gene Symbol: OSTM1
  Gene Name: osteopetrosis associated transmembrane protein 1
  Uniprot ID: Q86WC4
  ENSP ID: ENSP00000193322
MEPGPTAAQRRCSLPPWLPLGLLLWSGLALGALPFGSSPHRVFHDLLSEQQLLEVEDLSLSLLQGGGLGPLSLPPDLPDLDPECRELLLDFANSSAELTGCLVRSARPVRLCQTCYPLFQQVVSKMDNISRAAGNTSESQSCARSLLMADRMQIVVILSEFFNTTWQEANCANCLTNNSEELSNSTVYFLNLFNHTLTCFEHNLQGNAHSLLQTKNYSEVCKNCREAYKTLSSLYSEMQKMNELENKAEPGTHLCIDVEDAMNITRKLWSRTFNCSVPCSDTVPVIAVSVFILFLPVVFYLSSFLHSEQKKRKLILPKRLKSSTSFANIQENSN

SEQ ID NO: 60436 - protein, 172 aa, Homo sapiens
  Payload ID: 12091
  Gene Symbol: OSTM1
  Gene Name: osteopetrosis associated transmembrane protein 1
  ENSP ID: ENSP00000398556
MADRMQIVVILSEFFNTTWQEANCANCLTNNSEELSNSTVYFLNLFNHTLTCFEHNLQGNAHSLLQTKNYSEVCKNCREAYKTLSSLYSEMQKMNELENKAEPGTHLCIDVEDAMNITRKLWSRTFNCSVPCSDTVPVIAVSVFILFLPVVFYLSSFLHSEQKKRKLILPKR

SEQ ID NO: 60437 - protein, 613 aa, Homo sapiens
  Payload ID: 12092
  Gene Symbol: OS9
  Gene Name: osteosarcoma amplified 9, endoplasmic reticulum lectin
  Uniprot ID: Q13438
  ENSP ID: ENSP00000257966
MAAETLLSSLLGLLLLGLLLPASLTGGVGSLNLEELSEMRYGIEILPLPVMGGQSQSSDVVIVSSKYKQRYECRLPAGAIHFQREREEETPAYQGPGIPELLSPMRDAPCLLKTKDWWTYEFCYGRHIQQYHMEDSEIKGEVLYLGYYQSAFDWDDETAKASKQHRLKRYHSQTYGNGSKCDLNGRPREAEVRFLCDEGAGISGDYIDRVDEPLSCSYVLTIRTPRLCPHPLLRPPPSAAPQAILCHPSLQPEEYMAYVQRQAVDSKQYGDKIIEELQDLGPQVWSETKSGVAPQKMAGASPTKDDSKDSDFWKMLNEPEDQAPGGEEVPAEEQDPSPEAADSASGAPNDFQNNVQVKVIRSPADLIRFIEELKGGTKKGKPNIGQEQPVDDAAEVPQREPEKERGDPERQREMEEEEDEDEDEDEDEDERQLLGEFEKELEGILLPSDRDRLRSEVKAGMERELENIIQETEKELDPDGLKKESERDRAMLALTSTLNKLIKRLEEKQSPELVKKHKKKRVVPKKPPPSPQPTGKIEIKIVRPWAEGTEEGARWLTDEDTRNLKEIFFNILVPGAEEAQKERQRQKELESNYRRVWGSPGGEGTGDLDEFDF

SEQ ID NO: 60438 - protein, 667 aa, Homo sapiens
  Payload ID: 12092
  Gene Symbol: OS9
  Gene Name: osteosarcoma amplified 9, endoplasmic reticulum lectin
  Uniprot ID: Q13438
  ENSP ID: ENSP00000318165
MAAETLLSSLLGLLLLGLLLPASLTGGVGSLNLEELSEMRYGIEILPLPVMGGQSQSSDVVIVSSKYKQRYECRLPAGAIHFQREREEETPAYQGPGIPELLSPMRDAPCLLKTKDWWTYEFCYGRHIQQYHMEDSEIKGEVLYLGYYQSAFDWDDETAKASKQHRLKRYHSQTYGNGSKCDLNGRPREAEVRFLCDEGAGISGDYIDRVDEPLSCSYVLTIRTPRLCPHPLLRPPPSAAPQAILCHPSLQPEEYMAYVQRQADSKQYGDKIIEELQDLGPQVWSETKSGVAPQKMAGASPTKDDSKDSDFWKMLNEPEDQAPGGEEVPAEEQDPSPEAADSASGAPNDFQNNVQVKVIRSPADLIRFIEELKGGTKKGKPNIGQEQPVDDAAEVPQREPEKERGDPERQREMEEEEDEDEDEDEDEDERQLLGEFEKELEGILLPSDRDRLRSEVKAGMERELENIIQETEKELDPDGLKKESERDRAMLALTSTLNKLIKRLEEKQSPELVKKHKKKRVVPKKPPPSPQPTEEDPEHRVRVRVTKLRLGGPNQDLTVLEMKRENPQLKQIEGLVKELLEREGLTAAGKIEIKIVRPWAEGTEEGARWLTDEDTRNLKEIFFNILVPGAEEAQKERQRQKELESNYRRVWGSPGGEGTGDLDEFDF

SEQ ID NO: 60439 - protein, 597 aa, Homo sapiens
  Payload ID: 12092
  Gene Symbol: OS9
  Gene Name: osteosarcoma amplified 9, endoplasmic reticulum lectin
  Uniprot ID: Q13438
  ENSP ID: ENSP00000373794
MAAETLLSSLLGLLLLGLLLPASLTGGVGSLNLEELSEMRYGIEILPLPVMGGQSQSSDVVIVSSKYKQRYECRLPAGAIHFQREREEETPAYQGPGIPELLSPMRDAPCLLKTKDWWTYEFCYGRHIQQYHMEDSEIKGEVLYLGYYQSAFDWDDETAKASKQHRLKRYHSQTYGNGSKCDLNGRPREAEVRFLCDEGAGISGDYIDRVDEPLSCSYVLTIRTPRLCPHPLLRPPPSAAPQAILCHPSLQPEEYMAYVQRQADSKQYGDKIIEELQDLGPQVWSETKSGVAPQKMAGASPTKDDSKDSDFWKMLNEPEDQAPGGEEVPAEEQDPSPEAADSASGAPNDFQNNVQVKVIRSPADLIRFIEELKGGTKKGKPNIGQEQPVDDAAEVPQREPEKERGDPERQREMEEEEDEDEDEDEDEDERQLLGEFEKELEGILLPSDRDRLRSETEKELDPDGLKKESERDRAMLALTSTLNKLIKRLEEKQSPELVKKHKKKRVVPKKPPPSPQPTGKIEIKIVRPWAEGTEEGARWLTDEDTRNLKEIFFNILVPGAEEAQKERQRQKELESNYRRVWGSPGGEGTGDLDEFDF

SEQ ID NO: 60440 - protein, 652 aa, Homo sapiens
  Payload ID: 12092
  Gene Symbol: OS9
  Gene Name: osteosarcoma amplified 9, endoplasmic reticulum lectin
  Uniprot ID: Q13438
  ENSP ID: ENSP00000373798
MAAETLLSSLLGLLLLGLLLPASLTGGVGSLNLEELSEMRYGIEILPLPVMGGQSQSSDVVIVSSKYKQRYECRLPAGAIHFQREREEETPAYQGPGIPELLSPMRDAPCLLKTKDWWTYEFCYGRHIQQYHMEDSEIKGEVLYLGYYQSAFDWDDETAKASKQHRLKRYHSQTYGNGSKCDLNGRPREAEVRFLCDEGAGISGDYIDRVDEPLSCSYVLTIRTPRLCPHPLLRPPPSAAPQAILCHPSLQPEEYMAYVQRQADSKQYGDKIIEELQDLGPQVWSETKSGVAPQKMAGASPTKDDSKDSDFWKMLNEPEDQAPGGEEVPAEEQDPSPEAADSASGAPNDFQNNVQVKVIRSPADLIRFIEELKGGTKKGKPNIGQEQPVDDAAEVPQREPEKERGDPERQREMEEEEDEDEDEDEDEDERQLLGEFEKELEGILLPSDRDRLRSETEKELDPDGLKKESERDRAMLALTSTLNKLIKRLEEKQSPELVKKHKKKRVVPKKPPPSPQPTEEDPEHRVRVRVTKLRLGGPNQDLTVLEMKRENPQLKQIEGLVKELLEREGLTAAGKIEIKIVRPWAEGTEEGARWLTDEDTRNLKEIFFNILVPGAEEAQKERQRQKELESNYRRVWGSPGGEGTGDLDEFDF

SEQ ID NO: 60441 - protein, 560 aa, Homo sapiens
  Payload ID: 12092
  Gene Symbol: OS9
  Gene Name: osteosarcoma amplified 9, endoplasmic reticulum lectin
  Uniprot ID: Q13438
  ENSP ID: ENSP00000389632
MAAETLLSSLLGLLLLGLLLPASLTGGVGSLNLEELSEMRYGIEILPLPVMGGQSQSSDVVIVSSKYKQRYECRLPAGAIHFQREREEETPAYQGPGIPELLSPMRDAPCLLKTKDWWTYEFCYGRHIQQYHMEDSEIKGEFLCDEGAGISGDYIDRVDEPLSCSYVLTIRTPRLCPHPLLRPPPSAAPQAILCHPSLQPEEYMAYVQRQADSKQYGDKIIEELQDLGPQVWSETKSGVAPQKMAGASPTKDDSKDSDFWKMLNEPEDQAPGGEEVPAEEQDPSPEAADSASGAPNDFQNNVQVKVIRSPADLIRFIEELKGGTKKGKPNIGQEQPVDDAAEVPQREPEKERGDPERQREMEEEEDEDEDEDEDEDERQLLGEFEKELEGILLPSDRDRLRSEVKAGMERELENIIQETEKELDPDGLKKESERDRAMLALTSTLNKLIKRLEEKQSPELVKKHKKKRVVPKKPPPSPQPTGKIEIKIVRPWAEGTEEGARWLTDEDTRNLKEIFFNILVPGAEEAQKERQRQKELESNYRRVWGSPGGEGTGDLDEFDF

SEQ ID NO: 60442 - protein, 538 aa, Homo sapiens
  Payload ID: 12092
  Gene Symbol: OS9
  Gene Name: osteosarcoma amplified 9, endoplasmic reticulum lectin
  Uniprot ID: Q13438
  ENSP ID: ENSP00000407360
MAAETLLSSLLGLLLLGLLLPASLTGGVGSLNLEELSEMRYGIEILPLPVMGGQTKDWWTYEFCYGRHIQQYHMEDSEIKGEVLYLGYYQSAFDWDDETAKASKQHRLKRYHSQTYGNGSKCDLNGRPREAEVRFLCDEGAGISGDYIDRVDEPLSCSYVLTIRTPRLCPHPLLRPPPSAAPQAILCHPSLQPEEYMAYVQRQADSKQYGDKIIEELQDLGPQVWSETKSGVAPQKMAGASPTKDDSKDSDFWKMLNEPEDQAPGGEEVPAEEQDPSPEAADSASGAPNDFQNNVQVKVIRSPADLIRFIEELKGGTKKGKPNIGQEQPVDDAAEVPQREPEKERGDPERQREMEEEEDEDEDEDEDEDERQLLGEFEKELEGILLPSDRDRLRSETEKELDPDGLKKESERDRAMLALTSTLNKLIKRLEEKQSPELVKKHKKKRVVPKKPPPSPQPTGKIEIKIVRPWAEGTEEGARWLTDEDTRNLKEIFFNILVPGAEEAQKERQRQKELESNYRRVWGSPGGEGTGDLDEFDF

SEQ ID NO: 60443 - protein, 406 aa, Homo sapiens
  Payload ID: 12092
  Gene Symbol: OS9
  Gene Name: osteosarcoma amplified 9, endoplasmic reticulum lectin
  ENSP ID: ENSP00000413112
MAAETLLSSLLGLLLLGLLLPASLTGGVGSLNLEELSEMRYGIEILPLPVMGGQSQSSDVVIVSSKYKQRYECRLPAGAIHFQREREEETPAYQGPGIPELLSPMRDAPCLLKTKDWWTYEFCYGRHIQQYHMEDSASGAPNDFQNNVQVKVIRSPADLIRFIEELKGGTKKGKPNIGQEQPVDDAAEVPQREPEKERGDPERQREMEEEEDEDEDEDEDEDERQLLGEFEKELEGILLPSDRDRLRSEVKAGMERELENIIQETEKELDPDGLKKESERDRAMLALTSTLNKLIKRLEEKQSPELVKKHKKKRVVPKKPPPSPQPTGKIEIKIVRPWAEGTEEGARWLTDEDTRNLKEIFFNILVPGAEEAQKERQRQKELESNYRRVWGSPGGEGTGDLDEFDF

SEQ ID NO: 60444 - protein, 186 aa, Homo sapiens
  Payload ID: 12092
  Gene Symbol: OS9
  Gene Name: osteosarcoma amplified 9, endoplasmic reticulum lectin
  ENSP ID: ENSP00000447031
MAAETLLSSLLGLLLLGLLLPASLTGGVGSLNLEELSEMRYGIEILPLPVMGGQSQSSDVVIVSSKYKQRYECRLPAGAIHFQREREEETPAYQGPGIPELLSPMRDAPCLLKTKDWWTYEFCYGRHIQQYHMEGILLPSDRDRLRSEVKAGMERELENIIQETEKELDPDGLKKESERDRAMLAL

SEQ ID NO: 60445 - protein, 125 aa, Homo sapiens
  Payload ID: 12092
  Gene Symbol: OS9
  Gene Name: osteosarcoma amplified 9, endoplasmic reticulum lectin
  ENSP ID: ENSP00000447163
MAAETLLSSLLGLLLLGLLLPASLTGGVGSLNLEELSEMRYGIEILPLPVMGGQSQSSDVVIVSSKYKQRYECRLPAGAIHFQREREEETPAYQGPGIPELLSPMRDAPCLLKGGMERPQVENRL

SEQ ID NO: 60446 - protein, 146 aa, Homo sapiens
  Payload ID: 12092
  Gene Symbol: OS9
  Gene Name: osteosarcoma amplified 9, endoplasmic reticulum lectin
  ENSP ID: ENSP00000447451
MAAETLLSSLLGLLLLGLLLPASLTGGVGSLNLEELSEMRYGIEILPLPVMGGQSQSSDVVIVSSKYKQRYECRLPAGAIHFQREREEETPAYQGPGIPELLSPMRDAPCLLKTKDWWTYEFCYGRHIQQYHMEDSEIKGLQAASS

SEQ ID NO: 60447 - protein, 162 aa, Homo sapiens
  Payload ID: 12092
  Gene Symbol: OS9
  Gene Name: osteosarcoma amplified 9, endoplasmic reticulum lectin
  ENSP ID: ENSP00000447719
MAAETLLSSLLGLLLLGLLLPASLTGGVGSLNLEELSEMRYGIEILPLPVMGGQSQSSDVVIVSSKYKQRYECRLPAGAIHFQREREEETPAYQGPGIPELLSPMRDAPCLLKTYGNGSKCDLNGRPREAEVRFLCDEGAGISGDYIDRVDEPLSCSYVLTI

SEQ ID NO: 60448 - protein, 580 aa, Homo sapiens
  Payload ID: 12092
  Gene Symbol: OS9
  Gene Name: osteosarcoma amplified 9, endoplasmic reticulum lectin
  Uniprot ID: Q13438
  ENSP ID: ENSP00000447866
MAAETLLSSLLGLLLLGLLLPASLTGGVGSLNLEELSEMRYGIEILPLPVMGGQSQSSDVVIVSSKYKQRYECRLPAGAIHFQREREEETPAYQGPGIPELLSPMRDAPCLLKTKDWWTYEFCYGRHIQQYHMEDSEIKGEVLYLGYYQSAFDWDDETAKFLCDEGAGISGDYIDRVDEPLSCSYVLTIRTPRLCPHPLLRPPPSAAPQAILCHPSLQPEEYMAYVQRQAVDSKQYGDKIIEELQDLGPQVWSETKSGVAPQKMAGASPTKDDSKDSDFWKMLNEPEDQAPGGEEVPAEEQDPSPEAADSASGAPNDFQNNVQVKVIRSPADLIRFIEELKGGTKKGKPNIGQEQPVDDAAEVPQREPEKERGDPERQREMEEEEDEDEDEDEDEDERQLLGEFEKELEGILLPSDRDRLRSEVKAGMERELENIIQETEKELDPDGLKKESERDRAMLALTSTLNKLIKRLEEKQSPELVKKHKKKRVVPKKPPPSPQPTGKIEIKIVRPWAEGTEEGARWLTDEDTRNLKEIFFNILVPGAEEAQKERQRQKELESNYRRVWGSPGGEGTGDLDEFDF

SEQ ID NO: 60449 - protein, 75 aa, Homo sapiens
  Payload ID: 12092
  Gene Symbol: OS9
  Gene Name: osteosarcoma amplified 9, endoplasmic reticulum lectin
  ENSP ID: ENSP00000448478
MAAETLLSSLLGLLLLGLLLPASLTGGVGSLNLEELSEMRYGIEILPLPVMGGQPFFASLPPDPPFFPRANLRTW

SEQ ID NO: 60450 - protein, 75 aa, Homo sapiens; identical to SEQ ID NO: 60449
  Payload ID: 12092
  Gene Symbol: OS9
  Gene Name: osteosarcoma amplified 9, endoplasmic reticulum lectin
  ENSP ID: ENSP00000449789

SEQ ID NO: 60451 - protein, 612 aa, Homo sapiens
  Payload ID: 12092
  Gene Symbol: OS9
  Gene Name: osteosarcoma amplified 9, endoplasmic reticulum lectin
  Uniprot ID: Q13438
  ENSP ID: ENSP00000450010
MAAETLLSSLLGLLLLGLLLPASLTGGVGSLNLEELSEMRYGIEILPLPVMGGQSQSSDVVIVSSKYKQRYECRLPAGAIHFQREREEETPAYQGPGIPELLSPMRDAPCLLKTKDWWTYEFCYGRHIQQYHMEDSEIKGEVLYLGYYQSAFDWDDETAKASKQHRLKRYHSQTYGNGSKCDLNGRPREAEVRFLCDEGAGISGDYIDRVDEPLSCSYVLTIRTPRLCPHPLLRPPPSAAPQAILCHPSLQPEEYMAYVQRQADSKQYGDKIIEELQDLGPQVWSETKSGVAPQKMAGASPTKDDSKDSDFWKMLNEPEDQAPGGEEVPAEEQDPSPEAADSASGAPNDFQNNVQVKVIRSPADLIRFIEELKGGTKKGKPNIGQEQPVDDAAEVPQREPEKERGDPERQREMEEEEDEDEDEDEDEDERQLLGEFEKELEGILLPSDRDRLRSEVKAGMERELENIIQETEKELDPDGLKKESERDRAMLALTSTLNKLIKRLEEKQSPELVKKHKKKRVVPKKPPPSPQPTGKIEIKIVRPWAEGTEEGARWLTDEDTRNLKEIFFNILVPGAEEAQKERQRQKELESNYRRVWGSPGGEGTGDLDEFDF

SEQ ID NO: 60452 - protein, 1153 aa, Homo sapiens
  Payload ID: 12093
  Gene Symbol: OTOA
  Gene Name: otoancorin
  Uniprot ID: Q7RTW8
  ENSP ID: ENSP00000286149
MSQEPTTYSLFLFLFLSHGVSSYTVPNSRQDLHPLLQNMAEEIIDGSYLNALLDLIQFQSSHVWTDDLSHRVLAYLNSRNVAFTIPSLQAAVENHLEQRLHQPQKLLEDLRKTDAQQFRTAMKCLLEDKKDGLDLKDIIIDLGEIRERALQSPGVNRSLFLITLERCFQMLNSLECVEILGKVLRGSSGSFLQPDITERLPRDLREDAFKNLSAVFKDLYDKTSAHSQRALYSWMTGILQTSSNATDDSASWVSAEHLWVLGRYMVHLSFEEITKISPIEIGLFISYDNATKQLDMVYDITPELAQAFLERISSSNFNMRNTSTIHRQAHELWALEPFPKMLGLLVCFYNDLELLDATVAQVLLYQMIKCSHLRGFQAGVQKLKAELLDIAMENQTLNETLGSLSDAVVGLTYSQLESLSPEAVHGAISTLNQVSGWAKSQVIILSAKYLAHEKVLSFYNVSQMGALLAGVSTQAFCSMKRKDISQVLRSAVSQYVSDLSPAQQQGILSKMVQAEDTAPGIVEIQGAFFKEVSLFDLRRQPGFNSTVLKDKELGRSQALFLYELLLKTTRRPEELLSAGQLVKGVTCSHIDAMSTDFFLAHFQDFQNNFALLSPYQVNCLAWKYWEVSRLSMPPFLLAALPARYLASVPASQCVPFLISLGKSWLDSLVLDSHKKTSVLRKVQQCLDDSIADEYTVDIMGNLLCHLPAAIIDRGISPRAWATALHGLRDCPDLNPEQKAAVRLKLLGQYGLPQHWTAETTKDLGPFLVLFSGDELSSIATKFPEILLQAASKMARTLPTKEFLWAVFQSVRNSSDKIPSYDPMPGCHGVVAPSSDDIFKLAEANACWALEDLRCMEEDTFIRTVELLGAVQGFSRPQLMTLKEKAIQVWDMPSYWREHHIVSLGRIALALNESELEQLDLSSIDTVASLSWQTEWTPGQAESILQGYLDDSGYSIQDLKSFHLVGLGATLCAINITEIPLIKISEFRVVVARIGTLLCSTHVLAEFKRKAEVVFGDPTEWTSSVLQELGTIAAGLTKAELRMLDKDLMPYFQPSAIKCLPDEIFKELSAEQIASLGPENAAAVTHAQRRRLSPLQLQSLQQALDGAKTHSWQDAPASAGPTRTSSSRSPAGALQSWGLWLGCPLLVLMAKLLW

SEQ ID NO: 60453 - protein, 1060 aa, Homo sapiens
  Payload ID: 12093
  Gene Symbol: OTOA
  Gene Name: otoancorin
  Uniprot ID: Q7RTW8
  ENSP ID: ENSP00000373608
MGNSITYRDQAAVENHLEQRLHQPQKLLEDLRKTDAQQFRTAMKCLLEDKKDGLDLKDIIIDLGEIRERALQSPGVNRSLFLITLERCFQMLNSLECVEILGKVLRGSSGSFLQPDITERLPRDLREDAFKNLSAVFKDLYDKTSAHSQRALYSWMTGILQTSSNATDDSASWVSAEHLWVLGRYMVHLSFEEITKISPIEIGLFISYDNATKQLDMVYDITPELAQAFLERISSSNFNMRNTSTIHRLGLLVCFYNDLELLDATVAQVLLYQMIKCSHLRGFQAGVQKLKAELLDIAMENQTLNETLGSLSDAVVGLTYSQLESLSPEAVHGAISTLNQVSGWAKSQVIILSAKYLAHEKVLSFYNVSQMGALLAGVSTQAFCSMKRKDISQVLRSAVSQYVSDLSPAQQQGILSKMVQAEDTAPGIVEIQGAFFKEVSLFDLRRQPGFNSTVLKDKELGRSQALFLYELLLKTTRRPEELLSAGQLVKGVTCSHIDAMSTDFFLAHFQDFQNNFALLSPYQVNCLAWKYWEVSRLSMPPFLLAALPARYLASVPASQCVPFLISLGKSWLDSLVLDSHKKTSVLRKVQQCLDDSIADEYTVDIMGNLLCHLPAAIIDRGISPRAWATALHGLRDCPDLNPEQKAAVRLKLLGQYGLPQHWTAETTKDLGPFLVLFSGDELSSIATKFPEILLQAASKMARTLPTKEFLWAVFQSVRNSSDKIPSYDPMPGCHGVVAPSSDDIFKLAEANACWALEDLRCMEEDTFIRTVELLGAVQGFSRPQLMTLKEKAIQVWDMPSYWREHHIVSLGRIALALNESELEQLDLSSIDTVASLSWQTEWTPGQAESILQGYLDDSGYSIQDLKSFHLVGLGATLCAINITEIPLIKISEFRVVVARIGTLLCSTHVLAEFKRKAEVVFGDPTEWTSSVLQELGTIAAGLTKAELRMLDKDLMPYFQPSAIKCLPDEIFKELSAEQIASLGPENAAAVTHAQRRRLSPLQLQSLQQALDGAKTHSWQDAPASAGPTRTSSSRSPAGALQSWGLWLGCPLLVLMAKLLW

SEQ ID NO: 60454 - protein, 815 aa, Homo sapiens
  Payload ID: 12093
  Gene Symbol: OTOA
  Gene Name: otoancorin
  Uniprot ID: Q7RTW8
  ENSP ID: ENSP00000373609
MFRLGLLVCFYNDLELLDATVAQVLLYQMIKCSHLRGFQAGVQKLKAELLDIAMENQTLNETLGSLSDAVVGLTYSQLESLSPEAVHGAISTLNQVSGWAKSQVIILSAKYLAHEKVLSFYNVSQMGALLAGVSTQAFCSMKRKDISQVLRSAVSQYVSDLSPAQQQGILSKMVQAEDTAPGIVEIQGAFFKEVSLFDLRRQPGFNSTVLKDKELGRSQALFLYELLLKTTRRPEELLSAGQLVKGVTCSHIDAMSTDFFLAHFQDFQNNFALLSPYQVNCLAWKYWEVSRLSMPPFLLAALPARYLASVPASQCVPFLISLGKSWLDSLVLDSHKKTSVLRKVQQCLDDSIADEYTVDIMGNLLCHLPAAIIDRGISPRAWATALHGLRDCPDLNPEQKAAVRLKLLGQYGLPQHWTAETTKDLGPFLVLFSGDELSSIATKFPEILLQAASKMARTLPTKEFLWAVFQSVRNSSDKIPSYDPMPGCHGVVAPSSDDIFKLAEANACWALEDLRCMEEDTFIRTVELLGAVQGFSRPQLMTLKEKAIQVWDMPSYWREHHIVSLGRIALALNESELEQLDLSSIDTVASLSWQTEWTPGQAESILQGYLDDSGYSIQDLKSFHLVGLGATLCAINITEIPLIKISEFRVVVARIGTLLCSTHVLAEFKRKAEVVFGDPTEWTSSVLQELGTIAAGLTKAELRMLDKDLMPYFQPSAIKCLPDEIFKELSAEQIASLGPENAAAVTHAQRRRLSPLQLQSLQQALDGAKTHSWQDAPASAGPTRTSSSRSPAGALQSWGLWLGCPLLVLMAKLLW

SEQ ID NO: 60455 - protein, 1139 aa, Homo sapiens
  Payload ID: 12093
  Gene Symbol: OTOA
  Gene Name: otoancorin
  Uniprot ID: Q7RTW8
  ENSP ID: ENSP00000373610
MSQEPTTYSLFLFLFLSHGVSSYTVPNSRQDLHPLLQNMAEEIIDGSYLNALLDLIQFQSSHVWTDDLSHRVLAYLNSRNVAFTIPSLQAAVENHLEQRLHQPQKLLEDLRKTDAQQFRTAMKCLLEDKKDGLDLKDIIIDLGEIRERALQSPGVNRSLFLITLERCFQMLNSLECVEILGKVLRGSSGSFLQPDITERLPRDLREDAFKNLSAVFKDLYDKTSAHSQRALYSWMTGILQTSSNATDDSASWVSAEHLWVLGRYMVHLSFEEITKISPIEIGLFISYDNATKQLDMVYDITPELAQAFLERISSSNFNMRNTSTIHRLGLLVCFYNDLELLDATVAQVLLYQMIKCSHLRGFQAGVQKLKAELLDIAMENQTLNETLGSLSDAVVGLTYSQLESLSPEAVHGAISTLNQVSGWAKSQVIILSAKYLAHEKVLSFYNVSQMGALLAGVSTQAFCSMKRKDISQVLRSAVSQYVSDLSPAQQQGILSKMVQAEDTAPGIVEIQGAFFKEVSLFDLRRQPGFNSTVLKDKELGRSQALFLYELLLKTTRRPEELLSAGQLVKGVTCSHIDAMSTDFFLAHFQDFQNNFALLSPYQVNCLAWKYWEVSRLSMPPFLLAALPARYLASVPASQCVPFLISLGKSWLDSLVLDSHKKTSVLRKVQQCLDDSIADEYTVDIMGNLLCHLPAAIIDRGISPRAWATALHGLRDCPDLNPEQKAAVRLKLLGQYGLPQHWTAETTKDLGPFLVLFSGDELSSIATKFPEILLQAASKMARTLPTKEFLWAVFQSVRNSSDKIPSYDPMPGCHGVVAPSSDDIFKLAEANACWALEDLRCMEEDTFIRTVELLGAVQGFSRPQLMTLKEKAIQVWDMPSYWREHHIVSLGRIALALNESELEQLDLSSIDTVASLSWQTEWTPGQAESILQGYLDDSGYSIQDLKSFHLVGLGATLCAINITEIPLIKISEFRVVVARIGTLLCSTHVLAEFKRKAEVVFGDPTEWTSSVLQELGTIAAGLTKAELRMLDKDLMPYFQPSAIKCLPDEIFKELSAEQIASLGPENAAAVTHAQRRRLSPLQLQSLQQALDGAKTHSWQDAPASAGPTRTSSSRSPAGALQSWGLWLGCPLLVLMAKLLW

SEQ ID NO: 60456 - protein, 477 aa, Homo sapiens
  Payload ID: 12094
  Gene Symbol: OC90
  Gene Name: otoconin 90
  Uniprot ID: Q02509
  ENSP ID: ENSP00000254627
MIAFLLTSVLMIPHAGGHPLDTPHLPQELPPGLPNNINITFFSGMFKNVESVAEIFDCLGPHFTWLQAVFTNFPVLIQFVNGMKCVAGLCPRDFEDYGCTCRFEMEGLPVDESDSCCFQHRRCYEEAAEMDCLQDPAKLSTEVNCVSKKIICESKDNCEHLLCTCDKAAIECLARSSLNSSLNLLDTSFCLAQTPETTIKEDLTTLLPRVVPVEPTDTSLTALSGEEAGHDQEGVGAARATSPPGSAEIVATRVTAKIVTLVPAGIKSLGLAVSSVENDPEETTEKACDRFTFLHLGSGDNMQVMPQLGEMLFCLTSRCPEEFESYGCYCGQEGRGEPRDDLDRCCLSHHCCLEQVRRLGCLLERLPWSPVVCVDHTPKCGGQSLCEKLLCACDQTAAECMTSASFNQSLKSPSRLGCPGQPAACEDSLHPVPAAPTLGSSSEEDSEEDPPQEDLGRAKRFLRKSLGPLGIGPLHGR

SEQ ID NO: 60457 - protein, 1997 aa, Homo sapiens
  Payload ID: 12095
  Gene Symbol: OTOF
  Gene Name: otoferlin
  Uniprot ID: Q9HC10
  ENSP ID: ENSP00000272371
MALLIHLKTVSELRGRGDRIAKVTFRGQSFYSRVLENCEDVADFDETFRWPVASSIDRNEMLEIQVFNYSKVFSNKLIGTFRMVLQKVVEESHVEVTDTLIDDNNAIIKTSLCVEVRYQATDGTVGSWDDGDFLGDESLQEEEKDSQETDGLLPGSRPSSRPPGEKSFRRAGRSVFSAMKLGKNRSHKEEPQRPDEPAVLEMEDLDHLAIRLGDGLDPDSVSLASVTALTTNVSNKRSKPDIKMEPSAGRPMDYQVSITVIEARQLVGLNMDPVVCVEVGDDKKYTSMKESTNCPYYNEYFVFDFHVSPDVMFDKIIKISVIHSKNLLRSGTLVGSFKMDVGTVYSQPEHQFHHKWAILSDPDDISSGLKGYVKCDVAVVGKGDNIKTPHKANETDEDDIEGNLLLPEGVPPERQWARFYVKIYRAEGLPRMNTSLMANVKKAFIGENKDLVDPYVQVFFAGQKGKTSVQKSSYEPLWNEQVVFTDLFPPLCKRMKVQIRDSDKVNDVAIGTHFIDLRKISNDGDKGFLPTLGPAWVNMYGSTRNYTLLDEHQDLNEGLGEGVSFRARLLLGLAVEIVDTSNPELTSSTEVQVEQATPISESCAGKMEEFFLFGAFLEASMIDRRNGDKPITFEVTIGNYGNEVDGLSRPQRPRPRKEPGDEEEVDLIQNASDDEAGDAGDLASVSSTPPMRPQVTDRNYFHLPYLERKPCIYIKSWWPDQRRRLYNANIMDHIADKLEEGLNDIQEMIKTEKSYPERRLRGVLEELSCGCCRFLSLADKDQGHSSRTRLDRERLKSCMRELENMGQQARMLRAQVKRHTVRDKLRLCQNFLQKLRFLADEPQHSIPDIFIWMMSNNKRVAYARVPSKDLLFSIVEEETGKDCAKVKTLFLKLPGKRGFGSAGWTVQAKVELYLWLGLSKQRKEFLCGLPCGFQEVKAAQGLGLHAFPPVSLVYTKKQAFQLRAHMYQARSLFAADSSGLSDPFARVFFINQSQCTEVLNETLCPTWDQMLVFDNLELYGEAHELRDDPPIIVIEIYDQDSMGKADFMGRTFAKPLVKMADEAYCPPRFPPQLEYYQIYRGNATAGDLLAAFELLQIGPAGKADLPPINGPVDVDRGPIMPVPMGIRPVLSKYRVEVLFWGLRDLKRVNLAQVDRPRVDIECAGKGVQSSLIHNYKKNPNFNTLVKWFEVDLPENELLHPPLNIRVVDCRAFGRYTLVGSHAVSSLRRFIYRPPDRSAPSWNTTVRLLRRCRVLCNGGSSSHSTGEVVVTMEPEVPIKKLETMVKLDATSEAVVKVDVAEEEKEKKKKKKGTAEEPEEEEPDESMLDWWSKYFASIDTMKEQLRQQEPSGIDLEEKEEVDNTEGLKGSMKGKEKARAAKEEKKKKTQSSGSGQGSEAPEKKKPKIDELKVYPKELESEFDNFEDWLHTFNLLRGKTGDDEDGSTEEERIVGRFKGSLCVYKVPLPEDVSREAGYDSTYGMFQGIPSNDPINVLVRVYVVRATDLHPADINGKADPYIAIRLGKTDIRDKENYISKQLNPVFGKSFDIEASFPMESMLTVAVYDWDLVGTDDLIGETKIDLENRFYSKHRATCGIAQTYSTHGYNIWRDPMKPSQILTRLCKDGKVDGPHFGPPGRVKVANRVFTGPSEIEDENGQRKPTDEHVALLALRHWEDIPRAGCRLVPEHVETRPLLNPDKPGIEQGRLELWVDMFPMDMPAPGTPLDISPRKPKKYELRVIIWNTDEVVLEDDDFFTGEKSSDIFVRGWLKGQQEDKQDTDVHYHSLTGEGNFNWRYLFPFDYLAAEEKIVISKKESMFSWDETEYKIPARLTLQIWDADHFSADDFLGAIELDLNRFPRGAKTAKQCTMEMATGEVDVPLVSIFKQKRVKGWWPLLARNENDEFELTGKVEAELHLLTAEEAEKNPVGLARNEPDPLEKPNRPDTSFIWFLNPLKSARYFLWHTYRWLLLKLLLLLLLLLLLALFLYSVPGYLVKKILGA

SEQ ID NO: 60458 - protein, 1230 aa, Homo sapiens
  Payload ID: 12095
  Gene Symbol: OTOF
  Gene Name: otoferlin
  Uniprot ID: Q9HC10
  ENSP ID: ENSP00000344521
MIKTEKSYPERRLRGVLEELSCGCCRFLSLADKDQGHSSRTRLDRERLKSCMRELENMGQQARMLRAQVKRHTVRDKLRLCQNFLQKLRFLADEPQHSIPDIFIWMMSNNKRVAYARVPSKDLLFSIVEEETGKDCAKVKTLFLKLPGKRGFGSAGWTVQAKVELYLWLGLSKQRKEFLCGLPCGFQEVKAAQGLGLHAFPPVSLVYTKKQAFQLRAHMYQARSLFAADSSGLSDPFARVFFINQSQCTEVLNETLCPTWDQMLVFDNLELYGEAHELRDDPPIIVIEIYDQDSMGKADFMGRTFAKPLVKMADEAYCPPRFPPQLEYYQIYRGNATAGDLLAAFELLQIGPAGKADLPPINGPVDVDRGPIMPVPMGIRPVLSKYRVEVLFWGLRDLKRVNLAQVDRPRVDIECAGKGVQSSLIHNYKKNPNFNTLVKWFEVDLPENELLHPPLNIRVVDCRAFGRYTLVGSHAVSSLRRFIYRPPDRSAPSWNTTGEVVVTMEPEVPIKKLETMVKLDATSEAVVKVDVAEEEKEKKKKKKGTAEEPEEEEPDESMLDWWSKYFASIDTMKEQLRQQEPSGIDLEEKEEVDNTEGLKGSMKGKEKARAAKEEKKKKTQSSGSGQGSEAPEKKKPKIDELKVYPKELESEFDNFEDWLHTFNLLRGKTGDDEDGSTEEERIVGRFKGSLCVYKVPLPEDVSREAGYDSTYGMFQGIPSNDPINVLVRVYVVRATDLHPADINGKADPYIAIRLGKTDIRDKENYISKQLNPVFGKSFDIEASFPMESMLTVAVYDWDLVGTDDLIGETKIDLENRFYSKHRATCGIAQTYSTHGYNIWRDPMKPSQILTRLCKDGKVDGPHFGPPGRVKVANRVFTGPSEIEDENGQRKPTDEHVALLALRHWEDIPRAGCRLVPEHVETRPLLNPDKPGIEQGRLELWVDMFPMDMPAPGTPLDISPRKPKKYELRVIIWNTDEVVLEDDDFFTGEKSSDIFVRGWLKGQQEDKQDTDVHYHSLTGEGNFNWRYLFPFDYLAAEEKIVISKKESMFSWDETEYKIPARLTLQIWDADHFSADDFLGAIELDLNRFPRGAKTAKQCTMEMATGEVDVPLVSIFKQKRVKGWWPLLARNENDEFELTGKVEAELHLLTAEEAEKNPVGLARNEPDPLEKPNRPDTAFVWFLNPLKSIKYLICTRYKWLIIKIVLALLGLLMLGLFLYSLPGYMVKKLLGA

SEQ ID NO: 60459 - protein, 1230 aa, Homo sapiens
  Payload ID: 12095
  Gene Symbol: OTOF
  Gene Name: otoferlin
  Uniprot ID: Q9HC10
  ENSP ID: ENSP00000345137
MIKTEKSYPERRLRGVLEELSCGCCRFLSLADKDQGHSSRTRLDRERLKSCMRELENMGQQARMLRAQVKRHTVRDKLRLCQNFLQKLRFLADEPQHSIPDIFIWMMSNNKRVAYARVPSKDLLFSIVEEETGKDCAKVKTLFLKLPGKRGFGSAGWTVQAKVELYLWLGLSKQRKEFLCGLPCGFQEVKAAQGLGLHAFPPVSLVYTKKQAFQLRAHMYQARSLFAADSSGLSDPFARVFFINQSQCTEVLNETLCPTWDQMLVFDNLELYGEAHELRDDPPIIVIEIYDQDSMGKADFMGRTFAKPLVKMADEAYCPPRFPPQLEYYQIYRGNATAGDLLAAFELLQIGPAGKADLPPINGPVDVDRGPIMPVPMGIRPVLSKYRVEVLFWGLRDLKRVNLAQVDRPRVDIECAGKGVQSSLIHNYKKNPNFNTLVKWFEVDLPENELLHPPLNIRVVDCRAFGRYTLVGSHAVSSLRRFIYRPPDRSAPSWNTTGEVVVTMEPEVPIKKLETMVKLDATSEAVVKVDVAEEEKEKKKKKKGTAEEPEEEEPDESMLDWWSKYFASIDTMKEQLRQQEPSGIDLEEKEEVDNTEGLKGSMKGKEKARAAKEEKKKKTQSSGSGQGSEAPEKKKPKIDELKVYPKELESEFDNFEDWLHTFNLLRGKTGDDEDGSTEEERIVGRFKGSLCVYKVPLPEDVSREAGYDSTYGMFQGIPSNDPINVLVRVYVVRATDLHPADINGKADPYIAIRLGKTDIRDKENYISKQLNPVFGKSFDIEASFPMESMLTVAVYDWDLVGTDDLIGETKIDLENRFYSKHRATCGIAQTYSTHGYNIWRDPMKPSQILTRLCKDGKVDGPHFGPPGRVKVANRVFTGPSEIEDENGQRKPTDEHVALLALRHWEDIPRAGCRLVPEHVETRPLLNPDKPGIEQGRLELWVDMFPMDMPAPGTPLDISPRKPKKYELRVIIWNTDEVVLEDDDFFTGEKSSDIFVRGWLKGQQEDKQDTDVHYHSLTGEGNFNWRYLFPFDYLAAEEKIVISKKESMFSWDETEYKIPARLTLQIWDADHFSADDFLGAIELDLNRFPRGAKTAKQCTMEMATGEVDVPLVSIFKQKRVKGWWPLLARNENDEFELTGKVEAELHLLTAEEAEKNPVGLARNEPDPLEKPNRPDTSFIWFLNPLKSARYFLWHTYRWLLLKLLLLLLLLLLLALFLYSVPGYLVKKILGA

SEQ ID NO: 60460 - protein, 1307 aa, Homo sapiens
  Payload ID: 12095
  Gene Symbol: OTOF
  Gene Name: otoferlin
  Uniprot ID: Q9HC10
  ENSP ID: ENSP00000383906
MMTDTQDGPSESSQIMRSLTPLINREEAFGEAGEAGLWPSITHTPDSQEEGLNDIQEMIKTEKSYPERRLRGVLEELSCGCCRFLSLADKDQGHSSRTRLDRERLKSCMRELENMGQQARMLRAQVKRHTVRDKLRLCQNFLQKLRFLADEPQHSIPDIFIWMMSNNKRVAYARVPSKDLLFSIVEEETGKDCAKVKTLFLKLPGKRGFGSAGWTVQAKVELYLWLGLSKQRKEFLCGLPCGFQEVKAAQGLGLHAFPPVSLVYTKKQAFQLRAHMYQARSLFAADSSGLSDPFARVFFINQSQCTEVLNETLCPTWDQMLVFDNLELYGEAHELRDDPPIIVIEIYDQDSMGKADFMGRTFAKPLVKMADEAYCPPRFPPQLEYYQIYRGNATAGDLLAAFELLQIGPAGKADLPPINGPVDVDRGPIMPVPMGIRPVLSKYRVEVLFWGLRDLKRVNLAQVDRPRVDIECAGKGVQSSLIHNYKKNPNFNTLVKWFEVDLPENELLHPPLNIRVVDCRAFGRYTLVGSHAVSSLRRFIYRPPDRSAPSWNTTVRLLRRCRVLCNGGSSSHSTGEVVVTMEPEVPIKKLETMVKLDATSEAVVKVDVAEEEKEKKKKKKGTAEEPEEEEPDESMLDWWSKYFASIDTMKEQLRQQEPSGIDLEEKEEVDNTEGLKGSMKGKEKARAAKEEKKKKTQSSGSGQGSEAPEKKKPKIDELKVYPKELESEFDNFEDWLHTFNLLRGKTGDDEDGSTEEERIVGRFKGSLCVYKVPLPEDVSREAGYDSTYGMFQGIPSNDPINVLVRVYVVRATDLHPADINGKADPYIAIRLGKTDIRDKENYISKQLNPVFGKSFDIEASFPMESMLTVAVYDWDLVGTDDLIGETKIDLENRFYSKHRATCGIAQTYSTHGYNIWRDPMKPSQILTRLCKDGKVDGPHFGPPGRVKVANRVFTGPSEIEDENGQRKPTDEHVALLALRHWEDIPRAGCRLVPEHVETRPLLNPDKPGIEQGRLELWVDMFPMDMPAPGTPLDISPRKPKKYELRVIIWNTDEVVLEDDDFFTGEKSSDIFVRGWLKGQQEDKQDTDVHYHSLTGEGNFNWRYLFPFDYLAAEEKIVISKKESMFSWDETEYKIPARLTLQIWDADHFSADDFLGAIELDLNRFPRGAKTAKQCTMEMATGEVDVPLVSIFKQKRVKGWWPLLARNENDEFELTGKVEAELHLLTAEEAEKNPVGLARNEPDPLEKPNRPDTSFIWFLNPLKSARYFLWHTYRWLLLKLLLLLLLLLLLALFLYSVPGYLVKKILGA

SEQ ID NO: 60461 - protein, 1997 aa, Homo sapiens
  Payload ID: 12095
  Gene Symbol: OTOF
  Gene Name: otoferlin
  Uniprot ID: Q9HC10
  ENSP ID: ENSP00000385255
MALLIHLKTVSELRGRGDRIAKVTFRGQSFYSRVLENCEDVADFDETFRWPVASSIDRNEMLEIQVFNYSKVFSNKLIGTFRMVLQKVVEESHVEVTDTLIDDNNAIIKTSLCVEVRYQATDGTVGSWDDGDFLGDESLQEEEKDSQETDGLLPGSRPSSRPPGEKSFRRAGRSVFSAMKLGKNRSHKEEPQRPDEPAVLEMEDLDHLAIRLGDGLDPDSVSLASVTALTTNVSNKRSKPDIKMEPSAGRPMDYQVSITVIEARQLVGLNMDPVVCVEVGDDKKYTSMKESTNCPYYNEYFVFDFHVSPDVMFDKIIKISVIHSKNLLRSGTLVGSFKMDVGTVYSQPEHQFHHKWAILSDPDDISSGLKGYVKCDVAVVGKGDNIKTPHKANETDEDDIEGNLLLPEGVPPERQWARFYVKIYRAEGLPRMNTSLMANVKKAFIGENKDLVDPYVQVFFAGQKGKTSVQKSSYEPLWNEQVVFTDLFPPLCKRMKVQIRDSDKVNDVAIGTHFIDLRKISNDGDKGFLPTLGPAWVNMYGSTRNYTLLDEHQDLNEGLGEGVSFRARLLLGLAVEIVDTSNPELTSSTEVQVEQATPISESCAGKMEEFFLFGAFLEASMIDRRNGDKPITFEVTIGNYGNEVDGLSRPQRPRPRKEPGDEEEVDLIQNASDDEAGDAGDLASVSSTPPMRPQVTDRNYFHLPYLERKPCIYIKSWWPDQRRRLYNANIMDHIADKLEEGLNDIQEMIKTEKSYPERRLRGVLEELSCGCCRFLSLADKDQGHSSRTRLDRERLKSCMRELENMGQQARMLRAQVKRHTVRDKLRLCQNFLQKLRFLADEPQHSIPDIFIWMMSNNKRVAYARVPSKDLLFSIVEEETGKDCAKVKTLFLKLPGKRGFGSAGWTVQAKVELYLWLGLSKQRKEFLCGLPCGFQEVKAAQGLGLHAFPPVSLVYTKKQAFQLRAHMYQARSLFAADSSGLSDPFARVFFINQSQCTEVLNETLCPTWDQMLVFDNLELYGEAHELRDDPPIIVIEIYDQDSMGKADFMGRTFAKPLVKMADEAYCPPRFPPQLEYYQIYRGNATAGDLLAAFELLQIGPAGKADLPPINGPVDVDRGPIMPVPMGIRPVLSKYRVEVLFWGLRDLKRVNLAQVDRPRVDIECAGKGVQSSLIHNYKKNPNFNTLVKWFEVDLPENELLHPPLNIRVVDCRAFGRYTLVGSHAVSSLRRFIYRPPDRSAPSWNTTVRLLRRCRVLCNGGSSSHSTGEVVVTMEPEVPIKKLETMVKLDATSEAVVKVDVAEEEKEKKKKKKGTAEEPEEEEPDESMLDWWSKYFASIDTMKEQLRQQEPSGIDLEEKEEVDNTEGLKGSMKGKEKARAAKEEKKKKTQSSGSGQGSEAPEKKKPKIDELKVYPKELESEFDNFEDWLHTFNLLRGKTGDDEDGSTEEERIVGRFKGSLCVYKVPLPEDVSREAGYDSTYGMFQGIPSNDPINVLVRVYVVRATDLHPADINGKADPYIAIRLGKTDIRDKENYISKQLNPVFGKSFDIEASFPMESMLTVAVYDWDLVGTDDLIGETKIDLENRFYSKHRATCGIAQTYSTHGYNIWRDPMKPSQILTRLCKDGKVDGPHFGPPGRVKVANRVFTGPSEIEDENGQRKPTDEHVALLALRHWEDIPRAGCRLVPEHVETRPLLNPDKPGIEQGRLELWVDMFPMDMPAPGTPLDISPRKPKKYELRVIIWNTDEVVLEDDDFFTGEKSSDIFVRGWLKGQQEDKQDTDVHYHSLTGEGNFNWRYLFPFDYLAAEEKIVISKKESMFSWDETEYKIPARLTLQIWDADHFSADDFLGAIELDLNRFPRGAKTAKQCTMEMATGEVDVPLVSIFKQKRVKGWWPLLARNENDEFELTGKVEAELHLLTAEEAEKNPVGLARNEPDPLEKPNRPDTAFVWFLNPLKSIKYLICTRYKWLIIKIVLALLGLLMLGLFLYSLPGYMVKKLLGA

SEQ ID NO: 60462 - protein, 141 aa, Homo sapiens
  Payload ID: 12095
  Gene Symbol: OTOF
  Gene Name: otoferlin
  ENSP ID: ENSP00000389917
  MOD_RES (1)..(1): Any amino acid
XKRVNLAQVDRPRVDIECAGKGVQSSLIHNYKKNPNFNTLVKWFEVDLPENELLHPPLNIRVVDCRAFGRYTLVGSHAVSSLRRFIYRPPDRSAPSWNTTGEVVVTMEPEVPIKKLETMVKLDAVRRVGSAPCWLGTCNFV

SEQ ID NO: 60463 - protein, 1508 aa, Homo sapiens
  Payload ID: 12096
  Gene Symbol: OTOG
  Gene Name: otogelin
  Uniprot ID: Q6ZRI0
  ENSP ID: ENSP00000341666
MFPARGVPLHLEGEGVFPWGPGDVSLPYLSTSDVSFSVIVENVNCYSSGMICRKFISINVGNSLIVFDDDSGNPSPESFLDDKQEVHTWRVGFFTLVHFPQEHITLLWDQRTTVHVQAGPQWQGQLAGLCGNFDLKTINEMRTPENLELTNPQEFGSSWAAVECPDTLDPRDMCVLNPLREPFAKKECSILLSEVFEICHPVVDVTWFYSNCLTDTCGCSQGGDCECFCASVSAYAHQCCQHGVAVDWRTPRLCLLGKGPYQLSSLAAGGALVGMKAVGDDIVLVRTEDVAPADIVSFLLTAALYKAKAHDPDVVSLEAADRPNFFLHVTANGSLELAKWQGRDTFQQHASFLLHRGTRQAGLVALESLAKPSSFLYVSGAVLALRLYEHTEVFRRGTLFRLLDAKPSGAAYPICEWRYDACASPCFQTCRDPRAASCRDVPRVEGCVPVCPTPQVLDEVTQRCVYLEDCVEPAVWVPTEALGNETLPPSQGLPTPSDEEPQLSQESPRTPTHRPALTPAAPLTTALNPPVTATEEPVVSPGPTQTTLQQPLELTASQLPAGPTESPASKGVTASLLAIPHTPESSSLPVALQTPTPGMVSGAMETTRVTVIFAGSPNITVSSRSPPAPRFPLMTKAVTVRGHGSLPVRTTPPQPSLTASPSSRPVASPGAISRSPTSSGSHKAVLTPAVTKVISRTGVPQPTQAQSASSPSTPLTVAGTAAEQVPVSPLATRSLEIVLSTEKGEAGHSQPMGSPASPQPHPLPSAPPRPAQHTTMATRSPALPPETPAAASLSTATDGLAATPFMSLESTRPSQLLSGLPPDTSLPLAKVGTSAPVATPGPKASVITTPLQPQATTLPAQTLSPVLPFTPAAMTQAHPPTHIAPPAAGTAPGLLLGATLPTSGVLPVAEGTASMVSVVPRKSTTGKVAILSKQVSLPTSMYGSAEGGPTELTPATSHPLTPLVAEPEGAQAGTALPVPTSYALSRVSARTAPQDSMLVLLPQLAEAHGTSAGPHLAAEPVDEATTEPSGRSAPALSIVEGLAEALATTTEANTSTTCVPIAEQDCVRHICLEGQLIRVNQSQHCPQGAAPPRCGILGLAVRVGGDRCCPLWECACRCSIFPDLSFVTFDGSHVALFKEAIYILSQSPDEMLTVHVLDCKSANLGHLNWPPFCLVMLNMTHLAHQVTIDRFNRKVTVDLQPVWPPVSRYGFRIEDTGHMYMILTPSDIQIQWLHSSGLMIVEASKTSKAQGHGLCGICDGDAANDLTLKDGSVVGGAEDPAPFLDSWQVPSSLTSVGQTRFRPDSCATTDCSPCLRMVSNRTFSACHRFVPPESFCELWIRDTKYVQQPCVALTVYVAMCHKFHVCIEWRRSDYCPFLCSSDSTYQACVTACEPPKTCQDGILGPLDPEHCQVLGEGCVCSEGTILHRRHSALCIPEAKCACGDCPDSIPECQEGEALTVHRNTTELCCPLYQCVCENFRCPQVQCGLGTALVEVWSPDRCCPYKSCG

SEQ ID NO: 60464 - protein, 2925 aa, Homo sapiens
  Payload ID: 12096
  Gene Symbol: OTOG
  Gene Name: otogelin
  Uniprot ID: Q6ZRI0
  ENSP ID: ENSP00000382323
MGVLASALCWLLCVWLPWGEQAAESLRVQRLGERVVDSGRSGARGMRNVKGMRNGPAQTRVSSSSSHQEATLAMGDKATVVGGQQAEAPDSVAMSSWERRLHRAKCAPSYLFSCFNGGECVHPAFCDCRRFNATGPRCQMVYNAGPERDSICRAWGQHHVETFDGLYYYLSGKGSYTLVGRHEPEGQSFSIQVHNDPQCGSSPYTCSRAVSLFFVGEQEIHLAKEVTHGGMRVQLPHVMGSARLQQLAGYVIVRHQSAFTLAWDGASAVYIKMSPELLGWTHGLCGNNNADPKDDLVTSSGKLTDDVVEFVHSWQEQAPNQPPGPTTSSLPRPPCLQQNPGTMQGVYEQCEALLRPPFDACHAYVSPLPFTASCTSDLCQSMGDVATWCRALAEYARACAQAGRPLQGWRTQLRQCTVHCKEKAFTYNECIACCPASCHPRASCVDSEIACVDGCYCPNGLIFEDGGCVAPAECPCEFHGTLYPPGSVVKEDCNTCTCTSGKWECSTAVCPAECSVTGDIHFTTFDGRRYTFPATCQYILAKSRSSGTFTVTLQNAPCGLNQDGACVQSVSVILHQDPRRQVTLTQAGDVLLFDQYKIIPPYTDDAFEIRRLSSVFLRVRTNVGVRVLYDREGLRLYLQVDQRWVEDTVGLCGTFNGNTQDDFLSPVGVPESTPQLFGNSWKTLSACSPLVSGSPLDPCDVHLQAASYSVQACSVLTGEMFAPCSAFLSPVPYFEQCRRDACRCGQPCLCATLAHYAHLCRRHGLPVDFRARLPACALSCEASKEYSPCVAPCGRTCQDLASPEACGVDGGDDLSRDECVEGCACPPDTYLDTQADLCVPRNQCSCHFQGVDYPPGDSDIPSLGHCHCKDGVMSCDSRAPAAACPAGQVFVNCSDLHTDLELSRERTCEQQLLNLSVSARGPCLSGCACPQGLLRHGDACFLPEECPCTWKGKEYFPGDQVMSPCHTCVCQRGSFQCTLHPCASTCTAYGDRHYRTFDGLPFDFVGACKVHLVKSTSDVSFSVIVENVNCYSSGMICRKFISINVGNSLIVFDDDSGNPSPESFLDDKQEVHTWRVGFFTLVHFPQEHITLLWDQRTTVHVQAGPQWQGQLAGLCGNFDLKTINEMRTPENLELTNPQEFGSSWAAVECPDTLDPRDMCVLNPLREPFAKKECSILLSEVFEICHPVVDVTWFYSNCLTDTCGCSQGGDCECFCASVSAYAHQCCQHGVAVDWRTPRLCPYDCDFFNKVLGKGPYQLSSLAAGGALVGMKAVGDDIVLVRTEDVAPADIVSFLLTAALYKAKAHDPDVVSLEAADRPNFFLHVTANGSLELAKWQGRDTFQQHASFLLHRGTRQAGLVALESLAKPSSFLYVSGAVLALRLYEHTEVFRRGTLFRLLDAKPSGAAYPICEWRYDACASPCFQTCRDPRAASCRDVPRVEGCVPVCPTPQVLDEVTQRCVYLEDCVEPAVWVPTEALGNETLPPSQGLPTPSDEEPQLSQESPRTPTHRPALTPAAPLTTALNPPVTATEEPVVSPGPTQTTLQQPLELTASQLPAGPTESPASKGVTASLLAIPHTPESSSLPVALQTPTPGMVSGAMETTRVTVIFAGSPNITVSSRSPPAPRFPLMTKAVTVRGHGSLPVRTTPPQPSLTASPSSRPVASPGAISRSPTSSGSHKAVLTPAVTKVISRTGVPQPTQAQSASSPSTPLTVAGTAAEQVPVSPLATRSLEIVLSTEKGEAGHSQPMGSPASPQPHPLPSAPPRPAQHTTMATRSPALPPETPAAASLSTATDGLAATPFMSLESTRPSQLLSGLPPDTSLPLAKVGTSAPVATPGPKASVITTPLQPQATTLPAQTLSPVLPFTPAAMTQAHPPTHIAPPAAGTAPGLLLGATLPTSGVLPVAEGTASMVSVVPRKSTTGKVAILSKQVSLPTSMYGSAEGGPTELTPATSHPLTPLVAEPEGAQAGTALPVPTSYALSRVSARTAPQDSMLVLLPQLAEAHGTSAGPHLAAEPVDEATTEPSGRSAPALSIVEGLAEALATTTEANTSTTCVPIAEQDCVRHICLEGQLIRVNQSQHCPQGAAPPRCGILGLAVRVGGDRCCPLWECACRCSIFPDLSFVTFDGSHVALFKEAIYILSQSPDEMLTVHVLDCKSANLGHLNWPPFCLVMLNMTHLAHQVTIDRFNRKVTVDLQPVWPPVSRYGFRIEDTGHMYMILTPSDIQIQWLHSSGLMIVEASKTSKAQGHGLCGICDGDAANDLTLKDGSVVGGAEDPAPFLDSWQVPSSLTSVGQTRFRPDSCATTDCSPCLRMVSNRTFSACHRFVPPESFCELWIRDTKYVQQPCVALTVYVAMCHKFHVCIEWRRSDYCPFLCSSDSTYQACVTACEPPKTCQDGILGPLDPEHCQVLGEGCVCSEGTILHRRHSALCIPEAKCACTDSMGVPRALGETWNSSLSGCCQHQCQAPDTIVPVDLGCPSPRPESCLRFGEVALLLPTKDPCCLGTVCVCNQTLCEGLAPTCRPGHRLLTHFQEDSCCPSYSCECDPDLCEAELVPSCRQDQILITGRLGDSCCTSYFCACGDCPDSIPECQEGEALTVHRNTTELCCPLYQCVCENFRCPQVQCGLGTALVEVWSPDRCCPYKSCECDCDTIPVPRCHLWEKSQLDEEFMHSVENVCGCAKYECVKAPVCLSRELGVMQPGQTVVELSADGVCHTSRCTTVLDPLTNFYQINTTSVLCDIHCEANQEYEHPRDLAACCGSCRNVSCLFTFPNGTTSLFLPGASWIADCARHHCSSTPLGAVLVRSPISCPPLNETECAKVGGSVVPSLEGCCRTCKEDGRSCKKVTIRMTIRKNECRSSTPVNLVSCDGRCPSASIYNYNINTYARFCKCCREVGLQRRSVQLFCATNATWVPYTVQEPTDCACQWS

SEQ ID NO: 60465 - protein, 2913 aa, Homo sapiens
  Payload ID: 12096
  Gene Symbol: OTOG
  Gene Name: otogelin
  ENSP ID: ENSP00000382329
MGVLASALCWLLCVWLPWGEQAAESLRVQRLAAAPVLWGSAEPQPEPAGQPSSSHQEATLAMGDKATVVGGQQAEAPDSVAMSSWERRLHRAKCAPSYLFSCFNGGECVHPAFCDCRRFNATGPRCQMVYNAGPERDSICRAWGQHHVETFDGLYYYLSGKGSYTLVGRHEPEGQSFSIQVHNDPQCGSSPYTCSRAVSLFFVGEQEIHLAKEVTHGGMRVQLPHVMGSARLQQLAGYVIVRHQSAFTLAWDGASAVYIKMSPELLGWTHGLCGNNNADPKDDLVTSSGKLTDDVVEFVHSWQEQAPNQPPGPTTSSLPRPPCLQQNPGTMQGVYEQCEALLRPPFDACHAYVSPLPFTASCTSDLCQSMGDVATWCRALAEYARACAQAGRPLQGWRTQLRQCTVHCKEKAFTYNECIACCPASCHPRASCVDSEIACVDGCYCPNGLIFEDGGCVAPAECPCEFHGTLYPPGSVVKEDCNTCTCTSGKWECSTAVCPAECSVTGDIHFTTFDGRRYTFPATCQYILAKSRSSGTFTVTLQNAPCGLNQDGACVQSVSVILHQDPRRQVTLTQAGDVLLFDQYKIIPPYTDDAFEIRRLSSVFLRVRTNVGVRVLYDREGLRLYLQVDQRWVEDTVGLCGTFNGNTQDDFLSPVGVPESTPQLFGNSWKTLSACSPLVSGSPLDPCDVHLQAASYSVQACSVLTGEMFAPCSAFLSPVPYFEQCRRDACRCGQPCLCATLAHYAHLCRRHGLPVDFRARLPACALSCEASKEYSPCVAPCGRTCQDLASPEACGVDGGDDLSRDECVEGCACPPDTYLDTQADLCVPRNQCSCHFQGVDYPPGDSDIPSLGHCHCKDGVMSCDSRAPAAACPAGQVFVNCSDLHTDLELSRERTCEQQLLNLSVSARGPCLSGCACPQGLLRHGDACFLPEECPCTWKGKEYFPGDQVMSPCHTCVCQRGSFQCTLHPCASTCTAYGDRHYRTFDGLPFDFVGACKVHLVKSTSDVSFSVIVENVNCYSSGMICRKFISINVGNSLIVFDDDSGNPSPESFLDDKQEVHTWRVGFFTLVHFPQEHITLLWDQRTTVHVQAGPQWQGQLAGLCGNFDLKTINEMRTPENLELTNPQEFGSSWAAVECPDTLDPRDMCVLNPLREPFAKKECSILLSEVFEICHPVVDVTWFYSNCLTDTCGCSQGGDCECFCASVSAYAHQCCQHGVAVDWRTPRLCPYDCDFFNKVLGKGPYQLSSLAAGGALVGMKAVGDDIVLVRTEDVAPADIVSFLLTAALYKAKAHDPDVVSLEAADRPNFFLHVTANGSLELAKWQGRDTFQQHASFLLHRGTRQAGLVALESLAKPSSFLYVSGAVLALRLYEHTEVFRRGTLFRLLDAKPSGAAYPICEWRYDACASPCFQTCRDPRAASCRDVPRVEGCVPVCPTPQVLDEVTQRCVYLEDCVEPAVWVPTEALGNETLPPSQGLPTPSDEEPQLSQESPRTPTHRPALTPAAPLTTALNPPVTATEEPVVSPGPTQTTLQQPLELTASQLPAGPTESPASKGVTASLLAIPHTPESSSLPVALQTPTPGMVSGAMETTRVTVIFAGSPNITVSSRSPPAPRFPLMTKAVTVRGHGSLPVRTTPPQPSLTASPSSRPVASPGAISRSPTSSGSHKAVLTPAVTKVISRTGVPQPTQAQSASSPSTPLTVAGTAAEQVPVSPLATRSLEIVLSTEKGEAGHSQPMGSPASPQPHPLPSAPPRPAQHTTMATRSPALPPETPAAASLSTATDGLAATPFMSLESTRPSQLLSGLPPDTSLPLAKVGTSAPVATPGPKASVITTPLQPQATTLPAQTLSPVLPFTPAAMTQAHPPTHIAPPAAGTAPGLLLGATLPTSGVLPVAEGTASMVSVVPRKSTTGKVAILSKQVSLPTSMYGSAEGGPTELTPATSHPLTPLVAEPEGAQAGTALPVPTSYALSRVSARTAPQDSMLVLLPQLAEAHGTSAGPHLAAEPVDEATTEPSGRSAPALSIVEGLAEALATTTEANTSTTCVPIAEQDCVRHICLEGQLIRVNQSQHCPQGAAPPRCGILGLAVRVGGDRCCPLWECACRCSIFPDLSFVTFDGSHVALFKEAIYILSQSPDEMLTVHVLDCKSANLGHLNWPPFCLVMLNMTHLAHQVTIDRFNRKVTVDLQPVWPPVSRYGFRIEDTGHMYMILTPSDIQIQWLHSSGLMIVEASKTSKAQGHGLCGICDGDAANDLTLKDGSVVGGAEDPAPFLDSWQVPSSLTSVGQTRFRPDSCATTDCSPCLRMVSNRTFSACHRFVPPESFCELWIRDTKYVQQPCVALTVYVAMCHKFHVCIEWRRSDYCPFLCSSDSTYQACVTACEPPKTCQDGILGPLDPEHCQVLGEGCVCSEGTILHRRHSALCIPEAKCACTDSMGVPRALGETWNSSLSGCCQHQCQAPDTIVPVDLGCPSPRPESCLRFGEVALLLPTKDPCCLGTVCVCNQTLCEGLAPTCRPGHRLLTHFQEDSCCPSYSCECDPDLCEAELVPSCRQDQILITGRLGDSCCTSYFCACGDCPDSIPECQEGEALTVHRNTTELCCPLYQCVCENFRCPQVQCGLGTALVEVWSPDRCCPYKSCECDCDTIPVPRCHLWEKSQLDEEFMHSVENVCGCAKYECVKAPVCLSRELGVMQPGQTVVELSADGVCHTSRCTTVLDPLTNFYQINTTSVLCDIHCEANQEYEHPRDLAACCGSCRNVSCLFTFPNGTTSLFLPGASWIADCARHHCSSTPLGAVLVRSPISCPPLNETECAKVGGSVVPSLEGCCRTCKEDGRSCKKVTIRMTIRKNECRSSTPVNLVSCDGRCPSASIYNYNINTYARFCKCCREVGLQRRSVQLFCATNATWVPYTVQEPTDCACQWS

SEQ ID NO: 60466 - protein, 94 aa, Homo sapiens
  Payload ID: 12096
  Gene Symbol: OTOG
  Gene Name: otogelin
  ENSP ID: ENSP00000399057
AMGDKATVVGGQAEAPDSVAMSSWERRLHRAKCAPSYLFSCFNGGECVHPAFCDCRRFNATGPRCQMVYNAGPERDSICRAWGQHHVETFDGLY

SEQ ID NO: 60467 - protein, 752 aa, Homo sapiens
  Payload ID: 12097
  Gene Symbol: OTOGL
  Gene Name: otogelin-like
  ENSP ID: ENSP00000298820
  MOD_RES (1)..(1): Any amino acid
XEIIVAHIEKCSMNQNGNSLKKLAPSGRISGLCFKKLNVTTPIHKIIVNRLARKVEVDSIVVPLPFSSQELSIEDSGSMYVITTPAGLIIKWSHLTGIIDIHFGFRFNLSSYTEGLCGICNEDPDDDLRMQNGTIITNMEDIGLFIESWEIEKSFEVTMRRPVRNCTEHDCSQCIDLLNRRIFIPCHDKVSPEDFCEKMWINYTYFWNYECDALSAYVALCNKFDICIQWRTPDYCSLSCPEGKEYQPCVRPCEARTCLNQWFYGHTSCLNLREDCVCKVGTILHRPHSAQCIPEKECACTDSEDQPRTAGEIWNGGIDECTLYKCLENGSIIPIEPDCDEEPTPVCEREAEVVMGIIDKWTCCSKEVCGCDTTLCETSIPTCTNSQKLIVGHSPLSCCPQYKCECDPLKCPSISTPECREDQFMIQVRQEEPCCFSPFCVCESCTKPVPLCHDGEFLTVDLNSTHFCCPQYYCVCEPNLCPMPLLNCAEDMNLVKENVSGQCCPTWHCEKDDVCVFQEVSVLNPGQSMIKYLEEDFCYAIECLEEKDNHTGFHTLNFTLVNCSKKCDVHQVYTPSPSDYGCCGTCKNVSCKFHMENGTSVVYAVGSTWHYNCTTYECVKTDEGAIILNYTMVCPPFNETECKMNEGIVKLYNEGCCKICKREERICQKVIIKSVIRKQDCMSQSPINVASCDGKCPSATIYNINIESHLRFCKCCRENGVRNLSVPLYCSGNGTEIMYTLQEPIDCTCQWN

SEQ ID NO: 60468 - protein, 2344 aa, Homo sapiens
  Payload ID: 12097
  Gene Symbol: OTOGL
  Gene Name: otogelin-like
  ENSP ID: ENSP00000400895
MIPWSIFLLHVLLFSLQEYICASSILMGTSKNGFNENRQKRALLAAQFEATSPRYFFHDAINWGESKIKGSCPYECLNGAFCSKTGTCDCQIFQALGTRCQIIPNMGNGRDGICKTWGQYHFETFDGIYYYFPGNCSYIFAKDCGDLEPRYTVWVHNSPKCLGSVYSCYRSISLFFSNQEEIRIYGHEIKKNGISLTLPQTIGQIFIEKLADYILVKTTFGFSLAWDGISGIYLKLSEDHKGKSCGLCGNYNDIQSDDFIILQEDYTEDIAMFANSWSVQTPDDTKCVLTPSDFPNPCSSGMPAFEAIFFKCQILLQFPFLSCHEYIDPYLYIASCVNDLCKTDDDETYCRAATEYARACSHAGYPIQDWRDDFPACTDKCDDSFVHRDCISCCPPTCTFEKQCLGSNLHCLDGCYCPDGLVMDNGTCISLENCPCGFHGLAYSVGSKIEQECTECVCVGGVWNCTEQDCPVQCSVVGDSHFTTFDGRHYSFIGMCQYILVKGTGKDKFTITLQKAPCEQNLGLVCLQSITLILEDDFNKQVTLGRGGQILTSPNQGFNLNGIVEIQTLSSLFILLKTTFGLKILFAIDGERIYIQLTSAWKRRTLGLCGTFNGNIRDDFLSPSGMIEGTPQLHANAWRVSSTCFAPVHVPVVDPCNINQQNIGYAAHCDVIHQELFAPCHIYISPGLYYQLCRHDACKCGSSCLCNALAHYAYLCGQHGVPIDFRTQISFCAVVCQKGMLYHHCSSFCLHSCISLSSPEQCSDDCAEGCNCPEGKFYEDTLNFCVPIFHCRCHYRGSVYQPGELIPTPSGLCQCSNGTVKCDELATPSAVHICPEGKEYFDCRFPDPELPAGGVNCETTCANLAMNFTCTPSSPCISGCVCAPGMAEHRGKCYVPESCPCIWKDWEYLSGEVIATPCYTCVCRRGMFNCTYYPCPAVCTIYGDRHYYSFDGLEYDYISDCQVFLIKSADDSDISVIAQNKKCFDNDIVCSKSVLISVGDTEIYLNDTPYKQKQSGFFLENKSTYQLWKAGYYIVVYFPEKDITILWDRKTTIHIKVGPQWKNKLSGLCGNFDKCTSNDMTTSNNLEVRNARVFGDSWALGQCESPDETIKPCEAHQNKFPYAKKECSILYSDIFASCRNVIDVTSFAKNCHEDTCNCNLGGDCECLCTSIAAYAYKCCQEGISIHWRSSTVCSLDCEYYNEGLGEGPYMLASYGQSGLVLGANMTSRSVFCLPRSSVHTSLFFYFMITPGLFKEKVSSLALVSLESAERPNYFLYVHDNDTLSLELWEANSAFHRRATFFHHQGLWIPGYSAFELYSKKGFFIIFTDSSVKASKYDDSEEFKHSSSFSIEEIQAAVPYRKMCEWRYEPCATPCFKTCSDPEALACKFLPPVEGCLPYCPKNMILDEVTLKCVYPRDCIPVIPTEPTLMPPAKPTVPMFTVWEMITPSDITVFDMLTPTTGLECEPQKFDPVYDCSQYICLNMEWQLYNWSLNCPKDVEMPDCGFRGRPVQVNSDICCPEWECPCRCSMLSELSIITFDGNNAALYSMASYILVRIPGEIIVAHIEKCSMNQNGNSLKKLAPSGRISGLCFKKLNVTTPIHKIIVNRLARKVEVDSIVVPLPFSSQELSIEDSGSMYVITTPAGLIIKWSHLTGIIDIHFGFRFNLSSYTEGLCGICNEDPDDDLRMQNGTIITNMEDIGLFIESWEIEKSFEVTMRRPVRNCTEHDCSQCIDLLNRRIFIPCHDKVSPEDFCEKMWINYTYFWNYECDALSAYVALCNKFDICIQWRTPDYCSLSCPEGKEYQPCVRPCEARTCLNQWFYGHTSCLNLREDCVCKVGTILHRPHSAQCIPEKECACTDSEDQPRTAGEIWNGGIDECTLYKCLENGSIIPIEPDCDEEPTPVCEREAEVVMGIIDKWTCCSKEVCGCDTTLCETSIPTCTNSQKLIVGHSPLSCCPQYKCECDPLKCPSISTPECREDQFMIQVRQEEPCCFSPFCVCESCTKPVPLCHDGEFLTVDLNSTHFCCPQYYCVCEPNLCPMPLLNCAEDMNLVKENVSGQCCPTWHCECNCENLIMPTCEVGEFTAIDHNFQSDCGCIQYLCEKDDVCVFQEVSVLNPGQSMIKYLEEDFCYAIECLEEKDNHTGFHTLNFTLVNCSKKCDVHQVYTPSPSDYGCCGTCKNVSCKFHMENGTSVVYAVGSTWHYNCTTYECVKTDEGAIILNYTMVCPPFNETECKMNEGIVKLYNEGCCKICKREERICQKVIIKSVIRKQDCMSQSPINVASCDGKCPSATIYNINIESHLRFCKCCRENGVRNLSVPLYCSGNGTEIMYTLQEPIDCTCQWN

SEQ ID NO: 60469 - protein, 2332 aa, Homo sapiens
  Payload ID: 12097
  Gene Symbol: OTOGL
  Gene Name: otogelin-like
  Uniprot ID: Q3ZCN5
  ENSP ID: ENSP00000447211
MIPWSIFLLHVLLFSLQEYICASSILMGTSKNGFNENRQKRALLAAQFEATSPRYFFHDAINWGESKIKGSCPYECLNGAFCSKTGTCDCQIFQALGTRCQIIPNMGNGRDGICKTWGQYHFETFDGIYYYFPGNCSYIFAKDCGDLEPRYTVWVHNSPKCLGSVYSCYRSISLFFSNQEEIRIYGHEIKKNGISLTLPQTIGQIFIEKLADYILVKTTFGFSLAWDGISGIYLKLSEDHKGKSCGLCGNYNDIQSDDFIILQEDYTEDIAMFANSWSVQTPDDTKCVLTPSDFPNPCSSGMPAFEAIFFKCQILLQFPFLSCHEYIDPYLYIASCVNDLCKTDDDETYCRAATEYARACSHAGYPIQDWRDDFPACTDKCDDSFVHRDCISCCPPTCTFEKQCLGSNLHCLDGCYCPDGLVMDNGTCISLENCPCGFHGLAYSVGSKIEQECTECVCVGGVWNCTEQDCPVQCSVVGDSHFTTFDGRHYSFIGMCQYILVKGTGKDKFTITLQKAPCEQNLGLVCLQSITLILEDDFNKQVTLGRGGQILTSPNQGFNLNGIVEIQTLSSLFILLKTTFGLKILFAIDGERIYIQLTSAWKRRTLGLCGTFNGNIRDDFLSPSGMIEGTPQLHANAWRVSSTCFAPVHVPVVDPCNINQQNIGYAAHCDVIHQELFAPCHIYISPGLYYQLCRHDACKCGSSCLCNALAHYAYLCGQHGVPIDFRTQISFCAVVCQKGMLYHHCSSFCLHSCISLSSPEQCSDDCAEGCNCPEGKFYEDTLNFCVPIFHCRCHYRGSVYQPGELIPTPSGLCQCSNGTVKCDELATPSAVHICPEGKEYFDCRFPDPELPAGGVNCETTCANLAMNFTCTPSSPCISGCVCAPGMAEHRGKCYVPESCPCIWKDWEYLSGEVIATPCYTCVCRRGMFNCTYYPCPAVCTIYGDRHYYSFDGLEYDYISDCQVFLIKSADDSDISVIAQNKKCFDNDIVCSKSVLISVGDTEIYLNDTPYKQKQSGFFLENKSTYQLWKAGYYIVVYFPEKDITILWDRKTTIHIKVGPQWKNKLSGLCGNFDKCTSNDMTTSNNLEVRNARVFGDSWALGQCESPDETIKPCEAHQNKFPYAKKECSILYSDIFASCRNVIDVTSFAKNCHEDTCNCNLGGDCECLCTSIAAYAYKCCQEGISIHWRSSTVCSLDCEYYNEGLGEGPYMLASYGQSGLVLGANMTSRSVFCLPRSSVHTSLFFYFMITPGLFKEKVSSLALVSLESAERPNYFLYVHDNDTLSLELWEANSAFHRRATFFHHQGLWIPGYSAFELYSKKGFFIIFTDSSVKASKYDDSEEFKHSSSFSIEEIQAAVPYRKMCEWRYEPCATPCFKTCSDPEALACKFLPPVEGCLPYCPKNMILDEVTLKCVYPRDCIPVIPTEPTLMPPAKPTVPITVFDMLTPTTGLECEPQKFDPVYDCSQYICLNMEWQLYNWSLNCPKDVEMPDCGFRGRPVQVNSDICCPEWECPCRCSMLSELSIITFDGNNAALYSMASYILVRIPGEIIVAHIEKCSMNQNGNSLKKLAPSGRISGLCFKKLNVTTPIHKIIVNRLARKVEVDSIVVPLPFSSQELSIEDSGSMYVITTPAGLIIKWSHLTGIIDIHFGFRFNLSSYTEGLCGICNEDPDDDLRMQNGTIITNMEDIGLFIESWEIEKSFEVTMRRPVRNCTEHDCSQCIDLLNRRIFIPCHDKVSPEDFCEKMWINYTYFWNYECDALSAYVALCNKFDICIQWRTPDYCSLSCPEGKEYQPCVRPCEARTCLNQWFYGHTSCLNLREDCVCKVGTILHRPHSAQCIPEKECACTDSEDQPRTAGEIWNGGIDECTLYKCLENGSIIPIEPDCDEEPTPVCEREAEVVMGIIDKWTCCSKEVCGCDTTLCETSIPTCTNSQKLIVGHSPLSCCPQYKCECDPLKCPSISTPECREDQFMIQVRQEEPCCFSPFCVCESCTKPVPLCHDGEFLTVDLNSTHFCCPQYYCVCEPNLCPMPLLNCAEDMNLVKENVSGQCCPTWHCECNCENLIMPTCEVGEFTAIDHNFQSDCGCIQYLCEKDDVCVFQEVSVLNPGQSMIKYLEEDFCYAIECLEEKDNHTGFHTLNFTLVNCSKKCDVHQVYTPSPSDYGCCGTCKNVSCKFHMENGTSVVYAVGSTWHYNCTTYECVKTDEGAIILNYTMVCPPFNETECKMNEGIVKLYNEGCCKICKREERICQKVIIKSVIRKQDCMSQSPINVASCDGKCPSATIYNINIESHLRFCKCCRENGVRNLSVPLYCSGNGTEIMYTLQEPIDCTCQWN

SEQ ID NO: 60470 - protein, 166 aa, Homo sapiens
  Payload ID: 12097
  Gene Symbol: OTOGL
  Gene Name: otogelin-like
  ENSP ID: ENSP00000449296
  MOD_RES (1)..(1): Any amino acid
XHSPLSCCPQYKCECDPLKCPSISTPECREDQFMIQVRQEEPCCFSPFCVCESCTKPVPLCHDGEFLTVDLNSTHFCCPQYYCVCEPNLCPMPLLNCAEDMNLVKENVSGQCCPTWHCECNCENLIMPTCEVQPCADADIRTLGCLGRADQEHFHEAKFLRENLLQ

SEQ ID NO: 60471 - protein, 266 aa, Homo sapiens
  Payload ID: 12097
  Gene Symbol: OTOGL
  Gene Name: otogelin-like
  ENSP ID: ENSP00000449641
QVRQEEPCCFSPFCVCESCTKPVPLCHDGEFLTVDLNSTHFCCPQYYCVCEPNLCPMPLLNCAEDMNLVKENVSGQCCPTWHCECNCENLIMPTCEVGEFTAIDHNFQSDCGCIQYLCEKDDVCVFQEVSVLNPGQSMIKYLEEDFCYAIECLEEKDNHTGFHTLNFTLVNCSKKCDVHQVYTPSPSDYGCCGTCKNVSCKFHMENGTSVVYAVGSTWHYNCTTYECVKTDEGAIILNYTMVCPPFNETECKMVCTLLYLRKFIII

SEQ ID NO: 60472 - protein, 477 aa, Homo sapiens
  Payload ID: 12098
  Gene Symbol: OTOL1
  Gene Name: otolin 1
  Uniprot ID: A6NHN0
  ENSP ID: ENSP00000330808
MWMFSWLCAILIILAIAGMNTIAKTTPHTKFTKKSEEREMPKGLKPSSGPPPEEEETLFTEMAEMAEPITKPSALDSVFGTATLSPFENFTLDPADFFLNCCDCCSPVPGQKGEPGETGQPGPKGEAGNLGIPGPPGVVGPQGPRGYKGEKGLKGERGDQGVPGYPGKPGAQGEPGPKGDKGNIGLGGVKGQKGSKGDTCGNCTKGEKGDQGAMGSPGLHGGPGAKGEKGEMGEKGEMGDKGCCGDSGERGGKGQKGEGGMKGEKGSKGDSGMEGKSGRNGLPGAKGDPGIKGEKGELGPPGLLGPTGPKGDIGNKGVRGPTGKKGSRGFKGSKGELARVPRSAFSAGLSKPFPPPNIPIKFEKILYNDQGNYSPVTGKFNCSIPGTYVFSYHITVRGRPARISLVAQNKKQFKSRETLYGQEIDQASLLVILKLSAGDQVWLEVSKDWNGVYVSAEDDSIFTGFLLYPEETSGISP

SEQ ID NO: 60473 - protein, 612 aa, Homo sapiens
  Payload ID: 12099
  Gene Symbol: OTOP1
  Gene Name: otopetrin 1
  Uniprot ID: Q7RTM1
  ENSP ID: ENSP00000296358
MLEGLGSPASPRAAASASVAGSSGPAACSPPSSSAPRSPESPAPRRGGVRASVPQKLAEMLSSQYGLIVFVAGLLLLLAWAVHAAGVSKSDLLCFLTALMLLQLLWMLWYVGRSSAHRRLFRLKDTHAGAGWLRGSITLFAVITVILGCLKIGYFIGFSECLSATEGVFPVTHSVHTLLQVYFLWGHAKDIIQSFKTLERFGVIHSVFTNLLLWANGVLNESKHQLNEHKERLITLGFGNITTVLDDHTPQCNCTPPTLCTAISHGIYYLYPFNIEYQILASTMLYVLWKNIGRKVDSHQHQKMQFKSDGVMVGAVLGLTVLAATIAVVVVYLIHIGRSKTKSESALIMFYLYAITLLMLMGAAGLAGIRIYRIDEKSLDESKNPARKLDSDLLVGTASGSWLISWGSILAILCAEGHPRYTWYNLPYSILAIVEKYIQNLFIFESIHREPEKLSEDIQTLRVVTVCNGNTMPLASSCPKSGGVARDVAPQGKDMPPAANGNVCMRESHDKEEEKQEESSWGGSPSPVRLPRFLQGNAKRKVLRNIAAFLFLCNISLWIPPAFGCRPEYDNGLEEIVFGFEPWIIVVNLAMPFSIFYRMHAAASLFEVYCKI

SEQ ID NO: 60474 - protein, 562 aa, Homo sapiens
  Payload ID: 12100
  Gene Symbol: OTOP2
  Gene Name: otopetrin 2
  Uniprot ID: Q7RTS6
  ENSP ID: ENSP00000332528
MSEELAQGPKESPPAPRAGPREVWKKGGRLLSVLLAVNVLLLACTLISGGAFNKVAVYDTDVFALLTAMMLLATLWILFYLLRTVRCPCAVPYRDAHAGPIWLRGGLVLFGICTLIMDVFKTGYYSSFFECQSAIKILHPLIQAVFVIIQTYFLWVSAKDCVHVHLDLTWCGLMFTLTTNLAIWMAAVVDESVHQSHSYSSSHSNASHARLISDQHADNPVGGDSCLCSTAVCQIFQQGYFYLYPFNIEYSLFASTMLYVMWKNVGRFLASTPGHSHTPTPVSLFRETFFAGPVLGLLLFVVGLAVFIIYEVQVSGDGSRTRQALVIYYSFNIVCLGLTTLVSLSGSIIYRFDRRAMDHHKNPTRTLDVALLMGAALGQYAISYYSIVAVVAGTPQDLLAGLNLTHALLMIAQHTFQNMFIIESLHRGPPGAEPHSTHPKEPCQDLTFTNLDALHTLSACPPNPGLVSPSPSDQREAVAIVSTPRSQWRRQCLKDISLFLLLCNVILWIMPAFGARPHFSNTVEVDFYGYSLWAVIVNICLPFGIFYRMHAVSSLLEVYVLS

SEQ ID NO: 60475 - protein, 562 aa, Homo sapiens; identical to SEQ ID NO: 60474
  Payload ID: 12100
  Gene Symbol: OTOP2
  Gene Name: otopetrin 2
  Uniprot ID: Q7RTS6
  ENSP ID: ENSP00000463837

SEQ ID NO: 60476 - protein, 596 aa, Homo sapiens
  Payload ID: 12101
  Gene Symbol: OTOP3
  Gene Name: otopetrin 3
  Uniprot ID: Q7RTS5
  ENSP ID: ENSP00000328090
MGRGARAAAAQSRWGRASRASVSPGRTIRSAPAVGEAQETEAAPEKENRVDVGAEERAAATRPRQKSWLVRHFSLLLRRDRQAQKAGQLFSGLLALNVVFLGGAFICSMIFNKVAVTLGDVWILLATLKVLSLLWLLYYVASTTRRPHAVLYQDPHAGPLWVRGSLVLFGSCTFCLNIFRVGYDVSHIRCKSQLDLVFSVIEMVFIGVQTWVLWKHCKDCVRVQTNFTRCGLMLTLATNLLLWVLAVTNDSMHREIEAELGILMEKSTGNETNTCLCLNATACEAFRRGFLMLYPFSTEYCLICCAVLFVMWKNVGRHVAPHMGAHPATAPFHLHGAIFGPLLGLLVLLAGVCVFVLFQIEASGPAIACQYFTLYYAFYVAVLPTMSLACLAGTAIHGLEERELDTVKNPTRSLDVVLLMGAALGQMGIAYFSIVAIVAKRPHELLNRLILAYSLLLILQHIAQNLFIIEGLHRRPLWETVPEGLAGKQEAEPPRRGSLLELGQGLQRASLAYIHSYSHLNWKRRALKEISLFLILCNITLWMMPAFGIHPEFENGLEKDFYGYQIWFAIVNFGLPLGVFYRMHSVGGLVEVYLGA

SEQ ID NO: 60477 - protein, 46 aa, Homo sapiens
  Payload ID: 12101
  Gene Symbol: OTOP3
  Gene Name: otopetrin 3
  ENSP ID: ENSP00000464577
MRFPKSTEKSMGRGARAAAAQSRWGRASRASVSPGRTIRSAPAVGG

SEQ ID NO: 60478 - protein, 128 aa, Homo sapiens
  Payload ID: 12102
  Gene Symbol: OTOR
  Gene Name: otoraplin
  Uniprot ID: Q9NRC9
  ENSP ID: ENSP00000246081
MARILLLFLPGLVAVCAVHGIFMDRLASKKLCADDECVYTISLASAQEDYNAPDCRFINVKKGQQIYVYSKLVKENGAGEFWAGSVYGDGQDEMGVVGYFPRNLVKEQRVYQEATKEVPTTDIDFFCE

SEQ ID NO: 60479 - protein, 89 aa, Homo sapiens
  Payload ID: 12103
  Gene Symbol: OTOS
  Gene Name: otospiralin
  Uniprot ID: Q8NHW6
  ENSP ID: ENSP00000322486
MQACMVPGLALCLLLGPLAGAKPVQEEGDPYAELPAMPYWPFSTSDFWNYVQHFQALGAYPQIEDMARTFFAHFPLGSTLGFHVPYQED

SEQ ID NO: 60480 - protein, 89 aa, Homo sapiens; identical to SEQ ID NO: 60479
  Payload ID: 12103
  Gene Symbol: OTOS
  Gene Name: otospiralin
  Uniprot ID: Q8NHW6
  ENSP ID: ENSP00000375849

SEQ ID NO: 60481 - protein, 481 aa, Homo sapiens
  Payload ID: 12104
  Gene Symbol: OTUD1
  Gene Name: OTU deubiquitinase 1
  Uniprot ID: Q5VV17
  ENSP ID: ENSP00000365678
MQLYSSVCTHYPAGAPGPTAAAPAPPAAATPFKVSLQPPGAAGAAPEPETGECQPAAAAEHREAAAVPAAKMPAFSSCFEVVSGAAAPASAAAGPPGASCKPPLPPHYTSTAQITVRALGADRLLLHGPDPVPGAAGSAAAPRGRCLLLAPAPAAPVPPRRGSSAWLLEELLRPDCPEPAGLDATREGPDRNFRLSEHRQALAAAKHRGPAATPGSPDPGPGPWGEEHLAERGPRGWERGGDRCDAPGGDAARRPDPEAEAPPAGSIEAAPSSAAEPVIVSRSDPRDEKLALYLAEVEKQDKYLRQRNKYRFHIIPDGNCLYRAVSKTVYGDQSLHRELREQTVHYIADHLDHFSPLIEGDVGEFIIAAAQDGAWAGYPELLAMGQMLNVNIHLTTGGRLESPTVSTMIHYLGPEDSLRPSIWLSWLSNGHYDAVFDHSYPNPEYDNWCKQTQVQRKRDEELAKSMAISLSKMYIEQNACS

SEQ ID NO: 60482 - protein, 398 aa, Homo sapiens
  Payload ID: 12105
  Gene Symbol: OTUD3
  Gene Name: OTU deubiquitinase 3
  Uniprot ID: Q5T2D3
  ENSP ID: ENSP00000364261
MSRKQAAKSRPGSGSRKAEAERKRDERAARRALAKERRNRPESGGGGGCEEEFVSFANQLQALGLKLREVPGDGNCLFRALGDQLEGHSRNHLKHRQETVDYMIKQREDFEPFVEDDIPFEKHVASLAKPGTFAGNDAIVAFARNHQLNVVIHQLNAPLWQIRGTEKSSVRELHIAYRYGEHYDSVRRINDNSEAPAHLQTDFQMLHQDESNKREKIKTKGMDSEDDLRDEVEDAVQKVCNATGCSDFNLIVQNLEAENYNIESAIIAVLRMNQGKRNNAEENLEPSGRVLKQCGPLWEEGGSGARIFGNQGLNEGRTENNKAQASPSEENKANKNQLAKVTNKQRREQQWMEKKKRQEERHRHKALESRGSHRDNNRSEAEANTQVTLVKTFAALNI

SEQ ID NO: 60483 - protein, 1114 aa, Homo sapiens
  Payload ID: 12106
  Gene Symbol: OTUD4
  Gene Name: OTU deubiquitinase 4
  Uniprot ID: Q01804
  ENSP ID: ENSP00000395487
MEAAVGVPDGGDQGGAGPREDATPMDAYLRKLGLYRKLVAKDGSCLFRAVAEQVLHSQSRHVEVRMACIHYLRENREKFEAFIEGSFEEYLKRLENPQEWVGQVEISALSLMYRKDFIIYREPNVSPSQVTENNFPEKVLLCFSNGNHYDIVYPIKYKESSAMCQSLLYELLYEKVFKTDVSKIVMELDTLEVADEDNSEISDSEDDSCKSKTAAAAADVNGFKPLSGNEQLKNNGNSTSLPLSRKVLKSLNPAVYRNVEYEIWLKSKQAQQKRDYSIAAGLQYEVGDKCQVRLDHNGKFLNADVQGIHSENGPVLVEELGKKHTSKNLKAPPPESWNTVSGKKMKKPSTSGQNFHSDVDYRGPKNPSKPIKAPSALPPRLQHPSGVRQHAFSSHSSGSQSQKFSSEHKNLSRTPSQIIRKPDRERVEDFDHTSRESNYFGLSPEERREKQAIEESRLLYEIQNRDEQAFPALSSSSVNQSASQSSNPCVQRKSSHVGDRKGSRRRMDTEERKDKDSIHGHSQLDKRPEPSTLENITDDKYATVSSPSKSKKLECPSPAEQKPAEHVSLSNPAPLLVSPEVHLTPAVPSLPATVPAWPSEPTTFGPTGVPAPIPVLSVTQTLTTGPDSAVSQAHLTPSPVPVSIQAVNQPLMPLPQTLSLYQDPLYPGFPCNEKGDRAIVPPYSLCQTGEDLPKDKNILRFFFNLGVKAYSCPMWAPHSYLYPLHQAYLAACRMYPKVPVPVYPHNPWFQEAPAAQNESDCTCTDAHFPMQTEASVNGQMPQPEIGPPTFSSPLVIPPSQVSESHGQLSYQADLESETPGQLLHADYEESLSGKNMFPQPSFGPNPFLGPVPIAPPFFPHVWYGYPFQGFIENPVMRQNIVLPSDEKGELDLSLENLDLSKDCGSVSTVDEFPEARGEHVHSLPEASVSSKPDEGRTEQSSQTRKADTALASIPPVAEGKAHPPTQILNRERETVPVELEPKRTIQSLKEKTEKVKDPKTAADVVSPGANSVDSRVQRPKEESSEDENEVSNILRSGRSKQFYNQTYGSRKYKSDWGYSGRGGYQHVRSEESWKGQPSRSRDEGYQYHRNVRGRPFRGDRRRSGMGDGHRGQHT

SEQ ID NO: 60484 - protein, 1049 aa, Homo sapiens
  Payload ID: 12106
  Gene Symbol: OTUD4
  Gene Name: OTU deubiquitinase 4
  Uniprot ID: Q01804
  ENSP ID: ENSP00000409279
MACIHYLRENREKFEAFIEGSFEEYLKRLENPQEWVGQVEISALSLMYRKDFIIYREPNVSPSQVTENNFPEKVLLCFSNGNHYDIVYPIKYKESSAMCQSLLYELLYEKVFKTDVSKIVMELDTLEVADEDNSEISDSEDDSCKSKTAAAAADVNGFKPLSGNEQLKNNGNSTSLPLSRKVLKSLNPAVYRNVEYEIWLKSKQAQQKRDYSIAAGLQYEVGDKCQVRLDHNGKFLNADVQGIHSENGPVLVEELGKKHTSKNLKAPPPESWNTVSGKKMKKPSTSGQNFHSDVDYRGPKNPSKPIKAPSALPPRLQHPSGVRQHAFSSHSSGSQSQKFSSEHKNLSRTPSQIIRKPDRERVEDFDHTSRESNYFGLSPEERREKQAIEESRLLYEIQNRDEQAFPALSSSSVNQSASQSSNPCVQRKSSHVGDRKGSRRRMDTEERKDKDSIHGHSQLDKRPEPSTLENITDDKYATVSSPSKSKKLECPSPAEQKPAEHVSLSNPAPLLVSPEVHLTPAVPSLPATVPAWPSEPTTFGPTGVPAPIPVLSVTQTLTTGPDSAVSQAHLTPSPVPVSIQAVNQPLMPLPQTLSLYQDPLYPGFPCNEKGDRAIVPPYSLCQTGEDLPKDKNILRFFFNLGVKAYSCPMWAPHSYLYPLHQAYLAACRMYPKVPVPVYPHNPWFQEAPAAQNESDCTCTDAHFPMQTEASVNGQMPQPEIGPPTFSSPLVIPPSQVSESHGQLSYQADLESETPGQLLHADYEESLSGKNMFPQPSFGPNPFLGPVPIAPPFFPHVWYGYPFQGFIENPVMRQNIVLPSDEKGELDLSLENLDLSKDCGSVSTVDEFPEARGEHVHSLPEASVSSKPDEGRTEQSSQTRKADTALASIPPVAEGKAHPPTQILNRERETVPVELEPKRTIQSLKEKTEKVKDPKTAADVVSPGANSVDSRVQRPKEESSEDENEVSNILRSGRSKQFYNQTYGSRKYKSDWGYSGRGGYQHVRSEESWKGQPSRSRDEGYQYHRNVRGRPFRGDRRRSGMGDGHRGQHT

SEQ ID NO: 60485 - protein, 139 aa, Homo sapiens
  Payload ID: 12106
  Gene Symbol: OTUD4
  Gene Name: OTU deubiquitinase 4
  ENSP ID: ENSP00000423453
MACIHYLRENREKFEAFIEGSFEEYLKRLENPQEWVGQVEISALSLMYRKDFIIYREPNVSPSQVTENNFPEKVLLCFSNGNHYDIVYPIKYKESSAMCQSLLYELLYEKVFKTDVSKIVMELDTLEVADEDNSEISDS

SEQ ID NO: 60486 - protein, 145 aa, Homo sapiens
  Payload ID: 12106
  Gene Symbol: OTUD4
  Gene Name: OTU deubiquitinase 4
  Uniprot ID: Q01804
  ENSP ID: ENSP00000424192
MACIHYLRENREKFEAFIEGSFEEYLKRLENPQEWVGQVEISALSLMYRKDFIIYREPNVSPSQVTENNFPEKVLLCFSNGNHYDIVYPIKYKESSAMCQSLLYELLYEKVFKTDVSKIVMELDTLEVADEDNSEISDSEDDSCK

SEQ ID NO: 60487 - protein, 372 aa, Homo sapiens
  Payload ID: 12106
  Gene Symbol: OTUD4
  Gene Name: OTU deubiquitinase 4
  ENSP ID: ENSP00000425972
MACIHYLRENREKFEAFIEGSFEEYLKRLENPQEWVGQVEISALSLMYRKDFIIYREPNVSPSQVTENNFPEKVLLCFSNGNHYDIVYPIKYKESSAMCQSLLYELLYEKVFKTDVSKIVMELDTLEVADEDNSEISDSEDDSCKSKTAAAAADVNGFKPLSGNELKNNGNSTSLPLSRKVLKSLNPAVYRNVEYEIWLKSKQAQQKRDYSIAAGLQYEVGDKCQVRLDHNGKFLNADVQGIHSENGPVLVEELGKKHTSKNLKAPPPESWNTVSGKKMKKPSTSGQNFHSDVDYRGPKNPSKPIKAPSALPPRLQHPSGVRQHAFSSHSSGSQSQKFSSEHKNLSRTPSQIIRKPDRERVEDFDHTSRESN

SEQ ID NO: 60488 - protein, 571 aa, Homo sapiens
  Payload ID: 12107
  Gene Symbol: OTUD5
  Gene Name: OTU deubiquitinase 5
  Uniprot ID: Q96G74
  ENSP ID: ENSP00000156084
MTILPKKKPPPPDADPANEPPPPGPMPPAPRRGGGVGVGGGGTGVGGGDRDRDSGVVGARPRASPPPQGPLPGPPGALHRWALAVPPGAVAGPRPQQASPPPCGGPGGPGGGPGDALGAAAAGVGAAGVVVGVGGAVGVGGCCSGPGHSKRRRQAPGVGAVGGGSPEREEVGAGYNSEDEYEAAAARIEAMDPATVEQQEHWFEKALRDKKGFIIKQMKEDGACLFRAVADQVYGDQDMHEVVRKHCMDYLMKNADYFSNYVTEDFTTYINRKRKNNCHGNHIEMQAMAEMYNRPVEVYQYSTGTSAVEPINTFHGIHQNEDEPIRVSYHRNIHYNSVVNPNKATIGVGLGLPSFKPGFAEQSLMKNAIKTSEESWIEQQMLEDKKRATDWEATNEAIEEQVARESYLQWLRDQEKQARQVRGPSQPRKASATCSSATAAASSGLEEWTSRSPRQRSSASSPEHPELHAELGMKPPSPGTVLALAKPPSPCAPGTSSQFSAGADRATSPLVSLYPALECRALIQQMSPSAFGLNDWDDDEILASVLAVSQQEYLDSMKKNKVHRDPPPDKS

SEQ ID NO: 60489 - protein, 566 aa, Homo sapiens
  Payload ID: 12107
  Gene Symbol: OTUD5
  Gene Name: OTU deubiquitinase 5
  Uniprot ID: Q96G74
  ENSP ID: ENSP00000365671
MTILPKKKPPPPDADPANEPPPPGPMPPAPRRGGGVGVGGGGTGVGGGDRDRDSGVVGARPRASPPPQGPLPGPPGALHRWALAVPPGAVAGPRPQQASPPPCGGPGGPGGGPGDALGAAAAGVGAAGVVVGVGGAVGVGGCCSGPGHSKRRRQAPGVGAVGGGSPEREEVGAGYNSEDEYEAAAARIEAMDPATVEQQEHWFEKALRDKKGFIIKQMKEDGACLFRAVADQVYGDQDMHEVVRKHCMDYLMKNADYFSNYVTEDFTTYINRKRKNNCHGNHIEMQAMAEMYNRPVEVYQYSTEPINTFHGIHQNEDEPIRVSYHRNIHYNSVVNPNKATIGVGLGLPSFKPGFAEQSLMKNAIKTSEESWIEQQMLEDKKRATDWEATNEAIEEQVARESYLQWLRDQEKQARQVRGPSQPRKASATCSSATAAASSGLEEWTSRSPRQRSSASSPEHPELHAELGMKPPSPGTVLALAKPPSPCAPGTSSQFSAGADRATSPLVSLYPALECRALIQQMSPSAFGLNDWDDDEILASVLAVSQQEYLDSMKKNKVHRDPPPDKS

SEQ ID NO: 60490 - protein, 566 aa, Homo sapiens; identical to SEQ ID NO: 60489
  Payload ID: 12107
  Gene Symbol: OTUD5
  Gene Name: OTU deubiquitinase 5
  Uniprot ID: Q96G74
  ENSP ID: ENSP00000379969

SEQ ID NO: 60491 - protein, 444 aa, Homo sapiens
  Payload ID: 12107
  Gene Symbol: OTUD5
  Gene Name: OTU deubiquitinase 5
  ENSP ID: ENSP00000390767
GVVVGVGGAVGVGGCCSGPGHSKRRRQAPGVGAVGGGSPEREEVGAGYNSEDEYEAAAARIEAMDPATVEQQEHWFEKALRDKKGFIIKQMKEDGACLFRAVADQVYGDQDMHEVVRKHCMDYLMKNADYFSNYVTEDFTTYINRKRKNNCHGNHIEMQAMAEMYNRPVEVYQYSTGTSAVEPINTFHGIHQNEDEPIRVSYHRNIHYNSVVNPNKATIGVGLGLPSFKPGFAEQSLMKNAIKTSEESWIEQQMLEDKKRATDWEATNEAIEEQVARESYLQWLRDQEKQARQVRGPSQPRKASATCSSATAAASSGLEEWTSRSPRQRSSASSPEHPELHAELGMKPPSPGTVLALAKPPSPCAPGTSSQFSAGADRATSPLVSLYPALECRALIQQMSPSAFGLNDWDDDEILASVLAVSQQEYLDSMKKNKVHRDPPPDKS

SEQ ID NO: 60492 - protein, 349 aa, Homo sapiens
  Payload ID: 12107
  Gene Symbol: OTUD5
  Gene Name: OTU deubiquitinase 5
  Uniprot ID: Q96G74
  ENSP ID: ENSP00000401629
MKEDGACLFRAVADQVYGDQDMHEVVRKHCMDYLMKNADYFSNYVTEDFTTYINRKRKNNCHGNHIEMQAMAEMYNRPVEVYQYSTEPINTFHGIHQNEDEPIRVSYHRNIHYNSVVNPNKATIGVGLGLPSFKPGFAEQSLMKNAIKTSEESWIEQQMLEDKKRATDWEATNEAIEEQVARESYLQWLRDQEKQARQVRGPSQPRKASATCSSATAAASSGLEEWTSRSPRQRSSASSPEHPELHAELGMKPPSPGTVLALAKPPSPCAPGTSSQFSAGADRATSPLVSLYPALECRALIQQMSPSAFGLNDWDDDEILASVLAVSQQEYLDSMKKNKVHRDPPPDKS

SEQ ID NO: 60493 - protein, 542 aa, Homo sapiens [sequence omitted]

SEQ ID NO: 60494 - protein, 288 aa, Homo sapiens
  Payload ID: 12108
  Gene Symbol: OTUD6A
  Gene Name: OTU deubiquitinase 6A
  Uniprot ID: Q7L8S5
  ENSP ID: ENSP00000339389
MDDPKSEQQRILRRHQRERQELQAQIRSLKNSVPKTDKTKRKQLLQDVARMEAEMAQKHRQELEKFQDDSSIESVVEDLAKMNLENRPPRSSKAHRKRERMESEERERQESIFQAEMSEHLAGFKREEEEKLAAILGARGLEMKAIPADGHCMYRAIQDQLVFSVSVEMLRCRTASYMKKHVDEFLPFFSNPETSDSFGYDDFMIYCDNIVRTTAWGGQLELRALSHVLKTPIEVIQADSPTLIIGEEYVKKPIILVYLRYAYSLGEHYNSVTPLEAGAAGGVLPRLL

SEQ ID NO: 60495 - protein, 926 aa, Homo sapiens
  Payload ID: 12109
  Gene Symbol: OTUD7A
  Gene Name: OTU deubiquitinase 7A
  Uniprot ID: Q8TE49
  ENSP ID: ENSP00000305926
MVSSVLPNPTSAECWAALLHDPMTLDMDAVLSDFVRSTGAEPGLARDLLEGKNWDLTAALSDYEQLRQVHTANLPHVFNEGRGPKQPEREPQPGHKVERPCLQRQDDIAQEKRLSRGISHASSAIVSLARSHVASECNNEQFPLEMPIYTFQLPDLSVYSEDFRSFIERDLIEQATMVALEQAGRLNWWSTVCTSCKRLLPLATTGDGNCLLHAASLGMWGFHDRDLVLRKALYTMMRTGAEREALKRRWRWQQTQQNKEEEWEREWTELLKLASSEPRTHFSKNGGTGGGVDNSEDPVYESLEEFHVFVLAHILRRPIVVVADTMLRDSGGEAFAPIPFGGIYLPLEVPPNRCHCSPLVLAYDQAHFSALVSMEQRDQQREQAVIPLTDSEHKLLPLHFAVDPGKDWEWGKDDNDNARLAHLILSLEAKLNLLHSYMNVTWIRIPSETRAPLAQPESPTASAGEDVQSLADSLDSDRDSVCSNSNSNNGKNGKDKEKEKQRKEKDKTRADSVANKLGSFSKTLGIKLKKNMGGLGGLVHGKMGRANSANGKNGDSAERGKEKKAKSRKGSKEESGASASTSPSEKTTPSPTDKAAGASPAEKGGGPRGDAWKYSTDVKLSLNILRAAMQGERKFIFAGLLLTSHRHQFHEEMIGYYLTSAQERFSAEQEQRRRDAATAAAAAAAAAAATAKRPPRRPETEGVPVPERASPGPPTQLVLKLKERPSPGPAAGRAARAAAGGTASPGGGARRASASGPVPGRSPPAPARQSVIHVQASGARDEACAPAVGALRPCATYPQQNRSLSSQSYSPARAAALRTVNTVESLARAVPGALPGAAGTAGAAEHKSQTYTNGFGALRDGLEFADADAPTARSNGECGRGGPGPVQRRCQRENCAFYGRAETEHYCSYCYREELRRRREARGARP

SEQ ID NO: 60496 - protein, 113 aa, Homo sapiens
  Payload ID: 12109
  Gene Symbol: OTUD7A
  Gene Name: OTU deubiquitinase 7A
  ENSP ID: ENSP00000453622
MVSSVLPNPTSAECWAALLHDPMTLDMDAVLSDFVRSTGAEPGLARDLLEAPPTVIHLPEPGRCCLHAVQGSRLHPVGQRVAVVSAHSPHPLLGPAFGFHRQKLGPDSRSERL

SEQ ID NO: 60497 - protein, 110 aa, Homo sapiens
  Payload ID: 12109
  Gene Symbol: OTUD7A
  Gene Name: OTU deubiquitinase 7A
  ENSP ID: ENSP00000453883
MVSSVLPNPTSAECWAALLHDPMTLDMDAVLSDFVRSTGAEPGLARDLLEGKNWDLTAALSDYEQLRQVHTANLPHVFNEGRGPKQPEREPQPGHKVERPCLQRQDDIAQ

SEQ ID NO: 60498 - protein, 427 aa, Homo sapiens
  Payload ID: 12110
  Gene Symbol: OTUD7B
  Gene Name: OTU deubiquitinase 7B
  ENSP ID: ENSP00000408231
MTLDMDAVLSDFVRSTGAEPGLARDLLEGKNWDVNAALSDFEQLRQVHAGNLPPSFSEGSGGSRTPEKGFSDREPTRPPRPILQRQDDIVQEKRLSRGISHASSSIVSLARSHVSSNGGGGGSNEHPLEMPICAFQLPDLTVYNEDFRSFIERDLIEQSMLVALEQAGRLNWWVSVDPTSQRLLPLATTGDGNCLLHAASLGMWGFHDRDLMLRKALYALMEKGVEKEALKRRWRWQQTQQNKESGLVYTEDEWQKEWNELIKLASSEPRMHLGTNGANCGGVESSEEPVYESLEEFHVFVLAHVLRRPIVVVADTMLRDSGGEAFAPIPFGGIYLPLEVPASQCHRSPLVLAYDQAHFSALVSMEQKENTKEQAVIPLTDSEYKLLPLHFAVDPGKGWEWGKDDSDNVRLASVILSLEVKLHLLHS

SEQ ID NO: 60499 - protein, 843 aa, Homo sapiens
  Payload ID: 12110
  Gene Symbol: OTUD7B
  Gene Name: OTU deubiquitinase 7B
  Uniprot ID: Q6GQQ9
  ENSP ID: ENSP00000462729
MTLDMDAVLSDFVRSTGAEPGLARDLLEGKNWDVNAALSDFEQLRQVHAGNLPPSFSEGSGGSRTPEKGFSDREPTRPPRPILQRQDDIVQEKRLSRGISHASSSIVSLARSHVSSNGGGGGSNEHPLEMPICAFQLPDLTVYNEDFRSFIERDLIEQSMLVALEQAGRLNWWVSVDPTSQRLLPLATTGDGNCLLHAASLGMWGFHDRDLMLRKALYALMEKGVEKEALKRRWRWQQTQQNKESGLVYTEDEWQKEWNELIKLASSEPRMHLGTNGANCGGVESSEEPVYESLEEFHVFVLAHVLRRPIVVVADTMLRDSGGEAFAPIPFGGIYLPLEVPASQCHRSPLVLAYDQAHFSALVSMEQKENTKEQAVIPLTDSEYKLLPLHFAVDPGKGWEWGKDDSDNVRLASVILSLEVKLHLLHSYMNVKWIPLSSDAQAPLAQPESPTASAGDEPRSTPESGDSDKESVGSSSTSNEGGRRKEKSKRDREKDKKRADSVANKLGSFGKTLGSKLKKNMGGLMHSKGSKPGGVGTGLGGSSGTETLEKKKKNSLKSWKGGKEEAAGDGPVSEKPPAESVGNGGSKYSQEVMQSLSILRTAMQGEGKFIFVGTLKMGHRHQYQEEMIQRYLSDAEERFLAEQKQKEAERKIMNGGIGGGPPPAKKPEPDAREEQPTGPPAESRAMAFSTGYPGDFTIPRPSGGGVHCQEPRRQLAGGPCVGGLPPYATFPRQCPPGRPYPHQDSIPSLEPGSHSKDGLHRGALLPPPYRVADSYSNGYREPPEPDGWAGGLRGLPPTQTKCKQPNCSFYGHPETNNFCSCCYREELRRREREPDGELLVHRF

SEQ ID NO: 60500 - protein, 352 aa, Homo sapiens
  Payload ID: 12111
  Gene Symbol: OTULIN
  Gene Name: OTU deubiquitinase with linear linkage specificity
  Uniprot ID: Q96BN8
  ENSP ID: ENSP00000284274
MSRGTMPQPEAWPGASCAETPAREAAATARDGGKAAASGQPRPEMQCPAEHEEDMYRAADEIEKEKELLIHERGASEPRLSVAPEMDIMDYCKKEWRGNTQKATCMKMGYEEVSQKFTSIRRVRGDNYCALRATLFQAMSQAVGLPPWLQDPELMLLPEKLISKYNWIKQWKLGLKFDGKNEDLVDKIKESLTLLRKKWAGLAEMRTAEARQIACDELFTNEAEEYSLYEAVKFLMLNRAIELYNDKEKGKEVPFFSVLLFARDTSNDPGQLLRNHLNQVGHTGGLEQVEMFLLAYAVRHTIQVYRLSKYNTEEFITVYPTDPPKDWPVVTLIAEDDRHYNIPVRVCEETSL

SEQ ID NO: 60501 - protein, 66 aa, Homo sapiens
  Payload ID: 12111
  Gene Symbol: OTULIN
  Gene Name: OTU deubiquitinase with linear linkage specificity
  ENSP ID: ENSP00000421928
  MOD_RES (1)..(1): Any amino acid
XATCMKMGYEEVSQKFTSIRRVRGDNYCALRATLFQAMSQAVGLPPWLQDPELMLVRCCCSYQKNS

SEQ ID NO: 60502 - protein, 84 aa, Homo sapiens
  Payload ID: 12111
  Gene Symbol: OTULIN
  Gene Name: OTU deubiquitinase with linear linkage specificity
  ENSP ID: ENSP00000424966
  MOD_RES (1)..(1): Any amino acid
XAMSQAVGLPPWLQDPELMLVEMFLLAYAVRHTIQVYRLSKYNTEEFITVYPTDPPKDWPVVTLIAEDDRHYNIPVRVCEETSL

SEQ ID NO: 60503 - protein, 58 aa, Homo sapiens
  Payload ID: 12111
  Gene Symbol: OTULIN
  Gene Name: OTU deubiquitinase with linear linkage specificity
  ENSP ID: ENSP00000427016
MSRGTMPQPEAWPGASCAETPAREAAATARDGGKAAASGQPRPEMQCPAEQTEIKRSS

SEQ ID NO: 60504 - protein, 271 aa, Homo sapiens
  Payload ID: 12112
  Gene Symbol: OTUB1
  Gene Name: OTU deubiquitinase, ubiquitin aldehyde binding 1
  Uniprot ID: Q96FW1
  ENSP ID: ENSP00000402551
MAAEEPQQQKQEPLGSDSEGVNCLAYDEAIMAQQDRIQQEIAVQNPLVSERLELSVLYKEYAEDDNIYQQKIKDLHKKYSYIRKTRPDGNCFYRAFGFSHLEALLDDSKELQRFKAVSAKSKEDLVSQGFTEFTIEDFHNTFMDLIEQVEKQTSVADLLASFNDQSTSDYLVVYLRLLTSGYLQRESKFFEHFIEGGRTVKEFCQQEVEPMCKESDHIHIIALAQALSVSIQVEYMDRGEGGTTNPHIFPEGSEPKVYLLYRPGHYDILYK

SEQ ID NO: 60505 - protein, 272 aa, Homo sapiens
  Payload ID: 12112
  Gene Symbol: OTUB1
  Gene Name: OTU deubiquitinase, ubiquitin aldehyde binding 1
  ENSP ID: ENSP00000416973
MAAEEPQQQKQEPLGSDSEGVNCLAYDEAIMAQQDRIQQEIAVQNPLVSERLELSVLYKEYAEDDNIYQQKIKDLHKKYSYIRKTRPDGNCFYRAFGFSHLEALLDDSKELQRRFKAVSAKSKEDLVSQGFTEFTIEDFHNTFMDLIEQVEKQTSVADLLASFNDQSTSDYLVVYLRLLTSGYLQRESKFFEHFIEGGRTVKEFCQQEVEPMCKESDHIHIIALAQALSVSIQVEYMDRGEGGTTNPHIFPEGSEPKVYLLYRPGHYDILYK

SEQ ID NO: 60506 - protein, 280 aa, Homo sapiens
  Payload ID: 12112
  Gene Symbol: OTUB1
  Gene Name: OTU deubiquitinase, ubiquitin aldehyde binding 1
  ENSP ID: ENSP00000437453
MAAEEPQQQKQEPLGSDSEGVNCLAYDEAIMAQQDRIQQEDMTDPCLLQIAVQNPLVSERLELSVLYKEYAEDDNIYQQKIKDLHKKYSYIRKTRPDGNCFYRAFGFSHLEALLDDSKELQRFKAVSAKSKEDLVSQGFTEFTIEDFHNTFMDLIEQVEKQTSVADLLASFNDQSTSDYLVVYLRLLTSGYLQRESKFFEHFIEGGRTVKEFCQQEVEPMCKESDHIHIIALAQALSVSIQVEYMDRGEGGTTNPHIFPEGSEPKVYLLYRPGHYDILYK

SEQ ID NO: 60507 - protein, 170 aa, Homo sapiens
  Payload ID: 12112
  Gene Symbol: OTUB1
  Gene Name: OTU deubiquitinase, ubiquitin aldehyde binding 1
  ENSP ID: ENSP00000439142
MAAEEPQQQKQEPLGSDSEGVNCLAYDEAIMAQQDRIQQEFMDLIEQVEKQTSVADLLASFNDQSTSDYLVVYLRLLTSGYLQRESKFFEHFIEGGRTVKEFCQQEVEPMCKESDHIHIIALAQALSVSIQVEYMDRGEGGTTNPHIFPEGSEPKVYLLYRPGHYDILYK

SEQ ID NO: 60508 - protein, 286 aa, Homo sapiens
  Payload ID: 12112
  Gene Symbol: OTUB1
  Gene Name: OTU deubiquitinase, ubiquitin aldehyde binding 1
  ENSP ID: ENSP00000440211
MAAEEPQQQKQEPLGSDSEGVNCLAYDEAIMAQQDRIQQEIAVQNPLVSERLELSVLYKEYAEDDNIYQQKIKDLHKKYSYIRKTRPDGNCFYRAFGFSHLEALLDDSKELQRFKAVSAKSKEDLVSQGFTEFTIEDFHNTFMDLIEQVEKQTSVADLLASFNDQSTSDYLVVYLRLLTSGYLQRESKFFEHFIEGGRTVKEFCQQEVEPMCKESDHIHIIALAQALSVSIQGVLVVSRVCVSLLCCPPGCSVCCPLPPDGQTKATFSFITSVSAQFQGCQGERQL

SEQ ID NO: 60509 - protein, 241 aa, Homo sapiens
  Payload ID: 12112
  Gene Symbol: OTUB1
  Gene Name: OTU deubiquitinase, ubiquitin aldehyde binding 1
  ENSP ID: ENSP00000441328
MAQQDRIQQEIAVQNPLVSERLELSVLYKEYAEDDNIYQQKIKDLHKKYSYIRKTRPDGNCFYRAFGFSHLEALLDDSKELQRFKAVSAKSKEDLVSQGFTEFTIEDFHNTFMDLIEQVEKQTSVADLLASFNDQSTSDYLVVYLRLLTSGYLQRESKFFEHFIEGGRTVKEFCQQEVEPMCKESDHIHIIALAQALSVSIQVEYMDRGEGGTTNPHIFPEGSEPKVYLLYRPGHYDILYK

SEQ ID NO: 60510 - protein, 271 aa, Homo sapiens; identical to SEQ ID NO: 60504
  Payload ID: 12112
  Gene Symbol: OTUB1
  Gene Name: OTU deubiquitinase, ubiquitin aldehyde binding 1
  Uniprot ID: Q96FW1
  ENSP ID: ENSP00000444357

SEQ ID NO: 60511 - protein, 102 aa, Homo sapiens
  Payload ID: 12112
  Gene Symbol: OTUB1
  Gene Name: OTU deubiquitinase, ubiquitin aldehyde binding 1
  ENSP ID: ENSP00000444968
MMKPSWLSRTEFSKRLLCRTLWCQSGWSSRSYTRSMLKMTTSINRRSRTSTKSTRTSARPGLTATVSIGLSDSPTWRHCWMTARSCSGGEADLCRRPAGLLQ

SEQ ID NO: 60512 - protein, 234 aa, Homo sapiens
  Payload ID: 12113
  Gene Symbol: OTUB2
  Gene Name: OTU deubiquitinase, ubiquitin aldehyde binding 2
  Uniprot ID: Q96DC9
  ENSP ID: ENSP00000203664
MSETSFNLISEKCDILSILRDHPENRIYRRKIEELSKRFTAIRKTKGDGNCFYRALGYSYLESLLGKSREIFKFKERVLQTPNDLLAAGFEEHKFRNFFNAFYSVVELVEKDGSVSSLLKVFNDQSASDHIVQFLRLLTSAFIRNRADFFRHFIDEEMDIKDFCTHEVEPMATECDHIQITALSQALSIALQVEYVDEMDTALNHHVFPEAATPSVYLLYKTSHYNILYAADKH

SEQ ID NO: 60513 - protein, 73 aa, Homo sapiens
  Payload ID: 12113
  Gene Symbol: OTUB2
  Gene Name: OTU deubiquitinase, ubiquitin aldehyde binding 2
  Uniprot ID: Q96DC9
  ENSP ID: ENSP00000451283
MSETSFNLISEKCDILSILRDHPENRIYRRKIEELSKRFTAIRKTKGDGNCFYRALGYSYLESLLGKSREIFK

SEQ ID NO: 60514 - protein, 234 aa, Homo sapiens; identical to SEQ ID NO: 60512
  Payload ID: 12113
  Gene Symbol: OTUB2
  Gene Name: OTU deubiquitinase, ubiquitin aldehyde binding 2
  Uniprot ID: Q96DC9
  ENSP ID: ENSP00000478628

SEQ ID NO: 60515 - protein, 73 aa, Homo sapiens; identical to SEQ ID NO: 60513
  Payload ID: 12113
  Gene Symbol: OTUB2
  Gene Name: OTU deubiquitinase, ubiquitin aldehyde binding 2
  Uniprot ID: Q96DC9
  ENSP ID: ENSP00000487491

SEQ ID NO: 60516 - protein, 323 aa, Homo sapiens
  Payload ID: 12114
  Gene Symbol: OTUD6B
  Gene Name: OTU domain containing 6B
  ENSP ID: ENSP00000285420
MEPRVRVEGWKVPTSRCRFLLARVLGYLVVMEAVLTEELDEEEQLLRRHRKEKKELQAKIQGMKNAVPKNDKKRRKQLTEDVAKLEKEMEQKHREELEQLKLTTKENKIDSVAVNISNLVLENQPPRISKAQKRREKKAALEKEREERIAEAEIENLTGARHMESEKLAQILAARQLEIKQIPSDGHCMYKAIEDQLKEKDCALTVVALRSQTAEYMQSHVEDFLPFLTNPNTGDMYTPEEFQKYCEDIVNTAAWGGQLELRALSHILQTPIEIIQADSPPIIVGEEYSKKPLILVYMRHAYGLGEHYNSVTRLVNIVTENCS

SEQ ID NO: 60517 - protein, 293 aa, Homo sapiens
  Payload ID: 12114
  Gene Symbol: OTUD6B
  Gene Name: OTU domain containing 6B
  Uniprot ID: Q8N6M0
  ENSP ID: ENSP00000384190
MEAVLTEELDEEEQLLRRHRKEKKELQAKIQGMKNAVPKNDKKRRKQLTEDVAKLEKEMEQKHREELEQLKLTTKENKIDSVAVNISNLVLENQPPRISKAQKRREKKAALEKEREERIAEAEIENLTGARHMESEKLAQILAARQLEIKQIPSDGHCMYKAIEDQLKEKDCALTVVALRSQTAEYMQSHVEDFLPFLTNPNTGDMYTPEEFQKYCEDIVNTAAWGGQLELRALSHILQTPIEIIQADSPPIIVGEEYSKKPLILVYMRHAYGLGEHYNSVTRLVNIVTENCS

SEQ ID NO: 60518 - protein, 108 aa, Homo sapiens
  Payload ID: 12114
  Gene Symbol: OTUD6B
  Gene Name: OTU domain containing 6B
  ENSP ID: ENSP00000428528
MEAVLTEELDEEEQLLRRHRKEKKELQAKIQGMKNAVPKNDKKRRKQLTEDVAKLEKEMEQKHREELEQLKLTTKENKIDSVAVNISNLVLENQPPRISKAQKRRVPG

SEQ ID NO: 60519 - protein, 192 aa, Homo sapiens
  Payload ID: 12114
  Gene Symbol: OTUD6B
  Gene Name: OTU domain containing 6B
  Uniprot ID: Q8N6M0
  ENSP ID: ENSP00000481196
MISKEKKAALEKEREERIAEAEIENLTGARHMESEKLAQILAARQLEIKQIPSDGHCMYKAIEDQLKEKDCALTVVALRSQTAEYMQSHVEDFLPFLTNPNTGDMYTPEEFQKYCEDIVNTAAWGGQLELRALSHILQTPIEIIQADSPPIIVGEEYSKKPLILVYMRHAYGLGEHYNSVTRLVNIVTENCS

SEQ ID NO: 60520 - protein, 323 aa, Homo sapiens; identical to SEQ ID NO: 60516
  Payload ID: 12114
  Gene Symbol: OTUD6B
  Gene Name: OTU domain containing 6B
  ENSP ID: ENSP00000483706

SEQ ID NO: 60521 - protein, 273 aa, Homo sapiens
  Payload ID: 12115
  Gene Symbol: OAF
  Gene Name: out at first homolog
  Uniprot ID: Q86UD1
  ENSP ID: ENSP00000332613
MRLPGVPLARPALLLLLPLLAPLLGTGAPAELRVRVRLPDGQVTEESLQADSDADSISLELRKPDGTLVSFTADFKKDVKVFRALILGELEKGQSQFQALCFVTQLQHNEIIPSEAMAKLRQKNPRAVRQAEEVRGLEHLHMDVAVNFSQGALLSPHLHNVCAEAVDAIYTRQEDVRFWLEQGVDSSVFEALPKASEQAELPRCRQVGDHGKPCVCRYGLSLAWYPCMLKYCHSRDRPTPYKCGIRSCQKSYSFDFYVPQRQLCLWDEDPYPG

SEQ ID NO: 60522 - protein, 157 aa, Homo sapiens
  Payload ID: 12115
  Gene Symbol: OAF
  Gene Name: out at first homolog
  ENSP ID: ENSP00000431865
MAKLRQKNPRAVRQAEEVRGLEHLHMDVAVNFSQGALLSPHLHNVCAEAVDAIYTRQEDVRFWLEQGVDSSVFEALPKASEQAELPRCRQVGDHGKPCVCRYGLSLAWYPCMLKYCHSRDRPTPYKCGIRSCQKSYSFDFYVPQRQLCLWDEDPYPG

SEQ ID NO: 60523 - protein, 250 aa, Homo sapiens
  Payload ID: 12116
  Gene Symbol: ODF1
  Gene Name: outer dense fiber of sperm tails 1
  Uniprot ID: Q14990
  ENSP ID: ENSP00000285402
MAALSCLLDSVRRDIKKVDRELRQLRCIDEFSTRCLCDLYMHPYCCCDLHPYPYCLCYSKRSRSCGLCDLYPCCLCDYKLYCLRPSLRSLERKAIRAIEDEKRELAKLRRTTNRILASSCCSSNILGSVNVCGFEPDQVKVRVKDGKVCVSAERENRYDCLGSKKYSYMNICKEFSLPPCVDEKDVTYSYGLGSCVKIESPCYPCTSPCSPCSPCSPCNPCSPCNPCSPYDPCNPCYPCGSRFSCRKMIL

SEQ ID NO: 60524 - protein, 43 aa, Homo sapiens
  Payload ID: 12116
  Gene Symbol: ODF1
  Gene Name: outer dense fiber of sperm tails 1
  ENSP ID: ENSP00000430023
MESPCSPCSPCNPCSPCNPCSPYDPCNPCYPCGSRFSCRKMIL

SEQ ID NO: 60525 - protein, 824 aa, Homo sapiens
  Payload ID: 12117
  Gene Symbol: ODF2
  Gene Name: outer dense fiber of sperm tails 2
  Uniprot ID: Q5BJF6
  ENSP ID: ENSP00000342581
MKDRSSTPPLHVHVDENTPVHVHIKKLPKPSATSSQKSHKRGMKGDTVNVRRSVRVKTKVPWMPPGKSSARPVGCKWENPPHCLEITPPSSEKLVSVMRLSDLSTEDDDSGHCKMNRYDKKIDSLMNAVGCLKSEVKMQKGERQMAKRFLEERKEELEEVAHELAETEHENTVLRHNIERMKEEKDFTILQKKHLQQEKECLMSKLVEAEMDGAAAAKQVMALKDTIGKLKTEKQMTCTDINTLTRQKELLLQKLSTFEETNRTLRDLLREQHCKEDSERLMEQQGALLKRLAEADSEKARLLLLLQDKDKEVEELLQEIQCEKAQAKTASELSKSMESMRGHLQAQLRSKEAENSRLCMQIKNLERSGNQHKAEVEAIMEQLKELKQKGDRDKESLKKAIRAQKERAEKSEEYAEQLHVQLADKDLYVAEALSTLESWRSRYNQVVKEKGDLELEIIVLNDRVTDLVNQQQTLEEKMREDRDSLVERLHRQTAEYSAFKLENERLKASFAPMEDKLNQAHLEVQQLKASVKNYEGMIDNYKSQVMKTRLEADEVAAQLERCDKENKILKDEMNKEIEAARRQFQSQLADLQQLPDILKITEAKLAECQDQLQGYERKNIDLTAIISDLRSRIEHQGDKLEMAREKHQASQKENKQLSLKVDELERKLEATSAQNIEFLQVIAKREEAIHQSQLRLEEKTRECGTLARQLESAIEDARRQVEQTKEHALSKERAAQNKILDLETQLSRTKTELSQLRRSRDDADRRYQSRLQDLKDRLEQSESTNRSMQNYVQFLKSSYANVFGDGPYSTFLTSSPIRSRSPPA

SEQ ID NO: 60526 - protein, 638 aa, Homo sapiens
  Payload ID: 12117
  Gene Symbol: ODF2
  Gene Name: outer dense fiber of sperm tails 2
  Uniprot ID: Q5BJF6
  ENSP ID: ENSP00000361877
MSASSSGGSPRFPSCGKNGVTSLTQKKVLRAPCGAPSVTVTKSHKRGMKGDTVNVRRSVRVKTKNPPHCLEITPPSSEKLVSVMRLSDLSTEDDDSGHCKMNRYDKKIDSLMNAVGCLKSEVKMQKGERQMAKRFLEERKEELEEVAHELAETEHENTVLRHNIERMKEEKDFTILQKKHLQQEKECLMSKLVEAEMDGAAAAKQVMALKDTIGKLKTEKQMTCTDINTLTRQKELLLQKLSTFEETNRTLRDLLREQHCKEDSERLMEQQGALLKRLAEADSEKARLLLLLQDKDKEVEELLQEIQCEKAQAKTASELSKSMESMRGHLQAQLRSKEAENSRLCMQIKNLERSGNQHKAEVEAIMEQLKELKQKGDRDKESLKKAIRAQKERAEKSEEYAEQLHVQLADKDLYVAEALSTLESWRSRYNQVVKEKGDLELEIIVLNDRVTDLVNQQQTLEEKMREDRDSLVERLHRQTAEYSAFKLENERLKASFAPMEDKLNQAHLEVQQLKASVKNYEGMIDNYKSQVMKTRLEADEVAAQLERCDKENKILKDEMNKEIEAARRQFQSQLADLQQLPDILKITEAKLAECQDQLQGYERKNIDLTAIISDLRSRVRDWQKGSHELTRAGARIPR

SEQ ID NO: 60527 - protein, 824 aa, Homo sapiens; identical to SEQ ID NO: 60525
  Payload ID: 12117
  Gene Symbol: ODF2
  Gene Name: outer dense fiber of sperm tails 2
  Uniprot ID: Q5BJF6
  ENSP ID: ENSP00000361893

SEQ ID NO: 60528 - protein, 701 aa, Homo sapiens
  Payload ID: 12117
  Gene Symbol: ODF2
  Gene Name: outer dense fiber of sperm tails 2
  Uniprot ID: Q5BJF6
  ENSP ID: ENSP00000361901
MGELPTGCRKRRRKRGGAAARARLHPPRRLHGTTLASDFNDFIRRRFWAQPCRSWFPSCGKNGVTSLTQKKVLRAPCGAPSVTVTKSHKRGMKGDTVNVRRSVRVKTKVPWMPPGKSSARPVGCKWENPPHCLEITPPSSEKLVSVMRLSDLSTEDDDSGHCKMNRYDKKIDSLMNAVGCLKSEVKMQKGERQMAKRFLEERKEELEEVAHELAETEHENTVLRHNIERMKEEKDFTILQKKHLQQEKECLMSKLVEAEMDGAAAAKQVMALKDTIGKLKTEKQMTCTDINTLTRQKELLLQKLSTFEETNRTLRDLLREQHCKEDSERLMEQQGALLKRLAEADSEKARLLLLLQDKDKEVEELLQEIQCEKAQAKTASELSKSMESMRGHLQAQLRSKEAENSRLCMQIKNLERSGNQHKAEVEAIMEQLKELKQKGDRDKESLKKAIRAQKERAEKSEEYAEQLHVQLADKDLYVAEALSTLESWRSRYNQVVKEKGDLELEIIVLNDRVTDLVNQQQTLEEKMREDRDSLVERLHRQTAEYSAFKLENERLKASFAPMEDKLNQAHLEVQQLKASVKNYEGMIDNYKSQVMKTRLEADEVAAQLERCDKENKILKDEMNKEIEAARRQFQSQLADLQQLPDILKITEAKLAECQDQLQGYERKNIDLTAIISDLRSRVRDWQKGSHELTRAGARIPR

SEQ ID NO: 60529 - protein, 805 aa, Homo sapiens
  Payload ID: 12117
  Gene Symbol: ODF2
  Gene Name: outer dense fiber of sperm tails 2
  Uniprot ID: Q5BJF6
  ENSP ID: ENSP00000377161
MKDRSSTPPLHVHVDENTPVHVHIKKLPKPSATSSQKSHKRGMKGDTVNVRRSVRVKTKNPPHCLEITPPSSEKLVSVMRLSDLSTEDDDSGHCKMNRYDKKIDSLMNAVGCLKSEVKMQKGERQMAKRFLEERKEELEEVAHELAETEHENTVLRHNIERMKEEKDFTILQKKHLQQEKECLMSKLVEAEMDGAAAAKQVMALKDTIGKLKTEKQMTCTDINTLTRQKELLLQKLSTFEETNRTLRDLLREQHCKEDSERLMEQQGALLKRLAEADSEKARLLLLLQDKDKEVEELLQEIQCEKAQAKTASELSKSMESMRGHLQAQLRSKEAENSRLCMQIKNLERSGNQHKAEVEAIMEQLKELKQKGDRDKESLKKAIRAQKERAEKSEEYAEQLHVQLADKDLYVAEALSTLESWRSRYNQVVKEKGDLELEIIVLNDRVTDLVNQQQTLEEKMREDRDSLVERLHRQTAEYSAFKLENERLKASFAPMEDKLNQAHLEVQQLKASVKNYEGMIDNYKSQVMKTRLEADEVAAQLERCDKENKILKDEMNKEIEAARRQFQSQLADLQQLPDILKITEAKLAECQDQLQGYERKNIDLTAIISDLRSRIEHQGDKLEMAREKHQASQKENKQLSLKVDELERKLEATSAQNIEFLQVIAKREEAIHQSQLRLEEKTRECGTLARQLESAIEDARRQVEQTKEHALSKERAAQNKILDLETQLSRTKTELSQLRRSRDDADRRYQSRLQDLKDRLEQSESTNRSMQNYVQFLKSSYANVFGDGPYSTFLTSSPIRSRSPPA

SEQ ID NO: 60530 - protein, 657 aa, Homo sapiens
  Payload ID: 12117
  Gene Symbol: ODF2
  Gene Name: outer dense fiber of sperm tails 2
  Uniprot ID: Q5BJF6
  ENSP ID: ENSP00000377166
MADQQGPHQNRFPSCGKNGVTSLTQKKVLRAPCGAPSVTVTKSHKRGMKGDTVNVRRSVRVKTKVPWMPPGKSSARPVGCKWENPPHCLEITPPSSEKLVSVMRLSDLSTEDDDSGHCKMNRYDKKIDSLMNAVGCLKSEVKMQKGERQMAKRFLEERKEELEEVAHELAETEHENTVLRHNIERMKEEKDFTILQKKHLQQEKECLMSKLVEAEMDGAAAAKQVMALKDTIGKLKTEKQMTCTDINTLTRQKELLLQKLSTFEETNRTLRDLLREQHCKEDSERLMEQQGALLKRLAEADSEKARLLLLLQDKDKEVEELLQEIQCEKAQAKTASELSKSMESMRGHLQAQLRSKEAENSRLCMQIKNLERSGNQHKAEVEAIMEQLKELKQKGDRDKESLKKAIRAQKERAEKSEEYAEQLHVQLADKDLYVAEALSTLESWRSRYNQVVKEKGDLELEIIVLNDRVTDLVNQQQTLEEKMREDRDSLVERLHRQTAEYSAFKLENERLKASFAPMEDKLNQAHLEVQQLKASVKNYEGMIDNYKSQVMKTRLEADEVAAQLERCDKENKILKDEMNKEIEAARRQFQSQLADLQQLPDILKITEAKLAECQDQLQGYERKNIDLTAIISDLRSRVRDWQKGSHELTRAGARIPR

SEQ ID NO: 60531 - protein, 805 aa, Homo sapiens; identical to SEQ ID NO: 60529
  Payload ID: 12117
  Gene Symbol: ODF2
  Gene Name: outer dense fiber of sperm tails 2
  Uniprot ID: Q5BJF6
  ENSP ID: ENSP00000394506

SEQ ID NO: 60532 - protein, 386 aa, Homo sapiens
  Payload ID: 12117
  Gene Symbol: ODF2
  Gene Name: outer dense fiber of sperm tails 2
  ENSP ID: ENSP00000395489
MGRNRYPPACWFPSCGKNGVTSLTQKKVLRAPCGAPSVTVTKSHKRGMKGDTVNVRRSVRVKTKVPWMPPGKSSARPVGCKWEVKMQKGERQMAKRFLEERKEELEEVAHELAETEHENTVLRHNIERMKEEKDFTILQKKHLQQEKECLMSKLVEAEMDGAAAAKQVMALKDTIGKLKTEKQMTCTDINTLTRQKELLLQKLSTFEETNRTLRDLLREQHCKEDSERLMEQQGALLKRLAEADSEKARLLLLLQDKDKEVEELLQEIQCEKAQAKTASELSKSMESMRGHLQAQLRSKEAENSRLCMQIKNLERSGNQHKAEVEAIMEQLKELKQKGDRDKESLKKAIRAQKERAEKSEEYAEQLHVQLADKDLYVAEALSTLES

SEQ ID NO: 60533 - protein, 576 aa, Homo sapiens
  Payload ID: 12117
  Gene Symbol: ODF2
  Gene Name: outer dense fiber of sperm tails 2
  Uniprot ID: Q5BJF6
  ENSP ID: ENSP00000396687
MKDRSSTPPLHVHVDENTPVHVHIKKLPKPSATSSQKSHKRGMKGDTVNVRRSVRVKTKVKMQKGERQMAKRFLEERKEELEEVAHELAETEHENTVLRHNIERMKEEKDFTILQKKHLQQEKECLMSKLVEAEMDGAAAAKQVMALKDTIGKLKTEKQMTCTDINTLTRQKELLLQKLSTFEETNRTLRDLLREQHCKEDSERLMEQQGALLKRLAEADSEKARLLLLLQDKDKEVEELLQEIQCEKAQAKTASELSKSMESMRGHLQAQLRSKEAENSRLCMQIKNLERSGNQHKAEVEAIMEQLKELKQKGDRDKESLKKAIRAQKERAEKSEEYAEQLHVQLADKDLYVAEALSTLESWRSRYNQVVKEKGDLELEIIVLNDRVTDLVNQQQTLEEKMREDRDSLVERLHRQTAEYSAFKLENERLKASFAPMEDKLNQAHLEVQQLKASVKNYEGMIDNYKSQVMKTRLEADEVAAQLERCDKENKILKDEMNKEIEAARRQFQSQLADLQQLPDILKITEAKLAECQDQLQGYERKNIDLTAIISDLRSRVRDWQKGSHELTRAGARIPR

SEQ ID NO: 60534 - protein, 829 aa, Homo sapiens
  Payload ID: 12117
  Gene Symbol: ODF2
  Gene Name: outer dense fiber of sperm tails 2
  Uniprot ID: Q5BJF6
  ENSP ID: ENSP00000403453
MSASSSGGSPRFPSCGKNGVTSLTQKKVLRAPCGAPSVTVTKSHKRGMKGDTVNVRRSVRVKTKVPWMPPGKSSARPVGCKWENPPHCLEITPPSSEKLVSVMRLSDLSTEDDDSGHCKMNRYDKKIDSLMNAVGCLKSEVKMQKGERQMAKRFLEERKEELEEVAHELAETEHENTVLRHNIERMKEEKDFTILQKKHLQQEKECLMSKLVEAEMDGAAAAKQVMALKDTIGKLKTEKQMTCTDINTLTRQKELLLQKLSTFEETNRTLRDLLREQHCKEDSERLMEQQGALLKRLAEADSEKARLLLLLQDKDKEVEELLQEIQCEKAQAKTASELSKSMESMRGHLQAQLRSKEAENSRLCMQIKNLERSGNQHKAEVEAIMEQLKELKQKGDRDKESLKKAIRAQKERAEKSEEYAEQLHVQLADKDLYVAEALSTLESWRSRYNQVVKEKGDLELEIIVLNDRVTDLVNQQQTLEEKMREDRDSLVERLHRQTAEYSAFKLENERLKASFAPMEDKLNQAHLEVQQLKASVKNYEGMIDNYKSQVMKTRLEADEVAAQLERCDKENKILKDEMNKEIEAARRQFQSQLADLQQLPDILKITEAKLAECQDQLQGYERKNIDLTAIISDLRSRIEHQGDKLEMAREKHQASQKENKQLSLKVDELERKLEATSAQNIEFLQVIAKREEAIHQSQLRLEEKTRECGTLARQLESAIEDARRQVEQTKEHALSKERAAQNKILDLETQLSRTKTELSQLRRSRDDADRRYQSRLQDLKDRLEQSESTNRSMQNYVQFLKSSYANVFGDGPYSTFLTSSPIRSRSPPA

SEQ ID NO: 60535 - protein, 205 aa, Homo sapiens
  Payload ID: 12117
  Gene Symbol: ODF2
  Gene Name: outer dense fiber of sperm tails 2
  ENSP ID: ENSP00000407852
MSASSSGGSPRFPSCGKNGVTSLTQKKVLRAPCGAPSVTVTKSHKRGMKGDTVNVRRSVRVKTKVKMQKGERQMAKRFLEERKEELEEVAHELAETEHENTVLRHNIERMKEEKDFTILQKKHLQQEKECLMSKLVEAEMDGAAAAKQVMALKDTIGKLKTEKQMTCTDINTLTRQKELLLQKLSTFEETNRTLRDLLREQHCKE

SEQ ID NO: 60536 - protein, 156 aa, Homo sapiens
  Payload ID: 12117
  Gene Symbol: ODF2
  Gene Name: outer dense fiber of sperm tails 2
  ENSP ID: ENSP00000415290
MSASSSGGSPRFPSCGKNGVTSLTQKKVLRAPCGAPSVTVTKSHKRGMKGDTVNVRRSVRVKTKNPPHCLEITPPSSEKLVSVMRLSDLSTEDDDSGHCKMNRYDKKIDSLMNAVGCLKSEVKMQKGERQMAKRFLEERKEELEEVAHELAETEHE

SEQ ID NO: 60537 - protein, 638 aa, Homo sapiens
  Payload ID: 12117
  Gene Symbol: ODF2
  Gene Name: outer dense fiber of sperm tails 2
  Uniprot ID: Q5BJF6
  ENSP ID: ENSP00000437579
MGRNRYPPACWFPSCGKNGVTSLTQKKVLRAPCGAPSVTVTKSHKRGMKGDTVNVRRSVRVKTKNPPHCLEITPPSSEKLVSVMRLSDLSTEDDDSGHCKMNRYDKKIDSLMNAVGCLKSEVKMQKGERQMAKRFLEERKEELEEVAHELAETEHENTVLRHNIERMKEEKDFTILQKKHLQQEKECLMSKLVEAEMDGAAAAKQVMALKDTIGKLKTEKQMTCTDINTLTRQKELLLQKLSTFEETNRTLRDLLREQHCKEDSERLMEQQGALLKRLAEADSEKARLLLLLQDKDKEVEELLQEIQCEKAQAKTASELSKSMESMRGHLQAQLRSKEAENSRLCMQIKNLERSGNQHKAEVEAIMEQLKELKQKGDRDKESLKKAIRAQKERAEKSEEYAEQLHVQLADKDLYVAEALSTLESWRSRYNQVVKEKGDLELEIIVLNDRVTDLVNQQQTLEEKMREDRDSLVERLHRQTAEYSAFKLENERLKASFAPMEDKLNQAHLEVQQLKASVKNYEGMIDNYKSQVMKTRLEADEVAAQLERCDKENKILKDEMNKEIEAARRQFQSQLADLQQLPDILKITEAKLAECQDQLQGYERKNIDLTAIISDLRSRVRDWQKGSHELTRAGARIPR

SEQ ID NO: 60538 - protein, 829 aa, Homo sapiens; identical to SEQ ID NO: 60534
  Payload ID: 12117
  Gene Symbol: ODF2
  Gene Name: outer dense fiber of sperm tails 2
  Uniprot ID: Q5BJF6
  ENSP ID: ENSP00000473949

SEQ ID NO: 60539 - protein, 241 aa, Homo sapiens
  Payload ID: 12117
  Gene Symbol: ODF2
  Gene Name: outer dense fiber of sperm tails 2
  ENSP ID: ENSP00000474651
EIEAARRQFQSQLADLQQLPDILKITEAKLAECQDQLQGYERKNIDLTAIISDLRSRIEHQGDKLEMAREKHQASQKENKQLSLKVDELERLEALGPISVLFLGPETFSHLAVFCLVCGSVEGLEALEGTRQTSEEKLLPFQWKLEATSAQNIEFLQVIAKREEAIHQSQLRLEEKTRECGTLARQLESAIEDARRQVEQTKEHALSKERAAQNKILDLETQLSRTKTELSQLRRSRDDAD

SEQ ID NO: 60540 - protein, 144 aa, Homo sapiens
  Payload ID: 12117
  Gene Symbol: ODF2
  Gene Name: outer dense fiber of sperm tails 2
  ENSP ID: ENSP00000474949
MRFPSCGKNGVTSLTQKKVLRAPCGAPSVTVTKSHKRGMKGDTVNVRRSVRVKTKVPWMPPGKSSARPVGCKWENPPHCLEITPPSSEKLVSVMRLSDLSTEDDDSGHCKMNRYDKKIDSLMNAVGCLKSEVKMQKGERQMAKR

SEQ ID NO: 60541 - protein, 100 aa, Homo sapiens
  Payload ID: 12117
  Gene Symbol: ODF2
  Gene Name: outer dense fiber of sperm tails 2
  ENSP ID: ENSP00000475118
MSASSSGGSPRFPSCGKNGVTSLTQKKVLRAPCGAPSVTVTKSHKRGMKGDTVNVRRSVRVKTKVPWMPPGKSSARPVGCKWENPPHCLEITPPSSEKLV

SEQ ID NO: 60542 - protein, 620 aa, Homo sapiens
  Payload ID: 12118
  Gene Symbol: ODF2L
  Gene Name: outer dense fiber of sperm tails 2-like
  Uniprot ID: Q9ULJ1
  ENSP ID: ENSP00000294678
MEKAVNDGSHSEELFCHLKTISEKEDLPRCTSESHLSCLKQDILNEKTELEATLKEAELVTHSVELLLPLFKDTIEKINFENANLSALNLKISEQKEILIKELDTFKSVKLALEHLLRKRDYKQTGDNLSSMLLENLTDNESENTNLKKKVFEKEAHIQELSCLFQSEKANTLKANRFSQSVKVVHERLQIQIHKREAENDKLKEYVKSLETKIAKWNLQSRMNKNEAIVMKEASRQKTVALKKASKVYKQRLDHFTGAIEKLTSQIRDQEAKLSETISASNAWKSHYEKIVIEKTELEVQIETMKKQIINLLEDLKKMEDHGKNSCEEILRKVHSIEYENETLNLENTKLKTTLAALKDEVVSVENELSELQEVEKKQKTLIEMYKTQVQKLQEAAEIVKSRCENLLHKNNQITKTKNKNVEKMRGQMESHLKELERVCDSLTAAERRLHECQESLQCCKGKCADQEHTIRELQGQILKQWEEYSVLAWVDGNHNLLTKLSLEEENCLIQLKCENLQQKLEQMDAENKELEKKLANQEECLKHSNLKFKEKSAEYTALARQLEAALEEGRQKVAEEIEKMSSRESALQIKILDLETELRKKNEEQNQLVCKMNSDPETP

SEQ ID NO: 60543 - protein, 636 aa, Homo sapiens
  Payload ID: 12118
  Gene Symbol: ODF2L
  Gene Name: outer dense fiber of sperm tails 2-like
  Uniprot ID: Q9ULJ1
  ENSP ID: ENSP00000320165
MEKAVNDGSHSEELFCHLKTISEKEDLPRCTSESHLSCLKQDILNEKTELEATLKEAELVTHSVELLLPLFKDTIEKINFENANLSALNLKISEQKEILIKELDTFKSVKLALEHLLRKRDYKQTGDNLSSMLLENLTDNESENTNLKKKVFEKEAHIQELSCLFQSEKANTLKANRFSQSVKVVHERLQIQIHKREAENDKLKEYVKSLETKIAKWNLQSRMNKNEAIVMKEASRQKTVALKKASKVYKQRLDHFTGAIEKLTSQIRDQEAKLSETISASNAWKSHYEKIVIEKTELEVQIETMKKQIINLLEDLKKMEDHGKNSCEEILRKVHSIEYENETLNLENTKLKLRFPCRITESKNMNILIVLDMLCYISSEKTTLAALKDEVVSVENELSELQEVEKKQKTLIEMYKTQVQKLQEAAEIVKSRCENLLHKNNQITKTKNKNVEKMRGQMESHLKELERVCDSLTAAERRLHECQESLQCCKGKCADQEHTIRELQGQVDGNHNLLTKLSLEEENCLIQLKCENLQQKLEQMDAENKELEKKLANQEECLKHSNLKFKEKSAEYTALARQLEAALEEGRQKVAEEIEKMSSRESALQIKILDLETELRKKNEEQNQLVCKMNSDPETP

SEQ ID NO: 60544 - protein, 591 aa, Homo sapiens
  Payload ID: 12118
  Gene Symbol: ODF2L
  Gene Name: outer dense fiber of sperm tails 2-like
  Uniprot ID: Q9ULJ1
  ENSP ID: ENSP00000359597
MEKAVNDGSHSEELFCHLKTISEKEDLPRCTSESHLSCLKQDILNEKTELEATLKEAELVTHSVELLLPLFKDTIEKINFENANLSALNLKISEQKEILIKELDTFKSVKLALEHLLRKRDYKQTGDNLSSMLLENLTDNESENTNLKKKVFEKEAHIQELSCLFQSEKANTLKANRFSQSVKVVHERLQIQIHKREAENDKLKEYVKSLETKIAKWNLQSRMNKNEAIVMKEASRQKTVALKKASKVYKQRLDHFTGAIEKLTSQIRDQEAKLSETISASNAWKSHYEKIVIEKTELEVQIETMKKQIINLLEDLKKMEDHGKNSCEEILRKVHSIEYENETLNLENTKLKTTLAALKDEVVSVENELSELQEVEKKQKTLIEMYKTQVQKLQEAAEIVKSRCENLLHKNNQITKTKNKNVEKVDGNHNLLTKLSLEEENCLIQLKCENLQQKLEQMDAENKELEKKLANQEECLKHSNLKFKEKSAEYTALARQLEAALEEGRQKVAEEIEKMSSRESALQIKILDLETELRKKNEEQNQLVCKMNSKAQHQEVCLKEVQNSLEKSENQNESIKNYLQFLKTSYVTMFE

SEQ ID NO: 60545 - protein, 636 aa, Homo sapiens; identical to SEQ ID NO: 60543
  Payload ID: 12118
  Gene Symbol: ODF2L
  Gene Name: outer dense fiber of sperm tails 2-like
  Uniprot ID: Q9ULJ1
  ENSP ID: ENSP00000359600

SEQ ID NO: 60546 - protein, 49 aa, Homo sapiens
  Payload ID: 12118
  Gene Symbol: ODF2L
  Gene Name: outer dense fiber of sperm tails 2-like
  ENSP ID: ENSP00000378220
MLLENLTDNESENTNLKKKVFEKEAHIQELSCLFQSEKANTLKANRFSQ

SEQ ID NO: 60547 - protein, 54 aa, Homo sapiens
  Payload ID: 12118
  Gene Symbol: ODF2L
  Gene Name: outer dense fiber of sperm tails 2-like
  ENSP ID: ENSP00000431920
  MOD_RES (1)..(1): Any amino acid
XAAERRLHECQESLQCCKGKCADQEHTIRELQGQNMDHVADFEAVGRIFCLGMG

SEQ ID NO: 60548 - protein, 60 aa, Homo sapiens
  Payload ID: 12118
  Gene Symbol: ODF2L
  Gene Name: outer dense fiber of sperm tails 2-like
  ENSP ID: ENSP00000432632
MEKAVNDGSHSEELFCHLKTISEKEDLPRCTSESHLSWYSHQYQGKSKFPILGFPVLSII

SEQ ID NO: 60549 - protein, 243 aa, Homo sapiens
  Payload ID: 12118
  Gene Symbol: ODF2L
  Gene Name: outer dense fiber of sperm tails 2-like
  ENSP ID: ENSP00000432834
MLLENLTDNESENTNLKKKVFEKEAHIQELSCLFQSEKSLETKIAKWNLQSRMNKNEAIVMKEASRQKTVALKKASKVYKQRLDHFTGAIEKLTSQIRDQEAKLSETISASNAWKSHYEKIVIEKTELEVQIETMKKQIINLLEDLKKMEDHGKNSCEEILRKVHSIEYENETLNLENTKLKTTLAALKDEVVSVENELSELQEVEKKQKTLIEMYKTQVQKLQEAAEIVKSRCENLLHKNNQ

SEQ ID NO: 60550 - protein, 520 aa, Homo sapiens
  Payload ID: 12118
  Gene Symbol: ODF2L
  Gene Name: outer dense fiber of sperm tails 2-like
  ENSP ID: ENSP00000433092
TGDNLSSMLLENLTDNESENTNLKKKVFEKEAHIQELSCLFQSEKANTLKANRFSQSVKVVHERLQIQIHKREAENDKLKEYVKSLETKIAKWNLQSRMNKNEAIVMKEASRQKTVALKKASKVYKQRLDHFTGAIEKLTSQIRDQEAKLSETISASNAWKSHYEKIVIEKTELEVQIETMKKQIINLLEDLKKMEDHGKNSCEEILRKVHSIEYENETLNLENTKLKTTLAALKDEVVSVENELSELQEVEKKQKTLIEMYKTQVQKLQEAAEIVKSRCENLLHKNNQITKTKNKNVEKMRGQMESHLKELERVCDSLTAAERRLHECQESLQCCKGKCADQEHTIRELQGQVDGNHNLLTKLSLEEENCLIQLKCENLQQKLEQMDAENKELEKKLANQEECLKHSNLKFKEKSAEYTALARQLEAALEEGRQKVAEEIEKMSSRESALQIKILDLETELRKKNEEQNQLVCKMNSKAQHQEVCLKEVQNSLEKSENQNESIKNYLQFLKTSYVTMFE

SEQ ID NO: 60551 - protein, 43 aa, Homo sapiens
  Payload ID: 12118
  Gene Symbol: ODF2L
  Gene Name: outer dense fiber of sperm tails 2-like
  ENSP ID: ENSP00000433632
MEKAVNDGSHSEELFCHLKTISEKEDLPRCTSESHLSWRIFLH

SEQ ID NO: 60552 - protein, 153 aa, Homo sapiens
  Payload ID: 12118
  Gene Symbol: ODF2L
  Gene Name: outer dense fiber of sperm tails 2-like
  ENSP ID: ENSP00000437043
ILKQWEEYSVLAWVDGNHNLLTKLSLEEENCLIQLKCENLQQKLEQMDAENKELEKKLANQEECLKHSNLKFKEKSAEYTALARQLEAALEEGRQKVAEEIEKMSSRESALQIKILDLETELRKKNEEQNQLVCKMNSKAQHQEVCLKEVQNS

SEQ ID NO: 60553 - protein, 60 aa, Homo sapiens; identical to SEQ ID NO: 60548
  Payload ID: 12118
  Gene Symbol: ODF2L
  Gene Name: outer dense fiber of sperm tails 2-like
  ENSP ID: ENSP00000437292

SEQ ID NO: 60554 - protein, 254 aa, Homo sapiens
  Payload ID: 12119
  Gene Symbol: ODF3
  Gene Name: outer dense fiber of sperm tails 3
  Uniprot ID: Q96PU9
  ENSP ID: ENSP00000325868
MTEEVWMGTWRPHRPRGPIMALYSSPGPKYLIPPTTGFMKHTPTKLRAPAYSFRGAPMLLAENCSPGPRYNVNPKILRTGKDLGPAYSILGRYQTKTMLTPGPGDYFPEKSTKYVFDSAPSHSISARTKAFRVDSTPGPAAYMLPMVMGPNTVGKASQPSFSIKGRSKLGGFSDDLHKTPGPAAYRQTDVRVTKFKAPQYTMAARVEPPGDKTLKPGPGAHSPEKVTLTKPCAPVVTFGIKHSDYMTPLLVDVE

SEQ ID NO: 60555 - protein, 127 aa, Homo sapiens
  Payload ID: 12119
  Gene Symbol: ODF3
  Gene Name: outer dense fiber of sperm tails 3
  ENSP ID: ENSP00000339623
MTEEVWMGTWRPHRPRGPIMALYSSPGPKYLIPPTTGFMKHTPTKLRAPAYSFRGAPMLLAENCSPGPRYNTVGKASQPSFSIKGRSKLGGFSDDLHKVTLTKPCAPVVTFGIKHSDYMTPLLVDVE

SEQ ID NO: 60556 - protein, 207 aa, Homo sapiens
  Payload ID: 12119
  Gene Symbol: ODF3
  Gene Name: outer dense fiber of sperm tails 3
  Uniprot ID: Q96PU9
  ENSP ID: ENSP00000436588
MTEEVWMGTWRPHRPRGPIMALYSSPGPKYLIPPTTGFMKHTPTKLRAPAYSFRGAPMLLAENCSPGPRYNVNPKILRTGKDLGPAYSILGRYQTKTMLTPGPGDYFPEKSTKYVFDSAPSHSISARTKAFRVDSTPGPAAYMLPMVMGPNTVGKASQPSFSIKGRSKLGGFSDDLHKVTLTKPCAPVVTFGIKHSDYMTPLLVDVE

SEQ ID NO: 60557 - protein, 253 aa, Homo sapiens
  Payload ID: 12120
  Gene Symbol: ODF3B
  Gene Name: outer dense fiber of sperm tails 3B
  Uniprot ID: A8MYP8
  ENSP ID: ENSP00000382804
MGSDAWVGLWRPHRPRGPIAAHYGGPGPKYKLPPNTGYALHDPSRPRAPAFTFGARFPTQQTTCGPGPGHLVPARMTVRGTDGAPAYSIYGRPRRSAPFLTPGPGRYFPERAGNATYPSAPRHTIAPRNWGVQAEQQSPGPAAYTVPSLLGPRVIGKVSAPTCSIYGRRAAGSFFEDLSKTPGPCAYQVVSPGVYKSRAPQFTILARTSLPQDNTRKPGPAAYNVDQHRKPRGWSFGIRHSDYLAPLVTDADN

SEQ ID NO: 60558 - protein, 281 aa, Homo sapiens
  Payload ID: 12120
  Gene Symbol: ODF3B
  Gene Name: outer dense fiber of sperm tails 3B
  ENSP ID: ENSP00000384012
MGSDAWVGLWRPHRPRGPIAAHYGGPGPKYKLPPNTGYALHDPSRPRAPAFTFGARFPTQQTTCGPGPGHLVPARMTVRGTDGAPAYSIYGRPRRSAPFLTPGPGSHAVLAPHTLDPPRRQVLPGASGERDVPQCASAHHCSPKLGCPGGTAEPRSRGLYGALALGSARHRQSLRPNLLHLRPQSGWQFLRGPQQDPGPLRLSGRESRGLQVPGPPVHDSGADFAPPRQHSEARARGLQRGSAPEAPRLEFRDPALGLPGPAGDRRGQLTRQAGAAPHVFA

SEQ ID NO: 60559 - protein, 242 aa, Homo sapiens
  Payload ID: 12120
  Gene Symbol: ODF3B
  Gene Name: outer dense fiber of sperm tails 3B
  ENSP ID: ENSP00000384310
MGSDAWVGLWRPHRPRGPIAAHYGGPGPKYKLPPNTADDVRPRARPPGARSHDRARHRRRPRLLHLRPPTPLSALPHSGTWQVLPGASGERDVPQCASAHHCSPKLGCPGGTAEPRSRGLYGALALGSARHRQSLRPNLLHLRPQSGWQFLRGPQQDPGPLRLSGRESRGLQVPGPPVHDSGADFAPPRQHSEARARGLQRGSAPEAPRLEFRDPALGLPGPAGDRRGQLTRQAGAAPHVFA

SEQ ID NO: 60560 - protein, 185 aa, Homo sapiens
  Payload ID: 12120
  Gene Symbol: ODF3B
  Gene Name: outer dense fiber of sperm tails 3B
  ENSP ID: ENSP00000385123
MGSDAWVGLWRPHRPRGPIAAHYGGPGPKYKLPPNTGRYFPERAGNATYPSAPRHTIAPRNWGVQAEQQSPGPAAYTVPSLLGPRVIGKVSAPTCSIYGRRAAGSFFEDLSKTPGPCAYQVVSPGVYKSRAPQFTILARTSLPQDNTRKPGPAAYNVDQHRKPRGWSFGIRHSDYLAPLVTDADN

SEQ ID NO: 60561 - protein, 253 aa, Homo sapiens; identical to SEQ ID NO: 60557
  Payload ID: 12120
  Gene Symbol: ODF3B
  Gene Name: outer dense fiber of sperm tails 3B
  Uniprot ID: A8MYP8
  ENSP ID: ENSP00000390712

SEQ ID NO: 60562 - protein, 46 aa, Homo sapiens
  Payload ID: 12120
  Gene Symbol: ODF3B
  Gene Name: outer dense fiber of sperm tails 3B
  ENSP ID: ENSP00000393668
MGSDAWVGLWRPHRPRGPIAAHYGGPGPKYKLPPNTGYALHDPSRP

SEQ ID NO: 60563 - protein, 274 aa, Homo sapiens
  Payload ID: 12121
  Gene Symbol: ODF3L1
  Gene Name: outer dense fiber of sperm tails 3-like 1
  Uniprot ID: Q8IXM7
  ENSP ID: ENSP00000329584
MKLPKGTRSSVYFAQHPEKEPLPSRQEVKQTPVIMAKIKGPGPAKYLRPSCTGYIDHDISMFKAPAYTLHSRHSEKRMVCHSSPGPCYLLDPKITRFGMSSCPQVPMEERISNLRLNPTLASCQYYFEKIHPPGERRAPQYTFGYRRPYRVMDLNPAPNQYQMPLLLGPNTPVSRAAPCYSLASRDKNWFYKEDVAGGPGPTTYARPEPSIYQNRSPTYSMAKRFAYPLDLTPRPGPGSHEVQQVTVHKPHIPAFTMGIKHSLHLCPLVIDIRD

SEQ ID NO: 60564 - protein, 289 aa, Homo sapiens
  Payload ID: 12122
  Gene Symbol: ODF3L2
  Gene Name: outer dense fiber of sperm tails 3-like 2
  Uniprot ID: Q3SX64
  ENSP ID: ENSP00000318029
MGTLSCDSTPRLATAPLGRRVTEGQIPETGLRKSCGTATLENGSGPGLYVLPSTVGFINHDCTRVASPAYSLVRRPSEAPPQDTSPGPIYFLDPKVTRFGRSCTPAYSMQGRAKSRGPEVTPGPGAYSPEKVPPVRHRTPPAFTLGCRLPLKPLDTSAPAPNAYTMPPLWGSQIFTKPSSPSYTVVGRTPPARPPQDPAEIPGPGQYDSPDANTYRQRLPAFTMLGRPRAPRPLEETPGPGAHCPEQVTVNKARAPAFSMGIRHSKRASTMAATTPSRPAGHRLPGRCC

SEQ ID NO: 60565 - protein, 253 aa, Homo sapiens
  Payload ID: 12122
  Gene Symbol: ODF3L2
  Gene Name: outer dense fiber of sperm tails 3-like 2
  Uniprot ID: Q3SX64
  ENSP ID: ENSP00000372143
MGTLSCDSTPRLATAPLGRRVTEGQIPETGLRKSCGTATLENAPPQDTSPGPIYFLDPKVTRFGRSCTPAYSMQGRAKSRGPEVTPGPGAYSPEKVPPVRHRTPPAFTLGCRLPLKPLDTSAPAPNAYTMPPLWGSQIFTKPSSPSYTVVGRTPPARPPQDPAEIPGPGQYDSPDANTYRQRLPAFTMLGRPRAPRPLEETPGPGAHCPEQVTVNKARAPAFSMGIRHSKRASTMAATTPSRPAGHRLPGRCC

SEQ ID NO: 60566 - protein, 257 aa, Homo sapiens
  Payload ID: 12123
  Gene Symbol: ODF4
  Gene Name: outer dense fiber of sperm tails 4
  Uniprot ID: Q2M2E3
  ENSP ID: ENSP00000331086
MDAEYSGNEFPRSEGERDQHQRPGKERKSGEAGWGTGELGQDGRLLSSTLSLSSNRSLGQRQNSPLPFQWRITHSFRWMAQVLASELSLVAFILLLVVAFSKKWLDLSRSLFYQRWPVDVSNRIHTSAHVMSMGLLHFYKSRSCSDLENGKVTFIFSTLMLFPINIWIFELERNVSIPIGWSYFIGWLVLILYFTCAILCYFNHKSFWSLILSHPSGAVSCSSSFGSVEESPRAQTITDTPITQEGVLDPEQKDTHV

SEQ ID NO: 60567 - protein, 142 aa, Homo sapiens
  Payload ID: 12123
  Gene Symbol: ODF4
  Gene Name: outer dense fiber of sperm tails 4
  ENSP ID: ENSP00000461942
MDAEYSGNEFPRSEGERDQHQRPGKERKSGEAGWGTVTFIFSTLMLFPINIWIFELERNVSIPIGWSYFIGWLVLILYFTCAILCYFNHKSFWSLILSHPSGAVSCSSSFGSVEESPRAQTITDTPITQEGVLDPEQKDTHV

SEQ ID NO: 60568 - protein, 227 aa, Homo sapiens
  Payload ID: 12124
  Gene Symbol: OVCA2
  Gene Name: ovarian tumor suppressor candidate 2
  Uniprot ID: Q8WZ82
  ENSP ID: ENSP00000461388
MAAQRPLRVLCLAGFRQSERGFREKTGALRKALRGRAELVCLSGPHPVPDPPGPEGARSDFGSCPPEEQPRGWWFSEQEADVFSALEEPAVCRGLEESLGMVAQALNRLGPFDGLLGFSQGAALAALVCALGQAGDPRFPLPRFILLVSGFCPRGIGFKESILQRPLSLPSLHVFGDTDKVIPSQESVQLASQFPGAITLTHSGGHFIPAAAPQRQAYLKFLDQFAE

SEQ ID NO: 60569 - protein, 678 aa, Homo sapiens
  Payload ID: 12125
  Gene Symbol: OVGP1
  Gene Name: oviductal glycoprotein 1, 120kDa
  Uniprot ID: Q12889
  ENSP ID: ENSP00000358747
MWKLLLWVGLVLVLKHHDGAAHKLVCYFTNWAHSRPGPASILPHDLDPFLCTHLIFAFASMNNNQIVAKDLQDEKILYPEFNKLKERNRELKTLLSIGGWNFGTSRFTTMLSTFANREKFIASVISLLRTHDFDGLDLFFLYPGLRGSPMHDRWTFLFLIEELLFAFRKEALLTMRPRLLLSAAVSGVPHIVQTSYDVRFLGRLLDFINVLSYDLHGSWERFTGHNSPLFSLPEDPKSSAYAMNYWRKLGAPSEKLIMGIPTYGRTFRLLKASKNGLQARAIGPASPGKYTKQEGFLAYFEICSFVWGAKKHWIDYQYVPYANKGKEWVGYDNAISFSYKAWFIRREHFGGAMVWTLDMDDVRGTFCGTGPFPLVYVLNDILVRAEFSSTSLPQFWLSSAVNSSSTDPERLAVTTAWTTDSKILPPGGEAGVTEIHGKCENMTITPRGTTVTPTKETVSLGKHTVALGEKTEITGAMTMTSVGHQSMTPGEKALTPVGHQSVTTGQKTLTSVGYQSVTPGEKTLTPVGHQSVTPVSHQSVSPGGTTMTPVHFQTETLRQNTVAPRRKAVAREKVTVPSRNISVTPEGQTMPLRGENLTSEVGTHPRMGNLGLQMEAENRMMLSSSPVIQLPEQTPLAFDNRFVPIYGNHSSVNSVTPQTSPLSLKKEIPENSAVDEEA

SEQ ID NO: 60570 - protein, 1134 aa, Homo sapiens
  Payload ID: 12126
  Gene Symbol: OVCH1
  Gene Name: ovochymase 1
  Uniprot ID: Q7RTY7
  ENSP ID: ENSP00000326708
MGLLASAGLLLLLVIGHPRSLGLKCGIRMVNMKSKEPAVGSRFFSRISSWRNSTVTGHPWQVSLKSDEHHFCGGSLIQEDRVVTAAHCLDSLSEKQLKNITVTSGEYSLFQKDKQEQNIPVSKIITHPEYNSREYMSPDIALLYLKHKVKFGNAVQPICLPDSDDKVEPGILCLSSGWGKISKTSEYSNVLQEMELPIMDDRACNTVLKSMNLPPLGRTMLCAGFPDWGMDACQGDSGGPLVCRRGGGIWILAGITSWVAGCAGGSVPVRNNHVKASLGIFSKVSELMDFITQNLFTGLDRGQPLSKVGSRYITKALSSVQEVNGSQRGKGILDMEKQVGCDHDYVSLRSSSGVLFNQRSLMEDDGKQNKRVCGKILPSPLLAETSEAMVPFVSDTEDSGSGFELTVTAVQKSEAGSGCGSLAILVEEGTNHSAKYPDLYPSNTRCHWFICAPEKHIIKLTFEDFAVKFSPNCIYDAVVIYGDSEEKHKLAKLCGMLTITSIFSSSNMTVIYFKSDGKNRLQGFKARFTILPSESLNKFEPKLPPQNNPVSTVKAILHDVCGIPPFSPQWLSRRIAGGEEACPHCWPWQVGLRFLGDYQCGGAIINPVWILTAAHCVQLKNNPLSWTIIAGDHDRNLKESTEQVRRAKHIIVHEDFNTLSYDSDIALIQLSSPLEYNSVVRPVCLPHSAEPLFSSEICAVTGWGSISADGGLASRLQQIQVHVLEREVCEHTYYSAHPGGITEKMICAGFAASGEKDFCQGDSGGPLVCRHENGPFVLYGIVSWGAGCVQPWKPGVFARVMIFLDWIQSKINGPASLQTNNKCKTLKQQLPPPTPSPDSASWPGCCSEAELEKPRGFFPTPRYLLDYRGRLECSWVLRVSASSMAKFTIEYLSLLGSPVCQDSVLIIYEERHSKRKTAGGLHGRRLYSMTFMSPGPLVRVTFHALVRGAFGISYIVLKVLGPKDSKITRLSQSSNREHLVPCEDVLLTKPEGIMQIPRNSHRTTMGCQWRLVAPLNHIIQLNIINFPMKPTTFVCHGHLRVYEGFGPGKKLIASFAGTLAMILTKDILKREKLNFINTYIMHIWENSVYDNVRSVGKRKQKKFASNLSYSMEAEKSRIQVPADLVPAKGSLSGS

SEQ ID NO: 60571 - protein, 121 aa, Homo sapiens
  Payload ID: 12126
  Gene Symbol: OVCH1
  Gene Name: ovochymase 1
  ENSP ID: ENSP00000445260
  MOD_RES (1)..(1): Any amino acid
XKITRLSQSSNREHLVPCEDVLLTKPEGIMQIPRNSHRTTMGCQWRLVAPLNHIIQLNIINFPMKPTTFVCHGHLRVYEGFGPGKKLIAHLHGSKKEFILISSAAYLTVHFKTDESERKRF

SEQ ID NO: 60572 - protein, 80 aa, Homo sapiens
  Payload ID: 12126
  Gene Symbol: OVCH1
  Gene Name: ovochymase 1
  ENSP ID: ENSP00000445480
REHLVPCEDVLLTKPEGIMQIPRNSHRTTMGCQWRLVAPLNHIIQLNIINFPMKPTTFVCHGHLRVYEGFGPGKKLIGEC

SEQ ID NO: 60573 - protein, 565 aa, Homo sapiens
  Payload ID: 12127
  Gene Symbol: OVCH2
  Gene Name: ovochymase 2 (gene/pseudogene)
  ENSP ID: ENSP00000484497
MLISRNKLILLLGIVFFERGKSATLSLPKAPSCGQSLVKVQPWNYFNIFSRILGGSQVEKGSYPWQVSLKQRQKHICGGSIVSPQWVITAAHCIANRNIVSTLNVTAGEYDLSQTDPGEQTLTIETVIIHPHFSTKKPMDYDIALLKMAGAFQFGHFVGPICLPELREQFEAGFICTTAGWGRLTEGGVLSQVLQEVNLPILTWEECVAALLTLKRPISGKTFLCTGFPDGGRDACQGDSGGSLMCRNKKGAWTLAGVTSWGLGCGRGWRNNVRKSDQGSPGIFTDISKVLPWIHEHIQTGNRRKSSRAWCSEQDVIVSGAEGKLHFPESLHLYYESKQRCVWTLLVPEEMHVLLSFSHLDVESCHHSYLSMYSLEDRPIGKFCGESLPSSILIGSNSLRLKFVSDATDNAAGFNLTYKALKPNYIPDSGCSYLTVLFEEGLIQSLNYPENYSDKANCDWIFQASKHHLIKLSFQSLEIEESGDCTSDYVTVHSDVERKKEIARLCGYDVPTPVLSPSSIMLISFQSDENGTCRGFQATVSFIPKAVYPDLNISISEDESMFLET

SEQ ID NO: 60574 - protein, 565 aa, Homo sapiens; identical to SEQ ID NO: 60573
  Payload ID: 12127
  Gene Symbol: OVCH2
  Gene Name: ovochymase 2 (gene/pseudogene)
  ENSP ID: ENSP00000484790

SEQ ID NO: 60575 - protein, 267 aa, Homo sapiens
  Payload ID: 12128
  Gene Symbol: OVOL1
  Gene Name: ovo-like zinc finger 1
  Uniprot ID: O14753
  ENSP ID: ENSP00000337862
MPRAFLVKKPCVSTCKRNWSELPDEERGEIYVPVSLGFCPPQPYREPEPSVAEPPSCPLALNMSLRDSSYSMAPGPCVVAQLPSEDMGHLTDPQSRDHGFLRTKMKVTLGDSPSGDLFTCRVCQKAFTYQRMLNRHMKCHNDVKRHLCTYCGKGFNDTFDLKRHVRTHTGVRPYKCSLCDKAFTQRCSLESHLKKIHGVQQKYAYKERRAKLYVCEECGCTSESQEGHVLHLKEHHPDSPLLRKTSKKVAVALQNTVTSLLQGSPHL

SEQ ID NO: 60576 - protein, 205 aa, Homo sapiens
  Payload ID: 12128
  Gene Symbol: OVOL1
  Gene Name: ovo-like zinc finger 1
  ENSP ID: ENSP00000434220
MSLRDSSYSMAPGPCVVAQLPSEDMGHLTDPQSRDHGFLRTKMKVTLGDSPSGDLFTCRVCQKAFTYQRMLNRHMKCHNDVKRHLCTYCGKGFNDTFDLKRHVRTHTGVRPYKCSLCDKAFTQRCSLESHLKKIHGVQQKYAYKERRAKLYVCEECGCTSESQEGHVLHLKEHHPDSPLLRKTSKKVAVALQNTVTSLLQGSPHL

SEQ ID NO: 60577 - protein, 275 aa, Homo sapiens
  Payload ID: 12129
  Gene Symbol: OVOL2
  Gene Name: ovo-like zinc finger 2
  Uniprot ID: Q9BRP0
  ENSP ID: ENSP00000278780
MPKVFLVKRRSLGVSVRSWDELPDEKRADTYIPVGLGRLLHDPPEDCRSDGGSSSGSGSSSAGEPGGAESSSSPHAPESETPEPGDAEGPDGHLATKQRPVARSKIKFTTGTCSDSVVHSCDLCGKGFRLQRMLNRHLKCHNQVKRHLCTFCGKGFNDTFDLKRHVRTHTGIRPYKCNVCNKAFTQRCSLESHLKKIHGVQQQYAYKQRRDKLYVCEDCGYTGPTQEDLYLHVNSAHPGSSFLKKTSKKLAALLQGKLTSAHQENTSLSEEEERK

SEQ ID NO: 60578 - protein, 214 aa, Homo sapiens
  Payload ID: 12130
  Gene Symbol: OVOL3
  Gene Name: ovo-like zinc finger 3
  Uniprot ID: O00110
  ENSP ID: ENSP00000465620
MPRAFLVRSRRPQPPNWGHLPDQLRGDAYIPGGPLTVPGGKGQERRSVTIWLFSSDCSSLGGPPAQQSSSVRDPWTAQPTQGNLTSAPRGPGTLGCPLCPKAFPLQRMLTRHLKCHSPVRRHLCRCCGKGFHDAFDLKRHMRTHTGIRPFRCSACGKAFTQRCSLEAHLAKVHGQPASYAYRERREKLHVCEDCGFTSSRPDTYAQHRALHRAA

SEQ ID NO: 60579 - protein, 190 aa, Homo sapiens
  Payload ID: 12130
  Gene Symbol: OVOL3
  Gene Name: ovo-like zinc finger 3
  ENSP ID: ENSP00000487603
MPRAFLVRSRRPQPPNWGHLPDQLRGDAYIPDCSSLGGPPAQQSSSVRDPWTAQPTQGNLTSAPRGPGTLGCPLCPKAFPLQRMLTRHLKCHSPVRRHLCRCCGKGFHDAFDLKRHMRTHTGIRPFRCSACGKAFTQRCSLEAHLAKVHGQPASYAYRERREKLHVCEDCGFTSSRPDTYAQHRALHRAA

SEQ ID NO: 60580 - protein, 1433 aa, Homo sapiens
  Payload ID: 12131
  Gene Symbol:
  Gene Name: OVOS2
  ENSP ID: ENSP00000479893
MTGSHLSHDSWQYVLLIPSVLQEGSLDKACAQLFNLTESVVLTVSLNYGEVQTKIFEENVTGENFFKCISFEVPQARSDPLAFITFSAKGATLNLEERRSVAIRSRENVVFVQTDKPTYKPGQKDVNGIAQFFLDTYTFTYPNITLKDPQNNRIFQWQNVTSFRNITQLSFQLISEPMFGDYWIVVKRNSRKTVTHQFAVKRYVLPKFEVTVNAPQTVTISDDEFQVDVCAKYTFGQPVQGKTQIRVCREYFSSSNCEKNDNEICEQFIAQLENGCVSQIVNTKVFQLYRSGLFMTFHVAVIVTEFGTGNYCMQISEKTSVFITQLLGTVNFENMDTFYRRGISYFGTLKFSDPNNVPMVNKLLQLELNDEFIGNYTTDENGEAQFSIDTSDIFDPEFNLKATYVRPKSCYLPSWLTPQYLDAHFLVSRFYSRTNSFLKIVPEPKQLECNHQKVVTVHYSLNSEAYEDDSNVKFFYLVSLSHDSGNFQHRISSSPIYTAWNGNFSFPLSISADLAPAAVLFVYTLHPSGEIVADSVRFQVDKCFKHKVNIKFSNEQGLPGSNASLYLQAAPVLFCALGAVDGNVLLLKSEQQLSAESVYNMVPSIEPYGYFYHGLNLDDGKEDPCIPQRDMFYNGLYYTPVSNYGDGDIYNIVRNMGLKVFTNLHYRKPEVCVMERRLPLPKPLYLETENYGPMHSVPSRIACRGENADYVEQAIIQTVRTNFPETWMWDLVSVDSSGSANLSFLIPDTITQWEASGFCVNGDVGFGISSTTTLEVSQPFFIEIASPFSVVQNEQFDLIVNAFSYLNTCVEISVQVEESQNYEANINTWKINGSEVIQAGGRKTNIWTIIPKKLGKVNITVVAESKQSSACPNEGMEQQKLNWKDTVVKSFLVEPEGIEKERTQSFLICTEGAKASKQGVLDLPNDVVEGSARGFFTVVGDILGLAMQNLVVLQMPYGGGEQNAALLASDTYVLDYLKSTEQLTEEVQSKAFFLLSNGYQRQLSFKNSDGSYSVFWQQNQKGSIWLSALTFKTLERMKKFVFIDENVQKQTLIWLSSQQKTSGCFKNDGQLFNHAWEGGDEEDISLTAYVVGMFFEAGLNSTFPALRNALFCLEAALDSGVTNGYNHAILAYAFALAGKEKQVESLLQTLDQSATKLNNVIYWERERKPKTEEFPSFIPWAPSAQTEKSCYVLLAVISRKIPDLTYASKIVQWLAQQMNSHGGFSSNQVINVGLILIAILGEEGLFSKNQNTVTFSSEGSSEIFQVNGHNRLLVQRSEVTQAPGQYTVDVEGRGCTFIQATLKYNVLLPKKASGFSLSLEIVKNYSLTVFDLTVNLKYTGIRNKSSMVVIDVKMLSGFTPTMSSIEELENKGQVMKTEVKNDHVLFYLENVFGRADSFTFSVEQSNLVFNIQPAPGMVYDYYEKDGEAFLLTN

SEQ ID NO: 60581 - protein, 1432 aa, Homo sapiens
  Payload ID: 12131
  Gene Symbol:
  Gene Name: OVOS2
  ENSP ID: ENSP00000487815
MTGSHLSHDSWQYVLLIPSVLQEGSLDKACAQLFNLTESVVLTVSLNYGEVQTKIFEENVTGENFFKCISFEVPQARSDPLAFITFSAKGATLNLEERRSVAIRSRENVVFVQTDKPTYKPGQKDVNGIAQFFLDTYTFTYPNITLKDPQNNRIFQWQNVTSFRNITQLSFQLISEPMFGDYWIVVKRNSRKTVTHQFAVKRYVLPKFEVTVNAPQTVTISDDEFQVDVCAKYTFGQPVQGKTQIRVCREYFSSSNCEKNDNEICEQFIAQLENGCVSQIVNTKVFQLYRSGLFMTFHVAVIVTEFGTGNYCMQISEKTSVFITQLLGTVNFENMDTFYRRGISYFGTLKFSDPNNVPMVNKLLQLELNDEFIGNYTTDENGEAQFSIDTSDIFDPEFNLKATYVRPKSCYLPSWLTPQYLDAHFLVSRFYSRTNSFLKIVPEPKQLECNHQKVVTVHYSLNSEAYEDDSNVKFFYLVSLSHDSGNFQHRISSSPIYTAWNGNFSFPLSISADLAPAAVLFVYTLHPSGEIVADSVRFQVDKCFKHKVNIKFSNEQGLPGSNASLYLQAAPVLFCALGAVDGNVLLLKSEQQLSAESVYNMVPSIEPYGYFYHGLNLDDGKEDPCIPQRDMFYNGLYYTPVSNYGDGDIYNIVRNMGLKVFTNLHYRKPEVCVMERRLPLPKPLYLETENYGPMHSVPSRIACRGENADYVEQAIIQTVRTNFPETWMWDLVSVDSSGSANLSFLIPDTITQWEASGFCVNGDVGFGISSTTTLEVSQPFFIEIASPFSVVQNEQFDLIVNAFSYLNTCVEISVQVEESQNYEANINTWKINGSEVIQAGGRKTNIWTIIPKKLGKVNITVVAESKQSSACPNEGMEQQKLNWKDTVVKSFLVEPEGIEKERTQSFLICTEGAKASKQGVLDLPNDVVEGSARGFFTVVGDILGLAMQNLVVLQMPYGGGEQNAALLASDTYVLDYLKSTEQLTEEVQSKAFFLLSNGYQRQLSFKNSDGSYSVFWQQNQKGSIWLSALTFKTLERMKKFVFIDENVQKQTLIWLSSQQKTSGCFKNDGQLFNHAWEGGDEEDISLTAYVVGMFFEAGLNSTFPALRNALFCLEAALDSGVTNGYNHAILAYAFALAGKEKQVESLLQTLDQSATKLNNVIYWERERKPKTEEFPSFIPWAPSAQTEKSCYVLLAVISRKIPDLTYASKIVQWLAQQMNSHGGFSSNQVINVGLILIAICGEEGLFSKNQNTVTFSSEGSSEIQFNGHNRLLVQRSEVTQAPGQYTVDVEGRGCTFIQATLKYNVLLPKKASGFSLSLEIVKNYSLTVFDLTVNLKYTGIRNKSSMVVIDVKMLSGFTPTMSSIEELENKGQVMKTEVKNDHVLFYLENVFGRADSFTFSAEQSNLVFNIQPAPGMVYDYYWKGGEAFLLTN

SEQ ID NO: 60582 - protein, 1419 aa, Homo sapiens
  Payload ID: 12131
  Gene Symbol:
  Gene Name: OVOS2
  ENSP ID: ENSP00000488166
MTGSHLSHDSWQYVLLIPSVLQEGSLDKACAQLFNLTESVVLTVSLNYGEVQTKIFEENVTGENFFKCISFEVPQARSDPLAFITFSAKGATLNLEERRSVAIRSRENVVFVQTDKPTYKPGQKDVNGIAQFFLDTYTFTYPNITLKDPQNNRIFQWQNVTSFRNITQLSFQLISEPMFGDYWIVVKRNSRKTVTHQFAVKRYVLPKFEVTVNAPQTVTISDDEFQVDVCAKYTFGQPVQGKTQIRVCREYFSSSNCEKNDNEICEQFIAQLENGCVSQIVNTKVFQLYRSGLFMTFHVAVIVTEFGTGNYCMQISEKTSVFITQLLGTVNFENMDTFYRRGISYFGTLKFSDPNNVPMVNKLLQLELNDEFIGNYTTDENGEAQFSIDTSDIFDPEFNLKATYVRPKSCYLPSWLTPQYLDAHFLVSRFYSRTNSFLKIVPEPKQLECNHQKVVTVHYSLNSEAYEDDSNVKFFYLVSLSHDSGNFQHRISSSPIYTAWNGNFSFPLSISADLAPAAVLFVYTLHPSGEIVADSVRFQVDKCFKHKVNIKFSNEQGLPGSNASLYLQAAPVLFCALGAVDGNVLLLKSEQQLSAESVYNMVPSIEPYGYFYHGLNLDDGKEDPCIPQRDMFYNGLYYTPVSNYGDGDIYNIVRNMGLKVFTNLHYRKPEVCVMERRLPLPKPLYLETENYGPMHSVPSRIACRGENADYVEQAIIQTVRTNFPETWMWDLVSVDSSGSANLSFLIPDTITQWEASGFCVNGDVGFGISSTTTLEVSQPFFIEIASPFSVVQNEQFDLIVNAFSYLNTCVEISVQVEESQNYEANINTWKINGSEVIQAGGRKTNIWTIIPKKLGKVNITVVAESKQSSACPNEGMEQQKLNWKDTVVKSFLVEPEGIEKERTQSFLICTEGAKASKQGVLDLPNDVVEGSARGFFTVVGDILGLAMQNLVVLQMPYGGGEQNAALLASDTYVLDYLKSTEQLTEEVQSKAFFLLSNGYQRQLSFKNSDGSYSVFWQQNQKGSIWLSALTFKTLERMKKFVFIDENVQKQTLIWLSSQQKTSGCFKNDGQLFNHAWEGGDEEDISLTAYVVGMFFEAGLNSTFPALRNALFCLEAALDSGVTNGYNHAILAYAFALAGKEKQVESLLQTLDQSATKLNNVIYWERERKPKTEEFPSFIPWAPSAQTEKSCYVLLAVISRKIPDLTYASKIVQWLAQQMNSHGGFSSNQVINVGLILIAICGEEGLFSKNQNTVTFSSEGSSEIQFNGHNRLLVQRSEVTQAPGQYTVDVEGRGCTFIQATLKYNVLLPKKASGFSLSLEIVKNYSLTVFDLTVNLKYTGIRNKSSMVVIDVKMLSGFTPTMSSIEELENKGQVMKTEVKNDHVLFYLENVFGRADSFTFSAEQSNLVFNIQPAPGMVYD

SEQ ID NO: 60583 - protein, 495 aa, Homo sapiens
  Payload ID: 12132
  Gene Symbol: OXA1L
  Gene Name: oxidase (cytochrome c) assembly 1-like
  ENSP ID: ENSP00000285848
MVTWLYRFLPTSNMAAKLRSLLPPDLRLQFWLHARLQKCFLSRGCGSYCAGAKASPLPGKMAMGLMCGRRELLRLLQSGRRVHSVAGPSQWLGKPLTTRLLFPAAPCCCRPHYLFLAASGPRSLSTSAISFAEVQVQAPPVVAATPSPTAVPEVASGETADVVQTAAEQSFAELGLGSYTPVGLIQNLLEFMHVDLGLPWWGAIAACTVFARCLIFPLIVTGQREAARIHNHLPEIQKFSSRIREAKLAGDHIEYYKASSEMALYQKKHGIKLYKPLILPVTQAPIFISFFIALREMANLPVPSLQTGGLWWFQDLTVSDPIYILPLAVTATMWAVLELGAETGVQSSDLQWMRNVIRMMPLITLPITMHFPTAVFMYWLSSNLFSLVQVSCLRIPAVRTVLKIPQRVVHDLDKLPPREGFLESFKKGWKNAEMTRQLREREQRMRNQLELAARGPLRQTFTHNPLLQPGKDNPPNIPSSSSKPKSKYPWHDTLG

SEQ ID NO: 60584 - protein, 419 aa, Homo sapiens
  Payload ID: 12132
  Gene Symbol: OXA1L
  Gene Name: oxidase (cytochrome c) assembly 1-like
  Uniprot ID: Q15070
  ENSP ID: ENSP00000350740
MRGTQVHSVAGPSQWLGKPLTTRLLFPAAPCCCRPHYLFLAASGPRSLSTSAISFAEVQVQAPPVVAATPSPTAVPEVASGETADVVQTAAEQSFAELGLGSYTPVGLIQNLLEFMHVDLGLPWWGAIAACTVFARCLIFPLIVTGQREAARIHNHLPEIQKFSSRIREAKLAGDHIEYYKASSEMALYQKKHGIKLYKPLILPVTQAPIFISFFIALREMANLPVPSLQTGGLWWFQDLTVSDPIYILPLAVTATMWAVLELGAETGVQSSDLQWMRNVIRMMPLITLPITMHFPTAVFMYWLSSNLFSLVQVSCLRIPAVRTVLKIPQRVVHDLDKLPPREGFLESFKKGWKNAEMTRQLREREQRMRNQLELAARGPLRQTFTHNPLLQPGKDNPPNIPSSSSKPKSKYPWHDTLG

SEQ ID NO: 60585 - protein, 408 aa, Homo sapiens
  Payload ID: 12132
  Gene Symbol: OXA1L
  Gene Name: oxidase (cytochrome c) assembly 1-like
  ENSP ID: ENSP00000387601
MAMGLMCGRRELLRLLQSGRRVHSVAGPSQWLGKPLTTRLLFPAAPCCCRPHYLFLAASGPRSLSTSAISFAEVQVQAPPVVAATPSPTAVPEVASGETADVVQTAAEQSFAELGLGSYTPVGLIQNLLEFMHVDLGLPWWGAIAACTVFARCLIFPLIVTGQREAARIHNHLPEIQKFSSRIREAKLAGDHIEYYKASSEMALYQKKHGIKLYKPLILPVTQAPIFISFFIALREMANLPVPSLQTGGLWWFQDLTVSDPIYILPLAVTATMWAVLELGAETGVQSSDLQWMRNVIRMMPLITLPITMHFPTAVFMYWLSSNLFSLVQVSCLRIPAVRTVLKIPQRVVHDLDKLPPREGFLESFKKGPLRQTFTHNPLLQPGKDNPPNIPSSSSKPKSKYPWHDTLG

SEQ ID NO: 60586 - protein, 82 aa, Homo sapiens
  Payload ID: 12132
  Gene Symbol: OXA1L
  Gene Name: oxidase (cytochrome c) assembly 1-like
  ENSP ID: ENSP00000389240
LPGKMAMGLMCGRRELLRLLQSGRRPRAAVAHTTSSLRLPAPAASVPLLSLLQKSRFRPLLLLLQLPHPQQYLRWLLERLQM

SEQ ID NO: 60587 - protein, 112 aa, Homo sapiens
  Payload ID: 12132
  Gene Symbol: OXA1L
  Gene Name: oxidase (cytochrome c) assembly 1-like
  ENSP ID: ENSP00000396596
MHVDLGLPWWGAIAACTVFARCLIFPLIVTGQREAARIHNHLPEIQKFSSRIREAKLAGDHIEYYKASSEMALYQKKHGIKLYKPLILPVTQAPIFISFFIALREMANLPVP

SEQ ID NO: 60588 - protein, 435 aa, Homo sapiens
  Payload ID: 12132
  Gene Symbol: OXA1L
  Gene Name: oxidase (cytochrome c) assembly 1-like
  ENSP ID: ENSP00000474623
MAMGLMCGRRELLRLLQSGRRVHSVAGPSQWLGKPLTTRLLFPAAPCCCRPHYLFLAASGPRSLSTSAISFAEVQVQAPPVVAATPSPTAVPEVASGETADVVQTAAEQSFAELGLGSYTPVGLIQNLLEFMHVDLGLPWWGAIAACTVFARCLIFPLIVTGQREAARIHNHLPEIQKFSSRIREAKLAGDHIEYYKASSEMALYQKKHGIKLYKPLILPVTQAPIFISFFIALREMANLPVPSLQTGGLWWFQDLTVSDPIYILPLAVTATMWAVLELGAETGVQSSDLQWMRNVIRMMPLITLPITMHFPTAVFMYWLSSNLFSLVQVSCLRIPAVRTVLKIPQRVVHDLDKLPPREGFLESFKKGWKNAEMTRQLREREQRMRNQLELAARGPLRQTFTHNPLLQPGKDNPPNIPSSSSKPKSKYPWHDTLG

SEQ ID NO: 60589 - protein, 495 aa, Homo sapiens; identical to SEQ ID NO: 60583
  Payload ID: 12132
  Gene Symbol: OXA1L
  Gene Name: oxidase (cytochrome c) assembly 1-like
  ENSP ID: ENSP00000483491

SEQ ID NO: 60590 - protein, 243 aa, Homo sapiens
  Payload ID: 12133
  Gene Symbol: OXR1
  Gene Name: oxidation resistance 1
  Uniprot ID: Q8N573
  ENSP ID: ENSP00000297447
MSRLWYGKKGRRHQPINHKYTLVVSVAEYHRRIDALNTEELRTLCRRLQITTREDINSKQVATVKADLESESFRPNLSDPSELLLPDQIEKLTKHLPPRTIGYPWTLVYGTGKHGTSLKTLYRTMTGLDTPVLMVIKDSDGQVFGALASEPLKVSDGFYGTGETFVFTFCPEFEVFKWTGDNMFFIKGDMDSLAFGGGGGEFALWLDGDLYHGRSHSCKTFGNRTLSKKEDFFIQDIEIWAFE

SEQ ID NO: 60591 - protein, 839 aa, Homo sapiens
  Payload ID: 12133
  Gene Symbol: OXR1
  Gene Name: oxidation resistance 1
  Uniprot ID: Q8N573
  ENSP ID: ENSP00000311026
MDYLTTFTEKSGRLLRGTANRLLGFGGGGEARQVRFEDYLREPAQGDLGCGSPPHRPPAPSSPEGPDTGQKKTLDKKDGRRMSFQKPKGTIEYTVESRDSLNSIALKFDTTPNELVQLNKLFSRAVVTGQVLYVPDPEYVSSVESSPSLSPVSPLSPTSSEAEFDKTTNPDVHPTEATPSSTFTGIRPARVVSSTSEEEEAFTEKFLKINCKYITSGKGTVSGVLLVTPNNIMFDPHKNDPLVQENGCEEYGIMCPMEEVMSAAMYKEILDSKIKESLPIDIDQLSGRDFCHSKKMTGSNTEEIDSRIRDAGNDSASTAPRSTEESLSEDVFTESELSPIREELVSSDELRQDKSSGASSESVQTVNQAEVESLTVKSESTGTPGHLRSDTEHSTNEVGTLCHKTDLNNLEMAIKEDQIADNFQGISGPKEDSTSIKGNSDQDSFLHENSLHQEESQKENMPCGETAEFKQKQSVNKGKQGKEQNQDSQTEAEELRKLWKTHTMQQTKQQRENIQQVSQKEAKHKITSADGHIESSALLKEKQRHRLHKFLCLRVGKPMRKTFVSQASATMQQYAQRDKKHEYWFAVPQERTDHLYAFFIQWSPEIYAEDTGEYTREPGFIVVKKIEESETIEDSSNQAAAREWEITTREDINSKQVATVKADLESESFRPNLSDPSELLLPDQIEKLTKHLPPRTIGYPWTLVYGTGKHGTSLKTLYRTMTGLDTPVLMVIKDSDGQVFGALASEPLKVSDGFYGTGETFVFTFCPEFEVFKWTGDNMFFIKGDMDSLAFGGGGGEFALWLDGDLYHGRSHSCKTFGNRTLSKKEDFFIQDIEIWAFE

SEQ ID NO: 60592 - protein, 87 aa, Homo sapiens
  Payload ID: 12133
  Gene Symbol: OXR1
  Gene Name: oxidation resistance 1
  ENSP ID: ENSP00000387886
MDYLTTFTEKSGRLLRGTANRLLGFGGGGEARQVRFEDYLREPAQGDLGCGSPPHRPPAPSSPEGPDYYKGRHKFKAGCYSESRPGV

SEQ ID NO: 60593 - protein, 873 aa, Homo sapiens
  Payload ID: 12133
  Gene Symbol: OXR1
  Gene Name: oxidation resistance 1
  Uniprot ID: Q8N573
  ENSP ID: ENSP00000395032
MSVSNLSWLKKKSQSVDINAPGFNPLAGAGKQTPQASKPPAPKTPIIEEEQNNAANTQKHPSRRSELKRFYTIDTGQKKTLDKKDGRRMSFQKPKGTIEYTVESRDSLNSIALKFDTTPNELVQLNKLFSRAVVTGQVLYVPDPEYVSSVESSPSLSPVSPLSPTSSEAEFDKTTNPDVHPTEATPSSTFTGIRPARVVSSTSEEEEAFTEKFLKINCKYITSGKGTVSGVLLVTPNNIMFDPHKNDPLVQENGCEEYGIMCPMEEVMSAAMYKEILDSKIKESLPIDIDQLSGRDFCHSKKMTGSNTEEIDSRIRDAGNDSASTAPRSTEESLSEDVFTESELSPIREELVSSDELRQDKSSGASSESVQTVNQAEVESLTVKSESTGTPGHLRSDTEHSTNEVGTLCHKTDLNNLEMAIKEDQIADNFQGISGPKEDSTSIKGNSDQDSFLHENSLHQEESQKENMPCGETAEFKQKQSVNKGKQGKEQNQDSQTEAEELRKLWKTHTMQQTKQQRENIQQVSQKEAKHKITSADGHIESSALLKEKQRHRLHKFLCLRVGKPMRKTFVSQASATMQQYAQRDKKHEYWFAVPQERTDHLYAFFIQWSPEIYAEDTGEYTREPGFIVVKKIEESETIEDSSNQAAAREWEVVSVAEYHRRIDALNTEELRTLCRRLQITTREDINSKQVATVKADLESESFRPNLSDPSELLLPDQIEKLTKHLPPRTIGYPWTLVYGTGKHGTSLKTLYRTMTGLDTPVLMVIKDSDGQVFGALASEPLKVSDGFYGTGETFVFTFCPEFEVFKWTGDNMFFIKGDMDSLAFGGGGGEFALWLDGDLYHGRSHSCKTFGNRTLSKKEDFFIQDIEIWAFE

SEQ ID NO: 60594 - protein, 846 aa, Homo sapiens
  Payload ID: 12133
  Gene Symbol: OXR1
  Gene Name: oxidation resistance 1
  Uniprot ID: Q8N573
  ENSP ID: ENSP00000402918
MSVSNLSWLKKKSQSVDINAPGFNPLAGAGKQTPQASKPPAPKTPIIEEEQNNAANTQKHPSRRSELKRFYTIDTGQKKTLDKKDGRRMSFQKPKGTIEYTVESRDSLNSIALKFDTTPNELVQLNKLFSRAVVTGQVLYVPDPEYVSSVESSPSLSPVSPLSPTSSEAEFDKTTNPDVHPTEATPSSTFTGIRPARVVSSTSEEEEAFTEKFLKINCKYITSGKGTVSGVLLVTPNNIMFDPHKNDPLVQENGCEEYGIMCPMEEVMSAAMYKEILDSKIKESLPIDIDQLSGRDFCHSKKMTGSNTEEIDSRIRDAGNDSASTAPRSTEESLSEDVFTESELSPIREELVSSDELRQDKSSGASSESVQTVNQAEVESLTVKSESTGTPGHLRSDTEHSTNEVGTLCHKTDLNNLEMAIKEDQIADNFQGISGPKEDSTSIKGNSDQDSFLHENSLHQEESQKENMPCGETAEFKQKQSVNKGKQGKEQNQDSQTEAEELRKLWKTHTMQQTKQQRENIQQVSQKEAKHKITSADGHIESSALLKEKQRHRLHKFLCLRVGKPMRKTFVSQASATMQQYAQRDKKHEYWFAVPQERTDHLYAFFIQWSPEIYAEDTGEYTREPGFIVVKKIEESETIEDSSNQAAAREWEITTREDINSKQVATVKADLESESFRPNLSDPSELLLPDQIEKLTKHLPPRTIGYPWTLVYGTGKHGTSLKTLYRTMTGLDTPVLMVIKDSDGQVFGALASEPLKVSDGFYGTGETFVFTFCPEFEVFKWTGDNMFFIKGDMDSLAFGGGGGEFALWLDGDLYHGRSHSCKTFGNRTLSKKEDFFIQDIEIWAFE

SEQ ID NO: 60595 - protein, 874 aa, Homo sapiens
  Payload ID: 12133
  Gene Symbol: OXR1
  Gene Name: oxidation resistance 1
  Uniprot ID: Q8N573
  ENSP ID: ENSP00000405424
MTKDKNSPGLKKKSQSVDINAPGFNPLAGAGKQTPQASKPPAPKTPIIEEEQNNAANTQKHPSRRSELKRFYTIDTGQKKTLDKKDGRRMSFQKPKGTIEYTVESRDSLNSIALKFDTTPNELVQLNKLFSRAVVTGQVLYVPDPEYVSSVESSPSLSPVSPLSPTSSEAEFDKTTNPDVHPTEATPSSTFTGIRPARVVSSTSEEEEAFTEKFLKINCKYITSGKGTVSGVLLVTPNNIMFDPHKNDPLVQENGCEEYGIMCPMEEVMSAAMYKEILDSKIKESLPIDIDQLSGRDFCHSKKMTGSNTEEIDSRIRDAGNDSASTAPRSTEESLSEDVFTESELSPIREELVSSDELRQDKSSGASSESVQTVNQAEVESLTVKSESTGTPGHLRSDTEHSTNEVGTLCHKTDLNNLEMAIKEDQIADNFQGISGPKEDSTSIKGNSDQDSFLHENSLHQEESQKENMPCGETAEFKQKQSVNKGKQGKEQNQDSQTEAEELRKLWKTHTMQQTKQQRENIQQVSQKEAKHKITSADGHIESSALLKEKQRHRLHKFLCLRVGKPMRKTFVSQASATMQQYAQRDKKHEYWFAVPQERTDHLYAFFIQWSPEIYAEDTGEYTREPGFIVVKKIEESETIEDSSNQAAAREWEVVSVAEYHRRIDALNTEELRTLCRRLQITTREDINSKQVATVKADLESESFRPNLSDPSELLLPDQIEKLTKHLPPRTIGYPWTLVYGTGKHGTSLKTLYRTMTGLDTPVLMVIKDSDGQVFGALASEPLKVSDGFYGTGETFVFTFCPEFEVFKWTGDNMFFIKGDMDSLAFGGGGGEFALWLDGDLYHGRSHSCKTFGNRTLSKKEDFFIQDIEIWAFE

SEQ ID NO: 60596 - protein, 216 aa, Homo sapiens
  Payload ID: 12133
  Gene Symbol: OXR1
  Gene Name: oxidation resistance 1
  Uniprot ID: Q8N573
  ENSP ID: ENSP00000408659
MSRLWYGKKGRRHQPINHKYTLITTREDINSKQVATVKADLESESFRPNLSDPSELLLPDQIEKLTKHLPPRTIGYPWTLVYGTGKHGTSLKTLYRTMTGLDTPVLMVIKDSDGQVFGALASEPLKVSDGFYGTGETFVFTFCPEFEVFKWTGDNMFFIKGDMDSLAFGGGGGEFALWLDGDLYHGRSHSCKTFGNRTLSKKEDFFIQDIEIWAFE

SEQ ID NO: 60597 - protein, 40 aa, Homo sapiens
  Payload ID: 12133
  Gene Symbol: OXR1
  Gene Name: oxidation resistance 1
  ENSP ID: ENSP00000414992
MDYLTTFTEKSGRLLRGTANRLLGFGGGGEARQTLAKRRP

SEQ ID NO: 60598 - protein, 873 aa, Homo sapiens; identical to SEQ ID NO: 60593
  Payload ID: 12133
  Gene Symbol: OXR1
  Gene Name: oxidation resistance 1
  Uniprot ID: Q8N573
  ENSP ID: ENSP00000429205

SEQ ID NO: 60599 - protein, 99 aa, Homo sapiens
  Payload ID: 12133
  Gene Symbol: OXR1
  Gene Name: oxidation resistance 1
  ENSP ID: ENSP00000429438
MKLRNTGQKKTLDKKDGRRMSFQKPKGTIEYTVESRDSLNSIALKFDTTPNELVQLNKLFSRAVVTGQVLYVPDPEYVSSVESSPSLSPVSPLSPTSSE

SEQ ID NO: 60600 - protein, 518 aa, Homo sapiens
  Payload ID: 12133
  Gene Symbol: OXR1
  Gene Name: oxidation resistance 1
  ENSP ID: ENSP00000430701
  MOD_RES (1)..(1): Any amino acid
XDIDQLSGRDFCHSKKMTGSNTEEIDSRIRDAGNDSASTAPRSTEESLSEDVFTESELSPIREELVSSDELRQDKSSGASSESVQTVNQAEVESLTVKSESTGTPGHLRSDTEHSTNEVGTLCHKTDLNNLEMAIKEDQIADNFQGISGPKEDSTSIKGNSDQDSFLHENSLHQEESQKENMPCGETAEFKQKQSVNKGKQGKEQNQDSQTEAEELRKLWKTHTMQQTKQQRENIQQVSQKEAKHKITSADGHIESSALLKEKQRHRLHKFLCLRVGKPMRKTFVSQASATMQQYAQRDKKHEYWFAVPQERTDHLYAFFIQWSPEIYAEDTGEYTREPGFIVVKKIEESETIEDSSNQAAAREWELTKHLPPRTIGYPWTLVYGTGKHGTSLKTLYRTMTGLDTPVLMVIKDSDGQVFGALASEPLKVSDGFYGTGETFVFTFCPEFEVFKWTGDNMFFIKGDMDSLAFGGGGGEFALWLDGDLYHGRSHSCKTFGNRTLSKKEDFFIQDIEIWAFE

SEQ ID NO: 60601 - protein, 503 aa, Homo sapiens
  Payload ID: 12133
  Gene Symbol: OXR1
  Gene Name: oxidation resistance 1
  Uniprot ID: Q8N573
  ENSP ID: ENSP00000431014
MFCQRKDTGQKKTLDKKDGRRMSFQKPKGTIEYTVESRDSLNSIALKFDTTPNELVQLNKLFSRAVVTGQVLYVPDPEYVSSVESSPSLSPVSPLSPTSSEAEFDKTTNPDVHPTEATPSSTFTGIRPARVVSSTSEEEEAFTEKFLKINCKYITSGKGTVSGVLLVTPNNIMFDPHKNDPLVQENGCEEYGIMCPMEEVMSAAMYKEILDSKIKESLPIDIDQLSGRDFCHSKKMTGSNTEEIDSRIRDAGNDSASTAPRSTEESLSEDVFTESELSPIREELVSSDELRQDKSSGASSESVQTVNQAEVESLTVKSESTGTPGHLRSDTEHSTNEVGTLCHKTDLNNLEMAIKEDQIADNFQGISGPKEDSTSIKGNSDQDSFLHENSLHQEESQKENMPCGETAEFKQKQSVNKGKQGKEQNQDSQTEAEELRKLWKTHTMQQTKQQRENIQQVSQKEAKHKITSADGHIESKCYRVNEVSSSNCMVSPSFLTDSKAAVP

SEQ ID NO: 60602 - protein, 846 aa, Homo sapiens; identical to SEQ ID NO: 60594
  Payload ID: 12133
  Gene Symbol: OXR1
  Gene Name: oxidation resistance 1
  Uniprot ID: Q8N573
  ENSP ID: ENSP00000431966

SEQ ID NO: 60603 - protein, 119 aa, Homo sapiens
  Payload ID: 12133
  Gene Symbol: OXR1
  Gene Name: oxidation resistance 1
  ENSP ID: ENSP00000435104
MTGLDTPVLMVIKDSDGQVFGALASEPLKVSDGFYGTGETFVFTFCPEFEVFKWTGDNMFFIKGDMDSLAFGGGGGEFALWLDGDLYHGRSHSCKTFGNRTLSKKEDFFIQDIEIWAFE

SEQ ID NO: 60604 - protein, 560 aa, Homo sapiens
  Payload ID: 12134
  Gene Symbol: OSGIN1
  Gene Name: oxidative stress induced growth inhibitor 1
  Uniprot ID: Q9UJX0
  ENSP ID: ENSP00000343376
MGKWRPRGCCRGNMQCRQEVPATLTSSELFSTRNQPQPQPQPLLADAPVPWAVASRMCLTPGQGCGHQGQDEGPLPAPSPPPAMSSSRKDHLGASSSEPLPVIIVGNGPSGICLSYLLSGYTPYTKPDAIHPHPLLQRKLTEAPGVSILDQDLDYLSEGLEGRSQSPVALLFDALLRPDTDFGGNMKSVLTWKHRKEHAIPHVVLGRNLPGGAWHSIEGSMVILSQGQWMGLPDLEVKDWMQKKRRGLRNSRATAGDIAHYYRDYVVKKGLGHNFVSGAVVTAVEWGTPDPSSCGAQDSSPLFQVSGFLTRNQAQQPFSLWARNVVLATGTFDSPARLGIPGEALPFIHHELSALEAATRVGAVTPASDPVLIIGAGLSAADAVLYARHYNIPVIHAFRRAVDDPGLVFNQLPKMLYPEYHKVHQMMREQSILSPSPYEGYRSLPRHQLLCFKEDCQAVFQDLEGVEKVFGVSLVLVLIGSHPDLSFLPGAGADFAVDPDQPLSAKRNPIDVDPFTYQSTRQEGLYAMGPLAGDNFVRFVQGGALAVASSLLRKETRKPP

SEQ ID NO: 60605 - protein, 477 aa, Homo sapiens
  Payload ID: 12134
  Gene Symbol: OSGIN1
  Gene Name: oxidative stress induced growth inhibitor 1
  Uniprot ID: Q9UJX0
  ENSP ID: ENSP00000355374
MSSSRKDHLGASSSEPLPVIIVGNGPSGICLSYLLSGYTPYTKPDAIHPHPLLQRKLTEAPGVSILDQDLDYLSEGLEGRSQSPVALLFDALLRPDTDFGGNMKSVLTWKHRKEHAIPHVVLGRNLPGGAWHSIEGSMVILSQGQWMGLPDLEVKDWMQKKRRGLRNSRATAGDIAHYYRDYVVKKGLGHNFVSGAVVTAVEWGTPDPSSCGAQDSSPLFQVSGFLTRNQAQQPFSLWARNVVLATGTFDSPARLGIPGEALPFIHHELSALEAATRVGAVTPASDPVLIIGAGLSAADAVLYARHYNIPVIHAFRRAVDDPGLVFNQLPKMLYPEYHKVHQMMREQSILSPSPYEGYRSLPRHQLLCFKEDCQAVFQDLEGVEKVFGVSLVLVLIGSHPDLSFLPGAGADFAVDPDQPLSAKRNPIDVDPFTYQSTRQEGLYAMGPLAGDNFVRFVQGGALAVASSLLRKETRKPP

SEQ ID NO: 60606 - protein, 477 aa, Homo sapiens; identical to SEQ ID NO: 60605
  Payload ID: 12134
  Gene Symbol: OSGIN1
  Gene Name: oxidative stress induced growth inhibitor 1
  Uniprot ID: Q9UJX0
  ENSP ID: ENSP00000376983

SEQ ID NO: 60607 - protein, 105 aa, Homo sapiens
  Payload ID: 12134
  Gene Symbol: OSGIN1
  Gene Name: oxidative stress induced growth inhibitor 1
  ENSP ID: ENSP00000456965
MALKSTSIGLCLSQAFEEQLSNSVTDNHLTVYTFKTTGKPQTRHRGMGKWRPRGCCRGNMQCRQEGNGCPDLAGDSVIRVPLTLLVHNLAGLTGLLHHCLSGPLP

SEQ ID NO: 60608 - protein, 122 aa, Homo sapiens
  Payload ID: 12134
  Gene Symbol: OSGIN1
  Gene Name: oxidative stress induced growth inhibitor 1
  ENSP ID: ENSP00000457157
MSSSRKDHLGASSSEPLPVIIVGNGPSGICLSYLLSGYTPYTKPDAIHPHPLLQRKLTEAPGVSILDQDLDYLSEGLEGRSQSPVALLFDALLRPDTDFGGNMKSVLTWKHRKEHAIPHVVL

SEQ ID NO: 60609 - protein, 163 aa, Homo sapiens
  Payload ID: 12134
  Gene Symbol: OSGIN1
  Gene Name: oxidative stress induced growth inhibitor 1
  ENSP ID: ENSP00000462048
MSSSRKDHLGASSSEPLPVIIVGNGPSGICLSYLLSGYTPYTKPDAIHPHPLLQRKLTEAPGVSILDQDLDYLSEGLEGRSQSPVALLFDALLRPDTDFGGNMKSVLTWKHRKEHAIPHVVLGRNLPGGAWHSIEGSMVILSQGQWMGLPDLEVKDWMQKKRR

SEQ ID NO: 60610 - protein, 505 aa, Homo sapiens
  Payload ID: 12135
  Gene Symbol: OSGIN2
  Gene Name: oxidative stress induced growth inhibitor family member 2
  Uniprot ID: Q9Y236
  ENSP ID: ENSP00000297438
MPLVEETSLLEDSSVTFPVVIIGNGPSGICLSYMLSGYRPYLSSEAIHPNTILNSKLEEARHLSIVDQDLEYLSEGLEGRSSNPVAVLFDTLLHPDADFGYDYPSVLHWKLEQHHYIPHVVLGKGPPGGAWHNMEGSMLTISFGSWMELPGLKFKDWVSSKRRSLKGDRVMPEEIARYYKHYVKVMGLQKNFRENTYITSVSRLYRDQDDDDIQDRDISTKHLQIEKSNFIKRNWEIRGYQRIADGSHVPFCLFAENVALATGTLDSPAHLEIEGEDFPFVFHSMPEFGAAINKGKLRGKVDPVLIVGSGLTAADAVLCAYNSNIPVIHVFRRRVTDPSLIFKQLPKKLYPEYHKVYHMMCTQSYSVDSNLLSDYTSFPEHRVLSFKSDMKCVLQSVSGLKKIFKLSAAVVLIGSHPNLSFLKDQGCYLGHKSSQPITCKGNPVEIDTYTYECIKEANLFALGPLVGDNFVRFLKGGALGVTRCLATRQKKKHLFVERGGGDGIA

SEQ ID NO: 60611 - protein, 549 aa, Homo sapiens
  Payload ID: 12135
  Gene Symbol: OSGIN2
  Gene Name: oxidative stress induced growth inhibitor family member 2
  Uniprot ID: Q9Y236
  ENSP ID: ENSP00000396445
MPVWCCRCSLAGHFRNYSDTETEGEIFNSLVQYFGDNLGRKVKAMPLVEETSLLEDSSVTFPVVIIGNGPSGICLSYMLSGYRPYLSSEAIHPNTILNSKLEEARHLSIVDQDLEYLSEGLEGRSSNPVAVLFDTLLHPDADFGYDYPSVLHWKLEQHHYIPHVVLGKGPPGGAWHNMEGSMLTISFGSWMELPGLKFKDWVSSKRRSLKGDRVMPEEIARYYKHYVKVMGLQKNFRENTYITSVSRLYRDQDDDDIQDRDISTKHLQIEKSNFIKRNWEIRGYQRIADGSHVPFCLFAENVALATGTLDSPAHLEIEGEDFPFVFHSMPEFGAAINKGKLRGKVDPVLIVGSGLTAADAVLCAYNSNIPVIHVFRRRVTDPSLIFKQLPKKLYPEYHKVYHMMCTQSYSVDSNLLSDYTSFPEHRVLSFKSDMKCVLQSVSGLKKIFKLSAAVVLIGSHPNLSFLKDQGCYLGHKSSQPITCKGNPVEIDTYTYECIKEANLFALGPLVGDNFVRFLKGGALGVTRCLATRQKKKHLFVERGGGDGIA

SEQ ID NO: 60612 - protein, 207 aa, Homo sapiens
  Payload ID: 12135
  Gene Symbol: OSGIN2
  Gene Name: oxidative stress induced growth inhibitor family member 2
  ENSP ID: ENSP00000431029
MPVWCCRCSLAGHFRNYSDTETEGEIFNSLVQYFGDNLGRKVKAMPLVEETSLLEDSSVTFPVVIIGNGPSGICLSYMLSGYRPYLSSEAIHPNTILNSKLEEARHLSIVDQDLEYLSEGLEGRSSNPVAVLFDTLLHPDADFGYDYPSVLHWKLEQHHYIPHVVLGKGPPGGAWHNMEGSMLTISFGSWMELPGLKFKDWVSSKRR

SEQ ID NO: 60613 - protein, 527 aa, Homo sapiens
  Payload ID: 12136
  Gene Symbol: OXSR1
  Gene Name: oxidative stress responsive 1
  Uniprot ID: O95747
  ENSP ID: ENSP00000311713
MSEDSSALPWSINRDDYELQEVIGSGATAVVQAAYCAPKKEKVAIKRINLEKCQTSMDELLKEIQAMSQCHHPNIVSYYTSFVVKDELWLVMKLLSGGSVLDIIKHIVAKGEHKSGVLDESTIATILREVLEGLEYLHKNGQIHRDVKAGNILLGEDGSVQIADFGVSAFLATGGDITRNKVRKTFVGTPCWMAPEVMEQVRGYDFKADIWSFGITAIELATGAAPYHKYPPMKVLMLTLQNDPPSLETGVQDKEMLKKYGKSFRKMISLCLQKDPEKRPTAAELLRHKFFQKAKNKEFLQEKTLQRAPTISERAKKVRRVPGSSGRLHKTEDGGWEWSDDEFDEESEEGKAAISQLRSPRVKESISNSELFPTTDPVGTLLQVPEQISAHLPQPAGQIATQPTQVSLPPTAEPAKTAQALSSGSGSQETKIPISLVLRLRNSKKELNDIRFEFTPGRDTAEGVSQELISAGLVDGRDLVIVAANLQKIVEEPQSNRSVTFKLASGVEGSDIPDDGKLIGFAQLSIS

SEQ ID NO: 60614 - protein, 113 aa, Homo sapiens
  Payload ID: 12136
  Gene Symbol: OXSR1
  Gene Name: oxidative stress responsive 1
  ENSP ID: ENSP00000398356
MSEDSSALPWSINRDDYELQEVIGSGATAVVQAAYCAPKKEKVAIKRINLEKCQTSMDELLKEIQAMSQCHHPNIVSYYTSFVVKDELWLVMKLLSGVTHWRNWIALLKALFI

SEQ ID NO: 60615 - protein, 468 aa, Homo sapiens
  Payload ID: 12136
  Gene Symbol: OXSR1
  Gene Name: oxidative stress responsive 1
  ENSP ID: ENSP00000415851
MSEDSSALPWSINRDDYELQEVIGSGATAVVQAAYCAPKKEKVAIKRINLEKCQTSMDELLKEIQAMSQCHHPNIVSYYTSFVVKDELWLVMKLLSGGSVLDIIKHIVAKGEHKSGVLDESTIATILREVLEGLEYLHKNGQIHRDVKAGNILLGEDGSVQIADFGVSAFLATGGDITRNKVRKTFVGTPCWMAPEVMEQVRGYDFKADIWSFGITAIELATGAAPYHKYPPMKVLMLTLQNDPPSLETGVQDKEMLKKYGKSFRKMISLCLQKDPEKRPTAAELLRHKFFQKAKNKEFLQEKTLQRAPTISERAKKVRRVPGSSGRLHKTEDGGWEWSDDEFDEESEEGKAAISQLRSPRVKESISNSELFPTTDPVGTLLQVPEQISAHLPQPAGQIATQPTQVSLPPTAEPAKTAQALSSGSGSQETKIPISLVLRLRNSKKELNDIRFEFTPGRGEASNGLKTK

SEQ ID NO: 60616 - protein, 292 aa, Homo sapiens
  Payload ID: 12137
  Gene Symbol: OSER1
  Gene Name: oxidative stress responsive serine-rich 1
  Uniprot ID: Q9NX31
  ENSP ID: ENSP00000255174
MKSEAKDGEEESLQTAFKKLRVDASGSVASLSVGEGTGVRAPVRTATDDTKPKTTCASKDSWHGSTRKSSRGAVRTQRRRRSKSPVLHPPKFIHCSTIASSSSSQLKHKSQTDSPDGSSGLGISSPKEFSAGESSTSLDANHTGAVVEPLRTSVPRLPSESKKEDSSDATQVPQASLKASDLSDFQSVSKLNQGKPCTCIGKECQCKRWHDMEVYSFSGLQSVPPLAPERRSTLEDYSQSLHARTLSGSPRSCSEQARVFVDDVTIEDLSGYMEYYLYIPKKMSHMAEMMYT

SEQ ID NO: 60617 - protein, 292 aa, Homo sapiens; identical to SEQ ID NO: 60616
  Payload ID: 12137
  Gene Symbol: OSER1
  Gene Name: oxidative stress responsive serine-rich 1
  Uniprot ID: Q9NX31
  ENSP ID: ENSP00000362061

SEQ ID NO: 60618 - protein, 273 aa, Homo sapiens
  Payload ID: 12138
  Gene Symbol: OLR1
  Gene Name: oxidized low density lipoprotein (lectin-like) receptor 1
  Uniprot ID: P78380
  ENSP ID: ENSP00000309124
MTFDDLKIQTVKDQPDEKSNGKKAKGLQFLYSPWWCLAAATLGVLCLGLVVTIMVLGMQLSQVSDLLTQEQANLTHQKKKLEGQISARQQAEEASQESENELKEMIETLARKLNEKSKEQMELHHQNLNLQETLKRVANCSAPCPQDWIWHGENCYLFSSGSFNWEKSQEKCLSLDAKLLKINSTADLDFIQQAISYSSFPFWMGLSRRNPSYPWLWEDGSPLMPHLFRVRGAVSQTYPSGTCAYIQRGAVYAENCILAAFSICQKKANLRAQ

SEQ ID NO: 60619 - protein, 104 aa, Homo sapiens
  Payload ID: 12138
  Gene Symbol: OLR1
  Gene Name: oxidized low density lipoprotein (lectin-like) receptor 1
  ENSP ID: ENSP00000340572
MIETLARKLNEKSKEQMELHHQNLNLQETLKRVANCSAPCPQDWIWHGENCYLFSSGSFNWEKSQEKCLSLDAKLLKINSTADLDFIQQAISYSSFPFWMGLSR

SEQ ID NO: 60620 - protein, 181 aa, Homo sapiens
  Payload ID: 12138
  Gene Symbol: OLR1
  Gene Name: oxidized low density lipoprotein (lectin-like) receptor 1
  Uniprot ID: P78380
  ENSP ID: ENSP00000405116
MTFDDLKIQTVKDQPDEKSNGKKAKGLQFLYSPWWCLAAATLGVLCLGLVVTIMVLGMQLSQVSDLLTQEQANLTHQKKKLEGQISARQQAEEASQESENELKEMIETLARKLNEKSKEQMELHHQNLNLQETLKRVANCSGLHPASNFLFQFSILDGAVSEEPQLPMALGGRFSFDAPLI

SEQ ID NO: 60621 - protein, 57 aa, Homo sapiens
  Payload ID: 12138
  Gene Symbol: OLR1
  Gene Name: oxidized low density lipoprotein (lectin-like) receptor 1
  ENSP ID: ENSP00000438744
MIETLARKLNEKSKEQMELHHQNLNLQETLKRVANCSAPCPQDWIWHGENCYLFSSG

SEQ ID NO: 60622 - protein, 122 aa, Homo sapiens
  Payload ID: 12138
  Gene Symbol: OLR1
  Gene Name: oxidized low density lipoprotein (lectin-like) receptor 1
  ENSP ID: ENSP00000438925
MIETLARKLNEKSKEQMELHHQNLNLQETLKRVANCSAPCPQDWIWHGENCYLFSSGSFNWEKSQEKCLSLDAKLLKINSTADLDFIQQAISYSSFPFWMGLSRRNPSYPWLWEDGSPLMPH

SEQ ID NO: 60623 - protein, 189 aa, Homo sapiens
  Payload ID: 12138
  Gene Symbol: OLR1
  Gene Name: oxidized low density lipoprotein (lectin-like) receptor 1
  Uniprot ID: P78380
  ENSP ID: ENSP00000439251
MTFDDLKIQTVKDQPDEKSNGKKAKGLQFLYSPWWCLAAATLGVLCLGLVVTIMVLGMQLSQVSDLLTQEQANLTHQKKKLEGQISARQQAEEASQESENELKEMIETLARKLNEKSKEQMELHHQNLNLQETLKRVANCSAPCPQDWIWHGENCYLFSSGSFNWEKSQEKCLSLDAKLLKINSTADLI

SEQ ID NO: 60624 - protein, 214 aa, Homo sapiens
  Payload ID: 12138
  Gene Symbol: OLR1
  Gene Name: oxidized low density lipoprotein (lectin-like) receptor 1
  ENSP ID: ENSP00000442389
MVLGMQLSQVSDLLTQEQANLTHQKKKLEGQISARQQAEEASQESENELKEMIETLARKLNEKSKEQMELHHQNLNLQETLKRVANCSAPCPQDWIWHGENCYLFSSGSFNWEKSQEKCLSLDAKLLKINSTADLDFIQQAISYSSFPFWMGLSRRNPSYPWLWEDGSPLMPHLFRVRGAVSQTYPSGTCAYIQRGAVYAENCILAAFSICQKK

SEQ ID NO: 60625 - protein, 104 aa, Homo sapiens
  Payload ID: 12138
  Gene Symbol: OLR1
  Gene Name: oxidized low density lipoprotein (lectin-like) receptor 1
  ENSP ID: ENSP00000444068
MVLGMQLSQVSDLLTQEQANLTHQKKKLEGQISARQQAEEASQESENELKEMIETLARKLNEKSKEQMELHHQNLNLQETLKRVANCSAPCPQDWIWHGENCYL

SEQ ID NO: 60626 - protein, 165 aa, Homo sapiens
  Payload ID: 12138
  Gene Symbol: OLR1
  Gene Name: oxidized low density lipoprotein (lectin-like) receptor 1
  ENSP ID: ENSP00000444457
MTFDDLKIQTVKDQPDEKSNGKKAKGLQFLYSPWWCLAAATLGVLCLGLVVTIMVLGMQLSQVSDLLTQEQANLTHQKKKLEGQISARQQAEEASQESENELKEMIETLARKLNEKSKEQMELHHQNLNLQETLKRVANCSAVYAENCILAAFSICQKKANLRAQ

SEQ ID NO: 60627 - protein, 77 aa, Homo sapiens
  Payload ID: 12138
  Gene Symbol: OLR1
  Gene Name: oxidized low density lipoprotein (lectin-like) receptor 1
  ENSP ID: ENSP00000445085
MIETLARKLNEKSKEQMELHHQNLNLQETLKRVANCSGLHPASNFLFQFSILDGAVSEEPQLPMALGGRFSFDAPLI

SEQ ID NO: 60628 - protein, 312 aa, Homo sapiens
  Payload ID: 12139
  Gene Symbol: OXNAD1
  Gene Name: oxidoreductase NAD-binding domain containing 1
  Uniprot ID: Q96HP4
  ENSP ID: ENSP00000285083
MACAAVMIPGLLRCSVGAIRIEAASLRLTLSTLRHLTLTSIMKSKRKTDHMERTASVLRREIVSAAKVCGAASESPSVKSLRLLVADQDFSFKAGQWVDFFIPGVSVVGGFSICSSPRLLEQERVIELAVKYTNHPPALWVHNTCTLDCEVAVRVGGEFFFDPQPADASRNLVLIAGGVGINPLLSILRHAADLLREQANKRNGYEIGTIKLFYSAKNTSELLFKKNILDLVNEFPEKIACSLHVTKQTTQINAELKPYITEGRITEKEIRDHISKETLFYICGPPPMTDFFSKQLENNHVPKEHICFEKWW

SEQ ID NO: 60629 - protein, 330 aa, Homo sapiens
  Payload ID: 12139
  Gene Symbol: OXNAD1
  Gene Name: oxidoreductase NAD-binding domain containing 1
  ENSP ID: ENSP00000389872
MTPKISWTSKFSVCPESAMACAAVMIPGLLRCSVGAIRIEAASLRLTLSTLRHLTLTSIMKSKRKTDHMERTASVLRREIVSAAKVCGAASESPSVKSLRLLVADQDFSFKAGQWVDFFIPGVSVVGGFSICSSPRLLEQERVIELAVKYTNHPPALWVHNTCTLDCEVAVRVGGEFFFDPQPADASRNLVLIAGGVGINPLLSILRHAADLLREQANKRNGYEIGTIKLFYSAKNTSELLFKKNILDLVNEFPEKIACSLHVTKQTTQINAELKPYITEGRITEKEIRDHISKETLFYICGPPPMTDFFSKQLENNHVPKEHICFEKWW

SEQ ID NO: 60630 - protein, 56 aa, Homo sapiens
  Payload ID: 12139
  Gene Symbol: OXNAD1
  Gene Name: oxidoreductase NAD-binding domain containing 1
  ENSP ID: ENSP00000397374
MACAAVMIPGLLRCSVGAIRIEAASLRLTLSTLRHLTLTRLCQQLRCVELPVSHRQ

SEQ ID NO: 60631 - protein, 71 aa, Homo sapiens
  Payload ID: 12139
  Gene Symbol: OXNAD1
  Gene Name: oxidoreductase NAD-binding domain containing 1
  ENSP ID: ENSP00000398867
MACAAVMIPGLLRCSVGAIRIEAASLRLTLSTLRHLTLTSIMKSKRKTDHMERTASVLRRESNLFHQGRKH

SEQ ID NO: 60632 - protein, 312 aa, Homo sapiens; identical to SEQ ID NO: 60628
  Payload ID: 12139
  Gene Symbol: OXNAD1
  Gene Name: oxidoreductase NAD-binding domain containing 1
  Uniprot ID: Q96HP4
  ENSP ID: ENSP00000475547

SEQ ID NO: 60633 - protein, 311 aa, Homo sapiens
  Payload ID: 12139
  Gene Symbol: OXNAD1
  Gene Name: oxidoreductase NAD-binding domain containing 1
  ENSP ID: ENSP00000476239
MACAAVMIPGLLRCSVGAIRIEAASLRLTLSTLRHLTLTSIMKSKRKTDHMERTASVLRREIVSAAKVCGAASESPSVKSLRLLVADQDFSFKAGQWVDFFIPGVSVVGGFSICSSPRLLEQERVIELAVKYTNHPPALWVHNTCTLDCEVAVRVGGEFFFDPQPADASRNLVLIAGGVGINPLLSILRHAADLLREQANKRNGYEIGTIKLFYSAKNTSELLFKKNILDLVNEFPEKIACSLHVTKQTTQINAELKPYITGRITEKEIRDHISKETLFYICGPPPMTDFFSKQLENNHVPKEHICFEKWW

SEQ ID NO: 60634 - protein, 330 aa, Homo sapiens; identical to SEQ ID NO: 60629
  Payload ID: 12139
  Gene Symbol: OXNAD1
  Gene Name: oxidoreductase NAD-binding domain containing 1
  ENSP ID: ENSP00000487136

SEQ ID NO: 60635 - protein, 147 aa, Homo sapiens
  Payload ID: 12140
  Gene Symbol: OXLD1
  Gene Name: oxidoreductase-like domain containing 1
  Uniprot ID: Q5BKU9
  ENSP ID: ENSP00000363873
MLLRRVVEGGRAVAAAVRGSGARRFSSPDCCQRLPGGGSFLQRHHPGAQAPDGRRKFGTDHVEVGSQAGADGTRPPKASLPPELQPPTNCCMSGCPNCVWVEYADRLLQHFQDGGERALAALEEHVADENLKAFLRMEIRLHTRCGG

SEQ ID NO: 60636 - protein, 92 aa, Homo sapiens
  Payload ID: 12140
  Gene Symbol: OXLD1
  Gene Name: oxidoreductase-like domain containing 1
  ENSP ID: ENSP00000459191
MLLRRVVEGGRAVAAAVRGSASTRTGLGSAEGHVREAAVRGPARTGRSPGPSTRMWGRSREDRALAAAEGPLAPLLHRLLPSPRPGICGGAA

SEQ ID NO: 60637 - protein, 92 aa, Homo sapiens; identical to SEQ ID NO: 60636
  Payload ID: 12140
  Gene Symbol: OXLD1
  Gene Name: oxidoreductase-like domain containing 1
  ENSP ID: ENSP00000459281

SEQ ID NO: 60638 - protein, 79 aa, Homo sapiens
  Payload ID: 12140
  Gene Symbol: OXLD1
  Gene Name: oxidoreductase-like domain containing 1
  ENSP ID: ENSP00000459374
  MOD_RES (1)..(1): Any amino acid
XAAVRGSASTRTGLGSAEGHVREAAVRGPARTGRSPGPSTRMWGRSREDRALAAAEGPLAPLLHRLLPSPRPGICGGAA

SEQ ID NO: 60639 - protein, 92 aa, Homo sapiens; identical to SEQ ID NO: 60636
  Payload ID: 12140
  Gene Symbol: OXLD1
  Gene Name: oxidoreductase-like domain containing 1
  ENSP ID: ENSP00000466256

SEQ ID NO: 60640 - protein, 423 aa, Homo sapiens
  Payload ID: 12141
  Gene Symbol: OXER1
  Gene Name: oxoeicosanoid (OXE) receptor 1
  Uniprot ID: Q8TDS5
  ENSP ID: ENSP00000367930
MLCHRGGQLIVPIIPLCPEHSCRGRRLQNLLSGPWPKQPMELHNLSSPSPSLSSSVLPPSFSPSPSSAPSAFTTVGGSSGGPCHPTSSSLVSAFLAPILALEFVLGLVGNSLALFIFCIHTRPWTSNTVFLVSLVAADFLLISNLPLRVDYYLLHETWRFGAAACKVNLFMLSTNRTASVVFLTAIALNRYLKVVQPHHVLSRASVGAAARVAGGLWVGILLLNGHLLLSTFSGPSCLSYRVGTKPSASLRWHQALYLLEFFLPLALILFAIVSIGLTIRNRGLGGQAGPQRAMRVLAMVVAVYTICFLPSIIFGMASMVAFWLSACRSLDLCTQLFHGSLAFTYLNSVLDPVLYCFSSPNFLHQSRALLGLTRGRQGPVSDESSYQPSRQWRYREASRKAEAIGKLKVQGEVSLEKEGSSQG

SEQ ID NO: 60641 - protein, 1023 aa, Homo sapiens
  Payload ID: 12142
  Gene Symbol: OGDH
  Gene Name: oxoglutarate (alpha-ketoglutarate) dehydrogenase (lipoamide)
  Uniprot ID: Q02218
  ENSP ID: ENSP00000222673
MFHLRTCAAKLRPLTASQTVKTFSQNRPAAARTFQQIRCYSAPVAAEPFLSGTSSNYVEEMYCAWLENPKSVHKSWDIFFRNTNAGAPPGTAYQSPLPLSRGSLAAVAHAQSLVEAQPNVDKLVEDHLAVQSLIRAYQIRGHHVAQLDPLGILDADLDSSVPADIISSTDKLGFYGLDESDLDKVFHLPTTTFIGGQESALPLREIIRRLEMAYCQHIGVEFMFINDLEQCQWIRQKFETPGIMQFTNEEKRTLLARLVRSTRFEEFLQRKWSSEKRFGLEGCEVLIPALKTIIDKSSENGVDYVIMGMPHRGRLNVLANVIRKELEQIFCQFDSKLEAADEGSGDVKYHLGMYHRRINRVTDRNITLSLVANPSHLEAADPVVMGKTKAEQFYCGDTEGKKVMSILLHGDAAFAGQGIVYETFHLSDLPSYTTHGTVHVVVNNQIGFTTDPRMARSSPYPTDVARVVNAPIFHVNSDDPEAVMYVCKVAAEWRSTFHKDVVVDLVCYRRNGHNEMDEPMFTQPLMYKQIRKQKPVLQKYAELLVSQGVVNQPEYEEEISKYDKICEEAFARSKDEKILHIKHWLDSPWPGFFTLDGQPRSMSCPSTGLTEDILTHIGNVASSVPVENFTIHGGLSRILKTRGEMVKNRTVDWALAEYMAFGSLLKEGIHIRLSGQDVERGTFSHRHHVLHDQNVDKRTCIPMNHLWPNQAPYTVCNSSLSEYGVLGFELGFAMASPNALVLWEAQFGDFHNTAQCIIDQFICPGQAKWVRQNGIVLLLPHGMEGMGPEHSSARPERFLQMCNDDPDVLPDLKEANFDINQLYDCNWVVVNCSTPGNFFHVLRRQILLPFRKPLIIFTPKSLLRHPEARSSFDEMLPGTHFQRVIPEDGPAAQNPENVKRLLFCTGKVYYDLTRERKARDMVGQVAITRIEQLSPFPFDLLLKEVQKYPNAELAWCQEEHKNQGYYDYVKPRLRTTISRAKPVWYAGRDPAAAPATGNKKTHLTELQRLLDTAFDLDVFKNFS

SEQ ID NO: 60642 - protein, 427 aa, Homo sapiens
  Payload ID: 12142
  Gene Symbol: OGDH
  Gene Name: oxoglutarate (alpha-ketoglutarate) dehydrogenase (lipoamide)
  Uniprot ID: Q02218
  ENSP ID: ENSP00000388084
MFHLRTCAAKLRPLTASQTVKTFSQNRPAAARTFQQIRCYSAPVAAEPFLSGTSSNYVEEMYCAWLENPKSVHKSWDIFFRNTNAGAPPGTAYQSPLPLSRGSLAAVAHAQSLVEAQPNVDKLVEDHLAVQSLIRAYQIRGHHVAQLDPLGILDADLDSSVPADIISSTDKLGFYGLDESDLDKVFHLPTTTFIGGQESALPLREIIRRLEMAYCQHIGVEFMFINDLEQCQWIRQKFETPGIMQFTNEEKRTLLARLVRSTRFEEFLQRKWSSEKRFGLEGCEVLIPALKTIIDKSSENGVDYVIMGMPHRGRLNVLANVIRKELEQIFCQFDSKLEAADEGSGDVKYHLGMYHRRINRVTDRNITLSLVANPSHLEAADPVVMGKTKAEQFYCGDTEGKKVRPRERRARQIVKAPCSSMEFRSPT

SEQ ID NO: 60643 - protein, 1034 aa, Homo sapiens
  Payload ID: 12142
  Gene Symbol: OGDH
  Gene Name: oxoglutarate (alpha-ketoglutarate) dehydrogenase (lipoamide)
  ENSP ID: ENSP00000388183
MFHLRTCAAKLRPLTASQTVKTFSQNRPAAARTFQQIRCYSAPVAAEPFLSGTSSNYVEEMYCAWLENPKSVHKSWDIFFRNTNAGAPPGTAYQSPLPLSRGSLAAVAHAQSLVEAQPNVDKLVEDHLAVQSLIRAYQVRGHHIAKLDPLGISCVNFDDAPVTVSSNVDLAVFKERLRMLTVGGFYGLDESDLDKVFHLPTTTFIGGQESALPLREIIRRLEMAYCQHIGVEFMFINDLEQCQWIRQKFETPGIMQFTNEEKRTLLARLVRSTRFEEFLQRKWSSEKRFGLEGCEVLIPALKTIIDKSSENGVDYVIMGMPHRGRLNVLANVIRKELEQIFCQFDSKLEAADEGSGDVKYHLGMYHRRINRVTDRNITLSLVANPSHLEAADPVVMGKTKAEQFYCGDTEGKKVMSILLHGDAAFAGQGIVYETFHLSDLPSYTTHGTVHVVVNNQIGFTTDPRMARSSPYPTDVARVVNAPIFHVNSDDPEAVMYVCKVAAEWRSTFHKDVVVDLVCYRRNGHNEMDEPMFTQPLMYKQIRKQKPVLQKYAELLVSQGVVNQPEYEEEISKYDKICEEAFARSKDEKILHIKHWLDSPWPGFFTLDGQPRSMSCPSTGLTEDILTHIGNVASSVPVENFTIHGGLSRILKTRGEMVKNRTVDWALAEYMAFGSLLKEGIHIRLSGQDVERGTFSHRHHVLHDQNVDKRTCIPMNHLWPNQAPYTVCNSSLSEYGVLGFELGFAMASPNALVLWEAQFGDFHNTAQCIIDQFICPGQAKWVRQNGIVLLLPHGMEGMGPEHSSARPERFLQMCNDDPDVLPDLKEANFDINQLYDCNWVVVNCSTPGNFFHVLRRQILLPFRKPLIIFTPKSLLRHPEARSSFDEMLPGTHFQRVIPEDGPAAQNPENVKRLLFCTGKVYYDLTRERKARDMVGQVAITRIEQLSPFPFDLLLKEVQKYPNAELAWCQEEHKNQGYYDYVKPRLRTTISRAKPVWYAGRDPAAAPATGNKKTHLTELQRLLDTAFDLDVFKNFS

SEQ ID NO: 60644 - protein, 1019 aa, Homo sapiens
  Payload ID: 12142
  Gene Symbol: OGDH
  Gene Name: oxoglutarate (alpha-ketoglutarate) dehydrogenase (lipoamide)
  Uniprot ID: Q02218
  ENSP ID: ENSP00000392878
MFHLRTCAAKLRPLTASQTVKTFSQNRPAAARTFQQIRCYSAPVAAEPFLSGTSSNYVEEMYCAWLENPKSVHKSWDIFFRNTNAGAPPGTAYQSPLPLSRGSLAAVAHAQSLVEAQPNVDKLVEDHLAVQSLIRAYQVRGHHIAKLDPLGISCVNFDDAPVTVSSNVGFYGLDESDLDKVFHLPTTTFIGGQESALPLREIIRRLEMAYCQHIGVEFMFINDLEQCQWIRQKFETPGIMQFTNEEKRTLLARLVRSTRFEEFLQRKWSSEKRFGLEGCEVLIPALKTIIDKSSENGVDYVIMGMPHRGRLNVLANVIRKELEQIFCQFDSKLEAADEGSGDVKYHLGMYHRRINRVTDRNITLSLVANPSHLEAADPVVMGKTKAEQFYCGDTEGKKVMSILLHGDAAFAGQGIVYETFHLSDLPSYTTHGTVHVVVNNQIGFTTDPRMARSSPYPTDVARVVNAPIFHVNSDDPEAVMYVCKVAAEWRSTFHKDVVVDLVCYRRNGHNEMDEPMFTQPLMYKQIRKQKPVLQKYAELLVSQGVVNQPEYEEEISKYDKICEEAFARSKDEKILHIKHWLDSPWPGFFTLDGQPRSMSCPSTGLTEDILTHIGNVASSVPVENFTIHGGLSRILKTRGEMVKNRTVDWALAEYMAFGSLLKEGIHIRLSGQDVERGTFSHRHHVLHDQNVDKRTCIPMNHLWPNQAPYTVCNSSLSEYGVLGFELGFAMASPNALVLWEAQFGDFHNTAQCIIDQFICPGQAKWVRQNGIVLLLPHGMEGMGPEHSSARPERFLQMCNDDPDVLPDLKEANFDINQLYDCNWVVVNCSTPGNFFHVLRRQILLPFRKPLIIFTPKSLLRHPEARSSFDEMLPGTHFQRVIPEDGPAAQNPENVKRLLFCTGKVYYDLTRERKARDMVGQVAITRIEQLSPFPFDLLLKEVQKYPNAELAWCQEEHKNQGYYDYVKPRLRTTISRAKPVWYAGRDPAAAPATGNKKTHLTELQRLLDTAFDLDVFKNFS

SEQ ID NO: 60645 - protein, 873 aa, Homo sapiens
  Payload ID: 12142
  Gene Symbol: OGDH
  Gene Name: oxoglutarate (alpha-ketoglutarate) dehydrogenase (lipoamide)
  ENSP ID: ENSP00000398576
MFHLRTCAAKLRPLTASQTVKTFSQNRPAAARTFQQIRCYSAPVAAEPFLSGTSSNYVEEMYCAWLENPKSVHKGSMAWMSLTSTRSSTCPPPLSSGDRNQHFLCGRSSVGWRFEEFLQRKWSSEKRFGLEGCEVLIPALKTIIDKSSENGVDYVIMGMPHRGRLNVLANVIRKELEQIFCQFDSKLEAADEGSGDVKYHLGMYHRRINRVTDRNITLSLVANPSHLEAADPVVMGKTKAEQFYCGDTEGKKVMSILLHGDAAFAGQGIVYETFHLSDLPSYTTHGTVHVVVNNQIGFTTDPRMARSSPYPTDVARVVNAPIFHVNSDDPEAVMYVCKVAAEWRSTFHKDVVVDLVCYRRNGHNEMDEPMFTQPLMYKQIRKQKPVLQKYAELLVSQGVVNQPEYEEEISKYDKICEEAFARSKDEKILHIKHWLDSPWPGFFTLDGQPRSMSCPSTGLTEDILTHIGNVASSVPVENFTIHGGLSRILKTRGEMVKNRTVDWALAEYMAFGSLLKEGIHIRLSGQDVERGTFSHRHHVLHDQNVDKRTCIPMNHLWPNQAPYTVCNSSLSEYGVLGFELGFAMASPNALVLWEAQFGDFHNTAQCIIDQFICPGQAKWVRQNGIVLLLPHGMEGMGPEHSSARPERFLQMCNDDPDVLPDLKEANFDINQLYDCNWVVVNCSTPGNFFHVLRRQILLPFRKPLIIFTPKSLLRHPEARSSFDEMLPGTHFQRVIPEDGPAAQNPENVKRLLFCTGKVYYDLTRERKARDMVGQVAITRIEQLSPFPFDLLLKEVQKYPNAELAWCQEEHKNQGYYDYVKPRLRTTISRAKPVWYAGRDPAAAPATGNKKTHLTELQRLLDTAFDLDVFKNFS

SEQ ID NO: 60646 - protein, 211 aa, Homo sapiens
  Payload ID: 12142
  Gene Symbol: OGDH
  Gene Name: oxoglutarate (alpha-ketoglutarate) dehydrogenase (lipoamide)
  ENSP ID: ENSP00000411830
MFHLRTCAAKLRPLTASQTVKTFSQNRPAAARTFQQIRCYSAPVAAEPFLSGTSSNYVEEMYCAWLENPKSVHKSWDIFFRNTNAGAPPGTAYQSPLPLSRGSLAAVAHAQSLVEAQPNVDKLVEDHLAVQSLIRAYQIRGHHVAQLDPLGILDADLDSSVPADIISSTDKLGFYGLDESDLDKVFHLPTTTFIGGQESALPLREIIRRLE

SEQ ID NO: 60647 - protein, 1038 aa, Homo sapiens
  Payload ID: 12142
  Gene Symbol: OGDH
  Gene Name: oxoglutarate (alpha-ketoglutarate) dehydrogenase (lipoamide)
  ENSP ID: ENSP00000414662
MFHLRTCAAKLRPLTASQTVKTFSQNRPAAARTFQQIRCYSAPVAAEPFLSGTSSNYVEEMYCAWLENPKSVHKSWDIFFRNTNAGAPPGTAYQSPLPLSRGSLAAVAHAQSLVEAQPNVDKLVEDHLAVQSLIRAYQIRGHHVAQLDPLGILDADLDSSVPADIISSTDKLDLAVFKERLRMLTVGGFYGLDESDLDKVFHLPTTTFIGGQESALPLREIIRRLEMAYCQHIGVEFMFINDLEQCQWIRQKFETPGIMQFTNEEKRTLLARLVRSTRFEEFLQRKWSSEKRFGLEGCEVLIPALKTIIDKSSENGVDYVIMGMPHRGRLNVLANVIRKELEQIFCQFDSKLEAADEGSGDVKYHLGMYHRRINRVTDRNITLSLVANPSHLEAADPVVMGKTKAEQFYCGDTEGKKVMSILLHGDAAFAGQGIVYETFHLSDLPSYTTHGTVHVVVNNQIGFTTDPRMARSSPYPTDVARVVNAPIFHVNSDDPEAVMYVCKVAAEWRSTFHKDVVVDLVCYRRNGHNEMDEPMFTQPLMYKQIRKQKPVLQKYAELLVSQGVVNQPEYEEEISKYDKICEEAFARSKDEKILHIKHWLDSPWPGFFTLDGQPRSMSCPSTGLTEDILTHIGNVASSVPVENFTIHGGLSRILKTRGEMVKNRTVDWALAEYMAFGSLLKEGIHIRLSGQDVERGTFSHRHHVLHDQNVDKRTCIPMNHLWPNQAPYTVCNSSLSEYGVLGFELGFAMASPNALVLWEAQFGDFHNTAQCIIDQFICPGQAKWVRQNGIVLLLPHGMEGMGPEHSSARPERFLQMCNDDPDVLPDLKEANFDINQLYDCNWVVVNCSTPGNFFHVLRRQILLPFRKPLIIFTPKSLLRHPEARSSFDEMLPGTHFQRVIPEDGPAAQNPENVKRLLFCTGKVYYDLTRERKARDMVGQVAITRIEQLSPFPFDLLLKEVQKYPNAELAWCQEEHKNQGYYDYVKPRLRTTISRAKPVWYAGRDPAAAPATGNKKTHLTELQRLLDTAFDLDVFKNFS

SEQ ID NO: 60648 - protein, 1001 aa, Homo sapiens
  Payload ID: 12142
  Gene Symbol: OGDH
  Gene Name: oxoglutarate (alpha-ketoglutarate) dehydrogenase (lipoamide)
  ENSP ID: ENSP00000486854
MFHLRTCAAKLRPLTASQTVKTFSQNRPAAARTFQQIRCYSAPVAAEPFLSGTSSNYVEEMYCAWLENPKSVHKSWDIFFRNTNAGAPPGTAYQSPLPLSRGSLAAVAHAQSLVEAQPNVDKLVEDHLAVQSLIRAYQIRGHHVAQLDPLGILDADLDSSVPADIISSTDKLGFYGLDESDLDKVFHLPTTTFIGGQESALPLREIIRRLEMAYCQHIGVEFMFINDLEQCQWIRQKFETPGIMQFTNEEKRTLLARLVRSTRFEEFLQRKWSSEKRFGLEGCEVLIPALKTIIDKSSENGVDYVIMGMPHRGRLNVLANVIRKELEQIFCQFDSKLEAADEGSGDVKYHLGMYHRRINRVTDRNITLSLVANPSHLEAADPVVMGKTKAEQFYCGDTEGKKVMSILLHGDAAFAGQGIVYETFHLSDLPSYTTHGTVHVVVNNQIGFTTDPRMARSSPYPTDVARVVNAPIFHVNSDDPEAVMYVCKVAAEWRSTFHKDVVVDLVCYRRNGHNEMDEPMFTQPLMYKQIRKQKPVLQKYAELLVSQGVVNQPEYEEEISKYDKICEEAFARSKDEKILHIKHWLDSPWPGFFTLDGQPRSMSCPSTGLTEDILTHIGNVASSVPVENFTIHGGLSRILKTRGEMVKNRTVDWALAEYMAFGSLLKEGIHIRLSGQDVERGTFSHRHHVLHDQNVDKRTCIPMNHLWPNQAPYTVCNSSLSEYGVLGLAGLRMASPNALVLWEAQFGDFHNTAQCIIDQFICPGQAKWVRQNGIVLLLPHGMEGMGPEHSSARPERFLQMCNDDPDVLPDLKEANFDINQLYDCNWVVVNCSTPGNFFHVLRRQILLPFRKPLIIFTPKSLLRHPEARSSFDEMLPGTHFQRVIPEDGPAAQNPENVKRLLFCTGKVYYDLTRERKARDMVGQVAITRIEQLSPFPFDLLLKEVQKYPNAELAWCQEEHKNQGYYDYVKPRLRTTISRAKPVWYAGRDPAAAPATGNKKTH

SEQ ID NO: 60649 - protein, 337 aa, Homo sapiens
  Payload ID: 12143
  Gene Symbol: OXGR1
  Gene Name: oxoglutarate (alpha-ketoglutarate) receptor 1
  Uniprot ID: Q96P68
  ENSP ID: ENSP00000298440
MNEPLDYLANASDFPDYAAAFGNCTDENIPLKMHYLPVIYGIIFLVGFPGNAVVISTYIFKMRPWKSSTIIMLNLACTDLLYLTSLPFLIHYYASGENWIFGDFMCKFIRFSFHFNLYSSILFLTCFSIFRYCVIIHPMSCFSIHKTRCAVVACAVVWIISLVAVIPMTFLITSTNRTNRSACLDLTSSDELNTIKWYNLILTATTFCLPLVIVTLCYTTIIHTLTHGLQTDSCLKQKARRLTILLLLAFYVCFLPFHILRVIRIESRLLSISCSIENQIHEAYIVSRPLAALNTFGNLLLYVVVSDNFQQAVCSTVRCKVSGNLEQAKKISYSNNP

SEQ ID NO: 60650 - protein, 62 aa, Homo sapiens
  Payload ID: 12143
  Gene Symbol: OXGR1
  Gene Name: oxoglutarate (alpha-ketoglutarate) receptor 1
  ENSP ID: ENSP00000437356
MNEPLDYLANASDFPDYAAAFGNCTDENIPLKMHYLPVIYGIIFLVGFPGNAVVISTYIFKM

SEQ ID NO: 60651 - protein, 337 aa, Homo sapiens; identical to SEQ ID NO: 60649
  Payload ID: 12143
  Gene Symbol: OXGR1
  Gene Name: oxoglutarate (alpha-ketoglutarate) receptor 1
  Uniprot ID: Q96P68
  ENSP ID: ENSP00000438800

SEQ ID NO: 60652 - protein, 69 aa, Homo sapiens
  Payload ID: 12143
  Gene Symbol: OXGR1
  Gene Name: oxoglutarate (alpha-ketoglutarate) receptor 1
  ENSP ID: ENSP00000445269
MNEPLDYLANASDFPDYAAAFGNCTDENIPLKMHYLPVIYGIIFLVGFPGNAVVISTYIFKMRPWKSST

SEQ ID NO: 60653 - protein, 1010 aa, Homo sapiens
  Payload ID: 12144
  Gene Symbol: OGDHL
  Gene Name: oxoglutarate dehydrogenase-like
  Uniprot ID: Q9ULD0
  ENSP ID: ENSP00000363216
MSQLRLLPSRLGVQAARLLAAHDVPVFGWRSRSSGPPATFPSSKGGGGSSYMEEMYFAWLENPQSVHKSWDSFFREASEEAFSGSAQPRPPSVVHESRSAVSSRTKTSKLVEDHLAVQSLIRAYQIRGHHVAQLDPLGILDADLDSFVPSDLITTIDKLAFYDLQEADLDKEFQLPTTTFIGGSENTLSLREIIRRLENTYCQHIGLEFMFINDVEQCQWIRQKFETPGVMQFSSEEKRTLLARLVRSMRFEDFLARKWSSEKRFGLEGCEVMIPALKTIIDKSSEMGIENVILGMPHRGRLNVLANVIRKDLEQIFCQFDPKLEAADEGSGDVKYHLGMYHERINRVTNRNITLSLVANPSHLEAVDPVVQGKTKAEQFYRGDAQGKKVMSILVHGDAAFAGQGVVYETFHLSDLPSYTTNGTVHVVVNNQIGFTTDPRMARSSPYPTDVARVVNAPIFHVNADDPEAVIYVCSVAAEWRNTFNKDVVVDLVCYRRRGHNEMDEPMFTQPLMYKQIHRQVPVLKKYADKLIAEGTVTLQEFEEEIAKYDRICEEAYGRSKDKKILHIKHWLDSPWPGFFNVDGEPKSMTCPATGIPEDMLTHIGSVASSVPLEDFKIHTGLSRILRGRADMTKNRTVDWALAEYMAFGSLLKEGIHVRLSGQDVERGTFSHRHHVLHDQEVDRRTCVPMNHLWPDQAPYTVCNSSLSEYGVLGFELGYAMASPNALVLWEAQFGDFHNTAQCIIDQFISTGQAKWVRHNGIVLLLPHGMEGMGPEHSSARPERFLQMSNDDSDAYPAFTKDFEVSQLYDCNWIVVNCSTPANYFHVLRRQILLPFRKPLIIFTPKSLLRHPEAKSSFDQMVSGTSFQRVIPEDGAAARAPEQVQRLIFCTGKVYYDLVKERSSQDLEEKVAITRLEQISPFPFDLIKQEAEKYPGAELAWCQEEHKNMGYYDYISPRFMTILRRARPIWYVGRDPAAAPATGNRNTHLVSLKKFLDTAFNLQAFEGKTF

SEQ ID NO: 60654 - protein, 801 aa, Homo sapiens
  Payload ID: 12144
  Gene Symbol: OGDHL
  Gene Name: oxoglutarate dehydrogenase-like
  Uniprot ID: Q9ULD0
  ENSP ID: ENSP00000390240
MFINDVEQCQWIRQKFETPGVMQFSSEEKRTLLARLVRSMRFEDFLARKWSSEKRFGLEGCEVMIPALKTIIDKSSEMGIENVILGMPHRGRLNVLANVIRKDLEQIFCQFDPKLEAADEGSGDVKYHLGMYHERINRVTNRNITLSLVANPSHLEAVDPVVQGKTKAEQFYRGDAQGKKVMSILVHGDAAFAGQGVVYETFHLSDLPSYTTNGTVHVVVNNQIGFTTDPRMARSSPYPTDVARVVNAPIFHVNADDPEAVIYVCSVAAEWRNTFNKDVVVDLVCYRRRGHNEMDEPMFTQPLMYKQIHRQVPVLKKYADKLIAEGTVTLQEFEEEIAKYDRICEEAYGRSKDKKILHIKHWLDSPWPGFFNVDGEPKSMTCPATGIPEDMLTHIGSVASSVPLEDFKIHTGLSRILRGRADMTKNRTVDWALAEYMAFGSLLKEGIHVRLSGQDVERGTFSHRHHVLHDQEVDRRTCVPMNHLWPDQAPYTVCNSSLSEYGVLGFELGYAMASPNALVLWEAQFGDFHNTAQCIIDQFISTGQAKWVRHNGIVLLLPHGMEGMGPEHSSARPERFLQMSNDDSDAYPAFTKDFEVSQLYDCNWIVVNCSTPANYFHVLRRQILLPFRKPLIIFTPKSLLRHPEAKSSFDQMVSGTSFQRVIPEDGAAARAPEQVQRLIFCTGKVYYDLVKERSSQDLEEKVAITRLEQISPFPFDLIKQEAEKYPGAELAWCQEEHKNMGYYDYISPRFMTILRRARPIWYVGRDPAAAPATGNRNTHLVSLKKFLDTAFNLQAFEGKTF

SEQ ID NO: 60655 - protein, 953 aa, Homo sapiens
  Payload ID: 12144
  Gene Symbol: OGDHL
  Gene Name: oxoglutarate dehydrogenase-like
  Uniprot ID: Q9ULD0
  ENSP ID: ENSP00000401356
MSQLRLLPSRLGVQAARLLAAHDVPVFGWRSRSSGPPATFPSSKGGGGSSYMEEMYFAWLENPQSVHKIRGHHVAQLDPLGILDADLDSFVPSDLITTIDKLAFYDLQEADLDKEFQLPTTTFIGGSENTLSLREIIRRLENTYCQHIGLEFMFINDVEQCQWIRQKFETPGVMQFSSEEKRTLLARLVRSMRFEDFLARKWSSEKRFGLEGCEVMIPALKTIIDKSSEMGIENVILGMPHRGRLNVLANVIRKDLEQIFCQFDPKLEAADEGSGDVKYHLGMYHERINRVTNRNITLSLVANPSHLEAVDPVVQGKTKAEQFYRGDAQGKKVMSILVHGDAAFAGQGVVYETFHLSDLPSYTTNGTVHVVVNNQIGFTTDPRMARSSPYPTDVARVVNAPIFHVNADDPEAVIYVCSVAAEWRNTFNKDVVVDLVCYRRRGHNEMDEPMFTQPLMYKQIHRQVPVLKKYADKLIAEGTVTLQEFEEEIAKYDRICEEAYGRSKDKKILHIKHWLDSPWPGFFNVDGEPKSMTCPATGIPEDMLTHIGSVASSVPLEDFKIHTGLSRILRGRADMTKNRTVDWALAEYMAFGSLLKEGIHVRLSGQDVERGTFSHRHHVLHDQEVDRRTCVPMNHLWPDQAPYTVCNSSLSEYGVLGFELGYAMASPNALVLWEAQFGDFHNTAQCIIDQFISTGQAKWVRHNGIVLLLPHGMEGMGPEHSSARPERFLQMSNDDSDAYPAFTKDFEVSQLYDCNWIVVNCSTPANYFHVLRRQILLPFRKPLIIFTPKSLLRHPEAKSSFDQMVSGTSFQRVIPEDGAAARAPEQVQRLIFCTGKVYYDLVKERSSQDLEEKVAITRLEQISPFPFDLIKQEAEKYPGAELAWCQEEHKNMGYYDYISPRFMTILRRARPIWYVGRDPAAAPATGNRNTHLVSLKKFLDTAFNLQAFEGKTF

SEQ ID NO: 60656 - protein, 807 aa, Homo sapiens
  Payload ID: 12145
  Gene Symbol: OSBP
  Gene Name: oxysterol binding protein
  Uniprot ID: P22059
  ENSP ID: ENSP00000263847
MAATELRGVVGPGPAAIAALGGGGAGPPVVGGGGGRGDAGPGSGAASGTVVAAAAGGPGPGAGGVAAAGPAPAPPTGGSGGSGAGGSGSAREGWLFKWTNYIKGYQRRWFVLSNGLLSYYRSKAEMRHTCRGTINLATANITVEDSCNFIISNGGAQTYHLKASSEVERQRWVTALELAKAKAVKMLAESDESGDEESVSQTDKTELQNTLRTLSSKVEDLSTCNDLIAKHGTALQRSLSELESLKLPAESNEKIKQVNERATLFRITSNAMINACRDFLMLAQTHSKKWQKSLQYERDQRIRLEETLEQLAKQHNHLERAFRGATVLPANTPGNVGSGKDQCCSGKGDMSDEDDENEFFDAPEIITMPENLGHKRTGSNISGASSDISLDEQYKHQLEETKKEKRTRIPYKPNYSLNLWSIMKNCIGKELSKIPMPVNFNEPLSMLQRLTEDLEYHELLDRAAKCENSLEQLCYVAAFTVSSYSTTVFRTSKPFNPLLGETFELDRLEENGYRSLCEQVSHHPPAAAHHAESKNGWTLRQEIKITSKFRGKYLSIMPLGTIHCIFHATGHHYTWKKVTTTVHNIIVGKLWIDQSGEIDIVNHKTGDKCNLKFVPYSYFSRDVARKVTGEVTDPSGKVHFALLGTWDEKMECFKVQPVIGENGGDARQRGHEAEESRVMLWKRNPLPKNAENMYYFSELALTLNAWESGTAPTDSRLRPDQRLMENGRWDEANAEKQRLEEKQRLSRKKREAEAMKATEDGTPYDPYKALWFERKKDPVTKELTHIYRGEYWECKEKQDWSSCPDIF

SEQ ID NO: 60657 - protein, 171 aa, Homo sapiens
  Payload ID: 12145
  Gene Symbol: OSBP
  Gene Name: oxysterol binding protein
  ENSP ID: ENSP00000432399
  MOD_RES (1)..(1): Any amino acid
XSGASSDISLDEQYKHQLEETKKEKRTRIPYKPNYSLNLWSIMKNCIGKELSKIPMPVNFNEPLSMLQRLTEDLEYHELLDRAAKCENSLEQLCYVAAFTVSSYSTTVFRTSKPFNPLLGETFELDRLEENGYRSLCEQVPFIVFSMQLGTTTLGRKLPQLYTTLLWASCG

SEQ ID NO: 60658 - protein, 916 aa, Homo sapiens
  Payload ID: 12146
  Gene Symbol: OSBP2
  Gene Name: oxysterol binding protein 2
  Uniprot ID: Q969R2
  ENSP ID: ENSP00000332576
MGKAAAPSRGGGCGGRSRGLSSLFTVVPCLSCHTAAPGMSASTSGSGPEPKPQPQPVPEPERGPLSEQVSEAVSEAVPRSEPVSETTSEPEPGAGQPSELLQGSRPGSESSSGVGAGPFTKAASEPLSRAVGSATFLRPESGSLPALKPLPLLRPGQAKTPLGVPMSGTGTTSSAPLALLPLDSFEGWLLKWTNYLKGYQRRWFVLGNGLLSYYRNQGEMAHTCRGTINLSTAHIDTEDSCGILLTSGARSYHLKASSEVDRQQWITALELAKAKAVRVMNTHSDDSGDDDEATTPADKSELHHTLKNLSLKLDDLSTCNDLIAKHGAALQRSLTELDGLKIPSESGEKLKVVNERATLFRITSNAMINACRDFLELAEIHSRKWQRALQYEQEQRVHLEETIEQLAKQHNSLERAFHSAPGRPANPSKSFIEGSLLTPKGEDSEEDEDTEYFDAMEDSTSFITVITEAKEDSRKAEGSTGTSSVDWSSADNVLDGASLVPKGSSKVKRRVRIPNKPNYSLNLWSIMKNCIGRELSRIPMPVNFNEPLSMLQRLTEDLEYHHLLDKAVHCTSSVEQMCLVAAFSVSSYSTTVHRIAKPFNPMLGETFELDRLDDMGLRSLCEQVSHHPPSAAHYVFSKHGWSLWQEITISSKFRGKYISIMPLGAIHLEFQASGNHYVWRKSTSTVHNIIVGKLWIDQSGDIEIVNHKTNDRCQLKFLPYSYFSKEAARKVTGVVSDSQGKAHYVLSGSWDEQMECSKVMHSSPSSPSSDGKQKTVYQTLSAKLLWKKYPLPENAENMYYFSELALTLNEHEEGVAPTDSRLRPDQRLMEKGRWDEANTEKQRLEEKQRLSRRRRLEACGPGSSCSSEEEKEADAYTPLWFEKRLDPLTGEMACVYKGGYWEAKEKQDWHMCPNIF

SEQ ID NO: 60659 - protein, 636 aa, Homo sapiens
  Payload ID: 12146
  Gene Symbol: OSBP2
  Gene Name: oxysterol binding protein 2
  ENSP ID: ENSP00000384213
MNTHSDDSGDDDEATTPADKSELHHTLKNLSLKLDDLSTCNDLIAKHGAALQRSLTELDGLKIPSESGEKLKVVNERATLFRITSNAMINACRDFLELAEIHSRKWQRALQYEQEQRVHLEETIEQLAKQHNSLERAFHSAPGRPANPSKSFIEGDLLTPKGEDSEEDEDTEYFDAMEDSTSFITVITEAKEDRKAEGSTGTSSVDWSSADNVLDGASLVPKGSSKVKRRVRIPNKPNYSLNLWSIMKNCIGRELSRIPMPVNFNEPLSMLQRLTEDLEYHHLLDKAVHCTSSVEQMCLVAAFSVSSYSTTVHRIAKPFNPMLGETFELDRLDDMGLRSLCEQVSHHPPSAAHYVFSKHGWSLWQEITISSKFRGKYISIMPLGAIHLEFQASGNHYVWRKSTSTVHNIIVGKLWIDQSGDIEIVNHKTNDRCQLKFLPYSYFSKEAARKVTGVVSDSQGKAHYVLSGSWDEQMECSKVMHSSPSSPSSDGKQKTVYQTLSAKLLWKKYPLPENAENMYYFSELALTLNEHEEGVAPTDSRLRPDQRLMEKGRWDEANTEKQRLEEKQRLSRRRRLEACGPGSSCSSEEEKEADAYTPLWFEKRLDPLTGEMACVYKGGYWEAKEKQDWHMCPNIF

SEQ ID NO: 60660 - protein, 743 aa, Homo sapiens
  Payload ID: 12146
  Gene Symbol: OSBP2
  Gene Name: oxysterol binding protein 2
  ENSP ID: ENSP00000385237
MSSLAAKRLGMNRRPAGSGGGGGEAATWGHRFWRPQERPTDRNQGEMAHTCRGTINLSTAHIDTEDSCGILLTSGARSYHLKASSEVDRQQWITALELAKAKAVRVMNTHSDDSGDDDEATTPADKSELHHTLKNLSLKLDDLSTCNDLIAKHGAALQRSLTELDGLKIPSESGEKLKVVNERATLFRITSNAMINACRDFLELAEIHSRKWQRALQYEQEQRVHLEETIEQLAKQHNSLERAFHSAPGRPANPSKSFIEGSLLTPKGEDSEEDEDTEYFDAMEDSTSFITVITEAKEDSRKAEGSTGTSSVDWSSADNVLDGASLVPKGSSKVKRRVRIPNKPNYSLNLWSIMKNCIGRELSRIPMPVNFNEPLSMLQRLTEDLEYHHLLDKAVHCTSSVEQMCLVAAFSVSSYSTTVHRIAKPFNPMLGETFELDRLDDMGLRSLCEQVSHHPPSAAHYVFSKHGWSLWQEITISSKFRGKYISIMPLGAIHLEFQASGNHYVWRKSTSTVHNIIVGKLWIDQSGDIEIVNHKTNDRCQLKFLPYSYFSKEAARKVTGVVSDSQGKAHYVLSGSWDEQMECSKVMHSSPSSPSSDGKQKTVYQTLSAKLLWKKYPLPENAENMYYFSELALTLNEHEEGVAPTDSRLRPDQRLMEKGRWDEANTEKQRLEEKQRLSRRRRLEACGPGSSCSSEEEKEADAYTPLWFEKRLDPLTGEMACVYKGGYWEAKEKQDWHMCPNIF

SEQ ID NO: 60661 - protein, 549 aa, Homo sapiens
  Payload ID: 12146
  Gene Symbol: OSBP2
  Gene Name: oxysterol binding protein 2
  Uniprot ID: Q969R2
  ENSP ID: ENSP00000385254
MINACRDFLELAEIHSRKWQRALQYEQEQRVHLEETIEQLAKQHNSLERAFHSAPGRPANPSKSFIEGSLLTPKGEDSEEDEDTEYFDAMEDSTSFITVITEAKEDRKAEGSTGTSSVDWSSADNVLDGASLVPKGSSKVKRRVRIPNKPNYSLNLWSIMKNCIGRELSRIPMPVNFNEPLSMLQRLTEDLEYHHLLDKAVHCTSSVEQMCLVAAFSVSSYSTTVHRIAKPFNPMLGETFELDRLDDMGLRSLCEQVSHHPPSAAHYVFSKHGWSLWQEITISSKFRGKYISIMPLGAIHLEFQASGNHYVWRKSTSTVHNIIVGKLWIDQSGDIEIVNHKTNDRCQLKFLPYSYFSKEAARKVTGVVSDSQGKAHYVLSGSWDEQMECSKVMHSSPSSPSSDGKQKTVYQTLSAKLLWKKYPLPENAENMYYFSELALTLNEHEEGVAPTDSRLRPDQRLMEKGRWDEANTEKQRLEEKQRLSRRRRLEACGPGSSCSSEEEKEADAYTPLWFEKRLDPLTGEMACVYKGGYWEAKEKQDWHMCPNIF

SEQ ID NO: 60662 - protein, 174 aa, Homo sapiens
  Payload ID: 12146
  Gene Symbol: OSBP2
  Gene Name: oxysterol binding protein 2
  ENSP ID: ENSP00000388575
MINACRDFLELAEIHSRKWQRALQYEQEQRVHLEETIEQLAKQHNSLERAFHSAPGRPANPSKSFIEGSLLTPKGEDSEEDEDTEYFDAMEDSTSFITVITEAKEDSRKAEGSTGTSSVDWSSADNVLDGASLVPKGSSKVKRRVRIPNKPNYSLNLWSIMKNCIGRELSRIPM

SEQ ID NO: 60663 - protein, 659 aa, Homo sapiens
  Payload ID: 12146
  Gene Symbol: OSBP2
  Gene Name: oxysterol binding protein 2
  Uniprot ID: Q969R2
  ENSP ID: ENSP00000389200
MKGRGCWDTASVRSFCSSGCLNKFKKDDSGDDDEATTPADKSELHHTLKNLSLKLDDLSTCNDLIAKHGAALQRSLTELDGLKIPSESGEKLKVVNERATLFRITSNAMINACRDFLELAEIHSRKWQRALQYEQEQRVHLEETIEQLAKQHNSLERAFHSAPGRPANPSKSFIEGSLLTPKGEDSEEDEDTEYFDAMEDSTSFITVITEAKEDSRKAEGSTGTSSVDWSSADNVLDGASLVPKGSSKVKRRVRIPNKPNYSLNLWSIMKNCIGRELSRIPMPVNFNEPLSMLQRLTEDLEYHHLLDKAVHCTSSVEQMCLVAAFSVSSYSTTVHRIAKPFNPMLGETFELDRLDDMGLRSLCEQVSHHPPSAAHYVFSKHGWSLWQEITISSKFRGKYISIMPLGAIHLEFQASGNHYVWRKSTSTVHNIIVGKLWIDQSGDIEIVNHKTNDRCQLKFLPYSYFSKEAARKVTGVVSDSQGKAHYVLSGSWDEQMECSKVMHSSPSSPSSDGKQKTVYQTLSAKLLWKKYPLPENAENMYYFSELALTLNEHEEGVAPTDSRLRPDQRLMEKGRWDEANTEKQRLEEKQRLSRRRRLEACGPGSSCSSEEAEKEADAYTPLWFEKRLDPLTGEMACVYKGGYWEAKEKQDWHMCPNIF

SEQ ID NO: 60664 - protein, 915 aa, Homo sapiens
  Payload ID: 12146
  Gene Symbol: OSBP2
  Gene Name: oxysterol binding protein 2
  Uniprot ID: Q969R2
  ENSP ID: ENSP00000392080
MGKAAAPSRGGGCGGRSRGLSSLFTVVPCLSCHTAAPGMSASTSGSGPEPKPQPQPVPEPERGPLSEQVSEAVSEAVPRSEPVSETTSEPEPGAGQPSELLQGSRPGSESSSGVGAGPFTKAASEPLSRAVGSATFLRPESGSLPALKPLPLLRPGQAKTPLGVPMSGTGTTSSAPLALLPLDSFEGWLLKWTNYLKGYQRRWFVLGNGLLSYYRNQGEMAHTCRGTINLSTAHIDTEDSCGILLTSGARSYHLKASSEVDRQQWITALELAKAKAVRVMNTHSDDSGDDDEATTPADKSELHHTLKNLSLKLDDLSTCNDLIAKHGAALQRSLTELDGLKIPSESGEKLKVVNERATLFRITSNAMINACRDFLELAEIHSRKWQRALQYEQEQRVHLEETIEQLAKQHNSLERAFHSAPGRPANPSKSFIEGSLLTPKGEDSEEDEDTEYFDAMEDSTSFITVITEAKEDRKAEGSTGTSSVDWSSADNVLDGASLVPKGSSKVKRRVRIPNKPNYSLNLWSIMKNCIGRELSRIPMPVNFNEPLSMLQRLTEDLEYHHLLDKAVHCTSSVEQMCLVAAFSVSSYSTTVHRIAKPFNPMLGETFELDRLDDMGLRSLCEQVSHHPPSAAHYVFSKHGWSLWQEITISSKFRGKYISIMPLGAIHLEFQASGNHYVWRKSTSTVHNIIVGKLWIDQSGDIEIVNHKTNDRCQLKFLPYSYFSKEAARKVTGVVSDSQGKAHYVLSGSWDEQMECSKVMHSSPSSPSSDGKQKTVYQTLSAKLLWKKYPLPENAENMYYFSELALTLNEHEEGVAPTDSRLRPDQRLMEKGRWDEANTEKQRLEEKQRLSRRRRLEACGPGSSCSSEEEKEADAYTPLWFEKRLDPLTGEMACVYKGGYWEAKEKQDWHMCPNIF

SEQ ID NO: 60665 - protein, 74 aa, Homo sapiens
  Payload ID: 12146
  Gene Symbol: OSBP2
  Gene Name: oxysterol binding protein 2
  ENSP ID: ENSP00000392362
  MOD_RES (1)..(1): Any amino acid
XAIHLEFQASGNHYVWRKSTSTVHNIIVGKLWIDQSGDIEIVNHKTNDRCQLKFLPYSYFSKEAARKVSRTSHL

SEQ ID NO: 60666 - protein, 298 aa, Homo sapiens
  Payload ID: 12146
  Gene Symbol: OSBP2
  Gene Name: oxysterol binding protein 2
  ENSP ID: ENSP00000401776
  MOD_RES (1)..(1): Any amino acid
XHSENSRATPGACLSPQHSQDGAWRRPAAAEETLGVRDGHQACRDFLELAEIHSRKWQRALQYEQEQRVHLEETIEQLAKQHNSLERAFHSAPGRPANPSKSFIEGSLLTPKGEDSEEDEDTEYFDAMEDSTSFITVITEAKEDRKAEGSTGTSSVDWSSADNVLDGASLVPKGSSKVKRRVRIPNKPNYSLNLWSIMKNCIGRELSRIPMPVNFNEPLSMLQRLTEDLEYHHLLDKAVHCTSSVEQMCLVAAFSVSSYSTTVHRIAKPFNPMLGETFELDRLDDMGLRSLCEQVSHH

SEQ ID NO: 60667 - protein, 196 aa, Homo sapiens
  Payload ID: 12146
  Gene Symbol: OSBP2
  Gene Name: oxysterol binding protein 2
  ENSP ID: ENSP00000409011
  MOD_RES (1)..(1): Any amino acid
XHSENSRATPGACLSPQHSQDGAWRRPAAAEETLGVRDGHQACRDFLELAEIHSRKWQRALQYEQEQRVHLEETIEQLAKQHNSLERAFHSAPGRPANPSKSFIEGSLLTPKGEDSEEDEDTEYFDAMEDSTSFITVITEAKEDSRKAEGSTGTSSVDWSSADNGSSKVKRRVRIPNKPNYSLNLWSIMKNCIGRE

SEQ ID NO: 60668 - protein, 450 aa, Homo sapiens
  Payload ID: 12146
  Gene Symbol: OSBP2
  Gene Name: oxysterol binding protein 2
  ENSP ID: ENSP00000409838
ACRDFLELAEIHSRKWQRALQYEQEQRVHLEETIEQLAKQHNSLERAFHSAPGRPANPSKSFIEGSLLTPKGEDSEEDEDTEYFDAMEDSTSFITVITEAKEDSRKAEGSTGTSSVDWSSADNVLDGASLVPKGSSKVKRRVRIPNKPNYSLNLWSIMKNCIGRELSRIPMPVNFNEPLSMLQRLTEDLEYHHLLDKAVHCTSSVEQMCLVAAFSVSSYSTTVHRIAKPFNPMLGETFELDRLDDMGLRSLCEQVSHHPPSAAHYVFSKHGWSLWQEITISSKFRGKYISIMPLGAIHLEFQASGNHYVWRKSTSTVHNIIVGKLWIDQSGDIEIVNHKTNDRCQLKFLPYSYFSKEAARKGERGEHVLLLRAGPDPQRARGGRSANRQPPAARPAADGEGPLGRGQYREAAAGGEAAPVAAPAAGGLRAGQQLQLGGREGGGCLHATVV

SEQ ID NO: 60669 - protein, 750 aa, Homo sapiens
  Payload ID: 12146
  Gene Symbol: OSBP2
  Gene Name: oxysterol binding protein 2
  Uniprot ID: Q969R2
  ENSP ID: ENSP00000411052
MHRQRTRTMSSLAAKRLGMNRRPAGSGGGGGEAATWGHRFWRPQERPTDRNQGEMAHTCRGTINLSTAHIDTEDSCGILLTSGARSYHLKASSEVDRQQWITALELAKAKAVRVMNTHSDDSGDDDEATTPADKSELHHTLKNLSLKLDDLSTCNDLIAKHGAALQRSLTELDGLKIPSESGEKLKVVNERATLFRITSNAMINACRDFLELAEIHSRKWQRALQYEQEQRVHLEETIEQLAKQHNSLERAFHSAPGRPANPSKSFIEGSLLTPKGEDSEEDEDTEYFDAMEDSTSFITVITEAKEDRKAEGSTGTSSVDWSSADNVLDGASLVPKGSSKVKRRVRIPNKPNYSLNLWSIMKNCIGRELSRIPMPVNFNEPLSMLQRLTEDLEYHHLLDKAVHCTSSVEQMCLVAAFSVSSYSTTVHRIAKPFNPMLGETFELDRLDDMGLRSLCEQVSHHPPSAAHYVFSKHGWSLWQEITISSKFRGKYISIMPLGAIHLEFQASGNHYVWRKSTSTVHNIIVGKLWIDQSGDIEIVNHKTNDRCQLKFLPYSYFSKEAARKVTGVVSDSQGKAHYVLSGSWDEQMECSKVMHSSPSSPSSDGKQKTVYQTLSAKLLWKKYPLPENAENMYYFSELALTLNEHEEGVAPTDSRLRPDQRLMEKGRWDEANTEKQRLEEKQRLSRRRRLEACGPGSSCSSEEEKEADAYTPLWFEKRLDPLTGEMACVYKGGYWEAKEKQDWHMCPNIF

SEQ ID NO: 60670 - protein, 25 aa, Homo sapiens
  Payload ID: 12146
  Gene Symbol: OSBP2
  Gene Name: oxysterol binding protein 2
  ENSP ID: ENSP00000411497
MINACRDFLELAEIHSRKWQRALQY

SEQ ID NO: 60671 - protein, 588 aa, Homo sapiens
  Payload ID: 12146
  Gene Symbol: OSBP2
  Gene Name: oxysterol binding protein 2
  ENSP ID: ENSP00000415274
  MOD_RES (1)..(1): Any amino acid
XHSENSRATPGACLSPQHSQDGAWRRPAAAEETLGVRDGHQACRDFLELAEIHSRKWQRALQYEQEQRVHLEETIEQLAKQHNSLERAFHSAPGRPANPSKSFIEGSLLTPKGEDSEEDEDTEYFDAMEDSTSFITVITEAKEDSRKAEGSTGTSSVDWSSADNVLDGASLVPKGSSKVKRRVRIPNKPNYSLNLWSIMKNCIGRELSRIPMPVNFNEPLSMLQRLTEDLEYHHLLDKAVHCTSSVEQMCLVAAFSVSSYSTTVHRIAKPFNPMLGETFELDRLDDMGLRSLCEQVSHHPPSAAHYVFSKHGWSLWQEITISSKFRGKYISIMPLGAIHLEFQASGNHYVWRKSTSTVHNIIVGKLWIDQSGDIEIVNHKTNDRCQLKFLPYSYFSKEAARKVTGVVSDSQGKAHYVLSGSWDEQMECSKVMHSSPSSPSSDGKQKTVYQTLSAKLLWKKYPLPENAENMYYFSELALTLNEHEEGVAPTDSRLRPDQRLMEKGRWDEANTEKQRLEEKQRLSRRRRLEACGPGSSCSSEEEKEADAYTPLWFEKRLDPLTGEMACVYKGGYWEAKEKQDWHMCPNIF

SEQ ID NO: 60672 - protein, 460 aa, Homo sapiens
  Payload ID: 12146
  Gene Symbol: OSBP2
  Gene Name: oxysterol binding protein 2
  Uniprot ID: Q969R2
  ENSP ID: ENSP00000438713
MEDSTSFITVITEAKEDRKAEGSTGTSSVDWSSADNVLDGASLVPKGSSKVKRRVRIPNKPNYSLNLWSIMKNCIGRELSRIPMPVNFNEPLSMLQRLTEDLEYHHLLDKAVHCTSSVEQMCLVAAFSVSSYSTTVHRIAKPFNPMLGETFELDRLDDMGLRSLCEQVSHHPPSAAHYVFSKHGWSLWQEITISSKFRGKYISIMPLGAIHLEFQASGNHYVWRKSTSTVHNIIVGKLWIDQSGDIEIVNHKTNDRCQLKFLPYSYFSKEAARKVTGVVSDSQGKAHYVLSGSWDEQMECSKVMHSSPSSPSSDGKQKTVYQTLSAKLLWKKYPLPENAENMYYFSELALTLNEHEEGVAPTDSRLRPDQRLMEKGRWDEANTEKQRLEEKQRLSRRRRLEACGPGSSCSSEEEKEADAYTPLWFEKRLDPLTGEMACVYKGGYWEAKEKQDWHMCPNIF

SEQ ID NO: 60673 - protein, 764 aa, Homo sapiens
  Payload ID: 12147
  Gene Symbol: OSBPL10
  Gene Name: oxysterol binding protein-like 10
  Uniprot ID: Q9BXB5
  ENSP ID: ENSP00000379804
MERAVQGTDGGGGSNSSSRSSSRATSAGSSPSCSLAGRGVSSRSAAAGLGGGGSRSSPGSVAASPSGGGGRRREPALEGVLSKYTNLLQGWQNRYFVLDFEAGILQYFVNEQSKHQKPRGVLSLSGAIVSLSDEAPHMLVVYSANGEMFKLRAADAKEKQFWVTQLRACAKYHMEMNSKSAPSSRSRSLTLLPHGTPNSASPCSQRHLSVGAPGVVTITHHKSPAAARRAKSQYSGQLHEVREMMNQVEGQQKNLVHAIESLPGSGPLTALDQDLLLLKATSAATLSCLGECLNLLQQSVHQAGQPSQKPGASENILGWHGSKSHSTEQLKNGTLGSLPSASANITWAILPNSAEDEQTSQPEPEPNSGSELVLSEDEKSDNEDKEETELGVMEDQRSIILHLISQLKLGMDLTKVVLPTFILEKRSLLEMYADFMAHPDLLLAITAGATPEERVICFVEYYLTAFHEGRKGALAKKPYNPIIGETFHCSWEVPKDRVKPKRTASRSPASCHEHPMADDPSKSYKLRFVAEQVSHHPPISCFYCECEEKRLCVNTHVWTKSKFMGMSVGVSMIGEGVLRLLEHGEEYVFTLPSAYARSILTIPWVELGGKVSINCAKTGYSATVIFHTKPFYGGKVHRVTAEVKHNPTNTIVCKAHGEWNGTLEFTYNNGETKVIDTTTLPVYPKKIRPLEKQGPMESRNLWREVTRYLRLGDIDAATEQKRHLEEKQRVEERKRENLRTPWKPKYFIQEGDGWVYFNPLWKAH

SEQ ID NO: 60674 - protein, 173 aa, Homo sapiens
  Payload ID: 12147
  Gene Symbol: OSBPL10
  Gene Name: oxysterol binding protein-like 10
  ENSP ID: ENSP00000399200
KSPAAARRAKSQYSGQLHEVREVKACMLNNMCEVTQRVIGIVKTQTQLIFLMMNQVEGQQKNLVHAIESLPGSGPLTALDQDLLLLKATSAATLSCLGECLNLLQQSVHQAGQPSQKPGASENILGWHGSKSHSTEQLKNGTLGSLPSASANITWAILPNSAEDEQTSQPEPE

SEQ ID NO: 60675 - protein, 700 aa, Homo sapiens
  Payload ID: 12147
  Gene Symbol: OSBPL10
  Gene Name: oxysterol binding protein-like 10
  Uniprot ID: Q9BXB5
  ENSP ID: ENSP00000406124
MERAVQGTDGGGGSNSSSRSSSRATSAGSSPSCSLAGRGVSSRSAAAGLGGGGSRSSPGSVAASPSGGGGRRREPALEGVLSKYTNLLQGWQNRYFVLDFEAGILQYFVNEQSKHQKPRGVLSLSGAIVSLSDEAPHMLVVYSANGEMFKLRAADAKEKQFWVTQLRACAKYHMEMNSKMMNQVEGQQKNLVHAIESLPGSGPLTALDQDLLLLKATSAATLSCLGECLNLLQQSVHQAGQPSQKPGASENILGWHGSKSHSTEQLKNGTLGSLPSASANITWAILPNSAEDEQTSQPEPEPNSGSELVLSEDEKSDNEDKEETELGVMEDQRSIILHLISQLKLGMDLTKVVLPTFILEKRSLLEMYADFMAHPDLLLAITAGATPEERVICFVEYYLTAFHEGRKGALAKKPYNPIIGETFHCSWEVPKDRVKPKRTASRSPASCHEHPMADDPSKSYKLRFVAEQVSHHPPISCFYCECEEKRLCVNTHVWTKSKFMGMSVGVSMIGEGVLRLLEHGEEYVFTLPSAYARSILTIPWVELGGKVSINCAKTGYSATVIFHTKPFYGGKVHRVTAEVKHNPTNTIVCKAHGEWNGTLEFTYNNGETKVIDTTTLPVYPKKIRPLEKQGPMESRNLWREVTRYLRLGDIDAATEQKRHLEEKQRVEERKRENLRTPWKPKYFIQEGDGWVYFNPLWKAH

SEQ ID NO: 60676 - protein, 538 aa, Homo sapiens
  Payload ID: 12147
  Gene Symbol: OSBPL10
  Gene Name: oxysterol binding protein-like 10
  ENSP ID: ENSP00000416078
  MOD_RES (1)..(1): Any amino acid
XQYSGQLHEVREMMNQVEGQQKNLVHAIESLPGSGPLTALDQDLLLLKATSAATLSCLGECLNLLQQSVHQAGQPSQKPGASENILGWHGSKSHSTEQLKNGTLGSLPSASANITWAILPNSAEDEQTSQPEPEPNSGSELVLSEDEKSDNEDKEETELGVMEDQRSIILHLISQLKLGMDLTKVVLPTFILEKRSLLEMYADFMAHPDLLLAITAGATPEERVICFVEYYLTAFHEGRKGALAKKPYNPIIGETFHCSWEVPKDRVKPKRTASRSPASCHEHPMADDPSKSYKLRFVAEQVSHHPPISCFYCECEEKRLCVNTHVWTKSKFMGMSVGVSMIGEGVLRLLEHGEEYVFTLPSAYARSILTIPWVELGGKVSINCAKTGYSATVIFHTKPFYGGKVHRVTAEVKHNPTNTIVCKAHGEWNGTLEFTYNNGETKVIDTTTLPVYPKKIRPLEKQGPMESRNLWREVTRYLRLGDIDAATEQKRHLEEKQRVEERKRENLRTPWKPKYFIQEVTLPPVIGPLPRRELVLRG

SEQ ID NO: 60677 - protein, 747 aa, Homo sapiens
  Payload ID: 12148
  Gene Symbol: OSBPL11
  Gene Name: oxysterol binding protein-like 11
  Uniprot ID: Q9BXB4
  ENSP ID: ENSP00000296220
MQGGEPVSTMKVSESEGKLEGQATAVTPNKNSSCGGGISSSSSSRGGSAKGWQYSDHMENVYGYLMKYTNLVTGWQYRFFVLNNEAGLLEYFVNEQSRNQKPRGTLQLAGAVISPSDEDSHTFTVNAASGEQYKLRATDAKERQHWVSRLQICTQHHTEAIGKNNPPLKSRSFSLASSSNSPISQRRPSQNAISFFNVGHSKLQSLSKRTNLPPDHLVEVREMMSHAEGQQRDLIRRIECLPTSGHLSSLDQDLLMLKATSMATMNCLNDCFHILQLQHASHQKGSLPSGTTIEWLEPKISLSNHYKNGADQPFATDQSKPVAVPEEQPVAESGLLAREPEEINADDEIEDTCDHKEDDLGAVEEQRSVILHLLSQLKLGMDLTRVVLPTFILEKRSLLEMYADFMSHPDLFIAITNGATAEDRMIRFVEYYLTSFHEGRKGAIAKKPYNPIIGETFHCSWKMPKSEVASSVFSSSSTQGVTNHAPLSGESLTQVGSDCYTVRFVAEQVSHHPPVSGFYAECTERKMCVNAHVWTKSKFLGMSIGVTMVGEGILSLLEHGEEYTFSLPCAYARSILTVPWVELGGKVSVNCAKTGYSASITFHTKPFYGGKLHRVTAEVKHNITNTVVCRVQGEWNSVLEFTYSNGETKYVDLTKLAVTKKRVRPLEKQDPFESRRLWKNVTDSLRESEIDKATEHKHTLEERQRTEERHRTETGTPWKTKYFIKEGDGWVYHKPLWKIIPTTQPAE

SEQ ID NO: 60678 - protein, 950 aa, Homo sapiens
  Payload ID: 12149
  Gene Symbol: OSBPL1A
  Gene Name: oxysterol binding protein-like 1A
  Uniprot ID: Q9BXW6
  ENSP ID: ENSP00000320291
MNTEAEQQLLHHARNGNAEEVRQLLETMARNEVIADINCKGRSKSNLGWTPLHLACYFGHRQVVQDLLKAGAEVNVLNDMGDTPLHRAAFTGRKELVMLLLEYNADTTIVNGSGQTAKEVTHAEEIRSMLEAVERTQQRKLEELLLAAAREGKTTELTALLNRPNPPDVNCSDQLGNTPLHCAAYRAHKQCALKLLRSGADPNLKNKNDQKPLDLAQGAEMKHILVGNKVIYKALKRYEGPLWKSSRFFGWRLFWVVLEHGVLSWYRKQPDAVHNIYRQGCKHLTQAVCTVKSTDSCLFFIKCFDDTIHGFRVPKNSLQQSREDWLEAIEEHSAYSTHYCSQDQLTDEEEEDTVSAADLKKSLEKAQSCQQRLDREISNFLKMIKECDMAKEMLPSFLQKVEVVSEASRETCVALTDCLNLFTKQEGVRNFKLEQEQEKNKILSEALETLATEHHELEQSLVKGSPPASILSEDEFYDALSDSESERSLSRLEAVTARSFEEEGEHLGSRKHRMSEEKDCGGGDALSNGIKKHRTSLPSPMFSRNDFSIWSILRKCIGMELSKITMPVIFNEPLSFLQRLTEYMEHTYLIHKASSLSDPVERMQCVAAFAVSAVASQWERTGKPFNPLLGETYELVRDDLGFRLISEQVSHHPPISAFHAEGLNNDFIFHGSIYPKLKFWGKSVEAEPKGTITLELLEHNEAYTWTNPTCCVHNIIVGKLWIEQYGNVEIINHKTGDKCVLNFKPCGLFGKELHKVEGYIQDKSKKKLCALYGKWTECLYSVDPATFDAYKKNDKKNTEEKKNSKQMSTSEELDEMPVPDSESVFIIPGSVLLWRIAPRPPNSAQMYNFTSFAMVLNEVDKDMESVIPKTDCRLRPDIRAMENGEIDQASEEKKRLEEKQRAARKNRSKSEEDWKTRWFHQGPNPYNGAQDWIYSGSYWDRNYFNLPDIY

SEQ ID NO: 60679 - protein, 568 aa, Homo sapiens
  Payload ID: 12149
  Gene Symbol: OSBPL1A
  Gene Name: oxysterol binding protein-like 1A
  Uniprot ID: Q9BXW6
  ENSP ID: ENSP00000349545
MIKECDMAKEMLPSFLQKVEVVSEASRETCVALTDCLNLFTKQEGVRNFKLEQEQEKNKILSEALETLATEHHELEQSLVKGSPPASILSEDEFYDALSDSESERSLSRLEAVTARSFEEEGEHLGSRKHRMSEEKDCGGGDALSNGIKKHRTSLPSPMFSRNDFSIWSILRKCIGMELSKITMPVIFNEPLSFLQRLTEYMEHTYLIHKASSLSDPVERMQCVAAFAVSAVASQWERTGKPFNPLLGETYELVRDDLGFRLISEQVSHHPPISAFHAEGLNNDFIFHGSIYPKLKFWGKSVEAEPKGTITLELLEHNEAYTWTNPTCCVHNIIVGKLWIEQYGNVEIINHKTGDKCVLNFKPCGLFGKELHKVEGYIQDKSKKKLCALYGKWTECLYSVDPATFDAYKKNDKKNTEEKKNSKQMSTSEELDEMPVPDSESVFIIPGSVLLWRIAPRPPNSAQMYNFTSFAMVLNEVDKDMESVIPKTDCRLRPDIRAMENGEIDQASEEKKRLEEKQRAARKNRSKSEEDWKTRWFHQGPNPYNGAQDWIYSGSYWDRNYFNLPDIY

SEQ ID NO: 60680 - protein, 100 aa, Homo sapiens
  Payload ID: 12149
  Gene Symbol: OSBPL1A
  Gene Name: oxysterol binding protein-like 1A
  ENSP ID: ENSP00000382370
MNTEAEQQLLHHARNGNAEEVRQLLETMARNEVIADINCKGRSKSNLGWTPLHLACYFGHRQVVQDLLKAGAEVNVLNDMGDTPLHRAAFTGRKICSQGS

SEQ ID NO: 60681 - protein, 437 aa, Homo sapiens
  Payload ID: 12149
  Gene Symbol: OSBPL1A
  Gene Name: oxysterol binding protein-like 1A
  Uniprot ID: Q9BXW6
  ENSP ID: ENSP00000382372
MSEEKDCGGGDALSNGIKKHRTSLPSPMFSRNDFSIWSILRKCIGMELSKITMPVIFNEPLSFLQRLTEYMEHTYLIHKASSLSDPVERMQCVAAFAVSAVASQWERTGKPFNPLLGETYELVRDDLGFRLISEQVSHHPPISAFHAEGLNNDFIFHGSIYPKLKFWGKSVEAEPKGTITLELLEHNEAYTWTNPTCCVHNIIVGKLWIEQYGNVEIINHKTGDKCVLNFKPCGLFGKELHKVEGYIQDKSKKKLCALYGKWTECLYSVDPATFDAYKKNDKKNTEEKKNSKQMSTSEELDEMPVPDSESVFIIPGSVLLWRIAPRPPNSAQMYNFTSFAMVLNEVDKDMESVIPKTDCRLRPDIRAMENGEIDQASEEKKRLEEKQRAARKNRSKSEEDWKTRWFHQGPNPYNGAQDWIYSGSYWDRNYFNLPDIY

SEQ ID NO: 60682 - protein, 48 aa, Homo sapiens
  Payload ID: 12149
  Gene Symbol: OSBPL1A
  Gene Name: oxysterol binding protein-like 1A
  ENSP ID: ENSP00000462155
MSEEKDCGGGDALSNGIKKHRTSLPSPMFSRNDFSIWSILRKCIGMTQ

SEQ ID NO: 60683 - protein, 51 aa, Homo sapiens
  Payload ID: 12149
  Gene Symbol: OSBPL1A
  Gene Name: oxysterol binding protein-like 1A
  ENSP ID: ENSP00000462477
MNTEAEQQLLHHARNGNAEEVRQLLETMARNEVIADINCKGRSWCRSECVE

SEQ ID NO: 60684 - protein, 51 aa, Homo sapiens
  Payload ID: 12149
  Gene Symbol: OSBPL1A
  Gene Name: oxysterol binding protein-like 1A
  ENSP ID: ENSP00000462887
MNTEAEQQLLHHARNGNAEEVRQLLETMARNEVIADINCKGRRVGNASLRI

SEQ ID NO: 60685 - protein, 49 aa, Homo sapiens
  Payload ID: 12149
  Gene Symbol: OSBPL1A
  Gene Name: oxysterol binding protein-like 1A
  ENSP ID: ENSP00000463452
MNTEAEQQLLHHARNGNAEEVRQLLETMARNEVIADINCKGVGNASLRI

SEQ ID NO: 60686 - protein, 41 aa, Homo sapiens
  Payload ID: 12149
  Gene Symbol: OSBPL1A
  Gene Name: oxysterol binding protein-like 1A
  ENSP ID: ENSP00000464541
MIKECDMAKDCLYDMSFVMMKCFHHFFRKLKLSQKLLEKLV

SEQ ID NO: 60687 - protein, 285 aa, Homo sapiens
  Payload ID: 12149
  Gene Symbol: OSBPL1A
  Gene Name: oxysterol binding protein-like 1A
  ENSP ID: ENSP00000464617
CVAAFAVSAVASQWERTGKPFNPLLGETYELVRHNEAYTWTNPTCCVHNIIVGKLWIEQYGNVEIINHKTGDKCVLNFKPCGLFGKELHKVEGYIQDKSKKKLCALYGKWTECLYSVDPATFDAYKKNDKKNTEEKKNSKQMSTSEELDEMPVPDSESVFIIPGSVLLWRIAPRPPNSAQMYNFTSFAMVLNEVDKDMESVIPKTDCRLRPDIRAMENGEIDQASEEKKRLEEKQRAARKNRSKSEEDWKTRWFHQGPNPYNGAQDWIYSGSYWDRNYFNLPDIY

SEQ ID NO: 60688 - protein, 480 aa, Homo sapiens
  Payload ID: 12150
  Gene Symbol: OSBPL2
  Gene Name: oxysterol binding protein-like 2
  Uniprot ID: Q9H1P3
  ENSP ID: ENSP00000316649
MNGEEEFFDAVTGFDSDNSSGEFSEANQKVTGMIDLDTSKNNRIGKTGERPSQENGIQKHRTSLPAPMFSRSDFSVWTILKKCVGLELSKITMPIAFNEPLSFLQRITEYMEHVYLIHRASCQPQPLERMQSVAAFAVSAVASQWERTGKPFNPLLGETYELIREDLGFRFISEQVSHHPPISAFHSEGLNHDFLFHGSIYPKLKFWGKSVEAEPRGTITLELLKHNEAYTWTNPTCCVHNVIIGKLWIEQYGTVEILNHRTGHKCVLHFKPCGLFGKELHKVEGHIQDKNKKKLFMIYGKWTECLWGIDPVSYESFKKQERRGDHLRKAKLDEDSGKADSDVADDVPVAQETVQVIPGSKLLWRINTRPPNSAQMYNFTSFTVSLNELETGMEKTLPPTDCRLRPDIRGMENGNMDLASQEKERLEEKQREARRERAKEEAEWQTRWFYPGNNPYTGTPDWLYAGDYFERNFSDCPDIY

SEQ ID NO: 60689 - protein, 468 aa, Homo sapiens
  Payload ID: 12150
  Gene Symbol: OSBPL2
  Gene Name: oxysterol binding protein-like 2
  Uniprot ID: Q9H1P3
  ENSP ID: ENSP00000350755
MNGEEEFFDAVTEANQKVTGMIDLDTSKNNRIGKTGERPSQENGIQKHRTSLPAPMFSRSDFSVWTILKKCVGLELSKITMPIAFNEPLSFLQRITEYMEHVYLIHRASCQPQPLERMQSVAAFAVSAVASQWERTGKPFNPLLGETYELIREDLGFRFISEQVSHHPPISAFHSEGLNHDFLFHGSIYPKLKFWGKSVEAEPRGTITLELLKHNEAYTWTNPTCCVHNVIIGKLWIEQYGTVEILNHRTGHKCVLHFKPCGLFGKELHKVEGHIQDKNKKKLFMIYGKWTECLWGIDPVSYESFKKQERRGDHLRKAKLDEDSGKADSDVADDVPVAQETVQVIPGSKLLWRINTRPPNSAQMYNFTSFTVSLNELETGMEKTLPPTDCRLRPDIRGMENGNMDLASQEKERLEEKQREARRERAKEEAEWQTRWFYPGNNPYTGTPDWLYAGDYFERNFSDCPDIY

SEQ ID NO: 60690 - protein, 370 aa, Homo sapiens
  Payload ID: 12150
  Gene Symbol: OSBPL2
  Gene Name: oxysterol binding protein-like 2
  ENSP ID: ENSP00000397602
MPIAFNEPLSFLQRITEYMEHVYLIHRASCQPQPLERMQSVAAFAVSAVASQWERTGKPFNPLLGETYELIREDLGFRFISEQVSHHPPISAFHSEGLNHDFLFHGSIYPKLKFWGKSVEAEPRGTITLELLKHNEAYTWTNPTCCVHNVIIGKLWIEQYGTVEILNHRTGHKCVLHFKPCGLFGKELHKVEGHIQDKNKKKLFMIYGKWTECLWGIDPVSYESFKKQERRGDHLRKAKLDEDSGKADSDVADDVPVAQETVQVIPGSKLLWRINTRPPNSAQIWPARRRSGWRRSREKHGGSGPRRRQSGRRGGSTQAITPTLGPPTGCMQGITLSGISPTAQISTEGLEGPGARDRRLTRLDFLEWPL

SEQ ID NO: 60691 - protein, 76 aa, Homo sapiens
  Payload ID: 12150
  Gene Symbol: OSBPL2
  Gene Name: oxysterol binding protein-like 2
  ENSP ID: ENSP00000415751
KPFNPLLGETYELIREDLGFRFISEQVSHHPPISAFHSEGLNHDFLFHGSIYPKLKFWGKSVEAEPRGTITLELLK

SEQ ID NO: 60692 - protein, 180 aa, Homo sapiens
  Payload ID: 12150
  Gene Symbol: OSBPL2
  Gene Name: oxysterol binding protein-like 2
  ENSP ID: ENSP00000478158
MNGEEEFFDAVTGFDSDNSSGEFSEANQKVTGMIDLDTSKNNRIGKTGERPSQENGIQKHRTSLPAPMFSRSDFSVWTILKKCVGLELSKITMPIAFNEPLSFLQRITEYMEHVYLIHRASCQPQPLERMQSVAAFAVSAVASQWERTGKPFNPLLGETYELIREDLGFRFISEQVSHHP

SEQ ID NO: 60693 - protein, 22 aa, Homo sapiens
  Payload ID: 12150
  Gene Symbol: OSBPL2
  Gene Name: oxysterol binding protein-like 2
  ENSP ID: ENSP00000479702
MNGEEEFFDAVTGFDSDNSSGE

SEQ ID NO: 60694 - protein, 887 aa, Homo sapiens
  Payload ID: 12151
  Gene Symbol: OSBPL3
  Gene Name: oxysterol binding protein-like 3
  Uniprot ID: Q9H4L5
  ENSP ID: ENSP00000315410
MMSDEKNLGVSQKLVSPSRSTSSCSSKQGSRQDSWEVVEGLRGEMNYTQEPPVQKGFLLKKRKWPLKGWHKRFFYLDKGILKYAKSQTDIEREKLHGCIDVGLSVMSVKKSSKCIDLDTEEHIYHLKVKSEEVFDEWVSKLRHHRMYRQNEIAMFPHEVNHFFSGSTITDSSSGVFDSISSRKRSSISKQNLFQTGSNVSFSCGGETRVPLWLQSSEDMEKCSKDLAHCHAYLVEMSQLLQSMDVLHRTYSAPAINAIQGGSFESPKKEKRSHRRWRSRAIGKDAKGTLQVPKPFSGPVRLHSSNPNLSTLDFGEEKNYSDGSETSSEFSKMQEDLCHIAHKVYFTLRSAFNIMSAEREKLKQLMEQDASSSPSAQVIGLKNALSSALAQNTDLKERLRRIHAESLLLDSPAVAKSGDNLAEENSRDENRALVHQLSNESRLSITDSLSEFFDAQEVLLSPSSSENEISDDDSYVSDISDNLSLDNLSNDLDNERQTLGPVLDSGREAKSRRRTCLPAPCPSSSNISLWNILRNNIGKDLSKVAMPVELNEPLNTLQRLCEELEYSELLDKAAQIPSPLERMVYVAAFAISAYASSYYRAGSKPFNPVLGETYECIREDKGFQFFSEQVSHHPPISACHAESRNFVFWQDVRWKNKFWGKSMEIVPIGTTHVTLPVFGDHFEWNKVTSCIHNILSGQRWIEHYGEIVIKNLHDDSCYCKVNFIKAKYWSTNAHEIEGTVFDRSGKAVHRLFGKWHESIYCGGGSSSACVWRANPMPKGYEQYYSFTQFALELNEMDPSSKSLLPPTDTRFRPDQRFLEEGNLEEAEIQKQRIEQLQRERRRVLEENHVEHQPRFFRKSDDDSWVSNGTYLELRKDLGFSKLDHPVLW

SEQ ID NO: 60695 - protein, 851 aa, Homo sapiens
  Payload ID: 12151
  Gene Symbol: OSBPL3
  Gene Name: oxysterol binding protein-like 3
  Uniprot ID: Q9H4L5
  ENSP ID: ENSP00000379706
MMSDEKNLGVSQKLVSPSRSTSSCSSKQGSRQDSWEVVEGLRGEMNYTQEPPVQKGFLLKKRKWPLKGWHKRFFYLDKGILKYAKSQTDIEREKLHGCIDVGLSVMSVKKSSKCIDLDTEEHIYHLKVKSEEVFDEWVSKLRHHRMYRQNEIAMFPHEVNHFFSGSTITDSSSGVFDSISSRKRSSISKQNLFQTGSNVSFSCGGETRVPLWLQSSEDMEKCSKDLAHCHAYLVEMSQLLQSMDVLHRTYSAPAINAIQGGSFESPKKEKRSHRRWRSRAIGKDAKGTLQVPKPFSGPVRLHSSNPNLSTLDFGEEKNYSDGSETSSEFSKMQEDLCHIAHKVYFTLRSAFNIMSAEREKLKQLMEQDASSSPSAQVIGLKNALSSENSRDENRALVHQLSNESRLSITDSLSEFFDAQEVLLSPSSSENEISDDDSYVSDISDNLSLDNLSNDLDNERQTLGPVLDSGREAKSRRRTCLPAPCPSSSNISLWNILRNNIGKDLSKVAMPVELNEPLNTLQRLCEELEYSELLDKAAQIPSPLERMVYVAAFAISAYASSYYRAGSKPFNPVLGETYECIREDKGFQFFSEQVSHHPPISACHAESRNFVFWQDVRWKNKFWGKSMEIVPIGTTHVTLPVFGDHFEWNKVTSCIHNILSGQRWIEHYGEIVIKNLHDDSCYCKVNFIKAKYWSTNAHEIEGTVFDRSGKAVHRLFGKWHESIYCGGGSSSACVWRANPMPKGYEQYYSFTQFALELNEMDPSSKSLLPPTDTRFRPDQRFLEEGNLEEAEIQKQRIEQLQRERRRVLEENHVEHQPRFFRKSDDDSWVSNGTYLELRKDLGFSKLDHPVLW

SEQ ID NO: 60696 - protein, 856 aa, Homo sapiens
  Payload ID: 12151
  Gene Symbol: OSBPL3
  Gene Name: oxysterol binding protein-like 3
  Uniprot ID: Q9H4L5
  ENSP ID: ENSP00000379708
MMSDEKNLGVSQKLVSPSRSTSSCSSKQGSRQDSWEVVEGLRGEMNYTQEPPVQKGFLLKKRKWPLKGWHKRFFYLDKGILKYAKSQTDIEREKLHGCIDVGLSVMSVKKSSKCIDLDTEEHIYHLKVKSEEVFDEWVSKLRHHRMYRQNEIAMFPHEVNHFFSGSTITDSSSGVFDSISSRKRSSISKQNLFQTGSNVSFSCGGETRVPLWLQSSEDMEKCSKDLAHCHAYLVEMSQLLQSMDVLHRTYSAPAINAIQVPKPFSGPVRLHSSNPNLSTLDFGEEKNYSDGSETSSEFSKMQEDLCHIAHKVYFTLRSAFNIMSAEREKLKQLMEQDASSSPSAQVIGLKNALSSALAQNTDLKERLRRIHAESLLLDSPAVAKSGDNLAEENSRDENRALVHQLSNESRLSITDSLSEFFDAQEVLLSPSSSENEISDDDSYVSDISDNLSLDNLSNDLDNERQTLGPVLDSGREAKSRRRTCLPAPCPSSSNISLWNILRNNIGKDLSKVAMPVELNEPLNTLQRLCEELEYSELLDKAAQIPSPLERMVYVAAFAISAYASSYYRAGSKPFNPVLGETYECIREDKGFQFFSEQVSHHPPISACHAESRNFVFWQDVRWKNKFWGKSMEIVPIGTTHVTLPVFGDHFEWNKVTSCIHNILSGQRWIEHYGEIVIKNLHDDSCYCKVNFIKAKYWSTNAHEIEGTVFDRSGKAVHRLFGKWHESIYCGGGSSSACVWRANPMPKGYEQYYSFTQFALELNEMDPSSKSLLPPTDTRFRPDQRFLEEGNLEEAEIQKQRIEQLQRERRRVLEENHVEHQPRFFRKSDDDSWVSNGTYLELRKDLGFSKLDHPVLW

SEQ ID NO: 60697 - protein, 606 aa, Homo sapiens
  Payload ID: 12151
  Gene Symbol: OSBPL3
  Gene Name: oxysterol binding protein-like 3
  Uniprot ID: Q9H4L5
  ENSP ID: ENSP00000386325
MMSDEKNLGVSQKLVSPSRSTSSCSSKQGSRQDSWEVVEGLRGEMNYTQEPPVQKGFLLKKRKWPLKGWHKRFFYLDKGILKYAKSQTDIEREKLHGCIDVGLSVMSVKKSSKCIDLDTEEHIYHLKVKSEEVFDEWVSKLRHHRMYRQNEIAMFPHEVNHFFSGSTITDSSSGVFDSISSRKRSSISKQNLFQTGSNVSFSCGGETRVPLWLQSSEDMEKCSKDLAHCHAYLVEMSQLLQSMDVLHRTYSAPAINAIQGGSFESPKKEKRSHRRWRSRAIGKDAKGTLQVPKPFSGPVRLHSSNPNLSTLDFGEEKNYSDGSETSSEFSKMQEDLCHIAHKVYFTLRSAFNIMSAEREKLKQLMEQDASSSPSAQVIGLKNALSSENSRDENRALVHQLSNESRLSITDSLSEFFDAQEVLLSPSSSENEISDDDSYVSDISDNLSLDNLSNDLDNERQTLGPVLDSGREAKSRRRTCLPAPCPSSSNISLWNILRNNIGKDLSKVAMPVELNEPLNTLQRLCEELEYSELLDKAAQIPSPLERMVRSQPSLATVQPRSPSHEAIHGAHQRDSPCSLRFHFDCSVNRFITQSCLASSAWLFPVTL

SEQ ID NO: 60698 - protein, 611 aa, Homo sapiens
  Payload ID: 12151
  Gene Symbol: OSBPL3
  Gene Name: oxysterol binding protein-like 3
  Uniprot ID: Q9H4L5
  ENSP ID: ENSP00000386429
MMSDEKNLGVSQKLVSPSRSTSSCSSKQGSRQDSWEVVEGLRGEMNYTQEPPVQKGFLLKKRKWPLKGWHKRFFYLDKGILKYAKSQTDIEREKLHGCIDVGLSVMSVKKSSKCIDLDTEEHIYHLKVKSEEVFDEWVSKLRHHRMYRQNEIAMFPHEVNHFFSGSTITDSSSGVFDSISSRKRSSISKQNLFQTGSNVSFSCGGETRVPLWLQSSEDMEKCSKDLAHCHAYLVEMSQLLQSMDVLHRTYSAPAINAIQVPKPFSGPVRLHSSNPNLSTLDFGEEKNYSDGSETSSEFSKMQEDLCHIAHKVYFTLRSAFNIMSAEREKLKQLMEQDASSSPSAQVIGLKNALSSALAQNTDLKERLRRIHAESLLLDSPAVAKSGDNLAEENSRDENRALVHQLSNESRLSITDSLSEFFDAQEVLLSPSSSENEISDDDSYVSDISDNLSLDNLSNDLDNERQTLGPVLDSGREAKSRRRTCLPAPCPSSSNISLWNILRNNIGKDLSKVAMPVELNEPLNTLQRLCEELEYSELLDKAAQIPSPLERMVRSQPSLATVQPRSPSHEAIHGAHQRDSPCSLRFHFDCSVNRFITQSCLASSAWLFPVTL

SEQ ID NO: 60699 - protein, 642 aa, Homo sapiens
  Payload ID: 12151
  Gene Symbol: OSBPL3
  Gene Name: oxysterol binding protein-like 3
  Uniprot ID: Q9H4L5
  ENSP ID: ENSP00000386801
MMSDEKNLGVSQKLVSPSRSTSSCSSKQGSRQDSWEVVEGLRGEMNYTQEPPVQKGFLLKKRKWPLKGWHKRFFYLDKGILKYAKSQTDIEREKLHGCIDVGLSVMSVKKSSKCIDLDTEEHIYHLKVKSEEVFDEWVSKLRHHRMYRQNEIAMFPHEVNHFFSGSTITDSSSGVFDSISSRKRSSISKQNLFQTGSNVSFSCGGETRVPLWLQSSEDMEKCSKDLAHCHAYLVEMSQLLQSMDVLHRTYSAPAINAIQGGSFESPKKEKRSHRRWRSRAIGKDAKGTLQVPKPFSGPVRLHSSNPNLSTLDFGEEKNYSDGSETSSEFSKMQEDLCHIAHKVYFTLRSAFNIMSAEREKLKQLMEQDASSSPSAQVIGLKNALSSALAQNTDLKERLRRIHAESLLLDSPAVAKSGDNLAEENSRDENRALVHQLSNESRLSITDSLSEFFDAQEVLLSPSSSENEISDDDSYVSDISDNLSLDNLSNDLDNERQTLGPVLDSGREAKSRRRTCLPAPCPSSSNISLWNILRNNIGKDLSKVAMPVELNEPLNTLQRLCEELEYSELLDKAAQIPSPLERMVRSQPSLATVQPRSPSHEAIHGAHQRDSPCSLRFHFDCSVNRFITQSCLASSAWLFPVTL

SEQ ID NO: 60700 - protein, 820 aa, Homo sapiens
  Payload ID: 12151
  Gene Symbol: OSBPL3
  Gene Name: oxysterol binding protein-like 3
  Uniprot ID: Q9H4L5
  ENSP ID: ENSP00000386953
MMSDEKNLGVSQKLVSPSRSTSSCSSKQGSRQDSWEVVEGLRGEMNYTQEPPVQKGFLLKKRKWPLKGWHKRFFYLDKGILKYAKSQTDIEREKLHGCIDVGLSVMSVKKSSKCIDLDTEEHIYHLKVKSEEVFDEWVSKLRHHRMYRQNEIAMFPHEVNHFFSGSTITDSSSGVFDSISSRKRSSISKQNLFQTGSNVSFSCGGETRVPLWLQSSEDMEKCSKDLAHCHAYLVEMSQLLQSMDVLHRTYSAPAINAIQVPKPFSGPVRLHSSNPNLSTLDFGEEKNYSDGSETSSEFSKMQEDLCHIAHKVYFTLRSAFNIMSAEREKLKQLMEQDASSSPSAQVIGLKNALSSENSRDENRALVHQLSNESRLSITDSLSEFFDAQEVLLSPSSSENEISDDDSYVSDISDNLSLDNLSNDLDNERQTLGPVLDSGREAKSRRRTCLPAPCPSSSNISLWNILRNNIGKDLSKVAMPVELNEPLNTLQRLCEELEYSELLDKAAQIPSPLERMVYVAAFAISAYASSYYRAGSKPFNPVLGETYECIREDKGFQFFSEQVSHHPPISACHAESRNFVFWQDVRWKNKFWGKSMEIVPIGTTHVTLPVFGDHFEWNKVTSCIHNILSGQRWIEHYGEIVIKNLHDDSCYCKVNFIKAKYWSTNAHEIEGTVFDRSGKAVHRLFGKWHESIYCGGGSSSACVWRANPMPKGYEQYYSFTQFALELNEMDPSSKSLLPPTDTRFRPDQRFLEEGNLEEAEIQKQRIEQLQRERRRVLEENHVEHQPRFFRKSDDDSWVSNGTYLELRKDLGFSKLDHPVLW

SEQ ID NO: 60701 - protein, 575 aa, Homo sapiens
  Payload ID: 12151
  Gene Symbol: OSBPL3
  Gene Name: oxysterol binding protein-like 3
  Uniprot ID: Q9H4L5
  ENSP ID: ENSP00000386990
MMSDEKNLGVSQKLVSPSRSTSSCSSKQGSRQDSWEVVEGLRGEMNYTQEPPVQKGFLLKKRKWPLKGWHKRFFYLDKGILKYAKSQTDIEREKLHGCIDVGLSVMSVKKSSKCIDLDTEEHIYHLKVKSEEVFDEWVSKLRHHRMYRQNEIAMFPHEVNHFFSGSTITDSSSGVFDSISSRKRSSISKQNLFQTGSNVSFSCGGETRVPLWLQSSEDMEKCSKDLAHCHAYLVEMSQLLQSMDVLHRTYSAPAINAIQVPKPFSGPVRLHSSNPNLSTLDFGEEKNYSDGSETSSEFSKMQEDLCHIAHKVYFTLRSAFNIMSAEREKLKQLMEQDASSSPSAQVIGLKNALSSENSRDENRALVHQLSNESRLSITDSLSEFFDAQEVLLSPSSSENEISDDDSYVSDISDNLSLDNLSNDLDNERQTLGPVLDSGREAKSRRRTCLPAPCPSSSNISLWNILRNNIGKDLSKVAMPVELNEPLNTLQRLCEELEYSELLDKAAQIPSPLERMVRSQPSLATVQPRSPSHEAIHGAHQRDSPCSLRFHFDCSVNRFITQSCLASSAWLFPVTL

SEQ ID NO: 60702 - protein, 89 aa, Homo sapiens
  Payload ID: 12151
  Gene Symbol: OSBPL3
  Gene Name: oxysterol binding protein-like 3
  ENSP ID: ENSP00000403374
MMSDEKNLGVSQKLVSPSRSTSSCSSKQGSRQDSWEVVEGLRGEMNYTQEPPVQKGFLLKKRKWPLKGWHKRFFYLDKGILKYAKSQTD

SEQ ID NO: 60703 - protein, 112 aa, Homo sapiens
  Payload ID: 12151
  Gene Symbol: OSBPL3
  Gene Name: oxysterol binding protein-like 3
  ENSP ID: ENSP00000407829
MMSDEKNLGVSQKLVSPSRSTSSCSSKQGSRQDSWEVVEGLRGEMNYTQEPPVQKGFLLKKRKWPLKGWHKRFFYLDKGILKYAKSQTDIEREKLHGCIDVGLSVMSVKKSS

SEQ ID NO: 60704 - protein, 61 aa, Homo sapiens
  Payload ID: 12151
  Gene Symbol: OSBPL3
  Gene Name: oxysterol binding protein-like 3
  ENSP ID: ENSP00000411249
MMSDEKNLGVSQKLVSPSRSTSSCSSKQGSRQDSWEVVEGLRGEMNYTQEPPVQKGFLLKK

SEQ ID NO: 60705 - protein, 879 aa, Homo sapiens
  Payload ID: 12152
  Gene Symbol: OSBPL5
  Gene Name: oxysterol binding protein-like 5
  Uniprot ID: Q9H0X9
  ENSP ID: ENSP00000263650
MKEEAFLRRRFSLCPPSSTPQKVDPRKLTRNLLLSGDNELYPLSPGKDMEPNGPSLPRDEGPPTPSSATKVPPAEYRLCNGSDKECVSPTARVTKKETLKAQKENYRQEKKRATRQLLSALTDPSVVIMADSLKIRGTLKSWTKLWCVLKPGVLLIYKTPKVGQWVGTVLLHCCELIERPSKKDGFCFKLFHPLDQSVWAVKGPKGESVGSITQPLPSSYLIFRAASESDGRCWLDALELALRCSSLLRLGTCKPGRDGEPGTSPDASPSSLCGLPASATVHPDQDLFPLNGSSLENDAFSDKSERENPEESDTETQDHSRKTESGSDQSETPGAPVRRGTTYVEQVQEELGELGEASQVETVSEENKSLMWTLLKQLRPGMDLSRVVLPTFVLEPRSFLNKLSDYYYHADLLSRAAVEEDAYSRMKLVLRWYLSGFYKKPKGIKKPYNPILGETFRCCWFHPQTDSRTFYIAEQVSHHPPVSAFHVSNRKDGFCISGSITAKSRFYGNSLSALLDGKATLTFLNRAEDYTLTMPYAHCKGILYGTMTLELGGKVTIECAKNNFQAQLEFKLKPFFGGSTSINQISGKITSGEEVLASLSGHWDRDVFIKEEGSGSSALFWTPSGEVRRQRLRQHTVPLEEQTELESERLWQHVTRAISKGDQHRATQEKFALEEAQRQRARERQESLMPWKPQLFHLDPITQEWHYRYEDHSPWDPLKDIAQFEQDGILRTLQQEAVARQTTFLGSPGPRHERSGPDQRLRKASDQPSGHSQATESSGSTPESCPELSDEEQDGDFVPGGESPCPRCRKEARRLQALHEAILSIREAQQELHRHLSAMLSSTARAAQAPTPGLLQSPRSWFLLCVFLACQLFINHILK

SEQ ID NO: 60706 - protein, 811 aa, Homo sapiens
  Payload ID: 12152
  Gene Symbol: OSBPL5
  Gene Name: oxysterol binding protein-like 5
  Uniprot ID: Q9H0X9
  ENSP ID: ENSP00000302872
MKEEAFLRRRFSLCPPSSTPQKVDPRKLTRNLLLSGDNELYPLSPGKDMEPNGPSLPRDEGPPTPSSATKVPPAEYRLCNGSDKECVSPTARVTKKETLKAQKENYRQEKKRATRQLLSALTDPSVVIMADSLKGPKGESVGSITQPLPSSYLIFRAASESDGRCWLDALELALRCSSLLRLGTCKPGRDGEPGTSPDASPSSLCGLPASATVHPDQDLFPLNGSSLENDAFSDKSERENPEESDTETQDHSRKTESGSDQSETPGAPVRRGTTYVEQVQEELGELGEASQVETVSEENKSLMWTLLKQLRPGMDLSRVVLPTFVLEPRSFLNKLSDYYYHADLLSRAAVEEDAYSRMKLVLRWYLSGFYKKPKGIKKPYNPILGETFRCCWFHPQTDSRTFYIAEQVSHHPPVSAFHVSNRKDGFCISGSITAKSRFYGNSLSALLDGKATLTFLNRAEDYTLTMPYAHCKGILYGTMTLELGGKVTIECAKNNFQAQLEFKLKPFFGGSTSINQISGKITSGEEVLASLSGHWDRDVFIKEEGSGSSALFWTPSGEVRRQRLRQHTVPLEEQTELESERLWQHVTRAISKGDQHRATQEKFALEEAQRQRARERQESLMPWKPQLFHLDPITQEWHYRYEDHSPWDPLKDIAQFEQDGILRTLQQEAVARQTTFLGSPGPRHERSGPDQRLRKASDQPSGHSQATESSGSTPESCPELSDEEQDGDFVPGGESPCPRCRKEARRLQALHEAILSIREAQQELHRHLSAMLSSTARAAQAPTPGLLQSPRSWFLLCVFLACQLFINHILK

SEQ ID NO: 60707 - protein, 811 aa, Homo sapiens; identical to SEQ ID NO: 60706
  Payload ID: 12152
  Gene Symbol: OSBPL5
  Gene Name: oxysterol binding protein-like 5
  Uniprot ID: Q9H0X9
  ENSP ID: ENSP00000374639

SEQ ID NO: 60708 - protein, 432 aa, Homo sapiens
  Payload ID: 12152
  Gene Symbol: OSBPL5
  Gene Name: oxysterol binding protein-like 5
  ENSP ID: ENSP00000431412
YNPILGETFRCCWFHPQTDSRTFYIAEQVSHHPPVSAFHVSNRKDGFCISGSITAKSRFYGNSLSALLDGKATLTFLNRAEDYTLTMPYAHCKGILYGTMTLELGGKVTIECAKNNFQAQLEFKLKPFFGGSTSINQISGKITSGEEVLASLSGHWDRDVFIKEEGSGSSALFWTPSGEVRRQRLRQHTVPLEEQTELESERLWQHVTRAISKGDQHRATQEKFALEEAQRQRARERQESLMPWKPQLFHLDPITQEWHYRYEDHSPWDPLKDIAQFEQDGILRTLQQEAVARQTTFLGSPGPRHERSGPDQRLRKASDQPSGHSQATESSGSTPESCPELSDEEQDGDFVPGGESPCPRCRKEARRLQALHEAILSIREAQQELHRHLSAMLSSTARAAQAPTPGLLQSPRSWFLLCVFLACQLFINHILK

SEQ ID NO: 60709 - protein, 89 aa, Homo sapiens
  Payload ID: 12152
  Gene Symbol: OSBPL5
  Gene Name: oxysterol binding protein-like 5
  ENSP ID: ENSP00000432507
MKEEAFLRRRFSLCPPSSTPQKVDPRKLTRNLLLSGDNELYPLSPGKDMEPNGPSLPRDEGPPTPSSATKVPPAEYRLCNGSDKECVSP

SEQ ID NO: 60710 - protein, 69 aa, Homo sapiens
  Payload ID: 12152
  Gene Symbol: OSBPL5
  Gene Name: oxysterol binding protein-like 5
  ENSP ID: ENSP00000433222
MKEEAFLRRRFSLCPPSSTPQKVDPRKLTRNLLLSGDNELYPLSPGKDMEPNGPSLPRDEGPPTPSSAT

SEQ ID NO: 60711 - protein, 790 aa, Homo sapiens
  Payload ID: 12152
  Gene Symbol: OSBPL5
  Gene Name: oxysterol binding protein-like 5
  Uniprot ID: Q9H0X9
  ENSP ID: ENSP00000433342
MEPNGPSLPRDEGPPTPSSATKVPPAEYRLCNGSDKECVSPTARVTKKETLKAQKENYRQEKKRATRQLLSALTDPSVVIMADSLKIRGTLKSWTKLWCVLKPGVLLIYKTPKGPKGESVGSITQPLPSSYLIFRAASESDGRCWLDALELALRCSSLLRLGTCKPGRDGEPGTSPDASPSSLCGLPASATVHPDQDLFPLNGSSLENDAFSDKSERENPEESDTETQDHSRKTESGSDQSETPGAPVRRGTTYVEQVQEELGELGEASQVETVSEENKSLMWTLLKQLRPGMDLSRVVLPTFVLEPRSFLNKLSDYYYHADLLSRAAVEEDAYSRMKLVLRWYLSGFYKKPKGIKKPYNPILGETFRCCWFHPQTDSRTFYIAEQVSHHPPVSAFHVSNRKDGFCISGSITAKSRFYGNSLSALLDGKATLTFLNRAEDYTLTMPYAHCKGILYGTMTLELGGKVTIECAKNNFQAQLEFKLKPFFGGSTSINQISGKITSGEEVLASLSGHWDRDVFIKEEGSGSSALFWTPSGEVRRQRLRQHTVPLEEQTELESERLWQHVTRAISKGDQHRATQEKFALEEAQRQRARERQESLMPWKPQLFHLDPITQEWHYRYEDHSPWDPLKDIAQFEQDGILRTLQQEAVARQTTFLGSPGPRHERSGPDQRLRKASDQPSGHSQATESSGSTPESCPELSDEEQDGDFVPGGESPCPRCRKEARRLQALHEAILSIREAQQELHRHLSAMLSSTARAAQAPTPGLLQSPRSWFLLCVFLACQLFINHILK

SEQ ID NO: 60712 - protein, 124 aa, Homo sapiens
  Payload ID: 12152
  Gene Symbol: OSBPL5
  Gene Name: oxysterol binding protein-like 5
  ENSP ID: ENSP00000433754
MKEEAFLRRRFSLCPPSSTPQKVDPRKLTRNLLLSGDNELYPLSPGKDMEPNGPSLPRDEGPPTPSSATKVPPAEYRLCNGSDKECVSPTARVTKKETLKAQKENYRQEKKRATRQLLSALTDP

SEQ ID NO: 60713 - protein, 115 aa, Homo sapiens
  Payload ID: 12152
  Gene Symbol: OSBPL5
  Gene Name: oxysterol binding protein-like 5
  ENSP ID: ENSP00000434265
MKEEAFLRRRFSLCPPSSTPQKVDPRKLTRNLLLSGDNELYPLSPGKDMEPNGPSLPRDEGPPTPSSATKVPPAEYRLCNGSDKECVSPTARVTKKETLKAQKENYRQEKNRAPS

SEQ ID NO: 60714 - protein, 98 aa, Homo sapiens
  Payload ID: 12152
  Gene Symbol: OSBPL5
  Gene Name: oxysterol binding protein-like 5
  ENSP ID: ENSP00000435812
MKEEAFLRRRFSLCPPSSTPQKVDPRKLTRNLLLSGDNELYPLSPGKDMEPNGPSLPRDEGPPTPSSATKVPPAEYRLCNGSDKECVSPTARVTKKET

SEQ ID NO: 60715 - protein, 139 aa, Homo sapiens
  Payload ID: 12152
  Gene Symbol: OSBPL5
  Gene Name: oxysterol binding protein-like 5
  ENSP ID: ENSP00000436950
MKEEAFLRRRFSLCPPSSTPQKVDPRKLTRNLLLSGDNELYPLSPGKDMEPNGPSLPRDEGPPTPSSATKVPPAEYRLCNGSDKECVSPTARVTKKETLKAQKENYRQEKKRATRQLLSALTDPSVVIMADSLKIRGTL

SEQ ID NO: 60716 - protein, 333 aa, Homo sapiens
  Payload ID: 12152
  Gene Symbol: OSBPL5
  Gene Name: oxysterol binding protein-like 5
  ENSP ID: ENSP00000437141
MTLELGGKVTIECAKNNFQAQLEFKLKPFFGGSTSINQISGKITSGEEVLASLSGHWDRDVFIKEEGSGSSALFWTPSGEVRRQRLRQHTVPLEEQTELESERLWQHVTRAISKGDQHRATQEKFALEEAQRQRARERQESLMPWKPQLFHLDPITQEWHYRYEDHSPWDPLKDIAQFEQDGILRTLQQEAVARQTTFLGSPGPRHERSGPDQRLRKASDQPSGHSQATESSGSTPESCPELSDEEQDGDFVPGGESPCPRCRKEARRLQALHEAILSIREAQQELHRHLSAMLSSTARAAQAPTPGLLQSPRSWFLLCVFLACQLFINHILK

SEQ ID NO: 60717 - protein, 934 aa, Homo sapiens
  Payload ID: 12153
  Gene Symbol: OSBPL6
  Gene Name: oxysterol binding protein-like 6
  Uniprot ID: Q9BZF3
  ENSP ID: ENSP00000190611
MSSDEKGISPAHKTSTPTHRSASSSTSSQRDSRQSIHILERTASSSTEPSVSRQLLEPEPVPLSKEADSWEIIEGLKIGQTNVQKPDKHEGFMLKKRKWPLKGWHKRFFVLDNGMLKYSKAPLDIQKGKVHGSIDVGLSVMSIKKKARRIDLDTEEHIYHLKVKSQDWFDAWVSKLRHHRLYRQNEIVRSPRDASFHIFPSTSTAESSPAANVSVMDGKMQPNSFPWQSPLPCSNSLPATCTTGQSKVAAWLQDSEEMDRCAEDLAHCQSNLVELSKLLQNLEILQRTQSAPNFTDMQANCVDISKKDKRVTRRWRTKSVSKDTKIQLQVPFSATMSPVRLHSSNPNLCADIEFQTPPSHLTDPLESSTDYTKLQEEFCLIAQKVHSLLKSAFNSIAIEKEKLKQMVSEQDHSKGHSTQMARLRQSLSQALNQNAELRSRLNRIHSESIICDQVVSVNIIPSPDEAGEQIHVSLPLSQQVANESRLSMSESVSEFFDAQEVLLSASSSENEASDDESYISDVSDNISEDNTSVADNISRQILNGELTGGAFRNGRRACLPAPCPDTSNINLWNILRNNIGKDLSKVSMPVELNEPLNTLQHLCEEMEYSELLDKASETDDPYERMVLVAAFAVSGYCSTYFRAGSKPFNPVLGETYECIREDKGFRFFSEQVSHHPPISACHCESKNFVFWQDIRWKNKFWGKSMEILPVGTLNVMLPKYGDYYVWNKVTTCIHNILSGRRWIEHYGEVTIRNTKSSVCICKLTFVKVNYWNSNMNEVQGVVIDQEGKAVYRLFGKWHEGLYCGVAPSAKCIWRPGSMPTNYELYYGFTRFAIELNELDPVLKDLLPPTDARFRPDQRFLEEGNLEAAASEKQRVEELQRSRRRYMEENNLEHIPKFFKKVIDANQREAWVSNDTYWELRKDPGFSKVDSPVLW

SEQ ID NO: 60718 - protein, 938 aa, Homo sapiens
  Payload ID: 12153
  Gene Symbol: OSBPL6
  Gene Name: oxysterol binding protein-like 6
  Uniprot ID: Q9BZF3
  ENSP ID: ENSP00000318723
MHQLSLIRGNRGRSIHILERTASSSTEPSVSRQLLEPEPVPLSKEADSWEIIEGLKIGQTNVQKPDKHEGFMLKKRKWPLKGWHKRFFVLDNGMLKYSKAPLDIQKGKVHGSIDVGLSVMSIKKKARRIDLDTEEHIYHLKVKSQDWFDAWVSKLRHHRLYRQNEIVRSPRDASFHIFPSTSTAESSPAANVSVMDGKMQPNSFPWQSPLPCSNSLPATCTTGQSKVAAWLQDSEEMDRCAEDLAHCQSNLVELSKLLQNLEILQRTQSAPNFTDMQANCVDISKKDKRVTRRWRTKSVSKDTKIQLQEGPPAKGQFSTTRRRQRLAAAVATTVPFSATMSPVRLHSSNPNLCADIEFQTPPSHLTDPLESSTDYTKLQEEFCLIAQKVHSLLKSAFNSIAIEKEKLKQMVSEQDHSKGHSTQMARLRQSLSQALNQNAELRSRLNRIHSESIICDQVVSVNIIPSPDEAGEQIHVSLPLSQQVANESRLSMSESVSEFFDAQEVLLSASSSENEASDDESYISDVSDNISEDNTSVADNISRQILNGELTGGAFRNGRRACLPAPCPDTSNINLWNILRNNIGKDLSKVSMPVELNEPLNTLQHLCEEMEYSELLDKASETDDPYERMVLVAAFAVSGYCSTYFRAGSKPFNPVLGETYECIREDKGFRFFSEQVSHHPPISACHCESKNFVFWQDIRWKNKFWGKSMEILPVGTLNVMLPKYGDYYVWNKVTTCIHNILSGRRWIEHYGEVTIRNTKSSVCICKLTFVKVNYWNSNMNEVQGVVIDQEGKAVYRLFGKWHEGLYCGVAPSAKCIWRPGSMPTNYELYYGFTRFAIELNELDPVLKDLLPPTDARFRPDQRFLEEGNLEAAASEKQRVEELQRSRRRYMEENNLEHIPKFFKKVIDANQREAWVSNDTYWELRKDPGFSKVDSPVLW

SEQ ID NO: 60719 - protein, 508 aa, Homo sapiens
  Payload ID: 12153
  Gene Symbol: OSBPL6
  Gene Name: oxysterol binding protein-like 6
  Uniprot ID: Q9BZF3
  ENSP ID: ENSP00000349591
MSSDEKGISPAHKTSTPTHRSASSSTSSQRDSRQSIHILERTASSSTEPSVSRQLLEPEPVPLSKEADSWEIIEGLKIGQTNVQKPDKHEGFMLKKRKWPLKGWHKRFFVLDNGMLKYSKAPLDIQKGKVHGSIDVGLSVMSIKKKARRIDLDTEEHIYHLKVKSQDWFDAWVSKLRHHRLYRQNEIVRSPRDASFHIFPSTSTAESSPAANVSVMDGKMQPNSFPWQSPLPCSNSLPATCTTGQSKVAAWLQDSEEMDRCAEDLAHCQSNLVELSKLLQNLEILQRTQSAPNFTDMQVPFSATMSPVRLHSSNPNLCADIEFQTPPSHLTDPLESSTDYTKLQEEFCLIAQKVHSLLKSAFNSIAIEKEKLKQMVSEQDHSKGHSTQMARLRQSLSQAGEQIHVSLPLSQQVANESRLSMSESVSEFFDAQEVLLSASSSENEASDDESYISDVSDNISEDNTSVADNISRQSMHHLSFQVVLSTCQIATRRLNEQAFPLPRHPHPC

SEQ ID NO: 60720 - protein, 898 aa, Homo sapiens
  Payload ID: 12153
  Gene Symbol: OSBPL6
  Gene Name: oxysterol binding protein-like 6
  Uniprot ID: Q9BZF3
  ENSP ID: ENSP00000352713
MSSDEKGISPAHKTSTPTHRSASSSTSSQRDSRQSIHILERTASSSTEPSVSRQLLEPEPVPLSKEADSWEIIEGLKIGQTNVQKPDKHEGFMLKKRKWPLKGWHKRFFVLDNGMLKYSKAPLDIQKGKVHGSIDVGLSVMSIKKKARRIDLDTEEHIYHLKVKSQDWFDAWVSKLRHHRLYRQNEIVRSPRDASFHIFPSTSTAESSPAANVSVMDGKMQPNSFPWQSPLPCSNSLPATCTTGQSKVAAWLQDSEEMDRCAEDLAHCQSNLVELSKLLQNLEILQRTQSAPNFTDMQANCVDISKKDKRVTRRWRTKSVSKDTKIQLQVPFSATMSPVRLHSSNPNLCADIEFQTPPSHLTDPLESSTDYTKLQEEFCLIAQKVHSLLKSAFNSIAIEKEKLKQMVSEQDHSKGHSTQMARLRQSLSQAGEQIHVSLPLSQQVANESRLSMSESVSEFFDAQEVLLSASSSENEASDDESYISDVSDNISEDNTSVADNISRQILNGELTGGAFRNGRRACLPAPCPDTSNINLWNILRNNIGKDLSKVSMPVELNEPLNTLQHLCEEMEYSELLDKASETDDPYERMVLVAAFAVSGYCSTYFRAGSKPFNPVLGETYECIREDKGFRFFSEQVSHHPPISACHCESKNFVFWQDIRWKNKFWGKSMEILPVGTLNVMLPKYGDYYVWNKVTTCIHNILSGRRWIEHYGEVTIRNTKSSVCICKLTFVKVNYWNSNMNEVQGVVIDQEGKAVYRLFGKWHEGLYCGVAPSAKCIWRPGSMPTNYELYYGFTRFAIELNELDPVLKDLLPPTDARFRPDQRFLEEGNLEAAASEKQRVEELQRSRRRYMEENNLEHIPKFFKKVIDANQREAWVSNDTYWELRKDPGFSKVDSPVLW

SEQ ID NO: 60721 - protein, 959 aa, Homo sapiens
  Payload ID: 12153
  Gene Symbol: OSBPL6
  Gene Name: oxysterol binding protein-like 6
  Uniprot ID: Q9BZF3
  ENSP ID: ENSP00000376293
MSSDEKGISPAHKTSTPTHRSASSSTSSQRDSRQSIHILERTASSSTEPSVSRQLLEPEPVPLSKEADSWEIIEGLKIGQTNVQKPDKHEGFMLKKRKWPLKGWHKRFFVLDNGMLKYSKAPLDIQKGKVHGSIDVGLSVMSIKKKARRIDLDTEEHIYHLKVKSQDWFDAWVSKLRHHRLYRQNEIVRSPRDASFHIFPSTSTAESSPAANVSVMDGKMQPNSFPWQSPLPCSNSLPATCTTGQSKVAAWLQDSEEMDRCAEDLAHCQSNLVELSKLLQNLEILQRTQSAPNFTDMQANCVDISKKDKRVTRRWRTKSVSKDTKIQLQEGPPAKGQFSTTRRRQRLAAAVATTVPFSATMSPVRLHSSNPNLCADIEFQTPPSHLTDPLESSTDYTKLQEEFCLIAQKVHSLLKSAFNSIAIEKEKLKQMVSEQDHSKGHSTQMARLRQSLSQALNQNAELRSRLNRIHSESIICDQVVSVNIIPSPDEAGEQIHVSLPLSQQVANESRLSMSESVSEFFDAQEVLLSASSSENEASDDESYISDVSDNISEDNTSVADNISRQILNGELTGGAFRNGRRACLPAPCPDTSNINLWNILRNNIGKDLSKVSMPVELNEPLNTLQHLCEEMEYSELLDKASETDDPYERMVLVAAFAVSGYCSTYFRAGSKPFNPVLGETYECIREDKGFRFFSEQVSHHPPISACHCESKNFVFWQDIRWKNKFWGKSMEILPVGTLNVMLPKYGDYYVWNKVTTCIHNILSGRRWIEHYGEVTIRNTKSSVCICKLTFVKVNYWNSNMNEVQGVVIDQEGKAVYRLFGKWHEGLYCGVAPSAKCIWRPGSMPTNYELYYGFTRFAIELNELDPVLKDLLPPTDARFRPDQRFLEEGNLEAAASEKQRVEELQRSRRRYMEENNLEHIPKFFKKVIDANQREAWVSNDTYWELRKDPGFSKVDSPVLW

SEQ ID NO: 60722 - protein, 898 aa, Homo sapiens; identical to SEQ ID NO: 60720
  Payload ID: 12153
  Gene Symbol: OSBPL6
  Gene Name: oxysterol binding protein-like 6
  Uniprot ID: Q9BZF3
  ENSP ID: ENSP00000386885

SEQ ID NO: 60723 - protein, 903 aa, Homo sapiens
  Payload ID: 12153
  Gene Symbol: OSBPL6
  Gene Name: oxysterol binding protein-like 6
  Uniprot ID: Q9BZF3
  ENSP ID: ENSP00000387248
MSSDEKGISPAHKTSTPTHRSASSSTSSQRDSRQSIHILERTASSSTEPSVSRQLLEPEPVPLSKEADSWEIIEGLKIGQTNVQKPDKHEGFMLKKRKWPLKGWHKRFFVLDNGMLKYSKAPLDIQKGKVHGSIDVGLSVMSIKKKARRIDLDTEEHIYHLKVKSQDWFDAWVSKLRHHRLYRQNEIVRSPRDASFHIFPSTSTAESSPAANVSVMDGKMQPNSFPWQSPLPCSNSLPATCTTGQSKVAAWLQDSEEMDRCAEDLAHCQSNLVELSKLLQNLEILQRTQSAPNFTDMQVPFSATMSPVRLHSSNPNLCADIEFQTPPSHLTDPLESSTDYTKLQEEFCLIAQKVHSLLKSAFNSIAIEKEKLKQMVSEQDHSKGHSTQMARLRQSLSQALNQNAELRSRLNRIHSESIICDQVVSVNIIPSPDEAGEQIHVSLPLSQQVANESRLSMSESVSEFFDAQEVLLSASSSENEASDDESYISDVSDNISEDNTSVADNISRQILNGELTGGAFRNGRRACLPAPCPDTSNINLWNILRNNIGKDLSKVSMPVELNEPLNTLQHLCEEMEYSELLDKASETDDPYERMVLVAAFAVSGYCSTYFRAGSKPFNPVLGETYECIREDKGFRFFSEQVSHHPPISACHCESKNFVFWQDIRWKNKFWGKSMEILPVGTLNVMLPKYGDYYVWNKVTTCIHNILSGRRWIEHYGEVTIRNTKSSVCICKLTFVKVNYWNSNMNEVQGVVIDQEGKAVYRLFGKWHEGLYCGVAPSAKCIWRPGSMPTNYELYYGFTRFAIELNELDPVLKDLLPPTDARFRPDQRFLEEGNLEAAASEKQRVEELQRSRRRYMEENNLEHIPKFFKKVIDANQREAWVSNDTYWELRKDPGFSKVDSPVLW

SEQ ID NO: 60724 - protein, 842 aa, Homo sapiens
  Payload ID: 12154
  Gene Symbol: OSBPL7
  Gene Name: oxysterol binding protein-like 7
  Uniprot ID: Q9BZF2
  ENSP ID: ENSP00000007414
MDFQERDPPFLPESAQSSKPSSAQQASELWEVVEEPRVRLGTEGVMPERQEGHLLKKRKWPLKGWHKRYFVLEDGILHYATTRQDITKGKLHGSIDVRLSVMSINKKAQRIDLDTEDNIYHLKIKSQDLFQSWVAQLRAHRLAHRLDMPRGSLPSTAHRKVPGAQLPTAATASALPGLGPREKVSSWLRDSDGLDRCSHELSECQGKLQELHRLLQSLESLHRIPSAPVIPTHQASVTTERPKKGKRTSRMWCTQSFAKDDTIGRVGRLHGSVPNLSRYLESRDSSGTRGLPPTDYAHLQRSFWALAQKVHSSLSSVLAALTMERDQLRDMHQGSELSRMGVSEASTGQRRLHSLSTSSDTTADSFSSLNPEEQEALYMKGRELTPQLSQTSILSLADSHTEFFDACEVLLSASSSENEGSEEEESCTSEITTSLSEEMLDLRGAERCQKGGCVPGRPMGPPRRRCLPAASGPGADVSLWNILRNNIGKDLSKVSMPVQLNEPLNTLQRLCEELEYSSLLDQASRIADPCERMVYIAAFAVSAYSSTYHRAGCKPFNPVLGETYECERPDRGFRFISEQVSHHPPISACHAESENFAFWQDMKWKNKFWGKSLEIVPVGTVNVSLPRFGDHFEWNKVTSCIHNVLSGQRWIEHYGEVLIRNTQDSSCHCKITFCKAKYWSSNVHEVQGAVLSRSGRVLHRLFGKWHEGLYRGPTPGGQCIWKPNSMPPDHERNFGFTQFALELNELTAELKRSLPSTDTRLRPDQRYLEEGNIQAAEAQKRRIEQLQRDRRKVMEENNIVHQARFFRRQTDSSGKEWWVTNNTYWRLRAEPGYGNMDGAVLW

SEQ ID NO: 60725 - protein, 842 aa, Homo sapiens; identical to SEQ ID NO: 60724
  Payload ID: 12154
  Gene Symbol: OSBPL7
  Gene Name: oxysterol binding protein-like 7
  Uniprot ID: Q9BZF2
  ENSP ID: ENSP00000376295

SEQ ID NO: 60726 - protein, 420 aa, Homo sapiens
  Payload ID: 12154
  Gene Symbol: OSBPL7
  Gene Name: oxysterol binding protein-like 7
  ENSP ID: ENSP00000463599
MDFQERDPPFLPESAQSSKPSSAQQASELWEVVEEPRVRLGTEGVMPERQEGHLLKKRKWPLKGWHKRYFVLEDGILHYATTRQDITKGKLHGSIDVRLSVMSINKKAQRIDLDTEDNIYHLKIKSQDLFQSWVAQLRAHRLAHRLDMPRGSLPSTAHRKVPGAQLPTAATASALPGLGPREKVSSWLRDSDGLDRCSHELSECQGKLQELHRLLQSLESLHRIPSAPVIPTHQASVTTERPKKGKRTSRMWCTQSFAKDDTIGRVGRLHGSVPNLSRYLESRDSSGTRGLPPTDYAHLQRSFWALAQKVHSSLSSVLAALTMERDQLRDMHQGSELSRMGVSEASTGQRRLHSLSTSSDTTADSFSSLNPEEQEALYMKGRELTPQLSQTSILSLADSHTEFFDACEVLLSASSSENEG

SEQ ID NO: 60727 - protein, 19 aa, Homo sapiens
  Payload ID: 12154
  Gene Symbol: OSBPL7
  Gene Name: oxysterol binding protein-like 7
  ENSP ID: ENSP00000464624
RGPTPGGQCIWKPICLGAE

SEQ ID NO: 60728 - protein, 357 aa, Homo sapiens
  Payload ID: 12154
  Gene Symbol: OSBPL7
  Gene Name: oxysterol binding protein-like 7
  Uniprot ID: Q9BZF2
  ENSP ID: ENSP00000479827
MDFQERDPPFLPESAQSSKPSSAQQASELWEVVEEPRVRLGTEGVMPERQEGHLLKKRKWPLKGWHKRYFVLEDGILHYATTRQDITKGKLHGSIDVRLSVMSINKKAQRIDLDTEDNIYHLKIKSQDLFQSWVAQLRAHRLAHRLDMPRGSLPSTAHRKVPGAQLPTAATASALPGLGPREKVSSWLRDSDGLDRCSHELSECQGKLQELHRLLQSLESLHRIPSAPVIPTHQASVTTERPKKGKRTSRMWCTQSFAKDDTIGRVGRLHGSVPNLSRYLESRDSSGTRGLPPTDYAHLQRSFWALAQKVHSSLSSVLAALTMERDQLRDMHQGSELSRMGVRPGGQGDWCGERASS

SEQ ID NO: 60729 - protein, 889 aa, Homo sapiens
  Payload ID: 12155
  Gene Symbol: OSBPL8
  Gene Name: oxysterol binding protein-like 8
  Uniprot ID: Q9BZF1
  ENSP ID: ENSP00000261183
MEGGLADGEPDRTSLLGDSKDVLGPSTVVANSDESQLLTPGKMSQRQGKEAYPTPTKDLHQPSLSPASPHSQGFERGKEDISQNKDESSLSMSKSKSESKLYNGSEKDSSTSSKLTKKESLKVQKKNYREEKKRATKELLSTITDPSVIVMADWLKIRGTLKSWTKLWCVLKPGVLLIYKTQKNGQWVGTVLLNACEIIERPSKKDGFCFKLFHPLEQSIWAVKGPKGEAVGSITQPLPSSYLIIRATSESDGRCWMDALELALKCSSLLKRTMIREGKEHDLSVSSDSTHVTFYGLLRANNLHSGDNFQLNDSEIERQHFKDQDMYSDKSDKENDQEHDESDNEVMGKSEESDTDTSERQDDSYIEPEPVEPLKETTYTEQSHEELGEAGEASQTETVSEENKSLIWTLLKQVRPGMDLSKVVLPTFILEPRSFLDKLSDYYYHADFLSEAALEENPYFRLKKVVKWYLSGFYKKPKGLKKPYNPILGETFRCLWIHPRTNSKTFYIAEQVSHHPPISAFYVSNRKDGFCLSGSILAKSKFYGNSLSAILEGEARLTFLNRGEDYVMTMPYAHCKGILYGTMTLELGGTVNITCQKTGYSAILEFKLKPFLGSSDCVNQISGKLKLGKEVLATLEGHWDSEVFITDKKTDNSEVFWNPTPDIKQWRLIRHTVKFEEQGDFESEKLWQRVTRAINAKDQTEATQEKYVLEEAQRQAARDRKTKNEEWSCKLFELDPLTGEWHYKFADTRPWDPLNDMIQFEKDGVIQTKVKHRTPMVSVPKMKHKPTRQQKKVAKGYSSPEPDIQDSSGSEAQSVKPSTRRKKGIELGDIQSSIESIKQTQEEIKRNIMALRNHLVSSTPATDYFLQQKDYFIIFLLILLQVIINFMFK

SEQ ID NO: 60730 - protein, 847 aa, Homo sapiens
  Payload ID: 12155
  Gene Symbol: OSBPL8
  Gene Name: oxysterol binding protein-like 8
  Uniprot ID: Q9BZF1
  ENSP ID: ENSP00000376939
MSQRQGKEAYPTPTKDLHQPSLSPASPHSQGFERGKEDISQNKDESSLSMSKSKSESKLYNGSEKDSSTSSKLTKKESLKVQKKNYREEKKRATKELLSTITDPSVIVMADWLKIRGTLKSWTKLWCVLKPGVLLIYKTQKNGQWVGTVLLNACEIIERPSKKDGFCFKLFHPLEQSIWAVKGPKGEAVGSITQPLPSSYLIIRATSESDGRCWMDALELALKCSSLLKRTMIREGKEHDLSVSSDSTHVTFYGLLRANNLHSGDNFQLNDSEIERQHFKDQDMYSDKSDKENDQEHDESDNEVMGKSEESDTDTSERQDDSYIEPEPVEPLKETTYTEQSHEELGEAGEASQTETVSEENKSLIWTLLKQVRPGMDLSKVVLPTFILEPRSFLDKLSDYYYHADFLSEAALEENPYFRLKKVVKWYLSGFYKKPKGLKKPYNPILGETFRCLWIHPRTNSKTFYIAEQVSHHPPISAFYVSNRKDGFCLSGSILAKSKFYGNSLSAILEGEARLTFLNRGEDYVMTMPYAHCKGILYGTMTLELGGTVNITCQKTGYSAILEFKLKPFLGSSDCVNQISGKLKLGKEVLATLEGHWDSEVFITDKKTDNSEVFWNPTPDIKQWRLIRHTVKFEEQGDFESEKLWQRVTRAINAKDQTEATQEKYVLEEAQRQAARDRKTKNEEWSCKLFELDPLTGEWHYKFADTRPWDPLNDMIQFEKDGVIQTKVKHRTPMVSVPKMKHKPTRQQKKVAKGYSSPEPDIQDSSGSEAQSVKPSTRRKKGIELGDIQSSIESIKQTQEEIKRNIMALRNHLVSSTPATDYFLQQKDYFIIFLLILLQVIINFMFK

SEQ ID NO: 60731 - protein, 847 aa, Homo sapiens; identical to SEQ ID NO: 60730
  Payload ID: 12155
  Gene Symbol: OSBPL8
  Gene Name: oxysterol binding protein-like 8
  Uniprot ID: Q9BZF1
  ENSP ID: ENSP00000376940

SEQ ID NO: 60732 - protein, 157 aa, Homo sapiens
  Payload ID: 12155
  Gene Symbol: OSBPL8
  Gene Name: oxysterol binding protein-like 8
  ENSP ID: ENSP00000446886
MLLGDSKDVLGPSTVVANSDESQLLTPGKMSQRQGKEAYPTPTKDLHQPSLSPASPHSQGFERGKEDISQNKDESSLSMSKSKSESKLYNGSEKDSSTSSKLTKKESLKVQKKNYREEKKRATKELLSTITDPSVIVMADWLKIRGTLKSWTKLWCV

SEQ ID NO: 60733 - protein, 52 aa, Homo sapiens
  Payload ID: 12155
  Gene Symbol: OSBPL8
  Gene Name: oxysterol binding protein-like 8
  ENSP ID: ENSP00000447235
MEGGLADGEPDRTSLLGDSKDVLGPSTNSDESQLLTPGKMSQRQGKEAYPTP

SEQ ID NO: 60734 - protein, 28 aa, Homo sapiens
  Payload ID: 12155
  Gene Symbol: OSBPL8
  Gene Name: oxysterol binding protein-like 8
  ENSP ID: ENSP00000447483
MEGGLADGEPDRTSSESKLYNGSEKDSS

SEQ ID NO: 60735 - protein, 58 aa, Homo sapiens
  Payload ID: 12155
  Gene Symbol: OSBPL8
  Gene Name: oxysterol binding protein-like 8
  ENSP ID: ENSP00000447744
MEGGLADGEPDRTSLLGDSKDVLGPSTVVANSDESQLLTPGKMSQRQGKEAYPTPTKD

SEQ ID NO: 60736 - protein, 694 aa, Homo sapiens
  Payload ID: 12155
  Gene Symbol: OSBPL8
  Gene Name: oxysterol binding protein-like 8
  ENSP ID: ENSP00000447893
MKEESSQRRFSSCTGVLPVLFPPRIDGRKLVRNASFGGYNELSPSLPGFERGKEDISQNKDESSLSMSKSKSESKLYNGSEKDSSTSSKLTKKESLKVQKKNYREEKKRATKELLSTITDPSVIVMADWLKIRGTLKSWTKLWCVLKPGVLLIYKTQKNGQWVGTVLLNACEIIERPSKKDGFCFKLFHPLEQSIWAVKGPKGEAVGSITQPLPSSYLIIRATSESDGRCWMDALELALKCSSLLKRTMIREGKEHDLSVSSDSTHVTFYGLLRANNLHSGDNFQLNDSEIERQHFKDQDMYSDKSDKENDQEHDESDNEVMGKSEESDTDTSERQDDSYIEPEPVEPLKETTYTEQSHEELGEAGEASQTETVSEENKSLIWTLLKQVRPGMDLSKVVLPTFILEPRSFLDKLSDYYYHADFLSEAALEENPYFRLKKVVKWYLSGFYKKPKGLKKPYNPILGETFRCLWIHPRTNSKTFYIAEQVSHHPPISAFYVSNRKDGFCLSGSILAKSKFYGNSLSAILEGEARLTFLNRGEDYVMTMPYAHCKGILYGTMTLELGGTVNITCQKTGYSAILEFKLKPFLGSSDCVNQISGKLKLGKEVLATLEGHWDSEVFITDKKTDNSEVFWNPTPDIKQWRLIRHTVKFEEQGDFESEKLWQRVTRAINAKDQTEATQEKYVLEEAQRQAARD

SEQ ID NO: 60737 - protein, 41 aa, Homo sapiens
  Payload ID: 12155
  Gene Symbol: OSBPL8
  Gene Name: oxysterol binding protein-like 8
  ENSP ID: ENSP00000448394
MEGGLADGEPDRTSVLKEGRKIFLKIKMNLHFLCQRASLNL

SEQ ID NO: 60738 - protein, 111 aa, Homo sapiens
  Payload ID: 12155
  Gene Symbol: OSBPL8
  Gene Name: oxysterol binding protein-like 8
  ENSP ID: ENSP00000449618
MSQRQGKEAYPTPTKDLHQPSLSPASPHSQGFERGKEDISQNKDESSLSMSKSKSESKLYNGSEKDSSTSSKLTKKESLKVQKKNYREEKKRATKELLSTITDPSVIVMAD

SEQ ID NO: 60739 - protein, 76 aa, Homo sapiens
  Payload ID: 12155
  Gene Symbol: OSBPL8
  Gene Name: oxysterol binding protein-like 8
  ENSP ID: ENSP00000449919
MSQRQGKEAYPTPTKDLHQPSLSPASPHSQGFERGKEDISQNKDESSLSMSKSKSESKLYNGSEKDSSTSSKLTKK

SEQ ID NO: 60740 - protein, 721 aa, Homo sapiens
  Payload ID: 12155
  Gene Symbol: OSBPL8
  Gene Name: oxysterol binding protein-like 8
  ENSP ID: ENSP00000450238
MEGGLADGEPDRTSLLGDSKDVLGPSTVVANSDESQLLTPGKMSQRQGKEAYPTPTKDLHQPSLSPASPHSQGFERGKEDISQNKDESSLSMSKSKSESKLYNGSEKDSSTSSKLTKKESLKVQKKNYREEKKRATKELLSTITDPSVIVMADWLKIRGTLKSWTKLWCVLKPGVLLIYKTQKNGQWVGTVLLNACEIIERPSKKDGFCFKLFHPLEQSIWAVKGPKGEAVGSITQPLPSSYLIIRATSESDGRCWMDALELALKCSSLLKRTMIREGKEHDLSVSSDSTHVTFYGLLRANNLHSGDNFQLNDSEIERQHFKDQDMYSDKSDKENDQEHDESDNEVMGKSEESDTDTSERQDDSYIEPEPVEPLKETTYTEQSHEELGEAGEASQTETVSEENKSLIWTLLKQVRPGMDLSKVVLPTFILEPRSFLDKLSDYYYHADFLSEAALEENPYFRLKKVVKWYLSGFYKKPKGLKKPYNPILGETFRCLWIHPRTNSKTFYIAEQVSHHPPISAFYVSNRKDGFCLSGSILAKSKFYGNSLSAILEGEARLTFLNRGEDYVMTMPYAHCKGILYGTMTLELGGTVNITCQKTGYSAILEFKLKPFLGSSDCVNQISGKLKLGKEVLATLEGHWDSEVFITDKKTDNSEVFWNPTPDIKQWRLIRHTVKFEEQGDFESEKLWQRVTRAINAKDQTEATQEKYVLEEAQRQAARDRK

SEQ ID NO: 60741 - protein, 847 aa, Homo sapiens; identical to SEQ ID NO: 60730
  Payload ID: 12155
  Gene Symbol: OSBPL8
  Gene Name: oxysterol binding protein-like 8
  Uniprot ID: Q9BZF1
  ENSP ID: ENSP00000478240

SEQ ID NO: 60742 - protein, 626 aa, Homo sapiens
  Payload ID: 12156
  Gene Symbol: OSBPL9
  Gene Name: oxysterol binding protein-like 9
  Uniprot ID: Q96SU4
  ENSP ID: ENSP00000354970
MAFLLATCGGLDSGFVPSVQDFDKKLTEADAYLQILIEQLKLFDDKLQNCKEDEQRKKIETLKETTNSMVESIKHCIVLLQIAKSTINPVDAIYQPSPLEPVISTMPSQTVLPPEPVQLCKSEQRPSSLPVGPVLATLGHHQTPTPNSTGSGHSPPSSSLTSPSHVNLSPNTVPEFSYSSSEDEFYDADEFHQSGSSPKRLIDSSGSASVLTHSSSGNSLKRPDTTESLNSSLSNGTSDADLFDSHDDRDDDAEAGSVEEHKSVIMHLLSQVRLGMDLTKVVLPTFILERRSLLEMYADFFAHPDLFVSISDQKDPKDRMVQVVKWYLSAFHAGRKGSVAKKPYNPILGEIFQCHWTLPNDTEENTELVSEGPVPWVSKNSVTFVAEQVSHHPPISAFYAECFNKKIQFNAHIWTKSKFLGMSIGVHNIGQGCVSCLDYDEHYILTFPNGYGRSILTVPWVELGGECNINCSKTGYSANIIFHTKPFYGGKKHRITAEIFSPNDKKSFCSIEGEWNGVMYAKYATGENTVFVDTKKLPIIKKKVRKLEDQNEYESRSLWKDVTFNLKIRDIDAATEAKHRLEERQRAEARERKEKEIQWETRLFHEDGECWVYDEPLLKRLGAAKH

SEQ ID NO: 60743 - protein, 723 aa, Homo sapiens
  Payload ID: 12156
  Gene Symbol: OSBPL9
  Gene Name: oxysterol binding protein-like 9
  Uniprot ID: Q96SU4
  ENSP ID: ENSP00000360779
MASIMEGPLSKWTNVMKGWQYRWFVLDYNAGLLSYYTSKDKMMRGSRRGCVRLRGAVIGIDDEDDSTFTITVDQKTFHFQARDADEREKWIHALEETILRHTLQLQGLDSGFVPSVQDFDKKLTEADAYLQILIEQLKLFDDKLQNCKEDEQRKKIETLKETTNSMVESIKHCIVLLQIAKSTINPVDAIYQPSPLEPVISTMPSQTVLPPEPVQLCKSEQRPSSLPVGPVLATLGHHQTPTPNSTGSGHSPPSSSLTSPSHVNLSPNTVPEFSYSSSEDEFYDADEFHQSGSSPKRLIDSSGSASVLTHSSSGNSLKRPDTTESLNSSLSNGTSDADLFDSHDDRDDDAEAGSVEEHKSVIMHLLSQVRLGMDLTKVVLPTFILERRSLLEMYADFFAHPDLFVSISDQKDPKDRMVQVVKWYLSAFHAGRKGSVAKKPYNPILGEIFQCHWTLPNDTEENTELVSEGPVPWVSKNSVTFVAEQVSHHPPISAFYAECFNKKIQFNAHIWTKSKFLGMSIGVHNIGQGCVSCLDYDEHYILTFPNGYGRSILTVPWVELGGECNINCSKTGYSANIIFHTKPFYGGKKHRITAEIFSPNDKKSFCSIEGEWNGVMYAKYATGENTVFVDTKKLPIIKKKVRKLEDQNEYESRSLWKDVTFNLKIRDIDAATEAKHRLEERQRAEARERKEKEIQWETRLFHEDGECWVYDEPLLKRLGAAKH

SEQ ID NO: 60744 - protein, 116 aa, Homo sapiens
  Payload ID: 12156
  Gene Symbol: OSBPL9
  Gene Name: oxysterol binding protein-like 9
  ENSP ID: ENSP00000390113
MASIMEGPLSKWTNVMKGWQYRWFVLDYNAGLLSYYTSKDKMMRGSRRGCVRLRGAVIGIDDEDDSTFTITVDQKTFHFQGELKEEILSLHSPICFFSSLLGCLLDDLNGFATDPA

SEQ ID NO: 60745 - protein, 736 aa, Homo sapiens
  Payload ID: 12156
  Gene Symbol: OSBPL9
  Gene Name: oxysterol binding protein-like 9
  Uniprot ID: Q96SU4
  ENSP ID: ENSP00000407168
MASIMEGPLSKWTNVMKGWQYRWFVLDYNAGLLSYYTSKDKMMRGSRRGCVRLRGAVIGIDDEDDSTFTITVDQKTFHFQARDADEREKWIHALEETILRHTLQLQGLDSGFVPSVQDFDKKLTEADAYLQILIEQLKLFDDKLQNCKEDEQRKKIETLKETTNSMVESIKHCIVLLQIAKDQSNAEKHADGMISTINPVDAIYQPSPLEPVISTMPSQTVLPPEPVQLCKSEQRPSSLPVGPVLATLGHHQTPTPNSTGSGHSPPSSSLTSPSHVNLSPNTVPEFSYSSSEDEFYDADEFHQSGSSPKRLIDSSGSASVLTHSSSGNSLKRPDTTESLNSSLSNGTSDADLFDSHDDRDDDAEAGSVEEHKSVIMHLLSQVRLGMDLTKVVLPTFILERRSLLEMYADFFAHPDLFVSISDQKDPKDRMVQVVKWYLSAFHAGRKGSVAKKPYNPILGEIFQCHWTLPNDTEENTELVSEGPVPWVSKNSVTFVAEQVSHHPPISAFYAECFNKKIQFNAHIWTKSKFLGMSIGVHNIGQGCVSCLDYDEHYILTFPNGYGRSILTVPWVELGGECNINCSKTGYSANIIFHTKPFYGGKKHRITAEIFSPNDKKSFCSIEGEWNGVMYAKYATGENTVFVDTKKLPIIKKKVRKLEDQNEYESRSLWKDVTFNLKIRDIDAATEAKHRLEERQRAEARERKEKEIQWETRLFHEDGECWVYDEPLLKRLGAAKH

SEQ ID NO: 60746 - protein, 746 aa, Homo sapiens
  Payload ID: 12156
  Gene Symbol: OSBPL9
  Gene Name: oxysterol binding protein-like 9
  Uniprot ID: Q96SU4
  ENSP ID: ENSP00000412733
MASIMEGPLSKWTNVMKGWQYRWFVLDYNAGLLSYYTSKDKMMRGSRRGCVRLRGAVIGIDDEDDSTFTITVDQKTFHFQARDADEREKWIHALEETILRHTLQLQISTTLAFFQSSGISPVLEFSKIIGLDSGFVPSVQDFDKKLTEADAYLQILIEQLKLFDDKLQNCKEDEQRKKIETLKETTNSMVESIKHCIVLLQIAKSTINPVDAIYQPSPLEPVISTMPSQTVLPPEPVQLCKSEQRPSSLPVGPVLATLGHHQTPTPNSTGSGHSPPSSSLTSPSHVNLSPNTVPEFSYSSSEDEFYDADEFHQSGSSPKRLIDSSGSASVLTHSSSGNSLKRPDTTESLNSSLSNGTSDADLFDSHDDRDDDAEAGSVEEHKSVIMHLLSQVRLGMDLTKVVLPTFILERRSLLEMYADFFAHPDLFVSISDQKDPKDRMVQVVKWYLSAFHAGRKGSVAKKPYNPILGEIFQCHWTLPNDTEENTELVSEGPVPWVSKNSVTFVAEQVSHHPPISAFYAECFNKKIQFNAHIWTKSKFLGMSIGVHNIGQGCVSCLDYDEHYILTFPNGYGRSILTVPWVELGGECNINCSKTGYSANIIFHTKPFYGGKKHRITAEIFSPNDKKSFCSIEGEWNGVMYAKYATGENTVFVDTKKLPIIKKKVRKLEDQNEYESRSLWKDVTFNLKIRDIDAATEAKHRLEERQRAEARERKEKEIQWETRLFHEDGECWVYDEPLLKRLGAAKH

SEQ ID NO: 60747 - protein, 719 aa, Homo sapiens
  Payload ID: 12156
  Gene Symbol: OSBPL9
  Gene Name: oxysterol binding protein-like 9
  Uniprot ID: Q96SU4
  ENSP ID: ENSP00000413263
MASIMEGPLSKWTNVMKGWQYRWFVLDYNAGLLSYYTGAVIGIDDEDDSTFTITVDQKTFHFQARDADEREKWIHALEETILRHTLQLQGLDSGFVPSVQDFDKKLTEADAYLQILIEQLKLFDDKLQNCKEDEQRKKIETLKETTNSMVESIKHCIVLLQIAKDQSNAEKHADGMISTINPVDAIYQPSPLEPVISTMPSQTVLPPEPVQLCKSEQRPSSLPVGPVLATLGHHQTPTPNSTGSGHSPPSSSLTSPSHVNLSPNTVPEFSYSSSEDEFYDADEFHQSGSSPKRLIDSSGSASVLTHSSSGNSLKRPDTTESLNSSLSNGTSDADLFDSHDDRDDDAEAGSVEEHKSVIMHLLSQVRLGMDLTKVVLPTFILERRSLLEMYADFFAHPDLFVSISDQKDPKDRMVQVVKWYLSAFHAGRKGSVAKKPYNPILGEIFQCHWTLPNDTEENTELVSEGPVPWVSKNSVTFVAEQVSHHPPISAFYAECFNKKIQFNAHIWTKSKFLGMSIGVHNIGQGCVSCLDYDEHYILTFPNGYGRSILTVPWVELGGECNINCSKTGYSANIIFHTKPFYGGKKHRITAEIFSPNDKKSFCSIEGEWNGVMYAKYATGENTVFVDTKKLPIIKKKVRKLEDQNEYESRSLWKDVTFNLKIRDIDAATEAKHRLEERQRAEARERKEKEIQWETRLFHEDGECWVYDEPLLKRLGAAKH

SEQ ID NO: 60748 - protein, 79 aa, Homo sapiens
  Payload ID: 12156
  Gene Symbol: OSBPL9
  Gene Name: oxysterol binding protein-like 9
  ENSP ID: ENSP00000431274
MAFLLATCGGLDSGFVPSVQDFDKKLTEADAYLQILIEQLKLFDDKLQNCKEDEQRKKIETLKETTNRWDSAMLPRLVS

SEQ ID NO: 60749 - protein, 558 aa, Homo sapiens
  Payload ID: 12156
  Gene Symbol: OSBPL9
  Gene Name: oxysterol binding protein-like 9
  Uniprot ID: Q96SU4
  ENSP ID: ENSP00000431980
MVESIKHCIVLLQIAKSTINPVDAIYQPSPLEPVISTMPSQTVLPPEPVQLCKSEQRPSSLPVGPVLATLGHHQTPTPNSTGSGHSPPSSSLTSPSHVNLSPNTVPEFSYSSSEDEFYDADEFHQSGSSPKRLIDSSGSASVLTHSSSGNSLKRPDTTESLNSSLSNGTSDADLFDSHDDRDDDAEAGSVEEHKSVIMHLLSQVRLGMDLTKVVLPTFILERRSLLEMYADFFAHPDLFVSISDQKDPKDRMVQVVKWYLSAFHAGRKGSVAKKPYNPILGEIFQCHWTLPNDTEENTELVSEGPVPWVSKNSVTFVAEQVSHHPPISAFYAECFNKKIQFNAHIWTKSKFLGMSIGVHNIGQGCVSCLDYDEHYILTFPNGYGRSILTVPWVELGGECNINCSKTGYSANIIFHTKPFYGGKKHRITAEIFSPNDKKSFCSIEGEWNGVMYAKYATGENTVFVDTKKLPIIKKKVRKLEDQNEYESRSLWKDVTFNLKIRDIDAATEAKHRLEERQRAEARERKEKEIQWETRLFHEDGECWVYDEPLLKRLGAAKH

SEQ ID NO: 60750 - protein, 34 aa, Homo sapiens
  Payload ID: 12156
  Gene Symbol: OSBPL9
  Gene Name: oxysterol binding protein-like 9
  ENSP ID: ENSP00000432409
ESIKHCIVLLQIAKDQSNAEKHADGMILYCVSLF

SEQ ID NO: 60751 - protein, 109 aa, Homo sapiens
  Payload ID: 12156
  Gene Symbol: OSBPL9
  Gene Name: oxysterol binding protein-like 9
  ENSP ID: ENSP00000432801
MVESIKHCIVLLQIAKSTINPVDAIYQPSPLEPVISTMPSQTVLPPEPVQLCKSEQRPSSLPVGPVLATLGHHQTPTPNSTGSGHSPPSSSLTSPSHVNLSPNTVPEFS

SEQ ID NO: 60752 - protein, 571 aa, Homo sapiens
  Payload ID: 12156
  Gene Symbol: OSBPL9
  Gene Name: oxysterol binding protein-like 9
  Uniprot ID: Q96SU4
  ENSP ID: ENSP00000433083
MVESIKHCIVLLQIAKDQSNAEKHADGMISTINPVDAIYQPSPLEPVISTMPSQTVLPPEPVQLCKSEQRPSSLPVGPVLATLGHHQTPTPNSTGSGHSPPSSSLTSPSHVNLSPNTVPEFSYSSSEDEFYDADEFHQSGSSPKRLIDSSGSASVLTHSSSGNSLKRPDTTESLNSSLSNGTSDADLFDSHDDRDDDAEAGSVEEHKSVIMHLLSQVRLGMDLTKVVLPTFILERRSLLEMYADFFAHPDLFVSISDQKDPKDRMVQVVKWYLSAFHAGRKGSVAKKPYNPILGEIFQCHWTLPNDTEENTELVSEGPVPWVSKNSVTFVAEQVSHHPPISAFYAECFNKKIQFNAHIWTKSKFLGMSIGVHNIGQGCVSCLDYDEHYILTFPNGYGRSILTVPWVELGGECNINCSKTGYSANIIFHTKPFYGGKKHRITAEIFSPNDKKSFCSIEGEWNGVMYAKYATGENTVFVDTKKLPIIKKKVRKLEDQNEYESRSLWKDVTFNLKIRDIDAATEAKHRLEERQRAEARERKEKEIQWETRLFHEDGECWVYDEPLLKRLGAAKH

SEQ ID NO: 60753 - protein, 558 aa, Homo sapiens; identical to SEQ ID NO: 60749
  Payload ID: 12156
  Gene Symbol: OSBPL9
  Gene Name: oxysterol binding protein-like 9
  Uniprot ID: Q96SU4
  ENSP ID: ENSP00000433279

SEQ ID NO: 60754 - protein, 116 aa, Homo sapiens
  Payload ID: 12156
  Gene Symbol: OSBPL9
  Gene Name: oxysterol binding protein-like 9
  ENSP ID: ENSP00000433291
  MOD_RES (1)..(1): Any amino acid
XDAIYQPSPLEPVISTMPSQTVLPPEPVQLCKSEQRPSSLPVGPVLATLGHHQTPTPNSTGSGHSPPSSSLTSPSHVNLSPNTVPEFSYSSSEDEFYDADEFHQSGSSPKRLIEPV

SEQ ID NO: 60755 - protein, 196 aa, Homo sapiens
  Payload ID: 12156
  Gene Symbol: OSBPL9
  Gene Name: oxysterol binding protein-like 9
  ENSP ID: ENSP00000434798
ASIMEGPLSKWTNVMKGWQYRWFVLDYNAGLLSYYTSKDKMMRGSRRGCVRLRGAVIGIDDEDDSTFTITVDQKTFHFQARDADEREKWIHALEETILRHTLQLQGLDSGFVPSVQDFDKKLTEADAYLQILIEQLKLFDDKLQNCKEDEQRKKIETLKETTNSMVESIKHCIVLLQIAKAVAIHHRVAVSLLQAT

SEQ ID NO: 60756 - protein, 92 aa, Homo sapiens
  Payload ID: 12156
  Gene Symbol: OSBPL9
  Gene Name: oxysterol binding protein-like 9
  ENSP ID: ENSP00000435129
MVESIKHCIVLLQIAKDQSNAEKHADGMISTINPVDAIYQPSPLEPVISTMPSQTVLPPEPVQLCKSEQRPSSLPVGPVLATLGHHQTPTPN

SEQ ID NO: 60757 - protein, 32 aa, Homo sapiens
  Payload ID: 12156
  Gene Symbol: OSBPL9
  Gene Name: oxysterol binding protein-like 9
  ENSP ID: ENSP00000435247
MVESIKHCIVLLQIAKDQSNAEKHADGMIVSL

SEQ ID NO: 60758 - protein, 74 aa, Homo sapiens
  Payload ID: 12156
  Gene Symbol: OSBPL9
  Gene Name: oxysterol binding protein-like 9
  ENSP ID: ENSP00000435264
  MOD_RES (1)..(1): Any amino acid
XSLAAPKMASIMEGPLSKWTNVMKGWQYRWFVLDYNAGLLSYYTSKDKMMRGSRRGCVRLRPVMLMSERSGSMP

SEQ ID NO: 60759 - protein, 79 aa, Homo sapiens; identical to SEQ ID NO: 60748
  Payload ID: 12156
  Gene Symbol: OSBPL9
  Gene Name: oxysterol binding protein-like 9
  ENSP ID: ENSP00000435429

SEQ ID NO: 60760 - protein, 41 aa, Homo sapiens
  Payload ID: 12156
  Gene Symbol: OSBPL9
  Gene Name: oxysterol binding protein-like 9
  ENSP ID: ENSP00000435627
MVESIKHCIVLLQIAKSTILVRNLLVLPLVLVCMGCHNKIP

SEQ ID NO: 60761 - protein, 129 aa, Homo sapiens
  Payload ID: 12156
  Gene Symbol: OSBPL9
  Gene Name: oxysterol binding protein-like 9
  ENSP ID: ENSP00000485521
EIFSPNDKKSFCSIEGEWNGVMYAKYATGENTVFVDTKKLPIIKKKVRKLEDQNEYESRSLWKDVTFNLKIRDIDAATEAKHRLEERQRAEARERKEKEIQWETRLFHEDGECWVYDEPLLKRLGAAKH

SEQ ID NO: 60762 - protein, 389 aa, Homo sapiens
  Payload ID: 12157
  Gene Symbol: OXTR
  Gene Name: oxytocin receptor
  Uniprot ID: P30559
  ENSP ID: ENSP00000324270
MEGALAANWSAEAANASAAPPGAEGNRTAGPPRRNEALARVEVAVLCLILLLALSGNACVLLALRTTRQKHSRLFFFMKHLSIADLVVAVFQVLPQLLWDITFRFYGPDLLCRLVKYLQVVGMFASTYLLLLMSLDRCLAICQPLRSLRRRTDRLAVLATWLGCLVASAPQVHIFSLREVADGVFDCWAVFIQPWGPKAYITWITLAVYIVPVIVLAACYGLISFKIWQNLRLKTAAAAAAEAPEGAAAGDGGRVALARVSSVKLISKAKIRTVKMTFIIVLAFIVCWTPFFFVQMWSVWDANAPKEASAFIIVMLLASLNSCCNPWIYMLFTGHLFHELVQRFLCCSASYLKGRRLGETSASKKSNSSSFVLSHRSSSQRSCSQPSTA

SEQ ID NO: 60763 - protein, 92 aa, Homo sapiens
  Payload ID: 12157
  Gene Symbol: OXTR
  Gene Name: oxytocin receptor
  ENSP ID: ENSP00000389587
MEGALAANWSAEAANASAAPPGAEGNRTAGPPRRNEALARVEVAVLCLILLLALSGNACVLLALRTTRQKHSRLFFFMKHLSIADLVVAVFQ

SEQ ID NO: 60764 - protein, 43 aa, Homo sapiens
  Payload ID: 12157
  Gene Symbol: OXTR
  Gene Name: oxytocin receptor
  ENSP ID: ENSP00000414828
MEGALAANWSAEAANASAAPPGAEGNRTAGPPRRNEALARVEV

SEQ ID NO: 60765 - protein, 125 aa, Homo sapiens
  Payload ID: 12158
  Gene Symbol: OXT
  Gene Name: oxytocin/neurophysin I prepropeptide
  Uniprot ID: P01178
  ENSP ID: ENSP00000217386
MAGPSLACCLLGLLALTSACYIQNCPLGGKRAAPDLDVRKCLPCGPGGKGRCFGPNICCAEELGCFVGTAEALRCQEENYLPSPCQSGQKACGSGGRCAVLGLCCSPDGCHADPACDAEATFSQR

SEQ ID NO: 60766 - protein, 146 aa, Homo sapiens
  Payload ID: 12159
  Gene Symbol: PAGE1
  Gene Name: P antigen family, member 1 (prostate associated)
  Uniprot ID: O75459
  ENSP ID: ENSP00000365320
MGFLRRLIYRRRPMIYVESSEESSDEQPDEVESPTQSQDSTPAEEREDEGASAAQGQEPEADSQELVQPKTGCELGDGPDTKRVCLRNEEQMKLPAEGPEPEADSQEQVHPKTGCERGDGPDVQELGLPNPEEVKTPEEDEGQSQP

SEQ ID NO: 60767 - protein, 94 aa, Homo sapiens
  Payload ID: 12160
  Gene Symbol: PAGE2
  Gene Name: P antigen family, member 2 (prostate associated)
  ENSP ID: ENSP00000364104
MSELLRARSQSSERGNDQESSQPVGSVIVQEPTEEKRQEEEPPTDNQGPDMEAFQQELALLKIEDEPGDGPDVREGIMPTFDLTKVLEAGDAQP

SEQ ID NO: 60768 - protein, 111 aa, Homo sapiens
  Payload ID: 12160
  Gene Symbol: PAGE2
  Gene Name: P antigen family, member 2 (prostate associated)
  Uniprot ID: Q7Z2X7
  ENSP ID: ENSP00000364107
MSELLRARSQSSERGNDQESSQPVGSVIVQEPTEEKRQEEEPPTDNQGIAPSGEIENQAVPAFQGPDMEAFQQELALLKIEDEPGDGPDVREGIMPTFDLTKVLEAGDAQP

SEQ ID NO: 60769 - protein, 64 aa, Homo sapiens
  Payload ID: 12160
  Gene Symbol: PAGE2
  Gene Name: P antigen family, member 2 (prostate associated)
  ENSP ID: ENSP00000392976
MSELLRARSQSSERGNDQESSQPVGSVIVQEPTEEKRQEEEPPTDNQGIAPSGEIENQAVPAFQ

SEQ ID NO: 60770 - protein, 111 aa, Homo sapiens
  Payload ID: 12161
  Gene Symbol: PAGE2B
  Gene Name: P antigen family, member 2B
  Uniprot ID: Q5JRK9
  ENSP ID: ENSP00000364110
MSEHVRTRSQSSERGNDQESSQPVGSVIVQEPTEEKRQEEEPPTDNQGIAPSGEIENEGAPAVQGPDMEAFQQELALLKIEDEPGDGPDVREGIMPTFDLTKVLEAGDAQP

SEQ ID NO: 60771 - protein, 94 aa, Homo sapiens
  Payload ID: 12161
  Gene Symbol: PAGE2B
  Gene Name: P antigen family, member 2B
  ENSP ID: ENSP00000364113
MSEHVRTRSQSSERGNDQESSQPVGSVIVQEPTEEKRQEEEPPTDNQGPDMEAFQQELALLKIEDEPGDGPDVREGIMPTFDLTKVLEAGDAQP

SEQ ID NO: 60772 - protein, 113 aa, Homo sapiens
  Payload ID: 12162
  Gene Symbol: PAGE3
  Gene Name: P antigen family, member 3 (prostate associated)
  Uniprot ID: Q5JUK9
  ENSP ID: ENSP00000364089
MSGHQRTRSRSRERRDDQDSNHPVGAVVAQELPSNDQLQQEEPPIESQDYTPGQERDEGALDFQVLGLAAYLWELTRSKTGGERGDGPNVKGEFLPNLEPVKIPEAGEGQPSV

SEQ ID NO: 60773 - protein, 113 aa, Homo sapiens; identical to SEQ ID NO: 60772
  Payload ID: 12162
  Gene Symbol: PAGE3
  Gene Name: P antigen family, member 3 (prostate associated)
  Uniprot ID: Q5JUK9
  ENSP ID: ENSP00000429571

SEQ ID NO: 60774 - protein, 102 aa, Homo sapiens
  Payload ID: 12163
  Gene Symbol: PAGE4
  Gene Name: P antigen family, member 4 (prostate associated)
  Uniprot ID: O60829
  ENSP ID: ENSP00000218068
MSARVRSRSRGRGDGQEAPDVVAFVAPGESQQEEPPTDNQDIEPGQEREGTPPIEERKVEGDCQEMDLEKTRSERGDGSDVKEKTPPNPKHAKTKEAGDGQP

SEQ ID NO: 60775 - protein, 102 aa, Homo sapiens; identical to SEQ ID NO: 60774
  Payload ID: 12163
  Gene Symbol: PAGE4
  Gene Name: P antigen family, member 4 (prostate associated)
  Uniprot ID: O60829
  ENSP ID: ENSP00000365311

SEQ ID NO: 60776 - protein, 130 aa, Homo sapiens
  Payload ID: 12164
  Gene Symbol: PAGE5
  Gene Name: P antigen family, member 5 (prostate associated)
  Uniprot ID: Q96GU1
  ENSP ID: ENSP00000289619
MQAPWAGNRGWAGTREEVRDMSEHVTRSQSSERGNDQESSQPVGPVIVQQPTEEKRQEEEPPTDNQGIAPSGEIKNEGAPAVQGTDVEAFQQELALLKIEDAPGDGPDVREGTLPTFDPTKVLEAGEGQL

SEQ ID NO: 60777 - protein, 93 aa, Homo sapiens
  Payload ID: 12164
  Gene Symbol: PAGE5
  Gene Name: P antigen family, member 5 (prostate associated)
  ENSP ID: ENSP00000364090
MSEHVTRSQSSERGNDQESSQPVGPVIVQQPTEEKRQEEEPPTDNQGTDVEAFQQELALLKIEDAPGDGPDVREGTLPTFDPTKVLEAGEGQL

SEQ ID NO: 60778 - protein, 110 aa, Homo sapiens
  Payload ID: 12164
  Gene Symbol: PAGE5
  Gene Name: P antigen family, member 5 (prostate associated)
  Uniprot ID: Q96GU1
  ENSP ID: ENSP00000364093
MSEHVTRSQSSERGNDQESSQPVGPVIVQQPTEEKRQEEEPPTDNQGIAPSGEIKNEGAPAVQGTDVEAFQQELALLKIEDAPGDGPDVREGTLPTFDPTKVLEAGEGQL

SEQ ID NO: 60779 - protein, 553 aa, Homo sapiens
  Payload ID: 12165
  Gene Symbol: PAK1
  Gene Name: p21 protein (Cdc42/Rac)-activated kinase 1
  Uniprot ID: Q13153
  ENSP ID: ENSP00000278568
MSNNGLDIQDKPPAPPMRNTSTMIGAGSKDAGTLNHGSKPLPPNPEEKKKKDRFYRSILPGDKTNKKKEKERPEISLPSDFEHTIHVGFDAVTGEFTGMPEQWARLLQTSNITKSEQKKNPQAVLDVLEFYNSKKTSNSQKYMSFTDKSAEDYNSSNALNVKAVSETPAVPPVSEDEDDDDDDATPPPVIAPRPEHTKSVYTRSVIEPLPVTPTRDVATSPISPTENNTTPPDALTRNTEKQKKKPKMSDEEILEKLRSIVSVGDPKKKYTRFEKIGQGASGTVYTAMDVATGQEVAIKQMNLQQQPKKELIINEILVMRENKNPNIVNYLDSYLVGDELWVVMEYLAGGSLTDVVTETCMDEGQIAAVCRECLQALEFLHSNQVIHRDIKSDNILLGMDGSVKLTDFGFCAQITPEQSKRSTMVGTPYWMAPEVVTRKAYGPKVDIWSLGIMAIEMIEGEPPYLNENPLRALYLIATNGTPELQNPEKLSAIFRDFLNRCLEMDVEKRGSAKELLQVRKLRFQVFSNFSMIAASIPEDCQAPLQPHSTDCCS

SEQ ID NO: 60780 - protein, 545 aa, Homo sapiens
  Payload ID: 12165
  Gene Symbol: PAK1
  Gene Name: p21 protein (Cdc42/Rac)-activated kinase 1
  Uniprot ID: Q13153
  ENSP ID: ENSP00000348696
MSNNGLDIQDKPPAPPMRNTSTMIGAGSKDAGTLNHGSKPLPPNPEEKKKKDRFYRSILPGDKTNKKKEKERPEISLPSDFEHTIHVGFDAVTGEFTGMPEQWARLLQTSNITKSEQKKNPQAVLDVLEFYNSKKTSNSQKYMSFTDKSAEDYNSSNALNVKAVSETPAVPPVSEDEDDDDDDATPPPVIAPRPEHTKSVYTRSVIEPLPVTPTRDVATSPISPTENNTTPPDALTRNTEKQKKKPKMSDEEILEKLRSIVSVGDPKKKYTRFEKIGQGASGTVYTAMDVATGQEVAIKQMNLQQQPKKELIINEILVMRENKNPNIVNYLDSYLVGDELWVVMEYLAGGSLTDVVTETCMDEGQIAAVCRECLQALEFLHSNQVIHRDIKSDNILLGMDGSVKLTDFGFCAQITPEQSKRSTMVGTPYWMAPEVVTRKAYGPKVDIWSLGIMAIEMIEGEPPYLNENPLRALYLIATNGTPELQNPEKLSAIFRDFLNRCLEMDVEKRGSAKELLQHQFLKIAKPLSSLTPLIAAAKEATKNNH

SEQ ID NO: 60781 - protein, 244 aa, Homo sapiens
  Payload ID: 12165
  Gene Symbol: PAK1
  Gene Name: p21 protein (Cdc42/Rac)-activated kinase 1
  ENSP ID: ENSP00000431541
  MOD_RES (1)..(1): Any amino acid
XASGTVYTAMDVATGQEVAIKQMNLQQQPKKELIINEILVMRENKNPNIVNYLDSYLVGDELWVVMEYLAGGSLTDVVTETCMDEGQIAAVCRECLQALEFLHSNQVIHRDIKSDNILLGMDGSVKLTDFGFCAQITPEQSKRSTMVGTPYWMAPEVVTRKAYGPKVDIWSLGIMAIEMIEGEPPYLNENPLRALYLIATNGTPELQNPEKLSAIFRDFLNRCLEMDVEKRGSAKELLQALVSG

SEQ ID NO: 60782 - protein, 167 aa, Homo sapiens
  Payload ID: 12165
  Gene Symbol: PAK1
  Gene Name: p21 protein (Cdc42/Rac)-activated kinase 1
  ENSP ID: ENSP00000431906
  MOD_RES (1)..(1): Any amino acid
XNITKSEQKKNPQAVLDVLEFYNSKKTSNSQKYMSFTDKSAEDYNSSNALNVKAVSETPAVPPVSEDEDDDDDDATPPPVIAPRPEHTKSVYTRSVIEPLPVTPTRDVATSPISPTENNTTPPDALTRNTEKQKKKPKMSDEEILEKLLTSWEMSCGLLWNTWLEAP

SEQ ID NO: 60783 - protein, 99 aa, Homo sapiens
  Payload ID: 12165
  Gene Symbol: PAK1
  Gene Name: p21 protein (Cdc42/Rac)-activated kinase 1
  ENSP ID: ENSP00000432477
MSNNGLDIQDKPPAPPMRNTSTMIGAGSKDAGTLNHGSKPLPPNPEEKKKKDRFYRSILPGDKTNKKKEKERPEISLPSDFEHTIHVGFDAVTGEFTGM

SEQ ID NO: 60784 - protein, 89 aa, Homo sapiens
  Payload ID: 12165
  Gene Symbol: PAK1
  Gene Name: p21 protein (Cdc42/Rac)-activated kinase 1
  ENSP ID: ENSP00000433004
MSNNGLDIQDKPPAPPMRNTSTMIGAGSKDAGTLNHGSKPLPPNPEEKKKKDRFYRSILPGDKTNKKKEKERPEISLPSDFEHTIHVGF

SEQ ID NO: 60785 - protein, 455 aa, Homo sapiens
  Payload ID: 12165
  Gene Symbol: PAK1
  Gene Name: p21 protein (Cdc42/Rac)-activated kinase 1
  ENSP ID: ENSP00000433211
MPEQWARLLQTSNITKSEQKKNPQAVLDVLEFYNSKKTSNSQKYMSFTDKSAEDYNSSNALNVKAVSETPAVPPVSEDEDDDDDDATPPPVIAPRPEHTKSVYTRSVIEPLPVTPTRDVATSPISPTENNTTPPDALTRNTEKQKKKPKMSDEEILEKLRSIVSVGDPKKKYTRFEKIGQGASGTVYTAMDVATGQEVAIKQMNLQQQPKKELIINEILVMRENKNPNIVNYLDSYLVGDELWVVMEYLAGGSLTDVVTETCMDEGQIAAVCRECLQALEFLHSNQVIHRDIKSDNILLGMDGSVKLTDFGFCAQITPEQSKRSTMVGTPYWMAPEVVTRKAYGPKVDIWSLGIMAIEMIEGEPPYLNENPLRALYLIATNGTPELQNPEKLSAIFRDFLNRCLEMDVEKRGSAKELLQVRKLRFQVFSNFSMIAASIPEDCQAPLQPHSTDCCS

SEQ ID NO: 60786 - protein, 522 aa, Homo sapiens
  Payload ID: 12165
  Gene Symbol: PAK1
  Gene Name: p21 protein (Cdc42/Rac)-activated kinase 1
  ENSP ID: ENSP00000433423
MSNNGLDIQDKPPAPPMRNTSTMIGAGSKDAGTLNHGSKPLPPNPEEKKKKDRFYRSILPGDKTNKKKEKERPEISLPSDFEHTIHVGFDAVTGEFTGMPEQWARLLQTSNITKSEQKKNPQAVLDVLEFYNSKKTSNSQKYMSFTDKSAEDYNSSNALNVKAVSETPAVPPVSEDEDDDDDDATPPPVIAPRPEHTKSVYTRSVIEPLPVTPTRDVATSPISPTENNTTPPDALTRNTEKQKKKPKMSDEEILEKLRSIVSVGDPKKKYTRFEKIGQGASGTVYTAMDVATGQEVAIKQMNLQQQPKKELIINEILVMRENKNPNIVNYLDSYLVGDELWVVMEYLAGGSLTDVVTETCMDEGQIAAVCRECLQALEFLHSNQVIHRDIKSDNILLGMDGSVKLTDFGFCAQITPEQSKRSTMVGTPYWMAPEVVTRKAYGPKVDIWSLGIMAIEMIEGEPPYLNENPLRALYLIATNGTPELQNPEKLSAIFRDFLNRCLEMDVEKRGSAKELLQHSSRL

SEQ ID NO: 60787 - protein, 106 aa, Homo sapiens
  Payload ID: 12165
  Gene Symbol: PAK1
  Gene Name: p21 protein (Cdc42/Rac)-activated kinase 1
  ENSP ID: ENSP00000433518
MSNNGLDIQDKPPAPPMRNTSTMIGAGSKDAGTLNHGSKPLPPNPEEKKKKDRFYRSILPGDKTNKKKEKERPEISLPSDFEHTIHVGFDAVTGEFTGMPEQWARL

SEQ ID NO: 60788 - protein, 26 aa, Homo sapiens
  Payload ID: 12165
  Gene Symbol: PAK1
  Gene Name: p21 protein (Cdc42/Rac)-activated kinase 1
  ENSP ID: ENSP00000433737
MSNNGLDIQDKPPAPPMRNTSTMIGA

SEQ ID NO: 60789 - protein, 63 aa, Homo sapiens
  Payload ID: 12165
  Gene Symbol: PAK1
  Gene Name: p21 protein (Cdc42/Rac)-activated kinase 1
  ENSP ID: ENSP00000435983
MSNNGLDIQDKPPAPPMRNTSTMIGAGSKDAGTLNHGSKPLPPNPEEKKKKDRFYRSILPGDK

SEQ ID NO: 60790 - protein, 18 aa, Homo sapiens
  Payload ID: 12165
  Gene Symbol: PAK1
  Gene Name: p21 protein (Cdc42/Rac)-activated kinase 1
  ENSP ID: ENSP00000437261
KSLLESMGCSQSLWPLSR

SEQ ID NO: 60791 - protein, 524 aa, Homo sapiens
  Payload ID: 12166
  Gene Symbol: PAK2
  Gene Name: p21 protein (Cdc42/Rac)-activated kinase 2
  Uniprot ID: Q13177
  ENSP ID: ENSP00000314067
MSDNGELEDKPPAPPVRMSSTIFSTGGKDPLSANHSLKPLPSVPEEKKPRHKIISIFSGTEKGSKKKEKERPEISPPSDFEHTIHVGFDAVTGEFTGMPEQWARLLQTSNITKLEQKKNPQAVLDVLKFYDSNTVKQKYLSFTPPEKDGFPSGTPALNAKGTEAPAVVTEEEDDDEETAPPVIAPRPDHTKSIYTRSVIDPVPAPVGDSHVDGAAKSLDKQKKKTKMTDEEIMEKLRTIVSIGDPKKKYTRYEKIGQGASGTVFTATDVALGQEVAIKQINLQKQPKKELIINEILVMKELKNPNIVNFLDSYLVGDELFVVMEYLAGGSLTDVVTETCMDEAQIAAVCRECLQALEFLHANQVIHRDIKSDNVLLGMEGSVKLTDFGFCAQITPEQSKRSTMVGTPYWMAPEVVTRKAYGPKVDIWSLGIMAIEMVEGEPPYLNENPLRALYLIATNGTPELQNPEKLSPIFRDFLNRCLEMDVEKRGSAKELLQHPFLKLAKPLSSLTPLIMAAKEAMKSNR

SEQ ID NO: 60792 - protein, 221 aa, Homo sapiens
  Payload ID: 12166
  Gene Symbol: PAK2
  Gene Name: p21 protein (Cdc42/Rac)-activated kinase 2
  ENSP ID: ENSP00000402927
  MOD_RES (1)..(1): Any amino acid
XASGTVFTATDVALGQEVAIKQINLQKQPKKELIINEILVMKELKNPNIVNFLDSYLVGDELFVVMEYLAGGSLTDVVTETCMDEAQIAAVCRECLQALEFLHANQVIHRDIKSDNVLLGMEGSVKLTDFGFCAQITPEQSKRSTMVGTPYWMAPEVVTRKAYGPKVDIWSLGIMAIEMVEGEPPYLNENPLRHPFLKLAKPLSSLTPLIMAAKEAMKSNR

SEQ ID NO: 60793 - protein, 559 aa, Homo sapiens
  Payload ID: 12167
  Gene Symbol: PAK3
  Gene Name: p21 protein (Cdc42/Rac)-activated kinase 3
  Uniprot ID: O75914
  ENSP ID: ENSP00000262836
MSDGLDNEEKPPAPPLRMNSNNRDSSALNHSSKPLPMAPEEKNKKARLRSIFPGGGDKTNKKKEKERPEISLPSDFEHTIHVGFDAVTGEFTPDLYGSQMCPGKLPEGIPEQWARLLQTSNITKLEQKKNPQAVLDVLKFYDSKETVNNQKYMSFTSGDKSAHGYIAAHPSSTKTASEPPLAPPVSEEEDEEEEEEEDENEPPPVIAPRPEHTKSIYTRSVVESIASPAVPNKEVTPPSAENANSSTLYRNTDRQRKKSKMTDEEILEKLRSIVSVGDPKKKYTRFEKIGQGASGTVYTALDIATGQEVAIKQMNLQQQPKKELIINEILVMRENKNPNIVNYLDSYLVGDELWVVMEYLAGGSLTDVVTETCMDEGQIAAVCRECLQALDFLHSNQVIHRDIKSDNILLGMDGSVKLTDFGFCAQITPEQSKRSTMVGTPYWMAPEVVTRKAYGPKVDIWSLGIMAIEMVEGEPPYLNENPLRALYLIATNGTPELQNPERLSAVFRDFLNRCLEMDVDRRGSAKELLQHPFLKLAKPLSSLTPLIIAAKEAIKNSSR

SEQ ID NO: 60794 - protein, 580 aa, Homo sapiens
  Payload ID: 12167
  Gene Symbol: PAK3
  Gene Name: p21 protein (Cdc42/Rac)-activated kinase 3
  Uniprot ID: O75914
  ENSP ID: ENSP00000353864
MSDGLDNEEKPPAPPLRMNSNNRDSSALNHSSKPLPMAPEEKNKKARLRSIFPGGGDKTNKKKEKERPEISLPSDFEHTIHVGFDAVTGEFTNSPFQTSRPVTVASSQSEGKMPDLYGSQMCPGKLPEGIPEQWARLLQTSNITKLEQKKNPQAVLDVLKFYDSKETVNNQKYMSFTSGDKSAHGYIAAHPSSTKTASEPPLAPPVSEEEDEEEEEEEDENEPPPVIAPRPEHTKSIYTRSVVESIASPAVPNKEVTPPSAENANSSTLYRNTDRQRKKSKMTDEEILEKLRSIVSVGDPKKKYTRFEKIGQGASGTVYTALDIATGQEVAIKQMNLQQQPKKELIINEILVMRENKNPNIVNYLDSYLVGDELWVVMEYLAGGSLTDVVTETCMDEGQIAAVCRECLQALDFLHSNQVIHRDIKSDNILLGMDGSVKLTDFGFCAQITPEQSKRSTMVGTPYWMAPEVVTRKAYGPKVDIWSLGIMAIEMVEGEPPYLNENPLRALYLIATNGTPELQNPERLSAVFRDFLNRCLEMDVDRRGSAKELLQHPFLKLAKPLSSLTPLIIAAKEAIKNSSR

SEQ ID NO: 60795 - protein, 544 aa, Homo sapiens
  Payload ID: 12167
  Gene Symbol: PAK3
  Gene Name: p21 protein (Cdc42/Rac)-activated kinase 3
  Uniprot ID: O75914
  ENSP ID: ENSP00000361077
MSDGLDNEEKPPAPPLRMNSNNRDSSALNHSSKPLPMAPEEKNKKARLRSIFPGGGDKTNKKKEKERPEISLPSDFEHTIHVGFDAVTGEFTGIPEQWARLLQTSNITKLEQKKNPQAVLDVLKFYDSKETVNNQKYMSFTSGDKSAHGYIAAHPSSTKTASEPPLAPPVSEEEDEEEEEEEDENEPPPVIAPRPEHTKSIYTRSVVESIASPAVPNKEVTPPSAENANSSTLYRNTDRQRKKSKMTDEEILEKLRSIVSVGDPKKKYTRFEKIGQGASGTVYTALDIATGQEVAIKQMNLQQQPKKELIINEILVMRENKNPNIVNYLDSYLVGDELWVVMEYLAGGSLTDVVTETCMDEGQIAAVCRECLQALDFLHSNQVIHRDIKSDNILLGMDGSVKLTDFGFCAQITPEQSKRSTMVGTPYWMAPEVVTRKAYGPKVDIWSLGIMAIEMVEGEPPYLNENPLRALYLIATNGTPELQNPERLSAVFRDFLNRCLEMDVDRRGSAKELLQHPFLKLAKPLSSLTPLIIAAKEAIKNSSR

SEQ ID NO: 60796 - protein, 559 aa, Homo sapiens; identical to SEQ ID NO: 60793
  Payload ID: 12167
  Gene Symbol: PAK3
  Gene Name: p21 protein (Cdc42/Rac)-activated kinase 3
  Uniprot ID: O75914
  ENSP ID: ENSP00000361080

SEQ ID NO: 60797 - protein, 565 aa, Homo sapiens
  Payload ID: 12167
  Gene Symbol: PAK3
  Gene Name: p21 protein (Cdc42/Rac)-activated kinase 3
  Uniprot ID: O75914
  ENSP ID: ENSP00000389172
MSDGLDNEEKPPAPPLRMNSNNRDSSALNHSSKPLPMAPEEKNKKARLRSIFPGGGDKTNKKKEKERPEISLPSDFEHTIHVGFDAVTGEFTNSPFQTSRPVTVASSQSEGKMGIPEQWARLLQTSNITKLEQKKNPQAVLDVLKFYDSKETVNNQKYMSFTSGDKSAHGYIAAHPSSTKTASEPPLAPPVSEEEDEEEEEEEDENEPPPVIAPRPEHTKSIYTRSVVESIASPAVPNKEVTPPSAENANSSTLYRNTDRQRKKSKMTDEEILEKLRSIVSVGDPKKKYTRFEKIGQGASGTVYTALDIATGQEVAIKQMNLQQQPKKELIINEILVMRENKNPNIVNYLDSYLVGDELWVVMEYLAGGSLTDVVTETCMDEGQIAAVCRECLQALDFLHSNQVIHRDIKSDNILLGMDGSVKLTDFGFCAQITPEQSKRSTMVGTPYWMAPEVVTRKAYGPKVDIWSLGIMAIEMVEGEPPYLNENPLRALYLIATNGTPELQNPERLSAVFRDFLNRCLEMDVDRRGSAKELLQHPFLKLAKPLSSLTPLIIAAKEAIKNSSR

SEQ ID NO: 60798 - protein, 544 aa, Homo sapiens; identical to SEQ ID NO: 60795
  Payload ID: 12167
  Gene Symbol: PAK3
  Gene Name: p21 protein (Cdc42/Rac)-activated kinase 3
  Uniprot ID: O75914
  ENSP ID: ENSP00000401982

SEQ ID NO: 60799 - protein, 181 aa, Homo sapiens
  Payload ID: 12167
  Gene Symbol: PAK3
  Gene Name: p21 protein (Cdc42/Rac)-activated kinase 3
  ENSP ID: ENSP00000405642
MSDGLDNEEKPPAPPLRMNSNNRDSSALNHSSKPLPMAPEEKNKKARLRSIFPGGGDKTNKKKEKERPEISLPSDFEHTIHVGFDAVTGEFTNSPFQTSRPVTVASSQSEGKMPDLYGSQMCPGKLPEGIPEQWARLLQTSNITKLEQKKNPQAVLDVLKFYDSKETVNNQKYMSFTSGDK

SEQ ID NO: 60800 - protein, 544 aa, Homo sapiens; identical to SEQ ID NO: 60795
  Payload ID: 12167
  Gene Symbol: PAK3
  Gene Name: p21 protein (Cdc42/Rac)-activated kinase 3
  Uniprot ID: O75914
  ENSP ID: ENSP00000410853

SEQ ID NO: 60801 - protein, 580 aa, Homo sapiens; identical to SEQ ID NO: 60794
  Payload ID: 12167
  Gene Symbol: PAK3
  Gene Name: p21 protein (Cdc42/Rac)-activated kinase 3
  Uniprot ID: O75914
  ENSP ID: ENSP00000428921

SEQ ID NO: 60802 - protein, 565 aa, Homo sapiens; identical to SEQ ID NO: 60797
  Payload ID: 12167
  Gene Symbol: PAK3
  Gene Name: p21 protein (Cdc42/Rac)-activated kinase 3
  Uniprot ID: O75914
  ENSP ID: ENSP00000429113

SEQ ID NO: 60803 - protein, 543 aa, Homo sapiens
  Payload ID: 12167
  Gene Symbol: PAK3
  Gene Name: p21 protein (Cdc42/Rac)-activated kinase 3
  ENSP ID: ENSP00000484798
MSDGLDNEEKPPAPPLRMNSNPGFFSTQPQLKPLPMAPEEKNKKARLRSIFPGGGDKTNKKKEKERPEISLPSDFEHTIHVGFDAVTGEFTGIPEQWARLLQTSNITKLEQKKNPQAVLDVLKFYDSKETVNNQKYMSFTSGDKSAHGYIAAHPSSTKTASEPPLAPPVSEEEDEEEEEEEDENEPPPVIAPRPEHTKSIYTRSVVESIASPAVPNKEVTPPSAENANSSTLYRNTDRQRKKSKMTDEEILEKLRSIVSVGDPKKKYTRFEKIGQGASGTVYTALDIATGQEVAIKQMNLQQQPKKELIINEILVMRENKNPNIVNYLDSYLVGDELWVVMEYLAGGSLTDVVTETCMDEGQIAAVCRECLQALDFLHSNQVIHRDIKSDNILLGMDGSVKLTDFGFCAQITPEQSKRSTMVGTPYWMAPEVVTRKAYGPKVDIWSLGIMAIEMVEGEPPYLNENPLRALYLIATNGTPELQNPERLSAVFRDFLNRCLEMDVDRRGSAKELLQHPFLKLAKPLSSLTPLIIAAKEAIKNSSR

SEQ ID NO: 60804 - protein, 501 aa, Homo sapiens
  Payload ID: 12168
  Gene Symbol: PAK4
  Gene Name: p21 protein (Cdc42/Rac)-activated kinase 4
  Uniprot ID: O96013
  ENSP ID: ENSP00000326864
MFGKRKKRVEISAPSNFEHRVHTGFDQHEQKFTGLPRQWQSLIEESARRPKPLVDPACITSIQPGAPKTIVRGSKGAKDGALTLLLDEFENMSVTRSNSLRRDSPPPPARARQENGMPEEPATTARGGPGKGEPHDVAPNGPSAGGLAIPQSSSSSSRPPTRARGAPSPGVLGPHASEPQLAPPACTPAAPAVPGPPGPRSPQREPQRVSHEQFRAALQLVVDPGDPRSYLDNFIKIGEGSTGIVCIATVRSSGKLVAVKKMDLRKQQRRELLFNEVVIMRDYQHENVVEMYNSYLVGDELWVVMEFLEGGALTDIVTHTRMNEEQIAAVCLAVLQALSVLHAQGVIHRDIKSDSILLTHDGRVKLSDFGFCAQVSKEVPRRKSLVGTPYWMAPELISRLPYGPEVDIWSLGIMVIEMVDGEPPYFNEPPLKAMKMIRDNLPPRLKNLHKVSPSLKGFLDRLLVRDPAQRATAAELLKHPFLAKAGPPASIVPLMRQNRTR

SEQ ID NO: 60805 - protein, 591 aa, Homo sapiens
  Payload ID: 12168
  Gene Symbol: PAK4
  Gene Name: p21 protein (Cdc42/Rac)-activated kinase 4
  Uniprot ID: O96013
  ENSP ID: ENSP00000351049
MFGKRKKRVEISAPSNFEHRVHTGFDQHEQKFTGLPRQWQSLIEESARRPKPLVDPACITSIQPGAPKTIVRGSKGAKDGALTLLLDEFENMSVTRSNSLRRDSPPPPARARQENGMPEEPATTARGGPGKAGSRGRFAGHSEAGGGSGDRRRAGPEKRPKSSREGSGGPQESSRDKRPLSGPDVGTPQPAGLASGAKLAAGRPFNTYPRADTDHPSRGAQGEPHDVAPNGPSAGGLAIPQSSSSSSRPPTRARGAPSPGVLGPHASEPQLAPPACTPAAPAVPGPPGPRSPQREPQRVSHEQFRAALQLVVDPGDPRSYLDNFIKIGEGSTGIVCIATVRSSGKLVAVKKMDLRKQQRRELLFNEVVIMRDYQHENVVEMYNSYLVGDELWVVMEFLEGGALTDIVTHTRMNEEQIAAVCLAVLQALSVLHAQGVIHRDIKSDSILLTHDGRVKLSDFGFCAQVSKEVPRRKSLVGTPYWMAPELISRLPYGPEVDIWSLGIMVIEMVDGEPPYFNEPPLKAMKMIRDNLPPRLKNLHKVSPSLKGFLDRLLVRDPAQRATAAELLKHPFLAKAGPPASIVPLMRQNRTR

SEQ ID NO: 60806 - protein, 591 aa, Homo sapiens; identical to SEQ ID NO: 60805
  Payload ID: 12168
  Gene Symbol: PAK4
  Gene Name: p21 protein (Cdc42/Rac)-activated kinase 4
  Uniprot ID: O96013
  ENSP ID: ENSP00000353625

SEQ ID NO: 60807 - protein, 591 aa, Homo sapiens; identical to SEQ ID NO: 60805
  Payload ID: 12168
  Gene Symbol: PAK4
  Gene Name: p21 protein (Cdc42/Rac)-activated kinase 4
  Uniprot ID: O96013
  ENSP ID: ENSP00000469413

SEQ ID NO: 60808 - protein, 438 aa, Homo sapiens
  Payload ID: 12168
  Gene Symbol: PAK4
  Gene Name: p21 protein (Cdc42/Rac)-activated kinase 4
  Uniprot ID: O96013
  ENSP ID: ENSP00000470284
MFGKRKKRVEISAPSNFEHRVHTGFDQHEQKFTGLPRQWQSLIEESARRPKPLVDPACITSIQPGAPKGEPHDVAPNGPSAGGLAIPQSSSSSSRPPTRARGAPSPGVLGPHASEPQLAPPACTPAAPAVPGPPGPRSPQREPQRVSHEQFRAALQLVVDPGDPRSYLDNFIKIGEGSTGIVCIATVRSSGKLVAVKKMDLRKQQRRELLFNEVVIMRDYQHENVVEMYNSYLVGDELWVVMEFLEGGALTDIVTHTRMNEEQIAAVCLAVLQALSVLHAQGVIHRDIKSDSILLTHDGRVKLSDFGFCAQVSKEVPRRKSLVGTPYWMAPELISRLPYGPEVDIWSLGIMVIEMVDGEPPYFNEPPLKAMKMIRDNLPPRLKNLHKVSPSLKGFLDRLLVRDPAQRATAAELLKHPFLAKAGPPASIVPLMRQNRTR

SEQ ID NO: 60809 - protein, 438 aa, Homo sapiens; identical to SEQ ID NO: 60808
  Payload ID: 12168
  Gene Symbol: PAK4
  Gene Name: p21 protein (Cdc42/Rac)-activated kinase 4
  Uniprot ID: O96013
  ENSP ID: ENSP00000471157

SEQ ID NO: 60810 - protein, 182 aa, Homo sapiens
  Payload ID: 12168
  Gene Symbol: PAK4
  Gene Name: p21 protein (Cdc42/Rac)-activated kinase 4
  ENSP ID: ENSP00000471318
MFVGDSTWRRECPRWWRCKRAEGGARARSSRPHRVPGTMFGKRKKRVEISAPSNFEHRVHTGFDQHEQKFTGLPRQWQSLIEESARRPKPLVDPACITSIQPGAPKGEPHDVAPNGPSAGGLAIPQSSSSSSRPPTRARGAPSPGVLGPHASEPQLAPPACTPAAPAVPGPPGPRSPQREPQ

SEQ ID NO: 60811 - protein, 149 aa, Homo sapiens
  Payload ID: 12168
  Gene Symbol: PAK4
  Gene Name: p21 protein (Cdc42/Rac)-activated kinase 4
  ENSP ID: ENSP00000472061
  MOD_RES (1)..(1): Any amino acid
XIMRDYQHENVVKLSDFGFCAQVSKEVPRRKSLVGTPYWMAPELISRLPYGPEVDIWSLGIMVIEMVDGEPPYFNEPPLKAMKMIRDNLPPRLKNLHKVSPSLKGFLDRLLVRDPAQRATAAELLKHPFLAKAGPPASIVPLMRQNRTR

SEQ ID NO: 60812 - protein, 131 aa, Homo sapiens
  Payload ID: 12168
  Gene Symbol: PAK4
  Gene Name: p21 protein (Cdc42/Rac)-activated kinase 4
  ENSP ID: ENSP00000472862
MFGKRKKRVEISAPSNFEHRVHTGFDQHEQKFTGLPRQWQSLIEESARRPKPLVDPACITSIQPGAPKTIVRGSKGAKDGALTLLLDEFENMSVTRSNSLRRDSPPPPARARQENGMPEEPATTARGGPGK

SEQ ID NO: 60813 - protein, 93 aa, Homo sapiens
  Payload ID: 12168
  Gene Symbol: PAK4
  Gene Name: p21 protein (Cdc42/Rac)-activated kinase 4
  ENSP ID: ENSP00000473215
MFGKRKKRVEISAPSNFEHRVHTGFDQHEQKFTGLPRQWQSLIEESARRPKPLVDPACITSIQPGAPKGEPHDVAPNGPSAGGLAIPQSSSSS

SEQ ID NO: 60814 - protein, 681 aa, Homo sapiens
  Payload ID: 12169
  Gene Symbol: PAK6
  Gene Name: p21 protein (Cdc42/Rac)-activated kinase 6
  Uniprot ID: Q9NQU5
  ENSP ID: ENSP00000260404
MFRKKKKKRPEISAPQNFQHRVHTSFDPKEGKFVGLPPQWQNILDTLRRPKPVVDPSRITRVQLQPMKTVVRGSAMPVDGYISGLLNDIQKLSVISSNTLRGRSPTSRRRAQSLGLLGDEHWATDPDMYLQSPQSERTDPHGLYLSCNGGTPAGHKQMPWPEPQSPRVLPNGLAAKAQSLGPAEFQGASQRCLQLGACLQSSPPGASPPTGTNRHGMKAAKHGSEEARPQSCLVGSATGRPGGEGSPSPKTRESSLKRRLFRSMFLSTAATAPPSSSKPGPPPQSKPNSSFRPPQKDNPPSLVAKAQSLPSDQPVGTFSPLTTSDTSSPQKSLRTAPATGQLPGRSSPAGSPRTWHAQISTSNLYLPQDPTVAKGALAGEDTGVVTHEQFKAALRMVVDQGDPRLLLDSYVKIGEGSTGIVCLAREKHSGRQVAVKMMDLRKQQRRELLFNEVVIMRDYQHFNVVEMYKSYLVGEELWVLMEFLQGGALTDIVSQVRLNEEQIATVCEAVLQALAYLHAQGVIHRDIKSDSILLTLDGRVKLSDFGFCAQISKDVPKRKSLVGTPYWMAPEVISRSLYATEVDIWSLGIMVIEMVDGEPPYFSDSPVQAMKRLRDSPPPKLKNSHKVSPVLRDFLERMLVRDPQERATAQELLDHPFLLQTGLPECLVPLIQLYRKQTSTC

SEQ ID NO: 60815 - protein, 636 aa, Homo sapiens
  Payload ID: 12169
  Gene Symbol: PAK6
  Gene Name: p21 protein (Cdc42/Rac)-activated kinase 6
  Uniprot ID: Q9NQU5
  ENSP ID: ENSP00000409465
MFRKKKKKRPEISAPQNFQHRVHTSFDPKEGKFVGLPPQWQNILDTLRRPKPVVDPSRITRVQLQPMKTVVRGSAMPVDGYISGLLNDIQKLSVISSNTLRGRSPTSRRRAQSLGLLGDEHWATDPDMYLQSPQSERTDPHGLYLSCNGGTPAGHKQMPWPEPQSPRVLPNGLAAKAQSLGPAEFQGASQRCLQLGACLQSSPPGASPPTGTNRHGMKAAKHGSEEARPQSCLVGSATGRPGGEGSPSPKTRESSLKRRLFRSMFLSTAATAPPSSSKPGPPPQSKPNSSFRPPQKDNPPSLVAKAQSLPSDQPVGTFSPLTTSDTSSPQKSLRTAPATGQLPGRSSPAGSPRTWHAQISTSNLYLPQDPTVAKGALAGEDTGVVTHEQFKAALRMVVDQGDPRLLLDSYVKIGEGSTGIVCLAREKHSGRQVAVKMMDLRKQQRRELLFNEVVIMRDYQHFNVVEMYKSYLVGEELWVLMEFLQGGALTDIVSQVRLNEEQIATVCEAVLQALAYLHAQGVIHRDIKSDSILLTLDGRVKLSDFGFCAQISKDVPKRKSLVGTPYWMAPEVISRSLYATEVSPVLRDFLERMLVRDPQERATAQELLDHPFLLQTGLPECLVPLIQLYRKQTSTC

SEQ ID NO: 60816 - protein, 681 aa, Homo sapiens; identical to SEQ ID NO: 60814
  Payload ID: 12169
  Gene Symbol: PAK6
  Gene Name: p21 protein (Cdc42/Rac)-activated kinase 6
  Uniprot ID: Q9NQU5
  ENSP ID: ENSP00000439597

SEQ ID NO: 60817 - protein, 74 aa, Homo sapiens
  Payload ID: 12169
  Gene Symbol: PAK6
  Gene Name: p21 protein (Cdc42/Rac)-activated kinase 6
  ENSP ID: ENSP00000452647
MPGPGTMFRKKKKKRPEISAPQNFQHRVHTSFDPKEGKFVGLPPQWQNILDTLRRPKPVVDPSRITRVQLQPMK

SEQ ID NO: 60818 - protein, 109 aa, Homo sapiens
  Payload ID: 12169
  Gene Symbol: PAK6
  Gene Name: p21 protein (Cdc42/Rac)-activated kinase 6
  ENSP ID: ENSP00000452686
MFRKKKKKRPEISAPQNFQHRVHTSFDPKEGKFVGLPPQWQNILDTLRRPKPVVDPSRITRVQLQPMKTVVRGSAMPVDGYISGLLNDIQKLSVISSNTLRGRSPTSRR

SEQ ID NO: 60819 - protein, 112 aa, Homo sapiens
  Payload ID: 12169
  Gene Symbol: PAK6
  Gene Name: p21 protein (Cdc42/Rac)-activated kinase 6
  ENSP ID: ENSP00000452708
MFRKKKKKRPEISAPQNFQHRVHTSFDPKEGKFVGLPPQWQNILDTLRRPKPVVDPSRITRVQLQPMKTVVRGSAMPVDGYISGLLNDIQKLSVISSNTLRGRSPTSRRRAQ

SEQ ID NO: 60820 - protein, 57 aa, Homo sapiens
  Payload ID: 12169
  Gene Symbol: PAK6
  Gene Name: p21 protein (Cdc42/Rac)-activated kinase 6
  ENSP ID: ENSP00000452737
MPGPGTMFRKKKKKRPEISAPQNFQHRVHTSFDPKEGKFVGLPPQWQNILDTLRRPK

SEQ ID NO: 60821 - protein, 20 aa, Homo sapiens
  Payload ID: 12169
  Gene Symbol: PAK6
  Gene Name: p21 protein (Cdc42/Rac)-activated kinase 6
  ENSP ID: ENSP00000453005
MPGPGTMFRKKKKKRPEISA

SEQ ID NO: 60822 - protein, 284 aa, Homo sapiens
  Payload ID: 12169
  Gene Symbol: PAK6
  Gene Name: p21 protein (Cdc42/Rac)-activated kinase 6
  ENSP ID: ENSP00000453021
MFRKKKKKRPEISAPQNFQHRVHTSFDPKEGKFVGLPPQWQNILDTLRRPKPVVDPSRITRVQLQPMKTVVRGSAMPVDGYISGLLNDIQKLSVISSNTLRGRSPTSRRRAQSLGLLGDEHWATDPDMYLQSPQSERTDPHGLYLSCNGGTPAGHKQMPWPEPQSPRVLPNGLAAKAQSLGPAEFQGASQRCLQLGACLQSSPPGASPPTGTNRHGMKAAKHGSEEARPQSCLVGSATGRPGGEGSPSPKTRESSLKRRLFRSMFLSTAATAPPSSSKPGPPPQ

SEQ ID NO: 60823 - protein, 71 aa, Homo sapiens
  Payload ID: 12169
  Gene Symbol: PAK6
  Gene Name: p21 protein (Cdc42/Rac)-activated kinase 6
  ENSP ID: ENSP00000453057
MPGPGTMFRKKKKKRPEISAPQNFQHRVHTSFDPKEGKFVGLPPQWQNILDTLRRPKPVVDPSRITRVQLQ

SEQ ID NO: 60824 - protein, 122 aa, Homo sapiens
  Payload ID: 12169
  Gene Symbol: PAK6
  Gene Name: p21 protein (Cdc42/Rac)-activated kinase 6
  ENSP ID: ENSP00000453407
MFRKKKKKRPEISAPQNFQHRVHTSFDPKEGKFVGLPPQWQNILDTLRRPKPVVDPSRITRVQLQPMKTVVRGSAMPVDGYISGLLNDIQKLSVISSNTLRGRSPTSRRRAQSLGLLGDEHW

SEQ ID NO: 60825 - protein, 104 aa, Homo sapiens
  Payload ID: 12169
  Gene Symbol: PAK6
  Gene Name: p21 protein (Cdc42/Rac)-activated kinase 6
  ENSP ID: ENSP00000453520
MFRKKKKKRPEISAPQNFQHRVHTSFDPKEGKFVGLPPQWQNILDTLRRPKPVVDPSRITRVQLQPMKTVVRGSAMPVDGYISGLLNDIQKLSVISSNTLRGRS

SEQ ID NO: 60826 - protein, 123 aa, Homo sapiens
  Payload ID: 12169
  Gene Symbol: PAK6
  Gene Name: p21 protein (Cdc42/Rac)-activated kinase 6
  ENSP ID: ENSP00000453721
MFRKKKKKRPEISAPQNFQHRVHTSFDPKEGKFVGLPPQWQNILDTLRRPKPVVDPSRITRVQLQPMKTVVRGSAMPVDGYISGLLNDIQKLSVISSNTLRGRSPTSRRRAQSLGLLGDEHWA

SEQ ID NO: 60827 - protein, 681 aa, Homo sapiens; identical to SEQ ID NO: 60814
  Payload ID: 12169
  Gene Symbol: PAK6
  Gene Name: p21 protein (Cdc42/Rac)-activated kinase 6
  Uniprot ID: Q9NQU5
  ENSP ID: ENSP00000453858

SEQ ID NO: 60828 - protein, 133 aa, Homo sapiens
  Payload ID: 12170
  Gene Symbol:
  Gene Name: p21 protein (Cdc42/Rac)-activated kinase 6 [Source:EntrezGene
  Acc:56924]
  ENSP ID: ENSP00000401153
MFLPSAAFGLYRSWKDKRSWLTVLLPTRPAEDWPSKVPGLPSPQRLRERPSAGEESRGRGGRRRKAPCSARKRRNALRSQRHRTSSTVSTPPSTPKKASLWASPHNGRTSWTHCGAPSPWWTLRESHGCSSSP

SEQ ID NO: 60829 - protein, 681 aa, Homo sapiens; identical to SEQ ID NO: 60814
  Payload ID: 12170
  Gene Symbol:
  Gene Name: p21 protein (Cdc42/Rac)-activated kinase 6 [Source:EntrezGene
  Acc:56924]
  ENSP ID: ENSP00000406873

SEQ ID NO: 60830 - protein, 160 aa, Homo sapiens
  Payload ID: 12170
  Gene Symbol:
  Gene Name: p21 protein (Cdc42/Rac)-activated kinase 6 [Source:EntrezGene
  Acc:56924]
  ENSP ID: ENSP00000456785
VFTLSGFRTVQILEGQKILANCSSPYQGVPLPGLETSTSLQWRTQDPAAQKEQPRPAEDWPSKVPGLPSPQRLRERPSAGEESRGRGGRRRKAPCSARKRRNALRSQRHRTSSTVSTPPSTPKKASLWASPHNGRTSWTHCGAPSPWWTLRESHGCSSSP

SEQ ID NO: 60831 - protein, 141 aa, Homo sapiens
  Payload ID: 12170
  Gene Symbol:
  Gene Name: p21 protein (Cdc42/Rac)-activated kinase 6 [Source:EntrezGene
  Acc:56924]
  ENSP ID: ENSP00000457109
  MOD_RES (1)..(1): Any amino acid
XKEHLQVFWDGSFWKLSQNISELKDGELWNKFFVRILNANDEATVSVLGELAAEMNGVFDTTFQSHLNKALWKGVPLPGLETSTSLQWRTQDPAAQKEQPRPAEDWPSKVPGLPSPQRLRERPSAGEESRGRGGRRRKTVE

SEQ ID NO: 60832 - protein, 719 aa, Homo sapiens
  Payload ID: 12171
  Gene Symbol: PAK7
  Gene Name: p21 protein (Cdc42/Rac)-activated kinase 7
  Uniprot ID: Q9P286
  ENSP ID: ENSP00000322957
MFGKKKKKIEISGPSNFEHRVHTGFDPQEQKFTGLPQQWHSLLADTANRPKPMVDPSCITPIQLAPMKTIVRGNKPCKETSINGLLEDFDNISVTRSNSLRKESPPTPDQGASSHGPGHAEENGFITFSQYSSESDTTADYTTEKYREKSLYGDDLDPYYRGSHAAKQNGHVMKMKHGEAYYSEVKPLKSDFARFSADYHSHLDSLSKPSEYSDLKWEYQRASSSSPLDYSFQFTPSRTAGTSGCSKESLAYSESEWGPSLDDYDRRPKSSYLNQTSPQPTMRQRSRSGSGLQEPMMPFGASAFKTHPQGHSYNSYTYPRLSEPTMCIPKVDYDRAQMVLSPPLSGSDTYPRGPAKLPQSQSKSGYSSSSHQYPSGYHKATLYHHPSLQSSSQYISTASYLSSLSLSSSTYPPPSWGSSSDQQPSRVSHEQFRAALQLVVSPGDPREYLANFIKIGEGSTGIVCIATEKHTGKQVAVKKMDLRKQQRRELLFNEVVIMRDYHHDNVVDMYSSYLVGDELWVVMEFLEGGALTDIVTHTRMNEEQIATVCLSVLRALSYLHNQGVIHRDIKSDSILLTSDGRIKLSDFGFCAQVSKEVPKRKSLVGTPYWMAPEVISRLPYGTEVDIWSLGIMVIEMIDGEPPYFNEPPLQAMRRIRDSLPPRVKDLHKVSSVLRGFLDLMLVREPSQRATAQELLGHPFLKLAGPPSCIVPLMRQYRHH

SEQ ID NO: 60833 - protein, 719 aa, Homo sapiens; identical to SEQ ID NO: 60832
  Payload ID: 12171
  Gene Symbol: PAK7
  Gene Name: p21 protein (Cdc42/Rac)-activated kinase 7
  Uniprot ID: Q9P286
  ENSP ID: ENSP00000367679

SEQ ID NO: 60834 - protein, 719 aa, Homo sapiens; identical to SEQ ID NO: 60832
  Payload ID: 12171
  Gene Symbol: PAK7
  Gene Name: p21 protein (Cdc42/Rac)-activated kinase 7
  Uniprot ID: Q9P286
  ENSP ID: ENSP00000367686

SEQ ID NO: 60835 - protein, 432 aa, Homo sapiens
  Payload ID: 12172
  Gene Symbol: P2RX5-TAX1BP3
  Gene Name: P2RX5-TAX1BP3 readthrough (NMD candidate)
  ENSP ID: ENSP00000455681
MGQAGCKGLCLSLFDYKTEKYVIAKNKKVGLLYRLLQASILAYLVVWVFLIKKGYQDVDTSLQSAVITKVKGVAFTNTSDLGQRIWDVADYVIPAQGENVFFVVTNLIVTPNQRQNVCAENEGIPDGACSKDSDCHAGEAVTAGNGVKTGRCLRRENLARGTCEIFAWCPLETSSRPEEPFLKEAEDFTIFIKNHIRFPKFNFSKSNVMDVKDRSFLKSCHFGPKNHYCPIFRLGSVIRWAGSDFQDIALEGGVIGINIEWNCDLDKAASECHPHYSFSRLDNKLSKSVSSGYNFRFARYYRDAAGVEFRTLMKAYGIRFDVMVNGKGAFFCDLVLIYLIKKREFYRDKKYEEVRGLEDSSQEAEDEASGLGLSEQLTSGPGLLGMPEQQELQEPPEAKRGSSSQKGNGSVCPQLLEPHRLRTPSASPLHQE

SEQ ID NO: 60836 - protein, 633 aa, Homo sapiens
  Payload ID: 12173
  Gene Symbol: POR
  Gene Name: P450 (cytochrome) oxidoreductase
  Uniprot ID: P16435
  ENSP ID: ENSP00000378355
MINMGDSHVDTSSTVSEAVAEEVSLFSMTDMILFSLIVGLLTYWFLFRKKKEEVPEFTKIQTLTSSVRESSFVEKMKKTGRNIIVFYGSQTGTAEEFANRLSKDAHRYGMRGMSADPEEYDLADLSSLPEIDNALVVFCMATYGEGDPTDNAQDFYDWLQETDVDLSGVKFAVFGLGNKTYEHFNAMGKYVDKRLEQLGAQRIFELGLGDDDGNLEEDFITWREQFWPAVCEHFGVEATGEESSIRQYELVVHTDIDAAKVYMGEMGRLKSYENQKPPFDAKNPFLAAVTTNRKLNQGTERHLMHLELDISDSKIRYESGDHVAVYPANDSALVNQLGKILGADLDVVMSLNNLDEESNKKHPFPCPTSYRTALTYYLDITNPPRTNVLYELAQYASEPSEQELLRKMASSSGEGKELYLSWVVEARRHILAILQDCPSLRPPIDHLCELLPRLQARYYSIASSSKVHPNSVHICAVVVEYETKAGRINKGVATNWLRAKEPAGENGGRALVPMFVRKSQFRLPFKATTPVIMVGPGTGVAPFIGFIQERAWLRQQGKEVGETLLYYGCRRSDEDYLYREELAQFHRDGALTQLNVAFSREQSHKVYVQHLLKQDREHLWKLIEGGAHIYVCG

SEQ ID NO: 60837 - protein, 166 aa, Homo sapiens
  Payload ID: 12173
  Gene Symbol: POR
  Gene Name: P450 (cytochrome) oxidoreductase
  Uniprot ID: P16435
  ENSP ID: ENSP00000389409
MINMGDSHVDTSSTVSEAVAEEVSLFSMTDMILFSLIVGLLTYWFLFRKKKEEVPEFTKIQTLTSSVRESSFVEKMKKTGRNIIVFYGSQTGTAEEFANRLSKDAHRYGMRGMSADPEEYDLADLSSLPEIDNALVVFCMATYGEGDPTDNAQDFYDWLQETDVDL

SEQ ID NO: 60838 - protein, 62 aa, Homo sapiens
  Payload ID: 12173
  Gene Symbol: POR
  Gene Name: P450 (cytochrome) oxidoreductase
  Uniprot ID: P16435
  ENSP ID: ENSP00000389719
MINMGDSHVDTSSTVSEAVAEEVSLFSMTDMILFSLIVGLLTYWFLFRKKKEEVPEFTKIQT

SEQ ID NO: 60839 - protein, 188 aa, Homo sapiens
  Payload ID: 12173
  Gene Symbol: POR
  Gene Name: P450 (cytochrome) oxidoreductase
  Uniprot ID: P16435
  ENSP ID: ENSP00000390540
MINMGDSHVDTSSTVSEAVAEEVSLFSMTDMILFSLIVGLLTYWFLFRKKKEEVPEFTKIQTLTSSVRESSFVEKMKKTGRNIIVFYGSQTGTAEEFANRLSKDAHRYGMRGMSADPEEYDLADLSSLPEIDNALVVFCMATYGEGDPTDNAQDFYDWLQETDVDLSGVKFAVFGLGNKTYEHFNAMG

SEQ ID NO: 60840 - protein, 725 aa, Homo sapiens
  Payload ID: 12173
  Gene Symbol: POR
  Gene Name: P450 (cytochrome) oxidoreductase
  ENSP ID: ENSP00000393527
  MOD_RES (1)..(1): Any amino acid
XTDMILFSLIVGLLTYWFLFRKKKEEVPEFTKIQTLTSSVRESSFVEKMKKTGRNIIVFYGSQTGTAEEFANRLSKDAHRYGMRGMSADPEEYDLADLSSLPEIDNALVVFCMATYGEGDPTDNAQDFYDWLQETDVDLSGVKFAVSHPETAMGSRWPAVPPWGLQIHVSERQPSRPPPCPQQPGQATCETLSSAPDPSTTRMSPPCPQPQSAPGGIGCWRLKVFGLGNKTYEHFNAMGKYVDKRLEQLGAQRIFELGLGDDDGNLEEDFITWREQFWPAVCEHFGVEATGEESSIRQYELVVHTDIDAAKVYMGEMGRLKSYENQKPPFDAKNPFLAAVTTNRKLNQGTERHLMHLELDISDSKIRYESGDHVAVYPANDSALVNQLGKILGADLDVVMSLNNLDEESNKKHPFPCPTSYRTALTYYLDITNPPRTNVLYELAQYASEPSEQELLRKMASSSGEGKELYLSWVVEARRHILAILQDCPSLRPPIDHLCELLPRLQARYYSIASSSKVHPNSVHICAVVVEYETKAGRINKGVATNWLRAKEPAGENGGRALVPMFVRKSQFRLPFKATTPVIMVGPGTGVAPFIGFIQERAWLRQQGKEVGETLLYYGCRRSDEDYLYREELAQFHRDGALTQLNVAFSREQSHKVYVQHLLKQDREHLWKLIEGGAHIYVCGTPSSCPGMHGTWPGMCRTPSTTSWLSSGPWSTRRRWTTSRN

SEQ ID NO: 60841 - protein, 140 aa, Homo sapiens
  Payload ID: 12173
  Gene Symbol: POR
  Gene Name: P450 (cytochrome) oxidoreductase
  Uniprot ID: P16435
  ENSP ID: ENSP00000395813
MINMGDSHVDTSSTVSEAVAEEVSLFSMTDMILFSLIVGLLTYWFLFRKKKEEVPEFTKIQTLTSSVRESSFVEKMKKTGRNIIVFYGSQTGTAEEFANRLSKDAHRYGMRGMSADPEEYDLADLSSLPEIDNALVVFCM

SEQ ID NO: 60842 - protein, 172 aa, Homo sapiens
  Payload ID: 12173
  Gene Symbol: POR
  Gene Name: P450 (cytochrome) oxidoreductase
  Uniprot ID: P16435
  ENSP ID: ENSP00000399327
MINMGDSHVDTSSTVSEAVAEEVSLFSMTDMILFSLIVGLLTYWFLFRKKKEEVPEFTKIQTLTSSVRESSFVEKMKKTGRNIIVFYGSQTGTAEEFANRLSKDAHRYGMRGMSADPEEYDLADLSSLPEIDNALVVFCMATYGEGDPTDNAQDFYDWLQETDVDLSGVKFA

SEQ ID NO: 60843 - protein, 101 aa, Homo sapiens
  Payload ID: 12173
  Gene Symbol: POR
  Gene Name: P450 (cytochrome) oxidoreductase
  ENSP ID: ENSP00000399409
MINMGDSHVDTSSTVSEAVAEEVSLFSMTDMILFSLIVGLLTYWFLFRKKKEEVPEFTKIQTLTSSVRESSFVEKMKKTVSFLHVFTLLRKPRPRWACNQV

SEQ ID NO: 60844 - protein, 62 aa, Homo sapiens; identical to SEQ ID NO: 60838
  Payload ID: 12173
  Gene Symbol: POR
  Gene Name: P450 (cytochrome) oxidoreductase
  Uniprot ID: P16435
  ENSP ID: ENSP00000399556

SEQ ID NO: 60845 - protein, 108 aa, Homo sapiens
  Payload ID: 12173
  Gene Symbol: POR
  Gene Name: P450 (cytochrome) oxidoreductase
  ENSP ID: ENSP00000400964
MGCTYSSPPEEPALRRTSSVRESSFVEKMKKTGRNIIVFYGSQTGTAEEFANRLSKDAHRYGMRGMSADPEEYDLADLSSLPEIDNALVVFCMATYGEGDPTDNAQDF

SEQ ID NO: 60846 - protein, 54 aa, Homo sapiens
  Payload ID: 12173
  Gene Symbol: POR
  Gene Name: P450 (cytochrome) oxidoreductase
  ENSP ID: ENSP00000403494
MRLPGVNSKDLLCQREQLCGKDEENGEEHHRVLRLPDGDCRGVCQPPVQGRPPL

SEQ ID NO: 60847 - protein, 211 aa, Homo sapiens
  Payload ID: 12173
  Gene Symbol: POR
  Gene Name: P450 (cytochrome) oxidoreductase
  Uniprot ID: P16435
  ENSP ID: ENSP00000404731
MINMGDSHVDTSSTVSEAVAEEVSLFSMTDMILFSLIVGLLTYWFLFRKKKEEVPEFTKIQTLTSSVRESSFVEKMKKTGRNIIVFYGSQTGTAEEFANRLSKDAHRYGMRGMSADPEEYDLADLSSLPEIDNALVVFCMATYGEGDPTDNAQDFYDWLQETDVDLSGVKFAVFGLGNKTYEHFNAMGKCGQGVHGGDGPAEELREPEAPL

SEQ ID NO: 60848 - protein, 146 aa, Homo sapiens
  Payload ID: 12173
  Gene Symbol: POR
  Gene Name: P450 (cytochrome) oxidoreductase
  Uniprot ID: P16435
  ENSP ID: ENSP00000409238
MINMGDSHVDTSSTVSEAVAEEVSLFSMTDMILFSLIVGLLTYWFLFRKKKEEVPEFTKIQTLTSSVRESSFVEKMKKTGRNIIVFYGSQTGTAEEFANRLSKDAHRYGMRGMSADPEEYDLADLSSLPEIDNALVVFCMATYGEG

SEQ ID NO: 60849 - protein, 39 aa, Homo sapiens
  Payload ID: 12173
  Gene Symbol: POR
  Gene Name: P450 (cytochrome) oxidoreductase
  ENSP ID: ENSP00000409881
MINMGDSHVDTSSTVSEAVAEEVSLFSMTDMILFSLIVG

SEQ ID NO: 60850 - protein, 418 aa, Homo sapiens
  Payload ID: 12173
  Gene Symbol: POR
  Gene Name: P450 (cytochrome) oxidoreductase
  ENSP ID: ENSP00000412490
MGEMGRLKSYENQKPPFDAKNPFLAAVTTNRKLNQGTERHLMHLELDISDSKIRYESGDHVAVYPANDSALVNQLGKILGADLDVVMSLNNLDEESNKKHPFPCPTSYRTALTYYLDITNPPRTNVLYELAQYASEPSEQELLRKMASSSGEGKELYLSWVVEARRHILAILQDCPSLRPPIDHLCELLPRLQARYYSIASSSKVHPNSVHICAVVVEYETKAGRINKGVATNWLRAKEPAGENGGRALVPMFVRKSQFRLPFKATTPVIMVGPGTGVAPFIGFIQERAWLRQQGKEVGETLLYYGCRRSDEDYLYREELAQFHRDGALTQLNVAFSREQSHKVYVQHLLKQDREHLWKLIEGGAHIYVCGDARNMARDVQNTFYDIVAELGAMEHAQAVDYIKKLMTKGRYSLDVWS

SEQ ID NO: 60851 - protein, 189 aa, Homo sapiens
  Payload ID: 12173
  Gene Symbol: POR
  Gene Name: P450 (cytochrome) oxidoreductase
  Uniprot ID: P16435
  ENSP ID: ENSP00000414263
MINMGDSHVDTSSTVSEAVAEEVSLFSMTDMILFSLIVGLLTYWFLFRKKKEEVPEFTKIQTLTSSVRESSFVEKMKKTGRNIIVFYGSQTGTAEEFANRLSKDAHRYGMRGMSADPEEYDLADLSSLPEIDNALVVFCMATYGEGDPTDNAQDFYDWLQETDVDLSGVKFALGGGLHHLARAVLAGRV

SEQ ID NO: 60852 - protein, 680 aa, Homo sapiens
  Payload ID: 12173
  Gene Symbol: POR
  Gene Name: P450 (cytochrome) oxidoreductase
  Uniprot ID: P16435
  ENSP ID: ENSP00000419970
MINMGDSHVDTSSTVSEAVAEEVSLFSMTDMILFSLIVGLLTYWFLFRKKKEEVPEFTKIQTLTSSVRESSFVEKMKKTGRNIIVFYGSQTGTAEEFANRLSKDAHRYGMRGMSADPEEYDLADLSSLPEIDNALVVFCMATYGEGDPTDNAQDFYDWLQETDVDLSGVKFAVFGLGNKTYEHFNAMGKYVDKRLEQLGAQRIFELGLGDDDGNLEEDFITWREQFWPAVCEHFGVEATGEESSIRQYELVVHTDIDAAKVYMGEMGRLKSYENQKPPFDAKNPFLAAVTTNRKLNQGTERHLMHLELDISDSKIRYESGDHVAVYPANDSALVNQLGKILGADLDVVMSLNNLDEESNKKHPFPCPTSYRTALTYYLDITNPPRTNVLYELAQYASEPSEQELLRKMASSSGEGKELYLSWVVEARRHILAILQDCPSLRPPIDHLCELLPRLQARYYSIASSSKVHPNSVHICAVVVEYETKAGRINKGVATNWLRAKEPAGENGGRALVPMFVRKSQFRLPFKATTPVIMVGPGTGVAPFIGFIQERAWLRQQGKEVGETLLYYGCRRSDEDYLYREELAQFHRDGALTQLNVAFSREQSHKVYVQHLLKQDREHLWKLIEGGAHIYVCGDARNMARDVQNTFYDIVAELGAMEHAQAVDYIKKLMTKGRYSLDVWS

SEQ ID NO: 60853 - protein, 133 aa, Homo sapiens
  Payload ID: 12174
  Gene Symbol: PDRG1
  Gene Name: p53 and DNA-damage regulated 1
  Uniprot ID: Q9NUG6
  ENSP ID: ENSP00000202017
MLSPEAERVLRYLVEVEELAEEVLADKRQIVDLDTKRNQNREGLRALQKDLSLSEDVMVCFGNMFIKMPHPETKEMIEKDQDHLDKEIEKLRKQLKVKVNRLFEAQGKPELKGFNLNPLNQDELKALKVILKG

SEQ ID NO: 60854 - protein, 910 aa, Homo sapiens
  Payload ID: 12175
  Gene Symbol: PIDD1
  Gene Name: p53-induced death domain protein 1
  Uniprot ID: Q9HB75
  ENSP ID: ENSP00000337797
MAATVEGPELEAAAAAGDASEDSDAGSRALPFLGGNRLSLDLYPGGCQQLLHLCVQQPLQLLQVEFLRLSTHEDPQLLEATLAQLPQSLSCLRSLVLKGGQRRDTLGACLRGALTNLPAGLSGLAHLAHLDLSFNSLETLPACVLQMRGLGALLLSHNCLSELPEALGALPALTFLTVTHNRLQTLPPALGALSTLQRLDLSQNLLDTLPPEIGGLGSLLELNLASNRLQSLPASLAGLRSLRLLVLHSNLLASVPADLARLPLLTRLDLRDNQLRDLPPELLDAPFVRLQGNPLGEASPDAPSSPVAALIPEMPRLFLTSDLDSFPVTPQGCSVTLACGVRLQFPAGATATPITIRYRLLLPEPGLVPLGPHDALLSHVLELQPHGVAFQQDVGLWLLFTPPQARRCREVVVRTRNDNSWGDLETYLEEEAPQRLWAHCQVPHFSWFLVVSRPVSNACLVPPEGTLLCSSGHPGVKVIFPPGATEEPRRVSMQVVRMAGRELQALLGEPEAAVSPLLCLSQSGPPSFLQPVTVQLPLPSGITGLSLDRSRLHLLYWAPPAATWDDITAQVVLELTHLYARFQVTHFSWYWLWYTTKNCVGGLARKAWERLRLHRVNLIALQRRRDPEQVLLQCLPRNKVDATLRRLLERYRGPEPSDTVEMFEGEEFFAAFERGIDVDADRPDCVEGRICFVFYSHLKNVKEVYVTTTLDREAQAVRGQVSFYRGAVPVRVPEEAEAARQRKGADALWMATLPIKLPRLRGSEGPRRGAGLSLAPLNLGDAETGFLTQSNLLSVAGRLGLDWPAVALHLGVSYREVQRIRHEFRDDLDEQIRHMLFSWAERQAGQPGAVGLLVQALEQSDRQDVAEEVRAVLELGRRKYQDSIRRMGLAPKDPALPGSSAPQPPEPAQA

SEQ ID NO: 60855 - protein, 893 aa, Homo sapiens
  Payload ID: 12175
  Gene Symbol: PIDD1
  Gene Name: p53-induced death domain protein 1
  Uniprot ID: Q9HB75
  ENSP ID: ENSP00000416801
MAATVEGPELEAAAAAGDASEDSDAGSRALPFLGGNRLSLDLYPGGCQQLLHLCVQQPLQLLQVEFLRLSTHEDPQLLEATLAQLPQSLSCLRSLVLKGGQRRDTLGACLRGALTNLPAGLSGLAHLAHLDLSFNSLETLPACVLQMRGLGALLLSHNCLSELPEALGALPALTFLTVTHNRLQTLPPALGALSTLQRLDLSQNLLDTLPPEIGGLGSLLELNLASNRLQSLPASLAGLRSLRLLVLHSNLLASVPADLARLPLLTRLDLRDNQLRDLPPELLDAPFVRLQGNPLGEASPDAPSSPVAALIPEMPRLFLTSDLDSFPVTPQGCSVTLACGVRLQFPAGATATPITIRYRLLLPEPGLVPLGPHDALLSHVLELQPHGVAFQQDVGLWLLFTPPQARRCREVVVRTRNDNSWGDLETYLEEEAPQRLWAHCQVPHFSWFLVVSRPVSNACLVPPEGTLLCSSGHPGVKVIFPPGATEEPRRVSMQVVRMAGRELQALLGEPEAAVSPLLCLSQSGPPSFLQPVTVQLPLPSGITGLSLDRSRLHLLYWAPPAATWDDITAQVVLELTHLYARFQVTHFSWYWLWYTTKNCVGGLARKAWERLRLHRVNLIALQRRRDPEQVLLQCLPRNKVDATLRRLLERYRGPEPSDTVEMFEGEEFFAAFERGIDVDADRPDCVEGRICFVFYSHLKNVKEVSFYRGAVPVRVPEEAEAARQRKGADALWMATLPIKLPRLRGSEGPRRGAGLSLAPLNLGDAETGFLTQSNLLSVAGRLGLDWPAVALHLGVSYREVQRIRHEFRDDLDEQIRHMLFSWAERQAGQPGAVGLLVQALEQSDRQDVAEEVRAVLELGRRKYQDSIRRMGLAPKDPALPGSSAPQPPEPAQA

SEQ ID NO: 60856 - protein, 338 aa, Homo sapiens
  Payload ID: 12175
  Gene Symbol: PIDD1
  Gene Name: p53-induced death domain protein 1
  ENSP ID: ENSP00000435008
  MOD_RES (1)..(1): Any amino acid
XAPFVRLQGNPLGEASPDAPSSPVAALIPEMPRLFLTSDLDSFPVTPQGCSVTLACGVRLQFPAGATATPITIRYRLLLPEPGLVPLGPHDALLSHVLELQPHGVAFQQDVGLWLLFTPPQARRCREVVVRTRNDNSWGDLETYLEEEAPQRLWAHCQVPHFSWFLVVSRPVSNACLVPPEGTLLCSSGHPGVKVIFPPGATEEPRRVSMQVVRMAGRELQALLGEPEAAVSPLLCLSQSGPPSFLQPVTVQLPLPSGITGLSLDRSRLHLLYWAPPAATWDDITAQVVLELTHLYARFQVLALVHHQELCGRPGSEGLGAAAAAPCEPHRSAAAPGP

SEQ ID NO: 60857 - protein, 108 aa, Homo sapiens
  Payload ID: 12175
  Gene Symbol: PIDD1
  Gene Name: p53-induced death domain protein 1
  ENSP ID: ENSP00000436146
MAATVEGPELEAAAAAGDASEDSDAGSRALPFLGGNRLSLDLYPGGCQQLLHLCVQQPLQLLQVEFLRLSTHEDPQLLEATLAQLPQSLSCLRSLVLKGSIWDLGPWL

SEQ ID NO: 60858 - protein, 108 aa, Homo sapiens; identical to SEQ ID NO: 60857
  Payload ID: 12175
  Gene Symbol: PIDD1
  Gene Name: p53-induced death domain protein 1
  ENSP ID: ENSP00000436342

SEQ ID NO: 60859 - protein, 531 aa, Homo sapiens
  Payload ID: 12176
  Gene Symbol: PAF1
  Gene Name: PAF1 homolog, Paf1/RNA polymerase II complex component
  Uniprot ID: Q8N7H5
  ENSP ID: ENSP00000221265
MAPTIQTQAQREDGHRPNSHRTLPERSGVVCRVKYCNSLPDIPFDPKFITYPFDQNRFVQYKATSLEKQHKHDLLTEPDLGVTIDLINPDTYRIDPNVLLDPADEKLLEEEIQAPTSSKRSQQHAKVVPWMRKTEYISTEFNRYGISNEKPEVKIGVSVKQQFTEEEIYKDRDSQITAIEKTFEDAQKSISQHYSKPRVTPVEVMPVFPDFKMWINPCAQVIFDSDPAPKDTSGAAALEMMSQAMIRGMMDEEGNQFVAYFLPVEETLKKRKRDQEEEMDYAPDDVYDYKIAREYNWNVKNKASKGYEENYFFIFREGDGVYYNELETRVRLSKRRAKAGVQSGTNALLVVKHRDMNEKELEAQEARKAQLENHEPEEEEEEEMETEEKEAGGSDEEQEKGSSSEKEGSEDEHSGSESEREEGDRDEASDKSGSGEDESSEDEARAARDKEEIFGSDADSEDDADSDDEDRGQAQGGSDNDSDSGSNGGGQRSRSHSRSASPFPSGSEHSAQEDGSEAAASDSSEADSDSD

SEQ ID NO: 60860 - protein, 288 aa, Homo sapiens
  Payload ID: 12176
  Gene Symbol: PAF1
  Gene Name: PAF1 homolog, Paf1/RNA polymerase II complex component
  ENSP ID: ENSP00000396412
MATGPIPTGLCLRGLEWSAESSTAIASLISPSTPSSSPTPSTRTVLLDPADEKLLEEEIQAPTSSKRSQQHAKVVPWMRKTEYISTEFNRYGISNEKPEVKIGVSVKQQFTEEEIYKDRDSQITAIEKTFEDAQKSISQHYSKPRVTPVEVMPVFPDFKMWINPCAQVIFDSDPAPKDTSGAAALEMMSQAMIRGMMDEEGNQFVAYFLPVEETLKKRKRDQEEEMDYAPDDVYDYKIAREYNWNVKNKASKGYEENYFFIFREGDGVYYNELETSIQYSHMLYNLVA

SEQ ID NO: 60861 - protein, 485 aa, Homo sapiens
  Payload ID: 12176
  Gene Symbol: PAF1
  Gene Name: PAF1 homolog, Paf1/RNA polymerase II complex component
  Uniprot ID: Q8N7H5
  ENSP ID: ENSP00000468874
MAPTIQTQAQREDGHRSGVVCRVKYCNSLPDIPFDPKFITYPFDQNRFVQYKATSLEKQHKHDLLTEPDLGVTIDLINPDTYRIDPNVLLDPADEKLLEEEIQAPTSSKRSQQHAKVVPWMRKTEYISTEFNRYGISNEKPEVKIGVSVKQQFTEEEIYKDRDSQITAIEKTFEDAQKSISQHYSKPRVTPVEVMPVFPDFKMWINPCAQVIFDSDPAPKDTSGAAALEMMSQAMIRGMMDEEGNQFVAYFLPVEETLKKRKRDQEEEMDYAPDDVYDYKIAREYNWNVKNKASKGYEENYFFIFREGDGVYYNELETRVRLSKRRAKAGVQSGTNALLVVKHRDMNEKELEAQEARKAQLENHEPEEEEEEEMETEEKEAGGSVMLILRTMPTLMMRTEDRPKVAVTMIQTAAAMGVASGAGATAAAPVPSPVAASTRPRRMAVKLQLLIPVKLIVTVTESQGIQGWFRHHYCEQQSTFLVVCL

SEQ ID NO: 60862 - protein, 94 aa, Homo sapiens
  Payload ID: 12176
  Gene Symbol: PAF1
  Gene Name: PAF1 homolog, Paf1/RNA polymerase II complex component
  ENSP ID: ENSP00000469742
  MOD_RES (1)..(1): Any amino acid
XVQSGTNALLVVKHRDMNEKELEAQEARKAQLENHEPEEEEEEEMETEEKEAGGSGKSGQARLWEPWEGGKVGFISLHSLPDEEQEKGSSSEKE

SEQ ID NO: 60863 - protein, 534 aa, Homo sapiens
  Payload ID: 12177
  Gene Symbol: PAX1
  Gene Name: paired box 1
  Uniprot ID: P15863
  ENSP ID: ENSP00000381499
MKFTLGLGSRAWRVSWEGAAAAAAGPGAGGSALRCRAQRVSSPRLGRRGSRLSGALPLCLSRGGGGAQALPDCAGPSPGHPGHPGARQLAGPLAMEQTYGEVNQLGGVFVNGRPLPNAIRLRIVELAQLGIRPCDISRQLRVSHGCVSKILARYNETGSILPGAIGGSKPRVTTPNVVKHIRDYKQGDPGIFAWEIRDRLLADGVCDKYNVPSVSSISRILRNKIGSLAQPGPYEASKQPPSQPTLPYNHIYQYPYPSPVSPTGAKMGSHPGVPGTAGHVSIPRSWPSAHSVSNILGIRTFMEQTGALAGSEGTAYSPKMEDWAGVNRTAFPATPAVNGLEKPALEADIKYTQSASTLSAVGGFLPACAYPASNQHGVYSAPGGGYLAPGPPWPPAQGPPLAPPGAGVAVHGGELAAAMTFKHPSREGSLPAPAARPRTPSVAYTDCPSRPRPPRGSSPRTRARRERQADPGAQVCAAAPAIGTGRIGGLAEEEASAGPRGARPASPQAQPCLWPDPPHFLYWSGFLGFSELGF

SEQ ID NO: 60864 - protein, 433 aa, Homo sapiens
  Payload ID: 12177
  Gene Symbol: PAX1
  Gene Name: paired box 1
  Uniprot ID: P15863
  ENSP ID: ENSP00000410355
MRRAPLRGSSAPLPTPSQTQAVCPWTPSCLGTHRSPLEVRLGAVPRSAWGPLANPPGVFSPSGSLLSGASAEQTYGEVNQLGGVFVNGRPLPNAIRLRIVELAQLGIRPCDISRQLRVSHGCVSKILARYNETGSILPGAIGGSKPRVTTPNVVKHIRDYKQGDPGIFAWEIRDRLLADGVCDKYNVPSVSSISRILRNKIGSLAQPGPYEASKQPPSQPTLPYNHIYQYPYPSPVSPTGAKMGSHPGVPGTAGHVSIPRSWPSAHSVSNILGIRTFMEQTGALAGSEGTAYSPKMEDWAGVNRTAFPATPAVNGLEKPALEADIKYTQSASTLSAVGGFLPACAYPASNQHGVYSAPGGGYLAPGPPWPPAQGPPLAPPGAGVAVHGGELAAAMTFKHPSREVADRKPPSSGSKAPDALSSLHGLPIPASTS

SEQ ID NO: 60865 - protein, 457 aa, Homo sapiens
  Payload ID: 12177
  Gene Symbol: PAX1
  Gene Name: paired box 1
  ENSP ID: ENSP00000481334
MKFTLGLGSRAWRVSWEGAAAAAAGPGAGGSALRCRAQRVSSPRLGRRGSRLSGALPLCLSRGGGGAQALPDCAGPSPGHPGHPGARQLAGPLAMEQTYGEVNQLGGVFVNGRPLPNAIRLRIVELAQLGIRPCDISRQLRVSHGCVSKILARYNETGSILPGAIGGSKPRVTTPNVVKHIRDYKQGDPGIFAWEIRDRLLADGVCDKYNVPSVSSISRILRNKIGSLAQPGPYEASKQPPSQPTLPYNHIYQYPYPSPVSPTGAKMGSHPGVPGTAGHVSIPRSWPSAHSVSNILGIRTFMEQTGALAGSEGTAYSPKMEDWAGVNRTAFPATPAVNGLEKPALEADIKYTQSASTLSAVGGFLPACAYPASNQHGVYSAPGGGYLAPGPPWPPAQGPPLAPPGAGVAVHGGELAAAMTFKHPSREVADRKPPSSGSKAPDALSSLHGLPIPASTS

SEQ ID NO: 60866 - protein, 394 aa, Homo sapiens
  Payload ID: 12178
  Gene Symbol: PAX2
  Gene Name: paired box 2
  Uniprot ID: Q02962
  ENSP ID: ENSP00000347385
MDMHCKADPFSAMHPGHGGVNQLGGVFVNGRPLPDVVRQRIVELAHQGVRPCDISRQLRVSHGCVSKILGRYYETGSIKPGVIGGSKPKVATPKVVDKIAEYKRQNPTMFAWEIRDRLLAEGICDNDTVPSVSSINRIIRTKVQQPFHPTPDGAGTGVTAPGHTIVPSTASPPVSSASNDPVGSYSINGILGIPRSNGEKRKRDEDVSEGSVPNGDSQSGVDSLRKHLRADTFTQQQLEALDRVFERPSYPDVFQASEHIKSEQGNEYSLPALTPGLDEVKSSLSASTNPELGSNVSGTQTYPVVTGRDMASTTLPGYPPHVPPTGQGSYPTSTLAGMVPGSEFSGNPYSHPQYTAYNEAWRFSNPALLSSPYYYSAAPRGSAPAAAAAAYDRH

SEQ ID NO: 60867 - protein, 393 aa, Homo sapiens
  Payload ID: 12178
  Gene Symbol: PAX2
  Gene Name: paired box 2
  ENSP ID: ENSP00000355069
MDMHCKADPFSAMHRHGGVNQLGGVFVNGRPLPDVVRQRIVELAHQGVRPCDISRQLRVSHGCVSKILGRYYETGSIKPGVIGGSKPKVATPKVVDKIAEYKRQNPTMFAWEIRDRLLAEGICDNDTVPSVSSINRIIRTKVQQPFHPTPDGAGTGVTAPGHTIVPSTASPPVSSASNDPVGSYSINGILGIPRSNGEKRKRDEDVSEGSVPNGDSQSGVDSLRKHLRADTFTQQQLEALDRVFERPSYPDVFQASEHIKSEQGNEYSLPALTPGLDEVKSSLSASTNPELGSNVSGTQTYPVVTGRDMASTTLPGYPPHVPPTGQGSYPTSTLAGMVPGSEFSGNPYSHPQYTAYNEAWRFSNPALLSSPYYYSAAPRGSAPAAAAAAYDRH

SEQ ID NO: 60868 - protein, 396 aa, Homo sapiens
  Payload ID: 12178
  Gene Symbol: PAX2
  Gene Name: paired box 2
  Uniprot ID: Q02962
  ENSP ID: ENSP00000359319
MDMHCKADPFSAMHPGHGGVNQLGGVFVNGRPLPDVVRQRIVELAHQGVRPCDISRQLRVSHGCVSKILGRYYETGSIKPGVIGGSKPKVATPKVVDKIAEYKRQNPTMFAWEIRDRLLAEGICDNDTVPSVSSINRIIRTKVQQPFHPTPDGAGTGVTAPGHTIVPSTASPPVSSASNDPVGSYSINGILGIPRSNGEKRKRDEDVSEGSVPNGDSQSGVDSLRKHLRADTFTQQQLEALDRVFERPSYPDVFQASEHIKSEQGNEYSLPALTPGLDEVKSSLSASTNPELGSNVSGTQTYPVVTGRDMASTTLPGYPPHVPPTGQGSYPTSTLAGMVPEAAVGPSSSLMSKPGRKLAEVPPCVQPTGASSPATRTATPSTRPTTRLGDSATPPY

SEQ ID NO: 60869 - protein, 417 aa, Homo sapiens
  Payload ID: 12178
  Gene Symbol: PAX2
  Gene Name: paired box 2
  Uniprot ID: Q02962
  ENSP ID: ENSP00000396259
MDMHCKADPFSAMHPGHGGVNQLGGVFVNGRPLPDVVRQRIVELAHQGVRPCDISRQLRVSHGCVSKILGRYYETGSIKPGVIGGSKPKVATPKVVDKIAEYKRQNPTMFAWEIRDRLLAEGICDNDTVPSVSSINRIIRTKVQQPFHPTPDGAGTGVTAPGHTIVPSTASPPVSSASNDPVGSYSINGILGIPRSNGEKRKRDEVEVYTDPAHIRGGGGLHLVWTLRDVSEGSVPNGDSQSGVDSLRKHLRADTFTQQQLEALDRVFERPSYPDVFQASEHIKSEQGNEYSLPALTPGLDEVKSSLSASTNPELGSNVSGTQTYPVVTGRDMASTTLPGYPPHVPPTGQGSYPTSTLAGMVPGSEFSGNPYSHPQYTAYNEAWRFSNPALLSSPYYYSAAPRGSAPAAAAAAYDRH

SEQ ID NO: 60870 - protein, 214 aa, Homo sapiens
  Payload ID: 12178
  Gene Symbol: PAX2
  Gene Name: paired box 2
  ENSP ID: ENSP00000398652
MDMHCKADPFSAMHPGHGGVNQLGGVFVNGRPLPDVVRQRIVELAHQGVRPCDISRQLRVSHGCVSKILGRYYETGSIKPGVIGGSKPKVATPKVVDKIAEYKRQNPTMFAWEIRDRLLAEGICDNDTVPSVSSINRIIRTKVQQPFHPTPDGAGTGVTAPGHTIVPSTASPPVSSASNDPVGSYSINGILGIPRSNGEKRKRDEVEVYTDPAH

SEQ ID NO: 60871 - protein, 304 aa, Homo sapiens
  Payload ID: 12178
  Gene Symbol: PAX2
  Gene Name: paired box 2
  ENSP ID: ENSP00000452489
MAGPCCVWGVVFFSCLSPAGHGGVNQLGGVFVNGRPLPDVVRQRIVELAHQGVRPCDISRQLRVSHGCVSKILGRYYETGSIKPGVIGGSKPKVATPKVVDKIAEYKRQNPTMFAWEIRDRLLAEGICDNDTVPSVSSINRIIRTKVQQPFHPTPDGAGTGVTAPGHTIVPSTASPPVSSASNDPVGSYSINGILGIPRSNDVSEGSVPNGDSQSGVDSLRKHLRADTFTQQQLEALDRVFERPSYPDVFQASEHIKSEQGNEYSLPALTPGLDEVKSSLSASTNPELGSNVSGTQTYPVVTGR

SEQ ID NO: 60872 - protein, 206 aa, Homo sapiens
  Payload ID: 12179
  Gene Symbol: PAX3
  Gene Name: paired box 3
  Uniprot ID: P23760
  ENSP ID: ENSP00000258387
MTTLAGAVPRMMRPGPGQNYPRSGFPLEVSTPLGQGRVNQLGGVFINGRPLPNHIRHKIVEMAHHGIRPCVISRQLRVSHGCVSKILCRYQETGSIRPGAIGGSKPKQVTTPDVEKKIEEYKRENPGMFSWEIRDKLLKDAVCDRNTVPSVSSISRILRSKFGKGEEEEADLERKEAEESEKKAKHSIDGILSERGKALVSGVSSH

SEQ ID NO: 60873 - protein, 407 aa, Homo sapiens
  Payload ID: 12179
  Gene Symbol: PAX3
  Gene Name: paired box 3
  Uniprot ID: P23760
  ENSP ID: ENSP00000338767
MTTLAGAVPRMMRPGPGQNYPRSGFPLEVSTPLGQGRVNQLGGVFINGRPLPNHIRHKIVEMAHHGIRPCVISRQLRVSHGCVSKILCRYQETGSIRPGAIGGSKPKQVTTPDVEKKIEEYKRENPGMFSWEIRDKLLKDAVCDRNTVPSVSSISRILRSKFGKGEEEEADLERKEAEESEKKAKHSIDGILSERASAPQSDEGSDIDSEPDLPLKRKQRRSRTTFTAEQLEELERAFERTHYPDIYTREELAQRAKLTEARVQVWFSNRRARWRKQAGANQLMAFNHLIPGGFPPTAMPTLPTYQLSETSYQPTSIPQAVSDPSSTVHRPQPLPPSTVHQSTIPSNPDSSSAYCLPSTRHGFSSYTDSFVPPSGPSNPMNPTIGNGLSPQVPFIISSQISLGFKSF

SEQ ID NO: 60874 - protein, 403 aa, Homo sapiens
  Payload ID: 12179
  Gene Symbol: PAX3
  Gene Name: paired box 3
  Uniprot ID: P23760
  ENSP ID: ENSP00000342092
MTTLAGAVPRMMRPGPGQNYPRSGFPLEVSTPLGQGRVNQLGGVFINGRPLPNHIRHKIVEMAHHGIRPCVISRQLRVSHGCVSKILCRYQETGSIRPGAIGGSKPKQVTTPDVEKKIEEYKRENPGMFSWEIRDKLLKDAVCDRNTVPSVSSISRILRSKFGKGEEEEADLERKEAEESEKKAKHSIDGILSERASAPQSDEGSDIDSEPDLPLKRKQRRSRTTFTAEQLEELERAFERTHYPDIYTREELAQRAKLTEARVQVWFSNRRARWRKQAGANQLMAFNHLIPGGFPPTAMPTLPTYQLSETSYQPTSIPQAVSDPSSTVHRPQPLPPSTVHQSTIPSNPDSSSAYCLPSTRHGFSSYTDSFVPPSGPSNPMNPTIGNGLSPQVPFIISSQISRK

SEQ ID NO: 60875 - protein, 479 aa, Homo sapiens
  Payload ID: 12179
  Gene Symbol: PAX3
  Gene Name: paired box 3
  Uniprot ID: P23760
  ENSP ID: ENSP00000343052
MTTLAGAVPRMMRPGPGQNYPRSGFPLEVSTPLGQGRVNQLGGVFINGRPLPNHIRHKIVEMAHHGIRPCVISRQLRVSHGCVSKILCRYQETGSIRPGAIGGSKPKQVTTPDVEKKIEEYKRENPGMFSWEIRDKLLKDAVCDRNTVPSVSSISRILRSKFGKGEEEEADLERKEAEESEKKAKHSIDGILSERASAPQSDEGSDIDSEPDLPLKRKQRRSRTTFTAEQLEELERAFERTHYPDIYTREELAQRAKLTEARVQVWFSNRRARWRKQAGANQLMAFNHLIPGGFPPTAMPTLPTYQLSETSYQPTSIPQAVSDPSSTVHRPQPLPPSTVHQSTIPSNPDSSSAYCLPSTRHGFSSYTDSFVPPSGPSNPMNPTIGNGLSPQVMGLLTNHGGVPHQPQTDYALSPLTGGLEPTTTVSASCSQRLDHMKSLDSLPTSQSYCPPTYSTTGYSMDPVTGYQYGQYGQSKPWTF

SEQ ID NO: 60876 - protein, 505 aa, Homo sapiens
  Payload ID: 12179
  Gene Symbol: PAX3
  Gene Name: paired box 3
  Uniprot ID: P23760
  ENSP ID: ENSP00000375921
MTTLAGAVPRMMRPGPGQNYPRSGFPLEVSTPLGQGRVNQLGGVFINGRPLPNHIRHKIVEMAHHGIRPCVISRQLRVSHGCVSKILCRYQETGSIRPGAIGGSKPKQVTTPDVEKKIEEYKRENPGMFSWEIRDKLLKDAVCDRNTVPSVSSISRILRSKFGKGEEEEADLERKEAEESEKKAKHSIDGILSERASAPQSDEGSDIDSEPDLPLKRKQRRSRTTFTAEQLEELERAFERTHYPDIYTREELAQRAKLTEARVQVWFSNRRARWRKQAGANQLMAFNHLIPGGFPPTAMPTLPTYQLSETSYQPTSIPQAVSDPSSTVHRPQPLPPSTVHQSTIPSNPDSSSAYCLPSTRHGFSSYTDSFVPPSGPSNPMNPTIGNGLSPQVMGLLTNHGGVPHQPQTDYALSPLTGGLEPTTTVSASCSQRLDHMKSLDSLPTSQSYCPPTYSTTGYSMDPVTGYQYGQYGQSAFHYLKPDIAWFQILLNTFDKSSGEEEDLEQ

SEQ ID NO: 60877 - protein, 484 aa, Homo sapiens
  Payload ID: 12179
  Gene Symbol: PAX3
  Gene Name: paired box 3
  Uniprot ID: P23760
  ENSP ID: ENSP00000375922
MTTLAGAVPRMMRPGPGQNYPRSGFPLEVSTPLGQGRVNQLGGVFINGRPLPNHIRHKIVEMAHHGIRPCVISRQLRVSHGCVSKILCRYQETGSIRPGAIGGSKPKQVTTPDVEKKIEEYKRENPGMFSWEIRDKLLKDAVCDRNTVPSVSSISRILRSKFGKGEEEEADLERKEAEESEKKAKHSIDGILSERASAPQSDEGSDIDSEPDLPLKRKQRRSRTTFTAEQLEELERAFERTHYPDIYTREELAQRAKLTEARVQVWFSNRRARWRKQAGANQLMAFNHLIPGGFPPTAMPTLPTYQLSETSYQPTSIPQAVSDPSSTVHRPQPLPPSTVHQSTIPSNPDSSSAYCLPSTRHGFSSYTDSFVPPSGPSNPMNPTIGNGLSPQVMGLLTNHGGVPHQPQTDYALSPLTGGLEPTTTVSASCSQRLDHMKSLDSLPTSQSYCPPTYSTTGYSMDPVTGYQYGQYGQSAFHYLKPDIA

SEQ ID NO: 60878 - protein, 483 aa, Homo sapiens
  Payload ID: 12179
  Gene Symbol: PAX3
  Gene Name: paired box 3
  Uniprot ID: P23760
  ENSP ID: ENSP00000386750
MTTLAGAVPRMMRPGPGQNYPRSGFPLEVSTPLGQGRVNQLGGVFINGRPLPNHIRHKIVEMAHHGIRPCVISRQLRVSHGCVSKILCRYQETGSIRPGAIGGSKPKVTTPDVEKKIEEYKRENPGMFSWEIRDKLLKDAVCDRNTVPSVSSISRILRSKFGKGEEEEADLERKEAEESEKKAKHSIDGILSERASAPQSDEGSDIDSEPDLPLKRKQRRSRTTFTAEQLEELERAFERTHYPDIYTREELAQRAKLTEARVQVWFSNRRARWRKQAGANQLMAFNHLIPGGFPPTAMPTLPTYQLSETSYQPTSIPQAVSDPSSTVHRPQPLPPSTVHQSTIPSNPDSSSAYCLPSTRHGFSSYTDSFVPPSGPSNPMNPTIGNGLSPQVMGLLTNHGGVPHQPQTDYALSPLTGGLEPTTTVSASCSQRLDHMKSLDSLPTSQSYCPPTYSTTGYSMDPVTGYQYGQYGQSAFHYLKPDIA

SEQ ID NO: 60879 - protein, 215 aa, Homo sapiens
  Payload ID: 12179
  Gene Symbol: PAX3
  Gene Name: paired box 3
  Uniprot ID: P23760
  ENSP ID: ENSP00000386817
MTTLAGAVPRMMRPGPGQNYPRSGFPLEVSTPLGQGRVNQLGGVFINGRPLPNHIRHKIVEMAHHGIRPCVISRQLRVSHGCVSKILCRYQETGSIRPGAIGGSKPKQVTTPDVEKKIEEYKRENPGMFSWEIRDKLLKDAVCDRNTVPSVSSISRILRSKFGKGEEEEADLERKEAEESEKKAKHSIDGILSERGKRWRLGRRTCWVTWRASAS

SEQ ID NO: 60880 - protein, 343 aa, Homo sapiens
  Payload ID: 12180
  Gene Symbol: PAX4
  Gene Name: paired box 4
  Uniprot ID: O43316
  ENSP ID: ENSP00000339906
MNQLGGLFVNGRPLPLDTRQQIVRLAVSGMRPCDISRILKVSNGCVSKILGRYYRTGVLEPKGIGGSKPRLATPPVVARIAQLKGECPALFAWEIQRQLCAEGLCTQDKTPSVSSINRVLRALQEDQGLPCTRLRSPAVLAPAVLTPHSGSETPRGTHPGTGHRNRTIFSPSQAEALEKEFQRGQYPDSVARGKLATATSLPEDTVRVWFSNRRAKWRRQEKLKWEMQLPGASQGLTVPRVAPGIISAQQSPGSVPTAALPALEPLGPSCYQLCWATAPERCLSDTPPKACLKPCWGHLPPQPNSLDSGLLCLPCPSSHCHLASLSGSQALLWPGCPLLYGLE

SEQ ID NO: 60881 - protein, 349 aa, Homo sapiens
  Payload ID: 12180
  Gene Symbol: PAX4
  Gene Name: paired box 4
  ENSP ID: ENSP00000344297
MHQDGISSMNQLGGLFVNGRPLPLDTRQQIVRLAVSGMRPCDISRILKVSNGCVSKILGRYYRTGVLEPKGIGGSKPRLATPPVVARIAQLKGECPALFAWEIQRQLCAEGLCTQDKTPSVSSINRVLRALQEDQGLPCTRLRSPAVLAPAVLTPHSGSETPRGTHPGTGHRNRTIFSPSQAEALEKEFQRGQYPDSVARGKLATATSLPEDTVRVWFSNRRAKWRRQEKLKWEMQLPGASQGLTVPRVAPGIISAQQSPGSVPTAALPALEPLGPSCYQLCWATAPERCLSDTPPKACLKPCWDCGSFLLPVIAPSCVDVAWPCLDASLAHHLIGGAGKATPTHFSHP

SEQ ID NO: 60882 - protein, 340 aa, Homo sapiens
  Payload ID: 12180
  Gene Symbol: PAX4
  Gene Name: paired box 4
  ENSP ID: ENSP00000368014
MNQLGGLFVNGRPLPLDTRQQIVRLAVSGMRPCDISRILKVSNGCVSKILGRYYRTGVLEPKGIGGSKPRLATPPVVARIAQLKGECPALFAWEIQRQLCAEGLCTQDKTPSVSSINRVLRALQEDQGLPCTRLRSPAVLAPAVLTPHSGSETPRGTHPGTGHRNRTIFSPSQAEALEKEFQRGQYPDSVARGKLATATSLPEDTVRVWFSNRRAKWRRQEKLKWEMQLPGASQGLTVPRVAPGIISAQQSPGSVPTAALPALEPLGPSCYQLCWATAPERCLSDTPPKACLKPCWDCGSFLLPVIAPSCVDVAWPCLDASLAHHLIGGAGKATPTHFSH

SEQ ID NO: 60883 - protein, 341 aa, Homo sapiens
  Payload ID: 12180
  Gene Symbol: PAX4
  Gene Name: paired box 4
  ENSP ID: ENSP00000451923
MAWSSKSWLCLIASSCPRDTLLPSAHHASPVPASHLTQVSNGCVSKILGRYYRTGVLEPKGIGGSKPRLATPPVVARIAQLKGECPALFAWEIQRQLCAEGLCTQDKTPSVSSINRVLRALQEDQGLPCTRLRSPAVLAPAVLTPHSGSETPRGTHPGTGHRNRTIFSPSQAEALEKEFQRGQYPDSVARGKLATATSLPEDTVRVWFSNRRAKWRRQEKLKWEMQLPGASQGLTVPRVAPGIISAQQSPGSVPTAALPALEPLGPSCYQLCWATAPERCLSDTPPKACLKPCWGHLPPQPNSLDSGLLCLPCPSSHCHLASLSGSQALLWPGCPLLYGLE

SEQ ID NO: 60884 - protein, 257 aa, Homo sapiens
  Payload ID: 12180
  Gene Symbol: PAX4
  Gene Name: paired box 4
  ENSP ID: ENSP00000473846
MAWSSKSWLCLIASSCPRDTLLPSAHHASPVPASHLTQVSNGCVSKILGRYYRTGVLEPKGIGGSKPRLATPPVVARIAQLKGECPALFAWEIQRQLCAEGLCTQDKTPSVSSINRVLRALQEDQGLPCTRLRSPAVLAPAVLTPHSGSETPRGTHPGTGHRNRTIFSPSQAEALEKEFQRGQYPDSVARGKLATATSLPEDTVRVWFSNRRAKWRRQEKLKWEMQLPGASQGLTVPRVAPGIISAQGPTVFMSRKY

SEQ ID NO: 60885 - protein, 257 aa, Homo sapiens; identical to SEQ ID NO: 60884
  Payload ID: 12180
  Gene Symbol: PAX4
  Gene Name: paired box 4
  ENSP ID: ENSP00000477877

SEQ ID NO: 60886 - protein, 391 aa, Homo sapiens
  Payload ID: 12181
  Gene Symbol: PAX5
  Gene Name: paired box 5
  Uniprot ID: Q02548
  ENSP ID: ENSP00000350844
MDLEKNYPTPRTSRTGHGGVNQLGGVFVNGRPLPDVVRQRIVELAHQGVRPCDISRQLRVSHGCVSKILGRYYETGSIKPGVIGGSKPKVATPKVVEKIAEYKRQNPTMFAWEIRDRLLAERVCDNDTVPSVSSINRIIRTKVQQPPNQPVPASSHSIVSTGSVTQVSSVSTDSAGSSYSISGILGITSPSADTNKRKRDEGIQESPVPNGHSLPGRDFLRKQMRGDLFTQQQLEVLDRVFERQHYSDIFTTTEPIKPEQTTEYSAMASLAGGLDDMKANLASPTPADIGSSVPGPQSYPIVTGRDLASTTLPGYPPHVPPAGQGSYSAPTLTGMVPGSEFSGSPYSHPQYSSYNDSWRFPNPGLLGSPYYYSAAARGAAPPAAATAYDRH

SEQ ID NO: 60887 - protein, 288 aa, Homo sapiens
  Payload ID: 12181
  Gene Symbol: PAX5
  Gene Name: paired box 5
  Uniprot ID: Q02548
  ENSP ID: ENSP00000367071
MDLEKNYPTPRTSRTGHGGVNQLGGVFVNGRPLPDVVRQRIVELAHQGVRPCDISRQLRVSHGCVSKILGRYYETGSIKPGVIGGSKPKVATPKVVEKIAEYKRQNPTMFAWEIRDRLLAERVCDNDTVPSVSSINRIIRTKVQQPPNQPVPASSHSIVSTGSVTQVSSVSTDSAGSSYSISGILGITSPSADTNKRKRDEGIQESPVPNGHSLPGRDFLRKQMRGDLFTQQQLEVLDRVFERQHYSDIFTTTEPIKPEQAVTWRARPSPGTLHTSPPLDRAATQHRR

SEQ ID NO: 60888 - protein, 328 aa, Homo sapiens
  Payload ID: 12181
  Gene Symbol: PAX5
  Gene Name: paired box 5
  Uniprot ID: Q02548
  ENSP ID: ENSP00000367078
MDLEKNYPTPRTSRTGHGGVNQLGGVFVNGRPLPDVVRQRIVELAHQGVRPCDISRQLRVSHGCVSKILGRYYETGSIKPGVIGGSKPKVATPKVVEKIAEYKRQNPTMFAWEIRDRLLAERVCDNDTVPSVSSINRIIRTKVQQPPNQPVPASSHSIVSTGSVTQVSSVSTDSAGSSYSISGILGITSPSADTNKRKRDEGIQESPVPNGHSLPGRDFLRKQMRGDLFTQQQLEVLDRVFERQHYSDIFTTTEPIKPEQTTEYSAMASLAGGLDDMKANLASPTPADIGSSVPGPQSYPIVTGSPYYYSAAARGAAPPAAATAYDRH

SEQ ID NO: 60889 - protein, 357 aa, Homo sapiens
  Payload ID: 12181
  Gene Symbol: PAX5
  Gene Name: paired box 5
  Uniprot ID: Q02548
  ENSP ID: ENSP00000367083
MDLEKNYPTPRTSRTGHGGVNQLGGVFVNGRPLPDVVRQRIVELAHQGVRPCDISRQLRVSHGCVSKILGRYYETGSIKPGVIGGSKPKVATPKVVEKIAEYKRQNPTMFAWEIRDRLLAERVCDNDTVPSVSSINRIIRTKVQQPPNQPVPASSHSIVSTGSVTQVSSVSTDSAGSSYSISGILGITSPSADTNKRKRDEGIQESPVPNGHSLPGRDFLRKQMRGDLFTQQQLEVLDRVFERQHYSDIFTTTEPIKPEQTTEYSAMASLAGGLDDMKANLASPTPADIGSSVPGPQSYPIVTGSEFSGSPYSHPQYSSYNDSWRFPNPGLLGSPYYYSAAARGAAPPAAATAYDRH

SEQ ID NO: 60890 - protein, 362 aa, Homo sapiens
  Payload ID: 12181
  Gene Symbol: PAX5
  Gene Name: paired box 5
  Uniprot ID: Q02548
  ENSP ID: ENSP00000367084
MDLEKNYPTPRTSRTGHGGVNQLGGVFVNGRPLPDVVRQRIVELAHQGVRPCDISRQLRVSHGCVSKILGRYYETGSIKPGVIGGSKPKVATPKVVEKIAEYKRQNPTMFAWEIRDRLLAERVCDNDTVPSVSSINRIIRTKVQQPPNQPVPASSHSIVSTGSVTQVSSVSTDSAGSSYSISGILGITSPSADTNKRKRDEGIQESPVPNGHSLPGRDFLRKQMRGDLFTQQQLEVLDRVFERQHYSDIFTTTEPIKPEQTTEYSAMASLAGGLDDMKANLASPTPADIGSSVPGPQSYPIVTGRDLASTTLPGYPPHVPPAGQGSYSAPTLTGMVPGSPYYYSAAARGAAPPAAATAYDRH

SEQ ID NO: 60891 - protein, 291 aa, Homo sapiens
  Payload ID: 12181
  Gene Symbol: PAX5
  Gene Name: paired box 5
  Uniprot ID: Q02548
  ENSP ID: ENSP00000404687
MDLEKNYPTPRTSRTGHGGVNQLGGVFVNGRPLPDVVRQRIVELAHQGVRPCDISRQLRVSHGCVSKILGRIIRTKVQQPPNQPVPASSHSIVSTGSVTQVSSVSTDSAGSSYSISGILGITSPSADTNKRKRDEGIQESPVPNGHSLPGRDFLRKQMRGDLFTQQQLEVLDRVFERQHYSDIFTTTEPIKPEQTTEYSAMASLAGGLDDMKANLASPTPADIGSSVPGPQSYPIVTGSEFSGSPYSHPQYSSYNDSWRFPNPGLLGSPYYYSAAARGAAPPAAATAYDRH

SEQ ID NO: 60892 - protein, 348 aa, Homo sapiens
  Payload ID: 12181
  Gene Symbol: PAX5
  Gene Name: paired box 5
  Uniprot ID: Q02548
  ENSP ID: ENSP00000412188
MDLEKNYPTPRTSRTGHGGVNQLGGVFVNGRPLPDVVRQRIVELAHQGVRPCDISRQLRVSHGCVSKILGRYYETGSIKPGVIGGSKPKVATPKVVEKIAEYKRQNPTMFAWEIRDRLLAERVCDNDTVPSVSSINRIIRTKVQQPPNQPVPASSHSIGIQESPVPNGHSLPGRDFLRKQMRGDLFTQQQLEVLDRVFERQHYSDIFTTTEPIKPEQTTEYSAMASLAGGLDDMKANLASPTPADIGSSVPGPQSYPIVTGRDLASTTLPGYPPHVPPAGQGSYSAPTLTGMVPGSEFSGSPYSHPQYSSYNDSWRFPNPGLLGSPYYYSAAARGAAPPAAATAYDRH

SEQ ID NO: 60893 - protein, 60 aa, Homo sapiens
  Payload ID: 12181
  Gene Symbol: PAX5
  Gene Name: paired box 5
  ENSP ID: ENSP00000428670
  MOD_RES (1)..(1): Any amino acid
XSSVSTDSAGSSYSISGILGITSPSADTNKRKRDEGSPYYYSAAARGAAPPAAATAYDRH

SEQ ID NO: 60894 - protein, 220 aa, Homo sapiens
  Payload ID: 12181
  Gene Symbol: PAX5
  Gene Name: paired box 5
  ENSP ID: ENSP00000429197
MFAWEIRDRLLAERVCDNDTVPSVSSINRIIRTKVQQPPNQPVPASSHSIVSTGSVTQVSSVSTDSAGSSYSISGILGITSPSADTNKRKRDEGIQESPVPNGHSLPGRDFLRKQMRGDLFTQQQLEVLDRVFERQHYSDIFTTTEPIKPEQTTEYSAMASLAGGLDDMKANLASPTPADIGSSVPGPQSYPIVTGSPYYYSAAARGAAPPAAATAYDRH

SEQ ID NO: 60895 - protein, 295 aa, Homo sapiens
  Payload ID: 12181
  Gene Symbol: PAX5
  Gene Name: paired box 5
  ENSP ID: ENSP00000429291
MDLEKNYPTPRTSRTGHGGVNQLGGVFVNGRPLPDVVRQRIVELAHQGVRPCDISRQLRVSHGCVSKILGRYYETGSIKPGVIGGSKPKVATPKVVEKIAEYKRQNPTMFAWEIRDRLLAERVCDNDTVPSVSSINRIIRTKVQQPPNQPVPASSHSIVSTGSVTQVSSVSTDSAGSSYSISGILGITSPSADTNKRKRDEGIQESPVPNGHSLPGRDFLRKQMRGDLFTQQQLEVLDRVFERQHYSDIFTTTEPIKPEQAPPTIIALPPEEPPHLQPPLPMTVTDPWSQAGTKH

SEQ ID NO: 60896 - protein, 283 aa, Homo sapiens
  Payload ID: 12181
  Gene Symbol: PAX5
  Gene Name: paired box 5
  ENSP ID: ENSP00000429359
MFAWEIRDRLLAERVCDNDTVPSVSSINRIIRTKVQQPPNQPVPASSHSIVSTGSVTQVSSVSTDSAGSSYSISGILGITSPSADTNKRKRDEGIQESPVPNGHSLPGRDFLRKQMRGDLFTQQQLEVLDRVFERQHYSDIFTTTEPIKPEQTTEYSAMASLAGGLDDMKANLASPTPADIGSSVPGPQSYPIVTGRDLASTTLPGYPPHVPPAGQGSYSAPTLTGMVPGSEFSGSPYSHPQYSSYNDSWRFPNPGLLGSPYYYSAAARGAAPPAAATAYDRH

SEQ ID NO: 60897 - protein, 218 aa, Homo sapiens
  Payload ID: 12181
  Gene Symbol: PAX5
  Gene Name: paired box 5
  ENSP ID: ENSP00000429404
DTNKRKRDEGIQESPVPNGHSLPGRDFLRKQMRGDLFTQQQLEVLDRVFERQHYSDIFTTTEPIKPEQWCPVLMRQYLVQPQAVLFQTTEYSAMASLAGGLDDMKANLASPTPADIGSSVPGPQSYPIVTGRDLASTTLPGYPPHVPPAGQGSYSAPTLTGMVPGSEFSGSPYSHPQYSSYNDSWRFPNPGLLGSPYYYSAAARGAAPPAAATAYDRH

SEQ ID NO: 60898 - protein, 324 aa, Homo sapiens
  Payload ID: 12181
  Gene Symbol: PAX5
  Gene Name: paired box 5
  ENSP ID: ENSP00000429637
MDLEKNYPTPRTSRTGHGGVNQLGGVFVNGRPLPDVVRQRIVELAHQGVRPCDISRQLRVSHGCVSKILGRYYETGSIKPGVIGGSKPKVATPKVVEKIAEYKRQNPTMFAWEIRDRLLAERVCDNDTVPSVSSINRIIRTKVQQPPNQPVPASSHSIVSTGSVTQVSSVSTDSAGSSYSISGILGITSPSADTNKRKRDEGIQESPVPNGHSLPGRDFLRKQMRGDLFTQQQLEVLDRVFERQHYSDIFTTTEPIKPEQGVSFPGVPTATLSIPRTTTPGGSPTRGCLAPPTIIALPPEEPPHLQPPLPMTVTDPWSQAGTKH

SEQ ID NO: 60899 - protein, 319 aa, Homo sapiens
  Payload ID: 12181
  Gene Symbol: PAX5
  Gene Name: paired box 5
  Uniprot ID: Q02548
  ENSP ID: ENSP00000430773
MDLEKNYPTPRTSRTGHGGVNQLGGVFVNGRPLPDVVRQRIVELAHQGVRPCDISRQLRVSHGCVSKILGRYYETGSIKPGVIGGSKPKVATPKVVEKIAEYKRQNPTMFAWEIRDRLLAERVCDNDTVPSVSSINRIIRTKVQQPPNQPVPASSHSIGIQESPVPNGHSLPGRDFLRKQMRGDLFTQQQLEVLDRVFERQHYSDIFTTTEPIKPEQTTEYSAMASLAGGLDDMKANLASPTPADIGSSVPGPQSYPIVTGRDLASTTLPGYPPHVPPAGQGSYSAPTLTGMVPGSPYYYSAAARGAAPPAAATAYDRH

SEQ ID NO: 60900 - protein, 307 aa, Homo sapiens
  Payload ID: 12181
  Gene Symbol: PAX5
  Gene Name: paired box 5
  Uniprot ID: Q02548
  ENSP ID: ENSP00000431038
MDLEKNYPTPRTSRTGHGGVNQLGGVFVNGRPLPDVVRQRIVELAHQGVRPCDISRQLRVSHGCVSKILGRYYETGSIKPGVIGGSKPKVATPKVVEKIAEYKRQNPTMFAWEIRDRLLAERVCDNDTVPSVSSINRIIRTKVQQPPNQPVPASSHSIVSTGSVTQVSSVSTDSAGSSYSISGILGITSPSADTNKRKRDEGIQESPVPNGHSLPGRDFLRKQMRGDLFTQQQLEVLDRVFERQHYSDIFTTTEPIKPEQWCPVLMRQYLVQPQAVLFQAVTWRARPSPGTLHTSPPLDRAATQHRR

SEQ ID NO: 60901 - protein, 422 aa, Homo sapiens [sequence omitted]

SEQ ID NO: 60902 - protein, 436 aa, Homo sapiens
  Payload ID: 12182
  Gene Symbol: PAX6
  Gene Name: paired box 6
  Uniprot ID: P26367
  ENSP ID: ENSP00000368401
MQNSHSGVNQLGGVFVNGRPLPDSTRQKIVELAHSGARPCDISRILQTHADAKVQVLDNQNVSNGCVSKILGRYYETGSIRPRAIGGSKPRVATPEVVSKIAQYKRECPSIFAWEIRDRLLSEGVCTNDNIPSVSSINRVLRNLASEKQQMGADGMYDKLRMLNGQTGSWGTRPGWYPGTSVPGQPTQDGCQQQEGGGENTNSISSNGEDSDEAQMRLQLKRKLQRNRTSFTQEQIEALEKEFERTHYPDVFARERLAAKIDLPEARIQVWFSNRRAKWRREEKLRNQRRQASNTPSHIPISSSFSTSVYQPIPQPTTPVSSFTSGSMLGRTDTALTNTYSALPPMPSFTMANNLPMQPPVPSQTSSYSCMLPTSPSVNGRSYDTYTPPHMQTHMNSQPMGTSGTTSTGLISPGVSVPVQVPGSEPDMSQYWPRLQ

SEQ ID NO: 60903 - protein, 422 aa, Homo sapiens [sequence omitted]

SEQ ID NO: 60904 - protein, 422 aa, Homo sapiens [sequence omitted]

SEQ ID NO: 60905 - protein, 436 aa, Homo sapiens; identical to SEQ ID NO: 60902
  Payload ID: 12182
  Gene Symbol: PAX6
  Gene Name: paired box 6
  Uniprot ID: P26367
  ENSP ID: ENSP00000368410

SEQ ID NO: 60906 - protein, 422 aa, Homo sapiens [sequence omitted]

SEQ ID NO: 60907 - protein, 436 aa, Homo sapiens; identical to SEQ ID NO: 60902
  Payload ID: 12182
  Gene Symbol: PAX6
  Gene Name: paired box 6
  Uniprot ID: P26367
  ENSP ID: ENSP00000368424

SEQ ID NO: 60908 - protein, 422 aa, Homo sapiens [sequence omitted]

SEQ ID NO: 60909 - protein, 61 aa, Homo sapiens
  Payload ID: 12182
  Gene Symbol: PAX6
  Gene Name: paired box 6
  ENSP ID: ENSP00000388132
MQNSHSGVNQLGGVFVNGRPLPDSTRQKIVELAHSGARPCDISRILQTHADAKVQVLDNQN

SEQ ID NO: 60910 - protein, 124 aa, Homo sapiens
  Payload ID: 12182
  Gene Symbol: PAX6
  Gene Name: paired box 6
  ENSP ID: ENSP00000397384
MQNSHSGVNQLGGVFVNGRPLPDSTRQKIVELAHSGARPCDISRILQTHADAKVQVLDNQNVSNGCVSSINRVLRNLASEKQQMGADGMYDKLRMLNGQTGSWGTRPGWYPGTSVPGQPTQDGC

SEQ ID NO: 60911 - protein, 436 aa, Homo sapiens; identical to SEQ ID NO: 60902
  Payload ID: 12182
  Gene Symbol: PAX6
  Gene Name: paired box 6
  Uniprot ID: P26367
  ENSP ID: ENSP00000404100

SEQ ID NO: 60912 - protein, 38 aa, Homo sapiens
  Payload ID: 12182
  Gene Symbol: PAX6
  Gene Name: paired box 6
  ENSP ID: ENSP00000404356
MQNSHSGVNQLGGVFVNGRPLPDSTRQKIVELAHSGAR

SEQ ID NO: 60913 - protein, 57 aa, Homo sapiens
  Payload ID: 12182
  Gene Symbol: PAX6
  Gene Name: paired box 6
  ENSP ID: ENSP00000431585
MQNSHSGVNQLGGVFVNGRPLPDSTRQKIVELAHSGARPCDISRILQVSNGCVSKIL

SEQ ID NO: 60914 - protein, 2 aa, Homo sapiens
  Payload ID: 12182
  Gene Symbol: PAX6
  Gene Name: paired box 6
  ENSP ID: ENSP00000436365
MQ

SEQ ID NO: 60915 - protein, 436 aa, Homo sapiens; identical to SEQ ID NO: 60902
  Payload ID: 12182
  Gene Symbol: PAX6
  Gene Name: paired box 6
  Uniprot ID: P26367
  ENSP ID: ENSP00000480026

SEQ ID NO: 60916 - protein, 520 aa, Homo sapiens
  Payload ID: 12183
  Gene Symbol: PAX7
  Gene Name: paired box 7
  Uniprot ID: P23759
  ENSP ID: ENSP00000364524
MAALPGTVPRMMRPAPGQNYPRTGFPLEVSTPLGQGRVNQLGGVFINGRPLPNHIRHKIVEMAHHGIRPCVISRQLRVSHGCVSKILCRYQETGSIRPGAIGGSKPRQVATPDVEKKIEEYKRENPGMFSWEIRDRLLKDGHCDRSTVPSGLVSSISRVLRIKFGKKEEEDEADKKEDDGEKKAKHSIDGILGDKGNRLDEGSDVESEPDLPLKRKQRRSRTTFTAEQLEELEKAFERTHYPDIYTREELAQRTKLTEARVQVWFSNRRARWRKQAGANQLAAFNHLLPGGFPPTGMPTLPPYQLPDSTYPTTTISQDGGSTVHRPQPLPPSTMHQGGLAAAAAAADTSSAYGARHSFSSYSDSFMNPAAPSNHMNPVSNGLSPQVMSILGNPSAVPPQPQADFSISPLHGGLDSATSISASCSQRADSIKPGDSLPTSQAYCPPTYSTTGYSVDPVAGYQYGQYGQSECLVPWASPVPIPSPTPRASCLFMESYKVVSGWGMSISQMEKLKSSQMEQFT

SEQ ID NO: 60917 - protein, 518 aa, Homo sapiens
  Payload ID: 12183
  Gene Symbol: PAX7
  Gene Name: paired box 7
  Uniprot ID: P23759
  ENSP ID: ENSP00000383502
MAALPGTVPRMMRPAPGQNYPRTGFPLEVSTPLGQGRVNQLGGVFINGRPLPNHIRHKIVEMAHHGIRPCVISRQLRVSHGCVSKILCRYQETGSIRPGAIGGSKPRQVATPDVEKKIEEYKRENPGMFSWEIRDRLLKDGHCDRSTVPSVSSISRVLRIKFGKKEEEDEADKKEDDGEKKAKHSIDGILGDKGNRLDEGSDVESEPDLPLKRKQRRSRTTFTAEQLEELEKAFERTHYPDIYTREELAQRTKLTEARVQVWFSNRRARWRKQAGANQLAAFNHLLPGGFPPTGMPTLPPYQLPDSTYPTTTISQDGGSTVHRPQPLPPSTMHQGGLAAAAAAADTSSAYGARHSFSSYSDSFMNPAAPSNHMNPVSNGLSPQVMSILGNPSAVPPQPQADFSISPLHGGLDSATSISASCSQRADSIKPGDSLPTSQAYCPPTYSTTGYSVDPVAGYQYGQYGQSECLVPWASPVPIPSPTPRASCLFMESYKVVSGWGMSISQMEKLKSSQMEQFT

SEQ ID NO: 60918 - protein, 505 aa, Homo sapiens
  Payload ID: 12183
  Gene Symbol: PAX7
  Gene Name: paired box 7
  Uniprot ID: P23759
  ENSP ID: ENSP00000403389
MAALPGTVPRMMRPAPGQNYPRTGFPLEVSTPLGQGRVNQLGGVFINGRPLPNHIRHKIVEMAHHGIRPCVISRQLRVSHGCVSKILCRYQETGSIRPGAIGGSKPRQVATPDVEKKIEEYKRENPGMFSWEIRDRLLKDGHCDRSTVPSGLVSSISRVLRIKFGKKEEEDEADKKEDDGEKKAKHSIDGILGDKGNRLDEGSDVESEPDLPLKRKQRRSRTTFTAEQLEELEKAFERTHYPDIYTREELAQRTKLTEARVQVWFSNRRARWRKQAGANQLAAFNHLLPGGFPPTGMPTLPPYQLPDSTYPTTTISQDGGSTVHRPQPLPPSTMHQGGLAAAAAAADTSSAYGARHSFSSYSDSFMNPAAPSNHMNPVSNGLSPQVMSILGNPSAVPPQPQADFSISPLHGGLDSATSISASCSQRADSIKPGDSLPTSQAYCPPTYSTTGYSVDPVAGYQYGQYGQTAVDYLAKNVSLSTQRRMKLGEHSAVLGLLPVETGQAY

SEQ ID NO: 60919 - protein, 450 aa, Homo sapiens
  Payload ID: 12184
  Gene Symbol: PAX8
  Gene Name: paired box 8
  Uniprot ID: Q06710
  ENSP ID: ENSP00000263334
MPHNSIRSGHGGLNQLGGAFVNGRPLPEVVRQRIVDLAHQGVRPCDISRQLRVSHGCVSKILGRYYETGSIRPGVIGGSKPKVATPKVVEKIGDYKRQNPTMFAWEIRDRLLAEGVCDNDTVPSVSSINRIIRTKVQQPFNLPMDSCVATKSLSPGHTLIPSSAVTPPESPQSDSLGSTYSINGLLGIAQPGSDKRKMDDSDQDSCRLSIDSQSSSSGPRKHLRTDAFSQHHLEPLECPFERQHYPEAYASPSHTKGEQGLYPLPLLNSTLDDGKATLTPSNTPLGRNLSTHQTYPVVADPHSPFAIKQETPEVSSSSSTPSSLSSSAFLDLQQVGSGVPPFNAFPHAASVYGQFTGQALLSGREMVGPTLPGYPPHIPTSGQGSYASSAIAGMVAGSEYSGNAYGHTPYSSYSEAWRFPNSSLLSSPYYYSSTSRPSAPPTTATAFDHL

SEQ ID NO: 60920 - protein, 321 aa, Homo sapiens
  Payload ID: 12184
  Gene Symbol: PAX8
  Gene Name: paired box 8
  Uniprot ID: Q06710
  ENSP ID: ENSP00000263335
MPHNSIRSGHGGLNQLGGAFVNGRPLPEVVRQRIVDLAHQGVRPCDISRQLRVSHGCVSKILGRYYETGSIRPGVIGGSKPKVATPKVVEKIGDYKRQNPTMFAWEIRDRLLAEGVCDNDTVPSVSSINRIIRTKVQQPFNLPMDSCVATKSLSPGHTLIPSSAVTPPESPQSDSLGSTYSINGLLGIAQPGSDKRKMDDSDQDSCRLSIDSQSSSSGPRKHLRTDAFSQHHLEPLECPFERQHYPEAYASPSHTKGEQGERWWGPRCPDTHPTSPPADRAAMPPLPSQAWWQEVNTLAMPMATPPTPPTARPGASPTPAC

SEQ ID NO: 60921 - protein, 398 aa, Homo sapiens
  Payload ID: 12184
  Gene Symbol: PAX8
  Gene Name: paired box 8
  Uniprot ID: Q06710
  ENSP ID: ENSP00000314750
MPHNSIRSGHGGLNQLGGAFVNGRPLPEVVRQRIVDLAHQGVRPCDISRQLRVSHGCVSKILGRYYETGSIRPGVIGGSKPKVATPKVVEKIGDYKRQNPTMFAWEIRDRLLAEGVCDNDTVPSVSSINRIIRTKVQQPFNLPMDSCVATKSLSPGHTLIPSSAVTPPESPQSDSLGSTYSINGLLGIAQPGSDKRKMDDSDQDSCRLSIDSQSSSSGPRKHLRTDAFSQHHLEPLECPFERQHYPEAYASPSHTKGEQGLYPLPLLNSTLDDGKATLTPSNTPLGRNLSTHQTYPVVAAPPFWICSKSAPGSRPSMPFPMLPPCTGSSRARPSSQGERWWGPRCPDTHPTSPPADRAAMPPLPSQAWWQEVNTLAMPMATPPTPPTARPGASPTPAC

SEQ ID NO: 60922 - protein, 287 aa, Homo sapiens
  Payload ID: 12184
  Gene Symbol: PAX8
  Gene Name: paired box 8
  Uniprot ID: Q06710
  ENSP ID: ENSP00000380768
MPHNSIRSGHGGLNQLGGAFVNGRPLPEVVRQRIVDLAHQGVRPCDISRQLRVSHGCVSKILGRYYETGSIRPGVIGGSKPKVATPKVVEKIGDYKRQNPTMFAWEIRDRLLAEGVCDNDTVPSVSSINRIIRTKVQQPFNLPMDSCVATKSLSPGHTLIPSSAVTPPESPQSDSLGSTYSINGLLGIAQPGSDKRKMDDSDQDSCRLSIDSQSSSSGPRKHLRTDAFSQHHLEPLECPFERQHYPEAYASPSHTKGEQEVNTLAMPMATPPTPPTARPGASPTPAC

SEQ ID NO: 60923 - protein, 450 aa, Homo sapiens; identical to SEQ ID NO: 60919
  Payload ID: 12184
  Gene Symbol: PAX8
  Gene Name: paired box 8
  Uniprot ID: Q06710
  ENSP ID: ENSP00000395498

SEQ ID NO: 60924 - protein, 116 aa, Homo sapiens
  Payload ID: 12184
  Gene Symbol: PAX8
  Gene Name: paired box 8
  ENSP ID: ENSP00000451213
MDSCVATKSLSPGHTLIPSSAVTPPESPQSDSLGSTYSINGLLGIAQPGSDKRKMDDSDQDSCRLSIDSQSSSSGPRKHLRTDAFSQHHLEPLECPFERQHYPEAYASPSHTKGEQ

SEQ ID NO: 60925 - protein, 173 aa, Homo sapiens
  Payload ID: 12184
  Gene Symbol: PAX8
  Gene Name: paired box 8
  ENSP ID: ENSP00000451240
  MOD_RES (1)..(1): Any amino acid
XSSGPRKHLRTDAFSQHHLEPLECPFERQHYPEAYASPSHTKGEQGLYPLPLLNSTLDDGKATLTPSNTPLGRNLSTHQTYPVVAGREMVGPTLPGYPPHIPTSGQGSYASSAIAGMVAGSEYSGNAYGHTPYSSYSEAWRFPNSSLLSSPYYYSSTSRPSAPPTTATAFDHL

SEQ ID NO: 60926 - protein, 85 aa, Homo sapiens
  Payload ID: 12184
  Gene Symbol: PAX8
  Gene Name: paired box 8
  ENSP ID: ENSP00000451618
MVGPTLPGYPPHIPTSGQGSYASSAIAGMVAGSEYSGNAYGHTPYSSYSEAWRFPNSSLLSSPYYYSSTSRPSAPPTTATAFDHL

SEQ ID NO: 60927 - protein, 98 aa, Homo sapiens
  Payload ID: 12184
  Gene Symbol: PAX8
  Gene Name: paired box 8
  ENSP ID: ENSP00000452547
  MOD_RES (1)..(1): Any amino acid
XHAASVYGQFTGQALLSGREMVGPTLPGYPPHIPTSGQGSYASSAIAGMVAGKERAGRKGSTAKRKYWSKEVNTLAMPMATPPTPPTARPGASPTPAC

SEQ ID NO: 60928 - protein, 341 aa, Homo sapiens
  Payload ID: 12185
  Gene Symbol: PAX9
  Gene Name: paired box 9
  Uniprot ID: P55771
  ENSP ID: ENSP00000355245
MEPAFGEVNQLGGVFVNGRPLPNAIRLRIVELAQLGIRPCDISRQLRVSHGCVSKILARYNETGSILPGAIGGSKPRVTTPTVVKHIRTYKQRDPGIFAWEIRDRLLADGVCDKYNVPSVSSISRILRNKIGNLAQQGHYDSYKQHQPTPQPALPYNHIYSYPSPITAAAAKVPTPPGVPAIPGSVAMPRTWPSSHSVTDILGIRSITDQVSDSSPYHSPKVEEWSSLGRNNFPAAAPHAVNGLEKGALEQEAKYGQAPNGLPAVGSFVSASSMAPYPTPAQVSPYMTYSAAPSGYVAGHGWQHAGGTSLSPHNCDIPASLAFKGMQAAREGSHSVTASAL

SEQ ID NO: 60929 - protein, 341 aa, Homo sapiens; identical to SEQ ID NO: 60928
  Payload ID: 12185
  Gene Symbol: PAX9
  Gene Name: paired box 9
  Uniprot ID: P55771
  ENSP ID: ENSP00000384817

SEQ ID NO: 60930 - protein, 96 aa, Homo sapiens
  Payload ID: 12185
  Gene Symbol: PAX9
  Gene Name: paired box 9
  ENSP ID: ENSP00000450434
MPRTWPSSHSVTDILGIRSITDQVSDSSPYHSPKVEEWSSLGRNNFPAAAPHAVNGLEKGALEQEAKHQMVSQLWAVLCQHPAWLLTLPQPKCRLT

SEQ ID NO: 60931 - protein, 303 aa, Homo sapiens
  Payload ID: 12186
  Gene Symbol: PILRA
  Gene Name: paired immunoglobin-like type 2 receptor alpha
  Uniprot ID: Q9UKJ1
  ENSP ID: ENSP00000198536
MGRPLLLPLLPLLLPPAFLQPSGSTGSGPSYLYGVTQPKHLSASMGGSVEIPFSFYYPWELATAPDVRISWRRGHFHRQSFYSTRPPSIHKDYVNRLFLNWTEGQKSGFLRISNLQKQDQSVYFCRVELDTRSSGRQQWQSIEGTKLSITQAVTTTTQRPSSMTTTWRLSSTTTTTGLRVTQGKRRSDSWHISLETAVGVAVAVTVLGIMILGLICLLRWRRRKGQQRTKATTPAREPFQNTEEPYENIRNEGQNTDPKLNPKDDGIVYASLALSSSTSPRAPPSHRPLKSPQNETLYSVLKA

SEQ ID NO: 60932 - protein, 230 aa, Homo sapiens
  Payload ID: 12186
  Gene Symbol: PILRA
  Gene Name: paired immunoglobin-like type 2 receptor alpha
  Uniprot ID: Q9UKJ1
  ENSP ID: ENSP00000340109
MGRPLLLPLLPLLLPPAFLQPSGSTGSGPSYLYGVTQPKHLSASMGGSVEIPFSFYYPWELATAPDVRISWRRGHFHRQSFYSTRPPSIHKDYVNRLFLNWTEGQKSGFLRISNLQKQDQSVYFCRVELDTRSSGRQQWQSIEGTKLSITQGQQRTKATTPAREPFQNTEEPYENIRNEGQNTDPKLNPKDDGIVYASLALSSSTSPRAPPSHRPLKSPQNETLYSVLKA

SEQ ID NO: 60933 - protein, 175 aa, Homo sapiens
  Payload ID: 12186
  Gene Symbol: PILRA
  Gene Name: paired immunoglobin-like type 2 receptor alpha
  Uniprot ID: Q9UKJ1
  ENSP ID: ENSP00000377569
MGRPLLLPLLPLLLPPAFLQPSGSTGSGPSYLYGVTQPKHLSASMGGSVEIPFSFYYPWELATAPDVRISWRRGHFHRQSFYSTRPPSIHKDYVNRLFLNWTEGQKSGFLRISNLQKQDQSVYFCRVELDTRSSGRQQWQSIEGTKLSITQGNPSKTQRSHMRISGMKDKIQIPS

SEQ ID NO: 60934 - protein, 226 aa, Homo sapiens
  Payload ID: 12186
  Gene Symbol: PILRA
  Gene Name: paired immunoglobin-like type 2 receptor alpha
  ENSP ID: ENSP00000390026
MGRPLLLPLLPLLLPPAFLQPSGSTGSGPSYLYGVTQPKHLSASMGGSVEIPFSFYYPWELATAPDVRISWRRGHFHRQSFYSTRPPSIHKDYVNRLFLNWTEGQKSGFLRISNLQKQDQSVYFCRVELDTRSSGRQQWQSIEGTKLSITQGQQRTKATTPAREPFQNTEEPYENIRNEGQNTDPKLNPKLHLTQSTSQPPSPQEPPERDPVLCLKGLTNGQPSQD

SEQ ID NO: 60935 - protein, 166 aa, Homo sapiens
  Payload ID: 12186
  Gene Symbol: PILRA
  Gene Name: paired immunoglobin-like type 2 receptor alpha
  ENSP ID: ENSP00000415111
MGRPLLLPLLPLLLPPAFLQPSGSTGSGPSYLYGVTQPKHLSASMGGSVEIPFSFYYPWELATAPDVRISWRRGHFHRQSFYSTRPPSIHKDYVNRLFLNWTEGQKSGFLRISNLQKQDQSVYFCRVELDTRSSGRQQWQSIEGTKLSITQGQQRTKATTPAREPF

SEQ ID NO: 60936 - protein, 127 aa, Homo sapiens
  Payload ID: 12187
  Gene Symbol: PILRB
  Gene Name: paired immunoglobin-like type 2 receptor beta
  ENSP ID: ENSP00000389856
MGRPLLLPLLLLLQPPAFLQPGGSTGSGPSYLYGVTQPKHLSASMGGSVEIPFSFYYPWELAIVPNVRISWRRGHFHGQSFYSTRPPSIHKDYVNRLFLNWTEGQESGFLRISNLRKEDQSVYFCRV

SEQ ID NO: 60937 - protein, 227 aa, Homo sapiens
  Payload ID: 12187
  Gene Symbol: PILRB
  Gene Name: paired immunoglobin-like type 2 receptor beta
  Uniprot ID: Q9UKJ0
  ENSP ID: ENSP00000391748
MGRPLLLPLLLLLQPPAFLQPGGSTGSGPSYLYGVTQPKHLSASMGGSVEIPFSFYYPWELAIVPNVRISWRRGHFHGQSFYSTRPPSIHKDYVNRLFLNWTEGQESGFLRISNLRKEDQSVYFCRVELDTRRSGRQQLQSIKGTKLTITQAVTTTTTWRPSSTTTIAGLRVTESKGHSESWHLSLDTAIRVALAVAVLKTVILGLLCLLLLWWRRRKGSRAPSSDF

SEQ ID NO: 60938 - protein, 107 aa, Homo sapiens
  Payload ID: 12187
  Gene Symbol: PILRB
  Gene Name: paired immunoglobin-like type 2 receptor beta
  ENSP ID: ENSP00000402073
MGRASYGGSPVGHQSSSDHPRAKTCRSPVRDGPRTLCGVPTVALSLHFLREASSGSRTCGRRTSLCTSAKSSWTYRSGRLSWQSIKGTHLTITQALRQPLHRAPLLP

SEQ ID NO: 60939 - protein, 127 aa, Homo sapiens; identical to SEQ ID NO: 60936
  Payload ID: 12187
  Gene Symbol: PILRB
  Gene Name: paired immunoglobin-like type 2 receptor beta
  ENSP ID: ENSP00000403757

SEQ ID NO: 60940 - protein, 127 aa, Homo sapiens; identical to SEQ ID NO: 60936
  Payload ID: 12187
  Gene Symbol: PILRB
  Gene Name: paired immunoglobin-like type 2 receptor beta
  ENSP ID: ENSP00000404321

SEQ ID NO: 60941 - protein, 121 aa, Homo sapiens
  Payload ID: 12187
  Gene Symbol: PILRB
  Gene Name: paired immunoglobin-like type 2 receptor beta
  ENSP ID: ENSP00000408425
MGRPLLLPLLLLLQPPAFLQPGGSTGSGPSYLYGVTQPKHLSASMGGSVEIPFSFYYPWELAIVPNVRISWRRGHFHGQSFYSTRPPSIHKDYVNRLFLNWTEGQESGFLRISNLRKEDQS

SEQ ID NO: 60942 - protein, 46 aa, Homo sapiens
  Payload ID: 12187
  Gene Symbol: PILRB
  Gene Name: paired immunoglobin-like type 2 receptor beta
  ENSP ID: ENSP00000409411
MGRPLLLPLLLLLQPPAFLQPEGQESGFLRISNLRKEDQSVYFCRV

SEQ ID NO: 60943 - protein, 127 aa, Homo sapiens; identical to SEQ ID NO: 60936
  Payload ID: 12187
  Gene Symbol: PILRB
  Gene Name: paired immunoglobin-like type 2 receptor beta
  ENSP ID: ENSP00000411261

SEQ ID NO: 60944 - protein, 271 aa, Homo sapiens
  Payload ID: 12187
  Gene Symbol: PILRB
  Gene Name: paired immunoglobin-like type 2 receptor beta
  Uniprot ID: Q9UKJ0
  ENSP ID: ENSP00000415775
MGRASYGGSPVGHQSSSDHPRAKTCRSPVRDGPRTLCGVPTVALSLHFLREASSGSRTCGRRTSLCTSAKSSWTYRSGRLSWQSIKGTHLTITQALRQPLHRAPLLPGQLCWSPRPLEKNKAMGRPLLLPLLLLLQPPAFLQPGLCEPALSELDRGSGERLPQDLKPAEGGPVCVFLPSRAGHPEIREAAVAVHQGDQTHHHPGCHNHHHLEAQQHNHHSRPQGHRKQRALRIMAPKSGHCHQGCIGCRCAQNCHFGTAVPPPPVVEEKER

SEQ ID NO: 60945 - protein, 60 aa, Homo sapiens
  Payload ID: 12187
  Gene Symbol: PILRB
  Gene Name: paired immunoglobin-like type 2 receptor beta
  ENSP ID: ENSP00000416342
MGRPLLLPLLLLLQPPAFLQPGLCEPALSELDRGSGERLPQDLKPAEGGPVCVFLPSRAG

SEQ ID NO: 60946 - protein, 138 aa, Homo sapiens
  Payload ID: 12187
  Gene Symbol: PILRB
  Gene Name: paired immunoglobin-like type 2 receptor beta
  ENSP ID: ENSP00000476607
MGRPLLLPLLLLLQPPAFLQPGGSTGSGPSYLYGVTQPKHLSASMGGSVEIPFSFYYPWELAIVPNVRISWRRGHFHGQSFYSTRPPSIHKDYVNRLFLNWTEGQESGFLRISNLRKEDQSVYFCRVELDTRRSGRQQ

SEQ ID NO: 60947 - protein, 227 aa, Homo sapiens; identical to SEQ ID NO: 60937
  Payload ID: 12187
  Gene Symbol: PILRB
  Gene Name: paired immunoglobin-like type 2 receptor beta
  Uniprot ID: Q9UKJ0
  ENSP ID: ENSP00000477365

SEQ ID NO: 60948 - protein, 245 aa, Homo sapiens
  Payload ID: 12188
  Gene Symbol: PRRX1
  Gene Name: paired related homeobox 1
  Uniprot ID: P54821
  ENSP ID: ENSP00000239461
MTSSYGHVLERQPALGGRLDSPGNLDTLQAKKNFSVSHLLDLEEAGDMVAAQADENVGEAGRSLLESPGLTSGSDTPQQDNDQLNSEEKKKRKQRRNRTTFNSSQLQALERVFERTHYPDAFVREDLARRVNLTEARVQVWFQNRRAKFRRNERAMLANKNASLLKSYSGDVTAVEQPIVPRPAPRPTDYLSWGTASPYSAMATYSATCANNSPAQGINMANSIANLRLKAKEYSLQRNQVPTVN

SEQ ID NO: 60949 - protein, 217 aa, Homo sapiens
  Payload ID: 12188
  Gene Symbol: PRRX1
  Gene Name: paired related homeobox 1
  Uniprot ID: P54821
  ENSP ID: ENSP00000356734
MTSSYGHVLERQPALGGRLDSPGNLDTLQAKKNFSVSHLLDLEEAGDMVAAQADENVGEAGRSLLESPGLTSGSDTPQQDNDQLNSEEKKKRKQRRNRTTFNSSQLQALERVFERTHYPDAFVREDLARRVNLTEARVQVWFQNRRAKFRRNERAMLANKNASLLKSYSGDVTAVEQPIVPRPAPRPTDYLSWGTASPYRSSSLPRCCLHEGLHNGF

SEQ ID NO: 60950 - protein, 200 aa, Homo sapiens
  Payload ID: 12188
  Gene Symbol: PRRX1
  Gene Name: paired related homeobox 1
  ENSP ID: ENSP00000450762
MTSSYGHVLERQPALGGRLDSPGNLDTLQAKKNFSVSHLLDLEEAGDMVAAQADENVGEAGRSLLESPGLTSGSDTPQQDNDQLNSEEKKKRKQRRNRTTFNSSQLQALERVFERTHYPDAFVREDLARRVNLTEARVQVWFQNRRAKFRRNERAMLANKNASLLKSYSGDVTAVEQPIVPRPAPRPTDYLSWGTASPYR

SEQ ID NO: 60951 - protein, 253 aa, Homo sapiens
  Payload ID: 12189
  Gene Symbol: PRRX2
  Gene Name: paired related homeobox 2
  Uniprot ID: Q99811
  ENSP ID: ENSP00000361547
MDSAAAAFALDKPALGPGPPPPPPALGPGDCAQARKNFSVSHLLDLEEVAAAGRLAARPGARAEAREGAAREPSGGSSGSEAAPQDGECPSPGRGSAAKRKKKQRRNRTTFNSSQLQALERVFERTHYPDAFVREELARRVNLSEARVQVWFQNRRAKFRRNERAMLASRSASLLKSYSQEAAIEQPVAPRPTALSPDYLSWTASSPYSTVPPYSPGSSGPATPGVNMANSIASLRLKAKEFSLHHSQVPTVN

SEQ ID NO: 60952 - protein, 284 aa, Homo sapiens
  Payload ID: 12190
  Gene Symbol: PHOX2A
  Gene Name: paired-like homeobox 2a
  Uniprot ID: O14813
  ENSP ID: ENSP00000298231
MDYSYLNSYDSCVAAMEASAYGDFGACSQPGGFQYSPLRPAFPAAGPPCPALGSSNCALGALRDHQPAPYSAVPYKFFPEPSGLHEKRKQRRIRTTFTSAQLKELERVFAETHYPDIYTREELALKIDLTEARVQVWFQNRRAKFRKQERAASAKGAAGAAGAKKGEARCSSEDDDSKESTCSPTPDSTASLPPPPAPGLASPRLSPSPLPVALGSGPGPGPGPQPLKGALWAGVAGGGGGGPGAGAAELLKAWQPAESGPGPFSGVLSSFHRKPGPALKTNLF

SEQ ID NO: 60953 - protein, 85 aa, Homo sapiens
  Payload ID: 12190
  Gene Symbol: PHOX2A
  Gene Name: paired-like homeobox 2a
  ENSP ID: ENSP00000444845
  MOD_RES (1)..(1): Any amino acid
XERVFAETHYPDIYTREELALKIDLTEARGALWAGVAGGGGGGPGAGAAELLKAWQPAESGPGPFSGVLSSFHRKPGPALKTNLF

SEQ ID NO: 60954 - protein, 314 aa, Homo sapiens
  Payload ID: 12191
  Gene Symbol: PHOX2B
  Gene Name: paired-like homeobox 2b
  Uniprot ID: Q99453
  ENSP ID: ENSP00000226382
MYKMEYSYLNSSAYESCMAGMDTSSLASAYADFSSCSQASGFQYNPIRTTFGATSGCPSLTPGSCSLGTLRDHQSSPYAAVPYKLFTDHGGLNEKRKQRRIRTTFTSAQLKELERVFAETHYPDIYTREELALKIDLTEARVQVWFQNRRAKFRKQERAAAAAAAAAKNGSSGKKSDSSRDDESKEAKSTDPDSTGGPGPNPNPTPSCGANGGGGGGPSPAGAPGAAGPGGPGGEPGKGGAAAAAAAAAAAAAAAAAAAAGGLAAAGGPGQGWAPGPGPITSIPDSLGGPFASVLSSLQRPNGAKAALVKSSMF

SEQ ID NO: 60955 - protein, 314 aa, Homo sapiens
  Payload ID: 12192
  Gene Symbol: PITX1
  Gene Name: paired-like homeodomain 1
  Uniprot ID: P78337
  ENSP ID: ENSP00000265340
MDAFKGGMSLERLPEGLRPPPPPPHDMGPAFHLARPADPREPLENSASESSDTELPEKERGGEPKGPEDSGAGGTGCGGADDPAKKKKQRRQRTHFTSQQLQELEATFQRNRYPDMSMREEIAVWTNLTEPRVRVWFKNRRAKWRKRERNQQLDLCKGGYVPQFSGLVQPYEDVYAAGYSYNNWAAKSLAPAPLSTKSFTFFNSMSPLSSQSMFSAPSSISSMTMPSSMGPGAVPGMPNSGLNNINNLTGSSLNSAMSPGACPYGTPASPYSVYRDTCNSSLASLRLKSKQHSSFGYGGLQGPASGLNACQYNS

SEQ ID NO: 60956 - protein, 130 aa, Homo sapiens
  Payload ID: 12192
  Gene Symbol: PITX1
  Gene Name: paired-like homeodomain 1
  ENSP ID: ENSP00000422908
MDAFKGGMSLERLPEGLRPPPPPPHDMGPAFHLARPADPREPLENSASESSDTELPEKERGGEPKGPEDSGAGGTGCGGADDPAKKKKQRRQRTHFTSQQLQELEATFQRNRYPDMSMREEIAVWTNLTE

SEQ ID NO: 60957 - protein, 114 aa, Homo sapiens
  Payload ID: 12192
  Gene Symbol: PITX1
  Gene Name: paired-like homeodomain 1
  ENSP ID: ENSP00000423624
MDAFKGGMSLERLPEGLRPPPPPPHDMGPAFHLARPADPREPLENSASESSDTELPEKERGGEPKGPEDSGAGGTGCGGADDPAKKKKQRRQRTHFTSQQLQELEATFQRNRYP

SEQ ID NO: 60958 - protein, 314 aa, Homo sapiens; identical to SEQ ID NO: 60955
  Payload ID: 12192
  Gene Symbol: PITX1
  Gene Name: paired-like homeodomain 1
  Uniprot ID: P78337
  ENSP ID: ENSP00000427542

SEQ ID NO: 60959 - protein, 208 aa, Homo sapiens
  Payload ID: 12192
  Gene Symbol: PITX1
  Gene Name: paired-like homeodomain 1
  ENSP ID: ENSP00000451199
  MOD_RES (1)..(1): Any amino acid
XRSRDPAHVRGRSPEQPGSGPRPGSCASPSALPFFVRAGAFFQQRTGPAGGRRGQWGSESAAQRSRPGSGGAPSSPVWAPLLRSFLNTQLNVSLHFLKKERGGEPKGPEDSGAGGTGCGGADDPAKKKKQRRQRTHFTSQQLQELEATFQRNRYPDMSMREEIAVWTNLTEPRVRVWFKNRRAKWRKRERNQQLDLCKGGYVPQFSGL

SEQ ID NO: 60960 - protein, 324 aa, Homo sapiens
  Payload ID: 12193
  Gene Symbol: PITX2
  Gene Name: paired-like homeodomain 2
  Uniprot ID: Q99697
  ENSP ID: ENSP00000304169
MNCMKGPLHLEHRAAGTKLSAVSSSSCHHPQPLAMASVLAPGQPRSLDSSKHRLEVHTISDTSSPEAAEKDKSQQGKNEDVGAEDPSKKKRQRRQRTHFTSQQLQELEATFQRNRYPDMSTREEIAVWTNLTEARVRVWFKNRRAKWRKRERNQQAELCKNGFGPQFNGLMQPYDDMYPGYSYNNWAAKGLTSASLSTKSFPFFNSMNVNPLSSQSMFSPPNSISSMSMSSSMVPSAVTGVPGSSLNSLNNLNNLSSPSLNSAVPTPACPYAPPTPPYVYRDTCNSSLASLRLKAKQHSSFGYASVQNPASNLSACQYAVDRPV

SEQ ID NO: 60961 - protein, 317 aa, Homo sapiens
  Payload ID: 12193
  Gene Symbol: PITX2
  Gene Name: paired-like homeodomain 2
  Uniprot ID: Q99697
  ENSP ID: ENSP00000347004
METNCRKLVSACVQLGVQPAAVECLFSKDSEIKKVEFTDSPESRKEAASSKFFPRQHPGANEKDKSQQGKNEDVGAEDPSKKKRQRRQRTHFTSQQLQELEATFQRNRYPDMSTREEIAVWTNLTEARVRVWFKNRRAKWRKRERNQQAELCKNGFGPQFNGLMQPYDDMYPGYSYNNWAAKGLTSASLSTKSFPFFNSMNVNPLSSQSMFSPPNSISSMSMSSSMVPSAVTGVPGSSLNSLNNLNNLSSPSLNSAVPTPACPYAPPTPPYVYRDTCNSSLASLRLKAKQHSSFGYASVQNPASNLSACQYAVDRPV

SEQ ID NO: 60962 - protein, 271 aa, Homo sapiens
  Payload ID: 12193
  Gene Symbol: PITX2
  Gene Name: paired-like homeodomain 2
  Uniprot ID: Q99697
  ENSP ID: ENSP00000347192
METNCRKLVSACVQLEKDKSQQGKNEDVGAEDPSKKKRQRRQRTHFTSQQLQELEATFQRNRYPDMSTREEIAVWTNLTEARVRVWFKNRRAKWRKRERNQQAELCKNGFGPQFNGLMQPYDDMYPGYSYNNWAAKGLTSASLSTKSFPFFNSMNVNPLSSQSMFSPPNSISSMSMSSSMVPSAVTGVPGSSLNSLNNLNNLSSPSLNSAVPTPACPYAPPTPPYVYRDTCNSSLASLRLKAKQHSSFGYASVQNPASNLSACQYAVDRPV

SEQ ID NO: 60963 - protein, 174 aa, Homo sapiens
  Payload ID: 12193
  Gene Symbol: PITX2
  Gene Name: paired-like homeodomain 2
  ENSP ID: ENSP00000378095
METNCRKLVSACVQLGVQPAAVECLFSKDSEIKKVEFTDSPESRKEAASSKFFPRQHPGANGLVQESSGQMEKEGAQPAGRAMQEWLRAAVQWAHAALRRHVPRLFLQQLGRQGPYIRLPIHQELPLLQLYERQPPVITEHVFPTQLYLVHEHVVQHGALSSDRRPGLQSQQPE

SEQ ID NO: 60964 - protein, 317 aa, Homo sapiens; identical to SEQ ID NO: 60961
  Payload ID: 12193
  Gene Symbol: PITX2
  Gene Name: paired-like homeodomain 2
  Uniprot ID: Q99697
  ENSP ID: ENSP00000378097

SEQ ID NO: 60965 - protein, 290 aa, Homo sapiens
  Payload ID: 12193
  Gene Symbol: PITX2
  Gene Name: paired-like homeodomain 2
  ENSP ID: ENSP00000421454
METNCRKLVSACVQLGVQPAAVECLFSKDSEIKKVEFTDSPESRKEAASSKFFPRQHPGANEKDKSQQGKNEDVGAEDPSKKKRQRRQRTHFTSQQLQELEATFQRNRYPDMSTREEIAVWTNLTEARVRVWFKNRRAKWRKRERNQQAELCKNGFGPQFNGLMQPYDDMYPGYSYNNWAAKGLTSASLSTKSFPFFNSMNVNPLSSQSMFSPPNSISSMSMSSSMVPSAVTGVPGSSLNSLNNLNNLSSPSLNSAVPTPACPYAPPTPPYVYRDTCNSSLASLRLKAKQ

SEQ ID NO: 60966 - protein, 118 aa, Homo sapiens
  Payload ID: 12193
  Gene Symbol: PITX2
  Gene Name: paired-like homeodomain 2
  ENSP ID: ENSP00000424142
METNCRKLVSACVQLEKDKSQQGKNEDVGAEDPSKKKRQRRQRTHFTSQQLQELEATFQRNRYPDMSTREEIAVWTNLTEARVRVWFKNRRAKWRKRERNQQAELCKNGFGPQFNGLM

SEQ ID NO: 60967 - protein, 264 aa, Homo sapiens
  Payload ID: 12193
  Gene Symbol: PITX2
  Gene Name: paired-like homeodomain 2
  ENSP ID: ENSP00000475617
MNCMKGPLHLEHRAAGTKLSAVSSSSCHHPQPLAMASVLAPGQPRSLDSSKHRLEVHTISDTSSPEAAEKDKSQQGKNEDVGAEDPSKKKRQRRQRTHFTSQQLQELEATFQRNRYPDMSTREEIAVWTNLTEARVRVGASTESGRDGGRMLWRYRPSRPGENVEGSAAWEGAGGAQLCKGRRPRGGLVARLQFPLRGRQDCRPGSGSQSGTGSLPRHPAISRAGLHGQSPAQDIVFLACSCQSRANKIPTRPRAANRLQPVSL

SEQ ID NO: 60968 - protein, 317 aa, Homo sapiens; identical to SEQ ID NO: 60961
  Payload ID: 12193
  Gene Symbol: PITX2
  Gene Name: paired-like homeodomain 2
  Uniprot ID: Q99697
  ENSP ID: ENSP00000481951

SEQ ID NO: 60969 - protein, 317 aa, Homo sapiens; identical to SEQ ID NO: 60961
  Payload ID: 12193
  Gene Symbol: PITX2
  Gene Name: paired-like homeodomain 2
  Uniprot ID: Q99697
  ENSP ID: ENSP00000484763

SEQ ID NO: 60970 - protein, 271 aa, Homo sapiens; identical to SEQ ID NO: 60962
  Payload ID: 12193
  Gene Symbol: PITX2
  Gene Name: paired-like homeodomain 2
  Uniprot ID: Q99697
  ENSP ID: ENSP00000484909

SEQ ID NO: 60971 - protein, 302 aa, Homo sapiens
  Payload ID: 12194
  Gene Symbol: PITX3
  Gene Name: paired-like homeodomain 3
  Uniprot ID: O75364
  ENSP ID: ENSP00000359019
MEFGLLSEAEARSPALSLSDAGTPHPQLPEHGCKGQEHSDSEKASASLPGGSPEDGSLKKKQRRQRTHFTSQQLQELEATFQRNRYPDMSTREEIAVWTNLTEARVRVWFKNRRAKWRKRERSQQAELCKGSFAAPLGGLVPPYEEVYPGYSYGNWPPKALAPPLAAKTFPFAFNSVNVGPLASQPVFSPPSSIAASMVPSAAAAPGTVPGPGALQGLGGGPPGLAPAAVSSGAVSCPYASAAAAAAAAASSPYVYRDPCNSSLASLRLKAKQHASFSYPAVHGPPPAANLSPCQYAVERPV

SEQ ID NO: 60972 - protein, 302 aa, Homo sapiens; identical to SEQ ID NO: 60971
  Payload ID: 12194
  Gene Symbol: PITX3
  Gene Name: paired-like homeodomain 3
  Uniprot ID: O75364
  ENSP ID: ENSP00000439383

SEQ ID NO: 60973 - protein, 392 aa, Homo sapiens
  Payload ID: 12195
  Gene Symbol: PAK1IP1
  Gene Name: PAK1 interacting protein 1
  Uniprot ID: Q9NWT1
  ENSP ID: ENSP00000368887
MELVAGCYEQVLFGFAVHPEPEACGDHEQWTLVADFTHHAHTASLSAVAVNSRFVVTGSKDETIHIYDMKKKIEHGALVHHSGTITCLKFYGNRHLISGAEDGLICIWDAKKWECLKSIKAHKGQVTFLSIHPSGKLALSVGTDKTLRTWNLVEGRSAFIKNIKQNAHIVEWSPRGEQYVVIIQNKIDIYQLDTASISGTITNEKRISSVKFLSESVLAVAGDEEVIRFFDCDSLVCLCEFKAHENRVKDMFSFEIPEHHVIVSASSDGFIKMWKLKQDKKVPPSLLCEINTNARLTCLGVWLDKVADMKESLPPAAEPSPVSKEQSKIGKKEPGDTVHKEEKRSKPNTKKRGLTGDSKKATKESGLISTKKRKMVEMLEKKRKKKKIKTMQ

SEQ ID NO: 60974 - protein, 1106 aa, Homo sapiens
  Payload ID: 12196
  Gene Symbol: PALLD
  Gene Name: palladin, cytoskeletal associated protein
  Uniprot ID: Q8WX93
  ENSP ID: ENSP00000261509
MSGTSSHESFYDSLSDMQEESKNTDFFPGLSAFLSQEEINKSLDLARRAIADSETEDFDSEKEISQIFSTSPASLCEHPSHKETKLGEHASRRPQDNRSTPVQPLAEKQTKSISSPVSKRKPAMSPLLTRPSYIRSLRKAEKRGAKTPSTNVKPKTPHQRKGGPQSQLCDKAANLIEELTSIFKAAKPRNRSPNGESSSPDSGYLSPKNQPSALLSASASQSPMEDQGEMEREVKSPGARHCYQDNQDLAVPHNRKSHPQPHSALHFPAAPRFIQKLRSQEVAEGSRVYLECRVTGNPTPRVRWFCEGKELHNTPDIQIHCEGGDLHTLIIAEAFEDDTGRYTCLATNPSGSDTTSAEVFIEGASSTDSDSESLAFKSRAGAMPQAQKKTTSVSLTIGSSSPKTGVTTAVIQPLSVPVQQVHSPTSYLCRPDGTTTAYFPPVFTKELQNTAVAEGQVVVLECRVRGAPPLQVQWFRQGSEIQDSPDFRILQKKPRSTAEPEEICTLVIAETFPEDAGIFTCSARNDYGSATSTAQLVVTSANTENCSYESMGESNNDHFQHFPPPPPILETSSLELASKKPSEIQQVNNPELGLSRAALQMQFNAAERETNGVHPSRGVNGLINGKANSNKSLPTPAVLLSPTKEPPPLLAKPKLGFPKKASRTARIASDEEIQGTKDAVIQDLERKLRFKEDLLNNGQPRLTYEERMARRLLGADSATVFNIQEPEEETANQEYKVSSCEQRLISEIEYRLERSPVDESGDEVQYGDVPVENGMAPFFEMKLKHYKIFEGMPVTFTCRVAGNPKPKIYWFKDGKQISPKSDHYTIQRDLDGTCSLHTTASTLDDDGNYTIMAANPQGRISCTGRLMVQAVNQRGRSPRSPSGHPHVRRPRSRSRDSGDENEPIQERFFRPHFLQAPGDLTVQEGKLCRMDCKVSGLPTPDLSWQLDGKPVRPDSAHKMLVRENGVHSLIIEPVTSRDAGIYTCIATNRAGQNSFSLELVVAAKEAHKPPVFIEKLQNTGVADGYPVRLECRVLGVPPPQIFWKKENESLTHSTDRVSMHQDNHGYICLLIQGATKEDAGWYTVSAKNEAGIVSCTARLDVYISRH

SEQ ID NO: 60975 - protein, 164 aa, Homo sapiens
  Payload ID: 12196
  Gene Symbol: PALLD
  Gene Name: palladin, cytoskeletal associated protein
  ENSP ID: ENSP00000377327
MARRLLGADSATVFNIQEPEEETANQEYKVSSCEQRLISEIEYRLERSPVDESGDEVQYGDVPVENGMAPFFEMKLKHYKIFEGMPVTFTCRVAGNPKPKIYWFKDGKQISPKSDHYTIQRDLDGTCSLHTTASTLDDDGNYTIMAANPQGRISCTGRLMVQAV

SEQ ID NO: 60976 - protein, 71 aa, Homo sapiens
  Payload ID: 12196
  Gene Symbol: PALLD
  Gene Name: palladin, cytoskeletal associated protein
  ENSP ID: ENSP00000422016
MPQAQKKTTSVSLTIGSSSPKTGVTTAVIQPLSVPVQQVHSPTSYLCRPDGTTTAYFPPVFTKELQNTAVA

SEQ ID NO: 60977 - protein, 90 aa, Homo sapiens
  Payload ID: 12196
  Gene Symbol: PALLD
  Gene Name: palladin, cytoskeletal associated protein
  ENSP ID: ENSP00000422135
MARRLLGADSATVFNIQEPEEETANQEYKVSSCEQRLISEIEYRLERSPVDESGDEVQYGDVPVENGMAPFFEMKLKHYKIFEGMPVTFT

SEQ ID NO: 60978 - protein, 512 aa, Homo sapiens
  Payload ID: 12196
  Gene Symbol: PALLD
  Gene Name: palladin, cytoskeletal associated protein
  ENSP ID: ENSP00000423063
KNTDFFPGLSAFLSQEEINKSLDLARRAIADSETEDFDSEKEISQIFSTSPASLCEHPSHKETKLGEHASRRPQDNRSTPVQPLAEKQTKSISSPVSKRKPAMSPLLTRPSYIRSLRKAEKRGAKTPSTNVKPKTPHQRKGGPQSQLCDKAANLIEELTSIFKAAKPRNRSPNGESSSPDSGYLSPKNQPSALLSASASQSPMEDQGEMEREVKSPGARHCYQDNQDLAVPHNRKSHPQPHSALHFPAAPRFIQKLRSQEVAEGSRVYLECRVTGNPTPRVRWFCEGKELHNTPDIQIHCEGGDLHTLIIAEAFEDDTGRYTCLATNPSGSDTTSAEVFIEGASSTDSDSESLAFKSRAGAMPQAQKKTTSVSLTIGSSSPKTGVTTAVIQPLSVPVQQVHSPTSYLCRPDGTTTAYFPPVFTKELQNTAVAEGQVVVLECRVRGAPPLQVQWFRQGSEIQDSPDFRILQKKPRSTAEPDVLYVFVRVRCHQMKIQYYNLAHLISSWLSSFL

SEQ ID NO: 60979 - protein, 28 aa, Homo sapiens
  Payload ID: 12196
  Gene Symbol: PALLD
  Gene Name: palladin, cytoskeletal associated protein
  ENSP ID: ENSP00000423640
MSGTSSHESFYDSLSDMQEESKNTDFFP

SEQ ID NO: 60980 - protein, 672 aa, Homo sapiens
  Payload ID: 12196
  Gene Symbol: PALLD
  Gene Name: palladin, cytoskeletal associated protein
  Uniprot ID: Q8WX93
  ENSP ID: ENSP00000424016
MSALASRSAPAMQSSGSFNYARPKQFIAAQNLGPASGHGTPASSPSSSSLPSPMSPTPRQFGRAPVPPFAQPFGAEPEAPWGSSSPSPPPPPPPVFSPTAAFPVPDVFPLPPPPPPLPSPGQASHCSSPATRFGHSQTPAAFLSALLPSQPPPAAVNALGLPKGVTPAGFPKKASRTARIASDEEIQGTKDAVIQDLERKLRFKEDLLNNGQPRLTYEERMARRLLGADSATVFNIQEPEEETANQEYKVSSCEQRLISEIEYRLERSPVDESGDEVQYGDVPVENGMAPFFEMKLKHYKIFEGMPVTFTCRVAGNPKPKIYWFKDGKQISPKSDHYTIQRDLDGTCSLHTTASTLDDDGNYTIMAANPQGRISCTGRLMVQAVNQRGRSPRSPSGHPHVRRPRSRSRDSGDENEPIQERFFRPHFLQAPGDLTVQEGKLCRMDCKVSGLPTPDLSWQLDGKPVRPDSAHKMLVRENGVHSLIIEPVTSRDAGIYTCIATNRAGQNSFSLELVVAAKEAHKPPVFIEKLQNTGVADGYPVRLECRVLGVPPPQIFWKKENESLTHSTDRVSMHQDNHGYICLLIQGATKEDAGWYTVSAKNEAGIVSCTARLDVYTQWHQQSQSTKPKKVRPSASRYAALSDQGLDIKAAFQPEANPSHLTLNTALVESEDL

SEQ ID NO: 60981 - protein, 83 aa, Homo sapiens
  Payload ID: 12196
  Gene Symbol: PALLD
  Gene Name: palladin, cytoskeletal associated protein
  ENSP ID: ENSP00000424121
MPQAQKKTTSVSLTIGSSSPKTGVTTAVIQPLSVPVQQVHSPTSYLCRPDGTTTAYFPPVFTKELQNTAVAEGQVVVLECRVR

SEQ ID NO: 60982 - protein, 96 aa, Homo sapiens
  Payload ID: 12196
  Gene Symbol: PALLD
  Gene Name: palladin, cytoskeletal associated protein
  ENSP ID: ENSP00000424288
MPQAQKKTTSVSLTIGSSSPKTGVTTAVIQPLSVPVQQVHSPTSYLCRPDGTTTAYFPPVFTKELQNTAVAEGQVVVLECRVRGAPPLQVQWFRQG

SEQ ID NO: 60983 - protein, 1123 aa, Homo sapiens
  Payload ID: 12196
  Gene Symbol: PALLD
  Gene Name: palladin, cytoskeletal associated protein
  Uniprot ID: Q8WX93
  ENSP ID: ENSP00000425556
MSGTSSHESFYDSLSDMQEESKNTDFFPGLSAFLSQEEINKSLDLARRAIADSETEDFDSEKEISQIFSTSPASLCEHPSHKETKLGEHASRRPQDNRSTPVQPLAEKQTKSISSPVSKRKPAMSPLLTRPSYIRSLRKAEKRGAKTPSTNVKPKTPHQRKGGPQSQLCDKAANLIEELTSIFKAAKPRNRSPNGESSSPDSGYLSPKNQPSALLSASASQSPMEDQGEMEREVKSPGARHCYQDNQDLAVPHNRKSHPQPHSALHFPAAPRFIQKLRSQEVAEGSRVYLECRVTGNPTPRVRWFCEGKELHNTPDIQIHCEGGDLHTLIIAEAFEDDTGRYTCLATNPSGSDTTSAEVFIEGASSTDSDSESLAFKSRAGAMPQAQKKTTSVSLTIGSSSPKTGVTTAVIQPLSVPVQQVHSPTSYLCRPDGTTTAYFPPVFTKELQNTAVAEGQVVVLECRVRGAPPLQVQWFRQGSEIQDSPDFRILQKKPRSTAEPEEICTLVIAETFPEDAGIFTCSARNDYGSATSTAQLVVTSANTENCSYESMGESNNDHFQHFPPPPPILETSSLELASKKPSEIQQVNNPELGLSRAALQMQFNAAERETNGVHPSRGVNGLINGKANSNKSLPTPAVLLSPTKEPPPLLAKPKLGFPKKASRTARIASDEEIQGTKDAVIQDLERKLRFKEDLLNNGQPRLTYEERMARRLLGADSATVFNIQEPEEETANQDIGSPHASVGSPLDGQKEYKVSSCEQRLISEIEYRLERSPVDESGDEVQYGDVPVENGMAPFFEMKLKHYKIFEGMPVTFTCRVAGNPKPKIYWFKDGKQISPKSDHYTIQRDLDGTCSLHTTASTLDDDGNYTIMAANPQGRISCTGRLMVQAVNQRGRSPRSPSGHPHVRRPRSRSRDSGDENEPIQERFFRPHFLQAPGDLTVQEGKLCRMDCKVSGLPTPDLSWQLDGKPVRPDSAHKMLVRENGVHSLIIEPVTSRDAGIYTCIATNRAGQNSFSLELVVAAKEAHKPPVFIEKLQNTGVADGYPVRLECRVLGVPPPQIFWKKENESLTHSTDRVSMHQDNHGYICLLIQGATKEDAGWYTVSAKNEAGIVSCTARLDVYISRH

SEQ ID NO: 60984 - protein, 160 aa, Homo sapiens
  Payload ID: 12196
  Gene Symbol: PALLD
  Gene Name: palladin, cytoskeletal associated protein
  ENSP ID: ENSP00000425729
  MOD_RES (1)..(1): Any amino acid
XGKPVRPDSAHKMLVRENGVHSLIIEPVTSRDAGIYTCIATNRAGQNSFSLELVVAAKEAHKPPVFIEKLQNTGVADGYPVRLECRVLGVPPPQIFWKKENESLTHSTDRVSMHQDNHGYICLLIQGATKEDAGWYTVSAKNEAGIVSCTARLDVYISRH

SEQ ID NO: 60985 - protein, 777 aa, Homo sapiens
  Payload ID: 12196
  Gene Symbol: PALLD
  Gene Name: palladin, cytoskeletal associated protein
  Uniprot ID: Q8WX93
  ENSP ID: ENSP00000426947
MPQAQKKTTSVSLTIGSSSPKTGVTTAVIQPLSVPVQQVHSPTSYLCRPDGTTTAYFPPVFTKELQNTAVAEGQVVVLECRVRGAPPLQVQWFRQGSEIQDSPDFRILQKKPRSTAEPEEICTLVIAETFPEDAGIFTCSARNDYGSATSTAQLVVTSANTENCSYESMGESNNDHFQHFPPPPPILETSSLELASKKPSEIQQVNNPELGLSRAALQMQFNAAERETNGVHPSRGVNGLINGKANSNKSLPTPAVLLSPTKEPPPLLAKPKLGFPKKASRTARIASDEEIQGTKDAVIQDLERKLRFKEDLLNNGQPRLTYEERMARRLLGADSATVFNIQEPEEETANQEYKVSSCEQRLISEIEYRLERSPVDESGDEVQYGDVPVENGMAPFFEMKLKHYKIFEGMPVTFTCRVAGNPKPKIYWFKDGKQISPKSDHYTIQRDLDGTCSLHTTASTLDDDGNYTIMAANPQGRISCTGRLMVQAVNQRGRSPRSPSGHPHVRRPRSRSRDSGDENEPIQERFFRPHFLQAPGDLTVQEGKLCRMDCKVSGLPTPDLSWQLDGKPVRPDSAHKMLVRENGVHSLIIEPVTSRDAGIYTCIATNRAGQNSFSLELVVAAKEAHKPPVFIEKLQNTGVADGYPVRLECRVLGVPPPQIFWKKENESLTHSTDRVSMHQDNHGYICLLIQGATKEDAGWYTVSAKNEAGIVSCTARLDVYTQWHQQSQSTKPKKVRPSASRYAALSDQGLDIKAAFQPEANPSHLTLNTALVESEDL

SEQ ID NO: 60986 - protein, 1090 aa, Homo sapiens
  Payload ID: 12197
  Gene Symbol: PALM2-AKAP2
  Gene Name: PALM2-AKAP2 readthrough
  ENSP ID: ENSP00000305861
MAEAELHKERLQAIAEKRKRQTEIEGKRQQLDEQILLLQHSKSKVLREKWLLQGIPAGTAEEEEARRRQSEEDEFRVKQLEDNIQRLEQEIQTLESEESQISAKEQIILEKLKETEKSFKDFQKGFSSTDGDAVNYISSQLPDLPILCSRTAEPSPGQDGTSRAAGVGWENVLLKEGESASNATETSGPDMTIKKPPQLSEDDIWLKSEGDNYSATLLEPAASSLSPDHKNMEIEVSVAECKSVPGITSTPHPMDHPSAFYSPPHNGLLTDHHESLDNDVAREIRYLDEVLEANCCDSAVDGTYNGTSSPEPGAVVLVGGLSPPVHEATQPEPTERTASRQAPPHIELSNSSPDPMAEAERTNGHSPSQPRDALGDSLQVPVSPSSTTSSRCSSRDGEFTLTTLKKEAKFELRAFHEDKKPSKLFEDDEHEKEQYCIRKVRPSEEMLELEKERRELIRSQAVKKNPGIAAKWWNPPQEKTIEEQLDEEHLESHKKYKERKERRAQQEQLLLQKQLQQQQQQPPSQLCTAPASSHERASMIDKAKEDIVTEQIDFSAARKQFQLMENSRQAVAKGQSTPRLFSIKPFYRPLGSVNSDKPLTNPRPPSVGGPPEDSGASAAKGQKSPGALETPSAAGSQGNTASQGKEGPYSEPSKRGPLSKLWAEDGEFTSARAVLTVVKDDDHGILDQFSRSVNVSLTQEELDSGLDELSVRSQDTTVLETLSNDFSMDNISDSGASNETTNALQENSLADFSLPQTPQTDNPSEGRGEGVSKSFSDHGFYSPSSTLGDSPLVDDPLEYQAGLLVQNAIQQAIAEQVDKAVSKTSRDGAEQQGPEATVEEAEAAAFGSEKPQSMFEPPQVSSPVQEKRDVLPKILPAEDRALRERGPPQPLPAVQPSGPINMEETRPEGSYFSKYSEAAELRSTASLLATQESDVMVGPFKLRSRKQRTLSMIEEEIRAAQEREEELKRQRQVLQSTQSPRTKNAPSLPSRTCYKTAPGKIEKVKPPPSPTTEGPSLQPDLAPEEAAGTQRPKNLMQTLMEDYETHKSKRRERMDDSSVLEATRVNRRKSALALRWEAGIYANQEEEDNE

SEQ ID NO: 60987 - protein, 1103 aa, Homo sapiens
  Payload ID: 12197
  Gene Symbol: PALM2-AKAP2
  Gene Name: PALM2-AKAP2 readthrough
  ENSP ID: ENSP00000363654
MAEAELHKERLQAIAEKRKRQTEIEGKRQQLDEQILLLQHSKSKVLREKWLLQGIPAGTAEEEEARRRQSEEDEFRVKQLEDNIQRLEQEIQTLESEESQISAKEQIILEKLKETEKSFKDFQKGFSSTDGDAVNYISSQLPDLPILCSRTAEPSPGQDGTSRAAGVGWENVLLKEGESASNATETSGPDMTIKKPPQLSEDDIWLKSEGDNYSATLLEPAASSLSPDHKNMEIEVSVAECKSVPGITSTPHPMDHPSAFYSPPHNGLLTDHHESLDNDVAREIRYLDEVLEANCCDSAVDGTYNGTSSPEPGAVVLVGGLSPPVHEATQPEPTERTASRQAPPHIELSNSSPDPMAEAERTNGHSPSQPRDALGDSLQVPVSPSSTTSSRCSSRDGEFTLTTLKKEAKFELRAFHEDKKPSKLFEDDEHEKEQYCIRKVRPSEEMLELEKERRELIRSQAVKKNPGIAAKWWNPPQEKTIEEQLDEEHLESHKKYKERKERRAQQEQLLLQKQLQQQQQQPPSQLCTAPASSHERASMIDKAKEDIVTEQIDFSAARKQFQLMENSRQAVAKGQSTPRLFSIKPFYRPLGSVNSDKPLTNPRPPSVGGPPEDSGASAAKGQKSPGALETPSAAGSQGNTASQGKEGPYSEPSKRGPLSKLWAEDGEFTSARAVLTVVKDDDHGILDQFSRSVNVSLTQEELDSGLDELSVRSQDTTVLETLSNDFSMDNISDSGASNETTNALQENSLADFSLPQTPQTDNPSEGRGEGVSKSFSDHGFYSPSSTLGDSPLVDDPLEYQAGLLVQNAIQQAIAEQVDKAVSKTSRDGAEQQGPEATVEEAEAAAFGSEKPQSMFEPPQVSSPVQEKRDVLPKILPAEDRALRERGPPQPLPAVQPSGPINMEETRPEGSYFSKYSEAAELRSTASLLATQESDVMVGPFKLRSRKQRTLSMIEEEIRAAQEREEELKRQRQVLQSTQSPRTKNAPSLPSRTCYKTAPGKIEKVKPPPSPTTEGPSLQPDLAPEEAAGTQRPKNLMQTLMEDYETHKSKRRERMDDSSYTSKLLSCKVTSEVLEATRVNRRKSALALRWEAGIYANQEEEDNE

SEQ ID NO: 60988 - protein, 433 aa, Homo sapiens
  Payload ID: 12197
  Gene Symbol: PALM2-AKAP2
  Gene Name: PALM2-AKAP2 readthrough
  ENSP ID: ENSP00000397839
MAEAELHKERLQAIAEKRKRQTEIEGKRQQLDEQILLLQHSKSKVLREKWLLQGIPAGTAEEEEARRRQSEEDEFRVKQLEDNIQRLEQEIQTLESEESQISAKEQIILEKLKETEKSFKDFQKGFSSTDGDAVNYISSQLPDLPILCSRTAEPSPGQDGTSRAAAVYAMEINVEKDKQTGETKILSTSTIGPEGVHQKGVKVYDDGTKVVYEVRSGGTVVENGVHKLSTKDVEELIQKAGQSSLGGGHVSERTVIADGSLSHPKEHMLCKEAKLEMVHKSRKDHSSGNPGQQAQAPSAAGPEANLDQPVTMIFMGYQNIEDEEETKKVLGYDETIKAELVLIDEDDEKSLREKTVTDVSTIDGNAAELVSGRPVSDTTEPSSPEGKEESLATEPAPGVGWENVLLKEGESASNATETSGPDMTIKKPPQLSE

SEQ ID NO: 60989 - protein, 551 aa, Homo sapiens
  Payload ID: 12198
  Gene Symbol: PALMD
  Gene Name: palmdelphin
  Uniprot ID: Q9NP74
  ENSP ID: ENSP00000263174
MEEAELVKGRLQAITDKRKIQEEISQKRLKIEEDKLKHQHLKKKALREKWLLDGISSGKEQEEMKKQNQQDQHQIQVLEQSILRLEKEIQDLEKAELQISTKEEAILKKLKSIERTTEDIIRSVKVEREERAEESIEDIYANIPDLPKSYIPSRLRKEINEEKEDDEQNRKALYAMEIKVEKDLKTGESTVLSSIPLPSDDFKGTGIKVYDDGQKSVYAVSSNHSAAYNGTDGLAPVEVEELLRQASERNSKSPTEYHEPVYANPFYRPTTPQRETVTPGPNFQERIKIKTNGLGIGVNESIHNMGNGLSEERGNNFNHISPIPPVPHPRSVIQQAEEKLHTPQKRLMTPWEESNVMQDKDAPSPKPRLSPRETIFGKSEHQNSSPTCQEDEEDVRYNIVHSLPPDINDTEPVTMIFMGYQQAEDSEEDKKFLTGYDGIIHAELVVIDDEEEEDEGEAEKPSYHPIAPHSQVYQPAKPTPLPRKRSEASPHENTNHKSPHKNSISLKEQEESLGSPVHHSPFDAQTTGDGTEDPSLTALRMRMAKLGKKVI

SEQ ID NO: 60990 - protein, 551 aa, Homo sapiens
  Payload ID: 12198
  Gene Symbol: PALMD
  Gene Name: palmdelphin
  ENSP ID: ENSP00000473839
MEEAELVKGRLQAITDKRKIQEEISQKRLKIEEDKLKHQHLKKKALREKWLLDGISSGKEQEEMKKQNQQDQHQIQVLEQSILRLEKEIQDLEKAELQISTKEEAILKKLKSIERTTEDIIRSVKVEREERAEESIEDIYANIPDLPKSYIPSRLRKEINEEKEDDEQNRKALYAMEIKVEKDLKTGESTVLSSIPLPSDDFKGTGIKVYDDGQKSVYAVSSNHSAAYNGTDGLAPVEVEELLRQASERNSKSPTEYHEPVYANPFYRPTTPQRETVTPGPNFQERIKIKTNGLGIGVNESIHNMGNGLSEERGNNFNHISPIPPVPHPRSVIQQAEEKLHTPQKRLMTPWEESNVMQDKDAPSPKPRLSPRETIFGKSEHQNSSPTCQEDEEDVRYNIVHSLPPDINDTEPVTMIFMGYQQAEDSEEDKKFLTGYDGIIHAELVVIDDEEEEDEGEAEKPSYHPIAPHSQVYQPAKPTPLPRKRSEASPHENTNHKSPHKNSISLKEQEESLGSPVHHSPFDAQTTGDGTEDPSLTGNKNDKACHCCSVM

SEQ ID NO: 60991 - protein, 471 aa, Homo sapiens
  Payload ID: 12198
  Gene Symbol: PALMD
  Gene Name: palmdelphin
  Uniprot ID: Q9NP74
  ENSP ID: ENSP00000479820
MASRWNQQRKRTGRDEEAKSTKEEAILKKLKSIERTTEDIIRSVKVEREERAEESIEDIYANIPDLPKSYIPSRLRKEINEEKEDDEQNRKALYAMEIKVEKDLKTGESTVLSSIPLPSDDFKGTGIKVYDDGQKSVYAVSSNHSAAYNGTDGLAPVEVEELLRQASERNSKSPTEYHEPVYANPFYRPTTPQRETVTPGPNFQERIKIKTNGLGIGVNESIHNMGNGLSEERGNNFNHISPIPPVPHPRSVIQQAEEKLHTPQKRLMTPWEESNVMQDKDAPSPKPRLSPRETIFGKSEHQNSSPTCQEDEEDVRYNIVHSLPPDINDTEPVTMIFMGYQQAEDSEEDKKFLTGYDGIIHAELVVIDDEEEEDEGEAEKPSYHPIAPHSQVYQPAKPTPLPRKRSEASPHENTNHKSPHKNSISLKEQEESLGSPVHHSPFDAQTTGDGTEDPSLTALRMRMAKLGKKVI

SEQ ID NO: 60992 - protein, 271 aa, Homo sapiens
  Payload ID: 12199
  Gene Symbol: PPT1
  Gene Name: palmitoyl-protein thioesterase 1
  ENSP ID: ENSP00000361865
MASPGCLWLLAVALLPWTCASRALQHLDPPAPLPLVIWHGMGSRYVAQTGLELLASSNPPASSYQSAGMIGDSCCNPLSMGAIKKMVEKKIPGIYVLSLEIGKTLMEDVENSFFLNVNSQVTTVCQALAKDPKLQQGYNAMGFSQGGQFLRAVAQRCPSPPMINLISVGGQHQGVFGLPRCPGESSHICDFIRKTLNAGAYSKVVQERLVQAEYWHDPIKEDVYRNHSIFLADINQERGINESYKKNLMALKKFVMVKFLNDSIVDPVDSE

SEQ ID NO: 60993 - protein, 203 aa, Homo sapiens
  Payload ID: 12199
  Gene Symbol: PPT1
  Gene Name: palmitoyl-protein thioesterase 1
  Uniprot ID: P50897
  ENSP ID: ENSP00000392293
MASPGCLWLLAVALLPWTCASRALQHLDPPAPLPLVIWHGMGVFGLPRCPGESSHICDFIRKTLNAGAYSKVVQERLVQAEYWHDPIKEDVYRNHSIFLADINQERGINESYKKNLMALKKFVMVKFLNDSIVDPVDSEWFGFYRSGQAKETIPLQETSLYTQDRLGLKEMDNAGQLVFLATEGDHLQLSEEWFYAHIIPFLG

SEQ ID NO: 60994 - protein, 306 aa, Homo sapiens
  Payload ID: 12199
  Gene Symbol: PPT1
  Gene Name: palmitoyl-protein thioesterase 1
  Uniprot ID: P50897
  ENSP ID: ENSP00000394863
MASPGCLWLLAVALLPWTCASRALQHLDPPAPLPLVIWHGMGDSCCNPLSMGAIKKMVEKKIPGIYVLSLEIGKTLMEDVENSFFLNVNSQVTTVCQALAKDPKLQQGYNAMGFSQGGQFLRAVAQRCPSPPMINLISVGGQHQGVFGLPRCPGESSHICDFIRKTLNAGAYSKVVQERLVQAEYWHDPIKEDVYRNHSIFLADINQERGINESYKKNLMALKKFVMVKFLNDSIVDPVDSEWFGFYRSGQAKETIPLQETSLYTQDRLGLKEMDNAGQLVFLATEGDHLQLSEEWFYAHIIPFLG

SEQ ID NO: 60995 - protein, 177 aa, Homo sapiens
  Payload ID: 12199
  Gene Symbol: PPT1
  Gene Name: palmitoyl-protein thioesterase 1
  ENSP ID: ENSP00000403207
QQGYNAMGFSQGGQFLRAVAQRCPSPPMINLISVGGQHQGVFGLPRCPGESSHICDFIRKTLNAGAYSKVVQERLVQAEYWHDPIKEDVYRNHSIFLADINQERGINESYKKNLMALKKFVMVKFLNDSIVDPVDSEDRLGLKEMDNAGQLVFLATEGDHLQLSEEWFYAHIIPFLG

SEQ ID NO: 60996 - protein, 148 aa, Homo sapiens
  Payload ID: 12199
  Gene Symbol: PPT1
  Gene Name: palmitoyl-protein thioesterase 1
  ENSP ID: ENSP00000431655
MASPGCLWLLAVALLPWTCASRALQHLDPPAPLPLVIWHGMGDSCCNPLSMGAIKKMVEKKIPGIYVLSLEIGKTLMEDVENSFFLNVNSQVTTVCQALAKDPKLQQGYNAMGFSQGGQFLRAVAQRCPSPPMINLISVGGQHQVPCA

SEQ ID NO: 60997 - protein, 306 aa, Homo sapiens; identical to SEQ ID NO: 60994
  Payload ID: 12199
  Gene Symbol: PPT1
  Gene Name: palmitoyl-protein thioesterase 1
  Uniprot ID: P50897
  ENSP ID: ENSP00000432053

SEQ ID NO: 60998 - protein, 87 aa, Homo sapiens
  Payload ID: 12199
  Gene Symbol: PPT1
  Gene Name: palmitoyl-protein thioesterase 1
  ENSP ID: ENSP00000434007
MALKKFVMVKFLNDSIVDPVDSEWFGFYRSGQAKETIPLQETSLYTQDRLGLKEMDNAGQLVFLATEGDHLQLSEEWFYAHIIPFLG

SEQ ID NO: 60999 - protein, 98 aa, Homo sapiens
  Payload ID: 12199
  Gene Symbol: PPT1
  Gene Name: palmitoyl-protein thioesterase 1
  ENSP ID: ENSP00000436481
MGAIKKMVEKKIPGIYVLSLEIGKTLMEDVENSFFLNVNSQVTTVCQALAKDPKLQQGYNAMGFSQGGQFLRAVAQRCPSPPMINLISVGGQHQGVFG

SEQ ID NO: 61000 - protein, 204 aa, Homo sapiens
  Payload ID: 12199
  Gene Symbol: PPT1
  Gene Name: palmitoyl-protein thioesterase 1
  ENSP ID: ENSP00000436695
MASPGCLWLLAVALLPWTCASRALQHLDPPAPLPLVIWHGMGGQFLRAVAQRCPSPPMINLISVGGQHQGVFGLPRCPGESSHICDFIRKTLNAGAYSKVVQERLVQAEYWHDPIKEDVYRNHSIFLADINQERGINESYKKNLMALKKFVMVKFLNDSIVDPVDSEWFGFYRSGQAKETIPLQETSLYTQDRLGLKEMDNAGQ

SEQ ID NO: 61001 - protein, 302 aa, Homo sapiens
  Payload ID: 12200
  Gene Symbol: PPT2
  Gene Name: palmitoyl-protein thioesterase 2
  Uniprot ID: Q9UMR5
  ENSP ID: ENSP00000320528
MLGLCGQRLPAAWVLLLLPFLPLLLLAAPAPHRASYKPVIVVHGLFDSSYSFRHLLEYINETHPGTVVTVLDLFDGRESLRPLWEQVQGFREAVVPIMAKAPQGVHLICYSQGGLVCRALLSVMDDHNVDSFISLSSPQMGQYGDTDYLKWLFPTSMRSNLYRICYSPWGQEFSICNYWHDPHHDDLYLNASSFLALINGERDHPNATVWRKNFLRVGHLVLIGGPDDGVITPWQSSFFGFYDANETVLEMEEQLVYLRDSFGLKTLLARGAIVRCPMAGISHTAWHSNRTLYETCIEPWLS

SEQ ID NO: 61002 - protein, 308 aa, Homo sapiens
  Payload ID: 12200
  Gene Symbol: PPT2
  Gene Name: palmitoyl-protein thioesterase 2
  Uniprot ID: Q9UMR5
  ENSP ID: ENSP00000354608
MKSCGSMLGLCGQRLPAAWVLLLLPFLPLLLLAAPAPHRASYKPVIVVHGLFDSSYSFRHLLEYINETHPGTVVTVLDLFDGRESLRPLWEQVQGFREAVVPIMAKAPQGVHLICYSQGGLVCRALLSVMDDHNVDSFISLSSPQMGQYGDTDYLKWLFPTSMRSNLYRICYSPWGQEFSICNYWHDPHHDDLYLNASSFLALINGERDHPNATVWRKNFLRVGHLVLIGGPDDGVITPWQSSFFGFYDANETVLEMEEQLVYLRDSFGLKTLLARGAIVRCPMAGISHTAWHSNRTLYETCIEPWLS

SEQ ID NO: 61003 - protein, 302 aa, Homo sapiens; identical to SEQ ID NO: 61001
  Payload ID: 12200
  Gene Symbol: PPT2
  Gene Name: palmitoyl-protein thioesterase 2
  Uniprot ID: Q9UMR5
  ENSP ID: ENSP00000364279

SEQ ID NO: 61004 - protein, 302 aa, Homo sapiens; identical to SEQ ID NO: 61001
  Payload ID: 12200
  Gene Symbol: PPT2
  Gene Name: palmitoyl-protein thioesterase 2
  Uniprot ID: Q9UMR5
  ENSP ID: ENSP00000364285

SEQ ID NO: 61005 - protein, 308 aa, Homo sapiens
  Payload ID: 12200
  Gene Symbol: PPT2
  Gene Name: palmitoyl-protein thioesterase 2
  ENSP ID: ENSP00000372637
MKSCGSMLGLWGQRLPAAWVLLLLPFLPLLLLAAPAPHRESYKPVIVVHGLFDSSYSFRHLLEYINETHPGTVVTVLDLFDGRESLRPLWEQVQGFREAVVPIMAKAPQGVHLICYSQGGLVCRALLSVMDDHNVDSFISLSSPQMGQYGDTDYLKWLFPTSMRSNLYRICYSPWGQEFSICNYWHDPHHDDLYLNASSFLALINGERDHPNATVWRKNFLRVGHLVLIGGPDDGVITPWQSSFFGFYDANETVLEMEEQLVYLRDSFGLKTLLARGAIVRCPMAGISHTAWHSNRTLYETCIEPWLS

SEQ ID NO: 61006 - protein, 308 aa, Homo sapiens
  Payload ID: 12200
  Gene Symbol: PPT2
  Gene Name: palmitoyl-protein thioesterase 2
  Uniprot ID: Q9UMR5
  ENSP ID: ENSP00000372789
MKSCGSMLGLWGQRLPAAWVLLLLPFLPLLLLAAPAPHRASYKPVIVVHGLFDSSYSFRHLLEYINETHPGTVVTVLDLFDGRESLRPLWEQVQGFREAVVPIMAKAPQGVHLICYSQGGLVCRALLSVMDDHNVDSFISLSSPQMGQYGDTDYLKWLFPTSMRSNLYRICYSPWGQEFSICNYWHDPHHDDLYLNASSFLALINGERDHPNATVWRKNFLRVGHLVLIGGPDDGVITPWQSSFFGFYDANETVLEMEEQLVYLRDSFGLKTLLARGAIVRCPMAGISHTAWHSNRTLYETCIEPWLS

SEQ ID NO: 61007 - protein, 302 aa, Homo sapiens; identical to SEQ ID NO: 61001
  Payload ID: 12200
  Gene Symbol: PPT2
  Gene Name: palmitoyl-protein thioesterase 2
  Uniprot ID: Q9UMR5
  ENSP ID: ENSP00000378894

SEQ ID NO: 61008 - protein, 302 aa, Homo sapiens
  Payload ID: 12200
  Gene Symbol: PPT2
  Gene Name: palmitoyl-protein thioesterase 2
  ENSP ID: ENSP00000382568
MLGLWGQRLPAAWVLLLLPFLPLLLLAAPAPHRESYKPVIVVHGLFDSSYSFRHLLEYINETHPGTVVTVLDLFDGRESLRPLWEQVQGFREAVVPIMAKAPQGVHLICYSQGGLVCRALLSVMDDHNVDSFISLSSPQMGQYGDTDYLKWLFPTSMRSNLYRICYSPWGQEFSICNYWHDPHHDDLYLNASSFLALINGERDHPNATVWRKNFLRVGHLVLIGGPDDGVITPWQSSFFGFYDANETVLEMEEQLVYLRDSFGLKTLLARGAIVRCPMAGISHTAWHSNRTLYETCIEPWLS

SEQ ID NO: 61009 - protein, 302 aa, Homo sapiens; identical to SEQ ID NO: 61008
  Payload ID: 12200
  Gene Symbol: PPT2
  Gene Name: palmitoyl-protein thioesterase 2
  ENSP ID: ENSP00000382570

SEQ ID NO: 61010 - protein, 302 aa, Homo sapiens; identical to SEQ ID NO: 61008
  Payload ID: 12200
  Gene Symbol: PPT2
  Gene Name: palmitoyl-protein thioesterase 2
  ENSP ID: ENSP00000382573

SEQ ID NO: 61011 - protein, 302 aa, Homo sapiens
  Payload ID: 12200
  Gene Symbol: PPT2
  Gene Name: palmitoyl-protein thioesterase 2
  ENSP ID: ENSP00000382748
MLGLWGQRLPAAWVLLLLPFLPLLLLAAPAPHRASYKPVIVVHGLFDSSYSFRHLLEYINETHPGTVVTVLDLFDGRESLRPLWEQVQGFREAVVPIMAKAPQGVHLICYSQGGLVCRALLSVMDDHNVDSFISLSSPQMGQYGDTDYLKWLFPTSMRSNLYRICYSPWGQEFSICNYWHDPHHDDLYLNASSFLALINGERDHPNATVWRKNFLRVGHLVLIGGPDDGVITPWQSSFFGFYDANETVLEMEEQLVYLRDSFGLKTLLARGAIVRCPMAGISHTAWHSNRTLYETCIEPWLS

SEQ ID NO: 61012 - protein, 302 aa, Homo sapiens; identical to SEQ ID NO: 61011
  Payload ID: 12200
  Gene Symbol: PPT2
  Gene Name: palmitoyl-protein thioesterase 2
  ENSP ID: ENSP00000382749

SEQ ID NO: 61013 - protein, 302 aa, Homo sapiens; identical to SEQ ID NO: 61011
  Payload ID: 12200
  Gene Symbol: PPT2
  Gene Name: palmitoyl-protein thioesterase 2
  ENSP ID: ENSP00000382750

SEQ ID NO: 61014 - protein, 200 aa, Homo sapiens
  Payload ID: 12200
  Gene Symbol: PPT2
  Gene Name: palmitoyl-protein thioesterase 2
  ENSP ID: ENSP00000387444
MLGLWGQRLPAAWVLLLLPFLPLLLLAAPAPHRASYKPVIVVHGLFDSSYSFRHLLEYINETHPGTVVTVLDLFDGRESLRPLWEQVQGFREAVVPIMAKAPQGVHLICYSQGGLVCRALLSVMDDHNVDSFISLSSPQMGQYGDTDYLKWLFPTSMRSNLYRICYSPWGQEFSICNYWHDPHHDDLYLNASSFLALING

SEQ ID NO: 61015 - protein, 302 aa, Homo sapiens; identical to SEQ ID NO: 61011
  Payload ID: 12200
  Gene Symbol: PPT2
  Gene Name: palmitoyl-protein thioesterase 2
  ENSP ID: ENSP00000388341

SEQ ID NO: 61016 - protein, 97 aa, Homo sapiens
  Payload ID: 12200
  Gene Symbol: PPT2
  Gene Name: palmitoyl-protein thioesterase 2
  ENSP ID: ENSP00000388444
MLGLWGQRLPAAWVLLLLPFLPLLLLAAPAPHRASYKPVIVVHGLFDSSYSFRHLLEYINEGALCAGLCFLSWMITTWILSSPSPLHRWDSMETRTT

SEQ ID NO: 61017 - protein, 93 aa, Homo sapiens
  Payload ID: 12200
  Gene Symbol: PPT2
  Gene Name: palmitoyl-protein thioesterase 2
  ENSP ID: ENSP00000389505
MLGLWGQRLPAAWVLLLLPFLPLLLLAAPAPHRESYKPVIVVHGLFDSSYSFRHLLEYINEGALCAGLCFLSWMITTWILSSPSPLHRWDSME

SEQ ID NO: 61018 - protein, 302 aa, Homo sapiens; identical to SEQ ID NO: 61011
  Payload ID: 12200
  Gene Symbol: PPT2
  Gene Name: palmitoyl-protein thioesterase 2
  ENSP ID: ENSP00000389930

SEQ ID NO: 61019 - protein, 200 aa, Homo sapiens; identical to SEQ ID NO: 61014
  Payload ID: 12200
  Gene Symbol: PPT2
  Gene Name: palmitoyl-protein thioesterase 2
  ENSP ID: ENSP00000392069

SEQ ID NO: 61020 - protein, 236 aa, Homo sapiens
  Payload ID: 12200
  Gene Symbol: PPT2
  Gene Name: palmitoyl-protein thioesterase 2
  ENSP ID: ENSP00000392744
MLGLWGQRLPAAWVLLLLPFLPLLLLAAPAPHRESYKPVIVVHGLFDSSYSFRHLLEYINETHPGTVVTVLDLFDGRESLRPLWEQVQGFREAVVPIMAKAPQGVHLICYSQGGLVCRALLSVMDDHNVDSFISLSSPQMGQYGDTDYLKWLFPTSMRSNLYRICYSPWGQEFSICNYWHDPHHDDLYLNASSFLALINGERDHPNATVWRKNFLRVGHLVLIGGPDDGVITPWQS

SEQ ID NO: 61021 - protein, 302 aa, Homo sapiens; identical to SEQ ID NO: 61011
  Payload ID: 12200
  Gene Symbol: PPT2
  Gene Name: palmitoyl-protein thioesterase 2
  ENSP ID: ENSP00000392885

SEQ ID NO: 61022 - protein, 236 aa, Homo sapiens; identical to SEQ ID NO: 61020
  Payload ID: 12200
  Gene Symbol: PPT2
  Gene Name: palmitoyl-protein thioesterase 2
  ENSP ID: ENSP00000393629

SEQ ID NO: 61023 - protein, 158 aa, Homo sapiens
  Payload ID: 12200
  Gene Symbol: PPT2
  Gene Name: palmitoyl-protein thioesterase 2
  ENSP ID: ENSP00000393813
MLGLWGQRLPAAWVLLLLPFLPLLLLAAPAPHRASYKPVIVVHGLFDSSYSFRHLLEYINEMGQYGDTDYLKWLFPTSMRSNLYRICYSPWGQEFSICNYWHDPHHDDLYLNASSFLALINGERDHPNATVWRKNFLRVGHLVLIGGPDDGVITPWQS

SEQ ID NO: 61024 - protein, 93 aa, Homo sapiens
  Payload ID: 12200
  Gene Symbol: PPT2
  Gene Name: palmitoyl-protein thioesterase 2
  ENSP ID: ENSP00000395212
MLGLWGQRLPAAWVLLLLPFLPLLLLAAPAPHRASYKPVIVVHGLFDSSYSFRHLLEYINEGALCAGLCFLSWMITTWILSSPSPLHRWDSME

SEQ ID NO: 61025 - protein, 302 aa, Homo sapiens; identical to SEQ ID NO: 61011
  Payload ID: 12200
  Gene Symbol: PPT2
  Gene Name: palmitoyl-protein thioesterase 2
  ENSP ID: ENSP00000395242

SEQ ID NO: 61026 - protein, 180 aa, Homo sapiens
  Payload ID: 12200
  Gene Symbol: PPT2
  Gene Name: palmitoyl-protein thioesterase 2
  ENSP ID: ENSP00000395322
MLGLWGQRLPAAWVLLLLPFLPLLLLAAPAPHRASYKPVIVVHGLFDSSYSFRHLLEYINETHPGTVVTVLDLFDGRESLRPLWEQVQGFREAVVPIMAKAPQGVHLICYSQGGLVCRALLSVMDDHNVDSFISLSSPQMGQYGDTDYLKWLFPTSMRSNLYRICYSPWGQEFSICNYWH

SEQ ID NO: 61027 - protein, 97 aa, Homo sapiens
  Payload ID: 12200
  Gene Symbol: PPT2
  Gene Name: palmitoyl-protein thioesterase 2
  ENSP ID: ENSP00000395456
MLGLCGQRLPAAWVLLLLPFLPLLLLAAPAPHRASYKPVIVVHGLFDSSYSFRHLLEYINEGALCAGLCFLSWMITTWILSSPSPLHRWDSMETRTT

SEQ ID NO: 61028 - protein, 93 aa, Homo sapiens; identical to SEQ ID NO: 61017
  Payload ID: 12200
  Gene Symbol: PPT2
  Gene Name: palmitoyl-protein thioesterase 2
  ENSP ID: ENSP00000396015

SEQ ID NO: 61029 - protein, 158 aa, Homo sapiens; identical to SEQ ID NO: 61023
  Payload ID: 12200
  Gene Symbol: PPT2
  Gene Name: palmitoyl-protein thioesterase 2
  ENSP ID: ENSP00000396541

SEQ ID NO: 61030 - protein, 236 aa, Homo sapiens; identical to SEQ ID NO: 61020
  Payload ID: 12200
  Gene Symbol: PPT2
  Gene Name: palmitoyl-protein thioesterase 2
  ENSP ID: ENSP00000397037

SEQ ID NO: 61031 - protein, 158 aa, Homo sapiens; identical to SEQ ID NO: 61023
  Payload ID: 12200
  Gene Symbol: PPT2
  Gene Name: palmitoyl-protein thioesterase 2
  ENSP ID: ENSP00000397767

SEQ ID NO: 61032 - protein, 308 aa, Homo sapiens; identical to SEQ ID NO: 61006
  Payload ID: 12200
  Gene Symbol: PPT2
  Gene Name: palmitoyl-protein thioesterase 2
  Uniprot ID: Q9UMR5
  ENSP ID: ENSP00000398462

SEQ ID NO: 61033 - protein, 180 aa, Homo sapiens
  Payload ID: 12200
  Gene Symbol: PPT2
  Gene Name: palmitoyl-protein thioesterase 2
  ENSP ID: ENSP00000398847
MLGLCGQRLPAAWVLLLLPFLPLLLLAAPAPHRASYKPVIVVHGLFDSSYSFRHLLEYINETHPGTVVTVLDLFDGRESLRPLWEQVQGFREAVVPIMAKAPQGVHLICYSQGGLVCRALLSVMDDHNVDSFISLSSPQMGQYGDTDYLKWLFPTSMRSNLYRICYSPWGQEFSICNYWH

SEQ ID NO: 61034 - protein, 180 aa, Homo sapiens; identical to SEQ ID NO: 61026
  Payload ID: 12200
  Gene Symbol: PPT2
  Gene Name: palmitoyl-protein thioesterase 2
  ENSP ID: ENSP00000399320

SEQ ID NO: 61035 - protein, 158 aa, Homo sapiens
  Payload ID: 12200
  Gene Symbol: PPT2
  Gene Name: palmitoyl-protein thioesterase 2
  ENSP ID: ENSP00000399332
MLGLWGQRLPAAWVLLLLPFLPLLLLAAPAPHRESYKPVIVVHGLFDSSYSFRHLLEYINEMGQYGDTDYLKWLFPTSMRSNLYRICYSPWGQEFSICNYWHDPHHDDLYLNASSFLALINGERDHPNATVWRKNFLRVGHLVLIGGPDDGVITPWQS

SEQ ID NO: 61036 - protein, 302 aa, Homo sapiens; identical to SEQ ID NO: 61011
  Payload ID: 12200
  Gene Symbol: PPT2
  Gene Name: palmitoyl-protein thioesterase 2
  ENSP ID: ENSP00000399879

SEQ ID NO: 61037 - protein, 180 aa, Homo sapiens
  Payload ID: 12200
  Gene Symbol: PPT2
  Gene Name: palmitoyl-protein thioesterase 2
  ENSP ID: ENSP00000402159
MLGLWGQRLPAAWVLLLLPFLPLLLLAAPAPHRESYKPVIVVHGLFDSSYSFRHLLEYINETHPGTVVTVLDLFDGRESLRPLWEQVQGFREAVVPIMAKAPQGVHLICYSQGGLVCRALLSVMDDHNVDSFISLSSPQMGQYGDTDYLKWLFPTSMRSNLYRICYSPWGQEFSICNYWH

SEQ ID NO: 61038 - protein, 180 aa, Homo sapiens; identical to SEQ ID NO: 61026
  Payload ID: 12200
  Gene Symbol: PPT2
  Gene Name: palmitoyl-protein thioesterase 2
  ENSP ID: ENSP00000402642

SEQ ID NO: 61039 - protein, 180 aa, Homo sapiens; identical to SEQ ID NO: 61037
  Payload ID: 12200
  Gene Symbol: PPT2
  Gene Name: palmitoyl-protein thioesterase 2
  ENSP ID: ENSP00000403457

SEQ ID NO: 61040 - protein, 302 aa, Homo sapiens; identical to SEQ ID NO: 61011
  Payload ID: 12200
  Gene Symbol: PPT2
  Gene Name: palmitoyl-protein thioesterase 2
  ENSP ID: ENSP00000403820

SEQ ID NO: 61041 - protein, 200 aa, Homo sapiens; identical to SEQ ID NO: 61014
  Payload ID: 12200
  Gene Symbol: PPT2
  Gene Name: palmitoyl-protein thioesterase 2
  ENSP ID: ENSP00000404636

SEQ ID NO: 61042 - protein, 93 aa, Homo sapiens; identical to SEQ ID NO: 61024
  Payload ID: 12200
  Gene Symbol: PPT2
  Gene Name: palmitoyl-protein thioesterase 2
  ENSP ID: ENSP00000405444

SEQ ID NO: 61043 - protein, 200 aa, Homo sapiens; identical to SEQ ID NO: 61014
  Payload ID: 12200
  Gene Symbol: PPT2
  Gene Name: palmitoyl-protein thioesterase 2
  ENSP ID: ENSP00000405631

SEQ ID NO: 61044 - protein, 308 aa, Homo sapiens; identical to SEQ ID NO: 61006
  Payload ID: 12200
  Gene Symbol: PPT2
  Gene Name: palmitoyl-protein thioesterase 2
  Uniprot ID: Q9UMR5
  ENSP ID: ENSP00000406219

SEQ ID NO: 61045 - protein, 302 aa, Homo sapiens; identical to SEQ ID NO: 61011
  Payload ID: 12200
  Gene Symbol: PPT2
  Gene Name: palmitoyl-protein thioesterase 2
  ENSP ID: ENSP00000406496

SEQ ID NO: 61046 - protein, 302 aa, Homo sapiens; identical to SEQ ID NO: 61011
  Payload ID: 12200
  Gene Symbol: PPT2
  Gene Name: palmitoyl-protein thioesterase 2
  ENSP ID: ENSP00000406566

SEQ ID NO: 61047 - protein, 200 aa, Homo sapiens
  Payload ID: 12200
  Gene Symbol: PPT2
  Gene Name: palmitoyl-protein thioesterase 2
  Uniprot ID: Q9UMR5
  ENSP ID: ENSP00000408333
MLGLWGQRLPAAWVLLLLPFLPLLLLAAPAPHRESYKPVIVVHGLFDSSYSFRHLLEYINETHPGTVVTVLDLFDGRESLRPLWEQVQGFREAVVPIMAKAPQGVHLICYSQGGLVCRALLSVMDDHNVDSFISLSSPQMGQYGDTDYLKWLFPTSMRSNLYRICYSPWGQEFSICNYWHDPHHDDLYLNASSFLALING

SEQ ID NO: 61048 - protein, 302 aa, Homo sapiens; identical to SEQ ID NO: 61011
  Payload ID: 12200
  Gene Symbol: PPT2
  Gene Name: palmitoyl-protein thioesterase 2
  ENSP ID: ENSP00000408703

SEQ ID NO: 61049 - protein, 158 aa, Homo sapiens; identical to SEQ ID NO: 61023
  Payload ID: 12200
  Gene Symbol: PPT2
  Gene Name: palmitoyl-protein thioesterase 2
  ENSP ID: ENSP00000409058

SEQ ID NO: 61050 - protein, 180 aa, Homo sapiens; identical to SEQ ID NO: 61026
  Payload ID: 12200
  Gene Symbol: PPT2
  Gene Name: palmitoyl-protein thioesterase 2
  ENSP ID: ENSP00000409804

SEQ ID NO: 61051 - protein, 200 aa, Homo sapiens; identical to SEQ ID NO: 61014
  Payload ID: 12200
  Gene Symbol: PPT2
  Gene Name: palmitoyl-protein thioesterase 2
  ENSP ID: ENSP00000409821

SEQ ID NO: 61052 - protein, 158 aa, Homo sapiens
  Payload ID: 12200
  Gene Symbol: PPT2
  Gene Name: palmitoyl-protein thioesterase 2
  ENSP ID: ENSP00000409877
MLGLCGQRLPAAWVLLLLPFLPLLLLAAPAPHRASYKPVIVVHGLFDSSYSFRHLLEYINEMGQYGDTDYLKWLFPTSMRSNLYRICYSPWGQEFSICNYWHDPHHDDLYLNASSFLALINGERDHPNATVWRKNFLRVGHLVLIGGPDDGVITPWQS

SEQ ID NO: 61053 - protein, 200 aa, Homo sapiens; identical to SEQ ID NO: 61047
  Payload ID: 12200
  Gene Symbol: PPT2
  Gene Name: palmitoyl-protein thioesterase 2
  Uniprot ID: Q9UMR5
  ENSP ID: ENSP00000410001

SEQ ID NO: 61054 - protein, 158 aa, Homo sapiens; identical to SEQ ID NO: 61023
  Payload ID: 12200
  Gene Symbol: PPT2
  Gene Name: palmitoyl-protein thioesterase 2
  ENSP ID: ENSP00000410212

SEQ ID NO: 61055 - protein, 302 aa, Homo sapiens; identical to SEQ ID NO: 61011
  Payload ID: 12200
  Gene Symbol: PPT2
  Gene Name: palmitoyl-protein thioesterase 2
  ENSP ID: ENSP00000411007

SEQ ID NO: 61056 - protein, 302 aa, Homo sapiens; identical to SEQ ID NO: 61011
  Payload ID: 12200
  Gene Symbol: PPT2
  Gene Name: palmitoyl-protein thioesterase 2
  ENSP ID: ENSP00000411625

SEQ ID NO: 61057 - protein, 180 aa, Homo sapiens; identical to SEQ ID NO: 61026
  Payload ID: 12200
  Gene Symbol: PPT2
  Gene Name: palmitoyl-protein thioesterase 2
  ENSP ID: ENSP00000412655

SEQ ID NO: 61058 - protein, 302 aa, Homo sapiens; identical to SEQ ID NO: 61011
  Payload ID: 12200
  Gene Symbol: PPT2
  Gene Name: palmitoyl-protein thioesterase 2
  ENSP ID: ENSP00000412827

SEQ ID NO: 61059 - protein, 158 aa, Homo sapiens; identical to SEQ ID NO: 61035
  Payload ID: 12200
  Gene Symbol: PPT2
  Gene Name: palmitoyl-protein thioesterase 2
  ENSP ID: ENSP00000412844

SEQ ID NO: 61060 - protein, 93 aa, Homo sapiens; identical to SEQ ID NO: 61024
  Payload ID: 12200
  Gene Symbol: PPT2
  Gene Name: palmitoyl-protein thioesterase 2
  ENSP ID: ENSP00000414838

SEQ ID NO: 61061 - protein, 93 aa, Homo sapiens; identical to SEQ ID NO: 61024
  Payload ID: 12200
  Gene Symbol: PPT2
  Gene Name: palmitoyl-protein thioesterase 2
  ENSP ID: ENSP00000415798

SEQ ID NO: 61062 - protein, 242 aa, Homo sapiens
  Payload ID: 12200
  Gene Symbol: PPT2
  Gene Name: palmitoyl-protein thioesterase 2
  ENSP ID: ENSP00000416062
MKSCGSMLGLWGQRLPAAWVLLLLPFLPLLLLAAPAPHRESYKPVIVVHGLFDSSYSFRHLLEYINETHPGTVVTVLDLFDGRESLRPLWEQVQGFREAVVPIMAKAPQGVHLICYSQGGLVCRALLSVMDDHNVDSFISLSSPQMGQYGDTDYLKWLFPTSMRSNLYRICYSPWGQEFSICNYWHDPHHDDLYLNASSFLALINGERDHPNATVWRKNFLRVGHLVLIGGPDDGVITPWQS

SEQ ID NO: 61063 - protein, 308 aa, Homo sapiens; identical to SEQ ID NO: 61006
  Payload ID: 12200
  Gene Symbol: PPT2
  Gene Name: palmitoyl-protein thioesterase 2
  Uniprot ID: Q9UMR5
  ENSP ID: ENSP00000416505

SEQ ID NO: 61064 - protein, 127 aa, Homo sapiens; identical to SEQ ID NO: 22457
  Payload ID: 12200
  Gene Symbol: PPT2
  Gene Name: palmitoyl-protein thioesterase 2
  ENSP ID: ENSP00000431652
  MOD_RES (1)..(1): Any amino acid

SEQ ID NO: 61065 - protein, 301 aa, Homo sapiens; identical to SEQ ID NO: 22456
  Payload ID: 12200
  Gene Symbol: PPT2
  Gene Name: palmitoyl-protein thioesterase 2
  Uniprot ID: Q9UMR5
  ENSP ID: ENSP00000431928

SEQ ID NO: 61066 - protein, 301 aa, Homo sapiens; identical to SEQ ID NO: 22456
  Payload ID: 12200
  Gene Symbol: PPT2
  Gene Name: palmitoyl-protein thioesterase 2
  Uniprot ID: Q9UMR5
  ENSP ID: ENSP00000432308

SEQ ID NO: 61067 - protein, 301 aa, Homo sapiens; identical to SEQ ID NO: 22456
  Payload ID: 12200
  Gene Symbol: PPT2
  Gene Name: palmitoyl-protein thioesterase 2
  Uniprot ID: Q9UMR5
  ENSP ID: ENSP00000432502

SEQ ID NO: 61068 - protein, 127 aa, Homo sapiens; identical to SEQ ID NO: 22457
  Payload ID: 12200
  Gene Symbol: PPT2
  Gene Name: palmitoyl-protein thioesterase 2
  ENSP ID: ENSP00000432657
  MOD_RES (1)..(1): Any amino acid

SEQ ID NO: 61069 - protein, 301 aa, Homo sapiens; identical to SEQ ID NO: 22456
  Payload ID: 12200
  Gene Symbol: PPT2
  Gene Name: palmitoyl-protein thioesterase 2
  Uniprot ID: Q9UMR5
  ENSP ID: ENSP00000432964

SEQ ID NO: 61070 - protein, 301 aa, Homo sapiens; identical to SEQ ID NO: 22456
  Payload ID: 12200
  Gene Symbol: PPT2
  Gene Name: palmitoyl-protein thioesterase 2
  Uniprot ID: Q9UMR5
  ENSP ID: ENSP00000433061

SEQ ID NO: 61071 - protein, 236 aa, Homo sapiens; identical to SEQ ID NO: 61020
  Payload ID: 12200
  Gene Symbol: PPT2
  Gene Name: palmitoyl-protein thioesterase 2
  ENSP ID: ENSP00000433262

SEQ ID NO: 61072 - protein, 97 aa, Homo sapiens; identical to SEQ ID NO: 61016
  Payload ID: 12200
  Gene Symbol: PPT2
  Gene Name: palmitoyl-protein thioesterase 2
  ENSP ID: ENSP00000433272

SEQ ID NO: 61073 - protein, 301 aa, Homo sapiens; identical to SEQ ID NO: 22456
  Payload ID: 12200
  Gene Symbol: PPT2
  Gene Name: palmitoyl-protein thioesterase 2
  Uniprot ID: Q9UMR5
  ENSP ID: ENSP00000433323

SEQ ID NO: 61074 - protein, 302 aa, Homo sapiens; identical to SEQ ID NO: 61011
  Payload ID: 12200
  Gene Symbol: PPT2
  Gene Name: palmitoyl-protein thioesterase 2
  ENSP ID: ENSP00000433696

SEQ ID NO: 61075 - protein, 301 aa, Homo sapiens; identical to SEQ ID NO: 22456
  Payload ID: 12200
  Gene Symbol: PPT2
  Gene Name: palmitoyl-protein thioesterase 2
  Uniprot ID: Q9UMR5
  ENSP ID: ENSP00000434992

SEQ ID NO: 61076 - protein, 127 aa, Homo sapiens; identical to SEQ ID NO: 22457
  Payload ID: 12200
  Gene Symbol: PPT2
  Gene Name: palmitoyl-protein thioesterase 2
  ENSP ID: ENSP00000435170
  MOD_RES (1)..(1): Any amino acid

SEQ ID NO: 61077 - protein, 54 aa, Homo sapiens
  Payload ID: 12200
  Gene Symbol: PPT2
  Gene Name: palmitoyl-protein thioesterase 2
  ENSP ID: ENSP00000435187
  MOD_RES (1)..(1): Any amino acid
XHDDLYLNASSFLALINGERDHPNATVWRKNFLRVGHLVLIGGPDDGVITPWQS

SEQ ID NO: 61078 - protein, 236 aa, Homo sapiens; identical to SEQ ID NO: 61020
  Payload ID: 12200
  Gene Symbol: PPT2
  Gene Name: palmitoyl-protein thioesterase 2
  ENSP ID: ENSP00000435258

SEQ ID NO: 61079 - protein, 127 aa, Homo sapiens; identical to SEQ ID NO: 22457
  Payload ID: 12200
  Gene Symbol: PPT2
  Gene Name: palmitoyl-protein thioesterase 2
  ENSP ID: ENSP00000435492
  MOD_RES (1)..(1): Any amino acid

SEQ ID NO: 61080 - protein, 132 aa, Homo sapiens
  Payload ID: 12200
  Gene Symbol: PPT2
  Gene Name: palmitoyl-protein thioesterase 2
  ENSP ID: ENSP00000435988
MLGLWGQRLPAAWVLLLLPFLPLLLLAAPAPHRASYKPVIVVHGLFDSSYSFRHLLEYINETHPGTVVTVLDLFDGRESLRPLWEQVQGFREAVVPIMAKAPQGVHLICYSQDGTVWRHGLLEVAVPHLHAV

SEQ ID NO: 61081 - protein, 301 aa, Homo sapiens; identical to SEQ ID NO: 22456
  Payload ID: 12200
  Gene Symbol: PPT2
  Gene Name: palmitoyl-protein thioesterase 2
  Uniprot ID: Q9UMR5
  ENSP ID: ENSP00000436963

SEQ ID NO: 61082 - protein, 302 aa, Homo sapiens; identical to SEQ ID NO: 61011
  Payload ID: 12200
  Gene Symbol: PPT2
  Gene Name: palmitoyl-protein thioesterase 2
  ENSP ID: ENSP00000447926

SEQ ID NO: 61083 - protein, 302 aa, Homo sapiens; identical to SEQ ID NO: 61011
  Payload ID: 12200
  Gene Symbol: PPT2
  Gene Name: palmitoyl-protein thioesterase 2
  ENSP ID: ENSP00000447950

SEQ ID NO: 61084 - protein, 302 aa, Homo sapiens; identical to SEQ ID NO: 61011
  Payload ID: 12200
  Gene Symbol: PPT2
  Gene Name: palmitoyl-protein thioesterase 2
  ENSP ID: ENSP00000447973

SEQ ID NO: 61085 - protein, 302 aa, Homo sapiens; identical to SEQ ID NO: 61011
  Payload ID: 12200
  Gene Symbol: PPT2
  Gene Name: palmitoyl-protein thioesterase 2
  ENSP ID: ENSP00000448392

SEQ ID NO: 61086 - protein, 302 aa, Homo sapiens; identical to SEQ ID NO: 61011
  Payload ID: 12200
  Gene Symbol: PPT2
  Gene Name: palmitoyl-protein thioesterase 2
  ENSP ID: ENSP00000448877

SEQ ID NO: 61087 - protein, 302 aa, Homo sapiens; identical to SEQ ID NO: 61008
  Payload ID: 12200
  Gene Symbol: PPT2
  Gene Name: palmitoyl-protein thioesterase 2
  ENSP ID: ENSP00000449114

SEQ ID NO: 61088 - protein, 39 aa, Homo sapiens
  Payload ID: 12200
  Gene Symbol: PPT2
  Gene Name: palmitoyl-protein thioesterase 2
  ENSP ID: ENSP00000475276
MAKAPQGVHLICYSQGGLVCRALLSVMDDHNVDSFISLS

SEQ ID NO: 61089 - protein, 132 aa, Homo sapiens; identical to SEQ ID NO: 61080
  Payload ID: 12200
  Gene Symbol: PPT2
  Gene Name: palmitoyl-protein thioesterase 2
  ENSP ID: ENSP00000475728

SEQ ID NO: 61090 - protein, 97 aa, Homo sapiens; identical to SEQ ID NO: 61016
  Payload ID: 12200
  Gene Symbol: PPT2
  Gene Name: palmitoyl-protein thioesterase 2
  ENSP ID: ENSP00000475954

SEQ ID NO: 61091 - protein, 327 aa, Homo sapiens
  Payload ID: 12201
  Gene Symbol: ZDHHC3
  Gene Name: Palmitoyltransferase ZDHHC3
  ENSP ID: ENSP00000485706
MMLIPTHHFRNIERKPEYLQPEKCVPPPYPGPVGTMWFIRDGCGIACAIVTWFLVLYAEFVVLFVMLIPSRDYVYSIINGIVFNLLAFLALASHCRAMLTDPGAVPKGNATKEFIESLQLKPGQVVYKCPKCCSIKPDRAHHCSVCKRCIRKMDHHCPWVNNCVGENNQKYFVLFTMYIALISLHALIMVGFHFLHCFEEDWTTYGLNREEMAETGISLHEKMQPLNFSSTECSSFSPPTTVILLILLCFEGLLFLIFTSVMFGTQVHSICTDETGIEQLKKEERRWAKKTKWMNMKAVFGHPFSLGWASPFATPDQGKADPYQYVV

SEQ ID NO: 61092 - protein, 60 aa, Homo sapiens
  Payload ID: 12201
  Gene Symbol: ZDHHC3
  Gene Name: Palmitoyltransferase ZDHHC3
  ENSP ID: ENSP00000485722
  MOD_RES (1)..(1): Any amino acid
XVMFGTQVHSICTDETAADDHPGRECRMPKANHLSWSLLLCQEGRPGEGPVRKQHGITCS

SEQ ID NO: 61093 - protein, 95 aa, Homo sapiens
  Payload ID: 12201
  Gene Symbol: ZDHHC3
  Gene Name: Palmitoyltransferase ZDHHC3
  ENSP ID: ENSP00000485753
MDHHCPWVNNCVGENNQKYFVLFTMYIALISLHALIMVGFHFLHCFEEDWTKCSSFSPPTTVILLILLCFEGLLFLIFTSVMFGTQVHSICTDET

SEQ ID NO: 61094 - protein, 333 aa, Homo sapiens
  Payload ID: 12201
  Gene Symbol: ZDHHC3
  Gene Name: Palmitoyltransferase ZDHHC3
  ENSP ID: ENSP00000486029
MMLIPTHHFRNIERKPEYLQPEKCVPPPYPGPVGTMWFIRDGCGIACAIVTWFLVLYAEFVVLFVMLIPSRDYVYSIINGIVFNLLAFLALASHCRAMLTDPVRTCTEMAFTLLGRGASFPEKLDKPVSGRSKCLLGAVPKGNATKEFIESLQLKPGQVVYKCPKCCSIKPDRAHHCSVCKRCIRKMDHHCPWVNNCVGENNQKYFVLFTMYIALISLHALIMVGFHFLHCFEEDWTKCSSFSPPTTVILLILLCFEGLLFLIFTSVMFGTQVHSICTDETGIEQLKKEERRWAKKTKWMNMKAVFGHPFSLGWASPFATPDQGKADPYQYVV

SEQ ID NO: 61095 - protein, 111 aa, Homo sapiens
  Payload ID: 12201
  Gene Symbol: ZDHHC3
  Gene Name: Palmitoyltransferase ZDHHC3
  ENSP ID: ENSP00000486173
  MOD_RES (1)..(1): Any amino acid
XLIPTHHFRNIERKPEYLQPEKCVPPPYPGPVGTMWFIRDGCGIACAIVTWFLVLYAEFVVLFVMLIPSRDYVYSIINGIVFNLLAFLALASHCRAMLTDPVRGSAQRKCH

SEQ ID NO: 61096 - protein, 195 aa, Homo sapiens
  Payload ID: 12201
  Gene Symbol: ZDHHC3
  Gene Name: Palmitoyltransferase ZDHHC3
  ENSP ID: ENSP00000486290
IKPDRAHHCSVCKRCIRKMDHHCPWVNNCVGENNQKYFVLFTMYIALISLHALIMVGFHFLHCFEEDWTKCSSFSPPTTVILLILLCFEGLLFLIFTSVMFGTQVHSICTDETGIERLKRKNQPREHMGSWQSVKETFGGDFSLNWFNPFSRPCQPEIPSDKDMVRQVTSLSDTETMEDPSEETKDEDSVEVTDE

SEQ ID NO: 61097 - protein, 299 aa, Homo sapiens
  Payload ID: 12201
  Gene Symbol: ZDHHC3
  Gene Name: Palmitoyltransferase ZDHHC3
  ENSP ID: ENSP00000486386
MMLIPTHHFRNIERKPEYLQPEKCVPPPYPGPVGTMWFIRDGCGIACAIVTWFLVLYAEFVVLFVMLIPSRDYVYSIINGIVFNLLAFLALASHCRAMLTDPGAVPKGNATKEFIESLQLKPGQVVYKCPKCCSIKPDRAHHCSVCKRCIRKMDHHCPWVNNCVGENNQKYFVLFTMYIALISLHALIMVGFHFLHCFEEDWTKCSSFSPPTTVILLILLCFEGLLFLIFTSVMFGTQVHSICTDETGIEQLKKEERRWAKKTKWMNMKAVFGHPFSLGWASPFATPDQGKADPYQYVV

SEQ ID NO: 61098 - protein, 44 aa, Homo sapiens
  Payload ID: 12201
  Gene Symbol: ZDHHC3
  Gene Name: Palmitoyltransferase ZDHHC3
  ENSP ID: ENSP00000486651
MDHHCPWVNNCVGENNQKYFVLFTMYIALISLHALIMVGFHFLH

SEQ ID NO: 61099 - protein, 1201 aa, Homo sapiens
  Payload ID: 12202
  Gene Symbol: PAN2
  Gene Name: PAN2 poly(A) specific ribonuclease subunit
  Uniprot ID: Q504Q3
  ENSP ID: ENSP00000257931
MNFEGLDPGLAEYAPAMHSALDPVLDAHLNPSLLQNVELDPEGVALEALPVQESVHIMEGVYSELHSVVAEVGVPVSVSHFDLHEEMLWVGSHGGHATSFFGPALERYSSFQVNGSDDIRQIQSLENGILFLTKNNLKYMARGGLIIFDYLLDENEDMHSLLLTDSSTLLVGGLQNHIIEIDLNTVQETQKYAVETPGVTIMRQTNRFFFCGHTSGKVSLRDLRTFKVEHEFDAFSGSLSDFDVHGNLLAACGFSSRLTGLACDRFLKVYDLRMMRAITPLQVHVDPAFLRFIPTYTSRLAIISQSGQCQFCEPTGLANPADIFHVNPVGPLLMTFDVSASKQALAFGDSEGCVHLWTDSPEPSFNPYSRETEFALPCLVDSLPPLDWSQDLLPLSLIPVPLTTDTLLSDWPAANSAPAPRRAPPVDAEILRTMKKVGFIGYAPNPRTRLRNQIPYRLKESDSEFDSFSQVTESPVGREEEPHLHMVSKKYRKVTIKYSKLGLEDFDFKHYNKTLFAGLEPHIPNAYCNCMIQVLYFLEPVRCLIQNHLCQKEFCLACELGFLFHMLDLSRGDPCQGNNFLRAFRTIPEASALGLILADSDEASGKGNLARLIQRWNRFILTQLHQDMQELEIPQAYRGAGGSFCSSGDSVIGQLFSCEMENCSLCRCGSETVRASSTLLFTLSYPDGSKSDKTGKNYDFAQVLKRSICLDQNTQAWCDTCEKYQPTIQTRNIRHLPDILVINCEVNSSKEADFWRMQAEVAFKMAVKKHGGEISKNKEFALADWKELGSPEGVLVCPSIEELKNVWLPFSIRMKMTKNKGLDVCNWTDGDEMQWGPARAEEEHGVYVYDLMATVVHILDSRTGGSLVAHIKVGETYHQRKEGVTHQQWYLFNDFLIEPIDKHEAVQFDMNWKVPAILYYVKRNLNSRYNLNIKNPIEASVLLAEASLARKQRKTHTTFIPLMLNEMPQIGDLVGLDAEFVTLNEEEAELRSDGTKSTIKPSQMSVARITCVRGQGPNEGIPFIDDYISTQEQVVDYLTQYSGIKPGDLDAKISSKHLTTLKSTYLKLRFLIDIGVKFVGHGLQKDFRVINLMVPKDQVLDTVYLFHMPRKRMISLRFLAWYFLDLKIQGETHDSIEDARTALQLYRKYLELSKNGTEPESFHKVLKGLYEKGRKMDWKVPEPEGQTSPKNAAVFSSVLAL

SEQ ID NO: 61100 - protein, 1198 aa, Homo sapiens
  Payload ID: 12202
  Gene Symbol: PAN2
  Gene Name: PAN2 poly(A) specific ribonuclease subunit
  Uniprot ID: Q504Q3
  ENSP ID: ENSP00000388231
MNFEGLDPGLAEYAPAMHSALDPVLDAHLNPSLLQNVELDPEGVALEALPVQESVHIMEGVYSELHSVVAEVGVPVSVSHFDLHEEMLWVGSHGGHATSFFGPALERYSSFQVNGSDDIRQIQSLENGILFLTKNNLKYMARGGLIIFDYLLDENEDMHSLLLTDSSTLLVGGLQNHIIEIDLNTVQETQKYAVETPGVTIMRQTNRFFFCGHTSGKVSLRDLRTFKVEHEFDAFSGSLSDFDVHGNLLAACGFSSRLTGLACDRFLKVYDLRMMRAITPLQVHVDPAFLRFIPTYTSRLAIISQSGQCQFCEPTGLANPADIFHVNPVGPLLMTFDVSASKQALAFGDSEGCVHLWTDSPEPSFNPYSRETEFALPCLVDSLPPLDWSQDLLPLSLIPVPLTTDTLLSDWPAANSAPAPRRAPPVDAEILRTMKKVGFIGYAPNPRTRLRNQIPYRLKESDSEFDSFSQVTESPVGREEEPHLHMVSKKYRKVTIKYSKLGLEDFDFKHYNKTLFAGLEPHIPNAYCNCMIQVLYFLEPVRCLIQNHLCQKEFCLACELGFLFHMLDLSRGDPCQGNNFLRAFRTIPEASALGLILADSDEASGKGNLARLIQRWNRFILTQLHQDMQELEIPQAYRGAGGSSFCSSGDSVIGQLFSCEMENCSLCRCGSETVRASSTLLFTLSYPDDKTGKNYDFAQVLKRSICLDQNTQAWCDTCEKYQPTIQTRNIRHLPDILVINCEVNSSKEADFWRMQAEVAFKMAVKKHGGEISKNKEFALADWKELGSPEGVLVCPSIEELKNVWLPFSIRMKMTKNKGLDVCNWTDGDEMQWGPARAEEEHGVYVYDLMATVVHILDSRTGGSLVAHIKVGETYHQRKEGVTHQQWYLFNDFLIEPIDKHEAVQFDMNWKVPAILYYVKRNLNSRYNLNIKNPIEASVLLAEASLARKQRKTHTTFIPLMLNEMPQIGDLVGLDAEFVTLNEEEAELRSDGTKSTIKPSQMSVARITCVRGQGPNEGIPFIDDYISTQEQVVDYLTQYSGIKPGDLDAKISSKHLTTLKSTYLKLRFLIDIGVKFVGHGLQKDFRVINLMVPKDQVLDTVYLFHMPRKRMISLRFLAWYFLDLKIQGETHDSIEDARTALQLYRKYLELSKNGTEPESFHKVLKGLYEKGRKMDWKVPEPEGQTSPKNAAVFSSVLAL

SEQ ID NO: 61101 - protein, 1202 aa, Homo sapiens
  Payload ID: 12202
  Gene Symbol: PAN2
  Gene Name: PAN2 poly(A) specific ribonuclease subunit
  Uniprot ID: Q504Q3
  ENSP ID: ENSP00000401721
MNFEGLDPGLAEYAPAMHSALDPVLDAHLNPSLLQNVELDPEGVALEALPVQESVHIMEGVYSELHSVVAEVGVPVSVSHFDLHEEMLWVGSHGGHATSFFGPALERYSSFQVNGSDDIRQIQSLENGILFLTKNNLKYMARGGLIIFDYLLDENEDMHSLLLTDSSTLLVGGLQNHIIEIDLNTVQETQKYAVETPGVTIMRQTNRFFFCGHTSGKVSLRDLRTFKVEHEFDAFSGSLSDFDVHGNLLAACGFSSRLTGLACDRFLKVYDLRMMRAITPLQVHVDPAFLRFIPTYTSRLAIISQSGQCQFCEPTGLANPADIFHVNPVGPLLMTFDVSASKQALAFGDSEGCVHLWTDSPEPSFNPYSRETEFALPCLVDSLPPLDWSQDLLPLSLIPVPLTTDTLLSDWPAANSAPAPRRAPPVDAEILRTMKKVGFIGYAPNPRTRLRNQIPYRLKESDSEFDSFSQVTESPVGREEEPHLHMVSKKYRKVTIKYSKLGLEDFDFKHYNKTLFAGLEPHIPNAYCNCMIQVLYFLEPVRCLIQNHLCQKEFCLACELGFLFHMLDLSRGDPCQGNNFLRAFRTIPEASALGLILADSDEASGKGNLARLIQRWNRFILTQLHQDMQELEIPQAYRGAGGSSFCSSGDSVIGQLFSCEMENCSLCRCGSETVRASSTLLFTLSYPDGSKSDKTGKNYDFAQVLKRSICLDQNTQAWCDTCEKYQPTIQTRNIRHLPDILVINCEVNSSKEADFWRMQAEVAFKMAVKKHGGEISKNKEFALADWKELGSPEGVLVCPSIEELKNVWLPFSIRMKMTKNKGLDVCNWTDGDEMQWGPARAEEEHGVYVYDLMATVVHILDSRTGGSLVAHIKVGETYHQRKEGVTHQQWYLFNDFLIEPIDKHEAVQFDMNWKVPAILYYVKRNLNSRYNLNIKNPIEASVLLAEASLARKQRKTHTTFIPLMLNEMPQIGDLVGLDAEFVTLNEEEAELRSDGTKSTIKPSQMSVARITCVRGQGPNEGIPFIDDYISTQEQVVDYLTQYSGIKPGDLDAKISSKHLTTLKSTYLKLRFLIDIGVKFVGHGLQKDFRVINLMVPKDQVLDTVYLFHMPRKRMISLRFLAWYFLDLKIQGETHDSIEDARTALQLYRKYLELSKNGTEPESFHKVLKGLYEKGRKMDWKVPEPEGQTSPKNAAVFSSVLAL

SEQ ID NO: 61102 - protein, 111 aa, Homo sapiens
  Payload ID: 12202
  Gene Symbol: PAN2
  Gene Name: PAN2 poly(A) specific ribonuclease subunit
  ENSP ID: ENSP00000449092
MARGGLIIFDYLLDENEDMHSLLLTDSSTLLVGGLQNHIIEIDLNTVQETQKYAVETPGVTIMRQTNRFFFCGHTSGKVSLRDLRTFKVEHEFDAFSGSLSDFDVHGNLLA

SEQ ID NO: 61103 - protein, 1202 aa, Homo sapiens; identical to SEQ ID NO: 61101
  Payload ID: 12202
  Gene Symbol: PAN2
  Gene Name: PAN2 poly(A) specific ribonuclease subunit
  Uniprot ID: Q504Q3
  ENSP ID: ENSP00000449861

SEQ ID NO: 61104 - protein, 1202 aa, Homo sapiens; identical to SEQ ID NO: 61101
  Payload ID: 12202
  Gene Symbol: PAN2
  Gene Name: PAN2 poly(A) specific ribonuclease subunit
  Uniprot ID: Q504Q3
  ENSP ID: ENSP00000481859

SEQ ID NO: 61105 - protein, 887 aa, Homo sapiens
  Payload ID: 12203
  Gene Symbol: PAN3
  Gene Name: PAN3 poly(A) specific ribonuclease subunit
  Uniprot ID: Q58A45
  ENSP ID: ENSP00000370345
MNSGGGLPPPSAAASPSSSSLAAAVAVVAPPGVGGVPGGAAVGVKLKYCRYYAKDKTCFYGEECQFLHEDPAAGAAPGLGLHSNSVPLALAGAPVAGFPPGAVAGGGAGPPPGPKKPDLGDPGTGAAAGGGGSSGGLDGPRLAIPGMDGGALTDTSLTDSYFSTSFIGVNGFGSPVETKYPLMQRMTNSSSSPSLLNDSAKPYSAHDPLTSPASSLFNDFGALNISQRRKPRKYRLGMLEERLVPMGSKARKAKNPIGCLADRCKSGVPINMVWWNRVTENNLQTPNPTASEFIPKGGSTSRLSNVSQSNMSAFSQVFSHPSMGSPATAGLAPGMSLSAGSSPLHSPKITPHTSPAPRRRSHTPNPASYMVPSSASTSVNNPVSQTPSSGQVIQKETVGGTTYFYTDTTPAPLTGMVFPNYHIYPPTAPHVAYMQPKANAPSFFMADELRQELINRHLITMAQIDQADMPAVPTEVDSYHSLFPLEPLPPPNRIQKSSNFGYITSCYKAVNSKDDLPYCLRRIHGFRLVNTKCMVLVDMWKKIQHSNIVTLREVFTTKAFAEPSLVFAYDFHAGGETMMSRHFNDPNADAYFTKRKWGQHEGPLPRQHAGLLPESLIWAYIVQLSSALRTIHTAGLACRVMDPTKILITGKTRLRVNCVGVFDVLTFDNSQNNNPLALMAQYQQADLISLGKVVLALACNSLAGIQRENLQKAMELVTINYSSDLKNLILYLLTDQNRMRSVNDIMPMIGARFYTQLDAAQMRNDVIEEDLAKEVQNGRLFRLLAKLGTINERPEFQKDPTWSETGDRYLLKLFRDHLFHQVTEAGAPWIDLSHIISCLNKLDAGVPEKISLISRDEKSVLVVTYSDLKRCFENTFQELIAAANGQL

SEQ ID NO: 61106 - protein, 687 aa, Homo sapiens
  Payload ID: 12203
  Gene Symbol: PAN3
  Gene Name: PAN3 poly(A) specific ribonuclease subunit
  ENSP ID: ENSP00000382522
MDGGALTDTSLTDSYFSTSFIGVNGFGSPVETKYPLMQRMTNSSSSPSLLNDSAKPYSAHDPLTSPASSLFNDFGALNISQRRKTPNPTASEFIPKGGSTSRLSNVSQSNMSAFSQVFSHPSMGSPATAGLAPGMSLSAGSSPLHSPKITPHTSPAPRRRSHTPNPASYMVPSSASTSVNNPVSQTPSSGQVIQKETVGGTTYFYTDTTPAPLTGMVFPNYHIYPPTAPHVAYMQPKANAPSFFMADELRQELINRHLITMAQIDQADMPAVPTEVDSYHSLFPLEPLPPPNRIQKSSNFGYITSCYKAVNSKDDLPYCLRRIHGFRLVNTKCMVLVDMWKKIQHSNIVTLREVFTTKAFAEPSLVFAYDFHAGGETMMSRHFNDPNADAYFTKRKWGQHEGPLPRQHAGLLPESLIWAYIVQLSSALRTIHTAGLACRVMDPTKILITGKTRLRVNCVGVFDVLTFDNSQNNNPLALMAQYQQADLISLGKVVLALACNSLAGIQRENLQKAMELVTINYSSDLKNLILYLLTDQNRMRSVNDIMPMIGARFYTQLDAAQMRNDVIEEDLAKEVQNGRLFRLLAKLGTINERPEFQKDPTWSETGDRYLLKLFRDHLFHQVTEAGAPWIDLSHIISCLNKLDAGVPEKISLISRDEKSVLVVTYSDLKRCFENTFQELIAAANGQL

SEQ ID NO: 61107 - protein, 328 aa, Homo sapiens
  Payload ID: 12204
  Gene Symbol: PTF1A
  Gene Name: pancreas specific transcription factor, 1a
  Uniprot ID: Q7RTS3
  ENSP ID: ENSP00000365687
MDAVLLEHFPGGLDAFPSSYFDEDDFFTDQSSRDPLEDGDELLADEQAEVEFLSHQLHEYCYRDGACLLLQPAPPAAPLALAPPSSGGLGEPDDGGGGGYCCETGAPPGGFPYSPGSPPSCLAYPCAGAAVLSPGARLRGLSGAAAAAARRRRRVRSEAELQQLRQAANVRERRRMQSINDAFEGLRSHIPTLPYEKRLSKVDTLRLAIGYINFLSELVQADLPLRGGGAGGCGGPGGGGRLGGDSPGSQAQKVIICHRGTRSPSPSDPDYGLPPLAGHSLSWTDEKQLKEQNIIRTAKVWTPEDPRKLNSKSSFNNIENEPPFEFVS

SEQ ID NO: 61108 - protein, 283 aa, Homo sapiens
  Payload ID: 12205
  Gene Symbol: PDX1
  Gene Name: pancreatic and duodenal homeobox 1
  Uniprot ID: P52945
  ENSP ID: ENSP00000370421
MNGEEQYYAATQLYKDPCAFQRGPAPEFSASPPACLYMGRQPPPPPPHPFPGALGALEQGSPPDISPYEVPPLADDPAVAHLHHHLPAQLALPHPPAGPFPEGAEPGVLEEPNRVQLPFPWMKSTKAHAWKGQWAGGAYAAEPEENKRTRTAYTRAQLLELEKEFLFNKYISRPRRVELAVMLNLTERHIKIWFQNRRMKWKKEEDKKRGGGTAVGGGGVAEPEQDCAVTSGEELLALPPPPPPGGAVPPAAPVAAREGRLPPGLSASPQPSSVAPRRPQEPR

SEQ ID NO: 61109 - protein, 465 aa, Homo sapiens
  Payload ID: 12206
  Gene Symbol: PNLIP
  Gene Name: pancreatic lipase
  Uniprot ID: P16233
  ENSP ID: ENSP00000358223
MLPLWTLSLLLGAVAGKEVCYERLGCFSDDSPWSGITERPLHILPWSPKDVNTRFLLYTNENPNNFQEVAADSSSISGSNFKTNRKTRFIIHGFIDKGEENWLANVCKNLFKVESVNCICVDWKGGSRTGYTQASQNIRIVGAEVAYFVEFLQSAFGYSPSNVHVIGHSLGAHAAGEAGRRTNGTIGRITGLDPAEPCFQGTPELVRLDPSDAKFVDVIHTDGAPIVPNLGFGMSQVVGHLDFFPNGGVEMPGCKKNILSQIVDIDGIWEGTRDFAACNHLRSYKYYTDSIVNPDGFAGFPCASYNVFTANKCFPCPSGGCPQMGHYADRYPGKTNDVGQKFYLDTGDASNFARWRYKVSVTLSGKKVTGHILVSLFGNKGNSKQYEIFKGTLKPDSTHSNEFDSDVDVGDLQMVKFIWYNNVINPTLPRVGASKIIVETNVGKQFNFCSPETVREEVLLTLTPC

SEQ ID NO: 61110 - protein, 467 aa, Homo sapiens
  Payload ID: 12207
  Gene Symbol: PNLIPRP1
  Gene Name: pancreatic lipase-related protein 1
  Uniprot ID: P54315
  ENSP ID: ENSP00000351695
MLIFWTITLFLLGAAKGKEVCYEDLGCFSDTEPWGGTAIRPLKILPWSPEKIGTRFLLYTNENPNNFQILLLSDPSTIEASNFQMDRKTRFIIHGFIDKGDESWVTDMCKKLFEVEEVNCICVDWKKGSQATYTQAANNVRVVGAQVAQMLDILLTEYSYPPSKVHLIGHSLGAHVAGEAGSKTPGLSRITGLDPVEASFESTPEEVRLDPSDADFVDVIHTDAAPLIPFLGFGTNQQMGHLDFFPNGGESMPGCKKNALSQIVDLDGIWAGTRDFVACNHLRSYKYYLESILNPDGFAAYPCTSYKSFESDKCFPCPDQGCPQMGHYADKFAGRTSEEQQKFFLNTGEASNFARWRYGVSITLSGRTATGQIKVALFGNKGNTHQYSIFRGILKPGSTHSYEFDAKLDVGTIEKVKFLWNNNVINPTLPKVGATKITVQKGEEKTVYNFCSEDTVREDTLLTLTPC

SEQ ID NO: 61111 - protein, 131 aa, Homo sapiens
  Payload ID: 12207
  Gene Symbol: PNLIPRP1
  Gene Name: pancreatic lipase-related protein 1
  ENSP ID: ENSP00000431207
MLIFWTITLFLLGAAKGKEVCYEDLGCFSDTEPWGGTAIRPLKILPWSPEKIGTRFLLYTNENPNNFQILLLSDPSTIEASNFQMDRKTRFIIHGFIDKGDESWVTDMCKKLFEVEEVNCICVDWKKGSQA

SEQ ID NO: 61112 - protein, 118 aa, Homo sapiens
  Payload ID: 12207
  Gene Symbol: PNLIPRP1
  Gene Name: pancreatic lipase-related protein 1
  ENSP ID: ENSP00000431406
MLIFWTITLFLLGAAKGKEVCYEDLGCFSDTEPWGGTAIRPLKILPWSPEKIGTRFLLYTNENPNNFQILLLSDPSTIEASNFQMDRKTRFIIHGFIDKGDESWVTDMCKQPGASPRA

SEQ ID NO: 61113 - protein, 163 aa, Homo sapiens
  Payload ID: 12207
  Gene Symbol: PNLIPRP1
  Gene Name: pancreatic lipase-related protein 1
  ENSP ID: ENSP00000433785
MLIFWTITLFLLGAAKGKEVCYEDLGCFSDTEPWGGTAIRPLKILPWSPEKIGTRFLLYTNENPNNFQILLLSDPSTIEASNFQMDRKTRFIIHGFIDKGDESWVTDMCKTPGLSRITGLDPVEASFESTPEEVRLDPSDADFVDVIHTDAAPLIPFLGFGTN

SEQ ID NO: 61114 - protein, 467 aa, Homo sapiens; identical to SEQ ID NO: 61110
  Payload ID: 12207
  Gene Symbol: PNLIPRP1
  Gene Name: pancreatic lipase-related protein 1
  Uniprot ID: P54315
  ENSP ID: ENSP00000433933

SEQ ID NO: 61115 - protein, 467 aa, Homo sapiens
  Payload ID: 12207
  Gene Symbol: PNLIPRP1
  Gene Name: pancreatic lipase-related protein 1
  ENSP ID: ENSP00000434159
MLIFWTITLFLLGAAKGKEVCYEDLGCFSDTEPWGGTAIRPLKILPWSPEKIGTRFLLYTNENPNNFQILLLSDPSTIEASNFQMDRKTRFIIHGFIDKGDESWVTDMCKKLFEVEEVNCICVDWKKGSQATYTQAANNVRVVGAQVAQMLDILLVKYSYPPSKVHLIGHSLGAHVAGEAGSKTPGLSRITGLDPVEASFESTPEEVRLDPSDADFVDVIHTDAAPLIPFLGFGTNQQMGHLDFFPNGGESMPGCKKNALSQIVDLDGIWAGTRDFVACNHLRSYKYYLESILNPDGFAAYPCTSYKSFESDKCFPCPDQGCPQMGHYADKFAGRTSEEQQKFFLNTGEASNFARWRYGVSITLSGRTATGQIKVALFGNKGNTHQYSIFRGILKPGSTHSYEFDAKLDVGTIEKVKFLWNNNVINPTLPKVGATKITVQKGEEKTVYNFCSEDTVREDTLLTLTPC

SEQ ID NO: 61116 - protein, 179 aa, Homo sapiens
  Payload ID: 12207
  Gene Symbol: PNLIPRP1
  Gene Name: pancreatic lipase-related protein 1
  ENSP ID: ENSP00000434549
KLFEVEEVNCICVDWKKGSQATYTQAANNVRVVGAQVAQMLDILLTEYSYPPSKVHLIGHSLGAHVAGEAGSKTPGLSRITGLDPVEASFESTPEEVRLDPSDADFVDVIHTDAAPLIPFLGFGTNQQMGHLDFFPNGGESMPGCKKNALSQIVDLDGIWAGQVLPVSRSRMPTDGSLC

SEQ ID NO: 61117 - protein, 191 aa, Homo sapiens
  Payload ID: 12207
  Gene Symbol: PNLIPRP1
  Gene Name: pancreatic lipase-related protein 1
  ENSP ID: ENSP00000436123
MLIFWTITLFLLGAAKGKEVCYEDLGCFSDTEPWGGTAIRPLKILPWSPEKIGTRFLLYTNENPNNFQILLLSDPSTIEASNFQMDRKTRFIIHGFIDKGDESWVTDMCKKLFEVEEVNCICVDWKKGSQATYTQAANNVRVVGAQVAQMLDILLTEYSYPPSKVHLIGHSLGAHVAGEAGSKTPGLSRIT

SEQ ID NO: 61118 - protein, 185 aa, Homo sapiens
  Payload ID: 12207
  Gene Symbol: PNLIPRP1
  Gene Name: pancreatic lipase-related protein 1
  ENSP ID: ENSP00000437263
MLIFWTITLFLLGAAKGKEVCYEDLGCFSDTEPWGGTAIRPLKILPWSPEKIGTRFLLYTNENPNNFQILLLSDPSTIEASNFQMDRKTRFIIHGFIDKGDESWVTDMCKTEYSYPPSKVHLIGHSLGAHVAGEAGSKTPGLSRITGLDPVEASFESTPEEVRLDPSDADFVDVIHTDAAPLIPF

SEQ ID NO: 61119 - protein, 468 aa, Homo sapiens
  Payload ID: 12208
  Gene Symbol: PNLIPRP2
  Gene Name: pancreatic lipase-related protein 2
  ENSP ID: ENSP00000463502
MLPPWTLGLLLLATVRGKEVCYGQLGCFSDEKPWAGTLQRPVKLLPWSPEDIDTRFLLYTNENPNNFQLITGTEPDTIEASNFQLDRKTRFIIHGFLDKAEDSWPSDMCKKMFEVEKVNCICVDWRHGSRAMYTQAVQNIRVVGAETAFLIQALSTQLGYSLEDVHVIGHSLGAHTAAEAGRRLGGRVGRITGLDPAGPCFQDEPEEVRLDPSDAVFVDVIHTDSSPIVPSLGFGMSQKVGHLDFFPNGGKEMPGCKKNVLSTITDIDGIWEGIGGFVSCNHLRSFEYYSSSVLNPDGFLGYPCASYDEFQESKCFPCPAEGCPKMGHYADQFKGKTSAVEQTFFLNTGESGNFTSRYKISVTLSGKEKVNGYIRIALYGSNENSKQYEIFKGSLKPDASHTCAIDVDFNVGKIQKVKFLWNKRGINLSEPKLGASQITVQSGEDGTEYNFCSSDTVEENVLQSLYPC

SEQ ID NO: 61120 - protein, 469 aa, Homo sapiens
  Payload ID: 12208
  Gene Symbol: PNLIPRP2
  Gene Name: pancreatic lipase-related protein 2
  ENSP ID: ENSP00000468117
MLPPWTLGLLLLATVRGKEVCYGQLGCFSDEKPWAGTLQRPVKLLPWSPEDIDTRFLLYTNENPNNFQLITGTEPDTIEASNFQLDRKTRFIIHGFLDKAEDSWPSDMCKKMFEVEKVNCICVDWRHGSRAMYTQAVQNIRVVGAETAFLIQALSTQLGYSLEDVHVIGHSLGAHTAAEAGRRLGGRVGRITGLDPAGPCFQDEPEEVRLDPSDAVFVDVIHTDSSPIVPSLGFGMSQKVGHLDFFPNGGKEMPGCKKNVLSTITDIDGIWEGIGGFVSCNHLRSFEYYSSSVLNPDGFLGYPCASYDEFQESKCFPCPAEGCPKMGHYADQFKGKTSAVEQTFFLNTGESGNFTSWRYKISVTLSGKEKVNGYIRIALYGSNENSKQYEIFKGSLKPDASHTCAIDVDFNVGKIQKVKFLWNKRGINLSEPKLGASQITVQSGEDGTEYNFCSSDTVEENVLQSLYPC

SEQ ID NO: 61121 - protein, 468 aa, Homo sapiens; identical to SEQ ID NO: 61119
  Payload ID: 12208
  Gene Symbol: PNLIPRP2
  Gene Name: pancreatic lipase-related protein 2
  ENSP ID: ENSP00000480815

SEQ ID NO: 61122 - protein, 467 aa, Homo sapiens
  Payload ID: 12209
  Gene Symbol: PNLIPRP3
  Gene Name: pancreatic lipase-related protein 3
  Uniprot ID: Q17RR3
  ENSP ID: ENSP00000358232
MLGIWIVAFLFFGTSRGKEVCYERLGCFKDGLPWTRTFSTELVGLPWSPEKINTRFLLYTIHNPNAYQEISAVNSSTIQASYFGTDKITRINIAGWKTDGKWQRDMCNVLLQLEDINCINLDWINGSREYIHAVNNLRVVGAEVAYFIDVLMKKFEYSPSKVHLIGHSLGAHLAGEAGSRIPGLGRITGLDPAGPFFHNTPKEVRLDPSDANFVDVIHTNAARILFELGVGTIDACGHLDFYPNGGKHMPGCEDLITPLLKFNFNAYKKEMASFFDCNHARSYQFYAESILNPDAFIAYPCRSYTSFKAGNCFFCSKEGCPTMGHFADRFHFKNMKTNGSHYFLNTGSLSPFARWRHKLSVKLSGSEVTQGTVFLRVGGAVRKTGEFAIVSGKLEPGMTYTKLIDADVNVGNITSVQFIWKKHLFEDSQNKLGAEMVINTSGKYGYKSTFCSQDIMGPNILQNLKPC

SEQ ID NO: 61123 - protein, 95 aa, Homo sapiens
  Payload ID: 12210
  Gene Symbol: PPY
  Gene Name: pancreatic polypeptide
  Uniprot ID: P01298
  ENSP ID: ENSP00000225992
MAAARLCLSLLLLSTCVALLLQPLLGAQGAPLEPVYPGDNATPEQMAQYAADLRRYINMLTRPRYGKRHKEDTLAFSEWGSPHAAVPRELSPLDL

SEQ ID NO: 61124 - protein, 105 aa, Homo sapiens
  Payload ID: 12210
  Gene Symbol: PPY
  Gene Name: pancreatic polypeptide
  ENSP ID: ENSP00000465711
MAAARLCLSLLLLSTCVALLLQPLLGAQGAPLEPVYPGDNATPEQMAQYAADLRRYINMLTRPSACPCCLFPPRYGKRHKEDTLAFSEWGSPHAAVPRELSPLDL

SEQ ID NO: 61125 - protein, 95 aa, Homo sapiens; identical to SEQ ID NO: 61123
  Payload ID: 12210
  Gene Symbol: PPY
  Gene Name: pancreatic polypeptide
  Uniprot ID: P01298
  ENSP ID: ENSP00000466009

SEQ ID NO: 61126 - protein, 79 aa, Homo sapiens
  Payload ID: 12210
  Gene Symbol: PPY
  Gene Name: pancreatic polypeptide
  ENSP ID: ENSP00000466546
MAAARLCLSLLLLSTCVALLLQPLLGAQGAPLEPVYPGDNATPEQMAQYAADLRRYINMLTRPRPRPMCPGQDGAYRQI

SEQ ID NO: 61127 - protein, 132 aa, Homo sapiens
  Payload ID: 12210
  Gene Symbol: PPY
  Gene Name: pancreatic polypeptide
  ENSP ID: ENSP00000489472
  MOD_RES (1)..(1): Any amino acid
XQYAADLRRYINMLTRPRCVPQLGREIPAPGTLGPLHIPGHTLSPAPAPAPSRPALGKTGHLCSTGLDQCALGKMVPTGRYETGGLAPGHSACPCCLFPPRYGKRHKEDTLAFSEWGSPHAAVPRELSPLDL

SEQ ID NO: 61128 - protein, 140 aa, Homo sapiens
  Payload ID: 12211
  Gene Symbol: PPDPF
  Gene Name: pancreatic progenitor cell differentiation and proliferation factor
  ENSP ID: ENSP00000359196
MAAIPSSGSLVATHDYYRRRLGSTSSNSSCSSTECPGEAIPHPPGECRIAPFSPRSSRSWQHQDPTSLLSGLPKADPGHWWASFFFGKSTLPFMATVLESAEHSEPPQASSSMTACGLARDAPRKQPGGQSSTASAGPPS

SEQ ID NO: 61129 - protein, 114 aa, Homo sapiens
  Payload ID: 12211
  Gene Symbol: PPDPF
  Gene Name: pancreatic progenitor cell differentiation and proliferation factor
  Uniprot ID: Q9H3Y8
  ENSP ID: ENSP00000359198
MAAIPSSGSLVATHDYYRRRLGSTSSNSSCSSTECPGEAIPHPPGLPKADPGHWWASFFFGKSTLPFMATVLESAEHSEPPQASSSMTACGLARDAPRKQPGGQSSTASAGPPS

SEQ ID NO: 61130 - protein, 426 aa, Homo sapiens
  Payload ID: 12212
  Gene Symbol: PANX1
  Gene Name: pannexin 1
  Uniprot ID: Q96RD7
  ENSP ID: ENSP00000227638
MAIAQLATEYVFSDFLLKEPTEPKFKGLRLELAVDKMVTCIAVGLPLLLISLAFAQEISIGTQISCFSPSSFSWRQAAFVDSYCWAAVQQKNSLQSESGNLPLWLHKFFPYILLLFAILLYLPPLFWRFAAAPHICSDLKFIMEELDKVYNRAIKAAKSARDLDMRDGACSVPGVTENLGQSLWEVSESHFKYPIVEQYLKTKKNSNNLIIKYISCRLLTLIIILLACIYLGYYFSLSSLSDEFVCSIKSGILRNDSTVPDQFQCKLIAVGIFQLLSVINLVVYVLLAPVVVYTLFVPFRQKTDVLKVYEILPTFDVLHFKSEGYNDLSLYNLFLEENISEVKSYKCLKVLENIKSSGQGIDPMLLLTNLGMIKMDVVDGKTPMSAEMREEQGNQTAELQGMNIDSETKANNGEKNARQRLLDSSC

SEQ ID NO: 61131 - protein, 422 aa, Homo sapiens
  Payload ID: 12212
  Gene Symbol: PANX1
  Gene Name: pannexin 1
  Uniprot ID: Q96RD7
  ENSP ID: ENSP00000411461
MAIAQLATEYVFSDFLLKEPTEPKFKGLRLELAVDKMVTCIAVGLPLLLISLAFAQEISIGTQISCFSPSSFSWRQAAFVDSYCWAAVQQKNSLQSESGNLPLWLHKFFPYILLLFAILLYLPPLFWRFAAAPHICSDLKFIMEELDKVYNRAIKAAKSARDLDMRDGACSVPGVTENLGQSLWEVSESHFKYPIVEQYLKTKKNSNNLIIKYISCRLLTLIIILLACIYLGYYFSLSSLSDEFVCSIKSGILRNDSTVPDQFQCKLIAVGIFQLLSVINLVVYVLLAPVVVYTLFVPFRQKTDVLKVYEILPTFDVLHFKSEGYNDLSLYNLFLEENISEVKSYKCLKVLENIKSSGQGIDPMLLLTNLGMIKMDVVDGKTPMSAEMREEQGNQTAELQDSETKANNGEKNARQRLLDSSC

SEQ ID NO: 61132 - protein, 643 aa, Homo sapiens
  Payload ID: 12213
  Gene Symbol: PANX2
  Gene Name: pannexin 2
  Uniprot ID: Q96RD6
  ENSP ID: ENSP00000159647
MHHLLEQSADMATALLAGEKLRELILPGAQDDKAGALAALLLQLKLELPFDRVVTIGTVLVPILLVTLVFTKNFAEEPIYCYTPHNFTRDQALYARGYCWTELRDALPGVDASLWPSLFEHKFLPYALLAFAAIMYVPALGWEFLASTRLTSELNFLLQEIDNCYHRAAEGRAPKIEKQIQSKGPGITEREKREIIENAEKEKSPEQNLFEKYLERRGRSNFLAKLYLARHVLILLLSAVPISYLCTYYATQKQNEFTCALGASPDGAAGAGPAVRVSCKLPSVQLQRIIAGVDIVLLCVMNLIILVNLIHLFIFRKSNFIFDKLHKVGIKTRRQWRRSQFCDINILAMFCNENRDHIKSLNRLDFITNESDLMYDNVVRQLLAALAQSNHDATPTVRDSGVQTVDPSANPAEPDGAAEPPVVKRPRKKMKWIPTSNPLPQPFKEPLAIMRVENSKAEKPKPARRKTATDTLIAPLLDRSAHHYKGGGGDPGPGPAPAPAPPPAPDKKHARHFSLDVHPYILGTKKAKAEAVPAALPASRSQEGGFLSQAEDCGLGLAPAPIKDAPLPEKEIPYPTEPARAGLPSGGPFHVRSPPAAPAVAPLTPASLGKAEPLTILSRNATHPLLHINTLSSSPPSTSRERS

SEQ ID NO: 61133 - protein, 677 aa, Homo sapiens
  Payload ID: 12213
  Gene Symbol: PANX2
  Gene Name: pannexin 2
  Uniprot ID: Q96RD6
  ENSP ID: ENSP00000379183
MHHLLEQSADMATALLAGEKLRELILPGAQDDKAGALAALLLQLKLELPFDRVVTIGTVLVPILLVTLVFTKNFAEEPIYCYTPHNFTRDQALYARGYCWTELRDALPGVDASLWPSLFEHKFLPYALLAFAAIMYVPALGWEFLASTRLTSELNFLLQEIDNCYHRAAEGRAPKIEKQIQSKGPGITEREKREIIENAEKEKSPEQNLFEKYLERRGRSNFLAKLYLARHVLILLLSAVPISYLCTYYATQKQNEFTCALGASPDGAAGAGPAVRVSCKLPSVQLQRIIAGVDIVLLCVMNLIILVNLIHLFIFRKSNFIFDKLHKVGIKTRRQWRRSQFCDINILAMFCNENRDHIKSLNRLDFITNESDLMYDNVVRQLLAALAQSNHDATPTVRDSGVQTVDPSANPAEPDGAAEPPVVKRPRKKMKWIPTSNPLPQPFKEPLAIMRVENSKAEKPKPARRKTATDTLIAPLLDRSAHHYKGGGGDPGPGPAPAPAPPPAPDKKHARHFSLDVHPYILGTKKAKAEAVPAALPASRSQEGGFLSQAEDCGLGLAPAPIKDAPLPEKEIPYPTEPARAGLPSGGPFHVRSPPAAPAVAPLTPASLGKAEPLTILSRNATHPLLHINTLYEAREEEDGGPRLPQDVGDLIAIPAPQQILIATFDEPRTVVSTVEF

SEQ ID NO: 61134 - protein, 77 aa, Homo sapiens
  Payload ID: 12213
  Gene Symbol: PANX2
  Gene Name: pannexin 2
  ENSP ID: ENSP00000384148
MATALLAGEKLRELILPGAQDDKAGALAALLLQLKLELPFDRVVTIGTVLVPILLVTLVFTKNFAGWTLFSGSWDWL

SEQ ID NO: 61135 - protein, 392 aa, Homo sapiens
  Payload ID: 12214
  Gene Symbol: PANX3
  Gene Name: pannexin 3
  Uniprot ID: Q96QZ0
  ENSP ID: ENSP00000284288
MSLAHTAAEYMLSDALLPDRRGPRLKGLRLELPLDRIVKFVAVGSPLLLMSLAFAQEFSSGSPISCFSPSNFSIRQAAYVDSSCWDSLLHHKQDGPGQDKMKSLWPHKALPYSLLALALLMYLPVLLWQYAAVPALSSDLLFIISELDKSYNRSIRLVQHMLKIRQKSSDPYVFWNELEKARKERYFEFPLLERYLACKQRSHSLVATYLLRNSLLLIFTSATYLYLGHFHLDVFFQEEFSCSIKTGLLSDETHVPNLITCRLTSLSIFQIVSLSSVAIYTILVPVIIYNLTRLCRWDKRLLSVYEMLPAFDLLSRKMLGCPINDLNVILLFLRANISELISFSWLSVLCVLKDTTTQKHNIDTVVDFMTLLAGLEPSKPKHLTNSACDEHP

SEQ ID NO: 61136 - protein, 598 aa, Homo sapiens
  Payload ID: 12215
  Gene Symbol: PANK1
  Gene Name: pantothenate kinase 1
  Uniprot ID: Q8TE04
  ENSP ID: ENSP00000302108
MLKLVGGGGGQDWACSVAGTSLGGEEAAFEVARPGDQGKAGGGSPGWGCAGIPDSAPGAGVLQAGAVGPARGGQGAEEVGESAGGGEERRVRHPQAPALRLLNRKPQGGSGEIKTPENDLQRGRLSRGPRTAPPAPGMGDRSGQQERSVPHSPGAPVGTSAAAVNGLLHNGFHPPPVQPPHVCSRGPVGGSDAAPQRLPLLPELQPQPLLPQHDSPAKKCRLRRRMDSGRKNRPPFPWFGMDIGGTLVKLVYFEPKDITAEEEQEEVENLKSIRKYLTSNTAYGKTGIRDVHLELKNLTMCGRKGNLHFIRFPSCAMHRFIQMGSEKNFSSLHTTLCATGGGAFKFEEDFRMIADLQLHKLDELDCLIQGLLYVDSVGFNGKPECYYFENPTNPELCQKKPYCLDNPYPMLLVNMGSGVSILAVYSKDNYKRVTGTSLGGGTFLGLCCLLTGCETFEEALEMAAKGDSTNVDKLVKDIYGGDYERFGLQGSAVASSFGNMMSKEKRDSISKEDLARATLVTITNNIGSIARMCALNENIDRVVFVGNFLRINMVSMKLLAYAMDFWSKGQLKALFLEHEGYFGAVGALLELFKMTDDK

SEQ ID NO: 61137 - protein, 314 aa, Homo sapiens
  Payload ID: 12215
  Gene Symbol: PANK1
  Gene Name: pantothenate kinase 1
  Uniprot ID: Q8TE04
  ENSP ID: ENSP00000318526
MKLINGKKQTFPWFGMDIGGTLVKLVYFEPKDITAEEEQEEVENLKSIRKYLTSNTAYGKTGIRDVHLELKNLTMCGRKGNLHFIRFPSCAMHRFIQMGSEKNFSSLHTTLCATGGGAFKFEEDFRMIADLQLHKLDELDCLIQGLLYVDSVGFNGKPECYYFENPTNPELCQKKPYCLDNPYPMLLVNMGSGVSILAVYSKDNYKRVTGTSFGNMMSKEKRDSISKEDLARATLVTITNNIGSIARMCALNENIDRVVFVGNFLRINMVSMKLLAYAMDFWSKGQLKALFLEHEGYFGAVGALLELFKMTDDK

SEQ ID NO: 61138 - protein, 373 aa, Homo sapiens
  Payload ID: 12215
  Gene Symbol: PANK1
  Gene Name: pantothenate kinase 1
  Uniprot ID: Q8TE04
  ENSP ID: ENSP00000345118
MKLINGKKQTFPWFGMDIGGTLVKLVYFEPKDITAEEEQEEVENLKSIRKYLTSNTAYGKTGIRDVHLELKNLTMCGRKGNLHFIRFPSCAMHRFIQMGSEKNFSSLHTTLCATGGGAFKFEEDFRMIADLQLHKLDELDCLIQGLLYVDSVGFNGKPECYYFENPTNPELCQKKPYCLDNPYPMLLVNMGSGVSILAVYSKDNYKRVTGTSLGGGTFLGLCCLLTGCETFEEALEMAAKGDSTNVDKLVKDIYGGDYERFGLQGSAVASSFGNMMSKEKRDSISKEDLARATLVTITNNIGSIARMCALNENIDRVVFVGNFLRINMVSMKLLAYAMDFWSKGQLKALFLEHEGYFGAVGALLELFKMTDDK

SEQ ID NO: 61139 - protein, 570 aa, Homo sapiens
  Payload ID: 12216
  Gene Symbol: PANK2
  Gene Name: pantothenate kinase 2
  Uniprot ID: Q9BZ23
  ENSP ID: ENSP00000313377
MRRLGPFHPRVHWAAPPSLSSGLHRLLFLRGTRIPSSTTLSPPRHDSLSLDGGTVNPPRVREPTGREAFGPSPASSDWLPARWRNGRGGRPRARLCSGWTAAEEARRNPTLGGLLGRQRLLLRMGGGRLGAPMERHGRASATSVSSAGEQAAGDPEGRRQEPLRRRASSASVPAVGASAEGTRRDRLGSYSGPTSVSRQRVESLRKKRPLFPWFGLDIGGTLVKLVYFEPKDITAEEEEEEVESLKSIRKYLTSNVAYGSTGIRDVHLELKDLTLCGRKGNLHFIRFPTHDMPAFIQMGRDKNFSSLHTVFCATGGGAYKFEQDFLTIGDLQLCKLDELDCLIKGILYIDSVGFNGRSQCYYFENPADSEKCQKLPFDLKNPYPLLLVNIGSGVSILAVYSKDNYKRVTGTSLGGGTFFGLCCLLTGCTTFEEALEMASRGDSTKVDKLVRDIYGGDYERFGLPGWAVASSFGNMMSKEKREAVSKEDLARATLITITNNIGSIARMCALNENINQVVFVGNFLRINTIAMRLLAYALDYWSKGQLKALFSEHEGYFGAVGALLELLKIP

SEQ ID NO: 61140 - protein, 279 aa, Homo sapiens
  Payload ID: 12216
  Gene Symbol: PANK2
  Gene Name: pantothenate kinase 2
  Uniprot ID: Q9BZ23
  ENSP ID: ENSP00000417609
MPAFIQMGRDKNFSSLHTVFCATGGGAYKFEQDFLTIGDLQLCKLDELDCLIKGILYIDSVGFNGRSQCYYFENPADSEKCQKLPFDLKNPYPLLLVNIGSGVSILAVYSKDNYKRVTGTSLGGGTFFGLCCLLTGCTTFEEALEMASRGDSTKVDKLVRDIYGGDYERFGLPGWAVASSFGNMMSKEKREAVSKEDLARATLITITNNIGSIARMCALNENINQVVFVGNFLRINTIAMRLLAYALDYWSKGQLKALFSEHEGYFGAVGALLELLKIP

SEQ ID NO: 61141 - protein, 115 aa, Homo sapiens
  Payload ID: 12216
  Gene Symbol: PANK2
  Gene Name: pantothenate kinase 2
  ENSP ID: ENSP00000476745
MASRGDSTKVDKLVRDIYGGDYERFGLPGWAVASSFGNMMSKEKREAVSKEDLARATLITITNNIGSIARMCALNENINQVVFVGNFLRINTIAMRLLAYALDYWSKGQLKALFS

SEQ ID NO: 61142 - protein, 158 aa, Homo sapiens
  Payload ID: 12216
  Gene Symbol: PANK2
  Gene Name: pantothenate kinase 2
  ENSP ID: ENSP00000477229
MGGGRLGAPMERHGRASATSVSSAGEQAAGDPEGRRQEPLRRRASSASVPAVGASAEGTRRDRLGSYSGPTSVSRQRVESLRKKRPLFPWFGLDIGGTLVKLVYFEPKDITAEEEEEEVESLKSIRKYLTSNVAYGSTGIRDVHLELKDLTLCGRKDR

SEQ ID NO: 61143 - protein, 447 aa, Homo sapiens
  Payload ID: 12216
  Gene Symbol: PANK2
  Gene Name: pantothenate kinase 2
  Uniprot ID: Q9BZ23
  ENSP ID: ENSP00000477429
MGGGRLGAPMERHGRASATSVSSAGEQAAGDPEGRRQEPLRRRASSASVPAVGASAEGTRRDRLGSYSGPTSVSRQRVESLRKKRPLFPWFGLDIGGTLVKLVYFEPKDITAEEEEEEVESLKSIRKYLTSNVAYGSTGIRDVHLELKDLTLCGRKGNLHFIRFPTHDMPAFIQMGRDKNFSSLHTVFCATGGGAYKFEQDFLTIGDLQLCKLDELDCLIKGILYIDSVGFNGRSQCYYFENPADSEKCQKLPFDLKNPYPLLLVNIGSGVSILAVYSKDNYKRVTGTSLGGGTFFGLCCLLTGCTTFEEALEMASRGDSTKVDKLVRDIYGGDYERFGLPGWAVASSFGNMMSKEKREAVSKEDLARATLITITNNIGSIARMCALNENINQVVFVGNFLRINTIAMRLLAYALDYWSKGQLKALFSEHEGYFGAVGALLELLKIP

SEQ ID NO: 61144 - protein, 279 aa, Homo sapiens; identical to SEQ ID NO: 61140
  Payload ID: 12216
  Gene Symbol: PANK2
  Gene Name: pantothenate kinase 2
  Uniprot ID: Q9BZ23
  ENSP ID: ENSP00000481523

SEQ ID NO: 61145 - protein, 370 aa, Homo sapiens
  Payload ID: 12217
  Gene Symbol: PANK3
  Gene Name: pantothenate kinase 3
  Uniprot ID: Q9H999
  ENSP ID: ENSP00000239231
MKIKDAKKPSFPWFGMDIGGTLVKLSYFEPIDITAEEEQEEVESLKSIRKYLTSNVAYGSTGIRDVHLELKDLTLFGRRGNLHFIRFPTQDLPTFIQMGRDKNFSTLQTVLCATGGGAYKFEKDFRTIGNLHLHKLDELDCLVKGLLYIDSVSFNGQAECYYFANASEPERCQKMPFNLDDPYPLLVVNIGSGVSILAVHSKDNYKRVTGTSLGGGTFLGLCSLLTGCESFEEALEMASKGDSTQADKLVRDIYGGDYERFGLPGWAVASSFGNMIYKEKRESVSKEDLARATLVTITNNIGSVARMCAVNEKINRVVFVGNFLRVNTLSMKLLAYALDYWSKGQLKALFLEHEGYFGAVGALLGLPNFS

SEQ ID NO: 61146 - protein, 122 aa, Homo sapiens
  Payload ID: 12217
  Gene Symbol: PANK3
  Gene Name: pantothenate kinase 3
  ENSP ID: ENSP00000428631
MDIGGTLVKLSYFEPIDITAEEEQEEVESLKSIRKYLTSNVAYGSTGIRDVHLELKDLTLFGRRGNLHFIRFPTQDLPTFIQMGRDKNFSTLQTVLCATGGGAYKFEKDFRTIGNLHLHKLD

SEQ ID NO: 61147 - protein, 781 aa, Homo sapiens
  Payload ID: 12218
  Gene Symbol: PANK4
  Gene Name: pantothenate kinase 4
  Uniprot ID: Q9NVE7
  ENSP ID: ENSP00000367727
MSWPGTFKMAECGASGSGSSGDSLDKSITLPPDEIFRNLENAKRFAIDIGGSLTKLAYYSTVQHKVAKVRSFDHSGKDTEREHEPPYEISVQEEITARLHFIKFENTYIEACLDFIKDHLVNTETKVIQATGGGAYKFKDLIEEKLRLKVDKEDVMTCLIKGCNFVLKNIPHEAFVYQKDSDPEFRFQTNHPHIFPYLLVNIGSGVSIVKVETEDRFEWVGGSSIGGGTFWGLGALLTKTKKFDELLHLASRGQHSNVDMLVRDVYGGAHQTLGLSGNLIASSFGKSATADQEFSKEDMAKSLLHMISNDIGQLACLHARLHSLDRVYFGGFFIRGHPVTMRTITYSINFFSKGEVQALFLRHEGYLGAIGAFLKGAEQDNPNQYSWGENYAGSSGLMSASPELGPAQRARSGTFDLLEMDRLERPLVDLPLLLDPPSYVPDTVDLTDDALARKYWLTCFEEALDGVVKRAVASQPDSVDAAERAEKFRQKYWNKLQTLRQQPFAYGTLTVRSLLDTREHCLNEFNFPDPYSKVKQRENGVALRCFPGVVRSLDALGWEERQLALVKGLLAGNVFDWGAKAVSAVLESDPYFGFEEAKRKLQERPWLVDSYSEWLQRLKGPPHKCALIFADNSGIDIILGVFPFVRELLLRGTEVILACNSGPALNDVTHSESLIVAERIAGMDPVVHSALQEERLLLVQTGSSSPCLDLSRLDKGLAALVRERGADLVVIEGMGRAVHTNYHAALRCESLKLAVIKNAWLAERLGGRLFSVIFKYEVPAE

SEQ ID NO: 61148 - protein, 737 aa, Homo sapiens
  Payload ID: 12218
  Gene Symbol: PANK4
  Gene Name: pantothenate kinase 4
  ENSP ID: ENSP00000421433
TFKMAECGASGSGSSGDSLDKSITLPPDEIFRNLENAKRFAIDIGGSLTKLAYYSTVQHKVAKVRSFDHSGKDTEREHEPPYEISVQEEITARLHFIKFENTYIEACLDFIKDHLVNTETKVIQATGGGAFVYQKDSDPEFRFQTNHPHIFPYLLVNIGSGVSIVKVETEDRFEWVGGSSIGGGTFWGLGALLTKTKKFDELLHLASRGQHSNVDMLVRDVYGGAHQTLGLSGNLIASSFGKSATADQEFSKEDMAKSLLHMISNDIGQLACLHARLHSLDRVYFGGFFIRGHPVTMRTITYSINFFSKGEVQALFLRHEGYLGAIGAFLKGAEQDNPNQYSWGENYAGSSGLMSASPELGPAQRARSGTFDLLEMDRLERPLVDLPLLLDPPSYVPDTVDLTDDALARKYWLTCFEEALDGVVKRAVASQPDSVDAAERAEKFRQKYWNKLQTLRQQPFAYGTLTVRSLLDTREHCLNEFNFPDPYSKVKQRENGVALRCFPGVVRSLDALGWEERQLALVKGLLAGNVFDWGAKAVSAVLESDPYFGFEEAKRKLQERPWLVDSYSEWLQRLKGPPHKCALIFADNSGIDIILGVFPFVRELLLRGTEVILACNSGPALNDVTHSESLIVAERIAGMDPVVHSALQEERLLLVQTGSSSPCLDLSRLDKGLAALVRERGADLVVIEGMGRAVHTNYHAALRCESLKLAVIKNAWLAERLGGRLFSVIFKYEVPAE

SEQ ID NO: 61149 - protein, 136 aa, Homo sapiens
  Payload ID: 12218
  Gene Symbol: PANK4
  Gene Name: pantothenate kinase 4
  ENSP ID: ENSP00000423920
FRQKYWNKLQTLRQQPFAYGTLTVRSLLDTREHCLNEFNFPDPYSKVKQRENGVALRCFPGVVRSLDALGWEERQLALVKGLLAGNVFDWGAKAVSAVLESDPYFGFEEAKRKLQERPWLVDSYSEWLQRLKITVE

SEQ ID NO: 61150 - protein, 41 aa, Homo sapiens
  Payload ID: 12218
  Gene Symbol: PANK4
  Gene Name: pantothenate kinase 4
  ENSP ID: ENSP00000425668
GASGSGSSGDSLDKSITLPPDEIFRNLENAKRFAIDIGHRT

SEQ ID NO: 61151 - protein, 154 aa, Homo sapiens
  Payload ID: 12218
  Gene Symbol: PANK4
  Gene Name: pantothenate kinase 4
  ENSP ID: ENSP00000425674
TFKMAECGASGSGSSGDSLDKSITLPPDEIFRNLENAKRFAIDIGFLSSSSPKPLIYRDFSLQDTQRVWGMDPQAPLCPGPESCPVCVSPAGGSLTKLAYYSTVQHKVAKVRSFDHSGKVSLHCGHPGQGSRFSVVLDLALVSQSSLCCCRPRL

SEQ ID NO: 61152 - protein, 473 aa, Homo sapiens
  Payload ID: 12218
  Gene Symbol: PANK4
  Gene Name: pantothenate kinase 4
  ENSP ID: ENSP00000425932
  MOD_RES (1)..(1): Any amino acid
XKEDVMTCLIKGCNFVLKNIPHEAFVYQKDSDPEFRFQTNHPHIFPYLLVNIGSGVSIVKVETEDRFEWVGGSSIGGGTFWGLGALLTKTKKFDELLHLASRGQHSNVDMLVRDVYGGAHQTLGLSGNLIASSFGKSATADQEFSKEDMAKSLLHMISNDIGQLACLHARLHSLDRVYFGGFFIRGHPVTMRTITYSINFFSKGEVQALFLRHEGYLGAIGAFLKGAEQDNPNQYSWGENYAGSSGLMSASPELGPAQRARSGTFDLLEMDRLERPLVDLPLLLDPPSYVPDTVDLTDDALARKYWLTCFEEALDGVVKRAVASQPDSVDAAERAEKFRQKYWNKLQTLRQQPFAYGTLTVRSLLDTREHCLNEFNFPDPYSKVKQRENGVALRCFPGVVRSLDALGWEERQLALVKGLLAGNVFDWGAKAVSAVLESDPYFGFEEAKRKLQERPWLVDSYSEWLQRLKITVE

SEQ ID NO: 61153 - protein, 190 aa, Homo sapiens
  Payload ID: 12218
  Gene Symbol: PANK4
  Gene Name: pantothenate kinase 4
  ENSP ID: ENSP00000425977
LLHMISNDIGQLACLHARLHSLDRVYFGGFFIRGHPVTMRTITYSINFFSKGEVQALFLRHEGYLGAIGAFLKGAEQDNPNQYSWGENYAGSSGLMSASPELGPAQRARSGTFDLLEMDRLERPLVDLPLLLDPPSYVPDTVDLTDDALARKYWLTCFEEALDGAKIPLLATWWVSEDVASARHVASKGS

SEQ ID NO: 61154 - protein, 773 aa, Homo sapiens
  Payload ID: 12218
  Gene Symbol: PANK4
  Gene Name: pantothenate kinase 4
  Uniprot ID: Q9NVE7
  ENSP ID: ENSP00000478189
MAECGASGSGSSGDSLDKSITLPPDEIFRNLENAKRFAIDIGGSLTKLAYYSTVQHKVAKVRSFDHSGKDTEREHEPPYEISVQEEITARLHFIKFENTYIEACLDFIKDHLVNTETKVIQATGGGAYKFKDLIEEKLRLKVDKEDVMTCLIKGCNFVLKNIPHEAFVYQKDSDPEFRFQTNHPHIFPYLLVNIGSGVSIVKVETEDRFEWVGGSSIGGGTFWGLGALLTKTKKFDELLHLASRGQHSNVDMLVRDVYGGAHQTLGLSGNLIASSFGKSATADQEFSKEDMAKSLLHMISNDIGQLACLHARLHSLDRVYFGGFFIRGHPVTMRTITYSINFFSKGEVQALFLRHEGYLGAIGAFLKGAEQDNPNQYSWGENYAGSSGLMSASPELGPAQRARSGTFDLLEMDRLERPLVDLPLLLDPPSYVPDTVDLTDDALARKYWLTCFEEALDGVVKRAVASQPDSVDAAERAEKFRQKYWNKLQTLRQQPFAYGTLTVRSLLDTREHCLNEFNFPDPYSKVKQRENGVALRCFPGVVRSLDALGWEERQLALVKGLLAGNVFDWGAKAVSAVLESDPYFGFEEAKRKLQERPWLVDSYSEWLQRLKGPPHKCALIFADNSGIDIILGVFPFVRELLLRGTEVILACNSGPALNDVTHSESLIVAERIAGMDPVVHSALQEERLLLVQTGSSSPCLDLSRLDKGLAALVRERGADLVVIEGMGRAVHTNYHAALRCESLKLAVIKNAWLAERLGGRLFSVIFKYEVPAE

SEQ ID NO: 61155 - protein, 151 aa, Homo sapiens
  Payload ID: 12218
  Gene Symbol: PANK4
  Gene Name: pantothenate kinase 4
  ENSP ID: ENSP00000486126
MAECGASGSGSSGDSLDKSITLPPDEIFRNLENAKRFAIDIGFLSSSSPKPLIYRDFSLQDTQRVWGMDPQAPLCPGPESCPVCVSPAGGSLTKLAYYSTVQHKVAKVRSFDHSGKVSLHCGHPGQGSRFSVVLDLALVSQSSLCCCRPRL

SEQ ID NO: 61156 - protein, 136 aa, Homo sapiens; identical to SEQ ID NO: 61149
  Payload ID: 12218
  Gene Symbol: PANK4
  Gene Name: pantothenate kinase 4
  ENSP ID: ENSP00000486272

SEQ ID NO: 61157 - protein, 734 aa, Homo sapiens
  Payload ID: 12218
  Gene Symbol: PANK4
  Gene Name: pantothenate kinase 4
  ENSP ID: ENSP00000486414
MAECGASGSGSSGDSLDKSITLPPDEIFRNLENAKRFAIDIGGSLTKLAYYSTVQHKVAKVRSFDHSGKDTEREHEPPYEISVQEEITARLHFIKFENTYIEACLDFIKDHLVNTETKVIQATGGGAFVYQKDSDPEFRFQTNHPHIFPYLLVNIGSGVSIVKVETEDRFEWVGGSSIGGGTFWGLGALLTKTKKFDELLHLASRGQHSNVDMLVRDVYGGAHQTLGLSGNLIASSFGKSATADQEFSKEDMAKSLLHMISNDIGQLACLHARLHSLDRVYFGGFFIRGHPVTMRTITYSINFFSKGEVQALFLRHEGYLGAIGAFLKGAEQDNPNQYSWGENYAGSSGLMSASPELGPAQRARSGTFDLLEMDRLERPLVDLPLLLDPPSYVPDTVDLTDDALARKYWLTCFEEALDGVVKRAVASQPDSVDAAERAEKFRQKYWNKLQTLRQQPFAYGTLTVRSLLDTREHCLNEFNFPDPYSKVKQRENGVALRCFPGVVRSLDALGWEERQLALVKGLLAGNVFDWGAKAVSAVLESDPYFGFEEAKRKLQERPWLVDSYSEWLQRLKGPPHKCALIFADNSGIDIILGVFPFVRELLLRGTEVILACNSGPALNDVTHSESLIVAERIAGMDPVVHSALQEERLLLVQTGSSSPCLDLSRLDKGLAALVRERGADLVVIEGMGRAVHTNYHAALRCESLKLAVIKNAWLAERLGGRLFSVIFKYEVPAE

SEQ ID NO: 61158 - protein, 473 aa, Homo sapiens; identical to SEQ ID NO: 61152
  Payload ID: 12218
  Gene Symbol: PANK4
  Gene Name: pantothenate kinase 4
  ENSP ID: ENSP00000486638
  MOD_RES (1)..(1): Any amino acid

SEQ ID NO: 61159 - protein, 41 aa, Homo sapiens; identical to SEQ ID NO: 61150
  Payload ID: 12218
  Gene Symbol: PANK4
  Gene Name: pantothenate kinase 4
  ENSP ID: ENSP00000487314

SEQ ID NO: 61160 - protein, 190 aa, Homo sapiens; identical to SEQ ID NO: 61153
  Payload ID: 12218
  Gene Symbol: PANK4
  Gene Name: pantothenate kinase 4
  ENSP ID: ENSP00000487332

SEQ ID NO: 61161 - protein, 484 aa, Homo sapiens
  Payload ID: 12219
  Gene Symbol: PAPD4
  Gene Name: PAP associated domain containing 4
  Uniprot ID: Q6PIY7
  ENSP ID: ENSP00000296783
MFPNSILGRPPFTPNHQQHNNFFTLSPTVYSHQQLIDAQFNFQNADLSRAVSLQQLTYGNVSPIQTSASPLFRGRKRLSDEKNLPLDGKRQRFHSPHQEPTVVNQIVPLSGERRYSMPPLFHTHYVPDIVRCVPPFREIAFLEPREITLPEAKDKLSQQILELFETCQQQISDLKKKELCRTQLQREIQLLFPQSRLFLVGSSLNGFGTRSSDGDLCLVVKEEPCFFQVNQKTEARHILTLVHKHFCTRLSGYIERPQLIRAKVPIVKFRDKVSCVEFDLNVNNIVGIRNTFLLRTYAYLENRVRPLVLVIKKWASHHQINDASRGTLSSYSLVLMVLHYLQTLPEPILPSLQKIYPESFSPAIQLHLVHQAPCNVPPYLSKNESNLGDLLLGFLKYYATEFDWNSQMISVREAKAIPRPDGIEWRNKYICVEEPFDGTNTARAVHEKQKFDMIKDQFLKSWHRLKNKRDLNSILPVRAAVLKR

SEQ ID NO: 61162 - protein, 480 aa, Homo sapiens
  Payload ID: 12219
  Gene Symbol: PAPD4
  Gene Name: PAP associated domain containing 4
  Uniprot ID: Q6PIY7
  ENSP ID: ENSP00000393412
MFPNSILGRPPFTPNHQQHNNFFTLSPTVYSHQQLIDAQFNFQNADLSRAVSLQQLTYGNVSPIQTSASPLFRGRKRLSDEKNLPLDGKRQRFHSPHQEPTVVNQIVPLSGERRYSMPPLFHTHYVPDIVRCVPPFREIAFLEPREITLPEAKDKLSQQILELFETCQQQISDLKKKELCRTQLQREIQLLFPQSRLFLVGSSLNGFGTRSSDGDLCLVVKEEPVNQKTEARHILTLVHKHFCTRLSGYIERPQLIRAKVPIVKFRDKVSCVEFDLNVNNIVGIRNTFLLRTYAYLENRVRPLVLVIKKWASHHQINDASRGTLSSYSLVLMVLHYLQTLPEPILPSLQKIYPESFSPAIQLHLVHQAPCNVPPYLSKNESNLGDLLLGFLKYYATEFDWNSQMISVREAKAIPRPDGIEWRNKYICVEEPFDGTNTARAVHEKQKFDMIKDQFLKSWHRLKNKRDLNSILPVRAAVLKR

SEQ ID NO: 61163 - protein, 484 aa, Homo sapiens; identical to SEQ ID NO: 61161
  Payload ID: 12219
  Gene Symbol: PAPD4
  Gene Name: PAP associated domain containing 4
  Uniprot ID: Q6PIY7
  ENSP ID: ENSP00000396861

SEQ ID NO: 61164 - protein, 484 aa, Homo sapiens; identical to SEQ ID NO: 61161
  Payload ID: 12219
  Gene Symbol: PAPD4
  Gene Name: PAP associated domain containing 4
  Uniprot ID: Q6PIY7
  ENSP ID: ENSP00000397563

SEQ ID NO: 61165 - protein, 441 aa, Homo sapiens
  Payload ID: 12219
  Gene Symbol: PAPD4
  Gene Name: PAP associated domain containing 4
  ENSP ID: ENSP00000421966
MFPNSILGRPPFTPNHQQHNNFFTLSPTVYSHQQLIDAQFNFQNADLSRAVSLQQLTYGNVSPIQTSASPLFRGRKRLSDEKNLPLDGKRQRFHSPHQEPTVVNQIVPLSGERRYSMPPLFHTHYVPDIVRCVPPFREIAFLEPREITLPEAKDKLSQQILELFETCQQQISDLKKKELCRTQLQREIQLLFPQSRLFLVGSSLNGFGTRSSDGDLCLVVKEEPCFFQVNQKTEARHILTLVHKHFCTRLSGYIERPQLIRAKVPIVKFRDKVSCVEFDLNVNNIVGIRNTFLLRTYAYPLPEPILPSLQKIYPESFSPAIQLHLVHQAPCNVPPYLSKNESNLGDLLLGFLKYYATEFDWNSQMISVREAKAIPRPDGIEWRNKYICVEEPFDGTNTARAVHEKQKFDMIKDQFLKSWHRLKNKRDLNSILPVRAAVLKR

SEQ ID NO: 61166 - protein, 303 aa, Homo sapiens
  Payload ID: 12220
  Gene Symbol: PAPD5
  Gene Name: PAP associated domain containing 5
  ENSP ID: ENSP00000350054
  MOD_RES (1)..(1): Any amino acid
XIFGSFKTGLYLPTSDIDLVVFGKWENLPLWTLEEALRKHKVADEDSVKVLDKATVPIIKLTDSFTEVKVDISFNVQNGVRAADLIKDFTKKYPVLPYLVLVLKQFLLQRDLNEVFTGGIGSYSLFLMAVSFLQLHPREDACIPNTNYGVLLIEFFELYGRHFNYLKTGIRIKDGGSYVAKDEVQKNMLDGYRPSMLYIEDPLQPGNDVGRSSYGAMQVKQAFDYAYVVLSHAVSPIAKYYPNNETESILGRIIRVTDEVATYRDWISKQWGLKNRPEPSCNGKIFSLVQCRPLLPHSPALVM

SEQ ID NO: 61167 - protein, 698 aa, Homo sapiens
  Payload ID: 12220
  Gene Symbol: PAPD5
  Gene Name: PAP associated domain containing 5
  Uniprot ID: Q8NDF8
  ENSP ID: ENSP00000396995
MRPRPRSAPGKPRRRSRARLRSSRTPSGGASGGGGSSSSSSTATGGSGSSTGSPGGAASAPAPAPAGMYRSGERLLGSHALPAEQRDFLPLETTNNNNNHHQPGAWARRAGSSASSPPSASSSPHPSAAVPAADPADSASGSSNKRKRDNKASTYGLNYSLLQPSGGRAAGGGRADGGGVVYSGTPWKRRNYNQGVVGLHEEISDFYEYMSPRPEEEKMRMEVVNRIESVIKELWPSADVQIFGSFKTGLYLPTSDIDLVVFGKWENLPLWTLEEALRKHKVADEDSVKVLDKATVPIIKLTDSFTEVKVDISFNVQNGVRAADLIKDFTKKYPVLPYLVLVLKQFLLQRDLNEVFTGGIGSYSLFLMAVSFLQLHPREDACIPNTNYGVLLIEFFELYGRHFNYLKTGIRIKDGGSYVAKDEVQKNMLDGYRPSMLYIEDPLQPGNDVGRSSYGAMQVKQAFDYAYVVLSHAVSPIAKYYPNNETESILGRIIRVTDEVATYRDWISKQWGLKNRPEPSCNGNGVTLIVDTQQLDKCNNNLSEENEALGKCRSKTSESLSKHSSNSSSGPVSSSSATQSSSSDVDSDATPCKTPKQLLCRPSTGNRVGSQDVSLESSQAVGKMQSTQTTNTSNSTNKSQHGSARLFRSSSKGFQGTTQTSHGSLMTNKQHQGKSNNQYYHGKKRKHKRDAPLSDLCR

SEQ ID NO: 61168 - protein, 588 aa, Homo sapiens
  Payload ID: 12220
  Gene Symbol: PAPD5
  Gene Name: PAP associated domain containing 5
  ENSP ID: ENSP00000455837
MYRSGERLLGSHALPAEQRDFLPLETTNNNNNHHQPGAWARRAGSSASSPPSASSSPHPSAAVPAADPADSASGSSNKRKRDNKASTYGLNYSLLQPSGGRAAGGGRADGGGVVYSGTPWKRRNYNQGVVGLHEEISDFYEYMSPRPEEEKMRMEVVNRIESVIKELWPSADVQIFGSFKTGLYLPTSDIDLVVFGKWENLPLWTLEEALRKHKVADEDSVKVLDKATVPIIKLTDSFTEVKVDISFNVQNGVRAADLIKDFTKLHPREDACIPNTNYGVLLIEFFELYGRHFNYLKTGIRIKDGGSYVAKDEVQKNMLDGYRPSMLYIEDPLQPGNDVGRSSYGAMQVKQAFDYAYVVLSHAVSPIAKYYPNNETESILGRIIRVTDEVATYRDWISKQWGLKNRPEPSCNGNGVTLIVDTQQLDKCNNNLSEENEALGKCRSKTSESLSKHSSNSSSGPVSSSSATQSSSSDVDSDATPCKTPKQLLCRPSTGNRVGSQDVSLESSQAVGKMQSTQTTNTSNSTNKSQHGSARLFRSSSKGFQGTTQTSHGSLMTNKQHQGKSNNQYYHGKKRKHKRDAPLSDLCR

SEQ ID NO: 61169 - protein, 792 aa, Homo sapiens
  Payload ID: 12221
  Gene Symbol: PAPD7
  Gene Name: PAP associated domain containing 7
  Uniprot ID: Q5XG87
  ENSP ID: ENSP00000230859
MDPRVAWIQPEQKGPANALWMQIWETSQGVGRGGSGFASYFCLNSPALDTAAAAGAAGRGSGGLGPALPAASPPPPGPTAPAALPPALLTALGPAAEGARRLHKSPSLSSSSSSSSSNAESGTESPGCSSSSSSSASLGRPGGGRGGAFFNFADGAPSAPGTANGHPGPRGPAPAGSPSQHQFHPGRRKRENKASTYGLNYLLSGSRAAALSGGGGPGAQAPRPGTPWKSRAYSPGIQGLHEEIIDFYNFMSPCPEEAAMRREVVKRIETVVKDLWPTADVQIFGSFSTGLYLPTSDIDLVVFGKWERPPLQLLEQALRKHNVAEPCSIKVLDKATVPIIKLTDQETEVKVDISFNMETGVRAAEFIKNYMKKYSLLPYLILVLKQFLLQRDLNEVFTGGISSYSLILMAISFLQLHPRIDARRADENLGMLLVEFFELYGRNFNYLKTGIRIKEGGAYIAKEEIMKAMTSGYRPSMLCIEDPLLPGNDVGRSSYGAMQVKQVFDYAYIVLSHAVSPLARSYPNRDAESTLGRIIKVTQEVIDYRRWIKEKWGSKAHPSPGMDSRIKIKERIATCNGEQTQNREPESPYGQRLTLSLSSPQLLSSGSSASSVSSLSGSDVDSDTPPCTTPSVYQFSLQAPAPLMAGLPTALPMPSGKPQPTTSRTLIMTTNNQTRFTIPPPTLGVAPVPCRQAGVEGTASLKAVHHMSSPAIPSASPNPLSSPHLYHKQHNGMKLSMKGSHGHTQGGGYSSVGSGGVRPPVGNRGHHQYNRTGWRRKKHTHTRDSLPVSLSR

SEQ ID NO: 61170 - protein, 27 aa, Homo sapiens
  Payload ID: 12221
  Gene Symbol: PAPD7
  Gene Name: PAP associated domain containing 7
  ENSP ID: ENSP00000427232
MSPCPEEAAMRREVVKRIETVVKDLWP

SEQ ID NO: 61171 - protein, 542 aa, Homo sapiens
  Payload ID: 12221
  Gene Symbol: PAPD7
  Gene Name: PAP associated domain containing 7
  Uniprot ID: Q5XG87
  ENSP ID: ENSP00000488642
MSPCPEEAAMRREVVKRIETVVKDLWPTADVQIFGSFSTGLYLPTSDIDLVVFGKWERPPLQLLEQALRKHNVAEPCSIKVLDKATVPIIKLTDQETEVKVDISFNMETGVRAAEFIKNYMKKYSLLPYLILVLKQFLLQRDLNEVFTGGISSYSLILMAISFLQLHPRIDARRADENLGMLLVEFFELYGRNFNYLKTGIRIKEGGAYIAKEEIMKAMTSGYRPSMLCIEDPLLPGNDVGRSSYGAMQVKQVFDYAYIVLSHAVSPLARSYPNRDAESTLGRIIKVTQEVIDYRRWIKEKWGSKAHPSPGMDSRIKIKERIATCNGEQTQNREPESPYGQRLTLSLSSPQLLSSGSSASSVSSLSGSDVDSDTPPCTTPSVYQFSLQAPAPLMAGLPTALPMPSGKPQPTTSRTLIMTTNNQTRFTIPPPTLGVAPVPCRQAGVEGTASLKAVHHMSSPAIPSASPNPLSSPHLYHKQHNGMKLSMKGSHGHTQGGGYSSVGSGGVRPPVGNRGHHQYNRTGWRRKKHTHTRDSLPVSLSR

SEQ ID NO: 61172 - protein, 808 aa, Homo sapiens
  Payload ID: 12222
  Gene Symbol: PAPLN
  Gene Name: papilin, proteoglycan-like sulfated glycoprotein
  ENSP ID: ENSP00000216658
MRLLLLVPLLLAPAPGSSAPKVRRQSDTWGPWSQWSPCSRTCGGGVSFRERPCYSQRRDGGSSCVGPARSHRSCRTESCPDGARDFRAEQCAEFDGAEFQGRRYRWLPYYSAPNKCELNCIPKGENFYYKHREAVVDGTPCEPGKRDVCVDGSCRVVGCDHELDSSKQEDKCLRCGGDGTTCYPVAGTFDANDLSRGYNQILIVPMGATSILIDEAAASRNFLAVKNVRGEYYLNGHWTIEAARALPAASTILHYERGAEGDLAPERLHARGPTSEPLVIELISQEPNPGVHYEYHLPLRRPSPGFSWSHGSWSDCSAECGGGHQSRLVFCTIDHEAYPDHMCQRQPRPADRRSCNLHPCPETKRWKAGPWAPCSASCGGGSQSRSVYCISSDGAGIQEAVEEAECAGLPGKPPAIQACNLQRCAAWSPEPWGECSVSCGVGVRKRSVTCRGERGSLLHTAACSLEDRPPLTEPCVHEDCPLLSDQAWHVGTWGLCSKSCSSGTRRRQVICAIGPPSHCGSLQHSKPVDVEPCNTQPCHLPQEVPSMQDVHTPASNPWMPLGPQESPASDSRGQWWAAQEHPSARGDHRGERGDPRGDQGTHLSALGPAPSLQQPPYQQPLRSGSGPHDCRHSPHGCCPDGHTASLGPQWQGCPGAPCQQSRYGCCPDRVSVAEGPHHAGCTKSYGGDSTGGMPRSRAVASTVHNTHQPQAQQNEPSECRGSQFGCCYDNVATAAGPLGEGCVGQPSHGLAWQVWSPRWCRQPWGSWCGSPAQTTLPRNPRLPGRKMASPSPLTGVCDGPPTSSDRCV

SEQ ID NO: 61173 - protein, 1251 aa, Homo sapiens
  Payload ID: 12222
  Gene Symbol: PAPLN
  Gene Name: papilin, proteoglycan-like sulfated glycoprotein
  Uniprot ID: O95428
  ENSP ID: ENSP00000345395
MRLLLLVPLLLAPAPGSSAPKVRRQSDTWGPWSQWSPCSRTCGGGVSFRERPCYSQRRDGGSSCVGPARSHRSCRTESCPDGARDFRAEQCAEFDGAEFQGRRYRWLPYYSAPNKCELNCIPKGENFYYKHREAVVDGTPCEPGKRDVCVDGSCRVVGCDHELDSSKQEDKCLRCGGDGTTCYPVAGTFDANDLSRAVKNVRGEYYLNGHWTIEAARALPAASTILHYERGAEGDLAPERLHARGPTSEPLVIELISQEPNPGVHYEYHLPLRRPSPGFSWSHGSWSDCSAECGGGHQSRLVFCTIDHEAYPDHMCQRQPRPADRRSCNLHPCPETKRWKAGPWAPCSASCGGGSQSRSVYCISSDGAGIQEAVEEAECAGLPGKPPAIQACNLQRCAAWSPEPWGECSVSCGVGVRKRSVTCRGERGSLLHTAACSLEDRPPLTEPCVHEDCPLLSDQAWHVGTWGLCSKSCSSGTRRRQVICAIGPPSHCGSLQHSKPVDVEPCNTQPCHLPQEVPSMQDVHTPASNPWMPLGPQESPASDSRGQWWAAQEHPSARGDHRGERGDPRGDQGTHLSALGPAPSLQQPPYQQPLRSGSGPHDCRHSPHGCCPDGHTASLGPQWQGCPGAPCQQSRYGCCPDRVSVAEGPHHAGCTKSYGGDSTGGMPRSRAVASTVHNTHQPQAQQNEPSECRGSQFGCCYDNVATAAGPLGEGCVGQPSHAYPVRCLLPSAHGSCADWAARWYFVASVGQCNRFWYGGCHGNANNFASEQECMSSCQGSLHGPRRPQPGASGRSTHTDGGGSSPAGEQEPSQHRTGAAVQRKPWPSGGLWRQDQQPGPGEAPHTQAFGEWPWGQELGSRAPGLGGDAGSPAPPFHSSSYRISLAGVEPSLVQAALGQLVRLSCSDDTAPESQAAWQKDGQPISSDRHRLQFDGSLIIHPLQAEDAGTYSCGSTRPGRDSQKIQLRIIGGDMAVLSEAELSRFPQPRDPAQDFGQAGAAGPLGAIPSSHPQPANRLRLDQNQPRVVDASPGQRIRMTCRAEGFPPPAIEWQRDGQPVSSPRHQLQPDGSLVISRVAVEDGGFYTCVAFNGQDRDQRWVQLRVLGELTISGLPPTVTVPEGDTARLLCVVAGESVNIRWSRNGLPVQADGHRVHQSPDGTLLIYNLRARDEGSYTCSAYQGSQAVSRSTEVKVVSPAPTAQPRDPGRDCVDQPELANCDLILQAQLCGNEYYSSFCCASCSRFQPHAQPIWQ

SEQ ID NO: 61174 - protein, 214 aa, Homo sapiens
  Payload ID: 12222
  Gene Symbol: PAPLN
  Gene Name: papilin, proteoglycan-like sulfated glycoprotein
  ENSP ID: ENSP00000451053
VHNTHQPQAQQNEPSECRGSQFGCCYDNVATAAGPLGEGCVGQPSHAYPVRCLLPSAHGSCADWAARWYFVASVGQCNRFWYGGCHGNANNFASEQECMSSCQGSLHGPRRPQPGASGRSTHTDGGGSSPAGEQEPSQHRTGAAVQRKPWPSGGLWRQDQQPGPGEAPHTQAFGEWPWGQELGSRAPGLGGDAGSPAPPFHSSSYRSHFPPLQD

SEQ ID NO: 61175 - protein, 1262 aa, Homo sapiens
  Payload ID: 12222
  Gene Symbol: PAPLN
  Gene Name: papilin, proteoglycan-like sulfated glycoprotein
  Uniprot ID: O95428
  ENSP ID: ENSP00000451729
MRLLLLVPLLLAPAPGSSAPKVRRQSDTWGPWSQWSPCSRTCGGGVSFRERPCYSQRRDGGSSCVGPARSHRSCRTESCPDGARDFRAEQCAEFDGAEFQGRRYRWLPYYSAPNKCELNCIPKGENFYYKHREAVVDGTPCEPGKRDVCVDGSCRVVGCDHELDSSKQEDKCLRCGGDGTTCYPVAGTFDANDLSRGYNQILIVPMGATSILIDEAAASRNFLAVKNVRGEYYLNGHWTIEAARALPAASTILHYERGAEGDLAPERLHARGPTSEPLVIELISQEPNPGVHYEYHLPLRRPSPGFSWSHGSWSDCSAECGGGHQSRLVFCTIDHEAYPDHMCQRQPRPADRRSCNLHPCPETKRWKAGPWAPCSASCGGGSQSRSVYCISSDGAGIQEAVEEAECAGLPGKPPAIQACNLQRCAAWSPEPWGECSVSCGVGVRKRSVTCRGERGSLLHTAACSLEDRPPLTEPCVHEDCPLLSDQAWHVGTWGLCSKSCSSGTRRRQVICAIGPPSHCGSLQHSKPVDVEPCNTQPCHLPQEVPSMQDVHTPASNPWMPLGPQESPASDSRGQWWAAQEHPSARGDHRGERGDPRGDQGTHLSALGPAPSLQQPPYQQPLRSGSGPHDCRHSPHGCCPDGHTASLGPQWQGCPGAPCQQSRYGCCPDRVSVAEGPHHAGCTKSYGGDSTGGMPRSRAVASTVHNTHQPQAQQNEPSECRGSQFGCCYDNVATAAGPLGEGCVGQPSHDWAARWYFVASVGQCNRFWYGGCHGNANNFASEQECMSSCQGSLHGPRRPQPGASGRSTHTDGGGSSPAGEQEPSQHRTGAAVQRKPWPSGGLWRQDQQPGPGEAPHTQAFGEWPWGQELGSRAPGLGGDAGSPAPPFHSSSYRISLAGVEPSLVQAALGQLVRLSCSDDTAPESQAAWQKDGQPISSDRHRLQFDGSLIIHPLQAEDAGTYSCGSTRPGRDSQKIQLRIIGGDMAVLSEAELSRFPQPRDPAQDFGQAGAAGPLGAIPSSHPQPANRLRLDQNQPRVVDASPGQRIRMTCRAEGFPPPAIEWQRDGQPVSSPRHQLQPDGSLVISRVAVEDGGFYTCVAFNGQDRDQRWVQLRVLGELTISGLPPTVTVPEGDTARLLCVVAGESVNIRWSRNGLPVQADGHRVHQSPDGTLLIYNLRARDEGSYTCSAYQGSQAVSRSTEVKVVSPAPTAQPRDPGRDCVDQPELANCDLILQAQLCGNEYYSSFCCASCSRFQPHAQPIWQ

SEQ ID NO: 61176 - protein, 1278 aa, Homo sapiens
  Payload ID: 12222
  Gene Symbol: PAPLN
  Gene Name: papilin, proteoglycan-like sulfated glycoprotein
  Uniprot ID: O95428
  ENSP ID: ENSP00000451803
MRLLLLVPLLLAPAPGSSAPKVRRQSDTWGPWSQWSPCSRTCGGGVSFRERPCYSQRRDGGSSCVGPARSHRSCRTESCPDGARDFRAEQCAEFDGAEFQGRRYRWLPYYSAPNKCELNCIPKGENFYYKHREAVVDGTPCEPGKRDVCVDGSCRVVGCDHELDSSKQEDKCLRCGGDGTTCYPVAGTFDANDLSRGYNQILIVPMGATSILIDEAAASRNFLAVKNVRGEYYLNGHWTIEAARALPAASTILHYERGAEGDLAPERLHARGPTSEPLVIELISQEPNPGVHYEYHLPLRRPSPGFSWSHGSWSDCSAECGGGHQSRLVFCTIDHEAYPDHMCQRQPRPADRRSCNLHPCPETKRWKAGPWAPCSASCGGGSQSRSVYCISSDGAGIQEAVEEAECAGLPGKPPAIQACNLQRCAAWSPEPWGECSVSCGVGVRKRSVTCRGERGSLLHTAACSLEDRPPLTEPCVHEDCPLLSDQAWHVGTWGLCSKSCSSGTRRRQVICAIGPPSHCGSLQHSKPVDVEPCNTQPCHLPQEVPSMQDVHTPASNPWMPLGPQESPASDSRGQWWAAQEHPSARGDHRGERGDPRGDQGTHLSALGPAPSLQQPPYQQPLRSGSGPHDCRHSPHGCCPDGHTASLGPQWQGCPGAPCQQSRYGCCPDRVSVAEGPHHAGCTKSYGGDSTGGMPRSRAVASTVHNTHQPQAQQNEPSECRGSQFGCCYDNVATAAGPLGEGCVGQPSHAYPVRCLLPSAHGSCADWAARWYFVASVGQCNRFWYGGCHGNANNFASEQECMSSCQGSLHGPRRPQPGASGRSTHTDGGGSSPAGEQEPSQHRTGAAVQRKPWPSGGLWRQDQQPGPGEAPHTQAFGEWPWGQELGSRAPGLGGDAGSPAPPFHSSSYRISLAGVEPSLVQAALGQLVRLSCSDDTAPESQAAWQKDGQPISSDRHRLQFDGSLIIHPLQAEDAGTYSCGSTRPGRDSQKIQLRIIGGDMAVLSEAELSRFPQPRDPAQDFGQAGAAGPLGAIPSSHPQPANRLRLDQNQPRVVDASPGQRIRMTCRAEGFPPPAIEWQRDGQPVSSPRHQLQPDGSLVISRVAVEDGGFYTCVAFNGQDRDQRWVQLRVLGELTISGLPPTVTVPEGDTARLLCVVAGESVNIRWSRNGLPVQADGHRVHQSPDGTLLIYNLRARDEGSYTCSAYQGSQAVSRSTEVKVVSPAPTAQPRDPGRDCVDQPELANCDLILQAQLCGNEYYSSFCCASCSRFQPHAQPIWQ

SEQ ID NO: 61177 - protein, 929 aa, Homo sapiens
  Payload ID: 12222
  Gene Symbol: PAPLN
  Gene Name: papilin, proteoglycan-like sulfated glycoprotein
  ENSP ID: ENSP00000452455
MRLLLLVPLLLAPAPGSSAPKVRRQSDTWGPWSQWSPCSRTCGGGVSFRERPCYSQRRDGGSSCVGPARSHRSCRTESCPDGARDFRAEQCAEFDGAEFQGRRYRWLPYYSAPNKCELNCIPKGENFYYKHREAVVDGTPCEPGKRDVCVDGSCRVVGCDHELDSSKQEDKCLRCGGDGTTCYPVAGTFDANDLSRAVKNVRGEYYLNGHWTIEAARALPAASTILHYERGAEGDLAPERLHARGPTSEPLVIELISQEPNPGVHYEYHLPLRRPSPGFSWSHGSWSDCSAECGGGHQSRLVFCTIDHEAYPDHMCQRQPRPADRRSCNLHPCPETKRWKAGPWAPCSASCGGGSQSRSVYCISSDGAGIQEAVEEAECAGLPGKPPAIQACNLQRCAAWSPEPWGECSVSCGVGVRKRSVTCRGERGSLLHTAACSLEDRPPLTEPCVHEDCPLLSDQAWHVGTWGLCSKSCSSGTRRRQVICAIGPPSHCGSLQHSKPVDVEPCNTQPCHLPQEVPSMQDVHTPASNPWMPLGPQESPASDSRGQWWAAQEHPSARGDHRGERGDPRGDQGTHLSALGPAPSLQQPPYQQPLRSGSGPHDCRHSPHGCCPDGHTASLGPQWQGCPGAPCQQSRYGCCPDRVSVAEGPHHAGCTKSYGGDSTGGMPRSRAVASTVHNTHQPQAQQNEPSECRGSQFGCCYDNVATAAGPLGEGCVGQPSHAYPVRCLLPSAHGSCADWAARWYFVASVGQCNRFWYGGCHGNANNFASEQECMSSCQGSLHGPRRPQPGASGRSTHTDGGGSSPAGEQEPSQHRTGAAVQRKPWPSGGLWRQDQQPGPGEAPHTQAFGEWPWGQELGSRAPGLGGDAGSPAPPFHSSSYRISLAGVEPSLVQAALGQLVRLSCSDDTAPESQAAWQKDGQPISSDRFT

SEQ ID NO: 61178 - protein, 311 aa, Homo sapiens
  Payload ID: 12222
  Gene Symbol: PAPLN
  Gene Name: papilin, proteoglycan-like sulfated glycoprotein
  ENSP ID: ENSP00000453664
  MOD_RES (1)..(1): Any amino acid
XCMSSCQGSLHGPRRPQPGASGRSTHTDGGGSSPAGEQEPSQHRTGAAVQRKPWPSGGLWRQDQQPGPGEAPHTQAFGEWPWGQELGSRAPGLGGDAGSPAPPFHSSSYRISLAGVEPSLVQAALGQLVRLSCSDDTAPESQAAWQKDGQPISSDRHRLQFDGSLIIHPLQAEDAGTYSCGSTRPGRDSQKIQLRIIGGDMAVLSEAELSRFPQPRDPAQDFGQAGAAGPLGAIPSSHPQPANRLRLDQNQPRVVDASPGQRIRMTCRAEGFPPPAIEWQRDGQPVSSPSTHRPAQGPWQGLRRPARAGQL

SEQ ID NO: 61179 - protein, 491 aa, Homo sapiens
  Payload ID: 12223
  Gene Symbol: PRCC
  Gene Name: papillary renal cell carcinoma (translocation-associated)
  Uniprot ID: Q92733
  ENSP ID: ENSP00000271526
MSLVAYASSDESEPDEAEPEPEEEEAVAPTSGPALGGLFASLPAPKGPALLPPPPQMLAPAFPPPLLLPPPTGDPRLQPPPPLPFGLGGFPPPPGVSPAEAAGVGEGLGLGLPSPRGPGLNLPPPIGGAGPPLGLPKPKKRKEPVKIAAPELHKGDSDSEEDEPTKKKTILQGSSEGTGLSALLPQPKNLTVKETNRLLLPHAFSRKPSDGSPDTKPSRLASKTKTSSLAPVVGTTTTTPSPSAIKAAAKSAALQVTKQITQEEDDSDEEVAPENFFSLPEKAEPPGVEPYPYPIPTVPEELPPGTEPEPAFQDDAANAPLEFKMAAGSSGAPWMPKPGDDYSYNQFSTYGDANAAGAYYQDYYSGGYYPAQDPALVPPQEIAPDASFIDDEAFKRLQGKRNRGREEINFVEIKGDDQLSGAQQWMTKSLTEEKTMKSFSKKKGEQPTGQQRRKHQITYLIHQAKERELELKNTWSENKLSRRQTQAKYGF

SEQ ID NO: 61180 - protein, 257 aa, Homo sapiens
  Payload ID: 12223
  Gene Symbol: PRCC
  Gene Name: papillary renal cell carcinoma (translocation-associated)
  ENSP ID: ENSP00000403560
  MOD_RES (1)..(1): Any amino acid
XDEEVAPENFFSLPEKAEPPGVEPYPYPIPTVPEELPPGTEPEPAFQDDAANAPLEFKMAAGSSGAPWMPKPGDDYSYNQFSTYGDANAAGAYYQGLQQHLGHSPLRGIMRFLNSKSGKRTCFVPSFDYYSGGYYPAQDPALVPPQEIAPDASFIDDEAFKRLQGKRNRGREEINFVEIKGDDQLSGAQQWMTKSLTEEKTMKSFSKKKGEQPTGQQRRKHQITYLIHQAKERELELKNTWSENKLSRRQTQAKYGF

SEQ ID NO: 61181 - protein, 198 aa, Homo sapiens
  Payload ID: 12223
  Gene Symbol: PRCC
  Gene Name: papillary renal cell carcinoma (translocation-associated)
  ENSP ID: ENSP00000434762
QEEDDSDEEVAPENFFSLPEKAEPPGVEPYPYPIPTVPEELPPGTEPEPAFQDDAANAPLEFKMAAGSSGAPWMPKPGDDYSYNQFSTYGDANAAGAYYQFKRLQGKRNRGREEINFVEIKGDDQLSGAQQWMTKSLTEEKTMKSFSKKKGEQPTGQQRRKHQITYLIHQAKERELELKNTWSENKLSRRQTQAKYGF

SEQ ID NO: 61182 - protein, 827 aa, Homo sapiens
  Payload ID: 12224
  Gene Symbol: PAPPA2
  Gene Name: pappalysin 2
  Uniprot ID: Q9BXP8
  ENSP ID: ENSP00000356633
MMCLKILRISLAILAGWALCSANSELGWTRKKSLVEREHLNQVLLEGERCWLGAKVRRPRASPQHHLFGVYPSRAGNYLRPYPVGEQEIHHTGRSKPDTEGNAVSLVPPDLTENPAGLRGAVEEPAAPWVGDSPIGQSELLGDDDAYLGNQRSKESLGEAGIQKGSAMAATTTTAIFTTLNEPKPETQRRGWAKSRQRRQVWKRRAEDGQGDSGISSHFQPWPKHSLKHRVKKSPPEESNQNGGEGSYREAETFNSQVGLPILYFSGRRERLLLRPEVLAEIPREAFTVEAWVKPEGGQNNPAIIAGVFDNCSHTVSDKGWALGIRSGKDKGKRDARFFFSLCTDRVKKATILISHSRYQPGTWTHVAATYDGRHMALYVDGTQVASSLDQSGPLNSPFMASCRSLLLGGDSSEDGHYFRGHLGTLVFWSTALPQSHFQHSSQHSSGEEEATDLVLTASFEPVNTEWVPFRDEKYPRLEVLQGFEPEPEILSPLQPPLCGQTVCDNVELISQYNGYWPLRGEKVIRYQVVNICDDEGLNPIVSEEQIRLQHEALNEAFSRYNISWQLSVHQVHNSTLRHRVVLVNCEPSKIGNDHCDPECEHPLTGYDGGDCRLQGRCYSWNRRDGLCHVECNNMLNDFDDGDCCDPQVADVRKTCFDPDSPKRAYMSVKELKEALQLNSTHFLNIYFASSVREDLAGAATWPWDKDAVTHLGGIVLSPAYYGMPGHTDTMIHEVGHVLGLYHVFKGVSERESCNDPCKETVPSMETGDLCADTAPTPKSELCREPEPTSDTCGFTRFPGAPFTNYMSYTGITTVLFCFLLRIHGGL

SEQ ID NO: 61183 - protein, 1791 aa, Homo sapiens
  Payload ID: 12224
  Gene Symbol: PAPPA2
  Gene Name: pappalysin 2
  Uniprot ID: Q9BXP8
  ENSP ID: ENSP00000356634
MMCLKILRISLAILAGWALCSANSELGWTRKKSLVEREHLNQVLLEGERCWLGAKVRRPRASPQHHLFGVYPSRAGNYLRPYPVGEQEIHHTGRSKPDTEGNAVSLVPPDLTENPAGLRGAVEEPAAPWVGDSPIGQSELLGDDDAYLGNQRSKESLGEAGIQKGSAMAATTTTAIFTTLNEPKPETQRRGWAKSRQRRQVWKRRAEDGQGDSGISSHFQPWPKHSLKHRVKKSPPEESNQNGGEGSYREAETFNSQVGLPILYFSGRRERLLLRPEVLAEIPREAFTVEAWVKPEGGQNNPAIIAGVFDNCSHTVSDKGWALGIRSGKDKGKRDARFFFSLCTDRVKKATILISHSRYQPGTWTHVAATYDGRHMALYVDGTQVASSLDQSGPLNSPFMASCRSLLLGGDSSEDGHYFRGHLGTLVFWSTALPQSHFQHSSQHSSGEEEATDLVLTASFEPVNTEWVPFRDEKYPRLEVLQGFEPEPEILSPLQPPLCGQTVCDNVELISQYNGYWPLRGEKVIRYQVVNICDDEGLNPIVSEEQIRLQHEALNEAFSRYNISWQLSVHQVHNSTLRHRVVLVNCEPSKIGNDHCDPECEHPLTGYDGGDCRLQGRCYSWNRRDGLCHVECNNMLNDFDDGDCCDPQVADVRKTCFDPDSPKRAYMSVKELKEALQLNSTHFLNIYFASSVREDLAGAATWPWDKDAVTHLGGIVLSPAYYGMPGHTDTMIHEVGHVLGLYHVFKGVSERESCNDPCKETVPSMETGDLCADTAPTPKSELCREPEPTSDTCGFTRFPGAPFTNYMSYTDDNCTDNFTPNQVARMHCYLDLVYQQWTESRKPTPIPIPPMVIGQTNKSLTIHWLPPISGVVYDRASGSLCGACTEDGTFRQYVHTASSRRVCDSSGYWTPEEAVGPPDVDQPCEPSLQAWSPEVHLYHMNMTVPCPTEGCSLELLFQHPVQADTLTLWVTSFFMESSQVLFDTEILLENKESVHLGPLDTFCDIPLTIKLHVDGKVSGVKVYTFDERIEIDAALLTSQPHSPLCSGCRPVRYQVLRDPPFASGLPVVVTHSHRKFTDVEVTPGQMYQYQVLAEAGGELGEASPPLNHIHGAPYCGDGKVSERLGEECDDGDLVSGDGCSKVCELEEGFNCVGEPSLCYMYEGDGICEPFERKTSIVDCGIYTPKGYLDQWATRAYSSHEDKKKCPVSLVTGEPHSLICTSYHPDLPNHRPLTGWFPCVASENETQDDRSEQPEGSLKKEDEVWLKVCFNRPGEARAIFIFLTTDGLVPGEHQQPTVTLYLTDVRGSNHSLGTYGLSCQHNPLIINVTHHQNVLFHHTTSVLLNFSSPRVGISAVALRTSSRIGLSAPSNCISEDEGQNHQGQSCIHRPCGKQDSCPSLLLDHADVVNCTSIGPGLMKCAITCQRGFALQASSGQYIRPMQKEILLTCSSGHWDQNVSCLPVDCGVPDPSLVNYANFSCSEGTKFLKRCSISCVPPAKLQGLSPWLTCLEDGLWSLPEVYCKLECDAPPIILNANLLLPHCLQDNHDVGTICKYECKPGYYVAESAEGKVRNKLLKIQCLEGGIWEQGSCIPVVCEPPPPVFEGMYECTNGFSLDSQCVLNCNQEREKLPILCTKEGLWTQEFKLCENLQGECPPPPSELNSVEYKCEQGYGIGAVCSPLCVIPPSDPVMLPENITADTLEHWMEPVKVQSIVCTGRRQWHPDPVLVHCIQSCEPFQADGWCDTINNRAYCHYDGGDCCSSTLSSKKVIPFAADCDLDECTCRDPKAEENQ

SEQ ID NO: 61184 - protein, 1310 aa, Homo sapiens
  Payload ID: 12225
  Gene Symbol: PARD3
  Gene Name: par-3 family cell polarity regulator
  Uniprot ID: Q8TEW0
  ENSP ID: ENSP00000311986
MKVTVCFGRTRVVVPCGDGHMKVFSLIQQAVTRYRKAIAKDPNYWIQVHRLEHGDGGILDLDDILCDVADDKDRLVAVFDEQDPHHGGDGTSASSTGTQSPEIFGSELGTNNVSAFQPYQATSEIEVTPSVLRANMPLHVRRSSDPALIGLSTSVSDSNFSSEEPSRKNPTRWSTTAGFLKQNTAGSPKTCDRKKDENYRSLPRDTSNWSNQFQRDNARSSLSASHPMVGKWLEKQEQDEDGTEEDNSRVEPVGHADTGLEHIPNFSLDDMVKLVEVPNDGGPLGIHVVPFSARGGRTLGLLVKRLEKGGKAEHENLFRENDCIVRINDGDLRNRRFEQAQHMFRQAMRTPIIWFHVVPAANKEQYEQLSQSEKNNYYSSRFSPDSQYIDNRSVNSAGLHTVQRAPRLNHPPEQIDSHSRLPHSAHPSGKPPSAPASAPQNVFSTTVSSGYNTKKIGKRLNIQLKKGTEGLGFSITSRDVTIGGSAPIYVKNILPRGAAIQDGRLKAGDRLIEVNGVDLVGKSQEEVVSLLRSTKMEGTVSLLVFRQEDAFHPRELKAEDEDIVLTPDGTREFLTFEVPLNDSGSAGLGVSVKGNRSKENHADLGIFVKSIINGGAASKDGRLRVNDQLIAVNGESLLGKTNQDAMETLRRSMSTEGNKRGMIQLIVARRISKCNELKSPGSPPGPELPIETALDDRERRISHSLYSGIEGLDESPSRNAALSRIMGKYQLSPTVNMPQDDTVIIEDDRLPVLPPHLSDQSSSSSHDDVGFVTADAGTWAKAAISDSADCSLSPDVDPVLAFQREGFGRQIADETKLNTVDDQKAGSPSRDVGPSLGLKKSSSLESLQTAVAEVTLNGDIPFHRPRPRIIRGRGCNESFRAAIDKSYDKPAVDDDDEGMETLEEDTEESSRSGRESVSTASDQPSHSLERQMNGNQEKGDKTDRKKDKTGKEKKKDRDKEKDKMKAKKGMLKGLGDMFRFGKHRKDDKIEKTGKIKIQESFTSEEERIRMKQEQERIQAKTREFRERQARERDYAEIQDFHRTFGCDDELMYGGVSSYEGSMALNARPQSPREGHMMDALYAQVKKPRNSKPSPVDSNRSTPSNHDRIQRLRQEFQQAKQDEDVEDRRRTYSFEQPWPNARPATQSGRHSVSVEVQMQRQRQEERESSQQAQRQYSSLPRQSRKNASSVSQDSWEQNYSPGEGFQSAKENPRYSSYQGSRNGYLGGHGFNARVMLETQELLRQEQRRKEQQMKKQPPSEGPSNYDSYKKVQDPSYAPPKGPFRQDVPPSPSQVARLNRLQTPEKGRPFYS

SEQ ID NO: 61185 - protein, 1319 aa, Homo sapiens
  Payload ID: 12225
  Gene Symbol: PARD3
  Gene Name: par-3 family cell polarity regulator
  Uniprot ID: Q8TEW0
  ENSP ID: ENSP00000340591
MKVTVCFGRTRVVVPCGDGHMKVFSLIQQAVTRYRKAIAKDPNYWIQVHRLEHGDGGILDLDDILCDVADDKDRLVAVFDEQDPHHGGDGTSASSTGTQSPEIFGSELGTNNVSAFQPYQATSEIEVTPSVLRANMPLHVRRSSDPALIGLSTSVSDSNFSSEEPSRKNPTRWSTTAGFLKQNTAGSPKTCDRKKDENYRSLPRDTSNWSNQFQRDNARSSLSASHPMVGKWLEKQEQDEDGTEEDNSRVEPVGHADTGLEHIPNFSLDDMVKLVEVPNDGGPLGIHVVPFSARGGRTLGLLVKRLEKGGKAEHENLFRENDCIVRINDGDLRNRRFEQAQHMFRQAMRTPIIWFHVVPAANKEQYEQLSQSEKNNYYSSRFSPDSQYIDNRSVNSAGLHTVQRAPRLNHPPEQIDSHSRLPHSAHPSGKPPSAPASAPQNVFSTTVSSGYNTKKIGKRLNIQLKKGTEGLGFSITSRDVTIGGSAPIYVKNILPRGAAIQDGRLKAGDRLIEVNGVDLVGKSQEEVVSLLRSTKMEGTVSLLVFRQEDAFHPRELNAEPSQMQIPKETKAEDEDIVLTPDGTREFLTFEVPLNDSGSAGLGVSVKGNRSKENHADLGIFVKSIINGGAASKDGRLRVNDQLIAVNGESLLGKTNQDAMETLRRSMSTEGNKRGMIQLIVARRISKCNELKSPGSPPGPELPIETALDDRERRISHSLYSGIEGLDESPSRNAALSRIMGESGKYQLSPTVNMPQDDTVIIEDDRLPVLPPHLSDQSSSSSHDDVGFVTADAGTWAKAAISDSADCSLSPDVDPVLAFQREGFGRQSMSEKRTKQFSDASQLDFVKTRKSKSMDLGIADETKLNTVDDQKAGSPSRDVGPSLGLKKSSSLESLQTAVAEVTLNGDIPFHRPRPRIIRGRGCNESFRAAIDKSYDKPAVDDDDEGMETLEEDTEESSRSGRESVSTASDQPSHSLERQMNGNQEKGDKTDRKKDKTGKEKKKDRDKEKDKMKAKKGMLKGLGDMFRIQAKTREFRERQARERDYAEIQDFHRTFGCDDELMYGGVSSYEGSMALNARPQSPREGHMMDALYAQVKKPRNSKPSPVDSNRSTPSNHDRIQRLRQEFQQAKQDEDVEDRRRTYSFEQPWPNARPATQSGRHSVSVEVQMQRQRQEERESSQQAQRQYSSLPRQSRKNASSVSQDSWEQNYSPGEGFQSAKENPRYSSYQGSRNGYLGGHGFNARVMLETQELLRQEQRRKEQQMKKQPPSEGPSNYDSYKKVQDPSYAPPKGPFRQDVPPSPSQVARLNRLQTPEKGRPFYS

SEQ ID NO: 61186 - protein, 1031 aa, Homo sapiens
  Payload ID: 12225
  Gene Symbol: PARD3
  Gene Name: par-3 family cell polarity regulator
  Uniprot ID: Q8TEW0
  ENSP ID: ENSP00000341844
MKVTVCFGRTRVVVPCGDGHMKVFSLIQQAVTRYRKAIAKDPNYWIQVHRLEHGDGGILDLDDILCDVADDKDRLVAVFDEQDPHHGGDGTSASSTGTQSPEIFGSELGTNNVSAFQPYQATSEIEVTPSVLRANMPLHVRRSSDPALIGLSTSVSDSNFSSEEPSRKNPTRWSTTAGFLKQNTAGSPKTCDRKKDENYRSLPRDTSNWSNQFQRDNARSSLSASHPMVGKWLEKQEQDEDGTEEDNSRVEPVGHADTGLEHIPNFSLDDMVKLVEVPNDGGPLGIHVVPFSARGGRTLGLLVKRLEKGGKAEHENLFRENDCIVRINDGDLRNRRFEQAQHMFRQAMRTPIIWFHVVPAANKEQYEQLSQSEKNNYYSSRFSPDSQYIDNRSVNSAGLHTVQRAPRLNHPPEQIDSHSRLPHSAHPSGKPPSAPASAPQNVFSTTVSSGYNTKKIGKRLNIQLKKGTEGLGFSITSRDVTIGGSAPIYVKNILPRGAAIQDGRLKAGDRLIEVNGVDLVGKSQEEVVSLLRSTKMEGTVSLLVFRQEDAFHPRELNAEPSQMQIPKETKAEDEDIVLTPDGTREFLTFEVPLNDSGSAGLGVSVKGNRSKENHADLGIFVKSIINGGAASKDGRLRVNDQLIAVNGESLLGKTNQDAMETLRRSMSTEGNKRGMIQLIVARRISKCNELKSPGSPPGPELPIETALDDRERRISHSLYSGIEGLDESPSRNAALSRIMGKYQLSPTVNMPQDDTVIIEDDRLPVLPPHLSDQSSSSSHDDVGFVTADAGTWAKAAISDSADCSLSPDVDPVLAFQREGFGRQSMSEKRTKQFSDASQLDFVKTRKSKSMDLGIADETKLNTVDDQKAGSPSRDVGPSLGLKKSSSLESLQTAVAEVTLNGDIPFHRPRPRIIRGRGCNESFRAAIDKSYDKPAVDDDDEGMETLEEDTEESSRSGRESVSTASDQPSHSLERQMNGNQEKGDKTDRKKDKTGKEKKKDRDKEKDKMKAKKGMLKGLGDMFSLAKLKPEKR

SEQ ID NO: 61187 - protein, 179 aa, Homo sapiens
  Payload ID: 12225
  Gene Symbol: PARD3
  Gene Name: par-3 family cell polarity regulator
  ENSP ID: ENSP00000363900
MQIPKETKAEDEDIVLTPDGTREFLTFEVPLNDSGSAGLGVSVKGNRSKENHADLGIFVKSIINGGAASKDGRLRVNDQLIAVNGESLLGKTNQDAMETLRRSMSTEGNKRGMIQLIVARRISKCNELKSPGSPPGPELPIETALDDRERRISHSLYSGIEGLDESPSRNAALSRIMGT

SEQ ID NO: 61188 - protein, 1001 aa, Homo sapiens
  Payload ID: 12225
  Gene Symbol: PARD3
  Gene Name: par-3 family cell polarity regulator
  ENSP ID: ENSP00000363905
MKVTVCFGRTRVVVPCGDGHMKVFSLIQQAVTRYRKAIAKDPNYWIQVHRLEHGDGGILDLDDILCDVADDKDRLVAVFDEQDPHHGGDGTSASSTGTQSPEIFGSELGTNNVSAFQPYQATSEIEVTPSVLRANMPLHVRRSSDPALIGLSTSVSDSNFSSEEPSRKNPTRWSTTAGFLKQNTAGSPKTCDRKKDENYRSLPRDTSNWSNQFQRDNARSSLSASHPMVGKWLEKQEQDEDGTEEDNSRVEPVGHADTGLEHIPNFSLDDMVKLVEVPNDGGPLGIHVVPFSARGGRTLGLLVKRLEKGGKAEHENLFRENDCIVRINDGDLRNRRFEQAQHMFRQAMRTPIIWFHVVPAANKEQYEQLSQSEKNNYYSSRFSPDSQYIDNRSVNSAGLHTVQRAPRLNHPPEQIDSHSRLPHSAHPSGKPPSAPASAPQNVFSTTVSSGYNTKKIGKRLNIQLKKGTEGLGFSITSRDVTIGGSAPIYVKNILPRGAAIQDGRLKAGDRLIEVNGVDLVGKSQEEVVSLLRSTKMEGTVSLLVFRQEDAFHPRELNAEPSQMQIPKETKAEDEDIVLTPDGTREFLTFEVPLNDSGSAGLGVSVKGNRSKENHADLGIFVKSIINGGAASKDGRLRVNDQLIAVNGESLLGKTNQDAMETLRRSMSTEGNKRGMIQLIVARRISKCNELKSPGSPPGPELPIETALDDRERRISHSLYSGIEGLDESPSRNAALSRIMGKYQLSPTVNMPQDDTVIIEDDRLPVLPPHLSDQSSSSSHDDVGFVTADAGTWAKAAISDSADCSLSPDVDPVLAFQREGFGRQIADETKLNTVDDQKAGSPSRDVGPSLGLKKSSSLESLQTAVAEVTLNGDIPFHRPRPRIIRGRGCNESFRAAIDKSYDKPAVDDDDEGMETLEEDTEESSRSGRESVSTASDQPSHSLERQMNGNQEKGDKTDRKKDKTGKEKKKDRDKEKDKMKAKKGMLKGLGDMFSLAKLKPEKR

SEQ ID NO: 61189 - protein, 988 aa, Homo sapiens
  Payload ID: 12225
  Gene Symbol: PARD3
  Gene Name: par-3 family cell polarity regulator
  Uniprot ID: Q8TEW0
  ENSP ID: ENSP00000363908
MKVTVCFGRTRVVVPCGDGHMKVFSLIQQAVTRYRKAIAKDPNYWIQVHRLEHGDGGILDLDDILCDVADDKDRLVAVFDEQDPHHGGDGTSASSTGTQSPEIFGSELGTNNVSAFQPYQATSEIEVTPSVLRANMPLHVRRSSDPALIGLSTSVSDSNFSSEEPSRKNPTRWSTTAGFLKQNTAGSPKTCDRKKDENYRSLPRDTSNWSNQFQRDNARSSLSASHPMVGKWLEKQEQDEDGTEEDNSRVEPVGHADTGLEHIPNFSLDDMVKLVEVPNDGGPLGIHVVPFSARGGRTLGLLVKRLEKGGKAEHENLFRENDCIVRINDGDLRNRRFEQAQHMFRQAMRTPIIWFHVVPAANKEQYEQLSQSEKNNYYSSRFSPDSQYIDNRSVNSAGLHTVQRAPRLNHPPEQIDSHSRLPHSAHPSGKPPSAPASAPQNVFSTTVSSGYNTKKIGKRLNIQLKKGTEGLGFSITSRDVTIGGSAPIYVKNILPRGAAIQDGRLKAGDRLIEVNGVDLVGKSQEEVVSLLRSTKMEGTVSLLVFRQEDAFHPRELKAEDEDIVLTPDGTREFLTFEVPLNDSGSAGLGVSVKGNRSKENHADLGIFVKSIINGGAASKDGRLRVNDQLIAVNGESLLGKTNQDAMETLRRSMSTEGNKRGMIQLIVARRISKCNELKSPGSPPGPELPIETALDDRERRISHSLYSGIEGLDESPSRNAALSRIMGKYQLSPTVNMPQDDTVIIEDDRLPVLPPHLSDQSSSSSHDDVGFVTADAGTWAKAAISDSADCSLSPDVDPVLAFQREGFGRQIADETKLNTVDDQKAGSPSRDVGPSLGLKKSSSLESLQTAVAEVTLNGDIPFHRPRPRIIRGRGCNESFRAAIDKSYDKPAVDDDDEGMETLEEDTEESSRSGRESVSTASDQPSHSLERQMNGNQEKGDKTDRKKDKTGKEKKKDRDKEKDKMKAKKGMLKGLGDMFSLAKLKPEKR

SEQ ID NO: 61190 - protein, 1353 aa, Homo sapiens
  Payload ID: 12225
  Gene Symbol: PARD3
  Gene Name: par-3 family cell polarity regulator
  Uniprot ID: Q8TEW0
  ENSP ID: ENSP00000363920
MKVTVCFGRTRVVVPCGDGHMKVFSLIQQAVTRYRKAIAKDPNYWIQVHRLEHGDGGILDLDDILCDVADDKDRLVAVFDEQDPHHGGDGTSASSTGTQSPEIFGSELGTNNVSAFQPYQATSEIEVTPSVLRANMPLHVRRSSDPALIGLSTSVSDSNFSSEEPSRKNPTRWSTTAGFLKQNTAGSPKTCDRKKDENYRSLPRDTSNWSNQFQRDNARSSLSASHPMVGKWLEKQEQDEDGTEEDNSRVEPVGHADTGLEHIPNFSLDDMVKLVEVPNDGGPLGIHVVPFSARGGRTLGLLVKRLEKGGKAEHENLFRENDCIVRINDGDLRNRRFEQAQHMFRQAMRTPIIWFHVVPAANKEQYEQLSQSEKNNYYSSRFSPDSQYIDNRSVNSAGLHTVQRAPRLNHPPEQIDSHSRLPHSAHPSGKPPSAPASAPQNVFSTTVSSGYNTKKIGKRLNIQLKKGTEGLGFSITSRDVTIGGSAPIYVKNILPRGAAIQDGRLKAGDRLIEVNGVDLVGKSQEEVVSLLRSTKMEGTVSLLVFRQEDAFHPRELNAEPSQMQIPKETKAEDEDIVLTPDGTREFLTFEVPLNDSGSAGLGVSVKGNRSKENHADLGIFVKSIINGGAASKDGRLRVNDQLIAVNGESLLGKTNQDAMETLRRSMSTEGNKRGMIQLIVARRISKCNELKSPGSPPGPELPIETALDDRERRISHSLYSGIEGLDESPSRNAALSRIMGKYQLSPTVNMPQDDTVIIEDDRLPVLPPHLSDQSSSSSHDDVGFVTADAGTWAKAAISDSADCSLSPDVDPVLAFQREGFGRQSMSEKRTKQFSDASQLDFVKTRKSKSMDLGIADETKLNTVDDQKAGSPSRDVGPSLGLKKSSSLESLQTAVAEVTLNGDIPFHRPRPRIIRGRGCNESFRAAIDKSYDKPAVDDDDEGMETLEEDTEESSRSGRESVSTASDQPSHSLERQMNGNQEKGDKTDRKKDKTGKEKKKDRDKEKDKMKAKKGMLKGLGDMFRFGKHRKDDKIEKTGKIKIQESFTSEEERIRMKQEQERIQAKTREFRERQARERDYAEIQDFHRTFGCDDELMYGGVSSYEGSMALNARPQSPREGHMMDALYAQVKKPRNSKPSPVDSNRSTPSNHDRIQRLRQEFQQAKQDEDVEDRRRTYSFEQPWPNARPATQSGRHSVSVEVQMQRQRQEERESSQQAQRQYSSLPRQSRKNASSVSQDSWEQNYSPGEGFQSAKENPRYSSYQGSRNGYLGGHGFNARVMLETQELLRQEQRRKEQQMKKQPPSEGPSNYDSYKKVQDPSYAPPKGPFRQDVPPSPSQVARLNRLQTPEKGRPFYS

SEQ ID NO: 61191 - protein, 1356 aa, Homo sapiens
  Payload ID: 12225
  Gene Symbol: PARD3
  Gene Name: par-3 family cell polarity regulator
  Uniprot ID: Q8TEW0
  ENSP ID: ENSP00000363921
MKVTVCFGRTRVVVPCGDGHMKVFSLIQQAVTRYRKAIAKDPNYWIQVHRLEHGDGGILDLDDILCDVADDKDRLVAVFDEQDPHHGGDGTSASSTGTQSPEIFGSELGTNNVSAFQPYQATSEIEVTPSVLRANMPLHVRRSSDPALIGLSTSVSDSNFSSEEPSRKNPTRWSTTAGFLKQNTAGSPKTCDRKKDENYRSLPRDTSNWSNQFQRDNARSSLSASHPMVGKWLEKQEQDEDGTEEDNSRVEPVGHADTGLEHIPNFSLDDMVKLVEVPNDGGPLGIHVVPFSARGGRTLGLLVKRLEKGGKAEHENLFRENDCIVRINDGDLRNRRFEQAQHMFRQAMRTPIIWFHVVPAANKEQYEQLSQSEKNNYYSSRFSPDSQYIDNRSVNSAGLHTVQRAPRLNHPPEQIDSHSRLPHSAHPSGKPPSAPASAPQNVFSTTVSSGYNTKKIGKRLNIQLKKGTEGLGFSITSRDVTIGGSAPIYVKNILPRGAAIQDGRLKAGDRLIEVNGVDLVGKSQEEVVSLLRSTKMEGTVSLLVFRQEDAFHPRELNAEPSQMQIPKETKAEDEDIVLTPDGTREFLTFEVPLNDSGSAGLGVSVKGNRSKENHADLGIFVKSIINGGAASKDGRLRVNDQLIAVNGESLLGKTNQDAMETLRRSMSTEGNKRGMIQLIVARRISKCNELKSPGSPPGPELPIETALDDRERRISHSLYSGIEGLDESPSRNAALSRIMGESGKYQLSPTVNMPQDDTVIIEDDRLPVLPPHLSDQSSSSSHDDVGFVTADAGTWAKAAISDSADCSLSPDVDPVLAFQREGFGRQSMSEKRTKQFSDASQLDFVKTRKSKSMDLGIADETKLNTVDDQKAGSPSRDVGPSLGLKKSSSLESLQTAVAEVTLNGDIPFHRPRPRIIRGRGCNESFRAAIDKSYDKPAVDDDDEGMETLEEDTEESSRSGRESVSTASDQPSHSLERQMNGNQEKGDKTDRKKDKTGKEKKKDRDKEKDKMKAKKGMLKGLGDMFRFGKHRKDDKIEKTGKIKIQESFTSEEERIRMKQEQERIQAKTREFRERQARERDYAEIQDFHRTFGCDDELMYGGVSSYEGSMALNARPQSPREGHMMDALYAQVKKPRNSKPSPVDSNRSTPSNHDRIQRLRQEFQQAKQDEDVEDRRRTYSFEQPWPNARPATQSGRHSVSVEVQMQRQRQEERESSQQAQRQYSSLPRQSRKNASSVSQDSWEQNYSPGEGFQSAKENPRYSSYQGSRNGYLGGHGFNARVMLETQELLRQEQRRKEQQMKKQPPSEGPSNYDSYKKVQDPSYAPPKGPFRQDVPPSPSQVARLNRLQTPEKGRPFYS

SEQ ID NO: 61192 - protein, 1296 aa, Homo sapiens
  Payload ID: 12225
  Gene Symbol: PARD3
  Gene Name: par-3 family cell polarity regulator
  ENSP ID: ENSP00000363922
MKVTVCFGRTRVVVPCGDGHMKVFSLIQQAVTRYRKAIAKDPNYWIQVHRLEHGDGGILDLDDILCDVADDKDRLVAVFDEQDPHHGGDGTSASSTGTQSPEIFGSELGTNNVSAFQPYQATSEIEVTPSVLRANMPLHVRRSSDPALIGLSTSVSDSNFSSEEPSRKNPTRWSTTAGFLKQNTAGSPKTCDRKDEDGTEEDNSRVEPVGHADTGLEHIPNFSLDDMVKLVEVPNDGGPLGIHVVPFSARGGRTLGLLVKRLEKGGKAEHENLFRENDCIVRINDGDLRNRRFEQAQHMFRQAMRTPIIWFHVVPAANKEQYEQLSQSEKNNYYSSRFSPDSQYIDNRSVNSAGLHTVQRAPRLNHPPEQIDSHSRLPHSAHPSGKPPSAPASAPQNVFSTTVSSGYNTKKIGKRLNIQLKKGTEGLGFSITSRDVTIGGSAPIYVKNILPRGAAIQDGRLKAGDRLIEVNGVDLVGKSQEEVVSLLRSTKMEGTVSLLVFRQEDAFHPRELKAEDEDIVLTPDGTREFLTFEVPLNDSGSAGLGVSVKGNRSKENHADLGIFVKSIINGGAASKDGRLRVNDQLIAVNGESLLGKTNQDAMETLRRSMSTEGNKRGMIQLIVARRISKCNELKSPGSPPGPELPIETALDDRERRISHSLYSGIEGLDESPSRNAALSRIMGKYQLSPTVNMPQDDTVIIEDDRLPVLPPHLSDQSSSSSHDDVGFVTADAGTWAKAAISDSADCSLSPDVDPVLAFQREGFGRQSMSEKRTKQFSDASQLDFVKTRKSKSMDLGIADETKLNTVDDQKAGSPSRDVGPSLGLKKSSSLESLQTAVAEVTLNGDIPFHRPRPRIIRGRGCNESFRAAIDKSYDKPAVDDDDEGMETLEEDTEESSRSGRESVSTASDQPSHSLERQMNGNQEKGDKTDRKKDKTGKEKKKDRDKEKDKMKAKKGMLKGLGDMFRFGKHRKDDKIEKTGKIKIQESFTSEEERIRMKQEQERIQAKTREFRERQARERDYAEIQDFHRTFGCDDELMYGGVSSYEGSMALNARPQSPREGHMMDALYAQVKKPRNSKPSPVDSNRSTPSNHDRIQRLRQEFQQAKQDEDVEDRRRTYSFEQPWPNARPATQSGRHSVSVEVQMQRQRQEERESSQQAQRQYSSLPRQSRKNASSVSQDSWEQNYSPGEGFQSAKENPRYSSYQGSRNGYLGGHGFNARVMLETQELLRQEQRRKEQQMKKQPPSEGPSNYDSYKKVQDPSYAPPKGPFRQDVPPSPSQVARLNRLQTPEKGRPFYS

SEQ ID NO: 61193 - protein, 1244 aa, Homo sapiens
  Payload ID: 12225
  Gene Symbol: PARD3
  Gene Name: par-3 family cell polarity regulator
  Uniprot ID: Q8TEW0
  ENSP ID: ENSP00000363926
MKVTVCFGRTRVVVPCGDGHMKVFSLIQQAVTRYRKAIAKDPNYWIQVHRLEHGDGGILDLDDILCDVADDKDRLVAVFDEQDPHHGGDGTSASSTGTQSPEIFGSELGTNNVSAFQPYQATSEIEVTPSVLRANMPLHVRRSSDPALIGLSTSVSDSNFSSEEPSRKNPTRWSTTAGFLKQNTAGSPKTCDRKDEDGTEEDNSRVEPVGHADTGLEHIPNFSLDDMVKLVEVPNDGGPLGIHVVPFSARGGRTLGLLVKRLEKGGKAEHENLFRENDCIVRINDGDLRNRRFEQAQHMFRQAMRTPIIWFHVVPAANKEQYEQLSQSEKNNYYSSRFSPDSQYIDNRSVNSAGLHTVQRAPRLNHPPEQIDSHSRLPHSAHPSGKPPSAPASAPQNVFSTTVSSGYNTKKIGKRLNIQLKKGTEGLGFSITSRDVTIGGSAPIYVKNILPRGAAIQDGRLKAGDRLIEVNGVDLVGKSQEEVVSLLRSTKMEGTVSLLVFRQEDAFHPRELKAEDEDIVLTPDGTREFLTFEVPLNDSGSAGLGVSVKGNRSKENHADLGIFVKSIINGGAASKDGRLRVNDQLIAVNGESLLGKTNQDAMETLRRSMSTEGNKRGMIQLIVARRISKCNELKSPGSPPGPELPIETALDDRERRISHSLYSGIEGLDESPSRNAALSRIMGKYQLSPTVNMPQDDTVIIEDDRLPVLPPHLSDQSSSSSHDDVGFVTADAGTWAKAAISDSADCSLSPDVDPVLAFQREGFGRQSMSEKRTKQFSDASQLDFVKTRKSKSMDLGSSPSRDVGPSLGLKKSSSLESLQTAVAEVTLNGDIPFHRPRPRIIRGRGCNESFRAAIDKSYDKPAVDDDDEGMETLEEDTEESSRSGRESVSTASDQPSHSLERQMNGNQEKGDKTDRKKDKTGKEKKKDRDKEKDKMKAKKGMLKGLGDMFRIQAKTREFRERQARERDYAEIQDFHRTFGCDDELMYGGVSSYEGSMALNARPQSPREGHMMDALYAQVKKPRNSKPSPVDSNRSTPSNHDRIQRLRQEFQQAKQDEDVEDRRRTYSFEQPWPNARPATQSGRHSVSVEVQMQRQRQEERESSQQAQRQYSSLPRQSRKNASSVSQDSWEQNYSPGEGFQSAKENPRYSSYQGSRNGYLGGHGFNARVMLETQELLRQEQRRKEQQMKKQPPSEGPSNYDSYKKVQDPSYAPPKGPFRQDVPPSPSQVARLNRLQTPEKGRPFYS

SEQ ID NO: 61194 - protein, 1266 aa, Homo sapiens
  Payload ID: 12225
  Gene Symbol: PARD3
  Gene Name: par-3 family cell polarity regulator
  Uniprot ID: Q8TEW0
  ENSP ID: ENSP00000440857
MKVTVCFGRTRVVVPCGDGHMKVFSLIQQAVTRYRKAIAKDPNYWIQVHRLEHGDGGILDLDDILCDVADDKDRLVAVFDEQDPHHGGDGTSASSTGTQSPEIFGSELGTNNVSAFQPYQATSEIEVTPSVLRANMPLHVRRSSDPALIGLSTSVSDSNFSSEEPSRKNPTRWSTTAGFLKQNTAGSPKTCDRKDEDGTEEDNSRVEPVGHADTGLEHIPNFSLDDMVKLVEVPNDGGPLGIHVVPFSARGGRTLGLLVKRLEKGGKAEHENLFRENDCIVRINDGDLRNRRFEQAQHMFRQAMRTPIIWFHVVPAANKEQYEQLSQSEKNNYYSSRFSPDSQYIDNRSVNSAGLHTVQRAPRLNHPPEQIDSHSRLPHSAHPSGKPPSAPASAPQNVFSTTVSSGYNTKKIGKRLNIQLKKGTEGLGFSITSRDVTIGGSAPIYVKNILPRGAAIQDGRLKAGDRLIEVNGVDLVGKSQEEVVSLLRSTKMEGTVSLLVFRQEDAFHPRELKAEDEDIVLTPDGTREFLTFEVPLNDSGSAGLGVSVKGNRSKENHADLGIFVKSIINGGAASKDGRLRVNDQLIAVNGESLLGKTNQDAMETLRRSMSTEGNKRGMIQLIVARRISKCNELKSPGSPPGPELPIETALDDRERRISHSLYSGIEGLDESPSRNAALSRIMGKYQLSPTVNMPQDDTVIIEDDRLPVLPPHLSDQSSSSSHDDVGFVTADAGTWAKAAISDSADCSLSPDVDPVLAFQREGFGRQIADETKLNTVDDQKAGSPSRDVGPSLGLKKSSSLESLQTAVAEVTLNGDIPFHRPRPRIIRGRGCNESFRAAIDKSYDKPAVDDDDEGMETLEEDTEESSRSGRESVSTASDQPSHSLERQMNGNQEKGDKTDRKKDKTGKEKKKDRDKEKDKMKAKKGMLKGLGDMFRFGKHRKDDKIEKTGKIKIQESFTSEEERIRMKQEQERIQAKTREFRERQARERDYAEIQDFHRTFGCDDELMYGGVSSYEGSMALNARPQSPREGHMMDALYAQVKKPRNSKPSPVDSNRSTPSNHDRIQRLRQEFQQAKQDEDVEDRRRTYSFEQPWPNARPATQSGRHSVSVEVQMQRQRQEERESSQQAQRQYSSLPRQSRKNASSVSQDSWEQNYSPGEGFQSAKENPRYSSYQGSRNGYLGGHGFNARVMLETQELLRQEQRRKEQQMKKQPPSEGPSNYDSYKKVQDPSYAPPKGPFRQDVPPSPSQVARLNRLQTPEKGRPFYS

SEQ ID NO: 61195 - protein, 1340 aa, Homo sapiens
  Payload ID: 12225
  Gene Symbol: PARD3
  Gene Name: par-3 family cell polarity regulator
  Uniprot ID: Q8TEW0
  ENSP ID: ENSP00000443147
MKVTVCFGRTRVVVPCGDGHMKVFSLIQQAVTRYRKAIAKDPNYWIQVHRLEHGDGGILDLDDILCDVADDKDRLVAVFDEQDPHHGGDGTSASSTGTQSPEIFGSELGTNNVSAFQPYQATSEIEVTPSVLRANMPLHVRRSSDPALIGLSTSVSDSNFSSEEPSRKNPTRWSTTAGFLKQNTAGSPKTCDRKKDENYRSLPRDTSNWSNQFQRDNARSSLSASHPMVGKWLEKQEQDEDGTEEDNSRVEPVGHADTGLEHIPNFSLDDMVKLVEVPNDGGPLGIHVVPFSARGGRTLGLLVKRLEKGGKAEHENLFRENDCIVRINDGDLRNRRFEQAQHMFRQAMRTPIIWFHVVPAANKEQYEQLSQSEKNNYYSSRFSPDSQYIDNRSVNSAGLHTVQRAPRLNHPPEQIDSHSRLPHSAHPSGKPPSAPASAPQNVFSTTVSSGYNTKKIGKRLNIQLKKGTEGLGFSITSRDVTIGGSAPIYVKNILPRGAAIQDGRLKAGDRLIEVNGVDLVGKSQEEVVSLLRSTKMEGTVSLLVFRQEDAFHPRELKAEDEDIVLTPDGTREFLTFEVPLNDSGSAGLGVSVKGNRSKENHADLGIFVKSIINGGAASKDGRLRVNDQLIAVNGESLLGKTNQDAMETLRRSMSTEGNKRGMIQLIVARRISKCNELKSPGSPPGPELPIETALDDRERRISHSLYSGIEGLDESPSRNAALSRIMGKYQLSPTVNMPQDDTVIIEDDRLPVLPPHLSDQSSSSSHDDVGFVTADAGTWAKAAISDSADCSLSPDVDPVLAFQREGFGRQSMSEKRTKQFSDASQLDFVKTRKSKSMDLGIADETKLNTVDDQKAGSPSRDVGPSLGLKKSSSLESLQTAVAEVTLNGDIPFHRPRPRIIRGRGCNESFRAAIDKSYDKPAVDDDDEGMETLEEDTEESSRSGRESVSTASDQPSHSLERQMNGNQEKGDKTDRKKDKTGKEKKKDRDKEKDKMKAKKGMLKGLGDMFRFGKHRKDDKIEKTGKIKIQESFTSEEERIRMKQEQERIQAKTREFRERQARERDYAEIQDFHRTFGCDDELMYGGVSSYEGSMALNARPQSPREGHMMDALYAQVKKPRNSKPSPVDSNRSTPSNHDRIQRLRQEFQQAKQDEDVEDRRRTYSFEQPWPNARPATQSGRHSVSVEVQMQRQRQEERESSQQAQRQYSSLPRQSRKNASSVSQDSWEQNYSPGEGFQSAKENPRYSSYQGSRNGYLGGHGFNARVMLETQELLRQEQRRKEQQMKKQPPSEGPSNYDSYKKVQDPSYAPPKGPFRQDVPPSPSQVARLNRLQTPEKGRPFYS

SEQ ID NO: 61196 - protein, 747 aa, Homo sapiens
  Payload ID: 12225
  Gene Symbol: PARD3
  Gene Name: par-3 family cell polarity regulator
  ENSP ID: ENSP00000444429
MVKLVEVPNDGGPLGIHVVPFSARGGRTLGLLVKRLEKGGKAEHENLFRENDCIVRINDGDLRNRRFEQAQHMFRQAMRTPIIWFHVVPAANKEQYEQLSQSEKNNYYSSRFSPDSQYIDNRSVNSAGLHTVQRAPRLNHPPEQIDSHSRLPHSAHPSGKPPSAPASAPQNVFSTTVSSGYNTKKIGKRLNIQLKKGTEGLGFSITSRDVTIGGSAPIYVKNILPRGAAIQDGRLKAGDRLIEVNGVDLVGKSQEEVVSLLRSTKMEGTVSLLVFRQEDAFHPRELKAEDEDIVLTPDGTREFLTFEVPLNDSGSAGLGVSVKGNRSKENHADLGIFVKSIINGGAASKDGRLRVNDQLIAVNGESLLGKTNQDAMETLRRSMSTEGNKRGMIQLIVARRISKCNELKSPGSPPGPELPIETALDDRERRISHSLYSGIEGLDESPSRNAALSRIMGKYQLSPTVNMPQDDTVIIEDDRLPVLPPHLSDQSSSSSHDDVGFVTADAGTWAKAAISDSADCSLSPDVDPVLAFQREGFGRQSMSEKRTKQFSDASQLDFVKTRKSKSMDLVADETKLNTVDDQKAGSPSRDVGPSLGLKKSSSLESLQTAVAEVTLNGDIPFHRPRPRIIRGRGCNESFRAAIDKSYDKPAVDDDDEGMETLEEDTEESSRSGRESVSTASDQPSHSLERQMNGNQEKGDKTDRKKDKTGKEKKKDRDKEKDKMKAKKGMLKGLGDMFSLAKLKPEKR

SEQ ID NO: 61197 - protein, 1136 aa, Homo sapiens
  Payload ID: 12226
  Gene Symbol: PARD3B
  Gene Name: par-3 family cell polarity regulator beta
  Uniprot ID: Q8TEW8
  ENSP ID: ENSP00000317261
MKVTVCFGRTGIVVPCKEGQLRVGELTQQALQRYLKTREKGPGYWVKIHHLEYTDGGILDPDDVLADVVEDKDKLIAVFEEQEPLHKIESPSGNPADRQSPDAFETEVAAQLAAFKPIGGEIEVTPSALKLGTPLLVRRSSDPVPGPPADTQPSASHPGGQSLKLVVPDSTQNLEDREVLNGVQTELLTSPRTKDTLSDMTRTVEISGEGGPLGIHVVPFFSSLSGRILGLFIRGIEDNSRSKREGLFHENECIVKINNVDLVDKTFAQAQDVFRQAMKSPSVLLHVLPPQNREQYEKSVIGSLNIFGNNDGVLKTKVPPPVHGKSGLKTANLTGTDSPETDASASLQQNKSPRVPRLGGKPSSPSLSPLMGFGSNKNAKKIKIDLKKGPEGLGFTVVTRDSSIHGPGPIFVKNILPKGAAIKDGRLQSGDRILEVNGRDVTGRTQEELVAMLRSTKQGETASLVIARQEGHFLPRELKGEPDCCALSLETSEQLTFEIPLNDSGSAGLGVSLKGNKSRETGTDLGIFIKSIIHGGAAFKDGRLRMNDQLIAVNGESLLGKSNHEAMETLRRSMSMEGNIRGMIQLVILRRPERPMEDPAECGAFSKPCFENCQNAVTTSRRNDNSILHPLGTCSPQDKQKGLLLPNDGWAESEVPPSPTPHSALGLGLEDYSHSSGVDSAVYFPDQHINFRSVTPARQPESINLKASKSMDLVPDESKVHSLAGQKSDGLSDKSSHSGQGALNCESAPQGNSELEDMENKARKVKKTKEKEKKKEKGKLKVKEKKRKEENEDPERKIKKKGFGAMLRFGKKKEDKGGKAEQKGTLKHGGLREEELEKMKEERERIGAKHQELREKQARGLLDYATGAIGSVYDMDDDEMDPNYARVNHFREPCTSANVFRSPSPPRAGPFGYPRDGHPLSPERDHLEGLYAKVNKPYHPLVPADSGRPTGGSTDRIQKLRKEYYQARREGFPLYEDDEGRARPSEYDLLWVPGRGPDGNAHNLRFEGMERQYASLPRGGPADPVDYLPAAPRGLYKERELPYYPGAHPMHPPKGSYPRPTELRVADLRYPQHYPPPPAPQHKGPFRQDVPPSPPQHQRMPAYQETGRPGPRGGSPDQYPYRTQDSRQKNPMTAAV

SEQ ID NO: 61198 - protein, 1104 aa, Homo sapiens
  Payload ID: 12226
  Gene Symbol: PARD3B
  Gene Name: par-3 family cell polarity regulator beta
  Uniprot ID: Q8TEW8
  ENSP ID: ENSP00000340280
MKVTVCFGRTGIVVPCKEGQLRVGELTQQALQRYLKTREKGPGYWVKIHHLEYTDGGILDPDDVLADVVEDKDKLIAVFEEQEPLHKIESPSGNPADRQSPDAFETEVAAQLAAFKPIGGEIEVTPSALKLGTPLLVRRSSDPVPGPPADTQPSASHPGGQSLKLVVPDSTQNLEDREVLNGVQTELLTSPRTKDTLSDMTRTVEISGEGGPLGIHVVPFFSSLSGRILGLFIRGIEDNSRSKREGLFHENECIVKINNVDLVDKTFAQAQDVFRQAMKSPSVLLHVLPPQNREQYEKSVIGSLNIFGNNDGVLKTKVPPPVHGKSGLKTANLTGTDSPETDASASLQQNKSPRVPRLGGKPSSPSLSPLMGFGSNKNAKKIKIDLKKGPEGLGFTVVTRDSSIHGPGPIFVKNILPKGAAIKDGRLQSGDRILEVNGRDVTGRTQEELVAMLRSTKQGETASLVIARQEGHFLPRELKGEPDCCALSLETSEQLTFEIPLNDSGSAGLGVSLKGNKSRETGTDLGIFIKSIIHGGAAFKDGRLRMNDQLIAVNGESLLGKSNHEAMETLRRSMSMEGNIRGMIQLVILRRPERPMEDPAECGAFSKPCFENCQNAVTTSRRNDNSILHPLGTCSPQDKQKGLLLPNDGWAESEVPPSPTPHSALGLGLEDYSHSSGVDSAVYFPDQHINFRSVTPARQPESINLKASKSMDLVPDESKVHSLAGQKSESPSKDFGPTLGLKKSSSLESLQTAVAEVRKNDLPFHRPRPHMVRGRGCNESFRAAIDKSYDGPEEIEADGLSDKSSHSGQGALNCESAPQGNSELEDMENKARKVKKTKEKEKKKEKGKLKVKEKKRKEENEDPERKIKKKGFGAMLRFGKKKEDKGGKAEQKGTLKHGGLREEELEKMKEERESGRPTGGSTDRIQKLRKEYYQARREGFPLYEDDEGRARPSEYDLLWVPGRGPDGNAHNLRFEGMERQYASLPRGGPADPVDYLPAAPRGLYKERELPYYPGAHPMHPPKGSYPRPTELRVADLRYPQHYPPPPAPQHKGPFRQDVPPSPPQHQRMPAYQETGRPGPRGGSPDQYPYRTQDSRQKNPMTAAV

SEQ ID NO: 61199 - protein, 1143 aa, Homo sapiens
  Payload ID: 12226
  Gene Symbol: PARD3B
  Gene Name: par-3 family cell polarity regulator beta
  Uniprot ID: Q8TEW8
  ENSP ID: ENSP00000351618
MKVTVCFGRTGIVVPCKEGQLRVGELTQQALQRYLKTREKGPGYWVKIHHLEYTDGGILDPDDVLADVVEDKDKLIAVFEEQEPLHKIESPSGNPADRQSPDAFETEVAAQLAAFKPIGGEIEVTPSALKLGTPLLVRRSSDPVPGPPADTQPSASHPGGQSLKLVVPDSTQNLEDREVLNGVQTELLTSPRTKDTLSDMTRTVEISGEGGPLGIHVVPFFSSLSGRILGLFIRGIEDNSRSKREGLFHENECIVKINNVDLVDKTFAQAQDVFRQAMKSPSVLLHVLPPQNREQYEKSVIGSLNIFGNNDGVLKTKVPPPVHGKSGLKTANLTGTDSPETDASASLQQNKSPRVPRLGGKPSSPSLSPLMGFGSNKNAKKIKIDLKKGPEGLGFTVVTRDSSIHGPGPIFVKNILPKGAAIKDGRLQSGDRILEVNGRDVTGRTQEELVAMLRSTKQGETASLVIARQEGHFLPRELDGRLRMNDQLIAVNGESLLGKSNHEAMETLRRSMSMEGNIRGMIQLVILRRPERPMEDPAECGAFSKPCFENCQNAVTTSRRNDNSILHPLGTCSPQDKQKGLLLPNDGWAESEVPPSPTPHSALGLGLEDYSHSSGVDSAVYFPDQHINFRSVTPARQPESINLKASKSMDLVPDESKVHSLAGQKSESPSKDFGPTLGLKKSSSLESLQTAVAEVRKNDLPFHRPRPHMVRGRGCNESFRAAIDKSYDGPEEIEADGLSDKSSHSGQGALNCESAPQGNSELEDMENKARKVKKTKEKEKKKEKGKLKVKEKKRKEENEDPERKIKKKGFGAMLRFGKKKEDKGGKAEQKGTLKHGGLREEELEKMKEERERIGAKHQELREKQARGLLDYATGAIGSVYDMDDDEMDPNYARVNHFREPCTSANVFRSPSPPRAGPFGYPRDGHPLSPERDHLEGLYAKVNKPYHPLVPADSGRPTGGSTDRIQKLRKEYYQARREGFPLYEDDEGRARPSEYDLLWVPGRGPDGNAHNLRFEGMERQYASLPRGGPADPVDYLPAAPRGLYKERELPYYPGAHPMHPPKGSYPRPTELRVADLRYPQHYPPPPAPQHKGPFRQDVPPSPPQHQRMPAYQETGRPGPRGGSPDQYPYRTQDSRQKNPMTAAV

SEQ ID NO: 61200 - protein, 1205 aa, Homo sapiens
  Payload ID: 12226
  Gene Symbol: PARD3B
  Gene Name: par-3 family cell polarity regulator beta
  Uniprot ID: Q8TEW8
  ENSP ID: ENSP00000385848
MKVTVCFGRTGIVVPCKEGQLRVGELTQQALQRYLKTREKGPGYWVKIHHLEYTDGGILDPDDVLADVVEDKDKLIAVFEEQEPLHKIESPSGNPADRQSPDAFETEVAAQLAAFKPIGGEIEVTPSALKLGTPLLVRRSSDPVPGPPADTQPSASHPGGQSLKLVVPDSTQNLEDREVLNGVQTELLTSPRTKDTLSDMTRTVEISGEGGPLGIHVVPFFSSLSGRILGLFIRGIEDNSRSKREGLFHENECIVKINNVDLVDKTFAQAQDVFRQAMKSPSVLLHVLPPQNREQYEKSVIGSLNIFGNNDGVLKTKVPPPVHGKSGLKTANLTGTDSPETDASASLQQNKSPRVPRLGGKPSSPSLSPLMGFGSNKNAKKIKIDLKKGPEGLGFTVVTRDSSIHGPGPIFVKNILPKGAAIKDGRLQSGDRILEVNGRDVTGRTQEELVAMLRSTKQGETASLVIARQEGHFLPRELKGEPDCCALSLETSEQLTFEIPLNDSGSAGLGVSLKGNKSRETGTDLGIFIKSIIHGGAAFKDGRLRMNDQLIAVNGESLLGKSNHEAMETLRRSMSMEGNIRGMIQLVILRRPERPMEDPAECGAFSKPCFENCQNAVTTSRRNDNSILHPLGTCSPQDKQKGLLLPNDGWAESEVPPSPTPHSALGLGLEDYSHSSGVDSAVYFPDQHINFRSVTPARQPESINLKASKSMDLVPDESKVHSLAGQKSESPSKDFGPTLGLKKSSSLESLQTAVAEVRKNDLPFHRPRPHMVRGRGCNESFRAAIDKSYDGPEEIEADGLSDKSSHSGQGALNCESAPQGNSELEDMENKARKVKKTKEKEKKKEKGKLKVKEKKRKEENEDPERKIKKKGFGAMLRFGKKKEDKGGKAEQKGTLKHGGLREEELEKMKEERERIGAKHQELREKQARGLLDYATGAIGSVYDMDDDEMDPNYARVNHFREPCTSANVFRSPSPPRAGPFGYPRDGHPLSPERDHLEGLYAKVNKPYHPLVPADSGRPTGGSTDRIQKLRKEYYQARREGFPLYEDDEGRARPSEYDLLWVPGRGPDGNAHNLRFEGMERQYASLPRGGPADPVDYLPAAPRGLYKERELPYYPGAHPMHPPKGSYPRPTELRVADLRYPQHYPPPPAPQHKGPFRQDVPPSPPQHQRMPAYQETGRPGPRGGSPDQYPYRTQDSRQKNPMTAAV

SEQ ID NO: 61201 - protein, 79 aa, Homo sapiens
  Payload ID: 12226
  Gene Symbol: PARD3B
  Gene Name: par-3 family cell polarity regulator beta
  Uniprot ID: Q8TEW8
  ENSP ID: ENSP00000407718
MKVTVCFGRTGIVVPCKEGQLRVGELTQQALQRYLKTREKVSAARRSGARLQPRHLPGSWLLGEDSSLRIYRWRNPGSR

SEQ ID NO: 61202 - protein, 935 aa, Homo sapiens
  Payload ID: 12226
  Gene Symbol: PARD3B
  Gene Name: par-3 family cell polarity regulator beta
  ENSP ID: ENSP00000473503
MKVTVCFGRTGIVVPCKEGQLRVGELTQQALQRYLKTREKGPGYWVKIHHLEYTDGGILDPDDVLADVVEDKDKLIAVFEEQEPLHKIESPSGNPADRQSPDAFETEVAAQLAAFKPIGGEIEVTPSALKLGTPLLVRRSSDPVPGPPADTQPSASHPGGQSLKLVVPDSTQNLEDREVLNGVQTELLTSPRTKDTLSDMTRTVEISGEGGPLGIHVVPFFSSLSGRILGLFIRGIEDNSRSKREGLFHENECIVKINNVDLVDKTFAQAQDVFRQAMKSPSVLLHVLPPQNREQYEKSVIGSLNIFGNNDGVLKTKVPPPVHGKSGLKTANLTGTDSPETDASASLQQNKSPRVPRLGGKPSSPSLSPLMGFGSNKNAKKIKIDLKKGPEGLGFTVVTRDSSIHGPGPIFVKNILPKGAAIKDGRLQSGDRILEVNGRDVTGRTQEELVAMLRSTKQGETASLVIARQEGHFLPRELKGEPDCCALSLETSEQLTFEIPLNDSGSAGLGVSLKGNKSRETGTDLGIFIKSIIHGGAAFKDGRLRMNDQLIAVNGESLLGKSNHEAMETLRRSMSMEGNIRGMIQLVILRRPERPMEDPAECGAFSKPCFENCQNAVTTSRRNDNSILHPLGTCSPQDKQKGLLLPNDGWAESEVPPSPTPHSALGLGLEDYSHSSGVDSAVYFPDQHINFRSVTPARQPESINLKASKSMDLVPDESKVHSLAGQKSESPSKDFGPTLGLKKSSSLESLQTAVAEVRKNDLPFHRPRPHMVRGRGCNESFRAAIDKSYDGPEEIEADGLSDKSSHSGQGALNCESAPQGNSELEDMENKARKVKKTKEKEKKKEKGKLKVKEKKRKEENEDPERKIKKKGFGAMLRYGPALKAKLVLILSLLKKAHAFPRLQPNAYGSQFCARSLSAEAEELFGESYSDDRTLS

SEQ ID NO: 61203 - protein, 1062 aa, Homo sapiens
  Payload ID: 12226
  Gene Symbol: PARD3B
  Gene Name: par-3 family cell polarity regulator beta
  ENSP ID: ENSP00000481918
LIAVFEEQEPLHKIESPSGNPADRQSPDAFETEVAAQLAAFKPIGGEIEVTPSALKLGTPLLVRRSSDPVPGPPADTQPSASHPGGQSLKLVVPDSTQNLEDREVLNGVQTELLTSPRTKDTLSDMTRTVEISGEGGPLGIHVVPFFSSLSGRILGLFIRGIEDNSRSKREGLFHENECIVKINNVDLVDKTFAQAQDVFRQAMKSPSVLLHVLPPQNREQYEKSVIGSLNIFGNNDGVLKTKVPPPVHGKSGLKTANLTGTDSPETDASASLQQNKSPRVPRLGGKPSSPSLSPLMGFGSNKNAKKIKIDLKKGPEGLGFTVVTRDSSIHGPGPIFVKNILPKGAAIKDGRLQSGDRILEVNGRDVTGRTQEELVAMLRSTKQGETASLVIARQEGHFLPRELKGEPDCCALSLETSEQLTFEIPLNDSGSAGLGVSLKGNKSRETGTDLGIFIKSIIHGGAAFKDGRLRMNDQLIAVNGESLLGKSNHEAMETLRRSMSMEGNIRGMIQLVILRRPERPMEDPAECGAFSKPCFENCQNAVTTSRRNDNSILHPLGTCSPQDKQKGLLLPNDGWAESEVPPSPTPHSALGLGLEDYSHSSGVDSAVYFPDQHINFRSVTPARQPESINLKASKSMDLVPDESKVHSLAGQKSDGLSDKSSHSGQGALNCESAPQGNSELEDMENKARKVKKTKEKEKKKEKGKLKVKEKKRKEENEDPERKIKKKGFGAMLRFGKKKEDKGGKAEQKGTLKHGGLREEELEKMKEERERIGAKHQELREKQARGLLDYATGAIGSVYDMDDDEMDPNYARVNHFREPCTSANVFRSPSPPRAGPFGYPRDGHPLSPERDHLEGLYAKVNKPYHPLVPADSGRPTGGSTDRIQKLRKEYYQARREGFPLYEDDEGRARPSEYDLLWVPGRGPDGNAHNLRFEGMERQYASLPRGGPADPVDYLPAAPRGLYKERELPYYPGAHPMHPPKGSYPRPTELRVADLRYPQHYPPPPAPQHKGPFRQDVPPSPPQHQRMPAYQETGRPGPRGGSPDQYPYRTQDSRQKNPMTAAV

SEQ ID NO: 61204 - protein, 1030 aa, Homo sapiens
  Payload ID: 12226
  Gene Symbol: PARD3B
  Gene Name: par-3 family cell polarity regulator beta
  ENSP ID: ENSP00000482649
LIAVFEEQEPLHKIESPSGNPADRQSPDAFETEVAAQLAAFKPIGGEIEVTPSALKLGTPLLVRRSSDPVPGPPADTQPSASHPGGQSLKLVVPDSTQNLEDREVLNGVQTELLTSPRTKDTLSDMTRTVEISGEGGPLGIHVVPFFSSLSGRILGLFIRGIEDNSRSKREGLFHENECIVKINNVDLVDKTFAQAQDVFRQAMKSPSVLLHVLPPQNREQYEKSVIGSLNIFGNNDGVLKTKVPPPVHGKSGLKTANLTGTDSPETDASASLQQNKSPRVPRLGGKPSSPSLSPLMGFGSNKNAKKIKIDLKKGPEGLGFTVVTRDSSIHGPGPIFVKNILPKGAAIKDGRLQSGDRILEVNGRDVTGRTQEELVAMLRSTKQGETASLVIARQEGHFLPRELKGEPDCCALSLETSEQLTFEIPLNDSGSAGLGVSLKGNKSRETGTDLGIFIKSIIHGGAAFKDGRLRMNDQLIAVNGESLLGKSNHEAMETLRRSMSMEGNIRGMIQLVILRRPERPMEDPAECGAFSKPCFENCQNAVTTSRRNDNSILHPLGTCSPQDKQKGLLLPNDGWAESEVPPSPTPHSALGLGLEDYSHSSGVDSAVYFPDQHINFRSVTPARQPESINLKASKSMDLVPDESKVHSLAGQKSESPSKDFGPTLGLKKSSSLESLQTAVAEVRKNDLPFHRPRPHMVRGRGCNESFRAAIDKSYDGPEEIEADGLSDKSSHSGQGALNCESAPQGNSELEDMENKARKVKKTKEKEKKKEKGKLKVKEKKRKEENEDPERKIKKKGFGAMLRFGKKKEDKGGKAEQKGTLKHGGLREEELEKMKEERESGRPTGGSTDRIQKLRKEYYQARREGFPLYEDDEGRARPSEYDLLWVPGRGPDGNAHNLRFEGMERQYASLPRGGPADPVDYLPAAPRGLYKERELPYYPGAHPMHPPKGSYPRPTELRVADLRYPQHYPPPPAPQHKGPFRQDVPPSPPQHQRMPAYQETGRPGPRGGSPDQYPYRTQDSRQKNPMTAAV

SEQ ID NO: 61205 - protein, 1069 aa, Homo sapiens
  Payload ID: 12226
  Gene Symbol: PARD3B
  Gene Name: par-3 family cell polarity regulator beta
  ENSP ID: ENSP00000484434
LIAVFEEQEPLHKIESPSGNPADRQSPDAFETEVAAQLAAFKPIGGEIEVTPSALKLGTPLLVRRSSDPVPGPPADTQPSASHPGGQSLKLVVPDSTQNLEDREVLNGVQTELLTSPRTKDTLSDMTRTVEISGEGGPLGIHVVPFFSSLSGRILGLFIRGIEDNSRSKREGLFHENECIVKINNVDLVDKTFAQAQDVFRQAMKSPSVLLHVLPPQNREQYEKSVIGSLNIFGNNDGVLKTKVPPPVHGKSGLKTANLTGTDSPETDASASLQQNKSPRVPRLGGKPSSPSLSPLMGFGSNKNAKKIKIDLKKGPEGLGFTVVTRDSSIHGPGPIFVKNILPKGAAIKDGRLQSGDRILEVNGRDVTGRTQEELVAMLRSTKQGETASLVIARQEGHFLPRELDGRLRMNDQLIAVNGESLLGKSNHEAMETLRRSMSMEGNIRGMIQLVILRRPERPMEDPAECGAFSKPCFENCQNAVTTSRRNDNSILHPLGTCSPQDKQKGLLLPNDGWAESEVPPSPTPHSALGLGLEDYSHSSGVDSAVYFPDQHINFRSVTPARQPESINLKASKSMDLVPDESKVHSLAGQKSESPSKDFGPTLGLKKSSSLESLQTAVAEVRKNDLPFHRPRPHMVRGRGCNESFRAAIDKSYDGPEEIEADGLSDKSSHSGQGALNCESAPQGNSELEDMENKARKVKKTKEKEKKKEKGKLKVKEKKRKEENEDPERKIKKKGFGAMLRFGKKKEDKGGKAEQKGTLKHGGLREEELEKMKEERERIGAKHQELREKQARGLLDYATGAIGSVYDMDDDEMDPNYARVNHFREPCTSANVFRSPSPPRAGPFGYPRDGHPLSPERDHLEGLYAKVNKPYHPLVPADSGRPTGGSTDRIQKLRKEYYQARREGFPLYEDDEGRARPSEYDLLWVPGRGPDGNAHNLRFEGMERQYASLPRGGPADPVDYLPAAPRGLYKERELPYYPGAHPMHPPKGSYPRPTELRVADLRYPQHYPPPPAPQHKGPFRQDVPPSPPQHQRMPAYQETGRPGPRGGSPDQYPYRTQDSRQKNPMTAAV

SEQ ID NO: 61206 - protein, 346 aa, Homo sapiens
  Payload ID: 12227
  Gene Symbol: PARD6A
  Gene Name: par-6 family cell polarity regulator alpha
  Uniprot ID: Q9NPB6
  ENSP ID: ENSP00000219255
MARPQRTPARSPDSIVEVKSKFDAEFRRFALPRASVSGFQEFSRLLRAVHQIPGLDVLLGYTDAHGDLLPLTNDDSLHRALASGPPPLRLLVQKRAEADSSGLAFASNSLQRRKKGLLLRPVAPLRTRPPLLISLPQDFRQVSSVIDVDLLPETHRRVRLHKHGSDRPLGFYIRDGMSVRVAPQGLERVPGIFISRLVRGGLAESTGLLAVSDEILEVNGIEVAGKTLDQVTDMMVANSHNLIVTVKPANQRNNVVRGASGRLTGPPSAGPGPAEPDSDDDSSDLVIENRQPPSSNGLSQGPPCWDLHPGCRHPGTRSSLPSLDDQEQASSGWGSRIRGDGSGFSL

SEQ ID NO: 61207 - protein, 345 aa, Homo sapiens
  Payload ID: 12227
  Gene Symbol: PARD6A
  Gene Name: par-6 family cell polarity regulator alpha
  Uniprot ID: Q9NPB6
  ENSP ID: ENSP00000392388
MARPQRTPARSPDSIVEVKSKFDAEFRRFALPRASVSGFQEFSRLLRAVHQIPGLDVLLGYTDAHGDLLPLTNDDSLHRALASGPPPLRLLVQKREADSSGLAFASNSLQRRKKGLLLRPVAPLRTRPPLLISLPQDFRQVSSVIDVDLLPETHRRVRLHKHGSDRPLGFYIRDGMSVRVAPQGLERVPGIFISRLVRGGLAESTGLLAVSDEILEVNGIEVAGKTLDQVTDMMVANSHNLIVTVKPANQRNNVVRGASGRLTGPPSAGPGPAEPDSDDDSSDLVIENRQPPSSNGLSQGPPCWDLHPGCRHPGTRSSLPSLDDQEQASSGWGSRIRGDGSGFSL

SEQ ID NO: 61208 - protein, 316 aa, Homo sapiens
  Payload ID: 12227
  Gene Symbol: PARD6A
  Gene Name: par-6 family cell polarity regulator alpha
  ENSP ID: ENSP00000473257
MARPQRTPARSPDSIVEVKSKFDAEFRRFALPRASVSGFQEFSRLLRAVHQIPGLDVLLGYTDAHAEADSSGLAFASNSLQRRKKGLLLRPVAPLRTRPPLLISLPQDFRQVSSVIDVDLLPETHRRVRLHKHGSDRPLGFYIRDGMSVRVAPQGLERVPGIFISRLVRGGLAESTGLLAVSDEILEVNGIEVAGKTLDQVTDMMVANSHNLIVTVKPANQRNNVVRGASGRLTGPPSAGPGPAEPDSDDDSSDLVIENRQPPSSNGLSQGPPCWDLHPGCRHPGTRSSLPSLDDQEQASSGWGSRIRGDGSGFSL

SEQ ID NO: 61209 - protein, 372 aa, Homo sapiens
  Payload ID: 12228
  Gene Symbol: PARD6B
  Gene Name: par-6 family cell polarity regulator beta
  Uniprot ID: Q9BYG5
  ENSP ID: ENSP00000360672
MNRSHRHGAGSGCLGTMEVKSKFGAEFRRFSLERSKPGKFEEFYGLLQHVHKIPNVDVLVGYADIHGDLLPINNDDNYHKAVSTANPLLRIFIQKKEEADYSAFGTDTLIKKKNVLTNVLRPDNHRKKPHIVISMPQDFRPVSSIIDVDILPETHRRVRLYKYGTEKPLGFYIRDGSSVRVTPHGLEKVPGIFISRLVPGGLAQSTGLLAVNDEVLEVNGIEVSGKSLDQVTDMMIANSRNLIITVRPANQRNNVVRNSRTSGSSGQSTDNSLLGYPQQIEPSFEPEDEDSEEDDIIIEDNGVPQQIPKAVPNTESLESLTQIELSFESGQNGFIPSNEVSLAAIASSSNTEFETHAPDQKLLEEDGTIITL

SEQ ID NO: 61210 - protein, 115 aa, Homo sapiens
  Payload ID: 12228
  Gene Symbol: PARD6B
  Gene Name: par-6 family cell polarity regulator beta
  Uniprot ID: Q9BYG5
  ENSP ID: ENSP00000379354
MNRSHRHGAGSGCLGTMEVKSKFGAEFRRFSLERSKPGKFEEFYGLLQHVHKIPNVDVLVGYADIHGDLLPINNDDNYHKAVSTANPLLRIFIQKKGCVLEHSKNNVRMPCLKTL

SEQ ID NO: 61211 - protein, 376 aa, Homo sapiens
  Payload ID: 12229
  Gene Symbol: PARD6G
  Gene Name: par-6 family cell polarity regulator gamma
  Uniprot ID: Q9BYG4
  ENSP ID: ENSP00000343144
MNRSFHKSQTLRFYDCSAVEVKSKFGAEFRRFSLDRHKPGKFEDFYKLVVHTHHISNSDVTIGYADVHGDLLPINNDDNFCKAVSSANPLLRVFIQKREEAERGSLGAGSLCRRRRALGALRDEGPRRRAHLDIGLPRDFRPVSSIIDVDLVPETHRRVRLHRHGCEKPLGFYIRDGASVRVTPHGLEKVPGIFISRMVPGGLAESTGLLAVNDEVLEVNGIEVAGKTLDQVTDMMIANSHNLIVTVKPANQRNNVVRGGRALGSSGPPSDGTAGFVGPPAPRVLQNFHPDEAESDEDNDVVIEGTLEPARPPQTPGAPAGSLSRVNGAGLAQRLQRDLALDGGLQRLLSSLRADPRHSLALPPGGVEEHGPAVTL

SEQ ID NO: 61212 - protein, 61 aa, Homo sapiens
  Payload ID: 12229
  Gene Symbol: PARD6G
  Gene Name: par-6 family cell polarity regulator gamma
  ENSP ID: ENSP00000466076
FEDFYKLVVHTHHISNSDVTIGYADVHGDLLPINNDDNFCKAVSSANPLLRVFIQKRGGEH

SEQ ID NO: 61213 - protein, 107 aa, Homo sapiens
  Payload ID: 12229
  Gene Symbol: PARD6G
  Gene Name: par-6 family cell polarity regulator gamma
  Uniprot ID: Q9BYG4
  ENSP ID: ENSP00000468735
MNRSFHKSQTLRFYDCSAVEVKSKFGAEFRRFSLDRHKPGKFEDFYKLVVHTHHISNSDVTIGYADVHGDLLPINNDDNFCKAVSSANPLLRVFIQKRDDGALRPGT

SEQ ID NO: 61214 - protein, 343 aa, Homo sapiens
  Payload ID: 12230
  Gene Symbol: PALM
  Gene Name: paralemmin
  Uniprot ID: O75781
  ENSP ID: ENSP00000264560
MEVLAAETTSQQERLQAIAEKRKRQAEIENKRRQLEDERRQLQHLKSKALRERWLLEGTPSSASEGDEDLRRQMQDDEQKTRLLEDSVSRLEKEIEVLERGDSAPATAKENAAAPSPVRAPAPSPAKEERKTEVVMNSQQTPVGTPKDKRVSNTPLRTVDGSPMMKAVVHAVDGTAENGIHPLSSSEVDELIHKADEVTLSEAGSTAGAAETRGAVEGAARTTPSRREITGVQAQPGEATSGPPGIQPGQEPPVTMIFMGYQNVEDEAETKKVLGLQDTITAELVVIEDAAEPKEPAPPNGSAAEPPTEAASREENQAGPEATTSDPQDLDMKKHRCKCCSIM

SEQ ID NO: 61215 - protein, 387 aa, Homo sapiens
  Payload ID: 12230
  Gene Symbol: PALM
  Gene Name: paralemmin
  Uniprot ID: O75781
  ENSP ID: ENSP00000341911
MEVLAAETTSQQERLQAIAEKRKRQAEIENKRRQLEDERRQLQHLKSKALRERWLLEGTPSSASEGDEDLRRQMQDDEQKTRLLEDSVSRLEKEIEVLERGDSAPATAKENAAAPSPVRAPAPSPAKEERKTEVVMNSQQTPVGTPKDKRVSNTPLRTVDGSPMMKAAMYSVEITVEKDKVTGETRVLSSTTLLPRQPLPLGIKVYEDETKVVHAVDGTAENGIHPLSSSEVDELIHKADEVTLSEAGSTAGAAETRGAVEGAARTTPSRREITGVQAQPGEATSGPPGIQPGQEPPVTMIFMGYQNVEDEAETKKVLGLQDTITAELVVIEDAAEPKEPAPPNGSAAEPPTEAASREENQAGPEATTSDPQDLDMKKHRCKCCSIM

SEQ ID NO: 61216 - protein, 242 aa, Homo sapiens
  Payload ID: 12230
  Gene Symbol: PALM
  Gene Name: paralemmin
  ENSP ID: ENSP00000477952
MNYKRVSNTPLRTVDGSPMMKAAMYSVEITVEKDKVTGETRVLSSTTLLPRQPLPLGIKVYEDETKVVHAVDGTAENGIHPLSSSEVDELIHKADEVTLSEAGSTAGAAETRGAVEGAARTTPSRREITGVQAQPGEATSGPPGIQPGQEPPVTMIFMGYQNVEDEAETKKVLGLQDTITAELVVIEDAAEPKEPAPPNGSAAEPPTEAASREENQAGPEATTSDPQDLDMKKHRCKCCSIM

SEQ ID NO: 61217 - protein, 198 aa, Homo sapiens
  Payload ID: 12230
  Gene Symbol: PALM
  Gene Name: paralemmin
  ENSP ID: ENSP00000480594
MNYKRVSNTPLRTVDGSPMMKAVVHAVDGTAENGIHPLSSSEVDELIHKADEVTLSEAGSTAGAAETRGAVEGAARTTPSRREITGVQAQPGEATSGPPGIQPGQEPPVTMIFMGYQNVEDEAETKKVLGLQDTITAELVVIEDAAEPKEPAPPNGSAAEPPTEAASREENQAGPEATTSDPQDLDMKKHRCKCCSIM

SEQ ID NO: 61218 - protein, 12 aa, Homo sapiens
  Payload ID: 12230
  Gene Symbol: PALM
  Gene Name: paralemmin
  ENSP ID: ENSP00000484090
MVLAAETTSQQE

SEQ ID NO: 61219 - protein, 411 aa, Homo sapiens
  Payload ID: 12231
  Gene Symbol: PALM2
  Gene Name: paralemmin 2
  Uniprot ID: Q8IXS6
  ENSP ID: ENSP00000323805
MAEAELHKERLQAIAEKRKRQTEIEGKRQQLDEQILLLQHSKSKVLREKWLLQGIPAGTAEEEEARRRQSEEDEFRVKQLEDNIQRLEQEIQTLESEESQISAKEQIILEKLKETEKSFKDFQKGFSSTDGDAVNYISSQLPDLPILCSRTAEPSPGQDGTSRAAAVYAMEINVEKDKQTGETKILSTSTIGPEGVHQKGVKVYDDGTKVVYEVRSGGTVVENGVHKLSTKDVEELIQKAGQSSLGGGHVSERTVIADGSLSHPKEHMLCKEAKLEMVHKSRKDHSSGNPGQQAQAPSAAGPEANLDQPVTMIFMGYQNIEDEEETKKVLGYDETIKAELVLIDEDDEKSLREKTVTDVSTIDGNAAELVSGRPVSDTTEPSSPEGKEESLATEPAPGTQKKKRCQCCVVM

SEQ ID NO: 61220 - protein, 379 aa, Homo sapiens
  Payload ID: 12231
  Gene Symbol: PALM2
  Gene Name: paralemmin 2
  Uniprot ID: Q8IXS6
  ENSP ID: ENSP00000363656
MEMAEAELHKERLQAIAEKRKRQTEIEGKRQQLDEQILLLQHSKSKVLREKWLLQGIPAGTAEEEEARRRQSEEDEFRVKQLEDNIQRLEQEIQTLESEESQISAKEQIILEKLKETEKSFKDFQKGFSSTDGAVYAMEINVEKDKQTGETKILSTSTIGPEGVHQKGVKVYDDGTKVVYEVRSGGTVVENGVHKLSTKDVEELIQKAGQSSLGGGHVSERTVIADGSLSHPKEHMLCKEAKLEMVHKSRKDHSSGNPGQQAQAPSAAGPEANLDQPVTMIFMGYQNIEDEEETKKVLGYDETIKAELVLIDEDDEKSLREKTVTDVSTIDGNAAELVSGRPVSDTTEPSSPEGKEESLATEPAPGTQKKKRCQCCVVM

SEQ ID NO: 61221 - protein, 377 aa, Homo sapiens
  Payload ID: 12231
  Gene Symbol: PALM2
  Gene Name: paralemmin 2
  ENSP ID: ENSP00000417525
MAEAELHKERLQAIAEKRKRQTEIEGKRQQLDEQILLLQHSKSKVLREKWLLQGIPAGTAEEEEARRRQSEEDEFRVKQLEDNIQRLEQEIQTLESEESQISAKEQIILEKLKETEKSFKDFQKGFSSTDGAVYAMEINVEKDKQTGETKILSTSTIGPEGVHQKGVKVYDDGTKVVYEVRSGGTVVENGVHKLSTKDVEELIQKAGQSSLGGGHVSERTVIADGSLSHPKEHMLCKEAKLEMVHKSRKDHSSGNPGQQAQAPSAAGPEANLDQPVTMIFMGYQNIEDEEETKKVLGYDETIKAELVLIDEDDEKSLREKTVTDVSTIDGNAAELVSGRPVSDTTEPSSPEGKEESLATEPAPGTQKKKRCQCCVVM

SEQ ID NO: 61222 - protein, 180 aa, Homo sapiens
  Payload ID: 12231
  Gene Symbol: PALM2
  Gene Name: paralemmin 2
  ENSP ID: ENSP00000419747
MEKRKRQTEIEGKRQQLDEQILLLQHSKSKVLREKWLLQGIPAGTAEEEEARRRQSEEDEFRVKQLEDNIQRLEQEIQTLESEESQISAKEQIILEKLKETEKSFKDFQKGFSSTDGDAVNYISSQLPDLPILCSRTAEPSPGQDGTSRAAAVYAMEINVEKDKQTGETKILSTSTIGPE

SEQ ID NO: 61223 - protein, 673 aa, Homo sapiens
  Payload ID: 12232
  Gene Symbol: PALM3
  Gene Name: paralemmin 3
  Uniprot ID: A6NDB9
  ENSP ID: ENSP00000344996
MAESSLYRQRLEVIAEKRRLQEEIRAARREVEEEKLRVERLKRKSLRERWLMDGAAAVPEPSEDPTSKDPQSPEGQAQARIRNLEDSLFTLQSQLQLLQSASTGAQHKPSGRPSWRRQGHRPLSQSIVEAGSVGQTDLNKRASLPAGLVGTPPESPSEPREDVLGFLPGPRQVPGAAGDSSEANGPCPSPIPTPEQGLSQRAVPSEGRVGEAKGGGVVSVVWEGLRATEDCATGATGPELEAKVEEVVLEAIGDRKGAGSLELPAWVKEDRGIVEVVWEGVGGSDAEAMGEIGRVPEVVQTSSPRLQERLEAAASIEGEDVPQGSPEGDGQGGSGGEEGSFIWVERVTLSEEWEELLVEGLEGPEVAGRERGDESPLGAEGAKTGGGEETWEAEKRKAEESMGIGSEEKPGTGRDEAEMSPVVERKGGEKKLELESRGSAEKLGTEREGGEEPLGIERKVEGHLRAEKEGDEEKRGAEEEEVEEPLGVEKKGGEEEPEATKEPLEAERKGGEETLEAEKRGGEESLETEKTQGTEGDLNLEQGSREGSESQAEEMNEAGPPLEANTETRPEKEGPQPQEKPVGALEEEGVKPQTAAEGQGPLGDATPLLAETPAPEQPAECQPLLQGEGPSANPSAHPVPTYAPARQPEPSAPTEGEEASGPKQKTCQCCAVM

SEQ ID NO: 61224 - protein, 193 aa, Homo sapiens
  Payload ID: 12232
  Gene Symbol: PALM3
  Gene Name: paralemmin 3
  ENSP ID: ENSP00000465701
MDGAAAVPEPSEDPTSKDPQSPEGQAQARIRNLEDSLFTLQSQLQLLQSASTGAQHKPSGRPSWRRQGHRPLSQSIVEAGSVGQTDLNKRASLPAGLVGTPPESPSEPREDVLGFLPGPRQVPGAAGDSSEANGPCPSPIPTPEQGLSQRAVPSEGRVGEAKGGGVVSVVWEGLRATEDCATGATGPELEAKV

SEQ ID NO: 61225 - protein, 353 aa, Homo sapiens
  Payload ID: 12233
  Gene Symbol: PNMA1
  Gene Name: paraneoplastic Ma antigen 1
  Uniprot ID: Q8ND90
  ENSP ID: ENSP00000318914
MAMTLLEDWCRGMDVNSQRALLVWGIPVNCDEAEIEETLQAAMPQVSYRMLGRMFWREENAKAALLELTGAVDYAAIPREMPGKGGVWKVLFKPPTSDAEFLERLHLFLAREGWTVQDVARVLGFQNPTPTPGPEMPAEMLNYILDNVIQPLVESIWYKRLTLFSGRDIPGPGEETFDPWLEHTNEVLEEWQVSDVEKRRRLMESLRGPAADVIRILKSNNPAITTAECLKALEQVFGSVESSRDAQIKFLNTYQNPGEKLSAYVIRLEPLLQKVVEKGAIDKDNVNQARLEQVIAGANHSGAIRRQLWLTGAGEGPAPNLFQLLVQIREEEAKEEEEEAEATLLQLGLEGHF

SEQ ID NO: 61226 - protein, 364 aa, Homo sapiens
  Payload ID: 12234
  Gene Symbol: PNMA2
  Gene Name: paraneoplastic Ma antigen 2
  Uniprot ID: Q9UL42
  ENSP ID: ENSP00000429344
MALALLEDWCRIMSVDEQKSLMVTGIPADFEEAEIQEVLQETLKSLGRYRLLGKIFRKQENANAVLLELLEDTDVSAIPSEVQGKGGVWKVIFKTPNQDTEFLERLNLFLEKEGQTVSGMFRALGQEGVSPATVPCISPELLAHLLGQAMAHAPQPLLPMRYRKLRVFSGSAVPAPEEESFEVWLEQATEIVKEWPVTEAEKKRWLAESLRGPALDLMHIVQADNPSISVEECLEAFKQVFGSLESRRTAQVRYLKTYQEEGEKVSAYVLRLETLLRRAVEKRAIPRRIADQVRLEQVMAGATLNQMLWCRLRELKDQGPPPSFLELMKVIREEEEEEASFENESIEEPEERDGYGRWNHEGDD

SEQ ID NO: 61227 - protein, 463 aa, Homo sapiens
  Payload ID: 12235
  Gene Symbol: PNMA3
  Gene Name: paraneoplastic Ma antigen 3
  Uniprot ID: Q9UL41
  ENSP ID: ENSP00000390576
MPLTLLQDWCRGEHLNTRRCMLILGIPEDCGEDEFEETLQEACRHLGRYRVIGRMFRREENAQAILLELAQDIDYALLPREIPGKGGPWEVIVKPRNSDGEFLNRLNRFLEEERRTVSDMNRVLGSDTNCSAPRVTISPEFWTWAQTLGAAVQPLLEQMLYRELRVFSGNTISIPGALAFDAWLEHTTEMLQMWQVPEGEKRRRLMECLRGPALQVVSGLRASNASITVEECLAALQQVFGPVESHKIAQVKLCKAYQEAGEKVSSFVLRLEPLLQRAVENNVVSRRNVNQTRLKRVLSGATLPDKLRDKLKLMKQRRKPPGFLALVKLLREEEEWEATLGPDRESLEGLEVAPRPPARITGVGAVPLPASGNSFDARPSQGYRRRRGRGQHRRGGVARAGSRGSRKRKRHTFCYSCGEDGHIRVQCINPSNLLLVKQKKQAAVESGNGNWAWDKSHPKSKAK

SEQ ID NO: 61228 - protein, 463 aa, Homo sapiens; identical to SEQ ID NO: 61227
  Payload ID: 12235
  Gene Symbol: PNMA3
  Gene Name: paraneoplastic Ma antigen 3
  Uniprot ID: Q9UL41
  ENSP ID: ENSP00000469445

SEQ ID NO: 61229 - protein, 455 aa, Homo sapiens
  Payload ID: 12235
  Gene Symbol: PNMA3
  Gene Name: paraneoplastic Ma antigen 3
  Uniprot ID: Q9UL41
  ENSP ID: ENSP00000480719
MPLTLLQDWCRGEHLNTRRCMLILGIPEDCGEDEFEETLQEACRHLGRYRVIGRMFRREENAQAILLELAQDIDYALLPREIPGKGGPWEVIVKPRNSDGEFLNRLNRFLEEERRTVSDMNRVLGSDTNCSAPRVTISPEFWTWAQTLGAAVQPLLEQMLYRELRVFSGNTISIPGALAFDAWLEHTTEMLQMWQVPEGEKRRRLMECLRGPALQVVSGLRASNASITVEECLAALQQVFGPVESHKIAQVKLCKAYQEAGEKVSSFVLRLEPLLQRAVENNVVSRRNVNQTRLKRVLSGATLPDKLRDKLKLMKQRRKPPGFLALVKLLREEEEWEATLGPDRESLEGLEVAPRPPARITGVGAVPLPASGNSFDARPSQGYRRRRGRGQHRRGGVARAGSRGSRKRKRHTFCYSCGEDGHIRVQCINPSNLLLAKETKEILEGGEREAQTNSR

SEQ ID NO: 61230 - protein, 448 aa, Homo sapiens
  Payload ID: 12236
  Gene Symbol: PNMA5
  Gene Name: paraneoplastic Ma antigen family member 5
  Uniprot ID: Q96PV4
  ENSP ID: ENSP00000354834
MALTLLEDWCKGMDMDPRKALLIVGIPMECSEVEIQDTVKAGLQPLCAYRVLGRMFRREDNAKAVFIELADTVNYTTLPSHIPGKGGSWEVVVKPRNPDDEFLSRLNYFLKDEGRSMTDVARALGCCSLPAESLDAEVMPQVRSPPLEPPKESMWYRKLKVFSGTASPSPGEETFEDWLEQVTEIMPIWQVSEVEKRRRLLESLRGPALSIMRVLQANNDSITVEQCLDALKQIFGDKEDFRASQFRFLQTSPKIGEKVSTFLLRLEPLLQKAVHKSPLSVRSTDMIRLKHLLARVAMTPALRGKLELLDQRGCPPNFLELMKLIRDEEEWENTEAVMKNKEKPSGRGRGASGRQARAEASVSAPQATVQARSFSDSSPQTIQGGLPPLVKRRRLLGSESTRGEDHGQATYPKAENQTPGREGPQAAGEELGNEAGAGAMSHPKPWET

SEQ ID NO: 61231 - protein, 448 aa, Homo sapiens; identical to SEQ ID NO: 61230
  Payload ID: 12236
  Gene Symbol: PNMA5
  Gene Name: paraneoplastic Ma antigen family member 5
  Uniprot ID: Q96PV4
  ENSP ID: ENSP00000388850

SEQ ID NO: 61232 - protein, 140 aa, Homo sapiens
  Payload ID: 12236
  Gene Symbol: PNMA5
  Gene Name: paraneoplastic Ma antigen family member 5
  ENSP ID: ENSP00000391130
MALTLLEDWCKGMDMDPRKALLIVGIPMECSEVEIQDTVKAGLQPLCAYRVLGRMFRREDNAKAVFIELADTVNYTTLPSHIPGKGGSWEVVVKPRNPDDEFLSRLNYFLKDEGRSMTDVARALGCCSLPAESLDAEVMP

SEQ ID NO: 61233 - protein, 448 aa, Homo sapiens; identical to SEQ ID NO: 61230
  Payload ID: 12236
  Gene Symbol: PNMA5
  Gene Name: paraneoplastic Ma antigen family member 5
  Uniprot ID: Q96PV4
  ENSP ID: ENSP00000392342

SEQ ID NO: 61234 - protein, 448 aa, Homo sapiens; identical to SEQ ID NO: 61230
  Payload ID: 12236
  Gene Symbol: PNMA5
  Gene Name: paraneoplastic Ma antigen family member 5
  Uniprot ID: Q96PV4
  ENSP ID: ENSP00000445775

SEQ ID NO: 61235 - protein, 399 aa, Homo sapiens
  Payload ID: 12237
  Gene Symbol: PNMA6A
  Gene Name: paraneoplastic Ma antigen family member 6A
  Uniprot ID: P0CW24
  ENSP ID: ENSP00000391488
MAVTMLQDWCRWMGVNARRGLLILGIPEDCDDAEFQESLEAALRPMGHFTVLGKAFREEDNATAALVELDREVNYALVPREIPGTGGPWNVVFVPRCSGEEFLGLGRVFHFPEQEGQMVESVAGALGVGLRRVCWLRSIGQAVQPWVEAVRCQSLGVFSGRDQPAPGEESFEVWLDHTTEMLHVWQGVSERERRRRLLEGLRGTALQLVHALLAENPARTAQDCLAALAQVFGDNESQATIRVKCLTAQQQSGERLSAFVLRLEVLLQKAMEKEALARASADRVRLRQMLTRAHLTEPLDEALRKLRMAGRSPSFLEMLGLVRESEAWEASLARSVRAQTQEGAGARAGAQAVARASTKVEAVPGGPGREPEGLLQAGGQEAEELLQEGLKPVLEECDN

SEQ ID NO: 61236 - protein, 439 aa, Homo sapiens
  Payload ID: 12238
  Gene Symbol: PNMAL1
  Gene Name: paraneoplastic Ma antigen family-like 1
  Uniprot ID: Q86V59
  ENSP ID: ENSP00000318131
MSKTMAMNLLEDWCRGMEVDIHRSLLVTGIPEDCGQAEIEETLNGVLSPLGPYRVLNKIFVREENVKAALIEVGEGVNLSTIPREFPGRGGVWRVVCRDPTQDAEFLKNLNEFLDAEGRTWEDVVRLLQLNHPTLSQNQHQPPENWAEALGVLLGAVVQIIFCMDAEIRSREEARAQEAAEFEEMAAWALAAGRKVKKEPGLAAEVGSALKAETPNNWNATEDQHEPTKPLVRRAGAKSRSRRKKQKKNSRQEAVPWKKPKGINSNSTANLEDPEVGDAESMAISEPIKGSRKPCVNKEELALKKPMAKCAWKGPREPPQDARAEAESPGGASESDQDGGHESPPKKKAVAWVSAKNPAPMRKKKKVSLGPVSYVLVDSEDGRKKPVMPKKGPGSRREASDQKAPRGQQPAEATASTSRGPKAKPEGSPRRATNESRKV

SEQ ID NO: 61237 - protein, 378 aa, Homo sapiens
  Payload ID: 12238
  Gene Symbol: PNMAL1
  Gene Name: paraneoplastic Ma antigen family-like 1
  Uniprot ID: Q86V59
  ENSP ID: ENSP00000410273
MSKTMAMNLLEDWCRGMEVDIHRSLLVTGIPEDCGQAEIEETLNGVLSPLGPYRVLNKIFVREENVKAALIEVGEGVNLSTIPREFPGRGGVWRVVCRDPTQDAEFLKNLNEFLDAEGRTWEDVVRLLQLNHPTLSQNQHQPPENWAEALGVLLGAVVQIIFCMDAEIRSREEARAQEAAEFEEMAAWALAAGRKVKKEPGLAAEVGSALKAETPNNWNATEDQHEPTKPLVRRAGAKSRSRRKKQKKNSRQEAVPWKKPKGINSNSTANLEDPEVGDAESMAISEPIKGSRKPCVNKEELALKKPMAKCAWKGPREPPQDARAEAESPGGASESDQDGGHESPPKKKAVAWVSAKNPAPMRKKKKNPERFDLGDHPY

SEQ ID NO: 61238 - protein, 84 aa, Homo sapiens
  Payload ID: 12238
  Gene Symbol: PNMAL1
  Gene Name: paraneoplastic Ma antigen family-like 1
  ENSP ID: ENSP00000473064
MSKTMAMNLLEDWCRGMEVDIHRSLLVTGIPEDCGQAEIEETLNGVLSPLGPYRVLNKIFVREENVKAALIENPERFDLGDHPY

SEQ ID NO: 61239 - protein, 635 aa, Homo sapiens
  Payload ID: 12239
  Gene Symbol: PNMAL2
  Gene Name: paraneoplastic Ma antigen family-like 2
  Uniprot ID: Q9ULN7
  ENSP ID: ENSP00000473036
MAMSLLQDWCRSLDVDAHRALLVTGIPEGLEQADVEAVLQPTLLPLGTFRLRHMKALMNEKAQAALVEFVEDVNHAAIPREIPGKDGVWRVLWKDRAQDTRVLRQMRRLLLDDGPTQAAEAGTPGEAPTPPASETQAQDSGEVTGQAGSLLGAARNPRRGRRGRRNRTRRNRLTQKGKKRSRGGRPSAPARSEAEDSSDESLGIVIEEIDQGDLSGEEDQSALYATLQAAARELVRQWAPCNSEGEEDGPREFLALVTVTDKSKKEEAEKEPAGAESIRLNTKEDKNGVPDLVALLAVRDTPDEEPVDSDTSESDSQESGDQETEELDNPEFVAIVAYTDPSDPWAREEMLKIASVIESLGWSDEKDKRDPLRQVLSVMSKDTNGTRVKVEEAGREVDAVVLRKAGDDGDLRECISTLAQPDLPPQAKKAGRGLFGGWSEHREDEGGLLELVALLAAQDMAEVMKEEKENAWEGGKYKYPKGKLGEVLALLAARENMGSNEGSEEASDEQSEEESEDTESEASEPEDRASRKPRAKRARTAPRGLTPAGAPPTASGARKTRAGGRGRGRGVTPEKKAGSRGSAQDDAAGSRKKKGSAGAGAHARAGEAKGQAPTGSKAARGKKARRGRRLPPKCR

SEQ ID NO: 61240 - protein, 355 aa, Homo sapiens [sequence omitted]

SEQ ID NO: 61241 - protein, 77 aa, Homo sapiens
  Payload ID: 12240
  Gene Symbol: PON1
  Gene Name: paraoxonase 1
  ENSP ID: ENSP00000407359
MAKLIALTLLGMGLALFRNHQSSYQTRLNALREVQPVELPNCNLVKGIETGSEDLEILPNGLAFISSSWKNTSDGPE

SEQ ID NO: 61242 - protein, 354 aa, Homo sapiens
  Payload ID: 12241
  Gene Symbol: PON2
  Gene Name: paraoxonase 2
  Uniprot ID: Q15165
  ENSP ID: ENSP00000222572
MGRLVAVGLLGIALALLGERLLALRNRLKASREVESVDLPHCHLIKGIEAGSEDIDILPNGLAFFSVGLKFPGLHSFAPDKPGGILMMDLKEEKPRARELRISRGFDLASFNPHGISTFIDNDDTVYLFVVNHPEFKNTVEIFKFEEAENSLLHLKTVKHELLPSVNDITAVGPAHFYATNDHYFSDPFLKYLETYLNLHWANVVYYSPNEVKVVAEGFDSANGINISPDDKYIYVADILAHEIHVLEKHTNMNLTQLKVLELDTLVDNLSIDPSSGDIWVGCHPNGQKLFVYDPNNPPSSEVLRIQNILSEKPTVTTVYANNGSVLQGSSVASVYDGKLLIGTLYHRALYCEL

SEQ ID NO: 61243 - protein, 342 aa, Homo sapiens
  Payload ID: 12241
  Gene Symbol: PON2
  Gene Name: paraoxonase 2
  ENSP ID: ENSP00000404622
MGRLVAVGLLGIALALLGERLLALRNRLKASREVESVDLPHCHLIKGIEAGSEDIDILPNGLAFFSVGLKFPGLHSFAPDKPGGILMMDLKEEKPRARELRISRGFDLASFNPHGISTFIDNEFKNTVEIFKFEEAENSLLHLKTVKHELLPSVNDITAVGPAHFYATNDHYFSDPFLKYLETYLNLHWANVVYYSPNEVKVVAEGFDSANGINISPDDKYIYVADILAHEIHVLEKHTNMNLTQLKVLELDTLVDNLSIDPSSGDIWVGCHPNGQKLFVYDPNNPPSSEVLRIQNILSEKPTVTTVYANNGSVLQGSSVASVYDGKLLIGTLYHRALYCEL

SEQ ID NO: 61244 - protein, 50 aa, Homo sapiens
  Payload ID: 12241
  Gene Symbol: PON2
  Gene Name: paraoxonase 2
  Uniprot ID: Q15165
  ENSP ID: ENSP00000405211
MGRLVAVGLLGIALALLGERLLALRNRLKASREVESVDLPHCHLIKGIVW

SEQ ID NO: 61245 - protein, 219 aa, Homo sapiens
  Payload ID: 12241
  Gene Symbol: PON2
  Gene Name: paraoxonase 2
  ENSP ID: ENSP00000414515
MGRLVAVGLLGIALALLGERLLALRNRLKASREVESVDLPHCHLIKGIEAGSEDIDILPNGLAFFSVGLKFPGLHSFAPDKPGGILMMDLKEEKPRARELRISRGFDLASFNPHGISTFIDNDDTVYLFVVNHPEFKNTVEIFKFEEAENSLLHLKTVKHELLPSVNDITAVGPAHFYATNDHYFSDPFLKYLETYLNLHWANVVYYSPNEVKVVYLCC

SEQ ID NO: 61246 - protein, 32 aa, Homo sapiens
  Payload ID: 12241
  Gene Symbol: PON2
  Gene Name: paraoxonase 2
  ENSP ID: ENSP00000487703
MMDLKEEKPRARELRISRGFDLASFNPHGIST

SEQ ID NO: 61247 - protein, 84 aa, Homo sapiens
  Payload ID: 12241
  Gene Symbol: PON2
  Gene Name: paraoxonase 2
  ENSP ID: ENSP00000487898
MGRLVAVGLLGIALALLGERLLALRNRLKASREVESVDLPHCHLIKGIEAGSEDIDILPNGLAFFSVVSVFFLPQIQQRRYKGI

SEQ ID NO: 61248 - protein, 375 aa, Homo sapiens
  Payload ID: 12241
  Gene Symbol: PON2
  Gene Name: paraoxonase 2
  ENSP ID: ENSP00000488378
MAPPTELLARPERGSAPGSRAMGRLVAVGLLGIALALLGERLLALRNRLKASREVESVDLPHCHLIKGIEAGSEDIDILPNGLAFFSVGLKFPGLHSFAPDKPGGILMMDLKEEKPRARELRISRGFDLASFNPHGISTFIDNDDTVYLFVVNHPEFKNTVEIFKFEEAENSLLHLKTVKHELLPSVNDITAVGPAHFYATNDHYFSDPFLKYLETYLNLHWANVVYYSPNEVKVVAEGFDSANGINISPDDKYIYVADILAHEIHVLEKHTNMNLTQLKVLELDTLVDNLSIDPSSGDIWVGCHPNGQKLFVYDPNNPPSSEVLRIQNILSEKPTVTTVYANNGSVLQGSSVASVYDGKLLIGTLYHRALYCEL

SEQ ID NO: 61249 - protein, 84 aa, Homo sapiens; identical to SEQ ID NO: 61247
  Payload ID: 12241
  Gene Symbol: PON2
  Gene Name: paraoxonase 2
  ENSP ID: ENSP00000488462

SEQ ID NO: 61250 - protein, 113 aa, Homo sapiens
  Payload ID: 12241
  Gene Symbol: PON2
  Gene Name: paraoxonase 2
  ENSP ID: ENSP00000488550
MMDLKEEKPRARELRISRGFDLASFNPHGISTFIDNDDTVYLFVVNHPEFKNTVEIFKFEEAENSLLHLKTVKHELLPSVNDITAVGPAHFYATNDHYFSDPFLKYLETYLNL

SEQ ID NO: 61251 - protein, 53 aa, Homo sapiens
  Payload ID: 12241
  Gene Symbol: PON2
  Gene Name: paraoxonase 2
  ENSP ID: ENSP00000488822
MMDLKEEKPRARELRISRGFDLASFNPHGISTFIDNDDTVYLFVVNHPEFKNT

SEQ ID NO: 61252 - protein, 69 aa, Homo sapiens
  Payload ID: 12241
  Gene Symbol: PON2
  Gene Name: paraoxonase 2
  ENSP ID: ENSP00000488826
MMDLKEEKPRARELRISRGFDLASFNPHGISTFIDNDDTVYLFVVNHPEFKNTVEIFKFEEAENSLLHL

SEQ ID NO: 61253 - protein, 354 aa, Homo sapiens; identical to SEQ ID NO: 61242
  Payload ID: 12241
  Gene Symbol: PON2
  Gene Name: paraoxonase 2
  ENSP ID: ENSP00000488838

SEQ ID NO: 61254 - protein, 122 aa, Homo sapiens
  Payload ID: 12241
  Gene Symbol: PON2
  Gene Name: paraoxonase 2
  ENSP ID: ENSP00000488874
  MOD_RES (1)..(1): Any amino acid
XENSLLHLKTVKHELLPSVNDITAVGPAHFYATNDHYFSDPFLKYLETYLNLHWANVVYYSPNEVKVVAEGFDSANGINISPDDKYIYVADILAHEIHVLEKHTNMNLTQLKILTISHLEGT

SEQ ID NO: 61255 - protein, 354 aa, Homo sapiens
  Payload ID: 12242
  Gene Symbol: PON3
  Gene Name: paraoxonase 3
  Uniprot ID: Q15166
  ENSP ID: ENSP00000265627
MGKLVALVLLGVGLSLVGEMFLAFRERVNASREVEPVEPENCHLIEELESGSEDIDILPSGLAFISSGLKYPGMPNFAPDEPGKIFLMDLNEQNPRAQALEISGGFDKELFNPHGISIFIDKDNTVYLYVVNHPHMKSTVEIFKFEEQQRSLVYLKTIKHELLKSVNDIVVLGPEQFYATRDHYFTNSLLSFFEMILDLRWTYVLFYSPREVKVVAKGFCSANGITVSADQKYVYVADVAAKNIHIMEKHDNWDLTQLKVIQLGTLVDNLTVDPATGDILAGCHPNPMKLLNYNPEDPPGSEVLRIQNVLSEKPRVSTVYANNGSVLQGTSVASVYHGKILIGTVFHKTLYCEL

SEQ ID NO: 61256 - protein, 46 aa, Homo sapiens
  Payload ID: 12242
  Gene Symbol: PON3
  Gene Name: paraoxonase 3
  ENSP ID: ENSP00000390253
MGKLVALVLLGVGLSLVGEMFLAFRVGFYLLQRKGECLSRSGASRT

SEQ ID NO: 61257 - protein, 61 aa, Homo sapiens
  Payload ID: 12242
  Gene Symbol: PON3
  Gene Name: paraoxonase 3
  ENSP ID: ENSP00000391072
MGKLVALVLLGVGLSLVGEMFLAFRERVNASREVEPVEPENCHLIEELGIKISRHAKLCAR

SEQ ID NO: 61258 - protein, 46 aa, Homo sapiens; identical to SEQ ID NO: 61256
  Payload ID: 12242
  Gene Symbol: PON3
  Gene Name: paraoxonase 3
  ENSP ID: ENSP00000393174

SEQ ID NO: 61259 - protein, 270 aa, Homo sapiens
  Payload ID: 12242
  Gene Symbol: PON3
  Gene Name: paraoxonase 3
  ENSP ID: ENSP00000403850
MGKLVALVLLGVGLSLVGEMFLAFRERVNASREVEPVEPENCHLIEELESGSEDIDILPSGLAFISSGLKYPGMPNFAPDEPGKIFLMDLNEQNPRAQALEISGGFDKELFNPHGISIFIDKDNTVYLYVVNHPHMKSTVEIFKFEEQQRSLVYLKTIKHELLKSVNDIVVLGPEQFYATRDHYFTNSLLSFFEMILDLRWTYVLFYSPREVKVVAKGFCSANGITVSADQKYVYVADVAAKNIHIMEKHDNWDLTQLKETFWQDAILIL

SEQ ID NO: 61260 - protein, 245 aa, Homo sapiens
  Payload ID: 12242
  Gene Symbol: PON3
  Gene Name: paraoxonase 3
  ENSP ID: ENSP00000413276
MGKLVALVLLGVGLSLVGEMFLAFRERVNASREVEPVEPENCHLIEELESGSEDIDILPSGLAFISSGLKYPGMPNFAPDEPGKIFLMDLNEQNPRAQALEISGGFDKELFNPHGISIFIDKDNTVYLYVVNHPHMKSTVEIFKFEEQQRSLVYLKTIKHELLKSVNDIVVLGPEQFYATRDHYFTNSLLSFFEMILDLRWTYVLFYSPREVKVVAKGFCSANGITVSADQKYFASRMFCLRSPG

SEQ ID NO: 61261 - protein, 523 aa, Homo sapiens
  Payload ID: 12243
  Gene Symbol: PSPC1
  Gene Name: paraspeckle component 1
  Uniprot ID: Q8WXF1
  ENSP ID: ENSP00000343966
MMLRGNLKQVRIEKNPARLRALESAVGESEPAAAAAMALALAGEPAPPAPAPPEDHPDEEMGFTIDIKSFLKPGEKTYTQRCRLFVGNLPTDITEEDFKRLFERYGEPSEVFINRDRGFGFIRLESRTLAEIAKAELDGTILKSRPLRIRFATHGAALTVKNLSPVVSNELLEQAFSQFGPVEKAVVVVDDRGRATGKGFVEFAAKPPARKALERCGDGAFLLTTTPRPVIVEPMEQFDDEDGLPEKLMQKTQQYHKEREQPPRFAQPGTFEFEYASRWKALDEMEKQQREQVDRNIREAKEKLEAEMEAARHEHQLMLMRQDLMRRQEELRRLEELRNQELQKRKQIQLRHEEEHRRREEEMIRHREQEELRRQQEGFKPNYMENREQEMRMGDMGPRGAINMGDAFSPAPAGNQGPPPMMGMNMNNRATIPGPPMGPGPAMGPEGAANMGTPMMPDNGAVHNDRFPQGPPSQMGSPMGSRTGSETPQAPMSGVGPVSGGPGGFGRGSQGGNFEGPNKRRRY

SEQ ID NO: 61262 - protein, 248 aa, Homo sapiens
  Payload ID: 12243
  Gene Symbol: PSPC1
  Gene Name: paraspeckle component 1
  ENSP ID: ENSP00000393069
MMLRGNLKQVRIEKNPARLRALESAVGESEPAAAAAMALALAGEPAPPAPAPPEDHPDEEMGFTIDIKSFLKPGEKTYTQRCRLFVGNLPTDITEEDFKRLFERYGEPSEVFINRDRGFGFIRLESRTLAEIAKAELDGTILKSRPLRIRFATHGAALTVKNLSPVVSNELLEQAFSQFGPVEKAVVVVDDRGRATGKGFVEFAAKPPARKALERCGDGAFLLTTTPRPVIVEPMEQFDDEDGLPEKL

SEQ ID NO: 61263 - protein, 393 aa, Homo sapiens
  Payload ID: 12243
  Gene Symbol: PSPC1
  Gene Name: paraspeckle component 1
  Uniprot ID: Q8WXF1
  ENSP ID: ENSP00000435921
MMLRGNLKQVRIEKNPARLRALESAVGESEPAAAAAMALALAGEPAPPAPAPPEDHPDEEMGFTIDIKSFLKPGEKTYTQRCRLFVGNLPTDITEEDFKRLFERYGEPSEVFINRDRGFGFIRLESRTLAEIAKAELDGTILKSRPLRIRFATHGAALTVKNLSPVVSNELLEQAFSQFGPVEKAVVVVDDRGRATGKGFVEFAAKPPARKALERCGDGAFLLTTTPRPVIVEPMEQFDDEDGLPEKLMQKTQQYHKEREQPPRFAQPGTFEFEYASRWKALDEMEKQQREQVDRNIREAKEKLEAEMEAARHEHQLMLMRQDLMRRQEELRRLEELRNQELQKRKQIQLRHEEEHRRREEEMIRHREQEELRRQQEGFKPNYMENGDKRKCG

SEQ ID NO: 61264 - protein, 393 aa, Homo sapiens; identical to SEQ ID NO: 61263
  Payload ID: 12243
  Gene Symbol: PSPC1
  Gene Name: paraspeckle component 1
  Uniprot ID: Q8WXF1
  ENSP ID: ENSP00000436038

SEQ ID NO: 61265 - protein, 523 aa, Homo sapiens; identical to SEQ ID NO: 61261
  Payload ID: 12243
  Gene Symbol: PSPC1
  Gene Name: paraspeckle component 1
  Uniprot ID: Q8WXF1
  ENSP ID: ENSP00000481916

SEQ ID NO: 61266 - protein, 33 aa, Homo sapiens
  Payload ID: 12243
  Gene Symbol: PSPC1
  Gene Name: paraspeckle component 1
  ENSP ID: ENSP00000488975
EEMIRHREQEELRRQQEGFKPNYMENYVCHFLR

SEQ ID NO: 61267 - protein, 102 aa, Homo sapiens
  Payload ID: 12244
  Gene Symbol: PTMS
  Gene Name: parathymosin
  Uniprot ID: P20962
  ENSP ID: ENSP00000310088
MSEKSVEAAAELSAKDLKEKKEKVEEKASRKERKKEVVEEEENGAEEEEEETAEDGEEEDEGEEEDEEEEEEDDEGPALKRAAEEEDEADPKRQKTENGASA

SEQ ID NO: 61268 - protein, 104 aa, Homo sapiens
  Payload ID: 12244
  Gene Symbol: PTMS
  Gene Name: parathymosin
  ENSP ID: ENSP00000374113
MSEKSVEAAAELSAKDLKEKKEKVEEKASRKERKKEVVEAPVPLVVMVGKACSQPEATPSPGPHRRRRTGLRRKKKKLPRMERRKMKGKKKMRKKKKRMMKGPR

SEQ ID NO: 61269 - protein, 57 aa, Homo sapiens
  Payload ID: 12244
  Gene Symbol: PTMS
  Gene Name: parathymosin
  ENSP ID: ENSP00000442325
MSEKSVEAAAELSAKDLKEKKEKVEEKASRKERKKEVVEAPVPLVVMVGKACSQPEA

SEQ ID NO: 61270 - protein, 102 aa, Homo sapiens; identical to SEQ ID NO: 61267
  Payload ID: 12244
  Gene Symbol: PTMS
  Gene Name: parathymosin
  Uniprot ID: P20962
  ENSP ID: ENSP00000478828

SEQ ID NO: 61271 - protein, 115 aa, Homo sapiens
  Payload ID: 12245
  Gene Symbol: PTH
  Gene Name: parathyroid hormone
  Uniprot ID: P01270
  ENSP ID: ENSP00000282091
MIPAKDMAKVMIVMLAICFLTKSDGKSVKKRSVSEIQLMHNLGKHLNSMERVEWLRKKLQDVHNFVALGAPLAPRDAGSQRPRKKEDNVLVESHEKSLGEADKADVNVLTKAKSQ

SEQ ID NO: 61272 - protein, 115 aa, Homo sapiens; identical to SEQ ID NO: 61271
  Payload ID: 12245
  Gene Symbol: PTH
  Gene Name: parathyroid hormone
  Uniprot ID: P01270
  ENSP ID: ENSP00000433208

SEQ ID NO: 61273 - protein, 593 aa, Homo sapiens
  Payload ID: 12246
  Gene Symbol: PTH1R
  Gene Name: parathyroid hormone 1 receptor
  Uniprot ID: Q03431
  ENSP ID: ENSP00000321999
MGTARIAPGLALLLCCPVLSSAYALVDADDVMTKEEQIFLLHRAQAQCEKRLKEVLQRPASIMESDKGWTSASTSGKPRKDKASGKLYPESEEDKEAPTGSRYRGRPCLPEWDHILCWPLGAPGEVVAVPCPDYIYDFNHKGHAYRRCDRNGSWELVPGHNRTWANYSECVKFLTNETREREVFDRLGMIYTVGYSVSLASLTVAVLILAYFRRLHCTRNYIHMHLFLSFMLRAVSIFVKDAVLYSGATLDEAERLTEEELRAIAQAPPPPATAAAGYAGCRVAVTFFLYFLATNYYWILVEGLYLHSLIFMAFFSEKKYLWGFTVFGWGLPAVFVAVWVSVRATLANTGCWDLSSGNKKWIIQVPILASIVLNFILFINIVRVLATKLRETNAGRCDTRQQYRKLLKSTLVLMPLFGVHYIVFMATPYTEVSGTLWQVQMHYEMLFNSFQGFFVAIIYCFCNGEVQAEIKKSWSRWTLALDFKRKARSGSSSYSYGPMVSHTSVTNVGPRVGLGLPLSPRLLPTATTNGHPQLPGHAKPGTPALETLETTPPAMAAPKDDGFLNGSCSGLDEEASGPERPPALLQEEWETVM

SEQ ID NO: 61274 - protein, 333 aa, Homo sapiens
  Payload ID: 12246
  Gene Symbol: PTH1R
  Gene Name: parathyroid hormone 1 receptor
  ENSP ID: ENSP00000389811
MGTARIAPGLALLLCCPVLSSAYALVDADDVMTKEEQIFLLHRAQAQCEKRLKEVLQRPASIMESDKGWTSASTSGKPRKDKASGKLYPESEEDKEAPTGSRYRGRPCLPEWDHILCWPLGAPGEVVAVPCPDYIYDFNHKGHAYRRCDRNGSWELVPGHNRTWANYSECVKFLTNETREREVFDRLGMIYTVGYSVSLASLTVAVLILAYFRRLHCTRNYIHMHLFLSFMLRAVSIFVKDAVLYSGATLDEAERLTEEELRAIAQAPPPPATAAAGYAGCRVAVTFFLYFLATNYYWILVEGLYLHSLIFMAFFSEKKYLWGFTVFGWGAGT

SEQ ID NO: 61275 - protein, 182 aa, Homo sapiens
  Payload ID: 12246
  Gene Symbol: PTH1R
  Gene Name: parathyroid hormone 1 receptor
  ENSP ID: ENSP00000396176
YTEVSGTLWQVQMHYEMLFNSFQGFFVAIIYCFCNGENTPEDILKAEKSFQMMQVQAEIKKSWSRWTLALDFKRKARSGSSSYSYGPMVSHTSVTNVGPRVGLGLPLSPRLLPTATTNGHPQLPGHAKPGTPALETLETTPPAMAAPKDDGFLNGSCSGLDEEASGPERPPALLQEEWETVM

SEQ ID NO: 61276 - protein, 527 aa, Homo sapiens
  Payload ID: 12246
  Gene Symbol: PTH1R
  Gene Name: parathyroid hormone 1 receptor
  ENSP ID: ENSP00000400977
MGTARIAPGLALLLCCPVLSSAYALVDADDVMTKEEQIFLLHRAQAQCEKRLKEVLQRPASIMESDKGWTSASTSGKPRKDKASGKLYPESEEDKEAPTGSRYRGRPCLPEWDHILCWPLGAPGEVVAVPCPDYIYDFNHKGHAYRRCDRNGSWELVPGHNRTWANYSECVKFLTNETREREVFDRLGMIYTVGYSVSLASLTVAVLILAYFRRLHCTRNYIHMHLFLSFMLRAVSIFVKDAVLYSGATLDEAERLTEEELRAIAQAPPPPATAAAGYAGCRVAVTFFLYFLATNYYWILVEGLYLHSLIFMAFFSEKKYLWGFTVFGWGLPAVFVAVWVSVRATLANTGCWDLSSGNKKWIIQVPILASIVLNFILFINIVRVLATKLRETNAGRCDTRQQYRKLLKSTLVLMPLFGVHYIVFMATPYTEVSGTLWQVQMHYEMLFNSFQGFFVAIIYCFCNGEVQAEIKKSWSRWTLALDFKRKARSGSSSYSYGPMVSHTSVTNVGPRVGLGLPLSPRLLPTAT

SEQ ID NO: 61277 - protein, 593 aa, Homo sapiens; identical to SEQ ID NO: 61273
  Payload ID: 12246
  Gene Symbol: PTH1R
  Gene Name: parathyroid hormone 1 receptor
  Uniprot ID: Q03431
  ENSP ID: ENSP00000402723

SEQ ID NO: 61278 - protein, 593 aa, Homo sapiens; identical to SEQ ID NO: 61273
  Payload ID: 12246
  Gene Symbol: PTH1R
  Gene Name: parathyroid hormone 1 receptor
  Uniprot ID: Q03431
  ENSP ID: ENSP00000411424

SEQ ID NO: 61279 - protein, 593 aa, Homo sapiens; identical to SEQ ID NO: 61273
  Payload ID: 12246
  Gene Symbol: PTH1R
  Gene Name: parathyroid hormone 1 receptor
  Uniprot ID: Q03431
  ENSP ID: ENSP00000413774

SEQ ID NO: 61280 - protein, 100 aa, Homo sapiens
  Payload ID: 12247
  Gene Symbol: PTH2
  Gene Name: parathyroid hormone 2
  Uniprot ID: Q96A98
  ENSP ID: ENSP00000270631
METRQVSRSPRVRLLLLLLLLLVVPWGVRTASGVALPPVGVLSLRPPGRAWADPATPRPRRSLALADDAAFRERARLLAALERRHWLNSYMHKLLVLDAP

SEQ ID NO: 61281 - protein, 550 aa, Homo sapiens
  Payload ID: 12248
  Gene Symbol: PTH2R
  Gene Name: parathyroid hormone 2 receptor
  Uniprot ID: P49190
  ENSP ID: ENSP00000272847
MAGLGASLHVWGWLMLGSCLLARAQLDSDGTITIEEQIVLVLKAKVQCELNITAQLQEGEGNCFPEWDGLICWPRGTVGKISAVPCPPYIYDFNHKGVAFRHCNPNGTWDFMHSLNKTWANYSDCLRFLQPDISIGKQEFFERLYVMYTVGYSISFGSLAVAILIIGYFRRLHCTRNYIHMHLFVSFMLRATSIFVKDRVVHAHIGVKELESLIMQDDPQNSIEATSVDKSQYIGCKIAVVMFIYFLATNYYWILVEGLYLHNLIFVAFFSDTKYLWGFILIGWGFPAAFVAAWAVARATLADARCWELSAGDIKWIYQAPILAAIGLNFILFLNTVRVLATKIWETNAVGHDTRKQYRKLAKSTLVLVLVFGVHYIVFVCLPHSFTGLGWEIRMHCELFFNSFQGFFVSIIYCYCNGEVQAEVKKMWSRWNLSVDWKRTPPCGSRRCGSVLTTVTHSTSSQSQVAASTRMVLISGKAAKIASRQPDSHITLPGYVWSNSEQDCLPHSFHEETKEDSGRQGDDILMEKPSRPMESNPDTEGCQGETEDVL

SEQ ID NO: 61282 - protein, 54 aa, Homo sapiens
  Payload ID: 12248
  Gene Symbol: PTH2R
  Gene Name: parathyroid hormone 2 receptor
  ENSP ID: ENSP00000393930
  MOD_RES (1)..(1): Any amino acid
XSFTGLGWEIRMHCELFFNSFQGFFVSIIYCYCNGEIGRLLCMDKIPATASLTP

SEQ ID NO: 61283 - protein, 439 aa, Homo sapiens
  Payload ID: 12248
  Gene Symbol: PTH2R
  Gene Name: parathyroid hormone 2 receptor
  ENSP ID: ENSP00000482485
MHSLNKTWANYSDCLRFLQPDISIGKQEFFERLYVMYTVGYSISFGSLAVAILIIGYFRRLHCTRNYIHMHLFVSFMLRATSIFVKDRVVHAHIGVKELESLIMQDDPQNSIEATSVDKSQYIGCKIAVVMFIYFLATNYYWILVEGLYLHNLIFVAFFSDTKYLWGFILIGWGFPAAFVAAWAVARATLADARCWELSAGDIKWIYQAPILAAIGLNFILFLNTVRVLATKIWETNAVGHDTRKQYRKLAKSTLVLVLVFGVHYIVFVCLPHSFTGLGWEIRMHCELFFNSFQGFFVSIIYCYCNGEVQAEVKKMWSRWNLSVDWKRTPPCGSRRCGSVLTTVTHSTSSQSQVAASTRMVLISGKAAKIASRQPDSHITLPGYVWSNSEQDCLPHSFHEETKEDSGRQGDDILMEKPSRPMESNPDTEGCQGETEDVL

SEQ ID NO: 61284 - protein, 175 aa, Homo sapiens
  Payload ID: 12249
  Gene Symbol: PTHLH
  Gene Name: parathyroid hormone-like hormone
  Uniprot ID: P12272
  ENSP ID: ENSP00000201015
MQRRLVQQWSVAVFLLSYAVPSCGRSVEGLSRRLKRAVSEHQLLHDKGKSIQDLRRRFFLHHLIAEIHTAEIRATSEVSPNSKPSPNTKNHPVRFGSDDEGRYLTQETNKVETYKEQPLKTPGKKKKGKPGKRKEQEKKKRRTRSAWLDSGVTGSGLEGDHLSDTSTTSLELDSR

SEQ ID NO: 61285 - protein, 175 aa, Homo sapiens; identical to SEQ ID NO: 61284
  Payload ID: 12249
  Gene Symbol: PTHLH
  Gene Name: parathyroid hormone-like hormone
  Uniprot ID: P12272
  ENSP ID: ENSP00000379209

SEQ ID NO: 61286 - protein, 177 aa, Homo sapiens
  Payload ID: 12249
  Gene Symbol: PTHLH
  Gene Name: parathyroid hormone-like hormone
  Uniprot ID: P12272
  ENSP ID: ENSP00000379213
MQRRLVQQWSVAVFLLSYAVPSCGRSVEGLSRRLKRAVSEHQLLHDKGKSIQDLRRRFFLHHLIAEIHTAEIRATSEVSPNSKPSPNTKNHPVRFGSDDEGRYLTQETNKVETYKEQPLKTPGKKKKGKPGKRKEQEKKKRRTRSAWLDSGVTGSGLEGDHLSDTSTTSLELDSRRH

SEQ ID NO: 61287 - protein, 175 aa, Homo sapiens; identical to SEQ ID NO: 61284
  Payload ID: 12249
  Gene Symbol: PTHLH
  Gene Name: parathyroid hormone-like hormone
  Uniprot ID: P12272
  ENSP ID: ENSP00000440613

SEQ ID NO: 61288 - protein, 177 aa, Homo sapiens; identical to SEQ ID NO: 61286
  Payload ID: 12249
  Gene Symbol: PTHLH
  Gene Name: parathyroid hormone-like hormone
  Uniprot ID: P12272
  ENSP ID: ENSP00000441571

SEQ ID NO: 61289 - protein, 177 aa, Homo sapiens; identical to SEQ ID NO: 61286
  Payload ID: 12249
  Gene Symbol: PTHLH
  Gene Name: parathyroid hormone-like hormone
  Uniprot ID: P12272
  ENSP ID: ENSP00000441765

SEQ ID NO: 61290 - protein, 209 aa, Homo sapiens
  Payload ID: 12249
  Gene Symbol: PTHLH
  Gene Name: parathyroid hormone-like hormone
  Uniprot ID: P12272
  ENSP ID: ENSP00000441890
MQRRLVQQWSVAVFLLSYAVPSCGRSVEGLSRRLKRAVSEHQLLHDKGKSIQDLRRRFFLHHLIAEIHTAEIRATSEVSPNSKPSPNTKNHPVRFGSDDEGRYLTQETNKVETYKEQPLKTPGKKKKGKPGKRKEQEKKKRRTRSAWLDSGVTGSGLEGDHLSDTSTTSLELDSRTALLWGLKKKKENNRRTHHMQLMISLFKSPLLLL

SEQ ID NO: 61291 - protein, 172 aa, Homo sapiens
  Payload ID: 12249
  Gene Symbol: PTHLH
  Gene Name: parathyroid hormone-like hormone
  ENSP ID: ENSP00000444519
MQRRLVQQWSVAVFLLSYAVPSCGRSVEGLSRRLKRAVSEHQLLHDKGKSIQDLRRRFFLHHLIAEIHTAEIRATSEVSPNSKPSPNTKNHPVRFGSDDEGRYLTQETNKVETYKEQPLKTPGKKKKGKPGKRKEQEKKKRRTRSAWLDSGVTGSGLEGDHLSDTSTTSLEL

SEQ ID NO: 61292 - protein, 111 aa, Homo sapiens
  Payload ID: 12249
  Gene Symbol: PTHLH
  Gene Name: parathyroid hormone-like hormone
  ENSP ID: ENSP00000445157
MSRARAETMQRRLVQQWSVAVFLLSYAVPSCGRSVEGLSRRLKRAVSEHQLLHDKGKSIQDLRRRFFLHHLIAEIHTAEIRATSEVSPNSKPSPNTKNHPVRFGSDDEGRY

SEQ ID NO: 61293 - protein, 296 aa, Homo sapiens
  Payload ID: 12250
  Gene Symbol: PACRG
  Gene Name: PARK2 co-regulated
  Uniprot ID: Q96M98
  ENSP ID: ENSP00000337946
MVAEKETLSLNKCPDKMPKRTKLLAQQPLPVHQPHSLVSEGFTVKAMMKNSVVRGPPAAGAFKERPTKPTAFRKFYERGDFPIALEHDSKGNKIAWKVEIEKLDYHHYLPLFFDGLCEMTFPYEFFARQGIHDMLEHGGNKILPVLPQLIIPIKNALNLRNRQVICVTLKVLQHLVVSAEMVGKALVPYYRQILPVLNIFKNMNGSYSLPRLECSGAIMARCNLDHLGSSDPPTSASQVAEIIVNSGDGIDYSQQKRENIGDLIQETLEAFERYGGENAFINIKYVVPTYESCLLN

SEQ ID NO: 61294 - protein, 257 aa, Homo sapiens
  Payload ID: 12250
  Gene Symbol: PACRG
  Gene Name: PARK2 co-regulated
  Uniprot ID: Q96M98
  ENSP ID: ENSP00000355854
MVAEKETLSLNKCPDKMPKRTKLLAQQPLPVHQPHSLVSEGFTVKAMMKNSVVRGPPAAGAFKERPTKPTAFRKFYERGDFPIALEHDSKGNKIAWKVEIEKLDYHHYLPLFFDGLCEMTFPYEFFARQGIHDMLEHGGNKILPVLPQLIIPIKNALNLRNRQVICVTLKVLQHLVVSAEMVGKALVPYYRQILPVLNIFKNMNVNSGDGIDYSQQKRENIGDLIQETLEAFERYGGENAFINIKYVVPTYESCLLN

SEQ ID NO: 61295 - protein, 257 aa, Homo sapiens; identical to SEQ ID NO: 61294
  Payload ID: 12250
  Gene Symbol: PACRG
  Gene Name: PARK2 co-regulated
  Uniprot ID: Q96M98
  ENSP ID: ENSP00000355855

SEQ ID NO: 61296 - protein, 127 aa, Homo sapiens
  Payload ID: 12250
  Gene Symbol: PACRG
  Gene Name: PARK2 co-regulated
  ENSP ID: ENSP00000438242
  MOD_RES (1)..(1): Any amino acid
XPVLPQLIIPIKNALNLRNRQVICVTLKVLQHLVVSAEMVGKALVPYYRQILPVLNIFKNMNVTHRQRSELSSMLAKWGGPDLLLVFLPFSTIIVCKSLIFILSQFMLPRLNSATNNMNVTHFIICN

SEQ ID NO: 61297 - protein, 62 aa, Homo sapiens
  Payload ID: 12250
  Gene Symbol: PACRG
  Gene Name: PARK2 co-regulated
  ENSP ID: ENSP00000440706
  MOD_RES (1)..(1): Any amino acid
XGPPAAGAFKERPTKPTAFRKFYERGDFPIALEHDSKGNKIAWKILGMKNYKTTSPWPLSNR

SEQ ID NO: 61298 - protein, 125 aa, Homo sapiens
  Payload ID: 12250
  Gene Symbol: PACRG
  Gene Name: PARK2 co-regulated
  ENSP ID: ENSP00000442879
  MOD_RES (1)..(1): Any amino acid
XEHDSKGNKIAWKVEIEKLDYHHYLPLFFDGLCEMTFPYEFFARQGIHDMLEHGGNKILPVLPQLIIPIKNALNLRNRQVICVTLKVLQHLVVSAEMVGKALVPYYRQILPVLNIFKNMNGWAPP

SEQ ID NO: 61299 - protein, 120 aa, Homo sapiens [sequence omitted]

SEQ ID NO: 61300 - protein, 92 aa, Homo sapiens
  Payload ID: 12250
  Gene Symbol: PACRG
  Gene Name: PARK2 co-regulated
  ENSP ID: ENSP00000481001
GSYSLPRLECSGAIMARCNLDHLGSSDPPTSASQVAEIIVNSGDGIDYSQQKRENIGDLIQETLEAFERYGGENAFINIKYVVPTYESCLLN

SEQ ID NO: 61301 - protein, 221 aa, Homo sapiens
  Payload ID: 12251
  Gene Symbol: PACRGL
  Gene Name: PARK2 co-regulated-like
  Uniprot ID: Q8N7B6
  ENSP ID: ENSP00000295290
MQKSEGSGGTQLKNRATGNYDQRTSSSTQLKHRNAVQGSKSSLSTSSPESARKLHPRPSDKLNPKTINPFGEQSRVPSAFAAIYSKGGIPCRLVHGSVKHRLQWECPPESLSFDPLLITLAEGLRETKHPYTFVSKEGFRELLLVKGAPEKAIPLLPRLIPVLKAALVHSDDEVFERGLNALVQLSVVVGPSLNDHLKHLLTSGSLSIIKSKIPTYCSICC

SEQ ID NO: 61302 - protein, 221 aa, Homo sapiens; identical to SEQ ID NO: 61301
  Payload ID: 12251
  Gene Symbol: PACRGL
  Gene Name: PARK2 co-regulated-like
  Uniprot ID: Q8N7B6
  ENSP ID: ENSP00000354171

SEQ ID NO: 61303 - protein, 123 aa, Homo sapiens
  Payload ID: 12251
  Gene Symbol: PACRGL
  Gene Name: PARK2 co-regulated-like
  Uniprot ID: Q8N7B6
  ENSP ID: ENSP00000415832
MQKSEGSGGTQLKNRATGNYDQRTSSSTQLKHRNAVQGSKSSLSTSSPESARKLHPRPSDKLNPKTINPVHSDDEVFERGLNALVQLSVVVGPSLNDHLKHLLTSGSLSIIKSKIPTYCSICC

SEQ ID NO: 61304 - protein, 91 aa, Homo sapiens
  Payload ID: 12251
  Gene Symbol: PACRGL
  Gene Name: PARK2 co-regulated-like
  ENSP ID: ENSP00000420948
MQKSEGSGGTQLKNRATGNYDQRTSSSTQLKHRNAVQGSKSSLSTSSPESARKLHPRPSDKLNPKTINPFGEQSRVPSAFAAIYSKGGIPC

SEQ ID NO: 61305 - protein, 102 aa, Homo sapiens
  Payload ID: 12251
  Gene Symbol: PACRGL
  Gene Name: PARK2 co-regulated-like
  ENSP ID: ENSP00000421570
MQKSEGSGGTQLKNRATGNYDQRTSSSTQLKHRNAVQGSKSSLSTSSPESARKLHPRPSDKLNPKTINPFGEQSRVPSAFAAIYSKGGIPCRLVHGSVKHRL

SEQ ID NO: 61306 - protein, 150 aa, Homo sapiens
  Payload ID: 12251
  Gene Symbol: PACRGL
  Gene Name: PARK2 co-regulated-like
  ENSP ID: ENSP00000421687
MQKSEGSGGTQLKNRATGNYDQRTSSSTQLKHRNAVQGSKSSLSTSSPESARKLHPRPSDKLNPKTINPGLRETKHPYTFVSKEGFRELLLVKGAPEKAIPLLPRLIPVLKAALVHSDDEVFERGLNALVQLSVVVGPSLNDHLKHLLTS

SEQ ID NO: 61307 - protein, 14 aa, Homo sapiens
  Payload ID: 12251
  Gene Symbol: PACRGL
  Gene Name: PARK2 co-regulated-like
  ENSP ID: ENSP00000421703
MQKSEGSGGTQLKN

SEQ ID NO: 61308 - protein, 85 aa, Homo sapiens
  Payload ID: 12251
  Gene Symbol: PACRGL
  Gene Name: PARK2 co-regulated-like
  ENSP ID: ENSP00000422142
MQKSEGSGGTQLKNRATGNYDQRTSSSTQLKHRNAVQGSKSSLSTSSPESARKLHPRPSDKLNPKTINPIGTWFSKTQITVGMSS

SEQ ID NO: 61309 - protein, 142 aa, Homo sapiens
  Payload ID: 12251
  Gene Symbol: PACRGL
  Gene Name: PARK2 co-regulated-like
  ENSP ID: ENSP00000422394
MQKSEGSGGTQLKNRATGNYDQRTSSSTQLKHRNAVQGSKSSLSTSSPESARKLHPRPSDKLNPKTINPGLRETKHPYTFVSKEGFRELLLVKGAPEKAIPLLPRLIPVLKAALVHSDDEVFERGLNALVQLSVVVGPSLND

SEQ ID NO: 61310 - protein, 203 aa, Homo sapiens
  Payload ID: 12251
  Gene Symbol: PACRGL
  Gene Name: PARK2 co-regulated-like
  ENSP ID: ENSP00000422425
MQKSEGSGGTQLKNRATGNYDQRTSSSTQLKHRNAVQGSKSSLSTSSPESARKLHPRPSDKLNPKTINPFGEQSRVPSAFAAIYSKGGIPCRLVHGSVKHRLQWECPPESLSFDPLLITLAEGLRETKHPYTFVSKEGFRELLLVKGAPEKAIPLLPRLIPVLKAALVHSDDEVFERGLNALVQLSVVVGPSLNDHLKHLLTS

SEQ ID NO: 61311 - protein, 93 aa, Homo sapiens
  Payload ID: 12251
  Gene Symbol: PACRGL
  Gene Name: PARK2 co-regulated-like
  ENSP ID: ENSP00000422499
MQKSEGSGGTQLKNRATGNYDQRTSSSTQLKHRNAVQGSKSSLSTSSPESARKLHPRPSDKLNPKTINPFGEQSRVPSAFAAIYSKGGIPCRV

SEQ ID NO: 61312 - protein, 136 aa, Homo sapiens
  Payload ID: 12251
  Gene Symbol: PACRGL
  Gene Name: PARK2 co-regulated-like
  ENSP ID: ENSP00000422962
MQKSEGSGGTQLKNRATGNYDQRTSSSTQLKHRNAVQGSKSSLSTSSPESARKLHPRPSDKLNPKTINPFGEQSRVPSAFAAIYSKGGIPCRLVHGSVKHRLQWECPPESLSFDPLLITLAEGLRETKHPYTFVSK

SEQ ID NO: 61313 - protein, 15 aa, Homo sapiens
  Payload ID: 12251
  Gene Symbol: PACRGL
  Gene Name: PARK2 co-regulated-like
  ENSP ID: ENSP00000423105
MWNPHIRRANCNLSL

SEQ ID NO: 61314 - protein, 221 aa, Homo sapiens; identical to SEQ ID NO: 61301
  Payload ID: 12251
  Gene Symbol: PACRGL
  Gene Name: PARK2 co-regulated-like
  Uniprot ID: Q8N7B6
  ENSP ID: ENSP00000423477

SEQ ID NO: 61315 - protein, 245 aa, Homo sapiens
  Payload ID: 12251
  Gene Symbol: PACRGL
  Gene Name: PARK2 co-regulated-like
  ENSP ID: ENSP00000423499
MWNPHIRRANCNLSLSLLQEQLFDVKEDRNLAIKFHPKLPLNWSEREAMQKSEGSGGTQLKNRATGNYDQRTSSSTQLKHRNAVQGSKSSLSTSSPESARKLHPRPSDKLNPKTINPFGEQSRVPSAFAAIYSKGGIPCRLVHGSVKHRLQWECPPESLSFDPLLITLAEGLRETKHPYTFVSKEGFRELLLVKGAPEKAIPLLPRLIPVLKAALVHSDDEVFERGLNALVQLSVVVGPSLNDHL

SEQ ID NO: 61316 - protein, 5 aa, Homo sapiens
  Payload ID: 12251
  Gene Symbol: PACRGL
  Gene Name: PARK2 co-regulated-like
  ENSP ID: ENSP00000423523
MWNPH

SEQ ID NO: 61317 - protein, 221 aa, Homo sapiens; identical to SEQ ID NO: 61301
  Payload ID: 12251
  Gene Symbol: PACRGL
  Gene Name: PARK2 co-regulated-like
  Uniprot ID: Q8N7B6
  ENSP ID: ENSP00000423536

SEQ ID NO: 61318 - protein, 248 aa, Homo sapiens
  Payload ID: 12251
  Gene Symbol: PACRGL
  Gene Name: PARK2 co-regulated-like
  Uniprot ID: Q8N7B6
  ENSP ID: ENSP00000423881
MQKSEGSGGTQLKNRATGNYDQRTSSSTQLKHRNAVQGSKSSLSTSSPESARKLHPRPSDKLNPKTINPFGEQSRVPSAFAAIYSKGGIPCRLVHGSVKHRLQWECPPESLSFDPLLITLAEGLRETKHPYTFVSKEGFRELLLVKGAPEKAIPLLPRLIPVLKAALVHSDDEVFERGLNALVQLSVVVGPSLNDHLKHLLTSLSKRLMDKKFKEPITSALQKLEQHGGSGSLSIIKSKIPTYCSICC

SEQ ID NO: 61319 - protein, 248 aa, Homo sapiens; identical to SEQ ID NO: 61318
  Payload ID: 12251
  Gene Symbol: PACRGL
  Gene Name: PARK2 co-regulated-like
  Uniprot ID: Q8N7B6
  ENSP ID: ENSP00000423914

SEQ ID NO: 61320 - protein, 84 aa, Homo sapiens
  Payload ID: 12251
  Gene Symbol: PACRGL
  Gene Name: PARK2 co-regulated-like
  ENSP ID: ENSP00000424391
MQKSEGSGGTQLKNRATGNYDQRTSSSTQLKHRNAVQGSKSSLSTSSPESARKLHPRPSDKLNPKTINPFGEQSRVPSAFAAIY

SEQ ID NO: 61321 - protein, 105 aa, Homo sapiens
  Payload ID: 12251
  Gene Symbol: PACRGL
  Gene Name: PARK2 co-regulated-like
  ENSP ID: ENSP00000424898
MQKSEGSGGTQLKNRATGNYDQRTSSSTQLKHRNAVQGSKSSLSTSSPESARKLHPRPSDKLNPKTINPVHSDDEVFERGLNALVQLSVVVGPSLNDHLKHLLTS

SEQ ID NO: 61322 - protein, 87 aa, Homo sapiens
  Payload ID: 12251
  Gene Symbol: PACRGL
  Gene Name: PARK2 co-regulated-like
  ENSP ID: ENSP00000424950
MQKSEGSGGTQLKNRATGNYDQRTSSSTQLKHRNAVQGSKSSLSTSSPESARKLHPRPSDKLNPKTINPGSLSIIKSKIPTYCSICC

SEQ ID NO: 61323 - protein, 93 aa, Homo sapiens; identical to SEQ ID NO: 61311
  Payload ID: 12251
  Gene Symbol: PACRGL
  Gene Name: PARK2 co-regulated-like
  ENSP ID: ENSP00000425102

SEQ ID NO: 61324 - protein, 200 aa, Homo sapiens
  Payload ID: 12251
  Gene Symbol: PACRGL
  Gene Name: PARK2 co-regulated-like
  Uniprot ID: Q8N7B6
  ENSP ID: ENSP00000425461
MQKSEGSGGTQLKNRATGNYDQRTSSSTQLKHRNAVQGSKSSLSTSSPESARKLHPRPSDKLNPKTINPGLRETKHPYTFVSKEGFRELLLVKGAPEKAIPLLPRLIPVLKAALVHSDDEVFERGLNALVQLSVVVGPSLNDHLKHLLTSDPVQLMRFPRPLLGLMICQKDPWNSGKLLLAVMVSYNTQKIKIKISKGEP

SEQ ID NO: 61325 - protein, 221 aa, Homo sapiens; identical to SEQ ID NO: 61301
  Payload ID: 12251
  Gene Symbol: PACRGL
  Gene Name: PARK2 co-regulated-like
  Uniprot ID: Q8N7B6
  ENSP ID: ENSP00000425938

SEQ ID NO: 61326 - protein, 168 aa, Homo sapiens
  Payload ID: 12251
  Gene Symbol: PACRGL
  Gene Name: PARK2 co-regulated-like
  ENSP ID: ENSP00000426286
MQKSEGSGGTQLKNRATGNYDQRTSSSTQLKHRNAVQGSKSSLSTSSPESARKLHPRPSDKLNPKTINPGLRETKHPYTFVSKEGFRELLLVKGAPEKAIPLLPRLIPVLKAALVHSDDEVFERGLNALVQLSVVVGPSLNDHLKHLLTSGSLSIIKSKIPTYCSICC

SEQ ID NO: 61327 - protein, 68 aa, Homo sapiens
  Payload ID: 12251
  Gene Symbol: PACRGL
  Gene Name: PARK2 co-regulated-like
  ENSP ID: ENSP00000426399
  MOD_RES (1)..(1): Any amino acid
XFGEQSRVPSAFAAIYSKGGIPCRLVHGSVKHRLQWECPPESLSFDPLLITLAEVNMPSLEYLSENKH

SEQ ID NO: 61328 - protein, 122 aa, Homo sapiens
  Payload ID: 12251
  Gene Symbol: PACRGL
  Gene Name: PARK2 co-regulated-like
  ENSP ID: ENSP00000426643
MQKSEGSGGTQLKNRATGNYDQRTSSSTQLKHRNAVQGSKSSLSTSSPESARKLHPRPSDKLNPKTINPFGEQSRVPSAFAAIYSKGGIPCRLVHGSVKHRLQWECPPESLSFDPLLITLAE

SEQ ID NO: 61329 - protein, 79 aa, Homo sapiens
  Payload ID: 12251
  Gene Symbol: PACRGL
  Gene Name: PARK2 co-regulated-like
  ENSP ID: ENSP00000426833
MQKSEGSGGTQLKNRATGNYDQRTSSSTQLKHRNAVQGSKSSLSTSSPESARKLHPRPSDKLNPKTINPVHSDDEVFER

SEQ ID NO: 61330 - protein, 34 aa, Homo sapiens
  Payload ID: 12251
  Gene Symbol: PACRGL
  Gene Name: PARK2 co-regulated-like
  ENSP ID: ENSP00000427064
MWNPHIRRANCNLSLSLLQEQLFDVKEDRNLAIK

SEQ ID NO: 61331 - protein, 274 aa, Homo sapiens
  Payload ID: 12252
  Gene Symbol: PARK2
  Gene Name: parkin RBR E3 ubiquitin protein ligase
  Uniprot ID: O60260
  ENSP ID: ENSP00000343589
MSGECQSPHCPGTSAEFFFKCGAHPTSDKETSVALHLIATNSRNITCITCTDVRSPVLVFQCNSRHVICLDCFHLYCVTRLNDRQFVHDPQLGYSLPCVAGCPNSLIKELHHFRILGEEQYNRYQQYGAEECVLQMGGVLCPRPGCGAGLLPEPDQRKVTCEGGNGLGCGFAFCRECKEAYHEGECSAVFEASGTTTQAYRVDERAAEQARWEAASKETIKKTTKPCPRCHVPVEKNGGCMHMKCPQPQCRLEWCWNCGCEWNRVCMGDHWFDV

SEQ ID NO: 61332 - protein, 368 aa, Homo sapiens
  Payload ID: 12252
  Gene Symbol: PARK2
  Gene Name: parkin RBR E3 ubiquitin protein ligase
  ENSP ID: ENSP00000355858
MIVFVRFNSSHGFPVEVDSDTSIFQLKEVVAKRQGVPADQLRVIFAGKELRNDWTVQNCDLDQQSIVHIVQRPWRKGQEMNATGGDDPRNAAGGCEREPQSLTRVDLSSSVLPGDSVGLAVILHTDSRKDSPPAGSPAGRSIYNSFYVYCKGPCQRVQPGKLRVQCSTCRQATLTLTQGPSCWDDVLIPNRMSGECQSPHCPGTSAEFFFKCGAHPTSDKETSVALHLIATNSRNITCITCTDVRSPVLVFQCNSRHVICLDCFHLYCVTRLNDRQFVHDPQLGYSLPCVAGCPNSLIKELHHFRILGEEQYNRYQQYGAEECVLQMGGVLCPRPGCGAGLLPEPDQRKVTCEGGNGLGCGYGQRRTK

SEQ ID NO: 61333 - protein, 274 aa, Homo sapiens; identical to SEQ ID NO: 61331
  Payload ID: 12252
  Gene Symbol: PARK2
  Gene Name: parkin RBR E3 ubiquitin protein ligase
  Uniprot ID: O60260
  ENSP ID: ENSP00000355860

SEQ ID NO: 61334 - protein, 316 aa, Homo sapiens
  Payload ID: 12252
  Gene Symbol: PARK2
  Gene Name: parkin RBR E3 ubiquitin protein ligase
  Uniprot ID: O60260
  ENSP ID: ENSP00000355862
MIVFVRFNSSHGFPVEVDSDTSIFQLKEVVAKRQGVPADQLRVIFAGKELRNDWTVQEFFFKCGAHPTSDKETSVALHLIATNSRNITCITCTDVRSPVLVFQCNSRHVICLDCFHLYCVTRLNDRQFVHDPQLGYSLPCVAGCPNSLIKELHHFRILGEEQYNRYQQYGAEECVLQMGGVLCPRPGCGAGLLPEPDQRKVTCEGGNGLGCGFAFCRECKEAYHEGECSAVFEASGTTTQAYRVDERAAEQARWEAASKETIKKTTKPCPRCHVPVEKNGGCMHMKCPQPQCRLEWCWNCGCEWNRVCMGDHWFDV

SEQ ID NO: 61335 - protein, 437 aa, Homo sapiens
  Payload ID: 12252
  Gene Symbol: PARK2
  Gene Name: parkin RBR E3 ubiquitin protein ligase
  Uniprot ID: O60260
  ENSP ID: ENSP00000355863
MIVFVRFNSSHGFPVEVDSDTSIFQLKEVVAKRQGVPADQLRVIFAGKELRNDWTVQNCDLDQQSIVHIVQRPWRKGQEMNATGGDDPRNAAGGCEREPQSLTRVDLSSSVLPGDSVGLAVILHTDSRKDSPPAGSPAGRSIYNSFYVYCKGPCQRVQPGKLRVQCSTCRQATLTLTQEFFFKCGAHPTSDKETSVALHLIATNSRNITCITCTDVRSPVLVFQCNSRHVICLDCFHLYCVTRLNDRQFVHDPQLGYSLPCVAGCPNSLIKELHHFRILGEEQYNRYQQYGAEECVLQMGGVLCPRPGCGAGLLPEPDQRKVTCEGGNGLGCGFAFCRECKEAYHEGECSAVFEASGTTTQAYRVDERAAEQARWEAASKETIKKTTKPCPRCHVPVEKNGGCMHMKCPQPQCRLEWCWNCGCEWNRVCMGDHWFDV

SEQ ID NO: 61336 - protein, 465 aa, Homo sapiens
  Payload ID: 12252
  Gene Symbol: PARK2
  Gene Name: parkin RBR E3 ubiquitin protein ligase
  Uniprot ID: O60260
  ENSP ID: ENSP00000355865
MIVFVRFNSSHGFPVEVDSDTSIFQLKEVVAKRQGVPADQLRVIFAGKELRNDWTVQNCDLDQQSIVHIVQRPWRKGQEMNATGGDDPRNAAGGCEREPQSLTRVDLSSSVLPGDSVGLAVILHTDSRKDSPPAGSPAGRSIYNSFYVYCKGPCQRVQPGKLRVQCSTCRQATLTLTQGPSCWDDVLIPNRMSGECQSPHCPGTSAEFFFKCGAHPTSDKETSVALHLIATNSRNITCITCTDVRSPVLVFQCNSRHVICLDCFHLYCVTRLNDRQFVHDPQLGYSLPCVAGCPNSLIKELHHFRILGEEQYNRYQQYGAEECVLQMGGVLCPRPGCGAGLLPEPDQRKVTCEGGNGLGCGFAFCRECKEAYHEGECSAVFEASGTTTQAYRVDERAAEQARWEAASKETIKKTTKPCPRCHVPVEKNGGCMHMKCPQPQCRLEWCWNCGCEWNRVCMGDHWFDV

SEQ ID NO: 61337 - protein, 218 aa, Homo sapiens
  Payload ID: 12252
  Gene Symbol: PARK2
  Gene Name: parkin RBR E3 ubiquitin protein ligase
  Uniprot ID: O60260
  ENSP ID: ENSP00000434414
MNATGGDDPRNAAGGCEREPQSLTRVDLSSSVLPGDSVGLAVILHTDSRKDSPPAGSPAGRSIYNSFYVYCKGPCQRVQPGKLRVQCSTCRQATLTLTQGPSCWDDVLIPNRMSGECQSPHCPGTSAEFFFKCGAHPTSDKETSVALHLIATNSRNITCITCTDVRSPVLVFQCNSRHVICLDCFHLYCVTRLNDRQFVHDPQLGYSLPCVVCLLPGM

SEQ ID NO: 61338 - protein, 201 aa, Homo sapiens [sequence omitted]

SEQ ID NO: 61339 - protein, 74 aa, Homo sapiens [sequence omitted]

SEQ ID NO: 61340 - protein, 176 aa, Homo sapiens [sequence omitted]

SEQ ID NO: 61341 - protein, 87 aa, Homo sapiens [sequence omitted]

SEQ ID NO: 61342 - protein, 220 aa, Homo sapiens
  Payload ID: 12253
  Gene Symbol: PDDC1
  Gene Name: Parkinson disease 7 domain containing 1
  Uniprot ID: Q8NB37
  ENSP ID: ENSP00000321691
MASERLPNRPACLLVASGAAEGVSAQSFLHCFTMASTAFNLQVATPGGKAMEFVDVTESNARWVQDFRLKAYASPAKLESIDGARYHALLIPSCPGALTDLASSGSLARILQHFHSESKPICAVGHGVAALCCATNEDRSWVFDSYSLTGPSVCELVRAPGFARLPLVVEDFVKDSGACFSASEPDAVHVVLDRHLVTGQNASSTVPAVQNLLFLCGSRK

SEQ ID NO: 61343 - protein, 184 aa, Homo sapiens
  Payload ID: 12253
  Gene Symbol: PDDC1
  Gene Name: Parkinson disease 7 domain containing 1
  Uniprot ID: Q8NB37
  ENSP ID: ENSP00000346239
MASERLPNRPACLLVASGAAEGVSAQSFLHCFTMASTAFNLQVATPGGKAMEFVDVTESNARWVQDFRLKAYASPAKLESIDEPICAVGHGVAALCCATNEDRSWVFDSYSLTGPSVCELVRAPGFARLPLVVEDFVKDSGACFSASEPDAVHVVLDRHLVTGQNASSTVPAVQNLLFLCGSRK

SEQ ID NO: 61344 - protein, 250 aa, Homo sapiens
  Payload ID: 12253
  Gene Symbol: PDDC1
  Gene Name: Parkinson disease 7 domain containing 1
  Uniprot ID: Q8NB37
  ENSP ID: ENSP00000380612
MASERLPNRPACLLVASGAAEGVSAQSFLHCFTMASTAFNLQVATPGGKAMEFVDVTESNARWVQDFRLKAYASPAKLESIDGARYHALLIPSCPGALTDLASSGSLARILQHFHSESKPICAVGHGVAALCCATNEDRSWVFDSYSLTGPSVCELVRAPGFARLPLVVEDFVKDSGACFSGAAASCPKADRHWQHFPVEEIFLACGFKVAGLGAAPGWGRGGKQEDRPPEEQRRAGEDFPIYQCVFIYP

SEQ ID NO: 61345 - protein, 184 aa, Homo sapiens; identical to SEQ ID NO: 61343
  Payload ID: 12253
  Gene Symbol: PDDC1
  Gene Name: Parkinson disease 7 domain containing 1
  Uniprot ID: Q8NB37
  ENSP ID: ENSP00000431183

SEQ ID NO: 61346 - protein, 186 aa, Homo sapiens
  Payload ID: 12253
  Gene Symbol: PDDC1
  Gene Name: Parkinson disease 7 domain containing 1
  ENSP ID: ENSP00000433322
MASERLPNRPACLLVASGAAEGVSAQSFLHCFTMASTAFNLQVATPGGKAMEFVDVTESNARWVQDFRLKAYASPAKLESIDGARYHALLIPSCPGALTDLASSGSLARILQHFHSESKPICAVGHGVAALCCATNEDRSWVFDSYSLTGGLGLSQEPPPRSRSPLCVSSSGPPASPACRSWWRTS

SEQ ID NO: 61347 - protein, 144 aa, Homo sapiens
  Payload ID: 12253
  Gene Symbol: PDDC1
  Gene Name: Parkinson disease 7 domain containing 1
  ENSP ID: ENSP00000434839
KLESIDGARYHALLIPSCPGALTDLASSGSLARILQHFHSESKPICAVGHGVAALCCATNEDRSWVFDSYSLTGPSVCELVRAPGFARLPLVVEDFVKDSGACFSGLGAAPGWGRGGKQEDRPPEEQRRAGEDFPIYQCVFIYP

SEQ ID NO: 61348 - protein, 87 aa, Homo sapiens
  Payload ID: 12253
  Gene Symbol: PDDC1
  Gene Name: Parkinson disease 7 domain containing 1
  ENSP ID: ENSP00000436417
  MOD_RES (1)..(1): Any amino acid
XPSVCELVRAPGFARLPLVVEDFVKDSGACFSASEPDAVHVVLDRHLVTGQNASSTVPAVQNLLFLCGSRSSSLLPQGRPALAALSC

SEQ ID NO: 61349 - protein, 120 aa, Homo sapiens
  Payload ID: 12253
  Gene Symbol: PDDC1
  Gene Name: Parkinson disease 7 domain containing 1
  ENSP ID: ENSP00000436861
MASERLPNRPACLLVASGAAEGVSAQSFLHCFTMASTAFNLQVATPGGKAMEFVDVTESNARWVQDFRLKAYASPAKLESIDGARYHALLIPSCPGALTDLASSGSLARILQHFHSESSR

SEQ ID NO: 61350 - protein, 162 aa, Homo sapiens
  Payload ID: 12253
  Gene Symbol: PDDC1
  Gene Name: Parkinson disease 7 domain containing 1
  ENSP ID: ENSP00000437068
WVQDFRLKAYASPAKLESIDGARYHALLIPSCPGALTDLASSGSLARILQHFHSESKPICAVGHGVAALCCATNEDRSWVFDSYSLTGPSVCELVRAPGFARLPLVVEDFVKDSGACFSGQGLGQHQAGAEEESKRTDLQKSSGGRVRISPYTSVCSSTHEE

SEQ ID NO: 61351 - protein, 189 aa, Homo sapiens
  Payload ID: 12254
  Gene Symbol: PARK7
  Gene Name: parkinson protein 7
  Uniprot ID: Q99497
  ENSP ID: ENSP00000340278
MASKRALVILAKGAEEMETVIPVDVMRRAGIKVTVAGLAGKDPVQCSRDVVICPDASLEDAKKEGPYDVVVLPGGNLGAQNLSESAAVKEILKEQENRKGLIAAICAGPTALLAHEIGFGSKVTTHPLAKDKMMNGGHYTYSENRVEKDGLILTSRGPGTSFEFALAIVEALNGKEVAAQVKAPLVLKD

SEQ ID NO: 61352 - protein, 189 aa, Homo sapiens; identical to SEQ ID NO: 61351
  Payload ID: 12254
  Gene Symbol: PARK7
  Gene Name: parkinson protein 7
  Uniprot ID: Q99497
  ENSP ID: ENSP00000366708

SEQ ID NO: 61353 - protein, 189 aa, Homo sapiens; identical to SEQ ID NO: 61351
  Payload ID: 12254
  Gene Symbol: PARK7
  Gene Name: parkinson protein 7
  Uniprot ID: Q99497
  ENSP ID: ENSP00000366711

SEQ ID NO: 61354 - protein, 189 aa, Homo sapiens; identical to SEQ ID NO: 61351
  Payload ID: 12254
  Gene Symbol: PARK7
  Gene Name: parkinson protein 7
  Uniprot ID: Q99497
  ENSP ID: ENSP00000418770

SEQ ID NO: 61355 - protein, 189 aa, Homo sapiens; identical to SEQ ID NO: 61351
  Payload ID: 12254
  Gene Symbol: PARK7
  Gene Name: parkinson protein 7
  Uniprot ID: Q99497
  ENSP ID: ENSP00000465404

SEQ ID NO: 61356 - protein, 169 aa, Homo sapiens
  Payload ID: 12254
  Gene Symbol: PARK7
  Gene Name: parkinson protein 7
  ENSP ID: ENSP00000466242
MASKRALVILAKGAEEMETVIPVDVMRRAGIKVTVAGLAGKDPVQCSRDVVICPDASLEDAKKESAAVKEILKEQENRKGLIAAICAGPTALLAHEIGFGSKVTTHPLAKDKMMNGGHYTYSENRVEKDGLILTSRGPGTSFEFALAIVEALNGKEVAAQVKAPLVLKD

SEQ ID NO: 61357 - protein, 160 aa, Homo sapiens
  Payload ID: 12254
  Gene Symbol: PARK7
  Gene Name: parkinson protein 7
  ENSP ID: ENSP00000466756
GKDPVQCSRDVVICPDASLEDAKKEGPYDVVVLPGGNLGAQNLSESAAVKEILKEQENRKGLIAAICAGPTALLAHEIGFGSKVTTHPLAKDKMMNGGCHLFCFYFAGHYTYSENRVEKDGLILTSRGPGTSFEFALAIVEALNGKEVAAQVKAPLVLKD

SEQ ID NO: 61358 - protein, 142 aa, Homo sapiens
  Payload ID: 12255
  Gene Symbol: PNKD
  Gene Name: paroxysmal nonkinesigenic dyskinesia
  Uniprot ID: Q8N490
  ENSP ID: ENSP00000248451
MAAVVAATALKGRGARNARVLRGILAGATANKASHNRTRALQSHSSPEGKEEPEPLSPELEYIPRKRGKNPMKAVGLAWAIGFPCGILLFILTKREVDKDRVKQMKARQNMRLSNTGEYESQRFRASSQSAPSPDVGSGVQT

SEQ ID NO: 61359 - protein, 361 aa, Homo sapiens
  Payload ID: 12255
  Gene Symbol: PNKD
  Gene Name: paroxysmal nonkinesigenic dyskinesia
  Uniprot ID: Q8N490
  ENSP ID: ENSP00000258362
MAWQGWPAAWQWVAGCWLLLVLVLVLLVSPRGCRARRGLRGLLMAHSQRLLFRIGYSLYTRTWLGYLFYRQQLRRARNRYPKGHSKTQPRLFNGVKVLPIPVLSDNYSYLIIDTQAQLAVAVDPSDPRAVQASIEKEGVTLVAILCTHKHWDHSGGNRDLSRRHRDCRVYGSPQDGIPYLTHPLCHQDVVSVGRLQIRALATPGHTQGHLVYLLDGEPYKGPSCLFSGDLLFLSGCGRTFEGNAETMLSSLDTVLGLGDDTLLWPGHEYAEENLGFAGVVEPENLARERKMQWVQRQRLERKGTCPSTLGEERSYNPFLRTHCLALQEALGPGPGPTGDDDYSRAQLLEELRRLKDMHKSK

SEQ ID NO: 61360 - protein, 385 aa, Homo sapiens
  Payload ID: 12255
  Gene Symbol: PNKD
  Gene Name: paroxysmal nonkinesigenic dyskinesia
  Uniprot ID: Q8N490
  ENSP ID: ENSP00000273077
MAAVVAATALKGRGARNARVLRGILAGATANKASHNRTRALQSHSSPEGKEEPEPLSPELEYIPRKRGKNPMKAVGLAWYSLYTRTWLGYLFYRQQLRRARNRYPKGHSKTQPRLFNGVKVLPIPVLSDNYSYLIIDTQAQLAVAVDPSDPRAVQASIEKEGVTLVAILCTHKHWDHSGGNRDLSRRHRDCRVYGSPQDGIPYLTHPLCHQDVVSVGRLQIRALATPGHTQGHLVYLLDGEPYKGPSCLFSGDLLFLSGCGRTFEGNAETMLSSLDTVLGLGDDTLLWPGHEYAEENLGFAGVVEPENLARERKMQWVQRQRLERKGTCPSTLGEERSYNPFLRTHCLALQEALGPGPGPTGDDDYSRAQLLEELRRLKDMHKSK

SEQ ID NO: 61361 - protein, 325 aa, Homo sapiens
  Payload ID: 12255
  Gene Symbol: PNKD
  Gene Name: paroxysmal nonkinesigenic dyskinesia
  Uniprot ID: Q8N490
  ENSP ID: ENSP00000414400
MPSSVHHTKRQMMSIYCYWYSLYTRTWLGYLFYRQQLRRARNRYPKGHSKTQPRLFNGVKVLPIPVLSDNYSYLIIDTQAQLAVAVDPSDPRAVQASIEKEGVTLVAILCTHKHWDHSGGNRDLSRRHRDCRVYGSPQDGIPYLTHPLCHQDVVSVGRLQIRALATPGHTQGHLVYLLDGEPYKGPSCLFSGDLLFLSGCGRTFEGNAETMLSSLDTVLGLGDDTLLWPGHEYAEENLGFAGVVEPENLARERKMQWVQRQRLERKGTCPSTLGEERSYNPFLRTHCLALQEALGPGPGPTGDDDYSRAQLLEELRRLKDMHKSK

SEQ ID NO: 61362 - protein, 579 aa, Homo sapiens
  Payload ID: 12256
  Gene Symbol: PARPBP
  Gene Name: PARP1 binding protein
  Uniprot ID: Q9NWS1
  ENSP ID: ENSP00000332915
MAVFNQKSVSDMIKEFRKNWRALCNSERTTLCGADSMLLALQLSMAENNKQHSGEFTVSLSDVLLTWKYLLHEKLNLPVENMDVTDHYEDVRKIYDDFLKNSNMLDLIDVYQKCRALTSNCENYNTVSPSQLLDFLSGKQYAVGDETDLSIPTSPTSKYNRDNEKVQLLARKIIFSYLNLLVNSKNDLAVAYILNIPDRGLGREAFTDLKHAAREKQMSIFLVATSFIRTIELGGKGYAPPPSDPLRTHVKGLSNFINFIDKLDEILGEIPNPSIAGGQILSVIKMQLIKGQNSRDPFCKAIEEVAQDLDLRIKNIINSQEGVVALSTTDISPARPKSHAINHGTAYCGRDTVKALLVLLDEEAANAPTKNKAELLYDEENTIHHHGTSILTLFRSPTQVNNSIKPLRERICVSMQEKKIKMKQTLIRSQFACTYKDDYMISKDNWNNVNLASKPLCVLYMENDLSEGVNPSVGRSTIGTSFGNVHLDRSKNEKVSRKSTSQTGNKSSKRKQVDLDGENILCDNRNEPPQHKNAKIPKKSNDSQNRLYGKLAKVAKSNKCTAKDKLISGQAKLTQFFRL

SEQ ID NO: 61363 - protein, 144 aa, Homo sapiens
  Payload ID: 12256
  Gene Symbol: PARPBP
  Gene Name: PARP1 binding protein
  ENSP ID: ENSP00000376641
MAVFNQKSVSDMIKEFRKNWRALCNSERTTLCGADSMLLALQLSMAENNKQHSGEFTVSLSDVLLTWKYLLHEKLNLPVENMDVTDHYEDVRKIYDDFLKNSNMLDLIDVYQKCRALTSNCENYNTVSPGNFQCGEKVDRKIYP

SEQ ID NO: 61364 - protein, 498 aa, Homo sapiens
  Payload ID: 12256
  Gene Symbol: PARPBP
  Gene Name: PARP1 binding protein
  Uniprot ID: Q9NWS1
  ENSP ID: ENSP00000376643
MDVTDHYEDVRKIYDDFLKNSNMLDLIDVYQKCRALTSNCENYNTVSPSQLLDFLSGKQYAVGDETDLSIPTSPTSKYNRDNEKVQLLARKIIFSYLNLLVNSKNDLAVAYILNIPDRGLGREAFTDLKHAAREKQMSIFLVATSFIRTIELGGKGYAPPPSDPLRTHVKGLSNFINFIDKLDEILGEIPNPSIAGGQILSVIKMQLIKGQNSRDPFCKAIEEVAQDLDLRIKNIINSQEGVVALSTTDISPARPKSHAINHGTAYCGRDTVKALLVLLDEEAANAPTKNKAELLYDEENTIHHHGTSILTLFRSPTQVNNSIKPLRERICVSMQEKKIKMKQTLIRSQFACTYKDDYMISKDNWNNVNLASKPLCVLYMENDLSEGVNPSVGRSTIGTSFGNVHLDRSKNEKVSRKSTSQTGNKSSKRKQVDLDGENILCDNRNEPPQHKNAKIPKKSNDSQNRLYGKLAKVAKSNKCTAKDKLISGQAKLTQFFRL

SEQ ID NO: 61365 - protein, 264 aa, Homo sapiens
  Payload ID: 12256
  Gene Symbol: PARPBP
  Gene Name: PARP1 binding protein
  ENSP ID: ENSP00000393867
ADSMLLALQLSMAENNKQHSGEFTVSLSDVLLTWKYLLHEKLNLPVENMDVTDHYEDVRKIYDDFLKNSNMLDLIDVYQKCRALTSNCENYNTVSPSQLLDFLSGKQYAVGDETDLSIPTSPTSKYNRDNEKVQLLARKIIFSYLNLLVNSKNDLAVAYILNIPDRGLGREAFTDLKHAAREKQMSIFLVATSFIRTIELGGKGYAPPPSDPLRTHVKGLSNFINFIDKLDEILGEIPNPRGCKSICWKINNWNEFWKCSSGQK

SEQ ID NO: 61366 - protein, 64 aa, Homo sapiens
  Payload ID: 12256
  Gene Symbol: PARPBP
  Gene Name: PARP1 binding protein
  ENSP ID: ENSP00000404323
ADSMLLALQLSMAENNKQSQLLDFLSGKQYAVGDETDLSIPTSPTSKYNRDNEKVLINCGHVFY

SEQ ID NO: 61367 - protein, 269 aa, Homo sapiens
  Payload ID: 12256
  Gene Symbol: PARPBP
  Gene Name: PARP1 binding protein
  ENSP ID: ENSP00000411313
ADSMLLALQLSMAENNKQHSGEFTVSLSDVLLTWKYLLHEKLNLPVENMDVTDHYEDVRKIYDDFLKNSNMLDLIDVYQKCRALTSNCENYNTVSPSQLLDFLSGKQYAVGDETDLSIPTSPTSKYNRDNEKVQLLARKIIFSYLNLLVNSKNDLAVAYILNIPDRGLGREAFTDLKHAAREKQMSIFLVATSFIRTIELGGKGYAPPPSDPLRTHVKGLSNFINFIDKLDEILGEIPNPRSPTQVNNSIKPLRERICVSMQEKKIKRV

SEQ ID NO: 61368 - protein, 656 aa, Homo sapiens
  Payload ID: 12256
  Gene Symbol: PARPBP
  Gene Name: PARP1 binding protein
  ENSP ID: ENSP00000440850
MAVFNQKSVSDMIKEFRKNWRALCNSERTTLCGADSMLLALQLSMAENNKQHSGEFTVSLSDVLLTWKYLLHEKLNLPVENMDVTDHYEDVRKIYDDFLKNSNMLDLIDVYQKCRALTSNCENYNTVSPGSTIQPPSERGSLLLSRPDLLAPGEDPPVSASLTLERQKGESLLAWSWSLNFRLPGIPITVQKKRRDLKKLAAVMRQSQLLDFLSGKQYAVGDETDLSIPTSPTSKYNRDNEKVQLLARKIIFSYLNLLVNSKNDLAVAYILNIPDRGLGREAFTDLKHAAREKQMSIFLVATSFIRTIELGGKGYAPPPSDPLRTHVKGLSNFINFIDKLDEILGEIPNPSIAGGQILSVIKMQLIKGQNSRDPFCKAIEEVAQDLDLRIKNIINSQEGVVALSTTDISPARPKSHAINHGTAYCGRDTVKALLVLLDEEAANAPTKNKAELLYDEENTIHHHGTSILTLFRSPTQVNNSIKPLRERICVSMQEKKIKMKQTLIRSQFACTYKDDYMISKDNWNNVNLASKPLCVLYMENDLSEGVNPSVGRSTIGTSFGNVHLDRSKNEKVSRKSTSQTGNKSSKRKQVDLDGENILCDNRNEPPQHKNAKIPKKSNDSQNRLYGKLAKVAKSNKCTAKDKLISGQAKLTQFFRL

SEQ ID NO: 61369 - protein, 133 aa, Homo sapiens
  Payload ID: 12256
  Gene Symbol: PARPBP
  Gene Name: PARP1 binding protein
  Uniprot ID: Q9NWS1
  ENSP ID: ENSP00000442549
MAVFNQKSVSDMIKEFRKNWRALCNSERTTLCGADSMLLALQLSMAENNKQHSGEFTVSLSDVLLTWKYLLHEKLNLPVENMDVTDHYEDVRKIYDDFLKNSNMLDLIDVYQKCRALTSNCENYNTVSPVSIF

SEQ ID NO: 61370 - protein, 183 aa, Homo sapiens
  Payload ID: 12256
  Gene Symbol: PARPBP
  Gene Name: PARP1 binding protein
  ENSP ID: ENSP00000444576
MAVFNQKSVSDMIKEFRKNWRALCNSERTTLCGADSMLLALQLSMAENNKQVQLLARKIIFSYLNLLVNSKNDLAVAYILNIPDRGLGREAFTDLKHAAREKQMSIFLVATSFIRTIELGGKGYAPPPSDPLRTHVKGLSNFINFIDKLDEILGEIPNPRGCKSICWKINNWNEFWKCSSGQK

SEQ ID NO: 61371 - protein, 1186 aa, Homo sapiens [sequence omitted]

SEQ ID NO: 61372 - protein, 891 aa, Homo sapiens
  Payload ID: 12257
  Gene Symbol: PALB2
  Gene Name: partner and localizer of BRCA2
  ENSP ID: ENSP00000454703
MTVSTDNLLVNKAISKSGQLPTSSNLEANISCSLNELTYNNLPANENQNLKEQNQTEKSLKSPSDTLDGRNENLQESEILSQPKSLSLEATSPLSAEKHSCTVPEGLLFPAEYYVRTTRSMSNCQRKVAVEAVIQSHLDVKKKGFKNKNKDASKNLNLSNEETDQSEIRMSGTCTGQPSSRTSQKLLSLTKVSSPAGPTEDNDLSRKAVAQAPGRRYTGKRKSACTPASDHCEPLLPTSSLSIVNRSKEEVTSHKYQHEKLFIQVKGKKSRHQKEDSLSWSNSAYLSLDDDAFTAPFHRDGMLSLKQLLSFLSITDFQLPDEDFGPLKLEKVKSCSEKPVEPFESKMFGERHLKEGSCIFPEELSPKRMDTEMEDLEEDLIVLPGKSHPKRPNSQSQHTKTGLSSSILLYTPLNTVAPDDNDRPTTDMCSPAFPILGTTPAFGPQGSYEKASTEVAGRTCCTPQLAHLKDSVCLASDTKQFDSSGSPAKPHTTLQVSGRQGQPTCDCDSVPPGTPPPIESFTFKENQLCRNTCQELHKHSVEQTETAELPASDSINPGNLQLVSELKNPSGSCSVDVSAMFWERAGCKEPCIITACEDVVSLWKALDAWQWEKLYTWHFAEVPVLQIVPVPDVYNLVCVALGNLEIREIRALFCSSDDESEKQVLLKSGNIKAVLGLTKRRLVSSSGTLSDQQVEVMTFAEDGGGKENQFLMPPEETILTFAEVQGMQEALLGTTIMNNIVIWNLKTGQLLKKMHIDDSYQASVCHKAYSEMGLLFIVLSHPCAKESESLRSPVFQLIVINPKTTLSVGVMLYCLPPGQAGRFLEGDVKDHCAAAILTSGTIAIWDLLLGQCTALLPPVSDQHWSFVKWSGTDSHLLAGQKDGNIFVYHYS

SEQ ID NO: 61373 - protein, 43 aa, Homo sapiens
  Payload ID: 12257
  Gene Symbol: PALB2
  Gene Name: partner and localizer of BRCA2
  ENSP ID: ENSP00000459237
  MOD_RES (1)..(1): Any amino acid
XTIMNNIVIWNLKTGQLLKKMHIDDSYQASVCHKAYSEMVPGR

SEQ ID NO: 61374 - protein, 30 aa, Homo sapiens
  Payload ID: 12257
  Gene Symbol: PALB2
  Gene Name: partner and localizer of BRCA2
  ENSP ID: ENSP00000459882
  MOD_RES (1)..(1): Any amino acid
XKIKHSIKKTVEEQDCLSQQDLSPQLKHSD

SEQ ID NO: 61375 - protein, 89 aa, Homo sapiens
  Payload ID: 12257
  Gene Symbol: PALB2
  Gene Name: partner and localizer of BRCA2
  ENSP ID: ENSP00000460666
MFPACADVILILAYLLVELKEKLAFLKREYSKTLARLQRAQRAEKIKHSIKKTVEEQDCLSQQDLSPQLKHSEPKNKICVYDKLHIKTH

SEQ ID NO: 61376 - protein, 252 aa, Homo sapiens
  Payload ID: 12258
  Gene Symbol: PNO1
  Gene Name: partner of NOB1 homolog
  Uniprot ID: Q9NRX1
  ENSP ID: ENSP00000263657
MESEMETQSARAEEGFTQVTRKGGRRAKKRQAEQLSAAGEGGDAGRMDTEEARPAKRPVFPPLCGDGLLSGKEETRKIPVPANRYTPLKENWMKIFTPIVEHLGLQIRFNLKSRNVEIRTCKETKDVSALTKAADFVKAFILGFQVEDALALIRLDDLFLESFEITDVKPLKGDHLSRAIGRIAGKGGKTKFTIENVTRTRIVLADVKVHILGSFQNIKMARTAICNLILGNPPSKVYGNIRAVASRSADRF

SEQ ID NO: 61377 - protein, 136 aa, Homo sapiens
  Payload ID: 12258
  Gene Symbol: PNO1
  Gene Name: partner of NOB1 homolog
  ENSP ID: ENSP00000405892
MESEMETQSARAEEGFTQVTRKGGRRAKKRQAEQLSAAGEGGDAGRMDTEEARPAKRPVFPPLCGDGLLSGKEETRKIPVPANRYTPLKENWMKIFTPIVEHLGLQIRFNLKSRNVEIRCMQVVRPGAVGLRNISI

SEQ ID NO: 61378 - protein, 110 aa, Homo sapiens
  Payload ID: 12259
  Gene Symbol: PVALB
  Gene Name: parvalbumin
  Uniprot ID: P20472
  ENSP ID: ENSP00000216200
MSMTDLLNAEDIKKAVGAFSATDSFDHKKFFQMVGLKKKSADDVKKVFHMLDKDKSGFIEEDELGFILKGFSPDARDLSAKETKMLMAAGDKDGDGKIGVDEFSTLVAES

SEQ ID NO: 61379 - protein, 106 aa, Homo sapiens
  Payload ID: 12259
  Gene Symbol: PVALB
  Gene Name: parvalbumin
  ENSP ID: ENSP00000384735
  MOD_RES (1)..(1): Any amino acid
XMTDLLNAEDIKKAVGAFSATDSFDHKKFFQMVGLKKKSADDVKKVFHMLDKDKSGFIEEDELGFILKGFSPDARDLSAKETKMLMAAGDKDGDGKIGVDDPADVD

SEQ ID NO: 61380 - protein, 78 aa, Homo sapiens
  Payload ID: 12259
  Gene Symbol: PVALB
  Gene Name: parvalbumin
  ENSP ID: ENSP00000386089
MVGLKKKSADDVKKVFHMLDKDKSGFIEEDELGFILKGFSPDARDLSAKETKMLMAAGDKDGDGKIGVDEFSTLVAES

SEQ ID NO: 61381 - protein, 110 aa, Homo sapiens; identical to SEQ ID NO: 61378
  Payload ID: 12259
  Gene Symbol: PVALB
  Gene Name: parvalbumin
  Uniprot ID: P20472
  ENSP ID: ENSP00000400247

SEQ ID NO: 61382 - protein, 101 aa, Homo sapiens
  Payload ID: 12259
  Gene Symbol: PVALB
  Gene Name: parvalbumin
  ENSP ID: ENSP00000406977
MSMTDLLNAEDIKKAVGAFSATDSFDHKKFFQMVGLKKKSADDVKKVFHMLDKDKSGFIEEDELGFILKGFSPDARDLSAKETKMLMAAGDKDGDGKIGVD

SEQ ID NO: 61383 - protein, 110 aa, Homo sapiens; identical to SEQ ID NO: 61378
  Payload ID: 12259
  Gene Symbol: PVALB
  Gene Name: parvalbumin
  Uniprot ID: P20472
  ENSP ID: ENSP00000480913

SEQ ID NO: 61384 - protein, 78 aa, Homo sapiens; identical to SEQ ID NO: 61380
  Payload ID: 12259
  Gene Symbol: PVALB
  Gene Name: parvalbumin
  ENSP ID: ENSP00000485850

SEQ ID NO: 61385 - protein, 110 aa, Homo sapiens; identical to SEQ ID NO: 61378
  Payload ID: 12259
  Gene Symbol: PVALB
  Gene Name: parvalbumin
  Uniprot ID: P20472
  ENSP ID: ENSP00000486144

SEQ ID NO: 61386 - protein, 101 aa, Homo sapiens; identical to SEQ ID NO: 61382
  Payload ID: 12259
  Gene Symbol: PVALB
  Gene Name: parvalbumin
  ENSP ID: ENSP00000487336

SEQ ID NO: 61387 - protein, 106 aa, Homo sapiens; identical to SEQ ID NO: 61379
  Payload ID: 12259
  Gene Symbol: PVALB
  Gene Name: parvalbumin
  ENSP ID: ENSP00000487426
  MOD_RES (1)..(1): Any amino acid

SEQ ID NO: 61388 - protein, 412 aa, Homo sapiens
  Payload ID: 12260
  Gene Symbol: PARVA
  Gene Name: parvin, alpha
  ENSP ID: ENSP00000334008
MLGIIPLPFGKPQPQSRRRPLRPPSASSASRPARGSLRRAMATSPQKSPSVPKSPTPKSPPSRKKDDSFLGKLGGTLARRKKAKEVSELQEEGMNAINLPLSPIPFELDPEDTMLEENEVRTMVDPNSRSDPKLQELMKVLIDWINDVLVGERIIVKDLAEDLYDGQVLQKLFEKLESEKLNVAEVTQSEIAQKQKLQTVLEKINETLKLPPRSIKWNVDSVHAKSLVAILHLLVALSQYFRAPIRLPDHVSIQVVVVQKREGILQSRQIQEEITGNTEALSGRHERDAFDTLFDHAPDKLNVVKKTLITFVNKHLNKLNLEVTELETQFADGVYLVLLMGLLEGYFVPLHSFFLTPDSFEQKVLNVSFAFELMQDGGLEKPKPRPEDIVNCDLKSTLRVLYNLFTKYRNVE

SEQ ID NO: 61389 - protein, 209 aa, Homo sapiens
  Payload ID: 12260
  Gene Symbol: PARVA
  Gene Name: parvin, alpha
  ENSP ID: ENSP00000435860
MGCGALCPQVSELQEEGMNAINLPLSPIPFELDPEDTMLEENEVRTMVDPNSRSDPKLQELMKVLIDWINDVLVGERIIVKDLAEDLYDGQVLQKLFEKLESEKLNVAEVTQSEIAQKQKLQTVLEKINETLKLPPRSIKWNVDSVHAKSLVAILHLLVALSQYFRAPIRLPDHVSIQVVVVQKREGILQSRQIQEEITGNTEALSGRH

SEQ ID NO: 61390 - protein, 364 aa, Homo sapiens
  Payload ID: 12261
  Gene Symbol: PARVB
  Gene Name: parvin, beta
  Uniprot ID: Q9HBI1
  ENSP ID: ENSP00000342492
MSSAPRSPTPRPRRMKKDESFLGKLGGTLARKRRAREVSDLQEEGKNAINSPMSPALVDVHPEDTQLEENEERTMIDPTSKEDPKFKELVKVLLDWINDVLVEERIIVKQLEEDLYDGQVLQKLLEKLAGCKLNVAEVTQSEIGQKQKLQTVLEAVHDLLRPRGWALRWSVDSIHGKNLVAILHLLVSLAMHFRAPIRLPEHVTVQVVVVRKREGLLHSSHISEELTTTTEMMMGRFERDAFDTLFDHAPDKLSVVKKSLITFVNKHLNKLNLEVTELETQFADGVYLVLLMGLLEDYFVPLHHFYLTPESFDQKVHNVSFAFELMLDGGLKKPKARPEDVVNLDLKSTLRVLYNLFTKYKNVE

SEQ ID NO: 61391 - protein, 327 aa, Homo sapiens
  Payload ID: 12261
  Gene Symbol: PARVB
  Gene Name: parvin, beta
  Uniprot ID: Q9HBI1
  ENSP ID: ENSP00000384353
MSDLQEEGKNAINSPMSPALVDVHPEDTQLEENEERTMIDPTSKEDPKFKELVKVLLDWINDVLVEERIIVKQLEEDLYDGQVLQKLLEKLAGCKLNVAEVTQSEIGQKQKLQTVLEAVHDLLRPRGWALRWSVDSIHGKNLVAILHLLVSLAMHFRAPIRLPEHVTVQVVVVRKREGLLHSSHISEELTTTTEMMMGRFERDAFDTLFDHAPDKLSVVKKSLITFVNKHLNKLNLEVTELETQFADGVYLVLLMGLLEDYFVPLHHFYLTPESFDQKVHNVSFAFELMLDGGLKKPKARPEDVVNLDLKSTLRVLYNLFTKYKNVE

SEQ ID NO: 61392 - protein, 397 aa, Homo sapiens
  Payload ID: 12261
  Gene Symbol: PARVB
  Gene Name: parvin, beta
  Uniprot ID: Q9HBI1
  ENSP ID: ENSP00000384515
MHHVFKDHQRGEKRGFLSPENKNCRRLELRRGCSCSWGLCSQALMASLAGSLLPGSDRSGVETSEYAQGGVSDLQEEGKNAINSPMSPALVDVHPEDTQLEENEERTMIDPTSKEDPKFKELVKVLLDWINDVLVEERIIVKQLEEDLYDGQVLQKLLEKLAGCKLNVAEVTQSEIGQKQKLQTVLEAVHDLLRPRGWALRWSVDSIHGKNLVAILHLLVSLAMHFRAPIRLPEHVTVQVVVVRKREGLLHSSHISEELTTTTEMMMGRFERDAFDTLFDHAPDKLSVVKKSLITFVNKHLNKLNLEVTELETQFADGVYLVLLMGLLEDYFVPLHHFYLTPESFDQKVHNVSFAFELMLDGGLKKPKARPEDVVNLDLKSTLRVLYNLFTKYKNVE

SEQ ID NO: 61393 - protein, 194 aa, Homo sapiens
  Payload ID: 12261
  Gene Symbol: PARVB
  Gene Name: parvin, beta
  ENSP ID: ENSP00000393758
MPRLKCSGAVIAHCSLELLASSDPSASASQGARTTVSDLQEEGKNAINSPMSPALVDVHPEDTQLEENEERTMIDPTSKEDPKFKELVKVLLDWINDVLVEERIIVKQLEEDLYDGQVLQKLLEKLAGCKLNVAEVTQSEIGQKQKLQTVLEAVHDLLRPRGWALRWSVDSIHGKNLVAILHLLVSLAMHFRAP

SEQ ID NO: 61394 - protein, 289 aa, Homo sapiens
  Payload ID: 12261
  Gene Symbol: PARVB
  Gene Name: parvin, beta
  ENSP ID: ENSP00000482511
MSPALVDVHPEDTQLEENEERTMIDPTSKEDPKFKELVKVLLDWINDVLVEERIIVKQLEEDLYDGQVLQKLLEKLAGCKLNVAEVTQSEIGQKQKLQTVLEAVHDLLRPRGWALRWSVDSIHGKNLVAILHLLVSLAMHFRAPIRLPEHVTVQVVVVRKREGLLHSSHISEELTTTTEMMMGRFERDAFDTLFDHAPDKLSVVKKFADGVYLVLLMGLLEDYFVPLHHFYLTPESFDQKVHNVSFAFELMLDGGLKKPKARPEDVVNLDLKSTLRVLYNLFTKYKNVE

SEQ ID NO: 61395 - protein, 187 aa, Homo sapiens
  Payload ID: 12262
  Gene Symbol: PARVG
  Gene Name: parvin, gamma
  Uniprot ID: Q9HBI0
  ENSP ID: ENSP00000349378
MEPEFLYDLLQLPKGVEPPAEEELSKGGKKKYLPPTSRKDPKFEELQKVLMEWINATLLPEHIVVRSLEEDMFDGLILHHLFQRLAALKLEAEDIALTATSQKHKLTVVLEAVNRSLQLEEWQAKWSVESIFNKDLLSTLHLLVALAKRFQPDLSLPTNVQVEVITIESTKSGLKSEKLVEQLTEYR

SEQ ID NO: 61396 - protein, 331 aa, Homo sapiens
  Payload ID: 12262
  Gene Symbol: PARVG
  Gene Name: parvin, gamma
  Uniprot ID: Q9HBI0
  ENSP ID: ENSP00000391453
MEPEFLYDLLQLPKGVEPPAEEELSKGGKKKYLPPTSRKDPKFEELQKVLMEWINATLLPEHIVVRSLEEDMFDGLILHHLFQRLAALKLEAEDIALTATSQKHKLTVVLEAVNRSLQLEEWQAKWSVESIFNKDLLSTLHLLVALAKRFQPDLSLPTNVQVEVITIESTKSGLKSEKLVEQLTEYSTDKDEPPKDVFDELFKLAPEKVNAVKEAIVNFVNQKLDRLGLSVQNLDTQFADGVILLLLIGQLEGFFLHLKEFYLTPNSPAEMLHNVTLALELLKDEGLLSCPVSPEDIVNKDAKSTLRVLYGLFCKHTQKAHRDRTPHGAPN

SEQ ID NO: 61397 - protein, 331 aa, Homo sapiens; identical to SEQ ID NO: 61396
  Payload ID: 12262
  Gene Symbol: PARVG
  Gene Name: parvin, gamma
  Uniprot ID: Q9HBI0
  ENSP ID: ENSP00000391583

SEQ ID NO: 61398 - protein, 26 aa, Homo sapiens
  Payload ID: 12262
  Gene Symbol: PARVG
  Gene Name: parvin, gamma
  ENSP ID: ENSP00000399839
MEPEFLYDLLQLPKGVEPPAEEELSK

SEQ ID NO: 61399 - protein, 30 aa, Homo sapiens
  Payload ID: 12262
  Gene Symbol: PARVG
  Gene Name: parvin, gamma
  ENSP ID: ENSP00000407199
MEPEFLYDLLQLPKGVEPPAEEELSKGVCP

SEQ ID NO: 61400 - protein, 187 aa, Homo sapiens; identical to SEQ ID NO: 61395
  Payload ID: 12262
  Gene Symbol: PARVG
  Gene Name: parvin, gamma
  Uniprot ID: Q9HBI0
  ENSP ID: ENSP00000416761

SEQ ID NO: 61401 - protein, 34 aa, Homo sapiens
  Payload ID: 12262
  Gene Symbol: PARVG
  Gene Name: parvin, gamma
  ENSP ID: ENSP00000475593
MEPEFLYDLLQLPKGVEPPAEEELSKELEPLLSR

SEQ ID NO: 61402 - protein, 773 aa, Homo sapiens
  Payload ID: 12263
  Gene Symbol: PASD1
  Gene Name: PAS domain containing 1
  Uniprot ID: Q8IV76
  ENSP ID: ENSP00000359382
MKMRGEKRRDKVNPKSSQRKLNWIPSFPTYDYFNQVTLQLLDGFMITLSTDGVIICVAENISSLLGHLPAEIVGKKLLSLLPDEEKDEVYQKIILKFPLLNSETHIEFCCHLKRGNVEHGDSSAYENVKFIVNVRDICNEFPVVFSGLFSSHLCADFAACVPQEDRLYLVGNVCILRTQLLQQLYTSKAVSDEAVLTQDSDEEPFVGELSSSQGQRGHTSMKAVYVEPAAAAAAAAISDDQIDIAEVEQYGPQENVHMFVDSDSTYCSSTVFLDTMPESPALSLQDFRGEPEVNPLYRADPVDLEFSVDQVDSVDQEGPMDQQDPENPVAPLDQAGLMDPVDPEDSVDLGAAGASAQPLQPSSPVAYDIISQELELMKKLKEQLEERTWLLHDAIQNQQNALELMMDHLQKQPNTLRHVVIPDLQSSEAVPKKQQKQHAGQVKRPLPHPKDVKCFCGLSLSNSLKNTGELQEPCVAFNQQQLVQQEQHLKEQQRQLREQLQQLREQRKVQKQKKMQEKKKLQEQKMQEKKKLQEQRRQKKKKLQERKKWQGQMLQKEPEEEQQKQQLQEQPLKHNVIVGNERVQICLQNPRDVSVPLCNHPVRFLQAQPIVPVQRAAEQQPSGFYQDENCGQQEDESQSFYPEAYQGPPVNQLPLIDTSNSEAISSSSIPQFPITSDSTISTLETPQDYIRLWQELSDSLGPVVQVNTWSCDEQGTLHGQPTYHQVQVSEVGVEGPPDPQAFQGPAAYQPDQMRSAEQTRLMPAEQRDSNKPC

SEQ ID NO: 61403 - protein, 1323 aa, Homo sapiens
  Payload ID: 12264
  Gene Symbol: PASK
  Gene Name: PAS domain containing serine/threonine kinase
  Uniprot ID: Q96RG2
  ENSP ID: ENSP00000234040
MEDGGLTAFEEDQRCLSQSLPLPVSAEGPAAQTTAEPSRSFSSAHRHLSRRNGLSRLCQSRTALSEDRWSSYCLSSLAAQNICTSKLHCPAAPEHTDPSEPRGSVSCCSLLRGLSSGWSSPLLPAPVCNPNKAIFTVDAKTTEILVANDKACGLLGYSSQDLIGQKLTQFFLRSDSDVVEALSEEHMEADGHAAVVFGTVVDIISRSGEKIPVSVWMKRMRQERRLCCVVVLEPVERVSTWVAFQSDGTVTSCDSLFAHLHGYVSGEDVAGQHITDLIPSVQLPPSGQHIPKNLKIQRSVGRARDGTTFPLSLKLKSQPSSEEATTGEAAPVSGYRASVWVFCTISGLITLLPDGTIHGINHSFALTLFGYGKTELLGKNITFLIPGFYSYMDLAYNSSLQLPDLASCLDVGNESGCGERTLDPWQGQDPAEGGQDPRINVVLAGGHVVPRDEIRKLMESQDIFTGTQTELIAGGQLLSCLSPQPAPGVDNVPEGSLPVHGEQALPKDQQITALGREEPVAIESPGQDLLGESRSEPVDVKPFASCEDSEAPVPAEDGGSDAGMCGLCQKAQLERMGVSGPSGSDLWAGAAVAKPQAKGQLAGGSLLMHCPCYGSEWGLWWRSQDLAPSPSGMAGLSFGTPTLDEPWLGVENDREELQTCLIKEQLSQLSLAGALDVPHAELVPTECQAVTAPVSSCDLGGRDLCGGCTGSSSACYALATDLPGGLEAVEAQEVDVNSFSWNLKELFFSDQTDQTSSNCSCATSELRETPSSLAVGSDPDVGSLQEQGSCVLDDRELLLLTGTCVDLGQGRRFRESCVGHDPTEPLEVCLVSSEHYAASDRESPGHVPSTLDAGPEDTCPSAEEPRLNVQVTSTPVIVMRGAAGLQREIQEGAYSGSCYHRDGLRLSIQFEVRRVELQGPTPLFCCWLVKDLLHSQRDSAARTRLFLASLPGSTHSTAAELTGPSLVEVLRARPWFEEPPKAVELEGLAACEGEYSQKYSTMSPLGSGAFGFVWTAVDKEKNKEVVVKFIKKEKVLEDCWIEDPKLGKVTLEIAILSRVEHANIIKVLDIFENQGFFQLVMEKHGSGLDLFAFIDRHPRLDEPLASYIFRQLVSAVGYLRLKDIIHRDIKDENIVIAEDFTIKLIDFGSAAYLERGKLFYTFCGTIEYCAPEVLMGNPYRGPELEMWSLGVTLYTLVFEENPFCELEETVEAAIHPPYLVSKELMSLVSGLLQPVPERRTTLEKLVTDPWVTQPVNLADYTWEEVFRVNKPESGVLSAASLEMGNRSLSDVAQAQELCGGPVPGEAPNGQGCLHPGDPRLLTS

SEQ ID NO: 61404 - protein, 1330 aa, Homo sapiens
  Payload ID: 12264
  Gene Symbol: PASK
  Gene Name: PAS domain containing serine/threonine kinase
  Uniprot ID: Q96RG2
  ENSP ID: ENSP00000351475
MEDGGLTAFEEDQRCLSQSLPLPVSAEGPAAQTTAEPSRSFSSAHRHLSRRNGLSRLCQSRTALSEDRWSSYCLSSLAAQNICTSKLHCPAAPEHTDPSEPRGSVSCCSLLRGLSSGWSSPLLPAPVCNPNKAIFTVDAKTTEILVANDKACGLLGYSSQDLIGQKLTQFFLRSDSDVVEALSEEHMEADGHAAVVFGTVVDIISRSGEKIPVSVWMKRMRQERRLCCVVVLEPVERVSTWVAFQSDGTVTSCDSLFAHLHGYVSGEDVAGQHITDLIPSVQLPPSGQHIPKNLKIQRSVGRARDGTTFPLSLKLKSQPSSEEATTGEAAPVSGYRASVWVFCTISGLITLLPDGTIHGINHSFALTLFGYGKTELLGKNITFLIPGFYSYMDLAYNSSLQLPDLASCLDVGNESGCGERTLDPWQGQDPAEGGQDPRINVVLAGGHVVPRDEIRKLMESQDIFTGTQTELIAGGQLLSCLSPQPAPGVDNVPEGSLPVHGEQALPKDQQITALGREEPVAIESPGQDLLGESRSEPVDVKPFASCEDSEAPVPAEDGGSDAGMCGLCQKAQLERMGVSGPSGSDLWAGAAVAKPQAKGQLAGGSLLMHCPCYGSEWGLWWRSQDLAPSPSGMAGLSFGTPTLDEPWLGVENDREELQTCLIKEQLSQLSLAGALDVPHAELVPTECQAVTAPVSSCDLGGRDLCGGCTGSSSACYALATDLPGGLEAVEAQEVDVNSFSWNLKELFFSDQTDQTSSNCSCATSELRETPSSLAVGSDPDVGSLQEQGSCVLDDRELLLLTGTCVDLGQGRRFRESCVGHDPTEPLEVCLVSSEHYAASDRESPGHVPSTLDAGPEDTCPSAEEPRLNVQVTSTPVIVMRGAAGLQREIQEGAYSGSCYHRDGLRLSIQFEVRRVELQGPTPLFCCWLVKDLLHSQRDSAARTRLFLASLPGSTHSTAAELTGPSLVEVLRARPWFEEPPKAVELEGLAACEGEYSQKYSTMSPLGSGAFGFVWTAVDKEKNKEVVVKFIKKEKVLEDCWIEDPKLGKVTLEIAILSRVEHANIIKVLDIFENQGFFQLVMEKHGSGLDLFAFIDRHPRLDEPLASYIFRQVRAGQSRLVSAVGYLRLKDIIHRDIKDENIVIAEDFTIKLIDFGSAAYLERGKLFYTFCGTIEYCAPEVLMGNPYRGPELEMWSLGVTLYTLVFEENPFCELEETVEAAIHPPYLVSKELMSLVSGLLQPVPERRTTLEKLVTDPWVTQPVNLADYTWEEVFRVNKPESGVLSAASLEMGNRSLSDVAQAQELCGGPVPGEAPNGQGCLHPGDPRLLTS

SEQ ID NO: 61405 - protein, 1323 aa, Homo sapiens; identical to SEQ ID NO: 61403
  Payload ID: 12264
  Gene Symbol: PASK
  Gene Name: PAS domain containing serine/threonine kinase
  Uniprot ID: Q96RG2
  ENSP ID: ENSP00000384016

SEQ ID NO: 61406 - protein, 1143 aa, Homo sapiens
  Payload ID: 12264
  Gene Symbol: PASK
  Gene Name: PAS domain containing serine/threonine kinase
  Uniprot ID: Q96RG2
  ENSP ID: ENSP00000384438
MEDGGLTAFEEDQRCLSQSLPLPVSAEGPAAQTTAEPSRSFSSAHRHLSRRNGLSRLCQSRTALSEDRWSSYCLSSLAAQNICTSKLHCPAAPEHTDPSEPRGSVSCCSLLRGLSSGWSSPLLPAPVCNPNKAIFTVDAKTTEILVANDKACGLLGYSSQDLIGQKLTQFFLRSDSDVVEALSEEHMEADGHAAVVFGTVVDIISRSGEKIPVSVWMKRMRQERRLCCVVVLEPVERVSTWVAFQSDGTVTSCDSLFAHLHGYVSGEDVAGQHITDLIPSVQLPPSGQHIPKNLKIQRSVGRARDGTTFPLSLKLKSQPSSEEATTGEAAPVSGYRASVWVFCTISGLITLLPDGTIHGINHSFALTLFGYGKTELLGKNITFLIPGFYSYMDLAYNSSLQLPDLASCLDVGNESGCGERTLDPWQGQDPAEGGQDPRINVVLAGGHVVPRDEIRKLMESQDIFTGTQTELIAGGQLLSCLSPQPAPGVDNVPEGSLPVHGEQALPKDQQITALGREEPVAIESPGQDLLGESRSEPVDVKPFASCEDSEAPVPAEDGGSDAGMCGLCQKAQLERMGVSGPSGSDLWAGAAVAKPQAKGQLAGGSLLMHCPCYGSEWGLWWRSQDLAPSPSGMAGLSFGTPTLDEPWLGVENDREELQTCLIKEQLSQLSLAGALDVPHAELVPTECQAVTAPVSSCDLGGRDLCGGCTGSSSACYALATDLPGGLEAVEAQEVDVNSFSWNLKELFFSDQTDQTSSNCSCATSELRETPSSLAVGSDPDVGSLQEQGSCVLDDRELLLLTGTCVDLGQGRRFRESCVGHDPTEPLEVCLVSSEHYAASDRESPGHVPSTLDAGPEDTCPSAEEPRLNVQVTSTPVIVMRGAAGLQREIQEGAYSGSCYHRDGLRLSIQFEVRRVELQGPTPLFCCWLVKDLLHSQRDSAARTRLFLASLPGSTHSTAAELTGPSLVEVLRARPWFEEPPKAVELEGLAACEGEYSQKYSTMSPLGSGAFGFVWTAVDKEKNKEVVVKFIKKEKVLEDCWIEDPKLGKVTLEIAILSRVEHANIIKVLDIFENQGFFQLVMEKHGSGLDLFAFIDRHPRLDEPLASYIFRQVRAGQSRVSVNAGLGAWVRWLQRSVIHTRFSL

SEQ ID NO: 61407 - protein, 193 aa, Homo sapiens
  Payload ID: 12264
  Gene Symbol: PASK
  Gene Name: PAS domain containing serine/threonine kinase
  ENSP ID: ENSP00000395672
  MOD_RES (1)..(1): Any amino acid
XMFCSPAGQHIRCSRVDIISRSGEKIPVSVWMKRMRQERRLCCVVVLEPVERVSTWVAFQSDGTVTSCDSLFAHLHGYVSGEDVAGQHITDLIPSVQLPPSGQHIPKNLKIQRSVGRARDGTTFPLSLKLKSQPSSEEATTGEAAPVSGYRASVWVFCTISGLITLLPDGTIHGINHSFALTLFGYGKTELLG

SEQ ID NO: 61408 - protein, 125 aa, Homo sapiens
  Payload ID: 12264
  Gene Symbol: PASK
  Gene Name: PAS domain containing serine/threonine kinase
  ENSP ID: ENSP00000397922
MEDGGLTAFEEDQRCLSQSLPLPVSAEGPAAQTTAEPSRSFSSAHRHLSRRNGLSRLCQSRTALSEDRWSSYCLSSLAAQNICTSKLHCPAAPEHTDPSEPRGSVSCCSLLRGLSSGWSSPLLPA

SEQ ID NO: 61409 - protein, 140 aa, Homo sapiens
  Payload ID: 12264
  Gene Symbol: PASK
  Gene Name: PAS domain containing serine/threonine kinase
  ENSP ID: ENSP00000400734
MKRMRQERRLCCVVVLEPVERVSTWVAFQSDGTVTSCDSLFAHLHGYVSGEDVAGQHITDLIPSVQLPPSGQHIPKNLKIQRSVGRARDGTTFPLSLKLKSQPSSEEATTGEAAPVSGYRASVWVFCTISGLITLLPDGT

SEQ ID NO: 61410 - protein, 71 aa, Homo sapiens
  Payload ID: 12264
  Gene Symbol: PASK
  Gene Name: PAS domain containing serine/threonine kinase
  ENSP ID: ENSP00000408506
MEDGGLTAFEEDQRCLSQSLPLPVSAEGPAAQTTAEPSRSFSSAHRHLSRRNGLSRLCQSRTALSGGHHQP

SEQ ID NO: 61411 - protein, 1323 aa, Homo sapiens; identical to SEQ ID NO: 61403
  Payload ID: 12264
  Gene Symbol: PASK
  Gene Name: PAS domain containing serine/threonine kinase
  Uniprot ID: Q96RG2
  ENSP ID: ENSP00000441374

SEQ ID NO: 61412 - protein, 71 aa, Homo sapiens; identical to SEQ ID NO: 61410
  Payload ID: 12264
  Gene Symbol: PASK
  Gene Name: PAS domain containing serine/threonine kinase
  ENSP ID: ENSP00000486149

SEQ ID NO: 61413 - protein, 446 aa, Homo sapiens
  Payload ID: 12265
  Gene Symbol: PNPLA1
  Gene Name: patatin-like phospholipase domain containing 1
  Uniprot ID: Q8N8W4
  ENSP ID: ENSP00000321116
MVQMMRQFLYRVLPEDSYKVTTGKLHVSLTRLTDGENVVVSEFTSKEELIEALYCSCFVPVYCGLIPPTYRGVWAFLTLPPQRYIDGGFTGMQPCAFWTDAITISTFSGQQDICPRDCPAIFHDFRMFNCSFQFSLENIARMTHALFPPDLVILHDYYYRGYEDAVLYLRRLNAVYLNSSSKRVIFPRVEVYCQIELALGNECPERSQPSLRARQASLEGATQPHKEWVPKGDGRGSHGPPVSQPVQTLEFTCESPVSAPVSPLEQPPAQPLASSTPLSLSGMPPVSFPAVHKPPSSTPGSSLPTPPPGLSPLSPQQQVQPSGSPARSLHSQAPTSPRPSLGPSTVGAPQTLPRSSLSAFPAQPPVEELGQEQPQAVALLVSSKPKSAVPLVHVKETVSKPYVTESPAEDSNWVNKVFKKNKQKTSGTRKGFPRHSGSKKPSSKVQ

SEQ ID NO: 61414 - protein, 437 aa, Homo sapiens
  Payload ID: 12265
  Gene Symbol: PNPLA1
  Gene Name: patatin-like phospholipase domain containing 1
  Uniprot ID: Q8N8W4
  ENSP ID: ENSP00000373367
MVQMMRQFLYRVLPEDSYKVTTGKLHVSLTRLTDGENVVVSEFTSKEELIEALYCSCFVPVYCGLIPPTYRGVRYIDGGFTGMQPCAFWTDAITISTFSGQQDICPRDCPAIFHDFRMFNCSFQFSLENIARMTHALFPPDLVILHDYYYRGYEDAVLYLRRLNAVYLNSSSKRVIFPRVEVYCQIELALGNECPERSQPSLRARQASLEGATQPHKEWVPKGDGRGSHGPPVSQPVQTLEFTCESPVSAPVSPLEQPPAQPLASSTPLSLSGMPPVSFPAVHKPPSSTPGSSLPTPPPGLSPLSPQQQVQPSGSPARSLHSQAPTSPRPSLGPSTVGAPQTLPRSSLSAFPAQPPVEELGQEQPQAVALLVSSKPKSAVPLVHVKETVSKPYVTESPAEDSNWVNKVFKKNKQKTSGTRKGFPRHSGSKKPSSKVQ

SEQ ID NO: 61415 - protein, 532 aa, Homo sapiens
  Payload ID: 12265
  Gene Symbol: PNPLA1
  Gene Name: patatin-like phospholipase domain containing 1
  Uniprot ID: Q8N8W4
  ENSP ID: ENSP00000378072
MEEQVFKGDPDTPHSISFSGSGFLSFYQAGAVDALRDLAPRMLETAHRFAGTSAGAVIAALAICGIEMDEYLRVLNVGVAEVKKSFLGPLSPSCKMVQMMRQFLYRVLPEDSYKVTTGKLHVSLTRLTDGENVVVSEFTSKEELIEALYCSCFVPVYCGLIPPTYRGVRYIDGGFTGMQPCAFWTDAITISTFSGQQDICPRDCPAIFHDFRMFNCSFQFSLENIARMTHALFPPDLVILHDYYYRGYEDAVLYLRRLNAVYLNSSSKRVIFPRVEVYCQIELALGNECPERSQPSLRARQASLEGATQPHKEWVPKGDGRGSHGPPVSQPVQTLEFTCESPVSAPVSPLEQPPAQPLASSTPLSLSGMPPVSFPAVHKPPSSTPGSSLPTPPPGLSPLSPQQQVQPSGSPARSLHSQAPTSPRPSLGPSTVGAPQTLPRSSLSAFPAQPPVEELGQEQPQAVALLVSSKPKSAVPLVHVKETVSKPYVTESPAEDSNWVNKVFKKNKQKTSGTRKGFPRHSGSKKPSSKVQ

SEQ ID NO: 61416 - protein, 533 aa, Homo sapiens
  Payload ID: 12265
  Gene Symbol: PNPLA1
  Gene Name: patatin-like phospholipase domain containing 1
  ENSP ID: ENSP00000391868
MEEQVFKGDPDTPHSISFSGSGFLSFYQAGAVDALRDLAPRMLETAHRFAGTSAGAVIAALAICGIEMDEYLRVLNVGVAEVKKSFLGPLSPSCKMVQMMRQFLYRVLPEDSYKVTTGKLHVSLTRLTDGENVVVSEFTSKEELIEAALYCSCFVPVYCGLIPPTYRGVRYIDGGFTGMQPCAFWTDAITISTFSGQQDICPRDCPAIFHDFRMFNCSFQFSLENIARMTHALFPPDLVILHDYYYRGYEDAVLYLRRLNAVYLNSSSKRVIFPRVEVYCQIELALGNECPERSQPSLRARQASLEGATQPHKEWVPKGDGRGSHGPPVSQPVQTLEFTCESPVSAPVSPLEQPPAQPLASSTPLSLSGMPPVSFPAVHKPPSSTPGSSLPTPPPGLSPLSPQQQVQPSGSPARSLHSQAPTSPRPSLGPSTVGAPQTLPRSSLSAFPAQPPVEELGQEQPQAVALLVSSKPKSAVPLVHVKETVSKPYVTESPAEDSNWVNKVFKKNKQKTSGTRKGFPRHSGSKKPSSKVQ

SEQ ID NO: 61417 - protein, 504 aa, Homo sapiens
  Payload ID: 12266
  Gene Symbol: PNPLA2
  Gene Name: patatin-like phospholipase domain containing 2
  Uniprot ID: Q96AD5
  ENSP ID: ENSP00000337701
MFPREKTWNISFAGCGFLGVYYVGVASCLREHAPFLVANATHIYGASAGALTATALVTGVCLGEAGAKFIEVSKEARKRFLGPLHPSFNLVKIIRSFLLKVLPADSHEHASGRLGISLTRVSDGENVIISHFNSKDELIQANVCSGFIPVYCGLIPPSLQGVRYVDGGISDNLPLYELKNTITVSPFSGESDICPQDSSTNIHELRVTNTSIQFNLRNLYRLSKALFPPEPLVLREMCKQGYRDGLRFLQRNGLLNRPNPLLALPPARPHGPEDKDQAVESAQAEDYSQLPGEDHILEHLPARLNEALLEACVEPTDLLTTLSNMLPVRLATAMMVPYTLPLESALSFTIRLLEWLPDVPEDIRWMKEQTGSICQYLVMRAKRKLGRHLPSRLPEQVELRRVQSLPSVPLSCAAYREALPGWMRNNLSLGDALAKWEECQRQLLLGLFCTNVAFPPEALRMRAPADPAPAPADPASPQHQLAGPAPLLSTPAPEARPVIGALGL

SEQ ID NO: 61418 - protein, 215 aa, Homo sapiens
  Payload ID: 12266
  Gene Symbol: PNPLA2
  Gene Name: patatin-like phospholipase domain containing 2
  ENSP ID: ENSP00000481602
MVPYTLPLESALSFTIRLLEWLPDVPEDIRWMKEQTGSICQYLVMRAKRKLGRHLPSRLPEQVELRRVQSLPSVPLSCAAYREALPGWMRNNLSLGDALAKWEECQRQLLLGLFCTNVAFPPEALRMRAPADPAPAPADPASPQHQLAGPAPLLSTPAPEARPVIGPGAVRPRPSRGTLPETPPLPLRSEMRGLTVAKRGLCRGPPRQPLTSCMH

SEQ ID NO: 61419 - protein, 481 aa, Homo sapiens
  Payload ID: 12267
  Gene Symbol: PNPLA3
  Gene Name: patatin-like phospholipase domain containing 3
  Uniprot ID: Q9NST1
  ENSP ID: ENSP00000216180
MYDAERGWSLSFAGCGFLGFYHVGATRCLSEHAPHLLRDARMLFGASAGALHCVGVLSGIPLEQTLQVLSDLVRKARSRNIGIFHPSFNLSKFLRQGLCKCLPANVHQLISGKIGISLTRVSDGENVLVSDFRSKDEVVDALVCSCFIPFYSGLIPPSFRGVRYVDGGVSDNVPFIDAKTTITVSPFYGEYDICPKVKSTNFLHVDITKLSLRLCTGNLYLLSRAFVPPDLKVLGEICLRGYLDAFRFLEEKGICNRPQPGLKSSSEGMDPEVAMPSWANMSLDSSPESAALAVRLEGDELLDHLRLSILPWDESILDTLSPRLATALSEEMKDKGGYMSKICNLLPIRIMSYVMLPCTLPVESAIAIVQRLVTWLPDMPDDVLWLQWVTSQVFTRVLMCLLPASRSQMPVSSQQASPCTPEQDWPCWTPCSPKGCPAETKAEATPRSILRSSLNFFLGNKVPAGAEGLSTFPSFSLEKSL

SEQ ID NO: 61420 - protein, 120 aa, Homo sapiens
  Payload ID: 12267
  Gene Symbol: PNPLA3
  Gene Name: patatin-like phospholipase domain containing 3
  ENSP ID: ENSP00000384668
MYDAERGWSLSFAGCGFLGFYHVGATRCLSEHAPHLLRDARMLFGASAGALHCVGVLSGIPLDSAGPLRSCAEGQESEHWHLPSILQLKQVPPTGSLQMPPGQCPPAHLRQNRHLSYQSV

SEQ ID NO: 61421 - protein, 477 aa, Homo sapiens
  Payload ID: 12267
  Gene Symbol: PNPLA3
  Gene Name: patatin-like phospholipase domain containing 3
  Uniprot ID: Q9NST1
  ENSP ID: ENSP00000397987
MYDAERGWSLSFAGCGFLGFYHVGATRCLSEHAPHLLRDARMLFGASAGALHCVGVLSEQTLQVLSDLVRKARSRNIGIFHPSFNLSKFLRQGLCKCLPANVHQLISGKIGISLTRVSDGENVLVSDFRSKDEVVDALVCSCFIPFYSGLIPPSFRGVRYVDGGVSDNVPFIDAKTTITVSPFYGEYDICPKVKSTNFLHVDITKLSLRLCTGNLYLLSRAFVPPDLKVLGEICLRGYLDAFRFLEEKGICNRPQPGLKSSSEGMDPEVAMPSWANMSLDSSPESAALAVRLEGDELLDHLRLSILPWDESILDTLSPRLATALSEEMKDKGGYMSKICNLLPIRIMSYVMLPCTLPVESAIAIVQRLVTWLPDMPDDVLWLQWVTSQVFTRVLMCLLPASRSQMPVSSQQASPCTPEQDWPCWTPCSPKGCPAETKAEATPRSILRSSLNFFLGNKVPAGAEGLSTFPSFSLEKSL

SEQ ID NO: 61422 - protein, 253 aa, Homo sapiens
  Payload ID: 12268
  Gene Symbol: PNPLA4
  Gene Name: patatin-like phospholipase domain containing 4
  Uniprot ID: P41247
  ENSP ID: ENSP00000370430
MKHINLSFAACGFLGIYHLGAASALCRHGKKLVKDVKAFAGASAGSLVASVLLTAPEKIEECNQFTYKFAEEIRRQSFGAVTPGYDFMARLRSGMESILPPSAHELAQNRLHVSITNAKTRENHLVSTFSSREDLIKVLLASSFVPIYAGLKLVEYKGQKWVDGGLTNALPILPVGRTVTISPFSGRLDISPQDKGQLDLYVNIAKQDIMLSLANLVRLNQALFPPSKRKMESLYQCGFDDTVKFLLKENWFE

SEQ ID NO: 61423 - protein, 190 aa, Homo sapiens
  Payload ID: 12268
  Gene Symbol: PNPLA4
  Gene Name: patatin-like phospholipase domain containing 4
  ENSP ID: ENSP00000406698
MKHINLSFAACGFLGIYHLGAASALCRHGKKLVKDVKAFAGASAGSLVASVLLTAPEKIEECNQFTYKFAEEIRRQSFGAVTPGYDFMARLRSGMESILPPSAHELAQNRLHVSITNAKTRENHLVSTFSSREDLIKVLLASSFVPIYAGLKLVEYKGQKWVDGGLTNALPILPVGRTVTISPFSGRLDI

SEQ ID NO: 61424 - protein, 253 aa, Homo sapiens; identical to SEQ ID NO: 61422
  Payload ID: 12268
  Gene Symbol: PNPLA4
  Gene Name: patatin-like phospholipase domain containing 4
  Uniprot ID: P41247
  ENSP ID: ENSP00000415245

SEQ ID NO: 61425 - protein, 166 aa, Homo sapiens
  Payload ID: 12268
  Gene Symbol: PNPLA4
  Gene Name: patatin-like phospholipase domain containing 4
  Uniprot ID: P41247
  ENSP ID: ENSP00000443157
MARLRSGMESILPPSAHELAQNRLHVSITNAKTRENHLVSTFSSREDLIKVLLASSFVPIYAGLKLVEYKGQKWVDGGLTNALPILPVGRTVTISPFSGRLDISPQDKGQLDLYVNIAKQDIMLSLANLVRLNQALFPPSKRKMESLYQCGFDDTVKFLLKENWFE

SEQ ID NO: 61426 - protein, 429 aa, Homo sapiens
  Payload ID: 12269
  Gene Symbol: PNPLA5
  Gene Name: patatin-like phospholipase domain containing 5
  Uniprot ID: Q7Z6Z6
  ENSP ID: ENSP00000216177
MGFLEEEGRWNLSFSGAGYLGAHHVGATECLRQRAPRLLQGARRIYGSSSGALNAVSIVCGKSVDFCCSHLLGMVGQLERLSLSILHPAYAPIEHVKQQLQDALPPDAHVLASQRLGISLTRWPDGRNFLVTDFATCDELIQALVCTLYFPFYCGLIPPEFRGERYIDGALSNNLPFADCPSTITVSPFHGTVDICPQSTSPNLHELNVFNFSFQISTENFFLGLICLIPPSLEVVADNCRQGYLDALRFLERRGLTKEPVLWTLVSKEPPAPADGNWDAGCDQRWKGGLSLNWKVPHVQVKDVPNFEQLSPELEAALKKACTRDPSRWARFWHSGPGQVLTYLLLPCTLPFEYIYFRSRRLVVWLPDVPADLWWMQGLLRNMALEVFSRTKAQLLGPISPPATRVLETSPLQPQIAPHREELGPTHQA

SEQ ID NO: 61427 - protein, 315 aa, Homo sapiens
  Payload ID: 12269
  Gene Symbol: PNPLA5
  Gene Name: patatin-like phospholipase domain containing 5
  Uniprot ID: Q7Z6Z6
  ENSP ID: ENSP00000370595
MGFLEEEGRWNLSFSGAGYLGAHHVGATECLRQRAPRLLQGARRIYGSSSGALNAVSIVCGKSVDCPSTITVSPFHGTVDICPQSTSPNLHELNVFNFSFQISTENFFLGLICLIPPSLEVVADNCRQGYLDALRFLERRGLTKEPVLWTLVSKEPPAPADGNWDAGCDQRWKGGLSLNWKVPHVQVKDVPNFEQLSPELEAALKKACTRDPSRWARFWHSGPGQVLTYLLLPCTLPFEYIYFRSRRLVVWLPDVPADLWWMQGLLRNMALEVFSRTKAQLLGPISPPATRVLETSPLQPQIAPHREELGPTHQA

SEQ ID NO: 61428 - protein, 268 aa, Homo sapiens
  Payload ID: 12269
  Gene Symbol: PNPLA5
  Gene Name: patatin-like phospholipase domain containing 5
  ENSP ID: ENSP00000405732
MGFLEEEGRWNLSFSGAGYLGAHHVGATECLRQRAPRLLQGARRIYGSSSGALNAVSIVCGKSVDFCCSHLLGMVGQLERLSLSILHPAYAPIEHVKQQLQDALPPDAHVLASQRLGISLTRWPDGRNFLVTDFATCDELIQVVADNCRQGYLDALRFLERRGLTKEPVLWTLVSKEPPAPADGNWDAGCDQRWKGGLSLNWKVPHVQVKDVPNFEQLSPELEAALKKACTRDPSRWARFWHSGPGQVLTYLLLPCTLPFEYIYFRSR

SEQ ID NO: 61429 - protein, 429 aa, Homo sapiens; identical to SEQ ID NO: 61426
  Payload ID: 12269
  Gene Symbol: PNPLA5
  Gene Name: patatin-like phospholipase domain containing 5
  Uniprot ID: Q7Z6Z6
  ENSP ID: ENSP00000471069

SEQ ID NO: 61430 - protein, 315 aa, Homo sapiens; identical to SEQ ID NO: 61427
  Payload ID: 12269
  Gene Symbol: PNPLA5
  Gene Name: patatin-like phospholipase domain containing 5
  Uniprot ID: Q7Z6Z6
  ENSP ID: ENSP00000471795

SEQ ID NO: 61431 - protein, 1327 aa, Homo sapiens
  Payload ID: 12270
  Gene Symbol: PNPLA6
  Gene Name: patatin-like phospholipase domain containing 6
  Uniprot ID: Q8IY17
  ENSP ID: ENSP00000221249
MEAPLQTGMVLGVMIGAGVAVVVTAVLILLVVRRLRVPKTPAPDGPRYRFRKRDKVLFYGRKIMRKVSQSTSSLVDTSVSATSRPRMRKKLKMLNIAKKILRIQKETPTLQRKEPPPAVLEADLTEGDLANSHLPSEVLYMLKNVRVLGHFEKPLFLELCRHMVFQRLGQGDYVFRPGQPDASIYVVQDGLLELCLPGPDGKECVVKEVVPGDSVNSLLSILDVITGHQHPQRTVSARAARDSTVLRLPVEAFSAVFTKYPESLVRVVQIIMVRLQRVTFLALHNYLGLTNELFSHEIQPLRLFPSPGLPTRTSPVRGSKRMVSTSATDEPRETPGRPPDPTGAPLPGPTGDPVKPTSLETPSAPLLSRCVSMPGDISGLQGGPRSDFDMAYERGRISVSLQEEASGGSLAAPARTPTQEPREQPAGACEYSYCEDESATGGCPFGPYQGRQTSSIFEAAKQELAKLMRIEDPSLLNSRVLLHHAKAGTIIARQGDQDVSLHFVLWGCLHVYQRMIDKAEDVCLFVAQPGELVGQLAVLTGEPLIFTLRAQRDCTFLRISKSDFYEIMRAQPSVVLSAAHTVAARMSPFVRQMDFAIDWTAVEAGRALYRQGDRSDCTYIVLNGRLRSVIQRGSGKKELVGEYGRGDLIGVVEALTRQPRATTVHAVRDTELAKLPEGTLGHIKRRYPQVVTRLIHLLSQKILGNLQQLQGPFPAGSGLGVPPHSELTNPASNLATVAILPVCAEVPMVAFTLELQHALQAIGPTLLLNSDIIRARLGASALDSIQEFRLSGWLAQQEDAHRIVLYQTDASLTPWTVRCLRQADCILIVGLGDQEPTLGQLEQMLENTAVRALKQLVLLHREEGAGPTRTVEWLNMRSWCSGHLHLRCPRRLFSRRSPAKLHELYEKVFSRRADRHSDFSRLARVLTGNTIALVLGGGGARGCSHIGVLKALEEAGVPVDLVGGTSIGSFIGALYAEERSASRTKQRAREWAKSMTSVLEPVLDLTYPVTSMFTGSAFNRSIHRVFQDKQIEDLWLPYFNVTTDITASAMRVHKDGSLWRYVRASMTLSGYLPPLCDPKDGHLLMDGGYINNLPADIARSMGAKTVIAIDVGSQDETDLSTYGDSLSGWWLLWKRLNPWADKVKVPDMAEIQSRLAYVSCVRQLEVVKSSSYCEYLRPPIDCFKTMDFGKFDQIYDVGYQYGKAVFGGWSRGNVIEKMLTDRRSTDLNESRRADVLAFPSSGFTDLAEIVSRIEPPTSYVSDGCADGEESDCLTEYEEDAGPDCSRDEGGSPEGASPSTASEMEEEKSILRQRRCLPQEPPGSATDA

SEQ ID NO: 61432 - protein, 1327 aa, Homo sapiens; identical to SEQ ID NO: 61431
  Payload ID: 12270
  Gene Symbol: PNPLA6
  Gene Name: patatin-like phospholipase domain containing 6
  Uniprot ID: Q8IY17
  ENSP ID: ENSP00000394348

SEQ ID NO: 61433 - protein, 1375 aa, Homo sapiens
  Payload ID: 12270
  Gene Symbol: PNPLA6
  Gene Name: patatin-like phospholipase domain containing 6
  Uniprot ID: Q8IY17
  ENSP ID: ENSP00000407509
MEAPLQTGMMGTSSHGLATNSSGAKVAERDGFQDVLAPGEGSAGRICGAQPVPFVPQVLGVMIGAGVAVVVTAVLILLVVRRLRVPKTPAPDGPRYRFRKRDKVLFYGRKIMRKVSQSTSSLVDTSVSATSRPRMRKKLKMLNIAKKILRIQKETPTLQRKEPPPAVLEADLTEGDLANSHLPSEVLYMLKNVRVLGHFEKPLFLELCRHMVFQRLGQGDYVFRPGQPDASIYVVQDGLLELCLPGPDGKECVVKEVVPGDSVNSLLSILDVITGHQHPQRTVSARAARDSTVLRLPVEAFSAVFTKYPESLVRVVQIIMVRLQRVTFLALHNYLGLTNELFSHEIQPLRLFPSPGLPTRTSPVRGSKRMVSTSATDEPRETPGRPPDPTGAPLPGPTGDPVKPTSLETPSAPLLSRCVSMPGDISGLQGGPRSDFDMAYERGRISVSLQEEASGGSLAAPARTPTQEPREQPAGACEYSYCEDESATGGCPFGPYQGRQTSSIFEAAKQELAKLMRIEDPSLLNSRVLLHHAKAGTIIARQGDQDVSLHFVLWGCLHVYQRMIDKAEDVCLFVAQPGELVGQLAVLTGEPLIFTLRAQRDCTFLRISKSDFYEIMRAQPSVVLSAAHTVAARMSPFVRQMDFAIDWTAVEAGRALYRQGDRSDCTYIVLNGRLRSVIQRGSGKKELVGEYGRGDLIGVVEALTRQPRATTVHAVRDTELAKLPEGTLGHIKRRYPQVVTRLIHLLSQKILGNLQQLQGPFPAGSGLGVPPHSELTNPASNLATVAILPVCAEVPMVAFTLELQHALQAIGPTLLLNSDIIRARLGASALDSIQEFRLSGWLAQQEDAHRIVLYQTDASLTPWTVRCLRQADCILIVGLGDQEPTLGQLEQMLENTAVRALKQLVLLHREEGAGPTRTVEWLNMRSWCSGHLHLRCPRRLFSRRSPAKLHELYEKVFSRRADRHSDFSRLARVLTGNTIALVLGGGGARGCSHIGVLKALEEAGVPVDLVGGTSIGSFIGALYAEERSASRTKQRAREWAKSMTSVLEPVLDLTYPVTSMFTGSAFNRSIHRVFQDKQIEDLWLPYFNVTTDITASAMRVHKDGSLWRYVRASMTLSGYLPPLCDPKDGHLLMDGGYINNLPADIARSMGAKTVIAIDVGSQDETDLSTYGDSLSGWWLLWKRLNPWADKVKVPDMAEIQSRLAYVSCVRQLEVVKSSSYCEYLRPPIDCFKTMDFGKFDQIYDVGYQYGKAVFGGWSRGNVIEKMLTDRRSTDLNESRRADVLAFPSSGFTDLAEIVSRIEPPTSYVSDGCADGEESDCLTEYEEDAGPDCSRDEGGSPEGASPSTASEMEEEKSILRQRRCLPQEPPGSATDA

SEQ ID NO: 61434 - protein, 1300 aa, Homo sapiens
  Payload ID: 12270
  Gene Symbol: PNPLA6
  Gene Name: patatin-like phospholipase domain containing 6
  Uniprot ID: Q8IY17
  ENSP ID: ENSP00000443323
MEAPLQTGMVLGVMIGAGVAVVVTAVLILLVVRRLRVPKTPAPDGPRYRFRKRDKVLFYGRKIMRKVSQSTSSLVDTSVSATSRPRMRKKLKMLNIAKKILRIQKETPTLQRKEPPPAVLEADLTEGDLANSHLPSEVLYMLKNVRVLGHFEKPLFLELCRHMVFQRLGQGDYVFRPGQPDASIYVVQDGLLELCLPGPDGKECVVKEVVPGDSVNSLLSILDVITGHQHPQRTVSARAARDSTVLRLPVEAFSAVFTKYPESLVRVVQIIMVRLQRVTFLALHNYLGLTNELFSHEIQPLRLFPSPGLPTRTSPVRGSKRMVSTSATDEPRETPGRPPDPTGAPLPGPTGDPVKPTSLETPSAPLLSRCVSMPGDISGLQGGPRSDFDMAYERGRISVSLQEEASGGSLAAPARTPTQEPREQPAGACEYSYCEDESATGGCPFGPYQGRQTSSIFEAAKQELAKLMRIEDVSLHFVLWGCLHVYQRMIDKAEDVCLFVAQPGELVGQLAVLTGEPLIFTLRAQRDCTFLRISKSDFYEIMRAQPSVVLSAAHTVAARMSPFVRQMDFAIDWTAVEAGRALYRQGDRSDCTYIVLNGRLRSVIQRGSGKKELVGEYGRGDLIGVVEALTRQPRATTVHAVRDTELAKLPEGTLGHIKRRYPQVVTRLIHLLSQKILGNLQQLQGPFPGSGLGVPPHSELTNPASNLATVAILPVCAEVPMVAFTLELQHALQAIGPTLLLNSDIIRARLGASALDSIQEFRLSGWLAQQEDAHRIVLYQTDASLTPWTVRCLRQADCILIVGLGDQEPTLGQLEQMLENTAVRALKQLVLLHREEGAGPTRTVEWLNMRSWCSGHLHLRCPRRLFSRRSPAKLHELYEKVFSRRADRHSDFSRLARVLTGNTIALVLGGGGARGCSHIGVLKALEEAGVPVDLVGGTSIGSFIGALYAEERSASRTKQRAREWAKSMTSVLEPVLDLTYPVTSMFTGSAFNRSIHRVFQDKQIEDLWLPYFNVTTDITASAMRVHKDGSLWRYVRASMTLSGYLPPLCDPKDGHLLMDGGYINNLPADIARSMGAKTVIAIDVGSQDETDLSTYGDSLSGWWLLWKRLNPWADKVKVPDMAEIQSRLAYVSCVRQLEVVKSSSYCEYLRPPIDCFKTMDFGKFDQIYDVGYQYGKAVFGGWSRGNVIEKMLTDRRSTDLNESRRADVLAFPSSGFTDLAEIVSRIEPPTSYVSDGCADGEESDCLTEYEEDAGPDCSRDEGGSPEGASPSTASEMEEEKSILRQRRCLPQEPPGSATDA

SEQ ID NO: 61435 - protein, 155 aa, Homo sapiens
  Payload ID: 12270
  Gene Symbol: PNPLA6
  Gene Name: patatin-like phospholipase domain containing 6
  ENSP ID: ENSP00000469171
  MOD_RES (1)..(1): Any amino acid
XRLNPWADKVKVPDMAEIQSRLAYVSCVRQLEVVKSSSYCEYLRPPIDCFKTMDFGKFDQIYVLAFPSSGFTDLAEIVSRIEPPTSYVSDGCADGEESDCLTEYEEDAGPDCSRDEGGSPEGASPSTASEMEEEKSILRQRRCLPQEPPGSATDA

SEQ ID NO: 61436 - protein, 117 aa, Homo sapiens
  Payload ID: 12270
  Gene Symbol: PNPLA6
  Gene Name: patatin-like phospholipase domain containing 6
  ENSP ID: ENSP00000469794
MEAPLQTGMVLGVMIGAGVAVVVTAVLILLVVRRLRVPKTPAPDGPRYRFRKRDKVLFYGRKIMRKVSQSTSSLVDTSVSATSRPRMRKKLKMLNIAKKILRIQKETPTLQRKEPPP

SEQ ID NO: 61437 - protein, 192 aa, Homo sapiens
  Payload ID: 12270
  Gene Symbol: PNPLA6
  Gene Name: patatin-like phospholipase domain containing 6
  ENSP ID: ENSP00000470060
  MOD_RES (1)..(1): Any amino acid
XYMLKNVRVLGHFEKPLFLELCRHMVFQRLGQGDYVFRPGQPDASIYVVQDGLLELCLPGPDGKECVVKEVVPGDSVNSLLSILDVITHPQRTVSARAARDSTVLRLPVEAFSAVFTKYPESLVRVVQIIMVRLQRVTFLALHNYLGLTNELFSHEIQPLRLFPSPGLPTRTSPVRGSKRMVSTSATDEPRE

SEQ ID NO: 61438 - protein, 38 aa, Homo sapiens
  Payload ID: 12270
  Gene Symbol: PNPLA6
  Gene Name: patatin-like phospholipase domain containing 6
  ENSP ID: ENSP00000470461
MEAPLQTGMVLGVMIGAGVAVVVTAVLILLVVRRLRVP

SEQ ID NO: 61439 - protein, 134 aa, Homo sapiens
  Payload ID: 12270
  Gene Symbol: PNPLA6
  Gene Name: patatin-like phospholipase domain containing 6
  ENSP ID: ENSP00000470608
MEAPLQTGMVLGVMIGAGVAVVVTAVLILLVVRRLRVPKTPAPDGPRYRFRKRDKVLFYGRKIMRKVSQSTSSLVDTSVSATSRPRMRKKLKMLNIAKKILRIQKETPTLQRKEPPPAVLEADLTEGDLANSHL

SEQ ID NO: 61440 - protein, 267 aa, Homo sapiens
  Payload ID: 12270
  Gene Symbol: PNPLA6
  Gene Name: patatin-like phospholipase domain containing 6
  ENSP ID: ENSP00000472456
  MOD_RES (1)..(1): Any amino acid
XADLTEGDLANSHLPSEVLYMLKNVRVLGHFEKPLFLELCRHMVFQRLGQGDYVFRPGQPDASIYVVQDGLLELCLPGPDGKECVVKEVVPGDSVNSLLSILDVITGHQHPQRTVSARAARDSTVLRLPVEAFSAVFTKYPESLVRVVQIIMVRLQRVTFLALHNYLGLTNELFSHEIQPLRLFPSPGLPTRTSPVRGSKRMVSTSATDEPRETPGRPPDPTGAPLPGPTGLQGGPRSDFDMAYERGRISVSLQEEASGGSLAAPAR

SEQ ID NO: 61441 - protein, 153 aa, Homo sapiens
  Payload ID: 12270
  Gene Symbol: PNPLA6
  Gene Name: patatin-like phospholipase domain containing 6
  ENSP ID: ENSP00000472572
MEAPLQTGMVLGVMIGAGVAVVVTAVLILLVVRRLRVPKTPAPDGPRYRFRKRDKVLFYGRKIMRKVSQSTSSLVDTSVSATSRPRMRKKLKMLNIAKKILRIQKETPTLQRKEPPPAVLEADLTEGDLANSHLPSEVLYMLKNVRVLGHFEK

SEQ ID NO: 61442 - protein, 181 aa, Homo sapiens
  Payload ID: 12270
  Gene Symbol: PNPLA6
  Gene Name: patatin-like phospholipase domain containing 6
  ENSP ID: ENSP00000472631
MEAPLQTGMVLGVMIGAGVAVVVTAVLILLVVRRLRVPKTPAPDGPRYRFRKRDKVLFYGRKIMRKVSQSTSSLVDTSVSATSRPRMRKKLKMLNIAKKILRIQKETPTLQRKEPPPAVLEADLTEGDLANSHLPSEVLYMLKNVRVLGHFEKPLFLELCRHMVFQRLGQGDYVFRPGQPD

SEQ ID NO: 61443 - protein, 1365 aa, Homo sapiens
  Payload ID: 12270
  Gene Symbol: PNPLA6
  Gene Name: patatin-like phospholipase domain containing 6
  Uniprot ID: Q8IY17
  ENSP ID: ENSP00000473211
MGTSSHGLATNSSGAKVAERDGFQDVLAPGEGSAGRICGAQPVPFVPQVLGVMIGAGVAVVVTAVLILLVVRRLRVPKTPAPDGPRYRFRKRDKVLFYGRKIMRKVSQSTSSLVDTSVSATSRPRMRKKLKMLNIAKKILRIQKETPTLQRKEPPPAVLEADLTEGDLANSHLPSEVLYMLKNVRVLGHFEKPLFLELCRHMVFQRLGQGDYVFRPGQPDASIYVVQDGLLELCLPGPDGKECVVKEVVPGDSVNSLLSILDVITGHQHPQRTVSARAARDSTVLRLPVEAFSAVFTKYPESLVRVVQIIMVRLQRVTFLALHNYLGLTNELFSHEIQPLRLFPSPGLPTRTSPVRGSKRMVSTSATDEPRETPGRPPDPTGAPLPGPTGDPVKPTSLETPSAPLLSRCVSMPGDISGLQGGPRSDFDMAYERGRISVSLQEEASGGSLAAPARTPTQEPREQPAGACEYSYCEDESATGGCPFGPYQGRQTSSIFEAAKQELAKLMRIEDPSLLNSRVLLHHAKAGTIIARQGDQDVSLHFVLWGCLHVYQRMIDKAEDVCLFVAQPGELVGQLAVLTGEPLIFTLRAQRDCTFLRISKSDFYEIMRAQPSVVLSAAHTVAARMSPFVRQMDFAIDWTAVEAGRALYRQGDRSDCTYIVLNGRLRSVIQRGSGKKELVGEYGRGDLIGVVEALTRQPRATTVHAVRDTELAKLPEGTLGHIKRRYPQVVTRLIHLLSQKILGNLQQLQGPFPGSGLGVPPHSELTNPASNLATVAILPVCAEVPMVAFTLELQHALQAIGPTLLLNSDIIRARLGASALDSIQEFRLSGWLAQQEDAHRIVLYQTDASLTPWTVRCLRQADCILIVGLGDQEPTLGQLEQMLENTAVRALKQLVLLHREEGAGPTRTVEWLNMRSWCSGHLHLRCPRRLFSRRSPAKLHELYEKVFSRRADRHSDFSRLARVLTGNTIALVLGGGGARGCSHIGVLKALEEAGVPVDLVGGTSIGSFIGALYAEERSASRTKQRAREWAKSMTSVLEPVLDLTYPVTSMFTGSAFNRSIHRVFQDKQIEDLWLPYFNVTTDITASAMRVHKDGSLWRYVRASMTLSGYLPPLCDPKDGHLLMDGGYINNLPADIARSMGAKTVIAIDVGSQDETDLSTYGDSLSGWWLLWKRLNPWADKVKVPDMAEIQSRLAYVSCVRQLEVVKSSSYCEYLRPPIDCFKTMDFGKFDQIYDVGYQYGKAVFGGWSRGNVIEKMLTDRRSTDLNESRRADVLAFPSSGFTDLAEIVSRIEPPTSYVSDGCADGEESDCLTEYEEDAGPDCSRDEGGSPEGASPSTASEMEEEKSILRQRRCLPQEPPGSATDA

SEQ ID NO: 61444 - protein, 1317 aa, Homo sapiens
  Payload ID: 12271
  Gene Symbol: PNPLA7
  Gene Name: patatin-like phospholipase domain containing 7
  Uniprot ID: Q6ZV29
  ENSP ID: ENSP00000277531
MEEEKDDSPQLTGIAVGALLALALVGVLILFMFRRLRQFRQAQPTPQYRFRKRDKVMFYGRKIMRKVTTLPNTLVENTALPRQRARKRTKVLSLAKRILRFKKEYPALQPKEPPPSLLEADLTEFDVKNSHLPSEVLYMLKNVRVLGHFEKPLFLELCKHIVFVQLQEGEHVFQPREPDPSICVVQDGRLEVCIQDTDGTEVVVKEVLAGDSVHSLLSILDIITGHAAPYKTVSVRAAIPSTILRLPAAAFHGVFEKYPETLVRVVQIIMVRLQRVTFLALHNYLGLTTELFNAESQAIPLVSVASVAAGKAKKQVFYGEEERLKKPPRLQESCDSDHGGGRPAAAGPLLKRSHSVPAPSIRKQILEELEKPGAGDPDPSAPQGGPGSATSDLGMACDRARVFLHSDEHPGSSVASKSRKSVMVAEIPSTVSQHSESHTDETLASRKSDAIFRAAKKDLLTLMKLEDSSLLDGRVALLHVPAGTVVSRQGDQDASILFVVSGLLHVYQRKIGSQEDTCLFLTRPGEMVGQLAVLTGEPLIFTVKANRDCSFLSISKAHFYEIMRKQPTVVLGVAHTVVKRMSSFVRQIDFALDWVEVEAGRAIYRQGDKSDCTYIMLSGRLRSVIRKDDGKKRLAGEYGRGDLVGVVETLTHQARATTVHAVRDSELAKLPAGALTSIKRRYPQVVTRLIHLLGEKILGSLQQGPVTGHQLGLPTEGSKWDLGNPAVNLSTVAVMPVSEEVPLTAFALELEHALSAIGPTLLLTSDNIKRRLGSAALDSVHEYRLSSWLGQQEDTHRIVLYQADGTLTPWTQRCVRQADCILIVGLGDQEPTVGELERMLESTAVRAQKQLILLHREEGPAPARTVEWLNMRSWCSGHLHLCCPRRVFSRRSLPKLVEMYKHVFQRPPDRHSDFSRLARVLTGNAIALVLGGGGARGCAQVGVLKALAECGIPVDMVGGTSIGAFVGALYSEERNYSQMRIRAKQWAEGMTSLMKAALDLTYPITSMFSGAGFNSSIFSVFKDQQIEDLWIPYFAITTDITASAMRVHTDGSLWWYVRASMSLSGYMPPLCDPKDGHLLMDGGYINNLPADVARSMGAKVVIAIDVGSRDETDLTNYGDALSGWWLLWKRWNPLATKVKVLNMAEIQTRLAYVCCVRQLEVVKSSDYCEYLRPPIDSYSTLDFGKFNEICEVGYQHGRTVFDIWGRSGVLEKMLRDQQGPSKKPASAVLTCPNASFTDLAEIVSRIEPAKPAMVDDESDYQTEYEEELLDVPRDAYADFQSTSAQQGSDLEDESSLRHRHPSLAFPKLSEGSSDQDG

SEQ ID NO: 61445 - protein, 1342 aa, Homo sapiens
  Payload ID: 12271
  Gene Symbol: PNPLA7
  Gene Name: patatin-like phospholipase domain containing 7
  Uniprot ID: Q6ZV29
  ENSP ID: ENSP00000384610
MEEEKDDSPQADFCLGTALHSWGLWFTEEGSPSTMLTGIAVGALLALALVGVLILFMFRRLRQFRQAQPTPQYRFRKRDKVMFYGRKIMRKVTTLPNTLVENTALPRQRARKRTKVLSLAKRILRFKKEYPALQPKEPPPSLLEADLTEFDVKNSHLPSEVLYMLKNVRVLGHFEKPLFLELCKHIVFVQLQEGEHVFQPREPDPSICVVQDGRLEVCIQDTDGTEVVVKEVLAGDSVHSLLSILDIITGHAAPYKTVSVRAAIPSTILRLPAAAFHGVFEKYPETLVRVVQIIMVRLQRVTFLALHNYLGLTTELFNAESQAIPLVSVASVAAGKAKKQVFYGEEERLKKPPRLQESCDSDHGGGRPAAAGPLLKRSHSVPAPSIRKQILEELEKPGAGDPDPSAPQGGPGSATSDLGMACDRARVFLHSDEHPGSSVASKSRKSVMVAEIPSTVSQHSESHTDETLASRKSDAIFRAAKKDLLTLMKLEDSSLLDGRVALLHVPAGTVVSRQGDQDASILFVVSGLLHVYQRKIGSQEDTCLFLTRPGEMVGQLAVLTGEPLIFTVKANRDCSFLSISKAHFYEIMRKQPTVVLGVAHTVVKRMSSFVRQIDFALDWVEVEAGRAIYRQGDKSDCTYIMLSGRLRSVIRKDDGKKRLAGEYGRGDLVGVVETLTHQARATTVHAVRDSELAKLPAGALTSIKRRYPQVVTRLIHLLGEKILGSLQQGPVTGHQLGLPTEGSKWDLGNPAVNLSTVAVMPVSEEVPLTAFALELEHALSAIGPTLLLTSDNIKRRLGSAALDSVHEYRLSSWLGQQEDTHRIVLYQADGTLTPWTQRCVRQADCILIVGLGDQEPTVGELERMLESTAVRAQKQLILLHREEGPAPARTVEWLNMRSWCSGHLHLCCPRRVFSRRSLPKLVEMYKHVFQRPPDRHSDFSRLARVLTGNAIALVLGGGGARGCAQVGVLKALAECGIPVDMVGGTSIGAFVGALYSEERNYSQMRIRAKQWAEGMTSLMKAALDLTYPITSMFSGAGFNSSIFSVFKDQQIEDLWIPYFAITTDITASAMRVHTDGSLWWYVRASMSLSGYMPPLCDPKDGHLLMDGGYINNLPADVARSMGAKVVIAIDVGSRDETDLTNYGDALSGWWLLWKRWNPLATKVKVLNMAEIQTRLAYVCCVRQLEVVKSSDYCEYLRPPIDSYSTLDFGKFNEICEVGYQHGRTVFDIWGRSGVLEKMLRDQQGPSKKPASAVLTCPNASFTDLAEIVSRIEPAKPAMVDDESDYQTEYEEELLDVPRDAYADFQSTSAQQGSDLEDESSLRHRHPSLAFPKLSEGSSDQDG

SEQ ID NO: 61446 - protein, 200 aa, Homo sapiens
  Payload ID: 12271
  Gene Symbol: PNPLA7
  Gene Name: patatin-like phospholipase domain containing 7
  ENSP ID: ENSP00000436165
MFRRLRQFRQAQPTPQYRFRKRDKVMFYGRKIMRKVTTLPNTLVENTALPRQRARKRTKVLSLAKRILRFKKEYPALQPKEPPPSLLEADLTEFDVKNSHLPSEVLYMLKNVRVLGHFEKPLFLELCKHIVFVQLQEGEHVFQPREPDPSICVVQDGRLEVCIQDTVPAALMAPQRCRPVAPLPWAGLSLRQAPRSQPQT

SEQ ID NO: 61447 - protein, 782 aa, Homo sapiens
  Payload ID: 12272
  Gene Symbol: PNPLA8
  Gene Name: patatin-like phospholipase domain containing 8
  Uniprot ID: Q9NP80
  ENSP ID: ENSP00000257694
MSINLTVDIYIYLLSNARSVCGKQRSKQLYFLFSPKHYWRISHISLQRGFHTNIIRCKWTKSEAHSCSKHCYSPSNHGLHIGILKLSTSAPKGLTKVNICMSRIKSTLNSVSKAVFGNQNEMISRLAQFKPSSQILRKVSDSGWLKQKNIKQAIKSLKKYSDKSAEKSPFPEEKSHIIDKEEDIGKRSLFHYTSSITTKFGDSFYFLSNHINSYFKRKEKMSQQKENEHFRDKSELEDKKVEEGKLRSPDPGILAYKPGSESVHTVDKPTSPSAIPDVLQVSTKQSIANFLSRPTEGVQALVGGYIGGLVPKLKYDSKSQSEEQEEPAKTDQAVSKDRNAEEKKRLSLQREKIIARVSIDNRTRALVQALRRTTDPKLCITRVEELTFHLLEFPEGKGVAVKERIIPYLLRLRQIKDETLQAAVREILALIGYVDPVKGRGIRILSIDGGGTRGVVALQTLRKLVELTQKPVHQLFDYICGVSTGAILAFMLGLFHMPLDECEELYRKLGSDVFSQNVIVGTVKMSWSHAFYDSQTWENILKDRMGSALMIETARNPTCPKVAAVSTIVNRGITPKAFVFRNYGHFPGINSHYLGGCQYKMWQAIRASSAAPGYFAEYALGNDLHQDGGLLLNNPSALAMHECKCLWPDVPLECIVSLGTGRYESDVRNTVTYTSLKTKLSNVINSATDTEEVHIMLDGLLPPDTYFRFNPVMCENIPLDESRNEKLDQLQLEGLKYIERNEQKMKKVAKILSQEKTTLQKINDWIKLKTDMYEGLPFFSKL

SEQ ID NO: 61448 - protein, 682 aa, Homo sapiens
  Payload ID: 12272
  Gene Symbol: PNPLA8
  Gene Name: patatin-like phospholipase domain containing 8
  Uniprot ID: Q9NP80
  ENSP ID: ENSP00000387789
MSRIKSTLNSVSKAVFGNQNEMISRLAQFKPSSQILRKVSDSGWLKQKNIKQAIKSLKKYSDKSAEKSPFPEEKSHIIDKEEDIGKRSLFHYTSSITTKFGDSFYFLSNHINSYFKRKEKMSQQKENEHFRDKSELEDKKVEEGKLRSPDPGILAYKPGSESVHTVDKPTSPSAIPDVLQVSTKQSIANFLSRPTEGVQALVGGYIGGLVPKLKYDSKSQSEEQEEPAKTDQAVSKDRNAEEKKRLSLQREKIIARVSIDNRTRALVQALRRTTDPKLCITRVEELTFHLLEFPEGKGVAVKERIIPYLLRLRQIKDETLQAAVREILALIGYVDPVKGRGIRILSIDGGGTRGVVALQTLRKLVELTQKPVHQLFDYICGVSTGAILAFMLGLFHMPLDECEELYRKLGSDVFSQNVIVGTVKMSWSHAFYDSQTWENILKDRMGSALMIETARNPTCPKVAAVSTIVNRGITPKAFVFRNYGHFPGINSHYLGGCQYKMWQAIRASSAAPGYFAEYALGNDLHQDGGLLLNNPSALAMHECKCLWPDVPLECIVSLGTGRYESDVRNTVTYTSLKTKLSNVINSATDTEEVHIMLDGLLPPDTYFRFNPVMCENIPLDESRNEKLDQLQLEGLKYIERNEQKMKKVAKILSQEKTTLQKINDWIKLKTDMYEGLPFFSKL

SEQ ID NO: 61449 - protein, 55 aa, Homo sapiens
  Payload ID: 12272
  Gene Symbol: PNPLA8
  Gene Name: patatin-like phospholipase domain containing 8
  ENSP ID: ENSP00000391872
MSINLTVDIYIYLLSNARSVCGKQRSKQLYFLFSPKHYWRISHISLQRGFHTNII

SEQ ID NO: 61450 - protein, 720 aa, Homo sapiens
  Payload ID: 12272
  Gene Symbol: PNPLA8
  Gene Name: patatin-like phospholipase domain containing 8
  Uniprot ID: Q9NP80
  ENSP ID: ENSP00000394988
MSINLTVDIYIYLLSNARSVCGKQRSKQLYFLFSPKHYWRISHISLQRGFHTNIIRCKWTKSEAHSCSKHCYSPSNHGLHIGILKLSTSAPKGLTKVNICMSRIKSTLNSVSKAVFGNQNEMISRLAQFKPSSQILRKVSDSGWLKQKNIKQAIKSLKKYSDKSAEKSPFPEEKSHIIDKEEDIGKRSLFHYTSSITTKFGDSFYFLSNHINSYFKRKEKMSQQKENEHFRDKSELEDKKVEEGKLRSPDPGILAYKPGSESVHTVDKPTSPSAIPDVLQVSTKQSIANFLSRPTEGVQALVGGYIGGLVPKLKYDSKSQSEEQEEPAKTDQAVSKDRNAEEKKRLSLQREKIIARVSIDNRTRALVQALRRTTDPKLCITRVEELTFHLLEFPEGKGVAVKERIIPYLLRLRQIKDETLQAAVREILALIGYVDPVKGRGIRILSIDGGGTRGVVALQTLRKLVELTQKPVHQLFDYICGVSTGAILAFMLGLFHMPLDECEELYRKLGSDVFSQNVIVGTVKMSWSHAFYDSQTWENILKDRMGSALMIETARNPTCPKVAADGGLLLNNPSALAMHECKCLWPDVPLECIVSLGTGRYESDVRNTVTYTSLKTKLSNVINSATDTEEVHIMLDGLLPPDTYFRFNPVMCENIPLDESRNEKLDQLQLEGLKYIERNEQKMKKVAKILSQEKTTLQKINDWIKLKTDMYEGLPFFSKL

SEQ ID NO: 61451 - protein, 639 aa, Homo sapiens
  Payload ID: 12272
  Gene Symbol: PNPLA8
  Gene Name: patatin-like phospholipase domain containing 8
  ENSP ID: ENSP00000402274
MSRIKSTLNSVSKAVFGNQNEMISRLAQFKPSSQILRKVSDSGWLKQKNIKQAIKSLKKYSDKSAEKSPFPEEKSHIIDKEEDIGKRSLFHYTSSITTKFGDSFYFLSNHINSYFKRKEKMSQQKENEHFRDKSELEDKKVEEGKLRSPDPGILAYKPGSESVHTVDKPTSPSAIPDVLQVSTKQSIANFLSRPTEGVQALVGGYIGGLVPKLKYDSKSQSEEQEEPAKTDQAVSKDRNAEEKKRLSLQREKIIARVSIDNRTRALVQALRRTTDPKLCITRVEELTFHLLEFPEGKGVAVKERIIPYLLRLRQIKDETLQAAVREILALIGYVDPVKGRGIRILSIDGGGTRGVVALQTLRKLVELTQKPVHQLFDYICGVSTGAILAFMLGLFHMPLDECEELYRKLGSDVFSQNVIVGTVKMSWSHAFYDSQTWENILKDRMGSALMIETARNPTCPKVAAVSTIVNRGITPKAFVFRNYGHFPGINSHYLGGCQYKMWQAIRASSAAPGYFAEYALGNDLHQDGGLLLNNPSALAMHECKCLWPDVPLECIVSLGTGRYESDVRNTVTYTSLKTKLSNVINSATDTEEVHIMLDGLLPPDTYFRFNPVMCENIPLDESRNEKLDQLQLEGLKYIE

SEQ ID NO: 61452 - protein, 192 aa, Homo sapiens
  Payload ID: 12272
  Gene Symbol: PNPLA8
  Gene Name: patatin-like phospholipase domain containing 8
  ENSP ID: ENSP00000406033
MSINLTVDIYIYLLSNARSVCGKQRSKQLYFLFSPKHYWRISHISLQRGFHTNIIRCKWTKSEAHSCSKHCYSPSNHGLHIGILKLSTSAPKGLTKVNICMSRIKSTLNSVSKAVFGNQNEMISRLAQFKPSSQILRKVSDSGWLKQKNIKQAIKSLKKYSDKSAEKSPFPEEKSHIIDKEEDIGKRSLFHY

SEQ ID NO: 61453 - protein, 782 aa, Homo sapiens; identical to SEQ ID NO: 61447
  Payload ID: 12272
  Gene Symbol: PNPLA8
  Gene Name: patatin-like phospholipase domain containing 8
  Uniprot ID: Q9NP80
  ENSP ID: ENSP00000406779

SEQ ID NO: 61454 - protein, 782 aa, Homo sapiens; identical to SEQ ID NO: 61447
  Payload ID: 12272
  Gene Symbol: PNPLA8
  Gene Name: patatin-like phospholipase domain containing 8
  Uniprot ID: Q9NP80
  ENSP ID: ENSP00000410804

SEQ ID NO: 61455 - protein, 1447 aa, Homo sapiens
  Payload ID: 12273
  Gene Symbol: PTCH1
  Gene Name: patched 1
  Uniprot ID: Q13635
  ENSP ID: ENSP00000332353
MASAGNAAEPQDRGGGGSGCIGAPGRPAGGGRRRRTGGLRRAAAPDRDYLHRPSYCDAAFALEQISKGKATGRKAPLWLRAKFQRLLFKLGCYIQKNCGKFLVVGLLIFGAFAVGLKAANLETNVEELWVEVGGRVSRELNYTRQKIGEEAMFNPQLMIQTPKEEGANVLTTEALLQHLDSALQASRVHVYMYNRQWKLEHLCYKSGELITETGYMDQIIEYLYPCLIITPLDCFWEGAKLQSGTAYLLGKPPLRWTNFDPLEFLEELKKINYQVDSWEEMLNKAEVGHGYMDRPCLNPADPDCPATAPNKNSTKPLDMALVLNGGCHGLSRKYMHWQEELIVGGTVKNSTGKLVSAHALQTMFQLMTPKQMYEHFKGYEYVSHINWNEDKAAAILEAWQRTYVEVVHQSVAQNSTQKVLSFTTTTLDDILKSFSDVSVIRVASGYLLMLAYACLTMLRWDCSKSQGAVGLAGVLLVALSVAAGLGLCSLIGISFNAATTQVLPFLALGVGVDDVFLLAHAFSETGQNKRIPFEDRTGECLKRTGASVALTSISNVTAFFMAALIPIPALRAFSLQAAVVVVFNFAMVLLIFPAILSMDLYRREDRRLDIFCCFTSPCVSRVIQVEPQAYTDTHDNTRYSPPPPYSSHSFAHETQITMQSTVQLRTEYDPHTHVYYTTAEPRSEISVQPVTVTQDTLSCQSPESTSSTRDLLSQFSDSSLHCLEPPCTKWTLSSFAEKHYAPFLLKPKAKVVVIFLFLGLLGVSLYGTTRVRDGLDLTDIVPRETREYDFIAAQFKYFSFYNMYIVTQKADYPNIQHLLYDLHRSFSNVKYVMLEENKQLPKMWLHYFRDWLQGLQDAFDSDWETGKIMPNNYKNGSDDGVLAYKLLVQTGSRDKPIDISQLTKQRLVDADGIINPSAFYIYLTAWVSNDPVAYAASQANIRPHRPEWVHDKADYMPETRLRIPAAEPIEYAQFPFYLNGLRDTSDFVEAIEKVRTICSNYTSLGLSSYPNGYPFLFWEQYIGLRHWLLLFISVVLACTFLVCAVFLLNPWTAGIIVMVLALMTVELFGMMGLIGIKLSAVPVVILIASVGIGVEFTVHVALAFLTAIGDKNRRAVLALEHMFAPVLDGAVSTLLGVLMLAGSEFDFIVRYFFAVLAILTILGVLNGLVLLPVLLSFFGPYPEVSPANGLNRLPTPSPEPPPSVVRFAMPPGHTHSGSDSSDSEYSSQTTVSGLSEELRHYEAQQGAGGPAHQVIVEATENPVFAHSTVVHPESRHHPPSNPRQQPHLDSGSLPPGRQGQQPRRDPPREGLWPPPYRPRRDAFEISTEGHSGPSNRARWGPRGARSHNPRNPASTAMGSSVPGYCQPITTVTASASVTVAVHPPPVPGPGRNPRGGLCPGYPETDHGLFEDPHVPFHVRCERRDSKVEVIELQDVECEERPRGSSSN

SEQ ID NO: 61456 - protein, 352 aa, Homo sapiens
  Payload ID: 12273
  Gene Symbol: PTCH1
  Gene Name: patched 1
  ENSP ID: ENSP00000364420
KAEVGHGYMDRPCLNPADPDCPATAPNKNSTKPLDMALVLNGGCHGLSRKYMHWQEELIVGGTVKNSTGKLVSAHALQTMFQLMTPKQMYEHFKGYEYVSHINWNEDKAAAILEAWQRTYVEVVHQSVAQNSTQKVLSFTTTTLDDILKSFSDVSVIRVASGYLLMVLPFLALGVGVDDVFLLAHAFSETGQNKRIPFEDRTGECLKRTGASVALTSISNVTAFFMAALIPIPALRAFSLQAAVVVVFNFAMVLLIFPAILSMDLYRREDRRLDIFCCFTSPCVSRVIQVEPQAYTDTHDNTRYSPPPPYSSHSFAHETQITMQSTVQLRTEYDPHTHVYYTTAEPRSEISV

SEQ ID NO: 61457 - protein, 1446 aa, Homo sapiens
  Payload ID: 12273
  Gene Symbol: PTCH1
  Gene Name: patched 1
  Uniprot ID: Q13635
  ENSP ID: ENSP00000364423
MELLNRNRLVIVSPRCTPPKASGGPARRGFYTFRSFCKDGGGGEEEEENGGEEKDDRGDKETRSDKGKATGRKAPLWLRAKFQRLLFKLGCYIQKNCGKFLVVGLLIFGAFAVGLKAANLETNVEELWVEVGGRVSRELNYTRQKIGEEAMFNPQLMIQTPKEEGANVLTTEALLQHLDSALQASRVHVYMYNRQWKLEHLCYKSGELITETGYMDQIIEYLYPCLIITPLDCFWEGAKLQSGTAYLLGKPPLRWTNFDPLEFLEELKKINYQVDSWEEMLNKAEVGHGYMDRPCLNPADPDCPATAPNKNSTKPLDMALVLNGGCHGLSRKYMHWQEELIVGGTVKNSTGKLVSAHALQTMFQLMTPKQMYEHFKGYEYVSHINWNEDKAAAILEAWQRTYVEVVHQSVAQNSTQKVLSFTTTTLDDILKSFSDVSVIRVASGYLLMLAYACLTMLRWDCSKSQGAVGLAGVLLVALSVAAGLGLCSLIGISFNAATTQVLPFLALGVGVDDVFLLAHAFSETGQNKRIPFEDRTGECLKRTGASVALTSISNVTAFFMAALIPIPALRAFSLQAAVVVVFNFAMVLLIFPAILSMDLYRREDRRLDIFCCFTSPCVSRVIQVEPQAYTDTHDNTRYSPPPPYSSHSFAHETQITMQSTVQLRTEYDPHTHVYYTTAEPRSEISVQPVTVTQDTLSCQSPESTSSTRDLLSQFSDSSLHCLEPPCTKWTLSSFAEKHYAPFLLKPKAKVVVIFLFLGLLGVSLYGTTRVRDGLDLTDIVPRETREYDFIAAQFKYFSFYNMYIVTQKADYPNIQHLLYDLHRSFSNVKYVMLEENKQLPKMWLHYFRDWLQGLQDAFDSDWETGKIMPNNYKNGSDDGVLAYKLLVQTGSRDKPIDISQLTKQRLVDADGIINPSAFYIYLTAWVSNDPVAYAASQANIRPHRPEWVHDKADYMPETRLRIPAAEPIEYAQFPFYLNGLRDTSDFVEAIEKVRTICSNYTSLGLSSYPNGYPFLFWEQYIGLRHWLLLFISVVLACTFLVCAVFLLNPWTAGIIVMVLALMTVELFGMMGLIGIKLSAVPVVILIASVGIGVEFTVHVALAFLTAIGDKNRRAVLALEHMFAPVLDGAVSTLLGVLMLAGSEFDFIVRYFFAVLAILTILGVLNGLVLLPVLLSFFGPYPEVSPANGLNRLPTPSPEPPPSVVRFAMPPGHTHSGSDSSDSEYSSQTTVSGLSEELRHYEAQQGAGGPAHQVIVEATENPVFAHSTVVHPESRHHPPSNPRQQPHLDSGSLPPGRQGQQPRRDPPREGLWPPPYRPRRDAFEISTEGHSGPSNRARWGPRGARSHNPRNPASTAMGSSVPGYCQPITTVTASASVTVAVHPPPVPGPGRNPRGGLCPGYPETDHGLFEDPHVPFHVRCERRDSKVEVIELQDVECEERPRGSSSN

SEQ ID NO: 61458 - protein, 486 aa, Homo sapiens
  Payload ID: 12273
  Gene Symbol: PTCH1
  Gene Name: patched 1
  ENSP ID: ENSP00000364439
GKATGRKAPLWLRAKFQRLLFKLGCYIQKNCGKFLVVGLLIFGAFAVGLKAANLETNVEELWVEVGGRVSRELNYTRQKIGEEAMFNPQLMIQTPKEEGANVLTTEALLQHLDSALQASRVHVYMYNRGKPPLRWTNFDPLEFLEELKKINYQVDSWEEMLNKAEVGHGYMDRPCLNPADPDCPATAPNKNSTKPLDMALVLNGGCHGLSRKYMHWQEELIVGGTVKNSTGKLVSAHALQTMFQLMTPKQMYEHFKGYEYVSHINWNEDKAAAILEAWQRTYVEVVHQSVAQNSTQKVLSFTTTTLDDILKSFSDVSVIRVASGYLLMLAYACLTMLRWDCSKSQGAVGLAGVLLVALSVAAGLGLCSLIGISFNAATTQVLPFLALGVGVDDVFLLAHAFSETGQNKRIPFEDRTGECLKRTGASVALTSISNVTAFFMAALIPIPALRAFSLQYILMAHRGRLSFNDTLWCGGLKSYMRFPYEE

SEQ ID NO: 61459 - protein, 1381 aa, Homo sapiens
  Payload ID: 12273
  Gene Symbol: PTCH1
  Gene Name: patched 1
  Uniprot ID: Q13635
  ENSP ID: ENSP00000389744
MGKATGRKAPLWLRAKFQRLLFKLGCYIQKNCGKFLVVGLLIFGAFAVGLKAANLETNVEELWVEVGGRVSRELNYTRQKIGEEAMFNPQLMIQTPKEEGANVLTTEALLQHLDSALQASRVHVYMYNRQWKLEHLCYKSGELITETGYMDQIIEYLYPCLIITPLDCFWEGAKLQSGTAYLLGKPPLRWTNFDPLEFLEELKKINYQVDSWEEMLNKAEVGHGYMDRPCLNPADPDCPATAPNKNSTKPLDMALVLNGGCHGLSRKYMHWQEELIVGGTVKNSTGKLVSAHALQTMFQLMTPKQMYEHFKGYEYVSHINWNEDKAAAILEAWQRTYVEVVHQSVAQNSTQKVLSFTTTTLDDILKSFSDVSVIRVASGYLLMLAYACLTMLRWDCSKSQGAVGLAGVLLVALSVAAGLGLCSLIGISFNAATTQVLPFLALGVGVDDVFLLAHAFSETGQNKRIPFEDRTGECLKRTGASVALTSISNVTAFFMAALIPIPALRAFSLQAAVVVVFNFAMVLLIFPAILSMDLYRREDRRLDIFCCFTSPCVSRVIQVEPQAYTDTHDNTRYSPPPPYSSHSFAHETQITMQSTVQLRTEYDPHTHVYYTTAEPRSEISVQPVTVTQDTLSCQSPESTSSTRDLLSQFSDSSLHCLEPPCTKWTLSSFAEKHYAPFLLKPKAKVVVIFLFLGLLGVSLYGTTRVRDGLDLTDIVPRETREYDFIAAQFKYFSFYNMYIVTQKADYPNIQHLLYDLHRSFSNVKYVMLEENKQLPKMWLHYFRDWLQGLQDAFDSDWETGKIMPNNYKNGSDDGVLAYKLLVQTGSRDKPIDISQLTKQRLVDADGIINPSAFYIYLTAWVSNDPVAYAASQANIRPHRPEWVHDKADYMPETRLRIPAAEPIEYAQFPFYLNGLRDTSDFVEAIEKVRTICSNYTSLGLSSYPNGYPFLFWEQYIGLRHWLLLFISVVLACTFLVCAVFLLNPWTAGIIVMVLALMTVELFGMMGLIGIKLSAVPVVILIASVGIGVEFTVHVALAFLTAIGDKNRRAVLALEHMFAPVLDGAVSTLLGVLMLAGSEFDFIVRYFFAVLAILTILGVLNGLVLLPVLLSFFGPYPEVSPANGLNRLPTPSPEPPPSVVRFAMPPGHTHSGSDSSDSEYSSQTTVSGLSEELRHYEAQQGAGGPAHQVIVEATENPVFAHSTVVHPESRHHPPSNPRQQPHLDSGSLPPGRQGQQPRRDPPREGLWPPPYRPRRDAFEISTEGHSGPSNRARWGPRGARSHNPRNPASTAMGSSVPGYCQPITTVTASASVTVAVHPPPVPGPGRNPRGGLCPGYPETDHGLFEDPHVPFHVRCERRDSKVEVIELQDVECEERPRGSSSN

SEQ ID NO: 61460 - protein, 1296 aa, Homo sapiens
  Payload ID: 12273
  Gene Symbol: PTCH1
  Gene Name: patched 1
  Uniprot ID: Q13635
  ENSP ID: ENSP00000396135
MFNPQLMIQTPKEEGANVLTTEALLQHLDSALQASRVHVYMYNRQWKLEHLCYKSGELITETGYMDQIIEYLYPCLIITPLDCFWEGAKLQSGTAYLLGKPPLRWTNFDPLEFLEELKKINYQVDSWEEMLNKAEVGHGYMDRPCLNPADPDCPATAPNKNSTKPLDMALVLNGGCHGLSRKYMHWQEELIVGGTVKNSTGKLVSAHALQTMFQLMTPKQMYEHFKGYEYVSHINWNEDKAAAILEAWQRTYVEVVHQSVAQNSTQKVLSFTTTTLDDILKSFSDVSVIRVASGYLLMLAYACLTMLRWDCSKSQGAVGLAGVLLVALSVAAGLGLCSLIGISFNAATTQVLPFLALGVGVDDVFLLAHAFSETGQNKRIPFEDRTGECLKRTGASVALTSISNVTAFFMAALIPIPALRAFSLQAAVVVVFNFAMVLLIFPAILSMDLYRREDRRLDIFCCFTSPCVSRVIQVEPQAYTDTHDNTRYSPPPPYSSHSFAHETQITMQSTVQLRTEYDPHTHVYYTTAEPRSEISVQPVTVTQDTLSCQSPESTSSTRDLLSQFSDSSLHCLEPPCTKWTLSSFAEKHYAPFLLKPKAKVVVIFLFLGLLGVSLYGTTRVRDGLDLTDIVPRETREYDFIAAQFKYFSFYNMYIVTQKADYPNIQHLLYDLHRSFSNVKYVMLEENKQLPKMWLHYFRDWLQGLQDAFDSDWETGKIMPNNYKNGSDDGVLAYKLLVQTGSRDKPIDISQLTKQRLVDADGIINPSAFYIYLTAWVSNDPVAYAASQANIRPHRPEWVHDKADYMPETRLRIPAAEPIEYAQFPFYLNGLRDTSDFVEAIEKVRTICSNYTSLGLSSYPNGYPFLFWEQYIGLRHWLLLFISVVLACTFLVCAVFLLNPWTAGIIVMVLALMTVELFGMMGLIGIKLSAVPVVILIASVGIGVEFTVHVALAFLTAIGDKNRRAVLALEHMFAPVLDGAVSTLLGVLMLAGSEFDFIVRYFFAVLAILTILGVLNGLVLLPVLLSFFGPYPEVSPANGLNRLPTPSPEPPPSVVRFAMPPGHTHSGSDSSDSEYSSQTTVSGLSEELRHYEAQQGAGGPAHQVIVEATENPVFAHSTVVHPESRHHPPSNPRQQPHLDSGSLPPGRQGQQPRRDPPREGLWPPPYRPRRDAFEISTEGHSGPSNRARWGPRGARSHNPRNPASTAMGSSVPGYCQPITTVTASASVTVAVHPPPVPGPGRNPRGGLCPGYPETDHGLFEDPHVPFHVRCERRDSKVEVIELQDVECEERPRGSSSN

SEQ ID NO: 61461 - protein, 1296 aa, Homo sapiens; identical to SEQ ID NO: 61460
  Payload ID: 12273
  Gene Symbol: PTCH1
  Gene Name: patched 1
  Uniprot ID: Q13635
  ENSP ID: ENSP00000399981

SEQ ID NO: 61462 - protein, 1381 aa, Homo sapiens; identical to SEQ ID NO: 61459
  Payload ID: 12273
  Gene Symbol: PTCH1
  Gene Name: patched 1
  Uniprot ID: Q13635
  ENSP ID: ENSP00000410287

SEQ ID NO: 61463 - protein, 1296 aa, Homo sapiens; identical to SEQ ID NO: 61460
  Payload ID: 12273
  Gene Symbol: PTCH1
  Gene Name: patched 1
  Uniprot ID: Q13635
  ENSP ID: ENSP00000414823

SEQ ID NO: 61464 - protein, 174 aa, Homo sapiens
  Payload ID: 12273
  Gene Symbol: PTCH1
  Gene Name: patched 1
  ENSP ID: ENSP00000447008
MFNPQLMIQTPKEEGANVLTTEALLQHLDSALQASRVHVYMYNRQWKLEHLCYKSGELITETGYMDQIIEYLYPCLIITPLDCFWEGAKLQSGTAYLLGKPPLRWTNFDPLEFLEELKKINYQVDSWEEMLNKAEVGHGYMDRPCLNPADPDCPATAPNKNSTKPLDMALVLNG

SEQ ID NO: 61465 - protein, 16 aa, Homo sapiens
  Payload ID: 12273
  Gene Symbol: PTCH1
  Gene Name: patched 1
  ENSP ID: ENSP00000447242
DDRGDKETRSDKLEDE

SEQ ID NO: 61466 - protein, 174 aa, Homo sapiens; identical to SEQ ID NO: 61464
  Payload ID: 12273
  Gene Symbol: PTCH1
  Gene Name: patched 1
  ENSP ID: ENSP00000447797

SEQ ID NO: 61467 - protein, 174 aa, Homo sapiens; identical to SEQ ID NO: 61464
  Payload ID: 12273
  Gene Symbol: PTCH1
  Gene Name: patched 1
  ENSP ID: ENSP00000447878

SEQ ID NO: 61468 - protein, 174 aa, Homo sapiens; identical to SEQ ID NO: 61464
  Payload ID: 12273
  Gene Symbol: PTCH1
  Gene Name: patched 1
  ENSP ID: ENSP00000448843

SEQ ID NO: 61469 - protein, 66 aa, Homo sapiens
  Payload ID: 12273
  Gene Symbol: PTCH1
  Gene Name: patched 1
  ENSP ID: ENSP00000449078
MLNKAEVGHGYMDRPCLNPADPDCPATAPNKNSTKPLDMALVLNGGCHGLSRKYMHWQEELIVGGT

SEQ ID NO: 61470 - protein, 183 aa, Homo sapiens
  Payload ID: 12273
  Gene Symbol: PTCH1
  Gene Name: patched 1
  ENSP ID: ENSP00000449745
MGKATGRKAPLWLRAKFQRLLFKLGCYIQKNCGKFLVVGLLIFGAFAVGLKAANLETNVEELWVEVGGRVSRELNYTRQKIGEEAMFNPQLMIQTPKEEGANVLTTEALLQHLDSALQASRVHVYMYNRQWKLEHLCYKSGELITETGYMDQIIEYLYPCLIITPLDCFWEGAKLQSGTAYLL

SEQ ID NO: 61471 - protein, 79 aa, Homo sapiens
  Payload ID: 12273
  Gene Symbol: PTCH1
  Gene Name: patched 1
  ENSP ID: ENSP00000450047
MFNPQLMIQTPKEEGANVLTTEALLQHLDSALQASRVHVYMYNSEKFLSLLFILLGSGNWNICVTNQESLSQKQVTWIR

SEQ ID NO: 61472 - protein, 92 aa, Homo sapiens
  Payload ID: 12273
  Gene Symbol: PTCH1
  Gene Name: patched 1
  ENSP ID: ENSP00000450131
MFNPQLMIQTPKEEGANVLTTEALLQHLDSALQASRVHVYMYNRQWKLEHLCYKSGELITETGYMDQIIEYLYPCLIITPLDCFWEGAKLQS

SEQ ID NO: 61473 - protein, 1203 aa, Homo sapiens
  Payload ID: 12274
  Gene Symbol: PTCH2
  Gene Name: patched 2
  Uniprot ID: Q9Y6C5
  ENSP ID: ENSP00000361266
MTRSPPLRELPPSYTPPARTAAPQILAGSLKAPLWLRAYFQGLLFSLGCGIQRHCGKVLFLGLLAFGALALGLRMAIIETNLEQLWVEVGSRVSQELHYTKEKLGEEAAYTSQMLIQTARQEGENILTPEALGLHLQAALTASKVQVSLYGKSWDLNKICYKSGVPLIENGMIERMIEKLFPCVILTPLDCFWEGAKLQGGSAYLPGRPDIQWTNLDPEQLLEELGPFASLEGFRELLDKAQVGQAYVGRPCLHPDDLHCPPSAPNHHSRQAPNVAHELSGGCHGFSHKFMHWQEELLLGGMARDPQGELLRAEALQSTFLLMSPRQLYEHFRGDYQTHDIGWSEEQASTVLQAWQRRFVQLAQEALPENASQQIHAFSSTTLDDILHAFSEVSAARVVGGYLLMLAYACVTMLRWDCAQSQGSVGLAGVLLVALAVASGLGLCALLGITFNAATTQVLPFLALGIGVDDVFLLAHAFTEALPGTPLQERMGECLQRTGTSVVLTSINNMAAFLMAALVPIPALRAFSLQAAIVVGCTFVAVMLVFPAILSLDLRRRHCQRLDVLCCFSSPCSAQVIQILPQELGDGTVPVGIAHLTATVQAFTHCEASSQHVVTILPPQAHLVPPPSDPLGSELFSPGGSTRDLLGQEEETRQKAACKSLPCARWNLAHFARYQFAPLLLQSHAKAIVLVLFGALLGLSLYGATLVQDGLALTDVVPRGTKEHAFLSAQLRYFSLYEVALVTQGGFDYAHSQRALFDLHQRFSSLKAVLPPPATQAPRTWLHYYRNWLQGIQAAFDQDWASGRITRHSYRNGSEDGALAYKLLIQTGDAQEPLDFSQLTTRKLVDREGLIPPELFYMGLTVWVSSDPLGLAASQANFYPPPPEWLHDKYDTTGENLRIPPAQPLEFAQFPFLLRGLQKTADFVEAIEGARAACAEAGQAGVHAYPSGSPFLFWEQYLGLRRCFLLAVCILLVCTFLVCALLLLNPWTAGLIVLVLAMMTVELFGIMGFLGIKLSAIPVVILVASVGIGVEFTVHVALGFLTTQGSRNLRAAHALEHTFAPVTDGAISTLLGLLMLAGSHFDFIVRYFFAALTVLTLLGLLHGLVLLPVLLSILGPPPEVIQMYKESPEILSPPAPQGGGLRWGASSSLPQSFARVTTSMTVAIHPPPLPGAYIHPAPDEPPWSPAATSSGNLSSRGPGPATG

SEQ ID NO: 61474 - protein, 1146 aa, Homo sapiens
  Payload ID: 12274
  Gene Symbol: PTCH2
  Gene Name: patched 2
  Uniprot ID: Q9Y6C5
  ENSP ID: ENSP00000389703
MTRSPPLRELPPSYTPPARTAAPQILAGSLKAPLWLRAYFQGLLFSLGCGIQRHCGKVLFLGLLAFGALALGLRMAIIETNLEQLWVEVGSRVSQELHYTKEKLGEEAAYTSQMLIQTARQEGENILTPEALGLHLQAALTASKVQVSLYGKSWDLNKICYKSGVPLIENGMIERMIEKLFPCVILTPLDCFWEGAKLQGGSAYLPGRPDIQWTNLDPEQLLEELGPFASLEGFRELLDKAQVGQAYVGRPCLHPDDLHCPPSAPNHHSRQAPNVAHELSGGCHGFSHKFMHWQEELLLGGMARDPQGELLRAEALQSTFLLMSPRQLYEHFRGDYQTHDIGWSEEQASTVLQAWQRRFVQLAQEALPENASQQIHAFSSTTLDDILHAFSEVSAARVVGGYLLMLAYACVTMLRWDCAQSQGSVGLAGVLLVALAVASGLGLCALLGITFNAATTQVLPFLALGIGVDDVFLLAHAFTEALPGTPLQERMGECLQRTGTSVVLTSINNMAAFLMAALVPIPALRAFSLQAAIVVGCTFVAVMLVFPAILSLDLRRRHCQRLDVLCCFSSPCSAQVIQILPQELGDGTVPVGIAHLTATVQAFTHCEASSQHVVTILPPQAHLVPPPSDPLGSELFSPGGSTRDLLGQEEETRQKAACKSLPCARWNLAHFARYQFAPLLLQSHAKAIVLVLFGALLGLSLYGATLVQDGLALTDVVPRGTKEHAFLSAQLRYFSLYEVALVTQGGFDYAHSQRALFDLHQRFSSLKAVLPPPATQAPRTWLHYYRNWLQGIQAAFDQDWASGRITRHSYRNGSEDGALAYKLLIQTGDAQEPLDFSQLTTRKLVDREGLIPPELFYMGLTVWVSSDPLGLAASQANFYPPPPEWLHDKYDTTGENLRIPPAQPLEFAQFPFLLRGLQKTADFVEAIEGARAACAEAGQAGVHAYPSGSPFLFWEQYLGLRRCFLLAVCILLVCTFLVCALLLLNPWTAGLIVLVLAMMTVELFGIMGFLGIKLSAIPVVILVASVGIGVEFTVHVALGFLTTQGSRNLRAAHALEHTFAPVTDGAISTLLGLLMLAGSHFDFIVRYFFAALTVLTLLGLLHGLVLLPVLLSILGPPPEVIQMYKESPEILSPPAPQGGGLRPEEI

SEQ ID NO: 61475 - protein, 88 aa, Homo sapiens
  Payload ID: 12274
  Gene Symbol: PTCH2
  Gene Name: patched 2
  ENSP ID: ENSP00000413169
  MOD_RES (1)..(1): Any amino acid
XFDFIVRYFFAALTVLTLLGLLHGLVLLPVLLSILGPPPEVIQMYKESPEILSPPAPQGGGLRVGSLQVNISYWKELLWCQDLRPEEI

SEQ ID NO: 61476 - protein, 888 aa, Homo sapiens
  Payload ID: 12275
  Gene Symbol: PTCHD1
  Gene Name: patched domain containing 1
  Uniprot ID: Q96NR3
  ENSP ID: ENSP00000368666
MLRQVLHRGLRTCFSRLGHFIASHPVFFASAPVLISILLGASFSRYQVEESVEHLLAPQHSLAKIERNLVNSLFPVNRSKHRLYSDLQTPGRYGRVIVTSFQKANMLDQHHTDLILKLHAAVTKIQVPRPGFNYTFAHICILNNDKTCIVDDIVHVLEELKNARATNRTNFAITYPITHLKDGRAVYNGHQLGGVTVHSKDRVKSAEAIQLTYYLQSINSLNDMVAERWESSFCDTVRLFQKSNSKVKMYPYTSSSLREDFQKTSRVSERYLVTSLILVVTMAILCCSMQDCVRSKPWLGLLGLVTISLATLTAAGIINLTGGKYNSTFLGVPFVMLGHGLYGTFEMLSSWRKTREDQHVKERTAAVYADSMLSFSLTTAMYLVTFGIGASPFTNIEAARIFCCNSCIAIFFNYLYVLSFYGSSLVFTGYIENNYQHSIFCRKVPKPEALQEKPAWYRFLLTARFSEDTAEGEEANTYESHLLVCFLKRYYCDWITNTYVKPFVVLFYLIYISFALMGYLQVSEGSDLSNIVATATQTIEYTTAQQKYFSNYSPVIGFYIYESIEYWNTSVQEDVLEYTKGFVRISWFESYLNYLRKLNVSTGLPKKNFTDMLRNSFLKAPQFSHFQEDIIFSKKYNDEVDVVASRMFLVAKTMETNREELYDLLETLRRLSVTSKVKFIVFNPSFVYMDRYASSLGAPLHNSCISALFLLFFSAFLVADSLINVWITLTVVSVEFGVIGFMTLWKVELDCISVLCLIYGINYTIDNCAPMLSTFVLGKDFTRTKWVKNALEVHGVAILQSYLCYIVGLIPLAAVPSNLTCTLFRCLFLIAFVTFFHCFAILPVILTFLPPSKKKRKEKKNPENREEIECVEMVDIDSTRVVDQITTV

SEQ ID NO: 61477 - protein, 103 aa, Homo sapiens
  Payload ID: 12275
  Gene Symbol: PTCHD1
  Gene Name: patched domain containing 1
  ENSP ID: ENSP00000406663
  MOD_RES (1)..(1): Any amino acid
XERNLVNSLFPVNRSKHRLYSDLQTPGRYGRVIVTSFQKANMLDQHHTDLILKVMDYMGLLKCYPPGGKLEKTNMLKRELQQSMQTPCSPFLSPLPCTWSPLA

SEQ ID NO: 61478 - protein, 256 aa, Homo sapiens
  Payload ID: 12275
  Gene Symbol: PTCHD1
  Gene Name: patched domain containing 1
  Uniprot ID: Q96NR3
  ENSP ID: ENSP00000478663
MLDQHHTDLILKLHAAVTKIQVPRPGFNYTFAHICILNNDKTCIVDDIVHVLEELKNARATNRTNFAITYPITHLKDGRAVYNGHQLGGVTVHSKDRVKSAEAIQLTYYLQSINSLNDMVAERWESSFCDTVRLFQKSNSKVKMYPYTSSSLREDFQKTSRVSERYLVTSLILVVTMAILCCSMQDCVRSKPWLGLLGLVTISLATLTAAGIINLTGGKYNSTFLGVPFVMLGNYYSSFFCFRLLVVLTRFLKGQE

SEQ ID NO: 61479 - protein, 1392 aa, Homo sapiens
  Payload ID: 12276
  Gene Symbol: PTCHD2
  Gene Name: patched domain containing 2
  Uniprot ID: Q9P2K9
  ENSP ID: ENSP00000294484
MDTEDDPLLQDVWLEEEQEEEEATGETFLGAQKPGPQPGAGGQCCWRHWPLASRPPASGFWSTLGWAFTNPCCAGLVLFLGCSIPMALSAFMFLYYPPLDIDISYNAFEIRNHEASQRFDALTLALKSQFGSWGRNRRDLADFTSETLQRLISEQLQQLHLGNRSRQASRAPRVIPAASLGGPGPYRDTSAAQKPTANRSGRLRRETPPLEDLAANQSEDPRNQRLSKNGRYQPSIPPHAAVAANQSRARRGASRWDYSRAYVSANTQTHAHWRIELIFLARGDAERNIFTSERLVTIHEIERKIMDHPGFREFCWKPHEVLKDLPLGSYSYCSPPSSLMTYFFPTERGGKIYYDGMGQDLADIRGSLELAMTHPEFYWYVDEGLSADNLKSSLLRSEILFGAPLPNYYSVDDRWEEQRAKFQSFVVTYVAMLAKQSTSKVQVLYGGTDLFDYEVRRTFNNDMLLAFISSSCIAALVYILTSCSVFLSFFGIASIGLSCLVALFLYHVVFGIQYLGILNGVAAFVIVGIGVDDVFVFINTYRQATHLEDPQLRMIHTVQTAGKATFFTSLTTAAAYAANVFSQIPAVHDFGLFMSLIVSCCWLAVLVTMPAALGLWSLYLAPLESSCQTSCHQNCSRKTSLHFPGDVFAAPEQVGGSPAQGPIPYLDDDIPLLEVEEEPVSLELGDVSLVSVSPEGLQPASNTGSRGHLIVQLQELLHHWVLWSAVKSRWVIVGLFVSILILSLVFASRLRPASRAPLLFRPDTNIQVLLDLKYNLSAEGISCITCSGLFQEKPHSLQNNIRTSLEKKRRGSGVPWASRPEATLQDFPGTVYISKVKSQGHPAVYRLSLNASLPAPWQAVSPGDGEVPSFQVYRAPFGNFTKKLTACMSTVGLLQAASPSRKWMLTTLACDAKRGWKFDFSFYVATKEQQHTRKLYFAQSHKPPFHGRVCMAPPGCLLSSSPDGPTKGFFFVPSEKVPKARLSATFGFNPCVNTGCGKPAVRPLVDTGAMVFVVFGIIGVNRTRQVDNHVIGDPGSVVYDSSFDLFKEIGHLCHLCKAIAANSELVKPGGAQCLPSGYSISSFLQMLHPECKELPEPNLLPGQLSHGAVGVREGRVQWISMAFESTTYKGKSSFQTYSDYLRWESFLQQQLQALPEGSVLRRGFQTCEHWKQIFMEIVGVQSALCGLVLSLLICVAAVAVFTTHILLLLPVLLSILGIVCLVVTIMYWSGWEMGAVEAISLSILVGSSVDYCVHLVEGYLLAGENLPPHQAEDARTQRQWRTLEAVRHVGVAIVSSALTTVIATVPLFFCIIAPFAKFGKIVALNTGVSILYTLTVSTALLGIMAPSSFTRTRTSFLKALGAVLLAGALGLGACLVLLQSGYKIPLPAGASL

SEQ ID NO: 61480 - protein, 268 aa, Homo sapiens
  Payload ID: 12276
  Gene Symbol: PTCHD2
  Gene Name: patched domain containing 2
  ENSP ID: ENSP00000303400
MSRYLKNLLEQDHVQGQILLPDLLGLPALGELPPAAAAGLARGLSPAPGLPDLRALEADIHGNRRGAERPVRPGAIPAHLRGRGGRVHHPHPAPAARAPQHLGHRVPGGDHHVLERLGDGGCGSHLPVHPRWLLRGLLRPPGRGLPAGWREPAPPPGRGRPNAAPVAYAGGRAARGRGHRLQCPHHGHRHSAPLLLHHRPICQVRQDCGTQHGRVHPLHADRQHRPAGHHGAQLFHSDPDFLPQGPGCRAAGRGPGAGCLPRAPAERL

SEQ ID NO: 61481 - protein, 767 aa, Homo sapiens
  Payload ID: 12277
  Gene Symbol: PTCHD3
  Gene Name: patched domain containing 3
  Uniprot ID: Q3KNS1
  ENSP ID: ENSP00000417658
MPWVEPKPRPGPEQKPKLTKPDSATGPQWYQESQESESEGKQPPPGPLAPPKSPEPSGPLASEQDAPLPEGDDAPPRPSMLDDAPRLPLELDDAPLPEEETPEPTAICRHRHRCHTDCLEGLLSRTFQWLGWQVGAHPWIFLLAPLMLTAALGTGFLYLPKDEEEDLEEHYTPVGSPAKAERRFVQGHFTTNDSYRFSASRRSTEANFVSLLVVSYSDSLLDPATFAEVSKLDGAVQDLRVAREKGSQIQYQQVCARYRALCVPPNPILYAWQVNKTLNLSSISFPAYNHGRHPLYLTGFFGGYILGGSLGMGQLLLRAKAMRLLYYLKTEDPEYDVQSKQWLTHLLDQFTNIKNILALKKIEVVHFTSLSRQLEFEATSVTVIPVFHLAYILIILFAVTSCFRFDCIRNKMCVAAFGVISAFLAVVSGFGLLLHIGVPFVIIVANSPFLILGVGVDDMFIMISAWHKTNLADDIRERMSNVYSKAAVSITITTITNILALYTGIMSSFRSVQCFCIYTGMTLLFCYFYNITCFGAFMALDGKREVVCLCWLKKADPKWPSFKKFCCFPFGSVPDEHGTDIHPISLFFRDYFGPFLTRSESKYFVVFIYVLYIISSIYGCFHVQEGLDLRNLASDDSYITPYFNVEENYFSDYGPRVMVIVTKKVDYWDKDVRQKLENCTKIFEKNVYVDKNLTEFWLDAYVQYLKGNSQDPNEKNTFMNNIPDFLSNFPNFQHDINISSSNEIISSRGFIQTTDVSSSAKKKILLF

SEQ ID NO: 61482 - protein, 533 aa, Homo sapiens
  Payload ID: 12277
  Gene Symbol: PTCHD3
  Gene Name: patched domain containing 3
  ENSP ID: ENSP00000478346
MPWVEPKPRPGPEQKPKLTKPDSATGPQWYQESQESESEGKQPPPGPLAPPKSPEPSGPLASEQDAPLPEGDDAPPRPSMLDDAPRLPLELDDAPLPEEETPEPTAICRHRHRCHTDCLEGLLSRTFQWLGWQVGAHPWIFLLAPLMLTAALGTGFLYLPKDEEEDLEEHYTPVGSPAKAERRFVQGHFTTNDSYRFSASRRSTEANFVSLLVVSYSDSLLDPATFAEVSKLDGAVQDLRVAREKGSQIQYQQVCARYRALCVPPNPILYAWQVNKTLNLSSISFPAYNHGRHPLYLTGFFGGYILGGSLGMGQLLLRAKAMRLLYYLKTEDPEYDVQSKQWLTHLLDQFTNIKNILALKKIEVVHFTSLSRQLEFEATSVTVIPVFHLAYILIILFAVTSCFRFDCIRNKMCVAAFGVISAFLAVVSGFGLLLHIGVPFVIIVANSPFLILGVGVDDMFIMISAWHKTNLADDIRERMSNVYSKAAVSITITTITNILALYTGIMSSFRASFRQQMFLPQPKRKYCYSNYDA

SEQ ID NO: 61483 - protein, 533 aa, Homo sapiens; identical to SEQ ID NO: 61482
  Payload ID: 12277
  Gene Symbol: PTCHD3
  Gene Name: patched domain containing 3
  ENSP ID: ENSP00000479436

SEQ ID NO: 61484 - protein, 767 aa, Homo sapiens; identical to SEQ ID NO: 61481
  Payload ID: 12277
  Gene Symbol: PTCHD3
  Gene Name: patched domain containing 3
  Uniprot ID: Q3KNS1
  ENSP ID: ENSP00000484143

SEQ ID NO: 61485 - protein, 846 aa, Homo sapiens
  Payload ID: 12278
  Gene Symbol: PTCHD4
  Gene Name: patched domain containing 4
  Uniprot ID: Q6ZW05
  ENSP ID: ENSP00000341914
MCFLRRPGAPASWIWWRMLRQVLRRGLQSFCHRLGLCVSRHPVFFLTVPAVLTITFGLSALNRFQPEGDLERLVAPSHSLAKIERSLASSLFPLDQSKSQLYSDLHTPGRYGRVILLSPTGDNILLQAEGILQTHRAVLEMKDGRNSFIGHQLGGVVEVPNSKDQRVKSARAIQITYYLQTYGSATQDLIGEKWENEFCKLIRKLQEEHQELQLYSLASFSLWRDFHKTSILARSKVLVSLVLILTTATLSSSMKDCLRSKPFLGLLGVLTVCISIITAAGIFFITDGKYNSTLLGIPFFAMGHGTKGVFELLSGWRRTKENLPFKDRIADAYSDVMVTYTMTSSLYFITFGMGASPFTNIEAVKVFCQNMCVSILLNYFYIFSFFGSCLVFAGQLEQNRYHSIFCCKIPSAEYLDRKPVWFQTVMSDGHQQTSHHETNPYQHHFIQHFLREHYNEWITNIYVKPFVVILYLIYASFSFMGCLQISDGANIINLLASDSPSVSYAMVQQKYFSNYSPVIGFYVYEPLEYWNSSVQDDLRRLCSGFTAVSWVEQYYQFLKVSNVSANNKSDFISVLQSSFLKKPEFQHFRNDIIFSKAGDESNIIASRLYLVARTSRDKQKEITEVLEKLRPLSLSKSIRFIVFNPSFVFMDHYSLSVTVPVLIAGFGVLLVLILTFFLVIHPLGNFWLILSVTSIELGVLGLMTLWNVDMDCISILCLIYTLNFAIDHCAPLLFTFVLATEHTRTQCIKSSLQDHGTAILQNVTSFLIGLVPLLFVPSNLTFTLFKCLLLTGGCTLLHCFVILPVFLTFFPPSKKHHKKKKRAKRKEREEIECIEIQENPDHVTTV

SEQ ID NO: 61486 - protein, 311 aa, Homo sapiens
  Payload ID: 12278
  Gene Symbol: PTCHD4
  Gene Name: patched domain containing 4
  ENSP ID: ENSP00000381722
  MOD_RES (1)..(1): Any amino acid
XCFLRRPGAPASWIWWRMLRQVLRRGLQSFCHRLGLCVSRHPVFFLTVPAVLTITFGLSALNRFQPEGDLERLVAPSHSLAKIERSLASSLFPLDQSKSQLYSDLHTPGRYGRVILLSPTGDNILLQAEGILQTHRAVLEMKDGRNSFIGHQLGGVVEVPNSKDQRVKSARAIQITYYLQTYGSATQDLIGEKWENEFCKLIRKLQEEHQELQLYSLASFSLWRDFHKTSILARSKVLVSLVLILTTATLSSSMKDCLRSKPFLGLLGVLTVCISIITAAGIFFITDGKYNSTLLGIPFFAMGISTEFTSS

SEQ ID NO: 61487 - protein, 325 aa, Homo sapiens
  Payload ID: 12279
  Gene Symbol: PEG10
  Gene Name: paternally expressed 10
  Uniprot ID: Q86TG7
  ENSP ID: ENSP00000417587
MTERRRDELSEEINNLREKVMKQSEENNNLQSQVQKLTEENTTLREQVEPTPEDEDDDIELRGAAAAAAPPPPIEEECPEDLPEKFDGNPDMLAPFMAQCQIFMEKSTRDFSVDRVRVCFVTSMMTGRAARWASAKLERSHYLMHNYPAFMMEMKHVFEDPQRREVAKRKIRRLRQGMGSVIDYSNAFQMIAQDLDWNEPALIDQYHEGLSDHIQEELSHLEVAKSLSALIGQCIHIERRLARAAAARKPRSPPRALVLPHIASHHQVDPTEPVGGARMRLTQEEKERRRKLNLCLYCGTGGHYADNCPAKASKSSPAGNSPAPL

SEQ ID NO: 61488 - protein, 401 aa, Homo sapiens
  Payload ID: 12279
  Gene Symbol: PEG10
  Gene Name: paternally expressed 10
  ENSP ID: ENSP00000418944
MRNKRVLKTKKRRSGRGGQDPGLHPHRSEATAGRSPPTPTVTLGPDCPPPPPPPPPNNNNNNNSKHTGHKSACVPNMTERRRDELSEEINNLREKVMKQSEENNNLQSQVQKLTEENTTLREQVEPTPEDEDDDIELRGAAAAAAPPPPIEEECPEDLPEKFDGNPDMLAPFMAQCQIFMEKSTRDFSVDRVRVCFVTSMMTGRAARWASAKLERSHYLMHNYPAFMMEMKHVFEDPQRREVAKRKIRRLRQGMGSVIDYSNAFQMIAQDLDWNEPALIDQYHEGLSDHIQEELSHLEVAKSLSALIGQCIHIERRLARAAAARKPRSPPRALVLPHIASHHQVDPTEPVGGARMRLTQEEKERRRKLNLCLYCGTGGHYADNCPAKASKSSPAGNSPAPL

SEQ ID NO: 61489 - protein, 741 aa, Homo sapiens
  Payload ID: 12279
  Gene Symbol: PEG10
  Gene Name: paternally expressed 10
  ENSP ID: ENSP00000478744
LGPDCPPPPPPPPPNNNNNNNSKHTGHKSACVPNMTERRRDELSEEINNLREKVMKQSEENNNLQSQVQKLTEENTTLREQVEPTPEDEDDDIELRGAAAAAAPPPPIEEECPEDLPEKFDGNPDMLAPFMAQCQIFMEKSTRDFSVDRVRVCFVTSMMTGRAARWASAKLERSHYLMHNYPAFMMEMKHVFEDPQRREVAKRKIRRLRQGMGSVIDYSNAFQMIAQDLDWNEPALIDQYHEGLSDHIQEELSHLEVAKSLSALIGQCIHIERRLARAAAARKPRSPPRALVLPHIASHHQVDPTEPVGGARMRLTQEEKERRRKLNLCLYCGTGGHYADNCPAKASKSSPGKLPGPAVEGPSATGPEIIRSPQDDASSPHLQVMLQIHLPGRHTLFVRAMIDSGASGNFIDHEYVAQNGIPLRIKDWPILVEAIDGRPIASGPVVHETHDLIVDLGDHREVLSFDVTQSPFFPVVLGVRWLSTHDPNITWSTRSIVFDSEYCRYHCRMYSPIPPSLPPPAPQPPLYYPVDGYRVYQPVRYYYVQNVYTPVDEHVYPDHRLVDPHIEMIPGAHSIPSGHVYSLSEPEMAALRDFVARNVKDGLITPTIAPNGAQVLQVKRGWKLQVSYDCRAPNNFTIQNQYPRLSIPNLEDQAHLATYTEFVPQIPGYQTYPTYAAYPTYPVGFAWYPVGRDGQGRSLYVPVMITWNPHWYRQPPVPQYPPPQPPPPPPPPPPPPSYSTL

SEQ ID NO: 61490 - protein, 783 aa, Homo sapiens
  Payload ID: 12279
  Gene Symbol: PEG10
  Gene Name: paternally expressed 10
  ENSP ID: ENSP00000480676
MRNKRVLKTKKRRSGRGGQDPGLHPHRSEATAGRSPPTPTVTLGPDCPPPPPPPPPNNNNNNNSKHTGHKSACVPNMTERRRDELSEEINNLREKVMKQSEENNNLQSQVQKLTEENTTLREQVEPTPEDEDDDIELRGAAAAAAPPPPIEEECPEDLPEKFDGNPDMLAPFMAQCQIFMEKSTRDFSVDRVRVCFVTSMMTGRAARWASAKLERSHYLMHNYPAFMMEMKHVFEDPQRREVAKRKIRRLRQGMGSVIDYSNAFQMIAQDLDWNEPALIDQYHEGLSDHIQEELSHLEVAKSLSALIGQCIHIERRLARAAAARKPRSPPRALVLPHIASHHQVDPTEPVGGARMRLTQEEKERRRKLNLCLYCGTGGHYADNCPAKASKSSPGKLPGPAVEGPSATGPEIIRSPQDDASSPHLQVMLQIHLPGRHTLFVRAMIDSGASGNFIDHEYVAQNGIPLRIKDWPILVEAIDGRPIASGPVVHETHDLIVDLGDHREVLSFDVTQSPFFPVVLGVRWLSTHDPNITWSTRSIVFDSEYCRYHCRMYSPIPPSLPPPAPQPPLYYPVDGYRVYQPVRYYYVQNVYTPVDEHVYPDHRLVDPHIEMIPGAHSIPSGHVYSLSEPEMAALRDFVARNVKDGLITPTIAPNGAQVLQVKRGWKLQVSYDCRAPNNFTIQNQYPRLSIPNLEDQAHLATYTEFVPQIPGYQTYPTYAAYPTYPVGFAWYPVGRDGQGRSLYVPVMITWNPHWYRQPPVPQYPPPQPPPPPPPPPPPPSYSTL

SEQ ID NO: 61491 - protein, 707 aa, Homo sapiens
  Payload ID: 12279
  Gene Symbol: PEG10
  Gene Name: paternally expressed 10
  ENSP ID: ENSP00000481101
MTERRRDELSEEINNLREKVMKQSEENNNLQSQVQKLTEENTTLREQVEPTPEDEDDDIELRGAAAAAAPPPPIEEECPEDLPEKFDGNPDMLAPFMAQCQIFMEKSTRDFSVDRVRVCFVTSMMTGRAARWASAKLERSHYLMHNYPAFMMEMKHVFEDPQRREVAKRKIRRLRQGMGSVIDYSNAFQMIAQDLDWNEPALIDQYHEGLSDHIQEELSHLEVAKSLSALIGQCIHIERRLARAAAARKPRSPPRALVLPHIASHHQVDPTEPVGGARMRLTQEEKERRRKLNLCLYCGTGGHYADNCPAKASKSSPGKLPGPAVEGPSATGPEIIRSPQDDASSPHLQVMLQIHLPGRHTLFVRAMIDSGASGNFIDHEYVAQNGIPLRIKDWPILVEAIDGRPIASGPVVHETHDLIVDLGDHREVLSFDVTQSPFFPVVLGVRWLSTHDPNITWSTRSIVFDSEYCRYHCRMYSPIPPSLPPPAPQPPLYYPVDGYRVYQPVRYYYVQNVYTPVDEHVYPDHRLVDPHIEMIPGAHSIPSGHVYSLSEPEMAALRDFVARNVKDGLITPTIAPNGAQVLQVKRGWKLQVSYDCRAPNNFTIQNQYPRLSIPNLEDQAHLATYTEFVPQIPGYQTYPTYAAYPTYPVGFAWYPVGRDGQGRSLYVPVMITWNPHWYRQPPVPQYPPPQPPPPPPPPPPPPSYSTL

SEQ ID NO: 61492 - protein, 31 aa, Homo sapiens
  Payload ID: 12279
  Gene Symbol: PEG10
  Gene Name: paternally expressed 10
  ENSP ID: ENSP00000482046
MTERRRDELSEEINNLREKVMKQSEENNNLQ

SEQ ID NO: 61493 - protein, 359 aa, Homo sapiens
  Payload ID: 12279
  Gene Symbol: PEG10
  Gene Name: paternally expressed 10
  ENSP ID: ENSP00000482653
LGPDCPPPPPPPPPNNNNNNNSKHTGHKSACVPNMTERRRDELSEEINNLREKVMKQSEENNNLQSQVQKLTEENTTLREQVEPTPEDEDDDIELRGAAAAAAPPPPIEEECPEDLPEKFDGNPDMLAPFMAQCQIFMEKSTRDFSVDRVRVCFVTSMMTGRAARWASAKLERSHYLMHNYPAFMMEMKHVFEDPQRREVAKRKIRRLRQGMGSVIDYSNAFQMIAQDLDWNEPALIDQYHEGLSDHIQEELSHLEVAKSLSALIGQCIHIERRLARAAAARKPRSPPRALVLPHIASHHQVDPTEPVGGARMRLTQEEKERRRKLNLCLYCGTGGHYADNCPAKASKSSPAGNSPAPL

SEQ ID NO: 61494 - protein, 1588 aa, Homo sapiens
  Payload ID: 12280
  Gene Symbol: PEG3
  Gene Name: paternally expressed 3
  Uniprot ID: Q9GZU2
  ENSP ID: ENSP00000326581
MLPPKHLSATKPKKSWAPNLYELDSDLTKEPDVIIGEGPTDSEFFHQRFRNLIYVEFVGPRKTLIKLRNLCLDWLQPETRTKEEIIELLVLEQYLTIIPEKLKPWVRAKKPENCEKLVTLLENYKEMYQPEDDNNSDVTSDDDMTRNRRESSPPHSVHSFSDRDWDRRGRSRDMEPRDRWSHTRNPRSRMPPRDLSLPVVAKTSFEMDREDDRDSRAYESRSQDAESYQNVVDLAEDRKPHNTIQDNMENYRKLLSLVQLAEDDGHSHMTQGHSSRSKRSAYPSTSRGLKTMPEAKKSTHRRGICEDESSHGVIMEKFIKDVSRSSKSGRARESSDRSQRFPRMSDDNWKDISLNKRESVIQQRVYEGNAFRGGFRFNSTLVSRKRVLERKRRYHFDTDGKGSIHDQKGCPRKKPFECGSEMRKAMSVSSLSSLSSPSFTESQPIDFGAMPYVCDECGRSFSVISEFVEHQIMHTRENLYEYGESFIHSVAVSEVQKSQVGGKRFECKDCGETFNKSAALAEHRKIHARGYLVECKNQECEEAFMPSPTFSELQKIYGKDKFYECRVCKETFLHSSALIEHQKIHFGDDKDNEREHERERERERGETFRPSPALNEFQKMYGKEKMYECKVCGETFLHSSSLKEHQKIHTRGNPFENKGKVCEETFIPGQSLKRRQKTYNKEKLCDFTDGRDAFMQSSELSEHQKIHSRKNLFEGRGYEKSVIHSGPFTESQKSHTITRPLESDEDEKAFTISSNPYENQKIPTKENVYEAKSYERSVIHSLASVEAQKSHSVAGPSKPKVMAESTIQSFDAINHQRVRAGGNTSEGREYSRSVIHSLVASKPPRSHNGNELVESNEKGESSIYISDLNDKRQKIPARENPCEGGSKNRNYEDSVIQSVFRAKPQKSVPGEGSGEFKKDGEFSVPSSNVREYQKARAKKKYIEHRSNETSVIHSLPFGEQTFRPRGMLYECQECGECFAHSSDLTEHQKIHDREKPSGSRNYEWSVIRSLAPTDPQTSYAQEQYAKEQARNKCKDFRQFFATSEDLNTNQKIYDQEKSHGEESQGENTDGEETHSEETHGQETIEDPVIQGSDMEDPQKDDPDDKIYECEDCGLGFVDLTDLTDHQKVHSRKCLVDSREYTHSVIHTHSISEYQRDYTGEQLYECPKCGESFIHSSFLFEHQRIHEQDQLYSMKGCDDGFIALLPMKPRRNRAAERNPALAGSAIRCLLCGQGFIHSSALNEHMRLHREDDLLEQSQMAEEAIIPGLALTEFQRSQTEERLFECAVCGESFVNPAELADHVTVHKNEPYEYGSSYTHTSFLTEPLKGAIPFYECKDCGKSFIHSTVLTKHKELHLEEEEEDEAAAAAAAAAQEVEANVHVPQVVLRIQGLNVEAAEPEVEAAEPEVEAAEPEVEAAEPNGEAEGPDGEAAEPIGEAGQPNGEAEQPNGDADEPDGAGIEDPEERAEEPEGKAEEPEGDADEPDGVGIEDPEEGEDQEIQVEEPYYDCHECTETFTSSTAFSEHLKTHASMIIFEPANAFGECSGYIERASTSTGGANQADEKYFKCDVCGQLFNDRLSLARHQNTHTG

SEQ ID NO: 61495 - protein, 36 aa, Homo sapiens
  Payload ID: 12280
  Gene Symbol: PEG3
  Gene Name: paternally expressed 3
  ENSP ID: ENSP00000469144
MLPPKHLSATKPKKSWAPNLYELDSDLTKEPDVIIG

SEQ ID NO: 61496 - protein, 1588 aa, Homo sapiens; identical to SEQ ID NO: 61494
  Payload ID: 12280
  Gene Symbol: PEG3
  Gene Name: paternally expressed 3
  Uniprot ID: Q9GZU2
  ENSP ID: ENSP00000469486

SEQ ID NO: 61497 - protein, 395 aa, Homo sapiens
  Payload ID: 12280
  Gene Symbol: PEG3
  Gene Name: paternally expressed 3
  ENSP ID: ENSP00000470467
MYQPEDDNNSDVTSDDDMTRNRRESSPPHSVHSFSGDRDWDRRGRSRDMEPRDRWSHTRNPRSRMPPRDLSLPVVAKTSFEMDREDDRDSRAYESRSQDAESYQNVVDLAEDRKPHNTIQDNMENYRKLLSLGLKTMPEAKKSTHRRGICEDESSHGVIMEKFIKDVSRSSKSGRARESSDRSQRFPRMSDDNWKDISLNKRESVIQQRVYEGNAFRGGFRFNSTLVSRKRVLERKRRYHFDTDGKGSIHDQKGCPRKKPFECGSEMRKAMSVSSLSSLSSPSFTESQPIDFGAMPYVCDECGRSFSVISEFVEHQIMHTRENLYEYGESFIHSVAVSEVQKSQVGGKRFECKDCGETFNKSAALAEHRKIHARGYLVECKNQECEEAFMPSPTF

SEQ ID NO: 61498 - protein, 1588 aa, Homo sapiens; identical to SEQ ID NO: 61494
  Payload ID: 12280
  Gene Symbol: PEG3
  Gene Name: paternally expressed 3
  Uniprot ID: Q9GZU2
  ENSP ID: ENSP00000472395

SEQ ID NO: 61499 - protein, 1462 aa, Homo sapiens
  Payload ID: 12280
  Gene Symbol: PEG3
  Gene Name: paternally expressed 3
  Uniprot ID: Q9GZU2
  ENSP ID: ENSP00000472402
MYQPEDDNNSDVTSDDDMTRNRRESSPPHSVHSFSDRDWDRRGRSRDMEPRDRWSHTRNPRSRMPPRDLSLPVVAKTSFEMDREDDRDSRAYESRSQDAESYQNVVDLAEDRKPHNTIQDNMENYRKLLSLVQLAEDDGHSHMTQGHSSRSKRSAYPSTSRGLKTMPEAKKSTHRRGICEDESSHGVIMEKFIKDVSRSSKSGRARESSDRSQRFPRMSDDNWKDISLNKRESVIQQRVYEGNAFRGGFRFNSTLVSRKRVLERKRRYHFDTDGKGSIHDQKGCPRKKPFECGSEMRKAMSVSSLSSLSSPSFTESQPIDFGAMPYVCDECGRSFSVISEFVEHQIMHTRENLYEYGESFIHSVAVSEVQKSQVGGKRFECKDCGETFNKSAALAEHRKIHARGYLVECKNQECEEAFMPSPTFSELQKIYGKDKFYECRVCKETFLHSSALIEHQKIHFGDDKDNEREHERERERERGETFRPSPALNEFQKMYGKEKMYECKVCGETFLHSSSLKEHQKIHTRGNPFENKGKVCEETFIPGQSLKRRQKTYNKEKLCDFTDGRDAFMQSSELSEHQKIHSRKNLFEGRGYEKSVIHSGPFTESQKSHTITRPLESDEDEKAFTISSNPYENQKIPTKENVYEAKSYERSVIHSLASVEAQKSHSVAGPSKPKVMAESTIQSFDAINHQRVRAGGNTSEGREYSRSVIHSLVASKPPRSHNGNELVESNEKGESSIYISDLNDKRQKIPARENPCEGGSKNRNYEDSVIQSVFRAKPQKSVPGEGSGEFKKDGEFSVPSSNVREYQKARAKKKYIEHRSNETSVIHSLPFGEQTFRPRGMLYECQECGECFAHSSDLTEHQKIHDREKPSGSRNYEWSVIRSLAPTDPQTSYAQEQYAKEQARNKCKDFRQFFATSEDLNTNQKIYDQEKSHGEESQGENTDGEETHSEETHGQETIEDPVIQGSDMEDPQKDDPDDKIYECEDCGLGFVDLTDLTDHQKVHSRKCLVDSREYTHSVIHTHSISEYQRDYTGEQLYECPKCGESFIHSSFLFEHQRIHEQDQLYSMKGCDDGFIALLPMKPRRNRAAERNPALAGSAIRCLLCGQGFIHSSALNEHMRLHREDDLLEQSQMAEEAIIPGLALTEFQRSQTEERLFECAVCGESFVNPAELADHVTVHKNEPYEYGSSYTHTSFLTEPLKGAIPFYECKDCGKSFIHSTVLTKHKELHLEEEEEDEAAAAAAAAAQEVEANVHVPQVVLRIQGLNVEAAEPEVEAAEPEVEAAEPEVEAAEPNGEAEGPDGEAAEPIGEAGQPNGEAEQPNGDADEPDGAGIEDPEERAEEPEGKAEEPEGDADEPDGVGIEDPEEGEDQEIQVEEPYYDCHECTETFTSSTAFSEHLKTHASMIIFEPANAFGECSGYIERASTSTGGANQADEKYFKCDVCGQLFNDRLSLARHQNTHTG

SEQ ID NO: 61500 - protein, 1464 aa, Homo sapiens
  Payload ID: 12280
  Gene Symbol: PEG3
  Gene Name: paternally expressed 3
  Uniprot ID: Q9GZU2
  ENSP ID: ENSP00000473190
MYQPEDDNNSDVTSDDDMTRNRRESSPPHSVHSFSGDRDWDRRGRSRDMEPRDRWSHTRNPRSRMPPRDLSLPVVAKTSFEMDREDDRDSRAYESRSQDAESYQNVVDLAEDRKPHNTIQDNMENYRKLLSLGVQLAEDDGHSHMTQGHSSRSKRSAYPSTSRGLKTMPEAKKSTHRRGICEDESSHGVIMEKFIKDVSRSSKSGRARESSDRSQRFPRMSDDNWKDISLNKRESVIQQRVYEGNAFRGGFRFNSTLVSRKRVLERKRRYHFDTDGKGSIHDQKGCPRKKPFECGSEMRKAMSVSSLSSLSSPSFTESQPIDFGAMPYVCDECGRSFSVISEFVEHQIMHTRENLYEYGESFIHSVAVSEVQKSQVGGKRFECKDCGETFNKSAALAEHRKIHARGYLVECKNQECEEAFMPSPTFSELQKIYGKDKFYECRVCKETFLHSSALIEHQKIHFGDDKDNEREHERERERERGETFRPSPALNEFQKMYGKEKMYECKVCGETFLHSSSLKEHQKIHTRGNPFENKGKVCEETFIPGQSLKRRQKTYNKEKLCDFTDGRDAFMQSSELSEHQKIHSRKNLFEGRGYEKSVIHSGPFTESQKSHTITRPLESDEDEKAFTISSNPYENQKIPTKENVYEAKSYERSVIHSLASVEAQKSHSVAGPSKPKVMAESTIQSFDAINHQRVRAGGNTSEGREYSRSVIHSLVASKPPRSHNGNELVESNEKGESSIYISDLNDKRQKIPARENPCEGGSKNRNYEDSVIQSVFRAKPQKSVPGEGSGEFKKDGEFSVPSSNVREYQKARAKKKYIEHRSNETSVIHSLPFGEQTFRPRGMLYECQECGECFAHSSDLTEHQKIHDREKPSGSRNYEWSVIRSLAPTDPQTSYAQEQYAKEQARNKCKDFRQFFATSEDLNTNQKIYDQEKSHGEESQGENTDGEETHSEETHGQETIEDPVIQGSDMEDPQKDDPDDKIYECEDCGLGFVDLTDLTDHQKVHSRKCLVDSREYTHSVIHTHSISEYQRDYTGEQLYECPKCGESFIHSSFLFEHQRIHEQDQLYSMKGCDDGFIALLPMKPRRNRAAERNPALAGSAIRCLLCGQGFIHSSALNEHMRLHREDDLLEQSQMAEEAIIPGLALTEFQRSQTEERLFECAVCGESFVNPAELADHVTVHKNEPYEYGSSYTHTSFLTEPLKGAIPFYECKDCGKSFIHSTVLTKHKELHLEEEEEDEAAAAAAAAAQEVEANVHVPQVVLRIQGLNVEAAEPEVEAAEPEVEAAEPEVEAAEPNGEAEGPDGEAAEPIGEAGQPNGEAEQPNGDADEPDGAGIEDPEERAEEPEGKAEEPEGDADEPDGVGIEDPEEGEDQEIQVEEPYYDCHECTETFTSSTAFSEHLKTHASMIIFEPANAFGECSGYIERASTSTGGANQADEKYFKCDVCGQLFNDRLSLARHQNTHTG

SEQ ID NO: 61501 - protein, 1069 aa, Homo sapiens
  Payload ID: 12281
  Gene Symbol: PAXIP1
  Gene Name: PAX interacting (with transcription-activation domain) protein 1
  Uniprot ID: Q6ZW49
  ENSP ID: ENSP00000380376
MSDQAPKVPEEMFREVKYYAVGDIDPQVIQLLKAGKAKEVSYNALASHIISEDGDNPEVGEAREVFDLPVVKPSWVILSVQCGTLLPVNGFSPESCQIFFGITACLSQVSSEDRSALWALVTFYGGDCQLTLNKKCTHLIVPEPKGEKYECALKRASIKIVTPDWVLDCVSEKTKKDEAFYHPRLIIYEEEEEEEEEEEEVENEEQDSQNEGSTDEKSSPASSQEGSPSGDQQFSPKSNTEKSKGELMFDDSSDSSPEKQERNLNWTPAEVPQLAAAKRRLPQGKEPGLINLCANVPPVPGNILPPEVRGNLMAAGQNLQSSERSEMIATWSPAVRTLRNITNNADIQQMNRPSNVAHILQTLSAPTKNLEQQVNHSQQGHTNANAVLFSQVKVTPETHMLQQQQQAQQQQQQHPVLHLQPQQIMQLQQQQQQQISQQPYPQQPPHPFSQQQQQQQQAHPHQFSQQQLQFPQQQLHPPQQLHRPQQQLQPFQQQHALQQQFHQLQQHQLQQQQLAQLQQQHSLLQQQQQQQIQQQQLQRMHQQQQQQQMQSQTAPHLSQTSQALQHQVPPQQPPQQQQQQQPPPSPQQHQLFGHDPAVEIPEEGFLLGCVFAIADYPEQMSDKQLLATWKRIIQAHGGTVDPTFTSRCTHLLCESQVSSAYAQAIRERKRCVTAHWLNTVLKKKKMVPPHRALHFPVAFPPGGKPCSQHIISVTGFVDSDRDDLKLMAYLAGAKYTGYLCRSNTVLICKEPTGLKYEKAKEWRIPCVNAQWLGDILLGNFEALRQIQYSRYTAFSLQDPFAPTQHLVLNLLDAWRVPLKVSAELLMSIRLPPKLKQNEVANVQPSSKRARIEDVPPPTKKLTPELTPFVLFTGFEPVQVQQYIKKLYILGGEVAESAQKCTHLIASKVTRTVKFLTAISVVKHIVTPEWLEECFRCQKFIDEQNYILRDAEAEVLFSFSLEESLKRAHVSPLFKAKYFYITPGICPSLSTMKAIVECAGGKVLSKQPSFRKLMEHKQNSSLSEIILISCENDLHLCREYFARGIDVHNAEFVLTGVLTQTLDYESYKFN

SEQ ID NO: 61502 - protein, 1069 aa, Homo sapiens; identical to SEQ ID NO: 61501
  Payload ID: 12281
  Gene Symbol: PAXIP1
  Gene Name: PAX interacting (with transcription-activation domain) protein 1
  Uniprot ID: Q6ZW49
  ENSP ID: ENSP00000384048

SEQ ID NO: 61503 - protein, 173 aa, Homo sapiens
  Payload ID: 12281
  Gene Symbol: PAXIP1
  Gene Name: PAX interacting (with transcription-activation domain) protein 1
  ENSP ID: ENSP00000389849
KVPEEMFREVKYYAVGDIDPQVIQLLKAGKAKEVSYNALASHIISEDGDNPEVGEAREVFDLPVVKVSSEDRSALWALVTFYGGDCQLTLNKKCTHLIVPEPKGEKYECALKRASIKIVTPDWVLDCVSEKTKKDEAFYHPRLIIYEEEEEEEEEEEEVENEEQDSQNEGSTD

SEQ ID NO: 61504 - protein, 147 aa, Homo sapiens
  Payload ID: 12281
  Gene Symbol: PAXIP1
  Gene Name: PAX interacting (with transcription-activation domain) protein 1
  ENSP ID: ENSP00000392011
MSDQAPKVPEEMFREVKYYAVGDIDPQVIQLLKAGKAKEVSYNALASHIISEDGDNPEVGEAREVFDLPVVKPSWVILSVQCGTLLPVNGFSPESCQIFFGITACLSQGVDTSWSSLLESSRALPGRGREGSLSSRSWEAQRSSAFF

SEQ ID NO: 61505 - protein, 815 aa, Homo sapiens
  Payload ID: 12282
  Gene Symbol: PAXBP1
  Gene Name: PAX3 and PAX7 binding protein 1
  Uniprot ID: Q9Y5B6
  ENSP ID: ENSP00000290178
MFRKARRVNVRKRNDSEEEERERDEEQEPPPLLPPPGTGEEAGPGGGDRAPGGESLLGPGPSPPSALTPGLGAEAGGGFPGGAEPGNGLKPRKRPRENKEVPRASLLSFQDEEEENEEVFKVKKSSYSKKIVKLLKKEYKEDLEKSKIKTELNSSAESEQPLDKTGHVKDTNQEDGVIISEHGEDEMDMESEKEEEKPKTGGAFSNALSSLNVLRPGEIPDAAFIHAARKKRQMARELGDFTPHDNEPGKGRLVREDENDASDDEDDDEKRRIVFSVKEKSQRQKIAEEIGIEGSDDDALVTGEQDEELSRWEQEQIRKGINIPQVQASQPAEVNMYYQNTYQTMPYGSSYGIPYSYTAYGSSDAKSQKTDNTVPFKTPSNEMTPVTIDLVKKQLKDRLDSMKELHKTNRQQHEKHLQSRVDSTRAIERLEGSSGGIGERYKFLQEMRGYVQDLLECFSEKVPLINELESAIHQLYKQRASRLVQRRQDDIKDESSEFSSHSNKALMAPNLDSFGRDRALYQEHAKRRIAEREARRTRRRQAREQTGKMADHLEGLSSDDEETSTDITNFNLEKDRISKESGKVFEDVLESFYSIDCIKSQFEAWRSKYYTSYKDAYIGLCLPKLFNPLIRLQLLTWTPLEAKCRDFENMLWFESLLFYGCEEREQEKDDVDVALLPTIVEKVILPKLTVIAENMWDPFSTTQTSRMVGITLKLINGYPSVVNAENKNTQVYLKALLLRMRRTLDDDVFMPLYPKNVLENKNSGPYLFFQRQFWSSVKVIKPPFQRGSCPIPRRKECCSERPRRIWTDRPCVVFS

SEQ ID NO: 61506 - protein, 917 aa, Homo sapiens
  Payload ID: 12282
  Gene Symbol: PAXBP1
  Gene Name: PAX3 and PAX7 binding protein 1
  Uniprot ID: Q9Y5B6
  ENSP ID: ENSP00000328992
MFRKARRVNVRKRNDSEEEERERDEEQEPPPLLPPPGTGEEAGPGGGDRAPGGESLLGPGPSPPSALTPGLGAEAGGGFPGGAEPGNGLKPRKRPRENKEVPRASLLSFQDEEEENEEVFKVKKSSYSKKIVKLLKKEYKEDLEKSKIKTELNSSAESEQPLDKTGHVKDTNQEDGVIISEHGEDEMDMESEKEEEKPKTGGAFSNALSSLNVLRPGEIPDAAFIHAARKKRQMARELGDFTPHDNEPGKGRLVREDENDASDDEDDDEKRRIVFSVKEKSQRQKIAEEIGIEGSDDDALVTGEQDEELSRWEQEQIRKGINIPQVQASQPAEVNMYYQNTYQTMPYGSSYGIPYSYTAYGSSDAKSQKTDNTVPFKTPSNEMTPVTIDLVKKQLKDRLDSMKELHKTNRQQHEKHLQSRVDSTRAIERLEGSSGGIGERYKFLQEMRGYVQDLLECFSEKVPLINELESAIHQLYKQRASRLVQRRQDDIKDESSEFSSHSNKALMAPNLDSFGRDRALYQEHAKRRIAEREARRTRRRQAREQTGKMADHLEGLSSDDEETSTDITNFNLEKDRISKESGKVFEDVLESFYSIDCIKSQFEAWRSKYYTSYKDAYIGLCLPKLFNPLIRLQLLTWTPLEAKCRDFENMLWFESLLFYGCEEREQEKDDVDVALLPTIVEKVILPKLTVIAENMWDPFSTTQTSRMVGITLKLINGYPSVVNAENKNTQVYLKALLLRMRRTLDDDVFMPLYPKNVLENKNSGPYLFFQRQFWSSVKLLGNFLQWYGIFSNKTLQELSIDGLLNRYILMAFQNSEYGDDSIKKAQNVINCFPKQWFMNLKGERTISQLENFCRYLVHLADTIYRNSIGCSDVEKRNARENIKQIVKLLASVRALDHAMSVASDHNVKEFKSLIEGK

SEQ ID NO: 61507 - protein, 36 aa, Homo sapiens
  Payload ID: 12282
  Gene Symbol: PAXBP1
  Gene Name: PAX3 and PAX7 binding protein 1
  ENSP ID: ENSP00000388973
YKQRASRLVQRRQDDIKDESSEFSSHSSQSILKTKL

SEQ ID NO: 61508 - protein, 511 aa, Homo sapiens
  Payload ID: 12282
  Gene Symbol: PAXBP1
  Gene Name: PAX3 and PAX7 binding protein 1
  Uniprot ID: Q9Y5B6
  ENSP ID: ENSP00000393038
MFRKARRVNVRKRNDSEEEERERDEEQEPPPLLPPPGTGEEAGPGGGDRAPGGESLLGPGPSPPSALTPGLGAEAGGGFPGGAEPGNGLKPRKRPRENKEVPRASLLSFQDEEEENEEVFKVKKSSYSKKIVKLLKKEYKEDLEKSKIKTELNSSAESEQPLDKTGHVKDTNQEDGVIISEHGEDEMDMESEKEEEKPKTGGAFSNALSSLNVLRPGEIPDAAFIHAARKKRQMARELGDFTPHDNEPGKGRLVREDENDASDDEDDDEKRRIVFSVKEKSQRQKIAEEIGIEGSDDDALVTGEQDEELSRWEQEQIRKGINIPQVQASQPAEVNMYYQNTYQTMPYGSSYGIPYSYTAYGSSDAKSQKTDNTVPFKTPSNEMTPVTIDLVKKQLKDRLDSMKELHKTNRQQHEKHLQSRVDSTRAIERLEGSSGGIGERYKFLQEMRGYVQDLLECFSEKVPLINELESAIHQLYKQRASRLVQRRQDDIKDESSEFSSHSSQSILKTKL

SEQ ID NO: 61509 - protein, 25 aa, Homo sapiens
  Payload ID: 12282
  Gene Symbol: PAXBP1
  Gene Name: PAX3 and PAX7 binding protein 1
  ENSP ID: ENSP00000408048
QFWSSVKEKVISEFQSKVHRTQRNA

SEQ ID NO: 61510 - protein, 157 aa, Homo sapiens
  Payload ID: 12282
  Gene Symbol: PAXBP1
  Gene Name: PAX3 and PAX7 binding protein 1
  Uniprot ID: Q9Y5B6
  ENSP ID: ENSP00000458262
MFRKARRVNVRKRNDSEEEERERDEEQEPPPLLPPPGTGEEAGPGGGDRAPGGESLLGPGPSPPSALTPGLGAEAGGGFPGGAEPGNGLKPRKRPRENKEVPRASLLSFQDEEEENEEVFKVKKSSYSKKIVKLLKKEYKEDLEKSKIKTELNSSAE

SEQ ID NO: 61511 - protein, 157 aa, Homo sapiens; identical to SEQ ID NO: 61510
  Payload ID: 12282
  Gene Symbol: PAXBP1
  Gene Name: PAX3 and PAX7 binding protein 1
  Uniprot ID: Q9Y5B6
  ENSP ID: ENSP00000458892

SEQ ID NO: 61512 - protein, 591 aa, Homo sapiens
  Payload ID: 12283
  Gene Symbol: PXN
  Gene Name: paxillin
  Uniprot ID: P49023
  ENSP ID: ENSP00000228307
MDDLDALLADLESTTSHISKRPVFLSEETPYSYPTGNHTYQEIAVPPPVPPPPSSEALNGTILDPLDQWQPSSSRFIHQQPQSSSPVYGSSAKTSSVSNPQDSVGSPCSRVGEEEHVYSFPNKQKSAEPSPTVMSTSLGSNLSELDRLLLELNAVQHNPPGFPADEANSSPPLPGALSPLYGVPETNSPLGGKAGPLTKEKPKRNGGRGLEDVRPSVESLLDELESSVPSPVPAITVNQGEMSSPQRVTSTQQQTRISASSATRELDELMASLSDFKIQGLEQRADGERCWAAGWPRDGGRSSPGGQDEGGFMAQGKTGSSSPPGGPPKPGSQLDSMLGSLQSDLNKLGVATVAKGVCGACKKPIAGQVVTAMGKTWHPEHFVCTHCQEEIGSRNFFERDGQPYCEKDYHNLFSPRCYYCNGPILDKVVTALDRTWHPEHFFCAQCGAFFGPEGFHEKDGKAYCRKDYFDMFAPKCGGCARAILENYISALNTLWHPECFVCRECFTPFVNGSFFEHDGQPYCEVHYHERRGSLCSGCQKPITGRCITAMAKKFHPEHFVCAFCLKQLNKGTFKEQNDKPYCQNCFLKLFC

SEQ ID NO: 61513 - protein, 605 aa, Homo sapiens
  Payload ID: 12283
  Gene Symbol: PXN
  Gene Name: paxillin
  Uniprot ID: P49023
  ENSP ID: ENSP00000267257
MDDLDALLADLESTTSHISKRPVFLSEETPYSYPTGNHTYQEIAVPPPVPPPPSSEALNGTILDPLDQWQPSSSRFIHQQPQSSSPVYGSSAKTSSVSNPQDSVGSPCSRVGEEEHVYSFPNKQKSAEPSPTVMSTSLGSNLSELDRLLLELNAVQHNPPGFPADEANSSPPLPGALSPLYGVPETNSPLGGKAGPLTKEKPKRNGGRGLEDVRPSVESLLDELESSVPSPVPAITVNQGEMSSPQRVTSTQQQTRISASSATRELDELMASLSDFKGSWPLEEVVLLVSISSSVQEGEKYPHPCAARHRTPSLRSPDQPPPCPQFMAQGKTGSSSPPGGPPKPGSQLDSMLGSLQSDLNKLGVATVAKGVCGACKKPIAGQVVTAMGKTWHPEHFVCTHCQEEIGSRNFFERDGQPYCEKDYHNLFSPRCYYCNGPILDKVVTALDRTWHPEHFFCAQCGAFFGPEGFHEKDGKAYCRKDYFDMFAPKCGGCARAILENYISALNTLWHPECFVCRECFTPFVNGSFFEHDGQPYCEVHYHERRGSLCSGCQKPITGRCITAMAKKFHPEHFVCAFCLKQLNKGTFKEQNDKPYCQNCFLKLFC

SEQ ID NO: 61514 - protein, 557 aa, Homo sapiens
  Payload ID: 12283
  Gene Symbol: PXN
  Gene Name: paxillin
  Uniprot ID: P49023
  ENSP ID: ENSP00000391283
MDDLDALLADLESTTSHISKRPVFLSEETPYSYPTGNHTYQEIAVPPPVPPPPSSEALNGTILDPLDQWQPSSSRFIHQQPQSSSPVYGSSAKTSSVSNPQDSVGSPCSRVGEEEHVYSFPNKQKSAEPSPTVMSTSLGSNLSELDRLLLELNAVQHNPPGFPADEANSSPPLPGALSPLYGVPETNSPLGGKAGPLTKEKPKRNGGRGLEDVRPSVESLLDELESSVPSPVPAITVNQGEMSSPQRVTSTQQQTRISASSATRELDELMASLSDFKFMAQGKTGSSSPPGGPPKPGSQLDSMLGSLQSDLNKLGVATVAKGVCGACKKPIAGQVVTAMGKTWHPEHFVCTHCQEEIGSRNFFERDGQPYCEKDYHNLFSPRCYYCNGPILDKVVTALDRTWHPEHFFCAQCGAFFGPEGFHEKDGKAYCRKDYFDMFAPKCGGCARAILENYISALNTLWHPECFVCRECFTPFVNGSFFEHDGQPYCEVHYHERRGSLCSGCQKPITGRCITAMAKKFHPEHFVCAFCLKQLNKGTFKEQNDKPYCQNCFLKLFC

SEQ ID NO: 61515 - protein, 424 aa, Homo sapiens
  Payload ID: 12283
  Gene Symbol: PXN
  Gene Name: paxillin
  Uniprot ID: P49023
  ENSP ID: ENSP00000395536
MSTSLGSNLSELDRLLLELNAVQHNPPGFPADEANSSPPLPGALSPLYGVPETNSPLGGKAGPLTKEKPKRNGGRGLEDVRPSVESLLDELESSVPSPVPAITVNQGEMSSPQRVTSTQQQTRISASSATRELDELMASLSDFKFMAQGKTGSSSPPGGPPKPGSQLDSMLGSLQSDLNKLGVATVAKGVCGACKKPIAGQVVTAMGKTWHPEHFVCTHCQEEIGSRNFFERDGQPYCEKDYHNLFSPRCYYCNGPILDKVVTALDRTWHPEHFFCAQCGAFFGPEGFHEKDGKAYCRKDYFDMFAPKCGGCARAILENYISALNTLWHPECFVCRECFTPFVNGSFFEHDGQPYCEVHYHERRGSLCSGCQKPITGRCITAMAKKFHPEHFVCAFCLKQLNKGTFKEQNDKPYCQNCFLKLFC

SEQ ID NO: 61516 - protein, 176 aa, Homo sapiens
  Payload ID: 12283
  Gene Symbol: PXN
  Gene Name: paxillin
  ENSP ID: ENSP00000443745
MAGNKDALLADLESTTSHISKRPVFLSEETPYSYPTGNHTYQEIAVPPPVPPPPSSEALNGTILDPLDQWQPSSSRFIHQQPQSSSPVYGSSAKTSSVSNPQDSVGSPCSRVGEEEHVYSFPNKQKSAEPSPTVMSTSLGSNLSELDRLLLELNAVQHNPPGFPADEANSSPPLPG

SEQ ID NO: 61517 - protein, 589 aa, Homo sapiens
  Payload ID: 12283
  Gene Symbol: PXN
  Gene Name: paxillin
  ENSP ID: ENSP00000443887
MADALLADLESTTSHISKRPVFLSEETPYSYPTGNHTYQEIAVPPPVPPPPSSEALNGTILDPLDQWQPSSSRFIHQQPQSSSPVYGSSAKTSSVSNPQDSVGSPCSRVGEEEHVYSFPNKQKSAEPSPTVMSTSLGSNLSELDRLLLELNAVQHNPPGFPADEANSSPPLPGALSPLYGVPETNSPLGGKAGPLTKEKPKRNGGRGLEDVRPSVESLLDELESSVPSPVPAITVNQGEMSSPQRVTSTQQQTRISASSATRELDELMASLSDFKIQGLEQRADGERCWAAGWPRDGGRSSPGGQDEGGFMAQGKTGSSSPPGGPPKPGSQLDSMLGSLQSDLNKLGVATVAKGVCGACKKPIAGQVVTAMGKTWHPEHFVCTHCQEEIGSRNFFERDGQPYCEKDYHNLFSPRCYYCNGPILDKVVTALDRTWHPEHFFCAQCGAFFGPEGFHEKDGKAYCRKDYFDMFAPKCGGCARAILENYISALNTLWHPECFVCRECFTPFVNGSFFEHDGQPYCEVHYHERRGSLCSGCQKPITGRCITAMAKKFHPEHFVCAFCLKQLNKGTFKEQNDKPYCQNCFLKLFC

SEQ ID NO: 61518 - protein, 36 aa, Homo sapiens
  Payload ID: 12283
  Gene Symbol: PXN
  Gene Name: paxillin
  ENSP ID: ENSP00000446607
MSTSLGSNLSELDRLLLELNAVQHNPPGFPADEANS

SEQ ID NO: 61519 - protein, 31 aa, Homo sapiens
  Payload ID: 12283
  Gene Symbol: PXN
  Gene Name: paxillin
  ENSP ID: ENSP00000446650
MSTSLGSNLSELDRLLLELNAVQHNPPGFPA

SEQ ID NO: 61520 - protein, 91 aa, Homo sapiens
  Payload ID: 12283
  Gene Symbol: PXN
  Gene Name: paxillin
  ENSP ID: ENSP00000446893
MDDLDSEFQTGTSLAAARPCQEGTQCQVPDSQRRPAGGLGVYHLPHLQTACVLVGGDPLLIPNWKPHIPGDCRATPRPPTPVQRGPQWHNP

SEQ ID NO: 61521 - protein, 37 aa, Homo sapiens
  Payload ID: 12283
  Gene Symbol: PXN
  Gene Name: paxillin
  ENSP ID: ENSP00000447180
MSTSLGSNLSELDRLLLELNAVQHNPPGFPADEANSS

SEQ ID NO: 61522 - protein, 171 aa, Homo sapiens
  Payload ID: 12283
  Gene Symbol: PXN
  Gene Name: paxillin
  ENSP ID: ENSP00000449198
  MOD_RES (1)..(1): Any amino acid
XSRKEATPEGRPETCLLPSSPQAQRPIQGLEQRADGERCWAAGWPRDGGRSSPGGQDEGGFMAQGKTGSSSPPGGPPKPGSQLDSMLGSLQSDLNKLGVATVAKGVCGACKKPIAGQVVTAMGKTWHPEHFVCTHCQEEIGSRNFFERDGQPYCEKDYHNLFSPRCYYCNG

SEQ ID NO: 61523 - protein, 254 aa, Homo sapiens
  Payload ID: 12284
  Gene Symbol: PAGR1
  Gene Name: PAXIP1 associated glutamate-rich protein 1
  Uniprot ID: Q9BTK6
  ENSP ID: ENSP00000326519
MSLARGHGDTAASTAAPLSEEGEVTSGLQALAVEDTGGPSASAGKAEDEGEGGREETEREGSGGEEAQGEVPSAGGEEPAEEDSEDWCVPCSDEEVELPADGQPWMPPPSEIQRLYELLAAHGTLELQAEILPRRPPTPEAQSEEERSDEEPEAKEEEEEKPHMPTEFDFDDEPVTPKDSLIDRRRTPGSSARSQKREARLDKVLSDMKRHKKLEEQILRTGRDLFSLDSEDPSPASPPLRSSGSSLFPRQRKY

SEQ ID NO: 61524 - protein, 436 aa, Homo sapiens
  Payload ID: 12285
  Gene Symbol: PKNOX1
  Gene Name: PBX/knotted 1 homeobox 1
  Uniprot ID: P55347
  ENSP ID: ENSP00000291547
MMATQTLSIDSYQDGQQMQVVTELKTEQDPNCSEPDAEGVSPPPVESQTPMDVDKQAIYRHPLFPLLALLFEKCEQSTQGSEGTTSASFDVDIENFVRKQEKEGKPFFCEDPETDNLMVKAIQVLRIHLLELEKVNELCKDFCSRYIACLKTKMNSETLLSGEPGSPYSPVQSQQIQSAITGTISPQGIVVPASALQQGNVAMATVAGGTVYQPVTVVTPQGQVVTQTLSPGTIRIQNSQLQLQLNQDLSILHQDDGSSKNKRGVLPKHATNVMRSWLFQHIGHPYPTEDEKKQIAAQTNLTLLQVNNWFINARRRILQPMLDSSCSETPKTKKKTAQNRPVQRFWPDSIASGVAQPPPSELTMSEGAVVTITTPVNMNVDSLQSLSSDGATLAVQQVMMAGQSEDESVDSTEEDAGALAPAHISGLVLENSDSLQ

SEQ ID NO: 61525 - protein, 319 aa, Homo sapiens
  Payload ID: 12285
  Gene Symbol: PKNOX1
  Gene Name: PBX/knotted 1 homeobox 1
  ENSP ID: ENSP00000402243
MVKAIQVLRIHLLELEKVNELCKDFCSRYIACLKTKMNSETLLSGEPGSPYSPVQSQQIQSAITGTISPQGIVVPASALQQGNVAMATVAGGTVYQPVTVVTPQGQVVTQTLSPGTIRIQNSQLQLQLNQDLSILHQDDGSSKNKRGVLPKHATNVMRSWLFQHIGHPYPTEDEKKQIAAQTNLTLLQVNNWFINARRRILQPMLDSSCSETPKTKKKTAQNRPVQRFWPDSIASGVAQPPPSELTMSEGAVVTITTPVNMNVDSLQSLSSDGATLAVQQVMMAGQSEDESVDSTEEDAGALAPAHISGLVLENSDSLQ

SEQ ID NO: 61526 - protein, 61 aa, Homo sapiens
  Payload ID: 12285
  Gene Symbol: PKNOX1
  Gene Name: PBX/knotted 1 homeobox 1
  ENSP ID: ENSP00000453486
MMATQTLSIDSYQDGQQMQVVTELKTEQDPNCSEPDAEGVSPPPVESQTPMDVDKQAIYRW

SEQ ID NO: 61527 - protein, 472 aa, Homo sapiens
  Payload ID: 12286
  Gene Symbol: PKNOX2
  Gene Name: PBX/knotted 1 homeobox 2
  Uniprot ID: Q96KN3
  ENSP ID: ENSP00000298282
MMQHASPAPALTMMATQNVPPPPYQDSPQMTATAQPPSKAQAVHISAPSAAASTPVPSAPIDPQAQLEADKRAVYRHPLFPLLTLLFEKCEQATQGSECITSASFDVDIENFVHQQEQEHKPFFSDDPELDNLMVKAIQVLRIHLLELEKVNELCKDFCNRYITCLKTKMHSDNLLRNDLGGPYSPNQPSINLHSQDLLQNSPNSMSGVSNNPQGIVVPASALQQGNIAMTTVNSQVVSGGALYQPVTMVTSQGQVVTQAIPQGAIQIQNTQVNLDLTSLLDNEDKKSKNKRGVLPKHATNIMRSWLFQHLMHPYPTEDEKRQIAAQTNLTLLQVNNWFINARRRILQPMLDASNPDPAPKAKKIKSQHRPTQRFWPNSIAAGVLQQQGGAPGTNPDGSINLDNLQSLSSDSATMAMQQAMMAAHDDSLDGTEEEDEDEMEEEEEEELEEEVDELQTTNVSDLGLEHSDSLE

SEQ ID NO: 61528 - protein, 39 aa, Homo sapiens
  Payload ID: 12286
  Gene Symbol: PKNOX2
  Gene Name: PBX/knotted 1 homeobox 2
  ENSP ID: ENSP00000431599
MMQHASPAPALTMMATQNVPPPPYQDSPQMTATAQPPSK

SEQ ID NO: 61529 - protein, 40 aa, Homo sapiens
  Payload ID: 12286
  Gene Symbol: PKNOX2
  Gene Name: PBX/knotted 1 homeobox 2
  ENSP ID: ENSP00000434255
MMQHASPAPALTMMATQNVPPPPYQDSPQMTATAQPPSKA

SEQ ID NO: 61530 - protein, 40 aa, Homo sapiens
  Payload ID: 12286
  Gene Symbol: PKNOX2
  Gene Name: PBX/knotted 1 homeobox 2
  ENSP ID: ENSP00000434377
MMQHASPAPALTMMATQNVPPPPYQDSPQAPSFPAPDAAV

SEQ ID NO: 61531 - protein, 98 aa, Homo sapiens
  Payload ID: 12286
  Gene Symbol: PKNOX2
  Gene Name: PBX/knotted 1 homeobox 2
  ENSP ID: ENSP00000453374
MMQHASPAPALTMMATQNVPPPPYQDSPQMTATAQPPSKAQAVHISAPSAAASTPVPSAPIDPQAQLEADKRAVYRHPLFPLLTLLFEKCEQATQGSE

SEQ ID NO: 61532 - protein, 329 aa, Homo sapiens
  Payload ID: 12287
  Gene Symbol: PSIP1
  Gene Name: PC4 and SFRS1 interacting protein 1
  Uniprot ID: O75475
  ENSP ID: ENSP00000370091
MTRDFKPGDLIFAKMKGYPHWPARVDEVPDGAVKPPTNKLPIFFFGTHETAFLGPKDIFPYSENKEKYGKPNKRKGFNEGLWEIDNNPKVKFSSQQAATKQSNASSDVEVEEKETSVSKEDTDHEEKASNEDVTKAVDITTPKAARRGRKRKAEKQVETEEAGVVTTATASVNLKVSPKRGRPAATEVKIPKPRGRPKMVKQPCPSESDIITEEDKSKKKGQEEKQPKKQPKKDEEGQKEEDKPRKEPDKKEGKKEVESKRKNLAKTGVTSTSDSEEEGDDQEGEKKRKGGRNFQTAHRRNMLKGQHEKEAADRKRKQEEQMETEHFAL

SEQ ID NO: 61533 - protein, 333 aa, Homo sapiens
  Payload ID: 12287
  Gene Symbol: PSIP1
  Gene Name: PC4 and SFRS1 interacting protein 1
  Uniprot ID: O75475
  ENSP ID: ENSP00000370092
MTRDFKPGDLIFAKMKGYPHWPARVDEVPDGAVKPPTNKLPIFFFGTHETAFLGPKDIFPYSENKEKYGKPNKRKGFNEGLWEIDNNPKVKFSSQQAATKQSNASSDVEVEEKETSVSKEDTDHEEKASNEDVTKAVDITTPKAARRGRKRKAEKQVETEEAGVVTTATASVNLKVSPKRGRPAATEVKIPKPRGRPKMVKQPCPSESDIITEEDKSKKKGQEEKQPKKQPKKDEEGQKEEDKPRKEPDKKEGKKEVESKRKNLAKTGVTSTSDSEEEGDDQEGEKKRKGGRNFQTAHRRNMLKGQHEKEAADRKRKQEEQMETEHQTTCNLQ

SEQ ID NO: 61534 - protein, 530 aa, Homo sapiens
  Payload ID: 12287
  Gene Symbol: PSIP1
  Gene Name: PC4 and SFRS1 interacting protein 1
  Uniprot ID: O75475
  ENSP ID: ENSP00000370109
MTRDFKPGDLIFAKMKGYPHWPARVDEVPDGAVKPPTNKLPIFFFGTHETAFLGPKDIFPYSENKEKYGKPNKRKGFNEGLWEIDNNPKVKFSSQQAATKQSNASSDVEVEEKETSVSKEDTDHEEKASNEDVTKAVDITTPKAARRGRKRKAEKQVETEEAGVVTTATASVNLKVSPKRGRPAATEVKIPKPRGRPKMVKQPCPSESDIITEEDKSKKKGQEEKQPKKQPKKDEEGQKEEDKPRKEPDKKEGKKEVESKRKNLAKTGVTSTSDSEEEGDDQEGEKKRKGGRNFQTAHRRNMLKGQHEKEAADRKRKQEEQMETEQQNKDEGKKPEVKKVEKKRETSMDSRLQRIHAEIKNSLKIDNLDVNRCIEALDELASLQVTMQQAQKHTEMITTLKKIRRFKVSQVIMEKSTMLYNKFKNMFLVGEGDSVITQVLNKSLAEQRQHEEANKTKDQGKKGPNKKLEKEQTGSKTLNGGSDAQDGNQPQHNGESNEDSKDNHEASTKKKPSSEERETEISLKDSTLDN

SEQ ID NO: 61535 - protein, 530 aa, Homo sapiens; identical to SEQ ID NO: 61534
  Payload ID: 12287
  Gene Symbol: PSIP1
  Gene Name: PC4 and SFRS1 interacting protein 1
  Uniprot ID: O75475
  ENSP ID: ENSP00000370114

SEQ ID NO: 61536 - protein, 333 aa, Homo sapiens; identical to SEQ ID NO: 61533
  Payload ID: 12287
  Gene Symbol: PSIP1
  Gene Name: PC4 and SFRS1 interacting protein 1
  Uniprot ID: O75475
  ENSP ID: ENSP00000380653

SEQ ID NO: 61537 - protein, 65 aa, Homo sapiens
  Payload ID: 12287
  Gene Symbol: PSIP1
  Gene Name: PC4 and SFRS1 interacting protein 1
  ENSP ID: ENSP00000477077
KRKGGRNFQTAHRRNMLKGQHEKEAADRKRKQEEQMETEHINPVTEKRIQVEQTRDEDLDTDSLD

SEQ ID NO: 61538 - protein, 403 aa, Homo sapiens
  Payload ID: 12288
  Gene Symbol: PCED1A
  Gene Name: PC-esterase domain containing 1A
  Uniprot ID: Q9H1Q7
  ENSP ID: ENSP00000349334
MVFCLSSEEPRRPLRSDMVHFQASEVQQLLHNKFVVILGDSIQRAVYKDLVLLLQKDSLLTAAQLKAKYLEDVLEELTYGPAPDLVIINSCLWDLSRYGRCSMESYRENLERVFVRMDQVLPDSCLLVWNMAMPLGERITGGFLLPELQPLAGSLRRDVVEGNFYSATLAGDHCFDVLDLHFHFRHAVQHRHRDGVHWDQHAHRHLSHLLLTHVADAWGVELPKRGYPPDPWIEDWAEMNHPFQGSHRQTPDFGEHLALLPPPPSSLPPPMPFPYPLPQPSPPPLFPPLPQDTPFFPGQPFPPHEFFNYNPVEDFSMPPHLGCGPGVNFVPGPLPPPIPGPNPHGQHWGPVVHRGMPRYVPNSPYHVRRMGGPCRQRLRHSERLIHTYKLDRRPPAHSGTWPG

SEQ ID NO: 61539 - protein, 454 aa, Homo sapiens
  Payload ID: 12288
  Gene Symbol: PCED1A
  Gene Name: PC-esterase domain containing 1A
  Uniprot ID: Q9H1Q7
  ENSP ID: ENSP00000353868
MVFCLSSEEPRRPLRSDMVHFQASEVQQLLHNKFVVILGDSIQRAVYKDLVLLLQKDSLLTAAQLKAKGELSFEQDQLVAGGQLGELHNGTQYREVRQFCSGSGHHLVRFYFLTRVYSEYLEDVLEELTYGPAPDLVIINSCLWDLSRYGRCSMESYRENLERVFVRMDQVLPDSCLLVWNMAMPLGERITGGFLLPELQPLAGSLRRDVVEGNFYSATLAGDHCFDVLDLHFHFRHAVQHRHRDGVHWDQHAHRHLSHLLLTHVADAWGVELPKRGYPPDPWIEDWAEMNHPFQGSHRQTPDFGEHLALLPPPPSSLPPPMPFPYPLPQPSPPPLFPPLPQDTPFFPGQPFPPHEFFNYNPVEDFSMPPHLGCGPGVNFVPGPLPPPIPGPNPHGQHWGPVVHRGMPRYVPNSPYHVRRMGGPCRQRLRHSERLIHTYKLDRRPPAHSGTWPG

SEQ ID NO: 61540 - protein, 229 aa, Homo sapiens
  Payload ID: 12288
  Gene Symbol: PCED1A
  Gene Name: PC-esterase domain containing 1A
  ENSP ID: ENSP00000388935
MVFCLSSEEPRRPLRSDMVHFQASEVQQLLHNKFVVILGDSIQRAVYKDLVLLLQKDSLLTAAQLKAKYLEDVLEELTYGPAPDLVIINSCLWDLSRYGRCSMESYRENLERVFVRMDQVLPDSCLLVWNMAMPLGERITGGFLLPELQPLAGSLRRDVVEGNFYSATLAGDHCFDVLDLHFHFRHAVQHRHRDGVHWDQHAHRHLSHLLLTHVADAWGVELPKRGYPP

SEQ ID NO: 61541 - protein, 280 aa, Homo sapiens
  Payload ID: 12288
  Gene Symbol: PCED1A
  Gene Name: PC-esterase domain containing 1A
  ENSP ID: ENSP00000401711
MVFCLSSEEPRRPLRSDMVHFQASEVQQLLHNKFVVILGDSIQRAVYKDLVLLLQKDSLLTAAQLKAKGELSFEQDQLVAGGQLGELHNGTQYREVRQFCSGSGHHLVRFYFLTRVYSEYLEDVLEELTYGPAPDLVIINSCLWDLSRYGRCSMESYRENLERVFVRMDQVLPDSCLLVWNMAMPLGERITGGFLLPELQPLAGSLRRDVVEGNFYSATLAGDHCFDVLDLHFHFRHAVQHRHRDGVHWDQHAHRHLSHLLLTHVADAWGVELPKRGYPP

SEQ ID NO: 61542 - protein, 127 aa, Homo sapiens
  Payload ID: 12288
  Gene Symbol: PCED1A
  Gene Name: PC-esterase domain containing 1A
  ENSP ID: ENSP00000474824
  MOD_RES (1)..(1): Any amino acid
XHAVQHRHRDGVHWDQHAHRHLSHLLLTHVADAWGVELPKRGYPPGCGPGVNFVPGPLPPPIPGPNPHGQHWGPVVHRGMPRYVPNSPYHVRRMGGPCRQRLRHSERLIHTYKLDRRPPAHSGTWPG

SEQ ID NO: 61543 - protein, 432 aa, Homo sapiens
  Payload ID: 12289
  Gene Symbol: PCED1B
  Gene Name: PC-esterase domain containing 1B
  Uniprot ID: Q96HM7
  ENSP ID: ENSP00000396040
MILLRASEVRQLLHNKFVVILGDSVHRAVYKDLVLLLQKDRLLTPGQLRARGELNFEQDELVDGGQRGHMHNGLNYREVREFRSDHHLVRFYFLTRVYSDYLQTILKELQSGEHAPDLVIMNSCLWDISRYGPNSWRSYLENLENLFQCLGQVLPESCLLVWNTAMPVGEEVTGGFLPPKLRRQKATFLKNEVVKANFHSATEARKHNFDVLDLHFHFRHARENLHWDGVHWNGRVHRCLSQLLLAHVADAWGVELPHRHPVGEWIKKKKPGPRVEGPPQANRNHPALPLSPPLPSPTYRPLLGFPPQRLPLLPLLSPQPPPPILHHQGMPRFPQGPPDACFSSDHTFQSDQFYCHSDVPSSAHAGFFVEDNFMVGPQLPMPFFPTPRYQRPAPVVHRGFGRYRPRGPYTPWGQRPRPSKRRAPANPEPRPQ

SEQ ID NO: 61544 - protein, 432 aa, Homo sapiens; identical to SEQ ID NO: 61543
  Payload ID: 12289
  Gene Symbol: PCED1B
  Gene Name: PC-esterase domain containing 1B
  Uniprot ID: Q96HM7
  ENSP ID: ENSP00000446688

SEQ ID NO: 61545 - protein, 167 aa, Homo sapiens
  Payload ID: 12289
  Gene Symbol: PCED1B
  Gene Name: PC-esterase domain containing 1B
  ENSP ID: ENSP00000448000
MILLRASEVRQLLHNKFVVILGDSVHRAVYKDLVLLLQKDRLLTPGQLRARGELNFEQDELVDGGQRGHMHNGLNYREVREFRSDHHLVRFYFLTRVYSDYLQTILKELQSGEHAPDLVIMNSCLWDISRYGPNSWRSYLENLENLFQCLGQVLPESCLLVWNTAMP

SEQ ID NO: 61546 - protein, 189 aa, Homo sapiens
  Payload ID: 12289
  Gene Symbol: PCED1B
  Gene Name: PC-esterase domain containing 1B
  ENSP ID: ENSP00000448693
MNSCLWDISRYGPNSWRSYLENLENLFQCLGQVLPESCLLVWNTAMPVGEEVTGGFLPPKLRRQKATFLKNEVVKANFHSATEARKHNFDVLDLHFHFRHARENLHWDGVHWNGRVHRCLSQLLLAHVADAWGVELPHRHPVGEWIKKKKPGPRVEGPPQANRNHPALPLSPPLPSPTYRPLLGFPPQR

SEQ ID NO: 61547 - protein, 58 aa, Homo sapiens
  Payload ID: 12289
  Gene Symbol: PCED1B
  Gene Name: PC-esterase domain containing 1B
  ENSP ID: ENSP00000448926
MILLRASEVRQLLHNKFVVILGDSVHRAVYKDLVLLLQKDRLLTPGQLRARGELNFEQ

SEQ ID NO: 61548 - protein, 167 aa, Homo sapiens; identical to SEQ ID NO: 61545
  Payload ID: 12289
  Gene Symbol: PCED1B
  Gene Name: PC-esterase domain containing 1B
  ENSP ID: ENSP00000449680

SEQ ID NO: 61549 - protein, 1555 aa, Homo sapiens
  Payload ID: 12290
  Gene Symbol: PCF11
  Gene Name: PCF11 cleavage and polyadenylation factor subunit
  Uniprot ID: O94913
  ENSP ID: ENSP00000298281
MSEQTPAEAGAAGAREDACRDYQSSLEDLTFNSKPHINMLTILAEENLPFAKEIVSLIEAQTAKAPSSEKLPVMYLMDSIVKNVGREYLTAFTKNLVATFICVFEKVDENTRKSLFKLRSTWDEIFPLKKLYALDVRVNSLDPAWPIKPLPPNVNTSSIHVNPKFLNKSPEEPSTPGTVVSSPSISTPPIVPDIQKNLTQEQLIRQQLLAKQKQLLELQQKKLELELEQAKAQLAVSLSVQQETSNLGPGSAPSKLHVSQIPPMAVKAPHQVPVQSEKSRPGPSLQIQDLKGTNRDPRLNRISQHSHGKDQSHRKEFLMNTLNQSDTKTSKTIPSEKLNSSKQEKSKSGEKITKKELDQLDSKSKSKSKSPSPLKNKLSHTKDLKNQESESMRLSDMNKRDPRLKKHLQDKTDGKDDDVKEKRKTAEKKDKDEHMKSSEHRLAGSRNKIINGIVQKQDTITEESEKQGTKPGRSSTRKRSRSRSPKSRSPIIHSPKRRDRRSPKRRQRSMSPTSTPKAGKIRQSGAKQSHMEEFTPPSREDRNAKRSTKQDIRDPRRMKKTEEERPQETTNQHSTKSGTEPKENVENWQSSKSAKRWKSGWEENKSLQQVDEHSKPPHLRHRESWSSTKGILSPRAPKQQQHRLSVDANLQIPKELTLASKRELLQKTSERLASGEITQDDFLVVVHQIRQLFQYQEGVREEQRSPFNDRFPLKRPRYEDSDKPFVDSPASRFAGLDTNQRLTALAEDRPLFDGPSRPSVARDGPTKMIFEGPNKLSPRIDGPPTPASLRFDGSPGQMGGGGPLRFEGPQGQLGGGCPLRFEGPPGPVGTPLRFEGPIGQAGGGGFRFEGSPGLRFEGSPGGLRFEGPGGQPVGGLRFEGHRGQPVGGLRFEGPHGQPVGGLRFDNPRGQPVGGLRFEGGHGPSGAAIRFDGPHGQPGGGIRFEGPLLQQGVGMRFEGPHGQSVAGLRFEGQHNQLGGNLRFEGPHGQPGVGIRFEGPLVQQGGGMRFEGPSVPGGGLRIEGPLGQGGPRFEGCHALRFDGQPGQPSLLPRFDGLHGQPGPRFERTPGQPGPQRFDGPPGQQVQPRFDGVPQRFDGPQHQQASRFDIPLGLQGTRFDNHPSQRLESVSFNQTGPYNDPPGNAFNAPSQGLQFQRHEQIFDSPQGPNFNGPHGPGNQSFSNPLNRASGHYFDEKNLQSSQFGNFGNIPAPMTVGNIQASQQVLSGVAQPVAFGQGQQFLPVHPQNPGFVQNPSGALPKAYPDNHLSQVDVNELFSKLLKTGILKLSQTDSATTQVSEVTAQPPPEEEEDQNEDQDVPDLTNFTVEELKQRYDSVINRLYTGIQCYSCGMRFTTSQTDVYADHLDWHYRQNRTEKDVSRKVTHRRWYYSLTDWIEFEEIADLEERAKSQFFEKVHEEVVLKTQEAAKEKEFQSVPAGPAGAVESCEICQEQFEQYWDEEEEEWHLKNAIRVDGKIYHPSCYEDYQNTSSFDCTPSPSKTPVENPLNIMLNIVKNELQEPCDSPKVKEERIDTPPACTEESIATPSEIKTENDTVESV

SEQ ID NO: 61550 - protein, 784 aa, Homo sapiens
  Payload ID: 12290
  Gene Symbol: PCF11
  Gene Name: PCF11 cleavage and polyadenylation factor subunit
  ENSP ID: ENSP00000431567
MSEQTPAEAGAAGAREDACRDYQSSLEDLTFNSKPHINMLTILAEENLPFAKEIVSLIEAQTAKAPSSEKLPVMYLMDSIVKNVGREYLTAFTKNLVATFICVFEKVDENTRKSLFKLRSTWDEIFPLKKLYALDVRVNSLDPAWPIKPLPPNVNTSSIHVNPKFLNKSPEEPSTPGTVVSSPSISTPPIVPDIQKNLTQEQLIRQQLLAKQKQLLELQQKKLELELEQAKAQLAVSLSVQQETSNLGPGSAPSKLHVSQIPPMAVKAPHQVPVQSEKSRPGPSLQIQDLKGTNRDPRLNRISQHSHGKDQSHRKEFLMNTLNQSDTKTSKTIPSEKLNSSKQEKSKSGEKITKKELDQLDSKSKSKSKSPSPLKNKLSHTKDLKNQESESMRLSDMNKRDPRLKKHLQDKTDGKDDDVKEKRKTAEKKDKDEHMKSSEHRLAGSRNKIINGIVQKQDTITEESEKQGTKPGRSSTRKRSRSRSPKSRSPIIHSPKRRDRRSPKRRQRSMSPTSTPKAGKIRQSGAKQSHMEEFTPPSREDRNAKRSTKQDIRDPRRMKKTEEERPQETTNQHSTKSGTEPKENVENWQSSKSAKRWKSGWEENKSLQQVDEHSKPPHLRHRESWSSTKGILSPRAPKQQQHRLSVDANLQIPKELTLASKRELLQKTSERLASGEITQDDFLVVVHQIRQLFQYQEGVREEQRSPFNDRFPLKRPRYEDSDKPFVDSPASRFAGLDTNQRLTALAEDRPLFDGPSRPSVARDGPTKMIFEGPNKLSPRIDGPP

SEQ ID NO: 61551 - protein, 998 aa, Homo sapiens
  Payload ID: 12290
  Gene Symbol: PCF11
  Gene Name: PCF11 cleavage and polyadenylation factor subunit
  ENSP ID: ENSP00000434540
MSEQTPAEAGAAGAREDACRDYQSSLEDLTFNSKPHINMLTILAEENLPFAKEIVSLIEAQTAKAPSSEKLPVMYLMDSIVKNVGREYLTAFTKNLVATFICVFEKVDENTRKSLFKLRSTWDEIFPLKKLYALDVRVNSLDPAWPIKPLPPNVNTSSIHVNPKFLNKSPEEPSTPGTVVSSPSISTPPIVPDIQKNLTQEQLIRQQLLAKQKQLLELQQKKLELELEQAKAQLAVSLSVQQETSNLGPGSAPSKLHVSQIPPMAVKAPHQVPVQSEKSRPGPSLQIQDLKGTNRDPRLNRISQHSHGKDQSHRKEFLMNTLNQSDTKTSKTIPSEKLNSSKQEKSKSGEKITKKELDQLDSKSKSKSKSPSPLKNKLSHTKDLKNQESESMRLSDMNKRDPRLKKHLQDKTDGKDDDVKEKRKTAEKKDKDEHMKSSEHRLAGSRNKIINGIVQKQDTITEESEKQGTKPGRSSTRKRSRSRSPKSRSPIIHSPKRRDRRSPKRRQRSMSPTSTPKAGKIRQSGAKQSHMEEFTPPSREDRNAKRSTKQDIRDPRRMKKTEEERPQETTNQHSTKSGTEPKENVENWQSSKSAKRWKSGWEENKSLQQVDEHSKPPHLRHRESWSSTKGILSPRAPKQQQHRLSVDANLQIPKELTLASKRELLQKTSERLASGEITQDDFLVVVHQIRQLFQYQEGKHRCNVRDSPTEENKGGLKKKPLLSDAELTYYEHKAKLKRTQVQHSFPRLDLLDPDIFDYPLTDALLSGIECEPSKSKHASRNSGAQFDRKEQFSERARRLSPISGSRTYAENLSPHEGRRRHDEQVSAKGVREEQRSPFNDRFPLKRPRYEDSDKPFVDSPASRFAGLDTNQRLTALAEDRPLFDGPSRPSVARDGPTKMIFEGPNKLSPRIDGPPTPASLRFDGSPGQMGGGGPLRFEGPQGQLGGGCPLRFEGPPGPVGTPLRFEGPIGQAGGGGFRFEGSPGLRFEGSPGGLRFEG

SEQ ID NO: 61552 - protein, 99 aa, Homo sapiens
  Payload ID: 12290
  Gene Symbol: PCF11
  Gene Name: PCF11 cleavage and polyadenylation factor subunit
  ENSP ID: ENSP00000436806
MSEQTPAEAGAAGAREDACRDYQSSLEDLTFNSKPHINMLTILAEENLPFAKEIVSLIEAQTAKVDENTRKSLFKLRSTWDEIFPLKKLYALDVRVNSL

SEQ ID NO: 61553 - protein, 198 aa, Homo sapiens
  Payload ID: 12290
  Gene Symbol: PCF11
  Gene Name: PCF11 cleavage and polyadenylation factor subunit
  ENSP ID: ENSP00000437076
MLTCLVLSGVAQPVAFGQGQQFLPVHPQNPGFVQNPSGALPKAYPDNHLSQVDVNELFSKLLKTGILKLSQTDSATTQVSEVTAQPPPEEEEDQNEDQDVPDLTNFTVEELKQRYDSVINRLYTGIQCYSCGMRFTTSQTDVYADHLDWHYRQNRTEKDVSRKVTHRRWYYSLTDWIEFEEIADLEERAKSQFFEKVH

SEQ ID NO: 61554 - protein, 725 aa, Homo sapiens
  Payload ID: 12290
  Gene Symbol: PCF11
  Gene Name: PCF11 cleavage and polyadenylation factor subunit
  ENSP ID: ENSP00000479505
MSEQTPAEAGAAGAREDACRDYQSSLEDLTFNSKPHINMLTILAEENLPFAKEIVSLIEAQTAKAPSSEKLPVMYLMDSIVKNVGREYLTAFTKNLVATFICVFEKVDENTRKSLFKLRSTWDEIFPLKKLYALDVRVNSLDPAWPIKPLPPNVNTSSIHVNPKFLNKSPEEPSTPGTVVSSPSISTPPIVPDIQKNLTQEQLIRQQLLAKQKQLLELQQKKLELELEQAKAQLAVSLSVQQETSNLGPGSAPSKLHVSQIPPMAVKAPHQVPVQSEKSRPGPSLQIQDLKGTNRDPRLNRISQHSHGKDQSHRKEFLMNTLNQSDTKTSKTIPSEKLNSSKQEKSKSGEKITKKELDQLDSKSKSKSKSPSPLKNKLSHTKDLKNQESESMRLSDMNKRDPRLKKHLQDKTDGKDDDVKEKRKTAEKKDKDEHMKSSEHRLAGSRNKIINGIVQKQDTITEESEKQGTKPGRSSTRKRSRSRSPKSRSPIIHSPKRRDRRSPKRRQRSMSPTSTPKAGKIRQSGAKQSHMEEFTPPSREDRNAKRSTKQDIRDPRRMKKTEEERPQETTNQHSTKSGTEPKENVENWQSSKSAKRWKSGWEENKSLQQVDEHSKPPHLRHRESWSSTKGILSPRAPKQQQHRLSVDANLQIPKELTLASKRELLQKTSERLASGEITQDDFLVVVHQIRQLFQYQEGVREEQRSPFNDRFHLSDLDMKIQINHL

SEQ ID NO: 61555 - protein, 453 aa, Homo sapiens
  Payload ID: 12291
  Gene Symbol: PCID2
  Gene Name: PCI domain containing 2
  Uniprot ID: Q5JVF3
  ENSP ID: ENSP00000246505
MAHITINQYLQQVYEAIDSRDGASCAELVSFKHPHVANPRLQMASPEEKCQQVLEPPYDEMFAAHLRCTYAVGNHDFIEAYKCQTVIVQYPLSFMAAVPHRTHAVDYLGLETRKHWASCSFLQLERNDSVLEQKLVSALSLGTSFLRAFQAHKEENWALPVMYAVALDLRVFANNADQQLVKKGKSKVGDMLEKAAELLMSCFRVCASDTRAGIEDSKKWGMLFLVNQLFKIYFKINKLHLCKPLIRAIDSSNLKDDYSTAQRVTYKYYVGRKAMFDSDFKQAEEYLSFAFEHCHRSSQKNKRMILIYLLPVKMLLGHMPTVELLKKYHLMQFAEVTRAVSEGNLLLLHEALAKHEAFFIRCGIFLILEKLKIITYRNLFKKVYLLLKTHQLSLDAFLVALKFMQVEDVDIDEVQCILANLIYMGHVKGYISHQHQKLVVSKQNPFPPLSTVC

SEQ ID NO: 61556 - protein, 399 aa, Homo sapiens
  Payload ID: 12291
  Gene Symbol: PCID2
  Gene Name: PCI domain containing 2
  Uniprot ID: Q5JVF3
  ENSP ID: ENSP00000337405
MAHITINQYLQQVYEAIDSRDGASCAELVSFKHPHVANPRLQMASPEEKCQQVLEPPYDEMFAAHLRCTYAVGNHDFIEAYKCQTVIVQSFLRAFQAHKEENWALPVMYAVALDLRVFANNADQQLVKKGKSKVGDMLEKAAELLMSCFRVCASDTRAGIEDSKKWGMLFLVNQLFKIYFKINKLHLCKPLIRAIDSSNLKDDYSTAQRVTYKYYVGRKAMFDSDFKQAEEYLSFAFEHCHRSSQKNKRMILIYLLPVKMLLGHMPTVELLKKYHLMQFAEVTRAVSEGNLLLLHEALAKHEAFFIRCGIFLILEKLKIITYRNLFKKVYLLLKTHQLSLDAFLVALKFMQVEDVDIDEVQCILANLIYMGHVKGYISHQHQKLVVSKQNPFPPLSTVC

SEQ ID NO: 61557 - protein, 397 aa, Homo sapiens
  Payload ID: 12291
  Gene Symbol: PCID2
  Gene Name: PCI domain containing 2
  Uniprot ID: Q5JVF3
  ENSP ID: ENSP00000364606
MRLTDVVQQLVYEAIDSRDGASCAELVSFKHPHVANPRLQMASPEEKCQQVLEPPYDEMFAAHLRCTYAVGNHDFIEAYKCQTVIVQSFLRAFQAHKEENWALPVMYAVALDLRVFANNADQQLVKKGKSKVGDMLEKAAELLMSCFRVCASDTRAGIEDSKKWGMLFLVNQLFKIYFKINKLHLCKPLIRAIDSSNLKDDYSTAQRVTYKYYVGRKAMFDSDFKQAEEYLSFAFEHCHRSSQKNKRMILIYLLPVKMLLGHMPTVELLKKYHLMQFAEVTRAVSEGNLLLLHEALAKHEAFFIRCGIFLILEKLKIITYRNLFKKVYLLLKTHQLSLDAFLVALKFMQVEDVDIDEVQCILANLIYMGHVKGYISHQHQKLVVSKQNPFPPLSTVC

SEQ ID NO: 61558 - protein, 397 aa, Homo sapiens; identical to SEQ ID NO: 61557
  Payload ID: 12291
  Gene Symbol: PCID2
  Gene Name: PCI domain containing 2
  Uniprot ID: Q5JVF3
  ENSP ID: ENSP00000364608

SEQ ID NO: 61559 - protein, 399 aa, Homo sapiens; identical to SEQ ID NO: 61556
  Payload ID: 12291
  Gene Symbol: PCID2
  Gene Name: PCI domain containing 2
  Uniprot ID: Q5JVF3
  ENSP ID: ENSP00000364626

SEQ ID NO: 61560 - protein, 399 aa, Homo sapiens; identical to SEQ ID NO: 61556
  Payload ID: 12291
  Gene Symbol: PCID2
  Gene Name: PCI domain containing 2
  Uniprot ID: Q5JVF3
  ENSP ID: ENSP00000364628

SEQ ID NO: 61561 - protein, 453 aa, Homo sapiens; identical to SEQ ID NO: 61555
  Payload ID: 12291
  Gene Symbol: PCID2
  Gene Name: PCI domain containing 2
  Uniprot ID: Q5JVF3
  ENSP ID: ENSP00000479494

SEQ ID NO: 61562 - protein, 181 aa, Homo sapiens
  Payload ID: 12292
  Gene Symbol: PDAP1
  Gene Name: PDGFA associated protein 1
  Uniprot ID: Q13442
  ENSP ID: ENSP00000222968
MPKGGRKGGHKGRARQYTSPEEIDAQLQAEKQKAREEEEQKEGGDGAAGDPKKEKKSLDSDESEDEEDDYQQKRKGVEGLIDIENPNRVAQTTKKVTQLDLDGPKELSRREREEIEKQKAKERYMKMHLAGKTEQAKADLARLAIIRKQREEAARKKEEERKAKDDATLSGKRMQSLSLNK

SEQ ID NO: 61563 - protein, 39 aa, Homo sapiens
  Payload ID: 12292
  Gene Symbol: PDAP1
  Gene Name: PDGFA associated protein 1
  ENSP ID: ENSP00000411287
MPKGGRKGGHKGRARQYTSPEEIDAQLQAEKQKARVVHF

SEQ ID NO: 61564 - protein, 39 aa, Homo sapiens; identical to SEQ ID NO: 61563
  Payload ID: 12292
  Gene Symbol: PDAP1
  Gene Name: PDGFA associated protein 1
  ENSP ID: ENSP00000486021

SEQ ID NO: 61565 - protein, 341 aa, Homo sapiens
  Payload ID: 12293
  Gene Symbol: PDIK1L
  Gene Name: PDLIM1 interacting kinase 1 like
  Uniprot ID: Q8N165
  ENSP ID: ENSP00000363387
MVSSQPKYDLIREVGRGSYGVVYEAVIRKTSARVAVKKIRCHAPENVELALREFWALSSIKSQHPNVIHLEECILQKDGMVQKMSHGSNSSLYLQLVETSLKGEIAFDPRSAYYLWFVMDFCDGGDMNEYLLSRKPNRKTNTSFMLQLSSALAFLHKNQIIHRDLKPDNILISQTRLDTSDLEPTLKVADFGLSKVCSASGQNPEEPVSVNKCFLSTACGTDFYMAPEVWEGHYTAKADIFALGIIIWAMLERITFIDTETKKELLGSYVKQGTEIVPVGEALLENPKMELLIPVKKKSMNGRMKQLIKEMLAANPQDRPDAFELELRLVQIAFKDSSWET

SEQ ID NO: 61566 - protein, 341 aa, Homo sapiens; identical to SEQ ID NO: 61565
  Payload ID: 12293
  Gene Symbol: PDIK1L
  Gene Name: PDLIM1 interacting kinase 1 like
  Uniprot ID: Q8N165
  ENSP ID: ENSP00000363389

SEQ ID NO: 61567 - protein, 191 aa, Homo sapiens
  Payload ID: 12293
  Gene Symbol: PDIK1L
  Gene Name: PDLIM1 interacting kinase 1 like
  ENSP ID: ENSP00000406510
MVSSQPKYDLIREVGRGSYGVVYEAVIRKTSARVAVKKIRCHAPENVELALREFWALSSIKSQHPNVIHLEECILQKDGMVQKMSHGSNSSLYLQLVETSLKGEIAFDPRSAYYLWFVMDFCDGGDMNEYLLSRKPNRKTNTSFMLQLSSALAFLHKNQIIHRDLKPDNILISQTRLDTSDLEPTLKVADF

SEQ ID NO: 61568 - protein, 341 aa, Homo sapiens; identical to SEQ ID NO: 61565
  Payload ID: 12293
  Gene Symbol: PDIK1L
  Gene Name: PDLIM1 interacting kinase 1 like
  Uniprot ID: Q8N165
  ENSP ID: ENSP00000480635

SEQ ID NO: 61569 - protein, 1337 aa, Homo sapiens
  Payload ID: 12294
  Gene Symbol: PDS5A
  Gene Name: PDS5 cohesin associated factor A
  Uniprot ID: Q29RF7
  ENSP ID: ENSP00000303427
MDFTAQPKPATALCGVVSADGKIAYPPGVKEITDKITTDEMIKRLKMVVKTFMDMDQDSEDEKQQYLPLALHLASEFFLRNPNKDVRLLVACCLADIFRIYAPEAPYTSHDKLKDIFLFITRQLKGLEDTKSPQFNRYFYLLENLAWVKSYNICFELEDCNEIFIQLFRTLFSVINNSHNKKVQMHMLDLMSSIIMEGDGVTQELLDSILINLIPAHKNLNKQSFDLAKVLLKRTVQTIEACIANFFNQVLVLGRSSVSDLSEHVFDLIQELFAIDPHLLLSVMPQLEFKLKSNDGEERLAVVRLLAKLFGSKDSDLATQNRPLWQCFLGRFNDIHVPVRLESVKFASHCLMNHPDLAKDLTEYLKVRSHDPEEAIRHDVIVTIITAAKRDLALVNDQLLGFVRERTLDKRWRVRKEAMMGLAQLYKKYCLHGEAGKEAAEKVSWIKDKLLHIYYQNSIDDKLLVEKIFAQYLVPHNLETEERMKCLYYLYASLDPNAVKALNEMWKCQNMLRSHVRELLDLHKQPTSEANCSAMFGKLMTIAKNLPDPGKAQDFVKKFNQVLGDDEKLRSQLELLISPTCSCKQADICVREIARKLANPKQPTNPFLEMVKFLLERIAPVHIDSEAISALVKLMNKSIEGTADDEEEGVSPDTAIRSGLELLKVLSFTHPTSFHSAETYESLLQCLRMEDDKVAEAAIQIFRNTGHKIETDLPQIRSTLIPILHQKAKRGTPHQAKQAVHCIHAIFTNKEVQLAQIFEPLSRSLNADVPEQLITPLVSLGHISMLAPDQFASPMKSVVANFIVKDLLMNDRSTGEKNGKLWSPDEEVSPEVLAKVQAIKLLVRWLLGMKNNQSKSANSTLRLLSAMLVSEGDLTEQKRISKSDMSRLRLAAGSAIMKLAQEPCYHEIITPEQFQLCALVINDECYQVRQIFAQKLHKALVKLLLPLEYMAIFALCAKDPVKERRAHARQCLLKNISIRREYIKQNPMATEKLLSLLPEYVVPYMIHLLAHDPDFTRSQDVDQLRDIKECLWFMLEVLMTKNENNSHAFMKKMAENIKLTRDAQSPDESKTNEKLYTVCDVALCVINSKSALCNADSPKDPVLPMKFFTQPEKDFCNDKSYISEETRVLLLTGKPKPAGVLGAVNKPLSATGRKPYVRSTGTETGSNINVNSELNPSTGNRSREQSSEAAETGVSENEENPVRIISVTPVKNIDPVKNKEINSDQATQGNISSDRGKKRTVTAAGAENIQQKTDEKVDESGPPAPSKPRRGRRPKSESQGNATKNDDLNKPINKGRKRAAVGQESPGGLEAGNAKAPKLQDLAKKAAPAERQIDLQR

SEQ ID NO: 61570 - protein, 126 aa, Homo sapiens
  Payload ID: 12294
  Gene Symbol: PDS5A
  Gene Name: PDS5 cohesin associated factor A
  ENSP ID: ENSP00000424510
LIPILHQKAKRGTPHQAKQAVHCIHAIFTNKEVQLAQIFEPLSRSLNADVPEQLITPLVSLGHISMLAPDQFASPMKSVVANFIVKDLLMNDRSTGEKNGKLWSPDEEVSPEVLAKHFGRQSRRIA

SEQ ID NO: 61571 - protein, 165 aa, Homo sapiens
  Payload ID: 12294
  Gene Symbol: PDS5A
  Gene Name: PDS5 cohesin associated factor A
  ENSP ID: ENSP00000424531
  MOD_RES (1)..(1): Any amino acid
XLPLALHLASEFFLRNPNKDVRLLVACCLADIFRIYAPEAPYTSHDKLKWRVRKEAMMGLAQLYKKYCLHGEAGKEAAEKVSWIKDKLLHIYYQNSIDDKLLVEKIFAQYLVPHNLETEERMKCLYYLYASLDPNAVKALNEMWKCQNMLRSHVRELLDLHKQPT

SEQ ID NO: 61572 - protein, 43 aa, Homo sapiens
  Payload ID: 12294
  Gene Symbol: PDS5A
  Gene Name: PDS5 cohesin associated factor A
  ENSP ID: ENSP00000425386
SNDGEERLAVVRLLAKLFGSKDSDLATQNRPLWQCFLGRIFKG

SEQ ID NO: 61573 - protein, 600 aa, Homo sapiens
  Payload ID: 12294
  Gene Symbol: PDS5A
  Gene Name: PDS5 cohesin associated factor A
  Uniprot ID: Q29RF7
  ENSP ID: ENSP00000426749
MDFTAQPKPATALCGVVSADGKIAYPPGVKEITDKITTDEMIKRLKMVVKTFMDMDQDSEDEKQQYLPLALHLASEFFLRNPNKDVRLLVACCLADIFRIYAPEAPYTSHDKLKDIFLFITRQLKGLEDTKSPQFNRYFYLLENLAWVKSYNICFELEDCNEIFIQLFRTLFSVINNSHNKKVQMHMLDLMSSIIMEGDGVTQELLDSILINLIPAHKNLNKQSFDLAKVLLKRTVQTIEACIANFFNQVLVLGRSSVSDLSEHVFDLIQELFAIDPHLLLSVMPQLEFKLKSNDGEERLAVVRLLAKLFGSKDSDLATQNRPLWQCFLGRFNDIHVPVRLESVKFASHCLMNHPDLAKDLTEYLKVRSHDPEEAIRHDVIVTIITAAKRDLALVNDQLLGFVRERTLDKRWRVRKEAMMGLAQLYKKYCLHGEAGKEAAEKVSWIKDKLLHIYYQNSIDDKLLVEKIFAQYLVPHNLETEERMKCLYYLYASLDPNAVKALNEMWKCQNMLRSHVRELLDLHKQPTSEANCSAMFGKLMTIAKNLPDPGKAQDFVKKFNQVLGDDEKLRSQLELLISPTCSCKQADICVVSKSYFTLFL

SEQ ID NO: 61574 - protein, 1447 aa, Homo sapiens
  Payload ID: 12295
  Gene Symbol: PDS5B
  Gene Name: PDS5 cohesin associated factor B
  Uniprot ID: Q9NTI5
  ENSP ID: ENSP00000313851
MAHSKTRTNDGKITYPPGVKEISDKISKEEMVRRLKMVVKTFMDMDQDSEEEKELYLNLALHLASDFFLKHPDKDVRLLVACCLADIFRIYAPEAPYTSPDKLKDIFMFITRQLKGLEDTKSPQFNRYFYLLENIAWVKSYNICFELEDSNEIFTQLYRTLFSVINNGHNQKVHMHMVDLMSSIICEGDTVSQELLDTVLVNLVPAHKNLNKQAYDLAKALLKRTAQAIEPYITNFFNQVLMLGKTSISDLSEHVFDLILELYNIDSHLLLSVLPQLEFKLKSNDNEERLQVVKLLAKMFGAKDSELASQNKPLWQCYLGRFNDIHVPIRLECVKFASHCLMNHPDLAKDLTEYLKVRSHDPEEAIRHDVIVSIVTAAKKDILLVNDHLLNFVRERTLDKRWRVRKEAMMGLAQIYKKYALQSAAGKDAAKQIAWIKDKLLHIYYQNSIDDRLLVERIFAQYMVPHNLETTERMKCLYYLYATLDLNAVKALNEMWKCQNLLRHQVKDLLDLIKQPKTDASVKAIFSKVMVITRNLPDPGKAQDFMKKFTQVLEDDEKIRKQLEVLVSPTCSCKQAEGCVREITKKLGNPKQPTNPFLEMIKFLLERIAPVHIDTESISALIKQVNKSIDGTADDEDEGVPTDQAIRAGLELLKVLSFTHPISFHSAETFESLLACLKMDDEKVAEAALQIFKNTGSKIEEDFPHIRSALLPVLHHKSKKGPPRQAKYAIHCIHAIFSSKETQFAQIFEPLHKSLDPSNLEHLITPLVTIGHIALLAPDQFAAPLKSLVATFIVKDLLMNDRLPGKKTTKLWVPDEEVSPETMVKIQAIKMMVRWLLGMKNNHSKSGTSTLRLLTTILHSDGDLTEQGKISKPDMSRLRLAAGSAIVKLAQEPCYHEIITLEQYQLCALAINDECYQVRQVFAQKLHKGLSRLRLPLEYMAICALCAKDPVKERRAHARQCLVKNINVRREYLKQHAAVSEKLLSLLPEYVVPYTIHLLAHDPDYVKVQDIEQLKDVKECLWFVLEILMAKNENNSHAFIRKMVENIKQTKDAQGPDDAKMNEKLYTVCDVAMNIIMSKSTTYSLESPKDPVLPARFFTQPDKNFSNTKNYLPPEMKSFFTPGKPKTTNVLGAVNKPLSSAGKQSQTKSSRMETVSNASSSSNPSSPGRIKGRLDSSEMDHSENEDYTMSSPLPGKKSDKRDDSDLVRSELEKPRGRKKTPVTEQEEKLGMDDLTKLVQEQKPKGSQRSRKRGHTASESDEQQWPEEKRLKEDILENEDEQNSPPKKGKRGRPPKPLGGGTPKEEPTMKTSKKGSKKKSGPPAPEEEEEEERQSGNTEQKSKSKQHRVSRRAQQRAESPESSAIESTQSTPQKGRGRPSKTPSPSQPKKNVRVGRSKQAATKENDSSEEVDVFQGSSPVDDIPQEETEEEEVSTVNVRRRSAKRERR

SEQ ID NO: 61575 - protein, 1391 aa, Homo sapiens
  Payload ID: 12295
  Gene Symbol: PDS5B
  Gene Name: PDS5 cohesin associated factor B
  Uniprot ID: Q9NTI5
  ENSP ID: ENSP00000401619
MAHSKTRTNDGKITYPPGVKEISDKISKEEMVRRLKMVVKTFMDMDQDSEEEKELYLNLALHLASDFFLKHPDKDVRLLVACCLADIFRIYAPEAPYTSPDKLKDIFMFITRQLKGLEDTKSPQFNRYFYLLENIAWVKSYNICFELEDSNEIFTQLYRTLFSVINNGHNQKVHMHMVDLMSSIICEGDTVSQELLDTVLVNLVPAHKNLNKQAYDLAKALLKRTAQAIEPYITNFFNQVLMLGKTSISDLSEHVFDLILELYNIDSHLLLSVLPQLEFKLKSNDNEERLQVVKLLAKMFGAKDSELASQNKPLWQCYLGRFNDIHVPIRLECVKFASHCLMNHPDLAKDLTEYLKVRSHDPEEAIRHDVIVSIVTAAKKDILLVNDHLLNFVRERTLDKRWRVRKEAMMGLAQIYKKYALQSAAGKDAAKQIAWIKDKLLHIYYQNSIDDRLLVERIFAQYMVPHNLETTERMKCLYYLYATLDLNAVKALNEMWKCQNLLRHQVKDLLDLIKQPKTDASVKAIFSKVMVITRNLPDPGKAQDFMKKFTQVLEDDEKIRKQLEVLVSPTCSCKQAEGCVREITKKLGNPKQPTNPFLEMIKFLLERIAPVHIDTESISALIKQVNKSIDGTADDEDEGVPTDQAIRAGLELLKVLSFTHPISFHSAETFESLLACLKMDDEKVAEAALQIFKNTGSKIEEDFPHIRSALLPVLHHKSKKGPPRQAKYAIHCIHAIFSSKETQFAQIFEPLHKSLDPSNLEHLITPLVTIGHIALLAPDQFAAPLKSLVATFIVKDLLMNDRLPGKKTTKLWVPDEEVSPETMVKIQAIKMMVRWLLGMKNNHSKSGTSTLRLLTTILHSDGDLTEQGKISKPDMSRLRLAAGSAIVKLAQEPCYHEIITLEQYQLCALAINDECYQVRQVFAQKLHKGLSRLRLPLEYMAICALCAKDPVKERRAHARQCLVKNINVRREYLKQHAAVSEKLLSLLPEYVVPYTIHLLAHDPDYVKVQDIEQLKDVKECLWFVLEILMAKNENNSHAFIRKMVENIKQTKDAQGPDDAKMNEKLYTVCDVAMNIIMSKSTTYSLESPKDPVLPARFFTQPDKNFSNTKNYLPPEMKSFFTPGKPKTTNVLGAVNKPLSSAGKQSQTKSSRMETVSNASSSSNPSSPGRIKGRLDSSEMDHSENEDYTMSSPLPGKKSDKRDDSDLVRSELEKPRGRKKTPVTEQEEKLGMDDLTKLVQEQKPKGSQRSRKRGHTASESDEQQWPEEKRLKEDILENEDEQNSPPKKGKRGRPPKPLGGGTPKEEPTMKTSKKGSKKKSGPPAPEEEEEEERQSGNTEQKSKSKQHRVSRRAQQRAESPESSAIESTQSTPQKGRGRPSKTPSPSQPKKNV

SEQ ID NO: 61576 - protein, 302 aa, Homo sapiens
  Payload ID: 12295
  Gene Symbol: PDS5B
  Gene Name: PDS5 cohesin associated factor B
  ENSP ID: ENSP00000407005
IKQTKDAQGPDDAKMNEKLYTVCDVAMNIIMSKSTTYSLESPKDPVLPARFFTQPDKNFSNTKNYLPPEMKSFFTPGKPKTTNVLGAVNKPLSSAGKQSQTKSSRMETVSNASSSSNPSSPGRIKGRLDSSEMDHSENEDYTMSSPLPGKKSDKRDDSDLSELEKPRGRKKTPVTEQEEKLGMDDLTKLVQEQKPKGSQRSRKRGHTASESDEQQWPEEKRLKEDILENEDEQNSPPKKGKRGRPPKPLGGGTPKEEPTMKTSKKGSKKKSGPPAPEEEEEEERQSGNTEQKSKSKQHRVSR

SEQ ID NO: 61577 - protein, 704 aa, Homo sapiens
  Payload ID: 12296
  Gene Symbol: PCIF1
  Gene Name: PDX1 C-terminal inhibiting factor 1
  Uniprot ID: Q9H4Z3
  ENSP ID: ENSP00000361486
MANENHGSPREEASLLSHSPGTSNQSQPCSPKPIRLVQDLPEELVHAGWEKCWSRRENRPYYFNRFTNQSLWEMPVLGQHDVISDPLGLNATPLPQDSSLVETPPAENKPRKRQLSEEQPSGNGVKKPKIEIPVTPTGQSVPSSPSIPGTPTLKMWGTSPEDKQQAALLRPTEVYWDLDIQTNAVIKHRGPSEVLPPHPEVELLRSQLILKLRQHYRELCQQREGIEPPRESFNRWMLERKVVDKGSDPLLPSNCEPVVSPSMFREIMNDIPIRLSRIKFREEAKRLLFKYAEAARRLIESRSASPDSRKVVKWNVEDTFSWLRKDHSASKEDYMDRLEHLRRQCGPHVSAAAKDSVEGICSKIYHISLEYVKRIREKHLAILKENNISEEVEAPEVEPRLVYCYPVRLAVSAPPMPSVEMHMENNVVCIRYKGEMVKVSRNYFSKLWLLYRYSCIDDSAFERFLPRVWCLLRRYQMMFGVGLYEGTGLQGSLPVHVFEALHRLFGVSFECFASPLNCYFRQYCSAFPDTDGYFGSRGPCLDFAPLSGSFEANPPFCEELMDAMVSHFERLLESSPEPLSFIVFIPEWREPPTPALTRMEQSRFKRHQLILPAFEHEYRSGSQHICKKEEMHYKAVHNTAVLFLQNDPGFAKWAPTPERLQELSAAYRQSGRSHSSGSSSSSSSEAKDRDSGREQGPSREPHPT

SEQ ID NO: 61578 - protein, 304 aa, Homo sapiens
  Payload ID: 12296
  Gene Symbol: PCIF1
  Gene Name: PDX1 C-terminal inhibiting factor 1
  ENSP ID: ENSP00000480607
  MOD_RES (1)..(1): Any amino acid
XLKENNISEEVEAPEVEPRLVYCYPVRLAVSAPPMPSVEMHMENNVVCIRYKGEMVKVSRNYFSKLWLLYRYSCIDDSAFERFLPRVWCLLRRYQMMFGVGLYEGTGLQGSLPVHVFEALHRLFGVSFECFASPLNCYFRQYCSAFPDTDGYFGSRGPCLDFAPLSGSFEANPPFCEELMDAMVSHFERLLESSPEPLSFIVFIPEWREPPTPALTRMEQSRFKRHQLILPAFEHEYRSGSQHICKKWVPGRAGEGGWAGQARPSPTLSHCLCPQGGNALQGRPQHGCALPTERPWLCQVGADA

SEQ ID NO: 61579 - protein, 329 aa, Homo sapiens
  Payload ID: 12297
  Gene Symbol: PDLIM1
  Gene Name: PDZ and LIM domain 1
  Uniprot ID: O00151
  ENSP ID: ENSP00000360305
MTTQQIDLQGPGPWGFRLVGGKDFEQPLAISRVTPGSKAALANLCIGDVITAIDGENTSNMTHLEAQNRIKGCTDNLTLTVARSEHKVWSPLVTEEGKRHPYKMNLASEPQEVLHIGSAHNRSAMPFTASPASSTTARVITNQYNNPAGLYSSENISNFNNALESKTAASGVEANSRPLDHAQPPSSLVIDKESEVYKMLQEKQELNEPPKQSTSFLVLQEILESEEKGDPNKPSGFRSVKAPVTKVAASIGNAQKLPMCDKCGTGIVGVFVKLRDRHRHPECYVCTDCGTNLKQKGHFFVEDQIYCEKHARERVTPPEGYEVVTVFPK

SEQ ID NO: 61580 - protein, 366 aa, Homo sapiens
  Payload ID: 12298
  Gene Symbol: PDLIM2
  Gene Name: PDZ and LIM domain 2 (mystique)
  Uniprot ID: Q96JY6
  ENSP ID: ENSP00000265810
MALTVDVAGPAPWGFRITGGRDFHTPIMVTKVAERGKAKDADLRPGDIIVAINGESAEGMLHAEAQSKIRQSPSPLRLQLDRSQATSPGQTNGDSSLEVLATRFQGSVRTYTESQSSLRSSYSSPTSLSPRAGSPFSPPPSSSSLTGEAAISRSFQSLACSPGLPAADRLSYSGRPGSRQAGLGRAGDSAVLVLPPSPGPRSSRPSMDSEGGSLLLDEDSEVFKMLQENREGRAAPRQSSSFRLLQEALEAEERGGTPAFLPSSLSPQSSLPASRALATPPKLHTCEKCSTSIANQAVRIQEGRYRHPGCYTCADCGLNLKMRGHFWEDACAMEGMRLSLEALEGMVEGAKRRDRRKTRRPIQPSW

SEQ ID NO: 61581 - protein, 602 aa, Homo sapiens
  Payload ID: 12298
  Gene Symbol: PDLIM2
  Gene Name: PDZ and LIM domain 2 (mystique)
  Uniprot ID: Q96JY6
  ENSP ID: ENSP00000312634
MRGGRARPAWESFMGLPPRSSAKWGAGQSLDRLCCAPGSRGLAGAPGRMRAPPAGRSQPAGGPGDSLPHPPGGLGPGGSAWARRAEAAASRARGGGRGGPGITWAEAGPGAPGGLSPESGRRQRERWRLPAFPPSRAWAPSRTGERQPGERAHLRLSARPALPGAGLLSAPLSARNPGLVRGPAPWSLASAGAPPRAALSPAGALLLQPPARRVLCPRSEGGSRTGRAGPSGWAPPRGARSAESTDRLKGMALTVDVAGPAPWGFRITGGRDFHTPIMVTKVAERGKAKDADLRPGDIIVAINGESAEGMLHAEAQSKIRQSPSPLRLQLDRSQATSPGQTNGDSSLEVLATRFQGSVRTYTESQSSLRSSYSSPTSLSPRAGSPFSPPPSSSSLTGEAAISRSFQSLACSPGLPAADRLSYSGRPGSRQAGLGRAGDSAVLVLPPSPGPRSSRPSMDSEGGSLLLDEDSEVFKMLQENREGRAAPRQSSSFRLLQEALEAEERGGTPAFLPSSLSPQSSLPASRALATPPKLHTCEKCSTSIANQAVRIQEGRYRHPGCYTCADCGLNLKMRGHFWVGDELYCEKHARQRYSAPATLSSRA

SEQ ID NO: 61582 - protein, 602 aa, Homo sapiens; identical to SEQ ID NO: 61581
  Payload ID: 12298
  Gene Symbol: PDLIM2
  Gene Name: PDZ and LIM domain 2 (mystique)
  Uniprot ID: Q96JY6
  ENSP ID: ENSP00000342035

SEQ ID NO: 61583 - protein, 352 aa, Homo sapiens
  Payload ID: 12298
  Gene Symbol: PDLIM2
  Gene Name: PDZ and LIM domain 2 (mystique)
  Uniprot ID: Q96JY6
  ENSP ID: ENSP00000380867
MALTVDVAGPAPWGFRITGGRDFHTPIMVTKVAERGKAKDADLRPGDIIVAINGESAEGMLHAEAQSKIRQSPSPLRLQLDRSQATSPGQTNGDSSLEVLATRFQGSVRTYTESQSSLRSSYSSPTSLSPRAGSPFSPPPSSSSLTGEAAISRSFQSLACSPGLPAADRLSYSGRPGSRQAGLGRAGDSAVLVLPPSPGPRSSRPSMDSEGGSLLLDEDSEVFKMLQENREGRAAPRQSSSFRLLQEALEAEERGGTPAFLPSSLSPQSSLPASRALATPPKLHTCEKCSTSIANQAVRIQEGRYRHPGCYTCADCGLNLKMRGHFWVGDELYCEKHARQRYSAPATLSSRA

SEQ ID NO: 61584 - protein, 352 aa, Homo sapiens; identical to SEQ ID NO: 61583
  Payload ID: 12298
  Gene Symbol: PDLIM2
  Gene Name: PDZ and LIM domain 2 (mystique)
  Uniprot ID: Q96JY6
  ENSP ID: ENSP00000380868

SEQ ID NO: 61585 - protein, 278 aa, Homo sapiens
  Payload ID: 12298
  Gene Symbol: PDLIM2
  Gene Name: PDZ and LIM domain 2 (mystique)
  Uniprot ID: Q96JY6
  ENSP ID: ENSP00000386868
MALTVDVAGPAPWGFRITGGRDFHTPIMVTKVAERGKAKDADLRPGDIIVAINGESAEGMLHAEAQSKIRQSPSPLRLQLDRSQATSPGQTNGDSSLEVLATRFQGSVRTYTESQSSLRSSYSSPTSLSPRAGSPFSPPPSSSSLTGEAAISRSFQSLACSPGLPAADRLSYSGRPGSRQAGLGRAGDSAVLVLPPSPGPRSSRPSMDSEGGSLLLDEDSEVFKMLQENREGRAAPRQSSSFRLLQEALEAEERGTRLCASRRAGTATPAATPVPTVG

SEQ ID NO: 61586 - protein, 352 aa, Homo sapiens; identical to SEQ ID NO: 61583
  Payload ID: 12298
  Gene Symbol: PDLIM2
  Gene Name: PDZ and LIM domain 2 (mystique)
  Uniprot ID: Q96JY6
  ENSP ID: ENSP00000387084

SEQ ID NO: 61587 - protein, 173 aa, Homo sapiens
  Payload ID: 12298
  Gene Symbol: PDLIM2
  Gene Name: PDZ and LIM domain 2 (mystique)
  ENSP ID: ENSP00000392920
MALTVDVAGPAPWGFRITGGRDFHTPIMVTKVAERGKAKDADLRPGDIIVAINGESAEGMLHAEAQSKIRQSPSPLRLQLDRSQATSPGQTNGDSSLEVLATRFQGSVRTYTESQSSLRSSYSSPTSLSPRAGSPFSPPPSSSSLTGEAAISRSFQSLACSPGLPAADRLSYS

SEQ ID NO: 61588 - protein, 254 aa, Homo sapiens
  Payload ID: 12298
  Gene Symbol: PDLIM2
  Gene Name: PDZ and LIM domain 2 (mystique)
  ENSP ID: ENSP00000394376
MALTVDVAGPAPWGFRITGGRDFHTPIMVTKVAERGKAKDADLRPGDIIVAINGESAEGMLHAEAQSKIRQSPSPLRLQLDRSQATSPGQTNGDSSLEVLATRFQGSVRTYTESQSSLRSSYSSPTSLSPRAGSPFSPPPSSSSLTGEAAISRSFQSLACSPGLPAADRLSYSGRPGSRQAGLGRAGDSAVLVLPPSPGPRSSRPSMDSEGGSLLLDEDSEVFKMLQENREGRAAPRQSSSFRLLQEALEAEER

SEQ ID NO: 61589 - protein, 153 aa, Homo sapiens
  Payload ID: 12298
  Gene Symbol: PDLIM2
  Gene Name: PDZ and LIM domain 2 (mystique)
  ENSP ID: ENSP00000397738
MALTVDVAGPAPWGFRITGGRDFHTPIMVTKVAERGKAKDADLRPGDIIVAINGESAEGMLHAEAQSKIRQSPSPLRLQLDRSQATSPGQTNGDSSLEVLATRFQGSVRTYTESQSSLRSSYSSPTSLSPRAGSPFSPPPSSSSLTGEAAISR

SEQ ID NO: 61590 - protein, 235 aa, Homo sapiens
  Payload ID: 12298
  Gene Symbol: PDLIM2
  Gene Name: PDZ and LIM domain 2 (mystique)
  ENSP ID: ENSP00000401992
MALTVDVAGPAPWGFRITGGRDFHTPIMVTKVAERGKAKDADLRPGDIIVAINGESAEGMLHAEAQSKIRQSPSPLRLQLDRSQATSPGQTNGDSSLEVLATRFQGSVRTYTESQSSLRSSYSSPTSLSPRAGSPFSPPPSSSSLTGEAAISRSFQSLACSPGLPAADRLSYSGRPGSRQAGLGRAGDSAVLVLPPSPGPRSSRPSMDSEGGSLLLDEDSEVFKMLQENREGRAA

SEQ ID NO: 61591 - protein, 180 aa, Homo sapiens
  Payload ID: 12298
  Gene Symbol: PDLIM2
  Gene Name: PDZ and LIM domain 2 (mystique)
  ENSP ID: ENSP00000407643
MALTVDVAGPAPWGFRITGGRDFHTPIMVTKVAERGKAKDADLRPGDIIVAINGESAEGMLHAEAQSKIRQSPSPLRLQLDRSQATSPGQTNGDSSLEVLATRFQGSVRTYTESQSSLRSSYSSPTSLSPRAGSPFSPPPSSSSLTGEAAISRSFQSLACSPGLPAADRLSYSGRPGSRQ

SEQ ID NO: 61592 - protein, 38 aa, Homo sapiens
  Payload ID: 12298
  Gene Symbol: PDLIM2
  Gene Name: PDZ and LIM domain 2 (mystique)
  ENSP ID: ENSP00000412936
MALTVDVAGPAPWGFRITGGRDFHTPIMVTKAAIWGDY

SEQ ID NO: 61593 - protein, 146 aa, Homo sapiens
  Payload ID: 12298
  Gene Symbol: PDLIM2
  Gene Name: PDZ and LIM domain 2 (mystique)
  ENSP ID: ENSP00000477546
MDSEGGSLLLDEDSEVFKMLQENREGRAAPRQSSSFRLLQEALEAEERGGTPAFLPSSLSPQSSLPASRALATPPKLHTCEKCSTSIANQAVRIQEGRYRHPGCYTCADCGLNLKMRGHFWVGDELYCEKHARQRYSAPATLSSRA

SEQ ID NO: 61594 - protein, 18 aa, Homo sapiens
  Payload ID: 12298
  Gene Symbol: PDLIM2
  Gene Name: PDZ and LIM domain 2 (mystique)
  ENSP ID: ENSP00000478370
MALTVDVAGPAPWGFRIT

SEQ ID NO: 61595 - protein, 72 aa, Homo sapiens
  Payload ID: 12298
  Gene Symbol: PDLIM2
  Gene Name: PDZ and LIM domain 2 (mystique)
  ENSP ID: ENSP00000478826
MDSEGGSLLLDEDSEVFKMLQENREGRAAPRQSSSFRLLQEALEAEERGTRLCASRRAGTATPAATPVPTVG

SEQ ID NO: 61596 - protein, 325 aa, Homo sapiens [sequence omitted]

SEQ ID NO: 61597 - protein, 137 aa, Homo sapiens
  Payload ID: 12298
  Gene Symbol: PDLIM2
  Gene Name: PDZ and LIM domain 2 (mystique)
  ENSP ID: ENSP00000481074
GQTNGDSSLEVLATRFQGSVRTYTESQSSLRSSYSSPTSLSPRAGSPFSPPPSSSSLTGEAAISRSFQSLACSPGLPAADRLSYSGRPGSRQHGLGRGKPPPGRGLGSLQDAAGKSRGTGGPPTVQLLSALAGSPGG

SEQ ID NO: 61598 - protein, 146 aa, Homo sapiens; identical to SEQ ID NO: 61593
  Payload ID: 12298
  Gene Symbol: PDLIM2
  Gene Name: PDZ and LIM domain 2 (mystique)
  ENSP ID: ENSP00000481268

SEQ ID NO: 61599 - protein, 276 aa, Homo sapiens
  Payload ID: 12299
  Gene Symbol: PDLIM3
  Gene Name: PDZ and LIM domain 3
  ENSP ID: ENSP00000284767
MPQTVILPGPAPWGFRLSGGIDFNQPLVITRITPGSKAAAANLCPGDVILAIDGFGTESMTHADAQDRIKAAAHQLCLKIDRGETHLWSPQVSEDGKAHPFKINLESEPQDGNYFEHKHNIRPKPFVIPGRSSEPTASVPPESDVYRMLHDNRNEPTQPRQSGSFRVLQGMVDDGSDDRPAGTRSVRAPVTKVHGGSGGAQRMPLCDKCGSGIVGAVVKARDKYRHPECFVCADCNLNLKQKGYFFIEGELYCETHARARTKPPEGYDTVTLYPKA

SEQ ID NO: 61600 - protein, 364 aa, Homo sapiens
  Payload ID: 12299
  Gene Symbol: PDLIM3
  Gene Name: PDZ and LIM domain 3
  Uniprot ID: Q53GG5
  ENSP ID: ENSP00000284770
MPQTVILPGPAPWGFRLSGGIDFNQPLVITRITPGSKAAAANLCPGDVILAIDGFGTESMTHADAQDRIKAAAHQLCLKIDRGETHLWSPQVSEDGKAHPFKINLESEPQDGNYFEHKHNIRPKPFVIPGRSSGCSTPSGIDCGSGRSTPSSVSTVSTICPGDLKVAAKLAPNIPLEMELPGVKIVHAQFNTPMQLYSDDNIMETLQGQVSTALGETPLMSEPTASVPPESDVYRMLHDNRNEPTQPRQSGSFRVLQGMVDDGSDDRPAGTRSVRAPVTKVHGGSGGAQRMPLCDKCGSGIVGAVVKARDKYRHPECFVCADCNLNLKQKGYFFIEGELYCETHARARTKPPEGYDTVTLYPKA

SEQ ID NO: 61601 - protein, 316 aa, Homo sapiens
  Payload ID: 12299
  Gene Symbol: PDLIM3
  Gene Name: PDZ and LIM domain 3
  Uniprot ID: Q53GG5
  ENSP ID: ENSP00000284771
MPQTVILPGPAPWGFRLSGGIDFNQPLVITRITPGSKAAAANLCPGDVILAIDGFGTESMTHADAQDRIKAAAHQLCLKIDRGETHLWSPQVSEDGKAHPFKINLESEPQEFKPIGTAHNRRAQPFVAAANIDDKRQVVSASYNSPIGLYSTSNIQDALHGQLRGLIPSSPQNEPTASVPPESDVYRMLHDNRNEPTQPRQSGSFRVLQGMVDDGSDDRPAGTRSVRAPVTKVHGGSGGAQRMPLCDKCGSGIVGAVVKARDKYRHPECFVCADCNLNLKQKGYFFIEGELYCETHARARTKPPEGYDTVTLYPKA

SEQ ID NO: 61602 - protein, 42 aa, Homo sapiens
  Payload ID: 12299
  Gene Symbol: PDLIM3
  Gene Name: PDZ and LIM domain 3
  ENSP ID: ENSP00000421972
MPQTVILPGPAPWGFRLSGGIDFNQPLVITRGRNSLMVSTSI

SEQ ID NO: 61603 - protein, 42 aa, Homo sapiens; identical to SEQ ID NO: 61602
  Payload ID: 12299
  Gene Symbol: PDLIM3
  Gene Name: PDZ and LIM domain 3
  ENSP ID: ENSP00000425138

SEQ ID NO: 61604 - protein, 197 aa, Homo sapiens
  Payload ID: 12299
  Gene Symbol: PDLIM3
  Gene Name: PDZ and LIM domain 3
  ENSP ID: ENSP00000481771
MPQTVILPGPAPWGFRLSGGIDFNQPLVITRDGNYFEHKHNIRPKPFVIPGRSSEPTASVPPESDVYRMLHDNRNEPTQPRQSGSFRVLQGMVDDGSDDRPAGTRSVRAPVTKVHGGSGGAQRMPLCDKCGSGIVGAVVKARDKYRHPECFVCADCNLNLKQKGYFFIEGELYCETHARARTKPPEGYDTVTLYPKA

SEQ ID NO: 61605 - protein, 42 aa, Homo sapiens; identical to SEQ ID NO: 61602
  Payload ID: 12299
  Gene Symbol: PDLIM3
  Gene Name: PDZ and LIM domain 3
  ENSP ID: ENSP00000486107

SEQ ID NO: 61606 - protein, 330 aa, Homo sapiens
  Payload ID: 12300
  Gene Symbol: PDLIM4
  Gene Name: PDZ and LIM domain 4
  Uniprot ID: P50479
  ENSP ID: ENSP00000253754
MPHSVTLRGPSPWGFRLVGGRDFSAPLTISRVHAGSKAALAALCPGDLIQAINGESTELMTHLEAQNRIKGCHDHLTLSVSRPEGRSWPSAPDDSKAQAHRIHIDPEIQDGSPTTSRRPSGTGTGPEDGRPSLGSPYGQPPRFPVPHNGSSEATLPAQMSTLHVSPPPSADPARGLPRSRDCRVDLGSEVYRMLREPAEPVAAEPKQSGSFRYLQGMLEAGEGGDWPGPGGPRNLKPTASKLGAPLSGLQGLPECTRCGHGIVGTIVKARDKLYHPECFMCSDCGLNLKQRGYFFLDERLYCESHAKARVKPPEGYDVVAVYPNAKVELV

SEQ ID NO: 61607 - protein, 246 aa, Homo sapiens
  Payload ID: 12300
  Gene Symbol: PDLIM4
  Gene Name: PDZ and LIM domain 4
  Uniprot ID: P50479
  ENSP ID: ENSP00000368303
MPHSVTLRGPSPWGFRLVGGRDFSAPLTISRVHAGSKAALAALCPGDLIQAINGESTELMTHLEAQNRIKGCHDHLTLSVSRPEGRSWPSAPDDSKAQAHRIHIDPEIQDGSPTTSRRPSGTGTGPEDGRPSLGSPYGQPPRFPVPHNGSSEATLPAQMSTLHVSPPPSADPARGLPRSRDCRVDLGSEVYRMLREPAEPVAAEPKQSGSFRYLQGMLEAGEGGAPSSRHGTSSTIPSASCAVTAA

SEQ ID NO: 61608 - protein, 121 aa, Homo sapiens
  Payload ID: 12300
  Gene Symbol: PDLIM4
  Gene Name: PDZ and LIM domain 4
  ENSP ID: ENSP00000411753
MTHLEAQNRIKGCHDHLTLSVSRPEGRSWPSAPDDSKAQAHRIHIDPEIQDGSPTTSRRPSGTGTGPEDGRPSLGSPYGQPPRFPVPHNGSSEATLPAQMSTLHVSPPPSADPARGLPRSR

SEQ ID NO: 61609 - protein, 596 aa, Homo sapiens
  Payload ID: 12301
  Gene Symbol: PDLIM5
  Gene Name: PDZ and LIM domain 5
  Uniprot ID: Q96HC4
  ENSP ID: ENSP00000321746
MSNYSVSLVGPAPWGFRLQGGKDFNMPLTISSLKDGGKAAQANVRIGDVVLSIDGINAQGMTHLEAQNKIKGCTGSLNMTLQRASAAPKPEPVPVQKGEPKEVVKPVPITSPAVSKVTSTNNMAYNKAPRPFGSVSSPKVTSIPSPSSAFTPAHATTSSHASPSPVAAVTPPLFAASGLHANANLSADQSPSALSAGKTAVNVPRQPTVTSVCSETSQELAEGQRRGSQGDSKQQNGPPRKHIVERYTEFYHVPTHSDASKKRLIEDTEDWRPRTGTTQSRSFRILAQITGTEHLKESEADNTKKANNSQEPSPQLASSVASTRSMPESLDSPTSGRPGVTSLTAAAAFKPVGSTGVIKSPSWQRPNQGVPSTGRISNSATYSGSVAPANSALGQTQPSDQDTLVQRAEHIPAGKRTPMCAHCNQVIRGPFLVALGKSWHPEEFNCAHCKNTMAYIGFVEEKGALYCELCYEKFFAPECGRCQRKILGEVISALKQTWHVSCFVCVACGKPIRNNVFHLEDGEPYCETDYYALFGTICHGCEFPIEAGDMFLEALGYTWHDTCFVCSVCCESLEGQTFFSKKDKPLCKKHAHSVNF

SEQ ID NO: 61610 - protein, 214 aa, Homo sapiens
  Payload ID: 12301
  Gene Symbol: PDLIM5
  Gene Name: PDZ and LIM domain 5
  Uniprot ID: Q96HC4
  ENSP ID: ENSP00000322021
MSNYSVSLVGPAPWGFRLQGGKDFNMPLTISSLKDGGKAAQANVRIGDVVLSIDGINAQGMTHLEAQNKIKGCTGSLNMTLQRASAAPKPEPVPVQKKTQVTNNPGTVKIPPKRPPRKHIVERYTEFYHVPTHSDASKKRLIEDTEDWRPRTGTTQSRSFRILAQITGTEHLKESEADNTKKAKEKIPLHVFSPKYTKLRDWHHEVSARALNVQ

SEQ ID NO: 61611 - protein, 136 aa, Homo sapiens
  Payload ID: 12301
  Gene Symbol: PDLIM5
  Gene Name: PDZ and LIM domain 5
  Uniprot ID: Q96HC4
  ENSP ID: ENSP00000352210
MSNYSVSLVGPAPWGFRLQGGKDFNMPLTISSAGVQWRNLGSPQPPSPEFKRFSCLSLPSSWDYRHVPPRLANFVFLVETKFPYVGQAGLELPTSGDLPTSASQSAKITGVSHRAWPTLFYTLLFFATIYPEIILY

SEQ ID NO: 61612 - protein, 234 aa, Homo sapiens
  Payload ID: 12301
  Gene Symbol: PDLIM5
  Gene Name: PDZ and LIM domain 5
  Uniprot ID: Q96HC4
  ENSP ID: ENSP00000369527
MSNYSVSLVGPAPWGFRLQGGKDFNMPLTISSLKDGGKAAQANVRIGDVVLSIDGINAQGMTHLEAQNKIKGCTGSLNMTLQRASAAPKPEPVPVQKPTVTSVCSETSQELAEGQRRGSQGDSKQQNGKIPPKRPPRKHIVERYTEFYHVPTHSDASKKRLIEDTEDWRPRTGTTQSRSFRILAQITGTEHLKESEADNTKKAKEKIPLHVFSPKYTKLRDWHHEVSARALNVQ

SEQ ID NO: 61613 - protein, 271 aa, Homo sapiens
  Payload ID: 12301
  Gene Symbol: PDLIM5
  Gene Name: PDZ and LIM domain 5
  ENSP ID: ENSP00000398469
MPESLDSPTSGRPGVTSLTAAAAFKPVGSTGVIKSPSWQRPNQGVPSTGRISNSATYSGSVAPANSALGQTQPSDQDTLVQRAEHIPAGKRTPMCAHCNQVIRGPFLVALGKSWHPEEFNCAHCKNTMAYIGFVEEKGALYCELCYEKFFAPECGRCQRKILGEVISALKQTWHVSCFVCVACGKPIRNNVFHLEDGEPYCETDYYALFGTICHGCEFPIEAGDMFLEALGYTWHDTCFVCSVCCESLEGQTFFSKKDKPLCKKHAHSVNF

SEQ ID NO: 61614 - protein, 231 aa, Homo sapiens
  Payload ID: 12301
  Gene Symbol: PDLIM5
  Gene Name: PDZ and LIM domain 5
  ENSP ID: ENSP00000422528
  MOD_RES (1)..(1): Any amino acid
XASKKRLIEDTEDWRPRTGTTQSRSFRILAQITGTEHLKESEADNTKKANNSQEPSPQLASSVASTRSMPESLDSPTSGRPGVTSLTAAAAFKPVGSTGVIKSPSWQRPNQGVPSTGRISNSATYSGSVAPANSALGQTQPSDQDTLVQRAEHIPAGKRTPMCAHCNQVIRGPFLVALGKSWHPEEFNCAHCKNTMAYIGFVEEKGALYCELCYEKFFAPECGRCQRKILG

SEQ ID NO: 61615 - protein, 85 aa, Homo sapiens
  Payload ID: 12301
  Gene Symbol: PDLIM5
  Gene Name: PDZ and LIM domain 5
  ENSP ID: ENSP00000422833
LKDGGKAAQANVRIGDVVLSIDGINAQGMTHLEAQNKIKGCTGSLNMTLQRASAAPKPEPVPVQKPTKKTHCGALYRVLSCTHSQ

SEQ ID NO: 61616 - protein, 38 aa, Homo sapiens
  Payload ID: 12301
  Gene Symbol: PDLIM5
  Gene Name: PDZ and LIM domain 5
  ENSP ID: ENSP00000423009
MSNYSVSLVGPAPWGFRLQGGKDFNMPLTISSLTFWWR

SEQ ID NO: 61617 - protein, 483 aa, Homo sapiens
  Payload ID: 12301
  Gene Symbol: PDLIM5
  Gene Name: PDZ and LIM domain 5
  Uniprot ID: Q96HC4
  ENSP ID: ENSP00000424297
MSNYSVSLVGPAPWGFRLQGGKDFNMPLTISSLKDGGKAAQANVRIGDVVLSIDGINAQGMTHLEAQNKIKGCTGSLNMTLQRASAAPKPEPVPVQKPTVTSVCSETSQELAEGQRRGSQGDSKQQNGKIPPKRPPRKHIVERYTEFYHVPTHSDASKKRLIEDTEDWRPRTGTTQSRSFRILAQITGTEHLKESEADNTKKANNSQEPSPQLASSVASTRSMPESLDSPTSGRPGVTSLTAAAAFKPVGSTGVIKSPSWQRPNQGVPSTGRISNSATYSGSVAPANSALGQTQPSDQDTLVQRAEHIPAGKRTPMCAHCNQVIRGPFLVALGKSWHPEEFNCAHCKNTMAYIGFVEEKGALYCELCYEKFFAPECGRCQRKILGEVISALKQTWHVSCFVCVACGKPIRNNVFHLEDGEPYCETDYYALFGTICHGCEFPIEAGDMFLEALGYTWHDTCFVCSVCCESLEGQTFFSKKDKPL

SEQ ID NO: 61618 - protein, 625 aa, Homo sapiens
  Payload ID: 12301
  Gene Symbol: PDLIM5
  Gene Name: PDZ and LIM domain 5
  Uniprot ID: Q96HC4
  ENSP ID: ENSP00000424360
MSNYSVSLVGPAPWGFRLQGGKDFNMPLTISSLKDGGKAAQANVRIGDVVLSIDGINAQGMTHLEAQNKIKGCTGSLNMTLQRASAAPKPEPVPVQKPTVTSVCSETSQELAEGQRRGSQGDSKQQNGKIPPKRPPRKHIVERYTEFYHVPTHSDASKKRLIEDTEDWRPRTGTTQSRSFRILAQITGTEHLKESEADNTKKAKFDSALEDLPKSGPHPPATPQVLTIGSQVATLSKVATTYSSLSSSTGNVEDSFEGFRNFSTFSSPARYSAAVLSSAAATVSAVIATKTRLYTPERYHSLLDALCISPVSKPLAFSYLQSSRKSTGSIHVKKTSNSQEPSPQLASSVASTRSMPESLDSPTSGRPGVTSLTAAAAFKPVGSTGVIKSPSWQRPNQGVPSTGRISNSATYSGSVAPANSALGQTQPSDQDTLVQRAEHIPAGKRTPMCAHCNQVIRGPFLVALGKSWHPEEFNCAHCKNTMAYIGFVEEKGALYCELCYEKFFAPECGRCQRKILGEVISALKQTWHVSCFVCVACGKPIRNNVFHLEDGEPYCETDYYALFGTICHGCEFPIEAGDMFLEALGYTWHDTCFVCSVCCESLEGQTFFSKKDKPLCKKHAHSVNF

SEQ ID NO: 61619 - protein, 47 aa, Homo sapiens
  Payload ID: 12301
  Gene Symbol: PDLIM5
  Gene Name: PDZ and LIM domain 5
  ENSP ID: ENSP00000426379
MSNYSVSLVGPAPWGFRLQGGKDFNMPLTISSVSKLYKFYYRCSFSA

SEQ ID NO: 61620 - protein, 234 aa, Homo sapiens; identical to SEQ ID NO: 61612
  Payload ID: 12301
  Gene Symbol: PDLIM5
  Gene Name: PDZ and LIM domain 5
  Uniprot ID: Q96HC4
  ENSP ID: ENSP00000426804

SEQ ID NO: 61621 - protein, 196 aa, Homo sapiens
  Payload ID: 12301
  Gene Symbol: PDLIM5
  Gene Name: PDZ and LIM domain 5
  ENSP ID: ENSP00000429577
  MOD_RES (1)..(1): Any amino acid
XKDGGKAAQANVRIGDVVLSIDGINAQGMTHLEAQNKIKGCTGSLNMTLQRASAAPKPEPVPVQKPTVTSVCSETSQELAEGQRRGSQGDSKQQNGPPRKHIVERYTEFYHVPTHSDASKKRLIEDTEDWRPRTGTTQSRSFRILAQITGTEHLKESEADNTKKAKEKIPLHVFSPKYTKLRDWHHEVSARALNVQ

SEQ ID NO: 61622 - protein, 487 aa, Homo sapiens
  Payload ID: 12301
  Gene Symbol: PDLIM5
  Gene Name: PDZ and LIM domain 5
  Uniprot ID: Q96HC4
  ENSP ID: ENSP00000442187
MSNYSVSLVGPAPWGFRLQGGKDFNMPLTISSLKDGGKAAQANVRIGDVVLSIDGINAQGMTHLEAQNKIKGCTGSLNMTLQRASAAPKPEPVPVQKPTVTSVCSETSQELAEGQRRGSQGDSKQQNGPPRKHIVERYTEFYHVPTHSDASKKRLIEDTEDWRPRTGTTQSRSFRILAQITGTEHLKESEADNTKKANNSQEPSPQLASSVASTRSMPESLDSPTSGRPGVTSLTAAAAFKPVGSTGVIKSPSWQRPNQGVPSTGRISNSATYSGSVAPANSALGQTQPSDQDTLVQRAEHIPAGKRTPMCAHCNQVIRGPFLVALGKSWHPEEFNCAHCKNTMAYIGFVEEKGALYCELCYEKFFAPECGRCQRKILGEVISALKQTWHVSCFVCVACGKPIRNNVFHLEDGEPYCETDYYALFGTICHGCEFPIEAGDMFLEALGYTWHDTCFVCSVCCESLEGQTFFSKKDKPLCKKHAHSVNF

SEQ ID NO: 61623 - protein, 625 aa, Homo sapiens; identical to SEQ ID NO: 61618
  Payload ID: 12301
  Gene Symbol: PDLIM5
  Gene Name: PDZ and LIM domain 5
  Uniprot ID: Q96HC4
  ENSP ID: ENSP00000480359

SEQ ID NO: 61624 - protein, 176 aa, Homo sapiens
  Payload ID: 12301
  Gene Symbol: PDLIM5
  Gene Name: PDZ and LIM domain 5
  ENSP ID: ENSP00000486834
MVIKLKDGGKAAQANVRIGDVVLSIDGINAQGMTHLEAQNKIKGCTGSLNMTLQRASAAPKPEPVPVQKGEPKEVVKPVPITSPAVSKVTSTNNMAYNKAPRPFGSVSSPKVTSIPSPSSAFTPAHATTSSHASPSPVAAVTPPLFAASGLHANANLSADQSPSALSAGKTAVNVP

SEQ ID NO: 61625 - protein, 39 aa, Homo sapiens
  Payload ID: 12301
  Gene Symbol: PDLIM5
  Gene Name: PDZ and LIM domain 5
  ENSP ID: ENSP00000486938
MSNYSVSLVGPAPWGFRLQGGKDFNMPLTISSSICCTQA

SEQ ID NO: 61626 - protein, 222 aa, Homo sapiens
  Payload ID: 12302
  Gene Symbol: PDLIM7
  Gene Name: PDZ and LIM domain 7 (enigma)
  Uniprot ID: Q9NR12
  ENSP ID: ENSP00000347776
MDSFKVVLEGPAPWGFRLQGGKDFNVPLSISRLTPGGKAAQAGVAVGDWVLSIDGENAGSLTHIEAQNKIRACGERLSLGLSRAQPVQSKPQKASAPAADPPRYTFAPSVSLNKTARPFGAPPPADSAPQQNGQPLRPLVPDASKQRLMENTEDWRPRPGTGQSRSFRILAHLTGTEFMQDPDEEHLKKSREKYVLELQSPRYTRLRDWHHQRSAHVLNVQS

SEQ ID NO: 61627 - protein, 457 aa, Homo sapiens
  Payload ID: 12302
  Gene Symbol: PDLIM7
  Gene Name: PDZ and LIM domain 7 (enigma)
  Uniprot ID: Q9NR12
  ENSP ID: ENSP00000348099
MDSFKVVLEGPAPWGFRLQGGKDFNVPLSISRLTPGGKAAQAGVAVGDWVLSIDGENAGSLTHIEAQNKIRACGERLSLGLSRAQPVQSKPQKASAPAADPPRYTFAPSVSLNKTARPFGAPPPADSAPQQNGQPLRPLVPDASKQRLMENTEDWRPRPGTGQSRSFRILAHLTGTEFMQDPDEEHLKKSSQVPRTEAPAPASSTPQEPWPGPTAPSPTSRPPWAVDPAFAERYAPDKTSTVLTRHSQPATPTPLQSRTSIVQAAAGGVPGGGSNNGKTPVCHQCHKVIRGRYLVALGHAYHPEEFVCSQCGKVLEEGGFFEEKGAIFCPPCYDVRYAPSCAKCKKKITGEIMHALKMTWHVHCFTCAACKTPIRNRAFYMEEGVPYCERDYEKMFGTKCHGCDFKIDAGDRFLEALGFSWHDTCFVCAICQINLEGKTFYSKKDRPLCKSHAFSHV

SEQ ID NO: 61628 - protein, 423 aa, Homo sapiens
  Payload ID: 12302
  Gene Symbol: PDLIM7
  Gene Name: PDZ and LIM domain 7 (enigma)
  Uniprot ID: Q9NR12
  ENSP ID: ENSP00000352964
MDSFKVVLEGPAPWGFRLQGGKDFNVPLSISRLTPGGKAAQAGVAVGDWVLSIDGENAGSLTHIEAQNKIRACGERLSLGLSRAQPVQSKPQKVQTPDKQPLRPLVPDASKQRLMENTEDWRPRPGTGQSRSFRILAHLTGTEFMQDPDEEHLKKSSQVPRTEAPAPASSTPQEPWPGPTAPSPTSRPPWAVDPAFAERYAPDKTSTVLTRHSQPATPTPLQSRTSIVQAAAGGVPGGGSNNGKTPVCHQCHKVIRGRYLVALGHAYHPEEFVCSQCGKVLEEGGFFEEKGAIFCPPCYDVRYAPSCAKCKKKITGEIMHALKMTWHVHCFTCAACKTPIRNRAFYMEEGVPYCERDYEKMFGTKCHGCDFKIDAGDRFLEALGFSWHDTCFVCAICQINLEGKTFYSKKDRPLCKSHAFSHV

SEQ ID NO: 61629 - protein, 195 aa, Homo sapiens
  Payload ID: 12302
  Gene Symbol: PDLIM7
  Gene Name: PDZ and LIM domain 7 (enigma)
  ENSP ID: ENSP00000377177
MDSFKVVLEGPAPWGFRLQGGKDFNVPLSISRLTPGGKAAQAGVAVGDWVLSIDGENAGSLTHIEAQNKIRACGERLSLGLSRAQPVQSKPQKAPTLPCPPALPGCVSAQASAPAADPPRYTFAPSVSLNKTARPFGAPPPADSAPQQNGQPLRPLVPDASKQRLMENTEDWRPRPGTGQSRSFRILAHLTGTEF

SEQ ID NO: 61630 - protein, 287 aa, Homo sapiens
  Payload ID: 12302
  Gene Symbol: PDLIM7
  Gene Name: PDZ and LIM domain 7 (enigma)
  Uniprot ID: Q9NR12
  ENSP ID: ENSP00000377182
MDSFKVVLEGPAPWGFRLQGGKDFNVPLSISRLTPGGKAAQAGVAVGDWVLSIDGENAGSLTHIEAQNKIRACGERLSLGLSRAQPVQSKPQKASAPAADPPRYTFAPSVSLNKTARPFGAPPPADSAPQQNGQPLRPLVPDASKQRLMENTEDWRPRPGTGQSRSFRILAHLTGTEFMQDPDEEHLKKSRPYRPQPYQPPALGCGPCVCRALCPGQNEHSADPAQPAGHAHAAAEPHLHCAGSCRRGARRGQQQRQDSRVSPVPQGHPGPLPGGAGPRVPPGGVCV

SEQ ID NO: 61631 - protein, 90 aa, Homo sapiens
  Payload ID: 12302
  Gene Symbol: PDLIM7
  Gene Name: PDZ and LIM domain 7 (enigma)
  ENSP ID: ENSP00000421664
MDSFKVVLEGPAPWGFRLQGGKDFNVPLSISRLTPGGKAAQAGVAVGDWVLSIDGENAGSLTHIEAQNKIRACGERLSLGLSRAQPVQSK

SEQ ID NO: 61632 - protein, 120 aa, Homo sapiens
  Payload ID: 12302
  Gene Symbol: PDLIM7
  Gene Name: PDZ and LIM domain 7 (enigma)
  ENSP ID: ENSP00000422363
  MOD_RES (1)..(1): Any amino acid
XISRLTPGGKAAQAGVAVGDWVLSIDGENAGSLTHIEAQNKIRACGERLSLGLSRAQPVQSKPQKAPHFHPGPHLTLPARPARLCLCPGLRPRRGPSAVHLCTQRLPQQDGPALWGAPAR

SEQ ID NO: 61633 - protein, 173 aa, Homo sapiens
  Payload ID: 12302
  Gene Symbol: PDLIM7
  Gene Name: PDZ and LIM domain 7 (enigma)
  ENSP ID: ENSP00000424850
MDSFKVVLEGPAPWGFRLQGGKDFNVPLSISRLTPGGKAAQAGVAVGDWVLSIDGENAGSLTHIEAQNKIRACGERLSLGLSRAQPVQSKPQKASAPAADPPRYTFAPSVSLNKTARPFGAPPPADSAPQQNGQPLRPLVPDASKQRLMENTEDWRPRPGTGQSRSFRILAHL

SEQ ID NO: 61634 - protein, 287 aa, Homo sapiens
  Payload ID: 12302
  Gene Symbol: PDLIM7
  Gene Name: PDZ and LIM domain 7 (enigma)
  ENSP ID: ENSP00000426213
MDSFKVVLEGPAPWGFRLQGGKDFNVPLSISRLTPGGKAAQAGVAVGDWVLSIDGENAGSLTHIEAQNKIRACGERLSLGLSRAQPVQSKPQKASAPAADPPRYTFAPSVSLNKTARPFGAPPPADSAPQQNGQPLRPLVPDASKQRLMENTEDWRPRPGTGQSRSFRILAHLTGTEFMQDPDEEHLKKSRWLPGMRGTPGAASEAGALPRLPARDRTPANWTLLGEAALPIPTPVGPGIQLGSFHAPSHLPWGQQDPGWGVGPCQEAQPCRALNGRSCSQVPRTEA

SEQ ID NO: 61635 - protein, 153 aa, Homo sapiens
  Payload ID: 12302
  Gene Symbol: PDLIM7
  Gene Name: PDZ and LIM domain 7 (enigma)
  Uniprot ID: Q9NR12
  ENSP ID: ENSP00000431236
MDSFKVVLEGPAPWGFRLQGGKDFNVPLSISRLTPGGKAAQAGVAVGDWVLSIDGENAGSLTHIEAQNKIRACGERLSLGLSRAQPVQSKPQKASAPAADPPRYTFAPSVSLNKTARPFGAPPPADSAPQQNGCRPLTNSRSDRWSQMPASSG

SEQ ID NO: 61636 - protein, 191 aa, Homo sapiens
  Payload ID: 12302
  Gene Symbol: PDLIM7
  Gene Name: PDZ and LIM domain 7 (enigma)
  Uniprot ID: Q9NR12
  ENSP ID: ENSP00000439157
MDSFKVVLEGPAPWGFRLQGGKDFNVPLSISRLTPGGKAAQAGVAVGDWVLSIDGENAGSLTHIEAQNKIRACGERLSLGLSRAQPVQSKPQKASAPAADPPRYTFAPSVSLNKTARPFGAPPPADSAPQQNGQPLRPLVPDASKQRLMENTEDWRPRPGTGQSRSFRILAHLTGTEFMQDPDEEHLKKSS

SEQ ID NO: 61637 - protein, 322 aa, Homo sapiens
  Payload ID: 12303
  Gene Symbol: PBK
  Gene Name: PDZ binding kinase
  Uniprot ID: Q96KB5
  ENSP ID: ENSP00000301905
MEGISNFKTPSKLSEKKKSVLCSTPTINIPASPFMQKLGFGTGVNVYLMKRSPRGLSHSPWAVKKINPICNDHYRSVYQKRLMDEAKILKSLHHPNIVGYRAFTEANDGSLCLAMEYGGEKSLNDLIEERYKASQDPFPAAIILKVALNMARGLKYLHQEKKLLHGDIKSSNVVIKGDFETIKICDVGVSLPLDENMTVTDPEACYIGTEPWKPKEAVEENGVITDKADIFAFGLTLWEMMTLSIPHINLSNDDDDEDKTFDESDFDDEAYYAALGTRPPINMEELDESYQKVIELFSVCTNEDPKDRPSAAHIVEALETDV

SEQ ID NO: 61638 - protein, 151 aa, Homo sapiens
  Payload ID: 12303
  Gene Symbol: PBK
  Gene Name: PDZ binding kinase
  ENSP ID: ENSP00000427892
MQKLGFGTGVNVYLMKRSPRGLSHSPWAVKKINPICNDHYRSVYQKRLMDEAKILKSLHHPNIVGYRAFTEANDGSLCLAMEYGGEKSLNDLIEERYKASQDPFPAAIILKVALNMARGLKYLHQEKKLLHGDIKSSNVVIKGDFETIKIC

SEQ ID NO: 61639 - protein, 63 aa, Homo sapiens
  Payload ID: 12303
  Gene Symbol: PBK
  Gene Name: PDZ binding kinase
  ENSP ID: ENSP00000428438
MEGISNFKTPSKLSEKKKSVLCSTPTINIPASPFMQKLGFGTGVNVYLMKSICTKKRNCFMET

SEQ ID NO: 61640 - protein, 333 aa, Homo sapiens
  Payload ID: 12303
  Gene Symbol: PBK
  Gene Name: PDZ binding kinase
  Uniprot ID: Q96KB5
  ENSP ID: ENSP00000428489
MEGISNFKTPSKLSEKKKSVLCSTPTINIPASPFMQKLGFGTGVNVYLMKRSPRGLSHSPWAVKKINPICNDHYRSVYQKRLMDEAKILKSLHHPNIVGYRAFTEANDGSLCLAMEYGGEKSLNDLIEERYKASQDPFPAAIILKVALNMARGLKYLHQEKKLLHGDIKSSNVVIKGDFETIKICDVGVSLPLDENMTAPAFITILLVSVTDPEACYIGTEPWKPKEAVEENGVITDKADIFAFGLTLWEMMTLSIPHINLSNDDDDEDKTFDESDFDDEAYYAALGTRPPINMEELDESYQKVIELFSVCTNEDPKDRPSAAHIVEALETDV

SEQ ID NO: 61641 - protein, 519 aa, Homo sapiens
  Payload ID: 12304
  Gene Symbol: PDZK1
  Gene Name: PDZ domain containing 1
  Uniprot ID: Q5T2W1
  ENSP ID: ENSP00000342143
MTSTFNPRECKLSKQEGQNYGFFLRIEKDTEGHLVRVVEKCSPAEKAGLQDGDRVLRINGVFVDKEEHMQVVDLVRKSGNSVTLLVLDGDSYEKAVKTRVDLKELGQSQKEQGLSDNILSPVMNGGVQTWTQPRLCYLVKEGGSYGFSLKTVQGKKGVYMTDITPQGVAMRAGVLADDHLIEVNGENVEDASHEEVVEKVKKSGSRVMFLLVDKETDKRHVEQKIQFKRETASLKLLPHQPRIVEMKKGSNGYGFYLRAGSEQKGQIIKDIDSGSPAEEAGLKNNDLVVAVNGESVETLDHDSVVEMIRKGGDQTSLLVVDKETDNMYRLAHFSPFLYYQSQELPNGSVKEAPAPTPTSLEVSSPPDTTEEVDHKPKLCRLAKGENGYGFHLNAIRGLPGSFIKEVQKGGPADLAGLEDEDVIIEVNGVNVLDEPYEKVVDRIQSSGKNVTLLVCGKKAYDYFQAKKIPIVSSLADPLDTPPDSKEGIVVESNHDSHMAKERAHSTASHSSSNSEDTEM

SEQ ID NO: 61642 - protein, 519 aa, Homo sapiens; identical to SEQ ID NO: 61641
  Payload ID: 12304
  Gene Symbol: PDZK1
  Gene Name: PDZ domain containing 1
  Uniprot ID: Q5T2W1
  ENSP ID: ENSP00000394485

SEQ ID NO: 61643 - protein, 408 aa, Homo sapiens
  Payload ID: 12304
  Gene Symbol: PDZK1
  Gene Name: PDZ domain containing 1
  Uniprot ID: Q5T2W1
  ENSP ID: ENSP00000403422
MTSTFNPRECKLSKQEGQNYGFFLRIEKDTEGHLVRVVEKCSPAEKAGLQDGDRVLRINGVFVDKEEHMQVVDLVRKSGNSVTLLVLDGDSYEKAVKTRVDLKELGQSQKEQGLSDNILSPVMNGGVQTWTQPRLCYLVKEGGSYGFSLKTVQGQIIKDIDSGSPAEEAGLKNNDLVVAVNGESVETLDHDSVVEMIRKGGDQTSLLVVDKETDNMYRLAHFSPFLYYQSQELPNGSVKEAPAPTPTSLEVSSPPDTTEEVDHKPKLCRLAKGENGYGFHLNAIRGLPGSFIKEVQKGGPADLAGLEDEDVIIEVNGVNVLDEPYEKVVDRIQSSGKNVTLLVCGKKAYDYFQAKKIPIVSSLADPLDTPPDSKEGIVVESNHDSHMAKERAHSTASHSSSNSEDTEM

SEQ ID NO: 61644 - protein, 264 aa, Homo sapiens
  Payload ID: 12304
  Gene Symbol: PDZK1
  Gene Name: PDZ domain containing 1
  ENSP ID: ENSP00000409291
MTSTFNPRECKLSKQEGQNYGFFLRIEKDTEGHLVRVVEKCSPAEKAGLQDGDRVLRINGVFVDKEEHMQVVDLVRKSGNSVTLLVLDGDSYEKAVKTRVDLKELGQSQKEQGLSDNILSPVMNGGVQTWTQPRLCYLVKEGGSYGFSLKTVQGKKGVYMTDITPQGVAMRAGVLADDHLIEVNGENVEDASHEEVVEKVKKSGSRVMFLLVDKETDKRHVEQKIQFKRETASLKLLPHQPRIVEMKKGSNGYGFYLRAGSEQK

SEQ ID NO: 61645 - protein, 140 aa, Homo sapiens
  Payload ID: 12305
  Gene Symbol: PDZD11
  Gene Name: PDZ domain containing 11
  Uniprot ID: Q5EBL8
  ENSP ID: ENSP00000239666
MDSRIPYDDYPVVFLPAYENPPAWIPPHERVHHPDYNNELTQFLPRTITLKKPPGAQLGFNIRGGKASQLGIFISKVIPDSDAHRAGLQEGDQVLAVNDVDFQDIEHSKAVEILKTAREISMRVRFFPYNYHRQKERTVH

SEQ ID NO: 61646 - protein, 140 aa, Homo sapiens; identical to SEQ ID NO: 61645
  Payload ID: 12305
  Gene Symbol: PDZD11
  Gene Name: PDZ domain containing 11
  Uniprot ID: Q5EBL8
  ENSP ID: ENSP00000363578

SEQ ID NO: 61647 - protein, 2839 aa, Homo sapiens
  Payload ID: 12306
  Gene Symbol: PDZD2
  Gene Name: PDZ domain containing 2
  Uniprot ID: O15018
  ENSP ID: ENSP00000402033
MPITQDNAVLHLPLLYQWLQNSLQEGGDGPEQRLCQAAIQKLQEYIQLNFAVDESTVPPDHSPPEMEICTVYLTKELGDTETVGLSFGNIPVFGDYGEKRRGGKKRKTHQGPVLDVGCIWVTELRKNSPAGKSGKVRLRDEILSLNGQLMVGVDVSGASYLAEQCWNGGFIYLIMLRRFKHKAHSTYNGNSSNSSEPGETPTLELGDRTAKKGKRTRKFGVISRPPANKAPEESKGSAGCEVSSDPSTELENGPDPELGNGHVFQLENGPDSLKEVAGPHLERSEVDRGTEHRIPKTDAPLTTSNDKRRFSKGGKTDFQSSDCLAREEVGRIWKMELLKESDGLGIQVSGGRGSKRSPHAIVVTQVKEGGAAHRDGRLSLGDELLVINGHLLVGLSHEEAVAILRSATGMVQLVVASKENSAEDLLRLTSKSLPDLTSSVEDVSSWTDNEDQEADGEEDEGTSSSVQRAMPGTDEPQDVCGAEESKGNLESPKQGSNKIKLKSRLSGGVHRLESVEEYNELMVRNGDPRIRMLEVSRDGRKHSLPQLLDSSSASQEYHIVKKSTRSLSTTQVESPWRLIRPSVISIIGLYKEKGKGLGFSIAGGRDCIRGQMGIFVKTIFPNGSAAEDGRLKEGDEILDVNGIPIKGLTFQEAIHTFKQIRSGLFVLTVRTKLVSPSLTPCSTPTHMSRSASPNFNTSGGASAGGSDEGSSSSLGRKTPGPKDRIVMEVTLNKEPRVGLGIGACCLALENSPPGIYIHSLAPGSVAKMESNLSRGDQILEVNSVNVRHAALSKVHAILSKCPPGPVRLVIGRHPNPKVSEQEMDEVIARSTYQESKEANSSPGLGTPLKSPSLAKKDSLISESELSQYFAHDVPGPLSDFMVAGSEDEDHPGSGCSTSEEGSLPPSTSTHKEPGKPRANSLVTLGSHRASGLFHKQVTVARQASLPGSPQALRNPLLRQRKVGCYDANDASDEEEFDREGDCISLPGALPGPIRPLSEDDPRRVSISSSKGMDVHNQEERPRKTLVSKAISAPLLGSSVDLEESIPEGMVDAASYAANLTDSAEAPKGSPGSWWKKELSGSSSAPKLEYTVRTDTQSPTNTGSPSSPQQKSEGLGSRHRPVARVSPHCKRSEAEAKPSGSQTVNLTGRANDPCDLDSRVQATSVKVTVAGFQPGGAVEKESLGKLTTGDACVSTSCELASALSHLDASHLTENLPKAASELGQQPMTELDSSSDLISSPGKKGAAHPDPSKTSVDTGQVSRPENPSQPASPRVTKCKARSPVRLPHEGSPSPGEKAAAPPDYSKTRSASETSTPHNTRRVAALRGAGPGAEGMTPAGAVLPGDPLTSQEQRQGAPGNHSKALEMTGIHAPESSQEPSLLEGADSVSSRAPQASLSMLPSTDNTKEACGHVSGHCCPGGSRESPVTDIDSFIKELDASAARSPSSQTGDSGSQEGSAQGHPPAGAGGGSSCRAEPVPGGQTSSPRRAWAAGAPAYPQWASQPSVLDSINPDKHFTVNKNFLSNYSRNFSSFHEDSTSLSGLGDSTEPSLSSMYGDAEDSSSDPESLTEAPRASARDGWSPPRSRVSLHKEDPSESEEEQIEICSTRGCPNPPSSPAHLPTQAAICPASAKVLSLKYSTPRESVASPREKAACLPGSYTSGPDSSQPSSLLEMSSQEHETHADISTSQNHRPSCAEETTEVTSASSAMENSPLSKVARHFHSPPIILSSPNMVNGLEHDLLDDETLNQYETSINAAASLSSFSVDVPKNGESVLENLHISESQDLDDLLQKPKMIARRPIMAWFKEINKHNQGTHLRSKTEKEQPLMPARSPDSKIQMVSSSQKKGVTVPHSPPQPKTNLENKDLSKKSPAEMLLTNGQKAKCGPKLKRLSLKGKAKVNSEAPAANAVKAGGTDHRKPLISPQTSHKTLSKAVSQRLHVADHEDPDRNTTAAPRSPQCVLESKPPLATSGPLKPSVSDTSIRTFVSPLTSPKPVPEQGMWSRFHMAVLSEPDRGCPTTPKSPKCRAEGRAPRADSGPVSPAASRNGMSVAGNRQSEPRLASHVAADTAQPRPTGEKGGNIMASDRLERTNQLKIVEISAEAVSETVCGNKPAESDRRGGCLAQGNCQEKSEIRLYRQVAESSTSHPSSLPSHASQAEQEMSRSFSMAKLASSSSSLQTAIRKAEYSQGKSSLMSDSRGVPRNSIPGGPSGEDHLYFTPRPATRTYSMPAQFSSHFGREGHPPHSLGRSRDSQVPVTSSVVPEAKASRGGLPSLANGQGIYSVKPLLDTSRNLPATDEGDIISVQETSCLVTDKIKVTRRHYCYEQNWPHESTSFFSVKQRIKSFENLANADRPVAKSGASPFLSVSSKPPIGRRSSGSIVSGSLGHPGDAAARLLRRSLSSCSENQSEAGTLLPQMAKSPSIMTLTISRQNPPETSSKGSDSELKKSLGPLGIPTPTMTLASPVKRNKSSVRHTQPSPVSRSKLQELRALSMPDLDKLCSEDYSAGPSAVLFKTELEITPRRSPGPPAGGVSCPEKGGNRACPGGSGPKTSAAETPSSASDTGEAAQDLPFRRSWSVNLDQLLVSAGDQQRLQSVLSSVGSKSTILTLIQEAKAQSENEEDVCFIVLNRKEGSGLGFSVAGGTDVEPKSITVHRVFSQGAASQEGTMNRGDFLLSVNGASLAGLAHGNVLKVLHQAQLHKDALVVIKKGMDQPRPSARQEPPTANGKGLLSRKTIPLEPGIGRSVAVHDALCVEVLKTSAGLGLSLDGGKSSVTGDGPLVIKRVYKGGAAEQAGIIEAGDEILAINGKPLVGLMHFDAWNIMKSVPEGPVQLLIRKHRNSS

SEQ ID NO: 61648 - protein, 13 aa, Homo sapiens
  Payload ID: 12306
  Gene Symbol: PDZD2
  Gene Name: PDZ domain containing 2
  ENSP ID: ENSP00000424901
MPITQDNAVLHLP

SEQ ID NO: 61649 - protein, 491 aa, Homo sapiens
  Payload ID: 12307
  Gene Symbol: PDZD3
  Gene Name: PDZ domain containing 3
  Uniprot ID: Q86UT5
  ENSP ID: ENSP00000327107
MEKAADLQDTASLTLKFKFNPKLGIDNPVLSLAEDHDPYDPWSLERPRFCLLSKEEGKSFGFHLQQELGRAGHVVCRVDPGTSAQRQGLQEGDRILAVNNDVVEHEDYAVVVRRIRASSPRVLLTVLARHAHDVARAQLGEDAHLCPTLGPGVRPRLCHIVKDEGGFGFSVTHGNQGPFWLVLSTGGAAERAGVPPGARLLEVNGLWQSGQQVTLLVAGPEVEEQCRQLGLPLAAPLAEGWALPTKPRCLHLEKGPQGFGFLLREEKGLDGRPGQFLWEVDPGLPAKKAGMQAGDRLVAVAGESVEGLGHEETVSRIQGQGSCVSLTVVDPEADRFFSMVRLSPLLFLENTEAPASPRGSSSASLVETEDPSLEDTSVPSVPLGSRQCFLYPGPGGSYGFRLSCVASGPRLFISQVTPGGSAARAGLQVGDVILEVNGYPVGGQNDLERLQQLPEAEPPLCLKLAARSLRGLEAWIPPGAAEDWALASDLL

SEQ ID NO: 61650 - protein, 505 aa, Homo sapiens
  Payload ID: 12307
  Gene Symbol: PDZD3
  Gene Name: PDZ domain containing 3
  Uniprot ID: Q86UT5
  ENSP ID: ENSP00000347742
MEKAADLQDTASLTLKFKFNPKLGIDNPVLSLAEDHDPYDPWSLERPRFCLLSKEEGKSFGFHLQQELGRAGHVVCRVDPGTSAQRQGLQEGDRILAVNNDVVEHEDYAVVVRRIRASSPRVLLTVLARHAHDVARAQLGEDAHLCPTLGPGVRPRLCHIVKDEGGFGFSVTHGNQGPFWLVLSTGGAAERAGVPPGARLLEVNGVSVEKFTHNQLTRKLWQSGQQVTLLVAGPEVEEQCRQLGLPLAAPLAEGWALPTKPRCLHLEKGPQGFGFLLREEKGLDGRPGQFLWEVDPGLPAKKAGMQAGDRLVAVAGESVEGLGHEETVSRIQGQGSCVSLTVVDPEADRFFSMVRLSPLLFLENTEAPASPRGSSSASLVETEDPSLEDTSVPSVPLGSRQCFLYPGPGGSYGFRLSCVASGPRLFISQVTPGGSAARAGLQVGDVILEVNGYPVGGQNDLERLQQLPEAEPPLCLKLAARSLRGLEAWIPPGAAEDWALASDLL

SEQ ID NO: 61651 - protein, 571 aa, Homo sapiens
  Payload ID: 12307
  Gene Symbol: PDZD3
  Gene Name: PDZ domain containing 3
  Uniprot ID: Q86UT5
  ENSP ID: ENSP00000431164
MVTPSPPGNHSLSLEAPRLHTASDLLGNHSLGLPLITALVGSRDRRGRVFSPVPVPLPTNPTTQHPTRQKLPSTLSGHRVCQAHGEPVLGLCPLLPLFCCPPHPPDPWSLERPRFCLLSKEEGKSFGFHLQQELGRAGHVVCRVDPGTSAQRQGLQEGDRILAVNNDVVEHEDYAVVVRRIRASSPRVLLTVLARHAHDVARAQLGEDAHLCPTLGPGVRPRLCHIVKDEGGFGFSVTHGNQGPFWLVLSTGGAAERAGVPPGARLLEVNGVSVEKFTHNQLTRKLWQSGQQVTLLVAGPEVEEQCRQLGLPLAAPLAEGWALPTKPRCLHLEKGPQGFGFLLREEKGLDGRPGQFLWEVDPGLPAKKAGMQAGDRLVAVAGESVEGLGHEETVSRIQGQGSCVSLTVVDPEADRFFSMVRLSPLLFLENTEAPASPRGSSSASLVETEDPSLEDTSVPSVPLGSRQCFLYPGPGGSYGFRLSCVASGPRLFISQVTPGGSAARAGLQVGDVILEVNGYPVGGQNDLERLQQLPEAEPPLCLKLAARSLRGLEAWIPPGAAEDWALASDLL

SEQ ID NO: 61652 - protein, 119 aa, Homo sapiens
  Payload ID: 12307
  Gene Symbol: PDZD3
  Gene Name: PDZ domain containing 3
  ENSP ID: ENSP00000434264
MEKAADLQDTASLTLKFKFNPKLGIDNPVLSLAEDHDPYDPWSLERPRFCLLSKEEGKSFGFHLQQELGRAGHVVCRVDPGTSAQRQGLQEGDRILAVNNDVVEHEDYAVAIRVLSGWC

SEQ ID NO: 61653 - protein, 492 aa, Homo sapiens
  Payload ID: 12307
  Gene Symbol: PDZD3
  Gene Name: PDZ domain containing 3
  ENSP ID: ENSP00000434559
MVTPSPPGNHSLSLEAPRLHTASDLLDPWSLERPRFCLLSKEEGKSFGFHLQQELGRAGHVVCRVDPGTSAQRQGLQEGDRILAVNNDVVEHEDYAVVVRRIRASSPRVLLTVLARHAHDVARAQLGEDAHLCPTLGPGVRPRLCHIVKDEGGFGFSVTHGNQGPFWLVLSTGGAAERAGVPPGARLLEVNGVSVEKFTHNQLTRKLWQSGQQVTLLVAGPEVEEQCRQLGLPLAAPLAEGWALPTKPRCLHLEKGPQGFGFLLREEKGLDGRPGQFLWEVDPGLPAKKAGMQAGDRLVAVAGESVEGLGHEETVSRIQGQGSCVSLTVVDPEADRFFSMVRLSPLLFLENTEAPASPRGSSSASLVETEDPSLEDTSVPSVPLGSRQCFLYPGPGGSYGFRLSCVASGPRLFISQVTPGGSAARAGLQVGDVILEVNGYPVGGQNDLERLQQLPEAEPPLCLKLAARSLRGLEAWIPPGAAEDWALASDLL

SEQ ID NO: 61654 - protein, 769 aa, Homo sapiens
  Payload ID: 12308
  Gene Symbol: PDZD4
  Gene Name: PDZ domain containing 4
  Uniprot ID: Q76G19
  ENSP ID: ENSP00000164640
MGCNMCVVQKPEEQYKVMLQVNGKELSKLSQEQTLQALRSSKEPLVIQVLRRSPRLRGDSSCHDLQLVDSGTQTDITFEHIMALGKLRPPTPPMVILEPPPISHEYYDPAEFMEGGPQEADRLDELEYEEVELYKSSHRDKLGLMVCYRTDDEEDLGIYVGEVNPNSIAAKDGRIREGDRIIQINGVDVQNREEAVAILSQEENTNISLLVARPESQLAKRWKDSDRDDFLDDFGSENEGELRARKLKSPPAQQPGNEEEKGAPDAGPGLSNSQELDSGVGRTDESTRNEESSEHDLLGDEPPSSTNTPGSLRKFGLQGDALQSRDFHFSMDSLLAEGAGLGGGDVPGLTDEEYERYRELLEIKCHLENGNQLGLLFPRASGGNSALDVNRNESLGHEMAMLEEELRHLEFKCRNILRAQKMQQLRERCMKAWLLEEESLYDLAASEPKKHELSDISELPEKSDKDSTSAYNTGESCRSTPLLVEPLPESPLRRAMAGNSNLNRTPPGPAVATPAKAAPPPGSPAKFRSLSRDPEAGRRQHAEERGRRNPKTGLTLERVGPESSPYLSRRHRGQGQEGEHYHSCVQLAPTRGLEELGHGPLSLAGGPRVGGVAAAATEAPRMEWKVKVRSDGTRYVAKRPVRDRLLKARALKIREERSGMTTDDDAVSEMKMGRYWSKEERKQHLIRAREQRKRREFMMQSRLECLREQQNGDSKPELNIIALSHRKTMKKRNKKILDNWITIQEMLAHGARSADGKRVYNPLLSVTTV

SEQ ID NO: 61655 - protein, 775 aa, Homo sapiens
  Payload ID: 12308
  Gene Symbol: PDZD4
  Gene Name: PDZ domain containing 4
  ENSP ID: ENSP00000377355
MGCNMCVVQKPEEQYKVMLQVNGKELSKLSQEQTLQALRSSKEPLVIQVLRRSPRLRGDSSCHDLQLVDSGTQTDITFEHIMALGKLRPPTPPMVILEPYVLSELPPISHEYYDPAEFMEGGPQEADRLDELEYEEVELYKSSHRDKLGLMVCYRTDDEEDLGIYVGEVNPNSIAAKDGRIREGDRIIQINGVDVQNREEAVAILSQEENTNISLLVARPESQLAKRWKDSDRDDFLDDFGSENEGELRARKLKSPPAQQPGNEEEKGAPDAGPGLSNSQELDSGVGRTDESTRNEESSEHDLLGDEPPSSTNTPGSLRKFGLQGDALQSRDFHFSMDSLLAEGAGLGGGDVPGLTDEEYERYRELLEIKCHLENGNQLGLLFPRASGGNSALDVNRNESLGHEMAMLEEELRHLEFKCRNILRAQKMQQLRERCMKAWLLEEESLYDLAASEPKKHELSDISELPEKSDKDSTSAYNTGESCRSTPLLVEPLPESPLRRAMAGNSNLNRTPPGPAVATPAKAAPPPGSPAKFRSLSRDPEAGRRQHAEERGRRNPKTGLTLERVGPESSPYLSRRHRGQGQEGEHYHSCVQLAPTRGLEELGHGPLSLAGGPRVGGVAAAATEAPRMEWKVKVRSDGTRYVAKRPVRDRLLKARALKIREERSGMTTDDDAVSEMKMGRYWSKEERKQHLIRAREQRKRREFMMQSRLECLREQQNGDSKPELNIIALSHRKTMKKRNKKILDNWITIQEMLAHGARSADGKRVYNPLLSVTTV

SEQ ID NO: 61656 - protein, 660 aa, Homo sapiens
  Payload ID: 12308
  Gene Symbol: PDZD4
  Gene Name: PDZ domain containing 4
  Uniprot ID: Q76G19
  ENSP ID: ENSP00000442033
MGCNMCVVQKPEEQYKVMLQEVELYKSSHRDKLGLMVCYRTDDEEDLGIYVGEVNPNSIAAKDGRIREGDRIIQINGVDVQNREEAVAILSQEENTNISLLVARPESQLAKRWKDSDRDDFLDDFGSENEGELRARKLKSPPAQQPGNEEEKGAPDAGPGLSNSQELDSGVGRTDESTRNEESSEHDLLGDEPPSSTNTPGSLRKFGLQGDALQSRDFHFSMDSLLAEGAGLGGGDVPGLTDEEYERYRELLEIKCHLENGNQLGLLFPRASGGNSALDVNRNESLGHEMAMLEEELRHLEFKCRNILRAQKMQQLRERCMKAWLLEEESLYDLAASEPKKHELSDISELPEKSDKDSTSAYNTGESCRSTPLLVEPLPESPLRRAMAGNSNLNRTPPGPAVATPAKAAPPPGSPAKFRSLSRDPEAGRRQHAEERGRRNPKTGLTLERVGPESSPYLSRRHRGQGQEGEHYHSCVQLAPTRGLEELGHGPLSLAGGPRVGGVAAAATEAPRMEWKVKVRSDGTRYVAKRPVRDRLLKARALKIREERSGMTTDDDAVSEMKMGRYWSKEERKQHLIRAREQRKRREFMMQSRLECLREQQNGDSKPELNIIALSHRKTMKKRNKKILDNWITIQEMLAHGARSADGKRVYNPLLSVTTV

SEQ ID NO: 61657 - protein, 122 aa, Homo sapiens
  Payload ID: 12308
  Gene Symbol: PDZD4
  Gene Name: PDZ domain containing 4
  ENSP ID: ENSP00000476940
MGCNMCVVQKPEEQYKVMLQVNGKELSKLSQEQTLQALRSSKEPLVIQVLRRSPRLRGDSSCHDLQLVDSGTQTDITFEHIMALGKLRPPTPPMVILEPYVLSELAEGGPSCPGRRCRKCQG

SEQ ID NO: 61658 - protein, 517 aa, Homo sapiens
  Payload ID: 12309
  Gene Symbol: PDZD7
  Gene Name: PDZ domain containing 7
  Uniprot ID: Q9H5P4
  ENSP ID: ENSP00000359234
MAQGFAVGFDPLGLGDLSSGSLSSLSSRGHLGSDSGSTATRYLLRKQQRLLNGPPRGIRASSPMGRVILINSPIEANSDESDIIHSVRVEKSPAGRLGFSVRGGSEHGLGIFVSKVEEGSSAERAGLCVGDKITEVNGLSLESTTMGSAVKVLTSSSRLHMMVRRMGRVPGIKFSKEKTTWVDVVNRRLVVEKCGSTPSDTSSEDGVRRIVHLYTTSDDFCLGFNIRGGKEFGLGIYVSKVDHGGLAEENGIKVGDQVLAANGVRFDDISHSQAVEVLKGQTHIMLTIKETGRYPAYKEMVSEYCWLDRLSNGVLQQLSPASESSSSVSSCASSAPYSSGSLPSDRMDICLGQEEPGSRGPGWGRADTAMQTEPDAGGRVETWCSVRPTVILRDTAIRSDGPHPGRRLDSALSESPKTALLLALSRPRPPITRSQSYLTLWEEKQQRKKEKSGSPGEKGALQRSKTLMNLFFKGGRQGRLARDGRREAWTLDSGSLAKTYPRLDIEKEMGVSPCCPG

SEQ ID NO: 61659 - protein, 208 aa, Homo sapiens
  Payload ID: 12309
  Gene Symbol: PDZD7
  Gene Name: PDZ domain containing 7
  ENSP ID: ENSP00000412533
  MOD_RES (1)..(1): Any amino acid
XPRPPITRSQSYLTLWEEKQQRKKEKSGSPGEKGALQRSKTLMNLFFKGGRQGRLARDGRREAWTLDSGSLAKTYPRLDIEKAGGVGPVQKFVTWRLRRDQERGRALLSARSGSPSSQLPNVDEQVQAWESRRPLIQDLAQRLLTDDEVLAVTRHCSRYVHEGGIEDLVRPLLAILDRPEKLLLLQDIRSVVAPTDLGRFDSMVMLVE

SEQ ID NO: 61660 - protein, 133 aa, Homo sapiens
  Payload ID: 12309
  Gene Symbol: PDZD7
  Gene Name: PDZ domain containing 7
  ENSP ID: ENSP00000474447
MAQGFAVGFDPLGLGDLSSGSLSSLSSRGHLGSDSGSTATRYLLRKQQRLLNGPPRGIRASSPMGRVILINSPIEANSDESDIIHSVRVEKSPAGRLGFSVRGGSEHGLGIFVSKVEEGSSAGKQNPQAEVHA

SEQ ID NO: 61661 - protein, 181 aa, Homo sapiens
  Payload ID: 12309
  Gene Symbol: PDZD7
  Gene Name: PDZ domain containing 7
  ENSP ID: ENSP00000474831
MAQGFAVGFDPLGLGDLSSGSLSSLSSRGHLGSDSGSTATRYLLRKQQRLLNGPPRGIRASSPMGRVILINSPIEANSDESDIIHSVRVEKSPAGRLGFSVRGGSEHGLGIFVSKVEEGSSAERAGLCVGDKITEVNGLSLESTTMGSAVKVLTSSSRLHMMVRRMGRVPGIKFSKEKTTW

SEQ ID NO: 61662 - protein, 1033 aa, Homo sapiens
  Payload ID: 12309
  Gene Symbol: PDZD7
  Gene Name: PDZ domain containing 7
  Uniprot ID: Q9H5P4
  ENSP ID: ENSP00000480489
MAQGFAVGFDPLGLGDLSSGSLSSLSSRGHLGSDSGSTATRYLLRKQQRLLNGPPRGIRASSPMGRVILINSPIEANSDESDIIHSVRVEKSPAGRLGFSVRGGSEHGLGIFVSKVEEGSSAERAGLCVGDKITEVNGLSLESTTMGSAVKVLTSSSRLHMMVRRMGRVPGIKFSKEKTTWVDVVNRRLVVEKCGSTPSDTSSEDGVRRIVHLYTTSDDFCLGFNIRGGKEFGLGIYVSKVDHGGLAEENGIKVGDQVLAANGVRFDDISHSQAVEVLKGQTHIMLTIKETGRYPAYKEMVSEYCWLDRLSNGVLQQLSPASESSSSVSSCASSAPYSSGSLPSDRMDICLGQEEPGSRGPGWGRADTAMQTEPDAGGRVETWCSVRPTVILRDTAIRSDGPHPGRRLDSALSESPKTALLLALSRPRPPITRSQSYLTLWEEKQQRKKEKSGSPGEKGALQRSKTLMNLFFKGGRQGRLARDGRREAWTLDSGSLAKTYPRLDIEKAGGVGPVQKFVTWRLRRDQERGRALLSARSGSPSSQLPNVDEQVQAWESRRPLIQDLAQRLLTDDEVLAVTRHCSRYVHEGGIEDLVRPLLAILDRPEKLLLLQDIRSVVAPTDLGRFDSMVMLVELEAFEALKSRAVRPPALRPARQDTPPKRHLITPVPDSRGGFYLLPVNGFPEEEDNGELRERLGALKVSPSASAPRHPHKGIPPLQDVPVDAFTPLRIACTPPPQLPPVAPRPLRPNWLLTEPLSREHPPQSQIRGRAQSRSRSRSRSRSRSSRGQGKSPGRRSPSPVPTPAPSMTNGRYHKPRKARPPLPRPLDGEAAKVGAKQGPSESGTEGTAKEAAMKNPSGELKTVTLSKMKQSLGISISGGIESKVQPMVKIEKIFPGGAAFLSGALQAGFELVAVDGENLEQVTHQRAVDTIRRAYRNKAREPMELVVRVPGPSPRPSPSDSSALTDGGLPADHLPAHQPLDAAPVPAHWLPEPPTNPQTPPTDARLLQPTPSPAPSPALQTPDSKPAPSPRIP

SEQ ID NO: 61663 - protein, 1154 aa, Homo sapiens
  Payload ID: 12310
  Gene Symbol: PDZD8
  Gene Name: PDZ domain containing 8
  Uniprot ID: Q8NEN9
  ENSP ID: ENSP00000334642
MGLLLMILASAVLGSFLTLLAQFFLLYRRQPEPPADEAARAGEGFRYIKPVPGLLLREYLYGGGRDEEPSGAAPEGGATPTAAPETPAPPTRETCYFLNATILFLFRELRDTALTRRWVTKKIKVEFEELLQTKTAGRLLEGLSLRDVFLGETVPFIKTIRLVRPVVPSATGEPDGPEGEALPAACPEELAFEAEVEYNGGFHLAIDVDLVFGKSAYLFVKLSRVVGRLRLVFTRVPFTHWFFSFVEDPLIDFEVRSQFEGRPMPQLTSIIVNQLKKIIKRKHTLPNYKIRFKPFFPYQTLQGFEEDEEHIHIQQWALTEGRLKVTLLECSRLLIFGSYDREANVHCTLELSSSVWEEKQRSSIKTVELIKGNLQSVGLTLRLVQSTDGYAGHVIIETVAPNSPAAIADLQRGDRLIAIGGVKITSTLQVLKLIKQAGDRVLVYYERPVGQSNQGAVLQDNFGQLEENFLSSSCQSGYEEEAAGLTVDTESRELDSEFEDLASDVRAQNEFKDEAQSLSHSPKRVPTTLSIKPLGAISPVLNRKLAVGSHPLPPKIQSKDGNKPPPLKTSEITDPAQVSKPTQGSAFKPPVPPRPQAKVPLPSADAPNQAEPDVLVEKPEKVVPPPLVDKSAEKQAKNVDAIDDAAAPKQFLAKQEVAKDVTSETSCPTKDSSDDRQTWESSEILYRNKLGKWTRTRASCLFDIEACHRYLNIALWCRDPFKLGGLICLGHVSLKLEDVALGCLATSNTEYLSKLRLEAPSPKAIVTRTALRNLSMQKGFNDKFCYGDITIHFKYLKEGESDHHVVTNVEKEKEPHLVEEVSVLPKEEQFVGQMGLTENKHSFQDTQFQNPTWCDYCKKKVWTKAASQCMFCAYVCHKKCQEKCLAETSVCGATDRRIDRTLKNLRLEGQETLLGLPPRVDAEASKSVNKTTGLTRHIINTSSRLLNLRQVSKTRLSEPGTDLVEPSPKHTPNTSDNEGSDTEVCGPNSPSKRGNSTGIKLVRKEGGLDDSVFIAVKEIGRDLYRGLPTEERIQKLEFMLDKLQNEIDQELEHNNSLVREEKETTDTRKKSLLSAALAKSGERLQALTLLMIHYRAGIEDIETLESLSLDQHSKKISKYTDDTEEDLDNEISQLIDSQPFSSISDDLFGPSESV

SEQ ID NO: 61664 - protein, 264 aa, Homo sapiens
  Payload ID: 12311
  Gene Symbol: PDZD9
  Gene Name: PDZ domain containing 9
  Uniprot ID: Q8IXQ8
  ENSP ID: ENSP00000400514
MQKASHKNKKERGVSNKVKTSVHNLSKTQQTKLTVGSLGLGLIIIQHGPYLQITHLIRKGAAANDGKLQPGDVLISVGHANVLGYTLREFLQLLQHITIGTVLQIKVYRDFINIPEEWQEIYDLIPEAKFPVTSTPKKIELAKDESFTSSDDNENVDLDKRLQYYRYPWSTVHHPARRPISISRDWHGYKKKNHTISVGKDINCDVMIHRDDKKEVRAPSPYWIMVKQDNESSSSSTSSTSDAFWLEDCAQVEEGKAQLVSKVG

SEQ ID NO: 61665 - protein, 97 aa, Homo sapiens
  Payload ID: 12311
  Gene Symbol: PDZD9
  Gene Name: PDZ domain containing 9
  ENSP ID: ENSP00000429211
MQKASHKNKKERGVSNKVKTSVHNLSKTQQTKLTVGSLGLGLIIIQHGPYLQITHLIRKGAAANDGKLQPGCTGSMAGEASGNLQSWQKVKRKEVMF

SEQ ID NO: 61666 - protein, 204 aa, Homo sapiens
  Payload ID: 12311
  Gene Symbol: PDZD9
  Gene Name: PDZ domain containing 9
  Uniprot ID: Q8IXQ8
  ENSP ID: ENSP00000441685
MQKASHKNKKGDVLISVGHANVLGYTLREFLQLLQHITIGTVLQIKVYRDFINIPEEWQEIYDLIPEAKFPVTSTPKKIELAKDESFTSSDDNENVDLDKRLQYYRYPWSTVHHPARRPISISRDWHGYKKKNHTISVGKDINCDVMIHRDDKKEVRAPSPYWIMVKQDNESSSSSTSSTSDAFWLEDCAQVEEGKAQLVSKVG

SEQ ID NO: 61667 - protein, 1066 aa, Homo sapiens
  Payload ID: 12312
  Gene Symbol: PDZRN3
  Gene Name: PDZ domain containing ring finger 3
  Uniprot ID: Q9UPQ7
  ENSP ID: ENSP00000263666
MGFELDRFDGDVDPDLKCALCHKVLEDPLTTPCGHVFCAGCVLPWVVQEGSCPARCRGRLSAKELNHVLPLKRLILKLDIKCAYATRGCGRVVKLQQLPEHLERCDFAPARCRHAGCGQVLLRRDVEAHMRDACDARPVGRCQEGCGLPLTHGEQRAGGHCCARALRAHNGALQARLGALHKALKKEALRAGKREKSLVAQLAAAQLELQMTALRYQKKFTEYSARLDSLSRCVAAPPGGKGEETKSLTLVLHRDSGSLGFNIIGGRPSVDNHDGSSSEGIFVSKIVDSGPAAKEGGLQIHDRIIEVNGRDLSRATHDQAVEAFKTAKEPIVVQVLRRTPRTKMFTPPSESQLVDTGTQTDITFEHIMALTKMSSPSPPVLDPYLLPEEHPSAHEYYDPNDYIGDIHQEMDREELELEEVDLYRMNSQDKLGLTVCYRTDDEDDIGIYISEIDPNSIAAKDGRIREGDRIIQINGIEVQNREEAVALLTSEENKNFSLLIARPELQLDEGWMDDDRNDFLDDLHMDMLEEQHHQAMQFTASVLQQKKHDEDGGTTDTATILSNQHEKDSGVGRTDESTRNDESSEQENNGDDATASSNPLAGQRKLTCSQDTLGSGDLPFSNESFISADCTDADYLGIPVDECERFRELLELKCQVKSATPYGLYYPSGPLDAGKSDPESVDKELELLNEELRSIELECLSIVRAHKMQQLKEQYRESWMLHNSGFRNYNTSIDVRRHELSDITELPEKSDKDSSSAYNTGESCRSTPLTLEISPDNSLRRAAEGISCPSSEGAVGTTEAYGPASKNLLSITEDPEVGTPTYSPSLKELDPNQPLESKERRASDGSRSPTPSQKLGSAYLPSYHHSPYKHAHIPAHAQHYQSYMQLIQQKSAVEYAQSQMSLVSMCKDLSSPTPSEPRMEWKVKIRSDGTRYITKRPVRDRLLRERALKIREERSGMTTDDDAVSEMKMGRYWSKEERKQHLVKAKEQRRRREFMMQSRLDCLKEQQAADDRKEMNILELSHKKMMKKRNKKIFDNWMTIQELLTHGTKSPDGTRVYNSFLSVTTV

SEQ ID NO: 61668 - protein, 360 aa, Homo sapiens
  Payload ID: 12312
  Gene Symbol: PDZRN3
  Gene Name: PDZ domain containing ring finger 3
  Uniprot ID: Q9UPQ7
  ENSP ID: ENSP00000308831
MGFELDRFDGDVDPDLKCALCHKVLEDPLTTPCGHVFCAGCVLPWVVQEGSCPARCRGRLSAKELNHVLPLKRLILKLDIKCAYATRGCGRVVKLQQLPEHLERCDFAPARCRHAGCGQVLLRRDVEAHMRDACDARPVGRCQEGCGLPLTHGEQRAGGHCCARALRAHNGALQARLGALHKALKKEALRAGKREKSLVAQLAAAQLELQMTALRYQKKFTEYSARLDSLSRCVAAPPGGKGEETKSLTLVLHRDSGSLGFNIIGGRPSVDNHDGSSSEGIFVSKIVDSGPAAKEGGLQIHDRIIEMRKLELRTVKLPKAHSQDSNAGFIPQLLSLHTPPLSCEKGGGHLACGGAYLNCI

SEQ ID NO: 61669 - protein, 723 aa, Homo sapiens
  Payload ID: 12312
  Gene Symbol: PDZRN3
  Gene Name: PDZ domain containing ring finger 3
  ENSP ID: ENSP00000418168
MFTPPSESQLVDTGTQTDITFEHIMALTKMSSPSPPVLDPYLLPEEHPSAHEYYDPNDYIGDIHQEMDREELELEEVDLYRMNSQDKLGLTVCYRTDDEDDIGIYISEIDPNSIAAKDGRIREGDRIIQINGIEVQNREEAVALLTSEENKNFSLLIARPELQLDEGWMDDDRNDFLDDLHMDMLEEQHHQAMQFTASVLQQKKHDEDGGTTDTATILSNQHEKDSGVGRTDESTRNDESSEQENNGDDATASSNPLAGQRKLTCSQDTLGSGDLPFSNESFISADCTDADYLGIPVDECERFRELLELKCQVKSATPYGLYYPSGPLDAGKSDPESVDKELELLNEELRSIELECLSIVRAHKMQQLKEQYRESWMLHNSGFRNYNTSIDVRRHELSDITELPEKSDKDSSSAYNTGESCRSTPLTLEISPDNSLRRAAEGISCPSSEGAVGTTEAYGPASKNLLSITEDPEVGTPTYSPSLKELDPNQPLESKERRASDGSRSPTPSQKLGSAYLPSYHHSPYKHAHIPAHAQHYQSYMQLIQQKSAVEYAQSQMSLVSMCKDLSSPTPSEPRMEWKVKIRSDGTRYITKRPVRDRLLRERALKIREERSGMTTDDDAVSEMKMGRYWSKEERKQHLVKAKEQRRRREFMMQSRLDCLKEQQAADDRKEMNILELSHKKMMKKRNKKIFDNWMTIQELLTHGTKSPDGTRVYNSFLSVTTV

SEQ ID NO: 61670 - protein, 723 aa, Homo sapiens; identical to SEQ ID NO: 61669
  Payload ID: 12312
  Gene Symbol: PDZRN3
  Gene Name: PDZ domain containing ring finger 3
  ENSP ID: ENSP00000418484

SEQ ID NO: 61671 - protein, 783 aa, Homo sapiens
  Payload ID: 12312
  Gene Symbol: PDZRN3
  Gene Name: PDZ domain containing ring finger 3
  ENSP ID: ENSP00000418624
MGCSLCSLQKQEEQYKLLYEVCQVNGRDLSRATHDQAVEAFKTAKEPIVVQVLRRTPRTKMFTPPSESQLVDTGTQTDITFEHIMALTKMSSPSPPVLDPYLLPEEHPSAHEYYDPNDYIGDIHQEMDREELELEEVDLYRMNSQDKLGLTVCYRTDDEDDIGIYISEIDPNSIAAKDGRIREGDRIIQINGIEVQNREEAVALLTSEENKNFSLLIARPELQLDEGWMDDDRNDFLDDLHMDMLEEQHHQAMQFTASVLQQKKHDEDGGTTDTATILSNQHEKDSGVGRTDESTRNDESSEQENNGDDATASSNPLAGQRKLTCSQDTLGSGDLPFSNESFISADCTDADYLGIPVDECERFRELLELKCQVKSATPYGLYYPSGPLDAGKSDPESVDKELELLNEELRSIELECLSIVRAHKMQQLKEQYRESWMLHNSGFRNYNTSIDVRRHELSDITELPEKSDKDSSSAYNTGESCRSTPLTLEISPDNSLRRAAEGISCPSSEGAVGTTEAYGPASKNLLSITEDPEVGTPTYSPSLKELDPNQPLESKERRASDGSRSPTPSQKLGSAYLPSYHHSPYKHAHIPAHAQHYQSYMQLIQQKSAVEYAQSQMSLVSMCKDLSSPTPSEPRMEWKVKIRSDGTRYITKRPVRDRLLRERALKIREERSGMTTDDDAVSEMKMGRYWSKEERKQHLVKAKEQRRRREFMMQSRLDCLKEQQAADDRKEMNILELSHKKMMKKRNKKIFDNWMTIQELLTHGTKSPDGTRVYNSFLSVTTV

SEQ ID NO: 61672 - protein, 382 aa, Homo sapiens
  Payload ID: 12312
  Gene Symbol: PDZRN3
  Gene Name: PDZ domain containing ring finger 3
  ENSP ID: ENSP00000419095
  MOD_RES (1)..(1): Any amino acid
XDIHQEMDREELELEEVDLYRMNSQDKLGLTVCYRTDDEDDIGIYISEIDPNSIAAKDGRIREGDRIIQINGIEVQNREEAVALLTSEENKNFSLLIARPELQLDEGWMDDDRNDFLDDLHMDMLEEQHHQAMQFTASVLQQKKHDEDGGTTDTATILSNQHEKDSGVGRTDESTRNDESSEQENNGDDATASSNPLAGQRKLTCSQDTLGSGDLPFSNESFISADCTDADYLGIPWKVKIRSDGTRYITKRPVRDRLLRERALKIREERSGMTTDDDAVSEMKMGRYWSKEERKQHLVKAKEQRRRREFMMQSRLDCLKEQQAADDRKEMNILELSHKKMMKKRNKKIFDNWMTIQELLTHGTKSPDGTRVYNSFLSVTTV

SEQ ID NO: 61673 - protein, 492 aa, Homo sapiens
  Payload ID: 12312
  Gene Symbol: PDZRN3
  Gene Name: PDZ domain containing ring finger 3
  ENSP ID: ENSP00000419250
MINQVNGRDLSRATHDQAVEAFKTAKEPIVVQVLRRTPRTKMFTPPSESQLVDTGTQTDITFEHIMALTKMSSPSPPVLDPYLLPEEHPSAHEYYDPNDYIGDIHQEMDREELELEEVDLYRMNSQDKLGLTVCYRTDDEDDIGIYISEIDPNSIAAKDGRIREGDRIIQINGIEVQNREEAVALLTSEENKNFSLLIARPELQLDEGWMDDDRNDFLDDLHMDMLEEQHHQAMQFTASVLQQKKHDEDGGTTDTATILSNQHEKDSGVGRTDESTRNDESSEQENNGDDATASSNPLAGQRKLTCSQDTLGSGDLPFSNESFISADCTDADYLGIPVDECERFRELLELKCQVKSATPYGLYYPSGPLDAGKSDPESVDKELELLNEELRSIELECLSIVRAHKMQQLKEQYRESWMLHNSGFRNYNTSIDVRRHELSDITELPEKSDKDSSSAYNTGESCRSTPLTLEISPDNSLRRAAEGISCPSSEGA

SEQ ID NO: 61674 - protein, 776 aa, Homo sapiens
  Payload ID: 12313
  Gene Symbol: PDZRN4
  Gene Name: PDZ domain containing ring finger 4
  Uniprot ID: Q6ZMN7
  ENSP ID: ENSP00000298919
MSGKRQFFLKPLALLTCWPSTVNGKDLSKATHEEAVEAFRNAKEPIVVQVLRRTPLSRPAYGMASEVQLMNASTQTDITFEHIMALAKLRPPTPPVPDICPFLLSDSCHSLHPMEHEFYEDNEYISSLPADADRTEDFEYEEVELCRVSSQEKLGLTVCYRTDDEEDTGIYVSEVDPNSIAAKDGRIREGDRILQINGEDVQNREEAVALLSNDECKRIVLLVARPEIQLDEGWLEDERNEFLEELNLEMLEEEHNEAMQPTANEVEQPKKQEEEEGTTDTATSSSNNHEKDSGVGRTDESLRNDESSEQENAAEDPNSTSLKSKRDLGQSQDTLGSVELQYNESLVSGEYIDSDCIGNPDEDCERFRQLLELKCKIRNHGEYDLYYSSSTIECNQGEQEGVEHELQLLNEELRNIELECQNIMQAHRLQKVTDQYGDIWTLHDGGFRNYNTSIDMQRGKLDDIMEHPEKSDKDSSSAYNTAESCRSTPLTVDRSPDSSLPRVINLTNKKNLRSTMAATQSSSGQSSKESTSTKAKTTEQGCSAESKEKVLEGSKLPDQEKAVSEHIPYLSPYHSSSYRYANIPAHARHYQSYMQLIQQKSAVEYAQSQLSLVSMCKESQKCSEPKMEWKVKIRSDGTRYITKRPVRDRILKERALKIKEERSGMTTDDDTMSEMKMGRYWSKEERKQHLVRAKEQRRRREFMMRSRLECLKESPQSGSEGKKEINIIELSHKKMMKKRNKKILDNWMTIQELMTHGAKSPDGTRVHNAFLSVTTV

SEQ ID NO: 61675 - protein, 1036 aa, Homo sapiens
  Payload ID: 12313
  Gene Symbol: PDZRN4
  Gene Name: PDZ domain containing ring finger 4
  Uniprot ID: Q6ZMN7
  ENSP ID: ENSP00000384197
MGFALERFAEAVDPALECKLCGQVLEEPLCTPCGHVFCASCLLPWAVRRRRCPLQCQPLAPGELYRVLPLRSLIQKLRVQCDYRARGCGHSVRLHELEAHVEHCDFGPARRLRSRGGCASGLGGGEVPARGGCGPTPRAGRGGGARGGPPGGRWGRGRGPGPRVLAWRRREKALLAQLWALQGEVQLTARRYQEKFTQYMAHVRNFVGDLGGGHRRDGEHKPFTIVLERENDTLGFNIIGGRPNQNNQEGTSTEGIYVSKILENGPADRADGLEIHDKIMEVNGKDLSKATHEEAVEAFRNAKEPIVVQVLRRTPLSRPAYGMASEVQLMNASTQTDITFEHIMALAKLRPPTPPVPDICPFLLSDSCHSLHPMEHEFYEDNEYISSLPADADRTEDFEYEEVELCRVSSQEKLGLTVCYRTDDEEDTGIYVSEVDPNSIAAKDGRIREGDRILQINGEDVQNREEAVALLSNDECKRIVLLVARPEIQLDEGWLEDERNEFLEELNLEMLEEEHNEAMQPTANEVEQPKKQEEEEGTTDTATSSSNNHEKDSGVGRTDESLRNDESSEQENAAEDPNSTSLKSKRDLGQSQDTLGSVELQYNESLVSGEYIDSDCIGNPDEDCERFRQLLELKCKIRNHGEYDLYYSSSTIECNQGEQEGVEHELQLLNEELRNIELECQNIMQAHRLQKVTDQYGDIWTLHDGGFRNYNTSIDMQRGKLDDIMEHPEKSDKDSSSAYNTAESCRSTPLTVDRSPDSSLPRVINLTNKKNLRSTMAATQSSSGQSSKESTSTKAKTTEQGCSAESKEKVLEGSKLPDQEKAVSEHIPYLSPYHSSSYRYANIPAHARHYQSYMQLIQQKSAVEYAQSQLSLVSMCKESQKCSEPKMEWKVKIRSDGTRYITKRPVRDRILKERALKIKEERSGMTTDDDTMSEMKMGRYWSKEERKQHLVRAKEQRRRREFMMRSRLECLKESPQSGSEGKKEINIIELSHKKMMKKRNKKILDNWMTIQELMTHGAKSPDGTRVHNAFLSVTTV

SEQ ID NO: 61676 - protein, 778 aa, Homo sapiens
  Payload ID: 12313
  Gene Symbol: PDZRN4
  Gene Name: PDZ domain containing ring finger 4
  Uniprot ID: Q6ZMN7
  ENSP ID: ENSP00000439990
MGCNLCTFQKREEHYKLLYEVSQVNGKDLSKATHEEAVEAFRNAKEPIVVQVLRRTPLSRPAYGMASEVQLMNASTQTDITFEHIMALAKLRPPTPPVPDICPFLLSDSCHSLHPMEHEFYEDNEYISSLPADADRTEDFEYEEVELCRVSSQEKLGLTVCYRTDDEEDTGIYVSEVDPNSIAAKDGRIREGDRILQINGEDVQNREEAVALLSNDECKRIVLLVARPEIQLDEGWLEDERNEFLEELNLEMLEEEHNEAMQPTANEVEQPKKQEEEEGTTDTATSSSNNHEKDSGVGRTDESLRNDESSEQENAAEDPNSTSLKSKRDLGQSQDTLGSVELQYNESLVSGEYIDSDCIGNPDEDCERFRQLLELKCKIRNHGEYDLYYSSSTIECNQGEQEGVEHELQLLNEELRNIELECQNIMQAHRLQKVTDQYGDIWTLHDGGFRNYNTSIDMQRGKLDDIMEHPEKSDKDSSSAYNTAESCRSTPLTVDRSPDSSLPRVINLTNKKNLRSTMAATQSSSGQSSKESTSTKAKTTEQGCSAESKEKVLEGSKLPDQEKAVSEHIPYLSPYHSSSYRYANIPAHARHYQSYMQLIQQKSAVEYAQSQLSLVSMCKESQKCSEPKMEWKVKIRSDGTRYITKRPVRDRILKERALKIKEERSGMTTDDDTMSEMKMGRYWSKEERKQHLVRAKEQRRRREFMMRSRLECLKESPQSGSEGKKEINIIELSHKKMMKKRNKKILDNWMTIQELMTHGAKSPDGTRVHNAFLSVTTV

SEQ ID NO: 61677 - protein, 114 aa, Homo sapiens
  Payload ID: 12314
  Gene Symbol: PDZK1IP1
  Gene Name: PDZK1 interacting protein 1
  Uniprot ID: Q13113
  ENSP ID: ENSP00000294338
MSALSLLILGLLTAVPPASCQQGLGNLQPWMQGLIAVAVFLVLVAIAFAVNHFWCQEEPEPAHMILTVGNKADGVLVGTDGRYSSMAASFRSSEHENAYENVPEEEGKVRSTPM

SEQ ID NO: 61678 - protein, 114 aa, Homo sapiens; identical to SEQ ID NO: 61677
  Payload ID: 12314
  Gene Symbol: PDZK1IP1
  Gene Name: PDZK1 interacting protein 1
  Uniprot ID: Q13113
  ENSP ID: ENSP00000360952

SEQ ID NO: 61679 - protein, 2341 aa, Homo sapiens
  Payload ID: 12315
  Gene Symbol: PCNX
  Gene Name: pecanex homolog (Drosophila)
  Uniprot ID: Q96RV3
  ENSP ID: ENSP00000304192
MGSQTLQILRQGVWAALSGGWYYDPHQATFVNALHLYLWLFLLGLPFTLYMALPSTMIIVAVYCPVIAAVFIVLKMVNYRLHRALDAGEVVDRTANEFTDQRTKAEQGNCSTRRKDSNGPSDPGGGIEMSEFIREATPPVGCSSRNSYAGLDPSNQIGSGSSRLGTAATIKGDTDTAKTSDDISLSLGQSSSLCKEGSEEQDLAADRKLFRLVSNDSFISIQPSLSSCGQDLPRDFSDKVNLPSHNHHHHVDQSLSSACDTEVASLVPLHSHSYRKDHRPRGVPRTSSSAVAFPDTSLNDFPLYQQRRGLDPVSELESSKPLSGSKESLVENSGLSGEFQLAGDLKINTSQPPTKSGKSKPLKAEKSMDSLRSLSTRSSGSTESYCSGTDRDTNSTVSSYKSEQTSSTHIESILSEHEESPKAGTKSGRKKECCAGPEEKNSCASDKRTSSEKIAMEASTNSGVHEAKDPTPSDEMHNQRGLSTSASEEANKNPHANEFTSQGDRPPGNTAENKEEKSDKSAVSVDSKVRKDVGGKQKEGDVRPKSSSVIHRTASAHKSGRRRTGKKRASSFDSSRHRDYVCFRGVSGTKPHSAIFCHDEDSSDQSDLSRASSVQSAHQFSSDSSSSTTSHSCQSPEGRYSALKTKHTHKERGTDSEHTHKAHLVPEGTSKKRATRRTSSTNSAKTRARVLSLDSGTVACLNDSNRLMAPESIKPLTTSKSDLEAKEGEVLDELSLLGRASQLETVTRSRNSLPNQVAFPEGEEQDAVSGAAQASEEAVSFRRERSTFRRQAVRRRHNAGSNPTPPTLLIGSPLSLQDGQQGQQSTAQVKVQSRPPSQAAVLSASASLLVRNGSVHLEASHDNASAVGGSSLHDELGKFSSTLYETGGCDMSLVNFEPAARRASNICDTDSHVSSSTSVRFYPHDVLSLPQIRLNRLLTIDTDLLEQQDIDLSPDLAATYGPTEEAAQKVKHYYRFWILPQLWIGINFDRLTLLALFDRNREILENVLAVILAILVAFLGSILLIQGFFRDIWVFQFCLVIASCQYSLLKSVQPDSSSPRHGHNRIIAYSRPVYFCICCGLIWLLDYGSRNLTATKFKLYGITFTNPLVFISARDLVIVFTLCFPIVFFIGLLPQVNTFVMYLCEQLDIHIFGGNATTSLLAALYSFICSIVAVALLYGLCYGALKDSWDGQHIPVLFSIFCGLLVAVSYHLSRQSSDPSVLFSLVQSKIFPKTEEKNPEDPLSEVKDPLPEKLRNSVSERLQSDLVVCIVIGVLYFAIHVSTVFTVLQPALKYVLYTLVGFVGFVTHYVLPQVRKQLPWHCFSHPLLKTLEYNQYEVRNAATMMWFEKLHVWLLFVEKNIIYPLIVLNELSSSAETIASPKKLNTELGALMITVAGLKLLRSSFSSPTYQYVTVIFTVLFFKFDYEAFSETMLLDLFFMSILFNKLWELLYKLQFVYTYIAPWQITWGSAFHAFAQPFAVPHSAMLFIQAAVSAFFSTPLNPFLGSAIFITSYVRPVKFWERDYNTKRVDHSNTRLASQLDRNPGSDDNNLNSIFYEHLTRSLQHSLCGDLLLGRWGNYSTGDCFILASDYLNALVHLIEIGNGLVTFQLRGLEFRGTYCQQREVEAITEGVEEDEGFCCCEPGHIPHMLSFNAAFSQRWLAWEVIVTKYILEGYSITDNSAASMLQVFDLRKVLTTYYVKGIIYYVTTSSKLEEWLANETMQEGLRLCADRNYVDVDPTFNPNIDEDYDHRLAGISRESFCVIYLNWIEYCSSRRAKPVDVDKDSSLVTLCYGLCVLGRRALGTASHHMSSNLESFLYGLHALFKGDFRISSIRDEWIFADMELLRKVVVPGIRMSIKLHQDHFTSPDEYDDPTVLYEAIVSHEKNLVIAHEGDPAWRSAVLANSPSLLALRHVMDDGTNEYKIIMLNRRYLSFRVIKVNKECVRGLWAGQQQELVFLRNRNPERGSIQNAKQALRNMINSSCDQPIGYPIFVSPLTTSYSDSHEQLKDILGGPISLGNIRNFIVSTWHRLRKGCGAGCNSGGNIEDSDTGGGTSCTGNNATTANNPHSNVTQGSIGNPGQGSGTGLHPPVTSYPPTLGTSHSSHSVQSGLVRQSPARASVASQSSYCYSSRHSSLRMSTTGFVPCRRSSTSQISLRNLPSSIQSRLSMVNQMEPSGQSGLACVQHGLPSSSSSSQSIPACKHHTLVGFLATEGGQSSATDAQPGNTLSPANNSHSRKAEVIYRVQIVDPSQILEGINLSKRKELQWPDEGIRLKAGRNSWKDWSPQEGMEGHVIHRWVPCSRDPGTRSHIDKAVLLVQIDDKYVTVIETGVLELGAEV

SEQ ID NO: 61680 - protein, 2230 aa, Homo sapiens
  Payload ID: 12315
  Gene Symbol: PCNX
  Gene Name: pecanex homolog (Drosophila)
  Uniprot ID: Q96RV3
  ENSP ID: ENSP00000396617
MGSQTLQILRQGVWAALSGGWYYDPHQATFVNALHLYLWLFLLGLPFTLYMALPSTMIIVAVYCPVIAAVFIVLKMVNYRLHRALDAGEVVDRTANEFTDQRTKAEQGNCSTRRKDSNGPSDPGGGIEMSEFIREATPPVGCSSRNSYAGLDPSNQIGSGSSRLGTAATIKGDTDTAKTSDDISLSLGQSSSLCKEGSEEQDLAADRKLFRLVSNDSFISIQPSLSSCGQDLPRDFSDKVNLPSHNHHHHVDQSLSSACDTEVASLVPLHSHSYRKDHRPRGVPRTSSSAVAFPDTSLNDFPLYQQRRGLDPVSELESSKPLSGSKESLVENSGLSGEFQLAGDLKINTSQPPTKSGKSKPLKAEKSMDSLRSLSTRSSGSTESYCSGTDRDTNSTVSSYKSEQTSSTHIESILSEHEESPKAGTKSGRKKECCAGPEEKNSCASDKRTSSEKIAMEASTNSGVHEAKDPTPSDEMHNQRGLSTSASEEANKNPHANEFTSQGDRPPGNTAENKEEKSDKSAVSVDSKVRKDVGGKQKEGDVRPKSSSVIHRTASAHKSGRRRTGKKRASSFDSSRHRDYVCFRGVSGTKPHSAIFCHDEDSSDQSDLSRASSVQSAHQFSSDSSSSTTSHSCQSPEGRYSALKTKHTHKERGTDSEHTHKAHLVPEGTSKKRATRRTSSTNSAKTRARVLSLDSGTVACLNDSNRLMAPESIKPLTTSKSDLEAKEGEVLDELSLLGRASQLETVTRSRNSLPNQVAFPEGEEQDAVSGGKFSSTLYETGGCDMSLVNFEPAARRASNICDTDSHVSSSTSVRFYPHDVIRLNRLLTIDTDLLEQQDIDLSPDLAATYGPTEEAAQKVKHYYRFWILPQLWIGINFDRLTLLALFDRNREILENVLAVILAILVAFLGSILLIQGFFRDIWVFQFCLVIASCQYSLLKSVQPDSSSPRHGHNRIIAYSRPVYFCICCGLIWLLDYGSRNLTATKFKLYGITFTNPLVFISARDLVIVFTLCFPIVFFIGLLPQVNTFVMYLCEQLDIHIFGGNATTSLLAALYSFICSIVAVALLYGLCYGALKDSWDGQHIPVLFSIFCGLLVAVSYHLSRQSSDPSVLFSLVQSKIFPKTEEKNPEDPLSEVKDPLPEKLRNSVSERLQSDLVVCIVIGVLYFAIHVSTVFTVLQPALKYVLYTLVGFVGFVTHYVLPQVRKQLPWHCFSHPLLKTLEYNQYEVRNAATMMWFEKLHVWLLFVEKNIIYPLIVLNELSSSAETIASPKKLNTELGALMITVAGLKLLRSSFSSPTYQYVTVIFTVLFFKFDYEAFSETMLLDLFFMSILFNKLWELLYKLQFVYTYIAPWQITWGSAFHAFAQPFAVPHSAMLFIQAAVSAFFSTPLNPFLGSAIFITSYVRPVKFWERDYNTKRVDHSNTRLASQLDRNPGSDDNNLNSIFYEHLTRSLQHSLCGDLLLGRWGNYSTGDCFILASDYLNALVHLIEIGNGLVTFQLRGLEFRGTYCQQREVEAITEGVEEDEGFCCCEPGHIPHMLSFNAAFSQRWLAWEVIVTKYILEGYSITDNSAASMLQVFDLRKVLTTYYVKGIIYYVTTSSKLEEWLANETMQEGLRLCADRNYVDVDPTFNPNIDEDYDHRLAGISRESFCVIYLNWIEYCSSRRAKPVDVDKDSSLVTLCYGLCVLGRRALGTASHHMSSNLESFLYGLHALFKGDFRISSIRDEWIFADMELLRKVVVPGIRMSIKLHQDHFTSPDEYDDPTVLYEAIVSHEKNLVIAHEGDPAWRSAVLANSPSLLALRHVMDDGTNEYKIIMLNRRYLSFRVIKVNKECVRGLWAGQQQELVFLRNRNPERGSIQNAKQALRNMINSSCDQPIGYPIFVSPLTTSYSDSHEQLKDILGGPISLGNIRNFIVSTWHRLRKGCGAGCNSGGNIEDSDTGGGTSCTGNNATTANNPHSNVTQGSIGNPGQGSGTGLHPPVTSYPPTLGTSHSSHSVQSGLVRQSPARASVASQSSYCYSSRHSSLRMSTTGFVPCRRSSTSQISLRNLPSSIQSRLSMVNQMEPSGQSGLACVQHGLPSSSSSSQSIPACKHHTLVGFLATEGGQSSATDAQPGNTLSPANNSHSRKAEVIYRVQIVDPSQILEGINLSKRKELQWPDEGIRLKAGRNSWKDWSPQEGMEGHVIHRWVPCSRDPGTRSHIDKAVLLVQIDDKYVTVIETGVLELGAEV

SEQ ID NO: 61681 - protein, 95 aa, Homo sapiens
  Payload ID: 12315
  Gene Symbol: PCNX
  Gene Name: pecanex homolog (Drosophila)
  ENSP ID: ENSP00000450947
KAEVIYRVQIVDPSQILEGINLSKRKELQWPDEGIRLKAGRNSWKDWSPQEGMEGHVIHRWVPCSRDPGIGKREEQAEDACRYHFDPMWERLKIE

SEQ ID NO: 61682 - protein, 1328 aa, Homo sapiens
  Payload ID: 12315
  Gene Symbol: PCNX
  Gene Name: pecanex homolog (Drosophila)
  ENSP ID: ENSP00000451016
  MOD_RES (1)..(1): Any amino acid
XDLLEQQDIDLSPDLAATYGPTEEAAQKVKHYYRFWILPQLWIGINFDRLTLLALFDRNREILENVLAVILAILVAFLGSILLIQGFFRDIWVFQFCLVIASCQYSLLKSVQPDSSSPRHGHNRIIAYSRPVYFCICCGLIWLLDYGSRNLTATKFKLYGITFTNPLVFISARDLVIVFTLCFPIVFFIGLLPQVNTFVMYLCEQLDIHIFGGNATTSLLAALYSFICSIVAVALLYGLCYGALKDSWDGQHIPVLFSIFCGLLVAVSYHLSRQSSDPSVLFSLVQSKIFPKTEEKNPEDPLSEVKDPLPEKLRNSVSERLQSDLVVCIVIGVLYFAIHVSTVFTVLQPALKYVLYTLVGFVGFVTHYVLPQVRKQLPWHCFSHPLLKTLEYNQYEVRNAATMMWFEKLHVWLLFVEKNIIYPLIVLNELSSSAETIASPKKLNTELGALMITVAGLKLLRSSFSSPTYQYVTVIFTVLFFKFDYEAFSETMLLDLFFMSILFNKLWELLYKLQFVYTYIAPWQITWGSAFHAFAQPFAVPHSAMLFIQAAVSAFFSTPLNPFLGSAIFITSYVRPVKFWERDYNTKRVDHSNTRLASQLDRNPGTYCQQREVEAITEGVEEDEGFCCCEPGHIPHMLSFNAAFSQRWLAWEVIVTKYILEGYSITDNSAASMLQVFDLRKVLTTYYVKGIIYYVTTSSKLEEWLANETMQEGLRLCADRNYVDVDPTFNPNIDEDYDHRLAGISRESFCVIYLNWIEYCSSRRAKPVDVDKDSSLVTLCYGLCVLGRRALGTASHHMSSNLESFLYGLHALFKGDFRISSIRDEWIFADMELLRKVVVPGIRMSIKLHQDHFTSPDEYDDPTVLYEAIVSHEKNLVIAHEGDPAWRSAVLANSPSLLALRHVMDDGTNEYKIIMLNRRYLSFRVIKVNKECVRGLWAGQQQELVFLRNRNPERGSIQNAKQALRNMINSSCDQPIGYPIFVSPLTTSYSDSHEQLKDILGGPISLGNIRNFIVSTWHRLRKGCGAGCNSGGNIEDSDTGGGTSCTGNNATTANNPHSNVTQGSIGNPGQGSGTGLHPPVTSYPPTLGTSHSSHSVQSGLVRQSPARASVASQSSYCYSSRHSSLRMSTTGFVPCRRSSTSQISLRNLPSSIQSRLSMVNQMEPSGQSGLACVQHGLPSSSSSSQSIPACKHHTLVGFLATEGGQSSATDAQPGNTLSPANNSHSRKAEVIYRVQIVDPSQILEGINLSKRKELQWPDEGIRLKAGRNSWKDWSPQEGMEGHVIHRWVPCSRDPGTRSHIDKAVLLVQIDDKYVTVIETGVLELGAEV

SEQ ID NO: 61683 - protein, 199 aa, Homo sapiens
  Payload ID: 12315
  Gene Symbol: PCNX
  Gene Name: pecanex homolog (Drosophila)
  ENSP ID: ENSP00000452517
  MOD_RES (1)..(1): Any amino acid
XFMSILFNKLWELLYKLQFVYTYIAPWQITWGSAFHAFAQPFAVPHSAMLFIQAAVSAFFSTPLNPFLGSAIFITSYVRPVKFWERDYKVLPLSSRLECNDTISTHCNLRLPECNGAILIHCNLRLPGTYCQQREVEAITEGVEEDEGFCCCEPGHIPHMLSFNAAFSQRWLAWEVIVTKYILEGYSITDNSAASMLQV

SEQ ID NO: 61684 - protein, 2137 aa, Homo sapiens
  Payload ID: 12316
  Gene Symbol: PCNXL2
  Gene Name: pecanex-like 2 (Drosophila)
  Uniprot ID: A6NKB5
  ENSP ID: ENSP00000258229
MVSQVLQLLRQGVWAALTGGWYHDPEQSKFTNSCHLYLWLFLLLLPLALHLAFPPNAIIVFFYCSAVTIFFTIIKLVSYRLHLMFDKGEVIQQKPSRKEEKPNKDKEAKGEHITNHRNPSNNRQIHNGKKEEASRNLSTPPLRCSSRGQSITSHHSSGPLELSAQETVEDLKGVILLEDHPIAPVSSTSPGIKVESLPASQAHMLETTTKSVIPVKPVATETLINGKGKERGGKGQPPLRHRSEGGLVDKGPLKKLPHLSLSQYDLLETDVSFQPWGSENSVLIPEPVSCPRGSIRERVQSKSPQDSLSSSCPQCDTIVAKPVEEPADTSCQVDTSCQGDLPLHQEVDSSDSEVAVTLIDTSQPGDPLSLHEPIKIVITMSSTPNSMTDLESSLHLRVVGTEKTSVKSDAEPTNPGAAGSPNAEQISIPVITLDLPEGGGGGVPCPEGNGSERTPERLKTRVSTNQCSGYGSGEGGNAIKDHSSSSREPWESVSRLTPDTGSESKVGKEGQTNLDPSSCKSSHEKRHARVLSVDSGTDVFLSKSSAEIVNDTEKTMPTSKSDLEAKEGQMPNESNFLEFVSLLESINTSKMTASSQLNGSAEQNEESGLLRDNCSQEKKEEILENEKPSGHSSKQGKPDLQSQDHTSTGPACTQPAKTTAFFQGNRQRQIIYRVTSQQDSSVLQVISGPETSVQEEISVDAMHVFIDEHGEIRSCYLKSGNQKEGPLQPLPSNNDCLSQAREMQVSSSSTTTSESQDPSSGDPAVSALQQQLLLMVARRTQSETPRHVSQDLEASSCSSTQGKFNREQFYKFIIFPGKWIKVWYDRLTLLALLDRTEDIKENVLAILLIVLVSLLGFLTLSQGFCKDMWVLLFCLVMASCQYSLLKSVQPDPASPIHGHNQIITYSRPIYFCVLCGLILLLDTGAKARHPPSYVVYGLKLFSPVFLQSARDYLIVFLYCFPAISLLGLFPQINTFCTYLLEQIDMLFFGGSAVSGITSAVYSVARSVLAAALLHAVCFSAVKEPWSMQHIPALFSAFCGLLVALSYHLSRQSSDPSVLMSFIQCRLFPKFLHQNLAESAADPLPKKMKDSVTDVLKWDLIVCAVVAVLSFAVSASTVFLSLRPFLSIVLFALAGAVGFVTHYVLPQLRKHHPWMWISHPILKNKEYHQREVRDVAHLMWFERLYVWLQCFEKYILYPALILNALTIDAFLISNHRRLGTHWDIFLMIIAGMKLLRTSFCNPVYQFINLSFTVIFFHFDYKDISESFLLDFFMVSILFSKLGDLLHKLQFVLTYVAPWQMAWGSSFHVFAQLFAIPHSAMLFFQTIATSIFSTPLSPFLGSVIFITSYVRPVKFWEKNYNTRRVDNSNTRLAVQIERDPGNDDNNLNSIFYEHLTRTLQESLCGDLVLGRWGNYSSGDCFILASDDLNAFVHLIEIGNGLVTFQLRGLEFRGTYCQQREVEAIMEGDEEDRGCCCCKPGHLPHLLSCNAAFHLRWLTWEITQTQYILEGYSILDNNAATMLQVFDLRRILIRYYIKSIIYYMVTSPKLLSWIKNESLLKSLQPFAKWHYIERDLAMFNINIDDDYVPCLQGITRASFCNVYLEWIQHCARKRQEPSTTLDSDEDSPLVTLSFALCTLGRRALGTAAHNMAISLDSFLYGLHVLFKGDFRITARDEWVFADMDLLHKVVAPAIRMSLKLHQDQFTCPDEYEDPAVLYEAIQSFEKKVVICHEGDPAWRGAVLSNKEELLTLRHVVDEGADEYKVIMLHRSFLSFKVIKVNKECVRGLWAGQQQELIFLRNRNPERGSIQNNKQVLRNLINSSCDQPLGYPMYVSPLTTSYLGTHRQLKNIWGGPITLDRIRTWFWTKWVRMRKDCNARQHSGGNIEDVDGGGAPTTGGNNAPSGGSQESSAEQPRKGGAQHGVSSCEGTQRTGRRKGRSQSVQAHSALSQRPPMLSSSGPILESRQTFLQTSTSVHELAQRLSGSRLSLHASATSLHSQPPPVTTTGHLSVRERAEALIRSSLGSSTSSTLSFLFGKRSFSSALVISGLSAAEGGNTSDTQSSSSVNIVMGPSARAASQATRHLSEPCEPPDATEQGQLHDRCLAEAVADTLGVVCRRASQEDMGLDDTASQQSVSDEQ

SEQ ID NO: 61685 - protein, 777 aa, Homo sapiens
  Payload ID: 12316
  Gene Symbol: PCNXL2
  Gene Name: pecanex-like 2 (Drosophila)
  Uniprot ID: A6NKB5
  ENSP ID: ENSP00000340759
MTFYPFVASSSTRRVDNSNTRLAVQIERDPGNDDNNLNSIFYEHLTRTLQESLCGDLVLGRWGNYSSGDCFILASDDLNAFVHLIEIGNGLVTFQLRGLEFRGTYCQQREVEAIMEGDEEDRGCCCCKPGHLPHLLSCNAAFHLRWLTWEITQTQYILEGYSILDNNAATMLQVFDLRRILIRYYIKSIIYYMVTSPKLLSWIKNESLLKSLQPFAKWHYIERDLAMFNINIDDDYVPCLQGITRASFCNVYLEWIQHCARKRQEPSTTLDSDEDSPLVTLSFALCTLGRRALGTAAHNMAISLDSFLYGLHVLFKGDFRITARDEWVFADMDLLHKVVAPAIRMSLKLHQDQFTCPDEYEDPAVLYEAIQSFEKKVVICHEGDPAWRGAVLSNKEELLTLRHVVDEGADEYKVIMLHRSFLSFKVIKVNKECVRGLWAGQQQELIFLRNRNPERGSIQNNKQVLRNLINSSCDQPLGYPMYVSPLTTSYLGTHRQLKNIWGGPITLDRIRTWFWTKWVRMRKDCNARQHSGGNIEDVDGGGAPTTGGNNAPSGGSQESSAEQPRKGGAQHGVSSCEGTQRTGRRKGRSQSVQAHSALSQRPPMLSSSGPILESRQTFLQTSTSVHELAQRLSGSRLSLHASATSLHSQPPPVTTTGHLSVRERAEALIRSSLGSSTSSTLSFLFGKRSFSSALVISGLSAAEGGNTSDTQSSSSVNIVMGPSARAASQATRVRGWAGLTRTGWDGGTGSWPERGTCLAFPPFCLQNPIPFSMGLPE

SEQ ID NO: 61686 - protein, 412 aa, Homo sapiens
  Payload ID: 12316
  Gene Symbol: PCNXL2
  Gene Name: pecanex-like 2 (Drosophila)
  ENSP ID: ENSP00000394703
MWVLLFCLVMASCQYSLLKSVQPDPASPIHGHNQIITYSRPIYFCVLCGLILLLDTGAKARHPPSYVVYGLKLFSPVFLQSARDYLIVFLYCFPAISLLGLFPQINTFCTYLLEQIDMLFFGGSAVSGITSAVYSVARSVLAAALLHAVCFSAVKEPWSMQHIPALFSAFCGLLVALSYHLSRQSSDPSVLMSFIQCRLFPKFLHQNLAESAADPLPKKMKDSVTDVLKWDLIVCAVVAVLSFAVSASTVFLSLRPFLSIVLFALAGAVGFVTHYVLPQLRKHHPWMWISHPILKNKEYHQREVRDVAHLMWFERLYVWLQCFEKYILYPALILNALTIDAFLISNHRRLGTHWDIFLMIIAGMKLLRTSFCNPVYQFINLSFTVIFFHFDYKDISESFLLDFFMVSILFSK

SEQ ID NO: 61687 - protein, 109 aa, Homo sapiens
  Payload ID: 12316
  Gene Symbol: PCNXL2
  Gene Name: pecanex-like 2 (Drosophila)
  ENSP ID: ENSP00000427962
  MOD_RES (1)..(1): Any amino acid
XFERLYVWLQCFEKYILYPALILNALTIDAFLISNHRRLGTHWDIFLMIIAGMKLLRTSFCNPVYQFINLSFTVIFFHFDYKDISESFLLDFFMVSILFSKDGTHTQRG

SEQ ID NO: 61688 - protein, 178 aa, Homo sapiens
  Payload ID: 12316
  Gene Symbol: PCNXL2
  Gene Name: pecanex-like 2 (Drosophila)
  ENSP ID: ENSP00000428134
EYHQREVRDVAHLMWFERLYVWLQCFEKYILYPALILNALTIDAFLISNHRRLGTHWDIFLMIIAGMKLLRTSFCNPVYQFINLSFTVIFFHFDYKDISESFLLDFFMVSILFSKLGDLLHKLQFVLTYVAPWQMAWGSSFHVFAQLFAIPRILSASIFTLQLRFTFYGSKLFIDPWQ

SEQ ID NO: 61689 - protein, 490 aa, Homo sapiens
  Payload ID: 12316
  Gene Symbol: PCNXL2
  Gene Name: pecanex-like 2 (Drosophila)
  ENSP ID: ENSP00000428488
  MOD_RES (1)..(1): Any amino acid
XLEQIDMLFFGGSAVSGITSAVYSVARSVLAAALLHAVCFSAVKEPWSMQHIPALFSAFCGLLVALSYHLSRQSSDPSVLMSFIQCRLFPKFLHQNLAESAADPLPKKMKDSVTDVLKWDLIVCAVVAVLSFAVSASTVFLSLRPFLSIVLFALAGAVGFVTHYVLPQLRKHHPWMWISHPILKNKEYHQREVRDVAHLMWFERLYVWLQCFEKYILYPALILNALTIDAFLISNHRRLGTHWDIFLMIIAGMKLLRTSFCNPVYQFINLSFTVIFFHFDYKDISESFLLDFFMVSILFSKLGDLLHKLQFVLTYVAPWQMAWGSSFHVFAQLFAIPHSAMLFFQTIATSIFSTPLSPFLGSVIFITSYVRPVKFWEKNYNTRRVDNSNTRLAVQIERDPGNDDNNLNSIFYEHLTRTLQESLCGDLVLGRWGNYSSGDCFILASDDLNAFVHLIEIGNGLVTFQLRGLEFREYNILYGNVSQTPLLDQK

SEQ ID NO: 61690 - protein, 47 aa, Homo sapiens
  Payload ID: 12316
  Gene Symbol: PCNXL2
  Gene Name: pecanex-like 2 (Drosophila)
  ENSP ID: ENSP00000428582
  MOD_RES (1)..(1): Any amino acid
XDPLPKKMKDSVTDVLKWDLIVCAVVAVLSFAVSASTVFLSLRMLPI

SEQ ID NO: 61691 - protein, 181 aa, Homo sapiens
  Payload ID: 12316
  Gene Symbol: PCNXL2
  Gene Name: pecanex-like 2 (Drosophila)
  ENSP ID: ENSP00000429231
KVWYDRLTLLALLDRTEDIKENVLAILLIVLVSLLGFLTLSQGFCKDMWVLLFCLVMASCQYSLLKGHNQIITYSRPIYFCVLCGLILLLDTGAKARHPPSYVVYGLKLFSPVFLQSARDYLIVFLYCFPAISLLGLFPQINTFCTYLLEQIDMLFFGGSAVSGITSAVYSVARSVLAAAL

SEQ ID NO: 61692 - protein, 45 aa, Homo sapiens
  Payload ID: 12316
  Gene Symbol: PCNXL2
  Gene Name: pecanex-like 2 (Drosophila)
  ENSP ID: ENSP00000429262
  MOD_RES (1)..(1): Any amino acid
XMWVLLFCLVMASCQYSLLKSVQPDPASPIHGPKPGTLPVTLCMA

SEQ ID NO: 61693 - protein, 218 aa, Homo sapiens
  Payload ID: 12316
  Gene Symbol: PCNXL2
  Gene Name: pecanex-like 2 (Drosophila)
  ENSP ID: ENSP00000429360
  MOD_RES (1)..(1): Any amino acid
XPNESNFLEFVSLLESINTSKMTASSQLNGSAEQNEESGLLRDNCSQEKKEEILENEKPSGHSSKQGKPDLQSQDHTSTGPACTQPAKTTAFFQGNRQRQIIYRVTSQQDSSVLQVISGPETSVQEEISVDAMHVFIDEHGEIRSCYLKSGNQKEGPLQPLPSNNDCLSQAREMQVSSSSTTTSESQDPSSGDPAVSALQQQLLLMVARRTQSETPRN

SEQ ID NO: 61694 - protein, 424 aa, Homo sapiens
  Payload ID: 12316
  Gene Symbol: PCNXL2
  Gene Name: pecanex-like 2 (Drosophila)
  ENSP ID: ENSP00000430820
MWVLLFCLVMASCQYSLLKSVQPDPASPIHGHNQIITYSRPIYFCVLCGLILLLDTGAKARHPPSYVVYGLKLFSPVFLQSARDYLIVFLYCFPAISLLGLFPQINTFCTYLLEQIDMLFFGGSAVSGITSAVYSVARSVLAAALLHAVCFSAVKEPWSMQHIPALFSAFCGLLVALSYHLSRQSSDPSVLMSFIQCRLFPKFLHQNLAESAADPLPKKMKDSVTDVLKWDLIVCAVVAVLSFAVSASTVFLSLRPFLSIVLFALAGAVGFVTHYVLPQLRKHHPWMWISHPILKNKEYHQREVRDVAHLMWFERLYVWLQCFEKYILYPALILNALTIDAFLISNHRRLGTHWDIFLMIIAGMKLLRTSFCNPVYQFINLSFTVIFFHFDYKDISESFLLDFFMVSILFSKASELAIFFILTF

SEQ ID NO: 61695 - protein, 2034 aa, Homo sapiens
  Payload ID: 12317
  Gene Symbol: PCNXL3
  Gene Name: pecanex-like 3 (Drosophila)
  Uniprot ID: Q9H6A9
  ENSP ID: ENSP00000347931
MGSQVLQILRQGVWASLTGGWFFDPHQSTFSNCFHLYVWIFLLIFPFLLYMVLPPSLMVAGVYCLVVAVIFATIKTVNYRLHAMFDQGEIVEKRSSTMGELEEEPAQGDSNPPRDPGVEMTVFRKVSSTPPVRCSSQHSVFGFNQVSELLPRMEDSGPLRDIKELVREQGSNNVIVTSADREMLKLSSQEKLIGDLPQTPPGAVPDPSLASTDSSEPSPLAGDGAPWSGSSMADTPMSPLLKGSLSQELSKSFLTLTQPDRALVRTSSRREQRRGAGGYQPLDRRGSGEPTPQKAGSSDSCFSGTDRETLSSFKSEKTNSTHLDSPPGGPAPEGSDTDPPSEAELPASPDAGVPSDDTLRSFDTVIGAGTPPGLAEPLLVVRPKDLALLRPSKRQPPLRRHSPPGRAPRRPLLEGGGFFEDEDTSEGSELSPASSLRSQRRYSTDSSSSTSCYSPESSRGAAGGPRKRRAPHGAEEGTAVPPKRPYGTQRTPSTASAKTHARVLSMDGAGGDVLRPPLAGCKAELEAQVGVEQAASEPVVLPAEARRGPAANQPGWRGELQEEGAVGGAAEETGRRDRSSSVRRTQAIRRRHNAGSNPTPPASVMGSPPSSLQEAQRGRAASHSRALTLPSALHFASSLLLTRAGANVHEACTFDDTSEGAVHYFYDESGVRRSYTFGLAGGGYENPVGQQGEQTANGAWDRHSHSSSFHSADVPEATGGLNLLQPRPVVLQGMQVRRVPLEIPEEQTLMEEAPPRAQHSYKYWLLPGRWTSVRYERLALLALLDRTRGVLENIFGVGLSSLVAFLGYLLLLKGFFTDIWVFQFCLVIASCQYSLLKSVQPDAASPMHGHNWVIAYSRPVYFCICCLLIWLLDALGSAQPFPPVSLYGLTLFSASFFFCARDVATVFTLCFPFVFLLGLLPQVNTCLMYLLEQIDMHGFGGTAATSPLTAVFSLSRSLLAAALLYGFCLGAIKTPWPEQHVPVLFSVFCGLLVALSYHLSRQSSDPTVLWSLIRSKLFPELEERSLETARAEPPDPLPDKMRQSVREVLHSDLVMCVVIAVLTFAISASTVFIALKSVLGFVLYALAGAVGFFTHYLLPQLRKQLPWFCLSQPVLKPLEYSQYEVRGAAQVMWFEKLYAGLQCVEKYLIYPAVVLNALTVDAHTVVSHPDKYCFYCRALLMTVAGLKLLRSAFCCPPQQYLTLAFTVLLFHFDYPRLSQGFLLDYFLMSLLCSKLWDLLYKLRFVLTYIAPWQITWGSAFHAFAQPFAVPHSAMLFVQALLSGLFSTPLNPLLGSAVFIMSYARPLKFWERDYNTKRVDHSNTRLVTQLDRNPGADDNNLNSIFYEHLTRSLQHTLCGDLVLGRWGNYGPGDCFVLASDYLNALVHLIEVGNGLVTFQLRGLEFRGTYCQQREVEAITEGVEEDEGCCCCEPGHLPRVLSFNAAFGQRWLAWEVTASKYVLEGYSISDNNAASMLQVFDLRKILITYYVKSIIYYVSRSPKLEVWLSHEGITAALRPVRVPGYADSDPTFSLSVDEDYDLRLSGLSLPSFCAVHLEWIQYCASRRSQPVDQDWNSPLVTLCFGLCVLGRRALGTASHSMSASLEPFLYGLHALFKGDFRITSPRDEWVFADMDLLHRVVAPGVRMALKLHQDHFTSPDEYEEPAALYDAIAANEERLVISHEGDPAWRSAILSNTPSLLALRHVLDDASDEYKIIMLNRRHLSFRVIKVNRECVRGLWAGQQQELVFLRNRNPERGSIQNAKQALRNMINSSCDQPLGYPIYVSPLTTSLAGSHPQLRALWGGPISLGAIAHWLLRTWERLHKGCGAGCNSGGNVDDSDCSGGGGLTSLSNNPPVAHPTPENTAGNGDQPLPPGPGWGPRSSLSGSGDGRPPPLLQWPPPRLPGPPPASPIPTEGPRTSRPPGPGLLSSEGPSGKWSLGGRKGLGGSDGEPASGSPKGGTPKSQAPLDLSLSLSLSLSPDVSTEASPPRASQDIPCLDSSAPESGTPMGALGDWPAPIEERESPAAQPLLEHQY

SEQ ID NO: 61696 - protein, 938 aa, Homo sapiens
  Payload ID: 12318
  Gene Symbol: PCNXL4
  Gene Name: pecanex-like 4 (Drosophila)
  ENSP ID: ENSP00000317396
MPALEHMNQILHILFVFLPFLWALGTLPPPDALLLWAMEQVLEFGLGGSSMSTHLRLLVMFIMSAGTAIASYFIPSTVGVVLFMTGFGFLLSLNLSDMGHKIGTKSKDLPSGPEKHFSWKECLFYIIILVLALLETSLLHHFAGFSQISKSNSQAIVGYGLMILLIILWILREIQSVYIIGIFRNPFYPKDVQTVTVFFEKQTRLMKIGIVRRILLTLVSPFAMIAFLSLDSSLQGLHSVSVCIGFTRAFRMVWQNTENALLETVIVSTVHLISSTDIWWNRSLDTGLRLLLVGIIRDRLIQFISKLQFAVTVLLTSWTEKKQRRKTTATLCILNIVFSPFVLVIIVFSTLLSSPLLPLFTLPVFLVGFPRPIQSWPGAAGTTACVCADTVYYYQMVPRLTAVLQTAMAAGSLGLLLPGSHYLGRFQDRLMWIMILECGYTYCSINIKGLELQETSCHTAEARRVDEVFEDAFEQEYTRVCSLNEHFGNVLTPCTVLPVKLYSDARNVLSGIIDSHENLKEFKGDLIKVLVWILVQYCSKRPGMKENVHNTENKGKAPLMLPALNTLPPPKSPEDIDSLNSETFNDWSDDNIFDDEPTIKKVIEEKHQLKDLPGTNLFIPGSVESQRVGDHSTGTVPENDLYKAVLLGYPAVDKGKQEDMPYIPLMEFSCSHSHLVCLPAEWRTSCMPSSKMKEMSSLFPEDWYQFVLRQLECYHSEEKASNVLEEIAKDKVLKDFYVHTVMTCYFSLFGIDNMAPSPGHILRVYGGVLPWSVALDWLTEKPELFQLALKAFRYTLKLMIDKASLGPIEDFRELIKYLEEYERDWYIGLVSDEKWKEAILQEKPYLFSLGYDSNMGIYTGRVLSLQELLIQVGKLNPEAVRGQWANLSWELLYATNDDEERYSIQAHPLLLRNLTVQAAEPPLGYPIYSSKPLHIHLY

SEQ ID NO: 61697 - protein, 230 aa, Homo sapiens
  Payload ID: 12318
  Gene Symbol: PCNXL4
  Gene Name: pecanex-like 4 (Drosophila)
  ENSP ID: ENSP00000375469
MSPDVPLLNDYKQDFFLKRFPQTVLGGPRFKLGYCAPPYIYVNQIILFLMPWVWGGVGTLLYQLGILKDYYTAALSGGLMLFTAFVIQFTSLYAKNKSTTVERILTTDILAEEDEHEFTSCTGAETVKFLIPGKKYVANTVFHSILAGLACGLGTWYLLPNRITLLYGSTGGTALLFFFGWMTLCIAEYSLIVNTATETATFQTQDTYEIIPLMRPLYIFFFVSVDLAHR

SEQ ID NO: 61698 - protein, 1172 aa, Homo sapiens
  Payload ID: 12318
  Gene Symbol: PCNXL4
  Gene Name: pecanex-like 4 (Drosophila)
  Uniprot ID: Q63HM2
  ENSP ID: ENSP00000384801
MSPDVPLLNDYKQDFFLKRFPQTVLGGPRFKLGYCAPPYIYVNQIILFLMPWVWGGVGTLLYQLGILKDYYTAALSGGLMLFTAFVIQFTSLYAKNKSTTVERILTTDILAEEDEHEFTSCTGAETVKFLIPGKKYVANTVFHSILAGLACGLGTWYLLPNRITLLYGSTGGTALLFFFGWMTLCIAEYSLIVNTATETATFQTQDTYEIIPLMRPLYIFFFVSVDLAHRFVVNMPALEHMNQILHILFVFLPFLWALGTLPPPDALLLWAMEQVLEFGLGGSSMSTHLRLLVMFIMSAGTAIASYFIPSTVGVVLFMTGFGFLLSLNLSDMGHKIGTKSKDLPSGPEKHFSWKECLFYIIILVLALLETSLLHHFAGFSQISKSNSQAIVGYGLMILLIILWILREIQSVYIIGIFRNPFYPKDVQTVTVFFEKQTRLMKIGIVRRILLTLVSPFAMIAFLSLDSSLQGLHSVSVCIGFTRAFRMVWQNTENALLETVIVSTVHLISSTDIWWNRSLDTGLRLLLVGIIRDRLIQFISKLQFAVTVLLTSWTEKKQRRKTTATLCILNIVFSPFVLVIIVFSTLLSSPLLPLFTLPVFLVGFPRPIQSWPGAAGTTACVCADTVYYYQMVPRLTAVLQTAMAAGSLGLLLPGSHYLGRFQDRLMWIMILECGYTYCSINIKGLELQETSCHTAEARRVDEVFEDAFEQEYTRVCSLNEHFGNVLTPCTVLPVKLYSDARNVLSGIIDSHENLKEFKGDLIKVLVWILVQYCSKRPGMKENVHNTENKGKAPLMLPALNTLPPPKSPEDIDSLNSETFNDWSDDNIFDDEPTIKKVIEEKHQLKDLPGTNLFIPGSVESQRVGDHSTGTVPENDLYKAVLLGYPAVDKGKQEDMPYIPLMEFSCSHSHLVCLPAEWRTSCMPSSKMKEMSSLFPEDWYQFVLRQLECYHSEEKASNVLEEIAKDKVLKDFYVHTVMTCYFSLFGIDNMAPSPGHILRVYGGVLPWSVALDWLTEKPELFQLALKAFRYTLKLMIDKASLGPIEDFRELIKYLEEYERDWYIGLVSDEKWKEAILQEKPYLFSLGYDSNMGIYTGRVLSLQELLIQVGKLNPEAVRGQWANLSWELLYATNDDEERYSIQAHPLLLRNLTVQAAEPPLGYPIYSSKPLHIHLY

SEQ ID NO: 61699 - protein, 873 aa, Homo sapiens
  Payload ID: 12318
  Gene Symbol: PCNXL4
  Gene Name: pecanex-like 4 (Drosophila)
  ENSP ID: ENSP00000385201
MPALEHMNQILHILFVFLPFLWALGTLPPPDALLLWAMEQVLEFGLGGSSMSTHLRLLVMFIMSAGTAIASYFIPSTVGVVLFMTGFGFLLSLNLSDMGHKIGTKSKDLPSGPEKHFSWKECLFYIIILVLALLETSLLHHFAGFSQISKSNSQAIVGYGLMILLIILWILREIQSVYIIGIFRNPFYPKDVQTVTVFFEKQTRLMKIGIVRRILLTLVSPFAMIAFLSLDSSLQGLHSVSVCIGFTRAFRMVWQNTENALLETVIVSTVHLISSTDIWWNRSLDTGLRLLLVGIIRDRLIQFISKLQFAVTVLLTSWTEKKQRRKTTATLCILNIVFSPFVLVIIVFSTLLSSPLLPLFTLPVFLVGFPRPIQSWPGAAGTTACVCADTVYYYQMVPRLTAVLQTAMAAGSLGLLLPGSHYLGRFQDRLMWIMILECGYTYCSINIKGLELQETSCHTAEARRVDEVFEDAFEQEYTRVCSLNEHFGNVLTPCTVLPVKLYSDARNVLSGIIDSHENLKEFKGDLIKVLVWILVQYCSKRPGMKENVHNTENKGKAPLMLPALNTLPPPKSPEDIDSLNSETFNDWSDDNIFDDEPTIKKVIEEKHQLKDLPGTNLFIPGSVESQRVGDHSTGTVPENDLYKAVLLGYPAVDKGKQEDMPYIPLMEFSCSHSHLVCLPAEWRTSCMPSSKMKEMSSLFPEDWYQFVLRQLECYHSEEKASNVLEEIAKDKVLKDFYVHTVMTCYFSLFGIDNMAPSPGHILRVYGGVLPWSVALDWLTEKPELFQLALKAFRYTLKLMIDKASLGPIEDFRELIKYLEEYERDWYIGLVSDEKWKEAILQEKPYLFSLGYDSNMPGPALEISRVNRNLWSQI

SEQ ID NO: 61700 - protein, 527 aa, Homo sapiens
  Payload ID: 12318
  Gene Symbol: PCNXL4
  Gene Name: pecanex-like 4 (Drosophila)
  ENSP ID: ENSP00000450441
LCILNIVFSPFVLVIIVFSTLLSSPLLPLFTLPVFLVGFPRPIQSWPGAAGTTACVCADTVYYYQMVPRLTAVLQTAMAAGSLGLLLPGSHYLGRFQDRLMWIMILECGYTYCSINIKGLELQETSCHTAEARRVDEVFEDAFEQEYTRVCSLNEHFGNVLTPCTVLPVKLYSDARNVLSGIIDSHENLKEFKGDLIKVLVWILVQYCSKRPGMKENVHNTENKGKAPLMLPALNTLPPPKSPEDIDSLNSETFNDWSDDNIFDDEPTIKKVIEEKHQLKDLPGTNLFIPGSVESQRVGDHSTGTVPENDLYKAVLLGYPAVDKGKQEDMPYIPLMEFSCSHSHLVCLPAEWRTSCMPSSKMKEMSSLFPEDWYQFVLRQLECYHSEEKASNVLEEIAKDKVLKDFYVHTVMTCYFSLFGIDNMAPSPGHILRVYGGVLPWSVALDWLTEKPELFQLALKAFRYTLKLMIDKASLGPIEDFRELIKYLEEYERDWYIGLVSDEKWKEAILQEKPYLFSLGYDSNMYL

SEQ ID NO: 61701 - protein, 139 aa, Homo sapiens
  Payload ID: 12318
  Gene Symbol: PCNXL4
  Gene Name: pecanex-like 4 (Drosophila)
  ENSP ID: ENSP00000450994
  MOD_RES (1)..(1): Any amino acid
XRVCSLNEHFGNVLTPCTVLPVKLYSDARNVLSGIIDSHENLKEFKGDLIKVLVWILVQYCSKRPGMKENVHNTENKGKAPLMLPALNTLPPPKSPEDIDSLNSETFNDWSDDNIFDDEPTIKKVIEEKHQLKDLPGIL

SEQ ID NO: 61702 - protein, 119 aa, Homo sapiens
  Payload ID: 12318
  Gene Symbol: PCNXL4
  Gene Name: pecanex-like 4 (Drosophila)
  ENSP ID: ENSP00000451836
  MOD_RES (1)..(1): Any amino acid
XVSTVHLISSTDIWWNRSLDTGLRLLLSWPGAAGTTACVCADTVYYYQMVPRLTAVLQTAMAAGSLGLLLPGSHYLGRFQDRLMWIMILECGYTYCSINIKGLELQETSCHTAEARRVD

SEQ ID NO: 61703 - protein, 96 aa, Homo sapiens
  Payload ID: 12318
  Gene Symbol: PCNXL4
  Gene Name: pecanex-like 4 (Drosophila)
  ENSP ID: ENSP00000452234
  MOD_RES (1)..(1): Any amino acid
XYYYQMVPRLTAVLQTAMAAGSLGLLLPGSHYLGRFQDRLMWIMILECGYTYCSINIKGLELQETSCHTAEARRVDEVFEDAFEQEYTRVYSETND

SEQ ID NO: 61704 - protein, 418 aa, Homo sapiens
  Payload ID: 12319
  Gene Symbol: PELI1
  Gene Name: pellino E3 ubiquitin protein ligase 1
  Uniprot ID: Q96FA3
  ENSP ID: ENSP00000351789
MFSPDQENHPSKAPVKYGELIVLGYNGSLPNGDRGRRKSRFALFKRPKANGVKPSTVHIACTPQAAKAISNKDQHSISYTLSRAQTVVVEYTHDSNTDMFQIGRSTESPIDFVVTDTVPGSQSNSDTQSVQSTISRFACRIICERNPPFTARIYAAGFDSSKNIFLGEKAAKWKTSDGQMDGLTTNGVLVMHPRNGFTEDSKPGIWREISVCGNVFSLRETRSAQQRGKMVEIETNQLQDGSLIDLCGATLLWRTAEGLSHTPTVKHLEALRQEINAARPQCPVGFNTLAFPSMKRKDVVDEKQPWVYLNCGHVHGYHNWGNKEERDGKDRECPMCRSVGPYVPLWLGCEAGFYVDAGPPTHAFSPCGHVCSEKTTAYWSQIPLPHGTHTFHAACPFCAHQLAGEQGYIRLIFQGPLD

SEQ ID NO: 61705 - protein, 420 aa, Homo sapiens
  Payload ID: 12320
  Gene Symbol: PELI2
  Gene Name: pellino E3 ubiquitin protein ligase family member 2
  Uniprot ID: Q9HAT8
  ENSP ID: ENSP00000267460
MFSPGQEEHCAPNKEPVKYGELVVLGYNGALPNGDRGRRKSRFALYKRPKANGVKPSTVHVISTPQASKAISCKGQHSISYTLSRNQTVVVEYTHDKDTDMFQVGRSTESPIDFVVTDTISGSQNTDEAQITQSTISRFACRIVCDRNEPYTARIFAAGFDSSKNIFLGEKAAKWKNPDGHMDGLTTNGVLVMHPRGGFTEESQPGVWREISVCGDVYTLRETRSAQQRGKLVESETNVLQDGSLIDLCGATLLWRTADGLFHTPTQKHIEALRQEINAARPQCPVGLNTLAFPSINRKEVVEEKQPWAYLSCGHVHGYHNWGHRSDTEANERECPMCRTVGPYVPLWLGCEAGFYVDAGPPTHAFTPCGHVCSEKSAKYWSQIPLPHGTHAFHAACPFCATQLVGEQNCIKLIFQGPID

SEQ ID NO: 61706 - protein, 94 aa, Homo sapiens
  Payload ID: 12320
  Gene Symbol: PELI2
  Gene Name: pellino E3 ubiquitin protein ligase family member 2
  ENSP ID: ENSP00000452666
MFQVGRSTESPIDFVVTDTISGSQNTDEAQITQSTISRFACRIVCDRNEPYTARIFAAGFDSSKNIFLGEKAAKWKNPDGHMDGLTTNGVLVMH

SEQ ID NO: 61707 - protein, 77 aa, Homo sapiens
  Payload ID: 12320
  Gene Symbol: PELI2
  Gene Name: pellino E3 ubiquitin protein ligase family member 2
  ENSP ID: ENSP00000453988
MFQVGRSTESPIDFVVTDTISGSQNTDEAQITQSTISRFACRIVCDRNEPYTARIFAAGFDSSKNIFLGEKAAKWKN

SEQ ID NO: 61708 - protein, 445 aa, Homo sapiens
  Payload ID: 12321
  Gene Symbol: PELI3
  Gene Name: pellino E3 ubiquitin protein ligase family member 3
  Uniprot ID: Q8N2H9
  ENSP ID: ENSP00000309848
MVLEGNPEVGSPRTSDLQHRGNKGSCVLSSPGEDAQPGEEPIKYGELIVLGYNGCLASGDKGRRRSRLALSRRSHANGVKPDVMHHISTPLVSKALSNRGQHSISYTLSRSHSVIVEYTHDSDTDMFQIGRSTENMIDFVVTDTSPGGGAAEGPSAQSTISRYACRILCDRRPPYTARIYAAGFDASSNIFLGERAAKWRTPDGLMDGLTTNGVLVMHPAGGFSEDSAPGVWREISVCGNVYTLRDSRSAQQRGKLVENESNVLQDGSLIDLCGATLLWRTPAGLLRAPTLKQLEAQRQEANAARPQCPVGLSTLAFPSPARGRTAPDKQQPWVYVRCGHVHGYHGWGCRRERGPQERECPLCRLVGPYVPLWLGQEAGLCLDPGPPSHAFAPCGHVCSEKTARYWAQTPLPHGTHAFHAACPFCGAWLTGEHGCVRLIFQGPLD

SEQ ID NO: 61709 - protein, 469 aa, Homo sapiens
  Payload ID: 12321
  Gene Symbol: PELI3
  Gene Name: pellino E3 ubiquitin protein ligase family member 3
  Uniprot ID: Q8N2H9
  ENSP ID: ENSP00000322532
MVLEGNPEVGSPRTSDLQHRGNKGSCVLSSPGEDAQPGEEPIKYGELIVLGCCEEGGEETEAQRGEVTGPRAHSCYNGCLASGDKGRRRSRLALSRRSHANGVKPDVMHHISTPLVSKALSNRGQHSISYTLSRSHSVIVEYTHDSDTDMFQIGRSTENMIDFVVTDTSPGGGAAEGPSAQSTISRYACRILCDRRPPYTARIYAAGFDASSNIFLGERAAKWRTPDGLMDGLTTNGVLVMHPAGGFSEDSAPGVWREISVCGNVYTLRDSRSAQQRGKLVENESNVLQDGSLIDLCGATLLWRTPAGLLRAPTLKQLEAQRQEANAARPQCPVGLSTLAFPSPARGRTAPDKQQPWVYVRCGHVHGYHGWGCRRERGPQERECPLCRLVGPYVPLWLGQEAGLCLDPGPPSHAFAPCGHVCSEKTARYWAQTPLPHGTHAFHAACPFCGAWLTGEHGCVRLIFQGPLD

SEQ ID NO: 61710 - protein, 119 aa, Homo sapiens
  Payload ID: 12321
  Gene Symbol: PELI3
  Gene Name: pellino E3 ubiquitin protein ligase family member 3
  ENSP ID: ENSP00000432449
MVLEGNPEVGSPRTSDLQHRGNKGSCVLSSPGEDAQPGEEPIKYGELIVLGCCEEGGEETEAQRGEVTGPRAHSCYNGCLASGDKGRRRSRLALSRRSHANGVKPDVMHHISTPLVSKA

SEQ ID NO: 61711 - protein, 91 aa, Homo sapiens
  Payload ID: 12321
  Gene Symbol: PELI3
  Gene Name: pellino E3 ubiquitin protein ligase family member 3
  ENSP ID: ENSP00000434314
MVLEGNPEVGSPRTSDLQHRGNKGSCVLSSPGEDAQPGEEPIKYGELIVLGYNGCLASGDKGRRRSRLALSRRSHANGVKPDVMHHISTPL

SEQ ID NO: 61712 - protein, 331 aa, Homo sapiens
  Payload ID: 12321
  Gene Symbol: PELI3
  Gene Name: pellino E3 ubiquitin protein ligase family member 3
  Uniprot ID: Q8N2H9
  ENSP ID: ENSP00000434677
MVLEGNPEVGSPRTSDLQHRGNKGSCVLSSPGEDAQPGEEPIKYGELIVLGCCEEGGEETEAQRGEVTGPRAHSCYNGCLASGDKGRRRSRLALSRRSHANGVKPDVMHHISTPLVSKALSNRGQHSISYTLSRSHSVIVEYTHDSDTDMFQIGRSTENMIDFVVTDTSPGGGAAEGPSAQSTISRYACRILCDRRPPYTARIYAAGFDASSNIFLGERAAKWRTPDGLMDGLTTNGVLVMHPAGGFSEDSAPGVWREISVCGNVYTLRDSRSAQQRGKLVGGPLHSPPLSLPGPHKLPIPLPKPGDDLQSFCPREPQQAPYQGIPGPGGS

SEQ ID NO: 61713 - protein, 67 aa, Homo sapiens
  Payload ID: 12321
  Gene Symbol: PELI3
  Gene Name: pellino E3 ubiquitin protein ligase family member 3
  ENSP ID: ENSP00000436161
IFLGERAAKWRTPDGLMDGLTTNGVLVMHPAGGFSEDSAPGVWREISVCGNVYTLRDSRSAQQRGKL

SEQ ID NO: 61714 - protein, 255 aa, Homo sapiens
  Payload ID: 12321
  Gene Symbol: PELI3
  Gene Name: pellino E3 ubiquitin protein ligase family member 3
  ENSP ID: ENSP00000436722
MHHISTPLVSKALSNRGQHSISYTLSRSHSVIVEYTHDSDTDMFQIGRSTENMIDFVVTDTSPGGGAAEGPSAQSTISRYACRILCDRRPPYTARIYAAGFDASSNIFLGERAAKWRTPDGLMDGLTTNGVLVMHPAGGFSEDSAPGVWREISVCGNVYTLRDSRSAQQRGKLVENESNVLQDGSLIDLCGATLLWRTPAGLLRAPTLKQLEAQRQEANAARPQCPVGLSTLAFPSPARGRTAPDKQQPWVYVRC

SEQ ID NO: 61715 - protein, 406 aa, Homo sapiens
  Payload ID: 12321
  Gene Symbol: PELI3
  Gene Name: pellino E3 ubiquitin protein ligase family member 3
  Uniprot ID: Q8N2H9
  ENSP ID: ENSP00000484220
MVLEGNPEVGSPRTSDLQHRGNKGSCVLSSPGEDAQPGEEPIKYGELISTPLVSKALSNRGQHSISYTLSRSHSVIVEYTHDSDTDMFQIGRSTENMIDFVVTDTSPGGGAAEGPSAQSTISRYACRILCDRRPPYTARIYAAGFDASSNIFLGERAAKWRTPDGLMDGLTTNGVLVMHPAGGFSEDSAPGVWREISVCGNVYTLRDSRSAQQRGKLVENESNVLQDGSLIDLCGATLLWRTPAGLLRAPTLKQLEAQRQEANAARPQCPVGLSTLAFPSPARGRTAPDKQQPWVYVRCGHVHGYHGWGCRRERGPQERECPLCRLVGPYVPLWLGQEAGLCLDPGPPSHAFAPCGHVCSEKTARYWAQTPLPHGTHAFHAACPFCGAWLTGEHGCVRLIFQGPLD

SEQ ID NO: 61716 - protein, 385 aa, Homo sapiens
  Payload ID: 12322
  Gene Symbol: PELO
  Gene Name: pelota homolog (Drosophila)
  Uniprot ID: Q9BRX2
  ENSP ID: ENSP00000274311
MKLVRKNIEKDNAGQVTLVPEEPEDMWHTYNLVQVGDSLRASTIRKVQTESSTGSVGSNRVRTTLTLCVEAIDFDSQACQLRVKGTNIQENEYVKMGAYHTIELEPNRQFTLAKKQWDSVVLERIEQACDPAWSADVAAVVMQEGLAHICLVTPSMTLTRAKVEVNIPRKRKGNCSQHDRALERFYEQVVQAIQRHIHFDVVKCILVASPGFVREQFCDYLFQQAVKTDNKLLLENRSKFLQVHASSGHKYSLKEALCDPTVASRLSDTKAAGEVKALDDFYKMLQHEPDRAFYGLKQVEKANEAMAIDTLLISDELFRHQDVATRSRYVRLVDSVKENAGTVRIFSSLHVSGEQLSQLTGVAAILRFPVPELSDQEGDSSSEED

SEQ ID NO: 61717 - protein, 284 aa, Homo sapiens
  Payload ID: 12323
  Gene Symbol: PEF1
  Gene Name: penta-EF-hand domain containing 1
  Uniprot ID: Q9UBV8
  ENSP ID: ENSP00000362807
MASYPYRQGCPGAAGQAPGAPPGSYYPGPPNSGGQYGSGLPPGGGYGGPAPGGPYGPPAGGGPYGHPNPGMFPSGTPGGPYGGAAPGGPYGQPPPSSYGAQQPGLYGQGGAPPNVDPEAYSWFQSVDSDHSGYISMKELKQALVNCNWSSFNDETCLMMINMFDKTKSGRIDVYGFSALWKFIQQWKNLFQQYDRDRSGSISYTELQQALSQMGYNLSPQFTQLLVSRYCPRSANPAMQLDRFIQVCTQLQVLTEAFREKDTAVQGNIRLSFEDFVTMTASRML

SEQ ID NO: 61718 - protein, 700 aa, Homo sapiens
  Payload ID: 12324
  Gene Symbol: PTCD1
  Gene Name: pentatricopeptide repeat domain 1
  Uniprot ID: O75127
  ENSP ID: ENSP00000292478
MDFVRLARLFARARPMGLFILQHLDPCRARWAGGREGLMRPMWAPFSSSSSQLPLGQERQENTGSLGSDPSHSNSTATQEEDEEEEESFGTLSDKYSSRRLFRKSAAQFHNLRFGERRDEQMEPEPKLWRGRRNTPYWYFLQCKHLIKEGKLVEALDLFERQMLKEERLQPMESNYTVLIGGCGRVGYLKKAFNLYNQMKKRDLEPSDATYTALFNVCAESPWKDSALQSALKLRQQLQAKNFELNLKTYHALLKMAAKCADLRMCLDVFKEIIHKGHVVTEETFSFLLMGCIQDKKTGFRYALQVWRLMLSLGLQPSRDSYNLLLVAARDCGLGDPQVASELLLKPREEATVLQPPVSRQRPRRTAQAKAGNLMSAMLHVEALERQLFLEPSQALGPPEPPEARVPGKAQPEVDTKAEPSHTAALTAVALKPPPVELEVNLLTPGAVPPTVVSFGTVTTPADRLALIGGLEGFLSKMAEHRQQPDIRTLTLLAEVVESGSPAESLLLALLDEHQVEADLTFFNTLVRKKSKLGDLEGAKALLPVLAKRGLVPNLQTFCNLAIGCHRPKDGLQLLTDMKKSQVTPNTHIYSALINAAIRKLNYTYLISILKDMKQNRVPVNEVVIRQLEFAAQYPPTFDRYQGKNTYLEKIDGFRAYYKQWLTVMPAEETPHPWQKFRTKPQGDQDTGKEADDGCALGGR

SEQ ID NO: 61719 - protein, 164 aa, Homo sapiens
  Payload ID: 12324
  Gene Symbol: PTCD1
  Gene Name: pentatricopeptide repeat domain 1
  ENSP ID: ENSP00000390530
MDFVRLARLFARARPMGLFILQHLDPCRARWAGGREGLMRPMWAPFSSSSSQLPLGQERQENTGSLGSDPSHSNSTATQEEDEEEEESFGTLSDKYSSRRLFRKSAAQFHNLRFGERRDEQMEPEPKLWRGRRNTPYWYFLQCKHLIKEGKLVEALDLFERQML

SEQ ID NO: 61720 - protein, 106 aa, Homo sapiens
  Payload ID: 12324
  Gene Symbol: PTCD1
  Gene Name: pentatricopeptide repeat domain 1
  ENSP ID: ENSP00000401600
MDFVRLARLFARARPMGLFILQHLDPCRARWAGGREGLMRPMWAPFSSSSSQLPLGQERQENTGSLGSDPSHSNSTATQEEDEEEEESFGTLSDKYSSRRLFRKSA

SEQ ID NO: 61721 - protein, 144 aa, Homo sapiens
  Payload ID: 12324
  Gene Symbol: PTCD1
  Gene Name: pentatricopeptide repeat domain 1
  ENSP ID: ENSP00000408059
MDFVRLARLFARARPMGLFILQHLDPCRARWAGGREGLMRPMWAPFSSSSSQLPLGQERQENTGSLGSDPSHSNSTATQEEDEEEEESFGTLSDKYSSRRLFRKSAAQFHNLRFGERRDEQMEPEPKLWRGRRNTPYWYFLQCK

SEQ ID NO: 61722 - protein, 388 aa, Homo sapiens
  Payload ID: 12325
  Gene Symbol: PTCD2
  Gene Name: pentatricopeptide repeat domain 2
  Uniprot ID: Q8WV60
  ENSP ID: ENSP00000308948
MVRDSMAAAFRPSNRVLLQALQILVYPGVGGSGSVSCRCPLGAKRYLLTDNVVKLKEFQQKKVAVACNLSGTKETYFRNLKKKLTQNKLILKGELITLLHLCESRDHVELAKNVIYRYHAENKNFTLGEYKFGPLFVRLCYELDLEESAVELMKDQHLRGFFSDSTSFNILMDMLFIKGKYKSALQVLIEMKNQDVKFTKDTYVLAFAICYKLNSPESFKICTTLREEALLKGEILSRRASCFAVALALNQNEMAKAVSIFSQIMNPESIACINLNIIIHIQSNMLENLIKTLKNAAEGNLSKFVKRHVFSEEVLAKVREKVKDVPALVAKFDEIYGTLHITGQVTTDSLDAVLCHTPRDRKSHTLLLNKRMVSRRTFQPLSQSLLAE

SEQ ID NO: 61723 - protein, 388 aa, Homo sapiens; identical to SEQ ID NO: 61722
  Payload ID: 12325
  Gene Symbol: PTCD2
  Gene Name: pentatricopeptide repeat domain 2
  Uniprot ID: Q8WV60
  ENSP ID: ENSP00000370013

SEQ ID NO: 61724 - protein, 74 aa, Homo sapiens
  Payload ID: 12325
  Gene Symbol: PTCD2
  Gene Name: pentatricopeptide repeat domain 2
  ENSP ID: ENSP00000425606
MVRDSMAAAFRPSNRVLLQALQILVYPGVGGSGSVSCRCPLGGIRGFSLGKEGRDGREGSVRSQLASLWSSHSS

SEQ ID NO: 61725 - protein, 143 aa, Homo sapiens
  Payload ID: 12325
  Gene Symbol: PTCD2
  Gene Name: pentatricopeptide repeat domain 2
  ENSP ID: ENSP00000425773
MAAAFRPSNRVLLQALQILVYPGVGGSGSVSCRCPLGAKRYLLTDNVVKLKEFQQKKVAVACNLSGTKETYFRNLKKKLTQNKLILKGELITLLHLCESRDHVELAKNVIYRCFASIDRDEKPRCEVHQRYLCSCFCNLLQTE

SEQ ID NO: 61726 - protein, 203 aa, Homo sapiens
  Payload ID: 12325
  Gene Symbol: PTCD2
  Gene Name: pentatricopeptide repeat domain 2
  ENSP ID: ENSP00000426295
MDMLFIKGKYKSALQVLIEMKNQDVKFTKDTYVLAFAICYKLNSPESFKICTTLREEALLKGEILSRRASCFAVALALNQNEMAKAVSIFSQIMNPESIACINLNIIIHIQSNMLENLIKTLKNAAEGNLSKFVKRHVFSEEVLAKVREKVKDVPALVAKFDEIYGTLHITGQVTTDSLDAVLCHTPRDRKSHTLLLNKRMVS

SEQ ID NO: 61727 - protein, 279 aa, Homo sapiens
  Payload ID: 12325
  Gene Symbol: PTCD2
  Gene Name: pentatricopeptide repeat domain 2
  Uniprot ID: Q8WV60
  ENSP ID: ENSP00000427349
MVRDSMAAAFRPSNRVLLQALQILVYPGVGGSGSVSCRCPLGAKRYLLTDNVVKLKEFQQKKVAVACNLSGTKGALQVLIEMKNQDVKFTKDTYVLAFAICYKLNSPESFKICTTLREEALLKGEILSRRASCFAVALALNQNEMAKAVSIFSQIMNPESIACINLNIIIHIQSNMLENLIKTLKNAAEGNLSKFVKRHVFSEEVLAKVREKVKDVPALVAKFDEIYGTLHITGQVTTDSLDAVLCHTPRDRKSHTLLLNKRMVSRRTFQPLSQSLLAE

SEQ ID NO: 61728 - protein, 161 aa, Homo sapiens
  Payload ID: 12325
  Gene Symbol: PTCD2
  Gene Name: pentatricopeptide repeat domain 2
  ENSP ID: ENSP00000427524
MVRDSMAAAFRPSNRVLLQALQILVYPGVGGSGSVSCRCPLGAKRYLLTDNVVKLKEFQQKKVAVACNLSGTKETYFRNLKKKLTQNKLILKGELITLLHLCESRDHVELAKNVIYRYHAENKNFTLGEYKFGPLFVRLCYELDLEESAVELMKDQVLCKY

SEQ ID NO: 61729 - protein, 93 aa, Homo sapiens
  Payload ID: 12325
  Gene Symbol: PTCD2
  Gene Name: pentatricopeptide repeat domain 2
  ENSP ID: ENSP00000429665
MVRDSMAAAFRPSNRVLLQALQILVYPGVGGSGSVSCRCPLGAKRYLLTDNVVKLKEFQQKKVAVACNLSGTKGTMQRTKISLWGSINLDRFL

SEQ ID NO: 61730 - protein, 198 aa, Homo sapiens
  Payload ID: 12325
  Gene Symbol: PTCD2
  Gene Name: pentatricopeptide repeat domain 2
  ENSP ID: ENSP00000438810
MKNQDVKFTKDTYVLAFAICYKLNSPESFKICTTLREEALLKGEILSRRASCFAVALALNQNEMAKAVSIFSQIMNPESIACINLNIIIHIQSNMLENLIKTLKNAAEGNLSKFVKRHVFSEEVLAKVREKVKDVPALVAKFDEIYGTLHITGQVTTDSLDAVLCHTPRDRKSHTLLLNKRMVSRRTFQPLSQSLLAE

SEQ ID NO: 61731 - protein, 216 aa, Homo sapiens
  Payload ID: 12325
  Gene Symbol: PTCD2
  Gene Name: pentatricopeptide repeat domain 2
  Uniprot ID: Q8WV60
  ENSP ID: ENSP00000444772
MWNWLKMSFTGALQVLIEMKNQDVKFTKDTYVLAFAICYKLNSPESFKICTTLREEALLKGEILSRRASCFAVALALNQNEMAKAVSIFSQIMNPESIACINLNIIIHIQSNMLENLIKTLKNAAEGNLSKFVKRHVFSEEVLAKVREKVKDVPALVAKFDEIYGTLHITGQVTTDSLDAVLCHTPRDRKSHTLLLNKRMVSRRTFQPLSQSLLAE

SEQ ID NO: 61732 - protein, 689 aa, Homo sapiens
  Payload ID: 12326
  Gene Symbol: PTCD3
  Gene Name: pentatricopeptide repeat domain 3
  Uniprot ID: Q96EY7
  ENSP ID: ENSP00000254630
MAVVSAVRWLGLRSRLGQPLTGRRAGLCEQARSCRFYSGSATLSKVEGTDVTGIEEVVIPKKKTWDKVAVLQALASTVNRDTTAVPYVFQDDPYLMPASSLESRSFLLAKKSGENVAKFIINSYPKYFQKDIAEPHIPCLMPEYFEPQIKDISEAALKERIELRKVKASVDMFDQLLQAGTTVSLETTNSLLDLLCYYGDQEPSTDYHFQQTGQSEALEEENDETSRRKAGHQFGVTWRAKNNAERIFSLMPEKNEHSYCTMIRGMVKHRAYEQALNLYTELLNNRLHADVYTFNALIEATVCAINEKFEEKWSKILELLRHMVAQKVKPNLQTFNTILKCLRRFHVFARSPALQVLREMKAIGIEPSLATYHHIIRLFDQPGDPLKRSSFIIYDIMNELMGKRFSPKDPDDDKFFQSAMSICSSLRDLELAYQVHGLLKTGDNWKFIGPDQHRNFYYSKFFDLICLMEQIDVTLKWYEDLIPSAYFPHSQTMIHLLQALDVANRLEVIPKIWKDSKEYGHTFRSDLREEILMLMARDKHPPELQVAFADCAADIKSAYESQPIRQTAQDWPATSLNCIAILFLRAGRTQEAWKMLGLFRKHNKIPRSELLNELMDSAKVSNSPSQAIEVVELASAFSLPICEGLTQRVMSDFAINQEQKEALSNLTALTSDSDTDSSSDSDSDTSEGK

SEQ ID NO: 61733 - protein, 187 aa, Homo sapiens
  Payload ID: 12326
  Gene Symbol: PTCD3
  Gene Name: pentatricopeptide repeat domain 3
  ENSP ID: ENSP00000386922
MAVVSAVRWLGLRSRLGQPLTGRRAGLCEQARSCRFYSGSATLSKVEGTDVTGIEEVVIPKKKTWDKVAVLQALASTVNRDTTAVPYVFQDDPYLMPASSLESRSFLLAKKSGENVAKFIINSYPKYFQKDIAEPHIPEPLCLLKQQIVSWIYCVTMVTRSPQLITIFNKLDSQKHWKRKMMRHLGG

SEQ ID NO: 61734 - protein, 78 aa, Homo sapiens
  Payload ID: 12326
  Gene Symbol: PTCD3
  Gene Name: pentatricopeptide repeat domain 3
  ENSP ID: ENSP00000386963
MAVVSAVRWLGLRSRLGQPLTGRRAGLCEQARSCSSPQERETTPSDTAETFVLPFNASPPFPDFILVVQPSQRLKELM

SEQ ID NO: 61735 - protein, 69 aa, Homo sapiens
  Payload ID: 12326
  Gene Symbol: PTCD3
  Gene Name: pentatricopeptide repeat domain 3
  ENSP ID: ENSP00000394441
MAVVSAVRWLGLRSRLGQPLTGRRAGLCEQARSCRFYSGSATLSKVEGTDVTGIEEVVIPKKKTCDLVT

SEQ ID NO: 61736 - protein, 69 aa, Homo sapiens; identical to SEQ ID NO: 61735
  Payload ID: 12326
  Gene Symbol: PTCD3
  Gene Name: pentatricopeptide repeat domain 3
  ENSP ID: ENSP00000487135

SEQ ID NO: 61737 - protein, 381 aa, Homo sapiens
  Payload ID: 12327
  Gene Symbol: PTX3
  Gene Name: pentraxin 3, long
  Uniprot ID: P26022
  ENSP ID: ENSP00000295927
MHLLAILFCALWSAVLAENSDDYDLMYVNLDNEIDNGLHPTEDPTPCACGQEHSEWDKLFIMLENSQMRERMLLQATDDVLRGELQRLREELGRLAESLARPCAPGAPAEARLTSALDELLQATRDAGRRLARMEGAEAQRPEEAGRALAAVLEELRQTRADLHAVQGWAARSWLPAGCETAILFPMRSKKIFGSVHPVRPMRLESFSACIWVKATDVLNKTILFSYGTKRNPYEIQLYLSYQSIVFVVGGEENKLVAEAMVSLGRWTHLCGTWNSEEGLTSLWVNGELAATTVEMATGHIVPEGGILQIGQEKNGCCVGGGFDETLAFSGRLTGFNIWDSVLSNEEIRETGGAESCHIRGNIVGWGVTEIQPHGGAQYVS

SEQ ID NO: 61738 - protein, 473 aa, Homo sapiens
  Payload ID: 12328
  Gene Symbol: PTX4
  Gene Name: pentraxin 4, long
  Uniprot ID: Q96A99
  ENSP ID: ENSP00000293922
MGSGNWEVTGPPCGSRCERPPGLPRGVHGQFRSAVGLSGLRWFRRFQEVTWTHLQNIASNYNVSYNVDVRFRSLAEESQAVAQAVNRSQASVQGELAQLKAWVRKLQRRGRKVDTRLRALDLTLGERSQQRARERKAHKAQRDALQDSLARLEGLVHSQGARLAALEGRLPVAHPGTAALGPALVPTPTQPEELGPTSLKLQRDRQELRAASEHRGPPQDSSAPLQGRREPPASGSHRVLSGTAPKDPRQQAWSPQVPGEICGVGPTLVFPNASTRNVVFLSPGFVTALRALSFCSWVRTASGRLGTLLSYATEDNDNKLVLHGRDSLLPGSIHFVIGDPAFRELPLQLLLDGQWHHICVIWTSTQGRYWLHVDRRLVATGSRFREGYEIPPGGSLVLGQEQDSVGGGFDSSEAFVGSMSGLAIWDRALVPGEVANLAIGKEFPTGAILTLANAALAGGFVQGANCTCLERCP

SEQ ID NO: 61739 - protein, 478 aa, Homo sapiens
  Payload ID: 12328
  Gene Symbol: PTX4
  Gene Name: pentraxin 4, long
  Uniprot ID: Q96A99
  ENSP ID: ENSP00000445277
MGCSWRKTLSFFLVFVPIYLHGASSQEAAPVGPRKPFFERLRRLEEQFRRFQEVTWTHLQNIASNYNVSYNVDVRFRSLAEESQAVAQAVNRSQASVQGELAQLKAWVRKLQRRGRKVDTRLRALDLTLGERSQQRARERKAHKAQRDALQDSLARLEGLVHSQGARLAALEGRLPVAHPGTAALGPALVPTPTQPEELGPTSLKLQRDRQELRAASEHRGPPQDSSAPLQGRREPPASGSHRVLSGTAPKDPRQQAWSPQVPGEICGVGPTLVFPNASTRNVVFLSPGFVTALRALSFCSWVRTASGRLGTLLSYATEDNDNKLVLHGRDSLLPGSIHFVIGDPAFRELPLQLLLDGQWHHICVIWTSTQGRYWLHVDRRLVATGSRFREGYEIPPGGSLVLGQEQDSVGGGFDSSEAFVGSMSGLAIWDRALVPGEVANLAIGKEFPTGAILTLANAALAGGFVQGANCTCLERCP

SEQ ID NO: 61740 - protein, 192 aa, Homo sapiens
  Payload ID: 12328
  Gene Symbol: PTX4
  Gene Name: pentraxin 4, long
  ENSP ID: ENSP00000456816
MGCSWRKTLSFFLVFVPIYLHGASSQEAAPVGPRKPFFERLRRLEEQFRRFQEVTWTHLQNIASNYNVSYNVDVRFRSLAEESQAVAQAVNRSQASVQGELAQLKAWVRKLQRRGRKFAAWAPPSFSQTPPPGTWSSSALVSSLPCEPCPSAAGSARPPAAWAPSCPTPPRTMTTSWCCTAETPCCPDPSTS

SEQ ID NO: 61741 - protein, 388 aa, Homo sapiens
  Payload ID: 12329
  Gene Symbol: PGA3
  Gene Name: pepsinogen 3, group I (pepsinogen A)
  Uniprot ID: P0DJD8
  ENSP ID: ENSP00000322192
MKWLLLLGLVALSECIMYKVPLIRKKSLRRTLSERGLLKDFLKKHNLNPARKYFPQWKAPTLVDEQPLENYLDMEYFGTIGIGTPAQDFTVVFDTGSSNLWVPSVYCSSLACTNHNRFNPEDSSTYQSTSETVSITYGTGSMTGILGYDTVQVGGISDTNQIFGLSETEPGSFLYYAPFDGILGLAYPSISSSGATPVFDNIWNQGLVSQDLFSVYLSADDQSGSVVIFGGIDSSYYTGSLNWVPVTVEGYWQITVDSITMNGEAIACAEGCQAIVDTGTSLLTGPTSPIANIQSDIGASENSDGDMVVSCSAISSLPDIVFTINGVQYPVPPSAYILQSEGSCISGFQGMNLPTESGELWILGDVFIRQYFTVFDRANNQVGLAPVA

SEQ ID NO: 61742 - protein, 128 aa, Homo sapiens
  Payload ID: 12329
  Gene Symbol: PGA3
  Gene Name: pepsinogen 3, group I (pepsinogen A)
  ENSP ID: ENSP00000439846
MNGEAIACAEGCQAIVDTGTSLLTGPTSPIANIQSDIGASENSDGDMVVSCSAISSLPDIVFTINGVQYPVPPSAYILQSEGSCISGFQGMNLPTESGELWILGDVFIRQYFTVFDRANNQVGLAPVA

SEQ ID NO: 61743 - protein, 234 aa, Homo sapiens
  Payload ID: 12329
  Gene Symbol: PGA3
  Gene Name: pepsinogen 3, group I (pepsinogen A)
  ENSP ID: ENSP00000440177
MVSGNNSDSAHCIGTGLRGKETTLVTPQDSPRKCPIKGSPEEATADGHTNGRTKKFMSSPLTFHSDDQSGSVVIFGGIDSSYYTGSLNWVPVTVEGYWQITVDSITMNGEAIACAEGCQAIVDTGTSLLTGPTSPIANIQSDIGASENSDGDMVVSCSAISSLPDIVFTINGVQYPVPPSAYILQSEGSCISGFQGMNLPTESGELWILGDVFIRQYFTVFDRANNQVGLAPVA

SEQ ID NO: 61744 - protein, 184 aa, Homo sapiens
  Payload ID: 12329
  Gene Symbol: PGA3
  Gene Name: pepsinogen 3, group I (pepsinogen A)
  ENSP ID: ENSP00000442525
MEYFGTIGIGTPAQDFTVVFDTGSSNLWVPSVYCSSLACTNHNRFNPEDSSTYQSTSETVSITYGTGSMTGILGYDTVQVGGISDTNQIFGLSETEPGSFLYYAPFDGILGLAYPSISSSGATPVFDNIWNQGLVSQDLFSVYLSADDQSGSVVIFGGIDSSYYTGSLNWVPVTVEGYWQITVD

SEQ ID NO: 61745 - protein, 265 aa, Homo sapiens
  Payload ID: 12329
  Gene Symbol: PGA3
  Gene Name: pepsinogen 3, group I (pepsinogen A)
  ENSP ID: ENSP00000443732
MEYFGTIGIGTPAQDFTVVFDTGSSNLWVPSVYCSSLACTNHNRFNPEDSSTYQSTSETVSITYGTGSMTGILGYDTVQVGGISDTNQIFGLSETEPGSFLYYAPFDGILGLAYPSISSSGATPVFDNIWNQGLVSQDLFSVYLSADDQSGSVVIFGGIDSSYYTGSLNWVPVTVEGYWQITVDSITMNGEAIACAEGCQAIVDTGTSLLTGPTSPIANIQSDIGASENSDGDMVVSCSAISSLPDIVFTINGVQYPVPPSAYIL

SEQ ID NO: 61746 - protein, 388 aa, Homo sapiens
  Payload ID: 12330
  Gene Symbol: PGA4
  Gene Name: pepsinogen 4, group I (pepsinogen A)
  Uniprot ID: P0DJD7
  ENSP ID: ENSP00000367391
MKWLLLLGLVALSECIMYKVPLIRKKSLRRTLSERGLLKDFLKKHNLNPARKYFPQWEAPTLVDEQPLENYLDMEYFGTIGIGTPAQDFTVVFDTGSSNLWVPSVYCSSLACTNHNRFNPEDSSTYQSTSETVSITYGTGSMTGILGYDTVQVGGISDTNQIFGLSETEPGSFLYYAPFDGILGLAYPSISSSGATPVFDNIWNQGLVSQDLFSVYLSADDQSGSVVIFGGIDSSYYTGSLNWVPVTVEGYWQITVDSITMNGEAIACAEGCQAIVDTGTSLLTGPTSPIANIQSDIGASENSDGDMVVSCSAISSLPDIVFTINGVQYPVPPSAYILQSEGSCISGFQGMNLPTESGELWILGDVFIRQYFTVFDRANNQVGLAPVA

SEQ ID NO: 61747 - protein, 234 aa, Homo sapiens; identical to SEQ ID NO: 61743
  Payload ID: 12330
  Gene Symbol: PGA4
  Gene Name: pepsinogen 4, group I (pepsinogen A)
  ENSP ID: ENSP00000442757

SEQ ID NO: 61748 - protein, 128 aa, Homo sapiens; identical to SEQ ID NO: 61742
  Payload ID: 12330
  Gene Symbol: PGA4
  Gene Name: pepsinogen 4, group I (pepsinogen A)
  ENSP ID: ENSP00000443623

SEQ ID NO: 61749 - protein, 388 aa, Homo sapiens
  Payload ID: 12331
  Gene Symbol: PGA5
  Gene Name: pepsinogen 5, group I (pepsinogen A)
  Uniprot ID: P0DJD9
  ENSP ID: ENSP00000309542
MKWLLLLGLVALSECIMYKVPLIRKKSLRRTLSERGLLKDFLKKHNLNPARKYFPQWEAPTLVDEQPLENYLDMEYFGTIGIGTPAQDFTVVFDTGSSNLWVPSVYCSSLACTNHNRFNPEDSSTYQSTSETVSITYGTGSMTGILGYDTVQVGGISDTNQIFGLSETEPGSFLYYAPFDGILGLAYPSISSSGATPVFDNIWNQGLVSQDLFSVYLSADDKSGSVVIFGGIDSSYYTGSLNWVPVTVEGYWQITVDSITMNGETIACAEGCQAIVDTGTSLLTGPTSPIANIQSDIGASENSDGDMVVSCSAISSLPDIVFTINGVQYPVPPSAYILQSEGSCISGFQGMNVPTESGELWILGDVFIRQYFTVFDRANNQVGLAPVA

SEQ ID NO: 61750 - protein, 234 aa, Homo sapiens
  Payload ID: 12331
  Gene Symbol: PGA5
  Gene Name: pepsinogen 5, group I (pepsinogen A)
  ENSP ID: ENSP00000408739
MVSGNNSDGAHCMGPGLRGKETTLVTPQDSPGKCPINGRSEEATADGHTNGRTKKFMSSPLTFHSDDKSGSVVIFGGIDSSYYTGSLNWVPVTVEGYWQITVDSITMNGETIACAEGCQAIVDTGTSLLTGPTSPIANIQSDIGASENSDGDMVVSCSAISSLPDIVFTINGVQYPVPPSAYILQSEGSCISGFQGMNVPTESGELWILGDVFIRQYFTVFDRANNQVGLAPVA

SEQ ID NO: 61751 - protein, 128 aa, Homo sapiens
  Payload ID: 12331
  Gene Symbol: PGA5
  Gene Name: pepsinogen 5, group I (pepsinogen A)
  ENSP ID: ENSP00000441981
MNGETIACAEGCQAIVDTGTSLLTGPTSPIANIQSDIGASENSDGDMVVSCSAISSLPDIVFTINGVQYPVPPSAYILQSEGSCISGFQGMNVPTESGELWILGDVFIRQYFTVFDRANNQVGLAPVA

SEQ ID NO: 61752 - protein, 525 aa, Homo sapiens
  Payload ID: 12332
  Gene Symbol: PMPCA
  Gene Name: peptidase (mitochondrial processing) alpha
  Uniprot ID: Q10713
  ENSP ID: ENSP00000360782
MAAVVLAATRLLRGSGSWGCSRLRFGPPAYRRFSSGGAYPNIPLSSPLPGVPKPVFATVDGQEKFETKVTTLDNGLRVASQNKFGQFCTVGILINSGSRYEAKYLSGIAHFLEKLAFSSTARFDSKDEILLTLEKHGGICDCQTSRDTTMYAVSADSKGLDTVVALLADVVLQPRLTDEEVEMTRMAVQFELEDLNLRPDPEPLLTEMIHEAAYRENTVGLHRFCPTENVAKINREVLHSYLRNYYTPDRMVLAGVGVEHEHLVDCARKYLLGVQPAWGSAEAVDIDRSVAQYTGGIAKLERDMSNVSLGPTPIPELTHIMVGLESCSFLEEDFIPFAVLNMMMGGGGSFSAGGPGKGMFSRLYLNVLNRHHWMYNATSYHHSYEDTGLLCIHASADPRQVREMVEIITKEFILMGGTVDTVELERAKTQLTSMLMMNLESRPVIFEDVGRQVLATRSRKLPHELCTLIRNVKPEDVKRVASKMLRGKPAVAALGDLTDLPTYEHIQTALSSKDGRLPRTYRLFR

SEQ ID NO: 61753 - protein, 271 aa, Homo sapiens
  Payload ID: 12332
  Gene Symbol: PMPCA
  Gene Name: peptidase (mitochondrial processing) alpha
  ENSP ID: ENSP00000408393
YTGGIAKLERDMSNVSLGPTPIPELTHIMVGLESCSFLEEDFIPFAVLNMMMGGGGSFSAGGPGKGMFSRLYLNVLNRHHWMYNATSYHHSYEDTGLLCIHASADPRQVREMVEIITKEFILMGGTVDTVELERAKTQLTSMLMMNLESRPVIFEDVGRQVLATRSRKLPHELCTLIREYRRGSEGLPQASARLRGGRLALPQAVVGLWYVHHTQNLGPSPVVLSRGGQGQGRGVADLVSLPGPTMHLLPPWQVTPPSAPLGGAVTTAQSC

SEQ ID NO: 61754 - protein, 394 aa, Homo sapiens
  Payload ID: 12332
  Gene Symbol: PMPCA
  Gene Name: peptidase (mitochondrial processing) alpha
  Uniprot ID: Q10713
  ENSP ID: ENSP00000416702
MKRNTLVELLTFWKNWHFRLLLDLTAKMKFCLRWKSMGVSVTARHQDEEVEMTRMAVQFELEDLNLRPDPEPLLTEMIHEAAYRENTVGLHRFCPTENVAKINREVLHSYLRNYYTPDRMVLAGVGVEHEHLVDCARKYLLGVQPAWGSAEAVDIDRSVAQYTGGIAKLERDMSNVSLGPTPIPELTHIMVGLESCSFLEEDFIPFAVLNMMMGGGGSFSAGGPGKGMFSRLYLNVLNRHHWMYNATSYHHSYEDTGLLCIHASADPRQVREMVEIITKEFILMGGTVDTVELERAKTQLTSMLMMNLESRPVIFEDVGRQVLATRSRKLPHELCTLIRNVKPEDVKRVASKMLRGKPAVAALGDLTDLPTYEHIQTALSSKDGRLPRTYRLFR

SEQ ID NO: 61755 - protein, 489 aa, Homo sapiens
  Payload ID: 12333
  Gene Symbol: PMPCB
  Gene Name: peptidase (mitochondrial processing) beta
  Uniprot ID: O75439
  ENSP ID: ENSP00000249269
MAAAAARVVLSSAARRRLWGFSESLLIRGAAGRSLYFGENRLRSTQAATQVVLNVPETRVTCLESGLRVASEDSGLSTCTVGLWIDAGSRYENEKNNGTAHFLEHMAFKGTKKRSQLDLELEIENMGAHLNAYTSREQTVYYAKAFSKDLPRAVEILADIIQNSTLGEAEIERERGVILREMQEVETNLQEVVFDYLHATAYQNTALGRTILGPTENIKSISRKDLVDYITTHYKGPRIVLAAAGGVSHDELLDLAKFHFGDSLCTHKGEIPALPPCKFTGSEIRVRDDKMPLAHLAIAVEAVGWAHPDTICLMVANTLIGNWDRSFGGGMNLSSKLAQLTCHGNLCHSFQSFNTSYTDTGLWGLYMVCESSTVADMLHVVQKEWMRLCTSVTESEVARARNLLKTNMLLQLDGSTPICEDIGRQMLCYNRRIPIPELEARIDAVNAETIREVCTKYIYNRSPAIAAVGPIKQLPDFKQIRSNMCWLRD

SEQ ID NO: 61756 - protein, 122 aa, Homo sapiens
  Payload ID: 12333
  Gene Symbol: PMPCB
  Gene Name: peptidase (mitochondrial processing) beta
  ENSP ID: ENSP00000388934
MAAAAARVVLSSAARRRLWGFSESLLIRGAAGRVSFPPGRSCPRDLARPGAAHLRVGATDPNSGSGRASSTRTRRAPGGLGLLNWPGVTGLWPPARRPASDVWDDPGFRLLPPATEECMFDH

SEQ ID NO: 61757 - protein, 490 aa, Homo sapiens
  Payload ID: 12333
  Gene Symbol: PMPCB
  Gene Name: peptidase (mitochondrial processing) beta
  ENSP ID: ENSP00000390035
MAAAAARVVLSSAARRRLWGFSESLLIRGAAGRSLYFGENRLRSTQAATQVVLNVPETRVTCLESGLRVASEDSGLSTCTVGLWIDAGSRYENEKNNGTAHFLEHMAFKGTKKRSQLDLELEIENMGAHLNAYTSREQTVYYAKAFSKDLPRAVEILADIIQNSTLGEAEIERERGVILREMQEVETNLQEVVFDYLHATAYQNTALGRTILGPTENIKSISRKDLVDYITTHYKGPRIVLAAAGGVSHDELLDLAKFHFGDSLCTHKGEIPALPPCKFTGSEIRVRDDKMPLAHLAIAVEAVGWAHPDTICLMVANTLIGNWDRSFGGGMNLSSKLAQLTCHGNLCHSFQSFNTSYTDTGLWGLYMVCESSTVADMLHVVQKEWMRLCTSVTESEVARARNLLKTNMLLQLDGSTPICEDIGRQMLCYNRRIPIPELEARIDAVNAETIREVCTKYIYNRSPAIAAVGKPGFFSSMQKVGQVLLINSSF

SEQ ID NO: 61758 - protein, 202 aa, Homo sapiens
  Payload ID: 12333
  Gene Symbol: PMPCB
  Gene Name: peptidase (mitochondrial processing) beta
  ENSP ID: ENSP00000397884
MAAAAARVVLSSAARRRLWGFSESLLIRGAAGRSLYFGENRLRSTQAATQVVLNVPETRVTCLESGLRVASEDSGLSTCTVGLWIDAGSRYENEKNNGTAHFLEHMAFKGTKKRSQLDLELEIENMGAHLNAYTSREQTVYYAKAFSKDLPRAYQNTALGRTILGPTENIKSISRKDLVDYITTHYKGPRIVLAAAGDSCEG

SEQ ID NO: 61759 - protein, 122 aa, Homo sapiens
  Payload ID: 12333
  Gene Symbol: PMPCB
  Gene Name: peptidase (mitochondrial processing) beta
  ENSP ID: ENSP00000402859
MAAAAARVVLSSAARRRLWGFSESLLIRGAAGRSLYFGENRLRSTQAATQVVLNVPETRVTCLESGLRVASEDSGLSTCTVGLWIDAGSRYENEKNNGTAHFLEHMAFKARHQEEIPVRSGT

SEQ ID NO: 61760 - protein, 119 aa, Homo sapiens
  Payload ID: 12333
  Gene Symbol: PMPCB
  Gene Name: peptidase (mitochondrial processing) beta
  ENSP ID: ENSP00000408682
MAAAAARVVLSSAARRRLWGFSESLLIRGAAGRSLYFGENRLRSTQAATQVVLNVPETRVTCLESGLRVASEDSGLSTCTVGLWIDAGSRYENEKNNGTAHFLEHMAFKAKEIPVRSGT

SEQ ID NO: 61761 - protein, 493 aa, Homo sapiens
  Payload ID: 12334
  Gene Symbol: PEPD
  Gene Name: peptidase D
  Uniprot ID: P12955
  ENSP ID: ENSP00000244137
MAAATGPSFWLGNETLKVPLALFALNRQRLCERLRKNPAVQAGSIVVLQGGEETQRYCTDTGVLFRQESFFHWAFGVTEPGCYGVIDVDTGKSTLFVPRLPASHATWMGKIHSKEHFKEKYAVDDVQYVDEIASVLTSQKPSVLLTLRGVNTDSGSVCREASFDGISKFEVNNTILHPEIVECRVFKTDMELEVLRYTNKISSEAHREVMKAVKVGMKEYELESLFEHYCYSRGGMRHSSYTCICGSGENSAVLHYGHAGAPNDRTIQNGDMCLFDMGGEYYCFASDITCSFPANGKFTADQKAVYEAVLRSSRAVMGAMKPGVWWPDMHRLADRIHLEELAHMGILSGSVDAMVQAHLGAVFMPHGLGHFLGIDVHDVGGYPEGVERIDEPGLRSLRTARHLQPGMVLTVEPGIYFIDHLLDEALADPARASFLNREVLQRFRGFGGVRIEEDVVVTDSGIELLTCVPRTVEEIEACMAGCDKAFTPFSGPK

SEQ ID NO: 61762 - protein, 452 aa, Homo sapiens
  Payload ID: 12334
  Gene Symbol: PEPD
  Gene Name: peptidase D
  Uniprot ID: P12955
  ENSP ID: ENSP00000380226
MAAATGPSFWLGNETLKVPLALFALNRQRLCERLRKNPAVQAGSIVVLQGGEETQRYCTDTGVLFRQESFFHWAFGVTEPGCYGVIDVDTGKSTLFVPRLPASHATWMGKIHSKEHFKEKYAVDDVQYVDEIASVLTSQKPSVLLTLRGVNTDSGSVCREASFDGISKFEVNNTILHPEIVECLFEHYCYSRGGMRHSSYTCICGSGENSAVLHYGHAGAPNDRTIQNGDMCLFDMGGEYYCFASDITCSFPANGKFTADQKAVYEAVLRSSRAVMGAMKPGVWWPDMHRLADRIHLEELAHMGILSGSVDAMVQAHLGAVFMPHGLGHFLGIDVHDVGGYPEGVERIDEPGLRSLRTARHLQPGMVLTVEPGIYFIDHLLDEALADPARASFLNREVLQRFRGFGGVRIEEDVVVTDSGIELLTCVPRTVEEIEACMAGCDKAFTPFSGPK

SEQ ID NO: 61763 - protein, 429 aa, Homo sapiens
  Payload ID: 12334
  Gene Symbol: PEPD
  Gene Name: peptidase D
  Uniprot ID: P12955
  ENSP ID: ENSP00000391890
MAAATGPSFWLGNETLKVPLALFALNRQRLCERLRKNPAVQAGSIVVLQGGEETQRYCTDTGVLFRQIASVLTSQKPSVLLTLRGVNTDSGSVCREASFDGISKFEVNNTILHPEIVECRVFKTDMELEVLRYTNKISSEAHREVMKAVKVGMKEYELESLFEHYCYSRGGMRHSSYTCICGSGENSAVLHYGHAGAPNDRTIQNGDMCLFDMGGEYYCFASDITCSFPANGKFTADQKAVYEAVLRSSRAVMGAMKPGVWWPDMHRLADRIHLEELAHMGILSGSVDAMVQAHLGAVFMPHGLGHFLGIDVHDVGGYPEGVERIDEPGLRSLRTARHLQPGMVLTVEPGIYFIDHLLDEALADPARASFLNREVLQRFRGFGGVRIEEDVVVTDSGIELLTCVPRTVEEIEACMAGCDKAFTPFSGPK

SEQ ID NO: 61764 - protein, 194 aa, Homo sapiens
  Payload ID: 12334
  Gene Symbol: PEPD
  Gene Name: peptidase D
  ENSP ID: ENSP00000468516
  MOD_RES (1)..(1): Any amino acid
XVNNTILHPEIVECRVFKTDMELEVLRYTNKISSEAHREVMKAVKVGMKEYELESLFEHYCYSRGGMRHSSYTCICGSGENSAVLHYGHAGAPNDRTIQNGDMCLFDMGGEYYCFASDITCSFPANGKFTADQKAVYEAVLRSSRAVMGAMKPGARTGRTVFSVGTMSTPPAGRNGVWWPDMHRLADRIHLEEL

SEQ ID NO: 61765 - protein, 104 aa, Homo sapiens
  Payload ID: 12334
  Gene Symbol: PEPD
  Gene Name: peptidase D
  ENSP ID: ENSP00000476514
MELEVLRYTNKISSEAHREVMKAVKVGMKEYELESLFEHYCYSRGGMRHSSYTCICGSGENSAVLHYGHAGAPNDRTIQNGDMCLFDMGGEYYCFASDITCSFP

SEQ ID NO: 61766 - protein, 55 aa, Homo sapiens
  Payload ID: 12334
  Gene Symbol: PEPD
  Gene Name: peptidase D
  ENSP ID: ENSP00000476667
IASVLTSQKPSVLLTLRGVNTDSGSVCREASFDGISKFEVNNTILHPEIVECWEL

SEQ ID NO: 61767 - protein, 42 aa, Homo sapiens
  Payload ID: 12334
  Gene Symbol: PEPD
  Gene Name: peptidase D
  ENSP ID: ENSP00000476869
  MOD_RES (1)..(1): Any amino acid
XAFGVTEPGCYGVIDVDTGKSTLFVPRLPASHATWMGKLPAS

SEQ ID NO: 61768 - protein, 675 aa, Homo sapiens
  Payload ID: 12335
  Gene Symbol: PAMR1
  Gene Name: peptidase domain containing associated with muscle regeneration 1
  ENSP ID: ENSP00000432591
MCRECCEYDQIECVCPGKREVVGYTIPCCRNEENECDSCLIHPGCTIFENCKSCRNGSWGGTLDDFYVKGFYCAECRAGWYGGDCMRCGQVLRAPKGQILLESYPLNAHCEWTIHAKPGFVIQLRFVMLSLEFDYMCQYDYVEVRDGDNRDGQIIKRVCGNERPAPIQSIGSSLHVLFHSDGSKNFDGFHAIYEEITACSSSPCFHDGTCVLDKAGSYKCACLAGYTGQRCENLLEAGKSKIKASEDSLSVLEERNCSDPGGPVNGYQKITGGPGLINGRHAKIGTVVSFFCNNSYVLSGNEKRTCQQNGEWSGKQPICIKACREPKISDLVRRRVLPMQVQSRETPLHQLYSAAFSKQKLQSAPTKKPALPFGDLPMGYQHLHTQLQYECISPFYRRLGSSRRTCLRTGKWSGRAPSCIPICGKIENITAPKTQGLRWPWQAAIYRRTSGVHDGSLHKGAWFLVCSGALVNERTVVVAAHCVTDLGKVTMIKTADLKVVLGKFYRDDDRDEKTIQSLQISAIILHPNYDPILLDADIAILKLLDKARISTRVQPICLAASRDLSTSFQESHITVAGWNVLADVRSPGFKNDTLRSGVVSVVDSLLCEEQHEDHGIPVSVTDNMFCASWEPTAPSDICTAETGGIAAVSFPGRASPEPRWHLMGLVSWSYDKTCS

SEQ ID NO: 61769 - protein, 177 aa, Homo sapiens
  Payload ID: 12335
  Gene Symbol: PAMR1
  Gene Name: peptidase domain containing associated with muscle regeneration 1
  ENSP ID: ENSP00000433024
MELGCWTQLGLTFLQLLLISSLPREYTVINEACPGAEWNIMCRECCEYDQIECVCPGKREVVGYTIPCCRNEENECDSCLIHPGCTIFENCKSCRNGSWGGTLDDFYVKGFYCAECRAGWYGGDCMPCSSSPCFHDGTCVLDKAGSYKCACLAGYTGQRCENLLEERNCSDPGGPVN

SEQ ID NO: 61770 - protein, 416 aa, Homo sapiens
  Payload ID: 12335
  Gene Symbol: PAMR1
  Gene Name: peptidase domain containing associated with muscle regeneration 1
  ENSP ID: ENSP00000478867
MLKLAPWCLSFVTTPMFLVAMRKELASRMEWSGKQPICIKACREPKISDLVRRRVLPMQVQSRETPLHQLYSAAFSKQKLQSAPTKKPALPFGDLPMGYQHLHTQLQYECISPFYRRLGSSRRTCLRTGKWSGRAPSCIPICGKIENITAPKTQGLRWPWQAAIYRRTSGVHDGSLHKGAWFLVCSGALVNERTVVVAAHCVTDLGKVTMIKTADLKVVLGKFYRDDDRDEKTIQSLQISAIILHPNYDPILLDADIAILKLLDKARISTRVQPICLAASRDLSTSFQESHITVAGWNVLADVRSPGFKNDTLRSGVVSVVDSLLCEEQHEDHGIPVSVTDNMFCASWEPTAPSDICTAETGGIAAVSFPGRASPEPRWHLMGLVSWSYDKTCSHRLSTAFTKVLPFKDWIERNMK

SEQ ID NO: 61771 - protein, 609 aa, Homo sapiens
  Payload ID: 12335
  Gene Symbol: PAMR1
  Gene Name: peptidase domain containing associated with muscle regeneration 1
  Uniprot ID: Q6UXH9
  ENSP ID: ENSP00000479260
MELGCWTQLGLTFLQLLLISSLPREYTVINEACPGAEWNIMCRECCEYDQIECVCPGKREVVGYTIPCCRNEENECDSCLIHPGCTIFENCKSCRNGSWGGTLDDFYVKGFYCAECRAGWYGGDCMPCSSSPCFHDGTCVLDKAGSYKCACLAGYTGQRCENLLEERNCSDPGGPVNGYQKITGGPGLINGRHAKIGTVVSFFCNNSYVLSGNEKRTCQQNGEWSGKQPICIKACREPKISDLVRRRVLPMQVQSRETPLHQLYSAAFSKQKLQSAPTKKPALPFGDLPMGYQHLHTQLQYECISPFYRRLGSSRRTCLRTGKWSGRAPSCIPICGKIENITAPKTQGLRWPWQAAIYRRTSGVHDGSLHKGAWFLVCSGALVNERTVVVAAHCVTDLGKVTMIKTADLKVVLGKFYRDDDRDEKTIQSLQISAIILHPNYDPILLDADIAILKLLDKARISTRVQPICLAASRDLSTSFQESHITVAGWNVLADVRSPGFKNDTLRSGVVSVVDSLLCEEQHEDHGIPVSVTDNMFCASWEPTAPSDICTAETGGIAAVSFPGRASPEPRWHLMGLVSWSYDKTCSHRLSTAFTKVLPFKDWIERNMK

SEQ ID NO: 61772 - protein, 680 aa, Homo sapiens
  Payload ID: 12335
  Gene Symbol: PAMR1
  Gene Name: peptidase domain containing associated with muscle regeneration 1
  ENSP ID: ENSP00000480961
MCRECCEYDQIECVCPGKREVVGYTIPCCRNEENECDSCLIHPGCTIFENCKSCRNGSWGGTLDDFYVKGFYCAECRAGWYGGDCMRCGQVLRAPKGQILLESYPLNAHCEWTIHAKPGFVIQLRFVMLSLEFDYMCQYDYVEVRDGDNRDGQIIKRVCGNERPAPIQSIGSSLHVLFHSDGSKNFDGFHAIYEEITACSSSPCFHDGTCVLDKAGSYKCACLAGYTGQRCENLLEERNCSDPGGPVNGYQKITGGPGLINGRHAKIGTVVSFFCNNSYVLSGNEKRTCQQNGEWSGKQPICIKACREPKISDLVRRRVLPMQVQSRETPLHQLYSAAFSKQKLQSAPTKKPALPFGDLPMGYQHLHTQLQYECISPFYRRLGSSRRTCLRTGKWSGRAPSCIPICGKIENITAPKTQGLRWPWQAAIYRRTSGVHDGSLHKGAWFLVCSGALVNERTVVVAAHCVTDLGKVTMIKTADLKVVLGKFYRDDDRDEKTIQSLQISAIILHPNYDPILLDADIAILKLLDKARISTRVQPICLAASRDLSTSFQESHITVAGWNVLADVRSPGFKNDTLRSGVVSVVDSLLCEEQHEDHGIPVSVTDNMFCASWEPTAPSDICTAETGGIAAVSFPGRASPEPRWHLMGLVSWSYDKTCSHRLSTAFTKVLPFKDWIERNMK

SEQ ID NO: 61773 - protein, 737 aa, Homo sapiens
  Payload ID: 12335
  Gene Symbol: PAMR1
  Gene Name: peptidase domain containing associated with muscle regeneration 1
  Uniprot ID: Q6UXH9
  ENSP ID: ENSP00000482899
MELGCWTQLGLTFLQLLLISSLPREYTVINEACPGAEWNIMCRECCEYDQIECVCPGKREVVGYTIPCCRNEENECDSCLIHPGCTIFENCKSCRNGSWGGTLDDFYVKGFYCAECRAGWYGGDCMRCGQVLRAPKGQILLESYPLNAHCEWTIHAKPGFVIQLRFVMLSLEFDYMCQYDYVEVRDGDNRDGQIIKRVCGNERPAPIQSIGSSLHVLFHSDGSKNFDGFHAIYEEITACSSSPCFHDGTCVLDKAGSYKCACLAGYTGQRCENLLEAGKSKIKASEDSLSVLEERNCSDPGGPVNGYQKITGGPGLINGRHAKIGTVVSFFCNNSYVLSGNEKRTCQQNGEWSGKQPICIKACREPKISDLVRRRVLPMQVQSRETPLHQLYSAAFSKQKLQSAPTKKPALPFGDLPMGYQHLHTQLQYECISPFYRRLGSSRRTCLRTGKWSGRAPSCIPICGKIENITAPKTQGLRWPWQAAIYRRTSGVHDGSLHKGAWFLVCSGALVNERTVVVAAHCVTDLGKVTMIKTADLKVVLGKFYRDDDRDEKTIQSLQISAIILHPNYDPILLDADIAILKLLDKARISTRVQPICLAASRDLSTSFQESHITVAGWNVLADVRSPGFKNDTLRSGVVSVVDSLLCEEQHEDHGIPVSVTDNMFCASWEPTAPSDICTAETGGIAAVSFPGRASPEPRWHLMGLVSWSYDKTCSHRLSTAFTKVLPFKDWIERNMK

SEQ ID NO: 61774 - protein, 720 aa, Homo sapiens
  Payload ID: 12335
  Gene Symbol: PAMR1
  Gene Name: peptidase domain containing associated with muscle regeneration 1
  Uniprot ID: Q6UXH9
  ENSP ID: ENSP00000483703
MELGCWTQLGLTFLQLLLISSLPREYTVINEACPGAEWNIMCRECCEYDQIECVCPGKREVVGYTIPCCRNEENECDSCLIHPGCTIFENCKSCRNGSWGGTLDDFYVKGFYCAECRAGWYGGDCMRCGQVLRAPKGQILLESYPLNAHCEWTIHAKPGFVIQLRFVMLSLEFDYMCQYDYVEVRDGDNRDGQIIKRVCGNERPAPIQSIGSSLHVLFHSDGSKNFDGFHAIYEEITACSSSPCFHDGTCVLDKAGSYKCACLAGYTGQRCENLLEERNCSDPGGPVNGYQKITGGPGLINGRHAKIGTVVSFFCNNSYVLSGNEKRTCQQNGEWSGKQPICIKACREPKISDLVRRRVLPMQVQSRETPLHQLYSAAFSKQKLQSAPTKKPALPFGDLPMGYQHLHTQLQYECISPFYRRLGSSRRTCLRTGKWSGRAPSCIPICGKIENITAPKTQGLRWPWQAAIYRRTSGVHDGSLHKGAWFLVCSGALVNERTVVVAAHCVTDLGKVTMIKTADLKVVLGKFYRDDDRDEKTIQSLQISAIILHPNYDPILLDADIAILKLLDKARISTRVQPICLAASRDLSTSFQESHITVAGWNVLADVRSPGFKNDTLRSGVVSVVDSLLCEEQHEDHGIPVSVTDNMFCASWEPTAPSDICTAETGGIAAVSFPGRASPEPRWHLMGLVSWSYDKTCSHRLSTAFTKVLPFKDWIERNMK

SEQ ID NO: 61775 - protein, 258 aa, Homo sapiens
  Payload ID: 12336
  Gene Symbol: PI15
  Gene Name: peptidase inhibitor 15
  Uniprot ID: O43692
  ENSP ID: ENSP00000260113
MIAISAVSSALLFSLLCEASTVVLLNSTDSSPPTNNFTDIEAALKAQLDSADIPKARRKRYISQNDMIAILDYHNQVRGKVFPPAANMEYMVWDENLAKSAEAWAATCIWDHGPSYLLRFLGQNLSVRTGRYRSILQLVKPWYDEVKDYAFPYPQDCNPRCPMRCFGPMCTHYTQMVWATSNRIGCAIHTCQNMNVWGSVWRRAVYLVCNYAPKGNWIGEAPYKVGVPCSSCPPSYGGSCTDNLCFPGVTSNYLYWFK

SEQ ID NO: 61776 - protein, 258 aa, Homo sapiens; identical to SEQ ID NO: 61775
  Payload ID: 12336
  Gene Symbol: PI15
  Gene Name: peptidase inhibitor 15
  Uniprot ID: O43692
  ENSP ID: ENSP00000428567

SEQ ID NO: 61777 - protein, 463 aa, Homo sapiens
  Payload ID: 12337
  Gene Symbol: PI16
  Gene Name: peptidase inhibitor 16
  Uniprot ID: Q6UXB8
  ENSP ID: ENSP00000362778
MHGSCSFLMLLLPLLLLLVATTGPVGALTDEEKRLMVELHNLYRAQVSPTASDMLHMRWDEELAAFAKAYARQCVWGHNKERGRRGENLFAITDEGMDVPLAMEEWHHEREHYNLSAATCSPGQMCGHYTQVVWAKTERIGCGSHFCEKLQGVEETNIELLVCNYEPPGNVKGKRPYQEGTPCSQCPSGYHCKNSLCEPIGSPEDAQDLPYLVTEAPSFRATEASDSRKMGTPSSLATGIPAFLVTEVSGSLATKALPAVETQAPTSLATKDPPSMATEAPPCVTTEVPSILAAHSLPSLDEEPVTFPKSTHVPIPKSADKVTDKTKVPSRSPENSLDPKMSLTGARELLPHAQEEAEAEAELPPSSEVLASVFPAQDKPGELQATLDHTGHTSSKSLPNFPNTSATANATGGRALALQSSLPGAEGPDKPSVVSGLNSGPGHVWGPLLGLLLLPPLVLAGIF

SEQ ID NO: 61778 - protein, 463 aa, Homo sapiens; identical to SEQ ID NO: 61777
  Payload ID: 12337
  Gene Symbol: PI16
  Gene Name: peptidase inhibitor 16
  Uniprot ID: Q6UXB8
  ENSP ID: ENSP00000478888

SEQ ID NO: 61779 - protein, 117 aa, Homo sapiens
  Payload ID: 12338
  Gene Symbol: PI3
  Gene Name: peptidase inhibitor 3, skin-derived
  Uniprot ID: P19957
  ENSP ID: ENSP00000243924
MRASSFLIVVVFLIAGTLVLEAAVTGVPVKGQDTVKGRVPFNGQDPVKGQVSVKGQDKVKAQEPVKGPVSTKPGSCPIILIRCAMLNPPNRCLKDTDCPGIKKCCEGSCGMACFVPQ

SEQ ID NO: 61780 - protein, 502 aa, Homo sapiens
  Payload ID: 12339
  Gene Symbol: PM20D1
  Gene Name: peptidase M20 domain containing 1
  Uniprot ID: Q6GTS8
  ENSP ID: ENSP00000356104
MAQRCVCVLALVAMLLLVFPTVSRSMGPRSGEHQRASRIPSQFSKEERVAMKEALKGAIQIPTVTFSSEKSNTTALAEFGKYIHKVFPTVVSTSFIQHEVVEEYSHLFTIQGSDPSLQPYLLMAHFDVVPAPEEGWEVPPFSGLERDGIIYGRGTLDDKNSVMALLQALELLLIRKYIPRRSFFISLGHDEESSGTGAQRISALLQSRGVQLAFIVDEGGFILDDFIPNFKKPIALIAVSEKGSMNLMLQVNMTSGHSSAPPKETSIGILAAAVSRLEQTPMPIIFGSGTVVTVLQQLANEFPFPVNIILSNPWLFEPLISRFMERNPLTNAIIRTTTALTIFKAGVKFNVIPPVAQATVNFRIHPGQTVQEVLELTKNIVADNRVQFHVLSAFDPLPVSPSDDKALGYQLLRQTVQSVFPEVNITAPVTSIGNTDSRFFTNLTTGIYRFYPIYIQPEDFKRIHGVNEKISVQAYETQVKFIFELIQNADTDQEPVSHLHKL

SEQ ID NO: 61781 - protein, 436 aa, Homo sapiens
  Payload ID: 12340
  Gene Symbol: PM20D2
  Gene Name: peptidase M20 domain containing 2
  Uniprot ID: Q8IYS1
  ENSP ID: ENSP00000275072
MRPGGERPVEGGACNGRSELELLKLRSAECIDEAAERLGALSRAIWSQPELAYEEHHAHRVLTHFFEREPPAASWAVQPHYQLPTAFRAEWEPPEARAPSATPRPLHLGFLCEYDALPGIGHACGHNLIAEVGAAAALGVRGALEGLPRPPPPVKVVVLGTPAEEDGGGKIDLIEAGAFTNLDVVFMAHPSQENAAYLPDMAEHDVTVKYYGKASHSASYPWEGLNALDAAVLAYNNLSVFRQQMKPTWRVHGIIKNGGVKPNIIPSYSELIYYFRAPSMKELQVLTKKAEDCFRAAALASGCTVEIKGGAHDYYNVLPNKSLWKAYMENGRKLGIEFISEDTMLNGPSGSTDFGNVSFVVPGIHPYFHIGSNALNHTEQYTEAAGSQEAQFYTLRTAKALAMTALDVIFKPELLEGIREDFKLKLQEEQFVNAVE

SEQ ID NO: 61782 - protein, 243 aa, Homo sapiens
  Payload ID: 12341
  Gene Symbol: PDF
  Gene Name: peptide deformylase (mitochondrial)
  Uniprot ID: Q9HBH1
  ENSP ID: ENSP00000288022
MARLWGALSLWPLWAAVPWGGAAAVGVRACSSTAAPDGVEGPALRRSYWRHLRRLVLGPPEPPFSHVCQVGDPVLRGVAAPVERAQLGGPELQRLTQRLVQVMRRRRCVGLSAPQLGVPRQVLALELPEALCRECPPRQRALRQMEPFPLRVFVNPSLRVLDSRLVTFPEGCESVAGFLACVPRFQAVQISGLDPNGEQVVWQASGWAARIIQHEMDHLQGCLFIDKMDSRTFTNVYWMKVND

SEQ ID NO: 61783 - protein, 97 aa, Homo sapiens
  Payload ID: 12342
  Gene Symbol: PYY
  Gene Name: peptide YY
  Uniprot ID: P10082
  ENSP ID: ENSP00000353198
MVFVRRPWPALTTVLLALLVCLGALVDAYPIKPEAPREDASPEELNRYYASLRHYLNLVTRQRYGKRDGPDTLLSKTFFPDGEDRPVRSRSEGPDLW

SEQ ID NO: 61784 - protein, 90 aa, Homo sapiens
  Payload ID: 12342
  Gene Symbol: PYY
  Gene Name: peptide YY
  Uniprot ID: P10082
  ENSP ID: ENSP00000467310
MVFVRRPWPALTTVLLALLVCLGALVDAYPIKPEAPREDASPEELNRYYASLRHYLNLVTRQRYGKRDGPDTLLSKTFFPDGEDRPVRSR

SEQ ID NO: 61785 - protein, 196 aa, Homo sapiens
  Payload ID: 12343
  Gene Symbol: PGLYRP1
  Gene Name: peptidoglycan recognition protein 1
  Uniprot ID: O75594
  ENSP ID: ENSP00000008938
MSRRSMLLAWALPSLLRLGAAQETEDPACCSPIVPRNEWKALASECAQHLSLPLRYVVVSHTAGSSCNTPASCQQQARNVQHYHMKTLGWCDVGYNFLIGEDGLVYEGRGWNFTGAHSGHLWNPMSIGISFMGNYMDRVPTPQAIRAAQGLLACGVAQGALRSNYVLKGHRDVQRTLSPGNQLYHLIQNWPHYRSP

SEQ ID NO: 61786 - protein, 634 aa, Homo sapiens
  Payload ID: 12344
  Gene Symbol: PGLYRP2
  Gene Name: peptidoglycan recognition protein 2
  Uniprot ID: Q96PD5
  ENSP ID: ENSP00000292609
MAQGVLWILLGLLLWSDPGTASLPLLMDSVIQALAELEQKVPAAKTRHTASAWLMSAPNSGPHNRLYHFLLGAWSLNATELDPCPLSPELLGLTKEVARHDVREGKEYGVVLAPDGSTVAVEPLLAGLEAGLQGRRVINLPLDSMAAPWETGDTFPDVVAIAPDVRATSSPGLRDGSPDVTTADIGANTPDATKGCPDVQASLPDAKAKSPPTMVDSLLAVTLAGNLGLTFLRGSQTQSHPDLGTEGCWDQLSAPRTFTLLDPKASLLTMAFLNGALDGVILGDYLSRTPEPRPSLSHLLSQYYGAGVARDPGFRSNFRRQNGAALTSASILAQQVWGTLVLLQRLEPVHLQLQCMSQEQLAQVAANATKEFTEAFLGCPAIHPRCRWGAAPYRGRPKLLQLPLGFLYVHHTYVPAPPCTDFTRCAANMRSMQRYHQDTQGWGDIGYSFVVGSDGYVYEGRGWHWVGAHTLGHNSRGFGVAIVGNYTAALPTEAALRTVRDTLPSCAVRAGLLRPDYALLGHRQLVRTDCPGDALFDLLRTWPHFTAVSLRSLHYTARRPSVYTSSTRPLPPACNSCARTASARPPTSRRHVYSGNLGPAFAGHSAGNIPDPVTSAYAASAQPQTQPACPFPSS

SEQ ID NO: 61787 - protein, 576 aa, Homo sapiens
  Payload ID: 12344
  Gene Symbol: PGLYRP2
  Gene Name: peptidoglycan recognition protein 2
  Uniprot ID: Q96PD5
  ENSP ID: ENSP00000345968
MAQGVLWILLGLLLWSDPGTASLPLLMDSVIQALAELEQKVPAAKTRHTASAWLMSAPNSGPHNRLYHFLLGAWSLNATELDPCPLSPELLGLTKEVARHDVREGKEYGVVLAPDGSTVAVEPLLAGLEAGLQGRRVINLPLDSMAAPWETGDTFPDVVAIAPDVRATSSPGLRDGSPDVTTADIGANTPDATKGCPDVQASLPDAKAKSPPTMVDSLLAVTLAGNLGLTFLRGSQTQSHPDLGTEGCWDQLSAPRTFTLLDPKASLLTMAFLNGALDGVILGDYLSRTPEPRPSLSHLLSQYYGAGVARDPGFRSNFRRQNGAALTSASILAQQVWGTLVLLQRLEPVHLQLQCMSQEQLAQVAANATKEFTEAFLGCPAIHPRCRWGAAPYRGRPKLLQLPLGFLYVHHTYVPAPPCTDFTRCAANMRSMQRYHQDTQGWGDIGYSFVVGSDGYVYEGRGWHWVGAHTLGHNSRGFGVAIVGNYTAALPTEAALRTVRDTLPSCAVRAGLLRPDYALLGHRQLVRTDCPGDALFDLLRTWPHFTATVKPRPARSVSKRSRREPPPRTLPATDLQ

SEQ ID NO: 61788 - protein, 105 aa, Homo sapiens
  Payload ID: 12344
  Gene Symbol: PGLYRP2
  Gene Name: peptidoglycan recognition protein 2
  ENSP ID: ENSP00000470112
MAQGVLWILLGLLLWSDPGTASLPLLMDSVIQALAELEQKVPAAKTRHTASAWLMSAPNSGPHNRLYHFLLGAWSLNATELDPCPLSPELLGLTKEVARHDVREG

SEQ ID NO: 61789 - protein, 181 aa, Homo sapiens
  Payload ID: 12344
  Gene Symbol: PGLYRP2
  Gene Name: peptidoglycan recognition protein 2
  ENSP ID: ENSP00000472856
MGTRRRGRTFHCQPSTAEVLCRGQPEIPLGSWNPATMAQGVLWILLGLLLWSDPGTASLPLLMDSVIQALAELEQKVPAAKTRHTASAWLMSAPNSGPHNRLYHFLLGAWSLNATELDPCPLSPELLGLTKEVARHDVREGKEYGVVLAPDGSTVAVEPLLAGLEAGLQGRRVINLPLDSM

SEQ ID NO: 61790 - protein, 341 aa, Homo sapiens
  Payload ID: 12345
  Gene Symbol: PGLYRP3
  Gene Name: peptidoglycan recognition protein 3
  Uniprot ID: Q96LB9
  ENSP ID: ENSP00000290722
MGTLPWLLAFFILGLQAWDTPTIVSRKEWGARPLACRALLTLPVAYIITDQLPGMQCQQQSVCSQMLRGLQSHSVYTIGWCDVAYNFLVGDDGRVYEGVGWNIQGLHTQGYNNISLGIAFFGNKIGSSPSPAALSAAEGLISYAIQKGHLSPRYIQPLLLKEETCLDPQHPVMPRKVCPNIIKRSAWEARETHCPKMNLPAKYVIIIHTAGTSCTVSTDCQTVVRNIQSFHMDTRNFCDIGYHFLVGQDGGVYEGVGWHIQGSHTYGFNDIALGIAFIGYFVEKPPNAAALEAAQDLIQCAVVEGYLTPNYLLMGHSDVVNILSPGQALYNIISTWPHFKH

SEQ ID NO: 61791 - protein, 373 aa, Homo sapiens
  Payload ID: 12346
  Gene Symbol: PGLYRP4
  Gene Name: peptidoglycan recognition protein 4
  Uniprot ID: Q96LB8
  ENSP ID: ENSP00000352672
MLPWLLVFSALGIQAWGDSSWNKTQAKQVSEGLQYLFENISQLTEKGLPTDVSTTVSRKAWGAEAVGCSIQLTTPVNVLVIHHVPGLECHDQTVCSQRLRELQAHHVHNNSGCDVAYNFLVGDDGRVYEGVGWNIQGVHTQGYNNISLGFAFFGTKKGHSPSPAALSAMENLITYAVQKGHLSSSYVQPLLGKGENCLAPRQKTSLKKACPGVVPRSVWGARETHCPRMTLPAKYGIIIHTAGRTCNISDECRLLVRDIQSFYIDRLKSCDIGYNFLVGQDGAIYEGVGWNVQGSSTPGYDDIALGITFMGTFTGIPPNAAALEAAQDLIQCAMVKGYLTPNYLLVGHSDVARTLSPGQALYNIISTWPHFKH

SEQ ID NO: 61792 - protein, 369 aa, Homo sapiens
  Payload ID: 12346
  Gene Symbol: PGLYRP4
  Gene Name: peptidoglycan recognition protein 4
  Uniprot ID: Q96LB8
  ENSP ID: ENSP00000357728
MLPWLLVFSALGIQAWGDSSWNKTQAKQVSEGLQYLFENISQLTEKDVSTTVSRKAWGAEAVGCSIQLTTPVNVLVIHHVPGLECHDQTVCSQRLRELQAHHVHNNSGCDVAYNFLVGDDGRVYEGVGWNIQGVHTQGYNNISLGFAFFGTKKGHSPSPAALSAMENLITYAVQKGHLSSSYVQPLLGKGENCLAPRQKTSLKKACPGVVPRSVWGARETHCPRMTLPAKYGIIIHTAGRTCNISDECRLLVRDIQSFYIDRLKSCDIGYNFLVGQDGAIYEGVGWNVQGSSTPGYDDIALGITFMGTFTGIPPNAAALEAAQDLIQCAMVKGYLTPNYLLVGHSDVARTLSPGQALYNIISTWPHFKH

SEQ ID NO: 61793 - protein, 663 aa, Homo sapiens
  Payload ID: 12347
  Gene Symbol: PADI1
  Gene Name: peptidyl arginine deiminase, type I
  Uniprot ID: Q9ULC6
  ENSP ID: ENSP00000364620
MAPKRVVQLSLKMPTHAVCVVGVEAHVDIHSDVPKGANSFRVSGSSGVEVFMVYNRTRVKEPIGKARWPLDTDADMVVSVGTASKELKDFKVRVSYFGEQEDQALGRSVLYLTGVDISLEVDTGRTGKVKRSQGDKKTWRWGPEGYGAILLVNCDRDNHRSAEPDLTHSWLMSLADLQDMSPMLLSCNGPDKLFDSHKLVLNVPFSDSKRVRVFCARGGNSLSDYKQVLGPQCLSYEVERQPGEQEIKFYVEGLTFPDADFLGLVSLSVSLVDPGTLPEVTLFTDTVGFRMAPWIMTPNTQPPEELYVCRVMDTHGSNEKFLEDMSYLTLKANCKLTICPQVENRNDRWIQDEMEFGYIEAPHKSFPVVFDSPRNRGLKDFPYKRILGPDFGYVTREIPLPGPSSLDSFGNLDVSPPVTVGGTEYPLGRILIGSSFPKSGGRQMARAVRNFLKAQQVQAPVELYSDWLSVGHVDEFLTFVPTSDQKGFRLLLASPSACLKLFQEKKEEGYGEAAQFDGLKHQAKRSINEMLADRHLQRDNLHAQKCIDWNRNVLKRELGLAESDIVDIPQLFFLKNFYAEAFFPDMVNMVVLGKYLGIPKPYGPIINGRCCLEEKVQSLLEPLGLHCIFIDDYLSYHELQGEIHCGTNVRRKPFPFKWWNMVP

SEQ ID NO: 61794 - protein, 663 aa, Homo sapiens; identical to SEQ ID NO: 61793
  Payload ID: 12347
  Gene Symbol: PADI1
  Gene Name: peptidyl arginine deiminase, type I
  Uniprot ID: Q9ULC6
  ENSP ID: ENSP00000485803

SEQ ID NO: 61795 - protein, 437 aa, Homo sapiens
  Payload ID: 12348
  Gene Symbol: PADI2
  Gene Name: peptidyl arginine deiminase, type II
  Uniprot ID: Q9Y2J8
  ENSP ID: ENSP00000364630
MLRERTVRLQYGSRVEAVYVLGTYLWTDVYSAAPAGAQTFSLKHSEHVWVEVVRDGEAEEVATNGKQRWLLSPSTTLRVTMSQASTEASSDKVTVNYYDEEGSIPIDQAGLFLTAIEISLDVDADRDGVVEKNNPKKASWTWGPEGQGAILLVNCDRETPWLPKEDCRDEKVYSKEDLKDMSQMILRTKGPDRLPAGYEIVLYISMSDSDKVGVFYVENPFFGQRYIHILGRRKLYHVVKYTGGSAELLFFVEGLCFPDEGFSGLVSIHVSLLEYMAQDIPLTPIFTDTVIFRIAPWIMTPNILPPVSVFVCCMKDNYLFLKEVKNLVEKTNCELKVCFQYLNRGDRWIQDEIEFGYIEAPHKGFPVVLDSPRDGNLKDFPVKELLGPDFGYVTREPLFESVTSLDSFGNLEVSPPVTVNGKTYPLGRILIGSSFPL

SEQ ID NO: 61796 - protein, 665 aa, Homo sapiens
  Payload ID: 12348
  Gene Symbol: PADI2
  Gene Name: peptidyl arginine deiminase, type II
  Uniprot ID: Q9Y2J8
  ENSP ID: ENSP00000364635
MLRERTVRLQYGSRVEAVYVLGTYLWTDVYSAAPAGAQTFSLKHSEHVWVEVVRDGEAEEVATNGKQRWLLSPSTTLRVTMSQASTEASSDKVTVNYYDEEGSIPIDQAGLFLTAIEISLDVDADRDGVVEKNNPKKASWTWGPEGQGAILLVNCDRETPWLPKEDCRDEKVYSKEDLKDMSQMILRTKGPDRLPAGYEIVLYISMSDSDKVGVFYVENPFFGQRYIHILGRRKLYHVVKYTGGSAELLFFVEGLCFPDEGFSGLVSIHVSLLEYMAQDIPLTPIFTDTVIFRIAPWIMTPNILPPVSVFVCCMKDNYLFLKEVKNLVEKTNCELKVCFQYLNRGDRWIQDEIEFGYIEAPHKGFPVVLDSPRDGNLKDFPVKELLGPDFGYVTREPLFESVTSLDSFGNLEVSPPVTVNGKTYPLGRILIGSSFPLSGGRRMTKVVRDFLKAQQVQAPVELYSDWLTVGHVDEFMSFVPIPGTKKFLLLMASTSACYKLFREKQKDGHGEAIMFKGLGGMSSKRITINKILSNESLVQENLYFQRCLDWNRDILKKELGLTEQDIIDLPALFKMDEDHRARAFFPNMVNMIVLDKDLGIPKPFGPQVEEECCLEMHVRGLLEPLGLECTFIDDISAYHKFLGEVHCGTNVRRKPFTFKWWHMVP

SEQ ID NO: 61797 - protein, 664 aa, Homo sapiens
  Payload ID: 12349
  Gene Symbol: PADI3
  Gene Name: peptidyl arginine deiminase, type III
  Uniprot ID: Q9ULW8
  ENSP ID: ENSP00000364609
MSLQRIVRVSLEHPTSAVCVAGVETLVDIYGSVPEGTEMFEVYGTPGVDIYISPNMERGRERADTRRWRFDATLEIIVVMNSPSNDLNDSHVQISYHSSHEPLPLAYAVLYLTCVDISLDCDLNCEGRQDRNFVDKRQWVWGPSGYGGILLVNCDRDDPSCDVQDNCDQHVHCLQDLEDMSVMVLRTQGPAALFDDHKLVLHTSSYDAKRAQVFHICGPEDVCEAYRHVLGQDKVSYEVPRLHGDEERFFVEGLSFPDAGFTGLISFHVTLLDDSNEDFSASPIFTDTVVFRVAPWIMTPSTLPPLEVYVCRVRNNTCFVDAVAELARKAGCKLTICPQAENRNDRWIQDEMELGYVQAPHKTLPVVFDSPRNGELQDFPYKRILGPDFGYVTREPRDRSVSGLDSFGNLEVSPPVVANGKEYPLGRILIGGNLPGSSGRRVTQVVRDFLHAQKVQPPVELFVDWLAVGHVDEFLSFVPAPDGKGFRMLLASPGACFKLFQEKQKCGHGRALLFQGVVDDEQVKTISINQVLSNKDLINYNKFVQSCIDWNREVLKRELGLAECDIIDIPQLFKTERKKATAFFPDLVNMLVLGKHLGIPKPFGPIINGCCCLEEKVRSLLEPLGLHCTFIDDFTPYHMLHGEVHCGTNVCRKPFSFKWWNMVP

SEQ ID NO: 61798 - protein, 664 aa, Homo sapiens; identical to SEQ ID NO: 61797
  Payload ID: 12349
  Gene Symbol: PADI3
  Gene Name: peptidyl arginine deiminase, type III
  Uniprot ID: Q9ULW8
  ENSP ID: ENSP00000486702

SEQ ID NO: 61799 - protein, 663 aa, Homo sapiens
  Payload ID: 12350
  Gene Symbol: PADI4
  Gene Name: peptidyl arginine deiminase, type IV
  Uniprot ID: Q9UM07
  ENSP ID: ENSP00000364597
MAQGTLIRVTPEQPTHAVCVLGTLTQLDICSSAPEDCTSFSINASPGVVVDIAHGPPAKKKSTGSSTWPLDPGVEVTLTMKVASGSTGDQKVQISYYGPKTPPVKALLYLTGVEISLCADITRTGKVKPTRAVKDQRTWTWGPCGQGAILLVNCDRDNLESSAMDCEDDEVLDSEDLQDMSLMTLSTKTPKDFFTNHTLVLHVARSEMDKVRVFQATRGKLSSKCSVVLGPKWPSHYLMVPGGKHNMDFYVEALAFPDTDFPGLITLTISLLDTSNLELPEAVVFQDSVVFRVAPWIMTPNTQPPQEVYACSIFENEDFLKSVTTLAMKAKCKLTICPEEENMDDQWMQDEMEIGYIQAPHKTLPVVFDSPRNRGLKEFPIKRVMGPDFGYVTRGPQTGGISGLDSFGNLEVSPPVTVRGKEYPLGRILFGDSCYPSNDSRQMHQALQDFLSAQQVQAPVKLYSDWLSVGHVDEFLSFVPAPDRKGFRLLLASPRSCYKLFQEQQNEGHGEALLFEGIKKKKQQKIKNILSNKTLREHNSFVERCIDWNRELLKRELGLAESDIIDIPQLFKLKEFSKAEAFFPNMVNMLVLGKHLGIPKPFGPVINGRCCLEEKVCSLLEPLGLQCTFINDFFTYHIRHGEVHCGTNVRRKPFSFKWWNMVP

SEQ ID NO: 61800 - protein, 127 aa, Homo sapiens
  Payload ID: 12350
  Gene Symbol: PADI4
  Gene Name: peptidyl arginine deiminase, type IV
  ENSP ID: ENSP00000364602
MAQGTLIRVTPEQPTHAVCVLGTLTQLDICSSAPEDCTSFSINASPGVVVDIAHGPPAKKKSTGSSTWPLDPGVEVTLTMKVASGSTGDQKVQISYYGPKTPPVKALLYLTGVDGVSPCHPGWSAMA

SEQ ID NO: 61801 - protein, 694 aa, Homo sapiens
  Payload ID: 12351
  Gene Symbol: PADI6
  Gene Name: peptidyl arginine deiminase, type VI
  Uniprot ID: Q6TGC4
  ENSP ID: ENSP00000483125
MVSVEGRAMSFQSIIHLSLDSPVHAVCVLGTEICLDLSGCAPQKCQCFTIHGSGRVLIDVANTVISEKEDATIWWPLSDPTYATVKMTSPSPSVDADKVSVTYYGPNEDAPVGTAVLYLTGIEVSLEVDIYRNGQVEMSSDKQAKKKWIWGPSGWGAILLVNCNPADVGQQLEDKKTKKVIFSEEITNLSQMTLNVQGPSCILKKYRLVLHTSKEESKKARVYWPQKDNSSTFELVLGPDQHAYTLALLGNHLKETFYVEAIAFPSAEFSGLISYSVSLVEESQDPSIPETVLYKDTVVFRVAPCVFIPCTQVPLEVYLCRELQLQGFVDTVTKLSEKSNSQVASVYEDPNRLGRWLQDEMAFCYTQAPHKTTSLILDTPQAADLDEFPMKYSLSPGIGYMIQDTEDHKVASMDSIGNLMVSPPVKVQGKEYPLGRVLIGSSFYPSAEGRAMSKTLRDFLYAQQVQAPVELYSDWLMTGHVDEFMCFIPTDDKNEGKKGFLLLLASPSACYKLFREKQKEGYGDALLFDELRADQLLSNGREAKTIDQLLADESLKKQNEYVEKCIHLNRDILKTELGLVEQDIIEIPQLFCLEKLTNIPSDQQPKRSFARPYFPDLLRMIVMGKNLGIPKPFGPQIKGTCCLEEKICCLLEPLGFKCTFINDFDCYLTEVGDICACANIRRVPFAFKWWKMVP

SEQ ID NO: 61802 - protein, 887 aa, Homo sapiens
  Payload ID: 12352
  Gene Symbol: PAM
  Gene Name: peptidylglycine alpha-amidating monooxygenase
  Uniprot ID: P19021
  ENSP ID: ENSP00000282992
MAGRVPSLLVLLVFPSSCLAFRSPLSVFKRFKETTRPFSNECLGTTRPVVPIDSSDFALDIRMPGVTPKQSDTYFCMSMRIPVDEEAFVIDFKPRASMDTVHHMLLFGCNMPSSTGSYWFCDEGTCTDKANILYAWARNAPPTRLPKGVGFRVGGETGSKYFVLQVHYGDISAFRDNNKDCSGVSLHLTRLPQPLIAGMYLMMSVDTVIPAGEKVVNSDISCHYKNYPMHVFAYRVHTHHLGKVVSGYRVRNGQWTLIGRQSPQLPQAFYPVGHPVDVSFGDLLAARCVFTGEGRTEATHIGGTSSDEMCNLYIMYYMEAKHAVSFMTCTQNVAPDMFRTIPPEANIPIPVKSDMVMMHEHHKETEYKDKIPLLQQPKREEEEVLDQGDFYSLLSKLLGEREDVVHVHKYNPTEKAESESDLVAEIANVVQKKDLGRSDAREGAEHERGNAILVRDRIHKFHRLVSTLRPPESRVFSLQQPPPGEGTWEPEHTGDFHMEEALDWPGVYLLPGQVSGVALDPKNNLVIFHRGDHVWDGNSFDSKFVYQQIGLGPIEEDTILVIDPNNAAVLQSSGKNLFYLPHGLSIDKDGNYWVTDVALHQVFKLDPNNKEGPVLILGRSMQPGSDQNHFCQPTDVAVDPGTGAIYVSDGYCNSRIVQFSPSGKFITQWGEESSGSSPLPGQFTVPHSLALVPLLGQLCVADRENGRIQCFKTDTKEFVREIKHSSFGRNVFAISYIPGLLFAVNGKPHFGDQEPVQGFVMNFSNGEIIDIFKPVRKHFDMPHDIVASEDGTVYIGDAHTNTVWKFTLTEKLEHRSVKKAGIEVQEIKGKGSGGLNLGNFFASRKGYSRKGFDRLSTEGSDQEKEDDGSESEEEYSAPLPALAPSSS

SEQ ID NO: 61803 - protein, 175 aa, Homo sapiens
  Payload ID: 12352
  Gene Symbol: PAM
  Gene Name: peptidylglycine alpha-amidating monooxygenase
  ENSP ID: ENSP00000302544
MAGRVPSLLVLLVFPSSCLAFRSPLSVFKRFKETTRPFSNECLGTTRPVVPIDSSDFALDIRMPGVTPKQLTSSLEPAWILSITCYFLDAICLHPLEVTGFVMKEPVQIKPIFCMPGREMLPLPGSPKVLDSELEERLEVNTLYYRYTMGILVLLEIITRTVLVCPYTSHVCHSL

SEQ ID NO: 61804 - protein, 974 aa, Homo sapiens
  Payload ID: 12352
  Gene Symbol: PAM
  Gene Name: peptidylglycine alpha-amidating monooxygenase
  Uniprot ID: P19021
  ENSP ID: ENSP00000306100
MAGRVPSLLVLLVFPSSCLAFRSPLSVFKRFKETTRPFSNECLGTTRPVVPIDSSDFALDIRMPGVTPKQSDTYFCMSMRIPVDEEAFVIDFKPRASMDTVHHMLLFGCNMPSSTGSYWFCDEGTCTDKANILYAWARNAPPTRLPKGVGFRVGGETGSKYFVLQVHYGDISAFRDNNKDCSGVSLHLTRLPQPLIAGMYLMMSVDTVIPAGEKVVNSDISCHYKNYPMHVFAYRVHTHHLGKVVSGYRVRNGQWTLIGRQSPQLPQAFYPVGHPVDVSFGDLLAARCVFTGEGRTEATHIGGTSSDEMCNLYIMYYMEAKHAVSFMTCTQNVAPDMFRTIPPEANIPIPVKSDMVMMHEHHKETEYKDKIPLLQQPKREEEEVLDQGDFYSLLSKLLGEREDVVHVHKYNPTEKAESESDLVAEIANVVQKKDLGRSDAREGAEHERGNAILVRDRIHKFHRLVSTLRPPESRVFSLQQPPPGEGTWEPEHTGDFHMEEALDWPGVYLLPGQVSGVALDPKNNLVIFHRGDHVWDGNSFDSKFVYQQIGLGPIEEDTILVIDPNNAAVLQSSGKNLFYLPHGLSIDKDGNYWVTDVALHQVFKLDPNNKEGPVLILGRSMQPGSDQNHFCQPTDVAVDPGTGAIYVSDGYCNSRIVQFSPSGKFITQWGEESSGSSPLPGQFTVPHSLALVPLLGQLCVADRENGRIQCFKTDTKEFVREIKHSSFGRNVFAISYIPGLLFAVNGKPHFGDQEPVQGFVMNFSNGEIIDIFKPVRKHFDMPHDIVASEDGTVYIGDAHTNTVWKFTLTEKLEHRSVKKAGIEVQEIKEAEAVVETKMENKPTSSELQKMQEKQKLIKEPGSGVPVVLITTLLVIPVVVLLAIAIFIRWKKSRAFGADSEHKLETSSGRVLGRFRGKGSGGLNLGNFFASRKGYSRKGFDRLSTEGSDQEKEDDGSESEEEYSAPLPALAPSSS

SEQ ID NO: 61805 - protein, 866 aa, Homo sapiens
  Payload ID: 12352
  Gene Symbol: PAM
  Gene Name: peptidylglycine alpha-amidating monooxygenase
  Uniprot ID: P19021
  ENSP ID: ENSP00000314638
MAGRVPSLLVLLVFPSSCLAFRSPLSVFKRFKETTRPFSNECLGTTRPVVPIDSSDFALDIRMPGVTPKQSDTYFCMSMRIPVDEEAFVIDFKPRASMDTVHHMLLFGCNMPSSTGSYWFCDEGTCTDKANILYAWARNAPPTRLPKGVGFRVGGETGSKYFVLQVHYGDISAFRDNNKDCSGVSLHLTRLPQPLIAGMYLMMSVDTVIPAGEKVVNSDISCHYKNYPMHVFAYRVHTHHLGKVVSGYRVRNGQWTLIGRQSPQLPQAFYPVGHPVDVSFGDLLAARCVFTGEGRTEATHIGGTSSDEMCNLYIMYYMEAKHAVSFMTCTQNVAPDMFRTIPPEANIPIPVKSDMVMMHEHHKETEYKDKIPLLQQPKREEEEVLDQDFHMEEALDWPGVYLLPGQVSGVALDPKNNLVIFHRGDHVWDGNSFDSKFVYQQIGLGPIEEDTILVIDPNNAAVLQSSGKNLFYLPHGLSIDKDGNYWVTDVALHQVFKLDPNNKEGPVLILGRSMQPGSDQNHFCQPTDVAVDPGTGAIYVSDGYCNSRIVQFSPSGKFITQWGEESSGSSPLPGQFTVPHSLALVPLLGQLCVADRENGRIQCFKTDTKEFVREIKHSSFGRNVFAISYIPGLLFAVNGKPHFGDQEPVQGFVMNFSNGEIIDIFKPVRKHFDMPHDIVASEDGTVYIGDAHTNTVWKFTLTEKLEHRSVKKAGIEVQEIKEAEAVVETKMENKPTSSELQKMQEKQKLIKEPGSGVPVVLITTLLVIPVVVLLAIAIFIRWKKSRAFGDSEHKLETSSGRVLGRFRGKGSGGLNLGNFFASRKGYSRKGFDRLSTEGSDQEKEDDGSESEEEYSAPLPALAPSSS

SEQ ID NO: 61806 - protein, 679 aa, Homo sapiens
  Payload ID: 12352
  Gene Symbol: PAM
  Gene Name: peptidylglycine alpha-amidating monooxygenase
  ENSP ID: ENSP00000369125
  MOD_RES (1)..(1): Any amino acid
XMHVFAYRVHTHHLGKVVSGYRVRNGQWTLIGRQSPQLPQAFYPVGHPVDVSFGDLLAARCVFTGEGRTEATHIGGTSSDEMCNLYIMYYMEAKHAVSFMTCTQNVAPDMFRTIPPEANIPIPVKSDMVMMHEHHKETEYKDKIPLLQQPKREEEEVLDQGDFYSLLSKLLGEREDVVHVHKYNPTEKAESESDLVAEIANVVQKKDLGRSDAREGAEHERGNAILVRDRIHKFHRLVSTLRPPESRVFSLQQPPPGEGTWEPEHTGDFHMEEALDWPGVYLLPGQVSGVALDPKNNLVIFHRGDHVWDGNSFDSKFVYQQIGLGPIEEDTILVIDPNNAAVLQSSGKNLFYLPHGLSIDKDGNYWVTDVALHQVFKLDPNNKEGPVLILGRSMQPGSDQNHFCQPTDVAVDPGTGAIYVSDGYCNSRIVQFSPSGKFITQWGEESSGSSPLPGQFTVPHSLALVPLLGQLCVADRENGRIQCFKTDTKEFVREIKHSSFGRNVFAISYIPGLLFAVNGKPHFGDQEPVQGFVMNFSNGEIIDIFKPVRKHFDMPHDIVASEDGTVYIGDAHTNTVWKFTLTEKLEHRSVKKAGIEVQEIKADSEHKLETSSGRVLGRFRGKGSGGLNLGNFFASRKGYSRKGFDRLSTEGSDQEKEDDGSESEEEYSAPLPALAPSSS

SEQ ID NO: 61807 - protein, 973 aa, Homo sapiens [sequence omitted]

SEQ ID NO: 61808 - protein, 905 aa, Homo sapiens
  Payload ID: 12352
  Gene Symbol: PAM
  Gene Name: peptidylglycine alpha-amidating monooxygenase
  Uniprot ID: P19021
  ENSP ID: ENSP00000403461
MAGRVPSLLVLLVFPSSCLAFRSPLSVFKRFKETTRPFSNECLGTTRPVVPIDSSDFALDIRMPGVTPKQSDTYFCMSMRIPVDEEAFVIDFKPRASMDTVHHMLLFGCNMPSSTGSYWFCDEGTCTDKANILYAWARNAPPTRLPKGVGFRVGGETGSKYFVLQVHYGDISAFRDNNKDCSGVSLHLTRLPQPLIAGMYLMMSVDTVIPAGEKVVNSDISCHYKNYPMHVFAYRVHTHHLGKVVSGYRVRNGQWTLIGRQSPQLPQAFYPVGHPVDVSFGDLLAARCVFTGEGRTEATHIGGTSSDEMCNLYIMYYMEAKHAVSFMTCTQNVAPDMFRTIPPEANIPIPVKSDMVMMHEHHKETEYKDKIPLLQQPKREEEEVLDQGDFYSLLSKLLGEREDVVHVHKYNPTEKAESESDLVAEIANVVQKKDLGRSDAREGAEHERGNAILVRDRIHKFHRLVSTLRPPESRVFSLQQPPPGEGTWEPEHTGDFHMEEALDWPGVYLLPGQVSGVALDPKNNLVIFHRGDHVWDGNSFDSKFVYQQIGLGPIEEDTILVIDPNNAAVLQSSGKNLFYLPHGLSIDKDGNYWVTDVALHQVFKLDPNNKEGPVLILGRSMQPGSDQNHFCQPTDVAVDPGTGAIYVSDGYCNSRIVQFSPSGKFITQWGEESSGSSPLPGQFTVPHSLALVPLLGQLCVADRENGRIQCFKTDTKEFVREIKHSSFGRNVFAISYIPGLLFAVNGKPHFGDQEPVQGFVMNFSNGEIIDIFKPVRKHFDMPHDIVASEDGTVYIGDAHTNTVWKFTLTEKLEHRSVKKAGIEVQEIKDSEHKLETSSGRVLGRFRGKGSGGLNLGNFFASRKGYSRKGFDRLSTEGSDQEKEDDGSESEEEYSAPLPALAPSSS

SEQ ID NO: 61809 - protein, 25 aa, Homo sapiens
  Payload ID: 12352
  Gene Symbol: PAM
  Gene Name: peptidylglycine alpha-amidating monooxygenase
  ENSP ID: ENSP00000420851
MAGRVPSLLVLLVFPSSCLAFRSPL

SEQ ID NO: 61810 - protein, 29 aa, Homo sapiens
  Payload ID: 12352
  Gene Symbol: PAM
  Gene Name: peptidylglycine alpha-amidating monooxygenase
  ENSP ID: ENSP00000421569
MAGRVPSLLVLLVFPSSCLAFRSPLSVFK

SEQ ID NO: 61811 - protein, 42 aa, Homo sapiens
  Payload ID: 12352
  Gene Symbol: PAM
  Gene Name: peptidylglycine alpha-amidating monooxygenase
  ENSP ID: ENSP00000421823
MAGRVPSLLVLLVFPSSCLAFRSPLSVFKRFKETTRPFSNEC

SEQ ID NO: 61812 - protein, 28 aa, Homo sapiens
  Payload ID: 12352
  Gene Symbol: PAM
  Gene Name: peptidylglycine alpha-amidating monooxygenase
  ENSP ID: ENSP00000423611
MAGRVPSLLVLLVFPSSCLAFRSPLSVF

SEQ ID NO: 61813 - protein, 53 aa, Homo sapiens
  Payload ID: 12352
  Gene Symbol: PAM
  Gene Name: peptidylglycine alpha-amidating monooxygenase
  ENSP ID: ENSP00000423763
MAGRVPSLLVLLVFPSSCLAFRSPLSVFKRFKETTRPFSNECLGTTRPVVPID

SEQ ID NO: 61814 - protein, 250 aa, Homo sapiens
  Payload ID: 12352
  Gene Symbol: PAM
  Gene Name: peptidylglycine alpha-amidating monooxygenase
  ENSP ID: ENSP00000424203
  MOD_RES (1)..(1): Any amino acid
XRIQCFKTDTKEFVREIKHSSFGRNVFAISYIPGLLFAVNGKPHFGDQEPVQGFVMNFSNGEIIDIFKPVRKHFDMPHDIVASEDGTVYIGDAHTNTVWKFTLTEKLEHRSVKKAGIEVQEIKEAEAVVETKMENKPTSSELQKMQEKQKLIKEPGSGVPVVLITTLLVIPVVVLLAIAIFIRWKKSRAFGGKGSGGLNLGNFFASRKGYSRKGFDRLSTEGSDQEKEDDGSESEEEYSAPLPALAPSSS

SEQ ID NO: 61815 - protein, 68 aa, Homo sapiens
  Payload ID: 12352
  Gene Symbol: PAM
  Gene Name: peptidylglycine alpha-amidating monooxygenase
  ENSP ID: ENSP00000426448
MAGRVPSLLVLLVFPSSCLAFRSPLSVFKRFKETTRPFSNECLGTTRPVVPIDSSDFALDIRMPGVTP

SEQ ID NO: 61816 - protein, 163 aa, Homo sapiens
  Payload ID: 12353
  Gene Symbol: PIN1
  Gene Name: peptidylprolyl cis/trans isomerase, NIMA-interacting 1
  Uniprot ID: Q13526
  ENSP ID: ENSP00000247970
MADEEKLPPGWEKRMSRSSGRVYYFNHITNASQWERPSGNSSSGGKNGQGEPARVRCSHLLVKHSQSRRPSSWRQEKITRTKEEALELINGYIQKIKSGEEDFESLASQFSDCSSAKARGDLGAFSRGQMQKPFEDASFALRTGEMSGPVFTDSGIHIILRTE

SEQ ID NO: 61817 - protein, 145 aa, Homo sapiens
  Payload ID: 12353
  Gene Symbol: PIN1
  Gene Name: peptidylprolyl cis/trans isomerase, NIMA-interacting 1
  ENSP ID: ENSP00000466656
MADEEKLPPGWEKRMSRSSGRVYYFNHITNASQWERPSGNSSSGGKNGQGEPARVRCSHLLVKHSQSRRPSSWRQEKITRTKEEALELINGYIQKIKSGEEDFESLASQFSDCSSAKARGDLGAFSRGAQGMGLTRLGDPYHPEG

SEQ ID NO: 61818 - protein, 90 aa, Homo sapiens
  Payload ID: 12353
  Gene Symbol: PIN1
  Gene Name: peptidylprolyl cis/trans isomerase, NIMA-interacting 1
  ENSP ID: ENSP00000466780
  MOD_RES (1)..(1): Any amino acid
XQEKITRTKEEALELINGYIQKIKSGEEDFESLASQFSDCSSAKARGDLGAFSRGQMQKPFEDASFALRTGEMSGPVFTDSGIHIILRTE

SEQ ID NO: 61819 - protein, 163 aa, Homo sapiens; identical to SEQ ID NO: 61816
  Payload ID: 12353
  Gene Symbol: PIN1
  Gene Name: peptidylprolyl cis/trans isomerase, NIMA-interacting 1
  Uniprot ID: Q13526
  ENSP ID: ENSP00000466962

SEQ ID NO: 61820 - protein, 50 aa, Homo sapiens
  Payload ID: 12353
  Gene Symbol: PIN1
  Gene Name: peptidylprolyl cis/trans isomerase, NIMA-interacting 1
  ENSP ID: ENSP00000467197
  MOD_RES (1)..(1): Any amino acid
XADEEKLPPGWEKRMSRSSGENTKAQGRYITFEPRFRFESRPSVLLQPHH

SEQ ID NO: 61821 - protein, 111 aa, Homo sapiens
  Payload ID: 12354
  Gene Symbol: PIN4
  Gene Name: peptidylprolyl cis/trans isomerase, NIMA-interacting 4
  ENSP ID: ENSP00000218432
MPMAGLLKGLVRQLERFSVQQQASKMPPKGKSGSGKAGKGGAASGSDSADKKAQGPKGGGNAVKVRHILCEKHGKIMEAMEKLKSGMRFNEVAAQYSEDKARQGVCCSYYL

SEQ ID NO: 61822 - protein, 156 aa, Homo sapiens
  Payload ID: 12354
  Gene Symbol: PIN4
  Gene Name: peptidylprolyl cis/trans isomerase, NIMA-interacting 4
  Uniprot ID: Q9Y237
  ENSP ID: ENSP00000362773
MPMAGLLKGLVRQLERFSVQQQASKMPPKGKSGSGKAGKGGAASGSDSADKKAQGPKGGGNAVKVRHILCEKHGKIMEAMEKLKSGMRFNEVAAQYSEDKARQGGDLGWMTRGSMVGPFQEAAFALPVSGMDKPVFTDPPVKTKFGYHIIMVEGRK

SEQ ID NO: 61823 - protein, 91 aa, Homo sapiens
  Payload ID: 12354
  Gene Symbol: PIN4
  Gene Name: peptidylprolyl cis/trans isomerase, NIMA-interacting 4
  ENSP ID: ENSP00000394066
VQQQASKMPPKGKSGSGKAGKGGAASGSDSADKKAQGPKGGGNAVKVRHILCEKHGKIMEAMEKLKSGMRFNEVAAQYSEDKARQGAFRLR

SEQ ID NO: 61824 - protein, 116 aa, Homo sapiens
  Payload ID: 12354
  Gene Symbol: PIN4
  Gene Name: peptidylprolyl cis/trans isomerase, NIMA-interacting 4
  ENSP ID: ENSP00000402330
  MOD_RES (1)..(1): Any amino acid
XKEKVVLEKRGKVERPERSRRMGAGEERREGTDSPSPESGTDAAGGAASGSDSADKKAQGPKGGGNAVKVRHILCEKHGKIMEAMEKLKSGMRFNEVAAQYSEDKARQGVCCSYYL

SEQ ID NO: 61825 - protein, 133 aa, Homo sapiens
  Payload ID: 12354
  Gene Symbol: PIN4
  Gene Name: peptidylprolyl cis/trans isomerase, NIMA-interacting 4
  Uniprot ID: Q9Y237
  ENSP ID: ENSP00000409154
MPMAGLLKGLVRQLERFSVQQQASKMPPKGKSGSGKAGKGGAASGSDSADKKAQGPKGGGNAVKVRHILCEKHGKIMEAMEKLKSGMRFNEVAAQYSEDKARQGIPSLQQHAGHHRDLRSTLISLVSYLQTTP

SEQ ID NO: 61826 - protein, 106 aa, Homo sapiens
  Payload ID: 12354
  Gene Symbol: PIN4
  Gene Name: peptidylprolyl cis/trans isomerase, NIMA-interacting 4
  ENSP ID: ENSP00000421392
MPMAGLLKGLVRQLERFSVQQQASKMPPKGKSGSGKAGKACQLSLVLAYFVWPKIILPLWPREAERLDTLVVKCLAEFPFEVWRYDGNIHSGCVLDLSVNMEVQFK

SEQ ID NO: 61827 - protein, 115 aa, Homo sapiens
  Payload ID: 12354
  Gene Symbol: PIN4
  Gene Name: peptidylprolyl cis/trans isomerase, NIMA-interacting 4
  ENSP ID: ENSP00000421676
VQQQASKMPPKGKSGSGKAGKGGAASGSDSADKKAQGPKGGGNAVKVRHILCEKHGKIMEAMEKLKSGMRFNEVAAQYSEDKARQGIPSLQQHAGHHRDLRSTLISLVSYLQTTP

SEQ ID NO: 61828 - protein, 166 aa, Homo sapiens
  Payload ID: 12355
  Gene Symbol: PPIL1
  Gene Name: peptidylprolyl isomerase (cyclophilin)-like 1
  Uniprot ID: Q9Y3C6
  ENSP ID: ENSP00000362803
MAAIPPDSWQPPNVYLETSMGIIVLELYWKHAPKTCKNFAELARRGYYNGTKFHRIIKDFMIQGGDPTGTGRGGASIYGKQFEDELHPDLKFTGAGILAMANAGPDTNGSQFFVTLAPTQWLDGKHTIFGRVCQGIGMVNRVGMVETNSQDRPVDDVKIIKAYPSG

SEQ ID NO: 61829 - protein, 520 aa, Homo sapiens
  Payload ID: 12356
  Gene Symbol: PPIL2
  Gene Name: peptidylprolyl isomerase (cyclophilin)-like 2
  Uniprot ID: Q13356
  ENSP ID: ENSP00000334553
MGKRQHQKDKMYITCAEYTHFYGGKKPDLPQTNFRRLPFDHCSLSLQPFVYPVCTPDGIVFDLLNIVPWLKKYGTNPSNGEKLDGRSLIKLNFSKNSEGKYHCPVLFTVFTNNTHIVAVRTTGNVYAYEAVEQLNIKAKNFRDLLTDEPFSRQDIITLQDPTNLDKFNVSNFYHVKNNMKIIDPDEEKAKQDPSYYLKNTNAETRETLQELYKEFKGDEILAATMKAPEKKKVDKLNAAHYSTGKVSASFTSTAMVPETTHEAAAIDEDVLRYQFVKKKGYVRLHTNKGDLNLELHCDLTPKTCENFIRLCKKHYYDGTIFHRSIRNFVIQGGDPTGTGTGGESYWGKPFKDEFRPNLSHTGRGILSMANSGPNSNRSQFFITFRSCAYLDKKHTIFGRVVGGFDVLTAMENVESDPKTDRPKEEIRIDATTVFVDPYEEADAQIAQERKTQLKVAPETKVKSSQPQAGSQGPQTFRQGVGKYINPAATKRAAEEEPSTSATVPMSKKKPSRGFGDFSSW

SEQ ID NO: 61830 - protein, 520 aa, Homo sapiens; identical to SEQ ID NO: 61829
  Payload ID: 12356
  Gene Symbol: PPIL2
  Gene Name: peptidylprolyl isomerase (cyclophilin)-like 2
  Uniprot ID: Q13356
  ENSP ID: ENSP00000381812

SEQ ID NO: 61831 - protein, 520 aa, Homo sapiens; identical to SEQ ID NO: 61829
  Payload ID: 12356
  Gene Symbol: PPIL2
  Gene Name: peptidylprolyl isomerase (cyclophilin)-like 2
  Uniprot ID: Q13356
  ENSP ID: ENSP00000384299

SEQ ID NO: 61832 - protein, 160 aa, Homo sapiens
  Payload ID: 12356
  Gene Symbol: PPIL2
  Gene Name: peptidylprolyl isomerase (cyclophilin)-like 2
  ENSP ID: ENSP00000395181
MGKRQHQKDKIDRFSLCCPSCSPTPGLKQSSCLGLPNCWDYRYITCAEYTHFYGGKKPDLPQTNFRRLPFDHCSLSLQPFVYPVCTPDGIVFDLLNIVPWLKKYGTNPSNGEKLDGRSLIKLNFSKNSEGKYHCPVLFTVFTNNTHIVAVRTTGNVYAYE

SEQ ID NO: 61833 - protein, 41 aa, Homo sapiens
  Payload ID: 12356
  Gene Symbol: PPIL2
  Gene Name: peptidylprolyl isomerase (cyclophilin)-like 2
  ENSP ID: ENSP00000406745
MGKRQHQKDKMYITCAEYTHFYGGKKPAVKTIKTTITRALS

SEQ ID NO: 61834 - protein, 527 aa, Homo sapiens
  Payload ID: 12356
  Gene Symbol: PPIL2
  Gene Name: peptidylprolyl isomerase (cyclophilin)-like 2
  Uniprot ID: Q13356
  ENSP ID: ENSP00000486725
MGKRQHQKDKMYITCAEYTHFYGGKKPDLPQTNFRRLPFDHCSLSLQPFVYPVCTPDGIVFDLLNIVPWLKKYGTNPSNGEKLDGRSLIKLNFSKNSEGKYHCPVLFTVFTNNTHIVAVRTTGNVYAYEAVEQLNIKAKNFRDLLTDEPFSRQDIITLQDPTNLDKFNVSNFYHVKNNMKIIDPDEEKAKQDPSYYLKNTNAETRETLQELYKEFKGDEILAATMKAPEKKKVDKLNAAHYSTGKVSASFTSTAMVPETTHEAAAIDEDVLRYQFVKKKGYVRLHTNKGDLNLELHCDLTPKTCENFIRLCKKHYYDGTIFHRSIRNFVIQGGDPTGTGTGGESYWGKPFKDEFRPNLSHTGRGILSMANSGPNSNRSQFFITFRSCAYLDKKHTIFGRVVGGFDVLTAMENVESDPKTDRPKEEIRIDATTVFVDPYEEADAQIAQERKTQLKVAPETKVKSSQPQAGSQGPQTFRQGVGKYINPAATEQQRKSPQPVPLSPCPRRSPVGVLGTSAPGSSRLPDDH

SEQ ID NO: 61835 - protein, 165 aa, Homo sapiens
  Payload ID: 12357
  Gene Symbol: PPIL3
  Gene Name: peptidylprolyl isomerase (cyclophilin)-like 3
  Uniprot ID: Q9H2H8
  ENSP ID: ENSP00000286175
MSVTLHTDVGDIKIEVFCERTPKTCEMESRCVPQAGVQWRDLGSLQPPPPGFKQVFCLSLPRTGRGGNSIWGKKFEDEYSEYLKHNVRGVVSMANNGPNTNGSQFFITYGKQPHLDMKYTVFGKVIDGLETLDELEKLPVNEKTYRPLNDVHIKDITIHANPFAQ

SEQ ID NO: 61836 - protein, 161 aa, Homo sapiens
  Payload ID: 12357
  Gene Symbol: PPIL3
  Gene Name: peptidylprolyl isomerase (cyclophilin)-like 3
  Uniprot ID: Q9H2H8
  ENSP ID: ENSP00000376107
MSVTLHTDVGDIKIEVFCERTPKTCENFLALCASNYYNGCIFHRNIKGFMVQTGDPTGTGRGGNSIWGKKFEDEYSEYLKHNVRGVVSMANNGPNTNGSQFFITYGKQPHLDMKYTVFGKVIDGLETLDELEKLPVNEKTYRPLNDVHIKDITIHANPFAQ

SEQ ID NO: 61837 - protein, 157 aa, Homo sapiens
  Payload ID: 12357
  Gene Symbol: PPIL3
  Gene Name: peptidylprolyl isomerase (cyclophilin)-like 3
  ENSP ID: ENSP00000386235
MSVTLHTDVGDIKIEVFCERTPKTCEAGVQWRDLGSLQPPPPGFKQVFCLSLPRTGRGGNSIWGKKFEDEYSEYLKHNVRGVVSMANNGPNTNGSQFFITYGKQPHLDMKYTVFGKVIDGLETLDELEKLPVNEKTYRPLNDVHIKDITIHANPFAQ

SEQ ID NO: 61838 - protein, 180 aa, Homo sapiens
  Payload ID: 12357
  Gene Symbol: PPIL3
  Gene Name: peptidylprolyl isomerase (cyclophilin)-like 3
  ENSP ID: ENSP00000386893
LRLHFSCFNNGCARRSGEAQSVTLHTDVGDIKIEVFCERTPKTCENFLALCASNYYNGCIFHRNIKGFMVQTGDPTGTGRGGNSIWGKKFEDEYSEYLKHNVRGVVSMANNGPNTNGSQFFITYGKQPHLDMKYTVFGKVIDGLETLDELEKLPVNEKTYRPLNDVHIKDITIHANPFAQ

SEQ ID NO: 61839 - protein, 165 aa, Homo sapiens; identical to SEQ ID NO: 61835
  Payload ID: 12357
  Gene Symbol: PPIL3
  Gene Name: peptidylprolyl isomerase (cyclophilin)-like 3
  Uniprot ID: Q9H2H8
  ENSP ID: ENSP00000387012

SEQ ID NO: 61840 - protein, 73 aa, Homo sapiens
  Payload ID: 12357
  Gene Symbol: PPIL3
  Gene Name: peptidylprolyl isomerase (cyclophilin)-like 3
  ENSP ID: ENSP00000391082
MSVTLHTDVGDIKIEVFCERTPKTCEELEEEATVFGARSLRMNTVNILSTMLEVLYLWLIMARTPMDLSSSSP

SEQ ID NO: 61841 - protein, 53 aa, Homo sapiens
  Payload ID: 12357
  Gene Symbol: PPIL3
  Gene Name: peptidylprolyl isomerase (cyclophilin)-like 3
  ENSP ID: ENSP00000400726
MSVTLHTDVGDIKIEVFCERTPKTCEEYQGFHGSNRRSNRNWKRRQQYLGQEV

SEQ ID NO: 61842 - protein, 80 aa, Homo sapiens
  Payload ID: 12357
  Gene Symbol: PPIL3
  Gene Name: peptidylprolyl isomerase (cyclophilin)-like 3
  ENSP ID: ENSP00000401196
MSVTLHTDVGDIKIEVFCERTPKTCENFLALCASNYYNGCIFHRNIKGFMVQTGDPTGTGRGGNSIWGKKFEDEYSEYLK

SEQ ID NO: 61843 - protein, 492 aa, Homo sapiens
  Payload ID: 12358
  Gene Symbol: PPIL4
  Gene Name: peptidylprolyl isomerase (cyclophilin)-like 4
  Uniprot ID: Q8WUA2
  ENSP ID: ENSP00000253329
MAVLLETTLGDVVIDLYTEERPRACLNFLKLCKIKYYNYCLIHNVQRDFIIQTGDPTGTGRGGESIFGQLYGDQASFFEAEKVPRIKHKKKGTVSMVNNGSDQHGSQFLITTGENLDYLDGVHTVFGEVTEGMDIIKKINETFVDKDFVPYQDIRINHTVILDDPFDDPPDLLIPDRSPEPTREQLDSGRIGADEEIDDFKGRSAEEVEEIKAEKEAKTQAILLEMVGDLPDADIKPPENVLFVCKLNPVTTDEDLEIIFSRFGPIRSCEVIRDWKTGESLCYAFIEFEKEEDCEKAFFKMDNVLIDDRRIHVDFSQSVAKVKWKGKGGKYTKSDFKEYEKEQDKPPNLVLKDKVKPKQDTKYDLILDEQAEDSKSSHSHTSKKHKKKTHHCSEEKEDEDYMPIKNTNQDIYREMGFGHYEEEESCWEKQKSEKRDRTQNRSRSRSRERDGHYSNSHKSKYQTDLYERERSKKRDRSRSPKKSKDKEKSKYR

SEQ ID NO: 61844 - protein, 127 aa, Homo sapiens
  Payload ID: 12358
  Gene Symbol: PPIL4
  Gene Name: peptidylprolyl isomerase (cyclophilin)-like 4
  ENSP ID: ENSP00000344128
MSRPKTQNQVTHTQVKNTRRKPITVLKRKKMRTTCQSKILIRISIEKWGLVTMKKKKAVGRNKRVKRETELRTEVVADLERGMAIIVIVINQNTKQIFMKEKGVKRETEAEVQRSPKIKKNLSIDER

SEQ ID NO: 61845 - protein, 263 aa, Homo sapiens
  Payload ID: 12359
  Gene Symbol: PPIL6
  Gene Name: peptidylprolyl isomerase (cyclophilin)-like 6
  ENSP ID: ENSP00000389292
MARPQPCGPPHARCGSPSLPERPLQVKVVGLFSCPNFQIAKSAAENLKNNHPSKFEDPILVPLQEFAWHQYLQEKKRELKNETWEYSSSVISFVNGQFLGDALDLQKWAHEVWDIVDIKPSALYDALTEDFSAKFLRDTKHDFVFLDICIDSSPIGRLIFELYCDVCPKTCKNFQVLCTGKAGFSQRGIRLHYKNSIFHRIVQNGWIQGGDIVYGKGDNGESIYGPTFEDGVSLSPMLECNGVISAHCNLHLPGSSDSPASAS

SEQ ID NO: 61846 - protein, 337 aa, Homo sapiens
  Payload ID: 12359
  Gene Symbol: PPIL6
  Gene Name: peptidylprolyl isomerase (cyclophilin)-like 6
  Uniprot ID: Q8IXY8
  ENSP ID: ENSP00000392257
MARPQPCGPPHARCGSPSLPERPLQVKVVGLFSCPNFQIAKSAAENLKNNHPSKFEDPILVPLQEFAWHQYLQEKKRELKNETWEYSSSVISFVNGQFLGDALDLQKWAHEVWDIVDIKPSALYDALTEDFSAKFLRDTKHDFVFLDICIDSSPIGRLIFELYCDVCPKTCKNFQVLCTGKAGFSQRGIRLHYKNSIFHRIVQNGWIQGGDIVYGKGDNGESIYGPTFEELYGSLKRSVKRQKESRGVGKIEKYRDENFSVPHNKRGVLGMANKGRHSNGSQFYITLQATPYLDRKFVAFGQLIEGTEVLKQLELVPTQNERPIHMCRITDSGDPYA

SEQ ID NO: 61847 - protein, 279 aa, Homo sapiens
  Payload ID: 12359
  Gene Symbol: PPIL6
  Gene Name: peptidylprolyl isomerase (cyclophilin)-like 6
  Uniprot ID: Q8IXY8
  ENSP ID: ENSP00000407731
MARPQPCGPPHARCGSPSLPERPLQVKVVGLFSCPNFQIAKSAAEELKNETWEYSSSVISFVNGQFLGDALDLQKWAHEVWDIVDIKPSALYDALTEDFSAKFLRDTKHDFVFLDICIDSSPIGRLIFELYCDVCPKTCKNFQVLCTGKAGFSQRGIRLHYKNSIFHRIVQNGWIQGGDIVYGKGDNGESIYGPTFEDENFSVPHNKRGVLGMANKGRHSNGSQFYITLQATPYLDRKFVAFGQLIEGTEVLKQLELVPTQNERPIHMCRITDSGDPYA

SEQ ID NO: 61848 - protein, 205 aa, Homo sapiens
  Payload ID: 12359
  Gene Symbol: PPIL6
  Gene Name: peptidylprolyl isomerase (cyclophilin)-like 6
  ENSP ID: ENSP00000411731
ARCGSPSLPERPLQVKVVGLFSCPNFQIAKSAAEELKNETWEYSSSVISFVNGQFLGDALDLQKWAHEVWDIVDIKPSALYDALTEDFSAKFLRDTKHDFVFLDICIDSSPIGRLIFELYCDVCPKTCKNFQVLCTGKAGFSQRGIRLHYKNSIFHRIVQNGWIQGGDIVYGKGDNGESIYGPTFEDENFSVPHNKRGVLGMANK

SEQ ID NO: 61849 - protein, 171 aa, Homo sapiens
  Payload ID: 12359
  Gene Symbol: PPIL6
  Gene Name: peptidylprolyl isomerase (cyclophilin)-like 6
  ENSP ID: ENSP00000427899
  MOD_RES (1)..(1): Any amino acid
XGLFSCPNFQIAKSAAEELKNETWEYSSSVISFVNGQFLGDALDLQKWAHEVWDIVDIKPSALYDALTEDFSAKFLRDTKHDFVFLDICIDSSPIGRLIFELYCDVCPKTCKNFQVLCTGKAGFSQRGIRLHYKNSIFHRIVQNGWIQGGDIVYGKGDNGESIYGPTFEGN

SEQ ID NO: 61850 - protein, 311 aa, Homo sapiens
  Payload ID: 12359
  Gene Symbol: PPIL6
  Gene Name: peptidylprolyl isomerase (cyclophilin)-like 6
  Uniprot ID: Q8IXY8
  ENSP ID: ENSP00000427929
MARPQPCGPPHARCGSPSLPERPLQVKVVGLFSCPNFQIAKSAAENLKNNHPSKFEDPILVPLQEFAWHQYLQEKKRELKNETWEYSSSVISFVNGQFLGDALDLQKWAHEVWDIVDIKPSALYDALTEDFSAKFLRDTKHDFVFLDICIDSSPIGRLIFELYCDVCPKTCKNFQVLCTGKAGFSQRGIRLHYKNSIFHRIVQNGWIQGGDIVYGKGDNGESIYGPTFEDENFSVPHNKRGVLGMANKGRHSNGSQFYITLQATPYLDRKFVAFGQLIEGTEVLKQLELVPTQNERPIHMCRITDSGDPYA

SEQ ID NO: 61851 - protein, 146 aa, Homo sapiens
  Payload ID: 12359
  Gene Symbol: PPIL6
  Gene Name: peptidylprolyl isomerase (cyclophilin)-like 6
  ENSP ID: ENSP00000430998
  MOD_RES (1)..(1): Any amino acid
XRPLQVKVVGLFSCPNFQIAKSAAEELKNETWEYSSSVISFVNGQFLGDALDLQKWAHEVWDIVDIKPSALYDALTEDFSAKFLRDTKVLCTGKAGFSQRGIRLHYKNSIFHRIVQNGWIQGGDIVYGKGDNGESIYGPTFEDENF

SEQ ID NO: 61852 - protein, 120 aa, Homo sapiens
  Payload ID: 12360
  Gene Symbol: PPIA
  Gene Name: peptidylprolyl isomerase A (cyclophilin A)
  ENSP ID: ENSP00000394670
MVNPTVFFDIAVDGEPLGRVSFELFADKVPKTAENFRALSTGEKGFGYKGSCFHRIIPGFMCQGGDFTRHNGTGGKSIYGEKFEDENFILKHTGPGILSMANAGPNTNGSQFFICTAKTE

SEQ ID NO: 61853 - protein, 121 aa, Homo sapiens
  Payload ID: 12360
  Gene Symbol: PPIA
  Gene Name: peptidylprolyl isomerase A (cyclophilin A)
  ENSP ID: ENSP00000405975
MVNPTVFFDIAVDGEPLGRVSFELFADKVPKTAENFRALSTGEKGFGYKGSCFHRIIPGFMCQGGDFTRHNGTGGKSIYGEKFEDENFILKHTGPGILSMANAGPNTNGSQFFICTAKTEW

SEQ ID NO: 61854 - protein, 165 aa, Homo sapiens
  Payload ID: 12360
  Gene Symbol: PPIA
  Gene Name: peptidylprolyl isomerase A (cyclophilin A)
  Uniprot ID: P62937
  ENSP ID: ENSP00000419425
MVNPTVFFDIAVDGEPLGRVSFELFADKVPKTAENFRALSTGEKGFGYKGSCFHRIIPGFMCQGGDFTRHNGTGGKSIYGEKFEDENFILKHTGPGILSMANAGPNTNGSQFFICTAKTEWLDGKHVVFGKVKEGMNIVEAMERFGSRNGKTSKKITIADCGQLE

SEQ ID NO: 61855 - protein, 105 aa, Homo sapiens
  Payload ID: 12360
  Gene Symbol: PPIA
  Gene Name: peptidylprolyl isomerase A (cyclophilin A)
  Uniprot ID: P62937
  ENSP ID: ENSP00000427976
MCQGGDFTRHNGTGGKSIYGEKFEDENFILKHTGPGILSMANAGPNTNGSQFFICTAKTEWLDGKHVVFGKVKEGMNIVEAMERFGSRNGKTSKKITIADCGQLE

SEQ ID NO: 61856 - protein, 58 aa, Homo sapiens
  Payload ID: 12360
  Gene Symbol: PPIA
  Gene Name: peptidylprolyl isomerase A (cyclophilin A)
  ENSP ID: ENSP00000429251
MVNPTVFFDIAVDGEPLGRVSFECVSMHGVRKKPSYNSTKSSMDGCVGAGLSHVFGVE

SEQ ID NO: 61857 - protein, 105 aa, Homo sapiens; identical to SEQ ID NO: 61855
  Payload ID: 12360
  Gene Symbol: PPIA
  Gene Name: peptidylprolyl isomerase A (cyclophilin A)
  Uniprot ID: P62937
  ENSP ID: ENSP00000430817

SEQ ID NO: 61858 - protein, 105 aa, Homo sapiens; identical to SEQ ID NO: 61855
  Payload ID: 12360
  Gene Symbol: PPIA
  Gene Name: peptidylprolyl isomerase A (cyclophilin A)
  Uniprot ID: P62937
  ENSP ID: ENSP00000479961

SEQ ID NO: 61859 - protein, 164 aa, Homo sapiens
  Payload ID: 12361
  Gene Symbol: PPIAL4A
  Gene Name: peptidylprolyl isomerase A (cyclophilin A)-like 4A
  Uniprot ID: Q9Y536
  ENSP ID: ENSP00000485206
MVNSVVFFDITVDGKPLGRISIKLFADKILKTAENFRALSTGEKGFRYKGSCFHRIIPGFMCQGGDFTRHNGTGDKSIYGEKFDDENLIRKHTGSGILSMANAGPNTNGSQFFICAAKTEWLDGKHVAFGKVKERVNIVEAMEHFGYRNSKTSKKITIADCGQF

SEQ ID NO: 61860 - protein, 164 aa, Homo sapiens
  Payload ID: 12362
  Gene Symbol: PPIAL4C
  Gene Name: peptidylprolyl isomerase A (cyclophilin A)-like 4C
  Uniprot ID: A0A0B4J2A2
  ENSP ID: ENSP00000463057
MVNSVVFFDITVDGKPLGRISIKLFADKIPKTAENFRALSTGEKGFRYKGSCFHRIIPGFMCQGGDFTRPNGTGDKSIYGEKFDDENLIRKHTGSGILSMANAGPNTNGSQFFICTAKTEWLDGKHVAFGKVKERVNIVEAMEHFGYRNSKTSKKITIADCGQF

SEQ ID NO: 61861 - protein, 164 aa, Homo sapiens
  Payload ID: 12363
  Gene Symbol: PPIAL4D
  Gene Name: peptidylprolyl isomerase A (cyclophilin A)-like 4D
  Uniprot ID: F5H284
  ENSP ID: ENSP00000439444
MVNSVVFFEITRDGKPLGRISIKLFADKIPKTAENFRALSTGEKGFRYKGSCFHRIIPGFMCQGGDFTRPNGTGDKSIYGEKFDDENLIRKHTGSGILSMANAGPNTNGSQFFICAAKTEWLDGKHVAFGKVKERVNIVEATEHFGYRNSKTSKKITIADCGQF

SEQ ID NO: 61862 - protein, 164 aa, Homo sapiens
  Payload ID: 12364
  Gene Symbol: PPIAL4E
  Gene Name: peptidylprolyl isomerase A (cyclophilin A)-like 4E
  Uniprot ID: A0A075B759
  ENSP ID: ENSP00000463419
MVNSVVFFEITRDGKPLGRISIKLFADKIPKTAENFRALSTGEKGFRYKGSCFHRIIPGFMCQGGDFTRPNGTGDKSIYGEKFDDENLIRKHTGSGILSMANAGPNTNGSQFFICAAKTEWLDGKHVAFGKVKERVNIVEAMEHFGYRNSKTSKKITIADCGQF

SEQ ID NO: 61863 - protein, 164 aa, Homo sapiens
  Payload ID: 12365
  Gene Symbol: PPIAL4F
  Gene Name: peptidylprolyl isomerase A (cyclophilin A)-like 4F
  ENSP ID: ENSP00000358224
MVNSVVFFEITRDGKPLGRISIKLFADKIPKTAENFRALSTGEKGFRYKGSCFHRIIPGFMCQGGDFTRPNGTGDKSIYGEKFDDENLIRKHTGSGILSMANAGPNTSGSQFFICAAKTEWLDGKHVAFGKVKERVNIVEATEHFGYRNSKTSKKITIADCGQF

SEQ ID NO: 61864 - protein, 164 aa, Homo sapiens; identical to SEQ ID NO: 61862
  Payload ID: 12365
  Gene Symbol: PPIAL4F
  Gene Name: peptidylprolyl isomerase A (cyclophilin A)-like 4F
  Uniprot ID: P0DN26
  ENSP ID: ENSP00000485638

SEQ ID NO: 61865 - protein, 164 aa, Homo sapiens
  Payload ID: 12366
  Gene Symbol: PPIAL4G
  Gene Name: peptidylprolyl isomerase A (cyclophilin A)-like 4G
  Uniprot ID: P0DN37
  ENSP ID: ENSP00000393845
MVNSVIFFDITVDGKPLGRISIKQFADKIPKTAENFRALSTGEKGFRYKGSCFHRIIPGFMCQGGDFTHPNGTGDKSIYGEKFDDENLIRKHTGSGILSMANAGPNTNGSQFFICTAKTEWLDGKHVAFGKVKERVNIVEAMEHFGYRNSKTSKKITIADCGQF

SEQ ID NO: 61866 - protein, 216 aa, Homo sapiens
  Payload ID: 12367
  Gene Symbol: PPIB
  Gene Name: peptidylprolyl isomerase B (cyclophilin B)
  Uniprot ID: P23284
  ENSP ID: ENSP00000300026
MLRLSERNMKVLLAAALIAGSVFFLLLPGPSAADEKKKGPKVTVKVYFDLRIGDEDVGRVIFGLFGKTVPKTVDNFVALATGEKGFGYKNSKFHRVIKDFMIQGGDFTRGDGTGGKSIYGERFPDENFKLKHYGPGWVSMANAGKDTNGSQFFITTVKTAWLDGKHVVFGKVLEGMEVVRKVESTKTDSRDKPLKDVIIADCGKIEVEKPFAIAKE

SEQ ID NO: 61867 - protein, 212 aa, Homo sapiens
  Payload ID: 12368
  Gene Symbol: PPIC
  Gene Name: peptidylprolyl isomerase C (cyclophilin C)
  Uniprot ID: P45877
  ENSP ID: ENSP00000303057
MGPGPRLLLPLVLCVGLGALVFSSGAEGFRKRGPSVTAKVFFDVRIGDKDVGRIVIGLFGKVVPKTVENFVALATGEKGYGYKGSKFHRVIKDFMIQGGDITTGDGTGGVSIYGETFPDENFKLKHYGIGWVSMANAGPDTNGSQFFITLTKPTWLDGKHVVFGKVIDGMTVVHSIELQATDGHDRPLTNCSIINSGKIDVKTPFVVEIADW

SEQ ID NO: 61868 - protein, 370 aa, Homo sapiens
  Payload ID: 12369
  Gene Symbol: PPID
  Gene Name: peptidylprolyl isomerase D
  Uniprot ID: Q08752
  ENSP ID: ENSP00000303754
MSHPSPQAKPSNPSNPRVFFDVDIGGERVGRIVLELFADIVPKTAENFRALCTGEKGIGHTTGKPLHFKGCPFHRIIKKFMIQGGDFSNQNGTGGESIYGEKFEDENFHYKHDREGLLSMANAGRNTNGSQFFITTVPTPHLDGKHVVFGQVIKGIGVARILENVEVKGEKPAKLCVIAECGELKEGDDGGIFPKDGSGDSHPDFPEDADIDLKDVDKILLITEDLKNIGNTFFKSQNWEMAIKKYAEVLRYVDSSKAVIETADRAKLQPIALSCVLNIGACKLKMSNWQGAIDSCLEALELDPSNTKALYRRAQGWQGLKEYDQALADLKKAQGIAPEDKAIQAELLKVKQKIKAQKDKEKAVYAKMFA

SEQ ID NO: 61869 - protein, 48 aa, Homo sapiens
  Payload ID: 12369
  Gene Symbol: PPID
  Gene Name: peptidylprolyl isomerase D
  ENSP ID: ENSP00000421221
KALYRRAQGWQGLKEYDQALADLKKAQGIAPEDKGKLAAFVVKVNFVI

SEQ ID NO: 61870 - protein, 19 aa, Homo sapiens
  Payload ID: 12369
  Gene Symbol: PPID
  Gene Name: peptidylprolyl isomerase D
  ENSP ID: ENSP00000423207
  MOD_RES (1)..(1): Any amino acid
XILENVEVKGEKPAKNVEN

SEQ ID NO: 61871 - protein, 646 aa, Homo sapiens
  Payload ID: 12370
  Gene Symbol: PPWD1
  Gene Name: peptidylprolyl isomerase domain and WD repeat containing 1
  Uniprot ID: Q96BP3
  ENSP ID: ENSP00000261308
MAAESGSDFQQRRRRRRDPEEPEKTELSERELAVAVAVSQENDEENEERWVGPLPVEATLAKKRKVLEFERVYLDNLPSASMYERSYMHRDVITHVVCTKTDFIITASHDGHVKFWKKIEEGIEFVKHFRSHLGVIESIAVSSEGALFCSVGDDKAMKVFDVVNFDMINMLKLGYFPGQCEWIYCPGDAISSVAASEKSTGKIFIYDGRGDNQPLHIFDKLHTSPLTQIRLNPVYKAVVSSDKSGMIEYWTGPPHEYKFPKNVNWEYKTDTDLYEFAKCKAYPTSVCFSPDGKKIATIGSDRKVRIFRFVTGKLMRVFDESLSMFTELQQMRQQLPDMEFGRRMAVERELEKVDAVRLINIVFDETGHFVLYGTMLGIKVINVETNRCVRILGKQENIRVMQLALFQGIAKKHRAATTIEMKASENPVLQNIQADPTIVCTSFKKNRFYMFTKREPEDTKSADSDRDVFNEKPSKEEVMAATQAEGPKRVSDSAIIHTSMGDIHTKLFPVECPKTVENFCVHSRNGYYNGHTFHRIIKGFMIQTGDPTGTGMGGESIWGGEFEDEFHSTLRHDRPYTLSMANAGSNTNGSQFFITVVPTPWLDNKHTVFGRVTKGMEVVQRISNVKVNPKTDKPYEDVSIINITVK

SEQ ID NO: 61872 - protein, 132 aa, Homo sapiens
  Payload ID: 12370
  Gene Symbol: PPWD1
  Gene Name: peptidylprolyl isomerase domain and WD repeat containing 1
  ENSP ID: ENSP00000421595
YKFPKNVNWEYKTDTDLYEFAKCKAYPTSVCFSPDGKKIATIGSDRKVRIFRFVTGKLMRVFDESLSMFTELQQMRQQLPDMEFGRRMAVERELEKVDAVRLINIVFDETGHFVLYGTMLGIKVINVETNRG

SEQ ID NO: 61873 - protein, 241 aa, Homo sapiens
  Payload ID: 12370
  Gene Symbol: PPWD1
  Gene Name: peptidylprolyl isomerase domain and WD repeat containing 1
  ENSP ID: ENSP00000423234
MYERSYMHRDVITHVVCTKTDFIITASHDGHVKFWKKIEEGIEFVKHFRSHLGVIESIAVSSEGALFCSVGDDKAMKVFDVVNFDMINMLKLGYFPGQCEWIYCPGDAISSVAASEKSTGKIFIYDGRGDNQPLHIFDKLHTSPLTQIRLNPVYKAVVSSDKSGMIEYWTGPPHEYKFPKNVNWEYKTDTDLYEFAKCKAYPTSVCFSPDGKKIATIGSDRKVRIFRFVTGKLMRVFDESL

SEQ ID NO: 61874 - protein, 68 aa, Homo sapiens
  Payload ID: 12370
  Gene Symbol: PPWD1
  Gene Name: peptidylprolyl isomerase domain and WD repeat containing 1
  ENSP ID: ENSP00000423486
MAAESGSDFQQRRRRRRDPEEPEKTELSERELAVAVAVSQENDEENEERWVGPLPVEATLAKKRKAAT

SEQ ID NO: 61875 - protein, 107 aa, Homo sapiens
  Payload ID: 12370
  Gene Symbol: PPWD1
  Gene Name: peptidylprolyl isomerase domain and WD repeat containing 1
  ENSP ID: ENSP00000424519
MAAESGSDFQQRRRRRRDPEEPEKTELSERELAVAVAVSQENDEENEERWVGPLPVEATLAKKRKVLEFERVYLDNLPSASMYERSYMHRDVITHVVCTKFYYYCQS

SEQ ID NO: 61876 - protein, 84 aa, Homo sapiens
  Payload ID: 12370
  Gene Symbol: PPWD1
  Gene Name: peptidylprolyl isomerase domain and WD repeat containing 1
  ENSP ID: ENSP00000425390
MAAESGSDFQQRRRRRRDPEEPEKTELSERELAVAVAVSQENDEENEERWVGPLPVEATLAKKRKEQILLLLPVMMDMSSSGKK

SEQ ID NO: 61877 - protein, 107 aa, Homo sapiens
  Payload ID: 12370
  Gene Symbol: PPWD1
  Gene Name: peptidylprolyl isomerase domain and WD repeat containing 1
  ENSP ID: ENSP00000427054
MDLRTDFIITASHDGHVKFWKKIEEGIEFVKHFRSHLGVIESIAVSSEGALFCSVGDDKAMKVFDVVNFDMINMLKLGYFPGQCEWIYCPGDAISSVAASEKSTGKI

SEQ ID NO: 61878 - protein, 108 aa, Homo sapiens
  Payload ID: 12370
  Gene Symbol: PPWD1
  Gene Name: peptidylprolyl isomerase domain and WD repeat containing 1
  ENSP ID: ENSP00000427642
MAAESGSDFQQRRRRRRDPEEPEKTELSERELAVAVAVSQENDEENEERWVGPLPVEATLAKKRKVLEFERVYLDNLPSASMYERSYMHRDVITHVVCTKQWKVIQRI

SEQ ID NO: 61879 - protein, 616 aa, Homo sapiens
  Payload ID: 12370
  Gene Symbol: PPWD1
  Gene Name: peptidylprolyl isomerase domain and WD repeat containing 1
  ENSP ID: ENSP00000442371
MRRTKSAGLDLYLWRQHWPRRGKQPHEVGISNSYLVLEFERVYLDNLPSASMYERSYMHRDVITHVVCTKTDFIITASHDGHVKFWKKIEEGIEFVKHFRSHLGVIESIAVSSEGALFCSVGDDKAMKVFDVVNFDMINMLKLGYFPGQCEWIYCPGDAISSVAASEKSTGKIFIYDGRGDNQPLHIFDKLHTSPLTQIRLNPVYKAVVSSDKSGMIEYWTGPPHEYKFPKNVNWEYKTDTDLYEFAKCKAYPTSVCFSPDGKKIATIGSDRKVRIFRFVTGKLMRVFDESLSMFTELQQMRQQLPDMEFGRRMAVERELEKVDAVRLINIVFDETGHFVLYGTMLGIKVINVETNRCVRILGKQENIRVMQLALFQGIAKKHRAATTIEMKASENPVLQNIQADPTIVCTSFKKNRFYMFTKREPEDTKSADSDRDVFNEKPSKEEVMAATQAEGPKRVSDSAIIHTSMGDIHTKLFPVECPKTVENFCVHSRNGYYNGHTFHRIIKGFMIQTGDPTGTGMGGESIWGGEFEDEFHSTLRHDRPYTLSMANAGSNTNGSQFFITVVPTPWLDNKHTVFGRVTKGMEVVQRISNVKVNPKTDKPYEDVSIINITVK

SEQ ID NO: 61880 - protein, 490 aa, Homo sapiens
  Payload ID: 12370
  Gene Symbol: PPWD1
  Gene Name: peptidylprolyl isomerase domain and WD repeat containing 1
  Uniprot ID: Q96BP3
  ENSP ID: ENSP00000444496
MKVFDVVNFDMINMLKLGYFPGQCEWIYCPGDAISSVAASEKSTGKIFIYDGRGDNQPLHIFDKLHTSPLTQIRLNPVYKAVVSSDKSGMIEYWTGPPHEYKFPKNVNWEYKTDTDLYEFAKCKAYPTSVCFSPDGKKIATIGSDRKVRIFRFVTGKLMRVFDESLSMFTELQQMRQQLPDMEFGRRMAVERELEKVDAVRLINIVFDETGHFVLYGTMLGIKVINVETNRCVRILGKQENIRVMQLALFQGIAKKHRAATTIEMKASENPVLQNIQADPTIVCTSFKKNRFYMFTKREPEDTKSADSDRDVFNEKPSKEEVMAATQAEGPKRVSDSAIIHTSMGDIHTKLFPVECPKTVENFCVHSRNGYYNGHTFHRIIKGFMIQTGDPTGTGMGGESIWGGEFEDEFHSTLRHDRPYTLSMANAGSNTNGSQFFITVVPTPWLDNKHTVFGRVTKGMEVVQRISNVKVNPKTDKPYEDVSIINITVK

SEQ ID NO: 61881 - protein, 301 aa, Homo sapiens
  Payload ID: 12371
  Gene Symbol: PPIE
  Gene Name: peptidylprolyl isomerase E (cyclophilin E)
  Uniprot ID: Q9UNP9
  ENSP ID: ENSP00000312769
MATTKRVLYVGGLAEEVDDKVLHAAFIPFGDITDIQIPLDYETEKHRGFAFVEFELAEDAAAAIDNMNESELFGRTIRVNLAKPMRIKEGSSRPVWSDDDWLKKFSGKTLEENKEEEGSEPPKAETQEGEPIAKKARSNPQVYMDIKIGNKPAGRIQMLLRSDVVPMTAENFRCLCTHEKGFGFKGSSFHRIIPQFMCQGGDFTNHNGTGGKSIYGKKFDDENFILKHTGPGLLSMANSGPNTNGSQFFLTCDKTDWLDGKHVVFGEVTEGLDVLRQIEAQGSKDGKPKQKVIIADCGEYV

SEQ ID NO: 61882 - protein, 296 aa, Homo sapiens
  Payload ID: 12371
  Gene Symbol: PPIE
  Gene Name: peptidylprolyl isomerase E (cyclophilin E)
  Uniprot ID: Q9UNP9
  ENSP ID: ENSP00000348904
MATTKRVLYVGGLAEEVDDKVLHAAFIPFGDITDIQIPLDYETEKHRGFAFVEFELAEDAAAAIDNMNESELFGRTIRVNLAKPMRIKEGSSRPVWSDDDWLKKFSGKTLEENKEEEGSEPPKAETQEGEPIAKKARSNPQVYMDIKIGNKPAGRIQMLLRSDVVPMTAENFRCLCTHEKGFGFKGSSFHRIIPQFMCQGGDFTNHNGTGGKSIYGKKFDDENFILKHTGPGLLSMANSGPNTNGSQFFLTCDKTDWLDGKHVVFGEVTEGLDVLRQIEKQEESAITSQPRSWKLT

SEQ ID NO: 61883 - protein, 314 aa, Homo sapiens
  Payload ID: 12371
  Gene Symbol: PPIE
  Gene Name: peptidylprolyl isomerase E (cyclophilin E)
  Uniprot ID: Q9UNP9
  ENSP ID: ENSP00000361918
MATTKRVLYVGGLAEEVDDKVLHAAFIPFGDITDIQIPLDYETEKHRGFAFVEFELAEDAAAAIDNMNESELFGRTIRVNLAKPMRIKEGSSRPVWSDDDWLKKFSGKTLEENKEEEGSEPPKAETQEGEPIAKKARSNPQVYMDIKIGNKPAGRIQMLLRSDVVPMTAENFRCLCTHEKGFGFKGSSFHRIIPQFMCQGGDFTNHNGTGGKSIYGKKFDDENFILKHTGPGLLSMANSGPNTNGSQFFLTCDKTDWLDGKHVVFGEVTEGLDVLRQIEVAPDTKASKARGSRKNKDGQERNWGKSQKVESHTI

SEQ ID NO: 61884 - protein, 250 aa, Homo sapiens
  Payload ID: 12371
  Gene Symbol: PPIE
  Gene Name: peptidylprolyl isomerase E (cyclophilin E)
  ENSP ID: ENSP00000361925
MATTKRVLYVGGLAEEVDDKVLHAAFIPFGDITDIQIPLDYETVWSDDDWLKKFSGKTLEENKEEEGSEPPKAETQEGEPIAKKARSNPQVYMDIKIGNKPAGRIQMLLRSDVVPMTAENFRCLCTHEKGFGFKGSSFHRIIPQFMCQGGDFTNHNGTGGKSIYGKKFDDENFILKHTGPGLLSMANSGPNTNGSQFFLTCDKTDWLDGKHVVFGEVTEGLDVLRQIEAQGSKDGKPKQKVIIADCGEYV

SEQ ID NO: 61885 - protein, 208 aa, Homo sapiens
  Payload ID: 12371
  Gene Symbol: PPIE
  Gene Name: peptidylprolyl isomerase E (cyclophilin E)
  ENSP ID: ENSP00000431714
MATTKRVLYVGGLAEEVDDKVLHAAFIPFGDITDIQIPLDYETEKHRGFAFVEFELAEDAAAAIDNMNESELFGRTIRVNLAKPMRIKEGSSRPVWSDDDWLKKFSGKTLEENKEEEGSEPPKAETQERISAACALMKRALALREAASTASSPSSCARAVISQTTMALGASPSMGRSSMMKTLSSSIRDQVYYPWPTLAQTPMALSSS

SEQ ID NO: 61886 - protein, 37 aa, Homo sapiens
  Payload ID: 12371
  Gene Symbol: PPIE
  Gene Name: peptidylprolyl isomerase E (cyclophilin E)
  ENSP ID: ENSP00000432396
ATTKRVLWTGRGSGRQSSSCCVHSFWRHHRYSDSSGL

SEQ ID NO: 61887 - protein, 213 aa, Homo sapiens
  Payload ID: 12371
  Gene Symbol: PPIE
  Gene Name: peptidylprolyl isomerase E (cyclophilin E)
  ENSP ID: ENSP00000433475
MNESELFGRTIRVNLAKPMRIKEGSSRPVWSDDDWLKKFSGKTLEENKEEEGSEPPKAETQEGEPIAKKARSNPQVYMDIKIGNKPAGRIQMLLRSDVVPMTAENFRCLCTHEKGFGFKGSSFHRIIPQFMCQGGDFTNHNGTGGKSIYGKKFDDENFILKHTGPGLLSMANSGPNTNGSQFFLTCDKTDWLDGKHVVFGEVTEGLDVLRQIE

SEQ ID NO: 61888 - protein, 36 aa, Homo sapiens
  Payload ID: 12371
  Gene Symbol: PPIE
  Gene Name: peptidylprolyl isomerase E (cyclophilin E)
  ENSP ID: ENSP00000434888
  MOD_RES (1)..(1): Any amino acid
XTKRVLWTGRGSGRQSSSCCVHSFWRHHRYSDSSGL

SEQ ID NO: 61889 - protein, 38 aa, Homo sapiens
  Payload ID: 12371
  Gene Symbol: PPIE
  Gene Name: peptidylprolyl isomerase E (cyclophilin E)
  ENSP ID: ENSP00000434989
MATTKRVLWTGRGSGRQSSSCCVHSFWRHHRYSDSSGL

SEQ ID NO: 61890 - protein, 71 aa, Homo sapiens
  Payload ID: 12371
  Gene Symbol: PPIE
  Gene Name: peptidylprolyl isomerase E (cyclophilin E)
  ENSP ID: ENSP00000436689
MNESELFGRTIRVNLAKPMRIKEGSSRPVWSDDDWLKKFSGKTLEENKEEEGSEPPKAETQEGEPIAKKAR

SEQ ID NO: 61891 - protein, 207 aa, Homo sapiens
  Payload ID: 12372
  Gene Symbol: PPIF
  Gene Name: peptidylprolyl isomerase F
  Uniprot ID: P30405
  ENSP ID: ENSP00000225174
MLALRCGSRWLGLLSVPRSVPLRLPAARACSKGSGDPSSSSSSGNPLVYLDVDANGKPLGRVVLELKADVVPKTAENFRALCTGEKGFGYKGSTFHRVIPSFMCQAGDFTNHNGTGGKSIYGSRFPDENFTLKHVGPGVLSMANAGPNTNGSQFFICTIKTDWLDGKHVVFGHVKEGMDVVKKIESFGSKSGRTSKKIVITDCGQLS

SEQ ID NO: 61892 - protein, 165 aa, Homo sapiens
  Payload ID: 12372
  Gene Symbol: PPIF
  Gene Name: peptidylprolyl isomerase F
  ENSP ID: ENSP00000396388
  MOD_RES (1)..(1): Any amino acid
XSSSSSSGNPLVYLDVDANGKPLGRVVLELKADVVPKTAENFRALCTGEKGFGYKGSTFHRVIPSFMCQAGDFTNHNGTGGKSIYGSRFPDENFTLKHVGPGVLSMANAGPNTNGSQFFICTIKTDWSMALDDIALHCCSPGSPVLTGWMASMLCSVTSKRAWTS

SEQ ID NO: 61893 - protein, 145 aa, Homo sapiens
  Payload ID: 12372
  Gene Symbol: PPIF
  Gene Name: peptidylprolyl isomerase F
  ENSP ID: ENSP00000473548
MLALRCGSRWLGLLSVPRSVPLRLPAARACSKGSGDPSSSSSSGNPLVYLDVDANGKPLGRVVLELKADVVPKTAENFRALCTGEKGFGYKGSTFHRVIPSFMCQAGDFTNHNGTGGKSIYGSRFPDENFTLKHVGPGEWGPPLG

SEQ ID NO: 61894 - protein, 754 aa, Homo sapiens
  Payload ID: 12373
  Gene Symbol: PPIG
  Gene Name: peptidylprolyl isomerase G (cyclophilin G)
  Uniprot ID: Q13427
  ENSP ID: ENSP00000260970
MGIKVQRPRCFFDIAINNQPAGRVVFELFSDVCPKTCENFRCLCTGEKGTGKSTQKPLHYKSCLFHRVVKDFMVQGGDFSEGNGRGGESIYGGFFEDESFAVKHNKEFLLSMANRGKDTNGSQFFITTKPTPHLDGHHVVFGQVISGQEVVREIENQKTDAASKPFAEVRILSCGELIPKSKVKKEEKKRHKSSSSSSSSSSDSDSSSDSQSSSDSSDSESATEEKSKKRKKKHRKNSRKHKKEKKKRKKSKKSASSESEAENLEAQPQSTVRPEEIPPIPENRFLMRKSPPKADEKERKNRERERERECNPPNSQPASYQRRLLVTRSGRKIKGRGPRRYRTPSRSRSRDRFRRSETPPHWRQEMQRAQRMRVSSGERWIKGDKSELNEIKENQRSPVRVKERKITDHRNVSESPNRKNEKEKKVKDHKSNSKERDIRRNSEKDDKYKNKVKKRAKSKSRSKSKEKSKSKERDSKHNRNEEKRMRSRSKGRDHENVKEKEKQSDSKGKDQERSRSKEKSKQLESKSNEHDHSKSKEKDRRAQSRSRECDITKGKHSYNSRTRERSRSRDRSRRVRSRTHDRDRSRSKEYHRYREQEYRRRGRSRSRERRTPPGRSRSKDRRRRRRDSRSSEREESQSRNKDKYRNQESKSSHRKENSESEKRMYSKSRDHNSSNNSREKKADRDQSPFSKIKQSSQDNELKSSMLKNKEDEKIRSSVEKENQKSKGQENDHVHEKNKKFDHESSPGTDEDKSG

SEQ ID NO: 61895 - protein, 739 aa, Homo sapiens
  Payload ID: 12373
  Gene Symbol: PPIG
  Gene Name: peptidylprolyl isomerase G (cyclophilin G)
  ENSP ID: ENSP00000386245
MGIKVQRPRCFFDIAINNQPAGRVVFELFSDVCPKTCENFRCLCTGEKGTGKSTQKPLHYKSCLFHRVVKDFMVQGGDFSEDESFAVKHNKEFLLSMANRGKDTNGSQFFITTKPTPHLDGHHVVFGQVISGQEVVREIENQKTDAASKPFAEVRILSCGELIPKSKVKKEEKKRHKSSSSSSSSSSDSDSSSDSQSSSDSSDSESATEEKSKKRKKKHRKNSRKHKKEKKKRKKSKKSASSESEAENLEAQPQSTVRPEEIPPIPENRFLMRKSPPKADEKERKNRERERERECNPPNSQPASYQRRLLVTRSGRKIKGRGPRRYRTPSRSRSRDRFRRSETPPHWRQEMQRAQRMRVSSGERWIKGDKSELNEIKENQRSPVRVKERKITDHRNVSESPNRKNEKEKKVKDHKSNSKERDIRRNSEKDDKYKNKVKKRAKSKSRSKSKEKSKSKERDSKHNRNEEKRMRSRSKGRDHENVKEKEKQSDSKGKDQERSRSKEKSKQLESKSNEHDHSKSKEKDRRAQSRSRECDITKGKHSYNSRTRERSRSRDRSRRVRSRTHDRDRSRSKEYHRYREQEYRRRGRSRSRERRTPPGRSRSKDRRRRRRDSRSSEREESQSRNKDKYRNQESKSSHRKENSESEKRMYSKSRDHNSSNNSREKKADRDQSPFSKIKQSSQDNELKSSMLKNKEDEKIRSSVEKENQKSKGQENDHVHEKNKKFDHESSPGTDEDKSG

SEQ ID NO: 61896 - protein, 59 aa, Homo sapiens
  Payload ID: 12373
  Gene Symbol: PPIG
  Gene Name: peptidylprolyl isomerase G (cyclophilin G)
  ENSP ID: ENSP00000394202
MGIKVQRPRCFFDIAINNQPAGRVVFELFSDVCPKTCENFRCLCTGEKGTGKSTQKPLH

SEQ ID NO: 61897 - protein, 246 aa, Homo sapiens
  Payload ID: 12373
  Gene Symbol: PPIG
  Gene Name: peptidylprolyl isomerase G (cyclophilin G)
  ENSP ID: ENSP00000402222
MGIKVQRPRCFFDIAINNQPAGRVVFELFSDVCPKTCENFRCLCTGEKGTGKSTQKPLHYKSCLFHRVVKDFMVQGGDFSEGNGRGGESIYGGFFEDESFAVKHNKEFLLSMANRGKDTNGSQFFITTKPTPHLDGHHVVFGQVISGQEVVREIENQKTDAASKPFAEVRILSCGELIPKSKVKKEEKKRHKSSSSSSSSSSDSDSSSDSQSSSDSSDSESATEEKSKKRKKKHRKNSRKHKKEKK

SEQ ID NO: 61898 - protein, 754 aa, Homo sapiens; identical to SEQ ID NO: 61894
  Payload ID: 12373
  Gene Symbol: PPIG
  Gene Name: peptidylprolyl isomerase G (cyclophilin G)
  Uniprot ID: Q13427
  ENSP ID: ENSP00000407083

SEQ ID NO: 61899 - protein, 487 aa, Homo sapiens
  Payload ID: 12373
  Gene Symbol: PPIG
  Gene Name: peptidylprolyl isomerase G (cyclophilin G)
  ENSP ID: ENSP00000408683
MPGLSCGGGRRLAGFSAFSGGGRFEALQRTGPREEENSTGAGEKGTGKSTQKPLHYKSCLFHRVVKDFMVQGGDFSEGNGRGGESIYGGFFEDESFAVKHNKEFLLSMANRGKDTNGSQFFITTKPTPHLDGHHVVFGQVISGQEVVREIENQKTDAASKPFAEVRILSCGELIPKSKVKKEEKKRHKSSSSSSSSSSDSDSSSDSQSSSDSSDSESATEEKSKKRKKKHRKNSRKHKKEKKKRKKSKKSESEAENLEAQPQSTVRPEEIPPIPENRFLMRKSPPKADEKERKNRERERERECNPPNSQPASYQRRLLVTRSGRKIKGRGPRRYRTPSRSRSRDRFRRSETPPHWRQEMQRAQRMRVSSGERWIKGDKSELNEIKENQRSPVRVKERKITDHRNVSESPNRKNEKEKKVKDHKSNSKERDIRRNSEKDDKYKNKVKKRAKSKSRSKSKEKSKSKERDSKHNRNEEKRMRSRSKGRDH

SEQ ID NO: 61900 - protein, 104 aa, Homo sapiens
  Payload ID: 12373
  Gene Symbol: PPIG
  Gene Name: peptidylprolyl isomerase G (cyclophilin G)
  ENSP ID: ENSP00000411643
MGIKVQRPRCFFDIAINNQPAGRVVFELFSDVCPKTCENFRCLCTELSRILWFKVVTSVKEMDEEGNLSMEDFLKTRVSLLNTTKNFSCQWPTEGRIQMVHSSS

SEQ ID NO: 61901 - protein, 357 aa, Homo sapiens
  Payload ID: 12373
  Gene Symbol: PPIG
  Gene Name: peptidylprolyl isomerase G (cyclophilin G)
  Uniprot ID: Q13427
  ENSP ID: ENSP00000435987
MGIKVQRPRCFFDIAINNQPAGRVVFELFSDVCPKTCENFRCLCTGEKGTGKSTQKPLHYKSCLFHRVVKDFMVQGGDFSEGNGRGGESIYGGFFEDESFAVKHNKEFLLSMANRGKDTNGSQFFITTKPTPHLDGHHVVFGQVISGQEVVREIENQKTDAASKPFAEVRILSCGELIPKSKVKKEEKKRHKSSSSSSSSSSDSDSSSDSQSSSDSSDSESATEEKSKKRKKKHRKNSRKHKKEKKKRKKSKKSASSESEAENLEAQPQSTVRPEEIPPIPENRFLMRKSPPKADEKERKNRERERERECNPPNSQPASYQRRLLVTRSGRKIKGRGPRVGDSFPRDLHNIAFVFLK

SEQ ID NO: 61902 - protein, 177 aa, Homo sapiens
  Payload ID: 12374
  Gene Symbol: PPIH
  Gene Name: peptidylprolyl isomerase H (cyclophilin H)
  Uniprot ID: O43447
  ENSP ID: ENSP00000306614
MAVANSSPVNPVVFFDVSIGGQEVGRMKIELFADVVPKTAENFRQFCTGEFRKDGVPIGYKGSTFHRVIKDFMIQGGDFVNGDGTGVASIYRGPFADENFKLRHSAPGLLSMANSGPSTNGCQFFITCSKCDWLDGKHVVFGKIIDGLLVMRKIENVPTGPNNKPKLPVVISQCGEM

SEQ ID NO: 61903 - protein, 57 aa, Homo sapiens
  Payload ID: 12374
  Gene Symbol: PPIH
  Gene Name: peptidylprolyl isomerase H (cyclophilin H)
  ENSP ID: ENSP00000361629
MKIELFADVVPKTAENFRQFCTGEFRSVSDVFDFFACSRGVFWGCSEGIGEPPAGLE

SEQ ID NO: 61904 - protein, 134 aa, Homo sapiens
  Payload ID: 12374
  Gene Symbol: PPIH
  Gene Name: peptidylprolyl isomerase H (cyclophilin H)
  Uniprot ID: O43447
  ENSP ID: ENSP00000361630
MIAGDSDRRKDGVPIGYKGSTFHRVIKDFMIQGGDFVNGDGTGVASIYRGPFADENFKLRHSAPGLLSMANSGPSTNGCQFFITCSKCDWLDGKHVVFGKIIDGLLVMRKIENVPTGPNNKPKLPVVISQCGEM

SEQ ID NO: 61905 - protein, 144 aa, Homo sapiens
  Payload ID: 12374
  Gene Symbol: PPIH
  Gene Name: peptidylprolyl isomerase H (cyclophilin H)
  ENSP ID: ENSP00000402836
MKIELFADVVPKTAENFRQFCTGEFRKDGVPIGYKGSTFHRVIKDFMIQGGDFVNGDGTGVASIYRGPFADENFKLRHSAPGLLSMANSGPSTNGCQFFITCSKCDWLDGKHVVFGKIIDGLLVMRKIENVPTGPNNKPKLPVV

SEQ ID NO: 61906 - protein, 68 aa, Homo sapiens
  Payload ID: 12374
  Gene Symbol: PPIH
  Gene Name: peptidylprolyl isomerase H (cyclophilin H)
  ENSP ID: ENSP00000405493
MVNWKGLVLPAVTPSLFLFGYRKDGVPIGYKGSTFHRVIKDFMIQGGDFVNVSTIPFLSKTRSFSFCC

SEQ ID NO: 61907 - protein, 96 aa, Homo sapiens
  Payload ID: 12374
  Gene Symbol: PPIH
  Gene Name: peptidylprolyl isomerase H (cyclophilin H)
  ENSP ID: ENSP00000436091
GDGTGVASIYRGPFADENFKLRHSAPGLLSMANSGPSTNGCQFFITCSKCDWLDGKHVVFGKIIDGLLVMRKIENVPTGPNNKPKLPVVISQCGEM

SEQ ID NO: 61908 - protein, 182 aa, Homo sapiens
  Payload ID: 12375
  Gene Symbol: PTRH1
  Gene Name: peptidyl-tRNA hydrolase 1 homolog
  ENSP ID: ENSP00000418219
MRPGGFLGAGQRLSRAMSRCVLEPRPPGKRWMVAGLGNPGLPGTRHSVGMAVLGQLARRLGVAESWTRDRHCAADLALAPLGDAQLVLLRPRRLMNANGRSVARAAELFGLTAEEVYLVHDELDKPLGRLALKLGGSARQCQGCGWVSGARRTLRRFRPMCWAASPLLSRSCCLCCWIEPPT

SEQ ID NO: 61909 - protein, 214 aa, Homo sapiens
  Payload ID: 12375
  Gene Symbol: PTRH1
  Gene Name: peptidyl-tRNA hydrolase 1 homolog
  Uniprot ID: Q86Y79
  ENSP ID: ENSP00000418661
MRPGGFLGAGQRLSRAMSRCVLEPRPPGKRWMVAGLGNPGLPGTRHSVGMAVLGQLARRLGVAESWTRDRHCAADLALAPLGDAQLVLLRPRRLMNANGRSVARAAELFGLTAEEVYLVHDELDKPLGRLALKLGGSARGHNGVRSCISCLNSNAMPRLRVGIGRPAHPEAVQAHVLGCFSPAEQELLPLLLDRATDLILDHIRERSQGPSLGP

SEQ ID NO: 61910 - protein, 214 aa, Homo sapiens; identical to SEQ ID NO: 61909
  Payload ID: 12375
  Gene Symbol: PTRH1
  Gene Name: peptidyl-tRNA hydrolase 1 homolog
  Uniprot ID: Q86Y79
  ENSP ID: ENSP00000439469

SEQ ID NO: 61911 - protein, 172 aa, Homo sapiens
  Payload ID: 12375
  Gene Symbol: PTRH1
  Gene Name: peptidyl-tRNA hydrolase 1 homolog
  ENSP ID: ENSP00000485347
  MOD_RES (1)..(1): Any amino acid
XLSRAMSRCVLEPRPPGKRWMVAGLGNPGLPGTRHSVGMAVLGQLARRLGVAESWTRDRHCAADLALAPLGDAQLVLLRPRRLMNANGRSVARAAELFGLTAEEVYLVHDELDKPLGRLALKLGGSARGHNGVRSCISCLNSNELLPLLLDRATDLILDHIRERSQGPSLGP

SEQ ID NO: 61912 - protein, 137 aa, Homo sapiens
  Payload ID: 12375
  Gene Symbol: PTRH1
  Gene Name: peptidyl-tRNA hydrolase 1 homolog
  ENSP ID: ENSP00000485367
MRPGGFLGAGQRLSRAMSRCVLEPRPPGKRWMFPWCRPQVAGLGNPGLPGTRHSVGMAVLGQLARRLGVAESWTRDRHCAADLALAPLGDAQLVLLRPRRLMNANGRSVARAAELFGLTAEEVYLVHDELDKPLGRL

SEQ ID NO: 61913 - protein, 162 aa, Homo sapiens
  Payload ID: 12375
  Gene Symbol: PTRH1
  Gene Name: peptidyl-tRNA hydrolase 1 homolog
  ENSP ID: ENSP00000485479
  MOD_RES (1)..(1): Any amino acid
XGGFLGAGQRLSRAMSRCVLEPRPPGKRWMVAGLGNPGLPGTRHSVGMAVLGQLARRLGVAESWTRDRHCAADLALAPLGDAQLVLLRPRRLMNANGRSVARAGATMESVPALAASTPMQCQGCGWVSGARRTLRRFRPMCWAASPLLSRSCCLCCWIEPPT

SEQ ID NO: 61914 - protein, 179 aa, Homo sapiens
  Payload ID: 12376
  Gene Symbol: PTRH2
  Gene Name: peptidyl-tRNA hydrolase 2
  Uniprot ID: Q9Y3E5
  ENSP ID: ENSP00000376758
MPSKSLVMEYLAHPSTLGLAVGVACGMCLGWSLRVCFGMLPKSKTSKTHTDTESEASILGDSGEYKMILVVRNDLKMGKGKVAAQCSHAAVSAYKQIQRRNPEMLKQWEYCGQPKVVVKAPDEETLIALLAHAKMLGLTVSLIQDAGRTQIAPGSQTVLGIGPGPADLIDKVTGHLKLY

SEQ ID NO: 61915 - protein, 180 aa, Homo sapiens
  Payload ID: 12376
  Gene Symbol: PTRH2
  Gene Name: peptidyl-tRNA hydrolase 2
  ENSP ID: ENSP00000387180
MMPSKSLVMEYLAHPSTLGLAVGVACGMCLGWSLRVCFGMLPKSKTSKTHTDTESEASILGDSGEYKMILVVRNDLKMGKGKVAAQCSHAAVSAYKQIQRRNPEMLKQWEYCGQPKVVVKAPDEETLIALLAHAKMLGLTVSLIQDAGRTQIAPGSQTVLGIGPGPADLIDKVTGHLKLY

SEQ ID NO: 61916 - protein, 179 aa, Homo sapiens; identical to SEQ ID NO: 61914
  Payload ID: 12376
  Gene Symbol: PTRH2
  Gene Name: peptidyl-tRNA hydrolase 2
  Uniprot ID: Q9Y3E5
  ENSP ID: ENSP00000464327

SEQ ID NO: 61917 - protein, 140 aa, Homo sapiens
  Payload ID: 12377
  Gene Symbol: PTRHD1
  Gene Name: peptidyl-tRNA hydrolase domain containing 1
  Uniprot ID: Q6GMV3
  ENSP ID: ENSP00000330389
MHRGVGPAFRVVRKMAASGAEPQVLVQYLVLRKDLSQAPFSWPAGALVAQACHAATAALHTHRDHPHTAAYLQELGRMRKVVLEAPDETTLKELAETLQQKNIDHMLWLEQPENIATCIALRPYPKEEVGQYLKKFRLFK

SEQ ID NO: 61918 - protein, 555 aa, Homo sapiens
  Payload ID: 12378
  Gene Symbol: PRF1
  Gene Name: perforin 1 (pore forming protein)
  Uniprot ID: P14222
  ENSP ID: ENSP00000362305
MAARLLLLGILLLLLPLPVPAPCHTAARSECKRSHKFVPGAWLAGEGVDVTSLRRSGSFPVDTQRFLRPDGTCTLCENALQEGTLQRLPLALTNWRAQGSGCQRHVTRAKVSSTEAVARDAARSIRNDWKVGLDVTPKPTSNVHVSVAGSHSQAANFAAQKTHQDQYSFSTDTVECRFYSFHVVHTPPLHPDFKRALGDLPHHFNASTQPAYLRLISNYGTHFIRAVELGGRISALTALRTCELALEGLTDNEVEDCLTVEAQVNIGIHGSISAEAKACEEKKKKHKMTASFHQTYRERHSEVVGGHHTSINDLLFGIQAGPEQYSAWVNSLPGSPGLVDYTLEPLHVLLDSQDPRREALRRALSQYLTDRARWRDCSRPCPPGRQKSPRDPCQCVCHGSAVTTQDCCPRQRGLAQLEVTFIQAWGLWGDWFTATDAYVKLFFGGQELRTSTVWDNNNPIWSVRLDFGDVLLATGGPLRLQVWDQDSGRDDDLLGTCDQAPKSGSHEVRCNLNHGHLKFRYHARCLPHLGGGTCLDYVPQMLLGEPPGNRSGAVW

SEQ ID NO: 61919 - protein, 555 aa, Homo sapiens; identical to SEQ ID NO: 61918
  Payload ID: 12378
  Gene Symbol: PRF1
  Gene Name: perforin 1 (pore forming protein)
  Uniprot ID: P14222
  ENSP ID: ENSP00000398568

SEQ ID NO: 61920 - protein, 147 aa, Homo sapiens
  Payload ID: 12379
  Gene Symbol: PRX
  Gene Name: periaxin
  Uniprot ID: Q9BXM0
  ENSP ID: ENSP00000291825
MEARSRSAEELRRAELVEIIVETEAQTGVSGINVAGGGKEGIFVRELREDSPAARSLSLQEGDQLLSARVFFENFKYEDALRLLQCAEPYKVSFCLKRTVPTGDLALRPGTVSGYEIKGPRAKVAKLVRVLSPAPALDCPSDPVSAP

SEQ ID NO: 61921 - protein, 1461 aa, Homo sapiens
  Payload ID: 12379
  Gene Symbol: PRX
  Gene Name: periaxin
  Uniprot ID: Q9BXM0
  ENSP ID: ENSP00000326018
MEARSRSAEELRRAELVEIIVETEAQTGVSGINVAGGGKEGIFVRELREDSPAARSLSLQEGDQLLSARVFFENFKYEDALRLLQCAEPYKVSFCLKRTVPTGDLALRPGTVSGYEIKGPRAKVAKLNIQSLSPVKKKKMVPGALGVPADLAPVDVEFSFPKFSRLRRGLKAEAVKGPVPAAPARRRLQLPRLRVREVAEEAQAARLAAAAPPPRKAKVEAEVAAGARFTAPQVELVGPRLPGAEVGVPQVSAPKAAPSAEAAGGFALHLPTLGLGAPAPPAVEAPAVGIQVPQVELPALPSLPTLPTLPCLETREGAVSVVVPTLDVAAPTVGVDLALPGAEVEARGEAPEVALKMPRLSFPRFGARAKEVAEAKVAKVSPEARVKGPRLRMPTFGLSLLEPRPAAPEVVESKLKLPTIKMPSLGIGVSGPEVKVPKGPEVKLPKAPEVKLPKVPEAALPEVRLPEVELPKVSEMKLPKVPEMAVPEVRLPEVELPKVSEMKLPKVPEMAVPEVRLPEVQLLKVSEMKLPKVPEMAVPEVRLPEVQLPKVSEMKLPEVSEVAVPEVRLPEVQLPKVPEMKVPEMKLPKVPEMKLPEMKLPEVQLPKVPEMAVPDVHLPEVQLPKVPEMKLPEMKLPEVKLPKVPEMAVPDVHLPEVQLPKVPEMKLPKMPEMAVPEVRLPEVQLPKVSEMKLPKVPEMAVPDVHLPEVQLPKVCEMKVPDMKLPEIKLPKVPEMAVPDVHLPEVQLPKVSEIRLPEMQVPKVPDVHLPKAPEVKLPRAPEVQLKATKAEQAEGMEFGFKMPKMTMPKLGRAESPSRGKPGEAGAEVSGKLVTLPCLQPEVDGEAHVGVPSLTLPSVELDLPGALGLQGQVPAAKMGKGERVEGPEVAAGVREVGFRVPSVEIVTPQLPAVEIEEGRLEMIETKVKPSSKFSLPKFGLSGPKVAKAEAEGAGRATKLKVSKFAISLPKARVGAEAEAKGAGEAGLLPALDLSIPQLSLDAHLPSGKVEVAGADLKFKGPRFALPKFGVRGRDTEAAELVPGVAELEGKGWGWDGRVKMPKLKMPSFGLARGKEAEVQGDRASPGEKAESTAVQLKIPEVELVTLGAQEEGRAEGAVAVSGMQLSGLKVSTAGQVVTEGHDAGLRMPPLGISLPQVELTGFGEAGTPGQQAQSTVPSAEGTAGYRVQVPQVTLSLPGAQVAGGELLVGEGVFKMPTVTVPQLELDVGLSREAQAGEAATGEGGLRLKLPTLGARARVGGEGAEEQPPGAERTFCLSLPDVELSPSGGNHAEYQVAEGEGEAGHKLKVRLPRFGLVRAKEGAEEGEKAKSPKLRLPRVGFSQSEMVTGEGSPSPEEEEEEEEEGSGEGASGRRGRVRVRLPRVGLAAPSKASRGQEGDAAPKSPVREKSPKFRFPRVSLSPKARSGSGDQEEGGLRVRLPSVGFSETGAPGPARMEGAQAAAV

SEQ ID NO: 61922 - protein, 3336 aa, Homo sapiens
  Payload ID: 12380
  Gene Symbol: PCNT
  Gene Name: pericentrin
  Uniprot ID: O95613
  ENSP ID: ENSP00000352572
MEVEQEQRRRKVEAGRTKLAHFRQRKTKGDSSHSEKKTAKRKGSAVDASVQEESPVTKEDSALCGGGDICKSTSCDDTPDGAGGAFAAQPEDCDGEKREDLEQLQQKQVNDHPPEQCGMFTVSDHPPEQHGMFTVGDHPPEQRGMFTVSDHPPEQHGMFTVSDHPPEQRGMFTISDHQPEQRGMFTVSDHTPEQRGIFTISDHPAEQRGMFTKECEQECELAITDLESGREDEAGLHQSQAVHGLELEALRLSLSNMHTAQLELTQANLQKEKETALTELREMLNSRRAQELALLQSRQQHELELLREQHAREKEEVVLRCGQEAAELKEKLQSEMEKNAQIVKTLKEDWESEKDLCLENLRKELSAKHQSEMEDLQNQFQKELAEQRAELEKIFQDKNQAERALRNLESHHQAAIEKLREDLQSEHGRCLEDLEFKFKESEKEKQLELENLQASYEDLKAQSQEEIRRLWSQLDSARTSRQELSELHEQLLARTSRVEDLEQLKQREKTQHESELEQLRIYFEKKLRDAEKTYQEDLTLLQQRLQGAREDALLDSVEVGLSCVGLEEKPEKGRKDHVDELEPERHKESLPRFQAELEESHRHQLEALESPLCIQHEGHVSDRCCVETSALGHEWRLEPSEGHSQELPWVHLQGVQDGDLEADTERAARVLGLETEHKVQLSLLQTELKEEIELLKIENRNLYGKLQHETRLKDDLEKVKHNLIEDHQKELNNAKQKTELMKQEFQRKETDWKVMKEELQREAEEKLTLMLLELREKAESEKQTIINKFELREAEMRQLQDQQAAQILDLERSLTEQQGRLQQLEQDLTSDDALHCSQCGREPPTAQDGELAALHVKEDCALQLMLARSRFLEERKEITEKFSAEQDAFLQEAQEQHARELQLLQERHQQQLLSVTAELEARHQAALGELTASLESKQGALLAARVAELQTKHAADLGALETRHLSSLDSLESCYLSEFQTIREEHRQALELLRADFEEQLWKKDSLHQTILTQELEKLKRKHEGELQSVRDHLRTEVSTELAGTVAHELQGVHQGEFGSEKKTALHEKEETLRLQSAQAQPFHQEEKESLSLQLQKKNHQVQQLKDQVLSLSHEIEECRSELEVLQQRRERENREGANLLSMLKADVNLSHSERGALQDALRRLLGLFGETLRAAVTLRSRIGERVGLCLDDAGAGLALSTAPALEETWSDVALPELDRTLSECAEMSSVAEISSHMRESFLMSPESVRECEQPIRRVFQSLSLAVDGLMEMALDSSRQLEEARQIHSRFEKEFSFKNEETAQVVRKHQELLECLKEESAAKAELALELHKTQGTLEGFKVETADLKEVLAGKEDSEHRLVLELESLRRQLQQAAQEQAALREECTRLWSRGEATATDAEAREAALRKEVEDLTKEQSETRKQAEKDRSALLSQMKILESELEEQLSQHRGCAKQAEAVTALEQQVASLDKHLRNQRQFMDEQAAEREHEREEFQQEIQRLEGQLRQAAKPQPWGPRDSQQAPLDGEVELLQQKLREKLDEFNELAIQKESADRQVLMQEEEIKRLEEMNINIRKKVAQLQEEVEKQKNIVKGLEQDKEVLKKQQMSSLLLASTLQSTLDAGRCPEPPSGSPPEGPEIQLEVTQRALLRRESEVLDLKEQLEKMKGDLESKNEEILHLNLKLDMQNSQTAVSLRELEEENTSLKVIYTRSSEIEELKATIENLQENQKRLQKEKAEEIEQLHEVIEKLQHELSLMGPVVHEVSDSQAGSLQSELLCSQAGGPRGQALQGELEAALEAKEALSRLLADQERRHSQALEALQQRLQGAEEAAELQLAELERNVALREAEVEDMASRIQEFEAALKAKEATIAERNLEIDALNQRKAAHSAELEAVLLALARIRRALEQQPLAAGAAPPELQWLRAQCARLSRQLQVLHQRFLRCQVELDRRQARRATAHTRVPGAHPQPRMDGGAKAQVTGDVEASHDAALEPVVPDPQGDLQPVLVTLKDAPLCKQEGVMSVLTVCQRQLQSELLLVKNEMRLSLEDGGKGKEKVLEDCQLPKVDLVAQVKQLQEKLNRLLYSMTFQNVDAADTKSLWPMASAHLLESSWSDDSCDGEEPDISPHIDTCDANTATGGVTDVIKNQAIDACDANTTPGGVTDVIKNWDSLIPDEMPDSPIQEKSECQDMSLSSPTSVLGGSRHQSHTAEAGPRKSPVGMLDLSSWSSPEVLRKDWTLEPWPSLPVTPHSGALSLCSADTSLGDRADTSLPQTQGPGLLCSPGVSAAALALQWAESPPADDHHVQRTAVEKDVEDFITTSFDSQETLSSPPPGLEGKADRSEKSDGSGFGARLSPGSGGPEAQTAGPVTPASISGRFQPLPEAMKEKEVRPKHVKALLQMVRDESHQILALSEGLAPPSGEPHPPRKEDEIQDISLHGGKTQEVPTACPDWRGDLLQVVQEAFEKEQEMQGVELQPRLSGSDLGGHSSLLERLEKIIREQGDLQEKSLEHLRLPDRSSLLSEIQALRAQLRMTHLQNQEKLQHLRTALTSAEARGSQQEHQLRRQVELLAYKVEQEKCIAGDLQKTLSEEQEKANSVQKLLAAEQTVVRDLKSDLCESRQKSEQLSRSLCEVQQEVLQLRSMLSSKENELKAALQELESEQGKGRALQSQLEEEQLRHLQRESQSAKALEELRASLETQRAQSSRLCVALKHEQTAKDNLQKELRIEHSRCEALLAQERSQLSELQKDLAAEKSRTLELSEALRHERLLTEQLSQRTQEACVHQDTQAHHALLQKLKEEKSRVVDLQAMLEKVQQQALHSQQQLEAEAQKHCEALRREKEVSATLKSTVEALHTQKRELRCSLEREREKPAWLQAELEQSHPRLKEQEGRKAARRSAEARQSPAAAEQWRKWQRDKEKLRELELQRQRDLHKIKQLQQTVRDLESKDEVPGSRLHLGSARRAAGSDADHLREQQRELEAMRQRLLSAARLLTSFTSQAVDRTVNDWTSSNEKAVMSLLHTLEELKSDLSRPTSSQKKMAAELQFQFVDVLLKDNVSLTKALSTVTQEKLELSRAVSKLEKLLKHHLQKGCSPSRSERSAWKPDETAPQSSLRRPDPGRLPPAASEEAHTSNVKMEKLYLHYLRAESFRKALIYQKKYLLLLIGGFQDSEQETLSMIAHLGVFPSKAERKITSRPFTRFRTAVRVVIAILRLRFLVKKWQEVDRKGALAQGKAPRPGPRARQPQSPPRTRESPPTRDVPSGHTRDPARGRRLAAAASPHSGGRATPSPNSRLERSLTASQDPEHSLTEYIHHLEVIQQRLGGVLPDSTSKKSCHPMIKQ

SEQ ID NO: 61923 - protein, 228 aa, Homo sapiens
  Payload ID: 12380
  Gene Symbol: PCNT
  Gene Name: pericentrin
  ENSP ID: ENSP00000404708
  MOD_RES (1)..(1): Any amino acid
XELKSDLSRPTSSQKKMAAELQFQFVDVLLKDNVSLTKALSTVTQEKLELSRAVSKLEKLLKHHLQKGCSPSRSERSAWKPDETAPQSSLRRPDPGRLPPAASEEAHTSNVKMEKLYLHYLRAESFRKALIYQKKYLLLLIGGFQDSEQETLSMIAHLGVFPSKAERKITSRPFTRFRTAVRVVIAILRLRFLVKKWQEVDRKGALAQGKAPRPDSTSKKSCHPMIKQ

SEQ ID NO: 61924 - protein, 2024 aa, Homo sapiens
  Payload ID: 12381
  Gene Symbol: PCM1
  Gene Name: pericentriolar material 1
  Uniprot ID: Q15154
  ENSP ID: ENSP00000327077
MATGGGPFEDGMNDQDLPNWSNENVDDRLNNMDWGAQQKKANRSSEKNKKKFGVESDKRVTNDISPESSPGVGRRRTKTPHTFPHSRYMSQMSVPEQAELEKLKQRINFSDLDQRSIGSDSQGRATAANNKRQLSENRKPFNFLPMQINTNKSKDASTNPPNRETIGSAQCKELFASALSNDLLQNCQVSEEDGRGEPAMESSQIVSRLVQIRDYITKASSMREDLVEKNERSANVERLTHLIDHLKEQEKSYMKFLKKILARDPQQEPMEEIENLKKQHDLLKRMLQQQEQLRALQGRQAALLALQHKAEQAIAVMDDSVVAETAGSLSGVSITSELNEELNDLIQRFHNQLRDSQPPAVPDNRRQAESLSLTREVSQSRKPSASERLPDEKVELFSKMRVLQEKKQKMDKLLGELHTLRDQHLNNSSSSPQRSVDQRSTSAPSASVGLAPVVNGESNSLTSSVPYPTASLVSQNESENEGHLNPSEKLQKLNEVRKRLNELRELVHYYEQTSDMMTDAVNENRKDEETEESEYDSEHENSEPVTNIRNPQVASTWNEVNSHSNAQCVSNNRDGRTVNSNCEINNRSAANIRALNMPPSLDCRYNREGEQEIHVAQGEDDEEEEEEAEEEGVSGASLSSHRSSLVDEHPEDAEFEQKINRLMAAKQKLRQLQDLVAMVQDDDAAQGVISASASNLDDFYPAEEDTKQNSNNTRGNANKTQKDTGVNEKAREKFYEAKLQQQQRELKQLQEERKKLIDIQEKIQALQTACPDLQLSAASVGNCPTKKYMPAVTSTPTVNQHETSTSKSVFEPEDSSIVDNELWSEMRRHEMLREELRQRRKQLEALMAEHQRRQGLAETASPVAVSLRSDGSENLCTPQQSRTEKTMATWGGSTQCALDEEGDEDGYLSEGIVRTDEEEEEEQDASSNDNFSVCPSNSVNHNSYNGKETKNRWKNNCPFSADENYRPLAKTRQQNISMQRQENLRWVSELSYVEEKEQWQEQINQLKKQLDFSVSICQTLMQDQQTLSCLLQTLLTGPYSVMPSNVASPQVHFIMHQLNQCYTQLTWQQNNVQRLKQMLNELMRQQNQHPEKPGGKERGSSASHPPSPSLFCPFSFPTQPVNLFNIPGFTNFSSFAPGMNFSPLFPSNFGDFSQNISTPSEQQQPLAQNSSGKTEYMAFPKPFESSSSIGAEKPRNKKLPEEEVESSRTPWLYEQEGEVEKPFIKTGFSVSVEKSTSSNRKNQLDTNGRRRQFDEESLESFSSMPDPVDPTTVTKTFKTRKASAQASLASKDKTPKSKSKKRNSTQLKSRVKNIRYESASMSSTCEPCKSRNRHSAQTEEPVQAKVFSRKNHEQLEKIIKCNRSTEISSETGSDFSMFEALRDTIYSEVATLISQNESRPHFLIELFHELQLLNTDYLRQRALYALQDIVSRHISESHEKGENVKSVNSGTWIASNSELTPSESLATTDDETFEKNFERETHKISEQNDADNASVLSVSSNFEPFATDDLGNTVIHLDQALARMREYERMKTEAESNSNMRCTCRIIEDGDGAGAGTTVNNLEETPVIENRSSQQPVSEVSTIPCPRIDTQQLDRQIKAIMKEVIPFLKEHMDEVCSSQLLTSVRRMVLTLTQQNDESKEFVKFFHKQLGSILQDSLAKFAGRKLKDCGEDLLVEISEVLFNELAFFKLMQDLDNNSITVKQRCKRKIEATGVIQSCAKEAKRILEDHGSPAGEIDDEDKDKDETETVKQTQTSEVYDGPKNVRSDISDQEEDEESEGCPVSINLSKAETQALTNYGSGEDENEDEEMEEFEEGPVDVQTSLQANTEATEENEHDEQVLQRDFKKTAESKNVPLEREATSKNDQNNCPVKPCYLNILEDEQPLNSAAHKESPPTVDSTQQPNPLPLRLPEMEPLVPRVKEVKSAQETPESSLAGSPDTESPVLVNDYEAESGNISQKSDEEDFVKVEDLPLKLTIYSEADLRKKMVEEEQKNHLSGEICEMQTEELAGNSETLKEPETVGAQSI

SEQ ID NO: 61925 - protein, 1860 aa, Homo sapiens
  Payload ID: 12381
  Gene Symbol: PCM1
  Gene Name: pericentriolar material 1
  ENSP ID: ENSP00000328332
MATGGGPFEDGMNDQDLPNWSNENVDDRLNNMDWGAQQKKANRSSEKNKKKFGVESDKRVTNDISPESSPGVGRRRTKTPHTFPHSRYMSQMSVPEQAELEKLKQRINFSDLDQRSIGSDSQGRATAANNKRQLSENRKPFNFLPMQINTNKSKDASTNPPNRETIGSAQCKELFASALSNDLLQNCQVSEEDGRGEPAMESSQIVSRLVQIRDYITKASSMREDLVEKNERSANVERLTHLIDHLKEQEKSYMKFLKKILARDPQQEPMEEIENLKKQHDLLKRMLQQQEQLRALQGRQAALLALQHKAEQAIAVMDDSVVAETAGSLSGVSITSELNEELNDLIQRFHNQLRDSQPPAVPDNRRQAESLSLTREVSQSRKPSASERLPDEKVELFSKMRVLQEKKQKMDKLLGELHTLRDQHLNNSSSSPQRSVDQRSTSAPSASVGLAPVVNGESNSLTSSVPYPTASLVSQNESENEGHLNPSEKLQKLNEVRKRLNELRELVHYYEQTSDMMTDAVNENRKDEETEESEYDSEHENSEPVTNIRNPQVASTWNEVNSHSNAQCVSNNRDGRTVNSNCEINNRSAANIRALNMPPSLADCRYNREGEQEIHVAQGEDDEEEEEEAEEEGVSGASLSSHRSSLVDEHPEDAEFEQKINRLMAAKQKLRQLQDLVAMVQDDDAAQGVISASASNLDDFYPAEEDTKQNSNNTRGNANKTQKDTGVNEKAREKFYEAKLQQQQRELKQLQEERKKLIDIQEKIQALQTACPDLQLSAASVGNCPTKKYMPAVTSTPTVNQHETSTSKSVFEPEDSSIVDNELWSEMRRHEMLREELRQRRKQLEALMAEHQRRQGLAETASPVAVSLRSDGSENLCTPQQSRTEKTMATWGGSTQCALDEEGDEDGYLSEGIVRTDEEEEEEQDASSNDNFSVCPSNSVNHNSYNGKETKNRWKNNCPFSADENYRPLAKTRQQNISMQRQENLRWVSELSYVEEKEQWQEQINQLKKQLDFSVSICQTLMQDQQTLSCLLQTLLTGPYSVMPSNVASPQVHFIMHQLNQCYTQLTWQQNNVQRLKQMLNELMRQQNQHPEKPGGKERGSSASHPPSPSLFCPFSFPTQPVNLFNIPGFTNFSSFAPGMNFSPLFPSNFGDFSQNISTPSEQQQPLAQNSSGKTEYMAFPKPFESSSSIGAEKPRNKKLPEEEVESSRTPWLYEQEGEVEKPFIKTGFSVSVEKSTSSNRKNQLDTNGRRRQFDEESLESFSSMPDPVDPTTVTKTFKTRKASAQASLASKDKTPKSKSKKRNSTQLKSRVKNIKTGSDFSMFEALRDTIYSEVATLISQNESRPHFLIELFHELQLLNTDYLRQRALYALQDIVSRHISESHEKGENVKSVNSGTWIASNSELTPSESLATTDDETFEKNFERETHKISEQNDADNASVLSVSSNFEPFATDDLGNTVIHLDQALARMREYERMKTEAESNSNMRCTCRIIEDGDGAGAGTTVNNLEETPVIENRSSQQPVSEVSTIPCPRIDTQQLDRQIKAIMKEVIPFLKEHMDEVCSSQLLTSVRRMVLTLTQQNDESKEFVKFFHKQLGSILQDSLAKFAGRKLKDCGEDLLVEISEVLFNELAFFKLMQDLDNNSITVKQRCKRKIEATGVIQSCAKEAKRILEDHGSPAGEIDDEDKDKDETETVKQTQTSEVYDGPKNVRSDISDQEEDEESEGCPVSINLSKAETQALTNYGSGEDENEDEEMEEFEEGPVDVQTSLQANTEATEENEHDEQEAESGNISQKSDEEDFVKVEDLPLKLTIYSEADLRKKMVEEEQKNHLSGEICEMQTEELAGNSETLKEPETVGAQSI

SEQ ID NO: 61926 - protein, 530 aa, Homo sapiens
  Payload ID: 12381
  Gene Symbol: PCM1
  Gene Name: pericentriolar material 1
  ENSP ID: ENSP00000428123
MATGGGPFEDGMNDQDLPNWSNENVDDRLNNMDWGAQQKKANRSSEKNKKKFGVESDKRVTNDISPESSPGVGRRRTKTPHTFPHSRYMSQMSVPEQAELEKLKQRINFSDLDQRSIGSDSQGRATAANNKRQLSENRKPFNFLPMQINTNKSKDASTNPPNRETIGSAQCKELFASALSNDLLQNCQVSEEDGRGEPAMESSQIVSRLVQIRDYITKASSMREDLVEKNERSANVERLTHLIDHLKEQEKSYMKFLKKILARENEEEDVRTIDSAVGSGSVAESTSLNIDVQSEASDTTARDPQQEPMEEIENLKKQHDLLKRMLQQQEQLRALQGRQAALLALQHKAEQAIAVMDDSVVAETAGSLSGVSITSELNEELNDLIQRFHNQLRDSQPPAVPDNRRQAESLSLTREVSQSRKPSASERLPDEKVELFSKMRVLQEKKQKMDKLLGELHTLRDQHLNNSSSSPQRSVDQRSTSAPSASVGLAPVVNGESNSLTSSVPYPTASLVSQNESENEGHLNPSEKLQ

SEQ ID NO: 61927 - protein, 749 aa, Homo sapiens
  Payload ID: 12381
  Gene Symbol: PCM1
  Gene Name: pericentriolar material 1
  ENSP ID: ENSP00000428131
MATGGGPFEDGMNDQDLPNWSNENVDDRLNNMDWGAQQKKANRSSEKNKKKFGVESDKRVTNDISPESSPGVGRRRTKTPHTFPHSRYMSQMSVPEQAELEKLKQRINFSDLDQRSIGSDSQGRATAANNKRQLSENRKPFNFLPMQINTNKSKDASTNPPNRETIGSAQCKELFASALSNDLLQNCQVSEEDGRGEPAMESSQIVSRLVQIRDYITKASSMREDLVEKNERSANVERLTHLIDHLKEQEKSYMKFLKKILARENEEEDVRTIDSAVGSGSVAESTSLNIDVQSEASDTTARDPQQEPMEEIENLKKQHDLLKRMLQQQEQLRALQGRQAALLALQHKAEQAIAVMDDSVVAETAGSLSGVSITSELNEELNDLIQRFHNQLRDSQPPAVPDNRRQAESLSLTREVSQSRKPSASERLPDEKVELFSKMRVLQEKKQKMDKLLGELHTLRDQHLNNSSSSPQRSVDQRSTSAPSASVGLAPVVNGESNSLTSSVPYPTASLVSQNESENEGHLNPSEKLQKLNEVRKRLNELRELVHYYEQTSDMMTDAVNENRKDEETEESEYDSEHENSEPVTNIRNPQVASTWNEVNSHSNAQCVSNNRDGRTVNSNCEINNRSAANIRALNMPPSLDCRYNREGEQEIHVAQGEDDEEEEEEAEEEGVSGASLSSHRSSLVDEHPEDAEFEQKINRLMAAKQKLRQLQDLVAMVQDDDAAQGVISASASNLDDFYPAEEDTKQNS

SEQ ID NO: 61928 - protein, 764 aa, Homo sapiens
  Payload ID: 12381
  Gene Symbol: PCM1
  Gene Name: pericentriolar material 1
  ENSP ID: ENSP00000429054
  MOD_RES (1)..(1): Any amino acid
XKASAQASLASKDKTPKSKSKKRNSTQLKSRVKNIRYESASMSSTCEPCKSRNRHSAQTEEPVQAKVFSRKNHEQLEKIIKCNRSTEISSAHARRILQQSNRNACNEAPETGSDFSMFEALRDTIYSEVATLISQNESRPHFLIELFHELQLLNTDYLRQRALYALQDIVSRHISESHEKGENVKSVNSGTWIASNSELTPSESLATTDDETFEKNFERETHKISEQNDADNASVLSVSSNFEPFATDDLGNTVIHLDQALARMREYERMKTEAESNSNMRCTCRIIEDGDGAGAGTTVNNLEETPVIENRSSQQPVSEVSTIPCPRIDTQQLDRQIKAIMKEVIPFLKEHMDEVCSSQLLTSVRRMVLTLTQQNDESKEFVKFFHKQLGSILQDSLAKFAGRKLKDCGEDLLVEISEVLFNELAFFKLMQDLDNNSITVKQRCKRKIEATGVIQSCAKEAKRILEDHGSPAGEIDDEDKDKDETETVKQTQTSEVYDGPKNVRSDISDQEEDEESEGCPVSINLSKAETQALTNYGSGEDENEDEEMEEFEEGPVDVQTSLQANTEATEENEHDEQVLQRDFKKTAESKNVPLEREATSKNDQNNCPVKPCYLNILEDEQPLNSAAHKESPPTVDSTQQPNPLPLRLPEMEPLVPRVKEVKSAQETPESSLAGSPDTESPVLVNDYEAESGNISQKSDEEDFVKVEDLPLKLTIYSEADLRKKMVEEEQKNHLSGEICEMQTEELAGNSETLKEPETVGAQSI

SEQ ID NO: 61929 - protein, 408 aa, Homo sapiens
  Payload ID: 12381
  Gene Symbol: PCM1
  Gene Name: pericentriolar material 1
  ENSP ID: ENSP00000429941
MATGGGPFEDGMNDQDLPNWSNENVDDRLNNMDWGAQQKKANRSSEKNKKKFGVESDKRVTNDISPESSPGVGRRRTKTPHTFPHSRYMSQMSVPEQAELEKLKQRINFSDLDQRSIGSDSQGRATAANNKRQLSENRKPFNFLPMQINTNKSKDASTNPPNRETIGSAQCKELFASALSNDLLQNCQVSEEDGRGEPAMESSQIVSRLVQIRDYITKASSMREDLVEKNERSANVERLTHLIDHLKEQEKSYMKFLKKILARDPQQEPMEEIENLKKQHDLLKRMLQQQEQLRALQGRQAALLALQHKAEQAIAVMDDSVVAETAGSLSGVSITSELNEELNDLIQRFHNQLRDSQPPAVPDNRRQAESLSLTREVSQSRKPSASERLPDEKVELFSKMRVLQEKKQ

SEQ ID NO: 61930 - protein, 1860 aa, Homo sapiens; identical to SEQ ID NO: 61925
  Payload ID: 12381
  Gene Symbol: PCM1
  Gene Name: pericentriolar material 1
  ENSP ID: ENSP00000430521

SEQ ID NO: 61931 - protein, 2016 aa, Homo sapiens
  Payload ID: 12381
  Gene Symbol: PCM1
  Gene Name: pericentriolar material 1
  ENSP ID: ENSP00000431099
MATGGGPFEDGMNDQDLPNWSNENVDDRLNNMDWGAQQKKANRSSEKNKKKFGVESDKRVTNDISPESSPGVGRRRTKTPHTFPHSRYMSQMSVPEQAELEKLKQRINFSDLDQRSIGSDSQGRATAANNKRQLSENRKPFNFLPMQINTNKSKDASTNPPNRETIGSAQCKELFASALSNDLLQNCQVSEEDGRGEPAMESSQIVSRLVQIRDYITKASSMREDLVEKNERSANVERLTHLIDHLKEQEKSYMKFLKKILARDPQQEPMEEIENLKKQHDLLKRMLQQQEQLRALQGRQAALLALQHKAEQAIAVMDDSVVAETAGSLSGVSITSELNEELNDLIQRFHNQLRDSQPPAVPDNRRQAESLSLTREVSQSRKPSASERLPDEKVELFSKMRVLQEKKQKMDKLLGELHTLRDQHLNNSSSSPQRSVDQRSTSAPSASVGLAPVVNGESNSLTSSVPYPTASLVSQNESENEGHLNPSEKLQKLNEVRKRLNELRELVHYYEQTSDMMTDAVNENRKDEETEESEYDSEHENSEPVTNIRNPQVASTWNEVNSHSNAQCVSNNRDGRTVNSNCEINNRSAANIRALNMPPSLDCRYNREGEQEIHVAQGEDDEEEEEEAEEEGVSGASLSSHRSSLVDEHPEDAEFEQKINRLMAAKQKLRQLQDLVAMVQDDDAAQGVISASASNLDDFYPAEEDTKQNSNNTRGNANKTQKDTGVNEKAREKFYEAKLQQQQRELKQLQEERKKLIDIQEKIQALQTACPDLQLSAASVGNCPTKKYMPAVTSTPTVNQHETSTSKSVFEPEDSSIVDNELWSEMRRHEMLREELRQRRKQLEALMAEHQRRQGLAETASPVAVSLRSDGSENLCTPQQSRTEKTMATWGGSTQCALDEEGDEDGYLSEGIVRTDEEEEEEQDASSNDNFSVCPSNSVNHNSYNGKETKNRWKNNCPFSADENYRPLAKTRQQNISMQRQENLRWVSELSYVEEKEQWQEQINQLKKQLDFSVSICQTLMQDQQTLSCLLQTLLTGPYSVMPSNVASPQVHFIMHQLNQCYTQLTWQQNNVQRLKQMLNELMRQQNQHPEKPGGKERGSSASHPPSPSLFCPFSFPTQPVNLFNIPGFTNFSSFAPGMNFSPLFPSNFGDFSQNISTPSEQQQPLAQNSSGKTEYMAFPKPFESSSSIGAEKPRNKKLPEEEVESSRTPWLYEQEGEVEKPFIKTGFSVSVEKSTSSNRKNQLDTNGRRRQFDEESLESFSSMPDPVDPTTVTKTFKTRKASAQASLASKDKTPKSKSKKRNSTQLKSRVKNIRYESASMSSTCEPCKSRNRHSAQTEEPVQAKVFSRKNHEQLEKIIKCNRSTEISSETGSDFSMFEALRDTIYSEVATLISQNESRPHFLIELFHELQLLNTDYLRQRALYALQDIVSRHISESHEKGENVKSVNSGTWIASNSELTPSESLATTDDETFEKNFERETHKISEQNDADNASVLSVSSNFEPFATDDLGNTVIHLDQALARMREYERMKTEAESNSNMRCTCRIIEDGDGAGAETPVIENRSSQQPVSEVSTIPCPRIDTQQLDRQIKAIMKEVIPFLKEHMDEVCSSQLLTSVRRMVLTLTQQNDESKEFVKFFHKQLGSILQDSLAKFAGRKLKDCGEDLLVEISEVLFNELAFFKLMQDLDNNSITVKQRCKRKIEATGVIQSCAKEAKRILEDHGSPAGEIDDEDKDKDETETVKQTQTSEVYDGPKNVRSDISDQEEDEESEGCPVSINLSKAETQALTNYGSGEDENEDEEMEEFEEGPVDVQTSLQANTEATEENEHDEQVLQRDFKKTAESKNVPLEREATSKNDQNNCPVKPCYLNILEDEQPLNSAAHKESPPTVDSTQQPNPLPLRLPEMEPLVPRVKEVKSAQETPESSLAGSPDTESPVLVNDYEAESGNISQKSDEEDFVKVEDLPLKLTIYSEADLRKKMVEEEQKNHLSGEICEMQTEELAGNSETLKEPETVGAQSI

SEQ ID NO: 61932 - protein, 522 aa, Homo sapiens
  Payload ID: 12382
  Gene Symbol: PLIN1
  Gene Name: perilipin 1
  Uniprot ID: O60240
  ENSP ID: ENSP00000300055
MAVNKGLTLLDGDLPEQENVLQRVLQLPVVSGTCECFQKTYTSTKEAHPLVASVCNAYEKGVQSASSLAAWSMEPVVRRLSTQFTAANELACRGLDHLEEKIPALQYPPEKIASELKDTISTRLRSARNSISVPIASTSDKVLGAALAGCELAWGVARDTAEFAANTRAGRLASGGADLALGSIEKVVEYLLPPDKEESAPAPGHQQAQKSPKAKPSLLSRVGALTNTLSRYTVQTMARALEQGHTVAMWIPGVVPLSSLAQWGASVAMQAVSRRRSEVRVPWLHSLAAAQEEDHEDQTDTEGEDTEEEEELETEENKFSEVAALPGPRGLLGGVAHTLQKTLQTTISAVTWAPAAVLGMAGRVLHLTPAPAVSSTKGRAMSLSDALKGVTDNVVDTVVHYVPLPRLSLMEPESEFRDIDNPPAEVERREAERRASGAPSAGPEPAPRLAQPRRSLRSAQSPGAPPGPGLEDEVATPAAPRPGFPAVPREKPKRRVSDSFFRPSVMEPILGRTHYSQLRKKS

SEQ ID NO: 61933 - protein, 522 aa, Homo sapiens; identical to SEQ ID NO: 61932
  Payload ID: 12382
  Gene Symbol: PLIN1
  Gene Name: perilipin 1
  Uniprot ID: O60240
  ENSP ID: ENSP00000402167

SEQ ID NO: 61934 - protein, 73 aa, Homo sapiens
  Payload ID: 12382
  Gene Symbol: PLIN1
  Gene Name: perilipin 1
  ENSP ID: ENSP00000453426
EEELETEENKFSEVAALPGPRGLLGGVAHTLQKTLQTTISALLAHSHISICIITAFTCIVTLLMLGNQNGDDI

SEQ ID NO: 61935 - protein, 437 aa, Homo sapiens
  Payload ID: 12383
  Gene Symbol: PLIN2
  Gene Name: perilipin 2
  Uniprot ID: Q99541
  ENSP ID: ENSP00000276914
MASVAVDPQPSVVTRVVNLPLVSSTYDLMSSAYLSTKDQYPYLKSVCEMAENGVKTITSVAMTSALPIIQKLEPQIAVANTYACKGLDRIEERLPILNQPSTQIVANAKGAVTGAKDAVTTTVTGAKDSVASTITGVMDKTKGAVTGSVEKTKSVVSGSINTVLGSRMMQLVSSGVENALTKSELLVEQYLPLTEEELEKEAKKVEGFDLVQKPSYYVRLGSLSTKLHSRAYQQALSRVKEAKQKSQQTISQLHSTVHLIEFARKNVYSANQKIQDAQDKLYLSWVEWKRSIGYDDTDESHCAEHIESRTLAIARNLTQQLQTTCHTLLSNIQGVPQNIQDQAKHMGVMAGDIYSVFRNAASFKEVSDSLLTSSKGQLQKMKESLDDVMDYLVNNTPLNWLVGPFYPQLTESQNAQDQGAEMDKSSQETQRSEHKTH

SEQ ID NO: 61936 - protein, 110 aa, Homo sapiens
  Payload ID: 12383
  Gene Symbol: PLIN2
  Gene Name: perilipin 2
  ENSP ID: ENSP00000369831
MASVAVDPQPSVVTRVVNLPLVSSTYDLMSSAYLSTKDQYPYLKSVCEMAENGVKTITSVAMTSALPIIQKLEPQIAVANTYACKGLDRIEERLPILNQPSTQVSLGQKC

SEQ ID NO: 61937 - protein, 126 aa, Homo sapiens
  Payload ID: 12383
  Gene Symbol: PLIN2
  Gene Name: perilipin 2
  ENSP ID: ENSP00000369832
MASVAVDPQPSVVTRVVNLPLVSSTYDLMSSAYLSTKDQYPYLKSVCEMAENGVKTITSVAMTSALPIIQKLEPQIAVANTYACKGLDRIEERLPILNQPSTQANTCFPNLDLDVCLKNNGHFLTS

SEQ ID NO: 61938 - protein, 125 aa, Homo sapiens
  Payload ID: 12383
  Gene Symbol: PLIN2
  Gene Name: perilipin 2
  ENSP ID: ENSP00000403421
MASVAVDPQPSVVTRVVNLPLVSSTYDLMSSAYLSTKDQYPYLKSVCEMAENGVKTITSVAMTSALPIIQKLEPQIAVANTYACKGLDRIEERLPILNQPSTQIVANAKGAVTGAKDAVTTTVTG

SEQ ID NO: 61939 - protein, 434 aa, Homo sapiens
  Payload ID: 12384
  Gene Symbol: PLIN3
  Gene Name: perilipin 3
  Uniprot ID: O60664
  ENSP ID: ENSP00000221957
MSADGAEADGSTQVTVEEPVQQPSVVDRVASMPLISSTCDMVSAAYASTKESYPHIKTVCDAAEKGVRTLTAAAVSGAQPILSKLEPQIASASEYAHRGLDKLEENLPILQQPTEKVLADTKELVSSKVSGAQEMVSSAKDTVATQLSEAVDATRGAVQSGVDKTKSVVTGGVQSVMGSRLGQMVLSGVDTVLGKSEEWADNHLPLTDAELARIATSLDGFDVASVQQQRQEQSYFVRLGSLSERLRQHAYEHSLGKLRATKQRAQEALLQLSQVLSLMETVKQGVDQKLVEGQEKLHQMWLSWNQKQLQGPEKEPPKPEQVESRALTMFRDIAQQLQATCTSLGSSIQGLPTNVKDQVQQARRQVEDLQATFSSIHSFQDLSSSILAQSRERVASAREALDHMVEYVAQNTPVTWLVGPFAPGITEKAPEEKK

SEQ ID NO: 61940 - protein, 35 aa, Homo sapiens
  Payload ID: 12384
  Gene Symbol: PLIN3
  Gene Name: perilipin 3
  ENSP ID: ENSP00000465117
MSADGAEADGSTQVTVEEPVQQPSVVDRVASMPLI

SEQ ID NO: 61941 - protein, 433 aa, Homo sapiens
  Payload ID: 12384
  Gene Symbol: PLIN3
  Gene Name: perilipin 3
  Uniprot ID: O60664
  ENSP ID: ENSP00000465596
MSADGAEADGSTQVTVEEPVQQPSVVDRVASMPLISSTCDMVSAAYASTKESYPHIKTVCDAAEKGVRTLTAAAVSGAQPILSKLEPQIASASEYAHRGLDKLEENLPILQQPTEKVLADTKELVSSKVSGAQEMVSSAKDTVATQLSEAVDATRGAVQSGVDKTKSVVTGGVQSVMGSRLGQMVLSGVDTVLGKSEEWADNHLPLTDAELARIATSLDGFDVASVQQQRQEQSYFVRLGSLSERLRQHAYEHSLGKLRATKQRAQEALLQLSQVLSLMETVKQGVDQKLVEGQEKLHQMWLSWNQKQLQGPEKEPPKPEVESRALTMFRDIAQQLQATCTSLGSSIQGLPTNVKDQVQQARRQVEDLQATFSSIHSFQDLSSSILAQSRERVASAREALDHMVEYVAQNTPVTWLVGPFAPGITEKAPEEKK

SEQ ID NO: 61942 - protein, 172 aa, Homo sapiens
  Payload ID: 12384
  Gene Symbol: PLIN3
  Gene Name: perilipin 3
  ENSP ID: ENSP00000465975
MPLISSTCDMVSAAYASTKESYPHIKTVCDAAEKGVRTLTAAAVSGAQPILSKLEPQIASASEYAHRGLDKLEENLPILQQPTEKVLADTKELVSSKVSGAQEMVSSAKDTVATQLSEAVDATRGAVQSGVDKTKSVVTGGVQSVMGSRLGQMVLSGVDTVLGKSEEWADNH

SEQ ID NO: 61943 - protein, 422 aa, Homo sapiens
  Payload ID: 12384
  Gene Symbol: PLIN3
  Gene Name: perilipin 3
  Uniprot ID: O60664
  ENSP ID: ENSP00000467803
MSADGAEADGSTQVTVEEPVQQPSVVDRVASMPLISSTCDMVSAAYASTKESYPHIKTVCDAAEKGVRTLTAAAVSGAQPILSKLEPQIASASEYAHRGLDKLEENLPILQQPTEKVSGAQEMVSSAKDTVATQLSEAVDATRGAVQSGVDKTKSVVTGGVQSVMGSRLGQMVLSGVDTVLGKSEEWADNHLPLTDAELARIATSLDGFDVASVQQQRQEQSYFVRLGSLSERLRQHAYEHSLGKLRATKQRAQEALLQLSQVLSLMETVKQGVDQKLVEGQEKLHQMWLSWNQKQLQGPEKEPPKPEQVESRALTMFRDIAQQLQATCTSLGSSIQGLPTNVKDQVQQARRQVEDLQATFSSIHSFQDLSSSILAQSRERVASAREALDHMVEYVAQNTPVTWLVGPFAPGITEKAPEEKK

SEQ ID NO: 61944 - protein, 168 aa, Homo sapiens
  Payload ID: 12384
  Gene Symbol: PLIN3
  Gene Name: perilipin 3
  ENSP ID: ENSP00000468096
MAGSGLELPFWSQRQASAAETMSADGAEADGSTQVTVEEPVQQPSVVDRVASMPLISSTCDMVSAAYASTKESYPHIKTVCDAAEKGVRTLTAAAVSGAQPILSKLEPQIASASEYAHRGLDKLEENLPILQQPTEKVLADTKELVSSKVSGAQEMVSSAKDTVATQL

SEQ ID NO: 61945 - protein, 292 aa, Homo sapiens
  Payload ID: 12384
  Gene Symbol: PLIN3
  Gene Name: perilipin 3
  ENSP ID: ENSP00000468476
  MOD_RES (1)..(1): Any amino acid
XKLEENLPILQQPTEKVLADTKELVSSKVSGAQEMVSSAKDTVATQLSEAVDATRGAVQSGVDKTKSVVTGGVQSVMGSRLGQMVLSGVDTVLGKSEEWADNHLPLTDAELARIATSLDGFDVASVQQQRQEQSYFMETVKQGVDQKLVEGQEKLHQMWLSWNQKQLQGPEKEPPKPEQVESRALTMFRDIAQQLQATCTSLGSSIQGLPTNVKDQVQQARRQVEDLQATFSSIHSFQDLSSSILAQSRERVASAREALDHMVEYVAQNTPVTWLVGPFAPGITEKAPEEKK

SEQ ID NO: 61946 - protein, 1357 aa, Homo sapiens
  Payload ID: 12385
  Gene Symbol: PLIN4
  Gene Name: perilipin 4
  Uniprot ID: Q96Q06
  ENSP ID: ENSP00000301286
MQTLGSFFGSLPGFSSARNLVANAHSSARARPAADPTGAPAAEAAQPQAQVAAHPEQTAPWTEKELQPSEKQMVSGAKDLVCSKMSRAKDAVSSGVASVVDVAKGVVQGGLDTTRSALTGTKEVVSSGVTGAMDMAKGAVQGGLDTSKAVLTGTKDTVSTGLTGAVNVAKGTVQAGVDTTKTVLTGTKDTVTTGVMGAVNLAKGTVQTGVETSKAVLTGTKDAVSTGLTGAVNVARGSIQTGVDTSKTVLTGTKDTVCSGVTGAMNVAKGTIQTGVDTSKTVLTGTKDTVCSGVTGAMNVAKGTIQTGVDTSKTVLTGTKDTVCSGVTGAMNVAKGTIQTGVDTTKTVLTGTKNTVCSGVTGAVNLAKEAIQGGLDTTKSMVMGTKDTMSTGLTGAANVAKGAMQTGLNTTQNIATGTKDTVCSGVTGAMNLARGTIQTGVDTTKIVLTGTKDTVCSGVTGAANVAKGAVQGGLDTTKSVLTGTKDAVSTGLTGAVNVAKGTVQTGVDTTKTVLTGTKDTVCSGVTSAVNVAKGAVQGGLDTTKSVVIGTKDTMSTGLTGAANVAKGAVQTGVDTAKTVLTGTKDTVTTGLVGAVNVAKGTVQTGMDTTKTVLTGTKDTIYSGVTSAVNVAKGAVQTGLKTTQNIATGTKNTFGSGVTSAVNVAKGAAQTGVDTAKTVLTGTKDTVTTGLMGAVNVAKGTVQTSVDTTKTVLTGTKDTVCSGVTGAANVAKGAIQGGLDTTKSVLTGTKDAVSTGLTGAVKLAKGTVQTGMDTTKTVLTGTKDAVCSGVTGAANVAKGAVQMGVDTAKTVLTGTKDTVCSGVTGAANVAKGAVQTGLKTTQNIATGTKNTLGSGVTGAAKVAKGAVQGGLDTTKSVLTGTKDAVSTGLTGAVNLAKGTVQTGVDTSKTVLTGTKDTVCSGVTGAVNVAKGTVQTGVDTAKTVLSGAKDAVTTGVTGAVNVAKGTVQTGVDASKAVLMGTKDTVFSGVTGAMSMAKGAVQGGLDTTKTVLTGTKDAVSAGLMGSGNVATGATHTGLSTFQNWLPSTPATSWGGLTSSRTTDNGGEQTALSPQEAPFSGISTPPDVLSVGPEPAWEAAATTKGLATDVATFTQGAAPGREDTGLLATTHGPEEAPRLAMLQNELEGLGDIFHPMNAEEQAQLAASQPGPKVLSAEQGSYFVRLGDLGPSFRQRAFEHAVSHLQHGQFQARDTLAQLQDCFRLIEKAQQAPEGQPRLDQGSGASAEDAAVQEERDAGVLSRVCGLLRQLHTAYSGLVSSLQGLPAELQQPVGRARHSLCELYGIVASAGSVEELPAERLVQSREGVHQAWQGLEQLLEGLQHNPPLSWLVGPFALPAGGQ

SEQ ID NO: 61947 - protein, 1372 aa, Homo sapiens
  Payload ID: 12385
  Gene Symbol: PLIN4
  Gene Name: perilipin 4
  ENSP ID: ENSP00000488481
MSAPDEGRRDPPKPKGKTLGSFFGSLPGFSSARNLVANAHSSARARPAADPTGAPAAEAAQPQAQVAAHPEQTAPWTEKELQPSEKQMVSGAKDLVCSKMSRAKDAVSSGVASVVDVAKGVVQGGLDTTRSALTGTKEVVSSGVTGAMDMAKGAVQGGLDTSKAVLTGTKDTVSTGLTGAVNVAKGTVQAGVDTTKTVLTGTKDTVTTGVMGAVNLAKGTVQTGVETSKAVLTGTKDAVSTGLTGAVNVARGSIQTGVDTSKTVLTGTKDTVCSGVTGAMNVAKGTIQTGVDTSKTVLTGTKDTVCSGVTGAMNVAKGTIQTGVDTSKTVLTGTKDTVCSGVTGAMNVAKGTIQTGVDTTKTVLTGTKNTVCSGVTGAVNLAKEAIQGGLDTTKSMVMGTKDTMSTGLTGAANVAKGAMQTGLNTTQNIATGTKDTVCSGVTGAMNLARGTIQTGVDTTKIVLTGTKDTVCSGVTGAANVAKGAVQGGLDTTKSVLTGTKDAVSTGLTGAVNVAKGTVQTGVDTTKTVLTGTKDTVCSGVTSAVNVAKGAVQGGLDTTKSVVIGTKDTMSTGLTGAANVAKGAVQTGVDTAKTVLTGTKDTVTTGLVGAVNVAKGTVQTGMDTTKTVLTGTKDTIYSGVTSAVNVAKGAVQTGLKTTQNIATGTKNTFGSGVTSAVNVAKGAAQTGVDTAKTVLTGTKDTVTTGLMGAVNVAKGTVQTSVDTTKTVLTGTKDTVCSGVTGAANVAKGAIQGGLDTTKSVLTGTKDAVSTGLTGAVKLAKGTVQTGMDTTKTVLTGTKDAVCSGVTGAANVAKGAVQMGVDTAKTVLTGTKDTVCSGVTGAANVAKGAVQTGLKTTQNIATGTKNTLGSGVTGAAKVAKGAVQGGLDTTKSVLTGTKDAVSTGLTGAVNLAKGTVQTGVDTSKTVLTGTKDTVCSGVTGAVNVAKGTVQTGVDTAKTVLSGAKDAVTTGVTGAVNVAKGTVQTGVDASKAVLMGTKDTVFSGVTGAMSMAKGAVQGGLDTTKTVLTGTKDAVSAGLMGSGNVATGATHTGLSTFQNWLPSTPATSWGGLTSSRTTDNGGEQTALSPQEAPFSGISTPPDVLSVGPEPAWEAAATTKGLATDVATFTQGAAPGREDTGLLATTHGPEEAPRLAMLQNELEGLGDIFHPMNAEEQAQLAASQPGPKVLSAEQGSYFVRLGDLGPSFRQRAFEHAVSHLQHGQFQARDTLAQLQDCFRLIEKAQQAPEGQPRLDQGSGASAEDAAVQEERDAGVLSRVCGLLRQLHTAYSGLVSSLQGLPAELQQPVGRARHSLCELYGIVASAGSVEELPAERLVQSREGVHQAWQGLEQLLEGLQHNPPLSWLVGPFALPAGGQ

SEQ ID NO: 61948 - protein, 463 aa, Homo sapiens
  Payload ID: 12386
  Gene Symbol: PLIN5
  Gene Name: perilipin 5
  Uniprot ID: Q00G26
  ENSP ID: ENSP00000371272
MSEEEAAQIPRSSVWEQDQQNVVQRVVALPLVRATCTAVCDVYSAAKDRHPLLGSACRLAENCVCGLTTRALDHAQPLLEHLQPQLATMNSLACRGLDKLEEKLPFLQQPSETVVTSAKDVVASSVTGVVDLARRGRRWSVELKRSVSHAVDVVLEKSEELVDHFLPMTEEELAALAAEAEGPEVGSVEDQRRQQGYFVRLGSLSARIRHLAYEHSVGKLRQSKHRAQDTLAQLQETLELIDHMQCGVTPTAPACPGKVHELWGEWGQRPPESRRRSQAELETLVLSRSLTQELQGTVEALESSVRGLPAGAQEKVAEVRRSVDALQTAFADARCFRDVPAAALAEGRGRVAHAHACVDELLELVVQAVPLPWLVGPFAPILVERPEPLPDLADLVDEVIGGPDPRWAHLDWPAQQRAWEAEHRDGSGNGDGDRMGVAGDICEQEPETPSCPVKHTLMPELDF

SEQ ID NO: 61949 - protein, 58 aa, Homo sapiens
  Payload ID: 12386
  Gene Symbol: PLIN5
  Gene Name: perilipin 5
  ENSP ID: ENSP00000464926
MSEEEAAQIPRSSVWEQDQQVRAAPPMEQGQKVLCGTVPSRSVSGQVSRPTPLLAGKT

SEQ ID NO: 61950 - protein, 58 aa, Homo sapiens; identical to SEQ ID NO: 61949
  Payload ID: 12386
  Gene Symbol: PLIN5
  Gene Name: perilipin 5
  ENSP ID: ENSP00000468027

SEQ ID NO: 61951 - protein, 1290 aa, Homo sapiens
  Payload ID: 12387
  Gene Symbol: PER1
  Gene Name: period circadian clock 1
  Uniprot ID: O15534
  ENSP ID: ENSP00000314420
MSGPLEGADGGGDPRPGESFCPGGVPSPGPPQHRPCPGPSLADDTDANSNGSSGNESNGHESRGASQRSSHSSSSGNGKDSALLETTESSKSTNSQSPSPPSSSIAYSLLSASSEQDNPSTSGCSSEQSARARTQKELMTALRELKLRLPPERRGKGRSGTLATLQYALACVKQVQANQEYYQQWSLEEGEPCSMDMSTYTLEELEHITSEYTLQNQDTFSVAVSFLTGRIVYISEQAAVLLRCKRDVFRGTRFSELLAPQDVGVFYGSTAPSRLPTWGTGASAGSGLRDFTQEKSVFCRIRGGPDRDPGPRYQPFRLTPYVTKIRVSDGAPAQPCCLLIAERIHSGYEAPRIPPDKRIFTTRHTPSCLFQDVDERAAPLLGYLPQDLLGAPVLLFLHPEDRPLMLAIHKKILQLAGQPFDHSPIRFCARNGEYVTMDTSWAGFVHPWSRKVAFVLGRHKVRTAPLNEDVFTPPAPSPAPSLDTDIQELSEQIHRLLLQPVHSPSPTGLCGVGAVTSPGPLHSPGSSSDSNGGDAEGPGPPAPVTFQQICKDVHLVKHQGQQLFIESRARPQSRPRLPATGTFKAKALPCQSPDPELEAGSAPVQAPLALVPEEAERKEASSCSYQQINCLDSILRYLESCNLPSTTKRKCASSSSYTTSSASDDDRQRTGPVSVGTKKDPPSAALSGEGATPRKEPVVGGTLSPLALANKAESVVSVTSQCSFSSTIVHVGDKKPPESDIIMMEDLPGLAPGPAPSPAPSPTVAPDPAPDAYRPVGLTKAVLSLHTQKEEQAFLSRFRDLGRLRGLDSSSTAPSALGERGCHHGPAPPSRRHHCRSKAKRSRHHQNPRAEAPCYVSHPSPVPPSTPWPTPPATTPFPAVVQPYPLPVFSPRGGPQPLPPAPTSVPPAAFPAPLVTPMVALVLPNYLFPTPSSYPYGALQTPAEGPPTPASHSPSPSLPALAPSPPHRPDSPLFNSRCSSPLQLNLLQLEELPRAEGAAVAGGPGSSAGPPPPSAEAAEPEARLAEVTESSNQDALSGSSDLLELLLQEDSRSGTGSAASGSLGSGLGSGSGSGSHEGGSTSASITRSSQSSHTSKYFGSIDSSEAEAGAARGGAEPGDQVIKYVLQDPIWLLMANADQRVMMTYQVPSRDMTSVLKQDRERLRAMQKQQPRFSEDQRRELGAVHSWVRKGQLPRALDVMACVDCGSSTQDPGHPDDPLFSELDGLGLEPMEEGGGEQGSSGGGSGEGEGCEEAQGGAKASSSQDLAMEEEEEGRSSSSPALPTAGNCTS

SEQ ID NO: 61952 - protein, 859 aa, Homo sapiens
  Payload ID: 12387
  Gene Symbol: PER1
  Gene Name: period circadian clock 1
  Uniprot ID: O15534
  ENSP ID: ENSP00000346979
MLEVLEEIWSVRARRAHRPCPGPSLADDTDANSNGSSGNESNGHESRGASQRSSHSSSSGNGKDSALLETTESSKSTNSQSPSPPSSSIAYSLLSASSEQDNPSTSGCSSEQSARARTQKELMTALRELKLRLPPERRGKGRSGTLATLQYALACVKQVQANQEYYQQWSLEEGEPCSMDMSTYTLEELEHITSEYTLQNQDTFSVAVSFLTGRIVYISEQAAVLLRCKRDVFRGTRFSELLAPQDVGVFYGSTAPSRLPTWGTGASAGSGLRDFTQEKSVFCRIRGGPDRDPGPRYQPFRLTPYVTKIRVSDGAPAQPCCLLIAERIHSGYEAPRIPPDKRIFTTRHTPSCLFQDVDERAAPLLGYLPQDLLGAPVLLFLHPEDRPLMLAIHKKILQLAGQPFDHSPIRFCARNGEYVTMDTSWAGFVHPWSRKVAFVLGRHKVRTAPLNEDVFTPPAPSPAPSLDTDIQELSEQIHRLLLQPVHSPSPTGLCGVGAVTSPGPLHSPGSSSDSNGGDAEGPGPPAPVTFQQICKDVHLVKHQGQQLFIESRARPQSRPRLPATGTFKAKALPCQSPDPELEAGSAPVQAPLALVPEEAERKEASSCSYQQINCLDSILRYLESCNLPSTTKRKCASSSSYTTSSASDDDRQRTGPVSVGTKKDPPSAALSGEGATPRKEPVVGGTLSPLALANKAESVVSVTSQCSFSSTIVHVGDKKPPESDIIMMEDLPGLAPGPAPSPAPSPTVAPDPAPDAYRPVGLTKAVLSLHTQKEEQAFLSRFRDLGRLRGLDSSSTAPSALGERGSHLGPPGACPLPSLGLDCWGVGLKGGVSAPGTQAGVASTTRPCLGTGPSLASPH

SEQ ID NO: 61953 - protein, 1267 aa, Homo sapiens
  Payload ID: 12387
  Gene Symbol: PER1
  Gene Name: period circadian clock 1
  ENSP ID: ENSP00000462064
MSGPLEGADGGGDPRPGESFCPGGVPSPGPPQHRPCPGPSLADDTDANSNGSSGNESNGHESRGASQRSSHSSSSGNGKDSALLETTESSKSTNSQSPSPPSSSIAYSLLSASSEQDNPSTSGCSSEQSARARTQKELMTALRELKLRLPPERRGKGRSGTLATLQYALACVKQVQANQEYYQQWSLEEGEPCSMDMSTYTLEELEHITSEYTLQNQAAVLLRCKRDVFRGTRFSELLAPQDVGVFYGSTAPSRLPTWGTGASAGSGLRDFTQEKSVFCRIRGGPDRDPGPRYQPFRLTPYVTKIRVSDGAPAQPCCLLIAERIHSGYEAPRIPPDKRIFTTRHTPSCLFQDVDERAAPLLGYLPQDLLGAPVLLFLHPEDRPLMLAIHKKILQLAGQPFDHSPIRFCARNGEYVTMDTSWAGFVHPWSRKVAFVLGRHKVRTAPLNEDVFTPPAPSPAPSLDTDIQELSEQIHRLLLQPVHSPSPTGLCGVGAVTSPGPLHSPGSSSDSNGGDAEGPGPPAPVTFQQICKDVHLVKHQGQQLFIESRARPQSRPRLPATGTFKAKALPCQSPDPELEAGSAPVQAPLALVPEEAERKEASSCSYQQINCLDSILRYLESCNLPSTTKRKCASSSSYTTSSASDDDRQRTGPVSVGTKKDPPSAALSGEGATPRKEPVVGGTLSPLALANKAESVVSVTSQCSFSSTIVHVGDKKPPESDIIMMEDLPGLAPGPAPSPAPSPTVAPDPAPDAYRPVGLTKAVLSLHTQKEEQAFLSRFRDLGRLRGLDSSSTAPSALGCHHGPAPPSRRHHCRSKAKRSRHHQNPRAEAPCYVSHPSPVPPSTPWPTPPATTPFPAVVQPYPLPVFSPRGGPQPLPPAPTSVPPAAFPAPLVTPMVALVLPNYLFPTPSSYPYGALQTPAEGPPTPASHSPSPSLPALAPSPPHRPDSPLFNSRCSSPLQLNLLQLEELPRAEGAAVAGGPGSSAGPPPPSAEAAEPEARLAEVTESSNQDALSGSSDLLELLLQEDSRSGTGSAASGSLGSGLGSGSGSGSHEGGSTSASITRSSQSSHTSKYFGSIDSSEAEAGAARGGAEPGDQVIKYVLQDPIWLLMANADQRVMMTYQVPSRDMTSVLKQDRERLRAMQKQQPRFSEDQRRELGAVHSWVRKGQLPRALDVMACVDCGSSTQDPGHPDDPLFSELDGLGLEPMEEGGGEQGSSGGGSGEGEGCEEAQGGAKASSSQDLAMEEEEEGRSSSSPALPTAGNCTS

SEQ ID NO: 61954 - protein, 117 aa, Homo sapiens
  Payload ID: 12387
  Gene Symbol: PER1
  Gene Name: period circadian clock 1
  ENSP ID: ENSP00000462546
MSGPLEGADGGGDPRPGESFCPGGVPSPGPPQHRPCPGPSLADDTDANSNGSSGNESNGHESRGASQRSSHSSSSGNGKDSALLETTESSKSSEQSARARTQKELMTALRELKLRLP

SEQ ID NO: 61955 - protein, 824 aa, Homo sapiens
  Payload ID: 12387
  Gene Symbol: PER1
  Gene Name: period circadian clock 1
  ENSP ID: ENSP00000463054
MSGPLEGADGGGDPRPGESFCPGGVPSPGPPQHRPCPGPSLADDTDANSNGSSGNESNGHESRGASQRSSHSSSSGNGKDSALLETTESSKSTNSQSPSPPSSSIAYSLLSASSEQDNPSTSGCSSEQSARARTQKELMTALRELKLRLPPERRGKGRSGTLATLQYALACVKQVQANQEYYQQWSLEEGEPCSMDMSTYTLEELEHITSEYTLQNQDTFSVAVSFLTGRIVYISEQAAVLLRCKRDVFRGTRFSELLAPQDVGVFYGSTAPSRLPTWGTGASAGSGLRDFTQEKSVFCRIRGGPDRDPGPRYQPFRLTPYVTKIRVSDGAPAQPCCLLIAERIHSGYEAPRIPPDKRIFTTRHTPSCLFQDVDERAAPLLGYLPQDLLGAPVLLFLHPEDRPLMLAIHKKILQLAGQPFDHSPIRFCARNGEYVTMDTSWAGFVHPWSRKVAFVLGRHKVRTAPLNEDVFTPPAPSPAPSLDTDIQELSEQIHRLLLQPVHSPSPTGLCGVGAVTSPGPLHSPGSSSDSNGGDAEGPGPPAPVTFQQICKDVHLVKHQGQQLFIESRARPQSRPRLPATGTFKAKALPCQSPDPELEAGSAPVQAPLALVPEEAERKEASSCSYQQINCLDSILRYLESCNLPSTTKRKCASSSSYTTSSASDDDRQRTGPVSVGTKKDPPSAALSGEGATPRKEPVVGGTLSPLALANKAESVVSVTSQCSFSSTIVHVGDKKPPESDIIMMEDLPGLAPGPAPSPAPSPTVAPDPAPDAYRPVGLTKAVLSLHTQKEEQAFLSRFRDLGRLRGLDSSSTAPSALGERGGGH

SEQ ID NO: 61956 - protein, 168 aa, Homo sapiens
  Payload ID: 12387
  Gene Symbol: PER1
  Gene Name: period circadian clock 1
  ENSP ID: ENSP00000463369
VTSQCSFSSTIVHVGDKKPPESDIIMMEDLPGLAPGPAPSPAPSPTVAPDPAPDAYRPVGLTKAVLSLHTQKEEQAFLSRFRDLGRLRGLDSSSTAPSALGERGRIRPRWAGGMPRLAVPTGVWRTRAICPCVHGLTLLPPSASMPPSSAHPQLDPSCNLSLALFLSQ

SEQ ID NO: 61957 - protein, 175 aa, Homo sapiens
  Payload ID: 12387
  Gene Symbol: PER1
  Gene Name: period circadian clock 1
  ENSP ID: ENSP00000463385
MQPASPPARWSFHSAAGWSGGGQACGGHSCDQHRPCPGPSLADDTDANSNGSSGNESNGHESRGASQRSSHSSSSGNGKDSALLETTESSKSTNSQSPSPPSSSIAYSLLSASSEQDNPSTSGCSSEQSARARTQKELMTALRELKLRLPPERRGKGRSGTLATLQYALACVKQV

SEQ ID NO: 61958 - protein, 112 aa, Homo sapiens
  Payload ID: 12387
  Gene Symbol: PER1
  Gene Name: period circadian clock 1
  ENSP ID: ENSP00000463661
MSGPLEGADGGGDPRPGESFCPGGVPSPGPPQHRPCPGPSLADDTDANSNGSSGNESNGHESRGASQRSSHSSSSGNGKDSALLETTESSKSTNSQSPSPPSSSIAYSLLSA

SEQ ID NO: 61959 - protein, 572 aa, Homo sapiens
  Payload ID: 12387
  Gene Symbol: PER1
  Gene Name: period circadian clock 1
  ENSP ID: ENSP00000464696
MSGPLEGADGGGDPRPGESFCPGGVPSPGPPQHRPCPGPSLADDTDANSNGSSGNESNGHESRGASQRSSHSSSSGNGKDSALLETTESSKSTNSQSPSPPSSSIAYSLLSASSEQDNPSTSGCSSEQSARARTQKELMTALRELKLRLPPERRGKGRSGTLATLQYALACVKQVQANQEYYQQWSLEEGEPCSMDMSTYTLEELEHITSEYTLQNQDTFSVAVSFLTGRIVYISEQAAVLLRCKRDVFRGTRFSELLAPQDVGVFYGSTAPSRLPTWGTGASAGSGLRDFTQEKSVFCRIRGGPDRDPGPRYQPFRLTPYVTKIRVSDGAPAQPCCLLIAERIHSGYEAPRIPPDKRIFTTRHTPSCLFQDVDERAAPLLGYLPQDLLGAPVLLFLHPEDRPLMLAIHKKILQLAGQPFDHSPIRFCARNGEYVTMDTSWAGFVHPWSRKVAFVLGRHKVRTAPLNEDVFTPPAPSPAPSLDTDIQELSEQIHRLLLQPVHSPSPTGLCGVGAVTSPGPLHSPGSSSDSNGGDAEGPGPPAPLQARSRPRPFPANPQTQSWRRVLLPSRPH

SEQ ID NO: 61960 - protein, 1255 aa, Homo sapiens
  Payload ID: 12388
  Gene Symbol: PER2
  Gene Name: period circadian clock 2
  Uniprot ID: O15055
  ENSP ID: ENSP00000254657
MNGYAEFPPSPSNPTKEPVEPQPSQVPLQEDVDMSSGSSGHETNENCSTGRDSQGSDCDDSGKELGMLVEPPDARQSPDTFSLMMAKSEHNPSTSGCSSDQSSKVDTHKELIKTLKELKVHLPADKKAKGKASTLATLKYALRSVKQVKANEEYYQLLMSSEGHPCGADVPSYTVEEMESVTSEHIVKNADMFAVAVSLVSGKILYISDQVASIFHCKRDAFSDAKFVEFLAPHDVGVFHSFTSPYKLPLWSMCSGADSFTQECMEEKSFFCRVSVRKSHENEIRYHPFRMTPYLVKVRDQQGAESQLCCLLLAERVHSGYEAPRIPPEKRIFTTTHTPNCLFQDVDERAVPLLGYLPQDLIETPVLVQLHPSDRPLMLAIHKKILQSGGQPFDYSPIRFRARNGEYITLDTSWSSFINPWSRKISFIIGRHKVRVGPLNEDVFAAHPCTEEKALHPSIQELTEQIHRLLLQPVPHSGSSGYGSLGSNGSHEHLMSQTSSSDSNGHEDSRRRRAEICKNGNKTKNRSHYSHESGEQKKKSVTEMQTNPPAEKKAVPAMEKDSLGVSFPEELACKNQPTCSYQQISCLDSVIRYLESCNEAATLKRKCEFPANVPALRSSDKRKATVSPGPHAGEAEPPSRVNSRTGVGTHLTSLALPGKAESVASLTSQCSYSSTIVHVGDKKPQPELEMVEDAASGPESLDCLAGPALACGLSQEKEPFKKLGLTKEVLAAHTQKEEQSFLQKFKEIRKLSIFQSHCHYYLQERSKGQPSERTAPGLRNTSGIDSPWKKTGKNRKLKSKRVKPRDSSESTGSGGPVSARPPLVGLNATAWSPSDTSQSSCPAVPFPAPVPAAYSLPVFPAPGTVAAPPAPPHASFTVPAVPVDLQHQFAVQPPPFPAPLAPVMAFMLPSYSFPSGTPNLPQAFFPSQPQFPSHPTLTSEMASASQPEFPSRTSIPRQPCACPATRATPPSAMGRASPPLFQSRSSSPLQLNLLQLEEAPEGGTGAMGTTGATETAAVGADCKPGTSRDQQPKAPLTRDEPSDTQNSDALSTSSGLLNLLLNEDLCSASGSAASESLGSGSLGCDASPSGAGSSDTSHTSKYFGSIDSSENNHKAKMNTGMEESEHFIKCVLQDPIWLLMADADSSVMMTYQLPSRNLEAVLKEDREKLKLLQKLQPRFTESQKQELREVHQWMQTGGLPAAIDVAECVYCENKEKGNICIPYEEDIPSLGLSEVSDTKEDENGSPLNHRIEEQT

SEQ ID NO: 61961 - protein, 404 aa, Homo sapiens
  Payload ID: 12388
  Gene Symbol: PER2
  Gene Name: period circadian clock 2
  Uniprot ID: O15055
  ENSP ID: ENSP00000348013
MNGYAEFPPSPSNPTKEPVEPQPSQVPLQEDVDMSSGSSGHETNENCSTGRDSQGSDCDDSGKELGMLVEPPDARQSPDTFSLMMAKSEHNPSTSGCSSDQSSKVDTHKELIKTLKELKVHLPADKKAKGKASTLATLKYALRSVKQVKANEEYYQLLMSSEGHPCGADVPSYTVEEMESVTSEHIVKNADMFAVAVSLVSGKILYISDQVASIFHCKRDAFSDAKFVEFLAPHDVGVFHSFTSPYKLPLWSMCSGADSFTQECMEEKSFFCRVSVRKSHENEIRYHPFRMTPYLVKVRDQQGAESQLCCLLLAERVHSGYEAPRIPPEKRIFTTTHTPNCLFQDVDESPAVRRAAFRLFSHSVSRPERRVHHVGHQLVQLHQPMEQENLLHHWEAQSQGGPFE

SEQ ID NO: 61962 - protein, 109 aa, Homo sapiens
  Payload ID: 12388
  Gene Symbol: PER2
  Gene Name: period circadian clock 2
  ENSP ID: ENSP00000405891
MNGYAEFPPSPSNPTKEPVEPQPSQVPLQEDVDMSSGSSGHETNENCSTGRDSQGSDCDDSGKELGMLVEPPDARQSPDTFSLMMAKSEHNPSTSGCSSDQSSKVDTHK

SEQ ID NO: 61963 - protein, 1201 aa, Homo sapiens
  Payload ID: 12389
  Gene Symbol: PER3
  Gene Name: period circadian clock 3
  Uniprot ID: P56645
  ENSP ID: ENSP00000355031
MPRGEAPGPGRRGAKDEALGEESGERWSPEFHLQRKLADSSHSEQQDRNRVSEELIMVVQEMKKYFPSERRNKPSTLDALNYALRCVHSVQANSEFFQILSQNGAPQADVSMYSLEELATIASEHTSKNTDTFVAVFSFLSGRLVHISEQAALILNRKKDVLASSHFVDLLAPQDMRVFYAHTARAQLPFWNNWTQRAARYECAPVKPFFCRIRGGEDRKQEKCHSPFRIIPYLIHVHHPAQPELESEPCCLTVVEKIHSGYEAPRIPVNKRIFTTTHTPGCVFLEVDEKAVPLLGYLPQDLIGTSILSYLHPEDRSLMVAIHQKVLKYAGHPPFEHSPIRFCTQNGDYIILDSSWSSFVNPWSRKISFIIGRHKVRTSPLNEDVFATKIKKMNDNDKDITELQEQIYKLLLQPVHVSVSSGYGSLGSSGSQEQLVSIASSSEASGHRVEETKAEQMTLQQVYASVNKIKNLGQQLYIESMTKSSFKPVTGTRTEPNGGGECKTFTSFHQTLKNNSVYTEPCEDLRNDEHSPSYQQINCIDSVIRYLKSYNIPALKRKCISCTNTTSSSSEEDKQNHKADDVQALQAGLQIPAIPKSEMPTNGRSIDTGGGAPQILSTAMLSLGSGISQCGYSSTIVHVPPPETARDATLFCEPWTLNMQPAPLTSEEFKHVGLTAAVLSAHTQKEEQNYVDKFREKILSSPYSSYLQQESRSKAKYSYFQGDSTSKQTRSAGCRKGKHKRKKLPEPPDSSSSNTGSGPRRGAHQNAQPCCPSAASSPHTSSPTFPPAAMVPSQAPYLVPAFPLPAATSPGREYAAPGTAPEGLHGLPLSEGLQPYPAFPFPYLDTFMTVFLPDPPVCPLLSPSFLPCPFLGATASSAISPSMSSAMSPTLDPPPSVTSQRREEEKWEAQSEGHPFITSRSSSPLQLNLLQEEMPRPSESPDQMRRNTCPQTEYCVTGNNGSESSPATTGALSTGSPPRENPSHPTASALSTGSPPMKNPSHPTASALSTGSPPMKNPSHPTASTLSMGLPPSRTPSHPTATVLSTGSPPSESPSRTGSAASGSSDSSIYLTSSVYSSKISQNGQQSQDVQKKETFPNVAEEPIWRMIRQTPERILMTYQVPERVKEVVLKEDLEKLESMRQQQPQFSHGQKEELAKVYNWIQSQTVTQEIDIQACVTCENEDSADGAATSCGQVLVEDSC

SEQ ID NO: 61964 - protein, 1210 aa, Homo sapiens
  Payload ID: 12389
  Gene Symbol: PER3
  Gene Name: period circadian clock 3
  Uniprot ID: P56645
  ENSP ID: ENSP00000366755
MPRGEAPGPGRRGAKDEALGEESGERWSPEFHLQRKLADSSHSEQQDRNRVSEELIMVVQEMKKYFPSERRNKPSTLDALNYALRCVHSVQANSEFFQILSQNGAPQADVSMYSLEELATIASEHTSKNTDTFVAVFSFLSGRLVHISEQAALILNRKKDVLASSHFVDLLAPQDMRVFYAHTARAQLPFWNNWTQRAAARYECAPVKPFFCRIRGGEDRKQEKCHSPFRIIPYLIHVHHPAQPELESEPCCLTVVEKIHSGYEAPRIPVNKRIFTTTHTPGCVFLEVDEKAVPLLGYLPQDLIGTSILSYLHPEDRSLMVAIHQKVLKYAGHPPFEHSPIRFCTQNGDYIILDSSWSSFVNPWSRKISFIIGRHKVRTSPLNEDVFATKIKKMNDNDKDITELQEQIYKLLLQPVHVSVSSGYGSLGSSGSQEQLVSIASSSEASGHRVEETKAEQMTLQQVYASVNKIKNLGQQLYIESMTKSSFKPVTGTRTEPNGGGESANGGGECKTFTSFHQTLKNNSVYTEPCEDLRNDEHSPSYQQINCIDSVIRYLKSYNIPALKRKCISCTNTTSSSSEEDKQNHKADDVQALQAGLQIPAIPKSEMPTNGRSIDTGGGAPQILSTAMLSLGSGISQCGYSSTIVHVPPPETARDATLFCEPWTLNMQPAPLTSEEFKHVGLTAAVLSAHTQKEEQNYVDKFREKILSSPYSSYLQQESRSKAKYSYFQGDSTSKQTRSAGCRKGKHKRKKLPEPPDSSSSNTGSGPRRGAHQNAQPCCPSAASSPHTSSPTFPPAAMVPSQAPYLVPAFPLPAATSPGREYAAPGTAPEGLHGLPLSEGLQPYPAFPFPYLDTFMTVFLPDPPVCPLLSPSFLPCPFLGATASSAISPSMSSAMSPTLDPPPSVTSQRREEEKWEAQSEGHPFITSRSSSPLQLNLLQEEMPRPSESPDQMRRNTCPQTEYQCVTGNNGSESSPATTGALSTGSPPRENPSHPTASALSTGSPPMKNPSHPTASALSTGSPPMKNPSHPTASTLSMGLPPSRTPSHPTATVLSTGSPPSESPSRTGSAASGSSDSSIYLTSSVYSSKISQNGQQSQDVQKKETFPNVAEEPIWRMIRQTPERILMTYQVPERVKEVVLKEDLEKLESMRQQQPQFSHGQKEELAKVYNWIQSQTVTQEIDIQACVTCENEDSADGAATSCGQVLVEDSC

SEQ ID NO: 61965 - protein, 378 aa, Homo sapiens
  Payload ID: 12389
  Gene Symbol: PER3
  Gene Name: period circadian clock 3
  ENSP ID: ENSP00000366764
MPRGEAPGPGRRGAKDEALGEESGERWSPEFHLQRKLADSSHSEQQDRNRVSEELIMVVQEMKKYFPSERRNKPSTLDALNYALRCVHSVQANSEFFQILSQNGAPQADVSMYSLEELATIASEHTSKNTDTFVAVFSFLSGRLVHISEQAALILNRKKDVLASSHFVDLLAPQDMRVFYAHTARAQLPFWNNWTQRAARYECAPVKPFFCRIRGGEDRKQEKCHSPFRIIPYLIHVHHPAQPELESEPCCLTVVEKIHSGYEAPRIPVNKRIFTTTHTPGCVFLEVDEKAVPLLGYLPQDLIGTSILSYLHPEDRSLMVAIHQKVLKYAGHPPFEHSPIRFCTQNGDYIILDSSWSSFVNPWSRKISFIIGRHKVRT

SEQ ID NO: 61966 - protein, 1191 aa, Homo sapiens
  Payload ID: 12389
  Gene Symbol: PER3
  Gene Name: period circadian clock 3
  ENSP ID: ENSP00000479223
MPRGEAPGPGRRGAKDEALGEESGERWSPEFHLQRKLADSSHSEQQDRNRVSEELIMVVQEMKKYFPSERRNKPSTLDALNYALRCVHSVQANSEFFQILSQNGAPQADVSMYSLEELATIASEHTSKNTDTFVAVFSFLSGRLVHISEQAALILNRKKDVLASSHFVDLLAPQDMRVFYAHTARAQLPFWNNWTQRAAARYECAPVKPFFCRIRGGEDRKQEKCHSPFRIIPYLIHVHHPAQPELESEPCCLTVVEKIHSGYEAPRIPVNKRIFTTTHTPGCVFLEVDEKAVPLLGYLPQDLIGTSILSYLHPEDRSLMVAIHQKVLKYAGHPPFEHSPIRFCTQNGDYIILDSSWSSFVNPWSRKISFIIGRHKVRTSPLNEDVFATKIKKMNDNDKDITELQEQIYKLLLQPVHVSVSSGYGSLGSSGSQEQLVSIASSSEASGHRVEETKAEQMTLQQVYASVNKIKNLGQQLYIESMTKSSFKPVTGTRTEPNGGGESANGGGECKTFTSFHQTLKNNSVYTEPCEDLRNDEHSPSYQQINCIDSVIRYLKSYNIPALKRKCISCTNTTSSSSEEDKQNHKADDVQALQAGLQIPAIPKSEMPTNGRSIDTGGGAPQILSTAMLSLGSGISQCGYSSTIVHVPPPETARDATLFCEPWTLNMQPAPLTSEEFKHVGLTAAVLSAHTQKEEQNYVDKFREKILSSPYSSYLQQESRSKAKYSYFQGDSTSKQTRSAGCRKGKHKRKKLPEPPDSSSSNTGSGPRRGAHQNAQPCCPSAASSPHTSSPTFPPAAMVPSQAPYLVPAFPLPAATSPGREYAAPGTAPEGLHGLPLSEGLQPYPAFPFPYLDTFMTVFLPDPPVCPLLSPSFLPCPFLGATASSAISPSMSSAMSPTLDPPPSVTSQRREEEKWEAQSEGHPFITSRSSSPLQLNLLQEEMPRPSESPDQMRRNTCPQTEYCVTGNNGSESSPATTGALSTGSPPRENPSHPTASALSTGSPPMKNPSHPTASTLSMGLPPSRTPSHPTATVLSTGSPPSESPSRTGSAASGSSDSSIYLTSSVYSSKISQNGQQSQDVQKKETFPNVAEEPIWRMIRQTPERILMTYQVPERVKEVVLKEDLEKLESMRQQQPQFSHGQKEELAKVYNWIQSQTVTQEIDIQACVTCENEDSADGAATSCGQVLVEDSC

SEQ ID NO: 61967 - protein, 1210 aa, Homo sapiens; identical to SEQ ID NO: 61964
  Payload ID: 12389
  Gene Symbol: PER3
  Gene Name: period circadian clock 3
  Uniprot ID: P56645
  ENSP ID: ENSP00000482093

SEQ ID NO: 61968 - protein, 779 aa, Homo sapiens
  Payload ID: 12390
  Gene Symbol: POSTN
  Gene Name: periostin, osteoblast specific factor
  Uniprot ID: Q15063
  ENSP ID: ENSP00000369066
MIPFLPMFSLLLLLIVNPINANNHYDKILAHSRIRGRDQGPNVCALQQILGTKKKYFSTCKNWYKKSICGQKTTVLYECCPGYMRMEGMKGCPAVLPIDHVYGTLGIVGATTTQRYSDASKLREEIEGKGSFTYFAPSNEAWDNLDSDIRRGLESNVNVELLNALHSHMINKRMLTKDLKNGMIIPSMYNNLGLFINHYPNGVVTVNCARIIHGNQIATNGVVHVIDRVLTQIGTSIQDFIEAEDDLSSFRAAAITSDILEALGRDGHFTLFAPTNEAFEKLPRGVLERIMGDKVASEALMKYHILNTLQCSESIMGGAVFETLEGNTIEIGCDGDSITVNGIKMVNKKDIVTNNGVIHLIDQVLIPDSAKQVIELAGKQQTTFTDLVAQLGLASALRPDGEYTLLAPVNNAFSDDTLSMDQRLLKLILQNHILKVKVGLNELYNGQILETIGGKQLRVFVYRTAVCIENSCMEKGSKQGRNGAIHIFREIIKPAEKSLHEKLKQDKRFSTFLSLLEAADLKELLTQPGDWTLFVPTNDAFKGMTSEEKEILIRDKNALQNIILYHLTPGVFIGKGFEPGVTNILKTTQGSKIFLKEVNDTLLVNELKSKESDIMTTNGVIHVVDKLLYPADTPVGNDQLLEILNKLIKYIQIKFVRGSTFKEIPVTVYKPIIKKYTKIIDGVPVEITEKETREERIITGPEIKYTRISTGGGETEETLKKLLQEEVTKVTKFIEGGDGHLFEDEEIKRLLQGDTPVRKLQANKKVQGSRRRLREGRSQ

SEQ ID NO: 61969 - protein, 809 aa, Homo sapiens
  Payload ID: 12390
  Gene Symbol: POSTN
  Gene Name: periostin, osteoblast specific factor
  Uniprot ID: Q15063
  ENSP ID: ENSP00000369067
MIPFLPMFSLLLLLIVNPINANNHYDKILAHSRIRGRDQGPNVCALQQILGTKKKYFSTCKNWYKKSICGQKTTVLYECCPGYMRMEGMKGCPAVLPIDHVYGTLGIVGATTTQRYSDASKLREEIEGKGSFTYFAPSNEAWDNLDSDIRRGLESNVNVELLNALHSHMINKRMLTKDLKNGMIIPSMYNNLGLFINHYPNGVVTVNCARIIHGNQIATNGVVHVIDRVLTQIGTSIQDFIEAEDDLSSFRAAAITSDILEALGRDGHFTLFAPTNEAFEKLPRGVLERIMGDKVASEALMKYHILNTLQCSESIMGGAVFETLEGNTIEIGCDGDSITVNGIKMVNKKDIVTNNGVIHLIDQVLIPDSAKQVIELAGKQQTTFTDLVAQLGLASALRPDGEYTLLAPVNNAFSDDTLSMDQRLLKLILQNHILKVKVGLNELYNGQILETIGGKQLRVFVYRTAVCIENSCMEKGSKQGRNGAIHIFREIIKPAEKSLHEKLKQDKRFSTFLSLLEAADLKELLTQPGDWTLFVPTNDAFKGMTSEEKEILIRDKNALQNIILYHLTPGVFIGKGFEPGVTNILKTTQGSKIFLKEVNDTLLVNELKSKESDIMTTNGVIHVVDKLLYPADTPVGNDQLLEILNKLIKYIQIKFVRGSTFKEIPVTVYRPTLTKVKIEGEPEFRLIKEGETITEVIHGEPIIKKYTKIIDGVPVEITEKETREERIITGPEIKYTRISTGGGETEETLKKLLQEEVTKVTKFIEGGDGHLFEDEEIKRLLQGDTPVRKLQANKKVQGSRRRLREGRSQ

SEQ ID NO: 61970 - protein, 836 aa, Homo sapiens
  Payload ID: 12390
  Gene Symbol: POSTN
  Gene Name: periostin, osteoblast specific factor
  Uniprot ID: Q15063
  ENSP ID: ENSP00000369071
MIPFLPMFSLLLLLIVNPINANNHYDKILAHSRIRGRDQGPNVCALQQILGTKKKYFSTCKNWYKKSICGQKTTVLYECCPGYMRMEGMKGCPAVLPIDHVYGTLGIVGATTTQRYSDASKLREEIEGKGSFTYFAPSNEAWDNLDSDIRRGLESNVNVELLNALHSHMINKRMLTKDLKNGMIIPSMYNNLGLFINHYPNGVVTVNCARIIHGNQIATNGVVHVIDRVLTQIGTSIQDFIEAEDDLSSFRAAAITSDILEALGRDGHFTLFAPTNEAFEKLPRGVLERIMGDKVASEALMKYHILNTLQCSESIMGGAVFETLEGNTIEIGCDGDSITVNGIKMVNKKDIVTNNGVIHLIDQVLIPDSAKQVIELAGKQQTTFTDLVAQLGLASALRPDGEYTLLAPVNNAFSDDTLSMDQRLLKLILQNHILKVKVGLNELYNGQILETIGGKQLRVFVYRTAVCIENSCMEKGSKQGRNGAIHIFREIIKPAEKSLHEKLKQDKRFSTFLSLLEAADLKELLTQPGDWTLFVPTNDAFKGMTSEEKEILIRDKNALQNIILYHLTPGVFIGKGFEPGVTNILKTTQGSKIFLKEVNDTLLVNELKSKESDIMTTNGVIHVVDKLLYPADTPVGNDQLLEILNKLIKYIQIKFVRGSTFKEIPVTVYTTKIITKVVEPKIKVIEGSLQPIIKTEGPTLTKVKIEGEPEFRLIKEGETITEVIHGEPIIKKYTKIIDGVPVEITEKETREERIITGPEIKYTRISTGGGETEETLKKLLQEEVTKVTKFIEGGDGHLFEDEEIKRLLQGDTPVRKLQANKKVQGSRRRLREGRSQ

SEQ ID NO: 61971 - protein, 808 aa, Homo sapiens
  Payload ID: 12390
  Gene Symbol: POSTN
  Gene Name: periostin, osteoblast specific factor
  ENSP ID: ENSP00000369073
MIPFLPMFSLLLLLIVNPINANNHYDKILAHSRIRGRDQGPNVCALQQILGTKKKYFSTCKNWYKKSICGQKTTVLYECCPGYMRMEGMKGCPAVLPIDHVYGTLGIVGATTTQRYSDASKLREEIEGKGSFTYFAPSNEAWDNLDSDIRRGLESNVNVELLNALHSHMINKRMLTKDLKNGMIIPSMYNNLGLFINHYPNGVVTVNCARIIHGNQIATNGVVHVIDRVLTQIGTSIQDFIEAEDDLSSFRAAAITSDILEALGRDGHFTLFAPTNEAFEKLPRGVLERIMGDKVASEALMKYHILNTLQCSESIMGGAVFETLEGNTIEIGCDGDSITVNGIKMVNKKDIVTNNGVIHLIDQVLIPDSAKQVIELAGKQQTTFTDLVAQLGLASALRPDGEYTLLAPVNNAFSDDTLSMDQRLLKLILQNHILKVKVGLNELYNGQILETIGGKQLRVFVYRTAVCIENSCMEKGSKQGRNGAIHIFREIIKPAEKSLHEKLKQDKRFSTFLSLLEAADLKELLTQPGDWTLFVPTNDAFKGMTSEEKEILIRDKNALQNIILYHLTPGVFIGKGFEPGVTNILKTTQGSKIFLKEVNDTLLVNELKSKESDIMTTNGVIHVVDKLLYPADTPVGNDQLLEILNKLIKYIQIKFVRGSTFKEIPVTVYTTKIITKVVEPKIKVIEGSLQPIIKTEGPTLTKVKIEGEPEFRLIKEGETITEVIHGEPIIKKYTKIIDGVPVEITEKETREERIITGPEIKYTRISTGGGETEETLKKLLQEDTPVRKLQANKKVQGSRRRLREGRSQ

SEQ ID NO: 61972 - protein, 749 aa, Homo sapiens
  Payload ID: 12390
  Gene Symbol: POSTN
  Gene Name: periostin, osteoblast specific factor
  Uniprot ID: Q15063
  ENSP ID: ENSP00000437953
MIPFLPMFSLLLLLIVNPINANNHYDKILAHSRIRGRDQGPNVCALQQILGTKKKYFSTCKNWYKKSICGQKTTVLYECCPGYMRMEGMKGCPAVLPIDHVYGTLGIVGATTTQRYSDASKLREEIEGKGSFTYFAPSNEAWDNLDSDIRRGLESNVNVELLNALHSHMINKRMLTKDLKNGMIIPSMYNNLGLFINHYPNGVVTVNCARIIHGNQIATNGVVHVIDRVLTQIGTSIQDFIEAEDDLSSFRAAAITSDILEALGRDGHFTLFAPTNEAFEKLPRGVLERIMGDKVASEALMKYHILNTLQCSESIMGGAVFETLEGNTIEIGCDGDSITVNGIKMVNKKDIVTNNGVIHLIDQVLIPDSAKQVIELAGKQQTTFTDLVAQLGLASALRPDGEYTLLAPVNNAFSDDTLSMDQRLLKLILQNHILKVKVGLNELYNGQILETIGGKQLRVFVYRTAVCIENSCMEKGSKQGRNGAIHIFREIIKPAEKSLHEKLKQDKRFSTFLSLLEAADLKELLTQPGDWTLFVPTNDAFKGMTSEEKEILIRDKNALQNIILYHLTPGVFIGKGFEPGVTNILKTTQGSKIFLKEVNDTLLVNELKSKESDIMTTNGVIHVVDKLLYPADTPVGNDQLLEILNKLIKYIQIKFVRGSTFKEIPVTVYSPEIKYTRISTGGGETEETLKKLLQEEVTKVTKFIEGGDGHLFEDEEIKRLLQGDTPVRKLQANKKVQGSRRRLREGRSQ

SEQ ID NO: 61973 - protein, 781 aa, Homo sapiens
  Payload ID: 12390
  Gene Symbol: POSTN
  Gene Name: periostin, osteoblast specific factor
  Uniprot ID: Q15063
  ENSP ID: ENSP00000437959
MIPFLPMFSLLLLLIVNPINANNHYDKILAHSRIRGRDQGPNVCALQQILGTKKKYFSTCKNWYKKSICGQKTTVLYECCPGYMRMEGMKGCPAVLPIDHVYGTLGIVGATTTQRYSDASKLREEIEGKGSFTYFAPSNEAWDNLDSDIRRGLESNVNVELLNALHSHMINKRMLTKDLKNGMIIPSMYNNLGLFINHYPNGVVTVNCARIIHGNQIATNGVVHVIDRVLTQIGTSIQDFIEAEDDLSSFRAAAITSDILEALGRDGHFTLFAPTNEAFEKLPRGVLERIMGDKVASEALMKYHILNTLQCSESIMGGAVFETLEGNTIEIGCDGDSITVNGIKMVNKKDIVTNNGVIHLIDQVLIPDSAKQVIELAGKQQTTFTDLVAQLGLASALRPDGEYTLLAPVNNAFSDDTLSMDQRLLKLILQNHILKVKVGLNELYNGQILETIGGKQLRVFVYRTAVCIENSCMEKGSKQGRNGAIHIFREIIKPAEKSLHEKLKQDKRFSTFLSLLEAADLKELLTQPGDWTLFVPTNDAFKGMTSEEKEILIRDKNALQNIILYHLTPGVFIGKGFEPGVTNILKTTQGSKIFLKEVNDTLLVNELKSKESDIMTTNGVIHVVDKLLYPADTPVGNDQLLEILNKLIKYIQIKFVRGSTFKEIPVTVYRPTLTKVKIEGEPEFRLIKEGETITEVIHGEPIIKKYTKIIDGVPVEITEKETREERIITGPEIKYTRISTGGGETEETLKKLLQEDTPVRKLQANKKVQGSRRRLREGRSQ

SEQ ID NO: 61974 - protein, 132 aa, Homo sapiens
  Payload ID: 12391
  Gene Symbol: PMP2
  Gene Name: peripheral myelin protein 2
  Uniprot ID: P02689
  ENSP ID: ENSP00000256103
MSNKFLGTWKLVSSENFDDYMKALGVGLATRKLGNLAKPTVIISKKGDIITIRTESTFKNTEISFKLGQEFEETTADNRKTKSIVTLQRGSLNQVQRWDGKETTIKRKLVNGKMVAECKMKGVVCTRIYEKV

SEQ ID NO: 61975 - protein, 60 aa, Homo sapiens
  Payload ID: 12391
  Gene Symbol: PMP2
  Gene Name: peripheral myelin protein 2
  ENSP ID: ENSP00000429917
MSNKFLGTWKLVSSENFDDYMKALEHRNPAERITESSAEMGWQRDNHKEKASEWENGSGM

SEQ ID NO: 61976 - protein, 160 aa, Homo sapiens
  Payload ID: 12392
  Gene Symbol: PMP22
  Gene Name: peripheral myelin protein 22
  Uniprot ID: Q01453
  ENSP ID: ENSP00000308937
MLLLLLSIIVLHVAVLVLLFVSTIVSQWIVGNGHATDLWQNCSTSSSGNVHHCFSSSPNEWLQSVQATMILSIIFSILSLFLFFCQLFTLTKGGRFYITGIFQILAGLCVMSAAAIYTVRHPEWHLNSDYSYGFAYILAWVAFPLALLSGVIYVILRKRE

SEQ ID NO: 61977 - protein, 118 aa, Homo sapiens
  Payload ID: 12392
  Gene Symbol: PMP22
  Gene Name: peripheral myelin protein 22
  ENSP ID: ENSP00000379268
MLLLLLSIIVLHVAVLVLLFVSTIVSQWIVGNGHATDLWQNCSTSSSGNVHHCFSSSPNEWLQSVQATMILSIIFSILSLFLFFCQLFTLTKGGRFYITGIFQILAESNSSQMCGYRD

SEQ ID NO: 61978 - protein, 160 aa, Homo sapiens; identical to SEQ ID NO: 61976
  Payload ID: 12392
  Gene Symbol: PMP22
  Gene Name: peripheral myelin protein 22
  Uniprot ID: Q01453
  ENSP ID: ENSP00000379269

SEQ ID NO: 61979 - protein, 125 aa, Homo sapiens
  Payload ID: 12392
  Gene Symbol: PMP22
  Gene Name: peripheral myelin protein 22
  ENSP ID: ENSP00000409824
MLLLLLSIIVLHVAVLVLLFVSTIVSQWIVGNGHATDLWQNCSTSSSGNVHHCFSSSPNEWLQSVQATMILSIIFSILSLFLFFCQLFTLTKGGRFYITGIFQILAGKLWMVKSMWKRGASKSAE

SEQ ID NO: 61980 - protein, 161 aa, Homo sapiens [sequence omitted]

SEQ ID NO: 61981 - protein, 51 aa, Homo sapiens
  Payload ID: 12392
  Gene Symbol: PMP22
  Gene Name: peripheral myelin protein 22
  ENSP ID: ENSP00000464468
MAAVCPGHHDPVDHLQHSVSVPVLLPTLHPHQGGQVLHHWNLPNSCWSVRD

SEQ ID NO: 61982 - protein, 160 aa, Homo sapiens; identical to SEQ ID NO: 61976
  Payload ID: 12392
  Gene Symbol: PMP22
  Gene Name: peripheral myelin protein 22
  Uniprot ID: Q01453
  ENSP ID: ENSP00000484631

SEQ ID NO: 61983 - protein, 470 aa, Homo sapiens
  Payload ID: 12393
  Gene Symbol: PRPH
  Gene Name: peripherin
  Uniprot ID: P41219
  ENSP ID: ENSP00000257860
MSHHPSGLRAGFSSTSYRRTFGPPPSLSPGAFSYSSSSRFSSSRLLGSASPSSSVRLGSFRSPRAGAGALLRLPSERLDFSMAEALNQEFLATRSNEKQELQELNDRFANFIEKVRFLEQQNAALRGELSQARGQEPARADQLCQQELRELRRELELLGRERDRVQVERDGLAEDLAALKQRLEEETRKREDAEHNLVLFRKDVDDATLSRLELERKIESLMDEIEFLKKLHEEELRDLQVSVESQQVQQVEVEATVKPELTAALRDIRAQYESIAAKNLQEAEEWYKSKYADLSDAANRNHEALRQAKQEMNESRRQIQSLTCEVDGLRGTNEALLRQLRELEEQFALEAGGYQAGAARLEEELRQLKEEMARHLREYQELLNVKMALDIEIATYRKLLEGEESRISVPVHSFASLNIKTTVPEVEPPQDSHSRKTVLIKTIETRNGEVVTESQKEQRSELDKSSAHSY

SEQ ID NO: 61984 - protein, 207 aa, Homo sapiens
  Payload ID: 12393
  Gene Symbol: PRPH
  Gene Name: peripherin
  ENSP ID: ENSP00000408897
MAEALNQEFLATRSNEKQELQELNDRFANFIEKELRELRRELELLGRERDRVQVERDGLAEDLAALKQRLEEETRKREDAEHNLVLFRKDVDDATLSRLELERKIESLMDEIEFLKKLHEEELRDLQVSVESQQVQQVEVEATVKPELTAALRDIRAQYESIAAKNLQEAEEWYKSKYADLSDAANRNHEALRQAKQEMNESRRQIQ

SEQ ID NO: 61985 - protein, 200 aa, Homo sapiens
  Payload ID: 12393
  Gene Symbol: PRPH
  Gene Name: peripherin
  ENSP ID: ENSP00000437182
  MOD_RES (1)..(1): Any amino acid
XESIAAKNLQEAEEWYKSKYADLSDAANRNHEALRQAKQEMNESRRQIQSLTCEVDGLRGTNEALLRQLRELEEQFALEAGGYQAGAARLEEELRQLKEEMARHLREYQELLNVKMALDIEIATYRKLLEGEESRISVPVHSFASLNIKTTVPEVEPPQDSHSRKTVLIKTIETRNGEQVVTESQKEQRSELDKSSAHSY

SEQ ID NO: 61986 - protein, 346 aa, Homo sapiens
  Payload ID: 12394
  Gene Symbol: PRPH2
  Gene Name: peripherin 2 (retinal degeneration, slow)
  Uniprot ID: P23942
  ENSP ID: ENSP00000230381
MALLKVKFDQKKRVKLAQGLWLMNWFSVLAGIIIFSLGLFLKIELRKRSDVMNNSESHFVPNSLIGMGVLSCVFNSLAGKICYDALDPAKYARWKPWLKPYLAICVLFNIILFLVALCCFLLRGSLENTLGQGLKNGMKYYRDTDTPGRCFMKKTIDMLQIEFKCCGNNGFRDWFEIQWISNRYLDFSSKEVKDRIKSNVDGRYLVDGVPFSCCNPSSPRPCIQYQITNNSAHYSYDHQTEELNLWVRGCRAALLSYYSSLMNSMGVVTLLIWLFEVTITIGLRYLQTSLDGVSNPEESESESQGWLLERSVPETWKAFLESVKKLGKGNQVEAEGADAGQAPEAG

SEQ ID NO: 61987 - protein, 363 aa, Homo sapiens
  Payload ID: 12395
  Gene Symbol: PPHLN1
  Gene Name: periphilin 1
  ENSP ID: ENSP00000256678
MRDGFRRKSFYSSHYARERSPYKRDNTFFRESPVGRKDSPHSRSGSSVSSRSYSPERSKSYSFHQSQHRNKERPVQSLKTSRDTSPSSGSAVSSSKVLDKPSRLTEKELAEAASKWAAEKLEKSDESNLPEISEYEAGSTAPLFTDQPEEPESNTTHGIELFEDSQLTTRSKAIASKTKEIEQVYRQDCETFGMVVKMLIEKDPSLEKSIQFALRQNLHEIESAGQTWQQVPPVRNTEMDHDGTPENEGEETAQSHDASNHTIVGLGPNQVPEMKETTLQAPQPPQAPQPLQPRKKRVRRTTQLRRTTGAPDITWGMLKKTTQEAERILLRTQTPFTPENLFLAMLSVVHCNSRKDVKPENKQ

SEQ ID NO: 61988 - protein, 303 aa, Homo sapiens
  Payload ID: 12395
  Gene Symbol: PPHLN1
  Gene Name: periphilin 1
  ENSP ID: ENSP00000322048
MAYRRDEMWSEGRYEYERIPRERAPPRSHPSDESGYRWTRDDHSASRQPEYRDMRDGFRRKSFYSSHYARERSPYKRDNTFFRESPVGRKDSPHSRSGSSVSSRSYSPERSKSYSFHQSQHRNKERPVQSLKTSRDTSPSSGSAVSSSKVLDKPSRLTEKELAEAASKWAAEKLEKSDESNLPEISEYEAGSTAPLFTDQPEEPESNTTHGIELFEDSQLTTRSKAIASKTKEIEQVYRQDCETFGMVVKMLIEKDPSLEKSIQFALRQNLHEIAGADTIQCLPGQRGFEGTSWPHNKMHSVS

SEQ ID NO: 61989 - protein, 340 aa, Homo sapiens
  Payload ID: 12395
  Gene Symbol: PPHLN1
  Gene Name: periphilin 1
  ENSP ID: ENSP00000338510
MWSEGRYEYERIPRERAPPRSHPSDESGYRWTRDDHSASRQPEYRDMRDGFRRKSFYSSHYARERSPYKRDNTFFRESPVGRKDSPHSRSGSSVSSRSYSPERSKSYSFHQSQHRKSVRPGASYKRQNEGNPERDKERPVQSLKTSRDTSPSSGSAVSSSKVLDKPSRLTEKELAEAASKWAAEKLEKSDESNLPEISEYEAGSTAPLFTDQPEEPESNTTHGIELFEDSQLTTRSKAIASKTKEIEQVYRQDCETFGMVVKMLIEKDPSLEKSIQFALRQNLHEIESAGQTWQQVPPVRNTEMDHDGTPENEGEETAQSNLETALIKSTLEPALCAFFL

SEQ ID NO: 61990 - protein, 367 aa, Homo sapiens
  Payload ID: 12395
  Gene Symbol: PPHLN1
  Gene Name: periphilin 1
  Uniprot ID: Q8NEY8
  ENSP ID: ENSP00000351066
MWSEGRYEYERIPRERAPPRSHPSDGYNRLVNIVPKKPPLLDRPGEGSYNRYYSHVDYRDYDEGRSFSHDRRSGPPHRGDESGYRWTRDDHSASRQPEYRDMRDGFRRKSFYSSHYARERSPYKRDNTFFRESPVGRKDSPHSRSGSSVSSRSYSPERSKSYSFHQSQHRKSVRPGASYKRQNEGNPERDKERPVQSLKTSRDTSPSSGSAVSSSKVLDKPSRLTEKELAEAASKWAAEKLEKSDESNLPEISEYEAGSTAPLFTDQPEEPESNTTHGIELFEDSQLTTRSKAIASKTKEIEQVYRQDCETFGMVVKMLIEKDPSLEKSIQFALRQNLHEIGERCVEELKHFIAEYDTSTQDFGEPF

SEQ ID NO: 61991 - protein, 458 aa, Homo sapiens
  Payload ID: 12395
  Gene Symbol: PPHLN1
  Gene Name: periphilin 1
  Uniprot ID: Q8NEY8
  ENSP ID: ENSP00000378935
MWSEGRYEYERIPRERAPPRSHPSDGYNRLVNIVPKKPPLLDRPGEGSYNRYYSHVDYRDYDEGRSFSHDRRSGPPHRGDESGYRWTRDDHSASRQPEYRDMRDGFRRKSFYSSHYARERSPYKRDNTFFRESPVGRKDSPHSRSGSSVSSRSYSPERSKSYSFHQSQHRKSVRPGASYKRQNEGNPERDKERPVQSLKTSRDTSPSSGSAVSSSKVLDKPSRLTEKELAEAASKWAAEKLEKSDESNLPEISEYEAGSTAPLFTDQPEEPESNTTHGIELFEDSQLTTRSKAIASKTKEIEQVYRQDCETFGMVVKMLIEKDPSLEKSIQFALRQNLHEIESAGQTWQQVPPVRNTEMDHDGTPENEGEETAQSAPQPPQAPQPLQPRKKRVRRTTQLRRTTGAPDITWGMLKKTTQEAERILLRTQTPFTPENLFLAMLSVVHCNSRKDVKPENKQ

SEQ ID NO: 61992 - protein, 374 aa, Homo sapiens
  Payload ID: 12395
  Gene Symbol: PPHLN1
  Gene Name: periphilin 1
  Uniprot ID: Q8NEY8
  ENSP ID: ENSP00000378947
MAYRRDEMWSEGRYEYERIPRERAPPRSHPSDGYNRLVNIVPKKPPLLDRPGEGSYNRYYSHVDYRDYDEGRSFSHDRRSGPPHRGDESGYRWTRDDHSASRQPEYRDMRDGFRRKSFYSSHYARERSPYKRDNTFFRESPVGRKDSPHSRSGSSVSSRSYSPERSKSYSFHQSQHRKSVRPGASYKRQNEGNPERDKERPVQSLKTSRDTSPSSGSAVSSSKVLDKPSRLTEKELAEAASKWAAEKLEKSDESNLPEISEYEAGSTAPLFTDQPEEPESNTTHGIELFEDSQLTTRSKAIASKTKEIEQVYRQDCETFGMVVKMLIEKDPSLEKSIQFALRQNLHEIGERCVEELKHFIAEYDTSTQDFGEPF

SEQ ID NO: 61993 - protein, 348 aa, Homo sapiens
  Payload ID: 12395
  Gene Symbol: PPHLN1
  Gene Name: periphilin 1
  Uniprot ID: Q8NEY8
  ENSP ID: ENSP00000390681
MWSEGRYEYERIPRERAPPRSHPSDGYNRLVNIVPKKPPLLDRPGEGSYNRYYSHVDYRDYDEGRSFSHDRRSGPPHRGDESGYRWTRDDHSASRQPEYRDMRDGFRRKSFYSSHYARERSPYKRDNTFFRESPVGRKDSPHSRSGSSVSSRSYSPERSKSYSFHQSQHRNKERPVQSLKTSRDTSPSSGSAVSSSKVLDKPSRLTEKELAEAASKWAAEKLEKSDESNLPEISEYEAGSTAPLFTDQPEEPESNTTHGIELFEDSQLTTRSKAIASKTKEIEQVYRQDCETFGMVVKMLIEKDPSLEKSIQFALRQNLHEIGERCVEELKHFIAEYDTSTQDFGEPF

SEQ ID NO: 61994 - protein, 434 aa, Homo sapiens
  Payload ID: 12395
  Gene Symbol: PPHLN1
  Gene Name: periphilin 1
  Uniprot ID: Q8NEY8
  ENSP ID: ENSP00000393965
MWSEGRYEYERIPRERAPPRSHPSDESGYRWTRDDHSASRQPEYRDMRDGFRRKSFYSSHYARERSPYKRDNTFFRESPVGRKDSPHSRSGSSVSSRSYSPERSKSYSFHQSQHRKSVRPGASYKRQNEGNPERDKERPVQSLKTSRDTSPSSGSAVSSSKVLDKPSRLTEKELAEAASKWAAEKLEKSDESNLPEISEYEAGSTAPLFTDQPEEPESNTTHGIELFEDSQLTTRSKAIASKTKEIEQVYRQDCETFGMVVKMLIEKDPSLEKSIQFALRQNLHEIESAGQTWQQVPPVRNTEMDHDGTPENEGEETAQSALFGFQHDASNHTIVGLGPNQVPEMKETTLQAPQPPQAPQPLQPRKKRVRRTTQLRRTTGAPDITWGMLKKTTQEAERILLRTQTPFTPENLFLAMLSVVHCNSRKDVKPENKQ

SEQ ID NO: 61995 - protein, 385 aa, Homo sapiens
  Payload ID: 12395
  Gene Symbol: PPHLN1
  Gene Name: periphilin 1
  ENSP ID: ENSP00000447168
MLRHPVRSLVQVAYRRDEMWSEGRYEYERIPRERAPPRSHPSDGYNRLVNIVPKKPPLLDRPGEGSYNRYYSHVDYRDYDEGRSFSHDRRSGPPHRGDESGYRWTRDDHSASRQPEYRDMRDGFRRKSFYSSHYARERSPYKRDNTFFRESPVGRKDSPHSRSGSSVSSRSYSPERSKSYSFHQSQHRKSVRPGASYKRQNEGNPERDKERPVQSLKTSRDTSPSSGSAVSSSKVLDKPSRLTEKELAEAASKWAAEKLEKSDESNLPEISEYEAGSTAPLFTDQPEEPESNTTHGIELFEDSQLTTRSKAIASKTKEIEQVYRQDCETFGMVVKMLIEKDPSLEKSIQFALRQNLHEIGERCVEELKHFIAEYDTSTQDFGEPF

SEQ ID NO: 61996 - protein, 107 aa, Homo sapiens
  Payload ID: 12395
  Gene Symbol: PPHLN1
  Gene Name: periphilin 1
  ENSP ID: ENSP00000448645
MWSEGRYEYERIPRERAPPRSHPSDGYNRLVNIVPKKPPLLDRPGEGSYNRYYSHVDYRDYDEGRSFSHDRRSGPPHRGDESGYRWTRDDHSASRQPEYSRDGVSPC

SEQ ID NO: 61997 - protein, 37 aa, Homo sapiens
  Payload ID: 12395
  Gene Symbol: PPHLN1
  Gene Name: periphilin 1
  ENSP ID: ENSP00000449031
MTQKHQYFIQESDGYNRLVNIVPKKPPLLDRPGEGSY

SEQ ID NO: 61998 - protein, 319 aa, Homo sapiens
  Payload ID: 12395
  Gene Symbol: PPHLN1
  Gene Name: periphilin 1
  Uniprot ID: Q8NEY8
  ENSP ID: ENSP00000449331
MAYRRDEMWSEGRYEYERIPRERAPPRSHPSDESGYRWTRDDHSASRQPEYRDMRDGFRRKSFYSSHYARERSPYKRDNTFFRESPVGRKDSPHSRSGSSVSSRSYSPERSKSYSFHQSQHRKSVRPGASYKRQNEGNPERDKERPVQSLKTSRDTSPSSGSAVSSSKVLDKPSRLTEKELAEAASKWAAEKLEKSDESNLPEISEYEAGSTAPLFTDQPEEPESNTTHGIELFEDSQLTTRSKAIASKTKEIEQVYRQDCETFGMVVKMLIEKDPSLEKSIQFALRQNLHEIGERCVEELKHFIAEYDTSTQDFGEPF

SEQ ID NO: 61999 - protein, 168 aa, Homo sapiens
  Payload ID: 12395
  Gene Symbol: PPHLN1
  Gene Name: periphilin 1
  ENSP ID: ENSP00000449772
MWSEGRYEYERIPRERAPPRSHPSDGYNRLVNIVPKKPPLLDRPGEGSYNRYYSHVDYRDYDEGRSFSHDRRSGPPHRGDESGYRWTRDDHSASRQPEYRDMRDGFRRKSFYSSHYARERSPYKRDNTFFRESPVGRKDSPHSRSGSSVSSRSYSPERSKSYSFHQSQ

SEQ ID NO: 62000 - protein, 161 aa, Homo sapiens
  Payload ID: 12395
  Gene Symbol: PPHLN1
  Gene Name: periphilin 1
  ENSP ID: ENSP00000450274
MAYRRDEMWSEGRYEYERIPRERAPPRSHPSDGYNRLVNIVPKKPPLLDRPGEGSYNRYYSHVDYRDYDEGRSFSHDRRSGPPHRGDESGYRWTRDDHSASRQPEYRDMRDGFRRKSFYSSHYARERSPYKRDNTFFRESPVGRKDSPHSRSGSSVSSRSY

SEQ ID NO: 62001 - protein, 52 aa, Homo sapiens
  Payload ID: 12395
  Gene Symbol: PPHLN1
  Gene Name: periphilin 1
  ENSP ID: ENSP00000450346
MAYRRDEMWSEGRYEYERIPRERAPPRSHPSDESGYRWTRDDHSASRQPEYR

SEQ ID NO: 62002 - protein, 434 aa, Homo sapiens; identical to SEQ ID NO: 61994
  Payload ID: 12395
  Gene Symbol: PPHLN1
  Gene Name: periphilin 1
  Uniprot ID: Q8NEY8
  ENSP ID: ENSP00000477681

SEQ ID NO: 62003 - protein, 348 aa, Homo sapiens; identical to SEQ ID NO: 61993
  Payload ID: 12395
  Gene Symbol: PPHLN1
  Gene Name: periphilin 1
  Uniprot ID: Q8NEY8
  ENSP ID: ENSP00000478872

SEQ ID NO: 62004 - protein, 458 aa, Homo sapiens; identical to SEQ ID NO: 61991
  Payload ID: 12395
  Gene Symbol: PPHLN1
  Gene Name: periphilin 1
  Uniprot ID: Q8NEY8
  ENSP ID: ENSP00000479913

SEQ ID NO: 62005 - protein, 1756 aa, Homo sapiens
  Payload ID: 12396
  Gene Symbol: PPL
  Gene Name: periplakin
  Uniprot ID: O60437
  ENSP ID: ENSP00000340510
MNSLFRKRNKGKYSPTVQTRSISNKELSELIEQLQKNADQVEKNIVDTEAKMQSDLARLQEGRQPEHRDVTLQKVLDSEKLLYVLEADAAIAKHMKHPQGDMIAEDIRQLKERVTNLRGKHKQIYRLAVKEVDPQVNWAALVEEKLDKLNNQSFGTDLPLVDHQVEEHNIFHNEVKAIGPHLAKDGDKEQNSELRAKYQKLLAASQARQQHLSSLQDYMQRCTNELYWLDQQAKGRMQYDWSDRNLDYPSRRRQYENFINRNLEAKEERINKLHSEGDQLLAAEHPGRNSIEAHMEAVHADWKEYLNLLICEESHLKYMEDYHQFHEDVKDAQELLRKVDSDLNQKYGPDFKDRYQIELLLRELDDQEKVLDKYEDVVQGLQKRGQQVVPLKYRRETPLKPIPVEALCDFEGEQGLISRGYSYTLQKNNGESWELMDSAGNKLIAPAVCFVIPPTDPEALALADSLGSQYRSVRQKAAGSKRTLQQRYEVLKTENPGDASDLQGRQLLAGLDKVASDLDRQEKAITGILRPPLEQGRAVQDSAERAKDLKNITNELLRIEPEKTRSTAEGEAFIQALPGSGTTPLLRTRVEDTNRKYEHLLQLLDLAQEKVDVANRLEKSLQQSWELLATHENHLNQDDTVPESSRVLDSKGQELAAMACELQAQKSLLGEVEQNLQAAKQCSSTLASRFQEHCPDLERQEAEVHKLGQRFNNLRQQVERRAQSLQSAKAAYEHFHRGHDHVLQFLVSIPSYEPQETDSLSQMETKLKNQKNLLDEIASREQEVQKICANSQQYQQAVKDYELEAEKLRSLLDLENGRRSHVSKRARLQSPATKVKEEEAALAAKFTEVYAINRQRLQNLEFALNLLRQQPEVEVTHETLQRNRPDSGVEEAWKIRKELDEETERRRQLENEVKSTQEEIWTLRNQGPQESVVRKEVLKKVPDPVLEESFQQLQRTLAEEQHKNQLLQEELEALQLQLRALEQETRDGGQEYVVKEVLRIEPDRAQADEVLQLREELEALRRQKGAREAEVLLLQQRVAALAEEKSRAQEKVTEKEVVKLQNDPQLEAEYQQLQEDHQRQDQLREKQEEELSFLQDKLKRLEKERAMAEGKITVKEVLKVEKDAATEREVSDLTRQYEDEAAKARASQREKTELLRKIWALEEENAKVVVQEKVREIVRPDPKAESEVANLRLELVEQERKYRGAEEQLRSYQSELEALRRRGPQVEVKEVTKEVIKYKTDPEMEKELQRLREEIVDKTRLIERCDLEIYQLKKEIQALKDTKPQVQTKEVVQEILQFQEDPQTKEEVASLRAKLSEEQKKQVDLERERASQEEQIARKEEELSRVKERVVQQEVVRYEEEPGLRAEASAFAESIDVELRQIDKLRAELRRLQRRRTELERQLEELERERQARREAEREVQRLQQRLAALEQEEAEAREKVTHTQKVVLQQDPQQAREHALLRLQLEEEQHRRQLLEGELETLRRKLAALEKAEVKEKVVLSESVQVEKGDTEQEIQRLKSSLEEESRSKRELDVEVSRLEARLSELEFHNSKSSKELDFLREENHKLQLERQNLQLETRRLQSEINMAATETRDLRNMTVADSGTNHDSRLWSLERELDDLKRLSKDKDLEIDELQKRLGSVAVKREQRENHLRRSIVVIHPDTGRELSPEEAHRAGLIDWNMFVKLRSQECDWEEISVKGPNGESSVIHDRKSGKKFSIEEALQSGRLTPAQYDRYVNKDMSIQELAVLVSGQK

SEQ ID NO: 62006 - protein, 1754 aa, Homo sapiens
  Payload ID: 12396
  Gene Symbol: PPL
  Gene Name: periplakin
  ENSP ID: ENSP00000465640
MNSLFRKRNKGKYSPTVQTRSISNKELSELIEQLQKNADQVEKNIVDTEAKMQSDLARLQEGRQPEHRDVTLQKVLDSEKLLYVLEADAAIAKHMKHPQGDMIAEDIRQLKERVTNLRGKHKQIYRLAVKEVDPQVNWAALVEEKLDKLNNQSFGTDLPLVDHQVEEHNIFHNEVKAIGPHLAKDGDKNSELRAKYQKLLAASQARQQHLSSLQDYMQRCTNELYWLDQQAKGRMQYDWSDRNLDYPSRRRQYENFINRNLEAKEERINKLHSEGDQLLAAEHPGRNSIEAHMEAVHADWKEYLNLLICEESHLKYMEDYHQFHEDVKDAQELLRKVDSDLNQKYGPDFKDRYQIELLLRELDDQEKVLDKYEDVVQGLQKRGQQVVPLKYRRETPLKPIPVEALCDFEGEQGLISRGYSYTLQKNNGESWELMDSAGNKLIAPAVCFVIPPTDPEALALADSLGSQYRSVRQKAAGSKRTLQQRYEVLKTENPGDASDLQGRQLLAGLDKVASDLDRQEKAITGILRPPLEQGRAVQDSAERAKDLKNITNELLRIEPEKTRSTAEGEAFIQALPGSGTTPLLRTRVEDTNRKYEHLLQLLDLAQEKVDVANRLEKSLQQSWELLATHENHLNQDDTVPESSRVLDSKGQELAAMACELQAQKSLLGEVEQNLQAAKQCSSTLASRFQEHCPDLERQEAEVHKLGQRFNNLRQQVERRAQSLQSAKAAYEHFHRGHDHVLQFLVSIPSYEPQETDSLSQMETKLKNQKNLLDEIASREQEVQKICANSQQYQQAVKDYELEAEKLRSLLDLENGRRSHVSKRARLQSPATKVKEEEAALAAKFTEVYAINRQRLQNLEFALNLLRQQPEVEVTHETLQRNRPDSGVEEAWKIRKELDEETERRRQLENEVKSTQEEIWTLRNQGPQESVVRKEVLKKVPDPVLEESFQQLQRTLAEEQHKNQLLQEELEALQLQLRALEQETRDGGQEYVVKEVLRIEPDRAQADEVLQLREELEALRRQKGAREAEVLLLQQRVAALAEEKSRAQEKVTEKEVVKLQNDPQLEAEYQQLQEDHQRQDQLREKQEEELSFLQDKLKRLEKERAMAEGKITVKEVLKVEKDAATEREVSDLTRQYEDEAAKARASQREKTELLRKIWALEEENAKVVVQEKVREIVRPDPKAESEVANLRLELVEQERKYRGAEEQLRSYQSELEALRRRGPQVEVKEVTKEVIKYKTDPEMEKELQRLREEIVDKTRLIERCDLEIYQLKKEIQALKDTKPQVQTKEVVQEILQFQEDPQTKEEVASLRAKLSEEQKKQVDLERERASQEEQIARKEEELSRVKERVVQQEVVRYEEEPGLRAEASAFAESIDVELRQIDKLRAELRRLQRRRTELERQLEELERERQARREAEREVQRLQQRLAALEQEEAEAREKVTHTQKVVLQQDPQQAREHALLRLQLEEEQHRRQLLEGELETLRRKLAALEKAEVKEKVVLSESVQVEKGDTEQEIQRLKSSLEEESRSKRELDVEVSRLEARLSELEFHNSKSSKELDFLREENHKLQLERQNLQLETRRLQSEINMAATETRDLRNMTVADSGTNHDSRLWSLERELDDLKRLSKDKDLEIDELQKRLGSVAVKREQRENHLRRSIVVIHPDTGRELSPEEAHRAGLIDWNMFVKLRSQECDWEEISVKGPNGESSVIHDRKSGKKFSIEEALQSGRLTPAQYDRYVNKDMSIQELAVLVSGQK

SEQ ID NO: 62007 - protein, 1115 aa, Homo sapiens
  Payload ID: 12396
  Gene Symbol: PPL
  Gene Name: periplakin
  ENSP ID: ENSP00000467699
MQSDLARLQEGRQPEHRDVTLQKVLDSEKLLYVLEADAAIAKHMKHPQGDMIAEDIRQLKERVTNLRGKHKQIYRLAVKEVDPQAQKSLLGEVEQNLQAAKQCSSTLASRFQEHCPDLERQEAEVHKLGQRFNNLRQQVERRAQSLQSAKAAYEHFHRGHDHVLQFLVSIPSYEPQETDSLSQMETKLKNQKNLLDEIASREQEVQKICANSQQYQQAVKDYELEAEKLRSLLDLENGRRSHVSKRARLQSPATKVKEEEAALAAKFTEVYAINRQRLQNLEFALNLLRQQPEVEVTHETLQRNRPDSGVEEAWKIRKELDEETERRRQLENEVKSTQEEIWTLRNQGPQESVVRKEVLKKVPDPVLEESFQQLQRTLAEEQHKNQLLQEELEALQLQLRALEQETRDGGQEYVVKEVLRIEPDRAQADEVLQLREELEALRRQKGAREAEVLLLQQRVAALAEEKSRAQEKVTEKEVVKLQNDPQLEAEYQQLQEDHQRQDQLREKQEEELSFLQDKLKRLEKERAMAEGKITVKEVLKVEKDAATEREVSDLTRQYEDEAAKARASQREKTELLRKIWALEEENAKVVVQEKVREIVRPDPKAESEVANLRLELVEQERKYRGAEEQLRSYQSELEALRRRGPQVEVKEVTKEVIKYKTDPEMEKELQRLREEIVDKTRLIERCDLEIYQLKKEIQALKDTKPQVQTKEVVQEILQFQEDPQTKEEVASLRAKLSEEQKKQVDLERERASQEEQIARKEEELSRVKERVVQQEVVRYEEEPGLRAEASAFAESIDVELRQIDKLRAELRRLQRRRTELERQLEELERERQARREAEREVQRLQQRLAALEQEEAEAREKVTHTQKVVLQQDPQQAREHALLRLQLEEEQHRRQLLEGELETLRRKLAALEKAEVKEKVVLSESVQVEKGDTEQEIQRLKSSLEEESRSKRELDVEVSRLEARLSELEFHNSKSSKELDFLREENHKLQLERQNLQLETRRLQSEINMAATETRDLRNMTVADSGTNHDSRLWSLERELDDLKRLSKDKDLEIDELQKRLGSVAVKREQRENHLRRSIVVIHPDTGRELSPEEAHRAGLIDWNMFVKLRSQECD

SEQ ID NO: 62008 - protein, 1479 aa, Homo sapiens
  Payload ID: 12397
  Gene Symbol: PXDN
  Gene Name: peroxidasin
  Uniprot ID: Q92626
  ENSP ID: ENSP00000252804
MAKRSRGPGRRCLLALVLFCAWGTLAVVAQKPGAGCPSRCLCFRTTVRCMHLLLEAVPAVAPQTSILDLRFNRIREIQPGAFRRLRNLNTLLLNNNQIKRIPSGAFEDLENLKYLYLYKNEIQSIDRQAFKGLASLEQLYLHFNQIETLDPDSFQHLPKLERLFLHNNRITHLVPGTFNHLESMKRLRLDSNTLHCDCEILWLADLLKTYAESGNAQAAAICEYPRRIQGRSVATITPEELNCERPRITSEPQDADVTSGNTVYFTCRAEGNPKPEIIWLRNNNELSMKTDSRLNLLDDGTLMIQNTQETDQGIYQCMAKNVAGEVKTQEVTLRYFGSPARPTFVIQPQNTEVLVGESVTLECSATGHPPPRISWTRGDRTPLPVDPRVNITPSGGLYIQNVVQGDSGEYACSATNNIDSVHATAFIIVQALPQFTVTPQDRVVIEGQTVDFQCEAKGNPPPVIAWTKGGSQLSVDRRHLVLSSGTLRISGVALHDQGQYECQAVNIIGSQKVVAHLTVQPRVTPVFASIPSDTTVEVGANVQLPCSSQGEPEPAITWNKDGVQVTESGKFHISPEGFLTINDVGPADAGRYECVARNTIGSASVSMVLSVNVPDVSRNGDPFVATSIVEAIATVDRAINSTRTHLFDSRPRSPNDLLALFRYPRDPYTVEQARAGEIFERTLQLIQEHVQHGLMVDLNGTSYHYNDLVSPQYLNLIANLSGCTAHRRVNNCSDMCFHQKYRTHDGTCNNLQHPMWGASLTAFERLLKSVYENGFNTPRGINPHRLYNGHALPMPRLVSTTLIGTETVTPDEQFTHMLMQWGQFLDHDLDSTVVALSQARFSDGQHCSNVCSNDPPCFSVMIPPNDSRARSGARCMFFVRSSPVCGSGMTSLLMNSVYPREQINQLTSYIDASNVYGSTEHEARSIRDLASHRGLLRQGIVQRSGKPLLPFATGPPTECMRDENESPIPCFLAGDHRANEQLGLTSMHTLWFREHNRIATELLKLNPHWDGDTIYYETRKIVGAEIQHITYQHWLPKILGEVGMRTLGEYHGYDPGINAGIFNAFATAAFRFGHTLVNPLLYRLDENFQPIAQDHLPLHKAFFSPFRIVNEGGIDPLLRGLFGVAGKMRVPSQLLNTELTERLFSMAHTVALDLAAINIQRGRDHGIPPYHDYRVYCNLSAAHTFEDLKNEIKNPEIREKLKRLYGSTLNIDLFPALVVEDLVPGSRLGPTLMCLLSTQFKRLRDGDRLWYENPGVFSPAQLTQIKQTSLARILCDNADNITRVQSDVFRVAEFPHGYGSCDEIPRVDLRVWQDCCEDCRTRGQFNAFSYHFRGRRSLEFSYQEDKPTKKTRPRKIPSVGRQGEHLSNSTSAFSTRSDASGTNDFREFVLEMQKTITDLRTQIKKLESRLSTTECVDAGGESHANNTKWKKDACTICECKDGQVTCFVEACPPATCAVPVNIPGACCPVCLQKRAEEKP

SEQ ID NO: 62009 - protein, 224 aa, Homo sapiens
  Payload ID: 12397
  Gene Symbol: PXDN
  Gene Name: peroxidasin
  ENSP ID: ENSP00000398363
MAKRSRGPGRRCLLALVLFCAWGTLAVVAQKPGAGCPSRCLCFRTTVRCMHLLLEAVPAVAPQTSILDLRFNRIREIQPGAFRRLRNLNTLLLNNNQIKRIPSGAFEDLENLKYLYLHFNQIETLDPDSFQHLPKLERLFLHNNRITHLVPGTFNHLESMKRLRLDSNTLHCDCEILWLADLLKTYAESGNAQAAAICEYPRRIQGRSVATITPEELNCERPRI

SEQ ID NO: 62010 - protein, 723 aa, Homo sapiens
  Payload ID: 12397
  Gene Symbol: PXDN
  Gene Name: peroxidasin
  ENSP ID: ENSP00000402738
  MOD_RES (1)..(1): Any amino acid
XRGPGRRCLLALVLFCAWGTLAVVAQKPGAGCPSRCLCFRTTVRCMHLLLEAVPAVAPQTSILDLRFNRIREIQPGAFRRLRNLNTLLLNNNQIKRIPSGAFEDLENLKYLYLYKNEIQSIDRQAFKGLASLEQLYLHFNQIETLDPDSFQHLPKLERLFLHNNRITHLVPGTFNHLESMKRLRLDSNTLHCDCEILWLADLLKTYAESGNAQAAAICEYPRRIQGRSVATITPEELNCERPRITSEPQDADVTSGNTVYFTCRAEGNPKPEIIWLRNNNELSMKTDSRLNLLDDGTLMIQNTQETDQGIYQCMAKNVAGEVKTQEVTLRYFGSPARPTFVIQPQNTEVLVGESVTLECSATGHPPPRISWTRGDRTPLPVDPRVNITPSGGLYIQNVVQGDSGEYACSATNNIDSVHATAFIIVQALPQFTVTPQDRVVIEGQTVDFQCEAKGNPPPVIAWTKGGSQLSVDRRHLVLSSGTLRISGVALHDQGQYECQAVNIIGSQKVVAHLTVQPRVTPVFASIPSDTTVEVGANVQLPCSSQGEPEPAITWNKDGVQVTESGKFHISPEGFLTINDVGPADAGRYECVARNTIGSASVSMVLSVNVPDVSRNGDPFVATSIVEAIATVDRAINSTRTHLFDSRPRSPNDLLALFRYPRDPYTVEQARAGEIFERTLQLIQEHVQHGLMVDLNGTSQCQSLFFLLHGLSNGVEHASVKSHS

SEQ ID NO: 62011 - protein, 196 aa, Homo sapiens
  Payload ID: 12397
  Gene Symbol: PXDN
  Gene Name: peroxidasin
  ENSP ID: ENSP00000408701
  MOD_RES (1)..(1): Any amino acid
XGSWFPSAPGLSTTVLLNNNQIKRIPSGAFEDLENLKYLYLYKNEIQSIDRQAFKGLASLEQLYLHFNQIETLDPDSFQHLPKLERLFLHNNRITHLVPGTFNHLESMKRLRLDSNTLHCDCEILWLADLLKTYAESGNAQAAAICEYPRRIQGRSVATITPEELNCERPRITSEPQDADVTSGNTVYFTCRAEGN

SEQ ID NO: 62012 - protein, 76 aa, Homo sapiens
  Payload ID: 12397
  Gene Symbol: PXDN
  Gene Name: peroxidasin
  ENSP ID: ENSP00000414098
  MOD_RES (1)..(1): Any amino acid
XVQSDVFRVAEFPHGYGSCDEIPRVDLRVWQDCCEDCRTRGQFNAFSYHFRGRRSLEFSYQEDKPTKKTRPRKIPR

SEQ ID NO: 62013 - protein, 1463 aa, Homo sapiens
  Payload ID: 12398
  Gene Symbol: PXDNL
  Gene Name: peroxidasin-like
  Uniprot ID: A1KZ92
  ENSP ID: ENSP00000348645
MEPRLFCWTTLFLLAGWCLPGLPCPSRCLCFKSTVRCMHLMLDHIPQVPQQTTVLDLRFNRIREIPGSAFKKLKNLNTLLLNNNHIRKISRNAFEGLENLLYLYLYKNEIHALDKQTFKGLISLEHLYIHFNQLEMLQPETFGDLLRLERLFLHNNKLSKIPAGSFSNLDSLKRLRLDSNALVCDCDLMWLGELLQGFAQHGHTQAAATCEYPRRLHGRAVASVTVEEFNCQSPRITFEPQDVEVPSGNTVYFTCRAEGNPKPEIIWIHNNHSLDLEDDTRLNVFDDGTLMIRNTRESDQGVYQCMARNSAGEAKTQSAMLRYSSLPAKPSFVIQPQDTEVLIGTSTTLECMATGHPHPLITWTRDNGLELDGSRHVATSSGLYLQNITQRDHGRFTCHANNSHGTVQAAANIIVQAPPQFTVTPKDQVVLEEHAVEWLCEADGNPPPVIVWTKTGGQLPVEGQHTVLSSGTLRIDRAAQHDQGQYECQAVSSLGVKKVSVQLTVKPKALAVFTQLPQDTSVEVGKNINISCHAQGEPQPIITWNKEGVQITESGKFHVDDEGTLTIYDAGFPDQGRYECVARNSFGLAVTNMFLTVTAIQGRQAGDDFVESSILDAVQRVDSAINSTRRHLFSQKPHTSSDLLAQFHYPRDPLIVEMARAGEIFEHTLQLIRERVKQGLTVDLEGKEFRYNDLVSPRSLSLIANLSGCTARRPLPNCSNRCFHAKYRAHDGTCNNLQQPTWGAALTAFARLLQPAYRDGIRAPRGLGLPVGSRQPLPPPRLVATVWARAAAVTPDHSYTRMLMHWGWFLEHDLDHTVPALSTARFSDGRPCSSVCTNDPPCFPMNTRHADPRGTHAPCMLFARSSPACASGRPSATVDSVYAREQINQQTAYIDGSNVYGSSERESQALRDPSVPRGLLKTGFPWPPSGKPLLPFSTGPPTECARQEQESPCFLAGDHRANEHLALAAMHTLWFREHNRMATELSALNPHWEGNTVYQEARKIVGAELQHITYSHWLPKVLGDPGTRMLRGYRGYNPNVNAGIINSFATAAFRFGHTLINPILYRLNATLGEISEGHLPFHKALFSPSRIIKEGGIDPVLRGLFGVAAKWRAPSYLLSPELTQRLFSAAYSAAVDSAATIIQRGRDHGIPPYVDFRVFCNLTSVKNFEDLQNEIKDSEIRQKLRKLYGSPGDIDLWPALMVEDLIPGTRVGPTLMCLFVTQFQRLRDGDRFWYENPGVFTPAQLTQLKQASLSRVLCDNGDSIQQVQADVFVKAEYPQDYLNCSEIPKVDLRVWQDCCADCRSRGQFRAVTQESQKKRSAQYSYPVDKDMELSHLRSRQQDKIYVGEDARNVTVLAKTKFSQDFSTFAAEIQETITALREQINKLEARLRQAGCTDVRGVPRKAEERWMKEDCTHCICESGQVTCVVEICPPAPCPSPELVKGTCCPVCRDRGMPSDSPEKR

SEQ ID NO: 62014 - protein, 537 aa, Homo sapiens
  Payload ID: 12398
  Gene Symbol: PXDNL
  Gene Name: peroxidasin-like
  ENSP ID: ENSP00000428114
  MOD_RES (1)..(1): Any amino acid
XAREQINQQTAYIDGSNVYGSSERESQALRDPSVPRGLLKTGFPWPPSGKPLLPFSTGPPTECARQEQESPCFLAGDHRANEHLALAAMHTLWFREHNRMATELSALNPHWEGNTVYQEARKIVGAELQHITYSHWLPKVLGDPGTRMLRGYRGYNPNVNAGIINSFATAAFRFGHTLINPILYRLNATLGEISEGHLPFHKALFSPSRIIKEGGIDPVLRGLFGVAAKWRAPSYLLSPELTQRLFSAAYSAAVDSAATIIQRGRDHGIPPYVDFRVFCNLTSVKNFEDLQNEIKDSEIRQKLRKFWYENPGVFTPAQLTQLKQASLSRVLCDNGDSIQQVQADVFVKAEYPQDYLNCSEIPKVDLRVWQDCCADCRSRGQFRAVTQESQKKRSAQYSYPVDKDMELSHLRSRQQDKIYVGEDARNVTVLAKTKFSQDFSTFAAEIQETITALREQINKLEARLRQAGCTDVRGVPRKAEERWMKEDCTHCICESGQVTCVVEICPPAPCPSPELVKGTCCPVCRDRGMPSDSPEKR

SEQ ID NO: 62015 - protein, 582 aa, Homo sapiens
  Payload ID: 12398
  Gene Symbol: PXDNL
  Gene Name: peroxidasin-like
  ENSP ID: ENSP00000429855
NNLQQPTWGAALTAFARLLQPAYRDGIRAPRGLGLPVGSRQPLPPPRLVATVWARAAAVTPDHSYTRMLMHWGWFLEHDLDHTVPALSTARFSDGRPCSSVCTNDPPCFPMNTRHADPRGTHAPCMLFARSSPACASGRPSATVDSVYAREQINQQTAYIDGSNVYGSSERESQALRDPSVPRGLLKTGFPWPPSGKPLLPFSTGPPTECARQEQESPCFLAGDHRANEHLALAAMHTLWFREHNRMATELSALNPHWEGNTVYQEARKIVGAELQHITYSHWLPKVLGDPGTRMLRGYRGYNPNVNAGIINSFATAAFRFGHTLINPILYRLNATLGEISEGHLPFHKALFSPSRIIKEGGIDPVLRGLFGVAAKWRAPSYLLSPELTQRLFSAAYSAAVDSAATIIQRGRDHGIPPYVDFRVFCNLTSVKNFEDLQNEIKDSEIRQKLRKLYGSPGDIDLWPALMVEDLIPGTRVGPTLMCLFVTQFQRLRDGDRFWYENPGVFTPAQLTQLKQASLSRVLCDNGDSIQQVQADVFVKAEYPQDYLNCSEIPKVDLRVWQDCCADKQAGGTPEAGRVYRC

SEQ ID NO: 62016 - protein, 199 aa, Homo sapiens
  Payload ID: 12399
  Gene Symbol: PRDX1
  Gene Name: peroxiredoxin 1
  Uniprot ID: Q06830
  ENSP ID: ENSP00000262746
MSSGNAKIGHPAPNFKATAVMPDGQFKDISLSDYKGKYVVFFFYPLDFTFVCPTEIIAFSDRAEEFKKLNCQVIGASVDSHFCHLAWVNTPKKQGGLGPMNIPLVSDPKRTIAQDYGVLKADEGISFRGLFIIDDKGILRQITVNDLPVGRSVDETLRLVQAFQFTDKHGEVCPAGWKPGSDTIKPDVQKSKEYFSKQK

SEQ ID NO: 62017 - protein, 97 aa, Homo sapiens
  Payload ID: 12399
  Gene Symbol: PRDX1
  Gene Name: peroxiredoxin 1
  ENSP ID: ENSP00000361150
MSSGNAKIGHPAPNFKATADEGISFRGLFIIDDKGILRQITVNDLPVGRSVDETLRLVQAFQFTDKHGEVCPAGWKPGSDTIKPDVQKSKEYFSKQK

SEQ ID NO: 62018 - protein, 199 aa, Homo sapiens; identical to SEQ ID NO: 62016
  Payload ID: 12399
  Gene Symbol: PRDX1
  Gene Name: peroxiredoxin 1
  Uniprot ID: Q06830
  ENSP ID: ENSP00000361152

SEQ ID NO: 62019 - protein, 171 aa, Homo sapiens
  Payload ID: 12399
  Gene Symbol: PRDX1
  Gene Name: peroxiredoxin 1
  ENSP ID: ENSP00000389047
MSSGNAKIGHPAPNFKATAVMPDGQFKDISLSDYKGKYVVFFFYPLDFTFVCPTEIIAFSDRAEEFKKLNCQVIGASVDSHFCHLAWVNTPKKQGGLGPMNIPLVSDPKRTIAQDYGVLKADEGISFRGLFIIDDKGILRQITVNDLPVGRSVDETLRLVQAFQFTDKHGE

SEQ ID NO: 62020 - protein, 171 aa, Homo sapiens; identical to SEQ ID NO: 62019
  Payload ID: 12399
  Gene Symbol: PRDX1
  Gene Name: peroxiredoxin 1
  ENSP ID: ENSP00000407034

SEQ ID NO: 62021 - protein, 198 aa, Homo sapiens
  Payload ID: 12400
  Gene Symbol: PRDX2
  Gene Name: peroxiredoxin 2
  Uniprot ID: P32119
  ENSP ID: ENSP00000301522
MASGNARIGKPAPDFKATAVVDGAFKEVKLSDYKGKYVVLFFYPLDFTFVCPTEIIAFSNRAEDFRKLGCEVLGVSVDSQFTHLAWINTPRKEGGLGPLNIPLLADVTRRLSEDYGVLKTDEGIAYRGLFIIDGKGVLRQITVNDLPVGRSVDEALRLVQAFQYTDEHGEVCPAGWKPGSDTIKPNVDDSKEYFSKHN

SEQ ID NO: 62022 - protein, 136 aa, Homo sapiens
  Payload ID: 12400
  Gene Symbol: PRDX2
  Gene Name: peroxiredoxin 2
  ENSP ID: ENSP00000334063
MASGNARIGKPAPDFKATAVVDGAFKEVKLSDYKGKYVVLFFYPLDFTFVCPTEIIAFSNRAEDFRKLGCEVLGVSVDSQFTHLAWINTPRKEGGLGPLNIPLLADVTRRLSEDYGVLKTDEGIAYSLSRWLEAWQ

SEQ ID NO: 62023 - protein, 256 aa, Homo sapiens
  Payload ID: 12401
  Gene Symbol: PRDX3
  Gene Name: peroxiredoxin 3
  Uniprot ID: P30048
  ENSP ID: ENSP00000298510
MAAAVGRLLRASVARHVSAIPWGISATAALRPAACGRTSLTNLLCSGSSQAKLFSTSSSCHAPAVTQHAPYFKGTAVVNGEFKDLSLDDFKGKYLVLFFYPLDFTFVCPTEIVAFSDKANEFHDVNCEVVAVSVDSHFSHLAWINTPRKNGGLGHMNIALLSDLTKQISRDYGVLLEGSGLALRGLFIIDPNGVIKHLSVNDLPVGRSVEETLRLVKAFQYVETHGEVCPANWTPDSPTIKPSPAASKEYFQKVNQ

SEQ ID NO: 62024 - protein, 186 aa, Homo sapiens
  Payload ID: 12402
  Gene Symbol: PRDX4
  Gene Name: peroxiredoxin 4
  ENSP ID: ENSP00000368635
MEALPLLAATTPDHGRHRRLLLLPLLLFLLPAGAVQGWETEERPRTREEECHFYAGGQVYPGEASRVSVADHSLHLSKAKISKPAPYWEGTAVIDGEFKELKLTDYRGKYLVFFFYPLDFTFVCPTEIIAFGDRLEEFRSINTEVVACSVDSQFTHLAWSVSYTYIRRKKRMDLLLKHGQITLDMI

SEQ ID NO: 62025 - protein, 271 aa, Homo sapiens
  Payload ID: 12402
  Gene Symbol: PRDX4
  Gene Name: peroxiredoxin 4
  Uniprot ID: Q13162
  ENSP ID: ENSP00000368646
MEALPLLAATTPDHGRHRRLLLLPLLLFLLPAGAVQGWETEERPRTREEECHFYAGGQVYPGEASRVSVADHSLHLSKAKISKPAPYWEGTAVIDGEFKELKLTDYRGKYLVFFFYPLDFTFVCPTEIIAFGDRLEEFRSINTEVVACSVDSQFTHLAWINTPRRQGGLGPIRIPLLSDLTHQISKDYGVYLEDSGHTLRGLFIIDDKGILRQITLNDLPVGRSVDETLRLVQAFQYTDKHGEVCPAGWKPGSETIIPDPAGKLKYFDKLN

SEQ ID NO: 62026 - protein, 185 aa, Homo sapiens
  Payload ID: 12402
  Gene Symbol: PRDX4
  Gene Name: peroxiredoxin 4
  ENSP ID: ENSP00000368654
MDHRSRLRGTGLNRIPGTQSRAPRVPLPFHVQQEAREGEDWEREPPRQRPPIYEPPESEELPDNVMVSKPAPYWEGTAVIDGEFKELKLTDYRGKYLVFFFYPLDFTFVCPTEIIAFGDRLEEFRSINTEVVACSVDSQFTHLAWINTPRRQGGLGPIRIPLLSDLTHQISKDYGVYLEDSGHTL

SEQ ID NO: 62027 - protein, 161 aa, Homo sapiens
  Payload ID: 12402
  Gene Symbol: PRDX4
  Gene Name: peroxiredoxin 4
  ENSP ID: ENSP00000413736
  MOD_RES (1)..(1): Any amino acid
XCPTEIIAFGDRLEEFRSINTEVVACSVDSQFTHLAWINTPRRQGGLGPIRIPLLSDLTHQISKDYGVYLEDSGHTLRGLFIIDDKGILRQITLNDLPVGRSVDETLRLVQAFQYTDKHGEVCPAGWKPGSETIKPEDTMKAWWPRESYNPRSSWKAEVFR

SEQ ID NO: 62028 - protein, 214 aa, Homo sapiens
  Payload ID: 12403
  Gene Symbol: PRDX5
  Gene Name: peroxiredoxin 5
  Uniprot ID: P30044
  ENSP ID: ENSP00000265462
MGLAGVCALRRSAGYILVGGAGGQSAAAAARRYSEGEWASGGVRSFSRAAAAMAPIKVGDAIPAVEVFEGEPGNKVNLAELFKGKKGVLFGVPGAFTPGCSKTHLPGFVEQAEALKAKGVQVVACLSVNDAFVTGEWGRAHKAEGKVRLLADPTGAFGKETDLLLDDSLVSIFGNRRLKRFSMVVQDGIVKALNVEPDGTGLTCSLAPNIISQL

SEQ ID NO: 62029 - protein, 170 aa, Homo sapiens
  Payload ID: 12403
  Gene Symbol: PRDX5
  Gene Name: peroxiredoxin 5
  Uniprot ID: P30044
  ENSP ID: ENSP00000335334
MGLAGVCALRRSAGYILVGGAGGQSAAAAARRYSEGEWASGGVRSFSRAAAAMAPIKVGDAIPAVEVFEGEPGNKVNLAELFKGKKGVLFGVPGAFTPGCSKVRLLADPTGAFGKETDLLLDDSLVSIFGNRRLKRFSMVVQDGIVKALNVEPDGTGLTCSLAPNIISQL

SEQ ID NO: 62030 - protein, 125 aa, Homo sapiens
  Payload ID: 12403
  Gene Symbol: PRDX5
  Gene Name: peroxiredoxin 5
  Uniprot ID: P30044
  ENSP ID: ENSP00000335363
MGLAGVCALRRSAGYILVGGAGGQSAAAAARRYSEGEWASGGVRSFSRAAAAMAPIKVRLLADPTGAFGKETDLLLDDSLVSIFGNRRLKRFSMVVQDGIVKALNVEPDGTGLTCSLAPNIISQL

SEQ ID NO: 62031 - protein, 224 aa, Homo sapiens
  Payload ID: 12404
  Gene Symbol: PRDX6
  Gene Name: peroxiredoxin 6
  Uniprot ID: P30041
  ENSP ID: ENSP00000342026
MPGGLLLGDVAPNFEANTTVGRIRFHDFLGDSWGILFSHPRDFTPVCTTELGRAAKLAPEFAKRNVKLIALSIDSVEDHLAWSKDINAYNCEEPTEKLPFPIIDDRNRELAILLGMLDPAEKDEKGMPVTARVVFVFGPDKKLKLSILYPATTGRNFDEILRVVISLQLTAEKRVATPVDWKDGDSVMVLPTIPEEEAKKLFPKGVFTKELPSGKKYLRYTPQP

SEQ ID NO: 62032 - protein, 1283 aa, Homo sapiens
  Payload ID: 12405
  Gene Symbol: PEX1
  Gene Name: peroxisomal biogenesis factor 1
  Uniprot ID: O43933
  ENSP ID: ENSP00000248633
MWGSDRLAGAGGGGAAVTVAFTNARDCFLHLPRRLVAQLHLLQNQAIEVVWSHQPAFLSWVEGRHFSDQGENVAEINRQVGQKLGLSNGGQVFLKPCSHVVSCQQVEVEPLSADDWEILELHAVSLEQHLLDQIRIVFPKAIFPVWVDQQTYIFIQIVALIPAASYGRLETDTKLLIQPKTRRAKENTFSKADAEYKKLHSYGRDQKGMMKELQTKQLQSNTVGITESNENESEIPVDSSSVASLWTMIGSIFSFQSEKKQETSWGLTEINAFKNMQSKVVPLDNIFRVCKSQPPSIYNASATSVFHKHCAIHVFPWDQEYFDVEPSFTVTYGKLVKLLSPKQQQSKTKQNVLSPEKEKQMSEPLDQKKIRSDHNEEDEKACVLQVVWNGLEELNNAIKYTKNVEVLHLGKVWIPDDLRKRLNIEMHAVVRITPVEVTPKIPRSLKLQPRENLPKDISEEDIKTVFYSWLQQSTTTMLPLVISEEEFIKLETKDGLKEFSLSIVHSWEKEKDKNIFLLSPNLLQKTTIQVLLDPMVKEENSEEIDFILPFLKLSSLGGVNSLGVSSLEHITHSLLGRPLSRQLMSLVAGLRNGALLLTGGKGSGKSTLAKAICKEAFDKLDAHVERVDCKALRGKRLENIQKTLEVAFSEAVWMQPSVVLLDDLDLIAGLPAVPEHEHSPDAVQSQRLAHALNDMIKEFISMGSLVALIATSQSQQSLHPLLVSAQGVHIFQCVQHIQPPNQEQRCEILCNVIKNKLDCDINKFTDLDLQHVAKETGGFVARDFTVLVDRAIHSRLSRQSISTREKLVLTTLDFQKALRGFLPASLRSVNLHKPRDLGWDKIGGLHEVRQILMDTIQLPAKYPELFANLPIRQRTGILLYGPPGTGKTLLAGVIARESRMNFISVKGPELLSKYIGASEQAVRDIFIRAQAAKPCILFFDEFESIAPRRGHDNTGVTDRVVNQLLTQLDGVEGLQGVYVLAATSRPDLIDPALLRPGRLDKCVYCPPPDQVSRLEILNVLSDSLPLADDVDLQHVASVTDSFTGADLKALLYNAQLEALHGMLLSSGLQDGSSSSDSDLSLSSMVFLNHSSGSDDSAGDGECGLDQSLVSLEMSEILPDESKFNMYRLYFGSSYESELGNGTSSDLSSQCLSAPSSMTQDLPGVPGKDQLFSQPPVLRTASQEGCQELTQEQRDQLRADISIIKGRYRSQSGEDESMNQPGPIKTRLAISQSHLMTALGHTRPSISEDDWKNFAELYESFQNPKRRKNQSGTMFRPGQKVTLA

SEQ ID NO: 62033 - protein, 196 aa, Homo sapiens
  Payload ID: 12405
  Gene Symbol: PEX1
  Gene Name: peroxisomal biogenesis factor 1
  ENSP ID: ENSP00000389594
  MOD_RES (1)..(1): Any amino acid
XKKIRSDHNEEDEKACVLQVVWNGLEELNNAIKYTKNVEVLHLGKVWIPDDLRKRLNIEMHAVVRITPVEVTPKIPRSLKLQPRENLPKDISEEDIKTVFYSWLQQSTTTMLPLVISEEEFIKLETKDGLKEFSLSIVHSWEKEKDKNIFLLSPNLLQKTTIQRSEFLRRILLGAHHSQPPGTPFVSAADVSCCRT

SEQ ID NO: 62034 - protein, 1226 aa, Homo sapiens
  Payload ID: 12405
  Gene Symbol: PEX1
  Gene Name: peroxisomal biogenesis factor 1
  ENSP ID: ENSP00000394413
MWGSDRLAGAGGGGAAVTVAFTNARDCFLHLPRRLVAQLHLLQNQAIEVVWSHQPAFLSWVEGRHFSDQGENVAEINRQVGQKLGLSNGGQVFLKPCSHVVSCQQVEVEPLSADDWEILELHAVSLEQHLLDQIRIVFPKAIFPVWVDQQTYIFIQIVALIPAASYGRLETDTKLLIQPKTRRAKENTFSKADAEYKKLHSYGRDQKGMMKELQTKQLQSNTVGITESNENESEIPVDSSSVASLWTMIGSIFSFQSEKKQETSWGLTEINAFKNMQSKVVPLDNIFRVCKSQPPSIYNASATSVFHKHCAIHVFPWDQEYFDVEPSFTVTYGKLVKLLSPKQQQSKTKQNVLSPEKEKQMSEPLDQKKIRSDHNEEDEKACVLQVVWNGLEELNNAIKYTKNVEVLHLGKVWIPDDLRKRLNIEMHAVVRITPVEVTPKIPRSLKLQPRENLPKDISEEDIKTVFYSWLQQSTTTMLPLVISEEEFIKLETKDGLKEFSLSIVHSWEKEKDKNIFLLSPNLLQKTTIQVLLDPMVKEENSEEIDFILPFLKLSSLGGVNSLGVSSLEHITHSLLGRPLSRQLMSLVAGLRNGALLLTGGKGSGKSTLAKAICKEAFDKLDAHVERVDCKALRALNDMIKEFISMGSLVALIATSQSQQSLHPLLVSAQGVHIFQCVQHIQPPNQEQRCEILCNVIKNKLDCDINKFTDLDLQHVAKETGGFVARDFTVLVDRAIHSRLSRQSISTREKLVLTTLDFQKALRGFLPASLRSVNLHKPRDLGWDKIGGLHEVRQILMDTIQLPAKYPELFANLPIRQRTGILLYGPPGTGKTLLAGVIARESRMNFISVKGPELLSKYIGASEQAVRDIFIRAQAAKPCILFFDEFESIAPRRGHDNTGVTDRVVNQLLTQLDGVEGLQGVYVLAATSRPDLIDPALLRPGRLDKCVYCPPPDQVSRLEILNVLSDSLPLADDVDLQHVASVTDSFTGADLKALLYNAQLEALHGMLLSSGLQDGSSSSDSDLSLSSMVFLNHSSGSDDSAGDGECGLDQSLVSLEMSEILPDESKFNMYRLYFGSSYESELGNGTSSDLSSQCLSAPSSMTQDLPGVPGKDQLFSQPPVLRTASQEGCQELTQEQRDQLRADISIIKGRYRSQSGEDESMNQPGPIKTRLAISQSHLMTALGHTRPSISEDDWKNFAELYESFQNPKRRKNQSGTMFRPGQKVTLA

SEQ ID NO: 62035 - protein, 961 aa, Homo sapiens
  Payload ID: 12405
  Gene Symbol: PEX1
  Gene Name: peroxisomal biogenesis factor 1
  Uniprot ID: O43933
  ENSP ID: ENSP00000410438
MWGSDRLAGAGGGGAAVTVAFTNARDCFLHLPRRLVAQLHLLQNQAIEVVWSHQPAFLSWVEGRHFSDQGENVAEINRQVGQKLGLSNGGQIPDDLRKRLNIEMHAVVRITPVEVTPKIPRSLKLQPRENLPKDISEEDIKTVFYSWLQQSTTTMLPLVISEEEFIKLETKDGLKEFSLSIVHSWEKEKDKNIFLLSPNLLQKTTIQVLLDPMVKEENSEEIDFILPFLKLSSLGGVNSLGVSSLEHITHSLLGRPLSRQLMSLVAGLRNGALLLTGGKGSGKSTLAKAICKEAFDKLDAHVERVDCKALRGKRLENIQKTLEVAFSEAVWMQPSVVLLDDLDLIAGLPAVPEHEHSPDAVQSQRLAHALNDMIKEFISMGSLVALIATSQSQQSLHPLLVSAQGVHIFQCVQHIQPPNQEQRCEILCNVIKNKLDCDINKFTDLDLQHVAKETGGFVARDFTVLVDRAIHSRLSRQSISTREKLVLTTLDFQKALRGFLPASLRSVNLHKPRDLGWDKIGGLHEVRQILMDTIQLPAKYPELFANLPIRQRTGILLYGPPGTGKTLLAGVIARESRMNFISVKGPELLSKYIGASEQAVRDIFIRAQAAKPCILFFDEFESIAPRRGHDNTGVTDRVVNQLLTQLDGVEGLQGVYVLAATSRPDLIDPALLRPGRLDKCVYCPPPDQVSRLEILNVLSDSLPLADDVDLQHVASVTDSFTGADLKALLYNAQLEALHGMLLSSGLQDGSSSSDSDLSLSSMVFLNHSSGSDDSAGDGECGLDQSLVSLEMSEILPDESKFNMYRLYFGSSYESELGNGTSSDLSSQCLSAPSSMTQDLPGVPGKDQLFSQPPVLRTASQEGCQELTQEQRDQLRADISIIKGRYRSQSGEDESMNQPGPIKTRLAISQSHLMTALGHTRPSISEDDWKNFAELYESFQNPKRRKNQSGTMFRPGQKVTLA

SEQ ID NO: 62036 - protein, 346 aa, Homo sapiens
  Payload ID: 12406
  Gene Symbol: PEX10
  Gene Name: peroxisomal biogenesis factor 10
  Uniprot ID: O60683
  ENSP ID: ENSP00000288774
MAPAAASPPEVIRAAQKDEYYRGGLRSAAGGALHSLAGARKWLEWRKEVELLSDVAYFGLTTLAGYQTLGEEYVSIIQVDPSRIHVPSSLRRGVLVTLHAVLPYLLDKALLPLEQELQADPDSGRPLQGSLGPGGRGCSGARRWMRHHTATLTEQQRRALLRAVFVLRQGLACLQRLHVAWFYIHGVFYHLAKRLTGITYQALRPDPLRVLMSVAPSALQLRVRSLPGEDLRARVSYRLLGVISLLHLVLSMGLQLYGFRQRQRARKEWRLHRGLSHRRASLEERAVSRNPLCTLCLEERRHPTATPCGHLFCWECITAWCSSKAECPLCREKFPPQKLIYLRHYR

SEQ ID NO: 62037 - protein, 326 aa, Homo sapiens
  Payload ID: 12406
  Gene Symbol: PEX10
  Gene Name: peroxisomal biogenesis factor 10
  Uniprot ID: O60683
  ENSP ID: ENSP00000407922
MAPAAASPPEVIRAAQKDEYYRGGLRSAAGGALHSLAGARKWLEWRKEVELLSDVAYFGLTTLAGYQTLGEEYVSIIQVDPSRIHVPSSLRRGVLVTLHAVLPYLLDKALLPLEQELQADPDSGRPLQGSLGPGGRGCSGARRWMRHHTATLTEQQRRALLRAVFVLRQGLACLQRLHVAWFYIHGVFYHLAKRLTGITYLRVRSLPGEDLRARVSYRLLGVISLLHLVLSMGLQLYGFRQRQRARKEWRLHRGLSHRRASLEERAVSRNPLCTLCLEERRHPTATPCGHLFCWECITAWCSSKAECPLCREKFPPQKLIYLRHYR

SEQ ID NO: 62038 - protein, 209 aa, Homo sapiens
  Payload ID: 12406
  Gene Symbol: PEX10
  Gene Name: peroxisomal biogenesis factor 10
  ENSP ID: ENSP00000423051
MAPAAASPPEVIRAAQKDEYYRGGLRSAAGGALHSLAGARKWLEWRKEVELLSDVAYFGLTTLAGYQTLGEEYVSIIQVDPSRIHVPSSLRRGVLVTLHAVLPYLLDKALLPLEQELQADPDSGRPLQGSLGPGGRGCSGARRWMRHHTATLTEQQRRALLRAVFVLRQGLACLQRLHVAWFYIHGVFYHLAKRLTGITSVSAACPERT

SEQ ID NO: 62039 - protein, 324 aa, Homo sapiens
  Payload ID: 12406
  Gene Symbol: PEX10
  Gene Name: peroxisomal biogenesis factor 10
  ENSP ID: ENSP00000424291
MAPAAASPPEVIRAAQKDEYYRGGLRSAAGGALHSLAGARKWLEWRKEVELLSDVAYFGLTTLAGYQTLGEEYVSIIQVDPSRIHVPSSLRRGVLVTLHAVLPYLLDKALLPLEQELQADPDSGRPLQGSLGPGGRGCSGARRWMRHHTATLTEQQRRALLRAVFVLRQGLACLQRLHVAWFYIHGVFYHLAKRLTGITYLRVRSLPGEDLRARVSYRLLGVISLLHLVLSMGLQLYGFRQRQRARKEWRLHRGLSHRRASLEERAVSRNPLCTLCLEERRHPTATPCGHLFCWECITAWCSSKCPLCREKFPPQKLIYLRHYR

SEQ ID NO: 62040 - protein, 73 aa, Homo sapiens
  Payload ID: 12406
  Gene Symbol: PEX10
  Gene Name: peroxisomal biogenesis factor 10
  ENSP ID: ENSP00000425924
MAPAAASPPEVIRAAQKDEYYRGGLRSAAGGALHSLAGLITLLIDEQIEIPERPHSQQVGELLFDARQLASGL

SEQ ID NO: 62041 - protein, 25 aa, Homo sapiens
  Payload ID: 12406
  Gene Symbol: PEX10
  Gene Name: peroxisomal biogenesis factor 10
  ENSP ID: ENSP00000461951
EIPERPHSQQVGELLFDARQLASGL

SEQ ID NO: 62042 - protein, 30 aa, Homo sapiens
  Payload ID: 12406
  Gene Symbol: PEX10
  Gene Name: peroxisomal biogenesis factor 10
  ENSP ID: ENSP00000464289
MRHHTATLTEQQRRALLRAVFVLRQGLACL

SEQ ID NO: 62043 - protein, 247 aa, Homo sapiens
  Payload ID: 12407
  Gene Symbol: PEX11A
  Gene Name: peroxisomal biogenesis factor 11 alpha
  Uniprot ID: O75192
  ENSP ID: ENSP00000300056
MDAFTRFTNQTQGRDRLFRATQYTCMLLRYLLEPKAGKEKVVMKLKKLESSVSTGRKWFRLGNVVHAIQATEQSIHATDLVPRLCLTLANLNRVIYFICDTILWVRSVGLTSGINKEKWRTRAAHHYYYSLLLSLVRDLYEISLQMKRVTCDRAKKEKSASQDPLWFSVAEEETEWLQSFLLLLFRSLKQHPPLLLDTVKNLCDILNPLDQLGIYKSNPGIIGLGGLVSSIAGMITVAYPQMKLKTR

SEQ ID NO: 62044 - protein, 216 aa, Homo sapiens
  Payload ID: 12407
  Gene Symbol: PEX11A
  Gene Name: peroxisomal biogenesis factor 11 alpha
  Uniprot ID: O75192
  ENSP ID: ENSP00000453492
MDAFTRFTNQTQGRDRLFRATQYTCMLLRYLLEPKAGKEKVVMKLKKLESSVSTGRKSNLNRVIYFICDTILWVRSVGLTSGINKEKWRTRAAHHYYYSLLLSLVRDLYEISLQMKRVTCDRAKKEKSASQDPLWFSVAEEETEWLQSFLLLLFRSLKQHPPLLLDTVKNLCDILNPLDQLGIYKSNPGIIGLGGLVSSIAGMITVAYPQMKLKTR

SEQ ID NO: 62045 - protein, 64 aa, Homo sapiens
  Payload ID: 12407
  Gene Symbol: PEX11A
  Gene Name: peroxisomal biogenesis factor 11 alpha
  ENSP ID: ENSP00000453552
MDAFTRFTNQTQGRDRLFRATQYTCMLLRYLLEPKAGKEKVVMKLKKLESSVSTGRKYKIDLCL

SEQ ID NO: 62046 - protein, 32 aa, Homo sapiens
  Payload ID: 12407
  Gene Symbol: PEX11A
  Gene Name: peroxisomal biogenesis factor 11 alpha
  ENSP ID: ENSP00000453878
MDAFTRFTNQTQGRDRLFRVQTRQCGTCYTGN

SEQ ID NO: 62047 - protein, 259 aa, Homo sapiens
  Payload ID: 12408
  Gene Symbol: PEX11B
  Gene Name: peroxisomal biogenesis factor 11 beta
  Uniprot ID: O96011
  ENSP ID: ENSP00000358312
MDAWVRFSAQSQARERLCRAAQYACSLLGHALQRHGASPELQKQIRQLESHLSLGRKLLRLGNSADALESAKRAVHLSDVVLRFCITVSHLNRALYFACDNVLWAGKSGLAPRVDQEKWAQRSFRYYLFSLIMNLSRDAYEIRLLMEQESSACSRRLKGSGGGVPGGSETGGLGGPGTPGGGLPQLALKLRLQVLLLARVLRGHPPLLLDVVRNACDLFIPLDKLGLWRCGPGIVGLCGLVSSILSILTLIYPWLRLKP

SEQ ID NO: 62048 - protein, 81 aa, Homo sapiens
  Payload ID: 12408
  Gene Symbol: PEX11B
  Gene Name: peroxisomal biogenesis factor 11 beta
  ENSP ID: ENSP00000414018
PGGGLPQLALKLRLQVLLLARVLRGHPPLLLDVVRNACDLFIPLDKLGLWRCGPGIVGLCGLVSSILSILTLIYPWLRLKP

SEQ ID NO: 62049 - protein, 245 aa, Homo sapiens
  Payload ID: 12408
  Gene Symbol: PEX11B
  Gene Name: peroxisomal biogenesis factor 11 beta
  Uniprot ID: O96011
  ENSP ID: ENSP00000437510
MGKLRAAQYACSLLGHALQRHGASPELQKQIRQLESHLSLGRKLLRLGNSADALESAKRAVHLSDVVLRFCITVSHLNRALYFACDNVLWAGKSGLAPRVDQEKWAQRSFRYYLFSLIMNLSRDAYEIRLLMEQESSACSRRLKGSGGGVPGGSETGGLGGPGTPGGGLPQLALKLRLQVLLLARVLRGHPPLLLDVVRNACDLFIPLDKLGLWRCGPGIVGLCGLVSSILSILTLIYPWLRLKP

SEQ ID NO: 62050 - protein, 241 aa, Homo sapiens
  Payload ID: 12409
  Gene Symbol: PEX11G
  Gene Name: peroxisomal biogenesis factor 11 gamma
  Uniprot ID: Q96HA9
  ENSP ID: ENSP00000221480
MASLSGLASALESYRGRDRLIRVLGYCCQLVGGVLVEQCPARSEVGTRLLVVSTQLSHCRTILRLFDDLAMFVYTKQYGLGAQEEDAFVRCVSVLGNLADQLYYPCEHVAWAADARVLHVDSSRWWTLSTTLWALSLLLGVARSLWMLLKLRQRLRSPTAPFTSPLPRGKRRAMEAQMQSEALSLLSNLADLANAVHWLPRGVLWAGRFPPWLVGLMGTISSILSMYQAARAGGQAEATTP

SEQ ID NO: 62051 - protein, 171 aa, Homo sapiens
  Payload ID: 12409
  Gene Symbol: PEX11G
  Gene Name: peroxisomal biogenesis factor 11 gamma
  Uniprot ID: Q96HA9
  ENSP ID: ENSP00000472216
MFVYTKQYGLGAQEEDAFVRCVSVLGNLADQLYYPCEHVAWAADARVLHVDSSRWWTLSTTLWALSLLLGVARSLWMLLKLRQRLRSPTAPFTSPLPRGKRRAMEAQMQSEALSLLSNLADLANAVHWLPRGVLWAGRFPPWLVGLMGTISSILSMYQAARAGGQAEATTP

SEQ ID NO: 62052 - protein, 168 aa, Homo sapiens
  Payload ID: 12409
  Gene Symbol: PEX11G
  Gene Name: peroxisomal biogenesis factor 11 gamma
  ENSP ID: ENSP00000472956
  MOD_RES (1)..(1): Any amino acid
XYRGRDRLIRVLGYCCQLVGGVLVEQCPARSEVGTRLLVVSTQLSHCRTILRLFDDLAMFVYTKQYGLGAQEEDAFVRCVSVLGNLADQLYYPCEHVAWAADARVLHVDSSRWWTLSTTLWALSLLLGVARSLWMLLKLRQRLRSPTAPFTSMYQAARAGGQAEATTP

SEQ ID NO: 62053 - protein, 359 aa, Homo sapiens
  Payload ID: 12410
  Gene Symbol: PEX12
  Gene Name: peroxisomal biogenesis factor 12
  Uniprot ID: O00623
  ENSP ID: ENSP00000225873
MAEHGAHFTAASVADDQPSIFEVVAQDSLMTAVRPALQHVVKVLAESNPTHYGFLWRWFDEIFTLLDLLLQQHYLSRTSASFSENFYGLKRIVMGDTHKSQRLASAGLPKQQLWKSIMFLVLLPYLKVKLEKLVSSLREEDEYSIHPPSSRWKRFYRAFLAAYPFVNMAWEGWFLVQQLRYILGKAQHHSPLLRLAGVQLGRLTVQDIQALEHKPAKASMMQQPARSVSEKINSALKKAVGGVALSLSTGLSVGVFFLQFLDWWYSSENQETIKSLTALPTPPPPVHLDYNSDSPLLPKMKTVCPLCRKTRVNDTVLATSGYVFCYRCVFHYVRSHQACPITGYPTEVQHLIKLYSPEN

SEQ ID NO: 62054 - protein, 221 aa, Homo sapiens
  Payload ID: 12410
  Gene Symbol: PEX12
  Gene Name: peroxisomal biogenesis factor 12
  ENSP ID: ENSP00000466280
MAEHGAHFTAASVADDQPSIFEVVAQDSLMTAVRPALQHVVKVLAESNPTHYGFLWRWFDEIFTLLDLLLQQHYLSRTSASFSENFYGLKRIVMGDTHKSQRLASAGLPKQQLWKSIMFLVLLPYLKVKLEKLVSSLREEDEYSIHPPSSRWKRFYRAFLAAYPFVNMAWEGWFLVQQLRYILGKAQHHSPLLRLAGVQLGRLTVQDIQALEHKPAKASMM

SEQ ID NO: 62055 - protein, 358 aa, Homo sapiens
  Payload ID: 12410
  Gene Symbol: PEX12
  Gene Name: peroxisomal biogenesis factor 12
  ENSP ID: ENSP00000466894
MAEHGAHFTAASVADDQPSIFEVVAQDSLMTAVRPALQHVVKVLAESNPTHYGFLWRWFDEIFTLLDLLLQQHYLSRTSASFSENFYGLKRIVMGDTHKSQRLASAGLPKQQLWKSIMFLVLLPYLKVKLEKLVSSLREEDEYSIHPPSSRWKRFYRAFLAAYPFVNMAWEGWFLVQQLRYILGKAQHHSPLLRLAGVQLGRLTVQDIQALEHKPAKASMMQQPARSVSEKINSALKKAVGGVALSLSTGLSVGVFFLQFLDWWYSSENQETIKSLTALPTPPPPVHLDYNSDSPLLPKMKTVCPLCRKTRVNDTVLATSGYVFCYRCVFHYVRSHQACPITGYPTEVQHLIKLYSPE

SEQ ID NO: 62056 - protein, 359 aa, Homo sapiens; identical to SEQ ID NO: 62053
  Payload ID: 12410
  Gene Symbol: PEX12
  Gene Name: peroxisomal biogenesis factor 12
  Uniprot ID: O00623
  ENSP ID: ENSP00000482609

SEQ ID NO: 62057 - protein, 403 aa, Homo sapiens
  Payload ID: 12411
  Gene Symbol: PEX13
  Gene Name: peroxisomal biogenesis factor 13
  Uniprot ID: Q92968
  ENSP ID: ENSP00000295030
MASQPPPPPKPWETRRIPGAGPGPGPGPTFQSADLGPTLMTRPGQPALTRVPPPILPRPSQQTGSSSVNTFRPAYSSFSSGYGAYGNSFYGGYSPYSYGYNGLGYNRLRVDDLPPSRFVQQAEESSRGAFQSIESIVHAFASVSMMMDATFSAVYNSFRAVLDVANHFSRLKIHFTKVFSAFALVRTIRYLYRRLQRMLGLRRGSENEDLWAESEGTVACLGAEDRAATSAKSWPIFLFFAVILGGPYLIWKLLSTHSDEVTDSINWASGEDDHVVARAEYDFAAVSEEEISFRAGDMLNLALKEQQPKVRGWLLASLDGQTTGLIPANYVKILGKRKGRKTVESSKVSKQQQSFTNPTLTKGATVADSLDEQEAAFESVFVETNKVPVAPDSIGKDGEKQDL

SEQ ID NO: 62058 - protein, 36 aa, Homo sapiens
  Payload ID: 12411
  Gene Symbol: PEX13
  Gene Name: peroxisomal biogenesis factor 13
  ENSP ID: ENSP00000384738
MASQPPPPPKPWETRRIPGAGPGPGPGPTFHVDFGL

SEQ ID NO: 62059 - protein, 63 aa, Homo sapiens
  Payload ID: 12411
  Gene Symbol: PEX13
  Gene Name: peroxisomal biogenesis factor 13
  ENSP ID: ENSP00000405184
MASQPPPPPKPWETRRIPGAGPGPGPGPTFQMASLSLKRRLWSVAVESGICPATASTGSKVSP

SEQ ID NO: 62060 - protein, 54 aa, Homo sapiens
  Payload ID: 12411
  Gene Symbol: PEX13
  Gene Name: peroxisomal biogenesis factor 13
  ENSP ID: ENSP00000405413
MASQPPPPPKPWETRRIPGAGPGPGPGPTFQLWSVAVESGICPATASTGSKVSP

SEQ ID NO: 62061 - protein, 377 aa, Homo sapiens
  Payload ID: 12412
  Gene Symbol: PEX14
  Gene Name: peroxisomal biogenesis factor 14
  Uniprot ID: O75381
  ENSP ID: ENSP00000349016
MASSEQAEQPSQPSSTPGSENVLPREPLIATAVKFLQNSRVRQSPLATRRAFLKKKGLTDEEIDMAFQQSGTAADEPSSLGPATQVVPVQPPHLISQPYSPAGSRWRDYGALAIIMAGIAFGFHQLYKKYLLPLILGGREDRKQLERMEAGLSELSGSVAQTVTQLQTTLASVQELLIQQQQKIQELAHELAAAKATTSTNWILESQNINELKSEINSLKGLLLNRRQFPPSPSAPKIPSWQIPVKSPSPSSPAAVNHHSSSDISPVSNESTSSSPGKEGHSPEGSTVTYHLLGPQEEGEGVVDVKGQVRMEVQGEEEKREDKEDEEDEEDDDVSHVDEEDCLGVQREDRRGGDGQINEQVEKLRRPEGASNESERD

SEQ ID NO: 62062 - protein, 160 aa, Homo sapiens
  Payload ID: 12412
  Gene Symbol: PEX14
  Gene Name: peroxisomal biogenesis factor 14
  ENSP ID: ENSP00000465473
QAEQPSQPSSTPGSENVLPREPLIATAVKFLQNSRVRQSPLATRRAFLKKKGLTDEEIDMAFQQSGTAADEPSSLGPATQVVPVQPPHLISQPYSPAGSRWRDYGALAIIMAGIAFGFHQLYKKYLLPLILGGREDRKQLERMEAGLSELSGSVAQTGKD

SEQ ID NO: 62063 - protein, 346 aa, Homo sapiens
  Payload ID: 12413
  Gene Symbol: PEX16
  Gene Name: peroxisomal biogenesis factor 16
  Uniprot ID: Q9Y5Y5
  ENSP ID: ENSP00000241041
MEKLRLLGLRYQEYVTRHPAATAQLETAVRGFSYLLAGRFADSHELSELVYSASNLLVLLNDGILRKELRKKLPVSLSQQKLLTWLSVLECVEVFMEMGAAKVWGEVGRWLVIALVQLAKAVLRMLLLLWFKAGLQTSPPIVPLDRETQAQPPDGDHSPGNHEQSYVGKRSNRVVRTLQNTPSLHSRHWGAPQQREGRQQQHHEELSATPTPLGLQETIAEFLYIARPLLHLLSLGLWGQRSWKPWLLAGVVDVTSLSLLSDRKGLTRRERRELRRRTILLLYYLLRSPFYDRFSEARILFLLQLLADHVPGVGLVTTSQRAASPCLPARPHTQPWSPPAFLPGHP

SEQ ID NO: 62064 - protein, 336 aa, Homo sapiens
  Payload ID: 12413
  Gene Symbol: PEX16
  Gene Name: peroxisomal biogenesis factor 16
  Uniprot ID: Q9Y5Y5
  ENSP ID: ENSP00000368024
MEKLRLLGLRYQEYVTRHPAATAQLETAVRGFSYLLAGRFADSHELSELVYSASNLLVLLNDGILRKELRKKLPVSLSQQKLLTWLSVLECVEVFMEMGAAKVWGEVGRWLVIALVQLAKAVLRMLLLLWFKAGLQTSPPIVPLDRETQAQPPDGDHSPGNHEQSYVGKRSNRVVRTLQNTPSLHSRHWGAPQQREGRQQQHHEELSATPTPLGLQETIAEFLYIARPLLHLLSLGLWGQRSWKPWLLAGVVDVTSLSLLSDRKGLTRRERRELRRRTILLLYYLLRSPFYDRFSEARILFLLQLLADHVPGVGLVTRPLMDYLPTWQKIYFYSWG

SEQ ID NO: 62065 - protein, 52 aa, Homo sapiens
  Payload ID: 12413
  Gene Symbol: PEX16
  Gene Name: peroxisomal biogenesis factor 16
  ENSP ID: ENSP00000431132
MEKLRLLGLRYQEYVTRHPAATAQLETAVRGFSYLLAGATLTFDQFLLGPDL

SEQ ID NO: 62066 - protein, 160 aa, Homo sapiens
  Payload ID: 12413
  Gene Symbol: PEX16
  Gene Name: peroxisomal biogenesis factor 16
  ENSP ID: ENSP00000431309
MEMGAAKVWGEVGRWLVIALVQLAKAVLRMLLLLWFKAGLQTSPPIVPLDRETQAQPPDGDHSPGNHEQSYVGKRSNRVVRTLQNTPSLHSRHWGAPQQREGRQQQHHEELSATPTPLGLQETIAEFLYIARPLLHLLSLGLWGQRSWKPWLLAGVVDVT

SEQ ID NO: 62067 - protein, 60 aa, Homo sapiens
  Payload ID: 12413
  Gene Symbol: PEX16
  Gene Name: peroxisomal biogenesis factor 16
  ENSP ID: ENSP00000432486
MEKLRLLGLRYQEYVTRHPAATAQLETAVRGFSYLLAGRFADSHELSELGRSSVRLENSH

SEQ ID NO: 62068 - protein, 183 aa, Homo sapiens
  Payload ID: 12413
  Gene Symbol: PEX16
  Gene Name: peroxisomal biogenesis factor 16
  ENSP ID: ENSP00000433045
MEKLRLLGLRYQEYVTRHPAATAQLETAVRGFSYLLAGRFADSHELSELDGDHSPGNHEQSYVGKRSNRVVRTLQNTPSLHSRHWGAPQQREGRQQQHHEELSATPTPLGLQETIAEFLYIARPLLHLLSLGLWGQRSWKPWLLAGVVDVTSLSLLSDRKGLTRRERRELRRRTILLLYYLLR

SEQ ID NO: 62069 - protein, 64 aa, Homo sapiens
  Payload ID: 12413
  Gene Symbol: PEX16
  Gene Name: peroxisomal biogenesis factor 16
  ENSP ID: ENSP00000434060
MEKLRLLGLRYQESIRRFARAVRAGKKLSEVREQSLMVPEPRFKSRSPRFQDSQIVTTSRVFAQ

SEQ ID NO: 62070 - protein, 241 aa, Homo sapiens
  Payload ID: 12413
  Gene Symbol: PEX16
  Gene Name: peroxisomal biogenesis factor 16
  ENSP ID: ENSP00000434654
MEMGAAKVWGEVGRWLVIALVQLAKAVLRMLLLLWFKAGLQTSPPIVPLDRETQAQPPDGDHSPGNHEQSYVGKRSNRVVRTLQNTPSLHSRHWGAPQQREGRQQQHHEELSATPTPLGLQETIAEFLYIARPLLHLLSLGLWGQRSWKPWLLAGVVDVTSLSLLSDRKGLTRRERRELRRRTILLLYYLLRSPFYDRFSEARILFLLQLLADHVPGVGLVTRPLMDYLPTWQKIYFYSWG

SEQ ID NO: 62071 - protein, 299 aa, Homo sapiens
  Payload ID: 12414
  Gene Symbol: PEX19
  Gene Name: peroxisomal biogenesis factor 19
  Uniprot ID: P40855
  ENSP ID: ENSP00000357051
MAAAEEGCSVGAEADRELEELLESALDDFDKAKPSPAPPSTTTAPDASGPQKRSPGDTAKDALFASQEKFFQELFDSELASQATAEFEKAMKELAEEEPHLVEQFQKLSEAAGRVGSDMTSQQEFTSCLKETLSGLAKNATDLQNSSMSEEELTKAMEGLGMDEGDGEGNILPIMQSIMQNLLSKDVLYPSLKEITEKYPEWLQSHRESLPPEQFEKYQEQHSVMCKICEQFEAETPTDSETTQKARFEMVLDLMQQLQDLGHPPKELAGEMPPGLNFDLDALNLSGPPGASGEQCLIM

SEQ ID NO: 62072 - protein, 235 aa, Homo sapiens
  Payload ID: 12414
  Gene Symbol: PEX19
  Gene Name: peroxisomal biogenesis factor 19
  ENSP ID: ENSP00000376054
MESGALDDFDKAKPSPAPPSTTTAPDASGPQKRSPGDTAKDALFASQEKFFQELFDSELASQATAEFEKAMKELAEEEPHLVEQFQKLSEAAGRVGSDMTSQQEFTSCLKETLSGLAKNATDLQNSSMSEEELTKAMEGLGMDEGDGEGNILPIMQSIMQNLLSKDVLYPSLKEITEKYPEWLQSHRESLPPEQFEKYQEQHSVMCKICEQFEAETPTDSETTQKARFEMVLDLM

SEQ ID NO: 62073 - protein, 119 aa, Homo sapiens
  Payload ID: 12414
  Gene Symbol: PEX19
  Gene Name: peroxisomal biogenesis factor 19
  ENSP ID: ENSP00000434567
  MOD_RES (1)..(1): Any amino acid
XEGDGEGNILPIMQSIMQNLLSKDVLYPSLKEITEKYPEWLQSHRESLPPEQFEKYQEQHSVMCKICEQFEAETPTDSETTQKARFEMVLDLMQQLQDLGHPPKELAGEMVSMSYFSRF

SEQ ID NO: 62074 - protein, 40 aa, Homo sapiens
  Payload ID: 12414
  Gene Symbol: PEX19
  Gene Name: peroxisomal biogenesis factor 19
  ENSP ID: ENSP00000434633
MAAAEEGCSVGAEADRELEELLERCPLRFPREVFPGTIRQ

SEQ ID NO: 62075 - protein, 166 aa, Homo sapiens
  Payload ID: 12414
  Gene Symbol: PEX19
  Gene Name: peroxisomal biogenesis factor 19
  ENSP ID: ENSP00000435896
MESGALDDFDKAKPSPAPPSTTTAPDASGPQKRSPGDTAKDALFASQEKFFQELFDSELASQATAEFEKAMKELAEEEPHLVEQFQKLSEAAGRVELQHVGRRADQGHGGARHGRRGWGREHPPHHAEYYAEPTLQGCAVPITEGDHRKVSRMVAESSGISTSRAV

SEQ ID NO: 62076 - protein, 186 aa, Homo sapiens
  Payload ID: 12414
  Gene Symbol: PEX19
  Gene Name: peroxisomal biogenesis factor 19
  ENSP ID: ENSP00000435915
MAAAEEGCSVGAEADRELEELLESALDDFDKAKPSPAPPSTTTAPDASGPQKRSPGDTAKDALFASQEKFFQELFDSELASQATAEFEKAMKELAEEEPHLVEQFQKLSEAAGRVELQHVGRRADQGHGGARHGRRGWGREHPPHHAEYYAEPTLQGCAVPITEGDHRKVSRMVAESSGISTSRAV

SEQ ID NO: 62077 - protein, 305 aa, Homo sapiens
  Payload ID: 12415
  Gene Symbol: PEX2
  Gene Name: peroxisomal biogenesis factor 2
  Uniprot ID: P28328
  ENSP ID: ENSP00000349543
MASRKENAKSANRVLRISQLDALELNKALEQLVWSQFTQCFHGFKPGLLARFEPEVKACLWVFLWRFTIYSKNATVGQSVLNIKYKNDFSPNLRYQPPSKNQKIWYAVCTIGGRWLEERCYDLFRNHHLASFGKVKQCVNFVIGLLKLGGLINFLIFLQRGKFATLTERLLGIHSVFCKPQNICEVGFEYMNRELLWHGFAEFLIFLLPLINVQKLKAKLSSWCIPLTGAPNSDNTLATSGKECALCGEWPTMPHTIGCEHIFCYFCAKSSFLFDVYFTCPKCGTEVHSLQPLKSGIEMSEVNAL

SEQ ID NO: 62078 - protein, 305 aa, Homo sapiens; identical to SEQ ID NO: 62077
  Payload ID: 12415
  Gene Symbol: PEX2
  Gene Name: peroxisomal biogenesis factor 2
  Uniprot ID: P28328
  ENSP ID: ENSP00000428590

SEQ ID NO: 62079 - protein, 305 aa, Homo sapiens; identical to SEQ ID NO: 62077
  Payload ID: 12415
  Gene Symbol: PEX2
  Gene Name: peroxisomal biogenesis factor 2
  Uniprot ID: P28328
  ENSP ID: ENSP00000428638

SEQ ID NO: 62080 - protein, 179 aa, Homo sapiens
  Payload ID: 12415
  Gene Symbol: PEX2
  Gene Name: peroxisomal biogenesis factor 2
  ENSP ID: ENSP00000429304
MASRKENAKSANRVLRISQLDALELNKALEQLVWSQFTQCFHGFKPGLLARFEPEVKACLWVFLWRFTIYSKNATVGQSVLNIKYKNDFSPNLRYQPPSKNQKIWYAVCTIGGRWLEERCYDLFRNHHLASFGKVKQCVNFVIGLLKLGGLINFLIFLQRGKFATLTERLLGIHSVFCK

SEQ ID NO: 62081 - protein, 3 aa, Homo sapiens
  Payload ID: 12415
  Gene Symbol: PEX2
  Gene Name: peroxisomal biogenesis factor 2
  ENSP ID: ENSP00000429740
MAS

SEQ ID NO: 62082 - protein, 305 aa, Homo sapiens
  Payload ID: 12416
  Gene Symbol: PEX26
  Gene Name: peroxisomal biogenesis factor 26
  Uniprot ID: Q7Z412
  ENSP ID: ENSP00000331106
MKSDSSTSAAPLRGLGGPLRSSEPVRAVPARAPAVDLLEEAADLLVVHLDFRAALETCERAWQSLANHAVAEEPAGTSLEVKCSLCVVGIQALAEMDRWQEVLSWVLQYYQVPEKLPPKVLELCILLYSKMQEPGAVLDVVGAWLQDPANQNLPEYGALAEFHVQRVLLPLGCLSEAEELVVGSAAFGEERRLDVLQAIHTARQQQKQEHSGSEEAQKPNLEGSVSHKFLSLPMLVRQLWDSAVSHFFSLPFKKSLLAALILCLLVVRFDPASPSSLHFLYKLAQLFRWIRKAAFSRLYQLRIRD

SEQ ID NO: 62083 - protein, 305 aa, Homo sapiens; identical to SEQ ID NO: 62082
  Payload ID: 12416
  Gene Symbol: PEX26
  Gene Name: peroxisomal biogenesis factor 26
  Uniprot ID: Q7Z412
  ENSP ID: ENSP00000382648

SEQ ID NO: 62084 - protein, 256 aa, Homo sapiens
  Payload ID: 12416
  Gene Symbol: PEX26
  Gene Name: peroxisomal biogenesis factor 26
  Uniprot ID: Q7Z412
  ENSP ID: ENSP00000412441
MKSDSSTSAAPLRGLGGPLRSSEPVRAVPARAPAVDLLEEAADLLVVHLDFRAALETCERAWQSLANHAVAEEPAGTSLEVKCSLCVVGIQALAEMDRWQEVLSWVLQYYQVPEKLPPKVLELCILLYSKMQEPGAVLDVVGAWLQDPANQNLPEYGALAEFHVQRVLLPLGCLSEAEELVVGSAAFGEERRLDVLQAIHTARQQQKQEHSGSEEAQKPNLEASPSSLHFLYKLAQLFRWIRKAAFSRLYQLRIRD

SEQ ID NO: 62085 - protein, 189 aa, Homo sapiens
  Payload ID: 12416
  Gene Symbol: PEX26
  Gene Name: peroxisomal biogenesis factor 26
  ENSP ID: ENSP00000434235
MKSDSSTSAAPLRGLGGPLRSSEPVRAVPARAPAVDLLEEAADLLVVHLDFRAALETCERAWQSLANHAVAEEPAGTSLEVKCSLCVVGIQALAEMDRWQEVLSWVLQYYQVPEKLPPKVLELCGNAYQSTWAKREFRLAMPAGSSSAWNTASRQTALLMLKLARSTMMTPSPPFSARLAMGSMCPGPS

SEQ ID NO: 62086 - protein, 256 aa, Homo sapiens; identical to SEQ ID NO: 62084
  Payload ID: 12416
  Gene Symbol: PEX26
  Gene Name: peroxisomal biogenesis factor 26
  Uniprot ID: Q7Z412
  ENSP ID: ENSP00000482091

SEQ ID NO: 62087 - protein, 373 aa, Homo sapiens
  Payload ID: 12417
  Gene Symbol: PEX3
  Gene Name: peroxisomal biogenesis factor 3
  Uniprot ID: P56589
  ENSP ID: ENSP00000356563
MLRSVWNFLKRHKKKCIFLGTVLGGVYILGKYGQKKIREIQEREAAEYIAQARRQYHFESNQRTCNMTVLSMLPTLREALMQQLNSESLTALLKNRPSNKLEIWEDLKIISFTRSTVAVYSTCMLVVLLRVQLNIIGGYIYLDNAAVGKNGTTILAPPDVQQQYLSSIQHLLGDGLTELITVIKQAVQKVLGSVSLKHSLSLLDLEQKLKEIRNLVEQHKSSSWINKDGSKPLLCHYMMPDEETPLAVQACGLSPRDITTIKLLNETRDMLESPDFSTVLNTCLNRGFSRLLDNMAEFFRPTEQDLQHGNSMNSLSSVSLPLAKIIPIVNGQIHSVCSETPSHFVQDLLTMEQVKDFAANVYEAFSTPQQLEK

SEQ ID NO: 62088 - protein, 182 aa, Homo sapiens
  Payload ID: 12417
  Gene Symbol: PEX3
  Gene Name: peroxisomal biogenesis factor 3
  ENSP ID: ENSP00000356564
MLRSVWNFLKRHKKKCIFLGTVLGVLSMLPTLREALMQQLNSESLTALLKNRPSNKLEIWEDLKIISFTRSTVAVYSTCMLVVLLRVQLNIIGGYIYLDNAAVGKNGTTILAPPDVQQQYLSSIQHLLGDGLTELITVIKQAVQKVLGSVSLKHSLSLLDLEQKLKEIRNLVEQHKSSSWIN

SEQ ID NO: 62089 - protein, 602 aa, Homo sapiens
  Payload ID: 12418
  Gene Symbol: PEX5
  Gene Name: peroxisomal biogenesis factor 5
  Uniprot ID: P50542
  ENSP ID: ENSP00000266563
MAMRELVEAECGGANPLMKLAGHFTQDKALRQEGLRPGPWPPGAPASEAASKPLGVASEDELVAEFLQDQNAPLVSRAPQTFKMDDLLAEMQQIEQSNFRQAPQRAPGVADLALSENWAQEFLAAGDAVDVTQDYNETDWSQEFISEVTDPLSVSPARWAEEYLEQSEEKLWLGEPEGTATDRWYDEYHPEEDLQHTASDFVAKVDDPKLANSEGTSDAWVDQFTRPVNTSALDMEFERAKSAIESDVDFWDKLQAELEEMAKRDAEAHPWLSDYDDLTSATYDKGYQFEEENPLRDHPQPFEEGLRRLQEGDLPNAVLLFEAAVQQDPKHMEAWQYLGTTQAENEQELLAISALRRCLELKPDNQTALMALAVSFTNESLQRQACETLRDWLRYTPAYAHLVTPAEEGAGGAGLGPSKRILGSLLSDSLFLEVKELFLAAVRLDPTSIDPDVQCGLGVLFNLSGEYDKAVDCFTAALSVRPNDYLLWNKLGATLANGNQSEEAVAAYRRALELQPGYIRSRYNLGISCINLGAHREAVEHFLEALNMQRKSRGPRGEGGAMSENIWSTLRLALSMLGQSDAYGAADARDLSTLLTMFGLPQ

SEQ ID NO: 62090 - protein, 631 aa, Homo sapiens
  Payload ID: 12418
  Gene Symbol: PEX5
  Gene Name: peroxisomal biogenesis factor 5
  Uniprot ID: P50542
  ENSP ID: ENSP00000266564
MAMRELVEAECGGANPLMKLAGHFTQDKALRQEGLRPGPWPPGAPASEAASKPLGVASEDELVAEFLQDQNAPLVSRAPQTFKMDDLLAEMQQIEQSNFRQAPQRAPGVADLALSENWAQEFLAAGDAVDVTQDYNETDWSQEFISEVTDPLSVSPARWAEEYLEQSEEKLWLGEPEGTATDRWYDEYHPEEDLQHTASDFVAKVDDPKLANSEFLKFVRQIGEGQVSLESGAGSGRAQAEQWAAEFIQQQGTSDAWVDQFTRPVNTSALDMEFERAKSAIELQAELEEMAKRDAEAHPWLSDYDDLTSATYDKGYQFEEENPLRDHPQPFEEGLRRLQEGDLPNAVLLFEAAVQQDPKHMEAWQYLGTTQAENEQELLAISALRRCLELKPDNQTALMALAVSFTNESLQRQACETLRDWLRYTPAYAHLVTPAEEGAGGAGLGPSKRILGSLLSDSLFLEVKELFLAAVRLDPTSIDPDVQCGLGVLFNLSGEYDKAVDCFTAALSVRPNDYLLWNKLGATLANGNQSEEAVAAYRRALELQPGYIRSRYNLGISCINLGAHREAVEHFLEALNMQRKSRGPRGEGGAMSENIWSTLRLALSMLGQSDAYGAADARDLSTLLTMFGLPQ

SEQ ID NO: 62091 - protein, 410 aa, Homo sapiens
  Payload ID: 12418
  Gene Symbol: PEX5
  Gene Name: peroxisomal biogenesis factor 5
  ENSP ID: ENSP00000379877
MAMRELVEAECGGANPLMKLAGHFTQDKALRQEGLRPGPWPPGAPASEAVSVLEVESPGAASEAASKPLGVASEDELVAEFLQDQNAPLVSRAPQTFKMDDLLAEMQQIEQSNFRQAPQRAPGVADLALSENWAQEFLAAGDAVDVTQDYNETDWSQEFISEVTDPLSVSPARWAEEYLEQSEEKLWLGEPEGTATDRWYDEYHPEEDLQHTASDFVAKVDDPKLANSEGTSDAWVDQFTRPVNTSALDMEFERAKSAIELQAELEEMAKRDAEAHPWLSDYDDLTSATYDKGYQFEEENPLRDHPQPFEEGLRRLQEGDLPNAVLLFEAAVQQDPKHMEAWQYLGTTQAENEQELLAISALRRCLELKPDNQTALMALAVSFTNESLQRQACETLRDWLRYTPAYAHLV

SEQ ID NO: 62092 - protein, 660 aa, Homo sapiens
  Payload ID: 12418
  Gene Symbol: PEX5
  Gene Name: peroxisomal biogenesis factor 5
  ENSP ID: ENSP00000391601
MLLCRAHRVLGLRGARELAVTMAMRELVEAECGGANPLMKLAGHFTQDKALRQEGLRPGPWPPGAPASEAASKPLGVASEDELVAEFLQDQNAPLVSRAPQTFKMDDLLAEMQQIEQSNFRQAPQRAPGVADLALSENWAQEFLAAGDAVDVTQDYNETDWSQEFISEVTDPLSVSPARWAEEYLEQSEEKLWLGEPEGTATDRWYDEYHPEEDLQHTASDFVAKVDDPKLANSEFLKFVRQIGEGQVSLESGAGSGRAQAEQWAAEFIQQQGTSDAWVDQFTRPVNTSALDMEFERAKSAIESDVDFWDKLQAELEEMAKRDAEAHPWLSDYDDLTSATYDKGYQFEEENPLRDHPQPFEEGLRRLQEGDLPNAVLLFEAAVQQDPKHMEAWQYLGTTQAENEQELLAISALRRCLELKPDNQTALMALAVSFTNESLQRQACETLRDWLRYTPAYAHLVTPAEEGAGGAGLGPSKRILGSLLSDSLFLEVKELFLAAVRLDPTSIDPDVQCGLGVLFNLSGEYDKAVDCFTAALSVRPNDYLLWNKLGATLANGNQSEEAVAAYRRALELQPGYIRSRYNLGISCINLGAHREAVEHFLEALNMQRKSRGPRGEGGAMSENIWSTLRLALSMLGQSDAYGAADARDLSTLLTMFGLPQ

SEQ ID NO: 62093 - protein, 639 aa, Homo sapiens
  Payload ID: 12418
  Gene Symbol: PEX5
  Gene Name: peroxisomal biogenesis factor 5
  Uniprot ID: P50542
  ENSP ID: ENSP00000400647
MAMRELVEAECGGANPLMKLAGHFTQDKALRQEGLRPGPWPPGAPASEAASKPLGVASEDELVAEFLQDQNAPLVSRAPQTFKMDDLLAEMQQIEQSNFRQAPQRAPGVADLALSENWAQEFLAAGDAVDVTQDYNETDWSQEFISEVTDPLSVSPARWAEEYLEQSEEKLWLGEPEGTATDRWYDEYHPEEDLQHTASDFVAKVDDPKLANSEFLKFVRQIGEGQVSLESGAGSGRAQAEQWAAEFIQQQGTSDAWVDQFTRPVNTSALDMEFERAKSAIESDVDFWDKLQAELEEMAKRDAEAHPWLSDYDDLTSATYDKGYQFEEENPLRDHPQPFEEGLRRLQEGDLPNAVLLFEAAVQQDPKHMEAWQYLGTTQAENEQELLAISALRRCLELKPDNQTALMALAVSFTNESLQRQACETLRDWLRYTPAYAHLVTPAEEGAGGAGLGPSKRILGSLLSDSLFLEVKELFLAAVRLDPTSIDPDVQCGLGVLFNLSGEYDKAVDCFTAALSVRPNDYLLWNKLGATLANGNQSEEAVAAYRRALELQPGYIRSRYNLGISCINLGAHREAVEHFLEALNMQRKSRGPRGEGGAMSENIWSTLRLALSMLGQSDAYGAADARDLSTLLTMFGLPQ

SEQ ID NO: 62094 - protein, 654 aa, Homo sapiens
  Payload ID: 12418
  Gene Symbol: PEX5
  Gene Name: peroxisomal biogenesis factor 5
  Uniprot ID: P50542
  ENSP ID: ENSP00000407401
MAMRELVEAECGGANPLMKLAGHFTQDKALRQEGLRPGPWPPGAPASEAVSVLEVESPGAASEAASKPLGVASEDELVAEFLQDQNAPLVSRAPQTFKMDDLLAEMQQIEQSNFRQAPQRAPGVADLALSENWAQEFLAAGDAVDVTQDYNETDWSQEFISEVTDPLSVSPARWAEEYLEQSEEKLWLGEPEGTATDRWYDEYHPEEDLQHTASDFVAKVDDPKLANSEFLKFVRQIGEGQVSLESGAGSGRAQAEQWAAEFIQQQGTSDAWVDQFTRPVNTSALDMEFERAKSAIESDVDFWDKLQAELEEMAKRDAEAHPWLSDYDDLTSATYDKGYQFEEENPLRDHPQPFEEGLRRLQEGDLPNAVLLFEAAVQQDPKHMEAWQYLGTTQAENEQELLAISALRRCLELKPDNQTALMALAVSFTNESLQRQACETLRDWLRYTPAYAHLVTPAEEGAGGAGLGPSKRILGSLLSDSLFLEVKELFLAAVRLDPTSIDPDVQCGLGVLFNLSGEYDKAVDCFTAALSVRPNDYLLWNKLGATLANGNQSEEAVAAYRRALELQPGYIRSRYNLGISCINLGAHREAVEHFLEALNMQRKSRGPRGEGGAMSENIWSTLRLALSMLGQSDAYGAADARDLSTLLTMFGLPQ

SEQ ID NO: 62095 - protein, 639 aa, Homo sapiens; identical to SEQ ID NO: 62093
  Payload ID: 12418
  Gene Symbol: PEX5
  Gene Name: peroxisomal biogenesis factor 5
  Uniprot ID: P50542
  ENSP ID: ENSP00000410159

SEQ ID NO: 62096 - protein, 168 aa, Homo sapiens
  Payload ID: 12418
  Gene Symbol: PEX5
  Gene Name: peroxisomal biogenesis factor 5
  ENSP ID: ENSP00000437938
MAMRELVEAECGGANPLMKLAGHFTQDKALRQEGLRPGPWPPGAPASEAASKPLGVASEDELVAEFLQDQNAPLVSRAPQTFKMDDLLAEMQQIEQSNFRQAPQRAPGVADLALSENWAQEFLAAGDAVDVTQDYNETDWSQEFISEVTVLTRSRYDEYHPEEDLQHT

SEQ ID NO: 62097 - protein, 102 aa, Homo sapiens
  Payload ID: 12418
  Gene Symbol: PEX5
  Gene Name: peroxisomal biogenesis factor 5
  ENSP ID: ENSP00000438494
MAMRELVEAECGGANPLMKLAGHFTQDKALRQEGLRPGPWPPGAPASEAASKPLGVASEDELVAEFLQDQNAPLVSRAPQTFKMDDLLAEMQQIEQSNFRQA

SEQ ID NO: 62098 - protein, 118 aa, Homo sapiens
  Payload ID: 12418
  Gene Symbol: PEX5
  Gene Name: peroxisomal biogenesis factor 5
  ENSP ID: ENSP00000438772
MDDLLAEMQQIEQSNFRQAPQRAPGVADLALSENWAQEFLAAGDAVDVTQDYNETDWSQEFISEVTDPLSVSPARWAEEYLEQSEEKLWLGEPEGTATDRWYDEYHPEEDLQHTASDF

SEQ ID NO: 62099 - protein, 248 aa, Homo sapiens
  Payload ID: 12418
  Gene Symbol: PEX5
  Gene Name: peroxisomal biogenesis factor 5
  ENSP ID: ENSP00000439025
MAMRELVEAECGGANPLMKLAGHFTQDKALRQEGLRPGPWPPGAPASEAASKPLGVASEDELVAEFLQDQNAPLVSRAPQTFKMDDLLAEMQQIEQSNFRQAPQRAPGVADLALSENWAQEFLAAGDAVDVTQDYNETDWSQEFISEVTDPLSVSPARWAEEYLEQSEEKLWLGEPEGTATDRWYDEYHPEEDLQHTASDFVAKVDDPKLANSEFLKFVRQIGEGQVSLESGAGSGRAQAEQWAAEFI

SEQ ID NO: 62100 - protein, 128 aa, Homo sapiens
  Payload ID: 12418
  Gene Symbol: PEX5
  Gene Name: peroxisomal biogenesis factor 5
  ENSP ID: ENSP00000440711
MDDLLAEMQQIEQSNFRQAPQRAPGVADLALSENWAQEFLAAGDAVDVTQDYNETDWSQEFISEVTDPLSVSPARWAEEYLEQSEEKLWLGEPEGTATDRWYDEYHPEEDLQHTASDFVAKVDDPKLA

SEQ ID NO: 62101 - protein, 104 aa, Homo sapiens
  Payload ID: 12418
  Gene Symbol: PEX5
  Gene Name: peroxisomal biogenesis factor 5
  ENSP ID: ENSP00000440833
MAMRELVEAECGGANPLMKLAGHFTQDKALRQEGLRPGPWPPGAPASEAASKPLGVASEDELVAEFLQDQNAPLVSRAPQTFKMDDLLAEMQQIEQSNFRQAPQ

SEQ ID NO: 62102 - protein, 115 aa, Homo sapiens
  Payload ID: 12418
  Gene Symbol: PEX5
  Gene Name: peroxisomal biogenesis factor 5
  ENSP ID: ENSP00000441553
MDDLLAEMQQIEQSNFRQAPQRAPGVADLALSENWAQEFLAAGDAVDVTQDYNETDWSQEFISEVTDPLSVSPARWAEEYLEQSEEKLWLGEPEGTATDRWYDEYHPEEDLQHTA

SEQ ID NO: 62103 - protein, 272 aa, Homo sapiens
  Payload ID: 12418
  Gene Symbol: PEX5
  Gene Name: peroxisomal biogenesis factor 5
  ENSP ID: ENSP00000443500
MAMRELVEAECGGANPLMKLAGHFTQDKALRQEGLRPGPWPPGAPASEALVAEFLQDQNAPLVSRAPQTFKMDDLLAEMQQIEQSNFRQAPQRAPGVADLALSENWAQEFLAAGDAVDVTQDYNETDWSQEFISEVTDPLSVSPARWAEEYLEQSEEKLWLGEPEGTATDRWYDEYHPEEDLQHTASDFVAKVDDPKLANSEGTSDAWVDQFTRPVNTSALDMEFERAKSAIESDVDFWDKLQAELEEMAKRDAEAHPWLSDYDDLTSATYD

SEQ ID NO: 62104 - protein, 31 aa, Homo sapiens
  Payload ID: 12418
  Gene Symbol: PEX5
  Gene Name: peroxisomal biogenesis factor 5
  ENSP ID: ENSP00000444787
  MOD_RES (1)..(1): Any amino acid
XALSMLGQSDAYGAADARDLSTLLTMFGLPQ

SEQ ID NO: 62105 - protein, 114 aa, Homo sapiens
  Payload ID: 12418
  Gene Symbol: PEX5
  Gene Name: peroxisomal biogenesis factor 5
  ENSP ID: ENSP00000445630
MAMRELVEAECGGANPLMKLAGHFTQDKALRQEGLRPGPWPPGAPASEAASKPLGVASEDELVAEFLQDQNAPLVSRAPQTFKMDDLLAEMQQIEQSNFRQAPQRAPGVADLAL

SEQ ID NO: 62106 - protein, 624 aa, Homo sapiens
  Payload ID: 12419
  Gene Symbol: PEX5L
  Gene Name: peroxisomal biogenesis factor 5-like
  Uniprot ID: Q8IYB4
  ENSP ID: ENSP00000263962
MYQGHMQVVGVTLKKKWHCLQKSDLTLALGKGSRAADKAVAMVMKEIPREESAEEKPLLTMTSQLVNEQQESRPLLSPSIDDFLCETKSEAIARPVTSNTAVLTTGLDLLDLSEPVSQTQTKAKKSEPSSKTSSLKKKADGSDLISTDAEQRGQPLRVPETSSLDLDIQTQLEKWDDVKFHGDRNTKGHPMAERKSSSSRTGSKELLWSSEHRSQPELSGGKSALNSESASELELVAPTQARLTKEHRWGSALLSRNHSLEEEFERAKAAVESDTEFWDKMQAEWEEMARRNWISENQEAQNQVTISASEKGYYFHTENPFKDWPGAFEEGLKRLKEGDLPVTILFMEAAILQDPGDAEAWQFLGITQAENENEQAAIVALQRCLELQPNNLKALMALAVSYTNTGHQQDACDALKNWIKQNPKYKYLVKSKKGSPGLTRRMSKSPVDSSVLEGVKELYLEAAHQNGDMIDPDLQTGLGVLFHLSGEFNRAIDAFNAALTVRPEDYSLWNRLGATLANGDRSEEAVEAYTRALEIQPGFIRSRYNLGISCINLGAYREAVSNFLTALSLQRKSRNQQQVPHPAISGNIWAALRIALSLMDQPELFQAANLGDLDVLLRAFNLDP

SEQ ID NO: 62107 - protein, 518 aa, Homo sapiens
  Payload ID: 12419
  Gene Symbol: PEX5L
  Gene Name: peroxisomal biogenesis factor 5-like
  Uniprot ID: Q8IYB4
  ENSP ID: ENSP00000376420
MVMKEIPREESAEEKPLLTMTSQLVNEQQESRPLLSPSIDDFLCETKSEAIARPVTSNTADIQTQLEKWDDVKFHGDRNTKGHPMAERKSSSSRTGSKELLWSSEHRSQPELSGGKSALNSESASELELVAPTQARLTKEHRWGSALLSRNHSLEEEFERAKAAVESDTEFWDKMQAEWEEMARRNWISENQEAQNQVTISASEKGYYFHTENPFKDWPGAFEEGLKRLKEGDLPVTILFMEAAILQDPGDAEAWQFLGITQAENENEQAAIVALQRCLELQPNNLKALMALAVSYTNTGHQQDACDALKNWIKQNPKYKYLVKSKKGSPGLTRRMSKSPVDSSVLEGVKELYLEAAHQNGDMIDPDLQTGLGVLFHLSGEFNRAIDAFNAALTVRPEDYSLWNRLGATLANGDRSEEAVEAYTRALEIQPGFIRSRYNLGISCINLGAYREAVSNFLTALSLQRKSRNQQQVPHPAISGNIWAALRIALSLMDQPELFQAANLGDLDVLLRAFNLDP

SEQ ID NO: 62108 - protein, 518 aa, Homo sapiens; identical to SEQ ID NO: 62107
  Payload ID: 12419
  Gene Symbol: PEX5L
  Gene Name: peroxisomal biogenesis factor 5-like
  Uniprot ID: Q8IYB4
  ENSP ID: ENSP00000417270

SEQ ID NO: 62109 - protein, 194 aa, Homo sapiens
  Payload ID: 12419
  Gene Symbol: PEX5L
  Gene Name: peroxisomal biogenesis factor 5-like
  ENSP ID: ENSP00000417438
MSDSEMDGRTHIPSLLNALLSRNRVMQMSYLKSKEQGYGKLSSDEDLEIIVDQKQLVNEQQESRPLLSPSIDDFLCETKSEAIARPVTSNTAVLTTGLDLLDLSEPVSQTQTKAKKSEPSSKTSSLKKKADGSDLISTDAEQRGQPLRVPETSSLDLDIQTQLEKWDDVKFHGDRNTKGHPMAERKSSSSRTGS

SEQ ID NO: 62110 - protein, 567 aa, Homo sapiens
  Payload ID: 12419
  Gene Symbol: PEX5L
  Gene Name: peroxisomal biogenesis factor 5-like
  Uniprot ID: Q8IYB4
  ENSP ID: ENSP00000418054
MYQGHMQLVNEQQESRPLLSPSIDDFLCETKSEAIARPVTSNTAVLTTGLDLLDLSEPVSQTQTKAKKSEPSSKTSSLKKKADGSDLISTDAEQRGQPLRVPETSSLDLDIQTQLEKWDDVKFHGDRNTKGHPMAERKSSSSRTGSKELLWSSEHRSQPELSGGKSALNSESASELELVAPTQARLTKEHRWGSALLSRNHSLEEEFERAKAAVESDTEFWDKMQAEWEEMARRNWISENQEAQNQVTISASEKGYYFHTENPFKDWPGAFEEGLKRLKEGDLPVTILFMEAAILQDPGDAEAWQFLGITQAENENEQAAIVALQRCLELQPNNLKALMALAVSYTNTGHQQDACDALKNWIKQNPKYKYLVKSKKGSPGLTRRMSKSPVDSSVLEGVKELYLEAAHQNGDMIDPDLQTGLGVLFHLSGEFNRAIDAFNAALTVRPEDYSLWNRLGATLANGDRSEEAVEAYTRALEIQPGFIRSRYNLGISCINLGAYREAVSNFLTALSLQRKSRNQQQVPHPAISGNIWAALRIALSLMDQPELFQAANLGDLDVLLRAFNLDP

SEQ ID NO: 62111 - protein, 591 aa, Homo sapiens
  Payload ID: 12419
  Gene Symbol: PEX5L
  Gene Name: peroxisomal biogenesis factor 5-like
  Uniprot ID: Q8IYB4
  ENSP ID: ENSP00000418440
MYQGHMQKSKEQGYGKLSSDEDLEIIVDQKQLVNEQQESRPLLSPSIDDFLCETKSEAIARPVTSNTAVLTTGLDLLDLSEPVSQTQTKAKKSEPSSKTSSLKKKADGSDLISTDAEQRGQPLRVPETSSLDLDIQTQLEKWDDVKFHGDRNTKGHPMAERKSSSSRTGSKELLWSSEHRSQPELSGGKSALNSESASELELVAPTQARLTKEHRWGSALLSRNHSLEEEFERAKAAVESDTEFWDKMQAEWEEMARRNWISENQEAQNQVTISASEKGYYFHTENPFKDWPGAFEEGLKRLKEGDLPVTILFMEAAILQDPGDAEAWQFLGITQAENENEQAAIVALQRCLELQPNNLKALMALAVSYTNTGHQQDACDALKNWIKQNPKYKYLVKSKKGSPGLTRRMSKSPVDSSVLEGVKELYLEAAHQNGDMIDPDLQTGLGVLFHLSGEFNRAIDAFNAALTVRPEDYSLWNRLGATLANGDRSEEAVEAYTRALEIQPGFIRSRYNLGISCINLGAYREAVSNFLTALSLQRKSRNQQQVPHPAISGNIWAALRIALSLMDQPELFQAANLGDLDVLLRAFNLDP

SEQ ID NO: 62112 - protein, 434 aa, Homo sapiens
  Payload ID: 12419
  Gene Symbol: PEX5L
  Gene Name: peroxisomal biogenesis factor 5-like
  Uniprot ID: Q8IYB4
  ENSP ID: ENSP00000418665
MAERKSSSSRTGSKELLWSSEHRSQPELSGGKSALNSESASELELVAPTQARLTKEHRWGSALLSRNHSLEEEFERAKAAVESDTEFWDKMQAEWEEMARRNWISENQEAQNQVTISASEKGYYFHTENPFKDWPGAFEEGLKRLKEGDLPVTILFMEAAILQDPGDAEAWQFLGITQAENENEQAAIVALQRCLELQPNNLKALMALAVSYTNTGHQQDACDALKNWIKQNPKYKYLVKSKKGSPGLTRRMSKSPVDSSVLEGVKELYLEAAHQNGDMIDPDLQTGLGVLFHLSGEFNRAIDAFNAALTVRPEDYSLWNRLGATLANGDRSEEAVEAYTRALEIQPGFIRSRYNLGISCINLGAYREAVSNFLTALSLQRKSRNQQQVPHPAISGNIWAALRIALSLMDQPELFQAANLGDLDVLLRAFNLDP

SEQ ID NO: 62113 - protein, 70 aa, Homo sapiens
  Payload ID: 12419
  Gene Symbol: PEX5L
  Gene Name: peroxisomal biogenesis factor 5-like
  ENSP ID: ENSP00000418746
MAERKSSSSRTGSKELLWSSEHRSQPELSGGKSALNSESASELELVAPTQARLTKEHRWGSALLSRNHSL

SEQ ID NO: 62114 - protein, 602 aa, Homo sapiens
  Payload ID: 12419
  Gene Symbol: PEX5L
  Gene Name: peroxisomal biogenesis factor 5-like
  Uniprot ID: Q8IYB4
  ENSP ID: ENSP00000419348
MYQGHMQGKGSRAADKAVAMVMKEIPREESAEEKPLLTMTSQLVNEQQESRPLLSPSIDDFLCETKSEAIARPVTSNTAVLTTGLDLLDLSEPVSQTQTKAKKSEPSSKTSSLKKKADGSDLISTDAEQRGQPLRVPETSSLDLDIQTQLEKWDDVKFHGDRNTKGHPMAERKSSSSRTGSKELLWSSEHRSQPELSGGKSALNSESASELELVAPTQARLTKEHRWGSALLSRNHSLEEEFERAKAAVESDTEFWDKMQAEWEEMARRNWISENQEAQNQVTISASEKGYYFHTENPFKDWPGAFEEGLKRLKEGDLPVTILFMEAAILQDPGDAEAWQFLGITQAENENEQAAIVALQRCLELQPNNLKALMALAVSYTNTGHQQDACDALKNWIKQNPKYKYLVKSKKGSPGLTRRMSKSPVDSSVLEGVKELYLEAAHQNGDMIDPDLQTGLGVLFHLSGEFNRAIDAFNAALTVRPEDYSLWNRLGATLANGDRSEEAVEAYTRALEIQPGFIRSRYNLGISCINLGAYREAVSNFLTALSLQRKSRNQQQVPHPAISGNIWAALRIALSLMDQPELFQAANLGDLDVLLRAFNLDP

SEQ ID NO: 62115 - protein, 203 aa, Homo sapiens
  Payload ID: 12419
  Gene Symbol: PEX5L
  Gene Name: peroxisomal biogenesis factor 5-like
  ENSP ID: ENSP00000419406
MSDSEMDGRTHIPSLLNALLSRNRVMQMSYLKSKEQGYGKLSSDEDLEIIVDQKQGKGSRAADKAVAMVMKEIPREESAEEKPLLTMTSQLVNEQQESRPLLSPSIDDFLCETKSEAIARPVTSNTAVLTTGLDLLDLSEPVSQTQTKAKKSEPSSKTSSLKKKADGSDLISTDAEQRGQPLRVPETSSLDLDIQTQLEKWDD

SEQ ID NO: 62116 - protein, 34 aa, Homo sapiens
  Payload ID: 12419
  Gene Symbol: PEX5L
  Gene Name: peroxisomal biogenesis factor 5-like
  ENSP ID: ENSP00000419790
MAERKSSSSRTGSKELLWSSEHRSQPELSGGKSA

SEQ ID NO: 62117 - protein, 626 aa, Homo sapiens
  Payload ID: 12419
  Gene Symbol: PEX5L
  Gene Name: peroxisomal biogenesis factor 5-like
  Uniprot ID: Q8IYB4
  ENSP ID: ENSP00000419975
MYQGHMQKSKEQGYGKLSSDEDLEIIVDQKQGKGSRAADKAVAMVMKEIPREESAEEKPLLTMTSQLVNEQQESRPLLSPSIDDFLCETKSEAIARPVTSNTAVLTTGLDLLDLSEPVSQTQTKAKKSEPSSKTSSLKKKADGSDLISTDAEQRGQPLRVPETSSLDLDIQTQLEKWDDVKFHGDRNTKGHPMAERKSSSSRTGSKELLWSSEHRSQPELSGGKSALNSESASELELVAPTQARLTKEHRWGSALLSRNHSLEEEFERAKAAVESDTEFWDKMQAEWEEMARRNWISENQEAQNQVTISASEKGYYFHTENPFKDWPGAFEEGLKRLKEGDLPVTILFMEAAILQDPGDAEAWQFLGITQAENENEQAAIVALQRCLELQPNNLKALMALAVSYTNTGHQQDACDALKNWIKQNPKYKYLVKSKKGSPGLTRRMSKSPVDSSVLEGVKELYLEAAHQNGDMIDPDLQTGLGVLFHLSGEFNRAIDAFNAALTVRPEDYSLWNRLGATLANGDRSEEAVEAYTRALEIQPGFIRSRYNLGISCINLGAYREAVSNFLTALSLQRKSRNQQQVPHPAISGNIWAALRIALSLMDQPELFQAANLGDLDVLLRAFNLDP

SEQ ID NO: 62118 - protein, 583 aa, Homo sapiens
  Payload ID: 12419
  Gene Symbol: PEX5L
  Gene Name: peroxisomal biogenesis factor 5-like
  Uniprot ID: Q8IYB4
  ENSP ID: ENSP00000420555
MVMKEIPREESAEEKPLLTMTSQLVNEQQESRPLLSPSIDDFLCETKSEAIARPVTSNTAVLTTGLDLLDLSEPVSQTQTKAKKSEPSSKTSSLKKKADGSDLISTDAEQRGQPLRVPETSSLDLDIQTQLEKWDDVKFHGDRNTKGHPMAERKSSSSRTGSKELLWSSEHRSQPELSGGKSALNSESASELELVAPTQARLTKEHRWGSALLSRNHSLEEEFERAKAAVESDTEFWDKMQAEWEEMARRNWISENQEAQNQVTISASEKGYYFHTENPFKDWPGAFEEGLKRLKEGDLPVTILFMEAAILQDPGDAEAWQFLGITQAENENEQAAIVALQRCLELQPNNLKALMALAVSYTNTGHQQDACDALKNWIKQNPKYKYLVKSKKGSPGLTRRMSKSPVDSSVLEGVKELYLEAAHQNGDMIDPDLQTGLGVLFHLSGEFNRAIDAFNAALTVRPEDYSLWNRLGATLANGDRSEEAVEAYTRALEIQPGFIRSRYNLGISCINLGAYREAVSNFLTALSLQRKSRNQQQVPHPAISGNIWAALRIALSLMDQPELFQAANLGDLDVLLRAFNLDP

SEQ ID NO: 62119 - protein, 738 aa, Homo sapiens
  Payload ID: 12420
  Gene Symbol: PEX6
  Gene Name: peroxisomal biogenesis factor 6
  Uniprot ID: Q13608
  ENSP ID: ENSP00000244546
MALAVLRVLEPFPTETPPLAVLLPPGGPWPAAELGLVLALRPAGESPAGPALLVAALEGPDAGTEEQGPGPPQLLVSRALLRLLALGSGAWVRARAVRRPPALGWALLGTSLGPGLGPRVGPLLVRRGETLPVPGPRVLETRPALQGLLGPGTRLAVTELRGRARLCPESGDSSRPPPPPVVSSFAVSGTVRRLQGVLGGTGDSLGVSRSCLRGLGLFQGEWVWVAQARESSNTSQPHLARVQVLEPRWDLSDRLGPGSGPLGEPLADGLALVPATLAFNLGCDPLEMGELRIQRYLEGSIAPEDKGSCSLLPGPPFARELHIEIVSSPHYSTNGNYDGVLYRHFQIPRVVQEGDVLCVPTIGQVEILEGSPEKLPRWREMFFKVKKTVGEAPDGPASAYLADTTHTSLYMVGSTLSPVPWLPSEESTLWSSLSPPGLEALVSELCAVLKPRLQPGGALLTGTSSVLLRGPPGCGKTTVVAAACSHLGLHLLKVPCSSLCAESSGAVETKLQAIFSRARRCRPAVLLLTAVDLLGRDRDGLGEDARVMAVLRHLLLNEDPLNSCPPLMVVATTSRAQDLPADVQTAFPHELEVPALSEGQRLSILRALTAHLPLGQEVNLAQLARRCAGFVVGDLYALLTHSSRAACTRIKNSGLAGGLTEEDEGELCAAGFPLLAEDFGQALEQLQTAHSQAVGAPKVETKSLECLPGPGLQLHALSSLMNWTLWPQAGGEVEILEE

SEQ ID NO: 62120 - protein, 980 aa, Homo sapiens
  Payload ID: 12420
  Gene Symbol: PEX6
  Gene Name: peroxisomal biogenesis factor 6
  Uniprot ID: Q13608
  ENSP ID: ENSP00000303511
MALAVLRVLEPFPTETPPLAVLLPPGGPWPAAELGLVLALRPAGESPAGPALLVAALEGPDAGTEEQGPGPPQLLVSRALLRLLALGSGAWVRARAVRRPPALGWALLGTSLGPGLGPRVGPLLVRRGETLPVPGPRVLETRPALQGLLGPGTRLAVTELRGRARLCPESGDSSRPPPPPVVSSFAVSGTVRRLQGVLGGTGDSLGVSRSCLRGLGLFQGEWVWVAQARESSNTSQPHLARVQVLEPRWDLSDRLGPGSGPLGEPLADGLALVPATLAFNLGCDPLEMGELRIQRYLEGSIAPEDKGSCSLLPGPPFARELHIEIVSSPHYSTNGNYDGVLYRHFQIPRVVQEGDVLCVPTIGQVEILEGSPEKLPRWREMFFKVKKTVGEAPDGPASAYLADTTHTSLYMVGSTLSPVPWLPSEESTLWSSLSPPGLEALVSELCAVLKPRLQPGGALLTGTSSVLLRGPPGCGKTTVVAAACSHLGLHLLKVPCSSLCAESSGAVETKLQAIFSRARRCRPAVLLLTAVDLLGRDRDGLGEDARVMAVLRHLLLNEDPLNSCPPLMVVATTSRAQDLPADVQTAFPHELEVPALSEGQRLSILRALTAHLPLGQEVNLAQLARRCAGFVVGDLYALLTHSSRAACTRIKNSGLAGGLTEEDEGELCAAGFPLLAEDFGQALEQLQTAHSQAVGAPKIPSVSWHDVGGLQEVKKEILETIQLPLEHPELLSLGLRRSGLLLHGPPGTGKTLLAKAVATECSLTFLSVKGPELINMYVGQSEENVREVFARARAAAPCIIFFDELDSLAPSRGRSGDSGGVMDRVVSQLLAELDGLHSTQDVFVIGATNRPDLLDPALLRPGRFDKLVFVGANEDRASQLRVLSAITRKFKLEPSVSLVNVLDCCPPQLTGADLYSLCSDAMTAALKRRVHDLEEGLEPGSSALMLTMEDLLQAAARLQPSVSEQELLRYKRIQRKFAAC

SEQ ID NO: 62121 - protein, 323 aa, Homo sapiens
  Payload ID: 12421
  Gene Symbol: PEX7
  Gene Name: peroxisomal biogenesis factor 7
  Uniprot ID: O00628
  ENSP ID: ENSP00000315680
MSAVCGGAARMLRTPGRHGYAAEFSPYLPGRLACATAQHYGIAGCGTLLILDPDEAGLRLFRSFDWNDGLFDVTWSENNEHVLITCSGDGSLQLWDTAKAAGPLQVYKEHAQEVYSVDWSQTRGEQLVVSGSWDQTVKLWDPTVGKSLCTFRGHESIIYSTIWSPHIPGCFASASGDQTLRIWDVKAAGVRIVIPAHQAEILSCDWCKYNENLLVTGAVDCSLRGWDLRNVRQPVFELLGHTYAIRRVKFSPFHASVLASCSYDFTVRFWNFSKPDSLLETVEHHTEFTCGLDFSLQSPTQVADCSWDETIKIYDPACLTIPA

SEQ ID NO: 62122 - protein, 122 aa, Homo sapiens
  Payload ID: 12421
  Gene Symbol: PEX7
  Gene Name: peroxisomal biogenesis factor 7
  ENSP ID: ENSP00000356730
MSAVCGGAARMLRTPGRHGYAAEFSPYLPGRLACATAQHYGIAGCGTLLILDPDEAGLRLFRSFDWNDGLFDVTWSENNEHVLITCSGDGSLQLWDTAKAAGPLQVYKEHAQEYVQGSCVVK

SEQ ID NO: 62123 - protein, 280 aa, Homo sapiens
  Payload ID: 12421
  Gene Symbol: PEX7
  Gene Name: peroxisomal biogenesis factor 7
  Uniprot ID: O00628
  ENSP ID: ENSP00000441004
MSAVCGGAARMLRTPGRHGYAAEFSPYLPGRLACATAQHYGIAGCGTLLILDPDEAGLRLFRSFDWNDGLFDVTWSENNEHVLITCSGDGSLQLWDTAKAAGPLQVYKEHAQEVYSVDWSQTRGEQLVVSGSWDQTVKLWDPTVGKSLCTFRGHESIIYSTIWSPHIPGCFASASGDQTLRIWDVKAAGVRIVIPAHQAEILSCDWCKYNENLLVTGAVDCSLRGWDLRNVRQPVFELLGHTYAIRRVKMESCPVTQTRSQLTATSAFWVQAVLLPQPTE

SEQ ID NO: 62124 - protein, 195 aa, Homo sapiens
  Payload ID: 12422
  Gene Symbol: PXMP2
  Gene Name: peroxisomal membrane protein 2, 22kDa
  Uniprot ID: Q9NR77
  ENSP ID: ENSP00000321271
MAPAASRLRAEAGLGALPRRALAQYLLFLRLYPVLTKAATSGILSALGNFLAQMIEKKRKKENSRSLDVGGPLRYAVYGFFFTGPLSHFFYFFMEHWIPPEVPLAGLRRLLLDRLVFAPAFLMLFFLIMNFLEGKDASAFAAKMRGGFWPALRMNWRVWTPLQFININYVPLKFRVLFANLAALFWYAYLASLGK

SEQ ID NO: 62125 - protein, 227 aa, Homo sapiens
  Payload ID: 12422
  Gene Symbol: PXMP2
  Gene Name: peroxisomal membrane protein 2, 22kDa
  ENSP ID: ENSP00000398708
  MOD_RES (1)..(1): Any amino acid
XRKKENSRSLDVGGPLRYAVYGFFFTGPLSHFFYFFMEHWIPPEVPLAGLRRLLLDRLVFAPAFLMLFFLIMNFLEGKDASAFAAKMRGGFWPALRMNWRVWTPLQFININYVPLKPGSPGPLPHWEDGVQHPLQHGRIPPDATGGGLAEPAGATCFPPPEVPGALRQPGSSVLVCLPGLLGEVTTAGRTSGALWTWVWGSHPPSESRTNPVRMSLTLNQVIQDAQK

SEQ ID NO: 62126 - protein, 49 aa, Homo sapiens
  Payload ID: 12422
  Gene Symbol: PXMP2
  Gene Name: peroxisomal membrane protein 2, 22kDa
  ENSP ID: ENSP00000444486
  MOD_RES (1)..(1): Any amino acid
XGILSALGNFLAQMIEKKRKKENSRSLDVGGPLRYAVYGGKTPQPSPPR

SEQ ID NO: 62127 - protein, 160 aa, Homo sapiens
  Payload ID: 12422
  Gene Symbol: PXMP2
  Gene Name: peroxisomal membrane protein 2, 22kDa
  ENSP ID: ENSP00000446049
MAPAASRLRAEAGLGALPRRALAQYLLFLRLYPVLTKAATSGILSALGNFLAQMIEKKRKKENSRSLDVGGPLRYAVYGSGCSSPTWQLCSGMPTWPPWGSDDRWENIRCTVDVGLGVSPAQREQNQSSQDVTDSKSGDSRCPKMMDRETEISECQNPVF

SEQ ID NO: 62128 - protein, 83 aa, Homo sapiens
  Payload ID: 12422
  Gene Symbol: PXMP2
  Gene Name: peroxisomal membrane protein 2, 22kDa
  ENSP ID: ENSP00000484702
PEVPLAGLRRLLLDRLVFAPAFLMLFFLIMNFLEGKDASAFAAKMRGGFWPALRMNWRVWTPLQFININYVPLKVRATGLSLC

SEQ ID NO: 62129 - protein, 144 aa, Homo sapiens
  Payload ID: 12423
  Gene Symbol: PXMP4
  Gene Name: peroxisomal membrane protein 4, 24kDa
  ENSP ID: ENSP00000217398
MAAPPQLRALLVVVNALLRKRRYHAALAVLKGFRNGAVYGAKIRAPHALVMTFLFRNGRGTCVCAASRRSCGPYCRPHISTPGTWHGLCSPTRVSVPCSPTYKARPTQHTHSWRPSSGVSWCLEKTITSTARSTCTCCHASCLP

SEQ ID NO: 62130 - protein, 71 aa, Homo sapiens
  Payload ID: 12423
  Gene Symbol: PXMP4
  Gene Name: peroxisomal membrane protein 4, 24kDa
  Uniprot ID: Q9Y6I8
  ENSP ID: ENSP00000343071
MAAPPQLRALLVVVNALLRKRRYHAALAVLKGFRNGAVYGAKIRAPHALVMTFLFRNGRSTCTCCHASCLP

SEQ ID NO: 62131 - protein, 212 aa, Homo sapiens
  Payload ID: 12423
  Gene Symbol: PXMP4
  Gene Name: peroxisomal membrane protein 4, 24kDa
  Uniprot ID: Q9Y6I8
  ENSP ID: ENSP00000386385
MAAPPQLRALLVVVNALLRKRRYHAALAVLKGFRNGAVYGAKIRAPHALVMTFLFRNGSLQEKLWAILQATYIHSWNLARFVFTYKGLRALQSYIQGKTYPAHAFLAAFLGGILVFGENNNINSQINMYLLSRVLFALSRLAVEKGYIPEPRWDPFPLLTAVVWGLVLWLFEYHRSTLQPSLQSSMTYLYEDSNVWHDISDFLVYNKSRPSN

SEQ ID NO: 62132 - protein, 303 aa, Homo sapiens
  Payload ID: 12424
  Gene Symbol: PECR
  Gene Name: peroxisomal trans-2-enoyl-CoA reductase
  Uniprot ID: Q9BY49
  ENSP ID: ENSP00000265322
MASWAKGRSYLAPGLLQGQVAIVTGGATGIGKAIVKELLELGSNVVIASRKLERLKSAADELQANLPPTKQARVIPIQCNIRNEEEVNNLVKSTLDTFGKINFLVNNGGGQFLSPAEHISSKGWHAVLETNLTGTFYMCKAVYSSWMKEHGGSIVNIIVPTKAGFPLAVHSGAARAGVYNLTKSLALEWACSGIRINCVAPGVIYSQTAVENYGSWGQSFFEGSFQKIPAKRIGVPEEVSSVVCFLLSPAASFITGQSVDVDGGRSLYTHSYEVPDHDNWPKGAGDLSVVKKMKETFKEKAKL

SEQ ID NO: 62133 - protein, 157 aa, Homo sapiens
  Payload ID: 12424
  Gene Symbol: PECR
  Gene Name: peroxisomal trans-2-enoyl-CoA reductase
  ENSP ID: ENSP00000395512
MASWAKGRSYLAPGLLQGQVAIVTGGATGIGKAIVKELLELGSNVVIASRKLERLKSAADELQANLPPTKQARVIPIQCNIRNEEEVNNLVKSTLDTFGKINFLVNNGGGQFLSPAEHISSKGWHAVLETNLTGTFYMCKAGILELQEQVFTTSPNL

SEQ ID NO: 62134 - protein, 134 aa, Homo sapiens
  Payload ID: 12425
  Gene Symbol: PXT1
  Gene Name: peroxisomal, testis specific 1
  Uniprot ID: Q8NFP0
  ENSP ID: ENSP00000419944
MKKKHDGIVYETKEVLNPSPKVTHCCKSLWLKYSFQKAYMTQLVSSQPVPAMSRNPDHNLLSQPKEHSIVQKHHQEEIIHKLAMQLRHIGDNIDHRMVREDLQQDGRDALDHFVFFFFRRVQVLLHFFWNNHLL

SEQ ID NO: 62135 - protein, 51 aa, Homo sapiens
  Payload ID: 12425
  Gene Symbol: PXT1
  Gene Name: peroxisomal, testis specific 1
  ENSP ID: ENSP00000480598
MQLRHIGDNIDHRMVREDLQQDGRDALDHFVFFFFRRVQVLLHFFWNNHLL

SEQ ID NO: 62136 - protein, 468 aa, Homo sapiens
  Payload ID: 12426
  Gene Symbol: PPARA
  Gene Name: peroxisome proliferator-activated receptor alpha
  Uniprot ID: Q07869
  ENSP ID: ENSP00000262735
MVDTESPLCPLSPLEAGDLESPLSEEFLQEMGNIQEISQSIGEDSSGSFGFTEYQYLGSCPGSDGSVITDTLSPASSPSSVTYPVVPGSVDESPSGALNIECRICGDKASGYHYGVHACEGCKGFFRRTIRLKLVYDKCDRSCKIQKKNRNKCQYCRFHKCLSVGMSHNAIRFGRMPRSEKAKLKAEILTCEHDIEDSETADLKSLAKRIYEAYLKNFNMNKVKARVILSGKASNNPPFVIHDMETLCMAEKTLVAKLVANGIQNKEAEVRIFHCCQCTSVETVTELTEFAKAIPGFANLDLNDQVTLLKYGVYEAIFAMLSSVMNKDGMLVAYGNGFITREFLKSLRKPFCDIMEPKFDFAMKFNALELDDSDISLFVAAIICCGDRPGLLNVGHIEKMQEGIVHVLRLHLQSNHPDDIFLFPKLLQKMADLRQLVTEHAQLVQIIKKTESDAALHPLLQEIYRDMY

SEQ ID NO: 62137 - protein, 468 aa, Homo sapiens; identical to SEQ ID NO: 62136
  Payload ID: 12426
  Gene Symbol: PPARA
  Gene Name: peroxisome proliferator-activated receptor alpha
  Uniprot ID: Q07869
  ENSP ID: ENSP00000385246

SEQ ID NO: 62138 - protein, 468 aa, Homo sapiens; identical to SEQ ID NO: 62136
  Payload ID: 12426
  Gene Symbol: PPARA
  Gene Name: peroxisome proliferator-activated receptor alpha
  Uniprot ID: Q07869
  ENSP ID: ENSP00000385523

SEQ ID NO: 62139 - protein, 9 aa, Homo sapiens
  Payload ID: 12426
  Gene Symbol: PPARA
  Gene Name: peroxisome proliferator-activated receptor alpha
  ENSP ID: ENSP00000397291
MVDTESPLC

SEQ ID NO: 62140 - protein, 69 aa, Homo sapiens
  Payload ID: 12426
  Gene Symbol: PPARA
  Gene Name: peroxisome proliferator-activated receptor alpha
  ENSP ID: ENSP00000411677
MVDTESPLCPLSPLEAGDLESPLSEEFLQEMGNIQEISQSIGEDSSGSFGFTEYQYLGSCPGSDGSVIT

SEQ ID NO: 62141 - protein, 133 aa, Homo sapiens
  Payload ID: 12426
  Gene Symbol: PPARA
  Gene Name: peroxisome proliferator-activated receptor alpha
  ENSP ID: ENSP00000414752
MVDTESPLCPLSPLEAGDLESPLSEEFLQEMGNIQEISQSIGEDSSGSFGFTEYQYLGSCPGSDGSVITDTLSPASSPSSVTYPVVPGSVDESPSGALNIECRICGDKASGYHYGVHACEGCKVEGSWNRAWW

SEQ ID NO: 62142 - protein, 441 aa, Homo sapiens
  Payload ID: 12427
  Gene Symbol: PPARD
  Gene Name: peroxisome proliferator-activated receptor delta
  Uniprot ID: Q03181
  ENSP ID: ENSP00000310928
MEQPQEEAPEVREEEEKEEVAEAEGAPELNGGPQHALPSSSYTDLSRSSSPPSLLDQLQMGCDGASCGSLNMECRVCGDKASGFHYGVHACEGCKGFFRRTIRMKLEYEKCERSCKIQKKNRNKCQYCRFQKCLALGMSHNAIRFGRMPEAEKRKLVAGLTANEGSQYNPQVADLKAFSKHIYNAYLKNFNMTKKKARSILTGKASHTAPFVIHDIETLWQAEKGLVWKQLVNGLPPYKEISVHVFYRCQCTTVETVRELTEFAKSIPSFSSLFLNDQVTLLKYGVHEAIFAMLASIVNKDGLLVANGSGFVTREFLRSLRKPFSDIIEPKFEFAVKFNALELDDSDLALFIAAIILCGDRPGLMNVPRVEAIQDTILRALEFHLQANHPDAQYLFPKLLQKMADLRQLVTEHAQMMQRIKKTETETSLHPLLQEIYKDMY

SEQ ID NO: 62143 - protein, 361 aa, Homo sapiens
  Payload ID: 12427
  Gene Symbol: PPARD
  Gene Name: peroxisome proliferator-activated receptor delta
  Uniprot ID: Q03181
  ENSP ID: ENSP00000337063
MEQPQEEAPEVREEEEKEEVAEAEGAPELNGGPQHALPSSSYTDLSRSSSPPSLLDQLQMGCDGASCGSLNMECRVCGDKASGFHYGVHACEGCKGFFRRTIRMKLEYEKCERSCKIQKKNRNKCQYCRFQKCLALGMSHNAIRFGRMPEAEKRKLVAGLTANEGSQYNPQVADLKAFSKHIYNAYLKNFNMTKKKARSILTGKASHTAPFVIHDIETLWQAEKGLVWKQLVNGLPPYKEISVHVFYRCQCTTVETVRELTEFAKSIPSFSSLFLNDQVTLLKYGVHEAIFAMLASIVNKDGLLVANGSGFVTREFLRSLRKPFSDIIEPKFEFAVKFNALELDDSDLALFIAAIILCGGE

SEQ ID NO: 62144 - protein, 441 aa, Homo sapiens; identical to SEQ ID NO: 62142
  Payload ID: 12427
  Gene Symbol: PPARD
  Gene Name: peroxisome proliferator-activated receptor delta
  Uniprot ID: Q03181
  ENSP ID: ENSP00000353916

SEQ ID NO: 62145 - protein, 343 aa, Homo sapiens
  Payload ID: 12427
  Gene Symbol: PPARD
  Gene Name: peroxisome proliferator-activated receptor delta
  Uniprot ID: Q03181
  ENSP ID: ENSP00000413314
MEQPQEEAPEVREEEEKEEVAEAEGAPELNGGPQHALPSSSYTAIRFGRMPEAEKRKLVAGLTANEGSQYNPQVADLKAFSKHIYNAYLKNFNMTKKKARSILTGKASHTAPFVIHDIETLWQAEKGLVWKQLVNGLPPYKEISVHVFYRCQCTTVETVRELTEFAKSIPSFSSLFLNDQVTLLKYGVHEAIFAMLASIVNKDGLLVANGSGFVTREFLRSLRKPFSDIIEPKFEFAVKFNALELDDSDLALFIAAIILCGDRPGLMNVPRVEAIQDTILRALEFHLQANHPDAQYLFPKLLQKMADLRQLVTEHAQMMQRIKKTETETSLHPLLQEIYKDMY

SEQ ID NO: 62146 - protein, 402 aa, Homo sapiens
  Payload ID: 12427
  Gene Symbol: PPARD
  Gene Name: peroxisome proliferator-activated receptor delta
  Uniprot ID: Q03181
  ENSP ID: ENSP00000414372
MHQRDLSRSSSPPSLLDQLQMGCDGASCGSLNMECRVCGDKASGFHYGVHACEGCKGFFRRTIRMKLEYEKCERSCKIQKKNRNKCQYCRFQKCLALGMSHNAIRFGRMPEAEKRKLVAGLTANEGSQYNPQVADLKAFSKHIYNAYLKNFNMTKKKARSILTGKASHTAPFVIHDIETLWQAEKGLVWKQLVNGLPPYKEISVHVFYRCQCTTVETVRELTEFAKSIPSFSSLFLNDQVTLLKYGVHEAIFAMLASIVNKDGLLVANGSGFVTREFLRSLRKPFSDIIEPKFEFAVKFNALELDDSDLALFIAAIILCGDRPGLMNVPRVEAIQDTILRALEFHLQANHPDAQYLFPKLLQKMADLRQLVTEHAQMMQRIKKTETETSLHPLLQEIYKDMY

SEQ ID NO: 62147 - protein, 505 aa, Homo sapiens
  Payload ID: 12428
  Gene Symbol: PPARG
  Gene Name: peroxisome proliferator-activated receptor gamma
  Uniprot ID: P37231
  ENSP ID: ENSP00000287820
MGETLGDSPIDPESDSFTDTLSANISQEMTMVDTEMPFWPTNFGISSVDLSVMEDHSHSFDIKPFTTVDFSSISTPHYEDIPFTRTDPVVADYKYDLKLQEYQSAIKVEPASPPYYSEKTQLYNKPHEEPSNSLMAIECRVCGDKASGFHYGVHACEGCKGFFRRTIRLKLIYDRCDLNCRIHKKSRNKCQYCRFQKCLAVGMSHNAIRFGRMPQAEKEKLLAEISSDIDQLNPESADLRALAKHLYDSYIKSFPLTKAKARAILTGKTTDKSPFVIYDMNSLMMGEDKIKFKHITPLQEQSKEVAIRIFQGCQFRSVEAVQEITEYAKSIPGFVNLDLNDQVTLLKYGVHEIIYTMLASLMNKDGVLISEGQGFMTREFLKSLRKPFGDFMEPKFEFAVKFNALELDDSDLAIFIAVIILSGDRPGLLNVKPIEDIQDNLLQALELQLKLNHPESSQLFAKLLQKMTDLRQIVTEHVQLLQVIKKTETDMSLHPLLQEIYKDLY

SEQ ID NO: 62148 - protein, 477 aa, Homo sapiens
  Payload ID: 12428
  Gene Symbol: PPARG
  Gene Name: peroxisome proliferator-activated receptor gamma
  Uniprot ID: P37231
  ENSP ID: ENSP00000312472
MTMVDTEMPFWPTNFGISSVDLSVMEDHSHSFDIKPFTTVDFSSISTPHYEDIPFTRTDPVVADYKYDLKLQEYQSAIKVEPASPPYYSEKTQLYNKPHEEPSNSLMAIECRVCGDKASGFHYGVHACEGCKGFFRRTIRLKLIYDRCDLNCRIHKKSRNKCQYCRFQKCLAVGMSHNAIRFGRMPQAEKEKLLAEISSDIDQLNPESADLRALAKHLYDSYIKSFPLTKAKARAILTGKTTDKSPFVIYDMNSLMMGEDKIKFKHITPLQEQSKEVAIRIFQGCQFRSVEAVQEITEYAKSIPGFVNLDLNDQVTLLKYGVHEIIYTMLASLMNKDGVLISEGQGFMTREFLKSLRKPFGDFMEPKFEFAVKFNALELDDSDLAIFIAVIILSGDRPGLLNVKPIEDIQDNLLQALELQLKLNHPESSQLFAKLLQKMTDLRQIVTEHVQLLQVIKKTETDMSLHPLLQEIYKDLY

SEQ ID NO: 62149 - protein, 186 aa, Homo sapiens
  Payload ID: 12428
  Gene Symbol: PPARG
  Gene Name: peroxisome proliferator-activated receptor gamma
  Uniprot ID: P37231
  ENSP ID: ENSP00000380195
MTMVDTEMPFWPTNFGISSVDLSVMEDHSHSFDIKPFTTVDFSSISTPHYEDIPFTRTDPVVADYKYDLKLQEYQSAIKVEPASPPYYSEKTQLYNKPHEEPSNSLMAIECRVCGDKASGFHYGVHACEGCKGFFRRTIRLKLIYDRCDLNCRIHKKSRNKCQYCRFQKCLAVGMSHNEELQKDSY

SEQ ID NO: 62150 - protein, 250 aa, Homo sapiens
  Payload ID: 12428
  Gene Symbol: PPARG
  Gene Name: peroxisome proliferator-activated receptor gamma
  ENSP ID: ENSP00000380196
MTMVDTEMPFWPTNFGISSVDLSVMEDHSHSFDIKPFTTVDFSSISTPHYEDIPFTRTDPVVADYKYDLKLQEYQSAIKVEPASPPYYSEKTQLYNKPHEEPSNSLMAIECRVCGDKASGFHYGVHACEGCKGFFRRTIRLKLIYDRCDLNCRIHKKSRNKCQYCRFQKCLAVGMSHNAIRFGRMPQAEKEKLLAEISSDIDQLNPESADLRALAKHLYDSYIKSFPLTKAKARAILTGKTTDKSTAQVC

SEQ ID NO: 62151 - protein, 477 aa, Homo sapiens; identical to SEQ ID NO: 62148
  Payload ID: 12428
  Gene Symbol: PPARG
  Gene Name: peroxisome proliferator-activated receptor gamma
  Uniprot ID: P37231
  ENSP ID: ENSP00000380205

SEQ ID NO: 62152 - protein, 477 aa, Homo sapiens; identical to SEQ ID NO: 62148
  Payload ID: 12428
  Gene Symbol: PPARG
  Gene Name: peroxisome proliferator-activated receptor gamma
  Uniprot ID: P37231
  ENSP ID: ENSP00000380207

SEQ ID NO: 62153 - protein, 477 aa, Homo sapiens; identical to SEQ ID NO: 62148
  Payload ID: 12428
  Gene Symbol: PPARG
  Gene Name: peroxisome proliferator-activated receptor gamma
  Uniprot ID: P37231
  ENSP ID: ENSP00000380210

SEQ ID NO: 62154 - protein, 40 aa, Homo sapiens
  Payload ID: 12428
  Gene Symbol: PPARG
  Gene Name: peroxisome proliferator-activated receptor gamma
  ENSP ID: ENSP00000380218
MGETLGDSPIDPESDSFTDTLSANISQVFQDDSCLWMSLS

SEQ ID NO: 62155 - protein, 483 aa, Homo sapiens
  Payload ID: 12428
  Gene Symbol: PPARG
  Gene Name: peroxisome proliferator-activated receptor gamma
  ENSP ID: ENSP00000380221
MKGFSEMTMVDTEMPFWPTNFGISSVDLSVMEDHSHSFDIKPFTTVDFSSISTPHYEDIPFTRTDPVVADYKYDLKLQEYQSAIKVEPASPPYYSEKTQLYNKPHEEPSNSLMAIECRVCGDKASGFHYGVHACEGCKGFFRRTIRLKLIYDRCDLNCRIHKKSRNKCQYCRFQKCLAVGMSHNAIRFGRMPQAEKEKLLAEISSDIDQLNPESADLRALAKHLYDSYIKSFPLTKAKARAILTGKTTDKSPFVIYDMNSLMMGEDKIKFKHITPLQEQSKEVAIRIFQGCQFRSVEAVQEITEYAKSIPGFVNLDLNDQVTLLKYGVHEIIYTMLASLMNKDGVLISEGQGFMTREFLKSLRKPFGDFMEPKFEFAVKFNALELDDSDLAIFIAVIILSGDRPGLLNVKPIEDIQDNLLQALELQLKLNHPESSQLFAKLLQKMTDLRQIVTEHVQLLQVIKKTETDMSLHPLLQEIYKDLY

SEQ ID NO: 62156 - protein, 132 aa, Homo sapiens
  Payload ID: 12428
  Gene Symbol: PPARG
  Gene Name: peroxisome proliferator-activated receptor gamma
  ENSP ID: ENSP00000380224
MTMVDTEMPFWPTNFGISSVDLSVMEDHSHSFDIKPFTTVDFSSISTPHYEDIPFTRTDPVVADYKYDLKLQEYQSAIKVEPASPPYYSEKTQLYNKPHEEPSNSLMAIECRVCGDKASGFHYGVHACEGCK

SEQ ID NO: 62157 - protein, 99 aa, Homo sapiens
  Payload ID: 12428
  Gene Symbol: PPARG
  Gene Name: peroxisome proliferator-activated receptor gamma
  ENSP ID: ENSP00000392285
MTMVDTEMPFWPTNFGISSVDLSVMEDHSHSFDIKPFTTVDFSSISTPHYEDIPFTRTDPVVADYKYDLKLQEYQSAIKVEPASPPYYSEKTQLYNKPH

SEQ ID NO: 62158 - protein, 43 aa, Homo sapiens
  Payload ID: 12428
  Gene Symbol: PPARG
  Gene Name: peroxisome proliferator-activated receptor gamma
  ENSP ID: ENSP00000411931
MTMVDTEMPFWPTNFGISSVDLSVMEDHSHSFDIKPFTTVDFS

SEQ ID NO: 62159 - protein, 798 aa, Homo sapiens
  Payload ID: 12429
  Gene Symbol: PPARGC1A
  Gene Name: peroxisome proliferator-activated receptor gamma, coactivator 1 alpha
  Uniprot ID: Q9UBK2
  ENSP ID: ENSP00000264867
MAWDMCNQDSESVWSDIECAALVGEDQPLCPDLPELDLSELDVNDLDTDSFLGGLKWCSDQSEIISNQYNNEPSNIFEKIDEENEANLLAVLTETLDSLPVDEDGLPSFDALTDGDVTTDNEASPSSMPDGTPPPQEAEEPSLLKKLLLAPANTQLSYNECSGLSTQNHANHNHRIRTNPAIVKTENSWSNKAKSICQQQKPQRRPCSELLKYLTTNDDPPHTKPTENRNSSRDKCTSKKKSHTQSQSQHLQAKPTTLSLPLTPESPNDPKGSPFENKTIERTLSVELSGTAGLTPPTTPPHKANQDNPFRASPKLKSSCKTVVPPPSKKPRYSESSGTQGNNSTKKGPEQSELYAQLSKSSVLTGGHEERKTKRPSLRLFGDHDYCQSINSKTEILINISQELQDSRQLENKDVSSDWQGQICSSTDSDQCYLRETLEASKQVSPCSTRKQLQDQEIRAELNKHFGHPSQAVFDDEADKTGELRDSDFSNEQFSKLPMFINSGLAMDGLFDDSEDESDKLSYPWDGTQSYSLFNVSPSCSSFNSPCRDSVSPPKSLFSQRPQRMRSRSRSFSRHRSCSRSPYSRSRSRSPGSRSSSRSCYYYESSHYRHRTHRNSPLYVRSRSRSPYSRRPRYDSYEEYQHERLKREEYRREYEKRESERAKQRERQRQKAIEERRVIYVGKIRPDTTRTELRDRFEVFGEIEECTVNLRDDGDSYGFITYRYTCDAFAALENGYTLRRSNETDFELYFCGRKQFFKSNYADLDSNSDDFDPASTKSKYDSLDFDSLLKEAQRSLRR

SEQ ID NO: 62160 - protein, 301 aa, Homo sapiens
  Payload ID: 12429
  Gene Symbol: PPARGC1A
  Gene Name: peroxisome proliferator-activated receptor gamma, coactivator 1 alpha
  Uniprot ID: Q9UBK2
  ENSP ID: ENSP00000421632
MAWDMCNQDSESVWSDIECAALVGEDQPLCPDLPELDLSELDVNDLDTDSFLGGLKWCSDQSEIISNQYNNEPSNIFEKIDEENEANLLAVLTETLDSLPVDEDGLPSFDALTDGDVTTDNEASPSSMPDGTPPPQEAEEPSLLKKLLLAPANTQLSYNECSGLSTQNHANHNHRIRTNPAIVKTENSWSNKAKSICQQQKPQRRPCSELLKYLTTNDDPPHTKPTENRNSSRDKCTSKKKSHTQSQSQHLQAKPTTLSLPLTPESPNDPKGSPFENKTIERTLSVELSGTAGVKTNLISK

SEQ ID NO: 62161 - protein, 271 aa, Homo sapiens
  Payload ID: 12429
  Gene Symbol: PPARGC1A
  Gene Name: peroxisome proliferator-activated receptor gamma, coactivator 1 alpha
  Uniprot ID: Q9UBK2
  ENSP ID: ENSP00000423075
MAWDMCNQDSESVWSDIECAALVGEDQPLCPDLPELDLSELDVNDLDTDSFLGGLKWCSDQSEIISNQYNNEPSNIFEKIDEENEANLLAVLTETLDSLPVDEDGLPSFDALTDGDVTTDNEASPSSMPDGTPPPQEAEEPSLLKKLLLAPANTQLSYNECSGLSTQNHANHNHRIRTNPAIVKTENSWSNKAKSICQQQKPQRRPCSELLKYLTTNDDPPHTKPTENRNSSRDKCTSKKKSHTQSQSQHLQAKPTTLSLPLTPESPNLFL

SEQ ID NO: 62162 - protein, 99 aa, Homo sapiens
  Payload ID: 12429
  Gene Symbol: PPARGC1A
  Gene Name: peroxisome proliferator-activated receptor gamma, coactivator 1 alpha
  ENSP ID: ENSP00000424181
MAWDMCNQDSESVWSDIECAALVGEDQPLCPDLPELDLSELDVNDLDTDSFLGGLKWCSDQSEIISNQYNNEPSNIFEVRTSFGNINFSLSLAWARLTW

SEQ ID NO: 62163 - protein, 297 aa, Homo sapiens
  Payload ID: 12429
  Gene Symbol: PPARGC1A
  Gene Name: peroxisome proliferator-activated receptor gamma, coactivator 1 alpha
  ENSP ID: ENSP00000477921
MCNQDSESVWSDIECAALVGEDQPLCPDLPELDLSELDVNDLDTDSFLGGLKWCSDQSEIISNQYNNEPSNIFEKIDEENEANLLAVLTETLDSLPVDEDGLPSFDALTDGDVTTDNEASPSSMPDGTPPPQEAEEPSLLKKLLLAPANTQLSYNECSGLSTQNHANHNHRIRTNPAIVKTENSWSNKAKSICQQQKPQRRPCSELLKYLTTNDDPPHTKPTENRNSSRDKCTSKKKSHTQSQSQHLQAKPTTLSLPLTPESPNDPKGSPFENKTIERTLSVELSGTAGVKTNLISK

SEQ ID NO: 62164 - protein, 267 aa, Homo sapiens
  Payload ID: 12429
  Gene Symbol: PPARGC1A
  Gene Name: peroxisome proliferator-activated receptor gamma, coactivator 1 alpha
  ENSP ID: ENSP00000479729
MCNQDSESVWSDIECAALVGEDQPLCPDLPELDLSELDVNDLDTDSFLGGLKWCSDQSEIISNQYNNEPSNIFEKIDEENEANLLAVLTETLDSLPVDEDGLPSFDALTDGDVTTDNEASPSSMPDGTPPPQEAEEPSLLKKLLLAPANTQLSYNECSGLSTQNHANHNHRIRTNPAIVKTENSWSNKAKSICQQQKPQRRPCSELLKYLTTNDDPPHTKPTENRNSSRDKCTSKKKSHTQSQSQHLQAKPTTLSLPLTPESPNLFL

SEQ ID NO: 62165 - protein, 671 aa, Homo sapiens
  Payload ID: 12429
  Gene Symbol: PPARGC1A
  Gene Name: peroxisome proliferator-activated receptor gamma, coactivator 1 alpha
  Uniprot ID: Q9UBK2
  ENSP ID: ENSP00000481498
MPDGTPPPQEAEEPSLLKKLLLAPANTQLSYNECSGLSTQNHANHNHRIRTNPAIVKTENSWSNKAKSICQQQKPQRRPCSELLKYLTTNDDPPHTKPTENRNSSRDKCTSKKKSHTQSQSQHLQAKPTTLSLPLTPESPNDPKGSPFENKTIERTLSVELSGTAGLTPPTTPPHKANQDNPFRASPKLKSSCKTVVPPPSKKPRYSESSGTQGNNSTKKGPEQSELYAQLSKSSVLTGGHEERKTKRPSLRLFGDHDYCQSINSKTEILINISQELQDSRQLENKDVSSDWQGQICSSTDSDQCYLRETLEASKQVSPCSTRKQLQDQEIRAELNKHFGHPSQAVFDDEADKTGELRDSDFSNEQFSKLPMFINSGLAMDGLFDDSEDESDKLSYPWDGTQSYSLFNVSPSCSSFNSPCRDSVSPPKSLFSQRPQRMRSRSRSFSRHRSCSRSPYSRSRSRSPGSRSSSRSCYYYESSHYRHRTHRNSPLYVRSRSRSPYSRRPRYDSYEEYQHERLKREEYRREYEKRESERAKQRERQRQKAIEERRVIYVGKIRPDTTRTELRDRFEVFGEIEECTVNLRDDGDSYGFITYRYTCDAFAALENGYTLRRSNETDFELYFCGRKQFFKSNYADLDSNSDDFDPASTKSKYDSLDFDSLLKEAQRSLRR

SEQ ID NO: 62166 - protein, 1023 aa, Homo sapiens
  Payload ID: 12430
  Gene Symbol: PPARGC1B
  Gene Name: peroxisome proliferator-activated receptor gamma, coactivator 1 beta
  Uniprot ID: Q86YN6
  ENSP ID: ENSP00000312649
MAGNDCGALLDEELSSFFLNYLADTQGGGSGEEQLYADFPELDLSQLDASDFDSATCFGELQWCPENSETEPNQYSPDDSELFQIDSENEALLAELTKTLDDIPEDDVGLAAFPALDGGDALSCTSASPAPSSAPPSPAPEKPSAPAPEVDELSLLQKLLLATSYPTSSSDTQKEGTAWRQAGLRSKSQRPCVKADSTQDKKAPMMQSQSRSCTELHKHLTSAQCCLQDRGLQPPCLQSPRLPAKEDKEPGEDCPSPQPAPASPRDSLALGRADPGAPVSQEDMQAMVQLIRYMHTYCLPQRKLPPQTPEPLPKACSNPSQQVRSRPWSRHHSKASWAEFSILRELLAQDVLCDVSKPYRLATPVYASLTPRSRPRPPKDSQASPGRPSSVEEVRIAASPKSTGPRPSLRPLRLEVKREVRRPARLQQQEEEDEEEEEEEEEEEKEEEEEWGRKRPGRGLPWTKLGRKLESSVCPVRRSRRLNPELGPWLTFADEPLVPSEPQGALPSLCLAPKAYDVERELGSPTDEDSGQDQQLLRGPQIPALESPCESGCGDMDEDPSCPQLPPRDSPRCLMLALSQSDPTFGKKSFEQTLTVELCGTAGLTPPTTPPYKPTEEDPFKPDIKHSLGKEIALSLPSPEGLSLKATPGAAHKLPKKHPERSELLSHLRHATAQPASQAGQKRPFSCSFGDHDYCQVLRPEGVLQRKVLRSWEPSGVHLEDWPQQGAPWAEAQAPGREEDRSCDAGAPPKDSTLLRDHEIRASLTKHFGLLETALEEEDLASCKSPEYDTVFEDSSSSSGESSFLPEEEEEEGEEEEEDDEEEDSGVSPTCSDHCPYQSPPSKANRQLCSRSRSSSGSSPCHSWSPATRRNFRCESRGPCSDRTPSIRHARKRREKAIGEGRVVYIQNLSSDMSSRELKRRFEVFGEIEECEVLTRNRRGEKYGFITYRCSEHAALSLTKGAALRKRNEPSFQLSYGGLRHFCWPRYTDYDSNSEEALPASGKSKYEAMDFDSLLKEAQQSLH

SEQ ID NO: 62167 - protein, 984 aa, Homo sapiens
  Payload ID: 12430
  Gene Symbol: PPARGC1B
  Gene Name: peroxisome proliferator-activated receptor gamma, coactivator 1 beta
  Uniprot ID: Q86YN6
  ENSP ID: ENSP00000353638
MAGNDCGALLDEELSSFFLNYLADTQGGGSGEEQLYADFPELDLSQLDASDFDSATCFGELQWCPENSETEPNQYSPDDSELFQIDSENEALLAELTKTLDDIPEDDVGLAAFPALDGGDALSCTSASPAPSSAPPSPAPEKPSAPAPEVDELSLADSTQDKKAPMMQSQSRSCTELHKHLTSAQCCLQDRGLQPPCLQSPRLPAKEDKEPGEDCPSPQPAPASPRDSLALGRADPGAPVSQEDMQAMVQLIRYMHTYCLPQRKLPPQTPEPLPKACSNPSQQVRSRPWSRHHSKASWAEFSILRELLAQDVLCDVSKPYRLATPVYASLTPRSRPRPPKDSQASPGRPSSVEEVRIAASPKSTGPRPSLRPLRLEVKREVRRPARLQQQEEEDEEEEEEEEEEEKEEEEEWGRKRPGRGLPWTKLGRKLESSVCPVRRSRRLNPELGPWLTFADEPLVPSEPQGALPSLCLAPKAYDVERELGSPTDEDSGQDQQLLRGPQIPALESPCESGCGDMDEDPSCPQLPPRDSPRCLMLALSQSDPTFGKKSFEQTLTVELCGTAGLTPPTTPPYKPTEEDPFKPDIKHSLGKEIALSLPSPEGLSLKATPGAAHKLPKKHPERSELLSHLRHATAQPASQAGQKRPFSCSFGDHDYCQVLRPEGVLQRKVLRSWEPSGVHLEDWPQQGAPWAEAQAPGREEDRSCDAGAPPKDSTLLRDHEIRASLTKHFGLLETALEEEDLASCKSPEYDTVFEDSSSSSGESSFLPEEEEEEGEEEEEDDEEEDSGVSPTCSDHCPYQSPPSKANRQLCSRSRSSSGSSPCHSWSPATRRNFRCESRGPCSDRTPSIRHARKRREKAIGEGRVVYIQNLSSDMSSRELKRRFEVFGEIEECEVLTRNRRGEKYGFITYRCSEHAALSLTKGAALRKRNEPSFQLSYGGLRHFCWPRYTDYDSNSEEALPASGKSKYEAMDFDSLLKEAQQSLH

SEQ ID NO: 62168 - protein, 1017 aa, Homo sapiens
  Payload ID: 12430
  Gene Symbol: PPARGC1B
  Gene Name: peroxisome proliferator-activated receptor gamma, coactivator 1 beta
  Uniprot ID: Q86YN6
  ENSP ID: ENSP00000377855
MAGNDCGALLDEELSSFFLNYLADTQGGGSGEEQLYADFPELDLSQLDASDFDSATCFGELQWCPENSETEPNQYSPDDSELFQIDSENEALLAELTKTLDDIPEDDVGLAAFPALDGGDALSCTSASPAPSSAPPSPAPEKPSAPAPEVDELSLLQKLLLATSYPTSSSDTQKEGTAWRQAGLRSKSQRPCVKADSTQDKKAPMMQSQSRSCTELHKHLTSAQCCLQDRGLQPPCLQSPRLPAKEDKEPGEDCPSPQPAPASPRDSLALGRADPGAPVSQEDMQAMVQLIRYMHTYCLPQRKLPPQTPEPLPKACSNPSQQVRSRPWSRHHSKASWAEFSILRELLAQDVLCDVSKPYRLATPVYASLTPRSRPRPPKDSQASPGRPSSVEEVRIAASPKSTGPRPSLRPLRLEVKREVRRPARLQQQEEEDEEEEEEEEEEEKEEEEEWGRKRPGRGLPWTKLGRKLESSVCPVRRSRRLNPELGPWLTFADEPLVPSEPQGALPSLCLAPKAYDVERELGSPTDEDSGQDQQLLRGPQIPALESPCESGCGDMDEDPSCPQLPPRDSPRCLMLALSQSDPTFGKKSFEQTLTVELCGTAGLTPPTTPPYKPTEEDPFKPDIKHSLGKEIALSLPSPEGLSLKATPGAAHKLPKKHPERSELLSHLRHATAQPASQAGQKRPFSCSFGDHDYCQVLRPEGVLQRKVLRSWEPSGVHLEDWPQQGAPWAEAQAPGREEDRSCDAGAPPKDSTLLRDHEIRASLTKHFGLLETALEEEDLASCKSPEYDTVFEDSSSSSGESSFLPEEEEEEGEEEEEDDEEEDSGVSPTCSDHCPYQSPPSKANRQLCSRSRSSSGSSPCHSWSPATRRNFRCESRGPCSDRTPSIRHARKRREKAIGEGRVVYIQNLSSDMSSRELKRRFEVFGEIEECEVLTRNRRGEKYGFITYRCSEHAALSLTKGAALRKRNEPSFQLSYGGLRHFCWPRYTDYGKPLKPSHSLVRLKAWEAVPSLNKTQS

SEQ ID NO: 62169 - protein, 959 aa, Homo sapiens
  Payload ID: 12430
  Gene Symbol: PPARGC1B
  Gene Name: peroxisome proliferator-activated receptor gamma, coactivator 1 beta
  Uniprot ID: Q86YN6
  ENSP ID: ENSP00000384403
MGGGSGEEQLYADFPELDLSQLDASDFDSATCFGELQWCPENSETEPNQYSPDDSELFQIDSENEALLAELTKTLDDIPEDDVGLAAFPALDGGDALSCTSASPAPSSAPPSPAPEKPSAPAPEVDELSLADSTQDKKAPMMQSQSRSCTELHKHLTSAQCCLQDRGLQPPCLQSPRLPAKEDKEPGEDCPSPQPAPASPRDSLALGRADPGAPVSQEDMQAMVQLIRYMHTYCLPQRKLPPQTPEPLPKACSNPSQQVRSRPWSRHHSKASWAEFSILRELLAQDVLCDVSKPYRLATPVYASLTPRSRPRPPKDSQASPGRPSSVEEVRIAASPKSTGPRPSLRPLRLEVKREVRRPARLQQQEEEDEEEEEEEEEEEKEEEEEWGRKRPGRGLPWTKLGRKLESSVCPVRRSRRLNPELGPWLTFADEPLVPSEPQGALPSLCLAPKAYDVERELGSPTDEDSGQDQQLLRGPQIPALESPCESGCGDMDEDPSCPQLPPRDSPRCLMLALSQSDPTFGKKSFEQTLTVELCGTAGLTPPTTPPYKPTEEDPFKPDIKHSLGKEIALSLPSPEGLSLKATPGAAHKLPKKHPERSELLSHLRHATAQPASQAGQKRPFSCSFGDHDYCQVLRPEGVLQRKVLRSWEPSGVHLEDWPQQGAPWAEAQAPGREEDRSCDAGAPPKDSTLLRDHEIRASLTKHFGLLETALEEEDLASCKSPEYDTVFEDSSSSSGESSFLPEEEEEEGEEEEEDDEEEDSGVSPTCSDHCPYQSPPSKANRQLCSRSRSSSGSSPCHSWSPATRRNFRCESRGPCSDRTPSIRHARKRREKAIGEGRVVYIQNLSSDMSSRELKRRFEVFGEIEECEVLTRNRRGEKYGFITYRCSEHAALSLTKGAALRKRNEPSFQLSYGGLRHFCWPRYTDYDSNSEEALPASGKSKYEAMDFDSLLKEAQQSLH

SEQ ID NO: 62170 - protein, 748 aa, Homo sapiens
  Payload ID: 12430
  Gene Symbol: PPARGC1B
  Gene Name: peroxisome proliferator-activated receptor gamma, coactivator 1 beta
  ENSP ID: ENSP00000409364
  MOD_RES (1)..(1): Any amino acid
XACSNPSQQVRSRPWSRHHSKASWAEFSILRELLAQDVLCDVSKPYRLATPVYASLTPRSRPRPPKDSQASPGRPSSVEEVRIAASPKSTGPRPSLRPLRLEVKREVRRPARLQQQEEEDEEEEEEEEEEEKEEEEEWGRKRPGRGLPWTKLGRKLESSVCPVRRSRRLNPELGPWLTFADEPLVPSEPQGALPSLCLAPKAYDVERELGSPTDEDSGQDQQLLRGPQIPALESPCESGCGDMDEDPSCPQLPPRDSPRCLMLALSQSDPTFGKKSFEQTLTVELCGTAGLTPPTTPPYKPTEEDPFKPDIKHSLGKEIALSLPSPEGLSLKATPGAAHKLPKKHPERSELLSHLRHATAQPASQAGQKRPFSCSFGDHDYCQVLRPEGVLQRKVLRSWEPSGVHLEDWPQQGAPWAEAQAPGREEDRSCDAGAPPKDSTLLRDHEIRASLTKHFGLLETALEEEDLASCKSPEYDTVFEDSSSSSGESSFLPEEEEEEGEEEEEDDEEEDSGVSPTCSDHCPYQSPPSKANRQLCSRSRSSSGSSPCHSWSPATRRNFRCESRGPCSDRTPSIRHARKRREKAIGEGRVVYIQNLSSDMSSRELKRRFEVFGEIEECEVLTRNRRGEKYGFITYRCSEHAALSLTKGAALRKRNEPSFQLSYGGLRHFCWPRYTDYGWQAVPTVQRSSQLPKALGCSHSTVPTHSGRFFNHPVFVSCSLPSPLPCLFTPMPRFQFRRGPSCVREKQV

SEQ ID NO: 62171 - protein, 1664 aa, Homo sapiens
  Payload ID: 12431
  Gene Symbol: PPRC1
  Gene Name: peroxisome proliferator-activated receptor gamma, coactivator-related 1
  Uniprot ID: Q5VV67
  ENSP ID: ENSP00000278070
MAARRGRRDGVAPPPSGGPGPDPGGGARGSGWGSRSQAPYGTLGAVSGGEQVLLHEEAGDSGFVSLSRLGPSLRDKDLEMEELMLQDETLLGTMQSYMDASLISLIEDFGSLGESRLSLEDQNEVSLLTALTEILDNADSENLSPFDSIPDSELLVSPREGSSLHKLLTLSRTPPERDLITPVDPLGPSTGSSRGSGVEMSLPDPSWDFSPPSFLETSSPKLPSWRPPRSRPRWGQSPPPQQRSDGEEEEEVASFSGQILAGELDNCVSSIPDFPMHLACPEEEDKATAAEMAVPAAGDESISSLSELVRAMHPYCLPNLTHLASLEDELQEQPDDLTLPEGCVVLEIVGQAATAGDDLEIPVVVRQVSPGPRPVLLDDSLETSSALQLLMPTLESETEAAVPKVTLCSEKEGLSLNSEEKLDSACLLKPREVVEPVVPKEPQNPPANAAPGSQRARKGRKKKSKEQPAACVEGYARRLRSSSRGQSTVGTEVTSQVDNLQKQPQEELQKESGPLQGKGKPRAWARAWAAALENSSPKNLERSAGQSSPAKEGPLDLYPKLADTIQTNPIPTHLSLVDSAQASPMPVDSVEADPTAVGPVLAGPVPVDPGLVDLASTSSELVEPLPAEPVLINPVLADSAAVDPAVVPISDNLPPVDAVPSGPAPVDLALVDPVPNDLTPVDPVLVKSRPTDPRRGAVSSALGGSAPQLLVESESLDPPKTIIPEVKEVVDSLKIESGTSATTHEARPRPLSLSEYRRRRQQRQAETEERSPQPPTGKWPSLPETPTGLADIPCLVIPPAPAKKTALQRSPETPLEICLVPVGPSPASPSPEPPVSKPVASSPTEQVPSQEMPLLARPSPPVQSVSPAVPTPPSMSAALPFPAGGLGMPPSLPPPPLQPPSLPLSMGPVLPDPFTHYAPLPSWPCYPHVSPSGYPCLPPPPTVPLVSGTPGAYAVPPTCSVPWAPPPAPVSPYSSTCTYGPLGWGPGPQHAPFWSTVPPPPLPPASIGRAVPQPKMESRGTPAGPPENVLPLSMAPPLSLGLPGHGAPQTEPTKVEVKPVPASPHPKHKVSALVQSPQMKALACVSAEGVTVEEPASERLKPETQETRPREKPPLPATKAVPTPRQSTVPKLPAVHPARLRKLSFLPTPRTQGSEDVVQAFISEIGIEASDLSSLLEQFEKSEAKKECPPPAPADSLAVGNSGGVDIPQEKRPLDRLQAPELANVAGLTPPATPPHQLWKPLAAVSLLAKAKSPKSTAQEGTLKPEGVTEAKHPAAVRLQEGVHGPSRVHVGSGDHDYCVRSRTPPKKMPALVIPEVGSRWNVKRHQDITIKPVLSLGPAAPPPPCIAASREPLDHRTSSEQADPSAPCLAPSSLLSPEASPCRNDMNTRTPPEPSAKQRSMRCYRKACRSASPSSQGWQGRRGRNSRSVSSGSNRTSEASSSSSSSSSSSRSRSRSLSPPHKRWRRSSCSSSGRSRRCSSSSSSSSSSSSSSSSSSSSRSRSRSPSPRRRSDRRRRYSSYRSHDHYQRQRVLQKERAIEERRVVFIGKIPGRMTRSELKQRFSVFGEIEECTIHFRVQGDNYGFVTYRYAEEAFAAIESGHKLRQADEQPFDLCFGGRRQFCKRSYSDLDSNREDFDPAPVKSKFDSLDFDTLLKQAQKNLRR

SEQ ID NO: 62172 - protein, 631 aa, Homo sapiens
  Payload ID: 12431
  Gene Symbol: PPRC1
  Gene Name: peroxisome proliferator-activated receptor gamma, coactivator-related 1
  ENSP ID: ENSP00000359029
MAPPLSLGLPGHGAPQTEPTKVEVKPVPASPHPKHKVSALVQSPQMKALACVSAEGVTVEEPASERLKPETQETRPREKPPLPATKAVPTPRQSTVPKLPAVHPARLRKLSFLPTPRTQGSEDVVQAFISEIGIEASDLSSLLEQFEKSEAKKECPPPAPADSLAVGNSGGVDIPQEKRPLDRLQAPELANVAGLTPPATPPHQLWKPLAAVSLLAKAKSPKSTAQEGTLKPEGVTEAKHPAAVRLQEGVHGPSRVHVGSGDHDYCVRSRTPPKKMPALVIPEVGSRWNVKRHQDITIKPVLSLGPAAPPPPCIAASREPLDHRTSSEQADPSAPCLAPSSLLSPEASPCRNDMNTRTPPEPSAKQRSMRCYRKACRSASPSSQGWQGRRGRNSRSVSSGSNRTSEASSSSSSSSSSSRSRSRSLSPPHKRWRRSSCSSSGRSRRCSSSSSSSSSSSSSSSSSSSSRSRSRSPSPRRRSDRRRRYSSYRSHDHYQRQRVLQKERAIEERRVVFIGKIPGRMTRSELKQRFSVFGEIEECTIHFRVQGDNYGFVTYRYAEEAFAAIESGHKLRQADEQPFDLCFGGRRQFCKRSYSDLDSNREDFDPAPVKSKFDSLDFDTLLKQAQKNLRR

SEQ ID NO: 62173 - protein, 1400 aa, Homo sapiens
  Payload ID: 12431
  Gene Symbol: PPRC1
  Gene Name: peroxisome proliferator-activated receptor gamma, coactivator-related 1
  ENSP ID: ENSP00000399743
MAARRGRRDGVAPPPSGGPGPDPGGGARGSGWGSRSQAPYGTLGAVSGGEQVLLHEEAGDSGFVSLSRLGPSLRDKDLEMEELMLQDETLLGTMQSYMDASLISLIEDFGSLGESRLSLEDQNEVSLLTALTEILDNADSENLSPFDSIPDSELLVSPREGSSLHKLLTLSRTPPERDLITPVDPLGPSTGSSRGSGVEMSLPDPSWDFSPPSFLETSSPKLPSWRPPRSRPRWGQSPPPQQRSDGEEEEEVASFSGQILAGELDNCVSSIPDFPMHLACPEEEDKATAAEMAVPAAGDESISSLSELVRAMHPYCLPNLTHLASLEDELQEQPDDLTLPEGCVVLEIVGQAATAGDDLEIPVVVRQVSPGPRPVLLDDSLETSSALQLLMPTLESETEAAVPKVTLCSEKEGLSLNSEEKLDSACLLKPREVVEPVVPKEPQNPPANAAPGSQRARKGRKKKSKEQPAACVEGYARRLRSSSRGQSTVGTEVTSQVDNLQKQPQEELQKESGPLQGKGKPRAWARAWAAALENSSPKNLERSAGQSSPAKEGPLDLYPKLADTIQTNPIPTHLSLVDSAQASPMPVDSVEADPTAVGPVLAGPVPVDPGLVDLASTSSELVEPLPAEPVLINPVLADSAAVDPAVVPISDNLPPVDAVPSGPAPVDLALVDPVPNDLTPVDPVLVKSRPTDPRRGAVSSALGGSAPQLLVESESLDPPKTIIPEVKEVVDSLKIESGTSATTHEARPRPLSLSEYRRRRQQRQAETEERSPQPPTGKWPSLPETPTGLADIPCLVIPPAPAKKTALQRSPETPLEICLVPVGPSPASPSPEPPVSKPVASSPTEQVPSQEMPLLARPSPPVQSVSPAVPTPPSMSAALPFPAGGLGMPPSLPPPPLQPPSLPLSMGPVLPDPFTHYAPLPSWPCYPHVSPSGYPCLPPPPTVPLVSGTPGAYAVPPTCSVPWAPPPAPVSPYSSTCTYGPLGWGPGPQHAPFWSTVPPPPLPPASIGRAVPQPKMESRGTPAGPPENVLPLSMAPPLSLGLPGHGAPQTEPTKVEVKPVPASPHPKHKVSALVQSPQMKALACVSAEGVTVEEPASERLKPETQETRPREKPPLPATKAVPTPRQSTVPKLPAVHPARLRKLSFLPTPRTQGSEDVVQAFISEIGIEASDLSSLLEQFEKSEAKKECPPPAPADSLAVGNSGSSCSSSGRSRRCSSSSSSSSSSSSSSSSSSSSRSRSRSPSPRRRSDRRRRYSSYRSHDHYQRQRVLQKERAIEERRVVFIGKIPGRMTRSELKQRFSVFGEIEECTIHFRVQGDNYGFVTYRYAEEAFAAIESGHKLRQADEQPFDLCFGGRRQFCKRSYSDLDSNREDFDPAPVKSKFDSLDFDTLLKQAQKNLRR

SEQ ID NO: 62174 - protein, 193 aa, Homo sapiens
  Payload ID: 12432
  Gene Symbol: PERP
  Gene Name: PERP, TP53 apoptosis effector
  Uniprot ID: Q96FX8
  ENSP ID: ENSP00000397157
MIRCGLACERCRWILPLLLLSAIAFDIIALAGRGWLQSSDHGQTSSLWWKCSQEGGGSGSYEEGCQSLMEYAWGRAAAAMLFCGFIILVICFILSFFALCGPQMLVFLRVIGGLLALAAVFQIISLVIYPVKYTQTFTLHANPAVTYIYNWAYGFGWAATIILIGCAFFFCCLPNYEDDLLGNAKPRYFYTSA

SEQ ID NO: 62175 - protein, 156 aa, Homo sapiens
  Payload ID: 12433
  Gene Symbol: PSPN
  Gene Name: persephin
  Uniprot ID: O60542
  ENSP ID: ENSP00000245810
MAVGKFLLGSLLLLSLQLGQGWGPDARGVPVADGEFSSEQVAKAGGTWLGTHRPLARLRRALSGPCQLWSLTLSVAELGLGYASEEKVIFRYCAGSCPRGARTQHGLALARLQGQGRAHGGPCCRPTRYTDVAFLDDRHRWQRLPQLSAAACGCGG

SEQ ID NO: 62176 - protein, 164 aa, Homo sapiens
  Payload ID: 12433
  Gene Symbol: PSPN
  Gene Name: persephin
  ENSP ID: ENSP00000469884
MAVGKFLLGSLLLLSLQLGQGWGPDARGVPVADGEFSSEQVAKAGGTWLGKDFQGPSVTSQLSPALTLLTVSALPSHRHPPPPCPPAPSPVWSMPAVEPDPVRGRARPGLRLRGEGHLPLLRRQLPPWCPHPAWPGAGPAAGPGPSPRRALLPAHSLHRRGLPR

SEQ ID NO: 62177 - protein, 583 aa, Homo sapiens
  Payload ID: 12434
  Gene Symbol: PES1
  Gene Name: pescadillo ribosomal biogenesis factor 1
  Uniprot ID: O00541
  ENSP ID: ENSP00000334612
MGGLEKKKYERGSATNYITRNKARKKLQLSLADFRRLCILKGIYPHEPKHKKKVNKGSTAARTFYLIKDIRFLLHEPIVNKFREYKVFVRKLRKAYGKSEWNTVERLKDNKPNYKLDHIIKERYPTFIDALRDLDDALSMCFLFSTFPRTGKCHVQTIQLCRRLTVEFMHYIIAARALRKVFLSIKGIYYQAEVLGQPIVWITPYAFSHDHPTDVDYRVMATFTEFYTTLLGFVNFRLYQLLNLHYPPKLEGQAQAEAKAGEGTYALDSESCMEKLAALSASLARVVVPATEEEAEVDEFPTDGEEDRRKELEAQEKHKKLFEGLKFFLNREVPREALAFIIRSFGGEVSWDKSLCIGATYDVTDSRITHQIVDRPGQQTSVIGRCYVQPQWVFDSVNARLLLPVAEYFSGVQLPPHLSPFVTEKEGDYVPPEKLKLLALQRGEDPGNLNESEEEEEEDDNNEGDGDEEGENEEEEEDAEAGSEKEEEARLAALEEQRMEGKKPRVMAGTLKLEDKQRLAQEEESEAKRLAIMMMKKREKYLYQKIMFGKRRKIREANKLAEKRKAHDEAVRSEKKAKKARPE

SEQ ID NO: 62178 - protein, 588 aa, Homo sapiens
  Payload ID: 12434
  Gene Symbol: PES1
  Gene Name: pescadillo ribosomal biogenesis factor 1
  Uniprot ID: O00541
  ENSP ID: ENSP00000346725
MGGLEKKKYERGSATNYITRNKARKKLQLSLADFRRLCILKGIYPHEPKHKKKVNKGSTAARTFYLIKDIRFLLHEPIVNKFREYKVFVRKLRKAYGKSEWNTVERLKDNKPNYKLDHIIKERYPTFIDALRDLDDALSMCFLFSTFPRTGKCHVQTIQLCRRLTVEFMHYIIAARALRKVFLSIKGIYYQAEVLGQPIVWITPYAFSHDHPTDVDYRVMATFTEFYTTLLGFVNFRLYQLLNLHYPPKLEGQAQAEAKAGEGTYALDSESCMEKLAALSASLARVVVPATEEEAEVDEFPTDGEMSAQEEDRRKELEAQEKHKKLFEGLKFFLNREVPREALAFIIRSFGGEVSWDKSLCIGATYDVTDSRITHQIVDRPGQQTSVIGRCYVQPQWVFDSVNARLLLPVAEYFSGVQLPPHLSPFVTEKEGDYVPPEKLKLLALQRGEDPGNLNESEEEEEEDDNNEGDGDEEGENEEEEEDAEAGSEKEEEARLAALEEQRMEGKKPRVMAGTLKLEDKQRLAQEEESEAKRLAIMMMKKREKYLYQKIMFGKRRKIREANKLAEKRKAHDEAVRSEKKAKKARPE

SEQ ID NO: 62179 - protein, 571 aa, Homo sapiens
  Payload ID: 12434
  Gene Symbol: PES1
  Gene Name: pescadillo ribosomal biogenesis factor 1
  ENSP ID: ENSP00000384252
MGGLEKKKYERGSATNYITRNKARKKLQLSLADFRRLCILKGIYPHEPKHKKKVNKGSTAARTFYLIKDIRFLLHEPIVNKFREYKVFVRKLRKAYGKSEWNTVERLKDNKPNYKLDHIIKERYPTFIDALRDLDDALSMCFLFSTFPRTGKCHVQTIQLCRRLTVEFMHYIIAARALRKVFLSIKGIYYQAEHPTDVDYRVMATFTEFYTTLLGFVNFRLYQLLNLHYPPKLEGQAQAEAKAGEGTYALDSESCMEKLAALSASLARVVVPATEEEAEVDEFPTDGEMSAQEEDRRKELEAQEKHKKLFEGLKFFLNREVPREALAFIIRSFGGEVSWDKSLCIGATYDVTDSRITHQIVDRPGQQTSVIGRCYVQPQWVFDSVNARLLLPVAEYFSGVQLPPHLSPFVTEKEGDYVPPEKLKLLALQRGEDPGNLNESEEEEEEDDNNEGDGDEEGENEEEEEDAEAGSEKEEEARLAALEEQRMEGKKPRVMAGTLKLEDKQRLAQEEESEAKRLAIMMMKKREKYLYQKIMFGKRRKIREANKLAEKRKAHDEAVRSEKKAKKARPE

SEQ ID NO: 62180 - protein, 449 aa, Homo sapiens
  Payload ID: 12434
  Gene Symbol: PES1
  Gene Name: pescadillo ribosomal biogenesis factor 1
  ENSP ID: ENSP00000384366
MCFLFSTFPRTGKCHVQTIQLCRRLTVEFMHYIIAARALRKVFLSIKGIYYQAEVLGQPIVWITPYAFSHDHPTDVDYRVMATFTEFYTTLLGFVNFRLYQLLNLHYPPKLEGQAQAEAKAGEGTYALDSESCMEKLAALSASLARVVVPATEEEAEVDEFPTDGEMSAQEEDRRKELEAQEKHKKLFEGLKFFLNREVPREALAFIIRSFGGEVSWDKSLCIGATYDVTDSRITHQIVDRPGQQTSVIGRCYVQPQWVFDSVNARLLLPVAEYFSGVQLPPHLSPFVTEKEGDYVPPEKLKLLALQRGEDPGNLNESEEEEEEDDNNEGDGDEEGENEEEEEDAEAGSEKEEEARLAALEEQRMEGKKPRVMAGTLKLEDKQRLAQEEESEAKRLAIMMMKKREKYLYQKIMFGKRRKIREANKLAEKRKAHDEAVRSEKKAKKARPE

SEQ ID NO: 62181 - protein, 135 aa, Homo sapiens
  Payload ID: 12434
  Gene Symbol: PES1
  Gene Name: pescadillo ribosomal biogenesis factor 1
  ENSP ID: ENSP00000384777
MCFLFSTFPRTGKCHVQTIQLCRRLTVEFMHYIIAARALRKVFLSIKGIYYQAEVLGQPIVWITPYAFSHDHPTDVDYRVMATFTEFYTTLLGFVNFRLYQLLNLHYPPKLEGQAQAEAKAGEGTYALDSESCME

SEQ ID NO: 62182 - protein, 449 aa, Homo sapiens; identical to SEQ ID NO: 62180
  Payload ID: 12434
  Gene Symbol: PES1
  Gene Name: pescadillo ribosomal biogenesis factor 1
  ENSP ID: ENSP00000385654

SEQ ID NO: 62183 - protein, 194 aa, Homo sapiens
  Payload ID: 12434
  Gene Symbol: PES1
  Gene Name: pescadillo ribosomal biogenesis factor 1
  ENSP ID: ENSP00000404234
  MOD_RES (1)..(1): Any amino acid
XPQWVFDSVNARLLLPVAEYFSGVQLPPHLSPFVTEKEGDYVPPEKLKLLALQRGEDPGNLNESEEEEEEDDNNEGDGDEEGENEEEEEDAEAGSEKEEEARLAALEEQRMEGKPRVMAGTLKLEDKQRLAQEEESEAKRLAIMMMKKREKYLYQKIMFGKRRKIREANKLAEKRKAHDEAVRSEKKAKKARPE

SEQ ID NO: 62184 - protein, 178 aa, Homo sapiens
  Payload ID: 12435
  Gene Symbol: PCNP
  Gene Name: PEST proteolytic signal containing nuclear protein
  Uniprot ID: Q8WW12
  ENSP ID: ENSP00000265260
MADGKAGDEKPEKSQRAGAAGGPEEEAEKPVKTKTVSSSNGGESSSRSAEKRSAEEEAADLPTKPTKISKFGFAIGSQTTKKASAISIKLGSSKPKETVPTLAPKTLSVAAAFNEDEDSEPEEMPPEAKMRMKNIGRDTPTSAGPNSFNKGKHGFSDNQKLWERNIKSHLGNVHDQDN

SEQ ID NO: 62185 - protein, 40 aa, Homo sapiens
  Payload ID: 12435
  Gene Symbol: PCNP
  Gene Name: PEST proteolytic signal containing nuclear protein
  ENSP ID: ENSP00000418713
MADGKAGDEKPEKSQRAGAAGVNSWEPLLLPHNLSSCCIL

SEQ ID NO: 62186 - protein, 57 aa, Homo sapiens
  Payload ID: 12435
  Gene Symbol: PCNP
  Gene Name: PEST proteolytic signal containing nuclear protein
  ENSP ID: ENSP00000419390
MADGKAGDEKPEKSQRAGAAGVMEGKVPVAALRSDQLKKKLPTSQQSLQRSPSLDLP

SEQ ID NO: 62187 - protein, 55 aa, Homo sapiens
  Payload ID: 12435
  Gene Symbol: PCNP
  Gene Name: PEST proteolytic signal containing nuclear protein
  Uniprot ID: Q8WW12
  ENSP ID: ENSP00000470810
MPPEAKMRMKNIGRDTPTSAGPNSFNKGKHGFSDNQKLWERNIKSHLGNVHDQDN

SEQ ID NO: 62188 - protein, 40 aa, Homo sapiens; identical to SEQ ID NO: 62185
  Payload ID: 12435
  Gene Symbol: PCNP
  Gene Name: PEST proteolytic signal containing nuclear protein
  ENSP ID: ENSP00000485946

SEQ ID NO: 62189 - protein, 44 aa, Homo sapiens
  Payload ID: 12436
  Gene Symbol: PET100
  Gene Name: PET100 homolog
  ENSP ID: ENSP00000392303
MGVKLEIFRRELWPPEKLQEIEEFKERLRKRREEKLLRDAQQNS

SEQ ID NO: 62190 - protein, 46 aa, Homo sapiens
  Payload ID: 12436
  Gene Symbol: PET100
  Gene Name: PET100 homolog
  ENSP ID: ENSP00000470314
  MOD_RES (1)..(1): Any amino acid
XVKLEIFRMIIYLTFPVAMFWVSNQAEWFEDDVIQRKRELWPPEKP

SEQ ID NO: 62191 - protein, 73 aa, Homo sapiens
  Payload ID: 12436
  Gene Symbol: PET100
  Gene Name: PET100 homolog
  Uniprot ID: P0DJ07
  ENSP ID: ENSP00000470539
MGVKLEIFRMIIYLTFPVAMFWVSNQAEWFEDDVIQRKRELWPPEKLQEIEEFKERLRKRREEKLLRDAQQNS

SEQ ID NO: 62192 - protein, 68 aa, Homo sapiens
  Payload ID: 12436
  Gene Symbol: PET100
  Gene Name: PET100 homolog
  ENSP ID: ENSP00000470935
MGVKLEIFRMIIYLTFPVAMFWVSNQAEWFEDDVIQRKRELWPPEKVSDLFFLPEGWRRLDSCIRDGF

SEQ ID NO: 62193 - protein, 81 aa, Homo sapiens
  Payload ID: 12437
  Gene Symbol: PET117
  Gene Name: PET117 homolog
  Uniprot ID: Q6UWS5
  ENSP ID: ENSP00000397881
MSRSSKVVLGLSVLLTAATVAGVHVKQQWDQQRLRDGVIRDIERQIRKKENIRLLGEQIILTEQLEAEREKMLLAKGSQKS

SEQ ID NO: 62194 - protein, 473 aa, Homo sapiens
  Payload ID: 12438
  Gene Symbol: PPAN
  Gene Name: peter pan homolog (Drosophila)
  Uniprot ID: Q9NQ55
  ENSP ID: ENSP00000253107
MGQSGRSRHQKRARAQAQLRNLEAYAANPHSFVFTRGCTGRNIRQLSLDVRRVMEPLTASRLQVRKKNSLKDCVAVAGPLGVTHFLILSKTETNVYFKLMRLPGGPTLTFQVKKYSLVRDVVSSLRRHRMHEQQFAHPPLLVLNSFGPHGMHVKLMATMFQNLFPSINVHKVNLNTIKRCLLIDYNPDSQELDFRHYSIKVVPVGASRGMKKLLQEKFPNMSRLQDISELLATGAGLSESEAEPDGDHNITELPQAVAGRGNMRAQQSAVRLTEIGPRMTLQLIKVQEGVGEGKVMFHSFVSKTEEELQAILEAKEKKLRLKAQRQAQQAQNVQRKQEQREAHRKKSLEGMKKARVGGSDEEASGIPSRTASLELGEDDDEQEDDDIEYFCQAVGEAPSEDLFPEAKQKRLAKSPGRKRKRWEMDRGRGRLCDQKFPKTKDKSQGAQARRGPRGASRDGGRGRGRGRPGKRVA

SEQ ID NO: 62195 - protein, 420 aa, Homo sapiens
  Payload ID: 12438
  Gene Symbol: PPAN
  Gene Name: peter pan homolog (Drosophila)
  ENSP ID: ENSP00000377382
MEPLTASRLQVRKKNSLKDCVAVAGPLGVTHFLILSKTETNVYFKLMRLPGGPTLTFQVKKYSLVRDVVSSLRRHRMHEQQFAHPPLLVLNSFGPHGMHVKLMATMFQNLFPSINVHKVNLNTIKRCLLIDYNPDSQELDFRHYSIKVVPVGASRGMKKLLQEKFPNMSRLQDISELLATGAGLSESEAEPDGDHNITELPQAVAGRGNMRAQQSAVRLTEIGPRMTLQLIKVQEGVGEGKVMFHSFVSKTEEELQAILEAKEKKLRLKAQRQAQQAQNVQRKQEQREAHRKKSLEGMKKARVGGSDEEASGIPSRTASLELGEDDDEQEDDDIEYFCQAVGEAPSEDLFPEAKQKRLAKSPGRKRKRWEMDRGRGRLCDQKFPKTKDKSQGAQARRGPRGASRDGGRGRGRGRPGKRVA

SEQ ID NO: 62196 - protein, 210 aa, Homo sapiens
  Payload ID: 12438
  Gene Symbol: PPAN
  Gene Name: peter pan homolog (Drosophila)
  ENSP ID: ENSP00000410485
MVRKKNSLKDCVAVAGPLGVTHFLILSKTETNVYFKLMRLPGGPTLTFQVKKYSLVRDVVSSLRRHRMHEQQFAHPPLLVLNSFGPHGMHVKLMATMFQNLFPSINVHKVNLNTIKRCLLIDYNPDSQELDFRHYSIKVVPVGASRGMKKLLQEKFPNMSRLQDISELLATGAGLSESEAEPDGDHNITELPQAVAGRGNMRAQQSAVRL

SEQ ID NO: 62197 - protein, 208 aa, Homo sapiens
  Payload ID: 12438
  Gene Symbol: PPAN
  Gene Name: peter pan homolog (Drosophila)
  ENSP ID: ENSP00000415467
  MOD_RES (1)..(1): Any amino acid
XAEPDGDHNITELPQAVAGRGNMRAQQSAVRLTEIGPRMTLQLIKVQEGVGEGKVMFHSFVSKTEEELQAILEAKEKKLRLKAQRQAQQAQNVQRKQEQREAHRKKSLEGMKKARVGGSDEEASGIPSRTASLELDLFPEAKQKRLAKSPGRKRKRWEMDRGRGRLCDQKFPKTKDKSQGAQARRGPRGASRDGGRGRGRGRPGKRVA

SEQ ID NO: 62198 - protein, 97 aa, Homo sapiens
  Payload ID: 12438
  Gene Symbol: PPAN
  Gene Name: peter pan homolog (Drosophila)
  ENSP ID: ENSP00000415988
MVRKKNSLKDCVAVAGPLGVTHFLILSKTETNVYFKLMRLPGGPTLTFQVKKYSLVRDVVSSLRRHRMHEQQFAHPPLLVLNSFGPHGMHVKLMATM

SEQ ID NO: 62199 - protein, 255 aa, Homo sapiens
  Payload ID: 12439
  Gene Symbol: PGAM5
  Gene Name: PGAM family member 5, serine/threonine protein phosphatase, mitochondrial
  Uniprot ID: Q96HS1
  ENSP ID: ENSP00000321503
MAFRQALQLAACGLAGGSAAVLFSAVAVGKPRAGGDAEPRPAEPPAWAGGARPGPGVWDPNWDRREPLSLINVRKRNVESGEEELASKLDHYKAKATRHIFLIRHSQYHVDGSLEKDRTLTPLGREQAELTGLRLASLGLKFNKIVHSSMTRAIETTDIISRHLPGVCKVSTDLLREGAPIEPDPPVSHWKPEAVQYYEDGARIEAAFRNYIHRADARQEEDSYEIFICHANVIRYIVCSIPPLLSAGDFVLLGS

SEQ ID NO: 62200 - protein, 140 aa, Homo sapiens
  Payload ID: 12439
  Gene Symbol: PGAM5
  Gene Name: PGAM family member 5, serine/threonine protein phosphatase, mitochondrial
  ENSP ID: ENSP00000409537
MTRAIETTDIISRHLPGVCKVSTDLLREGAPIEPDPPVSHWKPEAVQYYEDGARIEAAFRNYIHRADARQEEDSYEIFICHANVIRYIVCRALQFPPEGWLRLSLNNGSITHLVIRPNGRVALRTLGDTGFMPPDKITRS

SEQ ID NO: 62201 - protein, 289 aa, Homo sapiens
  Payload ID: 12439
  Gene Symbol: PGAM5
  Gene Name: PGAM family member 5, serine/threonine protein phosphatase, mitochondrial
  Uniprot ID: Q96HS1
  ENSP ID: ENSP00000438465
MAFRQALQLAACGLAGGSAAVLFSAVAVGKPRAGGDAEPRPAEPPAWAGGARPGPGVWDPNWDRREPLSLINVRKRNVESGEEELASKLDHYKAKATRHIFLIRHSQYHVDGSLEKDRTLTPLGREQAELTGLRLASLGLKFNKIVHSSMTRAIETTDIISRHLPGVCKVSTDLLREGAPIEPDPPVSHWKPEAVQYYEDGARIEAAFRNYIHRADARQEEDSYEIFICHANVIRYIVCRALQFPPEGWLRLSLNNGSITHLVIRPNGRVALRTLGDTGFMPPDKITRS

SEQ ID NO: 62202 - protein, 140 aa, Homo sapiens; identical to SEQ ID NO: 62200
  Payload ID: 12439
  Gene Symbol: PGAM5
  Gene Name: PGAM family member 5, serine/threonine protein phosphatase, mitochondrial
  ENSP ID: ENSP00000440372

SEQ ID NO: 62203 - protein, 1717 aa, Homo sapiens
  Payload ID: 12440
  Gene Symbol: PHLPP1
  Gene Name: PH domain and leucine rich repeat protein phosphatase 1
  Uniprot ID: O60346
  ENSP ID: ENSP00000262719
MEPAAAATVQRLPELGREDRASAPAAAAAAAAAAAAAAAALAAAAGGGRSPEPALTPAAPSGGNGSGSGAREEAPGEAPPGPLPGRAGGAGRRRRRGAPQPIAGGAAPVPGAGGGANSLLLRRGRLKRNLSAAAAAASSSSSSSAAAASHSPGAAGLPASCSASASLCTRSLDRKTLLLKHRQTLQLQPSDRDWVRHQLQRGCVHVFDRHMASTYLRPVLCTLDTTAGEVAARLLQLGHKGGGVVKVLGQGPGAAAAREPAEPPPEAGPRLAPPEPRDSEVPPARSAPGAFGGPPRAPPADLPLPVGGPGGWSRRASPAPSDSSPGEPFVGGPVSSPRAPRPVVSDTESFSLSPSAESVSDRLDPYSSGGGSSSSSEELEADAASAPTGVPGQPRRPGHPAQPLPLPQTASSPQPQQKAPRAIDSPGGAVREGSCEEKAAAAVAPGGLQSTPGRSGVTAEKAPPPPPPPTLYVQLHGETTRRLEAEEKPLQIQNDYLFQLGFGELWRVQEEGMDSEIGCLIRFYAGKPHSTGSSERIQLSGMYNVRKGKMQLPVNRWTRRQVILCGTCLIVSSVKDSLTGKMHVLPLIGGKVEEVKKHQHCLAFSSSGPQSQTYYICFDTFTEYLRWLRQVSKVASQRISSVDLSCCSLEHLPANLFYSQDLTHLNLKQNFLRQNPSLPAARGLNELQRFTKLKSLNLSNNHLGDFPLAVCSIPTLAELNVSCNALRSVPAAVGVMHNLQTFLLDGNFLQSLPAELENMKQLSYLGLSFNEFTDIPEVLEKLTAVDKLCMSGNCVETLRLQALRKMPHIKHVDLRLNVIRKLIADEVDFLQHVTQLDLRDNKLGDLDAMIFNNIEVLHCERNQLVTLDICGYFLKALYASSNELVQLDVYPVPNYLSYMDVSRNRLENVPEWVCESRKLEVLDIGHNQICELPARLFCNSSLRKLLAGHNQLARLPERLERTSVEVLDVQHNQLLELPPNLLMKADSLRFLNASANKLESLPPATLSEETNSILQELYLTNNSLTDKCVPLLTGHPHLKILHMAYNRLQSFPASKMAKLEELEEIDLSGNKLKAIPTTIMNCRRMHTVIAHSNCIEVFPEVMQLPEIKCVDLSCNELSEVTLPENLPPKLQELDLTGNPRLVLDHKTLELLNNIRCFKIDQPSTGDASGAPAVWSHGYTEASGVKNKLCVAALSVNNFCDNREALYGVFDGDRNVEVPYLLQCTMSDILAEELQKTKNEEEYMVNTFIVMQRKLGTAGQKLGGAAVLCHIKHDPVDPGGSFTLTSANVGKCQTVLCRNGKPLPLSRSYIMSCEEELKRIKQHKAIITEDGKVNGVTESTRILGYTFLHPSVVPRPHVQSVLLTPQDEFFILGSKGLWDSLSVEEAVEAVRNVPDALAAAKKLCTLAQSYGCHDSISAVVVQLSVTEDSFCCCELSAGGAVPPPSPGIFPPSVNMVIKDRPSDGLGVPSSSSGMASEISSELSTSEMSSEVGSTASDEPPPGALSENSPAYPSEQRCMLHPICLSNSFQRQLSSATFSSAFSDNGLDSDDEEPIEGVFTNGSRVEVEVDIHCSRAKEKEKQQHLLQVPAEASDEGIVISANEDEPGLPRKADFSAVGTIGRRRANGSVAPQERSHNVIEVATDAPLRKPGGYFAAPAQPDPDDQFIIPPELEEEVKEIMKHHQEQQQQQQPPPPPQLQPQLPRHYQLDQLPDYYDTPL

SEQ ID NO: 62204 - protein, 197 aa, Homo sapiens
  Payload ID: 12440
  Gene Symbol: PHLPP1
  Gene Name: PH domain and leucine rich repeat protein phosphatase 1
  ENSP ID: ENSP00000467279
  MOD_RES (1)..(1): Any amino acid
XYASSNELVQLDVYPVPNYLSYMDVSRNRLENVPEWVCESRKLEVLDIGHNQICELPARLFCNSSLRKLLAGHNQLARLPERLERTSVEVLDVQHNQLLELPPNLLMKADSKMAKLEELEEIDLSGNKLKAIPTTIMNCRRMHTVIAHSNCIEVFPEVMQLPEIKCVDLSCNELSEVTLPENLPPKLQELDLTGNPR

SEQ ID NO: 62205 - protein, 1256 aa, Homo sapiens
  Payload ID: 12441
  Gene Symbol: PHLPP2
  Gene Name: PH domain and leucine rich repeat protein phosphatase 2
  Uniprot ID: Q6ZVD8
  ENSP ID: ENSP00000377159
MKRNGSRNCLNRRSRFGSRERDWLREDVKRGCVYLYGADTTTATTTTTTSSSSSSSSSSSDLHLVLCTVETPASEICAGEGRESLYLQLHGDLVRRLEPTERPLQIVYDYLSRLGFDDPVRIQEEATNPDLGCMIRFYGEKPCHMDRLDRILLSGIYNVRKGKTQLHKWAERLVVLCGTCLIVSSVKDCQTGKMHILPLVGGKIEEVKRRQYSLAFSSAGAQAQTYHVSFETLAEYQRWQRQASKVVSQRISTVDLSCYSLEEVPEHLFYSQDITYLNLRHNFMQLERPGGLDTLYKFSQLKGLNLSHNKLGLFPILLCEISTLTELNLSCNGFHDLPSQIGNLLNLQTLCLDGNFLTTLPEELGNLQQLSSLGISFNNFSQIPEVYEKLTMLDRVVMAGNCLEVLNLGVLNRMNHIKHVDLRMNHLKTMVIENLEGNKHITHVDLRDNRLTDLDLSSLCSLEQLHCGRNQLRELTLSGFSLRTLYASSNRLTAVNVYPVPSLLTFLDLSRNLLECVPDWACEAKKIEVLDVSYNLLTEVPVRILSSLSLRKLMLGHNHVQNLPTLVEHIPLEVLDLQHNALTRLPDTLFSKALNKLNKLEQLEELNLSGNKLKTIPTTIANCKRLHTLVAHSNNISIFPEILQLPQIQFVDLSCNDLTEILIPEALPATLQDLDLTGNTNLVLEHKTLDIFSHITTLKIDQKPLPTTDSTVTSTFWSHGLAEMAGQRNKLCVSALAMDSFAEGVGAVYGMFDGDRNEELPRLLQCTMADVLLEEVQQSTNDTVFMANTFLVSHRKLGMAGQKLGSSALLCYIRPDTADPASSFSLTVANVGTCQAVLCRGGKPVPLSKVFSLEQDPEEAQRVKDQKAIITEDNKVNGVTCCTRMLGCTYLYPWILPKPHISSTPLTIQDELLILGNKALWEHLSYTEAVNAVRHVQDPLAAAKKLCTLAQSYGCQDNVGAMVVYLNIGEEGCTCEMNGLTLPGPVGFASTTTIKDAPKPATPSSSSGIASEFSSEMSTSEVSSEVGSTASDEHNAGGLDTALLPRPERRCSLHPTPTSGLFQRQPSSATFSSNQSDNGLDSDDDQPVEGVITNGSKVEVEVDIHCCRGRDLENSPPLIESSPTLCSEEHARGSCFGIRRQNSVNSGMLLPMSKDRMELQKSPSTSCLYGKKLSNGSIVPLEDSLNLIEVATEVPKRKTGYFAAPTQMEPEDQFVVPHDLEEEVKEQMKQHQDSRLEPEPHEEDRTEPPEEFDTAL

SEQ ID NO: 62206 - protein, 1358 aa, Homo sapiens
  Payload ID: 12441
  Gene Symbol: PHLPP2
  Gene Name: PH domain and leucine rich repeat protein phosphatase 2
  ENSP ID: ENSP00000454519
MGEVEPGPAGPLEPPEPPEAPASRRPGGIRVLKRNMKRNGSRNCLNRRSRFGSRERDWLREDVKRGCVYLYGADTTTATTTTTTSSSSSSSSSSSDLHLVLCTVETPASEICAGEGRESLYLQLHGDLVRRLEPTERPLQIVYDYLSRLGFDDPVRIQEEATNPDLGCMIRFYGEKPCHMDRLDRILLSGIYNVRKGKTQLHKWAERLVVLCGTCLIVSSVKDCQTGKMHILPLVGGKIEEVKRRQYSLAFSSAGAQAQTYHVSFETLAEYQRWQRQASKVVSQRISTVDLSCYSLEEVPEHLFYSQDITYLNLRHNFMQLERPGGLDTLYKFSQLKGLNLSHNKLGLFPILLCEISTLTELNLSCNGFHDLPSQIGNLLNLQTLCLDGNFLTTLPEELGNLQQLSSLGISFNNFSQIPEVYEKLTMLDRVVMAGNCLEVLNLGVLNRMNHIKHVDLRMNHLKTMVIENLEGNKHITHVDLRDNRLTDLDLSSLCSLEQLHCGRNQLRELTLSGFSLRTLYASSNRLTAVNVYPVPSLLTFLDLSRNLLECVPDWACEAKKIEVLDVSYNLLTEVPVRILSSLSLRKLMLGHNHVQNLPTLVEHIPLEVLDLQHNALTRLPDTLFSKALNLRYLNASANSLESLPSACTGEESLSMLQLLYLTNNLLTDQCIPVLVGHLHLRILHLANNQLQTFPASKLNKLEQLEELNLSGNKLKTIPTTIANCKRLHTLVAHSNNISIFPEILQLPQIQFVDLSCNDLTEILIPEALPATLQDLDLTGNTNLVLEHKTLDIFSHITTLKIDQKPLPTTDSTVTSTFWSHGLAEMAGQRNKLCVSALAMDSFAEGVGAVYGMFDGDRNEELPRLLQCTMADVLLEEVQQSTNDTVFMANTFLVSHRKLGMAGQKLGSSALLCYIRPDTADPASSFSLTVANVGTCQAVLCRGGKPVPLSKVFSLEQDPEEAQRVKDQKAIITEDNKVNGVTCCTRMLGCTYLYPWILPKPHISSTPLTIQDELLILGNKALWEHLSYTEAVNAVRHVQDPLAAAKKLCTLAQSYGCQDNVGAMVVYLNIGEEGCTCEMNGLTLPGPVGFASTTTIKDAPKPATPSSSSGIASEFSSEMSTSEVSSEVGSTASDEHNAGGLDTALLPRPERRCSLHPTPTSGLFQRQPSSATFSSNQSDNGLDSDDDQPVEGVITNGSKVEVEVDIHCCRGRDLENSPPLIESSPTLCSEEHARGSCFGIRRQNSVNSGMLLPMSKDRMELQKSPSTSCLYGKKLSNGSIVPLEDSLNLIEVATEVPKRKTGYFAAPTQMEPEDQFVVPHDLEEEVKEQMKQHQDSRLEPEPHEEDRTEPPEEFDTAL

SEQ ID NO: 62207 - protein, 319 aa, Homo sapiens
  Payload ID: 12441
  Gene Symbol: PHLPP2
  Gene Name: PH domain and leucine rich repeat protein phosphatase 2
  ENSP ID: ENSP00000456572
  MOD_RES (1)..(1): Any amino acid
XVLVGHLHLRILHLANNQLQTFPASKLNKLEQLEELNLSGNKLKTIPTTIANCKRLHTLVAHSNNISIFPEILQLPQIQFVDLSCNDLTEILIPEALPATLQDLDLTGNTNLVLEHKTLDIFSHITTLKIDQKPLPTTDSTVTSTFWSHGLAEMAGQRNKLCVSALAMDSFAEGVGAVYGMFDGDRNEELPRLLQCTMADVLLEEVQQSTNDTVFMANTFLVSHRKLGMAGQKLGSSALLCYIRPDTADPASSFSLTVANVGTCQAVLCRGGKPVPLSKVFSLEQDPEEAQRVKDQKAIITENWVLNQKHLQDFPGEDK

SEQ ID NO: 62208 - protein, 1323 aa, Homo sapiens
  Payload ID: 12441
  Gene Symbol: PHLPP2
  Gene Name: PH domain and leucine rich repeat protein phosphatase 2
  Uniprot ID: Q6ZVD8
  ENSP ID: ENSP00000457991
MKRNGSRNCLNRRSRFGSRERDWLREDVKRGCVYLYGADTTTATTTTTTSSSSSSSSSSSDLHLVLCTVETPASEICAGEGRESLYLQLHGDLVRRLEPTERPLQIVYDYLSRLGFDDPVRIQEEATNPDLGCMIRFYGEKPCHMDRLDRILLSGIYNVRKGKTQLHKWAERLVVLCGTCLIVSSVKDCQTGKMHILPLVGGKIEEVKRRQYSLAFSSAGAQAQTYHVSFETLAEYQRWQRQASKVVSQRISTVDLSCYSLEEVPEHLFYSQDITYLNLRHNFMQLERPGGLDTLYKFSQLKGLNLSHNKLGLFPILLCEISTLTELNLSCNGFHDLPSQIGNLLNLQTLCLDGNFLTTLPEELGNLQQLSSLGISFNNFSQIPEVYEKLTMLDRVVMAGNCLEVLNLGVLNRMNHIKHVDLRMNHLKTMVIENLEGNKHITHVDLRDNRLTDLDLSSLCSLEQLHCGRNQLRELTLSGFSLRTLYASSNRLTAVNVYPVPSLLTFLDLSRNLLECVPDWACEAKKIEVLDVSYNLLTEVPVRILSSLSLRKLMLGHNHVQNLPTLVEHIPLEVLDLQHNALTRLPDTLFSKALNLRYLNASANSLESLPSACTGEESLSMLQLLYLTNNLLTDQCIPVLVGHLHLRILHLANNQLQTFPASKLNKLEQLEELNLSGNKLKTIPTTIANCKRLHTLVAHSNNISIFPEILQLPQIQFVDLSCNDLTEILIPEALPATLQDLDLTGNTNLVLEHKTLDIFSHITTLKIDQKPLPTTDSTVTSTFWSHGLAEMAGQRNKLCVSALAMDSFAEGVGAVYGMFDGDRNEELPRLLQCTMADVLLEEVQQSTNDTVFMANTFLVSHRKLGMAGQKLGSSALLCYIRPDTADPASSFSLTVANVGTCQAVLCRGGKPVPLSKVFSLEQDPEEAQRVKDQKAIITEDNKVNGVTCCTRMLGCTYLYPWILPKPHISSTPLTIQDELLILGNKALWEHLSYTEAVNAVRHVQDPLAAAKKLCTLAQSYGCQDNVGAMVVYLNIGEEGCTCEMNGLTLPGPVGFASTTTIKDAPKPATPSSSSGIASEFSSEMSTSEVSSEVGSTASDEHNAGGLDTALLPRPERRCSLHPTPTSGLFQRQPSSATFSSNQSDNGLDSDDDQPVEGVITNGSKVEVEVDIHCCRGRDLENSPPLIESSPTLCSEEHARGSCFGIRRQNSVNSGMLLPMSKDRMELQKSPSTSCLYGKKLSNGSIVPLEDSLNLIEVATEVPKRKTGYFAAPTQMEPEDQFVVPHDLEEEVKEQMKQHQDSRLEPEPHEEDRTEPPEEFDTAL

SEQ ID NO: 62209 - protein, 723 aa, Homo sapiens
  Payload ID: 12441
  Gene Symbol: PHLPP2
  Gene Name: PH domain and leucine rich repeat protein phosphatase 2
  ENSP ID: ENSP00000458660
EVPEHLFYSQDITYLNLRHNFMQLERPGGLDTLYKFSQLKGLNLSHNKLGLFPILLCEISTLTELNLSCNGFHDLPSQIGNLLNLQTLCLDGNFLTTLPEELGNLQQLSSLGISFNNFSQIPEVYEKLTMLDRVVMAGNCLEVLNLGVLNRMNHIKHVDLRMNHLKTMVIENLEGNKHITHVDLRDNRLTDLDLSSLCSLEQLHCGRNQLRELTLSGFSLRTLYASSNRLTAVNVYPVPSLLTFLDLSRNLLECVPDWACEAKKIEVLDVSYNLLTEVPVRILSSLSLRKLMLGHNHVQNLPTLVEHIPLEVLDLQHNALTRLPDTLFSKALNLRYLNASANSLESLPSACTGEESLSMLQLLYLTNNLLTDQCIPVLVGHLHLRILHLANNQLQTFPASKLNKLEQLEELNLSGNKLKTIPTTIANCKRLHTLVAHSNNISIFPEILQLPQIQFVDLSCNDLTEILIPEALPATLQDLDLTGNTNLVLEHKTLDIFSHITTLKIDQKPLPTTDSTVTSTFWSHGLAEMAGQRNKLCVSALAMDSFAEGVGAVYGMFDGDRNEELPRLLQCTMADVLLEEVQQSTNDTVFMANTFLVSHRKLGMAGQKLGSSALLCYIRPDTADPASSFSLTVANVGTCQAVLCRGGKPVPLSKVFSLEQDPEEAQRVKDQKAIITEVPEDLKEFQTTDIPVHHCNFRAVLGCLCSASVLGSYAGPAPRWRRT

SEQ ID NO: 62210 - protein, 230 aa, Homo sapiens
  Payload ID: 12442
  Gene Symbol:
  Gene Name: PHACTR1
  ENSP ID: ENSP00000489003
NLGRIFKPWKWRKKKSEKFKHTSAALERKISMRQSREELIKRGVLKEIYDKDGELSISNEEDSLENGQSLSSSQLSLPALSEMEPVPMPRDPCSYEVLQPSDIMDGPVSEESPSASESGVLLSQDPSAKPVLLLPPKKPAAFPGDHEETPVKQLPLLKQPPALPPKPTTRIANHLTDWHQAHQVGQRHPLPPWQWAFSSPGSSKRIQSRPGAVAYACNPSTLGGRGRWIT

SEQ ID NO: 62211 - protein, 144 aa, Homo sapiens
  Payload ID: 12442
  Gene Symbol:
  Gene Name: PHACTR1
  ENSP ID: ENSP00000489049
MYLQGPRKLMTQGGYDMVQKLFLDFFRRRLSQRPTAEELEQRNILKPRNEQEEQEEKREIKRRLTRKLSQRPTVEELRERKILIRFSDYVEVADAQDYDRRADKPWTRLTAADKAAIRKELNEFKSTEMEVHELSRHLTRFHRP

SEQ ID NO: 62212 - protein, 264 aa, Homo sapiens
  Payload ID: 12442
  Gene Symbol:
  Gene Name: PHACTR1
  ENSP ID: ENSP00000489276
  MOD_RES (1)..(1): Any amino acid
XSPFTPFSPLLSFFLSPFFFLFPSLSHSLPTPSLPLPSPFPSPSPVREPLPLPSSPFRLSPSPSVSFSLSARRATLLLPPTLMAASSEDDIDRRPIRRVRSKSDTPYLAEARISFNLGAAEEVERLAAMRSDSLVPGTHTPPIRRRSKFANLGRIFKPWKWRKKKSEKFKHTSAALERKISMRQSREELIKRGVLKEIYDKDGELSISNEEDSLENGQSLSSSQLSLPALSEMEPVPMPRDPCSYEVLQPSDIMDGPVSEESPS

SEQ ID NO: 62213 - protein, 484 aa, Homo sapiens
  Payload ID: 12442
  Gene Symbol:
  Gene Name: PHACTR1
  ENSP ID: ENSP00000489293
MDYPKMDYFLDVESAHRLLDVESAQRFFYSQGAQARRATLLLPPTLMAASSEDDIDRRPIRRVRSKSDTPYLAEARISFNLGAAEEVERLAAMRSDSLVPGTHTPPIRRRSKFANLGRIFKPWKWRKKKSEKFKHTSAALERKISMRQSREELIKRGVLKEIYDKDGELSISNEEDSLENGQSLSSSQLSLPALSEMEPVPMPRDPCSYEVLQPSDIMDGPDPGAPVKLPCLPVKLSPPLPPKKVMICMPVGGPDLSLVSYTAQKSGQQGVAQHHHTVLPSQIQHQLQYGSHGQHLPSTTGSLPMHPSGCRMIDELNKTLAMTMQRLESSEQRVPCSTSYHSSGLHSGDGVTKAGPMGLPEIRQVPTVVIECDDNKENVPHESDYEDSSCLYTREEEEEEEDEDDDSSLYTSSLAMKVCRKDSLAIKLSNRPSKRELEEKNILPRQTDEERLELRQQIGTKLTRRLSQRPTAEELEQRNILKRK

SEQ ID NO: 62214 - protein, 140 aa, Homo sapiens
  Payload ID: 12442
  Gene Symbol:
  Gene Name: PHACTR1
  ENSP ID: ENSP00000489306
MYLQGPRKLMTQGGYDMVQKLFLDFFRRRLSQRPTAEELEQRNILKPRNEQEEQEEKREIKRRLTRKLSQRPTVEELRERKILIRFSDYVEVADAQDYDRRADKPWTRLTAADKVSRGECWRVGGRTVCWVSLGSPLGSV

SEQ ID NO: 62215 - protein, 488 aa, Homo sapiens
  Payload ID: 12442
  Gene Symbol:
  Gene Name: PHACTR1
  ENSP ID: ENSP00000489396
MRSDSLVPGTHTPPIRRRSKFANLGRIFKPWKWRKKKSEKFKHTSAALERKISMRQSREELIKRGVLKEIYDKDGELSISNEEDSLENGQSLSSSQLSLPALSEMEPVPMPRDPCSYEVLQPSDIMDGPDPGAPVKLPCLPVKLSPPLPPKKVMICMPVGGPDLSLVSYTAQKSGQQGVAQHHHTVLPSQIQHQLQYGSHGQHLPSTTGSLPMHPSGCRMIDELNKTLAMTMQRLESSEQRVPCSTSYHSSGLHSGDGVTKAGPMGLPEIRQVPTVVIECDDNKENVPHESDYEDSSCLYTREEEEEEEDEDDDSSLYTSSLAMKVCRKDSLAIKLSNRPSKRELEEKNILPRQTDEERLELRQQIGTKLTRRLSQRPTAEELEQRNILKPRNEQEEQEEKREIKRRLTRKLSQRPTVEELRERKILIRFSDYVEVADAQDYDRRADKPWTRLTAADKAAIRKELNEFKSTEMEVHELSRHLTRFHRP

SEQ ID NO: 62216 - protein, 580 aa, Homo sapiens
  Payload ID: 12442
  Gene Symbol:
  Gene Name: PHACTR1
  ENSP ID: ENSP00000489436
MDYPKMDYFLDVESAHRLLDVESAQRFFYSQGAQARRATLLLPPTLMAASSEDDIDRRPIRRVRSKSDTPYLAEARISFNLGAAEEVERLAAMRSDSLVPGTHTPPIRRRSKFANLGRIFKPWKWRKKKSEKFKHTSAALERKISMRQSREELIKRGVLKEIYDKDGELSISNEEDSLENGQSLSSSQLSLPALSEMEPVPMPRDPCSYEVLQPSDIMDGPDPGAPVKLPCLPVKLSPPLPPKKVMICMPVGGPDLSLVSYTAQKSGQQGVAQHHHTVLPSQIQHQLQYGSHGQHLPSTTGSLPMHPSGCRMIDELNKTLAMTMQRLESSEQRVPCSTSYHSSGLHSGDGVTKAGPMGLPEIRQVPTVVIECDDNKENVPHESDYEDSSCLYTREEEEEEEDEDDDSSLYTSSLAMKVCRKDSLAIKLSNRPSKRELEEKNILPRQTDEERLELRQQIGTKLTRRLSQRPTAEELEQRNILKPRNEQEEQEEKREIKRRLTRKLSQRPTVEELRERKILIRFSDYVEVADAQDYDRRADKPWTRLTAADKAAIRKELNEFKSTEMEVHELSRHLTRFHRP

SEQ ID NO: 62217 - protein, 169 aa, Homo sapiens
  Payload ID: 12442
  Gene Symbol:
  Gene Name: PHACTR1
  ENSP ID: ENSP00000489543
MDYPKMDYFLDVESAHRLLDVESAQRFFYSQGAQARRATLLLPPTLMAASSEDDIDRRPIRRVRSKSDTPYLAEARISFNLGAGVSLFGDMDEARMGPAVPTLGRPLGLELCSLENHGLLKTAPTYTTSAHICSGPSTGGQFSTQGMSPVQGAKRRRVVWLPLEGEEFG

SEQ ID NO: 62218 - protein, 1649 aa, Homo sapiens
  Payload ID: 12443
  Gene Symbol: PHRF1
  Gene Name: PHD and ring finger domains 1
  Uniprot ID: Q9P1Y6
  ENSP ID: ENSP00000264555
MDDDSLDELVARSPGPDGHPQVGPADPAGDFEESSVGSSGDSGDDSDSEHGDGTDGEDEGASEEEDLEDRSGSEDSEDDGETLLEVAGTQGKLEAAGSFNSDDDAESCPICLNAFRDQAVGTPENCAHYFCLDCIVEWSKNANSCPVDRTLFKCICIRAQFGGKILRKIPVENTKASEEEEDPTFCEVCGRSDREDRLLLCDGCDAGYHMECLDPPLQEVPVDEWFCPECAAPGVVLAADAGPVSEEEVSLLLADVVPTTSRLRPRAGRTRAIARTRQSERVRATVNRNRISTARRVQHTPGRLGSSLLDEAIEAVATGLSTAVYQRPLTPRTPARRKRKTRRRKKVPGRKKTPSGPSAKSKSSATRSKKRQHRVKKRRGKKVKSEATTRSRIARTLGLRRPVHSSCIPSVLKPVEPSLGLLRADIGAASLSLFGDPYELDPFDSSEELSANPLSPLSAKRRALSRSALQSHQPVARPVSVGLSRRRLPAAVPEPDLEEEPVPDLLGSILSGQSLLMLGSSDVIIHRDGSLSAKRAAPVSFQRNSGSLSRGEEGFKGCLQPRALPSGSPAQGPSGNRPQSTGLSCQGRSRTPARTAGAPVRLDLPAAPGAVQARNLSNGSVPGFRQSHSPWFNGTNKHTLPLASAASKISSRDSKPPCRSVVPGPPLKPAPRRTDISELPRIPKIRRDDGGGRRDAAPAHGQSIEIPSACISRLTGREGTGQPGRGTRAESEASSRVPREPGVHTGSSRPPAPSSHGSLAPLGPSRGKGVGSTFESFRINIPGNMAHSSQLSSPGFCNTFRPVDDKEQRKENPSPLFSIKKTKQLRSEVYDPSDPTGSDSSAPGSSPERSGPGLLPSEITRTISINSPKAQTVQAVRCVTSYTVESIFGTEPEPPLGPSSAMSKLRGAVAAEGASDTEREEPTESQGLAARLRRPSPPEPWDEEDGASCSTFFGSEERTVTCVTVVEPEAPPSPDVLQAATHRVVELRPPSRSRSTSSSRSRKKAKRKRVSREHGRTRSGTRSESRDRSSRSASPSVGEERPRRQRSKAKSRRSSSDRSSSRERAKRKKAKDKSREHRRGPWGHSRRTSRSRSGSPGSSSYEHYESRKKKKRRSASRPRGRECSPTSSLERLCRHKHQRERSHERPDRKESVAWPRDRRKRRSRSPSSEHRAREHRRPRSREKWPQTRSHSPERKGAVREASPAPLAQGEPGREDLPTRLPALGEAHVSPEVATADKAPLQAPPVLEVAAECEPDDLDLDYGDSVEAGHVFDDFSSDAVFIQLDDMSSPPSPESTDSSPERDFPLKPALPPASLAVAAIQREVSLMHDEDPSQPPPLPEGTQEPHLLRPDAAEKAEAPSSPDVAPAGKEDSPSASGRVQEAARPEEVVSQTPLLRSRALVKRVTWNLQESESSAPAEDRAPRAPLHRPQKPREGAWDMEDVAPTGVRQVFSELPFPSHVLPEPGFPDTDPSQVYSPGLPPAPAQPSSIPPCALVSQPTVQFILQGSLPLVGCGAAQTLAPVPAALTPASEPASQATAASNSEEKTPAPRLAAEKTKKEEYMKKLHMQERAVEEVKLAIKPFYQKREVTKEEYKDILRKAVQKICHSKSGEINPVKVANLVKAYVDKYRHMRRHKKPEAGEEPPTQGAEG

SEQ ID NO: 62219 - protein, 1647 aa, Homo sapiens
  Payload ID: 12443
  Gene Symbol: PHRF1
  Gene Name: PHD and ring finger domains 1
  ENSP ID: ENSP00000388589
MDDDSLDELVARSPGPDGHPQVGPADPAGDFESSVGSSGDSGDDSDSEHGDGTDGEDEGASEEEDLEDRSGSEDSEDDGETLLEVAGTQGKLEAAGSFNSDDDAESCPICLNAFRDQAVGTPENCAHYFCLDCIVEWSKNANSCPVDRTLFKCICIRAQFGGKILRKIPVENTKASEEEEDPTFCEVCGRSDREDRLLLCDGCDAGYHMECLDPPLQEVPVDEWFCPECAAPGVVLAADAGPVSEEEVSLLLADVVPTTSRLRPRAGRTRAIARTRQSERVRATVNRNRISTARRVQHTPGRLGSSLLDEAIEAVATGLSTAVYQRPLTPRTPARRKRKTRRRKKVPGRKKTPSGPSAKSKSSATRSKKRQHRVKKRRGKKVKSEATTRSRIARTLGLRRPVHSSCIPSVLKPVEPSLGLLRADIGAASLSLFGDPYELDPFDSEELSANPLSPLSAKRRALSRSALQSHQPVARPVSVGLSRRRLPAAVPEPDLEEEPVPDLLGSILSGQSLLMLGSSDVIIHRDGSLSAKRAAPVSFQRNSGSLSRGEEGFKGCLQPRALPSGSPAQGPSGNRPQSTGLSCQGRSRTPARTAGAPVRLDLPAAPGAVQARNLSNGSVPGFRQSHSPWFNGTNKHTLPLASAASKISSRDSKPPCRSVVPGPPLKPAPRRTDISELPRIPKIRRDDGGGRRDAAPAHGQSIEIPSACISRLTGREGTGQPGRGTRAESEASSRVPREPGVHTGSSRPPAPSSHGSLAPLGPSRGKGVGSTFESFRINIPGNMAHSSQLSSPGFCNTFRPVDDKEQRKENPSPLFSIKKTKQLRSEVYDPSDPTGSDSSAPGSSPERSGPGLLPSEITRTISINSPKAQTVQAVRCVTSYTVESIFGTEPEPPLGPSSAMSKLRGAVAAEGASDTEREEPTESQGLAARLRRPSPPEPWDEEDGASCSTFFGSEERTVTCVTVVEPEAPPSPDVLQAATHRVVELRPPSRSRSTSSSRSRKKAKRKRVSREHGRTRSGTRSESRDRSSRSASPSVGEERPRRQRSKAKSRRSSSDRSSSRERAKRKKAKDKSREHRRGPWGHSRRTSRSRSGSPGSSSYEHYESRKKKKRRSASRPRGRECSPTSSLERLCRHKHQRERSHERPDRKESVAWPRDRRKRRSRSPSSEHRAREHRRPRSREKWPQTRSHSPERKGAVREASPAPLAQGEPGREDLPTRLPALGEAHVSPEVATADKAPLQAPPVLEVAAECEPDDLDLDYGDSVEAGHVFDDFSSDAVFIQLDDMSSPPSPESTDSSPERDFPLKPALPPASLAVAAIQREVSLMHDEDPSQPPPLPEGTQEPHLLRPDAAEKAEAPSSPDVAPAGKEDSPSASGRVQEAARPEEVVSQTPLLRSRALVKRVTWNLQESESSAPAEDRAPRAPLHRPQKPREGAWDMEDVAPTGVRQVFSELPFPSHVLPEPGFPDTDPSQVYSPGLPPAPAQPSSIPPCALVSQPTVQFILQGSLPLVGCGAAQTLAPVPAALTPASEPASQATAASNSEEKTPAPRLAAEKTKKEEYMKKLHMQERAVEEVKLAIKPFYQKREVTKEEYKDILRKAVQKICHSKSGEINPVKVANLVKAYVDKYRHMRRHKKPEAGEEPPTQGAEG

SEQ ID NO: 62220 - protein, 1648 aa, Homo sapiens
  Payload ID: 12443
  Gene Symbol: PHRF1
  Gene Name: PHD and ring finger domains 1
  Uniprot ID: Q9P1Y6
  ENSP ID: ENSP00000410626
MDDDSLDELVARSPGPDGHPQVGPADPAGDFEESSVGSSGDSGDDSDSEHGDGTDGEDEGASEEEDLEDRSGSEDSEDDGETLLEVAGTQGKLEAAGSFNSDDDAESCPICLNAFRDQAVGTPENCAHYFCLDCIVEWSKNANSCPVDRTLFKCICIRAQFGGKILRKIPVENTKASEEEEDPTFCEVCGRSDREDRLLLCDGCDAGYHMECLDPPLQEVPVDEWFCPECAAPGVVLAADAGPVSEEEVSLLLADVVPTTSRLRPRAGRTRAIARTRQSERVRATVNRNRISTARRVQHTPGRLGSSLLDEAIEAVATGLSTAVYQRPLTPRTPARRKRKTRRRKKVPGRKKTPSGPSAKSKSSATRSKKRQHRVKKRRGKKVKSEATTRSRIARTLGLRRPVHSSCIPSVLKPVEPSLGLLRADIGAASLSLFGDPYELDPFDSEELSANPLSPLSAKRRALSRSALQSHQPVARPVSVGLSRRRLPAAVPEPDLEEEPVPDLLGSILSGQSLLMLGSSDVIIHRDGSLSAKRAAPVSFQRNSGSLSRGEEGFKGCLQPRALPSGSPAQGPSGNRPQSTGLSCQGRSRTPARTAGAPVRLDLPAAPGAVQARNLSNGSVPGFRQSHSPWFNGTNKHTLPLASAASKISSRDSKPPCRSVVPGPPLKPAPRRTDISELPRIPKIRRDDGGGRRDAAPAHGQSIEIPSACISRLTGREGTGQPGRGTRAESEASSRVPREPGVHTGSSRPPAPSSHGSLAPLGPSRGKGVGSTFESFRINIPGNMAHSSQLSSPGFCNTFRPVDDKEQRKENPSPLFSIKKTKQLRSEVYDPSDPTGSDSSAPGSSPERSGPGLLPSEITRTISINSPKAQTVQAVRCVTSYTVESIFGTEPEPPLGPSSAMSKLRGAVAAEGASDTEREEPTESQGLAARLRRPSPPEPWDEEDGASCSTFFGSEERTVTCVTVVEPEAPPSPDVLQAATHRVVELRPPSRSRSTSSSRSRKKAKRKRVSREHGRTRSGTRSESRDRSSRSASPSVGEERPRRQRSKAKSRRSSSDRSSSRERAKRKKAKDKSREHRRGPWGHSRRTSRSRSGSPGSSSYEHYESRKKKKRRSASRPRGRECSPTSSLERLCRHKHQRERSHERPDRKESVAWPRDRRKRRSRSPSSEHRAREHRRPRSREKWPQTRSHSPERKGAVREASPAPLAQGEPGREDLPTRLPALGEAHVSPEVATADKAPLQAPPVLEVAAECEPDDLDLDYGDSVEAGHVFDDFSSDAVFIQLDDMSSPPSPESTDSSPERDFPLKPALPPASLAVAAIQREVSLMHDEDPSQPPPLPEGTQEPHLLRPDAAEKAEAPSSPDVAPAGKEDSPSASGRVQEAARPEEVVSQTPLLRSRALVKRVTWNLQESESSAPAEDRAPRAPLHRPQKPREGAWDMEDVAPTGVRQVFSELPFPSHVLPEPGFPDTDPSQVYSPGLPPAPAQPSSIPPCALVSQPTVQFILQGSLPLVGCGAAQTLAPVPAALTPASEPASQATAASNSEEKTPAPRLAAEKTKKEEYMKKLHMQERAVEEVKLAIKPFYQKREVTKEEYKDILRKAVQKICHSKSGEINPVKVANLVKAYVDKYRHMRRHKKPEAGEEPPTQGAEG

SEQ ID NO: 62221 - protein, 1645 aa, Homo sapiens
  Payload ID: 12443
  Gene Symbol: PHRF1
  Gene Name: PHD and ring finger domains 1
  ENSP ID: ENSP00000431870
MDDDSLDELVARSPGPDGHPQVGPADPAESSVGSSGDSGDDSDSEHGDGTDGEDEGASEEEDLEDRSGSEDSEDDGETLLEVAGTQGKLEAAGSFNSDDDAESCPICLNAFRDQAVGTPENCAHYFCLDCIVEWSKNANSCPVDRTLFKCICIRAQFGGKILRKIPVENTKASEEEEDPTFCEVCGRSDREDRLLLCDGCDAGYHMECLDPPLQEVPVDEWFCPECAAPGVVLAADAGPVSEEEVSLLLADVVPTTSRLRPRAGRTRAIARTRQSERVRATVNRNRISTARRVQHTPGRLGSSLLDEAIEAVATGLSTAVYQRPLTPRTPARRKRKTRRRKKVPGRKKTPSGPSAKSKSSATRSKKRQHRVKKRRGKKVKSEATTRSRIARTLGLRRPVHSSCIPSVLKPVEPSLGLLRADIGAASLSLFGDPYELDPFDSSEELSANPLSPLSAKRRALSRSALQSHQPVARPVSVGLSRRRLPAAVPEPDLEEEPVPDLLGSILSGQSLLMLGSSDVIIHRDGSLSAKRAAPVSFQRNSGSLSRGEEGFKGCLQPRALPSGSPAQGPSGNRPQSTGLSCQGRSRTPARTAGAPVRLDLPAAPGAVQARNLSNGSVPGFRQSHSPWFNGTNKHTLPLASAASKISSRDSKPPCRSVVPGPPLKPAPRRTDISELPRIPKIRRDDGGGRRDAAPAHGQSIEIPSACISRLTGREGTGQPGRGTRAESEASSRVPREPGVHTGSSRPPAPSSHGSLAPLGPSRGKGVGSTFESFRINIPGNMAHSSQLSSPGFCNTFRPVDDKEQRKENPSPLFSIKKTKQLRSEVYDPSDPTGSDSSAPGSSPERSGPGLLPSEITRTISINSPKAQTVQAVRCVTSYTVESIFGTEPEPPLGPSSAMSKLRGAVAAEGASDTEREEPTESQGLAARLRRPSPPEPWDEEDGASCSTFFGSEERTVTCVTVVEPEAPPSPDVLQAATHRVVELRPPSRSRSTSSSRSRKKAKRKRVSREHGRTRSGTRSESRDRSSRSASPSVGEERPRRQRSKAKSRRSSSDRSSSRERAKRKKAKDKSREHRRGPWGHSRRTSRSRSGSPGSSSYEHYESRKKKKRRSASRPRGRECSPTSSLERLCRHKHQRERSHERPDRKESVAWPRDRRKRRSRSPSSEHRAREHRRPRSREKWPQTRSHSPERKGAVREASPAPLAQGEPGREDLPTRLPALGEAHVSPEVATADKAPLQAPPVLEVAAECEPDDLDLDYGDSVEAGHVFDDFSSDAVFIQLDDMSSPPSPESTDSSPERDFPLKPALPPASLAVAAIQREVSLMHDEDPSQPPPLPEGTQEPHLLRPDAAEKAEAPSSPDVAPAGKEDSPSASGRVQEAARPEEVVSQTPLLRSRALVKRVTWNLQESESSAPAEDRAPRAPLHRPQKPREGAWDMEDVAPTGVRQVFSELPFPSHVLPEPGFPDTDPSQVYSPGLPPAPAQPSSIPPCALVSQPTVQFILQGSLPLVGCGAAQTLAPVPAALTPASEPASQATAASNSEEKTPAPRLAAEKTKKEEYMKKLHMQERAVEEVKLAIKPFYQKREVTKEEYKDILRKAVQKICHSKSGEINPVKVANLVKAYVDKYRHMRRHKKPEAGEEPPTQGAEG

SEQ ID NO: 62222 - protein, 1494 aa, Homo sapiens
  Payload ID: 12443
  Gene Symbol: PHRF1
  Gene Name: PHD and ring finger domains 1
  Uniprot ID: Q9P1Y6
  ENSP ID: ENSP00000435360
MDDDSLDELVARSPGPDGHPQVGPADPAGDFEESSVGSSGDSGDDSDSEHGDGTDGEDEGASEEEDLEDRSGSEDSEDDGETLLEVAGTQGKLEAAGSFNSDDDAESCPICLNAFRDQAVGTPENCAHYFCLDCIVEWSKNANSCPVDRTLFKCICIRAQFGGKILRKIPVENTKASEEEEDPTFCEVCGRSDREDRLLLCDGCDAGYHMECLDPPLQEVPVDEWFCPECAAPGVVLAADAGPVSEEEVSLLLADVVPTTSRLRPRAGRTRAIARTRQSERVRATVNRNRISTARRVQHTPGRLGSSLLDEAIEAVATGLSTAVYQRPLTPRTPARRKRKTRRRKKVPGRKKTPSGPSAKSKSSATRSKKRQHRVKKRRGKKVKSEATTRSRIARTLGLRRPVHSSCIPSVLKPVEPSLGLLRADIGAASLSLFGDPYELDPFDSSEELSANPLSPLSAKRRALSRSALQSHQPVARPVSVGLSRRRLPAAVPEPDLEEEPVPDLLGSILSGQSLLMLGSSDVIIHRDGSLSAKRAAPVSFQRNSGSLSRGEEGFKGCLQPRALPSGSPAQGPSGNRPQSTGLSCQGRSRTPARTAGAPVRLDLPAAPGAVQARNLSNGSVPGFRQSHSPWFNGTNKHTLPLASAASKISSRDSKPPCRSVVPGPPLKPAPRRTDISELPRIPKIRRDDGGGRRDAAPAHGQSIEIPSACISRLTGREGTGQPGRGTRAESEASSRVPREPGVHTGSSRPPAPSSHGSLAPLGPSRGKGVGSTFESFRINIPGNMAHSSQLSSPGFCNTFRPVDDKEQRKENPSPLFSIKKTKQLRSEVYDPSDPTGSDSSAPGSSPERSGPGLLPSEITRTISINSPKAQTVQAVRCVTSYTVESIFGTEPEPPLGPSSAMSKLRGAVAAEGASDTEREEPTESQGLAARLRRPSPPEPWDEEDGASCSTFFGSEERTVTCVTVVEPEAPPSPDVLQAATHRVVELRPPSRSRSTSSSRSRKKAKRKRVSREHGRTRSGTRSESRDRSSRSASPSVGEERPRRQRSKAKSRRSSSDRSSSRERAKRKKAKDKSREHRRGPWGHSRRTSRSRSGSPGSSSYEHYESRKKKKRRSASRPRGRECSPTSSLERLCRHKHQRERSHERPDRKESVAWPRDRRKRRSRSPSSEHRAREHRRPRSREKWPQTRSHSPERKGAVREASPAPLAQGEPGREDLPTRLPALGEAHVSPEVATADKAPLQAPPVLEVAAECEPDDLDLDYGDSVEAGHVFDDFSSDAVFIQLDDMSSPPSPESTDSSPERDFPLKPALPPASLAVAAIQREVSLMHDEDPSQPPPLPEGTQEPHLLRPDAAEKAEAPSSPDVAPAGKEDSPSASGRVQEAARPEEVVSQTPLLRSRALVKRVTWNLQESESSAPAEDRAPRAPLHRPQKPREGAWDMEDVAPTGVRQVFSELPFPSHVLPEPGFPDTDPSQPQSQPVKPLQPATRRRRPRPPG

SEQ ID NO: 62223 - protein, 1649 aa, Homo sapiens
  Payload ID: 12443
  Gene Symbol: PHRF1
  Gene Name: PHD and ring finger domains 1
  Uniprot ID: Q9P1Y6
  ENSP ID: ENSP00000483129
MDDDSLDELVARSPGPDGHPQVGPADPAGDFEESSVGSSGDSGDDSDSEHGDGTDGEDEGASEEEDLEDRSGSEDSEDDGETLLEVAGTQGKLEAAGSFNSDDDAESCPICLNAFRDQAVGTPENCAHYFCLDCIVEWSKNANSCPVDRTLFKCICIRAQFGGKILRKIPVENTKASEEEEDPTFCEVCGRSDREDRLLLCDGCDAGYHMECLDPPLQEVPVDEWFCPECAAPGVVLAADAGPVSEEEVSLLLADVVPTTSRLRPRAGRTRAIARTRQSERVRATVNRNRISTARRVQHTPGRLGSSLLDEAIEAVATGLSTAVYQRPLTPRTPARRKRKTRRRKKVPGRKKTPSGPSAKSKSSATRSKKRQHRVKKRRGKKVKSEATTRSRIARTLGLRRPVHSSCIPSVLKPVEPSLGLLRADIGAASLSLFGDPYELDPFDSSEELSANPLSPLSAKRRALSRSALQSHQPVARPVSVGLSRRRLPAAVPEPDLEEEPVPDLLGSILSGQSLLMLGSSDVIIHRDGSLSAKRAAPVSFQRNSGSLSRGEEGFKGCLQPRALPSGSPAQGPSGNRPQSTGLSCQGRSRTPARTAGAPVRLDLPAAPGAVQARNLSNGSVPGFRQSHSPWFNGTNKHTLPLASAASKISSRDSKPPCRSVVPGPPLKPAPRRTDISELPRIPKIRRDDGGGRRDAAPAHGQSIEIPSACISRLTGREGTGQPGRGTRAESEASSRVPREPGVHTGSSRPPAPSSHGSLAPLGPSRGKGVGSTFESFRINIPGNMAHSSQLSSPGFCNTFRPVDDKEQRKENPSPLFSIKKTKQLRSEVYDPSDPTGSDSSAPGSSPERSGPGLLPSEITRTISINSPKAQTVQAVRCVTSYTVESIFGTEPEPPLGPSSAMSKLRGAVAAEGASDTEREEPTESQGLAARLRRPSPPEPWDEEDGASCSTFFGSEERTVTCVTVVEPEAPPSPDVLQAATHRVVELRPPSRSRSTSSSRSRKKAKRKRVSREHGRTRSGTRSESRDRSSRSASPSVGEERPRRQRSKAKSRRSSSDRSSSRERAKRKKAKDKSREHRRGPWGHSRRTSRSRSGSPGSSSYEHYESRKKKKRRSASRPRGRECSPTSSLERLCRHKHQRERSHERPDRKESVAWPRDRRKRRSRSPSSEHRAREHRRPRSREKWPQTRSHSPERKGAVREASPAPLAQGEPGREDLPTRLPALGEAHVSPEVATADKAPLQAPPVLEVAAECEPDDLDLDYGDSVEAGHVFDDFSSDAVFIQLDDMSSPPSPESTDSSPERDFPLKPALPPASLAVAAIQREVSLMHDEDPSQPPPLPEGTQEPHLLRPDAAEKAEAPSSPDVAPAGKEDSPSASGRVQEAARPEEVVSQTPLLRSRALVKRVTWNLQESESSAPAEDRAPRAPLHRPQKPREGAWDMEDVAPTGVRQAFSELPFPSHVLPEPGFPDTDPSQVYSPGLPPAPAQPSSIPPCALVSQPTVQFILQGSLPLVGCGAAQTLAPVPAALTPASEPASQATAASNSEEKTPAPRLAAEKTKKEEYMKKLHMQERAVEEVKLAIKPFYQKREVTKEEYKDILRKAVQKICHSKSGEINPVKVANLVKAYVDKYRHMRRHKKPEAGEEPPTQGAEG

SEQ ID NO: 62224 - protein, 1645 aa, Homo sapiens
  Payload ID: 12443
  Gene Symbol: PHRF1
  Gene Name: PHD and ring finger domains 1
  ENSP ID: ENSP00000487848
MDDDSLDELVARSPGPDGHPQVGPADPAESSVGSSGDSGDDSDSEHGDGTDGEDEGASEEEDLEDRSGSEDSEDDGETLLEVAGTQGKLEAAGSFNSDDDAESCPICLNAFRDQAVGTPENCAHYFCLDCIVEWSKNANSCPVDRTLFKCICIRAQFGGKILRKIPVENTKASEEEEDPTFCEVCGRSDREDRLLLCDGCDAGYHMECLDPPLQEVPVDEWFCPECAAPGVVLAADAGPVSEEEVSLLLADVVPTTSRLRPRAGRTRAIARTRQSERVRATVNRNRISTARRVQHTPGRLGSSLLDEAIEAVATGLSTAVYQRPLTPRTPARRKRKTRRRKKVPGRKKTPSGPSAKSKSSATRSKKRQHRVKKRRGKKVKSEATTRSRIARTLGLRRPVHSSCIPSVLKPVEPSLGLLRADIGAASLSLFGDPYELDPFDSSEELSANPLSPLSAKRRALSRSALQSHQPVARPVSVGLSRRRLPAAVPEPDLEEEPVPDLLGSILSGQSLLMLGSSDVIIHRDGSLSAKRAAPVSFQRNSGSLSRGEEGFKGCLQPRALPSGSPAQGPSGNRPQSTGLSCQGRSRTPARTAGAPVRLDLPAAPGAVQARNLSNGSVPGFRQSHSPWFNGTNKHTLPLASAASKISSRDSKPPCRSVVPGPPLKPAPRRTDISELPRIPKIRRDDGGGRRDAAPAHGQSIEIPSACISRLTGREGTGQPGRGTRAESEASSRVPREPGVHTGSSRPPAPSSHGSLAPLGPSRGKGVGSTFESFRINIPGNMAHSSQLSSPGFCNTFRPVDDKEQRKENPSPLFSIKKTKQLRSEVYDPSDPTGSDSSAPGSSPERSGPGLLPSEITRTISINSPKAQTVQAVRCVTSYTVESIFGTEPEPPLGPSSAMSKLRGAVAAEGASDTEREEPTESQGLAARLRRPSPPEPWDEEDGASCSTFFGSEERTVTCVTVVEPEAPPSPDVLQAATHRVVELRPPSRSRSTSSSRSRKKAKRKRVSREHGRTRSGTRSESRDRSSRSASPSVGEERPRRQRSKAKSRRSSSDRSSSRERAKRKKAKDKSREHRRGPWGHSRRTSRSRSGSPGSSSYEHYESRKKKKRRSASRPRGRECSPTSSLERLCRHKHQRERSHERPDRKESVAWPRDRRKRRSRSPSSEHRAREHRRPRSREKWPQTRSHSPERKGAVREASPAPLAQGEPGREDLPTRLPALGEAHVSPEVATADKAPLQAPPVLEVAAECEPDDLDLDYGDSVEAGHVFDDFSSDAVFIQLDDMSSPPSPESTDSSPERDFPLKPALPPASLAVAAIQREVSLMHDEDPSQPPPLPEGTQEPHLLRPDAAEKAEAPSSPDVAPAGKEDSPSASGRVQEAARPEEVVSQTPLLRSRALVKRVTWNLQESESSAPAEDRAPRAPLHRPQKPREGAWDMEDVAPTGVRQAFSELPFPSHVLPEPGFPDTDPSQVYSPGLPPAPAQPSSIPPCALVSQPTVQFILQGSLPLVGCGAAQTLAPVPAALTPASEPASQATAASNSEEKTPAPRLAAEKTKKEEYMKKLHMQERAVEEVKLAIKPFYQKREVTKEEYKDILRKAVQKICHSKSGEINPVKVANLVKAYVDKYRHMRRHKKPEAGEEPPTQGAEG

SEQ ID NO: 62225 - protein, 1648 aa, Homo sapiens
  Payload ID: 12443
  Gene Symbol: PHRF1
  Gene Name: PHD and ring finger domains 1
  ENSP ID: ENSP00000487908
MDDDSLDELVARSPGPDGHPQVGPADPAGDFEESSVGSSGDSGDDSDSEHGDGTDGEDEGASEEEDLEDRSGSEDSEDDGETLLEVAGTQGKLEAAGSFNSDDDAESCPICLNAFRDQAVGTPENCAHYFCLDCIVEWSKNANSCPVDRTLFKCICIRAQFGGKILRKIPVENTKASEEEEDPTFCEVCGRSDREDRLLLCDGCDAGYHMECLDPPLQEVPVDEWFCPECAAPGVVLAADAGPVSEEEVSLLLADVVPTTSRLRPRAGRTRAIARTRQSERVRATVNRNRISTARRVQHTPGRLGSSLLDEAIEAVATGLSTAVYQRPLTPRTPARRKRKTRRRKKVPGRKKTPSGPSAKSKSSATRSKKRQHRVKKRRGKKVKSEATTRSRIARTLGLRRPVHSSCIPSVLKPVEPSLGLLRADIGAASLSLFGDPYELDPFDSEELSANPLSPLSAKRRALSRSALQSHQPVARPVSVGLSRRRLPAAVPEPDLEEEPVPDLLGSILSGQSLLMLGSSDVIIHRDGSLSAKRAAPVSFQRNSGSLSRGEEGFKGCLQPRALPSGSPAQGPSGNRPQSTGLSCQGRSRTPARTAGAPVRLDLPAAPGAVQARNLSNGSVPGFRQSHSPWFNGTNKHTLPLASAASKISSRDSKPPCRSVVPGPPLKPAPRRTDISELPRIPKIRRDDGGGRRDAAPAHGQSIEIPSACISRLTGREGTGQPGRGTRAESEASSRVPREPGVHTGSSRPPAPSSHGSLAPLGPSRGKGVGSTFESFRINIPGNMAHSSQLSSPGFCNTFRPVDDKEQRKENPSPLFSIKKTKQLRSEVYDPSDPTGSDSSAPGSSPERSGPGLLPSEITRTISINSPKAQTVQAVRCVTSYTVESIFGTEPEPPLGPSSAMSKLRGAVAAEGASDTEREEPTESQGLAARLRRPSPPEPWDEEDGASCSTFFGSEERTVTCVTVVEPEAPPSPDVLQAATHRVVELRPPSRSRSTSSSRSRKKAKRKRVSREHGRTRSGTRSESRDRSSRSASPSVGEERPRRQRSKAKSRRSSSDRSSSRERAKRKKAKDKSREHRRGPWGHSRRTSRSRSGSPGSSSYEHYESRKKKKRRSASRPRGRECSPTSSLERLCRHKHQRERSHERPDRKESVAWPRDRRKRRSRSPSSEHRAREHRRPRSREKWPQTRSHSPERKGAVREASPAPLAQGEPGREDLPTRLPALGEAHVSPEVATADKAPLQAPPVLEVAAECEPDDLDLDYGDSVEAGHVFDDFSSDAVFIQLDDMSSPPSPESTDSSPERDFPLKPALPPASLAVAAIQREVSLMHDEDPSQPPPLPEGTQEPHLLRPDAAEKAEAPSSPDVAPAGKEDSPSASGRVQEAARPEEVVSQTPLLRSRALVKRVTWNLQESESSAPAEDRAPRAPLHRPQKPREGAWDMEDVAPTGVRQAFSELPFPSHVLPEPGFPDTDPSQVYSPGLPPAPAQPSSIPPCALVSQPTVQFILQGSLPLVGCGAAQTLAPVPAALTPASEPASQATAASNSEEKTPAPRLAAEKTKKEEYMKKLHMQERAVEEVKLAIKPFYQKREVTKEEYKDILRKAVQKICHSKSGEINPVKVANLVKAYVDKYRHMRRHKKPEAGEEPPTQGAEG

SEQ ID NO: 62226 - protein, 1494 aa, Homo sapiens
  Payload ID: 12443
  Gene Symbol: PHRF1
  Gene Name: PHD and ring finger domains 1
  ENSP ID: ENSP00000488293
MDDDSLDELVARSPGPDGHPQVGPADPAGDFEESSVGSSGDSGDDSDSEHGDGTDGEDEGASEEEDLEDRSGSEDSEDDGETLLEVAGTQGKLEAAGSFNSDDDAESCPICLNAFRDQAVGTPENCAHYFCLDCIVEWSKNANSCPVDRTLFKCICIRAQFGGKILRKIPVENTKASEEEEDPTFCEVCGRSDREDRLLLCDGCDAGYHMECLDPPLQEVPVDEWFCPECAAPGVVLAADAGPVSEEEVSLLLADVVPTTSRLRPRAGRTRAIARTRQSERVRATVNRNRISTARRVQHTPGRLGSSLLDEAIEAVATGLSTAVYQRPLTPRTPARRKRKTRRRKKVPGRKKTPSGPSAKSKSSATRSKKRQHRVKKRRGKKVKSEATTRSRIARTLGLRRPVHSSCIPSVLKPVEPSLGLLRADIGAASLSLFGDPYELDPFDSSEELSANPLSPLSAKRRALSRSALQSHQPVARPVSVGLSRRRLPAAVPEPDLEEEPVPDLLGSILSGQSLLMLGSSDVIIHRDGSLSAKRAAPVSFQRNSGSLSRGEEGFKGCLQPRALPSGSPAQGPSGNRPQSTGLSCQGRSRTPARTAGAPVRLDLPAAPGAVQARNLSNGSVPGFRQSHSPWFNGTNKHTLPLASAASKISSRDSKPPCRSVVPGPPLKPAPRRTDISELPRIPKIRRDDGGGRRDAAPAHGQSIEIPSACISRLTGREGTGQPGRGTRAESEASSRVPREPGVHTGSSRPPAPSSHGSLAPLGPSRGKGVGSTFESFRINIPGNMAHSSQLSSPGFCNTFRPVDDKEQRKENPSPLFSIKKTKQLRSEVYDPSDPTGSDSSAPGSSPERSGPGLLPSEITRTISINSPKAQTVQAVRCVTSYTVESIFGTEPEPPLGPSSAMSKLRGAVAAEGASDTEREEPTESQGLAARLRRPSPPEPWDEEDGASCSTFFGSEERTVTCVTVVEPEAPPSPDVLQAATHRVVELRPPSRSRSTSSSRSRKKAKRKRVSREHGRTRSGTRSESRDRSSRSASPSVGEERPRRQRSKAKSRRSSSDRSSSRERAKRKKAKDKSREHRRGPWGHSRRTSRSRSGSPGSSSYEHYESRKKKKRRSASRPRGRECSPTSSLERLCRHKHQRERSHERPDRKESVAWPRDRRKRRSRSPSSEHRAREHRRPRSREKWPQTRSHSPERKGAVREASPAPLAQGEPGREDLPTRLPALGEAHVSPEVATADKAPLQAPPVLEVAAECEPDDLDLDYGDSVEAGHVFDDFSSDAVFIQLDDMSSPPSPESTDSSPERDFPLKPALPPASLAVAAIQREVSLMHDEDPSQPPPLPEGTQEPHLLRPDAAEKAEAPSSPDVAPAGKEDSPSASGRVQEAARPEEVVSQTPLLRSRALVKRVTWNLQESESSAPAEDRAPRAPLHRPQKPREGAWDMEDVAPTGVRQAFSELPFPSHVLPEPGFPDTDPSQPQSQPVKPLQPATRRRRPRPPG

SEQ ID NO: 62227 - protein, 1647 aa, Homo sapiens
  Payload ID: 12443
  Gene Symbol: PHRF1
  Gene Name: PHD and ring finger domains 1
  ENSP ID: ENSP00000488773
MDDDSLDELVARSPGPDGHPQVGPADPAGDFESSVGSSGDSGDDSDSEHGDGTDGEDEGASEEEDLEDRSGSEDSEDDGETLLEVAGTQGKLEAAGSFNSDDDAESCPICLNAFRDQAVGTPENCAHYFCLDCIVEWSKNANSCPVDRTLFKCICIRAQFGGKILRKIPVENTKASEEEEDPTFCEVCGRSDREDRLLLCDGCDAGYHMECLDPPLQEVPVDEWFCPECAAPGVVLAADAGPVSEEEVSLLLADVVPTTSRLRPRAGRTRAIARTRQSERVRATVNRNRISTARRVQHTPGRLGSSLLDEAIEAVATGLSTAVYQRPLTPRTPARRKRKTRRRKKVPGRKKTPSGPSAKSKSSATRSKKRQHRVKKRRGKKVKSEATTRSRIARTLGLRRPVHSSCIPSVLKPVEPSLGLLRADIGAASLSLFGDPYELDPFDSEELSANPLSPLSAKRRALSRSALQSHQPVARPVSVGLSRRRLPAAVPEPDLEEEPVPDLLGSILSGQSLLMLGSSDVIIHRDGSLSAKRAAPVSFQRNSGSLSRGEEGFKGCLQPRALPSGSPAQGPSGNRPQSTGLSCQGRSRTPARTAGAPVRLDLPAAPGAVQARNLSNGSVPGFRQSHSPWFNGTNKHTLPLASAASKISSRDSKPPCRSVVPGPPLKPAPRRTDISELPRIPKIRRDDGGGRRDAAPAHGQSIEIPSACISRLTGREGTGQPGRGTRAESEASSRVPREPGVHTGSSRPPAPSSHGSLAPLGPSRGKGVGSTFESFRINIPGNMAHSSQLSSPGFCNTFRPVDDKEQRKENPSPLFSIKKTKQLRSEVYDPSDPTGSDSSAPGSSPERSGPGLLPSEITRTISINSPKAQTVQAVRCVTSYTVESIFGTEPEPPLGPSSAMSKLRGAVAAEGASDTEREEPTESQGLAARLRRPSPPEPWDEEDGASCSTFFGSEERTVTCVTVVEPEAPPSPDVLQAATHRVVELRPPSRSRSTSSSRSRKKAKRKRVSREHGRTRSGTRSESRDRSSRSASPSVGEERPRRQRSKAKSRRSSSDRSSSRERAKRKKAKDKSREHRRGPWGHSRRTSRSRSGSPGSSSYEHYESRKKKKRRSASRPRGRECSPTSSLERLCRHKHQRERSHERPDRKESVAWPRDRRKRRSRSPSSEHRAREHRRPRSREKWPQTRSHSPERKGAVREASPAPLAQGEPGREDLPTRLPALGEAHVSPEVATADKAPLQAPPVLEVAAECEPDDLDLDYGDSVEAGHVFDDFSSDAVFIQLDDMSSPPSPESTDSSPERDFPLKPALPPASLAVAAIQREVSLMHDEDPSQPPPLPEGTQEPHLLRPDAAEKAEAPSSPDVAPAGKEDSPSASGRVQEAARPEEVVSQTPLLRSRALVKRVTWNLQESESSAPAEDRAPRAPLHRPQKPREGAWDMEDVAPTGVRQAFSELPFPSHVLPEPGFPDTDPSQVYSPGLPPAPAQPSSIPPCALVSQPTVQFILQGSLPLVGCGAAQTLAPVPAALTPASEPASQATAASNSEEKTPAPRLAAEKTKKEEYMKKLHMQERAVEEVKLAIKPFYQKREVTKEEYKDILRKAVQKICHSKSGEINPVKVANLVKAYVDKYRHMRRHKKPEAGEEPPTQGAEG

SEQ ID NO: 62228 - protein, 457 aa, Homo sapiens
  Payload ID: 12444
  Gene Symbol: PHF1
  Gene Name: PHD finger protein 1
  Uniprot ID: O43189
  ENSP ID: ENSP00000363636
MAQPPRLSRSGASSLWDPASPAPTSGPRPRLWEGQDVLARWTDGLLYLGTIKKVDSAREVCLVQFEDDSQFLVLWKDISPAALPGEELLCCVCRSETVVPGNRLVSCEKCRHAYHQDCHVPRAPAPGEGEGTSWVCRQCVFAIATKRGGALKKGPYARAMLGMKLSLPYGLKGLDWDAGHLSNRQQSYCYCGGPGEWNLKMLQCRSCLQWFHEACTQCLSKPLLYGDRFYEFECCVCRGGPEKVRRLQLRWVDVAHLVLYHLSVCCKKKYFDFDREILPFTSENWDSLLLGELSDTPKGERSSRLLSALNSHKDRFISGREIKKRKCLFGLHARMPPPVEPPTGDGALTRAGPWGRGLTSPGEAPEAGARAPEEEAEGESGGAGATLSSAQSARAPGAEGAGSSAEGTAAAPSGCLLPSTLLPAPQGPLGTVDPQTGHPWNFTLVSPQTSLKVPPTR

SEQ ID NO: 62229 - protein, 567 aa, Homo sapiens
  Payload ID: 12444
  Gene Symbol: PHF1
  Gene Name: PHD finger protein 1
  Uniprot ID: O43189
  ENSP ID: ENSP00000363640
MAQPPRLSRSGASSLWDPASPAPTSGPRPRLWEGQDVLARWTDGLLYLGTIKKVDSAREVCLVQFEDDSQFLVLWKDISPAALPGEELLCCVCRSETVVPGNRLVSCEKCRHAYHQDCHVPRAPAPGEGEGTSWVCRQCVFAIATKRGGALKKGPYARAMLGMKLSLPYGLKGLDWDAGHLSNRQQSYCYCGGPGEWNLKMLQCRSCLQWFHEACTQCLSKPLLYGDRFYEFECCVCRGGPEKVRRLQLRWVDVAHLVLYHLSVCCKKKYFDFDREILPFTSENWDSLLLGELSDTPKGERSSRLLSALNSHKDRFISGREIKKRKCLFGLHARMPPPVEPPTGDGALTSFPSGQGPGGGVSRPLGKRRRPEPEPLRRRQKGKVEELGPPSAVRNQPEPQEQRERAHLQRALQASVSPPSPSPNQSYQGSSGYNFRPTDARCLPSSPIRMFASFHPSASTAGTSGDSGPPDRSPLELHIGFPTDIPKSAPHSMTASSSSVSSPSPGLPRRSAPPSPLCRSLSPGTGGGVRGGVGYLSRGDPVRVLARRVRPDGSVQYLVEWGGGGIF

SEQ ID NO: 62230 - protein, 567 aa, Homo sapiens
  Payload ID: 12444
  Gene Symbol: PHF1
  Gene Name: PHD finger protein 1
  Uniprot ID: O43189
  ENSP ID: ENSP00000391901
MAQPPRLSRSGASSLWDPASPAPTSGPRPRLWEGQDVLARWTDGLLYLGTIKKVDSAREVCLVQFEDDSQFLVLWKDISPAALPGEELLCCVCRSETVVPGNRLVSCEKCRHAYHQDCHVPRAPAPGEGEGTSWVCRQCVFAIATKRGGALKKGPYARAMLGMKLSLPYGLKGLDWDAGHLSNRQQSYCYCGGPGEWNLKMLQCRSCLQWFHEACTQCLSKPLLYGDRFYEFECCVCRGGPEKVRRLQLRWVDVAHLVLYHLSVCCKKKYFDFDREILPFTSENWDSLLLGELSDTPKGERSSKLLSALNSHKDRFISGREIKKRKCLFGLHARMPPPVEPPTGDGALTSFPSGQGPGGGVSRPLGKRRRPEPEPLRRRQKGKVEELGPPSAVRNQPEPQEQRERAHLQRALQASVSPPSPSPNQSYQGSSGYNFRPTDARCLPSSPIRMFASFHPSASTAGTSGDSGPPDRSPLELHIGFPTDIPKSAPHSMTASSSSVSSPSPGLPRRSAPPSPLCRSLSPGTGGGVRGGVGYLSRGDPVRVLARRVRPDGSVQYLVEWGGGGIF

SEQ ID NO: 62231 - protein, 227 aa, Homo sapiens
  Payload ID: 12444
  Gene Symbol: PHF1
  Gene Name: PHD finger protein 1
  ENSP ID: ENSP00000392697
MAQPPRLSRSGASSLWDPASPAPTSGPRPRLWEGQDVLARWTDGLLYLGTIKKVDSAREVCLVQFEDDSQFLVLWKDISPAALPGEELLCCVCRSETVVPGNRLVSCEKCRHAYHQDCHVPRAPAPGEGEGTSWVCRQCVFAIATKRGGALKKGPYARAMLGMKLSLPYGLKGLDWDAGHLSNRQQSYCYCGGPGEWNLKMLQCRSCLQWFHEACTQCLSKPLLYGD

SEQ ID NO: 62232 - protein, 145 aa, Homo sapiens
  Payload ID: 12444
  Gene Symbol: PHF1
  Gene Name: PHD finger protein 1
  ENSP ID: ENSP00000395839
MAQPPRLSRSGASSLWDPASPAPTSGPRPRLWEGQDVLARWTDGLLYLGTIKKVDSAREVCLVQFEDDSQFLVLWKDISPAALPGEELLCCVCRSETVVPGNRLVSCEKCRHAYHQDCHVPRAPAPGEGEGTSWVCRQCVFAIAT

SEQ ID NO: 62233 - protein, 227 aa, Homo sapiens; identical to SEQ ID NO: 62231
  Payload ID: 12444
  Gene Symbol: PHF1
  Gene Name: PHD finger protein 1
  ENSP ID: ENSP00000396023

SEQ ID NO: 62234 - protein, 181 aa, Homo sapiens
  Payload ID: 12444
  Gene Symbol: PHF1
  Gene Name: PHD finger protein 1
  ENSP ID: ENSP00000399226
WGHPQQCAISPSPRSRGSGLICRGHCRPQCLHHPPALTRVTRAAAATTSGPQMPAACPGHPIRMFASFHPSASTAGTSGDSGPPDRSPLELHIGFPTDIPKSAPHSMTASSSSVSSPSPGLPRRSAPPSPLCRSLSPGTGGGVRGGVGYLSRGDPVRVLARRVRPDGSVQYLVEWGGGGIF

SEQ ID NO: 62235 - protein, 37 aa, Homo sapiens
  Payload ID: 12444
  Gene Symbol: PHF1
  Gene Name: PHD finger protein 1
  ENSP ID: ENSP00000404788
  MOD_RES (1)..(1): Any amino acid
XGATLSSAQSARAPGAEGAGSSAEGTAGLSVSTIPQP

SEQ ID NO: 62236 - protein, 457 aa, Homo sapiens
  Payload ID: 12444
  Gene Symbol: PHF1
  Gene Name: PHD finger protein 1
  Uniprot ID: O43189
  ENSP ID: ENSP00000407295
MAQPPRLSRSGASSLWDPASPAPTSGPRPRLWEGQDVLARWTDGLLYLGTIKKVDSAREVCLVQFEDDSQFLVLWKDISPAALPGEELLCCVCRSETVVPGNRLVSCEKCRHAYHQDCHVPRAPAPGEGEGTSWVCRQCVFAIATKRGGALKKGPYARAMLGMKLSLPYGLKGLDWDAGHLSNRQQSYCYCGGPGEWNLKMLQCRSCLQWFHEACTQCLSKPLLYGDRFYEFECCVCRGGPEKVRRLQLRWVDVAHLVLYHLSVCCKKKYFDFDREILPFTSENWDSLLLGELSDTPKGERSSKLLSALNSHKDRFISGREIKKRKCLFGLHARMPPPVEPPTGDGALTRAGPWGRGLTSPGEAPEAGARAPEEEAEGESGGAGATLSSAQSARAPGAEGAGSSAEGTAAAPSGCLLPSTLLPAPQGPLGTVDPQTGHPWNFTLVSPQTSLKVPPTR

SEQ ID NO: 62237 - protein, 145 aa, Homo sapiens; identical to SEQ ID NO: 62232
  Payload ID: 12444
  Gene Symbol: PHF1
  Gene Name: PHD finger protein 1
  ENSP ID: ENSP00000410494

SEQ ID NO: 62238 - protein, 243 aa, Homo sapiens
  Payload ID: 12444
  Gene Symbol: PHF1
  Gene Name: PHD finger protein 1
  ENSP ID: ENSP00000413510
  MOD_RES (1)..(1): Any amino acid
XSLLLTATRTVSFQGERLRRGNVCLVSMLGCLPLWSPLLEMEHSPGQGPGGGVSRPLGKRRRPEPEPLRRRQKGKVEELGPPSAVRNQPEPQEQRERAHLQRALQASVSPPSPSPNQSYQGSSGYNFRPTDARCLPSPIRMFASFHPSASTAGTSGDSGPPDRSPLELHIGFPTDIPKSAPHSMTASSSSVSSPSPGLPRRSAPPSPLCRSLSPGTGGGVRGGVGYLSRGDPVRVLARRVRPD

SEQ ID NO: 62239 - protein, 393 aa, Homo sapiens
  Payload ID: 12444
  Gene Symbol: PHF1
  Gene Name: PHD finger protein 1
  ENSP ID: ENSP00000432419
MAQPPRLSRSGASSLWDPASPAPTSGPRPRLWEGQDVLARWTDGLLYLGTIKKVDSAREVCLVQFEDDSQFLVLWKDISPAALPGEELLCCVCRSETVVPGNRLVSCEKCRHAYHQDCHVPRAPAPGEGEGTSWVCRQCVFAIATKRGGALKKGPYARAMLGMKLSLPYGLKGLDWDAGHLSNRQQSYCYCGGPGEWNLKMLQCRSCLQWFHEACTQCLSKPLLYGDRFYEFECCVCRGGPEKVRRLQLRWVDVAHLVLYHLSVCCKKKYFDFDREILPFTSENWDSLLLGELSDTPKGERSSRLLSALNSHKDRFISGREIKKRKCLFGLHARMPPPVEPPTGDGALTSFPSGQGPGGGVSRPLGKRRRPEPEPLRRRQKGKVEELGPPSAP

SEQ ID NO: 62240 - protein, 393 aa, Homo sapiens
  Payload ID: 12444
  Gene Symbol: PHF1
  Gene Name: PHD finger protein 1
  ENSP ID: ENSP00000433516
MAQPPRLSRSGASSLWDPASPAPTSGPRPRLWEGQDVLARWTDGLLYLGTIKKVDSAREVCLVQFEDDSQFLVLWKDISPAALPGEELLCCVCRSETVVPGNRLVSCEKCRHAYHQDCHVPRAPAPGEGEGTSWVCRQCVFAIATKRGGALKKGPYARAMLGMKLSLPYGLKGLDWDAGHLSNRQQSYCYCGGPGEWNLKMLQCRSCLQWFHEACTQCLSKPLLYGDRFYEFECCVCRGGPEKVRRLQLRWVDVAHLVLYHLSVCCKKKYFDFDREILPFTSENWDSLLLGELSDTPKGERSSKLLSALNSHKDRFISGREIKKRKCLFGLHARMPPPVEPPTGDGALTSFPSGQGPGGGVSRPLGKRRRPEPEPLRRRQKGKVEELGPPSAP

SEQ ID NO: 62241 - protein, 419 aa, Homo sapiens
  Payload ID: 12444
  Gene Symbol: PHF1
  Gene Name: PHD finger protein 1
  ENSP ID: ENSP00000434347
MAQPPRLSRSGASSLWDPASPAPTSGPRPRLWEGQDVLARWTDGLLYLGTIKKVDSAREVCLVQFEDDSQFLVLWKDISPAALPGEELLCCVCRSETVVPGNRLVSCEKCRHAYHQDCHVPRAPAPGEGEGTSWVCRQCVFAIATKRGGALKKGPYARAMLGMKLSLPYGLKGLDWDAGHLSNRQQSYCYCGGPGEWNLKMLQCRSCLQWFHEACTQCLSKPLLYGDRFYEFECCVCRGGPEKVRRLQLRWVDVAHLVLYHLSVCCKKKYFDFDREILPFTSENWDSLLLGELSDTPKGERSSRLLSALNSHKDRFISGREIKKRKCLFGLHARMPPPVEPPTGDGALTRAGPWGRGLTSPGEAPEAGARAPEEEAEGESGGAGATLSSAQSARAPGAEGAGSSAEGTAGLSVSTIPQP

SEQ ID NO: 62242 - protein, 54 aa, Homo sapiens
  Payload ID: 12444
  Gene Symbol: PHF1
  Gene Name: PHD finger protein 1
  ENSP ID: ENSP00000434774
MPAACPAAPSGCLLPSTLLPAPQGPLGTVDPQTGHPWNFTLVSPQTSLKVPPTR

SEQ ID NO: 62243 - protein, 54 aa, Homo sapiens
  Payload ID: 12444
  Gene Symbol: PHF1
  Gene Name: PHD finger protein 1
  ENSP ID: ENSP00000479423
MAQPPRLSRSGASSLWDPASPAPTSGPRPRLWEGQDVLARWTDGLLYLGTIKKC

SEQ ID NO: 62244 - protein, 498 aa, Homo sapiens
  Payload ID: 12445
  Gene Symbol: PHF10
  Gene Name: PHD finger protein 10
  Uniprot ID: Q8WUB8
  ENSP ID: ENSP00000341805
MAAAAGPGAALSPRPCDSDPATPGAQSPKDDNEDNSNDGTQPSKRRRMGSGDSSRSCETSSQDLGFSYYPAENLIEYKWPPDETGEYYMLQEQVSEYLGVTSFKRKYPDLERRDLSHKEKLYLRELNVITETQCTLGLTALRSDEVIDLMIKEYPAKHAEYSVILQEKERQRITDHYKEYSQMQQQNTQKVEASKVPEYIKKAAKKAAEFNSNLNRERMEERRAYFDLQTHVIQVPQGKYKVLPTERTKVSSYPVALIPGQFQEYYKRYSPDELRYLPLNTALYEPPLDPELPALDSDGDSDDGEDGRGDEKRKNKGTSDSSSGNVSEGESPPDSQEDSFQGRQKSKDKAATPRKDGPKRSVLSKSVPGYKPKVIPNAICGICLKGKESNKKGKAESLIHCSQCENSGHPSCLDMTMELVSMIKTYPWQCMECKTCIICGQPHHEEEMMFCDMCDRGYHTFCVGLGAIPSGRWICDCCQRAPPTPRKVGRRGKNSKEG

SEQ ID NO: 62245 - protein, 496 aa, Homo sapiens
  Payload ID: 12445
  Gene Symbol: PHF10
  Gene Name: PHD finger protein 10
  Uniprot ID: Q8WUB8
  ENSP ID: ENSP00000355743
MAAAAGPGAALSPRPCDSDPATPGAQSPKDDNEDNSNDGTQPSKRRRMGSGDSSRSCETSSQDLGFSYYPAENLIEYKWPPDETGEYYMLQEQVSEYLGVTSFKRKYPERRDLSHKEKLYLRELNVITETQCTLGLTALRSDEVIDLMIKEYPAKHAEYSVILQEKERQRITDHYKEYSQMQQQNTQKVEASKVPEYIKKAAKKAAEFNSNLNRERMEERRAYFDLQTHVIQVPQGKYKVLPTERTKVSSYPVALIPGQFQEYYKRYSPDELRYLPLNTALYEPPLDPELPALDSDGDSDDGEDGRGDEKRKNKGTSDSSSGNVSEGESPPDSQEDSFQGRQKSKDKAATPRKDGPKRSVLSKSVPGYKPKVIPNAICGICLKGKESNKKGKAESLIHCSQCENSGHPSCLDMTMELVSMIKTYPWQCMECKTCIICGQPHHEEEMMFCDMCDRGYHTFCVGLGAIPSGRWICDCCQRAPPTPRKVGRRGKNSKEG

SEQ ID NO: 62246 - protein, 377 aa, Homo sapiens
  Payload ID: 12445
  Gene Symbol: PHF10
  Gene Name: PHD finger protein 10
  ENSP ID: ENSP00000479515
MAAAAGPGAALSPRPCDSDPATPGAQSPKDDNEDNSNDGTQPSKRRRMGSGDSSRSCETSSQDLGFSYYPAENLIEYKWPPDETGEYYMLQEQVSEYLGVTSFKRKYPDLERRDLSHKEKLYLRELNVITETQCTLGLTALRSDEVIDLMIKEYPAKHAEYSVILQEKERQRITDHYKEYSQMQQQNTQKVEASKVPEYIKKAAKKAAEFNSNLNRERMEERRAYFDLQTHVIQVPQGKYKVLPTERTKVSSYPVALIPGQFQEYYKRYSPDELRYLPLNTALYEPPLDPELPALDSDGDSDDGEDGRGDEKRKNKGTSDSSSGNVSEGESPPDSQEDSFQGRQKSKDKAATPRKDGPKRSVLSKSVPGYKVEEKSP

SEQ ID NO: 62247 - protein, 451 aa, Homo sapiens
  Payload ID: 12445
  Gene Symbol: PHF10
  Gene Name: PHD finger protein 10
  Uniprot ID: Q8WUB8
  ENSP ID: ENSP00000484117
MGSGDSSRSCETSSQDLGFSYYPAENLIEYKWPPDETGEYYMLQEQVSEYLGVTSFKRKYPDLERRDLSHKEKLYLRELNVITETQCTLGLTALRSDEVIDLMIKEYPAKHAEYSVILQEKERQRITDHYKEYSQMQQQNTQKVEASKVPEYIKKAAKKAAEFNSNLNRERMEERRAYFDLQTHVIQVPQGKYKVLPTERTKVSSYPVALIPGQFQEYYKRYSPDELRYLPLNTALYEPPLDPELPALDSDGDSDDGEDGRGDEKRKNKGTSDSSSGNVSEGESPPDSQEDSFQGRQKSKDKAATPRKDGPKRSVLSKSVPGYKPKVIPNAICGICLKGKESNKKGKAESLIHCSQCENSGHPSCLDMTMELVSMIKTYPWQCMECKTCIICGQPHHEEEMMFCDMCDRGYHTFCVGLGAIPSGRWICDCCQRAPPTPRKVGRRGKNSKEG

SEQ ID NO: 62248 - protein, 292 aa, Homo sapiens
  Payload ID: 12446
  Gene Symbol: PHF11
  Gene Name: PHD finger protein 11
  Uniprot ID: Q9UIL8
  ENSP ID: ENSP00000350209
MEKRTCALCPKDVEYNVLYFAQSENIAAHENCLLYSSGLVECEDQDPLNPDRSFDVESVKKEIQRGRKLKCKFCHKRGATVGCDLKNCNKNYHFFCAKKDDAVPQSDGVRGIYKLLCQQHAQFPIIAQSAKFSGVKRKRGRKKPLSGNHVQPPETMKCNTFIRQVKEEHGRHTDATVKVPFLKKCKEAGLLNYLLEEILDKVHSIPEKLMDETTSESDYEEIGSALFDCRLFEDTFVNFQAAIEKKIHASQQRWQQLKEEIELLQDLKQTLCSFQENRDLMSSSTSISSLSY

SEQ ID NO: 62249 - protein, 331 aa, Homo sapiens
  Payload ID: 12446
  Gene Symbol: PHF11
  Gene Name: PHD finger protein 11
  Uniprot ID: Q9UIL8
  ENSP ID: ENSP00000367570
MAQASPPRPERVLGASSPEARPAQEALLLPTGVFQVAEKMEKRTCALCPKDVEYNVLYFAQSENIAAHENCLLYSSGLVECEDQDPLNPDRSFDVESVKKEIQRGRKLKCKFCHKRGATVGCDLKNCNKNYHFFCAKKDDAVPQSDGVRGIYKLLCQQHAQFPIIAQSAKFSGVKRKRGRKKPLSGNHVQPPETMKCNTFIRQVKEEHGRHTDATVKVPFLKKCKEAGLLNYLLEEILDKVHSIPEKLMDETTSESDYEEIGSALFDCRLFEDTFVNFQAAIEKKIHASQQRWQQLKEEIELLQDLKQTLCSFQENRDLMSSSTSISSLSY

SEQ ID NO: 62250 - protein, 286 aa, Homo sapiens
  Payload ID: 12446
  Gene Symbol: PHF11
  Gene Name: PHD finger protein 11
  ENSP ID: ENSP00000394883
  MOD_RES (1)..(1): Any amino acid
XRPGPRGCSAPAARRPGPRRRRSSFPPLYSSGLVECEDQDPLNPDRSFDVESVKKEIQRGRKLKCKFCHKRGATVGCDLKNCNKNYHFFCAKKDDAVPQSDGVRGIYKLLCQQHAQFPIIAQSAKFSGVKRKRGRKKPLSGNHVQPPETMKCNTFIRQVKEEHGRHTDATVKVPFLKKCKEAGLLNYLLEEILDKVHSIPEKLMDETTSESDYEEIGSALFDCRLFEDTFVNFQAAIEKKIHASQQRWQQLKEEIELLQDLKQTLCSFQENRDLMSSSTSISSLSY

SEQ ID NO: 62251 - protein, 168 aa, Homo sapiens
  Payload ID: 12446
  Gene Symbol: PHF11
  Gene Name: PHD finger protein 11
  ENSP ID: ENSP00000405227
MEKRTCALCPKDVEYNVLYFAQSENIAAHENCLLYSSGLVECEDQDPLNPDRSFDVESVKKEIQRGRKLKCKFCHKRGATVGCDLKNCNKNYHFFCAKKDDAVPQSDGVRGIYKLLCQQHAQFPIIAQSAKFSGVKRKRGRKKPLSGNHVQPPETMKCNTFIRQVKEE

SEQ ID NO: 62252 - protein, 292 aa, Homo sapiens; identical to SEQ ID NO: 62248
  Payload ID: 12446
  Gene Symbol: PHF11
  Gene Name: PHD finger protein 11
  Uniprot ID: Q9UIL8
  ENSP ID: ENSP00000417539

SEQ ID NO: 62253 - protein, 226 aa, Homo sapiens
  Payload ID: 12446
  Gene Symbol: PHF11
  Gene Name: PHD finger protein 11
  ENSP ID: ENSP00000418630
MEKRTCALCPKDVEYNVLYFAQSENIAAHENCLLYSSGLVECEDQDPLNPDRSFDVESVKKEIQRGRKLKCKFCHKRGATVGCDLKNCNKNYHFFCAKKDDAVPQSDGVRGIYKLLCQQHAQFPIIAQSAKFSGVKRKRGRKKPLSGNHVQPPETMKCNTFIRQVKEEHGRHTDATVKVPFLKKCKEAGLLNYLLEEILDKVHSIPEKLMDETTSESDQALPKQCA

SEQ ID NO: 62254 - protein, 133 aa, Homo sapiens
  Payload ID: 12446
  Gene Symbol: PHF11
  Gene Name: PHD finger protein 11
  ENSP ID: ENSP00000419229
MDCKLYSSGLVECEDQDPLNPDRSFDVESVKKEIQRGRKLKCKFCHKRGATVGCDLKNCNKNYHFFCAKKDDAVPQSDGVRGIYKLLCQQHAQFPIIAQSAKFSGVKRKRGRKKPLSGNHVQPPETMKCNTFI

SEQ ID NO: 62255 - protein, 98 aa, Homo sapiens
  Payload ID: 12446
  Gene Symbol: PHF11
  Gene Name: PHD finger protein 11
  ENSP ID: ENSP00000420129
MEKRTCALCPKDVEYNVLYFAQSENIAAHENCLLYSSGLVECEDQDPLNPDRSFDVESVKKEIQRGRKLKCKFCHKRGATVGCDLKNCNKNYHFFCAK

SEQ ID NO: 62256 - protein, 190 aa, Homo sapiens
  Payload ID: 12446
  Gene Symbol: PHF11
  Gene Name: PHD finger protein 11
  ENSP ID: ENSP00000482432
MEKRTCALCPKDVEYNVLYFAQSENIAAHENCLLYSSGLVECEDQDPLNPDRSFDVESVKKEIQRGRKLKCKFCHKRGATVGCDLKNCNKNYHFFCAKKDDAVPQSDGVRGIYKLLCQQHAQFPIIAQSAKFSGVKRKRGRKKPLSGNHVQPPETMKCNTFIRQVKEEHGRHTDATVKVPFLKKCKERTS

SEQ ID NO: 62257 - protein, 159 aa, Homo sapiens
  Payload ID: 12446
  Gene Symbol: PHF11
  Gene Name: PHD finger protein 11
  ENSP ID: ENSP00000483500
MAQASPPRPERVLGASSPEARPAQEALLLPTGVFQVAEKMEKRTCALCPKDVEYNVLYFAQSENIAAHENCLLYSSGLVECEDQDPLNPDRSFDVESVKKEIQRGRKLKCKFCHKRGATVGCDLKNCNKNYHFFCAKKDDAVPQSDGVRGIYKYLIKHF

SEQ ID NO: 62258 - protein, 704 aa, Homo sapiens
  Payload ID: 12447
  Gene Symbol: PHF12
  Gene Name: PHD finger protein 12
  Uniprot ID: Q96QT6
  ENSP ID: ENSP00000268756
MWEKMETKTIVYDLDTSGGLMEQIQALLAPPKTDEAEKRSRKPEKEPRRSGRATNHDSCDSCKEGGDLLCCDHCPAAFHLQCCNPPLSEEMLPPGEWMCHRCTVRRKKREQKKELGHVNGLVDKSGKRTTSPSSDTDLLDRSASKTELKAIAHARILERRASRPGTPTSSASTETPTSEQNDVDEDIIDVDEEPVAAEPDYVQPQLRRPFELLIAAAMERNPTQFQLPNELTCTTALPGSSKRRRKEETTGKNVKKTQHELDHNGLVPLPVKVCFTCNRSCRVAPLIQCDYCPLLFHMDCLEPPLTAMPLGRWMCPNHIEHVVLNQKNMTLSNRCQVFDRFQDTVSQHVVKVDFLNRIHKKHPPNRRVLQSVKRRSLKVPDAIKSQYQFPPPLIAPAAIRDGELICNGIPEESQMHLLNSEHLATQAEQQEWLCSVVALQCSILKHLSAKQMPSHWDSEQTEKADIKPVIVTDSSVTTSLQTADKTPTPSHYPLSCPSGISTQNSLSCSPPHQSPALEDIGCSSCAEKSKKTPCGTANGPVNTEVKANGPHLYSSPTDSTDPRRLPGANTPLPGLSHRQGWPRPLTPPAAGGLQNHTVGIIVKTENATGPSSCPQRSLVPVPSLPPSIPSSCASIENTSTLQRKTVQSQIGPPLTDSRPLGSPPNATRVLTPPQAAGDGILATTANQRFSSPAPSSGECCSALG

SEQ ID NO: 62259 - protein, 1004 aa, Homo sapiens
  Payload ID: 12447
  Gene Symbol: PHF12
  Gene Name: PHD finger protein 12
  Uniprot ID: Q96QT6
  ENSP ID: ENSP00000329933
MWEKMETKTIVYDLDTSGGLMEQIQALLAPPKTDEAEKRSRKPEKEPRRSGRATNHDSCDSCKEGGDLLCCDHCPAAFHLQCCNPPLSEEMLPPGEWMCHRCTVRRKKREQKKELGHVNGLVDKSGKRTTSPSSDTDLLDRSASKTELKAIAHARILERRASRPGTPTSSASTETPTSEQNDVDEDIIDVDEEPVAAEPDYVQPQLRRPFELLIAAAMERNPTQFQLPNELTCTTALPGSSKRRRKEETTGKNVKKTQHELDHNGLVPLPVKVCFTCNRSCRVAPLIQCDYCPLLFHMDCLEPPLTAMPLGRWMCPNHIEHVVLNQKNMTLSNRCQVFDRFQDTVSQHVVKVDFLNRIHKKHPPNRRVLQSVKRRSLKVPDAIKSQYQFPPPLIAPAAIRDGELICNGIPEESQMHLLNSEHLATQAEQQEWLCSVVALQCSILKHLSAKQMPSHWDSEQTEKADIKPVIVTDSSVTTSLQTADKTPTPSHYPLSCPSGISTQNSLSCSPPHQSPALEDIGCSSCAEKSKKTPCGTANGPVNTEVKANGPHLYSSPTDSTDPRRLPGANTPLPGLSHRQGWPRPLTPPAAGGLQNHTVGIIVKTENATGPSSCPQRSLVPVPSLPPSIPSSCASIENTSTLQRKTVQSQIGPPLTDSRPLGSPPNATRVLTPPQAAGDGILATTANQRFSSPAPSSDGKVSPGTLSIGSALTVPSFPANSTAMVDLTNSLRAFMDVNGEIEINMLDEKLIKFLALQRIHQLFPSRVQPSPGSVGTHQLASGGHHIEVQRKEVQARAVFYPLLGLGGAVNMCYRTLYIGTGADMDVCLTNYGHCNYVSGKHACIFYDENTKHYELLNYSEHGTTVDNVLYSCDFSEKTPPTPPSSIVAKVQSVIRRRRHQKQDEEPSEEAAMMSSQAQGPQRRPCNCKASSSSLIGGSGAGWEGTALLHHGSYIKLGCLQFVFSITEFATKQPKGDASLLQDGVLAEKLSLKPHQGPVLRSNSVP

SEQ ID NO: 62260 - protein, 705 aa, Homo sapiens
  Payload ID: 12447
  Gene Symbol: PHF12
  Gene Name: PHD finger protein 12
  ENSP ID: ENSP00000368157
MWEKMETKTIVYDLDTSGGLMEQIQALLAPPKTDEAEKRSRKPEKEPRRSGRATNHDSCDSCKEGGDLLCCDHCPAAFHLQCCNPPLSEEMLPPGEWMCHRCTVRRKKREQKKELGHVNGLVDKSGKRTTSPSSDTDLLDRSASKTELKAIAHARILERRASRPGTPTSSASTETPTSEQNDVDEDIIDVDEEPVAAEPDYVQPQLRRPFELLIAAAMERNPTQFQLPNELTCTTALPGSSKRRRKEETTGKNVKKTQHELDHNGLVPLPVKVCFTCNRSCRVAPLIQCDYCPLLFHMDCLEPPLTAMPLGRWMCPNHIEHVVLNQKNMTLSNRCQVFDRFQDTVSQHVVKVDFLNRIHKKHPPNRRVLQSVKRRSLKVPDAIKSQYQFPPPLIAPAAIRDGELICNGIPEESQMHLLNSEHLATQAEQQEWLCSVVALQCSILKHLSAKQMPSHWDSEQTEKADIKPVIVTDSSVTTSLQTADKTPTPSHYPLSCPSGISTQNSLSCSPPHQSPALEDIGCSSCAEKSKKTPCGTANGPVNTEVKANGPHLYSSPTDSTDPRRLPGANTPLPGLSHRQGWPRPLTPPAAGGLQNHTVGIIVKTENATGPSSCPQRSLVPVPSLPPSIPSSCASIENTSTLQRKTVQSQIGPPLTDSRPLGSPPNATRVLTPPQAAGDGILATTANQRFSSPAPSSALGVPEPMG

SEQ ID NO: 62261 - protein, 129 aa, Homo sapiens
  Payload ID: 12447
  Gene Symbol: PHF12
  Gene Name: PHD finger protein 12
  ENSP ID: ENSP00000463900
MWEKMETKTIVYDLDTSGGLMEQIQALLAPPKTDEAEKRSRKPEKEPRRSGRATNHDSCDSCKEGGDLLCCDHCPAAFHLQCCNPPLSEEMLPPGEWMCHRCTVRRKVLARGEERRKPQGKMLRRHSMN

SEQ ID NO: 62262 - protein, 215 aa, Homo sapiens
  Payload ID: 12447
  Gene Symbol: PHF12
  Gene Name: PHD finger protein 12
  ENSP ID: ENSP00000465017
MPARLRAGGYSLTAAAREPGRRLSLRLRAASADPGAPARVALRALAQIQALLAPPKTDEAEKRSRKPEKEPRRSGRATNHDSCDSCKEGGDLLCCDHCPAAFHLQCCNPPLSEEMLPPGEWMCHRCTVRRKKREQKKELGHVNGLVDKSGKRTTSPSSDTDLLDRSASKTELKAIAHARILERRASRPGTPTSSASTETPTSEQNDVDEDIIDVD

SEQ ID NO: 62263 - protein, 849 aa, Homo sapiens
  Payload ID: 12447
  Gene Symbol: PHF12
  Gene Name: PHD finger protein 12
  Uniprot ID: Q96QT6
  ENSP ID: ENSP00000465161
MWEKMETKTIVYDLDTSGGLMEQIQALLAPPKTDEAEKRSRKPEKEPRRSGRATNHDSCDSCKEGGDLLCCDHCPAAFHLQCCNPPLSEEMLPPGEWMCHRCTVRRKKREQKKELGHVNGLVDKSGKRTTSPSSDTDLLDRSASKTELKAIAHARILERRASRPGTPTSSASTETPTSEQNDVDEDIIDVDEEPVAAEPDYVQPQLRRPFELLIAAAMERNPTQFQLPNELTCTTALPGSSKRRRKEETTGKNVKKTQHELDHNGLVPLPVKVCFTCNRSCRVAPLIQCDYCPLLFHMDCLEPPLTAMPLGRWMCPNHIEHVVLNQKNMTLSNRCQVFDRFQDTVSQHVVKVDFLNRIHKKHPPNRRVLQSVKRRSLKVPDAIKSQYQFPPPLIAPAAIRDGELICNGIPEESQMHLLNSEHLATQAEQQEWLCSVVALQCSILKHLSAKQMPSHWDSEQTEKADIKPVIVTDSSVTTSLQTADKTPTPSHYPLSCPSGISTQNSLSCSPPHQSPALEDIGCSSCAEKSKKTPCGTANGPVNTEVKANGPHLYSSPTDSTDPRRLPGANTPLPGLSHRQGWPRPLTPPAAGGLQNHTVGIIVKTENATGPSSCPQRSLVPVPSLPPSIPSSCASIENTSTLQRKTVQSQIGPPLTDSRPLGSPPNATRVLTPPQAAGDGILATTANQRFSSPAPSSDGKVSPGTLSIGSALTVPSFPANSTAMVDLTNSLRAFMDVNGEIEINMLDEKLIKFLALQRIHQLFPSRVQPSPGSVGTHQLASGGHHIEGAHVHTCHHIIRSPLYVCEWSPCLHGESELPVSQTSLCAFHGLNKAPWFFSEESRNKMATTAF

SEQ ID NO: 62264 - protein, 80 aa, Homo sapiens
  Payload ID: 12447
  Gene Symbol: PHF12
  Gene Name: PHD finger protein 12
  ENSP ID: ENSP00000465255
  MOD_RES (1)..(1): Any amino acid
XFDRFQDTVSQHVVKVDFLNRIHKKHPPNRRCRDTSAGFWRAPHRSAKKGGTGPSCVLPPLRVGRSCEHVLSNPLHRDRS

SEQ ID NO: 62265 - protein, 54 aa, Homo sapiens
  Payload ID: 12447
  Gene Symbol: PHF12
  Gene Name: PHD finger protein 12
  ENSP ID: ENSP00000465374
  MOD_RES (1)..(1): Any amino acid
XLPNELTCTTALPGSSKRRRKEETTGKNVKKTQHELDHNGLVPLPVKVCFTCNS

SEQ ID NO: 62266 - protein, 30 aa, Homo sapiens
  Payload ID: 12447
  Gene Symbol: PHF12
  Gene Name: PHD finger protein 12
  ENSP ID: ENSP00000466695
MLPPGEWMCHRCTVRRKKREQKKELGHVNG

SEQ ID NO: 62267 - protein, 92 aa, Homo sapiens
  Payload ID: 12447
  Gene Symbol: PHF12
  Gene Name: PHD finger protein 12
  ENSP ID: ENSP00000467091
MLPPGEWMCHRCTVRRKKREQKKELGHVNGLVDKSGKRTTSPSSDTDLLDRSASKTELKAIAHARILERRASRPGTPTSSASTETPTSEQND

SEQ ID NO: 62268 - protein, 273 aa, Homo sapiens
  Payload ID: 12447
  Gene Symbol: PHF12
  Gene Name: PHD finger protein 12
  ENSP ID: ENSP00000467363
PLSCPSGISTQNSLSCSPPHQSPALEDIGCSSCAEKSKKTPCGTANGPVNTEVKANGPHLYSSPTDSTDPRRLPGANTPLPGLSHRQGWPRPLTPPAAGGLQNHTVGIIVKTENATGPSSCPQRSLVPVPSLPPSIPSSCASIENTSTLQRKTVQSQIGPPLTDSRPLGSPPNATRVLTPPQAAGDGILATTANQRFSSPAPSSANSTAMVDLTNSLRAFMDVNGEIEINMLDEKLIKFLALQRIHQLFPSRVQPSPGSVGTHQLASGGHHIE

SEQ ID NO: 62269 - protein, 117 aa, Homo sapiens
  Payload ID: 12447
  Gene Symbol: PHF12
  Gene Name: PHD finger protein 12
  ENSP ID: ENSP00000467921
MGGRRTKGGRGVGDGETAPGGRRTARELRVCTHAVCMCVQQIQALLAPPKTDEAEKRSRKPEKEPRRSGRATNHDSCDSCKEGGDLLCCDHCPAAFHLQCCNPPLSEEMLPPGEWMC

SEQ ID NO: 62270 - protein, 153 aa, Homo sapiens
  Payload ID: 12447
  Gene Symbol: PHF12
  Gene Name: PHD finger protein 12
  ENSP ID: ENSP00000468478
MLPPGEWMCHRCTVRRKKREQKKELGHVNGLVDKSGKRTTSPSSDTDLLDRSASKTELKAIAHARILERRASRPGTPTSSASTETPTSEQNDVDEDIIDVDEEPVAAEPDYVQPQLRRPFELLIAAAMERNPTQFQLPNELTCTTALPGSSKR

SEQ ID NO: 62271 - protein, 300 aa, Homo sapiens
  Payload ID: 12448
  Gene Symbol: PHF13
  Gene Name: PHD finger protein 13
  Uniprot ID: Q86YI8
  ENSP ID: ENSP00000366876
MDSDSCAAAFHPEEYSPSCKRRRTVEDFNKFCTFVLAYAGYIPYPKEELPLRSSPSPANSTAGTIDSDGWDAGFSDIASSVPLPVSDRCFSHLQPTLLQRAKPSNFLLDRKKTDKLKKKKKRKRRDSDAPGKEGYRGGLLKLEAADPYVETPTSPTLQDIPQAPSDPCSGWDSDTPSSGSCATVSPDQVKEIKTEGKRTIVRQGKQVVFRDEDSTGNDEDIMVDSDDDSWDLVTCFCMKPFAGRPMIECNECHTWIHLSCAKIRKSNVPEVFVCQKCRDSKFDIRRSNRSRTGSRKLFLD

SEQ ID NO: 62272 - protein, 888 aa, Homo sapiens
  Payload ID: 12449
  Gene Symbol: PHF14
  Gene Name: PHD finger protein 14
  Uniprot ID: O94880
  ENSP ID: ENSP00000385795
MDRSSKRRQVKPLAASLLEALDYDSSDDSDFKVGDASDSEGSGNGSEDASKDSGEGSCSDSEENILEEELNEDIKVKEEQLKNSAEEEVLSSEKQLIKMEKKEEEENGERPRKKKEKEKEKEKEKEKEKEREKEKEKATVSENVAASAAATTPATSPPAVNTSPSVPTTTTATEEQVSEPKKWNLRRNRPLLDFVSMEELNDMDDYDSEDDNDWRPTVVKRKGRSASQKEGSDGDNEDDEDEGSGSDEDENDEGNDEDHSSPASEGGCKKKKSKVLSRNSADDEELTNDSLTLSQSKSNEDSLILEKSQNWSSQKMDHILICCVCLGDNSEDADEIIQCDNCGITVHEGCYGVDGESDSIMSSASENSTEPWFCDACKCGVSPSCELCPNQDGIFKETDAGRWVHIVCALYVPGVAFGDIDKLRPVTLTEMNYSKYGAKECSFCEDPRFARTGVCISCDAGMCRAYFHVTCAQKEGLLSEAAAEEDIADPFFAYCKQHADRLDRKWKRKNYLALQSYCKMSLQEREKQLSPEAQARINARLQQYRAKAELARSTRPQAWVPREKLPRPLTSSASAIRKLMRKAELMGISTDIFPVDNSDTSSSVDGRRKHKQPALTADFVNYYFERNMRMIQIQENMAEQKNIKDKLENEQEKLHVEYNKLCESLEELQNLNGKLRSEGQGIWALLGRITGQKLNIPAILRAPKERKPSKKEGGTQKTSTLPAVLYSCGICKKNHDQHLLLLCDTCKLHYHLGCLDPPLTRMPRKTKNSYWQCSECDQAGSSDMEADMAMETLPDGTKRSRRQIKEPVKFVPQDVPPEPKKIPIRNTRTRGRKRSFVPEEEKHEERVPRERRQRQSVLQKKPKAEDLRTECATCKGTGDNENLVRYPS

SEQ ID NO: 62273 - protein, 42 aa, Homo sapiens
  Payload ID: 12449
  Gene Symbol: PHF14
  Gene Name: PHD finger protein 14
  ENSP ID: ENSP00000398407
MDRSSKRRQVKPLAASLLEALDYDSSDDSDFKVGDASGLADS

SEQ ID NO: 62274 - protein, 42 aa, Homo sapiens; identical to SEQ ID NO: 62273
  Payload ID: 12449
  Gene Symbol: PHF14
  Gene Name: PHD finger protein 14
  ENSP ID: ENSP00000428601

SEQ ID NO: 62275 - protein, 948 aa, Homo sapiens
  Payload ID: 12449
  Gene Symbol: PHF14
  Gene Name: PHD finger protein 14
  ENSP ID: ENSP00000489535
MDRSSKRRQVKPLAASLLEALDYDSSDDSDFKVGDASDSEGSGNGSEDASKDSGEGSCSDSEENILEEELNEDIKVKEEQLKNSAEEEVLSSEKQLIKMEKKEEEENGERPRKKKEKEKEKEKEKEKEKEREKEKEKATVSENVAASAAATTPATSPPAVNTSPSVPTTTTATEEQVSEPKKWNLRRNRPLLDFVSMEELNDMDDYDSEDDNDWRPTVVKRKGRSASQKEGSDGDNEDDEDEGSGSDEDENDEGNDEDHSSPASEGGCKKKKSKVLSRNSADDEELTNDSLTLSQSKSNEDSLILEKSQNWSSQKMDHILICCVCLGDNSEDADEIIQCDNCGITVHEGCYGVDGESDSIMSSASENSTEPWFCDACKCGVSPSCELCPNQDGIFKETDAGRWVHIVCALYVPGVAFGDIDKLRPVTLTEMNYSKYGAKECSFCEDPRFARTGVCISCDAGMCRAYFHVTCAQKEGLLSEAAAEEDIADPFFAYCKQHADRLDRKWKRKNYLALQSYCKMSLQEREKQLSPEAQARINARLQQYRAKAELARSTRPQAWVPREKLPRPLTSSASAIRKLMRKAELMGISTDIFPVDNSDTSSSVDGRRKHKQPALTADFVNYYFERNMRMIQIQENMAEQKNIKDKLENEQEKLHVEYNKLCESLEELQNLNGKLRSEGQGIWALLGRITGQKLNIPAILRAPKERKPSKKEGGTQKTSTLPAVLYSCGICKKNHDQHLLLLCDTCKLHYHLGCLDPPLTRMPRKTKNSYWQCSECDQAGSSDMEADMAMETLPDGTKRSRRQIKEPVKFVPQDVPPEPKKIPIRNTRTRGRKRSFVPEEEKHEERVPRERRQRQSVLQKKPKAEDLRTECATCKGTGDNENLVRCDECRLCYHFGCLDPPLKKSPKQTGYGWICQECDSSSSKEDENEAERKNISQELNMEQKNPKK

SEQ ID NO: 62276 - protein, 207 aa, Homo sapiens
  Payload ID: 12450
  Gene Symbol: PHF19
  Gene Name: PHD finger protein 19
  Uniprot ID: Q5T6S3
  ENSP ID: ENSP00000310372
MENRALDPGTRDSYGATSHLPNKGALAKVKNNFKDLMSKLTEGQYVLCRWTDGLYYLGKIKRVSSSKQSCLVTFEDNSKYWVLWKDIQHAGVPGEEPKCNICLGKTSGPLNEILICGKCGLGYHQQCHIPIAGSADQPLLTPWFCRRCIFALAVRVSLPSSPVPASPASSSGADQRLPSQSLSSKQKGHTWALETDSASATVLGQDL

SEQ ID NO: 62277 - protein, 580 aa, Homo sapiens
  Payload ID: 12450
  Gene Symbol: PHF19
  Gene Name: PHD finger protein 19
  Uniprot ID: Q5T6S3
  ENSP ID: ENSP00000363003
MENRALDPGTRDSYGATSHLPNKGALAKVKNNFKDLMSKLTEGQYVLCRWTDGLYYLGKIKRVSSSKQSCLVTFEDNSKYWVLWKDIQHAGVPGEEPKCNICLGKTSGPLNEILICGKCGLGYHQQCHIPIAGSADQPLLTPWFCRRCIFALAVRKGGALKKGAIARTLQAVKMVLSYQPEELEWDSPHRTNQQQCYCYCGGPGEWYLRMLQCYRCRQWFHEACTQCLNEPMMFGDRFYLFFCSVCNQGPEYIERLPLRWVDVVHLALYNLGVQSKKKYFDFEEILAFVNHHWELLQLGKLTSTPVTDRGPHLLNALNSYKSRFLCGKEIKKKKCIFRLRIRVPPNPPGKLLPDKGLLPNENSASSELRKRGKSKPGLLPHEFQQQKRRVYRRKRSKFLLEDAIPSSDFTSAWSTNHHLASIFDFTLDEIQSLKSASSGQTFFSDVDSTDAASTSGSASTSLSYDSRWTVGSRKRKLAAKAYMPLRAKRWAAELDGRCPSDSSAEGASVPERPDEGIDSHTFESISEDDSSLSHLKSSITNYFGAAGRLACGEKYQVLARRVTPEGKVQYLVEWEGTTPY

SEQ ID NO: 62278 - protein, 173 aa, Homo sapiens
  Payload ID: 12450
  Gene Symbol: PHF19
  Gene Name: PHD finger protein 19
  ENSP ID: ENSP00000395938
MLQCYRCRQWFHEACTQCLNEPMMFGDRFYLFFCSVCNQGPEYIERLPLRWVDVVHLALYNLGVQSKKKYFDFEEILAFVNHHWELLQLGKLTSTPVTDRGPHLLNALNSYKSRFLCGKEIKKKKCIFRLRIRVPPNPPGKLLPDKGLLPNENSASSELRKRGKSKPGLLPHE

SEQ ID NO: 62279 - protein, 106 aa, Homo sapiens
  Payload ID: 12450
  Gene Symbol: PHF19
  Gene Name: PHD finger protein 19
  ENSP ID: ENSP00000397935
MENRALDPGTRDSYGATSHLPNKGALAKVKNNFKDLMSKLTEGQYVLCRWTDGLYYLGKIKRVSSSKQSCLVTFEDNSKYWVLWKDIQHAGVPGEEPKCNICLGKT

SEQ ID NO: 62280 - protein, 60 aa, Homo sapiens
  Payload ID: 12450
  Gene Symbol: PHF19
  Gene Name: PHD finger protein 19
  ENSP ID: ENSP00000404655
MLQCYRCRQWFHEACTQCLNEPMMFGDRFYLFFCSVCNQGPEYIERLPLRWVDVVHLALY

SEQ ID NO: 62281 - protein, 371 aa, Homo sapiens
  Payload ID: 12450
  Gene Symbol: PHF19
  Gene Name: PHD finger protein 19
  ENSP ID: ENSP00000407433
MLQCYRCRQWFHEACTQCLNEPMMFGDRFYLFFCSVCNQGPEYIERLPLRWVDVVHLALYNLGVQSKKKYFDFEEILAFVNHHWELLQLGKLTSTPVTDRGPHLLNALNSYKSRFLCGKEIKKKKCIFRLRIRVPPNPPGKLLPDKGLLPNENSASSELRKRGKSKPGLLPHEFQQQKRRVYRRKRSKFLLEDAIPSSDFTSAWSTNHHLASIFDFTLDEIQSLKSASSGQTFFSDVDSTDAASTSGSASTSLSYDSRWTVGSRKRKLAAKAYMPLRAKRWAAELDGRCPSDSSAEGASVPERPDEGIDSHTFESISEDDSSLSHLKSSITNYFGAAGRLACGEKYQVLARRVTPEGKVQYLVEWEGTTPY

SEQ ID NO: 62282 - protein, 165 aa, Homo sapiens
  Payload ID: 12450
  Gene Symbol: PHF19
  Gene Name: PHD finger protein 19
  ENSP ID: ENSP00000408479
MENRALDPGTRDSYGATSHLPNKGALAKVKNNFKDLMSKLTEGQYVLCRWTDGLYYLGKIKRVSSSKQSCLVTFEDNSKYWVLWKDIQHAGVPGEEPKCNICLGKTSGPLNEILICGKCGLGYHQQCHIPIAGSADQPLLTPWFCRRCIFALAVRKGGALKKGAI

SEQ ID NO: 62283 - protein, 599 aa, Homo sapiens
  Payload ID: 12450
  Gene Symbol: PHF19
  Gene Name: PHD finger protein 19
  ENSP ID: ENSP00000483946
MLVLVIRGPYPSAQCQGKLMENRALDPGTRDSYGATSHLPNKGALAKVKNNFKDLMSKLTEGQYVLCRWTDGLYYLGKIKRVSSSKQSCLVTFEDNSKYWVLWKDIQHAGVPGEEPKCNICLGKTSGPLNEILICGKCGLGYHQQCHIPIAGSADQPLLTPWFCRRCIFALAVRKGGALKKGAIARTLQAVKMVLSYQPEELEWDSPHRTNQQQCYCYCGGPGEWYLRMLQCYRCRQWFHEACTQCLNEPMMFGDRFYLFFCSVCNQGPEYIERLPLRWVDVVHLALYNLGVQSKKKYFDFEEILAFVNHHWELLQLGKLTSTPVTDRGPHLLNALNSYKSRFLCGKEIKKKKCIFRLRIRVPPNPPGKLLPDKGLLPNENSASSELRKRGKSKPGLLPHEFQQQKRRVYRRKRSKFLLEDAIPSSDFTSAWSTNHHLASIFDFTLDEIQSLKSASSGQTFFSDVDSTDAASTSGSASTSLSYDSRWTVGSRKRKLAAKAYMPLRAKRWAAELDGRCPSDSSAEGASVPERPDEGIDSHTFESISEDDSSLSHLKSSITNYFGAAGRLACGEKYQVLARRVTPEGKVQYLVEWEGTTPY

SEQ ID NO: 62284 - protein, 1096 aa, Homo sapiens
  Payload ID: 12451
  Gene Symbol: PHF2
  Gene Name: PHD finger protein 2
  Uniprot ID: O75151
  ENSP ID: ENSP00000352185
MATVPVYCVCRLPYDVTRFMIECDACKDWFHGSCVGVEEEEAPDIDIYHCPNCEKTHGKSTLKKKRTWHKHGPGQAPDVKPVQNGSQLFIKELRSRTFPSAEDVVARVPGSQLTLGYMEEHGFTEPILVPKKDGLGLAVPAPTFYVSDVENYVGPERSVDVTDVTKQKDCKMKLKEFVDYYYSTNRKRVLNVTNLEFSDTRMSSFVEPPDIVKKLSWVENYWPDDALLAKPKVTKYCLICVKDSYTDFHIDSGGASAWYHVLKGEKTFYLIRPASANISLYERWRSASNHSEMFFADQVDKCYKCIVKQGQTLFIPSGWIYATLTPVDCLAFAGHFLHSLSVEMQMRAYEVERRLKLGSLTQFPNFETACWYMGKHLLEAFKGSHKSGKQLPPHLVQGAKILNGAFRSWTKKQALAEHEDELPEHFKPSQLIKDLAKEIRLSENASKAVRPEVNTVASSDEVCDGDREKEEPPSPIEATPPQSLLEKVSKKKTPKTVKMPKPSKIPKPPKPPKPPRPPKTLKLKDGGKKKGKKSRESASPTIPNLDLLEAHTKEALTKMEPPKKGKATKSVLSVPNKDVVHMQNDVERLEIREQTKSKSEAKWKYKNSKPDSLLKMEEEQKLEKSPLAGNKDNKFSFSFSNKKLLGSKALRPPTSPGVFGALQNFKEDKPKPVRDEYEYVSDDGELKIDEFPIRRKKNAPKRDLSFLLDKKAVLPTPVTKPKLDSAAYKSDDSSDEGSLHIDTDTKPGRNARVKKESGSSAAGILDLLQASEEVGALEYNPSSQPPASPSTQEAIQGMLSMANLQASDSCLQTTWGAGQAKGSSLAAHGARKNGGGSGKSAGKRLLKRAAKNSVDLDDYEEEQDHLDACFKDSDYVYPSLESDEDNPIFKSRSKKRKGSDDAPYSPTARVGPSVPRQDRPVREGTRVASIETGLAAAAAKLSQQEEQKSKKKKSAKRKLTPNTTSPSTSTSISAGTTSTSTTPASTTPASTTPASTSTASSQASQEGSSPEPPPESHSSSLADHEYTAAGTFTGAQAGRTSQPMAPGVFLTQRRPSASSPNNNTAAKGKRTKKGMATAKQRLGKILKIHRNGKLLL

SEQ ID NO: 62285 - protein, 309 aa, Homo sapiens [sequence omitted]

SEQ ID NO: 62286 - protein, 328 aa, Homo sapiens
  Payload ID: 12451
  Gene Symbol: PHF2
  Gene Name: PHD finger protein 2
  ENSP ID: ENSP00000479936
MATVPVYCVCRLPYDVTRFMIECDACKDWFHGSCVGVEEEEAPDIDIYHCPNCEKTHGKSTLKKKRTWHKHGPGQAPDVKAAKNSVDLDDYEEEQDHLDACFKDSDYVYPSLESDEDNPIFKSRSKKRKGSDDAPYSPTARVGPSVPRQDRPVREGTRVASIETGLAAAAAKLSQQEEQKSKKKKSAKRKLTPNTTSPSTSTSISAGTTSTSTTPASTTPASTTPASTSTASSQASQEGSSPEPPPESHSSSLADHEYTAAGTFTGAQAGRTSQPMAPGVFLTQRRPSASSPNNNTAAKGKRTKKGMATAKQRLGKILKIHRNGKLLL

SEQ ID NO: 62287 - protein, 543 aa, Homo sapiens
  Payload ID: 12452
  Gene Symbol: PHF20
  Gene Name: PHD finger protein 20
  ENSP ID: ENSP00000341900
MTKHPPNRRGISFEVGAQLEARDRLKNWYPAHIEDIDYEEGKVLIHFKRWNHRYDEWFCWDSPYLRPLEKIQLRKEGLHEEDGSSEFQINEQVLACWSDCRFYPAKVTAVNKDGTYTVKFYDGVVQTVKHIHVKAFSKDQNIVGNARPKETDHKSLSSSPDKREKFKEQRKATVNVKKDKEDKPLKTEKRPKQPDKEGKLICSEKGKVSEKSLPKNEKEDKENISENDREYSGDAQVDKKPENDIVKSPQENLREPKRKRGRPPSIAPTAVDSNSQTLQPITLELRRRKISKGCEVPLKRPRLDKNSSQEKSKNYSENTDKDLSRRRSSRLSTNGTHEILDPDLVVSDLVDTDPLQDTLSSTKESEEGQLKSALEAGQVSSALTCHSFGDGSGAAGLELNCPSMGENTMKTEPTSPLVELQEISTVEVTNTFKKTDDFGSSNAPAVDLDHKFRCKVVDCLKFFRKAKLLHYHMKYFHGMEKSLEPEESPGKRHVQTRGPSASDKPSQETLTRKRVSASSPTTKDKEKNKEKKFKEFVRVKPKK

SEQ ID NO: 62288 - protein, 549 aa, Homo sapiens
  Payload ID: 12452
  Gene Symbol: PHF20
  Gene Name: PHD finger protein 20
  ENSP ID: ENSP00000363112
MTKHPPNRRGISFEVGAQLEARDRLKNWYPAHIEDIDYEEGKVLIHFKRWNHRYDEWFCWDSPYLRPLEKIQLRKEGLHEEDGSSEFQINEQVLACWSDCRFYPAKVTAVNKDGTYTVKFYDGVVQTVKHIHVKAFSKDQNIVGNARPKETDHKSLSSSPDKREKFKEQRKATVNVKKDKEDKPLKTEKRPKQPDKEGKLICSEKGKVSEKSLPKNEKEDKENISENDREYSGDAQVDKKPENDIVKSPQENLREPKRKRGRPPSIAPTAVDSNSQTLQPITLELRRRKISKGCEVPLKRPRLDKNSSQEKSKNYSENTDKDLSRRRSSRLSTNGTHEILDPDLVVSDLVDTDPLQDTLSSTKESEEGQLKSALEAGQVSSALTCHSFGDGSGAAGLELNCPSMGENTMKTEPTSPLVELQEISTVEVTNTFKKTDDFGSSNAPAVDLDHKFRCKVVDCLKFFRKAKLLHYHMKYFHGMEKSLEPEESPGKRHVQTRGPSASDKPSQETLTRKRVSASSPTTKDKEKNKEKKFKEFVRVKPKKKKKKKK

SEQ ID NO: 62289 - protein, 1012 aa, Homo sapiens
  Payload ID: 12452
  Gene Symbol: PHF20
  Gene Name: PHD finger protein 20
  Uniprot ID: Q9BVI0
  ENSP ID: ENSP00000363124
MTKHPPNRRGISFEVGAQLEARDRLKNWYPAHIEDIDYEEGKVLIHFKRWNHRYDEWFCWDSPYLRPLEKIQLRKEGLHEEDGSSEFQINEQVLACWSDCRFYPAKVTAVNKDGTYTVKFYDGVVQTVKHIHVKAFSKDQNIVGNARPKETDHKSLSSSPDKREKFKEQRKATVNVKKDKEDKPLKTEKRPKQPDKEGKLICSEKGKVSEKSLPKNEKEDKENISENDREYSGDAQVDKKPENDIVKSPQENLREPKRKRGRPPSIAPTAVDSNSQTLQPITLELRRRKISKGCEVPLKRPRLDKNSSQEKSKNYSENTDKDLSRRRSSRLSTNGTHEILDPDLVVSDLVDTDPLQDTLSSTKESEEGQLKSALEAGQVSSALTCHSFGDGSGAAGLELNCPSMGENTMKTEPTSPLVELQEISTVEVTNTFKKTDDFGSSNAPAVDLDHKFRCKVVDCLKFFRKAKLLHYHMKYFHGMEKSLEPEESPGKRHVQTRGPSASDKPSQETLTRKRVSASSPTTKDKEKNKEKKFKEFVRVKPKKKKKKKKKTKPECPCSEEISDTSQEPSPPKAFAVTRCGSSHKPGVHMSPQLHGPESGHHKGKVKALEEDNLSESSSESFLWSDDEYGQDVDVTTNPDEELDGDDRYDFEVVRCICEVQEENDFMIQCEECQCWQHGVCMGLLEENVPEKYTCYVCQDPPGQRPGFKYWYDKEWLSRGHMHGLAFLEENYSHQNAKKIVATHQLLGDVQRVIEVLHGLQLKMSILQSREHPDLPLWCQPWKQHSGEGRSHFRNIPVTDTRSKEEAPSYRTLNGAVEKPRPLALPLPRSVEESYITSEHCYQKPRAYYPAVEQKLVVETRGSALDDAVNPLHENGDDSLSPRLGWPLDQDRSKGDSDPKPGSPKVKEYVSKKALPEEAPARKLLDRGGEGLLSSQHQWQFNLLTHVESLQDEVTHRMDSIEKELDVLESWLDYTGELEPPEPLARLPQLKHCIKQLLMDLGKVQQIALCCST

SEQ ID NO: 62290 - protein, 154 aa, Homo sapiens
  Payload ID: 12452
  Gene Symbol: PHF20
  Gene Name: PHD finger protein 20
  ENSP ID: ENSP00000391915
MVQVNHGTYTVKFYDGVVQTVKHIHVKAFSKDQNIVGNARPKETDHKSLSSSPDKREKFKEQRKATVNVKKDKEDKPLKTEKRPKQPDKEGKLICSEKGKVSEKSLPKNEKEDKENISENDREYSGDAQVDKKPENDIVKSPQENLREPKRKRG

SEQ ID NO: 62291 - protein, 103 aa, Homo sapiens
  Payload ID: 12452
  Gene Symbol: PHF20
  Gene Name: PHD finger protein 20
  ENSP ID: ENSP00000404455
MTKHPPNRRGISFEVGAQLEARDRLKNWYPAHIEDIDYEEGKVLIHFKRWNHRYDEWFCWDSPYLRPLEKIQLRKEGLHEEDGSSRRFLALSPSLKCSGAVLA

SEQ ID NO: 62292 - protein, 638 aa, Homo sapiens
  Payload ID: 12452
  Gene Symbol: PHF20
  Gene Name: PHD finger protein 20
  ENSP ID: ENSP00000410373
MTKHPPNRRGISFEVGAQLEARDRLKNWYPAHIEDIDYEEGKVLIHFKRWNHRYDEWFCWDSPYLRPLEKIQLRKEGLHEEDGSSEFQINEQVLACWSDCRFYPAKVTAVNKDGTYTVKFYDGVVQTVKHIHVKAFSKDQNIVGNARPKETDHKSLSSSPDKREKFKEQRKATVNVKKDKEDKPLKTEKRPKQPDKEGKLICSEKGKVSEKSLPKNEKEDKENISENDREYSGDAQVDKKPENDIVKSPQENLREPKRKRGRPPSIAPTAVDSNSQTLQPITLELRRRKISKGCEVPLKRPRLDKNSSQEKSKNYSENTDKDLSRRRSSRLSTNGTHEILDPDLVVSDLVDTDPLQDTLSSTKESEEGQLKSALEAGQVSSALTCHSFGDGSGAAGLELNCPSMGENTMKTEPTSPLVELQEISTVEVTNTFKKTDDFGSSNAPAVDLDHKFRCKVVDCLKFFRKAKLLHYHMKYFHGMEKSLEPEESPGKRHVQTRGPSASDKPSQETLTRKRVSASSPTTKDKEKNKEKKFKEFVRVKPKKKKKKKKKTKPECPCSEEISDTSQEPSPPKAFAVTRCGSSHKPGVHMSPQLHGPESGHHKGKVKALEEDNLSESSSESFLWSDDEYGQDVDVHQPR

SEQ ID NO: 62293 - protein, 64 aa, Homo sapiens
  Payload ID: 12452
  Gene Symbol: PHF20
  Gene Name: PHD finger protein 20
  ENSP ID: ENSP00000413712
MFLFGEEDNLSESSSESFLWSDDEYGQDVDVTTNPDEELDGDDRYDFEVVRCICEVQEENDFMI

SEQ ID NO: 62294 - protein, 991 aa, Homo sapiens
  Payload ID: 12453
  Gene Symbol: PHF20L1
  Gene Name: PHD finger protein 20-like 1
  ENSP ID: ENSP00000220847
MSKKPPNRPGITFEIGARLEALDYLQKWYPSRIEKIDYEEGKMLVHFERWSHRYDEWIYWDSNRLRPLERPALRKEGLKDEEDFFDFKAGEEVLARWTDCRYYPAKIEAINKEGTFTVQFYDGVIRCLKRMHIKAMPEDAKGQDWIALVKAAAAAAAKNKTGSKPRTSANSNKDKDKDERKWFKVPSKKEETSTCIATPDVEKKEDLPTSSETFGLHVENVPKMVFPQPESTLSNKRKNNQGNSFQAKRARLNKITGLLASKAVGVDGAEKKEDYNETAPMLEQAISPKPQSQKKNEADISSSANTQKPALLSSTLSSGKARSKKCKHESGDSSGCIKPPKSPLSPELIQVEDLTLVSQLSSSVINKTSPPQPVNPPRPFKHSERRRRSQRLATLPMPDDSVEKVSSPSPATDGKVFSISSQNQQESSVPEVPDVAHLPLEKLGPCLPLDLSRGSEVTAPVASDSSYRNECPRAEKEDTQMLPNPSSKAIADGRGAPAAAGISKTEKKVKLEDKSSTAFGKRKEKDKERREKRDKDHYRPKQKKKKKKKKKSKQHDYSDYEDSSLEFLERCSSPLTRSSGSSLASRSMFTEKTTTYQYPRAILSVDLSGENLSDVDFLDDSSTESLLLSGDEYNQDFDSTNFEESQDEDDALNEIVRCICEMDEENGFMIQCEECLCWQHSVCMGLLEESIPEQYICYICRDPPGQRWSAKYRYDKEWLNNGRMCGLSFFKENYSHLNAKKIVSTHHLLADVYGVTEVLHGLQLKIGILKNKHHPDLHLWACSGKRKDQDQIIAGVEKKIAQDTVNREEKKYVQNHKEPPRLPLKMEGTYITSEHSYQKPQSFGQDCKSLADPGSSDDDDVSSLEEEQEFHMRSKNSLQYSAKEHGMPEKNPAEGNTVFVYNDKKGTEDPGDSHLQWQLNLLTHIENVQNEVTSRMDLIEKEVDVLESWLDFTGELEPPDPLARLPQLKRHIKQLLIDMGKVQQIATLCSV

SEQ ID NO: 62295 - protein, 285 aa, Homo sapiens
  Payload ID: 12453
  Gene Symbol: PHF20L1
  Gene Name: PHD finger protein 20-like 1
  Uniprot ID: A8MW92
  ENSP ID: ENSP00000338269
MSKKPPNRPGITFEIGARLEALDYLQKWYPSRIEKIDYEEGKMLVHFERWSHRYDEWIYWDSNRLRPLERPALRKEGLKDEEDFFDFKAGEEVLARWTDCRYYPAKIEAINKEGTFTVQFYDGVIRCLKRMHIKAMPEDAKGQDWIALVKAAAAAAAKNKTGSKPRTSANSNKDKDKDERKWFKVPSKKEETSTCIATPDVEKKEDLPTSSETFGLHVENVPKMVFPQPESTLSNKRKNNQGNSFQAKRARLNKITGLLASKAVGVDGAEKKEDYNETAPMLEQV

SEQ ID NO: 62296 - protein, 316 aa, Homo sapiens
  Payload ID: 12453
  Gene Symbol: PHF20L1
  Gene Name: PHD finger protein 20-like 1
  ENSP ID: ENSP00000378775
MSKKPPNRPGITFEIGARLEALDYLQKWYPSRIEKIDYEEGKMLVHFERWSHRYDEWIYWDSNRLRPLERPALRKEGLKDEEDFFDFKAGEEVLARWTDCRYYPAKIEAINKEGTFTVQFYDGVIRCLKRMHIKAMPEDAKGQFLFQVKSQHPLSWCCPIDPAGSCNQSMGSEDWIALVKAAAAAAAKNKTGSKPRTSANSNKDKDKDERKWFKVPSKKEETSTCIATPDVEKKEDLPTSSETFVGLHVENVPKMVFPQPESTLSNKRKNNQGNSFQAKRARLNKITGLLASKAVGVDGAEKKEDYNETAPMLEQV

SEQ ID NO: 62297 - protein, 311 aa, Homo sapiens
  Payload ID: 12453
  Gene Symbol: PHF20L1
  Gene Name: PHD finger protein 20-like 1
  ENSP ID: ENSP00000378777
MSKKPPNRPGITFEIGARLEALDYLQKWYPSRIEKIDYEEGKMLVHFERWSHRYDEWIYWDSNRLRPLERPALRKEGLKDEEDFFDFKAGEEVLARWTDCRYYPAKIEAINKEGTFTVQFYDGVIRCLKRMHIKAMPEDAKGQVKSQHPLSWCCPIDPAGSCNQSMGSEDWIALVKAAAAAAAKNKTGSKPRTSANSNKDKDKDERKWFKVPSKKEETSTCIATPDVEKKEDLPTSSETFGLHVENVPKMVFPQPESTLSNKRKNNQGNSFQAKRARLNKITGLLASKAVGVDGAEKKEDYNETAPMLEQV

SEQ ID NO: 62298 - protein, 1017 aa, Homo sapiens
  Payload ID: 12453
  Gene Symbol: PHF20L1
  Gene Name: PHD finger protein 20-like 1
  Uniprot ID: A8MW92
  ENSP ID: ENSP00000378784
MSKKPPNRPGITFEIGARLEALDYLQKWYPSRIEKIDYEEGKMLVHFERWSHRYDEWIYWDSNRLRPLERPALRKEGLKDEEDFFDFKAGEEVLARWTDCRYYPAKIEAINKEGTFTVQFYDGVIRCLKRMHIKAMPEDAKGQVKSQHPLSWCCPIDPAGSCNQSMGSEDWIALVKAAAAAAAKNKTGSKPRTSANSNKDKDKDERKWFKVPSKKEETSTCIATPDVEKKEDLPTSSETFGLHVENVPKMVFPQPESTLSNKRKNNQGNSFQAKRARLNKITGLLASKAVGVDGAEKKEDYNETAPMLEQAISPKPQSQKKNEADISSSANTQKPALLSSTLSSGKARSKKCKHESGDSSGCIKPPKSPLSPELIQVEDLTLVSQLSSSVINKTSPPQPVNPPRPFKHSERRRRSQRLATLPMPDDSVEKVSSPSPATDGKVFSISSQNQQESSVPEVPDVAHLPLEKLGPCLPLDLSRGSEVTAPVASDSSYRNECPRAEKEDTQMLPNPSSKAIADGRGAPAAAGISKTEKKVKLEDKSSTAFGKRKEKDKERREKRDKDHYRPKQKKKKKKKKKSKQHDYSDYEDSSLEFLERCSSPLTRSSGSSLASRSMFTEKTTTYQYPRAILSVDLSGENLSDVDFLDDSSTESLLLSGDEYNQDFDSTNFEESQDEDDALNEIVRCICEMDEENGFMIQCEECLCWQHSVCMGLLEESIPEQYICYICRDPPGQRWSAKYRYDKEWLNNGRMCGLSFFKENYSHLNAKKIVSTHHLLADVYGVTEVLHGLQLKIGILKNKHHPDLHLWACSGKRKDQDQIIAGVEKKIAQDTVNREEKKYVQNHKEPPRLPLKMEGTYITSEHSYQKPQSFGQDCKSLADPGSSDDDDVSSLEEEQEFHMRSKNSLQYSAKEHGMPEKNPAEGNTVFVYNDKKGTEDPGDSHLQWQLNLLTHIENVQNEVTSRMDLIEKEVDVLESWLDFTGELEPPDPLARLPQLKRHIKQLLIDMGKVQQIATLCSV

SEQ ID NO: 62299 - protein, 992 aa, Homo sapiens
  Payload ID: 12453
  Gene Symbol: PHF20L1
  Gene Name: PHD finger protein 20-like 1
  ENSP ID: ENSP00000378788
MSKKPPNRPGITFEIGARLEALDYLQKWYPSRIEKIDYEEGKMLVHFERWSHRYDEWIYWDSNRLRPLERPALRKEGLKDEEDFFDFKAGEEVLARWTDCRYYPAKIEAINKEGTFTVQFYDGVIRCLKRMHIKAMPEDAKGQDWIALVKAAAAAAAKNKTGSKPRTSANSNKDKDKDERKWFKVPSKKEETSTCIATPDVEKKEDLPTSSETFVGLHVENVPKMVFPQPESTLSNKRKNNQGNSFQAKRARLNKITGLLASKAVGVDGAEKKEDYNETAPMLEQAISPKPQSQKKNEADISSSANTQKPALLSSTLSSGKARSKKCKHESGDSSGCIKPPKSPLSPELIQVEDLTLVSQLSSSVINKTSPPQPVNPPRPFKHSERRRRSQRLATLPMPDDSVEKVSSPSPATDGKVFSISSQNQQESSVPEVPDVAHLPLEKLGPCLPLDLSRGSEVTAPVASDSSYRNECPRAEKEDTQMLPNPSSKAIADGRGAPAAAGISKTEKKVKLEDKSSTAFGKRKEKDKERREKRDKDHYRPKQKKKKKKKKKSKQHDYSDYEDSSLEFLERCSSPLTRSSGSSLASRSMFTEKTTTYQYPRAILSVDLSGENLSDVDFLDDSSTESLLLSGDEYNQDFDSTNFEESQDEDDALNEIVRCICEMDEENGFMIQCEECLCWQHSVCMGLLEESIPEQYICYICRDPPGQRWSAKYRYDKEWLNNGRMCGLSFFKENYSHLNAKKIVSTHHLLADVYGVTEVLHGLQLKIGILKNKHHPDLHLWACSGKRKDQDQIIAGVEKKIAQDTVNREEKKYVQNHKEPPRLPLKMEGTYITSEHSYQKPQSFGQDCKSLADPGSSDDDDVSSLEEEQEFHMRSKNSLQYSAKEHGMPEKNPAEGNTVFVYNDKKGTEDPGDSHLQWQLNLLTHIENVQNEVTSRMDLIEKEVDVLESWLDFTGELEPPDPLARLPQLKRHIKQLLIDMGKVQQIATLCSV

SEQ ID NO: 62300 - protein, 86 aa, Homo sapiens
  Payload ID: 12453
  Gene Symbol: PHF20L1
  Gene Name: PHD finger protein 20-like 1
  ENSP ID: ENSP00000428091
MLVHFERWSHRYDEWIYWDSNRLRPLERPALRKEGLKDEEDFFDFKAGEEVLARWTDCRYYPAKIEAINKEGTFTVQFYDGVIRCL

SEQ ID NO: 62301 - protein, 112 aa, Homo sapiens
  Payload ID: 12453
  Gene Symbol: PHF20L1
  Gene Name: PHD finger protein 20-like 1
  ENSP ID: ENSP00000430688
  MOD_RES (1)..(1): Any amino acid
XMGSEDWIALVKAAAAAAAKNKTGSKPRTSANSNKDKDKDERKWFKVPSKKEETSTCIATPDVEKKEDLPTSSETFDKLSYMCSVESRTSCRERSKDGLSTAREHIIKQEEK

SEQ ID NO: 62302 - protein, 264 aa, Homo sapiens
  Payload ID: 12453
  Gene Symbol: PHF20L1
  Gene Name: PHD finger protein 20-like 1
  ENSP ID: ENSP00000433125
MSKKPPNRPGITFEIGARLEALDYLQKWYPSRIEKIDYEEGKMLVHFERWSHRYDEWIYWDSNRLRPLERPALRKEGLKDEEDFFDFKAGEEVLARWTDCRYYPAKIEAINKEGTFTVQFYDGVIRCLKRMHIKAMPEDAKGQDWIALVKAAAAAAAKNKTGSKPRTSANSNKDKDKDERKWFKVPSKKEETSTCIATPDVEKKEDLPTSSETFGLHVENVPKMVFPQPESTLSNKRKNNQGNSFQAKRARLNKITGRDQLCIL

SEQ ID NO: 62303 - protein, 93 aa, Homo sapiens
  Payload ID: 12453
  Gene Symbol: PHF20L1
  Gene Name: PHD finger protein 20-like 1
  ENSP ID: ENSP00000433524
  MOD_RES (1)..(1): Any amino acid
XEVTAPVASDSSYRNECPRAEKEDTQMLPNPSSKAIADGRGAPAAAGISKTEKKVKLEDKSSTAFGIRSWDFSALLMKIPSYSPISLSGLPES

SEQ ID NO: 62304 - protein, 1017 aa, Homo sapiens; identical to SEQ ID NO: 62298
  Payload ID: 12453
  Gene Symbol: PHF20L1
  Gene Name: PHD finger protein 20-like 1
  Uniprot ID: A8MW92
  ENSP ID: ENSP00000482945

SEQ ID NO: 62305 - protein, 160 aa, Homo sapiens
  Payload ID: 12453
  Gene Symbol: PHF20L1
  Gene Name: PHD finger protein 20-like 1
  ENSP ID: ENSP00000487068
MSKKPPNRPGITFEIGARLEALDYLQKWYPSRIEKIDYEEGKMLVHFERWSHRYDEWIYWDSNRLRPLERPALRKEGLKDEEDFFDFKAGEEVLARWTDCRYYPAKIEAINKEGTFTVQFYDGVIRCLKRMHIKAMPEDAKGQVRVFSIPSYPKGYLLER

SEQ ID NO: 62306 - protein, 634 aa, Homo sapiens
  Payload ID: 12454
  Gene Symbol: PHF21A
  Gene Name: PHD finger protein 21A
  Uniprot ID: Q96BD5
  ENSP ID: ENSP00000323152
MELQTLQEALKVEIQVHQKLVAQMKQDPQNADLKKQLHELQAKITALSEKQKRVVEQLRKNLIVKQEQPDKFQIQPLPQSENKLQTAQQQPLQQLQQQQQYHHHHAQQSAAASPNLTASQKTVTTASMITTKTLPLVLKAATATMPASVVGQRPTIAMVTAINSQKAVLSTDVQNTPVNLQTSSKVTGPGAEAVQIVAKNTVTLQVQATPPQPIKVPQFIPPPRLTPRPNFLPQVRPKPVAQNNIPIAPAPPPMLAAPQLIQRPVMLTKFTPTTLPTSQNSIHPVRVVNGQTATIAKTFPMAQLTSIVIATPGTRLAGPQTVQLSKPSLEKQTVKSHTETDEKQTESRTITPPAAPKPKREENPQKLAFMVSLGLVTHDHLEEIQSKRQERKRRTTANPVYSGAVFEPERKKSAVTYLNSTMHPGTRKRANEEHWPKGDIHEDFCSVCRKSGQLLMCDTCSRVYHLDCLDPPLKTIPKGMWICPRCQDQMLKKEEAIPWPGTLAIVHSYIAYKAAKEEEKQKLLKWSSDLKQEREQLEQKVKQLSNSISKCMEMKNTILARQKEMHSSLEKVKQLIRLIHGIDLSKPVDSEATVGAISNGPDCTPPANAATSTPAPSPSSQSCTANCNQGEETK

SEQ ID NO: 62307 - protein, 680 aa, Homo sapiens
  Payload ID: 12454
  Gene Symbol: PHF21A
  Gene Name: PHD finger protein 21A
  Uniprot ID: Q96BD5
  ENSP ID: ENSP00000398824
MELQTLQEALKVEIQVHQKLVAQMKQDPQNADLKKQLHELQAKITALSEKQKRVVEQLRKNLIVKQEQPDKFQIQPLPQSENKLQTAQQQPLQQLQQQQQYHHHHAQQSAAASPNLTASQKTVTTASMITTKTLPLVLKAATATMPASVVGQRPTIAMVTAINSQKAVLSTDVQNTPVNLQTSSKVTGPGAEAVQIVAKNTVTLVQATPPQPIKVPQFIPPPRLTPRPNFLPQVRPKPVAQNNIPIAPAPPPMLAAPQLIQRPVMLTKFTPTTLPTSQNSIHPVRVVNGQTATIAKTFPMAQLTSIVIATPGTRLAGPQTVQLSKPSLEKQTVKSHTETDEKQTESRTITPPAAPKPKREENPQKLAFMVSLGLVTHDHLEEIQSKRQERKRRTTANPVYSGAVFEPERKKSAVTYLNSTMHPGTRKRGRPPKYNAVLGFGALTPTSPQSSHPDSPENEKTETTFTFPAPVQPVSLPSPTSTDGDIHEDFCSVCRKSGQLLMCDTCSRVYHLDCLDPPLKTIPKGMWICPRCQDQMLKKEEAIPWPGTLAIVHSYIAYKAAKEEEKQKLLKWSSDLKQEREQLEQKVKQLSNSISKCMEMKNTILARQKEMHSSLEKVKQLIRLIHGIDLSKPVDSEATVGAISNGPDCTPPANAATSTPAPSPSSQSCTANCNQGEETK

SEQ ID NO: 62308 - protein, 134 aa, Homo sapiens
  Payload ID: 12454
  Gene Symbol: PHF21A
  Gene Name: PHD finger protein 21A
  ENSP ID: ENSP00000431273
MELQTLQEALKVEIQVHQKLVAQMKQDPQIFFLSNQNADLKKQLHELQAKITALSEKQKRVVEQLRKNLIVKQEQPDKFQIQPLPQSENKLQTAQQQPLQQLQQQQQYHHHHAQQSAAASPNLTASQKTVTTAS

SEQ ID NO: 62309 - protein, 150 aa, Homo sapiens
  Payload ID: 12454
  Gene Symbol: PHF21A
  Gene Name: PHD finger protein 21A
  ENSP ID: ENSP00000431621
VSLPSPTSTDMLKKEEAIPWPGTLAIVHSYIAYKAAKEEEKQKLLKWSSDLKQEREQLEQKVKQLSNSISKCMEMKNTILARQKEMHSSLEKVKQLIRLIHGIDLSKPVDSEATVGAISNGPDCTPPANAATSTPAPSPSSQSCTANCNQ

SEQ ID NO: 62310 - protein, 93 aa, Homo sapiens
  Payload ID: 12454
  Gene Symbol: PHF21A
  Gene Name: PHD finger protein 21A
  ENSP ID: ENSP00000431964
  MOD_RES (1)..(1): Any amino acid
XAYKAAKEEEKQKLLKWSSDLKQEREQLEQKVKQLSNSISCEEAGFLETSIGKMHGNEEHHPGPAEGDAQLPGEGKTADSPHPRHRPLQTCRL

SEQ ID NO: 62311 - protein, 82 aa, Homo sapiens
  Payload ID: 12454
  Gene Symbol: PHF21A
  Gene Name: PHD finger protein 21A
  ENSP ID: ENSP00000432094
MELQTLQEALKVEIQVHQKLVAQMKQDPQNADLKKQLHELQAKITALSEKQKPSVSLYQFYLACRCHCTGIHCVEASLCLTY

SEQ ID NO: 62312 - protein, 51 aa, Homo sapiens
  Payload ID: 12454
  Gene Symbol: PHF21A
  Gene Name: PHD finger protein 21A
  ENSP ID: ENSP00000432406
MELQTLQEALKVEIQVHQKLVAQMKQDPQNADLKKQLHELQAKITALSEKQ

SEQ ID NO: 62313 - protein, 133 aa, Homo sapiens
  Payload ID: 12454
  Gene Symbol: PHF21A
  Gene Name: PHD finger protein 21A
  ENSP ID: ENSP00000432916
MELQTLQEALKVEIQVHQKLVAQMKQDPQIFFLSNQNADLKKQLHELQAKITALSEKQKRVVEQLRKNLIVKQEQPDKFQIQPLPQSENKLQTAQQQPLQQLQQQQQYHHHHAQQSAAASPNLTASQKTVTTA

SEQ ID NO: 62314 - protein, 11 aa, Homo sapiens
  Payload ID: 12454
  Gene Symbol: PHF21A
  Gene Name: PHD finger protein 21A
  ENSP ID: ENSP00000434687
MELQTLQEALK

SEQ ID NO: 62315 - protein, 62 aa, Homo sapiens
  Payload ID: 12454
  Gene Symbol: PHF21A
  Gene Name: PHD finger protein 21A
  ENSP ID: ENSP00000435121
MKQDPQNADLKKQLHELQAKITALSEKQKRVVEQLRKNLIVKQEQPDKFQIQPLPQSENKLQ

SEQ ID NO: 62316 - protein, 9 aa, Homo sapiens
  Payload ID: 12454
  Gene Symbol: PHF21A
  Gene Name: PHD finger protein 21A
  ENSP ID: ENSP00000435645
MELQTLQEA

SEQ ID NO: 62317 - protein, 116 aa, Homo sapiens
  Payload ID: 12454
  Gene Symbol: PHF21A
  Gene Name: PHD finger protein 21A
  ENSP ID: ENSP00000435984
LLMCDTCSRVYHLDCLDPPLKTIPKGMWICPRCQDQMLKKEEAIPWPGTLAIVHSYIAYKAAKEEEKQKLLKWSSDLKQEREQLEQKVKQLSNSISSPERVGPSVRPSLALSSTPC

SEQ ID NO: 62318 - protein, 101 aa, Homo sapiens
  Payload ID: 12454
  Gene Symbol: PHF21A
  Gene Name: PHD finger protein 21A
  ENSP ID: ENSP00000436157
MELQTLQEALKVEIQVHQKLVAQMKQDPQNADLKKQLHELQAKITALSEKQKRVVEQLRKNLIVKQEQPDKFQIQPLPQSENKLQTAQQQPLQQLQQQQQY

SEQ ID NO: 62319 - protein, 26 aa, Homo sapiens
  Payload ID: 12454
  Gene Symbol: PHF21A
  Gene Name: PHD finger protein 21A
  ENSP ID: ENSP00000437110
MELQTLQEALKVEIQVHQKLVAQMKQ

SEQ ID NO: 62320 - protein, 531 aa, Homo sapiens
  Payload ID: 12455
  Gene Symbol: PHF21B
  Gene Name: PHD finger protein 21B
  Uniprot ID: Q96EK2
  ENSP ID: ENSP00000324403
MELQSRPEALAVELARHQNGDLKKQLHERQPRIAALSDKQALGTITAVPVTGPQVSSLQRLAGQGAAVLPQVRPKTLIPDSLPVAPGRDRPPKQPPTFQKATVVSVKNPSPALPTANNTVSHVPAPGSQPQALAEPAALASPLSSAGVAYAIISTSPSNAAAMAPSTAVSVVSDSIKVQPLLISADNKPPPRLLSSPHPATHHCPLHPSSLPLTPPSPSLSPSPLHGIFQVIIIQPQVQTQPESTAESRPPTEEPSQGAQATKKKKEDRPPTQENPEKIAFMVALGLVTTEHLEEIQSKRQERKRRSTANPAYSGLLETERKRLASNYLNNPLFLTARANEDPCWKNEITHDEHCAACKRGANLQPCGTCPGAYHLSCLEPPLKTAPKGVWVCPRCQQKALKKDEGVPWTGMLAIVHSYVTHKTVKEEEKQKLLQRGSELQNEHQQLEERDRRLASAVQKCLELKTSLLARQRGTQSSLDRLRALLRLIQGEQLLQVTMTTTSPAPLLAGPWTKPSVAATHPTVQHPQGHN

SEQ ID NO: 62321 - protein, 477 aa, Homo sapiens
  Payload ID: 12455
  Gene Symbol: PHF21B
  Gene Name: PHD finger protein 21B
  Uniprot ID: Q96EK2
  ENSP ID: ENSP00000379410
MRRQPQNGDLKKQLHERQPRIAALSDKQALGTITAVPVTGPQVSSLQRLAGQGAAVLPQVRPKTLIPDSLPVAPGRDRPPKQPPTFQKATVVSVKNPSPALPTANNTVSHVPAPGSQPQALAEPAALASPLSSAGVAYAIISTSPSNAAAMAPSTAVSVVSDSIKVQPLLISADNKVIIIQPQVQTQPESTAESRPPTEEPSQGAQATKKKKEDRPPTQENPEKIAFMVALGLVTTEHLEEIQSKRQERKRRSTANPAYSGLLETERKRLASNYLNNPLFLTARANEDPCWKNEITHDEHCAACKRGANLQPCGTCPGAYHLSCLEPPLKTAPKGVWVCPRCQQKALKKDEGVPWTGMLAIVHSYVTHKTVKEEEKQKLLQRGSELQNEHQQLEERDRRLASAVQKCLELKTSLLARQRGTQSSLDRLRALLRLIQGEQLLQVTMTTTSPAPLLAGPWTKPSVAATHPTVQHPQGHN

SEQ ID NO: 62322 - protein, 327 aa, Homo sapiens
  Payload ID: 12455
  Gene Symbol: PHF21B
  Gene Name: PHD finger protein 21B
  ENSP ID: ENSP00000385053
MAPSTAVSVVSDSIKVQPLLISADNKVIIIQPQVQTQPESTAESRPPTEEPSQGAQATKKKKEDRPPTQENPEKIAFMVALGLVTTEHLEEIQSKRQERKRRSTANPAYSGLLETERKRLASNYLNNPLFLTARANEDPCWKNEITHDEHCAACKRGANLQPCGTCPGAYHLSCLEPPLKTAPKGVWVCPRCQQKALKKDEGVPWTGMLAIVHSYVTHKTVKEEEKQKLLQRGSELQNEHQQLEERDRRLASAVQKCLELKTSLLARQRGTQSSLDRLRALLRLIQGEQLLQVTMTTTSPAPLLAGPWTKPSVAATHPTVQHPQGHN

SEQ ID NO: 62323 - protein, 137 aa, Homo sapiens
  Payload ID: 12455
  Gene Symbol: PHF21B
  Gene Name: PHD finger protein 21B
  ENSP ID: ENSP00000401091
MAPSTAVSVVSDSIKVQPLLISADNKVIIIQPQVQTQPESTAESRPPTEEPSQGAQATKKKKEDRPPTQENPEKIAFMVALGLVTTEHLEEIQSKRQERKRRSTANPAYSGLLETERKRLASNYLNNPLFLTARANE

SEQ ID NO: 62324 - protein, 191 aa, Homo sapiens
  Payload ID: 12455
  Gene Symbol: PHF21B
  Gene Name: PHD finger protein 21B
  ENSP ID: ENSP00000401294
MRRQPQNGDLKKQLHERQPRIAALSDKQALGTITAVPVTGPQVSSLQRLAGQGAAVLPQVRPKTLIPDSLPVAPGRDRPPKQPPTFQKATVVSVKNPSPALPTANNTVSHVPAPGSQPQALAEPAALASPLSSAGVAYAIISTSPSNAAAMAPSTAVSVVSDSIKVQPLLISADNKVIIIQPQVQTQPEST

SEQ ID NO: 62325 - protein, 489 aa, Homo sapiens
  Payload ID: 12455
  Gene Symbol: PHF21B
  Gene Name: PHD finger protein 21B
  Uniprot ID: Q96EK2
  ENSP ID: ENSP00000487086
MELQSRPEALAVELARHQNGDLKKQLHERQPRIAALSDKQALGTITAVPVTGPQVSSLQRLAGQGAAVLPQVRPKTLIPDSLPVAPGRDRPPKQPPTFQKATVVSVKNPSPALPTANNTVSHVPAPGSQPQALAEPAALASPLSSAGVAYAIISTSPSNAAAMAPSTAVSVVSDSIKVQPLLISADNKVIIIQPQVQTQPESTAESRPPTEEPSQGAQATKKKKEDRPPTQENPEKIAFMVALGLVTTEHLEEIQSKRQERKRRSTANPAYSGLLETERKRLASNYLNNPLFLTARANEDPCWKNEITHDEHCAACKRGANLQPCGTCPGAYHLSCLEPPLKTAPKGVWVCPRCQQKALKKDEGVPWTGMLAIVHSYVTHKTVKEEEKQKLLQRGSELQNEHQQLEERDRRLASAVQKCLELKTSLLARQRGTQSSLDRLRALLRLIQGEQLLQVTMTTTSPAPLLAGPWTKPSVAATHPTVQHPQGHN

SEQ ID NO: 62326 - protein, 403 aa, Homo sapiens
  Payload ID: 12456
  Gene Symbol: PHF23
  Gene Name: PHD finger protein 23
  Uniprot ID: Q9BUL5
  ENSP ID: ENSP00000322579
MLEAMAEPSPEDPPPTLKPETQPPEKRRRTIEDFNKFCSFVLAYAGYIPPSKEESDWPASGSSSPLRGESAADSDGWDSAPSDLRTIQTFVKKAKSSKRRAAQAGPTQPGPPRSTFSRLQAPDSATLLEKMKLKDSLFDLDGPKVASPLSPTSLTHTSRPPAALTPVPLSQGDLSHPPRKKDRKNRKLGPGAGAGFGVLRRPRPTPGDGEKRSRIKKSKKRKLKKAERGDRLPPPGPPQAPPSDTDSEEEEEEEEEEEEEEMATVVGGEAPVPVLPTPPEAPRPPATVHPEGVPPADSESKEVGSTETSQDGDASSSEGEMRVMDEDIMVESGDDSWDLITCYCRKPFAGRPMIECSLCGTWIHLSCAKIKKTNVPDFFYCQKCKELRPEARRLGGPPKSGEP

SEQ ID NO: 62327 - protein, 399 aa, Homo sapiens
  Payload ID: 12456
  Gene Symbol: PHF23
  Gene Name: PHD finger protein 23
  Uniprot ID: Q9BUL5
  ENSP ID: ENSP00000414607
MPGDCRRDPPPTLKPETQPPEKRRRTIEDFNKFCSFVLAYAGYIPPSKEESDWPASGSSSPLRGESAADSDGWDSAPSDLRTIQTFVKKAKSSKRRAAQAGPTQPGPPRSTFSRLQAPDSATLLEKMKLKDSLFDLDGPKVASPLSPTSLTHTSRPPAALTPVPLSQGDLSHPPRKKDRKNRKLGPGAGAGFGVLRRPRPTPGDGEKRSRIKKSKKRKLKKAERGDRLPPPGPPQAPPSDTDSEEEEEEEEEEEEEEMATVVGGEAPVPVLPTPPEAPRPPATVHPEGVPPADSESKEVGSTETSQDGDASSSEGEMRVMDEDIMVESGDDSWDLITCYCRKPFAGRPMIECSLCGTWIHLSCAKIKKTNVPDFFYCQKCKELRPEARRLGGPPKSGEP

SEQ ID NO: 62328 - protein, 36 aa, Homo sapiens
  Payload ID: 12456
  Gene Symbol: PHF23
  Gene Name: PHD finger protein 23
  ENSP ID: ENSP00000458401
MKLKDSLFDLDGPKVASPLSPTSLTHTSRPPAALTP

SEQ ID NO: 62329 - protein, 186 aa, Homo sapiens
  Payload ID: 12456
  Gene Symbol: PHF23
  Gene Name: PHD finger protein 23
  ENSP ID: ENSP00000458416
MRSLFRCSRTDYKTLDPPPTLKPETQPPEKRRRTIEDFNKFCSFVLAYAGYIPPSKEESDWPASGSSSPLRGESAADSDGWDSAPSDLRTIQTFVKKAKSSKRRAAQAGPTQPGPPRSTFSRLQAPDSATLLEKMKLKDSLFDLDGPKVASPLSPTSLTHTSRPPAALTPVPLSQGDLSHPPRKKD

SEQ ID NO: 62330 - protein, 273 aa, Homo sapiens
  Payload ID: 12456
  Gene Symbol: PHF23
  Gene Name: PHD finger protein 23
  ENSP ID: ENSP00000458953
MKLKDSLFDLDGPKVASPLSPTSLTHTSRPPAALTPVPLSQGDLSHPPRKKDRKNRKLGPGAGAGFGVLRRPRPTPGDGEKRSRIKKSKKRKLKKAERGDRLPPPGPPQAPPSDTDSEEEEEEEEEEEEEEMATVVGGEAPVPVLPTPPEAPRPPATVHPEGVPPADSESKEVGSTETSQDGDASSSEGEMRVMDEDIMVESGDDSWDLITCYCRKPFAGRPMIECSLCGTWIHLSCAKIKKTNVPDFFYCQKCKELRPEARRLGGPPKSGEP

SEQ ID NO: 62331 - protein, 6 aa, Homo sapiens
  Payload ID: 12456
  Gene Symbol: PHF23
  Gene Name: PHD finger protein 23
  ENSP ID: ENSP00000459904
MKLKDS

SEQ ID NO: 62332 - protein, 59 aa, Homo sapiens
  Payload ID: 12456
  Gene Symbol: PHF23
  Gene Name: PHD finger protein 23
  ENSP ID: ENSP00000459983
MKLKDSLFDLDGPKVASPLSPTSLTHTSRPPAALTPVPLSQGDLSHPPRKKDRKNRKLG

SEQ ID NO: 62333 - protein, 336 aa, Homo sapiens
  Payload ID: 12456
  Gene Symbol: PHF23
  Gene Name: PHD finger protein 23
  Uniprot ID: Q9BUL5
  ENSP ID: ENSP00000460738
MLEAMAEPSPEDPPPTLKPETQPPEKRRRTIEDFNKFCSFVLAYAGYIPPSKEAPDSATLLEKMKLKDSLFDLDGPKVASPLSPTSLTHTSRPPAALTPVPLSQGDLSHPPRKKDRKNRKLGPGAGAGFGVLRRPRPTPGDGEKRSRIKKSKKRKLKKAERGDRLPPPGPPQAPPSDTDSEEEEEEEEEEEEEEMATVVGGEAPVPVLPTPPEAPRPPATVHPEGVPPADSESKEVGSTETSQDGDASSSEGEMRVMDEDIMVESGDDSWDLITCYCRKPFAGRPMIECSLCGTWIHLSCAKIKKTNVPDFFYCQKCKELRPEARRLGGPPKSGEP

SEQ ID NO: 62334 - protein, 201 aa, Homo sapiens
  Payload ID: 12456
  Gene Symbol: PHF23
  Gene Name: PHD finger protein 23
  ENSP ID: ENSP00000460876
MKLKDSLFDLDGPKVASPLSPTSLTHTSRPPAALTPVPLSQGDLSHPPRKKDRKNRKLGPGAGAGFGVLRRPRPTPGDGEKRSRIKKSKKRKLKKAERGDRLPPPGPPQAPPSDTDSEEEEEEEEEEEEEEMATVVGGEAPVPVLPTPPEAPRPPATVHPEGVPPADSESKEVGSTETSQDGDASSSEGEMRVMDEDIMVE

SEQ ID NO: 62335 - protein, 203 aa, Homo sapiens
  Payload ID: 12456
  Gene Symbol: PHF23
  Gene Name: PHD finger protein 23
  ENSP ID: ENSP00000461442
MPDPPPTLKPETQPPEKRRRTIEDFNKFCSFVLAYAGYIPPSKEESDWPASGSSSPLRGESAADSDGWDSAPSDLRTIQTFVKKAKSSKRRAAQAGPTQPGPPRSTFSRLQAPDSATLLEKMKLKDSLFDLDGPKVASPLSPTSLTHTSRPPAALTPVPLSQGDLSHPPRKKDRKNRKLGPGAGAGFGVLRRPRPTPGDGEKR

SEQ ID NO: 62336 - protein, 158 aa, Homo sapiens
  Payload ID: 12456
  Gene Symbol: PHF23
  Gene Name: PHD finger protein 23
  ENSP ID: ENSP00000479592
MLEAMAEPSPEDPPPTLKPETQPPEKRRRTIEDFNKFCSFVLAYAGYIPPSKEESDWPASGSSSPLRGESAADSDGWDSAPSDLRTIQTFVKKAKSSKRRAAQAGPTQPGPPRSTFSRLQAPDSATLLEKMKLKDSLFDLDGPKVASPFPSPCAANTP

SEQ ID NO: 62337 - protein, 400 aa, Homo sapiens
  Payload ID: 12457
  Gene Symbol: PHF24
  Gene Name: PHD finger protein 24
  Uniprot ID: Q9UPV7
  ENSP ID: ENSP00000242315
MGVLMSKRQTVEQVQKVSLAVSAFKDGLRDRPSIRRTGELPGSRRGTVEGSVQEVQEEKEAEAGTSVVQEESSAGRAAWERLRDGRGVEPEEFDRTSRFTPPAFIRPTRKLDDDKPPEICLEPREPVVNDEMCDVCEVWTAESLFPCRVCTRVFHDGCLRRMGYIQGDSAAEVTEMAHTETGWSCHYCDNINLLLTEEEMYSLTETFQRCKVIPDCSLTLEDFLRYRHQAAKRGDRDRALSEEQEEQAARQFAALDPEHRGHIEWPDFLSHESLLLLQQLRPQNSLLRLLTVKERERARAAFLARGSGSTVSEAECRRAQHSWFCKRFPEAPSCSVSISHVGPIADSSPASSSSKSQDKTLLPTEQESRFVDWPTFLQENVLYILAARPNSAAIHLKPPG

SEQ ID NO: 62338 - protein, 2039 aa, Homo sapiens
  Payload ID: 12458
  Gene Symbol: PHF3
  Gene Name: PHD finger protein 3
  Uniprot ID: Q92576
  ENSP ID: ENSP00000262043
MDIVDTFNHLIPTEHLDDALFLGSNLENEVCEDFSASQNVLEDSLKNMLSDKDPMLGSASNQFCLPVLDSNDPNFQMPCSTVVGLDDIMDEGVVKESGNDTIDEEELILPNRNLRDKVEENSVRSPRKSPRLMAQEQVRSLRQSTIAKRSNAAPLSNTKKASGKTVSTAKAGVKQPERSQVKEEVCMSLKPEYHKENRRCSRNSGQIEVVPEVSVSSSHSSVSSCLEMKDEDGLDSKHKCNNPGEIDVPSHELNCSLLSETCVTIGEKKNEALMECKAKPVGSPLFKFSDKEEHEQNDSISGKTGETVVEEMIATRKVEQDSKETVKLSHEDDHILEDAGSSDISSDAACTNPNKTENSLVGLPSCVDEVTECNLELKDTMGIADKTENTLERNKIEPLGYCEDAESNRQLESTEFNKSNLEVVDTSTFGPESNILENAICDVPDQNSKQLNAIESTKIESHETANLQDDRNSQSSSVSYLESKSVKSKHTKPVIHSKQNMTTDAPKKIVAAKYEVIHSKTKVNVKSVKRNTDVPESQQNFHRPVKVRKKQIDKEPKIQSCNSGVKSVKNQAHSVLKKTLQDQTLVQIFKPLTHSLSDKSHAHPGCLKEPHHPAQTGHVSHSSQKQCHKPQQQAPAMKTNSHVKEELEHPGVEHFKEEDKLKLKKPEKNLQPRQRRSSKSFSLDEPPLFIPDNIATIRREGSDHSSSFESKYMWTPSKQCGFCKKPHGNRFMVGCGRCDDWFHGDCVGLSLSQAQQMGEEDKEYVCVKCCAEEDKKTEILDPDTLENQATVEFHSGDKTMECEKLGLSKHTTNDRTKYIDDTVKHKVKILKRESGEGRNSSDCRDNEIKKWQLAPLRKMGQPVLPRRSSEEKSEKIPKESTTVTCTGEKASKPGTHEKQEMKKKKVEKGVLNVHPAASASKPSADQIRQSVRHSLKDILMKRLTDSNLKVPEEKAAKVATKIEKELFSFFRDTDAKYKNKYRSLMFNLKDPKNNILFKKVLKGEVTPDHLIRMSPEELASKELAAWRRRENRHTIEMIEKEQREVERRPITKITHKGEIEIESDAPMKEQEAAMEIQEPAANKSLEKPEGSEKQKEEVDSMSKDTTSQHRQHLFDLNCKICIGRMAPPVDDLSPKKVKVVVGVARKHSDNEAESIADALSSTSNILASEFFEEEKQESPKSTFSPAPRPEMPGTVEVESTFLARLNFIWKGFINMPSVAKFVTKAYPVSGSPEYLTEDLPDSIQVGGRISPQTVWDYVEKIKASGTKEICVVRFTPVTEEDQISYTLLFAYFSSRKRYGVAANNMKQVKDMYLIPLGATDKIPHPLVPFDGPGLELHRPNLLLGLIIRQKLKRQHSACASTSHIAETPESAPPIALPPDKKSKIEVSTEEAPEEENDFFNSFTTVLHKQRNKPQQNLQEDLPTAVEPLMEVTKQEPPKPLRFLPGVLIGWENQPTTLELANKPLPVDDILQSLLGTTGQVYDQAQSVMEQNTVKEIPFLNEQTNSKIEKTDNVEVTDGENKEIKVKVDNISESTDKSAEIETSVVGSSSISAGSLTSLSLRGKPPDVSTEAFLTNLSIQSKQEETVESKEKTLKRQLQEDQENNLQDNQTSNSSPCRSNVGKGNIDGNVSCSENLVANTARSPQFINLKRDPRQAAGRSQPVTTSESKDGDSCRNGEKHMLPGLSHNKEHLTEQINVEEKLCSAEKNSCVQQSDNLKVAQNSPSVENIQTSQAEQAKPLQEDILMQNIETVHPFRRGSAVATSHFEVGNTCPSEFPSKSITFTSRSTSPRTSTNFSPMRPQQPNLQHLKSSPPGFPFPGPPNFPPQSMFGFPPHLPPPLLPPPGFGFAQNPMVPWPPVVHLPGQPQRMMGPLSQASRYIGPQNFYQVKDIRRPERRHSDPWGRQDQQQLDRPFNRGKGDRQRFYSDSHHLKRERHEKEWEQESERHRRRDRSQDKDRDRKSREEGHKDKERARLSHGDRGTDGKASRDSRNVDKKPDKPKSEDYEKDKEREKSKHREGEKDRDRYHKDRDHTDRTKSKR

SEQ ID NO: 62339 - protein, 2039 aa, Homo sapiens; identical to SEQ ID NO: 62338
  Payload ID: 12458
  Gene Symbol: PHF3
  Gene Name: PHD finger protein 3
  Uniprot ID: Q92576
  ENSP ID: ENSP00000377048

SEQ ID NO: 62340 - protein, 169 aa, Homo sapiens
  Payload ID: 12458
  Gene Symbol: PHF3
  Gene Name: PHD finger protein 3
  ENSP ID: ENSP00000421417
  MOD_RES (1)..(1): Any amino acid
XINMPSVAKFVTKAYPVSGSPEYLTEDLPDSIQVGGRISPQTVWDYVEKIKASGTKEICVVRFTPVTEEDQISYTLLFAYFSSRKRYGVAANNMKQVKDMYLIPLGATDKIPHPLVPFDGPGRSMTLANTASSIWVALRISQSSEMAILLSANLKSENTALKKCKNTSC

SEQ ID NO: 62341 - protein, 736 aa, Homo sapiens
  Payload ID: 12458
  Gene Symbol: PHF3
  Gene Name: PHD finger protein 3
  ENSP ID: ENSP00000422841
MDIVDTFNHLIPTEHLDDALFLGSNLENEVCEDFSASQNVLEDSLKNMLSDKDPMLGSASNQFCLPVLDSNDPNFQMPCSTVVGLDDIMDEGVVKESGNDTIDEEELILPNRNLRDKVEENSVRSPRKSPRLMAQEQVRSLRQSTIAKRSNAAPLSNTKKASGKTVSTAKAGVKQPERSQVKEEVCMSLKPEYHKENRRCSRNSGQIEVVPEVSVSSSHSSVSSCLEMKDEDGLDSKHKCNNPGEIDVPSHELNCSLLSETCVTIGEKKNEALMECKAKPVGSPLFKFSDKEEHEQNDSISGKTGETVVEEMIATRKVEQDSKETVKLSHEDDHILEDAGSSDISSDAACTNPNKTENSLVGLPSCVDEVTECNLELKDTMGIADKTENTLERNKIEPLGYCEDAESNRQLESTEFNKSNLEVVDTSTFGPESNILENAICDVPDQNSKQLNAIESTKIESHETANLQDDRNSQSSSVSYLESKSVKSKHTKPVIHSKQNMTTDAPKKIVAAKYEVIHSKTKVNVKSVKRNTDVPESQQNFHRPVKVRKKQIDKEPKIQSCNSGVKSVKNQAHSVLKKTLQDQTLVQIFKPLTHSLSDKSHAHPGCLKEPHHPAQTGHVSHSSQKQCHKPQQQAPAMKTNSHVKEELEHPGVEHFKEEDKLKLKKPEKNLQPRQRRSSKSFSLDEPPLFIPDNIATIRREGSDHSSSFESKYMWTPSKQCGFCKKPHGNRCVCMCV

SEQ ID NO: 62342 - protein, 821 aa, Homo sapiens
  Payload ID: 12458
  Gene Symbol: PHF3
  Gene Name: PHD finger protein 3
  ENSP ID: ENSP00000424078
MLSDKDPMLGSASNQFCLPVLDSNDPNFQMPCSTVVGLDDIMDEGVVKESGNDTIDEEELILPNRNLRDKVEENSVRSPRKSPRLMAQEQVRSLRQSTIAKRSNAAPLSNTKKASGKTVSTAKAGVKQPERSQVKEEVCMSLKPEYHKENRRCSRNSGQIEVVPEVSVSSSHSSVSSCLEMKDEDGLDSKHKCNNPGEIDVPSHELNCSLLSETCVTIGEKKNEALMECKAKPVGSPLFKFSDKEEHEQNDSISGKTGETVVEEMIATRKVEQDSKETVKLSHEDDHILEDAGSSDISSDAACTNPNKTENSLVGLPSCVDEVTECNLELKDTMGIADKTENTLERNKIEPLGYCEDAESNRQLESTEFNKSNLEVVDTSTFGPESNILENAICDVPDQNSKQLNAIESTKIESHETANLQDDRNSQSSSVSYLESKSVKSKHTKPVIHSKQNMTTDAPKKIVAAKYEVIHSKTKVNVKSVKRNTDVPESQQNFHRPVKVRKKQIDKEPKIQSCNSGVKSVKNQAHSVLKKTLQDQTLVQIFKPLTHSLSDKSHAHPGCLKEPHHPAQTGHVSHSSQKQCHKPQQQAPAMKTNSHVKEELEHPGVEHFKEEDKLKLKKPEKNLQPRQRRSSKSFSLDEPPLFIPDNIATIRREGSDHSSSFESKYMWTPSKQCGFCKKPHGNRFMVGCGRCDDWFHGDCVGLSLSQAQQMGEEDKEYVCVKCCAEEDKKTEILDPDTLENQATVEFHSGDKTMECEKLGLSKHTTNDRTKYIDDTVKHKVKILKRESGEGRNSSDCRDNEIKKWQLAPLRKMGQPVLPRRS

SEQ ID NO: 62343 - protein, 104 aa, Homo sapiens
  Payload ID: 12458
  Gene Symbol: PHF3
  Gene Name: PHD finger protein 3
  ENSP ID: ENSP00000424197
MLENFTFQIFKIVGLDDIMDEGVVKESGNDTIDEEELILPNRNLRDKVEENSVRSPRKSPRLMAQEQVRSLRQSTIAKRSNAAPLSNTKKASGKTVSTAKAGVK

SEQ ID NO: 62344 - protein, 1072 aa, Homo sapiens
  Payload ID: 12458
  Gene Symbol: PHF3
  Gene Name: PHD finger protein 3
  ENSP ID: ENSP00000424694
MSLKPEYHKENRRCSRNSGQIEVVPEVSVSSSHSSVSSCLEMKDEDGLDSKHKCNNPGEIDVPSHELNCSLLSETCVTIGEKKNEALMECKAKPVGSPLFKFSDKEEHEQNDSISGKTGETVVEEMIATRKVEQDSKETVKLSHEDDHILEDAGSSDISSDAACTNPNKTENSLVGLPSCVDEVTECNLELKDTMGIADKTENTLERNKIEPLGYCEDAESNRQLESTEFNKSNLEVVDTSTFGPESNILENAICDVPDQNSKQLNAIESTKIESHETANLQDDRNSQSSSVSYLESKSVKSKHTKPVIHSKQNMTTDAPKKIVAAKYEVIHSKTKVNVKSVKRNTDVPESQQNFHRPVKVRKKQIDKEPKIQSCNSGVKSVKNQAHSVLKKTLQDQTLVQIFKPLTHSLSDKSHAHPGCLKEPHHPAQTGHVSHSSQKQCHKPQQQAPAMKTNSHVKEELEHPGVEHFKEEDKLKLKKPEKNLQPRQRRSSKSFSLDEPPLFIPDNIATIRREGSDHSSSFESKYMWTPSKQCGFCKKPHGNRFMVGCGRCDDWFHGDCVGLSLSQAQQMGEEDKEYVCVKCCAEEDKKTEILDPDTLENQATVEFHSGDKTMECEKLGLSKHTTNDRTKYIDDTVKHKVKILKRESGEGRNSSDCRDNEIKKWQLAPLRKMGQPVLPRRSSEEKSEKIPKESTTVTCTGEKASKPGTHEKQEMKKKKVEKGVLNVHPAASASKPSADQIRQSVRHSLKDILMKRLTDSNLKVPEEKAAKVATKIEKELFSFFRDTDAKYKNKYRSLMFNLKDPKNNILFKKVLKGEVTPDHLIRMSPEELASKELAAWRRRENRHTIEMIEKEQREVERRPITKITHKGEIEIESDAPMKEQEAAMEIQEPAANKSLEKPEGSEKQKEEVDSMSKDTTSQHRQHLFDLNCKICIGRMAPPVDDLSPKKVKVVVGVARKHSDNEAESIADALSSTSNILASEFFEEEKQESPKSTFSPAPRPEMPGTVEVESTFLARLNFIWKGFINMPSVAKFVTKAYPVSGSPEYLTEDLPDSIQVGGRISPQTVWDYV

SEQ ID NO: 62345 - protein, 82 aa, Homo sapiens
  Payload ID: 12458
  Gene Symbol: PHF3
  Gene Name: PHD finger protein 3
  ENSP ID: ENSP00000424994
MDIVDTFNHLIPTEHLDDALFLGSNLENEVCEDFSASQNVLEDSLKNMLSDKDPMLGSASNQFCLPVLDSNDPNFQMPCSTG

SEQ ID NO: 62346 - protein, 813 aa, Homo sapiens
  Payload ID: 12458
  Gene Symbol: PHF3
  Gene Name: PHD finger protein 3
  ENSP ID: ENSP00000425227
MDEGVVKESGNDTIDEEELILPNRNLRDKVEENSVRSPRKSPRLMAQEQVRSLRQSTIAKRSNAAPLSNTKKASGKTVSTAKAGVKQPERSQVKEEVCMSLKPEYHKENRRCSRNSGQIEVVPEVSVSSSHSSVSSCLEMKDEDGLDSKHKCNNPGEIDVPSHELNCSLLSETCVTIGEKKNEALMECKAKPVGSPLFKFSDKEEHEQNDSISGKTGETVVEEMIATRKVEQDSKETVKLSHEDDHILEDAGSSDISSDAACTNPNKTENSLVGLPSCVDEVTECNLELKDTMGIADKTENTLERNKIEPLGYCEDAESNRQLESTEFNKSNLEVVDTSTFGPESNILENAICDVPDQNSKQLNAIESTKIESHETANLQDDRNSQSSSVSYLESKSVKSKHTKPVIHSKQNMTTDAPKKIVAAKYEVIHSKTKVNVKSVKRNTDVPESQQNFHRPVKVRKKQIDKEPKIQSCNSGVKSVKNQAHSVLKKTLQDQTLVQIFKPLTHSLSDKSHAHPGCLKEPHHPAQTGHVSHSSQKQCHKPQQQAPAMKTNSHVKEELEHPGVEHFKEEDKLKLKKPEKNLQPRQRRSSKSFSLDEPPLFIPDNIATIRREGSDHSSSFESKYMWTPSKQCGFCKKPHGNRFMVGCGRCDDWFHGDCVGLSLSQAQQMGEEDKEYVCVKCCAEEDKKTEILDPDTLENQATVEFHSGDKTMECEKLGLSKHTTNDRTKYIDDTVKHKVKILKRESGEGRNSSDCRDNEIKKWQLAPLRKMGQPVLPRRSSEEKSEKIPKESTTVTCTGEKASKPGTHEKQEM

SEQ ID NO: 62347 - protein, 860 aa, Homo sapiens
  Payload ID: 12458
  Gene Symbol: PHF3
  Gene Name: PHD finger protein 3
  ENSP ID: ENSP00000425338
MVGCGRCDDWFHGDCVGLSLSQAQQMGEEDKEYVCVKCCAEEDKKTEILDPDTLENQATVEFHSGDKTMECEKLGLSKHTTNDRTKYIDDTVKHKVKILKRESGEGRNSSDCRDNEIKKWQLAPLRKMGQPVLPRRSSEEKSEKIPKESTTVTCTGEKASKPGTHEKQEMKKKKVEKGVLNVHPAASASKPSADQIRQSVRHSLKDILMKRLTDSNLKVPEEKAAKVATKIEKELFSFFRDTDAKYKNKYRSLMFNLKDPKNNILFKKVLKGEVTPDHLIRMSPEELASKELAAWRRRENRHTIEMIEKEQREVERRPITKITHKGEIEIESDAPMKEQEAAMEIQEPAANKSLEKPEGSEKQKEEVDSMSKDTTSQHRQHLFDLNCKICIGRMAPPVDDLSPKKVKVVVGVARKHSDNEAESIADALSSTSNILASEFFEEEKQESPKSTFSPAPRPEMPGTVEVESTFLARLNFIWKGFINMPSVAKFVTKAYPVSGSPEYLTEDLPDSIQVGGRISPQTVWDYVEKIKASGTKEICVVRFTPVTEEDQISYTLLFAYFSSRKRYGVAANNMKQVKDMYLIPLGATDKIPHPLVPFDGPGLELHRPNLLLGLIIRQKLKRQHSACASTSHIAETPESAPPIALPPDKKSKIEVSTEEAPEEENDFFNSFTTVLHKQRNKPQQNLQEDLPTAVEPLMEVTKQEPPKPLRFLPGVLIGWENQPTTLELANKPLPVDDILQSLLGTTGQVYDQAQSVMEQNTVKEIPFLNEQTNSKIEKTDNVEVTDGENKEIKVKVDNISESTDKSAEIETSVVGSSSISAGSLTSLSLRGKPPDVSTEAFLTNLSIQSKQEETVESKEK

SEQ ID NO: 62348 - protein, 110 aa, Homo sapiens
  Payload ID: 12459
  Gene Symbol: PHF5A
  Gene Name: PHD finger protein 5A
  Uniprot ID: Q7RTV0
  ENSP ID: ENSP00000216252
MAKHHPDLIFCRKQAGVAIGRLCEKCDGKCVICDSYVRPCTLVRICDECNYGSYQGRCVICGGPGVSDAYYCKECTIQEKDRDGCPKIVNLGSSKTDLFYERKKYGFKKR

SEQ ID NO: 62349 - protein, 365 aa, Homo sapiens
  Payload ID: 12460
  Gene Symbol: PHF6
  Gene Name: PHD finger protein 6
  Uniprot ID: Q8IWS0
  ENSP ID: ENSP00000329097
MSSSVEQKKGPTRQRKCGFCKSNRDKECGQLLISENQKVAAHHKCMLFSSALVSSHSDNESLGGFSIEDVQKEIKRGTKLMCSLCHCPGATIGCDVKTCHRTYHYHCALHDKAQIREKPSQGIYMVYCRKHKKTAHNSEADLEESFNEHELEPSSPKSKKKSRKGRPRKTNFKGLSEDTRSTSSHGTDEMESSSYRDRSPHRSSPSDTRPKCGFCHVGEEENEARGKLHIFNAKKAAAHYKCMLFSSGTVQLTTTSRAEFGDFDIKTVLQEIKRGKRMKCTLCSQPGATIGCEIKACVKTYHYHCGVQDKAKYIENMSRGIYKLYCKNHSGNDERDEEDEERESKSRGKVEIDQQQLTQQQLNGN

SEQ ID NO: 62350 - protein, 324 aa, Homo sapiens
  Payload ID: 12460
  Gene Symbol: PHF6
  Gene Name: PHD finger protein 6
  ENSP ID: ENSP00000359835
MSSSVEQKKGPTRQRKCGFCKSNRDKECGQLLISENQKVAAHHKCMLFSSALVSSHSDNESLGGFSIEDVQKEIKRGTKLMCSLCHCPGATIGCDVKTCHRTYHYHCALHDKAQIREKPSQGIYMVYCRKHKKTAHNSEAADLEESFNEHELEPSSPKSKKKSRKGRPRKTNFKGLSEDTRSTSSHGTDEMESSSYRDRSPHRSSPSDTRPKCGFCHVGEEENEARGKLHIFNAKKAAAHYKCMLFSSGTVQLTTTSRAEFGDFDIKTVLQEIKRGKRMKCTLCSQPGATIGCEIKACVKTYHYHCGVQDKAKYIENMSRGIYK

SEQ ID NO: 62351 - protein, 312 aa, Homo sapiens
  Payload ID: 12460
  Gene Symbol: PHF6
  Gene Name: PHD finger protein 6
  Uniprot ID: Q8IWS0
  ENSP ID: ENSP00000359836
MSSSVEQKKGPTRQRKCGFCKSNRDKECGQLLISENQKVAAHHKCMLFSSALVSSHSDNESLGGFSIEDVQKEIKRGTKLMCSLCHCPGATIGCDVKTCHRTYHYHCALHDKAQIREKPSQGIYMVYCRKHKKTAHNSEAADLEESFNEHELEPSSPKSKKKSRKGRPRKTNFKGLSEDTRSTSSHGTDEMESSSYRDRSPHRSSPSDTRPKCGFCHVGEEENEARGKLHIFNAKKAAAHYKCMLFSSGTVQLTTTSRAEFGDFDIKTVLQEIKRGKRMVCSFYICYATLHLICCFKFRVHPKFIQSSENLK

SEQ ID NO: 62352 - protein, 365 aa, Homo sapiens; identical to SEQ ID NO: 62349
  Payload ID: 12460
  Gene Symbol: PHF6
  Gene Name: PHD finger protein 6
  Uniprot ID: Q8IWS0
  ENSP ID: ENSP00000359839

SEQ ID NO: 62353 - protein, 366 aa, Homo sapiens
  Payload ID: 12460
  Gene Symbol: PHF6
  Gene Name: PHD finger protein 6
  ENSP ID: ENSP00000487420
MSSSVEQKKGPTRQRKCGFCKSNRDKECGQLLISENQKVAAHHKCMLFSSALVSSHSDNESLGGFSIEDVQKEIKRGTKLMCSLCHCPGATIGCDVKTCHRTYHYHCALHDKAQIREKPSQGIYMVYCRKHKKTAHNSEAADLEESFNEHELEPSSPKSKKKSRKGRPRKTNFKGLSEDTRSTSSHGTDEMESSSYRDRSPHRSSPSDTRPKCGFCHVGEEENEARGKLHIFNAKKAAAHYKCMLFSSGTVQLTTTSRAEFGDFDIKTVLQEIKRGKRMKCTLCSQPGATIGCEIKACVKTYHYHCGVQDKAKYIENMSRGIYKLYCKNHSGNDERDEEDEERESKSRGKVEIDQQQLTQQQLNGN

SEQ ID NO: 62354 - protein, 342 aa, Homo sapiens
  Payload ID: 12461
  Gene Symbol: PHF7
  Gene Name: PHD finger protein 7
  Uniprot ID: Q9BWX1
  ENSP ID: ENSP00000246282
MKTVKEKKECQRLRKSAKTRRVTQRKPSSGPVCWLCLREPGDPEKLGEFLQKDNISVHYFCLILSSKLPQRGQSNRGFHGFLPEDIKKEAARASRKICFVCKKKGAAINCQKDQCLRNFHLPCGQERGCLSQFFGEYKSFCDKHRPTQNIQHGHVGEESCILCCEDLSQQSVENIQSPCCSQAIYHRKCIQKYAHTSAKHFFKCPQCNNRKEFPQEMLRMGIHIPDRRWCLILCATCGSHGTHRDCSSLRSNSKKWECEECSPAAATDYIPENSGDIPCCSSTFHPEEHFCRDNTLEENPGLSWTDWPEPSLLEKPESSRGRRSYSWRSKGVRITNSCKKSK

SEQ ID NO: 62355 - protein, 381 aa, Homo sapiens
  Payload ID: 12461
  Gene Symbol: PHF7
  Gene Name: PHD finger protein 7
  Uniprot ID: Q9BWX1
  ENSP ID: ENSP00000333024
MKTVKEKKECQRLRKSAKTRRVTQRKPSSGPVCWLCLREPGDPEKLGEFLQKDNISVHYFCLILSSKLPQRGQSNRGFHGFLPEDIKKEAARASRKICFVCKKKGAAINCQKDQCLRNFHLPCGQERGCLSQFFGEYKSFCDKHRPTQNIQHGHVGEESCILCCEDLSQQSVENIQSPCCSQAIYHRKCIQKYAHTSAKHFFKCPQCNNRKEFPQEMLRMGIHIPDRDAAWELEPGAFSDLYQRYQHCDAPICLYEQGRDSFEDEGRWCLILCATCGSHGTHRDCSSLRSNSKKWECEECSPAAATDYIPENSGDIPCCSSTFHPEEHFCRDNTLEENPGLSWTDWPEPSLLEKPESSRGRRSYSWRSKGVRITNSCKKSK

SEQ ID NO: 62356 - protein, 326 aa, Homo sapiens
  Payload ID: 12461
  Gene Symbol: PHF7
  Gene Name: PHD finger protein 7
  ENSP ID: ENSP00000417712
  MOD_RES (1)..(1): Any amino acid
XDPEKLGEFLQKDNISVHYFCLILSSKLPQRGQSNRGFHGFLPEDIKKEAARASRKICFVCKKKGAAINCQKDQCLRNFHLPCGQERGCLSQFFGEYKSFCDKHRPTQNIQHGHVGEESCILCCEDLSQQSVENIQSPCCSQAIYHRKCIQKYAHTSAKHFFKCPQCNNRKEFPQEMLRMGIHIPDRDAAWELEPGAFSDLYQRYQHCDAPICLYEQGRDSFEDEGRWCLILCATCGSHGTHRDCSSLRSNNYIPENSGDIPCCSSTFHPEEHFCRDNTLEENPGLSWTDWPEPSLLEKPESSRGRRSYSWRSKGVRITNSCKKSK

SEQ ID NO: 62357 - protein, 63 aa, Homo sapiens
  Payload ID: 12461
  Gene Symbol: PHF7
  Gene Name: PHD finger protein 7
  ENSP ID: ENSP00000420521
  MOD_RES (1)..(1): Any amino acid
XQQSVENIQSPCCSQAIYHRKCIQKYAHTSAKHFFKCPQCNNRKEFPQEMLRMGIHIPDRLHT

SEQ ID NO: 62358 - protein, 248 aa, Homo sapiens
  Payload ID: 12461
  Gene Symbol: PHF7
  Gene Name: PHD finger protein 7
  ENSP ID: ENSP00000478693
MKTVKEKKECQRLRKSAKTRRVTQRKPSSGPVCWLCLREPGDPEKLGEFLQKDNISVHYFCLILSSKLPQRGQSNRGSMDFCLKTSKRRQPGLLGRSALCARKRELLSTARRISASETSICLVAKKGVAFHNFLESTNHFVTNIAQHRTSNMGMWGRKAASYVVKTYPNRVLRTSRARVVVKPSTTASAYRNMPTHQQSISSNVHSVTIERVSSRNAENGNSYSRQEVVPHSVCYMRIPRNPQGLLLS

SEQ ID NO: 62359 - protein, 342 aa, Homo sapiens; identical to SEQ ID NO: 62354
  Payload ID: 12461
  Gene Symbol: PHF7
  Gene Name: PHD finger protein 7
  Uniprot ID: Q9BWX1
  ENSP ID: ENSP00000480003

SEQ ID NO: 62360 - protein, 213 aa, Homo sapiens [sequence omitted]

SEQ ID NO: 62361 - protein, 878 aa, Homo sapiens
  Payload ID: 12462
  Gene Symbol: PHF8
  Gene Name: PHD finger protein 8
  Uniprot ID: Q9UPP1
  ENSP ID: ENSP00000319473
MASVPVYCLCRLPYDVTRFMIECDMCQDWFHGSCVGVEEEKAADIDLYHCPNCEVLHGPSIMKKRRGSSKGHDTHKGKPVKTGSPTFVRELRSRTFDSSDEVILKPTGNQLTVEFLEENSFSVPILVLKKDGLGMTLPSPSFTVRDVEHYVGSDKEIDVIDVTRQADCKMKLGDFVKYYYSGKREKVLNVISLEFSDTRLSNLVETPKIVRKLSWVENLWPEECVFERPNVQKYCLMSVRDSYTDFHIDFGGTSVWYHVLKGEKIFYLIRPTNANLTLFECWSSSSNQNEMFFGDQVDKCYKCSVKQGQTLFIPTGWIHAVLTPVDCLAFGGNFLHSLNIEMQLKAYEIEKRLSTADLFRFPNFETICWYVGKHILDIFRGLRENRRHPASYLVHGGKALNLAFRAWTRKEALPDHEDEIPETVRTVQLIKDLAREIRLVEDIFQQNVGKTSNIFGLQRIFPAGSIPLTRPAHSTSVSMSRLSLPSKNGSKKKGLKPKELFKKAERKGKESSALGPAGQLSYNLMDTYSHQALKTGSFQKAKFNITGACLNDSDDDSPDLDLDGNESPLALLMSNGSTKRVKSLSKSRRTKIAKKVDKARLMAEQVMEDEFDLDSDDELQIDERLGKEKATLIIRPKFPRKLPRAKPCSDPNRVREPGEVEFDIEEDYTTDEDMVEGVEGYQTATPAPAQGASEAPASPSTQEAIQGMLCMANLQSSSSSPATSSLQAWWTGGQDRSSGSSSSGLGTVSNSPASQRTPGKRPIKRPAYWRTESEEEEENASLDEQDSLGACFKDAEYIYPSLESDDDDPALKSRPKKKKNSDDAPWSPKARVTPTLPKQDRPVREGTRVASIETGLAAAAAKLAQQVKKMKLSLTDSG

SEQ ID NO: 62362 - protein, 1024 aa, Homo sapiens
  Payload ID: 12462
  Gene Symbol: PHF8
  Gene Name: PHD finger protein 8
  Uniprot ID: Q9UPP1
  ENSP ID: ENSP00000338868
MASVPVYCLCRLPYDVTRFMIECDMCQDWFHGSCVGVEEEKAADIDLYHCPNCEVLHGPSIMKKRRGSSKGHDTHKGKPVKTGSPTFVRELRSRTFDSSDEVILKPTGNQLTVEFLEENSFSVPILVLKKDGLGMTLPSPSFTVRDVEHYVGSDKEIDVIDVTRQADCKMKLGDFVKYYYSGKREKVLNVISLEFSDTRLSNLVETPKIVRKLSWVENLWPEECVFERPNVQKYCLMSVRDSYTDFHIDFGGTSVWYHVLKGEKIFYLIRPTNANLTLFECWSSSSNQNEMFFGDQVDKCYKCSVKQGQTLFIPTGWIHAVLTPVDCLAFGGNFLHSLNIEMQLKAYEIEKRLSTADLFRFPNFETICWYVGKHILDIFRGLRENRRHPASYLVHGGKALNLAFRAWTRKEALPDHEDEIPETVRTVQLIKDLAREIRLVEDIFQQNVGKTSNIFGLQRIFPAGSIPLTRPAHSTSVSMSRLSLPSKNGSKKKGLKPKELFKKAERKGKESSALGPAGQLSYNLMDTYSHQALKTGSFQKAKFNITGACLNDSDDDSPDLDLDGNESPLALLMSNGSTKRVKSLSKSRRTKIAKKVDKARLMAEQVMEDEFDLDSDDELQIDERLGKEKATLIIRPKFPRKLPRAKPCSDPNRVREPGEVEFDIEEDYTTDEDMVEGVEGKLGNGSGAGGILDLLKASRQVGGPDYAALTEAPASPSTQEAIQGMLCMANLQSSSSSPATSSLQAWWTGGQDRSSGSSSSGLGTVSNSPASQRTPGKRPIKRPAYWRTESEEEEENASLDEQDSLGACFKDAEYIYPSLESDDDDPALKSRPKKKKNSDDAPWSPKARVTPTLPKQDRPVREGTRVASIETGLAAAAAKLAQQELQKAQKKKYIKKKPLLKEVEQPRPQDSNLSLTVPAPTVAATPQLVTSSSPLPPPEPKQEALSGSLADHEYTARPNAFGMAQANRSTTPMAPGVFLTQRRPSVGSQSNQAGQGKRPKKGLATAKQRLGRILKIHRNGKLLL

SEQ ID NO: 62363 - protein, 948 aa, Homo sapiens
  Payload ID: 12462
  Gene Symbol: PHF8
  Gene Name: PHD finger protein 8
  Uniprot ID: Q9UPP1
  ENSP ID: ENSP00000340051
MASVPVYCLCRLPYDVTRFMIECDMCQDWFHGSCVGVEEEKAADIDLYHCPNCEVLHGPSIMKKRRGSSKGHDTHKGKPVKTGSPTFVRELRSRTFDSSDEVILKPTGNQLTVEFLEENSFSVPILVLKKDGLGMTLPSPSFTVRDVEHYVGSDKEIDVIDVTRQADCKMKLGDFVKYYYSGKREKVLNVISLEFSDTRLSNLVETPKIVRKLSWVENLWPEECVFERPNVQKYCLMSVRDSYTDFHIDFGGTSVWYHVLKGEKIFYLIRPTNANLTLFECWSSSSNQNEMFFGDQVDKCYKCSVKQGQTLFIPTGWIHAVLTPVDCLAFGGNFLHSLNIEMQLKAYEIEKRLSTADLFRFPNFETICWYVGKHILDIFRGLRENRRHPASYLVHGGKALNLAFRAWTRKEALPDHEDEIPETVRTVQLIKDLAREIRLVEFNITGACLNDSDDDSPDLDLDGNESPLALLMSNGSTKRVKSLSKSRRTKIAKKVDKARLMAEQVMEDEFDLDSDDELQIDERLGKEKATLIIRPKFPRKLPRAKPCSDPNRVREPGEVEFDIEEDYTTDEDMVEGVEGKLGNGSGAGGILDLLKASRQVGGPDYAALTEAPASPSTQEAIQGMLCMANLQSSSSSPATSSLQAWWTGGQDRSSGSSSSGLGTVSNSPASQRTPGKRPIKRPAYWRTESEEEEENASLDEQDSLGACFKDAEYIYPSLESDDDDPALKSRPKKKKNSDDAPWSPKARVTPTLPKQDRPVREGTRVASIETGLAAAAAKLAQQELQKAQKKKYIKKKPLLKEVEQPRPQDSNLSLTVPAPTVAATPQLVTSSSPLPPPEPKQEALSGSLADHEYTARPNAFGMAQANRSTTPMAPGVFLTQRRPSVGSQSNQAGQGKRPKKGLATAKQRLGRILKIHRNGKLLLRQVIVQAECRQAIHEPKLKRRDAHP

SEQ ID NO: 62364 - protein, 1060 aa, Homo sapiens
  Payload ID: 12462
  Gene Symbol: PHF8
  Gene Name: PHD finger protein 8
  Uniprot ID: Q9UPP1
  ENSP ID: ENSP00000350676
MNRSRAIVQRGRVLPPPAPLDTTNLAGRRTLQGRAKMASVPVYCLCRLPYDVTRFMIECDMCQDWFHGSCVGVEEEKAADIDLYHCPNCEVLHGPSIMKKRRGSSKGHDTHKGKPVKTGSPTFVRELRSRTFDSSDEVILKPTGNQLTVEFLEENSFSVPILVLKKDGLGMTLPSPSFTVRDVEHYVGSDKEIDVIDVTRQADCKMKLGDFVKYYYSGKREKVLNVISLEFSDTRLSNLVETPKIVRKLSWVENLWPEECVFERPNVQKYCLMSVRDSYTDFHIDFGGTSVWYHVLKGEKIFYLIRPTNANLTLFECWSSSSNQNEMFFGDQVDKCYKCSVKQGQTLFIPTGWIHAVLTPVDCLAFGGNFLHSLNIEMQLKAYEIEKRLSTADLFRFPNFETICWYVGKHILDIFRGLRENRRHPASYLVHGGKALNLAFRAWTRKEALPDHEDEIPETVRTVQLIKDLAREIRLVEDIFQQNVGKTSNIFGLQRIFPAGSIPLTRPAHSTSVSMSRLSLPSKNGSKKKGLKPKELFKKAERKGKESSALGPAGQLSYNLMDTYSHQALKTGSFQKAKFNITGACLNDSDDDSPDLDLDGNESPLALLMSNGSTKRVKSLSKSRRTKIAKKVDKARLMAEQVMEDEFDLDSDDELQIDERLGKEKATLIIRPKFPRKLPRAKPCSDPNRVREPGEVEFDIEEDYTTDEDMVEGVEGKLGNGSGAGGILDLLKASRQVGGPDYAALTEAPASPSTQEAIQGMLCMANLQSSSSSPATSSLQAWWTGGQDRSSGSSSSGLGTVSNSPASQRTPGKRPIKRPAYWRTESEEEEENASLDEQDSLGACFKDAEYIYPSLESDDDDPALKSRPKKKKNSDDAPWSPKARVTPTLPKQDRPVREGTRVASIETGLAAAAAKLAQQELQKAQKKKYIKKKPLLKEVEQPRPQDSNLSLTVPAPTVAATPQLVTSSSPLPPPEPKQEALSGSLADHEYTARPNAFGMAQANRSTTPMAPGVFLTQRRPSVGSQSNQAGQGKRPKKGLATAKQRLGRILKIHRNGKLLL

SEQ ID NO: 62365 - protein, 953 aa, Homo sapiens
  Payload ID: 12462
  Gene Symbol: PHF8
  Gene Name: PHD finger protein 8
  ENSP ID: ENSP00000379578
  MOD_RES (1)..(1): Any amino acid
XSSDEVILKPTGNQLTVEFLEENSFSVPILVLKKDGLGMTLPSPSFTVRDVEHYVGSDKEIDVIDVTRQADCKMKLGDFVKYYYSGKREKVLNVISLEFSDTRLSNLVETPKIVRKLSWVENLWPEECVFERPNVQKYCLMSVRDSYTDFHIDFGGTSVWYHVLKGEKIFYLIRPTNANLTLFECWSSSSNQNEMFFGDQVDKCYKCSVKQGQTLFIPTGWIHAVLTPVDCLAFGGNFLHSLNIEMQLKAYEIEKRLSTADLFRFPNFETICWYVGKHILDIFRGLRENRRHPASYLVHGGKALNLAFRAWTRKEALPDHEDEIPETVRTVQLIKDLAREIRLVEDIFQQNVGKTSNIFGLQRIFPAGSIPLTRPAHSTSVSMSRLSLPSKNGSKKKGLKPKELFKKAERKGKESSALGPAGQLSYNLMDTYSHQALKTGSFQKAKFNITGACLNDSDDDSPDLDLDGNESPLALLMSNGSTKRVKSLSKSRRTKIAKKVDKARLMAEQVMEDEFDLDSDDELQIDERLGKEKATLIIRPKFPRKLPRAKPCSDPNRVREPGEVEFDIEEDYTTDEDMVEGVEGKLGNGSGAGGILDLLKASRQVGGPDYAALTEAPASPSTQEAIQGMLCMANLQSSSSSPATSSLQAWWTGGQDRSSGSSSSGLGTVSNSPASQRTPGKRPIKRPAYWRTESEEEEENASLDEQDSLGACFKDAEYIYPSLESDDDDPALKSRPKKKKNSDDAPWSPKARVTPTLPKQDRPVREGTRVASIETGLAAAAAKLAQQELQKAQKKKYIKKKPLLKEVEQPRPQDSNLSLTVPAPTVAATPQLVTSSSPLPPPEPKQEALSGSLADHEYTARPNAFGMAQANRSTTPMAPGVFLTQRRPSVGSQSNQAGQGKRPKKGLATAKQRLGRILKIHRNGKLLLRQVIVQAECRQAIHEPKLKRRDAHP

SEQ ID NO: 62366 - protein, 174 aa, Homo sapiens
  Payload ID: 12462
  Gene Symbol: PHF8
  Gene Name: PHD finger protein 8
  ENSP ID: ENSP00000388796
NEMFFGDQVDKCYKCSVKQGQTLFIPTGWIHAVLTPVDCLAFGGNFLHSLNIEMQLKAYEIEKRLSTADLFRFPNFETICWYVGKHILDIFRGLRENRRHPASYLVHGGKALNLAFRAWTRKEALPDHEDEIPETVRTVQLIKDLAREIRLVEFSRGEDDYKAMFQQVAYTTRQ

SEQ ID NO: 62367 - protein, 659 aa, Homo sapiens
  Payload ID: 12462
  Gene Symbol: PHF8
  Gene Name: PHD finger protein 8
  ENSP ID: ENSP00000397129
  MOD_RES (1)..(1): Any amino acid
XSVRDSYTDFHIDFGGTSVWYHVLKGEKIFYLIRPTNANLTLFECWSSSSNQNEMFFGDQVDKCYKCSVKQGQTLFIPTGWIHAVLTPVDCLAFGGNFLHSLNIEMQLKAYEIEKRLSTADLFRFPNFETICWYVGKHILDIFRGLRENRRHPASYLVHGGKALNLAFRAWTRKEALPDHEDEIPETVRTVQLIKDLAREIRLVEDIFQQNVGKTSNIFGLQRIFPAGSIPLTRPAHSTSVSMSRLSLPSKNGSKKKGLKPKELFKKAERKGKESSALGPAGQLSYNLMDTYSHQALKTGSFQKAKFNITGACLNDSDDDSPDLDLDGNESPLALLMSNGSTKRVKSLSKSRRTKIAKKVDKARLMAEQVMEDEFDLDSDDELQIDERLGKEKATLIIRPKFPRKLPRAKPCSDPNRVREPGEVEFDIEEDYTTDEDMVEGVEGKLGNGSGAGGILDLLKASRQVGGPDYAALTEAPASPSTQEAIQGMLCMANLQSSSSSPATSSLQAWWTGGQDRSSGSSSSGLGTVSNSPASQRTPGKRPIKRPAYWRTESEEEEENASLDEQDSLGACFKDAEYIYPSLESDDDDPALKSRPKKKKNSDDAPWSPKARVTPTLPKQDRPVREGTRVASIETGLAAAAAKLAQQVKKMKLSLTDSG

SEQ ID NO: 62368 - protein, 115 aa, Homo sapiens
  Payload ID: 12462
  Gene Symbol: PHF8
  Gene Name: PHD finger protein 8
  ENSP ID: ENSP00000398995
MASVPVYCLCRLPYDVTRFMIECDMCQDWFHGSCVGVEEEKAADIDLYHCPNCEVLHGPSIMKKRRGSSKGHDTHKGKPVKTGSPTFVRELRSRTFDSSDEVILKPTGNQLTVEF

SEQ ID NO: 62369 - protein, 114 aa, Homo sapiens
  Payload ID: 12462
  Gene Symbol: PHF8
  Gene Name: PHD finger protein 8
  ENSP ID: ENSP00000404117
MASVPVYCLCRLPYDVTRFMIECDMCQDWFHGSCVGVEEEKAADIDLYHCPNCEVLHGPSIMKKRRGSSKGHDTHKGKPVKTGSPTFVRELRSRTFDSSDEVILKPTGNQLTVE

SEQ ID NO: 62370 - protein, 148 aa, Homo sapiens
  Payload ID: 12462
  Gene Symbol: PHF8
  Gene Name: PHD finger protein 8
  ENSP ID: ENSP00000405897
MNRSRAIVQRGRVLPPPAPLDTTNLAGRRTLQGRAKMASVPVYCLCRLPYDVTRFMIECDMCQDWFHGSCVGVEEEKAADIDLYHCPNCEVLHGPSIMKKRRGSSKGHDTHKGKPVKTGSPTFVRELRSRTFDSSDEVILKPTGNQLT

SEQ ID NO: 62371 - protein, 126 aa, Homo sapiens
  Payload ID: 12462
  Gene Symbol: PHF8
  Gene Name: PHD finger protein 8
  ENSP ID: ENSP00000408113
MASVPVYCLCRLPYDVTRFMIECDMCQDWFHGSCVGVEEEKAADIDLYHCPNCEVLHGPSIMKKRRGSSKGHDTHKGKPVKTGSPTFVRELRSRTFDSSDEVILKPTGNQLTVEFLEENSFSVPIL

SEQ ID NO: 62372 - protein, 97 aa, Homo sapiens
  Payload ID: 12462
  Gene Symbol: PHF8
  Gene Name: PHD finger protein 8
  ENSP ID: ENSP00000410100
MASVPVYCLCRLPYDVTRFMIECDMCQDWFHGSCVGVEEEKAADIDLYHCPNCEVLHGPSIMKKRRGSSKGHDTHKGKPVKTGSPTFVRELRSRTFD

SEQ ID NO: 62373 - protein, 134 aa, Homo sapiens
  Payload ID: 12462
  Gene Symbol: PHF8
  Gene Name: PHD finger protein 8
  ENSP ID: ENSP00000414028
  MOD_RES (1)..(1): Any amino acid
XVLTPVDCLAFGGNFLHSLNIEMQLKAYEIEKRLSTADLFRFPNFETICWYVGKHILDIFRGLRENRRHPASYLVHGGKALNLAFRAWTRKEALPDHEDEIPETVRTVQLIKDLAREIRLVEFNITGACLNDSD

SEQ ID NO: 62374 - protein, 97 aa, Homo sapiens; identical to SEQ ID NO: 62372
  Payload ID: 12462
  Gene Symbol: PHF8
  Gene Name: PHD finger protein 8
  ENSP ID: ENSP00000416546

SEQ ID NO: 62375 - protein, 303 aa, Homo sapiens
  Payload ID: 12462
  Gene Symbol: PHF8
  Gene Name: PHD finger protein 8
  ENSP ID: ENSP00000482159
MDTYSHQALKTGSFQKAKFNITGACLNDSDDDSPDLDLDGNESPLALLMSNGSTKRVKSLSKSRRTKIAKKVDKARLMAEQVMEDEFDLDSDDELQIDERLGKEKATLIIRPKFPRKLPRASLALTPTEFVNQEKLSLTLRRTIQQMRTWWKGLKASLGMVVALVAFLICSRPAGRWGDLTMLPSPRPQLLPALRRPSRACCAWPTCSPHRPHRLPLACRPGGLGDRIEAVGAPAVGWAQCLTVLLPSAPQGSGPSSGQHTGEPRARRRRRTPVWMNRTAWERASRMQSISILHWSLMMMTLL

SEQ ID NO: 62376 - protein, 288 aa, Homo sapiens
  Payload ID: 12463
  Gene Symbol: PBLD
  Gene Name: phenazine biosynthesis-like protein domain containing
  Uniprot ID: P30039
  ENSP ID: ENSP00000308466
MKLPIFIADAFTARAFRGNPAAVCLLENELDEDMHQKIAREMNLSETAFIRKLHPTDNFAQSSCFGLRWFTPASEVPLCGHATLASAAVLFHKIKNMNSTLTFVTLSGELRARRAEDGIVLDLPLYPAHPQDFHEVEDLIKTAIGNTLVQDICYSPDTQKLLVRLSDVYNRSFLENLKVNTENLLQVENTGKVKGLILTLKGEPGGQTQAFDFYSRYFAPWVGVAEDPVTGSAHAVLSSYWSQHLGKKEMHAFQCSHRGGELGISLRPDGRVDIRGGAAVVLEGTLTA

SEQ ID NO: 62377 - protein, 255 aa, Homo sapiens
  Payload ID: 12463
  Gene Symbol: PBLD
  Gene Name: phenazine biosynthesis-like protein domain containing
  ENSP ID: ENSP00000338041
MHQKIAREMNLSETAFIRKLHPTDNFAQSSCFGLRWFTPASEVPLCGHATLASAAVLFHKIKNMNSTLTFVTLSGELRARRAEDGIVLDLPLYPAHPQDFHEVEDLIKTAIGNTLVQDICYSPDTQKLLVRLSDVYNRSFLENLKVNTENLLQVENTGKVKGLILTLKGEPGGQTQAFDFYSRYFAPWVGVAEDPVTGSAHAVLSSYWSQHLGKKEMHAFQCSHRGGELGISLRPDGRVDIRGGAAVVLEGTLTA

SEQ ID NO: 62378 - protein, 288 aa, Homo sapiens; identical to SEQ ID NO: 62376
  Payload ID: 12463
  Gene Symbol: PBLD
  Gene Name: phenazine biosynthesis-like protein domain containing
  Uniprot ID: P30039
  ENSP ID: ENSP00000351619

SEQ ID NO: 62379 - protein, 90 aa, Homo sapiens
  Payload ID: 12463
  Gene Symbol: PBLD
  Gene Name: phenazine biosynthesis-like protein domain containing
  ENSP ID: ENSP00000476261
  MOD_RES (1)..(1): Any amino acid
XLLVRLSDVYNRSFLENLKVNTENLLQVENTGKVKGLILTLKGEPGGQTQAFDFYSRYFAPWVGVAEDPVTGTKTKNQDESRKLTQKSMY

SEQ ID NO: 62380 - protein, 280 aa, Homo sapiens
  Payload ID: 12463
  Gene Symbol: PBLD
  Gene Name: phenazine biosynthesis-like protein domain containing
  Uniprot ID: P30039
  ENSP ID: ENSP00000476306
MKLPIFIADAFTARAFRGNPAAVCLLENELDEDMHQKIAREMNLSETAFIRKLHPTDNFAQSSCFGLRWFTPASEVPLCGHATLASAAVLFHKIKNMNSTLTFVTLSGELRARRAEDGIVLDLPLYPAHPQDFHEVEDLIKTAIGNTLVQDICYSPDTQKLLVRLSDVYNRSFLENLKVNTENLLQVENTGKVKGLILTLKGEPGGQTQAFDFYSRYFAPWVGVAEDPVTGSAHAVLSSYWSQHLGKKEMHGRTALYQFLFYLPNSKLVFLLICTIPLKM

SEQ ID NO: 62381 - protein, 447 aa, Homo sapiens
  Payload ID: 12464
  Gene Symbol: PAH
  Gene Name: phenylalanine hydroxylase
  ENSP ID: ENSP00000303500
MSALTPTLVFCHMHVETSYIEDNCNQNGAISLIFSLKEEVGALAKVLRLFEENDVNLTHIESRPSRLKKDEYEFFTHLDKRSLPALTNIIKILRHDIGATVHELSRDKKKDTVPWFPRTIQELDRFANQILSYGAELDADHPGFKDPVYRARRKQFADIAYNYRHGQPIPRVEYMEEEKKTWGTVFKTLKSLYKTHACYEYNHIFPLLEKYCGFHEDNIPQLEDVSQFLQTCTGFRLRPVAGLLSSRDFLGGLAFRVFHCTQYIRHGSKPMYTPEPDICHELLGHVPLFSDRSFAQFSQEIGLASLGAPDEYIEKLATIYWFTVEFGLCKQGDSIKAYGAGLLSSFGELQYCLSEKPKLLPLELEKTAIQNYTVTEFQPLYYVAESFNDAKEKVRNFAATIPRPFSVRYDPYTQRIEVLDNTQQLKILADSINSEIGILCSALQKIK

SEQ ID NO: 62382 - protein, 117 aa, Homo sapiens
  Payload ID: 12464
  Gene Symbol: PAH
  Gene Name: phenylalanine hydroxylase
  ENSP ID: ENSP00000446658
MSTAVLENPGLGRKLSDFGQETSYIEDNCNQNGAISLIFSLKEEVGALAKVLRLFEENDVNLTHIESRPSRLKKDEYEFFTHLDKRSLPALTNIIKILRHDIGATVHELSRDKKKDT

SEQ ID NO: 62383 - protein, 136 aa, Homo sapiens
  Payload ID: 12464
  Gene Symbol: PAH
  Gene Name: phenylalanine hydroxylase
  ENSP ID: ENSP00000447620
MSTAVLENPGLGRKLSDFGQETSYIEDNCNQNGAISLIFSLKEEVGALAKVLRLFEENDVNLTHIESRPSRLKKDEYEFFTHLDKRSLPALTNIIKILRHDIGATVHELSRDKKKDTVPWFPRTIQELDRFANQIL

SEQ ID NO: 62384 - protein, 452 aa, Homo sapiens
  Payload ID: 12464
  Gene Symbol: PAH
  Gene Name: phenylalanine hydroxylase
  Uniprot ID: P00439
  ENSP ID: ENSP00000448059
MSTAVLENPGLGRKLSDFGQETSYIEDNCNQNGAISLIFSLKEEVGALAKVLRLFEENDVNLTHIESRPSRLKKDEYEFFTHLDKRSLPALTNIIKILRHDIGATVHELSRDKKKDTVPWFPRTIQELDRFANQILSYGAELDADHPGFKDPVYRARRKQFADIAYNYRHGQPIPRVEYMEEEKKTWGTVFKTLKSLYKTHACYEYNHIFPLLEKYCGFHEDNIPQLEDVSQFLQTCTGFRLRPVAGLLSSRDFLGGLAFRVFHCTQYIRHGSKPMYTPEPDICHELLGHVPLFSDRSFAQFSQEIGLASLGAPDEYIEKLATIYWFTVEFGLCKQGDSIKAYGAGLLSSFGELQYCLSEKPKLLPLELEKTAIQNYTVTEFQPLYYVAESFNDAKEKVRNFAATIPRPFSVRYDPYTQRIEVLDNTQQLKILADSINSEIGILCSALQKIK

SEQ ID NO: 62385 - protein, 149 aa, Homo sapiens
  Payload ID: 12464
  Gene Symbol: PAH
  Gene Name: phenylalanine hydroxylase
  ENSP ID: ENSP00000489016
  MOD_RES (1)..(1): Any amino acid
XENPGLGRKLSDFGQETSYIEDNCNQNGAISLIFSLKEEVGALAKVLRLFEENDVNLTHIESRPSRLKKDEYEFFTHLDKRSLPALTNIIKILRHDIGATVHELSRDKKKDTVPWFPRTIQELDRFANQILSYGAELDADHPVSPWPVG

SEQ ID NO: 62386 - protein, 143 aa, Homo sapiens
  Payload ID: 12464
  Gene Symbol: PAH
  Gene Name: phenylalanine hydroxylase
  ENSP ID: ENSP00000489230
  MOD_RES (1)..(1): Any amino acid
XPDICHELLGHVPLFSDRSFAQFSQIYWFTVEFGLCKQGDSIKAYGAGLLSSFGELQYCLSEKPKLLPLELEKTAIQNYTVTEFQPLYYVAESFNDAKEKVRNFAATIPRPFSVRYDPYTQRIEVLDNTQQLKILADSINSEI

SEQ ID NO: 62387 - protein, 451 aa, Homo sapiens
  Payload ID: 12465
  Gene Symbol: FARS2
  Gene Name: phenylalanyl-tRNA synthetase 2, mitochondrial
  Uniprot ID: O95363
  ENSP ID: ENSP00000274680
MVGSALRRGAHAYVYLVSKASHISRGHQHQAWGSRPPAAECATQRAPGSVVELLGKSYPQDDHSNLTRKVLTRVGRNLHNQQHHPLWLIKERVKEHFYKQYVGRFGTPLFSVYDNLSPVVTTWQNFDSLLIPADHPSRKKGDNYYLNRTHMLRAHTSAHQWDLLHAGLDAFLVVGDVYRRDQIDSQHYPIFHQLEAVRLFSKHELFAGIKDGESLQLFEQSSRSAHKQETHTMEAVKLVEFDLKQTLTRLMAHLFGDELEIRWVDCYFPFTHPSFEMEINFHGEWLEVLGCGVMEQQLVNSAGAQDRIGWAFGLGLERLAMILYDIPDIRLFWCEDERFLKQFCVSNINQKVKFQPLSKYPAVINDISFWLPSENYAENDFYDLVRTIGGDLVEKVDLIDKFVHPKTHKTSHCYRITYRHMERTLSQREVRHIHQALQEAAVQLLGVEGRF

SEQ ID NO: 62388 - protein, 451 aa, Homo sapiens; identical to SEQ ID NO: 62387
  Payload ID: 12465
  Gene Symbol: FARS2
  Gene Name: phenylalanyl-tRNA synthetase 2, mitochondrial
  Uniprot ID: O95363
  ENSP ID: ENSP00000316335

SEQ ID NO: 62389 - protein, 101 aa, Homo sapiens
  Payload ID: 12465
  Gene Symbol: FARS2
  Gene Name: phenylalanyl-tRNA synthetase 2, mitochondrial
  ENSP ID: ENSP00000392525
LFAGIKDGESLQLFEQSSRSAHKQETHTMEAVKLVEFDLKQTLTRLMAHLFGDELEIRWVDCYFPFTHPSFEMEINFHGEWLEVLGCGVMEQQLVNSGGAT

SEQ ID NO: 62390 - protein, 47 aa, Homo sapiens
  Payload ID: 12465
  Gene Symbol: FARS2
  Gene Name: phenylalanyl-tRNA synthetase 2, mitochondrial
  ENSP ID: ENSP00000473394
MVGSALRRGAHAYVYLVSKASHISRGHQHQAWGSRPPAAECATQRAP

SEQ ID NO: 62391 - protein, 508 aa, Homo sapiens
  Payload ID: 12466
  Gene Symbol: FARSA
  Gene Name: phenylalanyl-tRNA synthetase, alpha subunit
  Uniprot ID: Q9Y285
  ENSP ID: ENSP00000320309
MADGQVAELLLRRLEASDGGLDSAELAAELGMEHQAVVGAVKSLQALGEVIEAELRSTKHWELTAEGEEIAREGSHEARVFRSIPPEGLAQSELMRLPSGKVGFSKAMSNKWIRVDKSAADGPRVFRVVDSMEDEVQRRLQLVRGGQAEKLGEKERSELRKRKLLAEVTLKTYWVSKGSAFSTSISKQETELSPEMISSGSWRDRPFKPYNFLAHGVLPDSGHLHPLLKVRSQFRQIFLEMGFTEMPTDNFIESSFWNFDALFQPQQHPARDQHDTFFLRDPAEALQLPMDYVQRVKRTHSQGGYGSQGYKYNWKLDEARKNLLRTHTTSASARALYRLAQKKPFTPVKYFSIDRVFRNETLDATHLAEFHQIEGVVADHGLTLGHLMGVLREFFTKLGITQLRFKPAYNPYTEPSMEVFSYHQGLKKWVEVGNSGVFRPEMLLPMGLPENVSVIAWGLSLERPTMIKYGINNIRELVGHKVNLQMVYDSPLCRLDAEPRPPPTQEAA

SEQ ID NO: 62392 - protein, 477 aa, Homo sapiens
  Payload ID: 12466
  Gene Symbol: FARSA
  Gene Name: phenylalanyl-tRNA synthetase, alpha subunit
  Uniprot ID: Q9Y285
  ENSP ID: ENSP00000396548
MADGQVAELLLRRLEASDGGLDSAELAAELGMEHQAVVGAVKSLQALGEVIEAELRSTKHWELTAEGEEIAREGSHEARVFRSIPPEGLAQSELMRLPSGKVGFSKAMSNKWIRVDKSAADGPRVFRVVDSMEDEVQRRLQLVRGGQAEKLGEKERSELRKRKLLAEVGSWRDRPFKPYNFLAHGVLPDSGHLHPLLKVRSQFRQIFLEMGFTEMPTDNFIESSFWNFDALFQPQQHPARDQHDTFFLRDPAEALQLPMDYVQRVKRTHSQGGYGSQGYKYNWKLDEARKNLLRTHTTSASARALYRLAQKKPFTPVKYFSIDRVFRNETLDATHLAEFHQIEGVVADHGLTLGHLMGVLREFFTKLGITQLRFKPAYNPYTEPSMEVFSYHQGLKKWVEVGNSGVFRPEMLLPMGLPENVSVIAWGLSLERPTMIKYGINNIRELVGHKVNLQMVYDSPLCRLDAEPRPPPTQEAA

SEQ ID NO: 62393 - protein, 168 aa, Homo sapiens
  Payload ID: 12466
  Gene Symbol: FARSA
  Gene Name: phenylalanyl-tRNA synthetase, alpha subunit
  ENSP ID: ENSP00000465402
MADGQVAELLLRRLEASDGGLDSAELAAELGMEHQAVVGAVKSLQALGEVIEAELRSTKHWELTAEGEEIAREGSHEARVFRSIPPEGLAQSELMRLPSGKVGFSKAMSNKWIRVDKSAADGPRVFRVVRSCGLVRGQVDGHMGPWPSYPSHSLSWQVDSMEDEVQRR

SEQ ID NO: 62394 - protein, 378 aa, Homo sapiens
  Payload ID: 12466
  Gene Symbol: FARSA
  Gene Name: phenylalanyl-tRNA synthetase, alpha subunit
  ENSP ID: ENSP00000467384
  MOD_RES (1)..(1): Any amino acid
XAELLLRRLEASDGGLDSAELAAELGMEHQAVVGAVKSLQALGEVDSMEDEVQRRLQLVRGGQAEKLGEKERSELRKRKLLAEVTLKTYWVSKGSAFSTSISKQETELSPEMISSGSWRDRPFKPYNFLAHGVLPDSGHLHPLLKVRSQFRQIFLEMGFTEMPTDNFIESSFWNFDALFQPQQHPARDQHDTFFLRDPAEALQLPMDYVQRVKRTHSQGGYGSQGYKYNWKLDEARKNLLRTHTTSASARALYRLAQKKPFTPVKYFSIDRVFRNETLDATHLAEFHQIEGVVADHGLTLGHLMGVLREFFTKLGITQLRFKPAYNPYTEPSMEVFSYHQGLKKWVEVGNSGVFRPEMLLPMGLPENVSVIAWGLSLE

SEQ ID NO: 62395 - protein, 548 aa, Homo sapiens
  Payload ID: 12466
  Gene Symbol: FARSA
  Gene Name: phenylalanyl-tRNA synthetase, alpha subunit
  ENSP ID: ENSP00000468051
MEPGWRWELSPMHLLRLRRHTQDDDTLSPVLQLDTFKMAVHTPVPVAELLLRRLEASDGGLDSAELAAELGMEHQAVVGAVKSLQALGEVIEAELRSTKHWELTAEGEEIAREGSHEARVFRSIPPEGLAQSELMRLPSGKVGFSKAMSNKWIRVDKSAADGPRVFRVVDSMEDEVQRRLQLVRGGQAEKLGEKERSELRKRKLLAEVTLKTYWVSKGSAFSTSISKQETELSPEMISSGSWRDRPFKPYNFLAHGVLPDSGHLHPLLKVRSQFRQIFLEMGFTEMPTDNFIESSFWNFDALFQPQQHPARDQHDTFFLRDPAEALQLPMDYVQRVKRTHSQGGYGSQGYKYNWKLDEARKNLLRTHTTSASARALYRLAQKKPFTPVKYFSIDRVFRNETLDATHLAEFHQIEGVVADHGLTLGHLMGVLREFFTKLGITQLRFKPAYNPYTEPSMEVFSYHQGLKKWVEVGNSGVFRPEMLLPMGLPENVSVIAWGLSLERPTMIKYGINNIRELVGHKVNLQMVYDSPLCRLDAEPRPPPTQEAA

SEQ ID NO: 62396 - protein, 235 aa, Homo sapiens
  Payload ID: 12466
  Gene Symbol: FARSA
  Gene Name: phenylalanyl-tRNA synthetase, alpha subunit
  ENSP ID: ENSP00000468068
MADGQVAELLLRRLEASDGGLDSAELAAELGMEHQAVVGAVKSLQALGEVIEAELRSTKHWELTAEGEEIAREGSHEARVFRSIPPEGLAQSELMRLPSGKVGFSKAMSNKWIRVDKSAADGPRVFRVVDSMEDEVQRRLQLVRGGQAEKLGEKERSELRKRKLLAEVTLKTYWVSKGSAFSTSISKQETELSPEMISSGSWRDRPFKPYNFLAHGVLPDSGHLHPLLKVHRDAD

SEQ ID NO: 62397 - protein, 159 aa, Homo sapiens
  Payload ID: 12466
  Gene Symbol: FARSA
  Gene Name: phenylalanyl-tRNA synthetase, alpha subunit
  ENSP ID: ENSP00000468384
  MOD_RES (1)..(1): Any amino acid
XDNFIESSFWNFDALFQPQQHPARDQHDTFFLRDPAEALQLPMDYVQRVKRTHSQGGYGSQGYKYNWKLDEARKNLLRTHTTSASARALYRLAQKKPFTPVKYFSIDRVFRNETLDATHLAEFHQIEGVVADHGLTLGQPPPSSFPPVPGPESQGQRTG

SEQ ID NO: 62398 - protein, 589 aa, Homo sapiens
  Payload ID: 12467
  Gene Symbol: FARSB
  Gene Name: phenylalanyl-tRNA synthetase, beta subunit
  Uniprot ID: Q9NSD9
  ENSP ID: ENSP00000281828
MPTVSVKRDLLFQALGRTYTDEEFDELCFEFGLELDEITSEKEIISKEQGNVKAAGASDVVLYKIDVPANRYDLLCLEGLVRGLQVFKERIKAPVYKRVMPDGKIQKLIITEETAKIRPFAVAAVLRNIKFTKDRYDSFIELQEKLHQNICRKRALVAIGTHDLDTLSGPFTYTAKRPSDIKFKPLNKTKEYTACELMNIYKTDNHLKHYLHIIENKPLYPVIYDSNGVVLSMPPIINGDHSRITVNTRNIFIECTGTDFTKAKIVLDIIVTMFSEYCENQFTVEAAEVVFPNGKSHTFPELAYRKEMVRADLINKKVGIRETPENLAKLLTRMYLKSEVIGDGNQIEIEIPPTRADIIHACDIVEDAAIAYGYNNIQMTLPKTYTIANQFPLNKLTELLRHDMAAAGFTEALTFALCSQEDIADKLGVDISATKAVHISNPKTAEFQVARTTLLPGLLKTIAANRKMPLPLKLFEISDIVIKDSNTDVGAKNYRHLCAVYYNKNPGFEIIHGLLDRIMQLLDVPPGEDKGGYVIKASEGPAFFPGRCAEIFARGQSVGKLGVLHPDVITKFELTMPCSSLEINVGPFL

SEQ ID NO: 62399 - protein, 282 aa, Homo sapiens
  Payload ID: 12468
  Gene Symbol: PNMT
  Gene Name: phenylethanolamine N-methyltransferase
  Uniprot ID: P11086
  ENSP ID: ENSP00000269582
MSGADRSPNAGAAPDSAPGQAAVASAYQRFEPRAYLRNNYAPPRGDLCNPNGVGPWKLRCLAQTFATGEVSGRTLIDIGSGPTVYQLLSACSHFEDITMTDFLEVNRQELGRWLQEEPGAFNWSMYSQHACLIEGKGECWQDKERQLRARVKRVLPIDVHQPQPLGAGSPAPLPADALVSAFCLEAVSPDLASFQRALDHITTLLRPGGHLLLIGALEESWYLAGEARLTVVPVSEEEVREALVRSGYKVRDLRTYIMPAHLQTGVDDVKGVFFAWAQKVGL

SEQ ID NO: 62400 - protein, 184 aa, Homo sapiens
  Payload ID: 12468
  Gene Symbol: PNMT
  Gene Name: phenylethanolamine N-methyltransferase
  ENSP ID: ENSP00000377791
MTDFLEVNRQELGRWLQEEPGAFNWSMYSQHACLIEGKGECWQDKERQLRARVKRVLPIDVHQPQPLGAGSPAPLPADALVSAFCLEAVSPDLASFQRALDHITTLLRPGGHLLLIGALEESWYLAGEARLTVVPVSEEEVREALVRSGYKVRDLRTYIMPAHLQTGVDDVKGVFFAWAQKVGL

SEQ ID NO: 62401 - protein, 137 aa, Homo sapiens
  Payload ID: 12468
  Gene Symbol: PNMT
  Gene Name: phenylethanolamine N-methyltransferase
  ENSP ID: ENSP00000464234
MSGADRSPNAGAAPDSAPGQAAVASAYQRFEPRAYLRNNYAPPRGDLCNPNGVGPWKLRCLAQTFATGEVSGRTLIDIGSGPTVYQLLSACSHFEDITMTDFLEVNRQELGRWLQEEPGAFNWSMYSQHACLIEGKG

SEQ ID NO: 62402 - protein, 136 aa, Homo sapiens
  Payload ID: 12469
  Gene Symbol: PMAIP1
  Gene Name: phorbol-12-myristate-13-acetate-induced protein 1
  Uniprot ID: Q13794
  ENSP ID: ENSP00000269518
MPGKKARKNAQPSPARAPAGPAGTAGTARDQAGFAIGMQLRFTRGKKLLSSSLSSSPLALPRGHEEQVQVAGSRVCYSTQEIWRQTELPAETSESDIQTLLLRNLTASKTCMRGLLQKSFLRRCTFHQFEERLHCN

SEQ ID NO: 62403 - protein, 54 aa, Homo sapiens
  Payload ID: 12469
  Gene Symbol: PMAIP1
  Gene Name: phorbol-12-myristate-13-acetate-induced protein 1
  Uniprot ID: Q13794
  ENSP ID: ENSP00000326119
MPGKKARKNAQPSPARAPAELEVECATQLRRFGDKLNFRQKLLNLISKLFCSGT

SEQ ID NO: 62404 - protein, 246 aa, Homo sapiens
  Payload ID: 12470
  Gene Symbol: PDC
  Gene Name: phosducin
  Uniprot ID: P20941
  ENSP ID: ENSP00000375855
MEEAKSQSLEEDFEGQATHTGPKGVINDWRKFKLESQDSDSIPPSKKEILRQMSSPQSRNGKDSKERVSRKMSIQEYELIHKEKEDENCLRKYRRQCMQDMHQKLSFGPRYGFVYELETGKQFLETIEKELKITTIVVHIYEDGIKGCDALNSSLTCLAAEYPIVKFCKIKASNTGAGDRFSLDVLPTLLIYKGGELISNFISVAEQFAEEFFAGDVESFLNEYGLLPEREVHVLEHTKIEEEDVE

SEQ ID NO: 62405 - protein, 194 aa, Homo sapiens
  Payload ID: 12470
  Gene Symbol: PDC
  Gene Name: phosducin
  Uniprot ID: P20941
  ENSP ID: ENSP00000422775
MSSPQSRNGKDSKERVSRKMSIQEYELIHKEKEDENCLRKYRRQCMQDMHQKLSFGPRYGFVYELETGKQFLETIEKELKITTIVVHIYEDGIKGCDALNSSLTCLAAEYPIVKFCKIKASNTGAGDRFSLDVLPTLLIYKGGELISNFISVAEQFAEEFFAGDVESFLNEYGLLPEREVHVLEHTKIEEEDVE

SEQ ID NO: 62406 - protein, 301 aa, Homo sapiens
  Payload ID: 12471
  Gene Symbol: PDCL
  Gene Name: phosducin-like
  Uniprot ID: Q13371
  ENSP ID: ENSP00000259467
MTTLDDKLLGEKLQYYYSSSEDEDSDHEDKDRGRCAPASSSVPAEAELAGEGISVNTGPKGVINDWRRFKQLETEQREEQCREMERLIKKLSMTCRSHLDEEEEQQKQKDLQEKISGKMTLKEFAIMNEDQDDEEFLQQYRKQRMEEMRQQLHKGPQFKQVFEISSGEGFLDMIDKEQKSIVIMVHIYEDGIPGTEAMNGCMICLAAEYPAVKFCKVKSSVIGASSQFTRNALPALLIYKGGELIGNFVRVTDQLGDDFFAVDLEAFLQEFGLLPEKEVLVLTSVRNSATCHSEDSDLEID

SEQ ID NO: 62407 - protein, 109 aa, Homo sapiens
  Payload ID: 12471
  Gene Symbol: PDCL
  Gene Name: phosducin-like
  ENSP ID: ENSP00000377826
  MOD_RES (1)..(1): Any amino acid
XLQYYYSSSEDEDSDHEDKDRGRCAPASSSVPAEAELAGEGISVNTGPKGVINDWRRFKQLETEQREEQCREMERLIKKLSMTCRSHLDEEEEQQKQKDLQEKISGKER

SEQ ID NO: 62408 - protein, 91 aa, Homo sapiens
  Payload ID: 12471
  Gene Symbol: PDCL
  Gene Name: phosducin-like
  ENSP ID: ENSP00000397984
  MOD_RES (1)..(1): Any amino acid
XCAPASSSVPAEAELAGEGISVNTGPKGVINDWRRFKQLETEQREEQCREMERLIKKLSMTCRSHLDEEEEQQKQKDLQEKISGKKSWAIL

SEQ ID NO: 62409 - protein, 241 aa, Homo sapiens
  Payload ID: 12472
  Gene Symbol: PDCL2
  Gene Name: phosducin-like 2
  Uniprot ID: Q8N4E4
  ENSP ID: ENSP00000295645
MQDPNEDTEWNDILRDFGILPPKEESKDEIEEMVLRLQKEAMVKPFEKMTLAQLKEAEDEFDEEDMQAVETYRKKRLQEWKALKKKQKFGELREISGNQYVNEVTNAEEDVWVIIHLYRSSIPMCLLVNQHLSLLARKFPETKFVKAIVNSCIQHYHDNCLPTIFVYKNGQIEAKFIGIIECGGINLKLEELEWKLAEVGAIQTDLEENPRKDMVDMMVSSIRNTSIHDDSDSSNSDNDTK

SEQ ID NO: 62410 - protein, 250 aa, Homo sapiens
  Payload ID: 12472
  Gene Symbol: PDCL2
  Gene Name: phosducin-like 2
  ENSP ID: ENSP00000480111
MQDPNEDTEWNDILRDFGILPPKEESKDEIEEMVLRLQKEAMVKPFEKMTLAQLKEAEDEFDEEDMQAVETYRKKRLQEWKALKKKQKFGELREISGNQYVNEVTNAEEDVWVIIHLYRSSIPMCLLVNQHLSLLARKFPETKFVKAIVNSCIQHYHDNCLPTIFVYKNGQIEAKFIGIIECGGINLKLEELEWKLAEVGAIQTDLEENPRKDMVDMMVSSIRNTSIHDDSDSSNSDNDPNREKYSINSF

SEQ ID NO: 62411 - protein, 239 aa, Homo sapiens
  Payload ID: 12473
  Gene Symbol: PDCL3
  Gene Name: phosducin-like 3
  Uniprot ID: Q9H2J4
  ENSP ID: ENSP00000264254
MQDPNADTEWNDILRKKGILPPKESLKELEEEAEEEQRILQQSVVKTYEDMTLEELEDHEDEFNEEDERAIEMYRRRRLAEWKATKLKNKFGEVLEISGKDYVQEVTKAGEGLWVILHLYKQGIPLCALINQHLSGLARKFPDVKFIKAISTTCIPNYPDRNLPTIFVYLEGDIKAQFIGPLVFGGMNLTRDELEWKLSESGAIMTDLEENPKKPIEDVLLSSVRRSVLMKRDSDSEGD

SEQ ID NO: 62412 - protein, 150 aa, Homo sapiens
  Payload ID: 12473
  Gene Symbol: PDCL3
  Gene Name: phosducin-like 3
  ENSP ID: ENSP00000390585
  MOD_RES (1)..(1): Any amino acid
XEELEDHEDEFNEEDERAIEMYRRRRLAEWKATKLKNKFGEVLEISGKDYVQEVTKAGEGLWVILHLYKQGIPLCALINQHLSGLARKFPDVKFIKAISTTCIPNYPDRNLPTIFVYLEGDIKAQFIGPLVFGGMNLTRDGKGSGRQAGQ

SEQ ID NO: 62413 - protein, 87 aa, Homo sapiens
  Payload ID: 12473
  Gene Symbol: PDCL3
  Gene Name: phosducin-like 3
  ENSP ID: ENSP00000413936
MTLEELEDHEDEFNEEDERAIEMYRRRRLAEWKATKLKNKFGEVLEISGKDYVQEVTKAGEGLWVILHLYKQGIPLCALINQHLSGL

SEQ ID NO: 62414 - protein, 580 aa, Homo sapiens; identical to SEQ ID NO: 62216
  Payload ID: 12474
  Gene Symbol: PHACTR1
  Gene Name: phosphatase and actin regulator 1
  Uniprot ID: Q9C0D0
  ENSP ID: ENSP00000329880

SEQ ID NO: 62415 - protein, 140 aa, Homo sapiens; identical to SEQ ID NO: 62214
  Payload ID: 12474
  Gene Symbol: PHACTR1
  Gene Name: phosphatase and actin regulator 1
  ENSP ID: ENSP00000368633

SEQ ID NO: 62416 - protein, 144 aa, Homo sapiens; identical to SEQ ID NO: 62211
  Payload ID: 12474
  Gene Symbol: PHACTR1
  Gene Name: phosphatase and actin regulator 1
  ENSP ID: ENSP00000368639

SEQ ID NO: 62417 - protein, 169 aa, Homo sapiens; identical to SEQ ID NO: 62217
  Payload ID: 12474
  Gene Symbol: PHACTR1
  Gene Name: phosphatase and actin regulator 1
  ENSP ID: ENSP00000368653

SEQ ID NO: 62418 - protein, 484 aa, Homo sapiens; identical to SEQ ID NO: 62213
  Payload ID: 12474
  Gene Symbol: PHACTR1
  Gene Name: phosphatase and actin regulator 1
  Uniprot ID: Q9C0D0
  ENSP ID: ENSP00000368655

SEQ ID NO: 62419 - protein, 264 aa, Homo sapiens; identical to SEQ ID NO: 62212
  Payload ID: 12474
  Gene Symbol: PHACTR1
  Gene Name: phosphatase and actin regulator 1
  ENSP ID: ENSP00000384760
  MOD_RES (1)..(1): Any amino acid

SEQ ID NO: 62420 - protein, 488 aa, Homo sapiens; identical to SEQ ID NO: 62215
  Payload ID: 12474
  Gene Symbol: PHACTR1
  Gene Name: phosphatase and actin regulator 1
  ENSP ID: ENSP00000395948

SEQ ID NO: 62421 - protein, 230 aa, Homo sapiens; identical to SEQ ID NO: 62210
  Payload ID: 12474
  Gene Symbol: PHACTR1
  Gene Name: phosphatase and actin regulator 1
  ENSP ID: ENSP00000412573

SEQ ID NO: 62422 - protein, 554 aa, Homo sapiens
  Payload ID: 12475
  Gene Symbol: PHACTR2
  Gene Name: phosphatase and actin regulator 2
  Uniprot ID: O75167
  ENSP ID: ENSP00000305530
MDNAVDGLDKASIANSDGPTAGSQTPPFKRKGKLSTIGKIFKPWKWRKKKTSDKFRETSAVLERKISTRQSREELIRRGVLKELPDQDGDVTVNFENSNGHMIPIGEESTREENVVKSEEGNGSVSEKTPPLEEQAEDKKAGSSHSKKTTGSKASASPSTSSTSSRPKASKETVSSKAGTVGTTKGKRKTDKQPITSHLSSDTTTSGTSDLKGEPAETRVESFKLEQTVPGAEEQNTGKFKSMVPPPPVAPAPSPLAPPLPLEDQCITASDTPVVLVSVGADLPVSALDPSQLLWAEEPTNRTTLYSGTGLSVNRENAKCFTTKEELGKTVPQLLTPGLMGESSESFSASEDEGHREYQANDSDSDGPILYTDDEDEDEDEDGSGESALASKIRRRDTLAIKLGNRPSKKELEDKNILQRTSEEERQEIRQQIGTKLVRRLSQRPTTEELEQRNILKQKNEEEEQEAKMELKRRLSRKLSLRPTVAELQARRILRFNEYVEVTDSPDYDRRADKPWARLTPADKAAIRKELNEFKSTEMEVHEESRQFTRFHRP

SEQ ID NO: 62423 - protein, 565 aa, Homo sapiens
  Payload ID: 12475
  Gene Symbol: PHACTR2
  Gene Name: phosphatase and actin regulator 2
  Uniprot ID: O75167
  ENSP ID: ENSP00000356554
MGQTSVSTLSPQPGSVDGLDKASIANSDGPTAGSQTPPFKRKGKLSTIGKIFKPWKWRKKKTSDKFRETSAVLERKISTRQSREELIRRGVLKELPDQDGDVTVNFENSNGHMIPIGEESTREENVVKSEEGNGSVSEKTPPLEEQAEDKKAGSSHSKKTTGSKASASPSTSSTSSRPKASKETVSSKAGTVGTTKGKRKTDKQPITSHLSSDTTTSGTSDLKGEPAETRVESFKLEQTVPGAEEQNTGKFKSMVPPPPVAPAPSPLAPPLPLEDQCITASDTPVVLVSVGADLPVSALDPSQLLWAEEPTNRTTLYSGTGLSVNRENAKCFTTKEELGKTVPQLLTPGLMGESSESFSASEDEGHREYQANDSDSDGPILYTDDEDEDEDEDGSGESALASKIRRRDTLAIKLGNRPSKKELEDKNILQRTSEEERQEIRQQIGTKLVRRLSQRPTTEELEQRNILKQKNEEEEQEAKMELKRRLSRKLSLRPTVAELQARRILRFNEYVEVTDSPDYDRRADKPWARLTPADKAAIRKELNEFKSTEMEVHEESRQFTRFHRP

SEQ ID NO: 62424 - protein, 622 aa, Homo sapiens
  Payload ID: 12475
  Gene Symbol: PHACTR2
  Gene Name: phosphatase and actin regulator 2
  ENSP ID: ENSP00000356556
MAEAGWRPAASPVDPAGQAAAVPVPEPEAPAPPAAPALRWLPGDPSPRGRSQSDLSSSSSRGRPLRVHISGSVDGLDKASIANSDGPTAGSQTPPFKRKGKLSTIGKIFKPWKWRKKKTSDKFRETSAVLERKISTRQSREELIRRGVLKELPDQDGDVTVNFENSNGHMIPIGEESTREENVVKSEEGNGSVSEKTPPLEEQAEDKKAGSSHSKKTTGSKASASPSTSSTSSRPKASKETVSSKAGTVGTTKGKRKTDKQPITSHLSSDTTTSGTSDLKGEPAETRVESFKLEQTVPGAEEQNTGKFKSMVPPPPVAPAPSPLAPPLPLEDQCITASDTPVVLVSVGADLPVSALDPSQLLWAEEPTNRTTLYSGTGLSVNRENAKCFTTKEELGKTVPQLLTPGLMGESSESFSASEDEGHREYQANDSDSDGPILYTDDEDEDEDEDGSGESALASKIRRRDTLAIKLGNRPSKKELEDKNILQRTSEEERQEIRQQIGTKLVRRLSQRPTTEELEQRNILKQKNEEEEQEAKMELKRRLSRKLSLRPTVAELQARRILRFNEYVEVTDSPDYDRRADKPWARLTPADKAAIRKELNEFKSTEMEVHEESRQFTRFHRP

SEQ ID NO: 62425 - protein, 153 aa, Homo sapiens
  Payload ID: 12475
  Gene Symbol: PHACTR2
  Gene Name: phosphatase and actin regulator 2
  ENSP ID: ENSP00000381067
MGQTSVSTLSPQPGSVDGLDKASIANSDGPTAGSQTPPFKRKGKLSTIGKIFKPWKWRKKKTSDKFRETSAVLERKISTRQSREELIRRGVLKELPDQDGDVTVNFENSNGHMIPIGEESTREENVVKSEEGNGSVSEKTPPLEEQAEDKKDC

SEQ ID NO: 62426 - protein, 634 aa, Homo sapiens
  Payload ID: 12475
  Gene Symbol: PHACTR2
  Gene Name: phosphatase and actin regulator 2
  Uniprot ID: O75167
  ENSP ID: ENSP00000391763
MDNAVDGLDKASIANSDGPTAGSQTPPFKRKGKLSTIGKIFKPWKWRKKKTSDKFRETSAVLERKISTRQSREELIRRGVLKELPDQDGDVTVNFENSNGHMIPIGEESTREENVVKSEEGNGSVSEKTPPLEEQAEDKKENTENHSETPAAPALPPSAPPKPRPKPKPKKSPVPPKGATAGASHKGDEVPPIKKNTKAPGKQAPVPPPKPASRNTTREAAGSSHSKKTTGSKASASPSTSSTSSRPKASKETVSSKAGTVGTTKGKRKTDKQPITSHLSSDTTTSGTSDLKGEPAETRVESFKLEQTVPGAEEQNTGKFKSMVPPPPVAPAPSPLAPPLPLEDQCITASDTPVVLVSVGADLPVSALDPSQLLWAEEPTNRTTLYSGTGLSVNRENAKCFTTKEELGKTVPQLLTPGLMGESSESFSASEDEGHREYQANDSDSDGPILYTDDEDEDEDEDGSGESALASKIRRRDTLAIKLGNRPSKKELEDKNILQRTSEEERQEIRQQIGTKLVRRLSQRPTTEELEQRNILKQKNEEEEQEAKMELKRRLSRKLSLRPTVAELQARRILRFNEYVEVTDSPDYDRRADKPWARLTPADKAAIRKELNEFKSTEMEVHEESRQFTRFHRP

SEQ ID NO: 62427 - protein, 178 aa, Homo sapiens
  Payload ID: 12475
  Gene Symbol: PHACTR2
  Gene Name: phosphatase and actin regulator 2
  ENSP ID: ENSP00000402449
MGQTSVSTLSPQPGSVDGLDKASIANSDGPTAGSQTPPFKRKGKLSTIGKIFKPWKWRKKKTSDKFRETSAVLERKISTRQSREELIRRGVLKELPDQAGSSHSKKTTGSKASASPSTSSTSSRPKASKETVSSKAGTVGTTKGKRKTDKQPITSHLSSDTTTSGTSDLKGEPAETRV

SEQ ID NO: 62428 - protein, 645 aa, Homo sapiens
  Payload ID: 12475
  Gene Symbol: PHACTR2
  Gene Name: phosphatase and actin regulator 2
  Uniprot ID: O75167
  ENSP ID: ENSP00000417038
MGQTSVSTLSPQPGSVDGLDKASIANSDGPTAGSQTPPFKRKGKLSTIGKIFKPWKWRKKKTSDKFRETSAVLERKISTRQSREELIRRGVLKELPDQDGDVTVNFENSNGHMIPIGEESTREENVVKSEEGNGSVSEKTPPLEEQAEDKKENTENHSETPAAPALPPSAPPKPRPKPKPKKSPVPPKGATAGASHKGDEVPPIKKNTKAPGKQAPVPPPKPASRNTTREAAGSSHSKKTTGSKASASPSTSSTSSRPKASKETVSSKAGTVGTTKGKRKTDKQPITSHLSSDTTTSGTSDLKGEPAETRVESFKLEQTVPGAEEQNTGKFKSMVPPPPVAPAPSPLAPPLPLEDQCITASDTPVVLVSVGADLPVSALDPSQLLWAEEPTNRTTLYSGTGLSVNRENAKCFTTKEELGKTVPQLLTPGLMGESSESFSASEDEGHREYQANDSDSDGPILYTDDEDEDEDEDGSGESALASKIRRRDTLAIKLGNRPSKKELEDKNILQRTSEEERQEIRQQIGTKLVRRLSQRPTTEELEQRNILKQKNEEEEQEAKMELKRRLSRKLSLRPTVAELQARRILRFNEYVEVTDSPDYDRRADKPWARLTPADKAAIRKELNEFKSTEMEVHEESRQFTRFHRP

SEQ ID NO: 62429 - protein, 166 aa, Homo sapiens
  Payload ID: 12475
  Gene Symbol: PHACTR2
  Gene Name: phosphatase and actin regulator 2
  ENSP ID: ENSP00000442153
MGQTSVSTLSPQPGSVLERKISTRQSREELIRRGVLKELPDQDGDVTVNFENSNGHMIPIGEESTREENVVKSEEGNGSVSEKTPPLEEQAEDKKAGSSHSKKTTGSKASASPSTSSTSSRPKASKETVSSKAGTVGTTKGKRKTDKQPITSHLSSDTTTSGTSDL

SEQ ID NO: 62430 - protein, 518 aa, Homo sapiens
  Payload ID: 12476
  Gene Symbol: PHACTR3
  Gene Name: phosphatase and actin regulator 3
  Uniprot ID: Q96KR7
  ENSP ID: ENSP00000347866
MDQTPPARPEYLVSGIRTPPVRRNSKLATLGRIFKPWKWRKKKNEKLKQTTSALEKKMAGRQGREELIKKGLLEMMEQDAESKTCNPDGGPRSVQSEPPTPKSETLTSEDAQPGSPLATGTDQVSLDKPLSSAAHLDDAAKMPSASSGEEADAGSLLPTTNELSQALAGADSLDSPPRPLERSVGQLPSPPLLPTPPPKASSKTTKNVTGQATLFQASSMKSADPSLRGQLSTPTGSPHLTTVHRPLPPSRVIEELHRALATKHRQDSFQGRESKGSPKKRLDVRLSRTSSVERGKEREEAWSFDGALENKRTAAKESEENKENLIINSELKDDLLLYQDEEALNDSIISGTLPRKCKKELLAVKLRNRPSKQELEDRNIFPRRTDEERQEIRQQIEMKLSKRLSQRPAVEELERRNILKQRNDQTEQEERREIKQRLTRKLNQRPTVDELRDRKILIRFSDYVEVAKAQDYDRRADKPWTRLSAADKAAIRKELNEYKSNEMEVHASSKHLTRFHRP

SEQ ID NO: 62431 - protein, 556 aa, Homo sapiens
  Payload ID: 12476
  Gene Symbol: PHACTR3
  Gene Name: phosphatase and actin regulator 3
  Uniprot ID: Q96KR7
  ENSP ID: ENSP00000353002
MRGRGGGRARCPAPLRSLLGAFGARDAAAAARDPAQDEMDQTPPARPEYLVSGIRTPPVRRNSKLATLGRIFKPWKWRKKKNEKLKQTTSALEKKMAGRQGREELIKKGLLEMMEQDAESKTCNPDGGPRSVQSEPPTPKSETLTSEDAQPGSPLATGTDQVSLDKPLSSAAHLDDAAKMPSASSGEEADAGSLLPTTNELSQALAGADSLDSPPRPLERSVGQLPSPPLLPTPPPKASSKTTKNVTGQATLFQASSMKSADPSLRGQLSTPTGSPHLTTVHRPLPPSRVIEELHRALATKHRQDSFQGRESKGSPKKRLDVRLSRTSSVERGKEREEAWSFDGALENKRTAAKESEENKENLIINSELKDDLLLYQDEEALNDSIISGTLPRKCKKELLAVKLRNRPSKQELEDRNIFPRRTDEERQEIRQQIEMKLSKRLSQRPAVEELERRNILKQRNDQTEQEERREIKQRLTRKLNQRPTVDELRDRKILIRFSDYVEVAKAQDYDRRADKPWTRLSAADKAAIRKELNEYKSNEMEVHASSKHLTRFHRP

SEQ ID NO: 62432 - protein, 448 aa, Homo sapiens
  Payload ID: 12476
  Gene Symbol: PHACTR3
  Gene Name: phosphatase and actin regulator 3
  Uniprot ID: Q96KR7
  ENSP ID: ENSP00000354555
MDQTPPARPEYLVSGIRTPPVRRNSKLATLGRIFKPWKWRKKKNEKLKQTTSALEKKMAGRQGREELIKKGLLEMMEQDAESKTCNPDGGPRSVQSEPPTPKSETLTSEDAQPGSPLATGTDQVSLDKPLSSAAHLDDAGQATLFQASSMKSADPSLRGQLSTPTGSPHLTTVHRPLPPSRVIEELHRALATKHRQDSFQGRESKGSPKKRLDVRLSRTSSVERGKEREEAWSFDGALENKRTAAKESEENKENLIINSELKDDLLLYQDEEALNDSIISGTLPRKCKKELLAVKLRNRPSKQELEDRNIFPRRTDEERQEIRQQIEMKLSKRLSQRPAVEELERRNILKQRNDQTEQEERREIKQRLTRKLNQRPTVDELRDRKILIRFSDYVEVAKAQDYDRRADKPWTRLSAADKAAIRKELNEYKSNEMEVHASSKHLTRFHRP

SEQ ID NO: 62433 - protein, 559 aa, Homo sapiens
  Payload ID: 12476
  Gene Symbol: PHACTR3
  Gene Name: phosphatase and actin regulator 3
  Uniprot ID: Q96KR7
  ENSP ID: ENSP00000360054
MAASEDGSGCLVSRGRSQSDPSVLTDSSATSSADAGENPDEMDQTPPARPEYLVSGIRTPPVRRNSKLATLGRIFKPWKWRKKKNEKLKQTTSALEKKMAGRQGREELIKKGLLEMMEQDAESKTCNPDGGPRSVQSEPPTPKSETLTSEDAQPGSPLATGTDQVSLDKPLSSAAHLDDAAKMPSASSGEEADAGSLLPTTNELSQALAGADSLDSPPRPLERSVGQLPSPPLLPTPPPKASSKTTKNVTGQATLFQASSMKSADPSLRGQLSTPTGSPHLTTVHRPLPPSRVIEELHRALATKHRQDSFQGRESKGSPKKRLDVRLSRTSSVERGKEREEAWSFDGALENKRTAAKESEENKENLIINSELKDDLLLYQDEEALNDSIISGTLPRKCKKELLAVKLRNRPSKQELEDRNIFPRRTDEERQEIRQQIEMKLSKRLSQRPAVEELERRNILKQRNDQTEQEERREIKQRLTRKLNQRPTVDELRDRKILIRFSDYVEVAKAQDYDRRADKPWTRLSAADKAAIRKELNEYKSNEMEVHASSKHLTRFHRP

SEQ ID NO: 62434 - protein, 518 aa, Homo sapiens; identical to SEQ ID NO: 62430
  Payload ID: 12476
  Gene Symbol: PHACTR3
  Gene Name: phosphatase and actin regulator 3
  Uniprot ID: Q96KR7
  ENSP ID: ENSP00000378998

SEQ ID NO: 62435 - protein, 41 aa, Homo sapiens
  Payload ID: 12476
  Gene Symbol: PHACTR3
  Gene Name: phosphatase and actin regulator 3
  ENSP ID: ENSP00000390915
MAASEDGSGCLVSRGRSQSDPSVLTDSSATSSADAGENPDE

SEQ ID NO: 62436 - protein, 518 aa, Homo sapiens; identical to SEQ ID NO: 62430
  Payload ID: 12476
  Gene Symbol: PHACTR3
  Gene Name: phosphatase and actin regulator 3
  Uniprot ID: Q96KR7
  ENSP ID: ENSP00000442483

SEQ ID NO: 62437 - protein, 712 aa, Homo sapiens
  Payload ID: 12477
  Gene Symbol: PHACTR4
  Gene Name: phosphatase and actin regulator 4
  Uniprot ID: Q8IZ21
  ENSP ID: ENSP00000362942
MGQADVSRPVNPDAVEEADQPTTEPGMVLDSVEAGDTTPPTKRKSKFSGFGKIFKPWKWRKKKSSDKFKETSEVLERKISMRKPREELVKRGVLLEDPEQGGEDPGKPSDAMLKNGHTTPIGNARSSSPVQVEEEPVRLASLRKAIPEEDLKKRLGSTGSQPNSEAESVPENVPKPPLLPPKRPLSSSHEASEGQAKDATSSGGTARFIISTSITTAPAATTAATSLAKTVNLSVTPSPAPRTLPAAPASTNTTATPSLTHMVPAKQPPIPPPKPAHRNSNPVIAELSQAINSGTLLSKPSPPLPPKRGIPSTSVPTLESAAAITTKTPSDEREKSTCSMGSELLPMISPRSPSPPLPTHIPPEPPRTPPFPAKTFQVVPEIEFPPSLDLHQEIPQQEDQKKEVPKRILDQNFGEPHIPSRLPPLPLHIRIQQALTSPLPMTPILEGSHRAHSLLFENSDSFSEDSSTLGRTRSLPITIEMLKVPDDEEEEEQTCPSTFSEEMTPTSVIPKLPQCLREEEEKESDSDSEGPIQYRDEEDEDESYQSALANKVKRKDTLAMKLNHRPSEPELNLNSWPCKSKEEWNEIRHQIGNTLIRRLSQRPTPEELEQRNILQPKNEADRQAEKREIKRRLTRKLSQRPTVAELLARKILRFNEYVEVTDAQDYDRRADKPWTKLTPADKAAIRKELNEFKSSEMEVHEESKHFTRYHRP

SEQ ID NO: 62438 - protein, 702 aa, Homo sapiens
  Payload ID: 12477
  Gene Symbol: PHACTR4
  Gene Name: phosphatase and actin regulator 4
  Uniprot ID: Q8IZ21
  ENSP ID: ENSP00000362945
MEDPFEEADQPTTEPGMVLDSVEAGDTTPPTKRKSKFSGFGKIFKPWKWRKKKSSDKFKETSEVLERKISMRKPREELVKRGVLLEDPEQGGEDPGKPSDAMLKNGHTTPIGNARSSSPVQVEEEPVRLASLRKAIPEEDLKKRLGSTGSQPNSEAESVPENVPKPPLLPPKRPLSSSHEASEGQAKDATSSGGTARFIISTSITTAPAATTAATSLAKTVNLSVTPSPAPRTLPAAPASTNTTATPSLTHMVPAKQPPIPPPKPAHRNSNPVIAELSQAINSGTLLSKPSPPLPPKRGIPSTSVPTLESAAAITTKTPSDEREKSTCSMGSELLPMISPRSPSPPLPTHIPPEPPRTPPFPAKTFQVVPEIEFPPSLDLHQEIPQQEDQKKEVPKRILDQNFGEPHIPSRLPPLPLHIRIQQALTSPLPMTPILEGSHRAHSLLFENSDSFSEDSSTLGRTRSLPITIEMLKVPDDEEEEEQTCPSTFSEEMTPTSVIPKLPQCLREEEEKESDSDSEGPIQYRDEEDEDESYQSALANKVKRKDTLAMKLNHRPSEPELNLNSWPCKSKEEWNEIRHQIGNTLIRRLSQRPTPEELEQRNILQPKNEADRQAEKREIKRRLTRKLSQRPTVAELLARKILRFNEYVEVTDAQDYDRRADKPWTKLTPADKAAIRKELNEFKSSEMEVHEESKHFTRYHRP

SEQ ID NO: 62439 - protein, 221 aa, Homo sapiens
  Payload ID: 12477
  Gene Symbol: PHACTR4
  Gene Name: phosphatase and actin regulator 4
  ENSP ID: ENSP00000487630
MEDPFDFSREPWNKEADQPTTEPGMVLDSVEAGDTTPPTKRKSKFSGFGKIFKPWKWRKKKSSDKFKETSEVLERKISMRKPREELVKRGVLLEDPEQGGEDPGKPSDAMLKNGHTTPIGNARSSSPVQVEEEPVRLASLRKAIPEEDLKKRLGSTGSQPNSEAESVPENVPKPPLLPPKRPLSSSHEASEGQAKDATSSGGTARFIISTSITTAPAATTA

SEQ ID NO: 62440 - protein, 106 aa, Homo sapiens
  Payload ID: 12477
  Gene Symbol: PHACTR4
  Gene Name: phosphatase and actin regulator 4
  ENSP ID: ENSP00000488137
MGQADVSRPVNPDAVDFSREPWNKEADQPTTEPGMVLDSVEAGDTTPPTKRKSKFSGFGKIFKPWKWRKKKSSDKFKETSEVLERKISMRKPREELVKRGVLLEDP

SEQ ID NO: 62441 - protein, 63 aa, Homo sapiens
  Payload ID: 12477
  Gene Symbol: PHACTR4
  Gene Name: phosphatase and actin regulator 4
  Uniprot ID: Q8IZ21
  ENSP ID: ENSP00000488359
MEDPFDFSREPWNSRGSRPAHYRARHGPGQCGSRRHNTSYQKEEQVLRLWQDLQALEMEEKKK

SEQ ID NO: 62442 - protein, 41 aa, Homo sapiens
  Payload ID: 12477
  Gene Symbol: PHACTR4
  Gene Name: phosphatase and actin regulator 4
  ENSP ID: ENSP00000488693
MEDPFEMGFYHVTQAGLELLDSSNPRLASQSAGIRGVSHCT

SEQ ID NO: 62443 - protein, 403 aa, Homo sapiens [sequence omitted]

SEQ ID NO: 62444 - protein, 156 aa, Homo sapiens
  Payload ID: 12478
  Gene Symbol: PTEN
  Gene Name: phosphatase and tensin homolog
  ENSP ID: ENSP00000477517
MGFPAERLEGVYRNNIDDVVRFLDSKHKNHYKIYNLCAERHYDTAKFNCRVAQYPFEDHNPPQLELIKPFCEDLDQWLSEDDNHVAAIHCKAGKGRTGVMICAYLLHRGKFLKAQEALDFYGEVRTRDKKADPTGGIPDKGIIVIGDGSSMDVIAP

SEQ ID NO: 62445 - protein, 153 aa, Homo sapiens
  Payload ID: 12478
  Gene Symbol: PTEN
  Gene Name: phosphatase and tensin homolog
  ENSP ID: ENSP00000483066
ALLFHKMMFETIPMFSGGTCNPQFVVCQLKVKIYSSNSGPTRREDKFMYFEFPQPLPVCGDIKVEFFHKQNKMLKKDKMFHFWVNTFFIPGPEETSEKVENGSLCDQEIDSICSIERADNDKEYLVLTLTKNDLDKANKDKANRYFSPNFKVS

SEQ ID NO: 62446 - protein, 856 aa, Homo sapiens
  Payload ID: 12479
  Gene Symbol: PALD1
  Gene Name: phosphatase domain containing, paladin 1
  Uniprot ID: Q9ULE6
  ENSP ID: ENSP00000263563
MGTTASTAQQTVSAGTPFEGLQGSGTMDSRHSVSIHSFQSTSLHNSKAKSIIPNKVAPVVITYNCKEEFQIHDELLKAHYTLGRLSDNTPEHYLVQGRYFLVRDVTEKMDVLGTVGSCGAPNFRQVQGGLTVFGMGQPSLSGFRRVLQKLQKDGHRECVIFCVREEPVLFLRADEDFVSYTPRDKQNLHENLQGLGPGVRVESLELAIRKEIHDFAQLSENTYHVYHNTEDLWGEPHAVAIHGEDDLHVTEEVYKRPLFLQPTYRYHRLPLPEQGSPLEAQLDAFVSVLRETPSLLQLRDAHGPPPALVFSCQMGVGRTNLGMVLGTLILLHRSGTTSQPEAAPTQAKPLPMEQFQVIQSFLRMVPQGRRMVEEVDRAITACAELHDLKEVVLENQKKLEGIRPESPAQGSGSRHSVWQRALWSLERYFYLILFNYYLHEQYPLAFALSFSRWLCAHPELYRLPVTLSSAGPVAPRDLIARGSLREDDLVSPDALSTVREMDVANFRRVPRMPIYGTAQPSAKALGSILAYLTDAKRRLRKVVWVSLREEAVLECDGHTYSLRWPGPPVAPDQLETLEAQLKAHLSEPPPGKEGPLTYRFQTCLTMQEVFSQHRRACPGLTYHRIPMPDFCAPREEDFDQLLEALRAALSKDPGTGFVFSCLSGQGRTTTAMVVAVLAFWHIQGFPEVGEEELVSVPDAKFTKGEFQVVMKVVQLLPDGHRVKKEVDAALDTVSETMTPMHYHLREIIICTYRQAKAAKEAQEMRRLQLRSLQYLERYVCLILFNAYLHLEKADSWQRPFSTWMQEVASKAGIYEILNELGFPELESGEDQPFSRLRYRWQEQSCSLEPSAPEDLL

SEQ ID NO: 62447 - protein, 267 aa, Homo sapiens
  Payload ID: 12480
  Gene Symbol: PHOSPHO1
  Gene Name: phosphatase, orphan 1
  Uniprot ID: Q8TCT1
  ENSP ID: ENSP00000311925
MSGCFPVSGLRCLSRDGRMAAQGAPRFLLTFDFDETIVDENSDDSIVRAAPGQRLPESLRATYREGFYNEYMQRVFKYLGEQGVRPRDLSAIYEAIPLSPGMSDLLQFVAKQGACFEVILISDANTFGVESSLRAAGHHSLFRRILSNPSGPDARGLLALRPFHTHSCARCPANMCKHKVLSDYLRERAHDGVHFERLFYVGDGANDFCPMGLLAGGDVAFPRRGYPMHRLIQEAQKAEPSSFRASVVPWETAADVRLHLQQVLKSC

SEQ ID NO: 62448 - protein, 292 aa, Homo sapiens
  Payload ID: 12480
  Gene Symbol: PHOSPHO1
  Gene Name: phosphatase, orphan 1
  Uniprot ID: Q8TCT1
  ENSP ID: ENSP00000406909
MCQRLWPWPANQPLPGGLLPRPLSLAPSSSSSCCSPPCSQDGRMAAQGAPRFLLTFDFDETIVDENSDDSIVRAAPGQRLPESLRATYREGFYNEYMQRVFKYLGEQGVRPRDLSAIYEAIPLSPGMSDLLQFVAKQGACFEVILISDANTFGVESSLRAAGHHSLFRRILSNPSGPDARGLLALRPFHTHSCARCPANMCKHKVLSDYLRERAHDGVHFERLFYVGDGANDFCPMGLLAGGDVAFPRRGYPMHRLIQEAQKAEPSSFRASVVPWETAADVRLHLQQVLKSC

SEQ ID NO: 62449 - protein, 166 aa, Homo sapiens
  Payload ID: 12480
  Gene Symbol: PHOSPHO1
  Gene Name: phosphatase, orphan 1
  ENSP ID: ENSP00000424406
MSGCFPVSGLRCLSRVCHGLVREALTSPSPTASPAARLLRTLAETPPADTFLLGNWCWMCQRLWPWPANQPLPGGLLPRPLSLAPSSSSSCCSPPCSQDGRMAAQGAPRFLLTFDFDETIVDENSDDSIVRAAPGQRLPESLRATYREGFYNEYMQRVFKYLGEQG

SEQ ID NO: 62450 - protein, 203 aa, Homo sapiens
  Payload ID: 12480
  Gene Symbol: PHOSPHO1
  Gene Name: phosphatase, orphan 1
  ENSP ID: ENSP00000426095
MSGCFPVSGLRCLSRDGRMAAQGAPRFLLTFDFDETIVDENSDDSIVRAAPGQRLPESLRATYREGFYNEYMQRVFKYLGEQGVRPRDLSAIYEAIPLSPGMSDLLQFVAKQGACFEVILISDANTFGVESSLRAAGHHSLFRRILSNPSGPDARGLLALRPFHTHSCARCPANMCKHKVLSDYLRERAHDGVHFERLFYVGD

SEQ ID NO: 62451 - protein, 111 aa, Homo sapiens
  Payload ID: 12480
  Gene Symbol: PHOSPHO1
  Gene Name: phosphatase, orphan 1
  ENSP ID: ENSP00000427397
MCQRLWPWPANQPLPGGLLPRPLSLAPSSSSSCCSPPCSQDGRMAAQGAPRFLLTFDFDETIVDENSDDSIVRAAPGQRLPESLRATYREGFYNEYMQRVFKYLGEQGVRP

SEQ ID NO: 62452 - protein, 292 aa, Homo sapiens; identical to SEQ ID NO: 62448
  Payload ID: 12480
  Gene Symbol: PHOSPHO1
  Gene Name: phosphatase, orphan 1
  Uniprot ID: Q8TCT1
  ENSP ID: ENSP00000427694

SEQ ID NO: 62453 - protein, 86 aa, Homo sapiens
  Payload ID: 12480
  Gene Symbol: PHOSPHO1
  Gene Name: phosphatase, orphan 1
  ENSP ID: ENSP00000461392
MSGCFPVSGLRCLSRDGRMAAQGAPRFLLTFDFDETIVDENSDDSIVRAAPGQRLPESLRATYREGFYNEYMQRVFKYLGEQGVRP

SEQ ID NO: 62454 - protein, 241 aa, Homo sapiens
  Payload ID: 12481
  Gene Symbol: PHOSPHO2
  Gene Name: phosphatase, orphan 2
  Uniprot ID: Q8TCD6
  ENSP ID: ENSP00000352782
MKILLVFDFDNTIIDDNSDTWIVQCAPNKKLPIELRDSYRKGFWTEFMGRVFKYLGDKGVREHEMKRAVTSLPFTPGMVELFNFIRKNKDKFDCIIISDSNSVFIDWVLEAASFHDIFDKVFTNPAAFNSNGHLTVENYHTHSCNRCPKNLCKKVVLIEFVDKQLQQGVNYTQIVYIGDGGNDVCPVTFLKNDDVAMPRKGYTLQKTLSRMSQNLEPMEYSVVVWSSGVDIISHLQFLIKD

SEQ ID NO: 62455 - protein, 55 aa, Homo sapiens
  Payload ID: 12481
  Gene Symbol: PHOSPHO2
  Gene Name: phosphatase, orphan 2
  ENSP ID: ENSP00000393983
MKILLVFDFDNTIIDDNSDTWIVQCAPNKKLPIELRDSYRKGFWTEFMGRVFKYL

SEQ ID NO: 62456 - protein, 135 aa, Homo sapiens
  Payload ID: 12481
  Gene Symbol: PHOSPHO2
  Gene Name: phosphatase, orphan 2
  ENSP ID: ENSP00000411844
MKILLVFDFDNTIIDDNSDTWIVQCAPNKKLPIELRDSYRKGFWTEFMGRVFKYLGDKGVREHEMKRAVTSLPFTPGMVELFNFIRKNKDKFDCIIISDSNSVFIDWVLEAASFHDIFDKVFTNPAAFNSNGHLT

SEQ ID NO: 62457 - protein, 49 aa, Homo sapiens
  Payload ID: 12481
  Gene Symbol: PHOSPHO2
  Gene Name: phosphatase, orphan 2
  ENSP ID: ENSP00000416790
MKILLVFDFDNTIIDDNSDTWIVQCAPNKKLPIELRDSYRKGFWTEFMG

SEQ ID NO: 62458 - protein, 241 aa, Homo sapiens; identical to SEQ ID NO: 62454
  Payload ID: 12481
  Gene Symbol: PHOSPHO2
  Gene Name: phosphatase, orphan 2
  Uniprot ID: Q8TCD6
  ENSP ID: ENSP00000481046

SEQ ID NO: 62459 - protein, 241 aa, Homo sapiens; identical to SEQ ID NO: 62454
  Payload ID: 12481
  Gene Symbol: PHOSPHO2
  Gene Name: phosphatase, orphan 2
  Uniprot ID: Q8TCD6
  ENSP ID: ENSP00000481680

SEQ ID NO: 62460 - protein, 241 aa, Homo sapiens; identical to SEQ ID NO: 62454
  Payload ID: 12481
  Gene Symbol: PHOSPHO2
  Gene Name: phosphatase, orphan 2
  Uniprot ID: Q8TCD6
  ENSP ID: ENSP00000481857

SEQ ID NO: 62461 - protein, 367 aa, Homo sapiens
  Payload ID: 12482
  Gene Symbol: PCYT1A
  Gene Name: phosphate cytidylyltransferase 1, choline, alpha
  Uniprot ID: P49585
  ENSP ID: ENSP00000292823
MDAQCSAKVNARKRRKEAPGPNGATEEDGVPSKVQRCAVGLRQPAPFSDEIEVDFSKPYVRVTMEEASRGTPCERPVRVYADGIFDLFHSGHARALMQAKNLFPNTYLIVGVCSDELTHNFKGFTVMNENERYDAVQHCRYVDEVVRNAPWTLTPEFLAEHRIDFVAHDDIPYSSAGSDDVYKHIKEAGMFAPTQRTEGISTSDIITRIVRDYDVYARRNLQRGYTAKELNVSFINEKKYHLQERVDKVKKKVKDVEEKSKEFVQKVEEKSIDLIQKWEEKSREFIGSFLEMFGPEGALKHMLKEGKGRMLQAISPKQSPSSSPTRERSPSPSFRWPFSGKTSPPCSPANLSRHKAAAYDISEDEED

SEQ ID NO: 62462 - protein, 137 aa, Homo sapiens
  Payload ID: 12482
  Gene Symbol: PCYT1A
  Gene Name: phosphate cytidylyltransferase 1, choline, alpha
  ENSP ID: ENSP00000390458
NENERYDAVQHCRYVDEVVRNAPWTLTPEFLAEHRIDFVAHDDIPYSSAGSDDVYKHIKEAGMFAPTQRTEGISTSDIITRIVRDYDVYARRNLQRGYTAKELNVSFINAMSPPRVDSDTRHTTSHTDLSFKFGLTK

SEQ ID NO: 62463 - protein, 380 aa, Homo sapiens
  Payload ID: 12482
  Gene Symbol: PCYT1A
  Gene Name: phosphate cytidylyltransferase 1, choline, alpha
  ENSP ID: ENSP00000390968
MDAQCSAKVNARKRRKEAPGPNGATEEDGVPSKVQRCAVGLRQPAPFSDEIEVDFSKPYVRVTMEEASRGTPCERPVRVYADGIFDLFHSGHARALMQAKNLFPNTYLIVGVCSDELTHNFKGFTVMNENERYDAVQHCRYVDEVVRNAPWTLTPEFLAEHRIDFVAHDDIPYSSAGSDDVYKHIKEAGMFAPTQRTEGISTSDIITRIVRDYDVYARRNLQRGYTAKELNVSFINEKKYHLQERVDKVKKKVKDVEEKSKEFVQKVEEKSIDLIQKWEEKSREFIGSFLEMFGPEGALKHMLKEGKGRMLQAISPKQSPSSSPTRERSPSPSFRWPFSGKTSPPCSPANLSRHKAAAYDIRYSYLEQSKFGSHVLLTQV

SEQ ID NO: 62464 - protein, 90 aa, Homo sapiens
  Payload ID: 12482
  Gene Symbol: PCYT1A
  Gene Name: phosphate cytidylyltransferase 1, choline, alpha
  ENSP ID: ENSP00000391405
MDAQCSAKVNARKRRKEAPGPNGATEEDGVPSKVQRCAVSLQPLEATNLLSDSVDLPVLDIHTNDIIRAYGNQLLFLMKLKLTLVSPMSG

SEQ ID NO: 62465 - protein, 212 aa, Homo sapiens
  Payload ID: 12482
  Gene Symbol: PCYT1A
  Gene Name: phosphate cytidylyltransferase 1, choline, alpha
  ENSP ID: ENSP00000392397
MDAQCSAKVNARKRRKEAPGPNGATEEDGVPSKVQRCAVGLRQPAPFSDEIEVDFSKPYVRVTMEEASRGTPCERPVRVYADGIFDLFHSGHARALMQAKNLFPNTYLIVGVCSDELTHNFKGFTVMNENERYDAVQHCRYVDEVVRNAPWTLTPEFLAEHRGMNSIAFVCRKPEARPLFTLGLITRPRPLPRRGSSHLESQHFGRPKRTDH

SEQ ID NO: 62466 - protein, 115 aa, Homo sapiens
  Payload ID: 12482
  Gene Symbol: PCYT1A
  Gene Name: phosphate cytidylyltransferase 1, choline, alpha
  ENSP ID: ENSP00000393341
MDAQCSAKVNARKRRKEAPGPNGATEEDGVPSKVQRCAVGLRQPAPFSDEIEVDFSKPYVRVTMEEASRGTPCERPVRVYADGIFDLFHSGHARALMQAKNLFPNTYLIVGVCSD

SEQ ID NO: 62467 - protein, 367 aa, Homo sapiens; identical to SEQ ID NO: 62461
  Payload ID: 12482
  Gene Symbol: PCYT1A
  Gene Name: phosphate cytidylyltransferase 1, choline, alpha
  Uniprot ID: P49585
  ENSP ID: ENSP00000394617

SEQ ID NO: 62468 - protein, 134 aa, Homo sapiens
  Payload ID: 12482
  Gene Symbol: PCYT1A
  Gene Name: phosphate cytidylyltransferase 1, choline, alpha
  ENSP ID: ENSP00000397888
MDAQCSAKVNARKRRKEAPGPNGATEEDGVPSKVQRCAVGLRQPAPFSDEIEVDFSKPYVRVTMEEASRGTPCERPVRVYADGIFDLFHSGHARALMQAKNLFPNTYLIVGDFFPVGEDGCSPKQWEKMGEVGG

SEQ ID NO: 62469 - protein, 293 aa, Homo sapiens
  Payload ID: 12482
  Gene Symbol: PCYT1A
  Gene Name: phosphate cytidylyltransferase 1, choline, alpha
  ENSP ID: ENSP00000400430
MDAQCSAKVNARKRRKEAPGPNGATEEDGVPSKVQRCAVGLRQPAPFSDEIEVDFSKPYVRVTMEEASRGTPCERPVRVYADGIFDLFHSGHARALMQAKNLFPNTYLIVGVCSDELTHNFKGFTVMNENERYDAVQHCRYVDEVVRNAPWTLTPEFLAEHRIDFVAHDDIPYSSAGSDDVYKHIKEAGMFAPTQRTEGISTSDIITRIVRDYDVYARRNLQRGYTAKELNVSFINEKKYHLQERVDKVKKKVKDVEEKSKEFVQKVEEKSIDLIQKWEEKSREFIGSFLEMF

SEQ ID NO: 62470 - protein, 133 aa, Homo sapiens
  Payload ID: 12482
  Gene Symbol: PCYT1A
  Gene Name: phosphate cytidylyltransferase 1, choline, alpha
  ENSP ID: ENSP00000402015
MDAQCSAKVNARKRRKEAPGPNGATEEDGVPSKVQRCAVGLRQPAPFSDEIEVDFSKPYVRVTMEEASRGTPCERPVRVYADGIFDLFHSGHARALMQAKNLFPNTYLIVGVCSDELTHNFKGFTVMNENERY

SEQ ID NO: 62471 - protein, 201 aa, Homo sapiens
  Payload ID: 12482
  Gene Symbol: PCYT1A
  Gene Name: phosphate cytidylyltransferase 1, choline, alpha
  ENSP ID: ENSP00000402283
ASRGTPCERPVRVYADGIFDLFHSGHARALMQAKNLFPNTYLIVGVCSDELTHNFKGFTVMNENERYDAVQHCRYVDEVVRNAPWTLTPEFLAEHRIDFVAHDDIPYSSAGSDDVYKHIKEAGMFAPTQRTEGISTSDIITRIVRDYDVYARRNLQRGYTAKELNVSFINVSSSLTPEFPDSVGDISPPTPSQLNWLCSWL

SEQ ID NO: 62472 - protein, 330 aa, Homo sapiens
  Payload ID: 12483
  Gene Symbol: PCYT1B
  Gene Name: phosphate cytidylyltransferase 1, choline, beta
  Uniprot ID: Q9Y5K3
  ENSP ID: ENSP00000349211
MPVVTTDAESETGIPKSLSNEPPSETMEEIEHTCPQPRLTLTAPAPFADETNCQCQAPHEKLTIAQARLGTPADRPVRVYADGIFDLFHSGHARALMQAKTLFPNSYLLVGVCSDDLTHKFKGFTVMNEAERYEALRHCRYVDEVIRDAPWTLTPEFLEKHKIDFVAHDDIPYSSAGSDDVYKHIKEAGMFVPTQRTEGISTSDIITRIVRDYDVYARRNLQRGYTAKELNVSFINEKRYRFQNQVDKMKEKVKNVEERSKEFVNRVEEKSHDLIQKWEEKSREFIGNFLELFGPDGAWKQMFQERSSRMLQALSPKQSPLKSWARCRDF

SEQ ID NO: 62473 - protein, 369 aa, Homo sapiens
  Payload ID: 12483
  Gene Symbol: PCYT1B
  Gene Name: phosphate cytidylyltransferase 1, choline, beta
  Uniprot ID: Q9Y5K3
  ENSP ID: ENSP00000368439
MPVVTTDAESETGIPKSLSNEPPSETMEEIEHTCPQPRLTLTAPAPFADETNCQCQAPHEKLTIAQARLGTPADRPVRVYADGIFDLFHSGHARALMQAKTLFPNSYLLVGVCSDDLTHKFKGFTVMNEAERYEALRHCRYVDEVIRDAPWTLTPEFLEKHKIDFVAHDDIPYSSAGSDDVYKHIKEAGMFVPTQRTEGISTSDIITRIVRDYDVYARRNLQRGYTAKELNVSFINEKRYRFQNQVDKMKEKVKNVEERSKEFVNRVEEKSHDLIQKWEEKSREFIGNFLELFGPDGAWKQMFQERSSRMLQALSPKQSPVSSPTRSRSPSRSPSPTFSWLPLKTSPPSSPKAASASISSMSEGDEDEK

SEQ ID NO: 62474 - protein, 351 aa, Homo sapiens
  Payload ID: 12483
  Gene Symbol: PCYT1B
  Gene Name: phosphate cytidylyltransferase 1, choline, beta
  Uniprot ID: Q9Y5K3
  ENSP ID: ENSP00000368440
MVGHQECIMEEDNRAPQLWRKTLTAPAPFADETNCQCQAPHEKLTIAQARLGTPADRPVRVYADGIFDLFHSGHARALMQAKTLFPNSYLLVGVCSDDLTHKFKGFTVMNEAERYEALRHCRYVDEVIRDAPWTLTPEFLEKHKIDFVAHDDIPYSSAGSDDVYKHIKEAGMFVPTQRTEGISTSDIITRIVRDYDVYARRNLQRGYTAKELNVSFINEKRYRFQNQVDKMKEKVKNVEERSKEFVNRVEEKSHDLIQKWEEKSREFIGNFLELFGPDGAWKQMFQERSSRMLQALSPKQSPVSSPTRSRSPSRSPSPTFSWLPLKTSPPSSPKAASASISSMSEGDEDEK

SEQ ID NO: 62475 - protein, 177 aa, Homo sapiens
  Payload ID: 12483
  Gene Symbol: PCYT1B
  Gene Name: phosphate cytidylyltransferase 1, choline, beta
  ENSP ID: ENSP00000436562
MEEIEHTCPQPRLTLTAPAPFADETNCQCQAPHEKLTIAQARLGTPADRPVRVYADGIFDLFHSGHARALMQAKTLFPNSYLLVGVCSDDLTHKFKGFTVMNEAERYEALRHCRYVDEVIRDAPWTLTPEFLEKHKGCSFQRREQKASQHRTSLPELFVTMMFMPDVTSREGIQPRN

SEQ ID NO: 62476 - protein, 311 aa, Homo sapiens
  Payload ID: 12484
  Gene Symbol: PCYT2
  Gene Name: phosphate cytidylyltransferase 2, ethanolamine
  Uniprot ID: Q99447
  ENSP ID: ENSP00000331719
MVQAIKWVDEVVPAAPYVTTLETLDKYNCDFCVHGNDITLTVDGRDTYEEVKQAGRYRECKRTQGVSTTDLVGRMLLVTKAHHSSQEMSSEYREYADSFGKCPGGRNPWTGVSQFLQTSQKIIQFASGKEPQPGETVIYVAGAFDLFHIGHVDFLEKVHRLAERPYIIAGLHFDQEVNHYKGKNYPIMNLHERTLSVLACRYVSEVVIGAPYAVTAELLSHFKVDLVCHGKTEIIPDRDGSDPYQEPKRRGIFRQIDSGSNLTTDLIVQRIITNRLEYEARNQKKEAKELAFLEAARQQAAQPLGERDGDF

SEQ ID NO: 62477 - protein, 389 aa, Homo sapiens
  Payload ID: 12484
  Gene Symbol: PCYT2
  Gene Name: phosphate cytidylyltransferase 2, ethanolamine
  Uniprot ID: Q99447
  ENSP ID: ENSP00000439245
MIRNGRGAAGGAEQPGPGGRRAVRVWCDGCYDMVHYGHSNQLRQARAMGDYLIVGVHTDEEIAKHKGPPVFTQEERYKMVQAIKWVDEVVPAAPYVTTLETLDKYNCDFCVHGNDITLTVDGRDTYEEVKQAGRYRECKRTQGVSTTDLVGRMLLVTKAHHSSQEMSSEYREYADSFGKCPGGRNPWTGVSQFLQTSQKIIQFASGKEPQPGETVIYVAGAFDLFHIGHVDFLEKVHRLAERPYIIAGLHFDQEVNHYKGKNYPIMNLHERTLSVLACRYVSEVVIGAPYAVTAELLSHFKVDLVCHGKTEIIPDRDGSDPYQEPKRRGIFRQIDSGSNLTTDLIVQRIITNRLEYEARNQKKEAKELAFLEAARQQAAQPLGERDGDF

SEQ ID NO: 62478 - protein, 407 aa, Homo sapiens
  Payload ID: 12484
  Gene Symbol: PCYT2
  Gene Name: phosphate cytidylyltransferase 2, ethanolamine
  Uniprot ID: Q99447
  ENSP ID: ENSP00000442050
MIRNGRGAAGGAEQPGPGGRRAVRVWCDGCYDMVHYGHSNQLRQARAMGDYLIVGVHTDEEIAKHKGPPVFTQEERYKMVQAIKWVDEVVPAAPYVTTLETLDKYNCDFCVHGNDITLTVDGRDTYEEVKQAGRYRECKRTQGVSTTDLVGRMLLVTKAHHSSQEMSSEYREYADSFGKPPHPIPAGDILSSEGCSQCPGGRNPWTGVSQFLQTSQKIIQFASGKEPQPGETVIYVAGAFDLFHIGHVDFLEKVHRLAERPYIIAGLHFDQEVNHYKGKNYPIMNLHERTLSVLACRYVSEVVIGAPYAVTAELLSHFKVDLVCHGKTEIIPDRDGSDPYQEPKRRGIFRQIDSGSNLTTDLIVQRIITNRLEYEARNQKKEAKELAFLEAARQQAAQPLGERDGDF

SEQ ID NO: 62479 - protein, 311 aa, Homo sapiens; identical to SEQ ID NO: 62476
  Payload ID: 12484
  Gene Symbol: PCYT2
  Gene Name: phosphate cytidylyltransferase 2, ethanolamine
  Uniprot ID: Q99447
  ENSP ID: ENSP00000458330

SEQ ID NO: 62480 - protein, 44 aa, Homo sapiens
  Payload ID: 12484
  Gene Symbol: PCYT2
  Gene Name: phosphate cytidylyltransferase 2, ethanolamine
  ENSP ID: ENSP00000458472
MIRNGRGAAGGAEQPGPGGRRAVRVWCDGCHRAEIWSHGLPASP

SEQ ID NO: 62481 - protein, 81 aa, Homo sapiens
  Payload ID: 12484
  Gene Symbol: PCYT2
  Gene Name: phosphate cytidylyltransferase 2, ethanolamine
  ENSP ID: ENSP00000458727
MVQAIKWVDEVVPAAPYVTTLETLDKYNCDFCVHGNDITLTVDGRDTYEEVKQAGRYRECKRTQGVSTTDLVGRMLLVTKA

SEQ ID NO: 62482 - protein, 34 aa, Homo sapiens
  Payload ID: 12484
  Gene Symbol: PCYT2
  Gene Name: phosphate cytidylyltransferase 2, ethanolamine
  ENSP ID: ENSP00000458805
MVQAIKWVDEVVPAAPYVTTLETLDKYNCDFCVH

SEQ ID NO: 62483 - protein, 314 aa, Homo sapiens
  Payload ID: 12484
  Gene Symbol: PCYT2
  Gene Name: phosphate cytidylyltransferase 2, ethanolamine
  ENSP ID: ENSP00000458931
MIRNGRGAAGGAEQPGPGGRRAVRVWCDGCYDMVHYGHSNQLRQARAMGDYLIVGVHTDDDITLTVDGRDTYEEVKQAGRYRECKRTQGVSTTDLVGRMLLVTKAHHSSQEMSSEYREYADSFGKCPGGRNPWTGVSQFLQTSQKIIQFASGKEPQPGETVIYVAGAFDLFHIGHVDFLEKVHRLAERPYIIAGLHFDQEVNHYKGKNYPIMNLHERTLSVLACRYVSEVVIGAPYAVTAELLSHFKVDLVCHGKTEIIPDRDGSDPYQEPKRRGIFRQIDSGSNLTTDLIVQRIITNRLEYEARNQKKEAKEL

SEQ ID NO: 62484 - protein, 367 aa, Homo sapiens
  Payload ID: 12484
  Gene Symbol: PCYT2
  Gene Name: phosphate cytidylyltransferase 2, ethanolamine
  ENSP ID: ENSP00000459044
MIRNGRGAAGGAEQPGPGGRRAVRVWCDGCYDMVHYGHSNQLRQARAMGDYLIVGVHTDEEIAKHKGPPVFTQEERYKMVQAIKWVDEVVPAAPYVTTLETLDKYNCDFCVHGNDITLTVDGRDTYEEVKQAGRYRECKRTQGVSTTDLVGRMLLVTKAHHSSQEMSSEYREYADSFGKCPGGRNPWTGVSQFLQTSQKIIQFASGKEPQPGETVIYVAGAFDLFHIGHVDFLEKVHRLAERPYIIAGLHFDQEVNHYKGKNYPIMNLHERTLSVLACRYVSEVVIGAPYAVTAELLSHFKEPKRRGIFRQIDSGSNLTTDLIVQRIITNRLEYEARNQKKEAKELAFLEAARQQAAQPLGERDGDF

SEQ ID NO: 62485 - protein, 286 aa, Homo sapiens
  Payload ID: 12484
  Gene Symbol: PCYT2
  Gene Name: phosphate cytidylyltransferase 2, ethanolamine
  ENSP ID: ENSP00000459836
MIRNGRGAAGGAEQPGPGGRRAVRVWCDGCYDMVHYGHSNQLRQARAMGDYLIVGVHTDEEIAKHKGPPVFTQEERYKMVQAIKWVDEVVPAAPYVTTLETLDKYNCDFCVHGNDITLTVDGRDTYEEVKQAGRYRECKRTQGVSTTDLVGRMLLVTKAHHSSQCPGGRNPWTGVSQFLQTSQKIIQFASGKEPQPGETVIYVAGAFDLFHIGHVDFLEKVHRLAERPYIIAGLHFDQEVNHYKGKNYPIMNLHERTLSVLACRYVSEVVIGAPYAVTAELLSHFK

SEQ ID NO: 62486 - protein, 207 aa, Homo sapiens
  Payload ID: 12484
  Gene Symbol: PCYT2
  Gene Name: phosphate cytidylyltransferase 2, ethanolamine
  ENSP ID: ENSP00000460767
  MOD_RES (1)..(1): Any amino acid
XKAHHSSQEMSSEYREYADSFGKCPGGRNPWTGVSQFLQTSQKIIQFASGKEPQPGETVIYVAGAFDLFHIGHVDFLEKVHRLAERPYIIAGLHFDQYVSEVVIGAPYAVTAELLSHFKVDLVCHGKTEIIPDRDGSDPYQEPKRRGIFRQIDSGSNLTTDLIVQRIITNRLEYEARNQKKEAKELAFLEAARQQAAQPLGERDGDF

SEQ ID NO: 62487 - protein, 357 aa, Homo sapiens
  Payload ID: 12484
  Gene Symbol: PCYT2
  Gene Name: phosphate cytidylyltransferase 2, ethanolamine
  Uniprot ID: Q99447
  ENSP ID: ENSP00000461190
MVHYGHSNQLRQARAMGDYLIVGVHTDEEIAKHKGPPVFTQEERYKMVQAIKWVDEVVPAAPYVTTLETLDKYNCDFCVHGNDITLTVDGRDTYEEVKQAGRYRECKRTQGVSTTDLVGRMLLVTKAHHSSQEMSSEYREYADSFGKCPGGRNPWTGVSQFLQTSQKIIQFASGKEPQPGETVIYVAGAFDLFHIGHVDFLEKVHRLAERPYIIAGLHFDQEVNHYKGKNYPIMNLHERTLSVLACRYVSEVVIGAPYAVTAELLSHFKVDLVCHGKTEIIPDRDGSDPYQEPKRRGIFRQIDSGSNLTTDLIVQRIITNRLEYEARNQKKEAKELAFLEAARQQAAQPLGERDGDF

SEQ ID NO: 62488 - protein, 53 aa, Homo sapiens
  Payload ID: 12484
  Gene Symbol: PCYT2
  Gene Name: phosphate cytidylyltransferase 2, ethanolamine
  ENSP ID: ENSP00000461814
MVHYGHSNQLRQARAMGDYLIVGVHTDGGEIQDGAGHQMGGRGGASGSLRHYT

SEQ ID NO: 62489 - protein, 749 aa, Homo sapiens
  Payload ID: 12485
  Gene Symbol: PHEX
  Gene Name: phosphate regulating endopeptidase homolog, X-linked
  Uniprot ID: P78562
  ENSP ID: ENSP00000368682
MEAETGSSVETGKKANRGTRIALVVFVGGTLVLGTILFLVSQGLLSLQAKQEYCLKPECIEAAAAILSKVNLSVDPCDNFFRFACDGWISNNPIPEDMPSYGVYPWLRHNVDLKLKELLEKSISRRRDTEAIQKAKILYSSCMNEKAIEKADAKPLLHILRHSPFRWPVLESNIGPEGVWSERKFSLLQTLATFRGQYSNSVFIRLYVSPDDKASNEHILKLDQATLSLAVREDYLDNSTEAKSYRDALYKFMVDTAVLLGANSSRAEHDMKSVLRLEIKIAEIMIPHENRTSEAMYNKMNISELSAMIPQFDWLGYIKKVIDTRLYPHLKDISPSENVVVRVPQYFKDLFRILGSERKKTIANYLVWRMVYSRIPNLSRRFQYRWLEFSRVIQGTTTLLPQWDKCVNFIESALPYVVGKMFVDVYFQEDKKEMMEELVEGVRWAFIDMLEKENEWMDAGTKRKAKEKARAVLAKVGYPEFIMNDTHVNEDLKAIKFSEADYFGNVLQTRKYLAQSDFFWLRKAVPKTEWFTNPTTVNAFYSASTNQIRFPAGELQKPFFWGTEYPRSLSYGAIGVIVGHEFTHGFDNNGRKYDKNGNLDPWWSTESEEKFKEKTKCMINQYSNYYWKKAGLNVKGKRTLGENIADNGGLREAFRAYRKWINDRRQGLEEPLLPGITFTNNQLFFLSYAHVRCNSYRPEAAREQVQIGAHSPPQFRVNGAISNFEEFQKAFNCPPNSTMNRGMDSCRLW

SEQ ID NO: 62490 - protein, 214 aa, Homo sapiens
  Payload ID: 12486
  Gene Symbol: PCTP
  Gene Name: phosphatidylcholine transfer protein
  Uniprot ID: Q9UKL6
  ENSP ID: ENSP00000268896
MELAAGSFSEEQFWEACAELQQPALAGADWQLLVETSGISIYRLLDKKTGLYEYKVFGVLEDCSPTLLADIYMDSDYRKQWDQYVKELYEQECNGETVVYWEVKYPFPMSNRDYVYLRQRRDLDMEGRKIHVILARSTSMPQLGERSGVIRVKQYKQSLAIESDGKKGSKVFMYYFDNPGGQIPSWLINWAAKNGVPNFLKDMARACQNYLKKT

SEQ ID NO: 62491 - protein, 142 aa, Homo sapiens
  Payload ID: 12486
  Gene Symbol: PCTP
  Gene Name: phosphatidylcholine transfer protein
  Uniprot ID: Q9UKL6
  ENSP ID: ENSP00000325181
MDSDYRKQWDQYVKELYEQECNGETVVYWEVKYPFPMSNRDYVYLRQRRDLDMEGRKIHVILARSTSMPQLGERSGVIRVKQYKQSLAIESDGKKGSKVFMYYFDNPGGQIPSWLINWAAKNGVPNFLKDMARACQNYLKKT

SEQ ID NO: 62492 - protein, 64 aa, Homo sapiens
  Payload ID: 12486
  Gene Symbol: PCTP
  Gene Name: phosphatidylcholine transfer protein
  ENSP ID: ENSP00000415185
MDSDYRKQWDQYVKELYEQECNGETVVYWEVKYPFPMSNRDVSFPQACGAFLLSVYNAGVGVLP

SEQ ID NO: 62493 - protein, 203 aa, Homo sapiens
  Payload ID: 12486
  Gene Symbol: PCTP
  Gene Name: phosphatidylcholine transfer protein
  ENSP ID: ENSP00000459793
MELAAGSFSEEQFWEACAELQQPALAGADWQLLVETSGISIYRLLDKKTGLYEYKVFGVLEDCSPTLLADIYMDSDYRKQWDQYVKELYEQECNGETVVYWEVKYPFPMSNRDYVYLRQRRDLDMEGRKIHVILARSTSMPQLGERSGVIRVKQYKQSLAIESDGKKGSKVFMYYFDNPGGQIPSWLINWAAKGGNCSGSLYH

SEQ ID NO: 62494 - protein, 219 aa, Homo sapiens
  Payload ID: 12486
  Gene Symbol: PCTP
  Gene Name: phosphatidylcholine transfer protein
  ENSP ID: ENSP00000460437
MELAAGSFSEEQFWEACAELQQPALAGADWQLLVETSGISIYRLLDKKTGLYEYKVFGVLEDCSPTLLADIYMDSDYRKQWDQYVKELYEQECNGETVVYWEVKYPFPMSNRDYVYLRQRRDLDMEGRKIHVILARSTSMPQLGERSGVIRVKQYKQSLAIESDGKKGSKVFMYYFDNPGGQIPSWLINWAAKNQSRTKREAQNQRDLIKFLANPNILQ

SEQ ID NO: 62495 - protein, 146 aa, Homo sapiens
  Payload ID: 12486
  Gene Symbol: PCTP
  Gene Name: phosphatidylcholine transfer protein
  ENSP ID: ENSP00000461676
RQRRDLDMEGRKIHVILARSTSMPQLGERSGVIRVKQYKQSLAIESDGKKGSKVFMYYFDNPGGQIPSWLINWAAKAGLELLTSSNPLASASQSAGITGMSHHTRPIRAEPSGKLRIRETSSSFWQTQTFCNRLSGRKRKDIKIKT

SEQ ID NO: 62496 - protein, 187 aa, Homo sapiens
  Payload ID: 12487
  Gene Symbol: PEBP1
  Gene Name: phosphatidylethanolamine binding protein 1
  Uniprot ID: P30086
  ENSP ID: ENSP00000261313
MPVDLSKWSGPLSLQEVDEQPQHPLHVTYAGAAVDELGKVLTPTQVKNRPTSISWDGLDSGKLYTLVLTDPDAPSRKDPKYREWHHFLVVNMKGNDISSGTVLSDYVGSGPPKGTGLHRYVWLVYEQDRPLKCDEPILSNRSGDHRGKFKVASFRKKYELRAPVAGTCYQAEWDDYVPKLYEQLSGK

SEQ ID NO: 62497 - protein, 236 aa, Homo sapiens
  Payload ID: 12488
  Gene Symbol: PEMT
  Gene Name: phosphatidylethanolamine N-methyltransferase
  Uniprot ID: Q9UBM1
  ENSP ID: ENSP00000255389
MKRSGNPGAEVTNSSVAGPDCCGGLGNIDFRQADFCVMTRLLGYVDPLDPSFVAAVITITFNPLYWNVVARWEHKTRKLSRAFGSPYLACYSLSVTILLLNFLRSHCFTQAMLSQPRMESLDTPAAYSLGLALLGLGVVLVLSSFFALGFAGTFLGDYFGILKEARVTVFPFNILDNPMYWGSTANYLGWAIMHASPTGLLLTVLVALTYIVALLYEEPFTAEIYRQKASGSHKRS

SEQ ID NO: 62498 - protein, 232 aa, Homo sapiens
  Payload ID: 12488
  Gene Symbol: PEMT
  Gene Name: phosphatidylethanolamine N-methyltransferase
  Uniprot ID: Q9UBM1
  ENSP ID: ENSP00000379127
MKRSGNPGAEVTNSSVAGPDCCGGLGNIDFRQADFCVMTRLLGYVDPLDPSFVAAVITITFNPLYWNVVARWEHKTRKLSRAFGSPYLACYSLSVTILLLNFLRSHCFTQAMLSQPRMESLDTPAAYSLGLALLGLGVVLVLSSFFALGFAGTFLGDYFGILKEARVTVFPFNILDNPMYWGSTANYLGWAIIPAPAGAVGSEARQPHGPAPDGAGGPHLHSGSPIRRALHR

SEQ ID NO: 62499 - protein, 199 aa, Homo sapiens
  Payload ID: 12488
  Gene Symbol: PEMT
  Gene Name: phosphatidylethanolamine N-methyltransferase
  Uniprot ID: Q9UBM1
  ENSP ID: ENSP00000379128
MTRLLGYVDPLDPSFVAAVITITFNPLYWNVVARWEHKTRKLSRAFGSPYLACYSLSVTILLLNFLRSHCFTQAMLSQPRMESLDTPAAYSLGLALLGLGVVLVLSSFFALGFAGTFLGDYFGILKEARVTVFPFNILDNPMYWGSTANYLGWAIMHASPTGLLLTVLVALTYIVALLYEEPFTAEIYRQKASGSHKRS

SEQ ID NO: 62500 - protein, 199 aa, Homo sapiens; identical to SEQ ID NO: 62499
  Payload ID: 12488
  Gene Symbol: PEMT
  Gene Name: phosphatidylethanolamine N-methyltransferase
  Uniprot ID: Q9UBM1
  ENSP ID: ENSP00000379129

SEQ ID NO: 62501 - protein, 211 aa, Homo sapiens
  Payload ID: 12488
  Gene Symbol: PEMT
  Gene Name: phosphatidylethanolamine N-methyltransferase
  ENSP ID: ENSP00000391288
MKRSGNPGAEADFCVMTRLLGYVDPLDPSFVAAVITITFNPLYWNVVARWEHKTRKLSRAFGSPYLACYSLSVTILLLNFLRSHCFTQAMLSQPRMESLDTPAAYSLGLALLGLGVVLVLSSFFALGFAGTFLGDYFGILKEARVTVFPFNILDNPMYWGSTANYLGWAIISPAPAGAVGSEARQPHGPAPDGAGGPHLHSGSPIRRALHR

SEQ ID NO: 62502 - protein, 79 aa, Homo sapiens
  Payload ID: 12488
  Gene Symbol: PEMT
  Gene Name: phosphatidylethanolamine N-methyltransferase
  ENSP ID: ENSP00000463112
MKRSGNPGAEVTNSSVAGPDCCGGLGNIDFRQADFCVMTRLLGYVDPLDPSFVAAVITITFNPLYWNVVITSGSSRRRE

SEQ ID NO: 62503 - protein, 97 aa, Homo sapiens
  Payload ID: 12488
  Gene Symbol: PEMT
  Gene Name: phosphatidylethanolamine N-methyltransferase
  ENSP ID: ENSP00000463713
MKRSGNPGAEVTNSSVAGPDCCGGLGNIDFRQADFCVMTRLLGYVDPLDPSFVAAVITITFNPLYWNVVLVAGEPGLAVGTLRLQARLHDGNTRPAS

SEQ ID NO: 62504 - protein, 227 aa, Homo sapiens
  Payload ID: 12489
  Gene Symbol: PEBP4
  Gene Name: phosphatidylethanolamine-binding protein 4
  Uniprot ID: Q96S96
  ENSP ID: ENSP00000256404
MGWTMRLVTAALLLGLMMVVTGDEDENSPCAHEALLDEDTLFCQGLEVFYPELGNIGCKVVPDCNNYRQKITSWMEPIVKFPGAVDGATYILVMVDPDAPSRAEPRQRFWRHWLVTDIKGADLKKGKIQGQELSAYQAPSPPAHSGFHRYQFFVYLQEGKVISLLPKENKTRGSWKMDRFLNRFHLGEPEASTQFMTQNYQDSPTLQAPRERASEPKHKNQAEIAAC

SEQ ID NO: 62505 - protein, 93 aa, Homo sapiens
  Payload ID: 12489
  Gene Symbol: PEBP4
  Gene Name: phosphatidylethanolamine-binding protein 4
  ENSP ID: ENSP00000429414
MSRRRAEPGCGGSGRRAGAPGEGRGRRRYAPGPAAKALPRRRLALQSQVPMGWTMRLVTAALLLGLMMVVTGDEDENSPCAHEALLDEDTLFC

SEQ ID NO: 62506 - protein, 556 aa, Homo sapiens
  Payload ID: 12490
  Gene Symbol: PGS1
  Gene Name: phosphatidylglycerophosphate synthase 1
  Uniprot ID: Q32NB8
  ENSP ID: ENSP00000262764
MAVAAAAAAGPVFWRRLLGLLPGRPGLAALLGRLSDRLGRNRDRQRRRSPWLLLAPLLSPAVPQVTSPPCCLCPEGVHRFQWIRNLVPEFGVSSSHVRVLSSPAEFFELMKGQIRVAKRRVVMASLYLGTGPLEQELVDCLESTLEKSLQAKFPSNLKVSILLDFTRGSRGRKNSRTMLLPLLRRFPEQVRVSLFHTPHLRGLLRLLIPERFNETIGLQHIKVYLFDNSVILSGANLSDSYFTNRQDRYVFLQDCAEIADFFTELVDAVGDVSLQLQGDDTVQVVDGMVHPYKGDRAEYCKAANKRVMDVINSARTRQQMLHAQTFHSNSLLTQEDAAAAGDRRPAPDTWIYPLIQMKPFEIQIDEIVTETLLTEAERGAKVYLTTGYFNLTQAYMDLVLGTRAEYQILLASPEVNGFFGAKGVAGAIPAAYVHIERQFFSEVCSLGQQERVQLQEYWRRGWTFHAKGLWLYLAGSSLPCLTLIGSPNFGYRSVHRDLEAQIAIVTENQALQQQLHQEQEQLYLRSGVVSSATFEQPSRQVKLWVKMVTPLIKNFF

SEQ ID NO: 62507 - protein, 264 aa, Homo sapiens
  Payload ID: 12490
  Gene Symbol: PGS1
  Gene Name: phosphatidylglycerophosphate synthase 1
  ENSP ID: ENSP00000465266
  MOD_RES (1)..(1): Any amino acid
XRQLRRDPCSGGDCWASCLAAQGWPRSWDACPTASAGTGTASAGAVPQVTSPPCCLCPEGVHRFQWIRNLVPEFGVSSSHVRVLSSPAEFFELMKGQIRVAKRRVVMASLYLGTGPLEQELVDCLESTLEKSLQAKFPSNLKVSILLDFTRGSRGRKNSRTMLLPLLRRFPEQVRVSLFHTPHLRGLLRLLIPERFNETIGLQHIKVYLFDNSVILSGTATCSCRTVRRLPTSSRSWWTRWGMCPCSCRGTTRCRWWMGWCILT

SEQ ID NO: 62508 - protein, 50 aa, Homo sapiens
  Payload ID: 12490
  Gene Symbol: PGS1
  Gene Name: phosphatidylglycerophosphate synthase 1
  Uniprot ID: Q32NB8
  ENSP ID: ENSP00000465278
MAVAAAAAAGPVFWRRLLGLLPGRPGLAALLGRLSDRLGRNRDRQRRRGR

SEQ ID NO: 62509 - protein, 384 aa, Homo sapiens
  Payload ID: 12490
  Gene Symbol: PGS1
  Gene Name: phosphatidylglycerophosphate synthase 1
  ENSP ID: ENSP00000465908
MAVAAAAAAGPVFWRRLLGLLPGRPGLAALLGRLSDRLGRNRDRQRRRSPWLLLAPLLSPAVPQVTSPPCCLCPEGVHRFQWIRNLVPEFGVSSSHVRVLSSPAEFFELMKVDCLESTLEKSLQAKFPSNLKVSILLDFTRGSRGRKNSRTMLLPLLRRFPEQVRVSLFHTPHLRGLLRLLIPERFNETIGLQHIKVYLFDNSVILSGANLSDSYFTNRQDRYVFLQDCAEIADFFTELVDAVGDVSLQLQGDDTVQVVDGMVHPYKGDRAEYCKAANKRVMDVINSARTRQQMLHAQTFHSNSLLTQEDAAAAGDRRPAPDTWIYPLIQMKPFEIQIDEIVTETLLTEAERGAKVYLTTGYFNLTQAYMDLVLGTRAEYQILL

SEQ ID NO: 62510 - protein, 329 aa, Homo sapiens
  Payload ID: 12490
  Gene Symbol: PGS1
  Gene Name: phosphatidylglycerophosphate synthase 1
  ENSP ID: ENSP00000466219
  MOD_RES (1)..(1): Any amino acid
XVAAAAAAGPVFWRRLLGLLPGRPGLAALLGRLSDRLGRNRDRQRRRSPWLLLAPLLSPAVPQVTSPPCCLCPEGVHRFQWIRNLVPEFGVSSSHVRVLSSPAEFFELMKGQIRVAKRRVVMASLYLGTGPLEQELVDCLESTLEKSLQAKFPSNLKVSILLDFTRGSRGRKNSRTMLLPLLRRFPEQVRVSLFHTPHLRGLLRLLIPERFNETIGLQHIKVYLFDNSVILSGANLSDSYFTNRQDRYVFLQDCAEIADFFTELVDAVGDVSLQLQGDDTVQVVDGMVHPYKGDRAEYCKAANKRVMDVINSARTRQQMLHAQTFHSNS

SEQ ID NO: 62511 - protein, 132 aa, Homo sapiens
  Payload ID: 12490
  Gene Symbol: PGS1
  Gene Name: phosphatidylglycerophosphate synthase 1
  ENSP ID: ENSP00000467569
  MOD_RES (1)..(1): Any amino acid
XLTTGYFNLTQAYMDLVLGTRAEYQILLASPEVNGFFGAKGVAGAIPAAYVHIERQFFSEVCSLGQQERVQLQEYWRRGWTFHAKGARAALPEVRCGVLCHLRAAESPGEAVGEDGDSTDQELLLRTDRCCL

SEQ ID NO: 62512 - protein, 114 aa, Homo sapiens
  Payload ID: 12490
  Gene Symbol: PGS1
  Gene Name: phosphatidylglycerophosphate synthase 1
  ENSP ID: ENSP00000467719
APSQRPMCTSSDSSSVRCAAWDSRSGSSFRSTGGGAGRSTPKVSSPGPGGPDCDRDGEPGPAAAASPGARAALPEVRCGVLCHLRAAESPGEAVGEDGDSTDQELLLRTDRCCL

SEQ ID NO: 62513 - protein, 84 aa, Homo sapiens
  Payload ID: 12490
  Gene Symbol: PGS1
  Gene Name: phosphatidylglycerophosphate synthase 1
  ENSP ID: ENSP00000467804
MAVAAAAAAGPVFWRRLLGLLPGRPGLAALLGRLSDRLGRNRDRQRRSCSPGHLPTLLPVSRRRAPVPVDQKPGSRIWSLQFSR

SEQ ID NO: 62514 - protein, 454 aa, Homo sapiens
  Payload ID: 12490
  Gene Symbol: PGS1
  Gene Name: phosphatidylglycerophosphate synthase 1
  Uniprot ID: Q32NB8
  ENSP ID: ENSP00000468431
MAVAAAAAAGPVFWRRLLGLLPGRPGLAALLGRLSDRLGRNRDRQRRRSPWLLLAPLLSPAVPQVTSPPCCLCPEGVHRFQWIRNLVPEFGVSSSHVRVLSSPAEFFELMKVDCLESTLEKSLQAKFPSNLKVSILLDFTRGSRGRKNSRTMLLPLLRRFPEQVRVSLFHTPHLRGLLRLLIPERFNETIGLQHIKVYLFDNSVILSGANLSDSYFTNRQDRYVFLQDCAEIADFFTELVDAVGDVSLQLQGDDTVQVVDGMVHPYKGDRAEYCKAANKRVMDVINSARTRQQMLHAQTFHSNSLLTQEDAAAAGDRRPAPDTWIYPLIQMKPFEIQIDEIVTETLLTEAERGAKVYLTTGYFNLTQAYMDLVLGTRAEYQILLASPEVNGFFGAKGVAGAIPAAYVHIERQFFSEVCSLGQQERVQLQEYWRRGWTFHAKGQFTGTWRPRLRS

SEQ ID NO: 62515 - protein, 150 aa, Homo sapiens
  Payload ID: 12490
  Gene Symbol: PGS1
  Gene Name: phosphatidylglycerophosphate synthase 1
  ENSP ID: ENSP00000475797
MAVAAAAAAGPVFWRRLLGLLPGRPGLAALLGRLSDRLGRNRDRQRRRWSPTLSPRLECNGTISAHCKLRLPGSSDSPASASGVAGNTGHHGCYWLPCCPQLFPRSPPHLAACVQKACTGSSGSETWFQNLESPVLTLGCFLPRQSFSSS

SEQ ID NO: 62516 - protein, 728 aa, Homo sapiens
  Payload ID: 12491
  Gene Symbol:
  Gene Name: Phosphatidylinositol 3-kinase regulatory subunit beta  [Source:UniProtKB/Swiss-Prot
  Acc:O00459]
  Uniprot ID: O00459
  ENSP ID: ENSP00000471914
MAGPEGFQYRALYPFRRERPEDLELLPGDVLVVSRAALQALGVAEGGERCPQSVGWMPGLNERTRQRGDFPGTYVEFLGPVALARPGPRPRGPRPLPARPRDGAPEPGLTLPDLPEQFSPPDVAPPLLVKLVEAIERTGLDSESHYRPELPAPRTDWSLSDVDQWDTAALADGIKSFLLALPAPLVTPEASAEARRALREAAGPVGPALEPPTLPLHRALTLRFLLQHLGRVASRAPALGPAVRALGATFGPLLLRAPPPPSSPPPGGAPDGSEPSPDFPALLVEKLLQEHLEEQEVAPPALPPKPPKAKPASTVLANGGSPPSLQDAEWYWGDISREEVNEKLRDTPDGTFLVRDASSKIQGEYTLTLRKGGNNKLIKVFHRDGHYGFSEPLTFCSVVDLINHYRHESLAQYNAKLDTRLLYPVSKYQQDQIVKEDSVEAVGAQLKVYHQQYQDKSREYDQLYEEYTRTSQELQMKRTAIEAFNETIKIFEEQGQTQEKCSKEYLERFRREGNEKEMQRILLNSERLKSRIAEIHESRTKLEQQLRAQASDNREIDKRMNSLKPDLMQLRKIRDQYLVWLTQKGARQKKINEWLGIKNETEDQYALMEDEDDLPHHEERTWYVGKINRTQAEEMLSGKRDGTFLIRESSQRGCYACSVVVDGDTKHCVIYRTATGFGFAEPYNLYGSLKELVLHYQHASLVQHNDALTVTLAHPVRAPGPGPPPAAR

SEQ ID NO: 62517 - protein, 887 aa, Homo sapiens
  Payload ID: 12492
  Gene Symbol: PIK3C3
  Gene Name: phosphatidylinositol 3-kinase, catalytic subunit type 3
  Uniprot ID: Q8NEB9
  ENSP ID: ENSP00000262039
MGEAEKFHYIYSCDLDINVQLKIGSLEGKREQKSYKAVLEDPMLKFSGLYQETCSDLYVTCQVFAEGKPLALPVRTSYKAFSTRWNWNEWLKLPVKYPDLPRNAQVALTIWDVYGPGKAVPVGGTTVSLFGKYGMFRQGMHDLKVWPNVEADGSEPTKTPGRTSSTLSEDQMSRLAKLTKAHRQGHMVKVDWLDRLTFREIEMINESEKRSSNFMYLMVEFRCVKCDDKEYGIVYYEKDGDESSPILTSFELVKVPDPQMSMENLVESKHHKLARSLRSGPSDHDLKPNAATRDQLNIIVSYPPTKQLTYEEQDLVWKFRYYLTNQEKALTKFLKCVNWDLPQEAKQALELLGKWKPMDVEDSLELLSSHYTNPTVRRYAVARLRQADDEDLLMYLLQLVQALKYENFDDIKNGLEPTKKDSQSSVSENVSNSGINSAEIDSSQIITSPLPSVSSPPPASKTKEVPDGENLEQDLCTFLISRACKNSTLANYLYWYVIVECEDQDTQQRDPKTHEMYLNVMRRFSQALLKGDKSVRVMRSLLAAQQTFVDRLVHLMKAVQRESGNRKKKNERLQALLGDNEKMNLSDVELIPLPLEPQVKIRGIIPETATLFKSALMPAQLFFKTEDGGKYPVIFKHGDDLRQDQLILQIISLMDKLLRKENLDLKLTPYKVLATSTKHGFMQFIQSVPVAEVLDTEGSIQNFFRKYAPSENGPNGISAEVMDTYVKSCAGYCVITYILGVGDRHLDNLLLTKTGKLFHIDFGYILGRDPKPLPPPMKLNKEMVEGMGGTQSEQYQEFRKQCYTAFLHLRRYSNLILNLFSLMVDANIPDIALEPDKTVKKVQDKFRLDLSDEEAVHYMQSLIDESVHALFAAVVEQIHKFAQYWRK

SEQ ID NO: 62518 - protein, 824 aa, Homo sapiens
  Payload ID: 12492
  Gene Symbol: PIK3C3
  Gene Name: phosphatidylinositol 3-kinase, catalytic subunit type 3
  ENSP ID: ENSP00000381845
MGEAEKFHYIYSCDLDINVQLKIWNEWLKLPVKYPDLPRNAQVALTIWDVYGPGKAVPVGGTTVSLFGKYGMFRQGMHDLKVWPNVEADGSEPTKTPGRTSSTLSEDQMSRLAKLTKAHRQGHMVKVDWLDRLTFREIEMINESEKRSSNFMYLMVEFRCVKCDDKEYGIVYYEKDGDESSPILTSFELVKVPDPQMSMENLVESKHHKLARSLRSGPSDHDLKPNAATRDQLNIIVSYPPTKQLTYEEQDLVWKFRYYLTNQEKALTKFLKCVNWDLPQEAKQALELLGKWKPMDVEDSLELLSSHYTNPTVRRYAVARLRQADDEDLLMYLLQLVQALKYENFDDIKNGLEPTKKDSQSSVSENVSNSGINSAEIDSSQIITSPLPSVSSPPPASKTKEVPDGENLEQDLCTFLISRACKNSTLANYLYWYVIVECEDQDTQQRDPKTHEMYLNVMRRFSQALLKGDKSVRVMRSLLAAQQTFVDRLVHLMKAVQRESGNRKKKNERLQALLGDNEKMNLSDVELIPLPLEPQVKIRGIIPETATLFKSALMPAQLFFKTEDGGKYPVIFKHGDDLRQDQLILQIISLMDKLLRKENLDLKLTPYKVLATSTKHGFMQFIQSVPVAEVLDTEGSIQNFFRKYAPSENGPNGISAEVMDTYVKSCAGYCVITYILGVGDRHLDNLLLTKTGKLFHIDFGYILGRDPKPLPPPMKLNKEMVEGMGGTQSEQYQEFRKQCYTAFLHLRRYSNLILNLFSLMVDANIPDIALEPDKTVKKVQDKFRLDLSDEEAVHYMQSLIDESVHALFAAVVEQIHKFAQYWRK

SEQ ID NO: 62519 - protein, 178 aa, Homo sapiens
  Payload ID: 12492
  Gene Symbol: PIK3C3
  Gene Name: phosphatidylinositol 3-kinase, catalytic subunit type 3
  ENSP ID: ENSP00000464909
  MOD_RES (1)..(1): Any amino acid
XGLLGVRGRKGSLEGKREQKSYKAVLEDPMLKFSGLYQETCSDLYVTCQVFAEGKPLALPVRTSYKAFSTRWNWNEWLKLPVKYPDLPRNAQVALTIWDVYGPGKAVPVGGTTVSLFGKYGMFRQGMHDLKVWPNVEADGSEPTKTPGRTSSTLSEDQMSRLAKVKKVIWNRCKALTD

SEQ ID NO: 62520 - protein, 201 aa, Homo sapiens
  Payload ID: 12492
  Gene Symbol: PIK3C3
  Gene Name: phosphatidylinositol 3-kinase, catalytic subunit type 3
  ENSP ID: ENSP00000465621
MGEAEKFHYIYSCDLDINVQLKIGSLEGKREQKSYKAVLEDPMLKFSGLYQETCSDLYVTCQVFAEGKPLALPVRTSYKAFSTRWNWNEWLKLPVKYPDLPRNAQVALTIWDVYGPGKAVPVGGTTVSLFGKYGMFRQGMHDLKVWPNVEADGSEPTKTPGRTSSTLSEDQMSRLAKVKKVIWNRCKALTDVYCSIYTLTL

SEQ ID NO: 62521 - protein, 134 aa, Homo sapiens
  Payload ID: 12492
  Gene Symbol: PIK3C3
  Gene Name: phosphatidylinositol 3-kinase, catalytic subunit type 3
  ENSP ID: ENSP00000466946
  MOD_RES (1)..(1): Any amino acid
XSGLYQETCSDLYVTCQVFAEGKPLALPVRTSYKAFSTRWNWNEWLKLPVKYPDLPRNAQVALTIWDVYGPGKAVPVGGTTVSLFGKYGMFRQGMHDLKVWPNVEADGSEPTKTPGRTSSTLSEDQMSRLAKQK

SEQ ID NO: 62522 - protein, 104 aa, Homo sapiens
  Payload ID: 12492
  Gene Symbol: PIK3C3
  Gene Name: phosphatidylinositol 3-kinase, catalytic subunit type 3
  ENSP ID: ENSP00000471957
MDKLLRKENLDLKLTPYKVLATSTKHGFMQFIQSVPVAEVLDTEGSIQNFFRKYAPSENGPNGISAEVMDTYVKSCAGYCVITYILGVGDRHLDNLLLTKTGNN

SEQ ID NO: 62523 - protein, 183 aa, Homo sapiens
  Payload ID: 12492
  Gene Symbol: PIK3C3
  Gene Name: phosphatidylinositol 3-kinase, catalytic subunit type 3
  ENSP ID: ENSP00000472926
  MOD_RES (1)..(1): Any amino acid
XLLGDNEKMNLSDVELIPLPLEPQVKIRGIIPETATLFKSALMPAQLFFKTEDGGKYPVIFKHGDDLRQDQLILQIISLMDKLLRKENLDLKLTPYKVLATSTKHGFMQFIQSVPVAEVLDTEGSIQNFFRKYAPSENGPNGISAEVMDTYVKSCAGYCVITYILGVGDRHLDNLLLTKTGNN

SEQ ID NO: 62524 - protein, 103 aa, Homo sapiens
  Payload ID: 12492
  Gene Symbol: PIK3C3
  Gene Name: phosphatidylinositol 3-kinase, catalytic subunit type 3
  ENSP ID: ENSP00000473061
MDKLLRKENLDLKLTPYKVLATSTKHGFMQFIQSVPVAEVLDTEGSIQNFFRKYAPSENGPNGISAEVMDTYVKSCAGYCVITYILGVGDRHLDNLLLTKTGG

SEQ ID NO: 62525 - protein, 479 aa, Homo sapiens
  Payload ID: 12493
  Gene Symbol: PI4K2A
  Gene Name: phosphatidylinositol 4-kinase type 2 alpha
  Uniprot ID: Q9BTU6
  ENSP ID: ENSP00000359665
MDETSPLVSPERAQPPDYTFPSGSGAHFPQVPGGAVRVAAAAGSGPSPPGSPGHDRERQPLLDRARGAAAQGQTQTVAAQAQALAAQAAAAAHAAQAHRERNEFPEDPEFEAVVRQAELAIERCIFPERIYQGSSGSYFVKDPQGRIIAVFKPKNEEPYGHLNPKWTKWLQKLCCPCCFGRDCLVLNQGYLSEAGASLVDQKLELNIVPRTKVVYLASETFNYSAIDRVKSRGKRLALEKVPKVGQRFNRIGLPPKVGSFQLFVEGYKDADYWLRRFEAEPLPENTNRQLLLQFERLVVLDYIIRNTDRGNDNWLIKYDCPMDSSSSRDTDWVVVKEPVIKVAAIDNGLAFPLKHPDSWRAYPFYWAWLPQAKVPFSQEIKDLILPKISDPNFVKDLEEDLYELFKKDPGFDRGQFHKQIAVMRGQILNLTQALKDNKSPLHLVQMPPVIVETARSHQRSSSESYTQSFQSRKPFFSWW

SEQ ID NO: 62526 - protein, 481 aa, Homo sapiens
  Payload ID: 12494
  Gene Symbol: PI4K2B
  Gene Name: phosphatidylinositol 4-kinase type 2 beta
  Uniprot ID: Q8TCG2
  ENSP ID: ENSP00000264864
MEDPSEPDRLASADGGSPEEEEDGEREPLLPRIAWAHPRRGAPGSAVRLLDAAGEEGEAGDEELPLPPGDVGVSRSSSAELDRSRPAVSVTIGTSEMNAFLDDPEFADIMLRAEQAIEVGIFPERISQGSSGSYFVKDPKRKIIGVFKPKSEEPYGQLNPKWTKYVHKVCCPCCFGRGCLIPNQGYLSEAGAYLVDNKLHLSIVPKTKVVWLVSETFNYNAIDRAKSRGKKYALEKVPKVGRKFHRIGLPPKIGSFQLFVEGYKEAEYWLRKFEADPLPENIRKQFQSQFERLVILDYIIRNTDRGNDNWLVRYEKQKCEKEIDHKESKWIDDEEFLIKIAAIDNGLAFPFKHPDEWRAYPFHWAWLPQAKVPFSEEIRNLILPYISDMNFVQDLCEDLYELFKTDKGFDKATFESQMSVMRGQILNLTQALRDGKSPFQLVQIPCVIVERSQGGSQGRIVHLSNSFTQTVNCRKPFFSSW

SEQ ID NO: 62527 - protein, 2102 aa, Homo sapiens
  Payload ID: 12495
  Gene Symbol: PI4KA
  Gene Name: phosphatidylinositol 4-kinase, catalytic, alpha
  ENSP ID: ENSP00000255882
MAAAPARGGGGGGGGGGGCSGSGSSASRGFYFNTVLSLARSLAVQRPASLEKVQKLLCMCPVDFHGIFQLDERRRDAVIALGIFLIESDLQHKDCVVPYLLRLLKGLPKVYWVEESTARKGRGALPVAESFSFCLVTLLSDVAYRDPSLRDEILEVLLQVLHVLLGMCQALEIQDKEYLCKYAIPCLIGISRAFGRYSNMEESLLSKLFPKIPPHSLRVLEELEGVRRRSFNDFRSILPSNLLTVCQEGTLKRKTSSVSSISQVSPERGMPPPSSPGGSAFHYFEASCLPDGTALEPEYYFSTISSSFSVSPLFNGVTYKEFNIPLEMLRELLNLVKKIVEEAVLKSLDAIVASVMEANPSADLYYTSFSDPLYLTMFKMLRDTLYYMKDLPTSFVKEIHDFVLEQFNTSQGELQKILHDADRIHNELSPLKLRCQANAACVDLMVWAVKDEQGAENLCIKLSEKLQSKTSSKVIIAHLPLLICCLQGLGRLCERFPVVVHSVTPSLRDFLVIPSPVLVKLYKYHSQYHTVAGNDIKISVTNEHSESTLNVMSGKKSQPSMYEQLRDIAIDNICRCLKAGLTVDPVIVEAFLASLSNRLYISQESDKDAHLIPDHTIRALGHIAVALRDTPKVMEPILQILQQKFCQPPSPLDVLIIDQLGCLVITGNQYIYQEVWNLFQQISVKASSVVYSATKDYKDHGYRHCSLAVINALANIAANIQDEHLVDELLMNLLELFVQLGLEGKRASERASEKGPALKASSSAGNLGVLIPVIAVLTRRLPPIKEAKPRLQKLFRDFWLYSVLMGFAVEGSGLWPEEWYEGVCEIATKSPLLTFPSKEPLRSVLQYNSAMKNDTVTPAELSELRSTIINLLDPPPEVSALINKLDFAMSTYLLSVYRLEYMRVLRSTDPDRFQVMFCYFEDKAIQKDKSGMMQCVIAVADKVFDAFLNMMADKAKTKENEEELERHAQFLLVNFNHIHKRIRRVADKYLSGLVDKFPHLLWSGTVLKTMLDILQTLSLSLSADIHKDQPYYDIPDAPYRITVPDTYEARESIVKDFAARCGMILQEAMKWAPTVTKSHLQEYLNKHQNWVSGLSQHTGLAMATESILHFAGYNKQNTTLGATQLSERPACVKKDYSNFMASLNLRNRYAGEVYGMIRFSGTTGQMSDLNKMMVQDLHSALDRSHPQHYTQAMFKLTAMLISSKDCDPQLLHHLCWGPLRMFNEHGMETALACWEWLLAGKDGVEVPFMREMAGAWHMTVEQKFGLFSAEIKEADPLAASEASQPKPCPPEVTPHYIWIDFLVQRFEIAKYCSSDQVEIFSSLLQRSMSLNIGGAKGSMNRHVAAIGPRFKLLTLGLSLLHADVVPNATIRNVLREKIYSTAFDYFSCPPKFPTQGEKRLREDISIMIKFWTAMFSDKKYLTASQLVPPDNQDTRSNLDITVGSRQQATQGWINTYPLSSGMSTISKKSGMSKKTNRGSQLHKYYMKRRTLLLSLLATEIERLITWYNPLSAPELELDQAGENSVANWRSKYISLSEKQWKDNVNLAWSISPYLAVQLPARFKNTEAIGNEVTRLVRLDPGAVSDVPEAIKFLVTWHTIDADAPELSHVLCWAPTDPPTGLSYFSSMYPPHPLTAQYGVKVLRSFPPDAILFYIPQIVQALRYDKMGYVREYILWAASKSQLLAHQFIWNMKTNIYLDEEGHQKDPDIGDLLDQLVEEITGSLSGPAKDFYQREFDFFNKITNVSAIIKPYPKGDERKKACLSALSEVKVQPGCYLPSNPEAIVLDIDYKSGTPMQSAAKAPYLAKFKVKRCGVSELEKEGLRCRSDSEDECSTQEADGQKISWQAAIFKVGDDCRQDMLALQIIDLFKNIFQLVGLDLFVFPYRVVATAPGCGVIECIPDCTSRDQLGRQTDFGMYDYFTRQYGDESTLAFQQARYNFIRSMAAYSLLLFLLQIKDRHNGNIMLDKKGHIIHIDFGFMFESSPGGNLGWEPDIKLTDEMVMIMGGKMEATPFKWFMEMCVRGYLAVRPYMDAVVSLVTLMLDTGLPCFRGQTIKLLKHRFSPNMTEREAANFIMKVIQSCFLSNRSRTYDMIQYYQNDIPY

SEQ ID NO: 62528 - protein, 435 aa, Homo sapiens
  Payload ID: 12495
  Gene Symbol: PI4KA
  Gene Name: phosphatidylinositol 4-kinase, catalytic, alpha
  ENSP ID: ENSP00000382162
MGYVREYILWAASKSQLLAHQFIWNMKTNIYLDEEGHQKDPDIGDLLDQLVEEITGSLSGPAKDFYQREFDFFNKITNVSAIIKPYPKGDERKKACLSALSEVKVQPGCYLPSNPEAIVLDIDYKSGTPMQSAAKAPYLAKFKVKRCGVSELEKEGLRCRSDSEDECSTQEADGQKISWQAAIFKVGDDCRQDMLALQIIDLFKNIFQLVGLDLFVFPYRVVATAPGCGVIECIPDCTSRDQLGRQTDFGMYDYFTRQYGDEALSAQARYNFIRSMAAYSLLLFLLQIKDRHNGNIMLDKKGHIIHIDFGFMFESSPGGNLGWEPDIKLTDEMVMIMGGKMEATPFKWFMEMCVRGYLAVRPYMDAVVSLVTLMLDTGLPCFRGQTIKLLKHRFSPNMTEREAANFIMKVIQSCFLSNRSRTYDMIQYYQNDIPY

SEQ ID NO: 62529 - protein, 87 aa, Homo sapiens
  Payload ID: 12495
  Gene Symbol: PI4KA
  Gene Name: phosphatidylinositol 4-kinase, catalytic, alpha
  ENSP ID: ENSP00000402437
MCPVDFHGIFQLDERRRDAVIALGIFLIESDLQHKDCVVPYLLRLLKGLPKVYWVEESTARKGRGALPVAESFSFCLVTLLSDVAYR

SEQ ID NO: 62530 - protein, 801 aa, Homo sapiens
  Payload ID: 12496
  Gene Symbol: PI4KB
  Gene Name: phosphatidylinositol 4-kinase, catalytic, beta
  Uniprot ID: Q9UBF8
  ENSP ID: ENSP00000357866
MGDTVVEPAPLKPTSEPTSGPPGNNGGSLLSVITEGVGELSVIDPEVAQKACQEVLEKVKLLHGGVAVSSRGTPLELVNGDGVDSEIRCLDDPPAQIREEEDEMGAAVASGTAKGARRRRQNNSAKQSWLLRLFESKLFDISMAISYLYNSKEPGVQAYIGNRLFCFRNEDVDFYLPQLLNMYIHMDEDVGDAIKPYIVHRCRQSINFSLQCALLLGAYSSDMHISTQRHSRGTKLRKLILSDELKPAHRKRELPSLSPAPDTGLSPSKRTHQRSKSDATASISLSSNLKRTASNPKVENEDEPVRLAPEREFIKSLMAIGKRLATLPTKEQKTQRLISELSLLNHKLPARVWLPTAGFDHHVVRVPHTQAVVLNSKDKAPYLIYVEVLECENFDTTSVPARIPENRIRSTRSVENLPECGITHEQRAGSFSTVPNYDNDDEAWSVDDIGELQVELPEVHTNSCDNISQFSVDSITSQESKEPVFIAAGDIRRRLSEQLAHTPTAFKRDPEDPSAVALKEPWQEKVRRIREGSPYGHLPNWRLLSVIVKCGDDLRQELLAFQVLKQLQSIWEQERVPLWIKPYKILVISADSGMIEPVVNAVSIHQVKKQSQLSLLDYFLQEHGSYTTEAFLSAQRNFVQSCAGYCLVCYLLQVKDRHNGNILLDAEGHIIHIDFGFILSSSPRNLGFETSAFKLTTEFVDVMGGLDGDMFNYYKMLMLQGLIAARKHMDKVVQIVEIMQQGSQLPCFHGSSTIRNLKERFHMSMTEEQLQLLVEQMVDGSMRSITTKLYDGFQYLTNGIM

SEQ ID NO: 62531 - protein, 816 aa, Homo sapiens
  Payload ID: 12496
  Gene Symbol: PI4KB
  Gene Name: phosphatidylinositol 4-kinase, catalytic, beta
  Uniprot ID: Q9UBF8
  ENSP ID: ENSP00000357867
MGDTVVEPAPLKPTSEPTSGPPGNNGGSLLSVITEGVGELSVIDPEVAQKACQEVLEKVKLLHGGVAVSSRGTPLELVNGDGVDSEIRCLDDPPAQIREEEDEMGAAVASGTAKGARRRRQNNSAKQSWLLRLFESKLFDISMAISYLYNSKEPGVQAYIGNRLFCFRNEDVDFYLPQLLNMYIHMDEDVGDAIKPYIVHRCRQSINFSLQCALLLGAYSSDMHISTQRHSRGTKLRKLILSDELKPAHRKRELPSLSPAPDTGLSPSKRTHQRSKSDATASISLSSNLKRTASNPKVENEDEELSSSTESIDNSFSSPVRLAPEREFIKSLMAIGKRLATLPTKEQKTQRLISELSLLNHKLPARVWLPTAGFDHHVVRVPHTQAVVLNSKDKAPYLIYVEVLECENFDTTSVPARIPENRIRSTRSVENLPECGITHEQRAGSFSTVPNYDNDDEAWSVDDIGELQVELPEVHTNSCDNISQFSVDSITSQESKEPVFIAAGDIRRRLSEQLAHTPTAFKRDPEDPSAVALKEPWQEKVRRIREGSPYGHLPNWRLLSVIVKCGDDLRQELLAFQVLKQLQSIWEQERVPLWIKPYKILVISADSGMIEPVVNAVSIHQVKKQSQLSLLDYFLQEHGSYTTEAFLSAQRNFVQSCAGYCLVCYLLQVKDRHNGNILLDAEGHIIHIDFGFILSSSPRNLGFETSAFKLTTEFVDVMGGLDGDMFNYYKMLMLQGLIAARKHMDKVVQIVEIMQQGSQLPCFHGSSTIRNLKERFHMSMTEEQLQLLVEQMVDGSMRSITTKLYDGFQYLTNGIM

SEQ ID NO: 62532 - protein, 801 aa, Homo sapiens; identical to SEQ ID NO: 62530
  Payload ID: 12496
  Gene Symbol: PI4KB
  Gene Name: phosphatidylinositol 4-kinase, catalytic, beta
  Uniprot ID: Q9UBF8
  ENSP ID: ENSP00000357868

SEQ ID NO: 62533 - protein, 828 aa, Homo sapiens
  Payload ID: 12496
  Gene Symbol: PI4KB
  Gene Name: phosphatidylinositol 4-kinase, catalytic, beta
  ENSP ID: ENSP00000357869
MRFLEARSLAVAMGDTVVEPAPLKPTSEPTSGPPGNNGGSLLSVITEGVGELSVIDPEVAQKACQEVLEKVKLLHGGVAVSSRGTPLELVNGDGVDSEIRCLDDPPAQIREEEDEMGAAVASGTAKGARRRRQNNSAKQSWLLRLFESKLFDISMAISYLYNSKEPGVQAYIGNRLFCFRNEDVDFYLPQLLNMYIHMDEDVGDAIKPYIVHRCRQSINFSLQCALLLGAYSSDMHISTQRHSRGTKLRKLILSDELKPAHRKRELPSLSPAPDTGLSPSKRTHQRSKSDATASISLSSNLKRTASNPKVENEDEELSSSTESIDNSFSSPVRLAPEREFIKSLMAIGKRLATLPTKEQKTQRLISELSLLNHKLPARVWLPTAGFDHHVVRVPHTQAVVLNSKDKAPYLIYVEVLECENFDTTSVPARIPENRIRSTRSVENLPECGITHEQRAGSFSTVPNYDNDDEAWSVDDIGELQVELPEVHTNSCDNISQFSVDSITSQESKEPVFIAAGDIRRRLSEQLAHTPTAFKRDPEDPSAVALKEPWQEKVRRIREGSPYGHLPNWRLLSVIVKCGDDLRQELLAFQVLKQLQSIWEQERVPLWIKPYKILVISADSGMIEPVVNAVSIHQVKKQSQLSLLDYFLQEHGSYTTEAFLSAQRNFVQSCAGYCLVCYLLQVKDRHNGNILLDAEGHIIHIDFGFILSSSPRNLGFETSAFKLTTEFVDVMGGLDGDMFNYYKMLMLQGLIAARKHMDKVVQIVEIMQQGSQLPCFHGSSTIRNLKERFHMSMTEEQLQLLVEQMVDGSMRSITTKLYDGFQYLTNGIM

SEQ ID NO: 62534 - protein, 73 aa, Homo sapiens
  Payload ID: 12496
  Gene Symbol: PI4KB
  Gene Name: phosphatidylinositol 4-kinase, catalytic, beta
  ENSP ID: ENSP00000391546
  MOD_RES (1)..(1): Any amino acid
XSSPRNLGFETSAFKLTTEFVDVMGGLDGDMFNYYKMLMLQGLIAARKHMDKVLSFLASMAPAPFETSKRGST

SEQ ID NO: 62535 - protein, 280 aa, Homo sapiens
  Payload ID: 12496
  Gene Symbol: PI4KB
  Gene Name: phosphatidylinositol 4-kinase, catalytic, beta
  ENSP ID: ENSP00000394719
MGDTVVEPAPLKPTSEPTSGPPGNNGGSLLSVITEGVGELSVIDPEVAQKACQEVLEKVKLLHGGVAVSSRGTPLELVNGDGVDSEIRCLDDPPAQIREEEDEMGAAVASGTAKGARRRRQNNSAKQSWLLRLFESKLFDISMAISYLYNSKEPGVQAYIGNRLFCFRNEDVDFYLPQLLNMYIHMDEDVGDAIKPYIVHRCRQSINFSLQCALLLGAYSSDMHISTQRHSRGTKLRKLILSDELKPAHRKRELPSLSPAPDTGLSPSKRTHQRSKSDAT

SEQ ID NO: 62536 - protein, 227 aa, Homo sapiens
  Payload ID: 12496
  Gene Symbol: PI4KB
  Gene Name: phosphatidylinositol 4-kinase, catalytic, beta
  ENSP ID: ENSP00000410974
EPVVNAVSIHQVKKQSQLSLLDYFLQEHGSYTTEAFLSAQRNFVQSCAGYCLVCYLLQVKDRHNGNILLDAEGHIIHIDFGFILSSSPRNLGFETSAFKLTTEFVDVMGGLDGDMFNYYKMLMLQGLIAARKHMDKVVQIVEIMQQGCRRCSGSSPSGPMMTVAQVICSQLPCFHGSSTIRNLKERFHMSMTEEQLQLLVEQMVDGSMRSITTKLYDGFQYLTNGIM

SEQ ID NO: 62537 - protein, 191 aa, Homo sapiens
  Payload ID: 12496
  Gene Symbol: PI4KB
  Gene Name: phosphatidylinositol 4-kinase, catalytic, beta
  ENSP ID: ENSP00000413599
MAIGKRLATLPTKEQKTQRLISELSLLNHKLPARVWLPTAGFDHHVVRVPHTQAVVLNSKDKAPYLIYVEVLECENFDTTSVPARIPENRIRSTRSVENLPECGITHEQRAGSFSTVPNYDNDDEAWSVDDIGELQVELPEVHTNSCDNISQFSVDSITSQESKEPVFIAAGDIRRRLSEQLAHTPTAFKR

SEQ ID NO: 62538 - protein, 95 aa, Homo sapiens
  Payload ID: 12496
  Gene Symbol: PI4KB
  Gene Name: phosphatidylinositol 4-kinase, catalytic, beta
  ENSP ID: ENSP00000431501
MAIGKRLATLPTKEQKTQRLISELSLLNHKLPARVWLPTAGFDHHVVRVPHTQAVVLNSKDKAPYLIYVEVLECENFDTTSVPARIPENRIRSTR

SEQ ID NO: 62539 - protein, 183 aa, Homo sapiens
  Payload ID: 12496
  Gene Symbol: PI4KB
  Gene Name: phosphatidylinositol 4-kinase, catalytic, beta
  ENSP ID: ENSP00000432426
PYKILVISADSGMIEPVVNAVSIHQVKKQSQLSLLDYFLQEHGSYTTEAFLSAQRNFVQSCAGYCLVCYLLQVKDRHNGNILLDAEGHIIHIDFGFILSSSPRNLGFETSAFKLTTEFVDVMGGLDGDMFNYYKMLMLQGLIAARKHMDKVVQIVEIMQQGGAGVRSGAIVPQASPLSRSPGA

SEQ ID NO: 62540 - protein, 484 aa, Homo sapiens
  Payload ID: 12496
  Gene Symbol: PI4KB
  Gene Name: phosphatidylinositol 4-kinase, catalytic, beta
  Uniprot ID: Q9UBF8
  ENSP ID: ENSP00000433149
MAIGKRLATLPTKEQKTQRLISELSLLNHKLPARVWLPTAGFDHHVVRVPHTQAVVLNSKDKAPYLIYVEVLECENFDTTSVPARIPENRIRSTRSVENLPECGITHEQRAGSFSTVPNYDNDDEAWSVDDIGELQVELPEVHTNSCDNISQFSVDSITSQESKEPVFIAAGDIRRRLSEQLAHTPTAFKRDPEDPSAVALKEPWQEKVRRIREGSPYGHLPNWRLLSVIVKCGDDLRQELLAFQVLKQLQSIWEQERVPLWIKPYKILVISADSGMIEPVVNAVSIHQVKKQSQLSLLDYFLQEHGSYTTEAFLSAQRNFVQSCAGYCLVCYLLQVKDRHNGNILLDAEGHIIHIDFGFILSSSPRNLGFETSAFKLTTEFVDVMGGLDGDMFNYYKMLMLQGLIAARKHMDKVVQIVEIMQQGSQLPCFHGSSTIRNLKERFHMSMTEEQLQLLVEQMVDGSMRSITTKLYDGFQYLTNGIM

SEQ ID NO: 62541 - protein, 632 aa, Homo sapiens
  Payload ID: 12497
  Gene Symbol: PICALM
  Gene Name: phosphatidylinositol binding clathrin assembly protein
  Uniprot ID: Q13492
  ENSP ID: ENSP00000348718
MSGQSLTDRITAAQHSVTGSAVSKTVCKATTHEIMGPKKKHLDYLIQCTNEMNVNIPQLADSLFERTTNSSWVVVFKSLITTHHLMVYGNERFIQYLASRNTLFNLSNFLDKSGLQGYDMSTFIRRYSRYLNEKAVSYRQVAFDFTKVKRGADGVMRTMNTEKLLKTVPIIQNQMDALLDFNVNSNELTNGVINAAFMLLFKDAIRLFAAYNEGIINLLEKYFDMKKNQCKEGLDIYKKFLTRMTRISEFLKVAEQVGIDRGDIPDLSQAPSSLLDALEQHLASLEGKKIKDSTAASRATTLSNAVSSLASTGLSLTKVDEREKQAALEEEQARLKALKEQRLKELAKKPHTSLTTAASPVSTSAGGIMTAPAIDIFSTPSSSNSTSKLPNDLLDLQQPTFHPSVHPMSTASQVASTWGDPFSATVDAVDDAIPSLNPFLTKSSGDVHLSISSDVSTFTTRTPTHEMFVGFTPSPVAQPHPSAGLNVDFESVFGNKSTNVIVDSGGFDELGGLLKPTVASQNQNLPVAKLPPSKLVSDDLDSSLANLVGNLGIGNGTTKNDVNWSQPGEKKLTGGSNWQPKVAPTTAWNAATMPPQMGSVPVMTQPTLIYSQPVMRPPNPFGPVSGAQIQFM

SEQ ID NO: 62542 - protein, 652 aa, Homo sapiens
  Payload ID: 12497
  Gene Symbol: PICALM
  Gene Name: phosphatidylinositol binding clathrin assembly protein
  Uniprot ID: Q13492
  ENSP ID: ENSP00000377015
MSGQSLTDRITAAQHSVTGSAVSKTVCKATTHEIMGPKKKHLDYLIQCTNEMNVNIPQLADSLFERTTNSSWVVVFKSLITTHHLMVYGNERFIQYLASRNTLFNLSNFLDKSGLQGYDMSTFIRRYSRYLNEKAVSYRQVAFDFTKVKRGADGVMRTMNTEKLLKTVPIIQNQMDALLDFNVNSNELTNGVINAAFMLLFKDAIRLFAAYNEGIINLLEKYFDMKKNQCKEGLDIYKKFLTRMTRISEFLKVAEQVGIDRGDIPDLSQAPSSLLDALEQHLASLEGKKIKDSTAASRATTLSNAVSSLASTGLSLTKVDEREKQAALEEEQARLKALKEQRLKELAKKPHTSLTTAASPVSTSAGGIMTAPAIDIFSTPSSSNSTSKLPNDLLDLQQPTFHPSVHPMSTASQVASTWGDPFSATVDAVDDAIPSLNPFLTKSSGDVHLSISSDVSTFTTRTPTHEMFVGFTPSPVAQPHPSAGLNVDFESVFGNKSTNVIVDSGGFDELGGLLKPTVASQNQNLPVAKLPPSKLVSDDLDSSLANLVGNLGIGNGTTKNDVNWSQPGEKKLTGGSNWQPKVAPTTAWNAATMAPPVMAYPATTPTGMIGYGIPPQMGSVPVMTQPTLIYSQPVMRPPNPFGPVSGAQIQFM

SEQ ID NO: 62543 - protein, 148 aa, Homo sapiens
  Payload ID: 12497
  Gene Symbol: PICALM
  Gene Name: phosphatidylinositol binding clathrin assembly protein
  ENSP ID: ENSP00000431545
MGPKKKHLDYLIQCTNEMNVNIPQLADSLFERTTNSSWVVVFKSLITTHHLMVYGNERFIQYLASRNTLFNLSNFLDKSGLQGYDMSTFIRRYSRYLNEKAVSYRQVAFDFTKVKRGADGVMRTMNTEKLLKTVPIIQNQMDALLDFN

SEQ ID NO: 62544 - protein, 105 aa, Homo sapiens
  Payload ID: 12497
  Gene Symbol: PICALM
  Gene Name: phosphatidylinositol binding clathrin assembly protein
  ENSP ID: ENSP00000431728
MSGQSLTDRITAAQHSVTGSAVSKTVCKATTHEIMGPKKKHLDYLIQCTNEMNVNIPQLADSLFERTTNSSWVVVFKSLITTHHLMVYGNEDMTCLHLLGGIVDI

SEQ ID NO: 62545 - protein, 244 aa, Homo sapiens
  Payload ID: 12497
  Gene Symbol: PICALM
  Gene Name: phosphatidylinositol binding clathrin assembly protein
  ENSP ID: ENSP00000432509
  MOD_RES (1)..(1): Any amino acid
XAVSSLASTGLSLTKVDEREKQAALEEEQARLKALKEQRLKELAKKPHTSLTTAASPVSTSAGGIMTAPAIDIFSTPSSSNSTSKLPNDLLDLQQPTFHPSVHPMSTASQVASTWGGFTPSPVAQPHPSAGLNVDFESVFGNKSTNVIVDSGGFDELGGLLKPTVASQNQNLPVAKLPPSKLVSDDLDSSLANLVGNLGIGNGTTKNDVNWSQPGEKKLTGGSNWQPKVAPTTAWNAATMIQFM

SEQ ID NO: 62546 - protein, 264 aa, Homo sapiens
  Payload ID: 12497
  Gene Symbol: PICALM
  Gene Name: phosphatidylinositol binding clathrin assembly protein
  ENSP ID: ENSP00000432976
  MOD_RES (1)..(1): Any amino acid
XTSKLPNDLLDLQQPTFHPSVHPMSTASQVASTWGDAVDDAIPSLNPFLTKSSGDVHLSISSDVSTFTTRTPTHEMFVGFTPSPVAQPHPSAGLNVDFESVFGNKSTNVIVDSGGGLLKPTVASQNQNLPVAKLPPSKLVSDDLDSSLANLVGNLGIGNGTTKNDVNWSQPGEKKLTGGSNWQPKVAPTTAWNAATMNGMHFPQYAPPVMAYPATTPTGMIGYGIPPQMGSVPVMTQPTLIYSQPVMRPPNPFGPVSGAQIQFM

SEQ ID NO: 62547 - protein, 48 aa, Homo sapiens
  Payload ID: 12497
  Gene Symbol: PICALM
  Gene Name: phosphatidylinositol binding clathrin assembly protein
  ENSP ID: ENSP00000433166
MSGQSLTDRITAAQHSVTGSAVSKTVCKATTHEIMGPKKKHLDWLMEL

SEQ ID NO: 62548 - protein, 185 aa, Homo sapiens
  Payload ID: 12497
  Gene Symbol: PICALM
  Gene Name: phosphatidylinositol binding clathrin assembly protein
  ENSP ID: ENSP00000433303
MGPKKKHLDYLIQCTNEMNVNIPQLADSLFERTTNSSWVVVFKSLITTHHLMVYGNERFIQYLASRNTLFNLSNFLDKSGLQGYDMSTFIRRYSRYLNEKAVSYRQVAFDFTKVKRGADGVMRTMNTEKLLKTVPIIQNQMDALLDFNVNSNELTNGVINAAFMLLFKDAIRLFAAYNEGIINLL

SEQ ID NO: 62549 - protein, 645 aa, Homo sapiens
  Payload ID: 12497
  Gene Symbol: PICALM
  Gene Name: phosphatidylinositol binding clathrin assembly protein
  Uniprot ID: Q13492
  ENSP ID: ENSP00000433846
MSGQSLTDRITAAQHSVTGSAVSKTVCKATTHEIMGPKKKHLDYLIQCTNEMNVNIPQLADSLFERTTNSSWVVVFKSLITTHHLMVYGNERFIQYLASRNTLFNLSNFLDKSGLQGYDMSTFIRRYSRYLNEKAVSYRQVAFDFTKVKRGADGVMRTMNTEKLLKTVPIIQNQMDALLDFNVNSNELTNGVINAAFMLLFKDAIRLFAAYNEGIINLLEKYFDMKKNQCKEGLDIYKKFLTRMTRISEFLKVAEQVGIDRGDIPDLSQAPSSLLDALEQHLASLEGKKIKDSTAASRATTLSNAVSSLASTGLSLTKVDEREKQAALEEEQARLKALKEQRLKELAKKPHTSLTTAASPVSTSAGGIMTAPAIDIFSTPSSSNSTSKLPNDLLDLQQPTFHPSVHPMSTASQVASTWGDAVDDAIPSLNPFLTKSSGDVHLSISSDVSTFTTRTPTHEMFVGFTPSPVAQPHPSAGLNVDFESVFGNKSTNVIVDSGGFDELGGLLKPTVASQNQNLPVAKLPPSKLVSDDLDSSLANLVGNLGIGNGTTKNDVNWSQPGEKKLTGGSNWQPKVAPTTAWNAATMAPPVMAYPATTPTGMIGYGIPPQMGSVPVMTQPTLIYSQPVMRPPNPFGPVSGAQIQFM

SEQ ID NO: 62550 - protein, 551 aa, Homo sapiens
  Payload ID: 12497
  Gene Symbol: PICALM
  Gene Name: phosphatidylinositol binding clathrin assembly protein
  Uniprot ID: Q13492
  ENSP ID: ENSP00000434884
MNVNIPQLADSLFERTTNSSWVVVFKSLITTHHLMVYGNERFIQYLASRNTLFNLSNFLDKSGLQGYDMSTFIRRYSRYLNEKAVSYRQVAFDFTKVKRGADGVMRTMNTEKLLKTVPIIQNQMDALLDFNVNSNELTNGVINAAFMLLFKDAIRLFAAYNEGIINLLEKYFDMKKNQCKEGLDIYKKFLTRMTRISEFLKVAEQVGIDRGDIPDLSQAPSSLLDALEQHLASLEGKKIKDSTAASRATTLSNAVSSLASTGLSLTKVDEREKQAALEEEQARLKALKEQRLKELAKKPHTSLTTAASPVSTSAGGIMTAPAIDIFSTPSSSNSTSKLPNDLLDLQQPTFHPSVHPMSTASQVASTWGGFTPSPVAQPHPSAGLNVDFESVFGNKSTNVIVDSGGFDELGGLLKPTVASQNQNLPVAKLPPSKLVSDDLDSSLANLVGNLGIGNGTTKNDVNWSQPGEKKLTGGSNWQPKVAPTTAWNAATMAPPVMAYPATTPTGMIGYGIPPQMGSVPVMTQPTLIYSQPVMRPPNPFGPVSGAQIQFM

SEQ ID NO: 62551 - protein, 134 aa, Homo sapiens
  Payload ID: 12497
  Gene Symbol: PICALM
  Gene Name: phosphatidylinositol binding clathrin assembly protein
  ENSP ID: ENSP00000435311
  MOD_RES (1)..(1): Any amino acid
XNKSTNVIVDSGGGLLKPTVASQNQNLPVAKLPPSKLVSDDLDSSLANLVGNLGIGNGTTKNDVNWSQPGEKKLTGGSNWQPKVAPTTAWNAATMPPQMGSVPVMTQPTLIYSQPVMRPPNPFGPVSGAQIQFM

SEQ ID NO: 62552 - protein, 48 aa, Homo sapiens; identical to SEQ ID NO: 62547
  Payload ID: 12497
  Gene Symbol: PICALM
  Gene Name: phosphatidylinositol binding clathrin assembly protein
  ENSP ID: ENSP00000435499

SEQ ID NO: 62553 - protein, 302 aa, Homo sapiens
  Payload ID: 12497
  Gene Symbol: PICALM
  Gene Name: phosphatidylinositol binding clathrin assembly protein
  ENSP ID: ENSP00000435737
  MOD_RES (1)..(1): Any amino acid
XATTLSNAVSSLASTGLSLTKVDEREKQAALEEEQARLKALKEQRLKELAKKPHTSLTTAASPVSTSAGGIMTAPAIDIFSTPSSSNSTSKLPNDLLDLQQPTFHPSVHPMSTASQVASTWGDPFSATVDAVDDAIPSLNPFLTKSSGDVHLSISSDVSTFTTRTPTHEMFVGFTPSPVAQPHPSAGLNVDFESVFGNKSTNVIVDSGGGLLKPTVASQNQNLPVAKLPPSKLVSDDLDSSLANLVGNLGIGNGTTKNDVNWSQPGEKKLTGGSNWQPKVAPTTAWNAATMAPPVMAYPATT

SEQ ID NO: 62554 - protein, 308 aa, Homo sapiens
  Payload ID: 12497
  Gene Symbol: PICALM
  Gene Name: phosphatidylinositol binding clathrin assembly protein
  ENSP ID: ENSP00000435807
  MOD_RES (1)..(1): Any amino acid
XATTLSNAVSSLASTGLSLTKVDEREKQAALEEEQARLKALKEQRLKELAKKPHTSLTTAASPVSTSAGGIMTAPAIDIFSTPSSSNSTSKLPNDLLDLQQPTFHPSVHPMSTASQVASTWGGFTPSPVAQPHPSAGLNVDFESVFGNKSTNVIVDSGGGLLKPTVASQNQNLPVAKLPPSKLVSDDLDSSLANLVGNLGIGNGTTKNDVNWSQPGEKKLTGGSNWQPKVAPTTAWNAATMNGMHFPQYAPPVMAYPATTPTGMIGYGIPPQMGSVPVMTQPTLIYSQPVMRPPNPFGPVSGAQIQFM

SEQ ID NO: 62555 - protein, 147 aa, Homo sapiens
  Payload ID: 12497
  Gene Symbol: PICALM
  Gene Name: phosphatidylinositol binding clathrin assembly protein
  ENSP ID: ENSP00000436508
MNVNIPQLADSLFERTTNSSWVVVFKSLITTHHLMVYGNERFIQYLASRNTLFNLSNFLDKSGLQGYDMSTFIRRYSRYLNEKAVSYRQVAFDFTKVKRGADGVMRTMNTEKLLKTVPIIQNQMDALLDFNVNSNELTNGVINAAFM

SEQ ID NO: 62556 - protein, 215 aa, Homo sapiens
  Payload ID: 12497
  Gene Symbol: PICALM
  Gene Name: phosphatidylinositol binding clathrin assembly protein
  ENSP ID: ENSP00000436852
  MOD_RES (1)..(1): Any amino acid
XFVGFTPSPVAQPHPSAGLNVDFESVFGNKSTNVIVDSGGGLLKPTVASQNQNLPVAKLPPSKLVSDDLDSSLANLVGNLGIGNGTTKNDVNWSQPGEKKLTGGSNWQPKVAPTTAWNAATMNGMHFPQYAPPVMAYPATTPTGMIGYGIPPQMGSVPVMTQPTLIYSQPVMRPPNPFGPVSGAQLSAASSPSSHSPHRASGKDPFAELSLEDFL

SEQ ID NO: 62557 - protein, 610 aa, Homo sapiens
  Payload ID: 12497
  Gene Symbol: PICALM
  Gene Name: phosphatidylinositol binding clathrin assembly protein
  Uniprot ID: Q13492
  ENSP ID: ENSP00000436958
MSGQSLTDRITAAQHSVTGSAVSKTVCKATTHEIMGPKKKHLDYLIQCTNEMNVNIPQLADSLFERTTNSSWVVVFKSLITTHHLMVYGNERFIQYLASRNTLFNLSNFLDKSGLQGYDMSTFIRRYSRYLNEKAVSYRQVAFDFTKVKRGADGVMRTMNTEKLLKTVPIIQNQMDALLDFNVNSNELTNGVINAAFMLLFKDAIRLFAAYNEGIINLLEKYFDMKKNQCKEGLDIYKKFLTRMTRISEFLKVAEQVGIDRGDIPDLSQAPSSLLDALEQHLASLEGKKIKDSTAASRATTLSNAVSSLASTGLSLTKVDEREKQAALEEEQARLKALKEQRLKELAKKPHTSLTTAASPVSTSAGGIMTAPAIDIFSTPSSSNSTSKLPNDLLDLQQPTFHPSVHPMSTASQVASTWGGFTPSPVAQPHPSAGLNVDFESVFGNKSTNVIVDSGGFDELGGLLKPTVASQNQNLPVAKLPPSKLVSDDLDSSLANLVGNLGIGNGTTKNDVNWSQPGEKKLTGGSNWQPKVAPTTAWNAATMNGMHFPQYAPPVMAYPATTPTGMIGYGIPPQMGSVPVMTQPTLIYSQPVMRPPNPFGPVSGAQIQFM

SEQ ID NO: 62558 - protein, 105 aa, Homo sapiens; identical to SEQ ID NO: 62544
  Payload ID: 12497
  Gene Symbol: PICALM
  Gene Name: phosphatidylinositol binding clathrin assembly protein
  ENSP ID: ENSP00000487119

SEQ ID NO: 62559 - protein, 484 aa, Homo sapiens
  Payload ID: 12498
  Gene Symbol: PIGA
  Gene Name: phosphatidylinositol glycan anchor biosynthesis, class A
  Uniprot ID: P37287
  ENSP ID: ENSP00000369820
MACRGGAGNGHRASATLSRVSPGSLYTCRTRTHNICMVSDFFYPNMGGVESHIYQLSQCLIERGHKVIIVTHAYGNRKGIRYLTSGLKVYYLPLKVMYNQSTATTLFHSLPLLRYIFVRERVTIIHSHSSFSAMAHDALFHAKTMGLQTVFTDHSLFGFADVSSVLTNKLLTVSLCDTNHIICVSYTSKENTVLRAALNPEIVSVIPNAVDPTDFTPDPFRRHDSITIVVVSRLVYRKGIDLLSGIIPELCQKYPDLNFIIGGEGPKRIILEEVRERYQLHDRVRLLGALEHKDVRNVLVQGHIFLNTSLTEAFCMAIVEAASCGLQVVSTRVGGIPEVLPENLIILCEPSVKSLCEGLEKAIFQLKSGTLPAPENIHNIVKTFYTWRNVAERTEKVYDRVSVEAVLPMDKRLDRLISHCGPVTGYIFALLAVFNFLFLIFLRWMTPDSIIDVAIDATGPRGAWTNNYSHSKRGGENNEISETR

SEQ ID NO: 62560 - protein, 484 aa, Homo sapiens; identical to SEQ ID NO: 62559
  Payload ID: 12498
  Gene Symbol: PIGA
  Gene Name: phosphatidylinositol glycan anchor biosynthesis, class A
  Uniprot ID: P37287
  ENSP ID: ENSP00000442653

SEQ ID NO: 62561 - protein, 51 aa, Homo sapiens
  Payload ID: 12498
  Gene Symbol: PIGA
  Gene Name: phosphatidylinositol glycan anchor biosynthesis, class A
  ENSP ID: ENSP00000488970
QGHIFLNTSLTEAFCMAIVEAASCGLQVYDRVSVEAVLPMDKRLDRLISHC

SEQ ID NO: 62562 - protein, 150 aa, Homo sapiens
  Payload ID: 12498
  Gene Symbol: PIGA
  Gene Name: phosphatidylinositol glycan anchor biosynthesis, class A
  ENSP ID: ENSP00000489083
MAIVEAASCGLQVVSTRVGGIPEVLPENLIILCEPSVKSLCEGLEKAIFQLKSGTLPAPENIHNIVKTFYTWRNVAERTEKVYDRVSVEAVLPMDKRLDRLISHCGPVTGYIFALLAVFNFLFLIFLRWMTPDSIIDVAIDATGPRGAWT

SEQ ID NO: 62563 - protein, 152 aa, Homo sapiens
  Payload ID: 12498
  Gene Symbol: PIGA
  Gene Name: phosphatidylinositol glycan anchor biosynthesis, class A
  ENSP ID: ENSP00000489205
MACRGGAGNGHRASATLSRVSPGSLYTCRTRTHNICMVSDFFYPNMGGVESHIYQLSQCLIERGHKVIIVTHAYGNRKGIRYLTSGLKVYYLPLKVMYNQSTATTLFHSLPLLRYIFVRERVTIIHSHSSFSAMAHDALFHAKTMGLQTVFT

SEQ ID NO: 62564 - protein, 118 aa, Homo sapiens
  Payload ID: 12498
  Gene Symbol: PIGA
  Gene Name: phosphatidylinositol glycan anchor biosynthesis, class A
  ENSP ID: ENSP00000489207
MACRGGAGNGHRASATLSRVSPGSLYTCRTRTHNICMVSDFFYPNMGGVESHIYQLSQCLIERGHKVIIVTHAYGNRKGIRYLTSGLKVYYLPLKVMYNQSTATTLFHSLPLLRDRFA

SEQ ID NO: 62565 - protein, 99 aa, Homo sapiens
  Payload ID: 12498
  Gene Symbol: PIGA
  Gene Name: phosphatidylinositol glycan anchor biosynthesis, class A
  ENSP ID: ENSP00000489491
VTHAYGNRKGIRYLTSGLKVYYLPLKVMYNQSTATTLFHSLPLLRSLLDQISKSHWNVLSEREDKSKFSLSRLFGCLFPEPPLPSLFCSQSGFTSTLHV

SEQ ID NO: 62566 - protein, 315 aa, Homo sapiens
  Payload ID: 12498
  Gene Symbol: PIGA
  Gene Name: phosphatidylinositol glycan anchor biosynthesis, class A
  ENSP ID: ENSP00000489528
MACRGGAGNGHRASATLSRVSPGSLYTCRTRTHNICMVSDFFYPNMGGVESHIYQLSQCLIERGHKVIIVTHAYGNRKGIRYLTSGLKVYYLPLKVMYNQSTATTLFHSLPLLRVRLLGALEHKDVRNVLVQGHIFLNTSLTEAFCMAIVEAASCGLQVVSTRVGGIPEVLPENLIILCEPSVKSLCEGLEKAIFQLKSGTLPAPENIHNIVKTFYTWRNVAERTEKVYDRVSVEAVLPMDKRLDRLISHCGPVTGYIFALLAVFNFLFLIFLRWMTPDSIIDVAIDATGPRGAWTNNYSHSKRGGENNEISETR

SEQ ID NO: 62567 - protein, 250 aa, Homo sapiens
  Payload ID: 12498
  Gene Symbol: PIGA
  Gene Name: phosphatidylinositol glycan anchor biosynthesis, class A
  ENSP ID: ENSP00000489540
MELTGIDLLSGIIPELCQKYPDLNFIIGGEGPKRIILEEVRERYQLHDRVRLLGALEHKDVRNVLVQGHIFLNTSLTEAFCMAIVEAASCGLQVVSTRVGGIPEVLPENLIILCEPSVKSLCEGLEKAIFQLKSGTLPAPENIHNIVKTFYTWRNVAERTEKVYDRVSVEAVLPMDKRLDRLISHCGPVTGYIFALLAVFNFLFLIFLRWMTPDSIIDVAIDATGPRGAWTNNYSHSKRGGENNEISETR

SEQ ID NO: 62568 - protein, 554 aa, Homo sapiens
  Payload ID: 12499
  Gene Symbol: PIGB
  Gene Name: phosphatidylinositol glycan anchor biosynthesis, class B
  Uniprot ID: Q92521
  ENSP ID: ENSP00000164305
MRRPLSKCGMEPGGGDASLTLHGLQNRSHGKIKLRKRKSTLYFNTQEKSARRRGDLLGENIYLLLFTIALRILNCFLVQTSFVPDEYWQSLEVSHHMVFNYGYLTWEWTERLRSYTYPLIFASIYKILHLLGKDSVQLLIWIPRLAQALLSAVADVRLYSLMKQLENQEVARWVFFCQLCSWFTWYCCTRTLTNTMETVLTIIALFYYPLEGSKSMNSVKYSSLVALAFIIRPTAVILWTPLLFRHFCQEPRKLDLILHHFLPVGFVTLSLSLMIDRIFFGQWTLVQFNFLKFNVLQNWGTFYGSHPWHWYFSQGFPVILGTHLPFFIHGCYLAPKRYRILLVTVLWTLLVYSMLSHKEFRFIYPVLPFCMVFCGYSLTHLKTWKKPALSFLFLSNLFLALYTGLVHQRGTLDVMSHIQKVCYNNPNKSSASIFIMMPCHSTPYYSHVHCPLPMRFLQCPPDLTGKSHYLDEADVFYLNPLNWLHREFHDDASLPTHLITFSILEEEISAFLISSNYKRTAVFFHTHLPEGRIGSHIYVYERKLKGKFNMKMKF

SEQ ID NO: 62569 - protein, 555 aa, Homo sapiens
  Payload ID: 12499
  Gene Symbol: PIGB
  Gene Name: phosphatidylinositol glycan anchor biosynthesis, class B
  ENSP ID: ENSP00000438963
MRRPLSKCGMEPGGGDASLTLHGLQNRSHGKIKLRKRKSTLYFNTQEKSARRRGDLLGENIYLLLFTIALRILNCFLVQTSFVPDEYWQSLEVSHHMVFNNYGYLTWEWTERLRSYTYPLIFASIYKILHLLGKDSVQLLIWIPRLAQALLSAVADVRLYSLMKQLENQEVARWVFFCQLCSWFTWYCCTRTLTNTMETVLTIIALFYYPLEGSKSMNSVKYSSLVALAFIIRPTAVILWTPLLFRHFCQEPRKLDLILHHFLPVGFVTLSLSLMIDRIFFGQWTLVQFNFLKFNVLQNWGTFYGSHPWHWYFSQGFPVILGTHLPFFIHGCYLAPKRYRILLVTVLWTLLVYSMLSHKEFRFIYPVLPFCMVFCGYSLTHLKTWKKPALSFLFLSNLFLALYTGLVHQRGTLDVMSHIQKVCYNNPNKSSASIFIMMPCHSTPYYSHVHCPLPMRFLQCPPDLTGKSHYLDEADVFYLNPLNWLHREFHDDASLPTHLITFSILEEEISAFLISSNYKRTAVFFHTHLPEGRIGSHIYVYERKLKGKFNMKMKF

SEQ ID NO: 62570 - protein, 88 aa, Homo sapiens
  Payload ID: 12499
  Gene Symbol: PIGB
  Gene Name: phosphatidylinositol glycan anchor biosynthesis, class B
  ENSP ID: ENSP00000455040
GCYLAPKRYRILLVTVLWTLLVYSMLSHKEFRFIYPVLPFCMVFCGYSLTHLKTWKKPALSFLFLSNLFLALYTGLVHQRAMFTAHFP

SEQ ID NO: 62571 - protein, 134 aa, Homo sapiens
  Payload ID: 12499
  Gene Symbol: PIGB
  Gene Name: phosphatidylinositol glycan anchor biosynthesis, class B
  ENSP ID: ENSP00000455943
MRRPLSKCGMEPGGGDASLTLHGLQNRSHGKIKLRKRKSTLYFNTQEKSARRRGVFLPVVLLVHMVLLYQNPYKHHGNCSHYNCSFLLSFGRFKVYEQCQILIPGGTCLHNSSHSCHSVDTFALQTFLSRTKKA

SEQ ID NO: 62572 - protein, 58 aa, Homo sapiens
  Payload ID: 12499
  Gene Symbol: PIGB
  Gene Name: phosphatidylinositol glycan anchor biosynthesis, class B
  ENSP ID: ENSP00000456285
MRRPLSKCGMEPGGGDASLTLHGLQNRSHGKIKLRKRKSTLYFNTQEKSARRRGDLDS

SEQ ID NO: 62573 - protein, 255 aa, Homo sapiens
  Payload ID: 12499
  Gene Symbol: PIGB
  Gene Name: phosphatidylinositol glycan anchor biosynthesis, class B
  ENSP ID: ENSP00000456531
MRRPLSKCGMEPGGGDASLTLHGLQNRSHGKIKLRKRKSTLYFNTQEKSARRRGDLLGENIYLLLFTIALRILNCFLVQTSFVPDEYWQSLEVSHHMVFKERLRSYTYPLIFASIYKILHLLGKDSVQLLIWIPRLAQALLSAVADVRLYSLMKQLENQEVARWVFFCQLCSWFTWYCCTRTLTNTMETVLTIIALFYYPLEGSKSMNSVKYSSLVALAFIIRPTAVILWTPLLFRHFCQEPRKLDLILHHFLPV

SEQ ID NO: 62574 - protein, 297 aa, Homo sapiens
  Payload ID: 12500
  Gene Symbol: PIGC
  Gene Name: phosphatidylinositol glycan anchor biosynthesis, class C
  Uniprot ID: Q92535
  ENSP ID: ENSP00000356701
MYAQPVTNTKEVKWQKVLYERQPFPDNYVDRRFLEELRKNIHARKYQYWAVVFESSVVIQQLCSVCVFVVIWWYMDEGLLAPHWLLGTGLASSLIGYVLFDLIDGGEGRKKSGQTRWADLKSALVFITFTYGFSPVLKTLTESVSTDTIYAMSVFMLLGHLIFFDYGANAAIVSSTLSLNMAIFASVCLASRLPRSLHAFIMVTFAIQIFALWPMLQKKLKACTPRSYVGVTLLFAFSAVGGLLSISAVGAVLFALLLMSISCLCPFYLIRLQLFKENIHGPWDEAEIKEDLSRFLS

SEQ ID NO: 62575 - protein, 297 aa, Homo sapiens; identical to SEQ ID NO: 62574
  Payload ID: 12500
  Gene Symbol: PIGC
  Gene Name: phosphatidylinositol glycan anchor biosynthesis, class C
  Uniprot ID: Q92535
  ENSP ID: ENSP00000356702

SEQ ID NO: 62576 - protein, 219 aa, Homo sapiens
  Payload ID: 12501
  Gene Symbol: PIGF
  Gene Name: phosphatidylinositol glycan anchor biosynthesis, class F
  Uniprot ID: Q07326
  ENSP ID: ENSP00000281382
MKDNDIKRLLYTHLLCIFSIILSVFIPSLFLENFSILETHLTWLCICSGFVTAVNLVLYLVVKPNTSSKRSSLSHKVTGFLKCCIYFLMSCFSFHVIFVLYGAPLIELALETFLFAVILSTFTTVPCLCLLGPNLKAWLRVFSRNGVTSIWENSLQITTISSFVGAWLGALPIPLDWERPWQVWPISCTLGATFGYVAGLVISPLWIYWNRKQLTYKNN

SEQ ID NO: 62577 - protein, 206 aa, Homo sapiens
  Payload ID: 12501
  Gene Symbol: PIGF
  Gene Name: phosphatidylinositol glycan anchor biosynthesis, class F
  Uniprot ID: Q07326
  ENSP ID: ENSP00000302663
MKDNDIKRLLYTHLLCIFSIILSVFIPSLFLENFSILETHLTWLCICSGFVTAVNLVLYLVVKPNTSSKRSSLSHKVTGFLKCCIYFLMSCFSFHVIFVLYGAPLIELALETFLFAVILSTFTTVPCLCLLGPNLKAWLRVFSRNGVTSIWENSLQITTISSFVGAWLGALPIPLDWERPWQMTVERKRSTYRSLHVPCRGLGTVK

SEQ ID NO: 62578 - protein, 57 aa, Homo sapiens
  Payload ID: 12501
  Gene Symbol: PIGF
  Gene Name: phosphatidylinositol glycan anchor biosynthesis, class F
  ENSP ID: ENSP00000410361
LGPNLKAWLRVFSRNGVTSIWENSLQITTISSFVGAWLGALPIPLDWERPWQKQIAR

SEQ ID NO: 62579 - protein, 112 aa, Homo sapiens
  Payload ID: 12501
  Gene Symbol: PIGF
  Gene Name: phosphatidylinositol glycan anchor biosynthesis, class F
  ENSP ID: ENSP00000413202
MKDNDIKRLLYTHLLCIFSIILSVFIPSLFLENFSILETHLTWLCICSGFVTAVNLVLYLVVKPNTSSKRSSLSHKVGIGNIFICSYFVYFYYCALLMFVRTKPQSMAKSVQ

SEQ ID NO: 62580 - protein, 49 aa, Homo sapiens
  Payload ID: 12501
  Gene Symbol: PIGF
  Gene Name: phosphatidylinositol glycan anchor biosynthesis, class F
  ENSP ID: ENSP00000429355
MKDNDIKRLLYTHLLCIFSIILSVFIPSLFLENFSILETHLTWLCICSG

SEQ ID NO: 62581 - protein, 975 aa, Homo sapiens
  Payload ID: 12502
  Gene Symbol: PIGG
  Gene Name: phosphatidylinositol glycan anchor biosynthesis, class G
  Uniprot ID: Q5H8A4
  ENSP ID: ENSP00000311750
MRLGSGTFATCCVAIEVLGIAVFLRGFFPAPVRSSARAEHGAEPPAPEPSAGASSNWTTLPPPLFSKVVIVLIDALRDDFVFGSKGVKFMPYTTYLVEKGASHSFVAEAKPPTVTMPRIKALMTGSLPGFVDVIRNLNSPALLEDSVIRQAKAAGKRIVFYGDETWVKLFPKHFVEYDGTTSFFVSDYTEVDNNVTRHLDKVLKRGDWDILILHYLGLDHIGHISGPNSPLIGQKLSEMDSVLMKIHTSLQSKERETPLPNLLVLCGDHGMSETGSHGASSTEEVNTPLILISSAFERKPGDIRHPKHVQQTDVAATLAIALGLPIPKDSVGSLLFPVVEGRPMREQLRFLHLNTVQLSKLLQENVPSYEKDPGFEQFKMSERLHGNWIRLYLEEKHSEVLFNLGSKVLRQYLDALKTLSLSLSAQVAQYDIYSMMVLTLLLLSVPQALRRKAELEVPLSSPGFSLLFYLVILVLSAVHVIVCTSAESSCYFCGLSWLAAGGVMVLASALLCVIVSVLTNVLVGGNTPRKNPMHPSSRWSELDLLILLGTAGHVLSLGASSFVEEEHQTWYFLVNTLCLALSQETYRNYFLGDDGEPPCGLCVEQGHDGATAAWQDGPGCDVLERDKGHGSPSTSEVLRGREKWMVLASPWLILACCRLLRSLNQTGVQWAHRPDLGHWLTSSDHKAELSVLAALSLLVVFVLVQRGCSPVSKAALALGLLGVYCYRAAIGSVRFPWRPDSKDISKGIIEARFVYVFVLGILFTGTKDLLKSQVIAADFKLKTVGLWEIYSGLVLLAALLFRPHNLPVLAFSLLIQTLMTKFIWKPLRHDAAEITVMHYWFGQAFFYFQGNSNNIATVDISAGFVGLDTYVEIPAVLLTAFGTYAGPVLWASHLVHFLSSETRSGSALSHACFCYALICSIPVFTYIVLVTSLRYHLFIWSVFSPKLLYEGMHLLITAAVCVFFTAMDQTRLTQS

SEQ ID NO: 62582 - protein, 850 aa, Homo sapiens
  Payload ID: 12502
  Gene Symbol: PIGG
  Gene Name: phosphatidylinositol glycan anchor biosynthesis, class G
  Uniprot ID: Q5H8A4
  ENSP ID: ENSP00000372494
MRLGSGTFATCCVAIEVLGIAVFLRGFFPAPVRSSARAEHGAEPPAPEPSAGASSNWTTLPPPLFSKVVIVLIDALRDDFVFGSKGVKFMPYTTYLVEKGASHSFVAEAKPPTVTMPRIKERETPLPNLLVLCGDHGMSETGSHGASSTEEVNTPLILISSAFERKPGDIRHPKHVQQTDVAATLAIALGLPIPKDSVGSLLFPVVEGRPMREQLRFLHLNTVQLSKLLQENVPSYEKDPGFEQFKMSERLHGNWIRLYLEEKHSEVLFNLGSKVLRQYLDALKTLSLSLSAQVAQYDIYSMMVGTVVVLEVLTLLLLSVPQALRRKAELEVPLSSPGFSLLFYLVILVLSAVHVIVCTSAESSCYFCGLSWLAAGGVMVLASALLCVIVSVLTNVLVGGNTPRKNPMHPSSRWSELDLLILLGTAGHVLSLGASSFVEEEHQTWYFLVNTLCLALSQETYRNYFLGDDGEPPCGLCVEQGHDGATAAWQDGPGCDVLERDKGHGSPSTSEVLRGREKWMVLASPWLILACCRLLRSLNQTGVQWAHRPDLGHWLTSSDHKAELSVLAALSLLVVFVLVQRGCSPVSKAALALGLLGVYCYRAAIGSVRFPWRPDSKDISKGIIEARFVYVFVLGILFTGTKDLLKSQVIAADFKLKTVGLWEIYSGLVLLAALLFRPHNLPVLAFSLLIQTLMTKFIWKPLRHDAAEITVMHYWFGQAFFYFQGNSNNIATVDISAGFVGLDTYVEIPAVLLTAFGTYAGPVLWASHLVHFLSSETRSGSALSHACFCYALICSIPVFTYIVLVTSLRYHLFIWSVFSPKLLYEGMHLLITAAVCVFFTAMDQTRLTQS

SEQ ID NO: 62583 - protein, 983 aa, Homo sapiens
  Payload ID: 12502
  Gene Symbol: PIGG
  Gene Name: phosphatidylinositol glycan anchor biosynthesis, class G
  Uniprot ID: Q5H8A4
  ENSP ID: ENSP00000415203
MRLGSGTFATCCVAIEVLGIAVFLRGFFPAPVRSSARAEHGAEPPAPEPSAGASSNWTTLPPPLFSKVVIVLIDALRDDFVFGSKGVKFMPYTTYLVEKGASHSFVAEAKPPTVTMPRIKALMTGSLPGFVDVIRNLNSPALLEDSVIRQAKAAGKRIVFYGDETWVKLFPKHFVEYDGTTSFFVSDYTEVDNNVTRHLDKVLKRGDWDILILHYLGLDHIGHISGPNSPLIGQKLSEMDSVLMKIHTSLQSKERETPLPNLLVLCGDHGMSETGSHGASSTEEVNTPLILISSAFERKPGDIRHPKHVQQTDVAATLAIALGLPIPKDSVGSLLFPVVEGRPMREQLRFLHLNTVQLSKLLQENVPSYEKDPGFEQFKMSERLHGNWIRLYLEEKHSEVLFNLGSKVLRQYLDALKTLSLSLSAQVAQYDIYSMMVGTVVVLEVLTLLLLSVPQALRRKAELEVPLSSPGFSLLFYLVILVLSAVHVIVCTSAESSCYFCGLSWLAAGGVMVLASALLCVIVSVLTNVLVGGNTPRKNPMHPSSRWSELDLLILLGTAGHVLSLGASSFVEEEHQTWYFLVNTLCLALSQETYRNYFLGDDGEPPCGLCVEQGHDGATAAWQDGPGCDVLERDKGHGSPSTSEVLRGREKWMVLASPWLILACCRLLRSLNQTGVQWAHRPDLGHWLTSSDHKAELSVLAALSLLVVFVLVQRGCSPVSKAALALGLLGVYCYRAAIGSVRFPWRPDSKDISKGIIEARFVYVFVLGILFTGTKDLLKSQVIAADFKLKTVGLWEIYSGLVLLAALLFRPHNLPVLAFSLLIQTLMTKFIWKPLRHDAAEITVMHYWFGQAFFYFQGNSNNIATVDISAGFVGLDTYVEIPAVLLTAFGTYAGPVLWASHLVHFLSSETRSGSALSHACFCYALICSIPVFTYIVLVTSLRYHLFIWSVFSPKLLYEGMHLLITAAVCVFFTAMDQTRLTQS

SEQ ID NO: 62584 - protein, 480 aa, Homo sapiens
  Payload ID: 12502
  Gene Symbol: PIGG
  Gene Name: phosphatidylinositol glycan anchor biosynthesis, class G
  ENSP ID: ENSP00000421550
MPYTTYLVEKGASHSFVAEAKPPTVTMPRIKALMTGSLPGFVDVIRNLNSPALLEDSVIRQAKAAGKRIVFYGDETWVKLFPKHFVEYDGTTSFFVSDYTEVDNNVTRHLDKVLKRGDWDILILHYLGLDHIGHISGPNSPLIGQKLSEMDSVLMKIHTSLQSKERETPLPNLLVLCGDHGMSETGSHGASSTEEVNTPLILISSAFERKPGDIRHPKHVQQTDVAATLAIALGLPIPKDSVGSLLFPVVEGRPMREQLRFLHLNTVQLSKLLQENVPSYEKDPGFEQFKMSERLHGNWIRLYLEEKHSEVLFNLGSKVLRQYLDALKTLSLSLSAQVAQYDIYSMMVGTVVVLEVLTLLLLSVPQALRRKAELEVPLSSPGFSLLFYLVILVLSAVHVIVCTSAESSCYFCGLSWLAAGGVMVLASALLCVIVSVLTNVLVGGNTPRKVRTAGSWECDVVLLLRLFLLFQAAFRLPDSG

SEQ ID NO: 62585 - protein, 24 aa, Homo sapiens
  Payload ID: 12502
  Gene Symbol: PIGG
  Gene Name: phosphatidylinositol glycan anchor biosynthesis, class G
  ENSP ID: ENSP00000422410
MTKFIWKPLRHDAAEITVMHYWFG

SEQ ID NO: 62586 - protein, 193 aa, Homo sapiens
  Payload ID: 12502
  Gene Symbol: PIGG
  Gene Name: phosphatidylinositol glycan anchor biosynthesis, class G
  ENSP ID: ENSP00000423596
MRLGSGTFATCCVAIEVLGIAVFLRGFFPAPVRSSARAEHGAEPPAPEPSAGASSNWTTLPPPLFSKVVIVLIDALRDDFVFGSKGVKFMPYTTYLVEKGASHSFVAEAKPPTVTMPRIKALMTGSLPGFVDVIRNLNSPALLEDSVIRQAKAAGKRIVFYGDETWVKLFPKHFVEYDGTTSFFVSDYTEKSM

SEQ ID NO: 62587 - protein, 463 aa, Homo sapiens
  Payload ID: 12502
  Gene Symbol: PIGG
  Gene Name: phosphatidylinositol glycan anchor biosynthesis, class G
  ENSP ID: ENSP00000424619
MRLGSGTFATCCVAIEVLGIAVFLRGFFPAPVRSSARAEHGAEPPAPEPSAGASSNWTTLPPPLFSKVVIVLIDALRDDFVFGSKGVKFMPYTTYLVEKGASHSFVAEAKPPTVTMPRIKALMTGSLPGFVDVIRNLNSPALLEDSVIRQAKAAGKRIVFYGDETWVKLFPKHFVEYDGTTSFFVSDYTEVDNNVTRHLDKVLKRGDWDILILHYLGLDHIGHISGPNSPLIGQKLSEMDSVLMKIHTSLQSKERETPLPNLLVLCGDHGMSETGSHGASSTEEVNTPLILISSAFERKPGDIRHPKHVQQTDVAATLAIALGLPIPKDSVGSLLFPVVEGRPMREQLRFLHLNTVQLSKLLQENVPSYEKDPGFEQFKMSERLHGNWIRLYLEEKHSEVLFNLGSKVLRQYLDALKTLSLSLSAQVAQFSPCSCSASHRHCAERLSWKSHCHLLGFLCSFIW

SEQ ID NO: 62588 - protein, 894 aa, Homo sapiens
  Payload ID: 12502
  Gene Symbol: PIGG
  Gene Name: phosphatidylinositol glycan anchor biosynthesis, class G
  ENSP ID: ENSP00000424800
MPYTTYLVEKGASHSFVAEAKPPTVTMPRIKALMTGSLPGFVDVIRNLNSPALLEDSVIRQAKAAGKRIVFYGDETWVKLFPKHFVEYDGTTSFFVSDYTEVDNNVTRHLDKVLKRGDWDILILHYLGLDHIGHISGPNSPLIGQKLSEMDSVLMKIHTSLQSKERETPLPNLLVLCGDHGMSETGSHGASSTEEVNTPLILISSAFERKPGDIRHPKHVQQTDVAATLAIALGLPIPKDSVGSLLFPVVEGRPMREQLRFLHLNTVQLSKLLQENVPSYEKDPGFEQFKMSERLHGNWIRLYLEEKHSEVLFNLGSKVLRQYLDALKTLSLSLSAQVAQYDIYSMMVGTVVVLEVLTLLLLSVPQALRRKAELEVPLSSPGFSLLFYLVILVLSAVHVIVCTSAESSCYFCGLSWLAAGGVMVLASALLCVIVSVLTNVLVGGNTPRKNPMHPSSRWSELDLLILLGTAGHVLSLGASSFVEEEHQTWYFLVNTLCLALSQETYRNYFLGDDGEPPCGLCVEQGHDGATAAWQDGPGCDVLERDKGHGSPSTSEVLRGREKWMVLASPWLILACCRLLRSLNQTGVQWAHRPDLGHWLTSSDHKAELSVLAALSLLVVFVLVQRGCSPVSKAALALGLLGVYCYRAAIGSVRFPWRPDSKDISKGIIEARFVYVFVLGILFTGTKDLLKSQVIAADFKLKTVGLWEIYSGLVLLAALLFRPHNLPVLAFSLLIQTLMTKFIWKPLRHDAAEITVMHYWFGQAFFYFQGNSNNIATVDISAGFVGLDTYVEIPAVLLTAFGTYAGPVLWASHLVHFLSSETRSGSALSHACFCYALICSIPVFTYIVLVTSLRYHLFIWSVFSPKLLYEGMHLLITAAVCVFFTAMDQTRLTQS

SEQ ID NO: 62589 - protein, 299 aa, Homo sapiens
  Payload ID: 12502
  Gene Symbol: PIGG
  Gene Name: phosphatidylinositol glycan anchor biosynthesis, class G
  Uniprot ID: Q5H8A4
  ENSP ID: ENSP00000426002
MPYTTYLVEKGASHSFVAEAKPPTVTMPRIKALMTGSLPGFVDVIRNLNSPALLEDSVIRQAKAAGKRIVFYGDETWVKLFPKHFVEYDGTTSFFVSDYTEVDNNVTRHLDKVLKRGDWDILILHYLGLDHIGHISGPNSPLIGQKLSEMDSVLMKIHTSLQSKERETPLPNLLVLCGDHGMSETGSHGASSTEEVNTPLILISSAFERKPGDIRHPKHVQQTDVAATLAIALGLPIPKDSVGSLLFPVVEGRPMREQLRFLHLNTVQLSKLLQENVPSYEKGSHPAPAQRPTGTAQKG

SEQ ID NO: 62590 - protein, 186 aa, Homo sapiens
  Payload ID: 12502
  Gene Symbol: PIGG
  Gene Name: phosphatidylinositol glycan anchor biosynthesis, class G
  ENSP ID: ENSP00000427069
MRLGSGTFATCCVAIEVLGIAVFLRGFFPAPVRSSARAEHGAEPPAPEPSAGASSNWTTLPPPLFSKVVIVLIDALRDDFVFGSKGVKFMPYTTYLVEKGASHSFVAEAKPPTVTMPRIKVSSLLTAALKYIVHFPRTVGKEKSIDDGEPSWLCRRHQEPQFSCTAGRQCDKTSKSSWKKNSLLWR

SEQ ID NO: 62591 - protein, 188 aa, Homo sapiens
  Payload ID: 12503
  Gene Symbol: PIGH
  Gene Name: phosphatidylinositol glycan anchor biosynthesis, class H
  Uniprot ID: Q14442
  ENSP ID: ENSP00000216452
MEDERSFSDICGGRLALQRRYYSPSCREFCLSCPRLSLRSLTAVTCTVWLAAYGLFTLCENSMILSAAIFITLLGLLGYLHFVKIDQETLLIIDSLGIQMTSSYASGKESTTFIEMGKVKDIVINEAIYMQKVIYYLCILLKDPVEPHGISQVVPVFQSAKPRLDCLIEVYRSCQEILAHQKATSTSP

SEQ ID NO: 62592 - protein, 136 aa, Homo sapiens
  Payload ID: 12503
  Gene Symbol: PIGH
  Gene Name: phosphatidylinositol glycan anchor biosynthesis, class H
  ENSP ID: ENSP00000452816
  MOD_RES (1)..(1): Any amino acid
XLLGLLGYLHFVKIDQETLLIIDSLGIQMTSSYASGKESTTFIEMGKVKDIVINEAIYMQKVIYYLCILLKDPVEPHGISQVVPVFQRQSLTLSPRLECSDNHHSLQPPPPRLKKSSCLSLLRTWDYRVPSPGWTA

SEQ ID NO: 62593 - protein, 83 aa, Homo sapiens
  Payload ID: 12503
  Gene Symbol: PIGH
  Gene Name: phosphatidylinositol glycan anchor biosynthesis, class H
  ENSP ID: ENSP00000452924
MEDERSFSDICGGRLALQRRYYSPSCREFCLSCPRLSLRSLTAVTCTVWLAAYGLFTLCEHDPLCCHLHHPLRSAWLSPFCED

SEQ ID NO: 62594 - protein, 133 aa, Homo sapiens
  Payload ID: 12503
  Gene Symbol: PIGH
  Gene Name: phosphatidylinositol glycan anchor biosynthesis, class H
  ENSP ID: ENSP00000452974
MEDERSFSDICGGRLALQRRYYSPSCREFCLSCPRLSLRSLTAVTCTVWLAAYGLFTLCENSMILSAAIFITLLGLLGYLHFVKIDQETLLIIDSLGIQMTSSYASGKESTTFIEMGKVKDIVINEAIYMVSI

SEQ ID NO: 62595 - protein, 137 aa, Homo sapiens
  Payload ID: 12503
  Gene Symbol: PIGH
  Gene Name: phosphatidylinositol glycan anchor biosynthesis, class H
  ENSP ID: ENSP00000452996
MEDERSFSDICGGRLALQRRYYSPSCREFCLSCPRLSLRSLTAVTCTVWLAAYGLFTLCENSMILSAAIFITLLGKESTTFIEMGKVKDIVINEAIYMQKVIYYLCILLKDPVEPHGISQVVPVFQRQSLTLSPRLE

SEQ ID NO: 62596 - protein, 137 aa, Homo sapiens
  Payload ID: 12503
  Gene Symbol: PIGH
  Gene Name: phosphatidylinositol glycan anchor biosynthesis, class H
  ENSP ID: ENSP00000453158
  MOD_RES (1)..(1): Any amino acid
XSCREFCLSCPRLSLRSLTAVTCTVWLAAYGLFTLCENSMILSAAIFITLLGLLGYLHFVKIDQETLLIIDSLGIQMTSSYASGKESTTFIEMGKVKDIVINEAIYMSAKPRLDCLIEVYRSCQEILAHQKATSTSP

SEQ ID NO: 62597 - protein, 187 aa, Homo sapiens
  Payload ID: 12503
  Gene Symbol: PIGH
  Gene Name: phosphatidylinositol glycan anchor biosynthesis, class H
  ENSP ID: ENSP00000453394
MEDERSFSDICGGRLALQRRYYSPSCREFCLSCPRLSLRSLTAVTCTVWLAAYGLFTLCENSMILSAAIFITLLGLLGYLHFVKIDQETLLIIDSLGIQMTSSYASGKESTTFIEMGKVKDIVINEAIYMKVIYYLCILLKDPVEPHGISQVVPVFQSAKPRLDCLIEVYRSCQEILAHQKATSTSP

SEQ ID NO: 62598 - protein, 183 aa, Homo sapiens
  Payload ID: 12503
  Gene Symbol: PIGH
  Gene Name: phosphatidylinositol glycan anchor biosynthesis, class H
  ENSP ID: ENSP00000453733
MEDERSFSDICGGRLALQRRYYSPSCREFCLSCPRLSLRSLTAVTCTVWLAAYGLFTLCEMTSSYASGKESTTFIEMGKVKDIVINEAIYMQKVIYYLCILLKDPVEPHGISQVVPVFQRQSLTLSPRLECSDNHHSLQPPPPRLKKSSCLSLLRTWDYRCAPSRLANFFFLFLVEMRSCHVA

SEQ ID NO: 62599 - protein, 182 aa, Homo sapiens
  Payload ID: 12503
  Gene Symbol: PIGH
  Gene Name: phosphatidylinositol glycan anchor biosynthesis, class H
  ENSP ID: ENSP00000453759
  MOD_RES (1)..(1): Any amino acid
XGRLALQRRYYSPSCREFCLSCPRLSLRSLTAVTCTVWLAAYGLFTLCENSMILSAAIFITLLGLLGYLHFVKIDQETLLIIDSLGIQMTSSYASGKESTTFIEMGKVKDIVINEAIYMQKVIYYLCILLKDPVEPHGISQVVPVFQAAWCIHSKLATRPSCFLNRTLPGPSGQPSQEPIPC

SEQ ID NO: 62600 - protein, 83 aa, Homo sapiens; identical to SEQ ID NO: 62593
  Payload ID: 12503
  Gene Symbol: PIGH
  Gene Name: phosphatidylinositol glycan anchor biosynthesis, class H
  ENSP ID: ENSP00000454061

SEQ ID NO: 62601 - protein, 332 aa, Homo sapiens
  Payload ID: 12504
  Gene Symbol: PIGK
  Gene Name: phosphatidylinositol glycan anchor biosynthesis, class K
  ENSP ID: ENSP00000352041
MAVTDSLSRAATVLATVLLLSFGSVAASHIEDQAEQFFRSGHTNNWAVLVCTSRFWFNYRHVANTLSVYRSVKRLGIPDSHIVLMLADDMACNPRNPKPATVFSHKNMELNVYGDDVEVDYRSYEVTVENFLRVLTGRIPPSTPRSKRLLSDDRSNILIYMTGHGGNGFLKFQDSEEITNIELADAFEQMWQKRRYNELLFIIDTCQGASMYERFYSPNIMALASSQVGEDSLSHQPDPAIGVHLMDRYTFYVLEFLEEINPASQTNMNDLFQVCPKSLCVSTPGHRTDLFQRDPKNVLITDFFGSVRKVEITTETIKLQQDSEIMESRYSS

SEQ ID NO: 62602 - protein, 395 aa, Homo sapiens
  Payload ID: 12504
  Gene Symbol: PIGK
  Gene Name: phosphatidylinositol glycan anchor biosynthesis, class K
  Uniprot ID: Q92643
  ENSP ID: ENSP00000359848
MAVTDSLSRAATVLATVLLLSFGSVAASHIEDQAEQFFRSGHTNNWAVLVCTSRFWFNYRHVANTLSVYRSVKRLGIPDSHIVLMLADDMACNPRNPKPATVFSHKNMELNVYGDDVEVDYRSYEVTVENFLRVLTGRIPPSTPRSKRLLSDDRSNILIYMTGHGGNGFLKFQDSEEITNIELADAFEQMWQKRRYNELLFIIDTCQGASMYERFYSPNIMALASSQVGEDSLSHQPDPAIGVHLMDRYTFYVLEFLEEINPASQTNMNDLFQVCPKSLCVSTPGHRTDLFQRDPKNVLITDFFGSVRKVEITTETIKLQQDSEIMESSYKEDQMDEKLMEPLKYAEQLPVAQIIHQKPKLKDWHPPGGFILGLWALIIMVFFKTYGIKHMKFIF

SEQ ID NO: 62603 - protein, 301 aa, Homo sapiens
  Payload ID: 12504
  Gene Symbol: PIGK
  Gene Name: phosphatidylinositol glycan anchor biosynthesis, class K
  ENSP ID: ENSP00000388854
MAVTDSLSRAATVLATVLLLSFGSVAASHIEVTVENFLRVLTGRIPPSTPRSKRLLSDDRSNILIYMTGHGGNGFLKFQDSEEITNIELADAFEQMWQKRRYNELLFIIDTCQGASMYERFYSPNIMALASSQVGEDSLSHQPDPAIGVHLMDRYTFYVLEFLEEINPASQTNMNDLFQVCPKSLCVSTPGHRTDLFQRDPKNVLITDFFGSVRKVEITTETIKLQQDSEIMESSYKEDQMDEKLMEPLKYAEQLPVAQIIHQKPKLKDWHPPGGFILGLWALIIMVFFKTYGIKHMKFIF

SEQ ID NO: 62604 - protein, 27 aa, Homo sapiens
  Payload ID: 12504
  Gene Symbol: PIGK
  Gene Name: phosphatidylinositol glycan anchor biosynthesis, class K
  ENSP ID: ENSP00000474518
KNMELNVYGDDVEVDYRSYEGMVEMVS

SEQ ID NO: 62605 - protein, 252 aa, Homo sapiens
  Payload ID: 12505
  Gene Symbol: PIGL
  Gene Name: phosphatidylinositol glycan anchor biosynthesis, class L
  Uniprot ID: Q9Y2B2
  ENSP ID: ENSP00000225609
MEAMWLLCVALAVLAWGFLWVWDSSERMKSREQGGRLGAESRTLLVIAHPDDEAMFFAPTVLGLARLRHWVYLLCFSAGNYYNQGETRKKELLQSCDVLGIPLSSVMIIDNRDFPDDPGMQWDTEHVARVLLQHIEVNGINLVVTFDAGGVSGHSNHIALYAAVRALHSEGKLPKGCSVLTLQSVNVLRKYISLLDLPLSLLHTQDVLFVLNSKEVAQAKKAMSCHRSQLLWFRRLYIIFSRYMRINSLSFL

SEQ ID NO: 62606 - protein, 244 aa, Homo sapiens
  Payload ID: 12505
  Gene Symbol: PIGL
  Gene Name: phosphatidylinositol glycan anchor biosynthesis, class L
  ENSP ID: ENSP00000379185
MEAMWLLCVALAVLAWGFLWVWDSSERMKSREQGGRLGAESRTLLVIAHPDDEAMFFAPTVLGLARLRHWVYLLCFSAGNYYNQGETRKKELLQSCDVLGIPLSSVMIIDNRDFPDDPGMQWDTEHVARVLLQHIEVNGINLVVTFDAGGVSGHSNHIALYAAVRVLCAHASVCECAAQVHLPSGSALVSASYAGCPLRAQQQRSGTGQESHVLPPQPAPLVPPPLHYLLPVHENQLTELPLKP

SEQ ID NO: 62607 - protein, 150 aa, Homo sapiens
  Payload ID: 12505
  Gene Symbol: PIGL
  Gene Name: phosphatidylinositol glycan anchor biosynthesis, class L
  ENSP ID: ENSP00000462432
MEAMWLLCVALAVLAWGFLWVWDSSERMKSREQGGRLGAESRTLLVIAHPDDEAMFFAPTVLGLARLRHWVYLLCFSAGNYYNQGETRKKELLQSCDVLGIPLSSVMIIDNRDFPDDPGMQWDTEHVARVLLQHIEVNGINLKDRANSRL

SEQ ID NO: 62608 - protein, 188 aa, Homo sapiens
  Payload ID: 12505
  Gene Symbol: PIGL
  Gene Name: phosphatidylinositol glycan anchor biosynthesis, class L
  ENSP ID: ENSP00000463540
MEAMWLLCVALAVLAWGFLWVWDSSERMKSREQGGRLGAESRTLLVIAHPDDEAMFFAPTVLGLARLRHWVYLLCFSAGNYYNQGETRKKELLQSCDVLGIPLSSVMIIDNRDFPDDPGMQWDTEHVARVLLQHIEVNGINLVVTFDAGGVSGHSNHIALYAAVRALHSEGKLPKESCPQPSRGSGWG

SEQ ID NO: 62609 - protein, 145 aa, Homo sapiens
  Payload ID: 12505
  Gene Symbol: PIGL
  Gene Name: phosphatidylinositol glycan anchor biosynthesis, class L
  ENSP ID: ENSP00000463754
MEAMWLLCVALAVLAWGFLWVWDSSERMKSREQGGRLGAESRTLLVIAHPDDEAMFFAPTVLGLARLRHWVYLLCFSAGNYYNQGETRKKELLQSCDVLGIPLSSVMIIDNRLSYLRLMCLSEAQGPQQHTPVSQSSDYSSLGMG

SEQ ID NO: 62610 - protein, 101 aa, Homo sapiens
  Payload ID: 12505
  Gene Symbol: PIGL
  Gene Name: phosphatidylinositol glycan anchor biosynthesis, class L
  ENSP ID: ENSP00000464424
MEAMWLLCVALAVLAWGFLWVWDSSERMKSREQGGRLGAESRTLLVIAHPDDEAMFFAPTVLGLARLRHWVYLLCFSAGISQMTQACSGTQSTWPESSFST

SEQ ID NO: 62611 - protein, 102 aa, Homo sapiens
  Payload ID: 12505
  Gene Symbol: PIGL
  Gene Name: phosphatidylinositol glycan anchor biosynthesis, class L
  ENSP ID: ENSP00000470064
VVTFDAGGVSGHSNHIALYAAVRVLCAHASVCECAAQVHLPSGSALVSASYAGCPLRAQQQRSGTGQESHVLPPQPAPLVPPPLHYLLPVHENQLTELPLKP

SEQ ID NO: 62612 - protein, 92 aa, Homo sapiens
  Payload ID: 12505
  Gene Symbol: PIGL
  Gene Name: phosphatidylinositol glycan anchor biosynthesis, class L
  ENSP ID: ENSP00000485657
  MOD_RES (1)..(1): Any amino acid
XCVALAVLAWGFLWVWDSSERMKSREQGGRLGAESRTLLVIAHPDDEAMFFAPTVLGLARLRHWVYLLCFSAVFRRELSEYTEGLTSEPLTA

SEQ ID NO: 62613 - protein, 423 aa, Homo sapiens [sequence omitted]

SEQ ID NO: 62614 - protein, 931 aa, Homo sapiens
  Payload ID: 12507
  Gene Symbol: PIGN
  Gene Name: phosphatidylinositol glycan anchor biosynthesis, class N
  Uniprot ID: O95427
  ENSP ID: ENSP00000350263
MLLFFTLGLLIHFVFFASIFDIYFTSPLVHGMTPQFTPLPPPARRLVLFVADGLRADALYELDENGNSRAPFIRNIIMHEGSWGISHTRVPTESRPGHVALIAGFYEDVSAVAKGWKENPVEFDSLFNESKYTWSWGSPDILPMFAKGASGDHVYTYSYDAKREDFGAQDATKLDTWVFDNVKDFFHHARNNQSLFSKINEEKIVFFLHLLGIDTNGHAHRPSSRDYKHNIKKVDDGVKEIVSMFNHFYGNDGKTTFIFTSDHGMTDWGSHGAGHPSETLTPLVTWGAGIKYPQRVSAQQFDDAFLKEWRLENWKRLDVNQADIAPLMTSLIGVPFPLNSVGILPVDYLNNTDLFKAESMFTNAVQILEQFKVKMTQKKEVTLPFLFTPFKLLSDSKQFNILRKARSYIKHRKFDEVVSLCKELIHLALKGLSYYHTYDRFFLGVNVVIGFVGWISYASLLIIKSHSNLIKGVSKEVKKPSHLLPCSFVAIGILVAFFLLIQACPWTYYVYGLLPLPIWYAVLREFQVIQDLVVSVLTYPLSHFVGYLLAFTLGIEVLVLSFFYRYMLTAGLTAFAAWPFLTRLWTRAKMTSLSWTFFSLLLAVFPLMPVVGRKPDISLVMGAGLLVLLLSLCVVTSLMKRKDSFIKEELLVHLLQVLSTVLSMYVVYSTQSSLLRKQGLPLMNQIISWATLASSLVVPLLSSPVLFQRLFSILLSLMSTYLLLSTGYEALFPLVLSCLMFVWINIEQETLQQSGVCCKQKLTSIQFSYNTDITQFRQLYLDDIRRAFFLVFFLVTAFFGTGNIASINSFDLASVYCFLTVFSPFMMGALMMWKILIPFVLVMCAFEAVQLTTQLSSKSLFLIVLVISDIMALHFFFLVKDYGSWLDIGTSISHYVIVMSMTIFLVFLNGLAQLLTTKKLRLCGKPKSHFM

SEQ ID NO: 62615 - protein, 931 aa, Homo sapiens; identical to SEQ ID NO: 62614
  Payload ID: 12507
  Gene Symbol: PIGN
  Gene Name: phosphatidylinositol glycan anchor biosynthesis, class N
  Uniprot ID: O95427
  ENSP ID: ENSP00000383188

SEQ ID NO: 62616 - protein, 140 aa, Homo sapiens
  Payload ID: 12507
  Gene Symbol: PIGN
  Gene Name: phosphatidylinositol glycan anchor biosynthesis, class N
  ENSP ID: ENSP00000464707
MMINLEARRLVLFVADGLRADALYELDENGNSRAPFIRNIIMHEGSWGISHTRVPTESRPGHVALIAGFYEDVSAVAKGWKENPVEFDSLFNESKYTWSWGSPDILPMFAKGASGDHVYTYSYDAKREDFGAQDATKLDT

SEQ ID NO: 62617 - protein, 143 aa, Homo sapiens
  Payload ID: 12507
  Gene Symbol: PIGN
  Gene Name: phosphatidylinositol glycan anchor biosynthesis, class N
  ENSP ID: ENSP00000465241
  MOD_RES (1)..(1): Any amino acid
XPCSFVAIGILVAFFLLIQACPWTYYVYGLLPLPIWYAVLREFQVIQDLVVSVLTYPLSHFVGYLLAFTLGIEVLVLSFFYRYMLTAGLTAFAAWPFLTRLWTRAKMTSLSWTFFSLLLAVFPLMPVVGRKPDISLVILKECI

SEQ ID NO: 62618 - protein, 93 aa, Homo sapiens
  Payload ID: 12507
  Gene Symbol: PIGN
  Gene Name: phosphatidylinositol glycan anchor biosynthesis, class N
  ENSP ID: ENSP00000465506
MLLFFTLGLLIHFVFFASIFDIYFTSPLVHGMTPQFTPLPPPARRLVLFVADGLRADALYELDENGNSRAPFIRNIIMHEGSWGISHTRVPTE

SEQ ID NO: 62619 - protein, 88 aa, Homo sapiens
  Payload ID: 12507
  Gene Symbol: PIGN
  Gene Name: phosphatidylinositol glycan anchor biosynthesis, class N
  ENSP ID: ENSP00000465897
MLLFFTLGLLIHFVFFASIFDIYFTSPLVHGMTPQFTPLPPPARRLVLFVADGLRADALYELDENGNSRAPFIRNIIMHEGSWGISHT

SEQ ID NO: 62620 - protein, 116 aa, Homo sapiens
  Payload ID: 12507
  Gene Symbol: PIGN
  Gene Name: phosphatidylinositol glycan anchor biosynthesis, class N
  ENSP ID: ENSP00000466035
MLLFFTLGLLIHFVFFASIFDIYFTSPLVHGMTPQFTPLPPPARRLVLFVADGLRADALYELDENGNSRAPFIRNIIMHEGSWGISHTRVPTESRPGHVALIAGFYEDVSAVAKGW

SEQ ID NO: 62621 - protein, 33 aa, Homo sapiens
  Payload ID: 12507
  Gene Symbol: PIGN
  Gene Name: phosphatidylinositol glycan anchor biosynthesis, class N
  ENSP ID: ENSP00000466354
MLLFFTLGLLIHFVFFASIFDIYFTSPLVHGMT

SEQ ID NO: 62622 - protein, 122 aa, Homo sapiens
  Payload ID: 12507
  Gene Symbol: PIGN
  Gene Name: phosphatidylinositol glycan anchor biosynthesis, class N
  ENSP ID: ENSP00000466462
MHEGSWGISHTRVPTESRPGHVALIAGFYEDVSAVAKGWKENPVEFDSLFNESKYTWSWGSPDILPMFAKGASGDHVYTYSYDAKREDFGAQDATKLDTWVFDNVKDFFHHARNNQSLFSKI

SEQ ID NO: 62623 - protein, 84 aa, Homo sapiens
  Payload ID: 12507
  Gene Symbol: PIGN
  Gene Name: phosphatidylinositol glycan anchor biosynthesis, class N
  ENSP ID: ENSP00000466883
MHEGSWGISHTRVPTESRPGHVALIAGFYEDVSAVAKGWKENPVEFDSLFNESKYTWSWGSPDILPMFAKGASGDHVYTYSYDA

SEQ ID NO: 62624 - protein, 29 aa, Homo sapiens
  Payload ID: 12507
  Gene Symbol: PIGN
  Gene Name: phosphatidylinositol glycan anchor biosynthesis, class N
  ENSP ID: ENSP00000466985
  MOD_RES (1)..(1): Any amino acid
XIRGFLIMLRNRYKRTCSSTILERLQAQY

SEQ ID NO: 62625 - protein, 111 aa, Homo sapiens
  Payload ID: 12507
  Gene Symbol: PIGN
  Gene Name: phosphatidylinositol glycan anchor biosynthesis, class N
  ENSP ID: ENSP00000467410
QKKEVTLPFLFTPFKFQVIQDLVVSVLTYPLSHFVGYLLAFTLGIEVLVLSFFYRYMLTAGLTAFAAWPFLTRLWTRAKMTSLSWTFFSLLLAVFPLMPVVGRKPDISLVM

SEQ ID NO: 62626 - protein, 183 aa, Homo sapiens
  Payload ID: 12507
  Gene Symbol: PIGN
  Gene Name: phosphatidylinositol glycan anchor biosynthesis, class N
  ENSP ID: ENSP00000467458
MHEGSWGISHTRVPTESRPGHVALIAGFYEDVSAVAKGWKENPVEFDSLFNESKYTWSWGSPDILPMFAKGASGDHVYTYSYDAKREDFGAQDATKLDTWVFDNVKDFFHHARNNQSLFSKINEEKIVFFLHLLGIDTNGHAHRPSSRDYKHNIKKVDDGVKEIVSMFNHFYGNDGKTTFIFT

SEQ ID NO: 62627 - protein, 103 aa, Homo sapiens
  Payload ID: 12507
  Gene Symbol: PIGN
  Gene Name: phosphatidylinositol glycan anchor biosynthesis, class N
  ENSP ID: ENSP00000467618
PGHVALIAGFYEDVSAVAKGWKENPVEFDSLFNESKYTWSWGSPDILPMFAKGASGDHVYTYSYDAKREDFGAQDATKLDTWVFDNVKVCAIEWLIYKKHIFT

SEQ ID NO: 62628 - protein, 192 aa, Homo sapiens
  Payload ID: 12507
  Gene Symbol: PIGN
  Gene Name: phosphatidylinositol glycan anchor biosynthesis, class N
  ENSP ID: ENSP00000467812
MLLFFTLGLLIHFVFFASIFDIYFTSPLVHGMTPQFTPLPPPARRLVLFVADGLRADALYELDENGNSRAPFIRNIIMHEGSWGISHTRVPTESRPGHVALIAGFYEDVSAVAKGWKENPVEFDSLFNESKYTWSWGSPDILPMFAKGASGDHVYTYSYDAKREDFGAQDATKLDTWVFDNVKDFFHHARNN

SEQ ID NO: 62629 - protein, 83 aa, Homo sapiens
  Payload ID: 12507
  Gene Symbol: PIGN
  Gene Name: phosphatidylinositol glycan anchor biosynthesis, class N
  ENSP ID: ENSP00000468456
MLLFFTLGLLIHFVFFASIFDIYFTSPLVHGMTPQFTPLPPPARRLVLFVADGLRADALYELDENGNSRAPFIRNIIMHEGSW

SEQ ID NO: 62630 - protein, 188 aa, Homo sapiens
  Payload ID: 12507
  Gene Symbol: PIGN
  Gene Name: phosphatidylinositol glycan anchor biosynthesis, class N
  ENSP ID: ENSP00000468721
MLLFFTLGLLIHFVFFASIFDIYFTSPLVHGMTPQFTPLPPPARRLVLFVADGLRADALYELDENGNSRAPFIRNIIMHEGSWGISHTRVPTESRPGHVALIAGFYEDVSAVAKGWKENPVEFDSLFNESKYTWSWGSPDILPMFAKGASGDHVYTYSYDAKREDFGAQDATKLDTWVFDNVKDFFHH

SEQ ID NO: 62631 - protein, 672 aa, Homo sapiens
  Payload ID: 12508
  Gene Symbol: PIGO
  Gene Name: phosphatidylinositol glycan anchor biosynthesis, class O
  Uniprot ID: Q8TEQ8
  ENSP ID: ENSP00000298004
MQKASVLLFLAWVCFLFYAGIALFTSGFLLTRLELTNHSSCQEPPGPGSLPWGSQGKPGACWMASRFSRVVLVLIDALRFDFAQPQHSHVPREPPVSLPFLGKLSSLQRILEIQPHHARLYRSQVDPPTTTMQRLKALTTGSLPTFIDAGSNFASHAIVEDNLIKQLTSAGRRVVFMGDDTWKDLFPGAFSKAFFFPSFNVRDLDTVDNGILEHLYPTMDSGEWDVLIAHFLGVDHCGHKHGPHHPEMAKKLSQMDQVIQGLVERLENDTLLVVAGDHGMTTNGDHGGDSELEVSAALFLYSPTAVFPSTPPEEPEVIPQVSLVPTLALLLGLPIPFGNIGEVMAELFSGGEDSQPHSSALAQASALHLNAQQVSRFLHTYSAATQDLQAKELHQLQNLFSKASADYQWLLQSPKGAEATLPTVIAELQQFLRGARAMCIESWARFSLSFLLLHLLAAGIPVTTPGPFTVPWQAVSAWALMATQTFYSTGHQPVFPAIHWHAAFVGFPEGHGSCTWLPALLVGANTFASHLLFAVGCPLLLLWPFLCESQGLRKRQQPPGNEADARVRPEEEEEPLMEMRLRDAPQHFYAALLQLGLKYLFILGIQILACALAASILRRHLMVWKVFAPKFIFEAVGFIVSSVGLLLGIALVMRVDGAVSSWFRQLFLAQQR

SEQ ID NO: 62632 - protein, 672 aa, Homo sapiens; identical to SEQ ID NO: 62631
  Payload ID: 12508
  Gene Symbol: PIGO
  Gene Name: phosphatidylinositol glycan anchor biosynthesis, class O
  Uniprot ID: Q8TEQ8
  ENSP ID: ENSP00000354678

SEQ ID NO: 62633 - protein, 1089 aa, Homo sapiens
  Payload ID: 12508
  Gene Symbol: PIGO
  Gene Name: phosphatidylinositol glycan anchor biosynthesis, class O
  Uniprot ID: Q8TEQ8
  ENSP ID: ENSP00000367880
MQKASVLLFLAWVCFLFYAGIALFTSGFLLTRLELTNHSSCQEPPGPGSLPWGSQGKPGACWMASRFSRVVLVLIDALRFDFAQPQHSHVPREPPVSLPFLGKLSSLQRILEIQPHHARLYRSQVDPPTTTMQRLKALTTGSLPTFIDAGSNFASHAIVEDNLIKQLTSAGRRVVFMGDDTWKDLFPGAFSKAFFFPSFNVRDLDTVDNGILEHLYPTMDSGEWDVLIAHFLGVDHCGHKHGPHHPEMAKKLSQMDQVIQGLVERLENDTLLVVAGDHGMTTNGDHGGDSELEVSAALFLYSPTAVFPSTPPEEPEVIPQVSLVPTLALLLGLPIPFGNIGEVMAELFSGGEDSQPHSSALAQASALHLNAQQVSRFLHTYSAATQDLQAKELHQLQNLFSKASADYQWLLQSPKGAEATLPTVIAELQQFLRGARAMCIESWARFSLVRMAGGTALLAASCFICLLASQWAISPGFPFCPLLLTPVAWGLVGAIAYAGLLGTIELKLDLVLLGAVAAVSSFLPFLWKAWAGWGSKRPLATLFPIPGPVLLLLLFRLAVFFSDSFVVAEARATPFLLGSFILLLVVQLHWEGQLLPPKLLTMPRLGTSATTNPPRHNGAYALRLGIGLLLCTRLAGLFHRCPEETPVCHSSPWLSPLASMVGGRAKNLWYGACVAALVALLAAVRLWLRRYGNLKSPEPPMLFVRWGLPLMALGTAAYWALASGADEAPPRLRVLVSGASMVLPRAVAGLAASGLALLLWKPVTVLVKAGAGAPRTRTVLTPFSGPPTSQADLDYVVPQIYRHMQEEFRGRLERTKSQGPLTVAAYQLGSVYSAAMVTALTLLAFPLLLLHAERISLVFLLLFLQSFLLLHLLAAGIPVTTPGPFTVPWQAVSAWALMATQTFYSTGHQPVFPAIHWHAAFVGFPEGHGSCTWLPALLVGANTFASHLLFAVGCPLLLLWPFLCESQGLRKRQQPPGNEADARVRPEEEEEPLMEMRLRDAPQHFYAALLQLGLKYLFILGIQILACALAASILRRHLMVWKVFAPKFIFEAVGFIVSSVGLLLGIALVMRVDGAVSSWFRQLFLAQQR

SEQ ID NO: 62634 - protein, 134 aa, Homo sapiens
  Payload ID: 12509
  Gene Symbol: PIGP
  Gene Name: phosphatidylinositol glycan anchor biosynthesis, class P
  Uniprot ID: P57054
  ENSP ID: ENSP00000353719
MVENSPSPLPERAIYGFVLFLSSQFGFILYLVWAFIPESWLNSLGLTYWPQKYWAVALPVYLLIAIVIGYVLLFGINMMSTSPLDSIHTITDNYAKNQQQKKYQEEAIPALRDISISEVNQMFFLAAKELYTKN

SEQ ID NO: 62635 - protein, 108 aa, Homo sapiens
  Payload ID: 12509
  Gene Symbol: PIGP
  Gene Name: phosphatidylinositol glycan anchor biosynthesis, class P
  Uniprot ID: P57054
  ENSP ID: ENSP00000382049
MVLYLVWAFIPESWLNSLGLTYWPQKYWAVALPVYLLIAIVIGYVLLFGINMMSTSPLDSIHTITDNYAKNQQQKKYQEEAIPALRDISISEVNQMFFLAAKELYTKN

SEQ ID NO: 62636 - protein, 134 aa, Homo sapiens; identical to SEQ ID NO: 62634
  Payload ID: 12509
  Gene Symbol: PIGP
  Gene Name: phosphatidylinositol glycan anchor biosynthesis, class P
  Uniprot ID: P57054
  ENSP ID: ENSP00000382053

SEQ ID NO: 62637 - protein, 134 aa, Homo sapiens; identical to SEQ ID NO: 62634
  Payload ID: 12509
  Gene Symbol: PIGP
  Gene Name: phosphatidylinositol glycan anchor biosynthesis, class P
  Uniprot ID: P57054
  ENSP ID: ENSP00000382054

SEQ ID NO: 62638 - protein, 25 aa, Homo sapiens
  Payload ID: 12509
  Gene Symbol: PIGP
  Gene Name: phosphatidylinositol glycan anchor biosynthesis, class P
  ENSP ID: ENSP00000388372
MVLYLVWAFIPESWLNSLGLTYWPQ

SEQ ID NO: 62639 - protein, 158 aa, Homo sapiens
  Payload ID: 12509
  Gene Symbol: PIGP
  Gene Name: phosphatidylinositol glycan anchor biosynthesis, class P
  ENSP ID: ENSP00000420037
MVPRSTSLTLIVFLFHRLSKAPGKMVENSPSPLPERAIYGFVLFLSSQFGFILYLVWAFIPESWLNSLGLTYWPQKYWAVALPVYLLIAIVIGYVLLFGINMMSTSPLDSIHTITDNYAKNQQQKKYQEEAIPALRDISISEVNQMFFLAAKELYTKN

SEQ ID NO: 62640 - protein, 760 aa, Homo sapiens
  Payload ID: 12510
  Gene Symbol: PIGQ
  Gene Name: phosphatidylinositol glycan anchor biosynthesis, class Q
  Uniprot ID: Q9BRB3
  ENSP ID: ENSP00000026218
MVLKAFFPTCCVSTDSGLLVGRWVPEQSSAVVLAVLHFPFIPIQVKQLLAQVRQASQVGVAVLGTWCHCRQEPEESLGRFLESLGAVFPHEPWLRLCRERGGTFWSCEATHRQAPTAPGAPGEDQVMLIFYDQRQVLLSQLHLPTVLPDRQAGATTASTGGLAAVFDTVARSEVLFRSDRFDEGPVRLSHWQSEGVEASILAELARRASGPICLLLASLLSLVSAVSACRVFKLWPLSFLGSKLSTCEQLRHRLEHLTLIFSTRKAENPAQLMRKANTVASVLLDVALGLMLLSWLHGRSRIGHLADALVPVADHVAEELQHLLQWLMGAPAGLKMNRALDQVLGRFFLYHIHLWISYIHLMSPFVEHILWHVGLSACLGLTVALSLLSDIIALLTFHIYCFYVYGARLYCLKIHGLSSLWRLFRGKKWNVLRQRVDSCSYDLDQLFIGTLLFTILLFLLPTTALYYLVFTLLRLLVVAVQGLIHLLVDLINSLPLYSLGLRLCRPYRLADKPTALQPRGAHLPPPQLWLPPQALLGRPVPQAVPWGAHLPLEAERGQAGLRELLARLAPPHGHSQPSALPGWHQLSWRMSCALWTLLCAPEHGRPCYHTLGLEVIGSEQMWGWPARLAALHHWHCLPWDPLPTCCGHHGGEHSNPRCPEHCPMPTLCTQVQRVRPPQQPQVEGWSPWGLPSGSALAVGVEGPCQDEPPSPRHPLAPSAEQHPASGGLKQSLTPVPSGPGPSLPEPHGVYLRMFPGEVAL

SEQ ID NO: 62641 - protein, 148 aa, Homo sapiens
  Payload ID: 12510
  Gene Symbol: PIGQ
  Gene Name: phosphatidylinositol glycan anchor biosynthesis, class Q
  ENSP ID: ENSP00000293874
MVLKAFFPTCCVSTDSGLLVGRWVPEQSSAVVLAVLHFPFIPIQVKQLLAQVRQASQVGVAVLGTWCHCRQEPEESLGRFLESLGAVFPHEPWLRLCRERGGTFWSCEATHRQAPTAPGAPGEDQVMLIFYDQRQVLLSQLHLPTVLP

SEQ ID NO: 62642 - protein, 581 aa, Homo sapiens
  Payload ID: 12510
  Gene Symbol: PIGQ
  Gene Name: phosphatidylinositol glycan anchor biosynthesis, class Q
  Uniprot ID: Q9BRB3
  ENSP ID: ENSP00000326674
MVLKAFFPTCCVSTDSGLLVGRWVPEQSSAVVLAVLHFPFIPIQVKQLLAQVRQASQVGVAVLGTWCHCRQEPEESLGRFLESLGAVFPHEPWLRLCRERGGTFWSCEATHRQAPTAPGAPGEDQVMLIFYDQRQVLLSQLHLPTVLPDRQAGATTASTGGLAAVFDTVARSEVLFRSDRFDEGPVRLSHWQSEGVEASILAELARRASGPICLLLASLLSLVSAVSACRVFKLWPLSFLGSKLSTCEQLRHRLEHLTLIFSTRKAENPAQLMRKANTVASVLLDVALGLMLLSWLHGRSRIGHLADALVPVADHVAEELQHLLQWLMGAPAGLKMNRALDQVLGRFFLYHIHLWISYIHLMSPFVEHILWHVGLSACLGLTVALSLLSDIIALLTFHIYCFYVYGARLYCLKIHGLSSLWRLFRGKKWNVLRQRVDSCSYDLDQLFIGTLLFTILLFLLPTTALYYLVFTLLRLLVVAVQGLIHLLVDLINSLPLYSLGLRLCRPYRLAAGVKFRVLRHEAGRPLRLLMQINPLPYSRVVHTYRLPSCGCHPKHSWGALCRKLFLGELIYPWRQRGDKQD

SEQ ID NO: 62643 - protein, 581 aa, Homo sapiens; identical to SEQ ID NO: 62642
  Payload ID: 12510
  Gene Symbol: PIGQ
  Gene Name: phosphatidylinositol glycan anchor biosynthesis, class Q
  Uniprot ID: Q9BRB3
  ENSP ID: ENSP00000386760

SEQ ID NO: 62644 - protein, 111 aa, Homo sapiens
  Payload ID: 12510
  Gene Symbol: PIGQ
  Gene Name: phosphatidylinositol glycan anchor biosynthesis, class Q
  ENSP ID: ENSP00000387820
MVLKAFFPTCCVSTDSGLLVGRWVPEQSSAVVLAVLHFPFIPIQVKQLLAQVRQASQVGVAVLGTWCHCRQEPEESLGRFLESLGAVFPHEPWLRLCRERGGTFWSCEATH

SEQ ID NO: 62645 - protein, 238 aa, Homo sapiens
  Payload ID: 12510
  Gene Symbol: PIGQ
  Gene Name: phosphatidylinositol glycan anchor biosynthesis, class Q
  ENSP ID: ENSP00000409341
  MOD_RES (1)..(1): Any amino acid
XLQWLMGAPAGLKMNRALDQVLGRFFLYHIHLWISYIHLMSPFVEHILWHVGLSACLGLTVALSLLSDIIALLTFHIYCFYVYGARLYCLKIHGLSSLWRLFRGKKWNVLRQRVDSCSYDLDQLFIGTLLFTILLFLLPTTALYYLVFTLLRLLVVAVQGLIHLLVDLINSLPLYSLGLRLCRPYRLAGSEPWRPEATGLCSSALGFSGLGSLNCRPGAKRGKVRGTRSQQGGHHPLA

SEQ ID NO: 62646 - protein, 574 aa, Homo sapiens
  Payload ID: 12510
  Gene Symbol: PIGQ
  Gene Name: phosphatidylinositol glycan anchor biosynthesis, class Q
  ENSP ID: ENSP00000410434
MWWALRPPGILPPGMVLKAFFPTCCVSTDSGLLVGRWVPEQSSAVVLAVLHFPFIPIQVKQLLAQVRQASQVGVAVLGTWCHCRQEPEESLGRFLESLGAVFPHEPWLRLCRERGGTFWSCEATHRQAPTAPGAPGEDQVMLIFYDQRQVLLSQLHLPTVLPDRQAGATTASTGGLAAVFDTVARSEVLFRSDRFDEGPVRLSHWQSEGVEASILAELARRASGPICLLLASLLSLVSAVSACRVFKLWPLSFLGSKLSTCEQLRHRLEHLTLIFSTRKAENPAQLMRKANTVASVLLDVALGLMLLSWLHGRSRIGHLADALVPVADHVAEELQHLLQWLMGAPAGLKMNRALDQVLGRFFLYHIHLWISYIHLMSPFVEHILWHVGLSACLGLTVALSLLSDIIALLTFHIYCFYVYGARLYCLKIHGLSSLWRLFRGKKWNVLRQRVDSCSYDLDQLFIGTLLFTILLFLLPTTALYYLVFTLLRLLVVAVQGLIHLLVDLINSLPLYSLGLRLCRPYRLAGSEPWRPEATGLCSSALGFSGLGSLNCRPGAKRGKVRGTRSQQGGHHPLA

SEQ ID NO: 62647 - protein, 396 aa, Homo sapiens
  Payload ID: 12510
  Gene Symbol: PIGQ
  Gene Name: phosphatidylinositol glycan anchor biosynthesis, class Q
  ENSP ID: ENSP00000413753
MVLKAFFPTCCVSTDSGLLVGRWVPEQSSAVVLAVLHFPFIPIQVKQLLAQVRQASQVGVAVLGTWCHCRQEPEESLGRFLESLGAVFPHEPWLRLCRERGGTFWSCEATHRQAPTAPGAPGEDQVMLIFYDQRQVLLSQLHLPTVLPDRQAGATTASTGGLAAVFDTVARSEVLFRSDRFDEGPVRLSHWQSEGVEASILAELARRASGPICLLLASLLSLVSAVSACRVFKLWPLSFLGSKLSTCEQLRHRLEHLTLIFSTRKAENPAQLMRKANTVASVLLDVALGLMLLSWLHGRSRIGHLADALVPVADVSGLGWSPVSRVGVGTPPGQQSLPGPEPPPHKASSTFSMLWRHGPPLNQKQELQGRWGLGRAGLAGTPPFPSEGAVCRSQPG

SEQ ID NO: 62648 - protein, 139 aa, Homo sapiens
  Payload ID: 12510
  Gene Symbol: PIGQ
  Gene Name: phosphatidylinositol glycan anchor biosynthesis, class Q
  ENSP ID: ENSP00000439374
GLSSLWRLFRGKKWNVLRQRVDSCSYDLDQLRLLVVAVQGLIHLLVDLINSLPLYSLGLRLCRPYRLAAGVKFRVLRHEAGRPLRLLMQINPLPYSRVVHTYRLPSCGCHPKHSWGALCRKLFLGELIYPWRQRGDKQD

SEQ ID NO: 62649 - protein, 299 aa, Homo sapiens
  Payload ID: 12510
  Gene Symbol: PIGQ
  Gene Name: phosphatidylinositol glycan anchor biosynthesis, class Q
  Uniprot ID: Q9BRB3
  ENSP ID: ENSP00000439650
MVLKAFFPTCCVSTDSGLLVGRWVPEQSSAVVLAVLHFPFIPIQVKQLLAQVRQASQVGVAVLGTWCHCRQEPEESLGRFLESLGAVFPHEPWLRLCRERGGTFWSCEATHRQAPTAPGAPGEDQVMLIFYDQRQVLLSQLHLPTVLPDRQAGATTASTGGLAAVFDTVARSEVLFRSDRFDEGPVRLSHWQSEGVEASILAELARRASGPICLLLASLLSLVSAVSACRVFKLWPLSFLGSKLSTCEQLRHRLEHLTLIFSTRKAENPAQLMRCGPALVSAGLGACPLAPSPSPSAPR

SEQ ID NO: 62650 - protein, 103 aa, Homo sapiens
  Payload ID: 12510
  Gene Symbol: PIGQ
  Gene Name: phosphatidylinositol glycan anchor biosynthesis, class Q
  ENSP ID: ENSP00000489216
  MOD_RES (1)..(1): Any amino acid
XVGLSACLGLTVALSLLSDIIALLTFHIYCFYVYGARLYCLKIHGLSSLWRLFRGKKWNVLRQRVDSCSYDLDQLFIGTLLFTILLFLLPTTALYYLVFTLLA

SEQ ID NO: 62651 - protein, 41 aa, Homo sapiens
  Payload ID: 12511
  Gene Symbol: PIGS
  Gene Name: phosphatidylinositol glycan anchor biosynthesis, class S
  ENSP ID: ENSP00000268758
MAAAGAAATHLAPPHGACHCRVYAGVSAPGRPGEAALHRCA

SEQ ID NO: 62652 - protein, 555 aa, Homo sapiens
  Payload ID: 12511
  Gene Symbol: PIGS
  Gene Name: phosphatidylinositol glycan anchor biosynthesis, class S
  Uniprot ID: Q96S52
  ENSP ID: ENSP00000309430
MAAAGAAATHLEVARGKRAALFFAAVAIVLGLPLWWKTTETYRASLPYSQISGLNALQLRLMVPVTVVFTRESVPLDDQEKLPFTVVHEREIPLKYKMKIKCRFQKAYRRALDHEEEALSSGSVQEAEAMLDEPQEQAEGSLTVYVISEHSSLLPQDMMSYIGPKRTAVVRGIMHREAFNIIGRRIVQVAQAMSLTEDVLAAALADHLPEDKWSAEKRRPLKSSLGYEITFSLLNPDPKSHDVYWDIEGAVRRYVQPFLNALGAAGNFSVDSQILYYAMLGVNPRFDSASSSYYLDMHSLPHVINPVESRLGSSAASLYPVLNFLLYVPELAHSPLYIQDKDGAPVATNAFHSPRWGGIMVYNVDSKTYNASVLPVRVEVDMVRVMEVFLAQLRLLFGIAQPQLPPKCLLSGPTSEGLMTWELDRLLWARSVENLATATTTLTSLAQLLGKISNIVIKDDVASEVYKAVAAVQKSAEELASGHLASAFVASQEAVTSSELAFFDPSLLHLLYFPDDQKFAIYIPLFLPMAVPILLSLVKIFLETRKSWRKPEKTD

SEQ ID NO: 62653 - protein, 547 aa, Homo sapiens
  Payload ID: 12511
  Gene Symbol: PIGS
  Gene Name: phosphatidylinositol glycan anchor biosynthesis, class S
  Uniprot ID: Q96S52
  ENSP ID: ENSP00000378755
MPSEVARGKRAALFFAAVAIVLGLPLWWKTTETYRASLPYSQISGLNALQLRLMVPVTVVFTRESVPLDDQEKLPFTVVHEREIPLKYKMKIKCRFQKAYRRALDHEEEALSSGSVQEAEAMLDEPQEQAEGSLTVYVISEHSSLLPQDMMSYIGPKRTAVVRGIMHREAFNIIGRRIVQVAQAMSLTEDVLAAALADHLPEDKWSAEKRRPLKSSLGYEITFSLLNPDPKSHDVYWDIEGAVRRYVQPFLNALGAAGNFSVDSQILYYAMLGVNPRFDSASSSYYLDMHSLPHVINPVESRLGSSAASLYPVLNFLLYVPELAHSPLYIQDKDGAPVATNAFHSPRWGGIMVYNVDSKTYNASVLPVRVEVDMVRVMEVFLAQLRLLFGIAQPQLPPKCLLSGPTSEGLMTWELDRLLWARSVENLATATTTLTSLAQLLGKISNIVIKDDVASEVYKAVAAVQKSAEELASGHLASAFVASQEAVTSSELAFFDPSLLHLLYFPDDQKFAIYIPLFLPMAVPILLSLVKIFLETRKSWRKPEKTD

SEQ ID NO: 62654 - protein, 41 aa, Homo sapiens; identical to SEQ ID NO: 62651
  Payload ID: 12511
  Gene Symbol: PIGS
  Gene Name: phosphatidylinositol glycan anchor biosynthesis, class S
  ENSP ID: ENSP00000463406

SEQ ID NO: 62655 - protein, 116 aa, Homo sapiens
  Payload ID: 12511
  Gene Symbol: PIGS
  Gene Name: phosphatidylinositol glycan anchor biosynthesis, class S
  ENSP ID: ENSP00000466846
MAAAGAAATHLEVARGKRAALFFAAVAIVLGLPLWWKTTETYRASLPYSQISGLNALQVRLLCGRVGGQPPRQGGDSVTALMLLPVAPPHGACHCRVYAGVSAPGRPGEAALHRCA

SEQ ID NO: 62656 - protein, 476 aa, Homo sapiens
  Payload ID: 12512
  Gene Symbol: PIGT
  Gene Name: phosphatidylinositol glycan anchor biosynthesis, class T
  Uniprot ID: Q969N2
  ENSP ID: ENSP00000279035
MAAAMPLALLVLLLLGPGGWCLAEPPRDSLREELVITPLPSGDVAATFQFRTRWDSELQREGDTDHYFLRYAVLPREVVCTENLTPWKKLLPCSSKAGLSVLLKADRLFHTSYHSQAVHIRPVCRNARCTSISWELRQTLSVVFDAFITGQGKKDWSLFRMFSRTLTEPCPLASESRVYVDITTYNQDNETLEVHPPPTTTYQDVILGTRKTYAIYDLLDTAMINNSRNLNIQLKWKRPPENEAPPVPFLHAQRYVSGYGLQKGELSTLLYNTHPYRAFPVLLLDTVPWYLRLYVHTLTITSKGKENKPSYIHYQPAQDRLQPHLLEMLIQLPANSVTKVSIQFERALLKWTEYTPDPNHGFYVSPSVLSALVPSMVAAKPVDWEESPLFNSLFPVSDGSNYFVRLYTEPLLVNLPTPDFSMPYNVICLTCTVVAVCYGSFYNLLTRTFHIEEPRTGGLAKRLANLIRRARGVPPL

SEQ ID NO: 62657 - protein, 578 aa, Homo sapiens
  Payload ID: 12512
  Gene Symbol: PIGT
  Gene Name: phosphatidylinositol glycan anchor biosynthesis, class T
  Uniprot ID: Q969N2
  ENSP ID: ENSP00000279036
MAAAMPLALLVLLLLGPGGWCLAEPPRDSLREELVITPLPSGDVAATFQFRTRWDSELQREGVSHYRLFPKALGQLISKYSLRELHLSFTQGFWRTRYWGPPFLQAPSGAELWVWFQDTVTDVDKSWKELSNVLSGIFCASLNFIDSTNTVTPTASFKPLGLANDTDHYFLRYAVLPREVVCTENLTPWKKLLPCSSKAGLSVLLKADRLFHTSYHSQAVHIRPVCRNARCTSISWELRQTLSVVFDAFITGQGKKDWSLFRMFSRTLTEPCPLASESRVYVDITTYNQDNETLEVHPPPTTTYQDVILGTRKTYAIYDLLDTAMINNSRNLNIQLKWKRPPENEAPPVPFLHAQRYVSGYGLQKGELSTLLYNTHPYRAFPVLLLDTVPWYLRLYVHTLTITSKGKENKPSYIHYQPAQDRLQPHLLEMLIQLPANSVTKVSIQFERALLKWTEYTPDPNHGFYVSPSVLSALVPSMVAAKPVDWEESPLFNSLFPVSDGSNYFVRLYTEPLLVNLPTPDFSMPYNVICLTCTVVAVCYGSFYNLLTRTFHIEEPRTGGLAKRLANLIRRARGVPPL

SEQ ID NO: 62658 - protein, 511 aa, Homo sapiens
  Payload ID: 12512
  Gene Symbol: PIGT
  Gene Name: phosphatidylinositol glycan anchor biosynthesis, class T
  Uniprot ID: Q969N2
  ENSP ID: ENSP00000361774
MAAAMPLALLVLLLLGPGGWCLAEPPRDSLREELVITPLPSGDVAATFQFRTRWDSELQREGVSHYRLFPKALGQLISKYSLRELHLSFTQGFWRTRYWGPPFLQAPSGAELWVWFQDTVTDVDKSWKELSNVLSGIFCASLNFIDSTNTVTPTASFKPLGLANDTDHYFLRYAVLPREVVCTENLTPWKKLLPCSSKAGLSVLLKADRLFHTSYHSQAVHIRPVCRNARCTSISWELRQTLSVVFDAFITGQGKKDWSLFRMFSRTLTEPCPLASESRVYVDITTYNQDNETLEVHPPPTTTYQDVILGTRKTYAIYDLLDTAMINNSRNLNIQLKWKRPPENGYIHYQPAQDRLQPHLLEMLIQLPANSVTKVSIQFERALLKWTEYTPDPNHGFYVSPSVLSALVPSMVAAKPVDWEESPLFNSLFPVSDGSNYFVRLYTEPLLVNLPTPDFSMPYNVICLTCTVVAVCYGSFYNLLTRTFHIEEPRTGGLAKRLANLIRRARGVPPL

SEQ ID NO: 62659 - protein, 123 aa, Homo sapiens
  Payload ID: 12512
  Gene Symbol: PIGT
  Gene Name: phosphatidylinositol glycan anchor biosynthesis, class T
  ENSP ID: ENSP00000407574
MAAAMPLALLVLLLLGPGGWCLAEPPRDSLREELVITPLPSGDVAATFQFRTRWDSELQREGVSHYRLFPKALGQLISKYSLRELHLSFTQGFWRTRYWGPPFLQAPSGAELWVWFQDTVTEH

SEQ ID NO: 62660 - protein, 109 aa, Homo sapiens
  Payload ID: 12512
  Gene Symbol: PIGT
  Gene Name: phosphatidylinositol glycan anchor biosynthesis, class T
  ENSP ID: ENSP00000408354
  MOD_RES (1)..(1): Any amino acid
XLVLLLLGPGGWCLAEPPRDSLREELVITPLPSGDVAATFQFRTRWDSELQREGDWSLFRMFSRTLTEPCPLASESRVYVDITTYNQDNETLEVHPPPTTTYQDVILGT

SEQ ID NO: 62661 - protein, 522 aa, Homo sapiens
  Payload ID: 12512
  Gene Symbol: PIGT
  Gene Name: phosphatidylinositol glycan anchor biosynthesis, class T
  Uniprot ID: Q969N2
  ENSP ID: ENSP00000441577
MAAAMPLALLVLLLLGPGGWCLAEPPRDSLREELVITPLPSGDVAATFQFRTRWDSELQREGVSHYRLFPKALGQLISKYSLRELHLSFTQGFWRTRYWGPPFLQAPSDTDHYFLRYAVLPREVVCTENLTPWKKLLPCSSKAGLSVLLKADRLFHTSYHSQAVHIRPVCRNARCTSISWELRQTLSVVFDAFITGQGKKDWSLFRMFSRTLTEPCPLASESRVYVDITTYNQDNETLEVHPPPTTTYQDVILGTRKTYAIYDLLDTAMINNSRNLNIQLKWKRPPENEAPPVPFLHAQRYVSGYGLQKGELSTLLYNTHPYRAFPVLLLDTVPWYLRLYVHTLTITSKGKENKPSYIHYQPAQDRLQPHLLEMLIQLPANSVTKVSIQFERALLKWTEYTPDPNHGFYVSPSVLSALVPSMVAAKPVDWEESPLFNSLFPVSDGSNYFVRLYTEPLLVNLPTPDFSMPYNVICLTCTVVAVCYGSFYNLLTRTFHIEEPRTGGLAKRLANLIRRARGVPPL

SEQ ID NO: 62662 - protein, 172 aa, Homo sapiens
  Payload ID: 12512
  Gene Symbol: PIGT
  Gene Name: phosphatidylinositol glycan anchor biosynthesis, class T
  ENSP ID: ENSP00000443963
  MOD_RES (1)..(1): Any amino acid
XMINNSRNLNIQLKWKRPPENEAPPVPFLHAQRYVSGYGLQKGELSTLLYNTHPYRAFPVLLLDTVPWYLRLYVHTLTITSKGKENKPSYIHYQPAQDRLQPHLLEMLIQLPANSVTKVSIQFERALLKWTEYTPDPNHGFYVSPSVLSALVPSMVAAKPVDWEESPLFNSL

SEQ ID NO: 62663 - protein, 435 aa, Homo sapiens
  Payload ID: 12513
  Gene Symbol: PIGU
  Gene Name: phosphatidylinositol glycan anchor biosynthesis, class U
  Uniprot ID: Q9H490
  ENSP ID: ENSP00000217446
MAAPLVLVLVVAVTVRAALFRSSLAEFISERVEVVSPLSSWKRVVEGLSLLDLGVSPYSGAVFHETPLIIYLFHFLIDYAELVFMITDALTAIALYFAIQDFNKVVFKKQKLLLELDQYAPDVAELIRTPMEMRYIPLKVALFYLLNPYTILSCVAKSTCAINNTLIAFFILTTIKGSAFLSAIFLALATYQSLYPLTLFVPGLLYLLQRQYIPVKMKSKAFWIFSWEYAMMYVGSLVVIICLSFFLLSSWDFIPAVYGFILSVPDLTPNIGLFWYFFAEMFEHFSLFFVCVFQINVFFYTIPLAIKLKEHPIFFMFIQIAVIAIFKSYPTVGDVALYMAFFPVWNHLYRFLRNIFVLTCIIIVCSLLFPVLWHLWIYAGSANSNFFYAITLTFNVGQILLISDYFYAFLRREYYLTHGLYLTAKDGTEAMLVLK

SEQ ID NO: 62664 - protein, 415 aa, Homo sapiens
  Payload ID: 12513
  Gene Symbol: PIGU
  Gene Name: phosphatidylinositol glycan anchor biosynthesis, class U
  Uniprot ID: Q9H490
  ENSP ID: ENSP00000363953
MAAPLVLVLVVAVTVRAALFRSSLAEFISERVEVVSPLSSWKRVVEGLSLLDLGVSPYSGAVFHEITDALTAIALYFAIQDFNKVVFKKQKLLLELDQYAPDVAELIRTPMEMRYIPLKVALFYLLNPYTILSCVAKSTCAINNTLIAFFILTTIKGSAFLSAIFLALATYQSLYPLTLFVPGLLYLLQRQYIPVKMKSKAFWIFSWEYAMMYVGSLVVIICLSFFLLSSWDFIPAVYGFILSVPDLTPNIGLFWYFFAEMFEHFSLFFVCVFQINVFFYTIPLAIKLKEHPIFFMFIQIAVIAIFKSYPTVGDVALYMAFFPVWNHLYRFLRNIFVLTCIIIVCSLLFPVLWHLWIYAGSANSNFFYAITLTFNVGQILLISDYFYAFLRREYYLTHGLYLTAKDGTEAMLVLK

SEQ ID NO: 62665 - protein, 169 aa, Homo sapiens
  Payload ID: 12513
  Gene Symbol: PIGU
  Gene Name: phosphatidylinositol glycan anchor biosynthesis, class U
  ENSP ID: ENSP00000395755
VSVPTHLVCPRTPLSPPAAVHTCENEEQSLLDLFLGVCHDINVFFYTIPLAIKLKEHPIFFMFIQIAVIAIFKSYPTVGDVALYMAFFPVWNHLYRFLRNIFVLTCIIIVCSLLFPVLWHLWIYAGSANSNFFYAITLTFNVGQILLISDYFYAFLRREYYLTHGLYLT

SEQ ID NO: 62666 - protein, 493 aa, Homo sapiens
  Payload ID: 12514
  Gene Symbol: PIGV
  Gene Name: phosphatidylinositol glycan anchor biosynthesis, class V
  Uniprot ID: Q9NUD9
  ENSP ID: ENSP00000078527
MWPQDPSRKEVLRFAVSCRILTLMLQALFNAIIPDHHAEAFSPPRLAPSGFVDQLVEGLLGGLSHWDAEHFLFIAEHGYLYEHNFAFFPGFPLALLVGTELLRPLRGLLSLRSCLLISVASLNFLFFMLAAVALHDLGCLVLHCPHQSFYAALLFCLSPANVFLAAGYSEALFALLTFSAMGQLERGRVWTSVLLFAFATGVRSNGLVSVGFLMHSQCQGFFSSLTMLNPLRQLFKLMASLFLSVFTLGLPFALFQYYAYTQFCLPGSARPIPEPLVQLAVDKGYRIAEGNEPPWCFWDVPLIYSYIQDVYWNVGFLKYYELKQVPNFLLAAPVAILVAWATWTYVTTHPWLCLTLGLQRSKNNKTLEKPDLGFLSPQVFVYVVHAAVLLLFGGLCMHVQVLTRFLGSSTPIMYWFPAHLLQDQEPLLRSLKTVPWKPLAEDSPPGQKVPRNPIMGLLYHWKTCSPVTRYILGYFLTYWLLGLLLHCNFLPWT

SEQ ID NO: 62667 - protein, 493 aa, Homo sapiens; identical to SEQ ID NO: 62666
  Payload ID: 12514
  Gene Symbol: PIGV
  Gene Name: phosphatidylinositol glycan anchor biosynthesis, class V
  Uniprot ID: Q9NUD9
  ENSP ID: ENSP00000363260

SEQ ID NO: 62668 - protein, 120 aa, Homo sapiens
  Payload ID: 12514
  Gene Symbol: PIGV
  Gene Name: phosphatidylinositol glycan anchor biosynthesis, class V
  ENSP ID: ENSP00000388425
MWPQDPSRKEVLRFAVSCRILTLMLQALFNAIIPDHHAEAFSPPRLAPSGFVDQLVEGLLGGLSHWDAEHFLFIAEHGYLYEHNFAFFPGFPLALLVGTELLRPLRGLLSLRSCLLISVA

SEQ ID NO: 62669 - protein, 72 aa, Homo sapiens
  Payload ID: 12514
  Gene Symbol: PIGV
  Gene Name: phosphatidylinositol glycan anchor biosynthesis, class V
  ENSP ID: ENSP00000399067
MWPQDPSRKEVLRFAVSCRILTLMLQALFNAIIPDHHAEAFSPPRLAPSGFVDQLVEGLLGGLSHWDAEHFL

SEQ ID NO: 62670 - protein, 182 aa, Homo sapiens
  Payload ID: 12514
  Gene Symbol: PIGV
  Gene Name: phosphatidylinositol glycan anchor biosynthesis, class V
  ENSP ID: ENSP00000406080
MWPQDPSRKEVLRFAVSCRILTLMLQALFNAIIPDHHAEAFSPPRLAPSGFVDQLVEGLLGGLSHWDAEHFLFIAEHGYLYEHNFAFFPGFPLALLVGTELLRPLRGLLSLRSCLLISVASLNFLFFMLAAVALHDLGCLVLHCPHQSFYAALLFCLSPANVFLAAGYSEALFALLTFSAMG

SEQ ID NO: 62671 - protein, 74 aa, Homo sapiens
  Payload ID: 12514
  Gene Symbol: PIGV
  Gene Name: phosphatidylinositol glycan anchor biosynthesis, class V
  ENSP ID: ENSP00000436884
MWPQDPSRKEVLRFAVSCRILTLMLQALFNAIIPDHHAEAFSPPRLAPSGFVDQLVEVLCLHPILSARLSPPHS

SEQ ID NO: 62672 - protein, 504 aa, Homo sapiens
  Payload ID: 12515
  Gene Symbol: PIGW
  Gene Name: phosphatidylinositol glycan anchor biosynthesis, class W
  Uniprot ID: Q7Z7B1
  ENSP ID: ENSP00000480021
MSEKQMKEAFVSNLNGTTVLEITQGLCFPAFCILCRGFLIIFSQYLCSFSPTWKTRFLTDFVVLIVPMVATLTIWASFILLELLGVIIFGAGLLYQIYRRRTCYARLPFLKILEKFLNISLESEYNPAISCFRVITSAFTAIAILAVDFPLFPRRFAKTELYGTGAMDFGVGGFVFGSAMVCLEVRRRKYMEGSKLHYFTNSLYSVWPLVFLGIGRLAIIKSIGYQEHLTEYGVHWNFFFTIIVVKLITPLLLIIFPLNKSWIIALGITVLYQLALDFTSLKRLILYGTDGSGTRVGLLNANREGIISTLGYVAIHMAGVQTGLYMHKNRSHIKDLIKVACFLLLAAISLFISLYVVQVNVEAVSRRMANLAFCIWIVASSLILLSSLLLGDIILSFAKFLIKGALVPCSWKLIQSPVTNKKHSESLVPEAERMEPSLCLITALNRKQLIFFLLSNITTGLINLMVDTLHSSTLWALFVVNLYMFSNCLIVYVLYLQDKTVQFW

SEQ ID NO: 62673 - protein, 277 aa, Homo sapiens
  Payload ID: 12515
  Gene Symbol: PIGW
  Gene Name: phosphatidylinositol glycan anchor biosynthesis, class W
  ENSP ID: ENSP00000480475
MSEKQMKEAFVSNLNGTTVLEITQGLCFPAFCILCRGFLIIFSQYLCSFSPTWKTRFLTDFVVLIVPMVATLTIWASFILLELLGVIIFGAGLLYQIYRRRTCYARLPFLKILEKFLNISLESEYNPAISCFRVITSAFTAIAILAVDFPLFPRRFAKTELYGTGAMDFGVGGFVFGSAMVCLEVRRRKYMEGSKLHYFTNSLYSVWPLVFLGIGRLAIIKSIGYQEHLTEYGVHWNFFFTIIVVKLITPLLLIIFPLNKSWIIALGITVLYQLALD

SEQ ID NO: 62674 - protein, 504 aa, Homo sapiens; identical to SEQ ID NO: 62672
  Payload ID: 12515
  Gene Symbol: PIGW
  Gene Name: phosphatidylinositol glycan anchor biosynthesis, class W
  Uniprot ID: Q7Z7B1
  ENSP ID: ENSP00000481144

SEQ ID NO: 62675 - protein, 504 aa, Homo sapiens; identical to SEQ ID NO: 62672
  Payload ID: 12515
  Gene Symbol: PIGW
  Gene Name: phosphatidylinositol glycan anchor biosynthesis, class W
  Uniprot ID: Q7Z7B1
  ENSP ID: ENSP00000482202

SEQ ID NO: 62676 - protein, 504 aa, Homo sapiens; identical to SEQ ID NO: 62672
  Payload ID: 12515
  Gene Symbol: PIGW
  Gene Name: phosphatidylinositol glycan anchor biosynthesis, class W
  Uniprot ID: Q7Z7B1
  ENSP ID: ENSP00000488033

SEQ ID NO: 62677 - protein, 277 aa, Homo sapiens; identical to SEQ ID NO: 62673
  Payload ID: 12515
  Gene Symbol: PIGW
  Gene Name: phosphatidylinositol glycan anchor biosynthesis, class W
  ENSP ID: ENSP00000488539

SEQ ID NO: 62678 - protein, 276 aa, Homo sapiens
  Payload ID: 12516
  Gene Symbol: PIGX
  Gene Name: phosphatidylinositol glycan anchor biosynthesis, class X
  ENSP ID: ENSP00000296333
LAARVAAVRAAAWLLLGAATGLTRGPAAAFTAARSDAGIRAMCSEIILRQEVLKDGFHRDLLIKVKFGESIEDLHTCRLLIKQDIPAGLYVDPYELASLRERNITEAVMVSENFDIEAPNYLSKESEVLIYARRDSQCIDCFQAFLPVHCRYHRPHSEDGEASIVVNNPDLLMFCDQAGSRRMIRFRFDSFDKTIEFPILKCWAHSEVAAPCALENEDICQWNKMKYKSVYKNVILQVPVGLTVHTSLVCSVTLLITILCSTLILVAVFKYGHFSL

SEQ ID NO: 62679 - protein, 258 aa, Homo sapiens
  Payload ID: 12516
  Gene Symbol: PIGX
  Gene Name: phosphatidylinositol glycan anchor biosynthesis, class X
  Uniprot ID: Q8TBF5
  ENSP ID: ENSP00000376192
LAARVAAVRAAAWLLLGAATGLTRGPAAAFTAARSDAGIRAMCSEIILRQEVLKDGFHRDLLIKVKFGESIEDLHTCRLLIKQDIPAGLYVDPYELASLRERNITEAVMVSENFDIEAPNYLSKESEVLIYARRDSQCIDCFQAFLPVHCRYHRPHSEDGEASIVVNNPDLLMFCDQEFPILKCWAHSEVAAPCALENEDICQWNKMKYKSVYKNVILQVPVGLTVHTSLVCSVTLLITILCSTLILVAVFKYGHFSL

SEQ ID NO: 62680 - protein, 127 aa, Homo sapiens
  Payload ID: 12516
  Gene Symbol: PIGX
  Gene Name: phosphatidylinositol glycan anchor biosynthesis, class X
  ENSP ID: ENSP00000390804
MCSEIILRQEVLKDGFHRDLLIKVKFGESIEDLHTCRLLIKQDIPAGLYVDPYELASLRERNITEAVMVSENFDIEAPNYLSKESEVLIYARRDSQCIDCFQAFLPVHCRYHRPHSEDGEASIVVNN

SEQ ID NO: 62681 - protein, 63 aa, Homo sapiens
  Payload ID: 12516
  Gene Symbol: PIGX
  Gene Name: phosphatidylinositol glycan anchor biosynthesis, class X
  ENSP ID: ENSP00000393424
AAAWLLLGAATGLTRGPAAAFTAARSDAGIRAMCSEIILRQEVLKDGFHRNSKYMYTRLLDIV

SEQ ID NO: 62682 - protein, 111 aa, Homo sapiens
  Payload ID: 12516
  Gene Symbol: PIGX
  Gene Name: phosphatidylinositol glycan anchor biosynthesis, class X
  ENSP ID: ENSP00000394722
AAAWLLLGAATGLTRGPAAAFTAARSDAGIRAMCSEIILRQEVLKDGFHRDLLIKVKFGESIEDLHTCRLLIKQDIPAGLYVDPYELASLRERNITEEKTSWRRLWLPSDN

SEQ ID NO: 62683 - protein, 170 aa, Homo sapiens
  Payload ID: 12516
  Gene Symbol: PIGX
  Gene Name: phosphatidylinositol glycan anchor biosynthesis, class X
  ENSP ID: ENSP00000409073
MCSEIILRQEVLKDGFHRDLLIKVKFGESIEDLHTCRLLIKQDIPAGLYVDPYELASLRERNITEAVMVSENFDIEAPNYLSKESEVLIYARRDSQCIDCFQAFLPVHCRYHRPHSEDGEASIVVNNPDLLMFCDQEFPILKCWAHSEVAAPCALENEDICQWNKMKYKS

SEQ ID NO: 62684 - protein, 79 aa, Homo sapiens
  Payload ID: 12516
  Gene Symbol: PIGX
  Gene Name: phosphatidylinositol glycan anchor biosynthesis, class X
  ENSP ID: ENSP00000413672
MCSEIILRQEVLKDGFHRDLLIKVKFGESIEDLHTCRLLIKQDIPAGLYVDPYELASLRERNITEEKTSWRRLWLPSDN

SEQ ID NO: 62685 - protein, 150 aa, Homo sapiens
  Payload ID: 12516
  Gene Symbol: PIGX
  Gene Name: phosphatidylinositol glycan anchor biosynthesis, class X
  ENSP ID: ENSP00000416446
MCSEIILRQEVLKDGFHRDLLIKVKFGESIEDLHTCRLLIKQDIPAGLYVDPYELASLRERNITEAVMVSENFDIEAPNYLSKESEVLIYARRDSQCIDCFQAFLPVHCRYHRPHSEDGEASIVVNNPDLLMFCDQGEGCKCFLRVETSE

SEQ ID NO: 62686 - protein, 71 aa, Homo sapiens
  Payload ID: 12517
  Gene Symbol: PIGY
  Gene Name: phosphatidylinositol glycan anchor biosynthesis, class Y
  Uniprot ID: Q3MUY2
  ENSP ID: ENSP00000432688
MFLSLPTLTVLIPLVSLAGLFYSASVEENFPQGCTSTASLCFYSLLLPITIPVYVFFHLWTWMGIKLFRHN

SEQ ID NO: 62687 - protein, 92 aa, Homo sapiens
  Payload ID: 12518
  Gene Symbol: PIGZ
  Gene Name: phosphatidylinositol glycan anchor biosynthesis, class Z
  ENSP ID: ENSP00000389327
MQICGSSVASVAAGTSFQVLGPVCWQQLDLKMAVRVLWGGLSLLRVLWCLLPQTGYVHPDEFFQSPEVMAGPSPTPLRDSSSRGCWCWYPPM

SEQ ID NO: 62688 - protein, 49 aa, Homo sapiens
  Payload ID: 12518
  Gene Symbol: PIGZ
  Gene Name: phosphatidylinositol glycan anchor biosynthesis, class Z
  ENSP ID: ENSP00000405341
  MOD_RES (1)..(1): Any amino acid
XRVLWGGLSLLRVLWCLLPQTGYVHPDEFFQSPEVMAGSGRSWGRGLAW

SEQ ID NO: 62689 - protein, 579 aa, Homo sapiens
  Payload ID: 12518
  Gene Symbol: PIGZ
  Gene Name: phosphatidylinositol glycan anchor biosynthesis, class Z
  Uniprot ID: Q86VD9
  ENSP ID: ENSP00000413405
MQICGSSVASVAAGTSFQVLGPVCWQQLDLKMAVRVLWGGLSLLRVLWCLLPQTGYVHPDEFFQSPEVMAEDILGVQAARPWEFYPSSSCRSVLFPLLISGSTFWLLRLWEELGPWPGLVSGYALLVGPRLLLTALSFALDGAVYHLAPPMGADRWNALALLSGSYVTLVFYTRTFSNTIEGLLFTWLLVLVSSHVTWGPTRKEPAPGPRWRSWLLGGIVAAGFFNRPTFLAFAVVPLYLWGTRGATNPGLKSLTREALVLLPGAALTAAVFVATDSWYFSSPATSRNLVLTPVNFLHYNLNPQNLARHGTHARLTHLAVNGFLLFGVLHAQALQAAWQRLQVGLQASAQMGLLRALGARSLLSSPRSYLLLLYFMPLALLSAFSHQEARFLIPLLVPLVLLCSPQTQPVPWKGTVVLFNALGALLFGCLHQGGLVPGLEYLEQVVHAPVLPSTPTHYTLLFTHTYMPPRHLLHLPGLGAPVEVVDMGGTEDWALCQTLKSFTRQPACQVAGGPWLCRLFVVTPGTTRRAVEKCSFPFKNETLLFPHLTLEDPPALSSLLSGAWRDHLSLHIVELGEET

SEQ ID NO: 62690 - protein, 270 aa, Homo sapiens
  Payload ID: 12519
  Gene Symbol: PITPNA
  Gene Name: phosphatidylinositol transfer protein, alpha
  Uniprot ID: Q00169
  ENSP ID: ENSP00000316809
MVLLKEYRVILPVSVDEYQVGQLYSVAEASKNETGGGEGVEVLVNEPYEKDGEKGQYTHKIYHLQSKVPTFVRMLAPEGALNIHEKAWNAYPYCRTVITNEYMKEDFLIKIETWHKPDLGTQENVHKLEPEAWKHVEAVYIDIADRSQVLSKDYKAEEDPAKFKSIKTGRGPLGPNWKQELVNQKDCPYMCAYKLVTVKFKWWGLQNKVENFIHKQERRLFTNFHRQLFCWLDKWVDLTMDDIRRMEEETKRQLDEMRQKDPVKGMTADD

SEQ ID NO: 62691 - protein, 270 aa, Homo sapiens [sequence omitted]

SEQ ID NO: 62692 - protein, 83 aa, Homo sapiens
  Payload ID: 12519
  Gene Symbol: PITPNA
  Gene Name: phosphatidylinositol transfer protein, alpha
  ENSP ID: ENSP00000460008
MLAPEGALNIHEKAWNAYPYCRTVITNEYMKEDFLIKIETWHKPDLGTQENVHKLEPEAWKHVEAVYIDIADRSQVLSKDYKA

SEQ ID NO: 62693 - protein, 44 aa, Homo sapiens
  Payload ID: 12519
  Gene Symbol: PITPNA
  Gene Name: phosphatidylinositol transfer protein, alpha
  ENSP ID: ENSP00000460771
MLAPEGALNIHEKAWNAYPYCRTVITNEYMKEDFLIKIETWHKP

SEQ ID NO: 62694 - protein, 142 aa, Homo sapiens
  Payload ID: 12519
  Gene Symbol: PITPNA
  Gene Name: phosphatidylinositol transfer protein, alpha
  ENSP ID: ENSP00000460983
MLAPEGALNIHEKAWNAYPYCRTVITNEYMKEDFLIKIETWHKPDLGTQENVHKLEPEAWKHVEAVYIDIADRSQVLSKDYKAEEDPAKFKSIKTGRGPLGPNWKQELVNQKDCPYMCAYKLVTVKFKWWGLQNKVENFIHK

SEQ ID NO: 62695 - protein, 98 aa, Homo sapiens
  Payload ID: 12519
  Gene Symbol: PITPNA
  Gene Name: phosphatidylinositol transfer protein, alpha
  ENSP ID: ENSP00000461011
MVLLKEYRVILPVSVDEYQVGQLYSVAEASKNETGGGEGVEVLVNEPYEKDGEKGQYTHKIYHLQSKVPTFVRMLAPEGALNIHEKAWNAYPYCRTGA

SEQ ID NO: 62696 - protein, 115 aa, Homo sapiens
  Payload ID: 12519
  Gene Symbol: PITPNA
  Gene Name: phosphatidylinositol transfer protein, alpha
  ENSP ID: ENSP00000461140
MLAPEGALNIHEKAWNAYPYCRTVITNEYMKEDFLIKIETWHKPDLGTQENVHKLEPEAWKHVEAVYIDIADRSQVLSKDYKAEEDPAKFKSIKTGRGPLGPNWKQELVNQKDCP

SEQ ID NO: 62697 - protein, 209 aa, Homo sapiens
  Payload ID: 12519
  Gene Symbol: PITPNA
  Gene Name: phosphatidylinositol transfer protein, alpha
  ENSP ID: ENSP00000461245
  MOD_RES (1)..(1): Any amino acid
XVNEPYEKDGEKGQYTHKIYHLQSKVPTFVRMLAPEGALNIHEKAWNAYPYCRTVITNEYMKEDFLIKIETWHKPDLGTQENVHKLEPEAWKHVEAVYIDIADRSQVLSKVFPGDLDAHPRLKVSVFNTDYKAEEDPAKFKSIKTGRGPLGPNWKQELVNQKDCPYMCAYKLVTVKFKWWGLQNKVENFIHKQERRLFTNFHRQLFCWL

SEQ ID NO: 62698 - protein, 121 aa, Homo sapiens
  Payload ID: 12519
  Gene Symbol: PITPNA
  Gene Name: phosphatidylinositol transfer protein, alpha
  ENSP ID: ENSP00000461539
MQDTKGPRGLQQGSGDRTSKLGNWLDLYGRVILPVSVDEYQVGQLYSVAEASKNETGGGEGVEVLVNEPYEKDGEKGQYTHKIYHLQSKVPTFVRMLAPEGALNIHEKAWNAYPYCRTVIT

SEQ ID NO: 62699 - protein, 66 aa, Homo sapiens
  Payload ID: 12519
  Gene Symbol: PITPNA
  Gene Name: phosphatidylinositol transfer protein, alpha
  ENSP ID: ENSP00000461801
MKEDFLIKIETWHKPDLGTQENVHKLEPEAWKHVEAVYIDIADRSQVLSKDYKAEEDPAKFKSIKT

SEQ ID NO: 62700 - protein, 272 aa, Homo sapiens
  Payload ID: 12520
  Gene Symbol: PITPNB
  Gene Name: phosphatidylinositol transfer protein, beta
  Uniprot ID: P48739
  ENSP ID: ENSP00000321266
MVLIKEFRVVLPCSVQEYQVGQLYSVAEASKNETGGGEGIEVLKNEPYEKDGEKGQYTHKIYHLKSKVPAFVRMIAPEGSLVFHEKAWNAYPYCRTIVTNEYMKDDFFIKIETWHKPDLGTLENVHGLDPNTWKTVEIVHIDIADRSQVEPADYKADEDPALFQSVKTKRGPLGPNWKKELANSPDCPQMCAYKLVTIKFKWWGLQSKVENFIQKQEKRIFTNFHRQLFCWIDKWIDLTMEDIRRMEDETQKELETLRNQGQVRGTSAASDE

SEQ ID NO: 62701 - protein, 271 aa, Homo sapiens
  Payload ID: 12520
  Gene Symbol: PITPNB
  Gene Name: phosphatidylinositol transfer protein, beta
  Uniprot ID: P48739
  ENSP ID: ENSP00000334738
MVLIKEFRVVLPCSVQEYQVGQLYSVAEASKNETGGGEGIEVLKNEPYEKDGEKGQYTHKIYHLKSKVPAFVRMIAPEGSLVFHEKAWNAYPYCRTIVTNEYMKDDFFIKIETWHKPDLGTLENVHGLDPNTWKTVEIVHIDIADRSQVEPADYKADEDPALFQSVKTKRGPLGPNWKKELANSPDCPQMCAYKLVTIKFKWWGLQSKVENFIQKQEKRIFTNFHRQLFCWIDKWIDLTMEDIRRMEDETQKELETMRKRGSVRGTSAADV

SEQ ID NO: 62702 - protein, 167 aa, Homo sapiens
  Payload ID: 12520
  Gene Symbol: PITPNB
  Gene Name: phosphatidylinositol transfer protein, beta
  ENSP ID: ENSP00000403675
MGDLLMEKCRVVLPCSVQEYQVGQLYSVAEASKNETGGGEGIEVLKNEPYEKDGEKGQYTHKIYHLKSKVPAFVRMIAPEGSLVFHEKAWNAYPYCRTIVTNEYMKDDFFIKIETWHKPDLGTLENVHGLDPNTWKTVEIVHIDIADRSQVEPADYKADEDPALFQS

SEQ ID NO: 62703 - protein, 271 aa, Homo sapiens [sequence omitted]

SEQ ID NO: 62704 - protein, 120 aa, Homo sapiens
  Payload ID: 12520
  Gene Symbol: PITPNB
  Gene Name: phosphatidylinositol transfer protein, beta
  ENSP ID: ENSP00000406542
MIAPEGSLVFHEKAWNAYPYCRTIVTNEYMKDDFFIKIETWHKPDLGTLENVHGLDPNTWKTVEIVHIDIADRSQVEPADYKADEDPALFQSVKTKRGPLGPNWKKELANSPDCPQMCAY

SEQ ID NO: 62705 - protein, 273 aa, Homo sapiens
  Payload ID: 12520
  Gene Symbol: PITPNB
  Gene Name: phosphatidylinositol transfer protein, beta
  Uniprot ID: P48739
  ENSP ID: ENSP00000487693
MGDLLMEKCRVVLPCSVQEYQVGQLYSVAEASKNETGGGEGIEVLKNEPYEKDGEKGQYTHKIYHLKSKVPAFVRMIAPEGSLVFHEKAWNAYPYCRTIVTNEYMKDDFFIKIETWHKPDLGTLENVHGLDPNTWKTVEIVHIDIADRSQVEPADYKADEDPALFQSVKTKRGPLGPNWKKELANSPDCPQMCAYKLVTIKFKWWGLQSKVENFIQKQEKRIFTNFHRQLFCWIDKWIDLTMEDIRRMEDETQKELETMRKRGSVRGTSAADV

SEQ ID NO: 62706 - protein, 266 aa, Homo sapiens
  Payload ID: 12521
  Gene Symbol: PITPNC1
  Gene Name: phosphatidylinositol transfer protein, cytoplasmic 1
  ENSP ID: ENSP00000299954
MLLKEYRICMPLTVDEYKIGQLYMISKHSHEQSDRGEGVEVVQNEPFEDPHHGNGQFTEKRVYLNSKLPSWARAVVPKIFYVTEKAWNYYPYTITECSFLPKFSIHIETKYEDNKGSNDTIFDNEAKDVEREVCFIDIACDEIPERYYKESEDPKHFKSEKTGRGQLREGWRDSHQPIMCSYKLVTVKFEVWGLQTRVEQFVHKVVRDILLIGHRQAFAWVDEWYDMTMDDVREYEKNMHEQTNIKVCNQHSSPVDDIESHAQTST

SEQ ID NO: 62707 - protein, 268 aa, Homo sapiens
  Payload ID: 12521
  Gene Symbol: PITPNC1
  Gene Name: phosphatidylinositol transfer protein, cytoplasmic 1
  ENSP ID: ENSP00000463626
MLLKEYRICMPLTVDEYKIGQLYMISKHSHEQSDRGEGVEVVQNEPFEDPHHGNGQFTEKRVYLNSKLPSWARAVVPKIFYVTEKAWNYYPYTITEYTCSFLPKFSIHIETKYEDNKGSNDTIFDNEAKDVEREVCFIDIACDEIPERYYKESEDPKHFKSEKTGRGQLREGWRDSHQPIMCSYKLVTVKFEVWGLQTRVEQFVHKVVRDILLIGHRQAFAWVDEWYDMTMDDVREYEKNMHEQTNIKVCNQHSSPVDDIESHAQTST

SEQ ID NO: 62708 - protein, 332 aa, Homo sapiens
  Payload ID: 12521
  Gene Symbol: PITPNC1
  Gene Name: phosphatidylinositol transfer protein, cytoplasmic 1
  Uniprot ID: Q9UKF7
  ENSP ID: ENSP00000464006
MLLKEYRICMPLTVDEYKIGQLYMISKHSHEQSDRGEGVEVVQNEPFEDPHHGNGQFTEKRVYLNSKLPSWARAVVPKIFYVTEKAWNYYPYTITEYTCSFLPKFSIHIETKYEDNKGSNDTIFDNEAKDVEREVCFIDIACDEIPERYYKESEDPKHFKSEKTGRGQLREGWRDSHQPIMCSYKLVTVKFEVWGLQTRVEQFVHKVVRDILLIGHRQAFAWVDEWYDMTMDEVREFERATQEATNKKIGIFPPAISISSIPLLPSSVRSAPSSAPSTPLSTDAPEFLSVPKDRPRKKSAPETLTLPDPEKKATLNLPGMHSSDKPCRPKSE

SEQ ID NO: 62709 - protein, 98 aa, Homo sapiens
  Payload ID: 12521
  Gene Symbol: PITPNC1
  Gene Name: phosphatidylinositol transfer protein, cytoplasmic 1
  ENSP ID: ENSP00000464364
MISKHSHEQSDRGEGVEVVQNEPFEDPHHGNGQFTEKRVYLNSKLPSWARAVVPKIFYVTEKAWNYYPYTITEYTCSFLPKFSIHIETKYEDNKGSND

SEQ ID NO: 62710 - protein, 88 aa, Homo sapiens
  Payload ID: 12521
  Gene Symbol: PITPNC1
  Gene Name: phosphatidylinositol transfer protein, cytoplasmic 1
  ENSP ID: ENSP00000464584
MISKHSHEQSDRGEGVEVVQNEPFEDPHHGNGQFTEKRVYLNSKLPSWARAVVPKIFYVTEKAWNYYPYTITEYTCSFLPKFSIHIET

SEQ ID NO: 62711 - protein, 1244 aa, Homo sapiens
  Payload ID: 12522
  Gene Symbol: PITPNM1
  Gene Name: phosphatidylinositol transfer protein, membrane-associated 1
  Uniprot ID: O00562
  ENSP ID: ENSP00000348772
MLIKEYHILLPMSLDEYQVAQLYMIQKKSREESSGEGSGVEILANRPYTDGPGGSGQYTHKVYHVGSHIPGWFRALLPKAALQVEEESWNAYPYTRTRYTCPFVEKFSIEIETYYLPDGGQQPNVFNLSGAERRQRILDTIDIVRDAVAPGEYKAEEDPRLYHSVKTGRGPLSDDWARTAAQTGPLMCAYKLCKVEFRYWGMQAKIEQFIHDVGLRRVMLRAHRQAWCWQDEWTELSMADIRALEEETARMLAQRMAKCNTGSEGSEAQPPGKPSTEARSAASNTGTPDGPEAPPGPDASPDASFGKQWSSSSRSSYSSQHGGAVSPQSLSEWRMQNIARDSENSSEEEFFDAHEGFSDSEEVFPKEMTKWNSNDFIDAFASPVEAEGTPEPGAEAAKGIEDGAQAPRDSEGLDGAGELGAEACAVHALFLILHSGNILDSGPGDANSKQADVQTLSSAFEAVTRIHFPEALGHVALRLVPCPPICAAAYALVSNLSPYSHDGDSLSRSQDHIPLAALPLLATSSSRYQGAVATVIARTNQAYSAFLRSPEGAGFCGQVALIGDGVGGILGFDALCHSANAGTGSRGSSRRGSMNNELLSPEFGPVRDPLADGVEGLGRGSPEPSALPPQRIPSDMASPEPEGSQNSLQAAPATTSSWEPRRASTAFCPPAASSEAPDGPSSTARLDFKVSGFFLFGSPLGLVLALRKTVMPALEAAQMRPACEQIYNLFHAADPCASRLEPLLAPKFQAIAPLTVPRYQKFPLGDGSSLLLADTLQTHSSLFLEELEMLVPSTPTSTSGAFWKGSELATDPPAQPAAPSTTSEVVKILERWWGTKRIDYSLYCPEALTAFPTVTLPHLFHASYWESADVVAFILRQVIEKERPQLAECEEPSIYSPAFPREKWQRKRTQVKIRNVTSNHRASDTVVCEGRPQVLSGRFMYGPLDVVTLTGEKVDVYIMTQPLSGKWIHFGTEVTNSSGRLTFPVPPERALGIGVYPVRMVVRGDHTYAECCLTVVARGTEAVVFSIDGSFTASVSIMGSDPKVRAGAVDVVRHWQDSGYLIVYVTGRPDMQKHRVVAWLSQHNFPHGVVSFCDGLTHDPLRQKAMFLQSLVQEVELNIVAGYGSPKDVAVYAALGLSPSQTYIVGRAVRKLQAQCQFLSDGYVAHLGQLEAGSHSHASSGPPRAALGKSSYGVAAPVDFLRKQSQLLRSRGPSQAEREGPGTPPTTLARGKARSISLKLDSEE

SEQ ID NO: 62712 - protein, 1243 aa, Homo sapiens
  Payload ID: 12522
  Gene Symbol: PITPNM1
  Gene Name: phosphatidylinositol transfer protein, membrane-associated 1
  Uniprot ID: O00562
  ENSP ID: ENSP00000398787
MLIKEYHILLPMSLDEYQVAQLYMIQKKSREESSGEGSGVEILANRPYTDGPGGSGQYTHKVYHVGSHIPGWFRALLPKAALQVEEESWNAYPYTRTRYTCPFVEKFSIEIETYYLPDGGQQPNVFNLSGAERRQRILDTIDIVRDAVAPGEYKAEEDPRLYHSVKTGRGPLSDDWARTAAQTGPLMCAYKLCKVEFRYWGMQAKIEQFIHDVGLRRVMLRAHRQAWCWQDEWTELSMADIRALEEETARMLAQRMAKCNTGSEGSEAQPPGKPSTEARSAASNTGTPDGPEAPPGPDASPDASFGKQWSSSSRSSYSSQHGGAVSPQSLSEWRMQNIARDSENSSEEEFFDAHEGFSDSEEVFPKEMTKWNSNDFIDAFASPVEAEGTPEPGAEAAKGIEDGAQAPRDSEGLDGAGELGAEACAVHALFLILHSGNILDSGPGDANSKQADVQTLSSAFEAVTRIHFPEALGHVALRLVPCPPICAAAYALVSNLSPYSHDGDSLSRSQDHIPLAALPLLATSSSRYQGAVATVIARTNQAYSAFLRSPEGAGFCGQVALIGDGVGGILGFDALCHSANAGTGSRGSSRRGSMNNELLSPEFGPVRDPLADGVEGLGRGSPEPSALPPQRIPSDMASPEPEGSQNSLQAAPATTSSWEPRRASTAFCPPAASSEAPDGPSSTARLDFKVSGFFLFGSPLGLVLALRKTVMPALEAQMRPACEQIYNLFHAADPCASRLEPLLAPKFQAIAPLTVPRYQKFPLGDGSSLLLADTLQTHSSLFLEELEMLVPSTPTSTSGAFWKGSELATDPPAQPAAPSTTSEVVKILERWWGTKRIDYSLYCPEALTAFPTVTLPHLFHASYWESADVVAFILRQVIEKERPQLAECEEPSIYSPAFPREKWQRKRTQVKIRNVTSNHRASDTVVCEGRPQVLSGRFMYGPLDVVTLTGEKVDVYIMTQPLSGKWIHFGTEVTNSSGRLTFPVPPERALGIGVYPVRMVVRGDHTYAECCLTVVARGTEAVVFSIDGSFTASVSIMGSDPKVRAGAVDVVRHWQDSGYLIVYVTGRPDMQKHRVVAWLSQHNFPHGVVSFCDGLTHDPLRQKAMFLQSLVQEVELNIVAGYGSPKDVAVYAALGLSPSQTYIVGRAVRKLQAQCQFLSDGYVAHLGQLEAGSHSHASSGPPRAALGKSSYGVAAPVDFLRKQSQLLRSRGPSQAEREGPGTPPTTLARGKARSISLKLDSEE

SEQ ID NO: 62713 - protein, 88 aa, Homo sapiens
  Payload ID: 12522
  Gene Symbol: PITPNM1
  Gene Name: phosphatidylinositol transfer protein, membrane-associated 1
  ENSP ID: ENSP00000432746
MLIKEYHILLPMSLDEYQVAQLYMIQKKSREESSGEGSGVEILANRPYTDGPGGSGQYTHKVYHVGSHIPGWFRALLPKAALQVEEES

SEQ ID NO: 62714 - protein, 154 aa, Homo sapiens
  Payload ID: 12522
  Gene Symbol: PITPNM1
  Gene Name: phosphatidylinositol transfer protein, membrane-associated 1
  ENSP ID: ENSP00000432977
MLIKEYHILLPMSLDEYQVAQLYMIQKKSREESSGEGSGVEILANRPYTDGPGGSGQYTHKVYHVGSHIPGWFRALLPKAALQVEEESWNAYPYTRTRYTCPFVEKFSIEIETYYLPDGGQQPNVFNLSGAERRQRILDTIDIVRDAVAPGEYK

SEQ ID NO: 62715 - protein, 163 aa, Homo sapiens
  Payload ID: 12522
  Gene Symbol: PITPNM1
  Gene Name: phosphatidylinositol transfer protein, membrane-associated 1
  ENSP ID: ENSP00000434046
MLIKEYHILLPMSLDEYQVAQLYMIQKKSREESSGEGSGVEILANRPYTDGPGGSGQYTHKVYHVGSHIPGWFRALLPKAALQVEEESWNAYPYTRTRYTCPFVEKFSIEIETYYLPDGGQQPNVFNLSGAERRQRILDTIDIVRDAVAPGEYKAEEDPRLYH

SEQ ID NO: 62716 - protein, 151 aa, Homo sapiens
  Payload ID: 12522
  Gene Symbol: PITPNM1
  Gene Name: phosphatidylinositol transfer protein, membrane-associated 1
  ENSP ID: ENSP00000434904
MLIKEYHILLPMSLDEYQVAQLYMIQKKSREESSGEGSGVEILANRPYTDGPGGSGQYTHKVYHVGSHIPGWFRALLPKAALQVEEESWNAYPYTRTRYTCPFVEKFSIEIETYYLPDGGQQPNVFNLSGAERRQRILDTIDIVRDAVAPG

SEQ ID NO: 62717 - protein, 1244 aa, Homo sapiens; identical to SEQ ID NO: 62711
  Payload ID: 12522
  Gene Symbol: PITPNM1
  Gene Name: phosphatidylinositol transfer protein, membrane-associated 1
  Uniprot ID: O00562
  ENSP ID: ENSP00000437286

SEQ ID NO: 62718 - protein, 1343 aa, Homo sapiens
  Payload ID: 12523
  Gene Symbol: PITPNM2
  Gene Name: phosphatidylinositol transfer protein, membrane-associated 2
  Uniprot ID: Q9BZ72
  ENSP ID: ENSP00000280562
MIIKEYRIPLPMTVEEYRIAQLYMIQKKSRNETYGEGSGVEILENRPYTDGPGGSGQYTHKVYHVGMHIPSWFRSILPKAALRVVEESWNAYPYTRTRFTCPFVEKFSIDIETFYKTDAGENPDVFNLSPVEKNQLTIDFIDIVKDPVPHNEYKTEEDPKLFQSTKTQRGPLSENWIEEYKKQVFPIMCAYKLCKVEFRYWGMQSKIERFIHDTGLRRVMVRAHRQAWCWQDEWYGLSMENIRELEKEAQLMLSRKMAQFNEDGEEATELVKHEAVSDQTSGEPPEPSSSNGEPLVGRGLKKQWSTSSKSSRSSKRGASPSRHSISEWRMQSIARDSDESSDDEFFDAHEDLSDTEEMFPKDITKWSSNDLMDKIESPEPEDTQDGLYRQGAPEFRVASSVEQLNIIEDEVSQPLAAPPSKIHVLLLVLHGGTILDTGAGDPSSKKGDANTIANVFDTVMRVHYPSALGRLAIRLVPCPPVCSDAFALVSNLSPYSHDEGCLSSSQDHIPLAALPLLATSSPQYQEAVATVIQRANLAYGDFIKSQEGMTFNGQVCLIGDCVGGILAFDALCYSNQPVSESQSSSRRGSVVSMQDNDLLSPGILMNAAHCCGGGGGGGGGGGSSGGGGSSGGSSLESSRHLSRSNVDIPRSNGTEDPKRQLPRKRSDSSTYELDTIQQHQAFLSSLHASVLRTEPCSRHSSSSTMLDGTGALGRFDFEITDLFLFGCPLGLVLALRKTVIPALDVFQLRPACQQVYNLFHPADPSASRLEPLLERRFHALPPFSVPRYQRYPLGDGCSTLLVETVQRNPELVLEGGPLAPLPHGDGFLETSMPVPAPTWQDGPRPGCAESDVLQTHNAAFQEHGAPSSPGTAPASRGFRRASEISIASQVSGMAESYTASSIAQIAAKWWGQKRIDYALYCPDALTAFPTVALPHLFHASYWESTDVVSFLLRQVMRHDNSSILELDGKEVSVFTPSKPREKWQRKRTHVKLRNVTANHRINDALANEDGPQVLTGRFMYGPLDMVTLTGEKVDVHIMTQPPSGEWLYLDTLVTNNSGRVSYTIPESHRLGVGVYPIKMVVRGDHTFADSYITVLPKGTEFVVFSIDGSFAASVSIMGSDPKVRAGAVDVVRHWQDLGYLIIYVTGRPDMQKQRVVAWLAQHNFPHGVVSFCDGLVHDPLRHKANFLKLLISELHLRVHAAYGSTKDVAVYSAISLSPMQIYIVGRPTKKLQQQCQFITDGYAAHLAQLKYSHRARPARNTATRMALRKGSFGLPGQGDFLRSRNHLLRTISAQPSGPSHRHERTQSQADGEQRGQRSMSVAAGCWGRAMTGRLEPGAAAGPK

SEQ ID NO: 62719 - protein, 1349 aa, Homo sapiens
  Payload ID: 12523
  Gene Symbol: PITPNM2
  Gene Name: phosphatidylinositol transfer protein, membrane-associated 2
  Uniprot ID: Q9BZ72
  ENSP ID: ENSP00000322218
MIIKEYRIPLPMTVEEYRIAQLYMIQKKSRNETYGEGSGVEILENRPYTDGPGGSGQYTHKVYHVGMHIPSWFRSILPKAALRVVEESWNAYPYTRTRFTCPFVEKFSIDIETFYKTDAGENPDVFNLSPVEKNQLTIDFIDIVKDPVPHNEYKTEEDPKLFQSTKTQRGPLSENWIEEYKKQVFPIMCAYKLCKVEFRYWGMQSKIERFIHDTGLRRVMVRAHRQAWCWQDEWYGLSMENIRELEKEAQLMLSRKMAQFNEDGEEATELVKHEAVSDQTSGEPPEPSSSNGEPLVGRGLKKQWSTSSKSSRSSKRGASPSRHSISEWRMQSIARDSDESSDDEFFDAHEDLSDTEEMFPKDITKWSSNDLMDKIESPEPEDTQDGLYRQGAPEFRVASSVEQLNIIEDEVSQPLAAPPSKIHVLLLVLHGGTILDTGAGDPSSKKGDANTIANVFDTVMRVHYPSALGRLAIRLVPCPPVCSDAFALVSNLSPYSHDEGCLSSSQDHIPLAALPLLATSSPQYQEAVATVIQRANLAYGDFIKSQEGMTFNGQVCLIGDCVGGILAFDALCYSNQPVSESQSSSRRGSVVSMQDNDLLSPGILMNAAHCCGGGGGGGGGGGSSGGGGSSGGSSLESSRHLSRSNVDIPRSNGTEDPKRQLPRKRSDSSTYELDTIQQHQAFLSSLHASVLRTEPCSRHSSSSTMLDGTGALGRFDFEITDLFLFGCPLGLVLALRKTVIPALDVFQLRPACQQVYNLFHPADPSASRLEPLLERRFHALPPFSVPRYQRYPLGDGCSTLLADVLQTHNAAFQEHGAPSSPGTAPASRGFRRASEISIASQVSGMAESYTASSIAQKAPDALSHTPSVRRLSLLALPAPSPTTPGPHPPARKASPGLERAPGLPELDIGEVAAKWWGQKRIDYALYCPDALTAFPTVALPHLFHASYWESTDVVSFLLRQVMRHDNSSILELDGKEVSVFTPSKPREKWQRKRTHVKLRNVTANHRINDALANEDGPQVLTGRFMYGPLDMVTLTGEKVDVHIMTQPPSGEWLYLDTLVTNNSGRVSYTIPESHRLGVGVYPIKMVVRGDHTFADSYITVLPKGTEFVVFSIDGSFAASVSIMGSDPKVRAGAVDVVRHWQDLGYLIIYVTGRPDMQKQRVVAWLAQHNFPHGVVSFCDGLVHDPLRHKANFLKLLISELHLRVHAAYGSTKDVAVYSAISLSPMQIYIVGRPTKKLQQQCQFITDGYAAHLAQLKYSHRARPARNTATRMALRKGSFGLPGQGDFLRSRNHLLRTISAQPSGPSHRHERTQSQADGEQRGQRSMSVAAGCWGRAMTGRLEPGAAAGPK

SEQ ID NO: 62720 - protein, 1349 aa, Homo sapiens; identical to SEQ ID NO: 62719
  Payload ID: 12523
  Gene Symbol: PITPNM2
  Gene Name: phosphatidylinositol transfer protein, membrane-associated 2
  Uniprot ID: Q9BZ72
  ENSP ID: ENSP00000437611

SEQ ID NO: 62721 - protein, 41 aa, Homo sapiens
  Payload ID: 12523
  Gene Symbol: PITPNM2
  Gene Name: phosphatidylinositol transfer protein, membrane-associated 2
  ENSP ID: ENSP00000437869
MIIKEYRIPLPMTVEEYRIAQLYMIQKKSRNETYGEGSGVE

SEQ ID NO: 62722 - protein, 15 aa, Homo sapiens
  Payload ID: 12523
  Gene Symbol: PITPNM2
  Gene Name: phosphatidylinositol transfer protein, membrane-associated 2
  ENSP ID: ENSP00000445399
MIIKEYRIPLPMTVE

SEQ ID NO: 62723 - protein, 478 aa, Homo sapiens
  Payload ID: 12523
  Gene Symbol: PITPNM2
  Gene Name: phosphatidylinositol transfer protein, membrane-associated 2
  ENSP ID: ENSP00000474962
MIIKEYRIPLPMTVEEYRIAQLYMIQKKSRNETYGEGSGVEILENRPYTDGPGGSGQYTHKVYHVGMHIPSWFRSILPKAALRVVEESWNAYPYTRTRFTCPFVEKFSIDIETFYKTDAGENPDVFNLSPVEKNQLTIDFIDIVKDPVPHNEYKTEEDPKLFQSTKTQRGPLSENWIEEYKKQVFPIMCAYKLCKVEFRYWGMQSKIERFIHDTGLRRVMVRAHRQAWCWQDEWYGLSMENIRELEKEAQLMLSRKMAQFNEDGEEATELVKHEAVSDQTSGEPPEPSSSNGEPLVGRGLKKQWSTSSKSSRSSKRGASVMPVRPVGGPPCLLPAQGSLWALPLQLAVNLGFCLPASPSRHSISEWRMQSIARDSDESSDDEFFDAHEDLSDTEEMFPKDITKWSSNDLMDKIESPEPEDTQDGLYRQGAPEFRVASSVEQLNIIEIKNKIFTLCPACLLSLKIKRRKGRKRQSSRQK

SEQ ID NO: 62724 - protein, 1659 aa, Homo sapiens
  Payload ID: 12524
  Gene Symbol: PREX1
  Gene Name: phosphatidylinositol-3,4,5-trisphosphate-dependent Rac exchange factor 1
  Uniprot ID: Q8TCU6
  ENSP ID: ENSP00000361009
MEAPSGSEPGGDGAGDCAHPDPRAPGAAAPSSGPGPCAAARESERQLRLRLCVLNEILGTERDYVGTLRFLQSAFLHRIRQNVADSVEKGLTEENVKVLFSNIEDILEVHKDFLAALEYCLHPEPQSQHELGNVFLKFKDKFCVYEEYCSNHEKALRLLVELNKIPTVRAFLLSCMLLGGRKTTDIPLEGYLLSPIQRICKYPLLLKELAKRTPGKHPDHPAVQSALQAMKTVCSNINETKRQMEKLEALEQLQSHIEGWEGSNLTDICTQLLLQGTLLKISAGNIQERAFFLFDNLLVYCKRKSRVTGSKKSTKRTKSINGSLYIFRGRINTEVMEVENVEDGTADYHSNGYTVTNGWKIHNTAKNKWFVCMAKTAEEKQKWLDAIIREREQRESLKLGMERDAYVMIAEKGEKLYHMMMNKKVNLIKDRRRKLSTVPKCFLGNEFVAWLLEIGEISKTEEGVNLGQALLENGIIHHVSDKHQFKNEQVMYRFRYDDGTYKARSELEDIMSKGVRLYCRLHSLYTPVIKDRDYHLKTYKSVLPGSKLVDWLLAQGDCQTREEAVALGVGLCNNGFMHHVLEKSEFRDESQYFRFHADEEMEGTSSKNKQLRNDFKLVENILAKRLLILPQEEDYGFDIEEKNKAVVVKSVQRGSLAEVAGLQVGRKIYSINEDLVFLRPFSEVESILNQSFCSRRPLRLLVATKAKEIIKIPDQPDTLCFQIRGAAPPYVYAVGRGSEAMAAGLCAGQCILKVNGSNVMNDGAPEVLEHFQAFRSRREEALGLYQWIYHTHEDAQEARASQEASTEDPSGEQAQEEDQADSAFPLLSLGPRLSLCEDSPMVTLTVDNVHLEHGVVYEYVSTAGVRCHVLEKIVEPRGCFGLTAKILEAFAANDSVFVENCRRLMALSSAIVTMPHFEFRNICDTKLESIGQRIACYQEFAAQLKSRVSPPFKQAPLEPHPLCGLDFCPTNCHINLMEVSYPKTTPSVGRSFSIRFGRKPSLIGLDPEQGHLNPMSYTQHCITTMAAPSWKCLPAAEGDPQGQGLHDGSFGPASGTLGQEDRGLSFLLKQEDREIQDAYLQLFTKLDVALKEMKQYVTQINRLLSTITEPTSGGSCDASLAEEASSLPLVSEESEMDRSDHGGIKKVCFKVAEEDQEDSGHDTMSYRDSYSECNSNRDSVLSYTSVRSNSSYLGSDEMGSGDELPCDMRIPSDKQDKLHGCLEHLFNQVDSINALLKGPVMSRAFEETKHFPMNHSLQEFKQKEECTIRGRSLIQISIQEDPWNLPNSIKTLVDNIQRYVEDGKNQLLLALLKCTDTELQLRRDAIFCQALVAAVCTFSKQLLAALGYRYNNNGEYEESSRDASRKWLEQVAATGVLLHCQSLLSPATVKEERTMLEDIWVTLSELDNVTFSFKQLDENYVANTNVFYHIEGSRQALKVIFYLDSYHFSKLPSRLEGGASLRLHTALFTKVLENVEGLPSPGSQAAEDLQQDINAQSLEKVQQYYRKLRAFYLERSNLPTDASTTAVKIDQLIRPINALDELCRLMKSFVHPKPGAAGSVGAGLIPISSELCYRLGACQMVMCGTGMQRSTLSVSLEQAAILARSHGLLPKCIMQATDIMRKQGPRVEILAKNLRVKDQMPQGAPRLYRLCQPPVDGDL

SEQ ID NO: 62725 - protein, 883 aa, Homo sapiens
  Payload ID: 12524
  Gene Symbol: PREX1
  Gene Name: phosphatidylinositol-3,4,5-trisphosphate-dependent Rac exchange factor 1
  ENSP ID: ENSP00000434632
  MOD_RES (1)..(1): Any amino acid
XPFSEVESILNQSFCSRRPLRLLVATKAKEIIKIPDQPDTLCFQIRGAAPPYVYAVGRGSEAMAAGLCAGQCILKVNGSNVMNDGAPEVLEHFQAFRSRREEALGLYQWIYHTHEDAQEARASQEASTEDPSGEQAQEEDQADSAFPLLSLGPRLSLCEDSPMVTLTVDNVHLEHGVVYEYVSTAGVRCHVLEKIVEPRGCFGLTAKILEAFAANDSVFVENCRRLMALSSAIVTMPHFEFRNICDTKLESIGQRIACYQEFAAQLKSRVSPPFKQAPLEPHPLCGLDFCPTNCHINLMEVSYPKTTPSVGRSFSIRFGRKPSLIGLDPEQGHLNPMSYTQHCITTMAAPSWKCLPAAEGDPQGQGLHDGSFGPASGTLGQEDRGLSFLLKQEDREIQDAYLQLFTKLDVALKEMKQYVTQINRLLSTITEPTSGGSCDASLAEEASSLPLVSEESEMDRSDHGGIKKVCFKVAEEDQEDSGHDTMSYRDSYSECNSNRDSVLSYTSVRSNSSYLGSDEMGSGDELPCDMRIPSDKQDKLHGCLEHLFNQVDSINALLKGPVMSRAFEETKHFPMNHSLQEFKQKEECTIRGRSLIQISIQEDPWNLPNSIKTLVDNIQRYVEDGKNQLLLALLKCTDTELQLRRDAIFCQALVAAVCTFSKQLLAALGYRYNNNGEYEESSRDASRKWLEQVAATGVLLHCQSLLSPATVKEERTMLEDIWVTLSELDNVTFSFKQLDENYVANTNVFYHIEGSRQALKVIFYLDSYHFSKLPSRLEGGASLRLHTALFTKGELQAWGREDHGGRAKATKHTGSQPPARPRHLPSQCWRTWRGCLLQAARPRRICSRTSTRSPWRKFSSITANSGHFTWSGLTCPRMPAPRR

SEQ ID NO: 62726 - protein, 12 aa, Homo sapiens
  Payload ID: 12524
  Gene Symbol: PREX1
  Gene Name: phosphatidylinositol-3,4,5-trisphosphate-dependent Rac exchange factor 1
  ENSP ID: ENSP00000481444
EDGTGSPSPSLA

SEQ ID NO: 62727 - protein, 1606 aa, Homo sapiens
  Payload ID: 12525
  Gene Symbol: PREX2
  Gene Name: phosphatidylinositol-3,4,5-trisphosphate-dependent Rac exchange factor 2
  Uniprot ID: Q70Z35
  ENSP ID: ENSP00000288368
MSEDSRGDSRAESAKDLEKQLRLRVCVLSELQKTERDYVGTLEFLVSAFLHRMNQCAASKVDKNVTEETVKMLFSNIEDILAVHKEFLKVVEECLHPEPNAQQEVGTCFLHFKDKFRIYDEYCSNHEKAQKLLLELNKIRTIRTFLLNCMLLGGRKNTDVPLEGYLVTPIQRICKYPLILKELLKRTPRKHSDYAAVMEALQAMKAVCSNINEAKRQMEKLEVLEEWQSHIEGWEGSNITDTCTEMLMCGVLLKISSGNIQERVFFLFDNLLVYCKRKHRRLKNSKASTDGHRYLFRGRINTEVMEVENVDDGTADFHSSGHIVVNGWKIHNTAKNKWFVCMAKTPEEKHEWFEAILKERERRKGLKLGMEQDTWVMISEQGEKLYKMMCRQGNLIKDRKRKLTTFPKCFLGSEFVSWLLEIGEIHRPEEGVHLGQALLENGIIHHVTDKHQFKPEQMLYRFRYDDGTFYPRNEMQDVISKGVRLYCRLHSLFTPVIRDKDYHLRTYKSVVMANKLIDWLIAQGDCRTREEAMIFGVGLCDNGFMHHVLEKSEFKDEPLLFRFFSDEEMEGSNMKHRLMKHDLKVVENVIAKSLLIKSNEGSYGFGLEDKNKVPIIKLVEKGSNAEMAGMEVGKKIFAINGDLVFMRPFNEVDCFLKSCLNSRKPLRVLVSTKPRETVKIPDSADGLGFQIRGFGPSVVHAVGRGTVAAAAGLHPGQCIIKVNGINVSKETHASVIAHVTACRKYRRPTKQDSIQWVYNSIESAQEDLQKSHSKPPGDEAGDAFDCKVEEVIDKFNTMAIIDGKKEHVSLTVDNVHLEYGVVYEYDSTAGIKCNVVEKMIEPKGFFSLTAKILEALAKSDEHFVQNCTSLNSLNEVIPTDLQSKFSALCSERIEHLCQRISSYKKFSRVLKNRAWPTFKQAKSKISPLHSSDFCPTNCHVNVMEVSYPKTSTSLGSAFGVQLDSRKHNSHDKENKSSEQGKLSPMVYIQHTITTMAAPSGLSLGQQDGHGLRYLLKEEDLETQDIYQKLLGKLQTALKEVEMCVCQIDDLLSSITYSPKLERKTSEGIIPTDSDNEKGERNSKRVCFNVAGDEQEDSGHDTISNRDSYSDCNSNRNSIASFTSICSSQCSSYFHSDEMDSGDELPLSVRISHDKQDKIHSCLEHLFSQVDSITNLLKGQAVVRAFDQTKYLTPGRGLQEFQQEMEPKLSCPKRLRLHIKQDPWNLPSSVRTLAQNIRKFVEEVKCRLLLALLEYSDSETQLRRDMVFCQTLVATVCAFSEQLMAALNQMFDNSKENEMETWEASRRWLDQIANAGVLFHFQSLLSPNLTDEQAMLEDTLVALFDLEKVSFYFKPSEEEPLVANVPLTYQAEGSRQALKVYFYIDSYHFEQLPQRLKNGGGFKIHPVLFAQALESMEGYYYRDNVSVEEFQAQINAASLEKVKQYNQKLRAFYLDKSNSPPNSTSKAAYVDKLMRPLNALDELYRLVASFIRSKRTAACANTACSASGVGLLSVSSELCNRLGACHIIMCSSGVHRCTLSVTLEQAIILARSHGLPPRYIMQATDVMRKQGARVQNTAKNLGVRDRTPQSAPRLYKLCEPPPPAGEE

SEQ ID NO: 62728 - protein, 1068 aa, Homo sapiens
  Payload ID: 12526
  Gene Symbol: PIK3CA
  Gene Name: phosphatidylinositol-4,5-bisphosphate 3-kinase, catalytic subunit alpha
  Uniprot ID: P42336
  ENSP ID: ENSP00000263967
MPPRPSSGELWGIHLMPPRILVECLLPNGMIVTLECLREATLITIKHELFKEARKYPLHQLLQDESSYIFVSVTQEAEREEFFDETRRLCDLRLFQPFLKVIEPVGNREEKILNREIGFAIGMPVCEFDMVKDPEVQDFRRNILNVCKEAVDLRDLNSPHSRAMYVYPPNVESSPELPKHIYNKLDKGQIIVVIWVIVSPNNDKQKYTLKINHDCVPEQVIAEAIRKKTRSMLLSSEQLKLCVLEYQGKYILKVCGCDEYFLEKYPLSQYKYIRSCIMLGRMPNLMLMAKESLYSQLPMDCFTMPSYSRRISTATPYMNGETSTKSLWVINSALRIKILCATYVNVNIRDIDKIYVRTGIYHGGEPLCDNVNTQRVPCSNPRWNEWLNYDIYIPDLPRAARLCLSICSVKGRKGAKEEHCPLAWGNINLFDYTDTLVSGKMALNLWPVPHGLEDLLNPIGVTGSNPNKETPCLELEFDWFSSVVKFPDMSVIEEHANWSVSREAGFSYSHAGLSNRLARDNELRENDKEQLKAISTRDPLSEITEQEKDFLWSHRHYCVTIPEILPKLLLSVKWNSRDEVAQMYCLVKDWPPIKPEQAMELLDCNYPDPMVRGFAVRCLEKYLTDDKLSQYLIQLVQVLKYEQYLDNLLVRFLLKKALTNQRIGHFFFWHLKSEMHNKTVSQRFGLLLESYCRACGMYLKHLNRQVEAMEKLINLTDILKQEKKDETQKVQMKFLVEQMRRPDFMDALQGFLSPLNPAHQLGNLRLEECRIMSSAKRPLWLNWENPDIMSELLFQNNEIIFKNGDDLRQDMLTLQIIRIMENIWQNQGLDLRMLPYGCLSIGDCVGLIEVVRNSHTIMQIQCKGGLKGALQFNSHTLHQWLKDKNKGEIYDAAIDLFTRSCAGYCVATFILGIGDRHNSNIMVKDDGQLFHIDFGHFLDHKKKKFGYKRERVPFVLTQDFLIVISKGAQECTKTREFERFQEMCYKAYLAIRQHANLFINLFSMMLGSGMPELQSFDDIAYIRKTLALDKTEQEALEYFMKQMNDAHHGGWTTKMDWIFHTIKQHALN

SEQ ID NO: 62729 - protein, 118 aa, Homo sapiens
  Payload ID: 12526
  Gene Symbol: PIK3CA
  Gene Name: phosphatidylinositol-4,5-bisphosphate 3-kinase, catalytic subunit alpha
  ENSP ID: ENSP00000417479
MPPRPSSGELWGIHLMPPRILVECLLPNGMIVTLECLREATLITIKHELFKEARKYPLHQLLQDESSYIFVSVTQEAEREEFFDETRRLCDLRLFQPFLKVIEPVGNREEKILNREIG

SEQ ID NO: 62730 - protein, 21 aa, Homo sapiens
  Payload ID: 12526
  Gene Symbol: PIK3CA
  Gene Name: phosphatidylinositol-4,5-bisphosphate 3-kinase, catalytic subunit alpha
  ENSP ID: ENSP00000418145
MPPRPSSGELWGIHLMPPRIL

SEQ ID NO: 62731 - protein, 1070 aa, Homo sapiens
  Payload ID: 12527
  Gene Symbol: PIK3CB
  Gene Name: phosphatidylinositol-4,5-bisphosphate 3-kinase, catalytic subunit beta
  Uniprot ID: P42338
  ENSP ID: ENSP00000289153
MCFSFIMPPAMADILDIWAVDSQIASDGSIPVDFLLPTGIYIQLEVPREATISYIKQMLWKQVHNYPMFNLLMDIDSYMFACVNQTAVYEELEDETRRLCDVRPFLPVLKLVTRSCDPGEKLDSKIGVLIGKGLHEFDSLKDPEVNEFRRKMRKFSEEKILSLVGLSWMDWLKQTYPPEHEPSIPENLEDKLYGGKLIVAVHFENCQDVFSFQVSPNMNPIKVNELAIQKRLTIHGKEDEVSPYDYVLQVSGRVEYVFGDHPLIQFQYIRNCVMNRALPHFILVECCKIKKMYEQEMIAIEAAINRNSSNLPLPLPPKKTRIISHVWENNNPFQIVLVKGNKLNTEETVKVHVRAGLFHGTELLCKTIVSSEVSGKNDHIWNEPLEFDINICDLPRMARLCFAVYAVLDKVKTKKSTKTINPSKYQTIRKAGKVHYPVAWVNTMVFDFKGQLRTGDIILHSWSSFPDELEEMLNPMGTVQTNPYTENATALHVKFPENKKQPYYYPPFDKIIEKAAEIASSDSANVSSRGGKKFLPVLKEILDRDPLSQLCENEMDLIWTLRQDCREIFPQSLPKLLLSIKWNKLEDVAQLQALLQIWPKLPPREALELLDFNYPDQYVREYAVGCLRQMSDEELSQYLLQLVQVLKYEPFLDCALSRFLLERALGNRRIGQFLFWHLRSEVHIPAVSVQFGVILEAYCRGSVGHMKVLSKQVEALNKLKTLNSLIKLNAVKLNRAKGKEAMHTCLKQSAYREALSDLQSPLNPCVILSELYVEKCKYMDSKMKPLWLVYNNKVFGEDSVGVIFKNGDDLRQDMLTLQMLRLMDLLWKEAGLDLRMLPYGCLATGDRSGLIEVVSTSETIADIQLNSSNVAAAAAFNKDALLNWLKEYNSGDDLDRAIEEFTLSCAGYCVASYVLGIGDRHSDNIMVKKTGQLFHIDFGHILGNFKSKFGIKRERVPFILTYDFIHVIQQGKTGNTEKFGRFRQCCEDAYLILRRHGNLFITLFALMLTAGLPELTSVKDIQYLKDSLALGKSEEEALKQFKQKFDEALRESWTTKVNWMAHTVRKDYRS

SEQ ID NO: 62732 - protein, 56 aa, Homo sapiens
  Payload ID: 12527
  Gene Symbol: PIK3CB
  Gene Name: phosphatidylinositol-4,5-bisphosphate 3-kinase, catalytic subunit beta
  ENSP ID: ENSP00000417329
MCFSFIMPPAMADILDIWAVDSQIASDGSIPVDFLLPTGIYIQLEVPREATISYIK

SEQ ID NO: 62733 - protein, 702 aa, Homo sapiens
  Payload ID: 12527
  Gene Symbol: PIK3CB
  Gene Name: phosphatidylinositol-4,5-bisphosphate 3-kinase, catalytic subunit beta
  ENSP ID: ENSP00000417869
  MOD_RES (1)..(1): Any amino acid
XVRAGLFHGTELLCKTIVSSEVSGKNDHIWNEPLEFDINICDLPRMARLCFAVYAVLDKVKTKKSTKTINPSKYQTIRKAGKVHYPVAWVNTMVFDFKGQLRTGDIILHSWSSFPDELEEMLNPMGTVQTNPYTENATALHVKFPENKKQPYYYPPFDKSRGGKKFLPVLKEILDRDPLSQLCENEMDLIWTLRQDCREIFPQSLPKLLLSIKWNKLEDVAQLQALLQIWPKLPPREALELLDFNYPDQYVREYAVGCLRQMSDEELSQYLLQLVQVLKYEPFLDCALSRFLLERALGNRRIGQFLFWHLRSEVHIPAVSVQFGVILEAYCRGSVGHMKVLSKQVEALNKLKTLNSLIKLNAVKLNRAKGKEAMHTCLKQSAYREALSDLQSPLNPCVILSELYVEKCKYMDSKMKPLWLVYNNKVFGEDSVGVIFKNGDDLRQDMLTLQMLRLMDLLWKEAGLDLRMLPYGCLATGDRSGLIEVVSTSETIADIQLNSSNVAAAAAFNKDALLNWLKEYNSGDDLDRAIEEFTLSCAGYCVASYVLGIGDRHSDNIMVKKTGQLFHIDFGHILGNFKSKFGIKRERVPFILTYDFIHVIQQGKTGNTEKFGRFRQCCEDAYLILRRHGNLFITLFALMLTAGLPELTSVKDIQYLKDSLALGKSEEEALKQFKQKFDEALRESWTTKVNWMAHTVRKDYRS

SEQ ID NO: 62734 - protein, 1070 aa, Homo sapiens; identical to SEQ ID NO: 62731
  Payload ID: 12527
  Gene Symbol: PIK3CB
  Gene Name: phosphatidylinositol-4,5-bisphosphate 3-kinase, catalytic subunit beta
  Uniprot ID: P42338
  ENSP ID: ENSP00000418143

SEQ ID NO: 62735 - protein, 181 aa, Homo sapiens
  Payload ID: 12527
  Gene Symbol: PIK3CB
  Gene Name: phosphatidylinositol-4,5-bisphosphate 3-kinase, catalytic subunit beta
  ENSP ID: ENSP00000418834
  MOD_RES (1)..(1): Any amino acid
XLHEFDSLKDPEVNEFRRKMRKFSEEKILSLVGLSWMDWLKQTYPPEHEPSIPENLEDKLYGGKLIVAVHFENCQDVFSFQVSPNMNPIKVNELAIQKRLTIHGKEDEVSPYDYVLQVSGRVEYVFGDHPLIQFQHVWENNNPFQIVLVKGNKLNTEETVKVHVRAGLFHGTELLCKTIVS

SEQ ID NO: 62736 - protein, 245 aa, Homo sapiens
  Payload ID: 12527
  Gene Symbol: PIK3CB
  Gene Name: phosphatidylinositol-4,5-bisphosphate 3-kinase, catalytic subunit beta
  ENSP ID: ENSP00000419091
LRTGDIILHSWSSFPDELEEMLNPMGTVQTNPYTENATALHVKFPENKKQPYYYPPFDKSRGGKKFLPVLKEILDRDPLSQLCENEMDLIWTLRQDCREIFPQSLPKLLLSIKWNKLEDVAQLQALLQIWPKLPPREALELLDFNYPDQYVREYAVGCLRQMSDEELSQYLLQLVQVLKYEPFLDCALSRFLLERALGNRRIGQFLFWHLRSEVHIPAVSVQFGVILEAYCRGSVGHMKVLSKQC

SEQ ID NO: 62737 - protein, 34 aa, Homo sapiens
  Payload ID: 12527
  Gene Symbol: PIK3CB
  Gene Name: phosphatidylinositol-4,5-bisphosphate 3-kinase, catalytic subunit beta
  ENSP ID: ENSP00000419513
HYPVAWVNTMVFDFKGQLRTGDIILHSWSSFPDY

SEQ ID NO: 62738 - protein, 131 aa, Homo sapiens
  Payload ID: 12527
  Gene Symbol: PIK3CB
  Gene Name: phosphatidylinositol-4,5-bisphosphate 3-kinase, catalytic subunit beta
  ENSP ID: ENSP00000419857
MCFSFIMPPAMADILDIWAVDSQIASDGSIPVDFLLPTGIYIQLEVPREATISYIKQMLWKQVHNYPMFNLLMDIDSYMFACVNQTAVYEELEDETRRLCDVRPFLPVLKLVTRSCDPGEKLDSKIGVLIG

SEQ ID NO: 62739 - protein, 134 aa, Homo sapiens
  Payload ID: 12527
  Gene Symbol: PIK3CB
  Gene Name: phosphatidylinositol-4,5-bisphosphate 3-kinase, catalytic subunit beta
  ENSP ID: ENSP00000420108
MCFSFIMPPAMADILDIWAVDSQIASDGSIPVDFLLPTGIYIQLEVPREATISYIKQMLWKQVHNYPMFNLLMDIDSYMFACVNQTAVYEELEDETRRLCDVRPFLPVLKLVTRSCDPGEKLDSKIGVLIGKGS

SEQ ID NO: 62740 - protein, 100 aa, Homo sapiens
  Payload ID: 12527
  Gene Symbol: PIK3CB
  Gene Name: phosphatidylinositol-4,5-bisphosphate 3-kinase, catalytic subunit beta
  ENSP ID: ENSP00000420399
MCFSFIMPPAMADILDIWAVDSQIASDGSIPVDFLLPTGIYIQLEVPREATISYIKQMLWKQVHNYPMFNLLMDIDSYMFACVNQTAVYEELEDETRRLC

SEQ ID NO: 62741 - protein, 521 aa, Homo sapiens
  Payload ID: 12527
  Gene Symbol: PIK3CB
  Gene Name: phosphatidylinositol-4,5-bisphosphate 3-kinase, catalytic subunit beta
  ENSP ID: ENSP00000438259
MDLIWTLRQDCREIFPQSLPKLLLSIKWNKLEDVAQLQALLQIWPKLPPREALELLDFNYPDQYVREYAVGCLRQMSDEELSQYLLQLVQVLKYEPFLDCALSRFLLERALGNRRIGQFLFWHLRSEVHIPAVSVQFGVILEAYCRGSVGHMKVLSKQVEALNKLKTLNSLIKLNAVKLNRAKGKEAMHTCLKQSAYREALSDLQSPLNPCVILSELYVEKCKYMDSKMKPLWLVYNNKVFGEDSVGVIFKNGDVCFPLDLRQDMLTLQMLRLMDLLWKEAGLDLRMLPYGCLATGDRSGLIEVVSTSETIADIQLNSSNVAAAAAFNKDALLNWLKEYNSGDDLDRAIEEFTLSCAGYCVASYVLGIGDRHSDNIMVKKTGQLFHIDFGHILGNFKSKFGIKRERVPFILTYDFIHVIQQGKTGNTEKFGRFRQCCEDAYLILRRHGNLFITLFALMLTAGLPELTSVKDIQYLKDSLALGKSEEEALKQFKQKFDEALRESWTTKVNWMAHTVRKDYRS

SEQ ID NO: 62742 - protein, 1068 aa, Homo sapiens
  Payload ID: 12528
  Gene Symbol: PIK3CD
  Gene Name: phosphatidylinositol-4,5-bisphosphate 3-kinase, catalytic subunit delta
  ENSP ID: ENSP00000354410
MPPGVDCPMEFWTKEENQSVVVDFLLPTGVYLNFPVSRNANLSTIKQLLWHRAQYEPLFHMLSGPEAYVFTCINQTAEQQELEDEQRRLCDVQPFLPVLRLVAREGDRVKKLINSQISLLIGKGLHEFDSLCDPEVNDFRAKMCQFCEEAAARRQQLGWEAWLQYSFPLQLEPSAQTWGPGTLRLPNRALLVNVKFEGSEESFTFQVSTKDVPLALMACALRKKATVFRQPLVEQPEDYTLQVNGRHEYLYGSYPLCQFQVQKPRAKPPPIPAKKPSSVSLWSLEQPFRIELIQGSKVNADERMKLVVQAGLFHGNEMLCKTVSSSEVSVCSEPVWKQRLEFDINICDLPRMARLCFALYAVIEKAKKARSTKKKSKKADCPIAWANLMLFDYKDQLKTGERCLYMWPSVPDEKGELLNPTGTVRSNPNTDSAAALLICLPEVAPHPVYYPALEKLPGGMLLASREWRPELLWMRLHAEDSAPSRMIGVAMPGLGVLPGLVQAPGDAECSRLLQILELGRHSECVHVTEEEQLQLREILERRGSGELYEHEKDLVWKLRHEVQEHFPEALARLLLVTKWNKHEDVAQMLYLLCSWPELPVLSALELLDFSFPDCHVGSFAIKSLRKLTDDELFQYLLQLVQVLKYESYLDCELTKFLLDRALANRKIGHFLFWHLRSEMHVPSVALRFGLILEAYCRGSTHHMKVLMKQGEALSKLKALNDFVKLSSQKTPKPQTKELMHLCMRQEAYLEALSHLQSPLDPSTLLAEVCVEQCTFMDSKMKPLWIMYSNEEAGSGGSVGIIFKNGDDLRQDMLTLQMIQLMDVLWKQEGLDLRMTPYGCLPTGDRTGLIEVVLRSDTIANIQLNKSNMAATAAFNKDALLNWLKSKNPGEALDRAIEEFTLSCAGYCVATYVLGIGDRHSDNIMIRESGQLFHIDFGHFLGNFKTKFGINRERVPFILTYDFVHVIQQGKTNNSEKFERFRGYCERAYTILRRHGLLFLHLFALMRAAGLPELSCSKDIQYLKDSLALGKTEEEALKHFRVKFNEALRESWKTKVNWLAHNVSKDNRQ

SEQ ID NO: 62743 - protein, 1044 aa, Homo sapiens
  Payload ID: 12528
  Gene Symbol: PIK3CD
  Gene Name: phosphatidylinositol-4,5-bisphosphate 3-kinase, catalytic subunit delta
  Uniprot ID: O00329
  ENSP ID: ENSP00000366563
MPPGVDCPMEFWTKEENQSVVVDFLLPTGVYLNFPVSRNANLSTIKQLLWHRAQYEPLFHMLSGPEAYVFTCINQTAEQQELEDEQRRLCDVQPFLPVLRLVAREGDRVKKLINSQISLLIGKGLHEFDSLCDPEVNDFRAKMCQFCEEAAARRQQLGWEAWLQYSFPLQLEPSAQTWGPGTLRLPNRALLVNVKFEGSEESFTFQVSTKDVPLALMACALRKKATVFRQPLVEQPEDYTLQVNGRHEYLYGSYPLCQFQYICSCLHSGLTPHLTMVHSSSILAMRDEQSNPAPQVQKPRAKPPPIPAKKPSSVSLWSLEQPFRIELIQGSKVNADERMKLVVQAGLFHGNEMLCKTVSSSEVSVCSEPVWKQRLEFDINICDLPRMARLCFALYAVIEKAKKARSTKKKSKKADCPIAWANLMLFDYKDQLKTGERCLYMWPSVPDEKGELLNPTGTVRSNPNTDSAAALLICLPEVAPHPVYYPALEKILELGRHSECVHVTEEEQLQLREILERRGSGELYEHEKDLVWKLRHEVQEHFPEALARLLLVTKWNKHEDVAQMLYLLCSWPELPVLSALELLDFSFPDCHVGSFAIKSLRKLTDDELFQYLLQLVQVLKYESYLDCELTKFLLDRALANRKIGHFLFWHLRSEMHVPSVALRFGLILEAYCRGSTHHMKVLMKQGEALSKLKALNDFVKLSSQKTPKPQTKELMHLCMRQEAYLEALSHLQSPLDPSTLLAEVCVEQCTFMDSKMKPLWIMYSNEEAGSGGSVGIIFKNGDDLRQDMLTLQMIQLMDVLWKQEGLDLRMTPYGCLPTGDRTGLIEVVLRSDTIANIQLNKSNMAATAAFNKDALLNWLKSKNPGEALDRAIEEFTLSCAGYCVATYVLGIGDRHSDNIMIRESGQLFHIDFGHFLGNFKTKFGINRERVPFILTYDFVHVIQQGKTNNSEKFERFRGYCERAYTILRRHGLLFLHLFALMRAAGLPELSCSKDIQYLKDSLALGKTEEEALKHFRVKFNEALRESWKTKVNWLAHNVSKDNRQ

SEQ ID NO: 62744 - protein, 1068 aa, Homo sapiens
  Payload ID: 12528
  Gene Symbol: PIK3CD
  Gene Name: phosphatidylinositol-4,5-bisphosphate 3-kinase, catalytic subunit delta
  ENSP ID: ENSP00000443811
MPPGVDCPMEFWTKEENQSVVVDFLLPTGVYLNFPVSRNANLSTIKQLLWHRAQYEPLFHMLSGPEAYVFTCINQTAEQQELEDEQRRLCDVQPFLPVLRLVAREGDRVKKLINSQISLLIGKGLHEFDSLCDPEVNDFRAKMCQFCEEAAARRQQLGWEAWLQYSFPLQLEPSAQTWGPGTLRLPNRALLVNVKFEGSEESFTFQVSTKDVPLALMACALRKKATVFRQPLVEQPEDYTLQVNGRHEYLYGSYPLCQFQVQKPRAKPPPIPAKKPSSVSLWSLEQPFRIELIQGSKVNADERMKLVVQAGLFHGNEMLCKTVSSSEVSVCSEPVWKQRLEFDINICDLPRMARLCFALYAVIEKAKKARSTKKKSKKADCPIAWANLMLFDYKDQLKTGERCLYMWPSVPDEKGELLNPTGTVRSNPNTDSAAALLICLPEVAPHPVYYPALEKLPGGMLLASREWRPELLWMRLHAEDSAPSRMIGVAMPGLGVLPGLVQAPGDAECSRLLQILELGRHSECVHVTEEEQLQLREILERRGSGELYEHEKDLVWKLRHEVQEHFPEALARLLLVTKWNKHEDVAQDALPAVSWPELPVLSALELLDFSFPDCHVGSFAIKSLRKLTDDELFQYLLQLVQVLKYESYLDCELTKFLLDRALANRKIGHFLFWHLRSEMHVPSVALRFGLILEAYCRGSTHHMKVLMKQGEALSKLKALNDFVKLSSQKTPKPQTKELMHLCMRQEAYLEALSHLQSPLDPSTLLAEVCVEQCTFMDSKMKPLWIMYSNEEAGSGGSVGIIFKNGDDLRQDMLTLQMIQLMDVLWKQEGLDLRMTPYGCLPTGDRTGLIEVVLRSDTIANIQLNKSNMAATAAFNKDALLNWLKSKNPGEALDRAIEEFTLSCAGYCVATYVLGIGDRHSDNIMIRESGQLFHIDFGHFLGNFKTKFGINRERVPFILTYDFVHVIQQGKTNNSEKFERFRGYCERAYTILRRHGLLFLHLFALMRAAGLPELSCSKDIQYLKDSLALGKTEEEALKHFRVKFNEALRESWKTKVNWLAHNVSKDNRQ

SEQ ID NO: 62745 - protein, 1068 aa, Homo sapiens; identical to SEQ ID NO: 62744
  Payload ID: 12528
  Gene Symbol: PIK3CD
  Gene Name: phosphatidylinositol-4,5-bisphosphate 3-kinase, catalytic subunit delta
  ENSP ID: ENSP00000446444

SEQ ID NO: 62746 - protein, 1068 aa, Homo sapiens; identical to SEQ ID NO: 62742
  Payload ID: 12528
  Gene Symbol: PIK3CD
  Gene Name: phosphatidylinositol-4,5-bisphosphate 3-kinase, catalytic subunit delta
  ENSP ID: ENSP00000486826

SEQ ID NO: 62747 - protein, 1102 aa, Homo sapiens
  Payload ID: 12529
  Gene Symbol: PIK3CG
  Gene Name: phosphatidylinositol-4,5-bisphosphate 3-kinase, catalytic subunit gamma
  Uniprot ID: P48736
  ENSP ID: ENSP00000352121
MELENYKQPVVLREDNCRRRRRMKPRSAAASLSSMELIPIEFVLPTSQRKCKSPETALLHVAGHGNVEQMKAQVWLRALETSVAADFYHRLGPHHFLLLYQKKGQWYEIYDKYQVVQTLDCLRYWKATHRSPGQIHLVQRHPPSEESQAFQRQLTALIGYDVTDVSNVHDDELEFTRRGLVTPRMAEVASRDPKLYAMHPWVTSKPLPEYLWKKIANNCIFIVIHRSTTSQTIKVSPDDTPGAILQSFFTKMAKKKSLMDIPESQSEQDFVLRVCGRDEYLVGETPIKNFQWVRHCLKNGEEIHVVLDTPPDPALDEVRKEEWPLVDDCTGVTGYHEQLTIHGKDHESVFTVSLWDCDRKFRVKIRGIDIPVLPRNTDLTVFVEANIQHGQQVLCQRRTSPKPFTEEVLWNVWLEFSIKIKDLPKGALLNLQIYCGKAPALSSKASAESPSSESKGKVQLLYYVNLLLIDHRFLLRRGEYVLHMWQISGKGEDQGSFNADKLTSATNPDKENSMSISILLDNYCHPIALPKHQPTPDPEGDRVRAEMPNQLRKQLEAIIATDPLNPLTAEDKELLWHFRYESLKHPKAYPKLFSSVKWGQQEIVAKTYQLLARREVWDQSALDVGLTMQLLDCNFSDENVRAIAVQKLESLEDDDVLHYLLQLVQAVKFEPYHDSALARFLLKRGLRNKRIGHFLFWFLRSEIAQSRHYQQRFAVILEAYLRGCGTAMLHDFTQQVQVIEMLQKVTLDIKSLSAEKYDVSSQVISQLKQKLENLQNSQLPESFRVPYDPGLKAGALAIEKCKVMASKKKPLWLEFKCADPTALSNETIGIIFKHGDDLRQDMLILQILRIMESIWETESLDLCLLPYGCISTGDKIGMIEIVKDATTIAKIQQSTVGNTGAFKDEVLNHWLKEKSPTEEKFQAAVERFVYSCAGYCVATFVLGIGDRHNDNIMITETGNLFHIDFGHILGNYKSFLGINKERVPFVLTPDFLFVMGTSGKKTSPHFQKFQDICVKAYLALRHHTNLLIILFSMMLMTGMPQLTSKEDIEYIRDALTVGKNEEDAKKYFLDQIEVCRDKGWTVQFNWFLHLVLGIKQGEKHSA

SEQ ID NO: 62748 - protein, 1102 aa, Homo sapiens; identical to SEQ ID NO: 62747
  Payload ID: 12529
  Gene Symbol: PIK3CG
  Gene Name: phosphatidylinositol-4,5-bisphosphate 3-kinase, catalytic subunit gamma
  Uniprot ID: P48736
  ENSP ID: ENSP00000392258

SEQ ID NO: 62749 - protein, 182 aa, Homo sapiens
  Payload ID: 12529
  Gene Symbol: PIK3CG
  Gene Name: phosphatidylinositol-4,5-bisphosphate 3-kinase, catalytic subunit gamma
  ENSP ID: ENSP00000417623
MLHDFTQQVQVIEMLQKVTLDIKSLSAEKYDVSSQVISQLKQKLENLQNSQLPESFRVPYDPGLKAGALAIEKCKVMASKKKPLWLEFKCADPTALSNETIGIIFKHGDDLRQDMLILQILRIMESIWETESLDLCLLPYGCISTGDKIGMIEIVKDATTIAKIQQSTVGNTGAFKDEVLNH

SEQ ID NO: 62750 - protein, 1102 aa, Homo sapiens; identical to SEQ ID NO: 62747
  Payload ID: 12529
  Gene Symbol: PIK3CG
  Gene Name: phosphatidylinositol-4,5-bisphosphate 3-kinase, catalytic subunit gamma
  Uniprot ID: P48736
  ENSP ID: ENSP00000419260

SEQ ID NO: 62751 - protein, 1686 aa, Homo sapiens
  Payload ID: 12530
  Gene Symbol: PIK3C2A
  Gene Name: phosphatidylinositol-4-phosphate 3-kinase, catalytic subunit type 2 alpha
  Uniprot ID: O00443
  ENSP ID: ENSP00000265970
MAQISSNSGFKECPSSHPEPTRAKDVDKEEALQMEAEALAKLQKDRQVTDNQRGFELSSSTRKKAQVYNKQDYDLMVFPESDSQKRALDIDVEKLTQAELEKLLLDDSFETKKTPVLPVTPILSPSFSAQLYFRPTIQRGQWPPGLPGPSTYALPSIYPSTYSKQAAFQNGFNPRMPTFPSTEPIYLSLPGQSPYFSYPLTPATPFHPQGSLPIYRPVVSTDMAKLFDKIASTSEFLKNGKARTDLEITDSKVSNLQVSPKSEDISKFDWLDLDPLSKPKVDNVEVLDHEEEKNVSSLLAKDPWDAVLLEERSTANCHLERKVNGKSLSVATVTRSQSLNIRTTQLAKAQGHISQKDPNGTSSLPTGSSLLQEVEVQNEEMAAFCRSITKLKTKFPYTNHRTNPGYLLSPVTAQRNICGENASVKVSIDIEGFQLPVTFTCDVSSTVEIIIMQALCWVHDDLNQVDVGSYVLKVCGQEEVLQNNHCLGSHEHIQNCRKWDTEIRLQLLTFSAMCQNLARTAEDDETPVDLNKHLYQIEKPCKEAMTRHPVEELLDSYHNQVELALQIENQHRAVDQVIKAVRKICSALDGVETLAITESVKKLKRAVNLPRSKTADVTSLFGGEDTSRSSTRGSLNPENPVQVSINQLTAAIYDLLRLHANSGRSPTDCAQSSKSVKEAWTTTEQLQFTIFAAHGISSNWVSNYEKYYLICSLSHNGKDLFKPIQSKKVGTYKNFFYLIKWDELIIFPIQISQLPLESVLHLTLFGILNQSSGSSPDSNKQRKGPEALGKVSLPLFDFKRFLTCGTKLLYLWTSSHTNSVPGTVTKKGYVMERIVLQVDFPSPAFDIIYTTPQVDRSIIQQHNLETLENDIKGKLLDILHKDSSLGLSKEDKAFLWEKRYYCFKHPNCLPKILASAPNWKWVNLAKTYSLLHQWPALYPLIALELLDSKFADQEVRSLAVTWIEAISDDELTDLLPQFVQALKYEIYLNSSLVQFLLSRALGNIQIAHNLYWLLKDALHDVQFSTRYEHVLGALLSVGGKRLREELLKQTKLVQLLGGVAEKVRQASGSARQVVLQRSMERVQSFFQKNKCRLPLKPSLVAKELNIKSCSFFSSNAVPLKVTMVNADPMGEEINVMFKVGEDLRQDMLALQMIKIMDKIWLKEGLDLRMVIFKCLSTGRDRGMVELVPASDTLRKIQVEYGVTGSFKDKPLAEWLRKYNPSEEEYEKASENFIYSCAGCCVATYVLGICDRHNDNIMLRSTGHMFHIDFGKFLGHAQMFGSFKRDRAPFVLTSDMAYVINGGEKPTIRFQLFVDLCCQAYNLIRKQTNLFLNLLSLMIPSGLPELTSIQDLKYVRDALQPQTTDAEATIFFTRLIESSLGSIATKFNFFIHNLAQLRFSGLPSNDEPILSFSPKTYSFRQDGRIKEVSVFTYHKKYNPDKHYIYVVRILREGQIEPSFVFRTFDEFQELHNKLSIIFPLWKLPGFPNRMVLGRTHIKDVAAKRKIELNSYLQSLMNASTDVAECDLVCTFFHPLLRDEKAEGIARSADAGSFSPTPGQIGGAVKLSISYRNGTLFIMVMHIKDLVTEDGADPNPYVKTYLLPDNHKTSKRKTKISRKTRNPTFNEMLVYSGYSKETLRQRELQLSVLSAESLRENFFLGGVTLPLKDFNLSKETVKWYQLTAATYL

SEQ ID NO: 62752 - protein, 483 aa, Homo sapiens
  Payload ID: 12530
  Gene Symbol: PIK3C2A
  Gene Name: phosphatidylinositol-4-phosphate 3-kinase, catalytic subunit type 2 alpha
  ENSP ID: ENSP00000436244
MAQISSNSGFKECPSSHPEPTRAKDVDKEEALQMEAEALAKLQKDRQVTDNQRGFELSSSTRKKAQVYNKQDYDLMVFPESDSQKRALDIDVEKLTQAELEKLLLDDSFETKKTPVLPVTPILSPSFSAQLYFRPTIQRGQWPPGLPGPSTYALPSIYPSTYSKQAAFQNGFNPRMPTFPSTEPIYLSLPGQSPYFSYPLTPATPFHPQGSLPIYRPVVSTDMAKLFDKIASTSEFLKNGKARTDLEITDSKVSNLQVSPKSEDISKFDWLDLDPLSKPKVDNVEVLDHEEEKNVSSLLAKDPWDAVLLEERSTANCHLERKVNGKSLSVATVTRSQSLNIRTTQLAKAQGHISQKDPNGTSSLPTGSSLLQEVEVQNEEMAAFCRSITKLKTKFPYTNHRTNPGYLLSPVTAQRNICGENASVKVSIDIEGFQLPVTFTCDVSSTVEIIIMQALCWVHDDLNQVDVGSYVLKVCGQEEVLQK

SEQ ID NO: 62753 - protein, 130 aa, Homo sapiens
  Payload ID: 12530
  Gene Symbol: PIK3C2A
  Gene Name: phosphatidylinositol-4-phosphate 3-kinase, catalytic subunit type 2 alpha
  ENSP ID: ENSP00000436969
MAQISSNSGFKECPSSHPEPTRAKDVDKEEALQMEAEALAKLQKDRQVTDNQRGFELSSSTRKKAQVYNKQDYDLMVFPESDSQKRALDIDVEKLTQAELEKLLLDDSFETKKTPVLPVTPILSPSFSAQ

SEQ ID NO: 62754 - protein, 173 aa, Homo sapiens
  Payload ID: 12531
  Gene Symbol: PIK3C2B
  Gene Name: phosphatidylinositol-4-phosphate 3-kinase, catalytic subunit type 2 beta
  ENSP ID: ENSP00000356152
MRPWSSPAQLVAGAQPAGRGDPLGPRPIPPPRFRRASSQREPPYPRPAEPALELAGSKCQPDTPAASLCPADSPSQHRVMPPGPASWANVGSRPHTVANGHELFEVSEERDEEVAAFCHMLDILRSGSDIQDYFLTGYVWSAVTPSPEHLGDEVNLKVTVLCDRLQEALTFTC

SEQ ID NO: 62755 - protein, 1634 aa, Homo sapiens
  Payload ID: 12531
  Gene Symbol: PIK3C2B
  Gene Name: phosphatidylinositol-4-phosphate 3-kinase, catalytic subunit type 2 beta
  Uniprot ID: O00750
  ENSP ID: ENSP00000356155
MSSTQGNGEHWKSLESVGISRKELAMAEALQMEYDALSRLRHDKEENRAKQNADPSLISWDEPGVDFYSKPAGRRTDLKLLRGLSGSDPTLNYNSLSPQEGPPNHSTSQGPQPGSDPWPKGSLSGDYLYIFDGSDGGVSSSPGPGDIEGSCKKLSPPPLPPRASIWDTPPLPPRKGSPSSSKISQPSDINTFSLVEQLPGKLLEHRILEEEEVLGGGGQGRLLGSVDYDGINDAITRLNLKSTYDAEMLRDATRGWKEGRGPLDFSKDTSGKPVARSKTMPPQVPPRTYASRYGNRKNATPGKNRRISAAPVGSRPHTVANGHELFEVSEERDEEVAAFCHMLDILRSGSDIQDYFLTGYVWSAVTPSPEHLGDEVNLKVTVLCDRLQEALTFTCNCSSTVDLLIYQTLCYTHDDLRNVDVGDFVLKPCGLEEFLQNKHALGSHEYIQYCRKFDIDIRLQLMEQKVVRSDLARTVNDDQSPSTLNYLVHLQERPVKQTISRQALSLLFDTYHNEVDAFLLADGDFPLKADRVVQSVKAICNALAAVETPEITSALNQLPPCPSRMQPKIQKDPSVLAVRENREKVVEALTAAILDLVELYCNTFNADFQTAVPGSRKHDLVQEACHFARSLAFTVYATHRIPIIWATSYEDFYLSCSLSHGGKELCSPLQTRRAHFSKYLFHLIVWDQQICFPVQVNRLPRETLLCATLYALPIPPPGSSSEANKQRRVPEALGWVTTPLFNFRQVLTCGRKLLGLWPATQENPSARWSAPNFHQPDSVILQIDFPTSAFDIKFTSPPGDKFSPRYEFGSLREEDQRKLKDIMQKESLYWLTDADKKRLWEKRYYCHSEVSSLPLVLASAPSWEWACLPDIYVLLKQWTHMNHQDALGLLHATFPDQEVRRMAVQWIGSLSDAELLDYLPQLVQALKYECYLDSPLVRFLLKRAVSDLRVTHYFFWLLKDGLKDSQFSIRYQYLLAALLCCCGKGLREEFNRQCWLVNALAKLAQQVREAAPSARQGILRTGLEEVKQFFALNGSCRLPLSPSLLVKGIVPRDCSYFNSNAVPLKLSFQNVDPLGENIRVIFKCGDDLRQDMLTLQMIRIMSKIWVQEGLDMRMVIFRCFSTGRGRGMVEMIPNAETLRKIQVEHGVTGSFKDRPLADWLQKHNPGEDEYEKAVENFIYSCAGCCVATYVLGICDRHNDNIMLKTTGHMFHIDFGRFLGHAQMFGNIKRDRAPFVFTSDMAYVINGGDKPSSRFHDFVDLCCQAYNLIRKHTHLFLNLLGLMLSCGIPELSDLEDLKYVYDALRPQDTEANATTYFTRLIESSLGSVATKLNFFIHNLAQMKFTGSDDRLTLSFASRTHTLKSSGRISDVFLCRHEKIFHPNKGYIYVVKVMRENTHEATYIQRTFEEFQELHNKLRLLFPSSHLPSFPSRFVIGRSRGEAVAERRREELNGYIWHLIHAPPEVAECDLVYTFFHPLPRDEKAMGTSPAPKSSDGTWARPVGKVGGEVKLSISYKNNKLFIMVMHIRGLQLLQDGNDPDPYVKIYLLPDPQKTTKRKTKVARKTCNPTYNEMLVYDGIPKGDLQQRELQLSVLSEQGFWENVLLGEVNIRLRELDLAQEKTGWFALGSRSHGTL

SEQ ID NO: 62756 - protein, 1606 aa, Homo sapiens
  Payload ID: 12531
  Gene Symbol: PIK3C2B
  Gene Name: phosphatidylinositol-4-phosphate 3-kinase, catalytic subunit type 2 beta
  ENSP ID: ENSP00000400561
MSSTQGNGEHWKSLESVGISRKELAMAEALQMEYDALSRLRHDKEENRAKQNADPSLISWDEPGVDFYSKPAGRRTDLKLLRGLSGSDPTLNYNSLSPQEGPPNHSTSQGPQPGSDPWPKGSLSGDYLYIFDGSDGGVSSSPGPGDIEGSCKKLSPPPLPPRASIWDTPPLPPRKGSPSSSKISQPSDINTFSLVEQLPGKLLEHRILEEEEVLGGGGQGRLLGSVDYDGINDAITRLNLKSTYDAEMLRDATRGWKEGRGPLDFSKDTSGKPVARSKTMPPQVPPRTYASRYGNRKNATPGKNRRISAAPVGSRPHTVANGHELFEVSEERDEEVAAFCHMLDILRSGSDIQDYFLTGYVWSAVTPSPEHLGDEVNLKVTVLCDRLQEALTFTCNCSSTVDLLIYQTLCYTHDDLRNVDVGDFVLKPCGLEEFLQNKHALGSHEYIQYCRKFDIDIRLQLMEQKVVRSDLARTVNDDQSPSTLNYLVHLQERPVKQTISRQALSLLFDTYHNEVDAFLLADGDFPLKADRVVQSVKAICNALAAVETPEITSALNQLPPCPSRMQPKIQKDPSVLAVRENREKVVEALTAAILDLVELYCNTFNADFQTAVPGSRKHDLVQEACHFARSLAFTVYATHRIPIIWATSYEDFYLSCSLSHGGKELCSPLQTRRAHFSKYLFHLIVWDQQICFPVQVNRLPRETLLCATLYALPIPPPGSSSEANKQRRVPEALGWVTTPLFNFRQVLTCGRKLLGLWPATQENPSARWSAPNFHQPDSVILQIDFPTSAFDIKFTSPPGDKFSPRYEFGSLREEDQRKLKDIMQKESLYWLTDADKKRLWEKRYYCHSEWTHMNHQDALGLLHATFPDQEVRRMAVQWIGSLSDAELLDYLPQLVQALKYECYLDSPLVRFLLKRAVSDLRVTHYFFWLLKDGLKDSQFSIRYQYLLAALLCCCGKGLREEFNRQCWLVNALAKLAQQVREAAPSARQGILRTGLEEVKQFFALNGSCRLPLSPSLLVKGIVPRDCSYFNSNAVPLKLSFQNVDPLGENIRVIFKCGDDLRQDMLTLQMIRIMSKIWVQEGLDMRMVIFRCFSTGRGRGMVEMIPNAETLRKIQVEHGVTGSFKDRPLADWLQKHNPGEDEYEKAVENFIYSCAGCCVATYVLGICDRHNDNIMLKTTGHMFHIDFGRFLGHAQMFGNIKRDRAPFVFTSDMAYVINGGDKPSSRFHDFVDLCCQAYNLIRKHTHLFLNLLGLMLSCGIPELSDLEDLKYVYDALRPQDTEANATTYFTRLIESSLGSVATKLNFFIHNLAQMKFTGSDDRLTLSFASRTHTLKSSGRISDVFLCRHEKIFHPNKGYIYVVKVMRENTHEATYIQRTFEEFQELHNKLRLLFPSSHLPSFPSRFVIGRSRGEAVAERRREELNGYIWHLIHAPPEVAECDLVYTFFHPLPRDEKAMGTSPAPKSSDGTWARPVGKVGGEVKLSISYKNNKLFIMVMHIRGLQLLQDGNDPDPYVKIYLLPDPQKTTKRKTKVARKTCNPTYNEMLVYDGIPKGDLQQRELQLSVLSEQGFWENVLLGEVNIRLRELDLAQEKTGWFALGSRSHGTL

SEQ ID NO: 62757 - protein, 131 aa, Homo sapiens
  Payload ID: 12531
  Gene Symbol: PIK3C2B
  Gene Name: phosphatidylinositol-4-phosphate 3-kinase, catalytic subunit type 2 beta
  ENSP ID: ENSP00000401795
MSSTQGNGEHWKSLESVGISRKELAMAEALQMEYDALSRLRHDKEENRAKQNADPSLISWDEPGVDFYSKPAGRRTDLKLLRGLSGSDPTLNYNSLSPQEGPPNHSTSQGPQPGSDPWPKGSLSGDYLYIF

SEQ ID NO: 62758 - protein, 60 aa, Homo sapiens
  Payload ID: 12531
  Gene Symbol: PIK3C2B
  Gene Name: phosphatidylinositol-4-phosphate 3-kinase, catalytic subunit type 2 beta
  ENSP ID: ENSP00000409554
MSSTQGNGEHWKSLESVGISRKELAMAEALQMEYDALSRLRHDKEENRAKQNADPSLISW

SEQ ID NO: 62759 - protein, 1445 aa, Homo sapiens
  Payload ID: 12532
  Gene Symbol: PIK3C2G
  Gene Name: phosphatidylinositol-4-phosphate 3-kinase, catalytic subunit type 2 gamma
  Uniprot ID: O75747
  ENSP ID: ENSP00000266497
MAYSWQTDPNPNESHEKQYEHQEFLFVNQPHSSSQVSLGFDQIVDEISGKIPHYESEIDENTFFVPTAPKWDSTGHSLNEAHQISLNEFTSKSRELSWHQVSKAPAIGFSPSVLPKPQNTNKECSWGSPIGKHHGADDSRFSILAPSFTSLDKINLEKELENENHNYHIGFESSIPPTNSSFSSDFMPKEENKRSGHVNIVEPSLMLLKGSLQPGMWESTWQKNIESIGCSIQLVEVPQSSNTSLASFCNKVKKIRERYHAADVNFNSGKIWSTTTAFPYQLFSKTKFNIHIFIDNSTQPLHFMPCANYLVKDLIAEILHFCTNDQLLPKDHILSVCGSEEFLQNDHCLGSHKMFQKDKSVIQLHLQKSREAPGKLSRKHEEDHSQFYLNQLLEFMHIWKVSRQCLLTLIRKYDFHLKYLLKTQENVYNIIEEVKKICSVLGCVETKQITDAVNELSLILQRKGENFYQSSETSAKGLIEKVTTELSTSIYQLINVYCNSFYADFQPVNVPRCTSYLNPGLPSHLSFTVYAAHNIPETWVHRINFPLEIKSLPRESMLTVKLFGIACATNNANLLAWTCLPLFPKEKSILGSMLFSMTLQSEPPVEMITPGVWDVSQPSPVTLQIDFPATGWEYMKPDSEENRSNLEEPLKECIKHIARLSQKQTPLLLSEEKKRYLWFYRFYCNNENCSLPLVLGSAPGWDERTVSEMHTILRRWTFSQPLEALGLLTSSFPDQEIRKVAVQQLDNLLNDELLEYLPQLVQAVKFEWNLESPLVQLLLHRSLQSIQVAHRLYWLLKNAENEAYFKSWYQKLLAALQFCAGKALNDEFSKEQKLIKILGDIGERVKSASDHQRQEVLKKEIGRLEEFFQDVNTCHLPLNPALCIKGIDHDACSYFTSNALPLKITFINANPMGKNISIIFKAGDDLRQDMLVLQLIQVMDNIWLQEGLDMQMIIYRCLSTGKDQGLVQMVPDAVTLAKIHRHSGLIGPLKENTIKKWFSQHNHLKADYEKALRNFFYSCAGWCVVTFILGVCDRHNDNIMLTKSGHMFHIDFGKFLGHAQTFGGIKRDRAPFIFTSEMEYFITEGGKNPQHFQDFVELCCRAYNIIRKHSQLLLNLLEMMLYAGLPELSGIQDLKYVYNNLRPQDTDLEATSHFTKKIKESLECFPVKLNNLIHTLAQMSAISPAKSTSQTFPQESCLLSTTRSIERATILGFSKKSSNLYLIQVTHSNNETSLTEKSFEQFSKLHSQLQKQFASLTLPEFPHWWHLPFTNSDHRRFRDLNHYMEQILNVSHEVTNSDCVLSFFLSEAVQQTVEESSPVYLGEKFPDKKPKVQLVISYEDVKLTILVKHMKNIHLPDGSAPSAHVEFYLLPYPSEVRRRKTKSVPKCTDPTYNEIVVYDEVTELQGHVLMLIVKSKTVFVGAINIRLCSVPLDKEKWYPLGNSII

SEQ ID NO: 62760 - protein, 1445 aa, Homo sapiens; identical to SEQ ID NO: 62759
  Payload ID: 12532
  Gene Symbol: PIK3C2G
  Gene Name: phosphatidylinositol-4-phosphate 3-kinase, catalytic subunit type 2 gamma
  Uniprot ID: O75747
  ENSP ID: ENSP00000404845

SEQ ID NO: 62761 - protein, 231 aa, Homo sapiens
  Payload ID: 12532
  Gene Symbol: PIK3C2G
  Gene Name: phosphatidylinositol-4-phosphate 3-kinase, catalytic subunit type 2 gamma
  ENSP ID: ENSP00000441618
MAYSWQTDPNPNESHEKQYEHQEFLFVNQPHSSSQVSLGFDQIVDEISGKIPHYESEIDENTFFVPTAPKWDSTGHSLNEAHQISLNEFTSKSRELSWHQVSKAPAIGFSPSVLPKPQNTNKECSWGSPIGKHHGADDSRFSILAPSFTSLDKINLEKELENENHNYHIGFESSIPPTNSSFSSDFMPKEENKRSGHVNIVEPSLMLLKGSLQPGMWESTWQKNIEVVPFS

SEQ ID NO: 62762 - protein, 583 aa, Homo sapiens
  Payload ID: 12532
  Gene Symbol: PIK3C2G
  Gene Name: phosphatidylinositol-4-phosphate 3-kinase, catalytic subunit type 2 gamma
  ENSP ID: ENSP00000443850
MAYSWQTDPNPNESHEKQYEHQEFLFVNQPHSSSQVSLGFDQIVDEISGKIPHYESEIDENTFFVPTAPKWDSTGHSLNEAHQISLNEFTSKSRELSWHQVSKAPAIGFSPSVLPKPQNTNKECSWGSPIGKHHGADDSRFSILAPSFTSLDKINLEKELENENHNYHIGFESSIPPTNSSFSSDFMPKEENKRSGHVNIVEPSLMLLKGSLQPGMWESTWQKNIESIGCSIQLVEVPQSSNTSLASFCNKVKKIRERYHAADVNFNSGKIWSTTTAFPYQLFSKTKFNIHIFIDNSTQPLHFMPCANYLVKDLIAEILHFCTNDQLLPKDHILSVCGSEEFLQNDHCLGSHKMFQKDKSVIQLHLQKSREAPGKLSRKHEEDHSQFYLNQLLEFMHIWKVSRQCLLTLIRKYDFHLKYLLKTQENVYNIIEEVKKICSVLGCVETKQITDAVNELSLILQRKGENFYQSSETSAKGLIEKVTTELSTSIYQLINVYCNSFYADFQPVNVPRCTSYLNPGLPSHLSFTVYAAHNIPETWVHSYKAFSFTCWLTYAGKKLCQVRNYRNIPDKKLFFFLVNWNET

SEQ ID NO: 62763 - protein, 1486 aa, Homo sapiens
  Payload ID: 12532
  Gene Symbol: PIK3C2G
  Gene Name: phosphatidylinositol-4-phosphate 3-kinase, catalytic subunit type 2 gamma
  ENSP ID: ENSP00000445381
MAYSWQTDPNPNESHEKQYEHQEFLFVNQPHSSSQVSLGFDQIVDEISGKIPHYESEIDENTFFVPTAPKWDSTGHSLNEAHQISLNEFTSKSRELSWHQVSKAPAIGFSPSVLPKPQNTNKECSWGSPIGKHHGADDSRFSILAPSFTSLDKINLEKELENENHNYHIGFESSIPPTNSSFSSDFMPKEENKRSGHVNIVEPSLMLLKGSLQPGMWESTWQKNIESIGCSIQLVEVPQSSNTSLASFCNKVKKIRERYHAADVNFNSGKIWSTTTAFPYQLFSKTKFNIHIFIDNSTQPLHFMPCANYLVKDLIAEILHFCTNDQLLPKDHILSVCGSEEFLQNDHCLGSHKMFQKDKSVIQLHLQKSREAPGKLSRKHEEDHSQFYLNQLLEFMHIWKVSRQCLLTLIRKYDFHLKYLLKTQENVYNIIEEVKKICSVLGCVETKQITDAVNELSLILQRKGENFYQSSETSAKGLIEKVTTELSTSIYQLINVYCNSFYADFQPVNVPRCTSYLNPGLPSHLSFTVYAAHNIPETWVHSYKAFSFTCWLTYAGKKLCQVRNYRNIPDKKLFFFLVNWNETINFPLEIKSLPRESMLTVKLFGIACATNNANLLAWTCLPLFPKEKSILGSMLFSMTLQSEPPVEMITPGVWDVSQPSPVTLQIDFPATGWEYMKPDSEENRSNLEEPLKECIKHIARLSQKQTPLLLSEEKKRYLWFYRFYCNNENCSLPLVLGSAPGWDERTVSEMHTILRRWTFSQPLEALGLLTSSFPDQEIRKVAVQQLDNLLNDELLEYLPQLVQAVKFEWNLESPLVQLLLHRSLQSIQVAHRLYWLLKNAENEAYFKSWYQKLLAALQFCAGKALNDEFSKEQKLIKILGDIGERVKSASDHQRQEVLKKEIGRLEEFFQDVNTCHLPLNPALCIKGIDHDACSYFTSNALPLKITFINANPMGKNISIIFKAGDDLRQDMLVLQLIQVMDNIWLQEGLDMQMIIYRCLSTGKDQGLVQMVPDAVTLAKIHRHSGLIGPLKENTIKKWFSQHNHLKADYEKALRNFFYSCAGWCVVTFILGVCDRHNDNIMLTKSGHMFHIDFGKFLGHAQTFGGIKRDRAPFIFTSEMEYFITEGGKNPQHFQDFVELCCRAYNIIRKHSQLLLNLLEMMLYAGLPELSGIQDLKYVYNNLRPQDTDLEATSHFTKKIKESLECFPVKLNNLIHTLAQMSAISPAKSTSQTFPQESCLLSTTRSIERATILGFSKKSSNLYLIQVTHSNNETSLTEKSFEQFSKLHSQLQKQFASLTLPEFPHWWHLPFTNSDHRRFRDLNHYMEQILNVSHEVTNSDCVLSFFLSEAVQQTVEESSPVYLGEKFPDKKPKVQLVISYEDVKLTILVKHMKNIHLPDGSAPSAHVEFYLLPYPSEVRRRKTKSVPKCTDPTYNEIVVYDEVTELQGHVLMLIVKSKTVFVGAINIRLCSVPLDKEKWYPLGNSII

SEQ ID NO: 62764 - protein, 187 aa, Homo sapiens
  Payload ID: 12532
  Gene Symbol: PIK3C2G
  Gene Name: phosphatidylinositol-4-phosphate 3-kinase, catalytic subunit type 2 gamma
  ENSP ID: ENSP00000479145
  MOD_RES (1)..(1): Any amino acid
XGSLQPGMWESTWQKNIESIGCSIQLVEVPQSSNTSLASFCNKVKKIRERYHAADVNFNSGKIWSTTTAFPYQLFSKTKFNIHIFIDNSTQPLHFMPCANYLVKDLIAEILHFCTNDQLLPKDHILSVCGSEEFLQNDHCLGSHKMFQKDKSVIQLHLQKSREAPGKLSRKVRTQQEGSCLHTGKGL

SEQ ID NO: 62765 - protein, 549 aa, Homo sapiens
  Payload ID: 12533
  Gene Symbol: PIP5K1A
  Gene Name: phosphatidylinositol-4-phosphate 5-kinase, type I, alpha
  Uniprot ID: Q99755
  ENSP ID: ENSP00000271663
MASASSGPSSSVGFSSFDPAVPSCTLSSASGIKRPMASEVPYASGMPIKKIGHRSVDSSGETTYKKTTSSALKGAIQLGITHTVGSLSTKPERDVLMQDFYVVESIFFPSEGSNLTPAHHYNDFRFKTYAPVAFRYFRELFGIRPDDYLYSLCSEPLIELCSSGASGSLFYVSSDDEFIIKTVQHKEAEFLQKLLPGYYMNLNQNPRTLLPKFYGLYCVQAGGKNIRIVVMNNLLPRSVKMHIKYDLKGSTYKRRASQKEREKPLPTFKDLDFLQDIPDGLFLDADMYNALCKTLQRDCLVLQSFKIMDYSLLMSIHNIDHAQREPLSSETQYSVDTRRPAPQKALYSTAMESIQGEARRGGTMETDDHMGGIPARNSKGERLLLYIGIIDILQSYRFVKKLEHSWKALVHDGDTVSVHRPGFYAERFQRFMCNTVFKKIPLKPSPSKKFRSGSSFSRRAGSSGNSCITYQPSVSGEHKAQVTTKAEVEPGVHLGRPDVLPQTPPLEEISEGSPIPDPSFSPLVGETLQMLTTSTTLEKLEVAESEFTH

SEQ ID NO: 62766 - protein, 562 aa, Homo sapiens
  Payload ID: 12533
  Gene Symbol: PIP5K1A
  Gene Name: phosphatidylinositol-4-phosphate 5-kinase, type I, alpha
  Uniprot ID: Q99755
  ENSP ID: ENSP00000357883
MASASSGPSSSVGFSSFDPAVPSCTLSSAASGIKRPMASEVLEARQDSYISLVPYASGMPIKKIGHRSVDSSGETTYKKTTSSALKGAIQLGITHTVGSLSTKPERDVLMQDFYVVESIFFPSEGSNLTPAHHYNDFRFKTYAPVAFRYFRELFGIRPDDYLYSLCSEPLIELCSSGASGSLFYVSSDDEFIIKTVQHKEAEFLQKLLPGYYMNLNQNPRTLLPKFYGLYCVQAGGKNIRIVVMNNLLPRSVKMHIKYDLKGSTYKRRASQKEREKPLPTFKDLDFLQDIPDGLFLDADMYNALCKTLQRDCLVLQSFKIMDYSLLMSIHNIDHAQREPLSSETQYSVDTRRPAPQKALYSTAMESIQGEARRGGTMETDDHMGGIPARNSKGERLLLYIGIIDILQSYRFVKKLEHSWKALVHDGDTVSVHRPGFYAERFQRFMCNTVFKKIPLKPSPSKKFRSGSSFSRRAGSSGNSCITYQPSVSGEHKAQVTTKAEVEPGVHLGRPDVLPQTPPLEEISEGSPIPDPSFSPLVGETLQMLTTSTTLEKLEVAESEFTH

SEQ ID NO: 62767 - protein, 500 aa, Homo sapiens
  Payload ID: 12533
  Gene Symbol: PIP5K1A
  Gene Name: phosphatidylinositol-4-phosphate 5-kinase, type I, alpha
  Uniprot ID: Q99755
  ENSP ID: ENSP00000357885
MASASSGPSSSVGFSSFDPAVPSCTLSSASGIKRPMASEVPYASGMPIKKIGHRSVDSSGETTYKKTTSSALKGAIQLGITHTVGSLSTKPERDVLMQDFYVVESIFFPSEGSNLTPAHHYNDFRFKTYAPVAFRYFRELFGIRPDDYLYSLCSEPLIELCSSGASGSLFYVSSDDEFIIKTVQHKEAEFLQKLLPGYYMNLNQNPRTLLPKFYGLYCVQAGGKNIRIVVMNNLLPRSVKMHIKYDLKGSTYKRRASQKEREKPLPTFKDLDFLQDIPDGLFLDADMYNALCKTLQRDCLVLQSFKIMDYSLLMSIHNIDHAQREPLSSETQYSVDTRRPAPQKALYSTAMESIQGEARRGGTMETDDHMGGIPARNSKGERLLLYIGIIDILQSYRFVKKLEHSWKALVHDGDTVSVHRPGFYAERFQRFMCNTVFKKIPCVHLGRPDVLPQTPPLEEISEGSPIPDPSFSPLVGETLQMLTTSTTLEKLEVAESEFTH

SEQ ID NO: 62768 - protein, 550 aa, Homo sapiens
  Payload ID: 12533
  Gene Symbol: PIP5K1A
  Gene Name: phosphatidylinositol-4-phosphate 5-kinase, type I, alpha
  ENSP ID: ENSP00000386432
MASASSGPSSSVGFSSFDPAVPSCTLSSAASGIKRPMASEVPYASGMPIKKIGHRSVDSSGETTYKKTTSSALKGAIQLGITHTVGSLSTKPERDVLMQDFYVVESIFFPSEGSNLTPAHHYNDFRFKTYAPVAFRYFRELFGIRPDDYLYSLCSEPLIELCSSGASGSLFYVSSDDEFIIKTVQHKEAEFLQKLLPGYYMNLNQNPRTLLPKFYGLYCVQAGGKNIRIVVMNNLLPRSVKMHIKYDLKGSTYKRRASQKEREKPLPTFKDLDFLQDIPDGLFLDADMYNALCKTLQRDCLVLQSFKIMDYSLLMSIHNIDHAQREPLSSETQYSVDTRRPAPQKALYSTAMESIQGEARRGGTMETDDHMGGIPARNSKGERLLLYIGIIDILQSYRFVKKLEHSWKALVHDGDTVSVHRPGFYAERFQRFMCNTVFKKIPLKPSPSKKFRSGSSFSRRAGSSGNSCITYQPSVSGEHKAQVTTKAEVEPGVHLGRPDVLPQTPPLEEISEGSPIPDPSFSPLVGETLQMLTTSTTLEKLEVAESEFTH

SEQ ID NO: 62769 - protein, 41 aa, Homo sapiens
  Payload ID: 12533
  Gene Symbol: PIP5K1A
  Gene Name: phosphatidylinositol-4-phosphate 5-kinase, type I, alpha
  ENSP ID: ENSP00000392780
MASASSGPSSSVGFSSFDPAVPSCTLSSGFNFLCCGVSGKR

SEQ ID NO: 62770 - protein, 101 aa, Homo sapiens
  Payload ID: 12533
  Gene Symbol: PIP5K1A
  Gene Name: phosphatidylinositol-4-phosphate 5-kinase, type I, alpha
  ENSP ID: ENSP00000401228
MHQIFTELRHCAVPNFVLEANKTQIYFECHSEEASGIKRPMASEVPYASGMPIKKIGHRSVDSSGETTYKKTTSSALKGAIQLGITHTVGSLSTKPERDVL

SEQ ID NO: 62771 - protein, 86 aa, Homo sapiens
  Payload ID: 12533
  Gene Symbol: PIP5K1A
  Gene Name: phosphatidylinositol-4-phosphate 5-kinase, type I, alpha
  ENSP ID: ENSP00000414632
MASEVLEARQDSYISLVPYASGMPIKKIGHRSVDSSGETTYKKTTSSALKGAIQLGITHTVGSLSTKPERDVLMQDFYVVESIFFP

SEQ ID NO: 62772 - protein, 522 aa, Homo sapiens
  Payload ID: 12533
  Gene Symbol: PIP5K1A
  Gene Name: phosphatidylinositol-4-phosphate 5-kinase, type I, alpha
  Uniprot ID: Q99755
  ENSP ID: ENSP00000415648
MASASSGPSSSVGFSSFDPAVPSCTLSSAASGIKRPMASEVPYASGMPIKKIGHRSVDSSGETTYKKTTSSALKGAIQLGITHTVGSLSTKPERDVLMQDFYVVESIFFPSEGSNLTPAHHYNDFRFKTYAPVAFRYFRELFGIRPDDYLYSLCSEPLIELCSSGASGSLFYVSSDDEFIIKTVQHKEAEFLQKLLPGYYMNLNQNPRTLLPKFYGLYCVQAGGKNIRIVVMNNLLPRSVKMHIKYDLKGSTYKRRASQKEREKPLPTFKDLDFLQDIPDGLFLDADMYNALCKTLQRDCLVLQSFKIMDYSLLMSIHNIDHAQREPLSSETQYSVDTRRPAPQKALYSTAMESIQGEARRGGTMETDDQFVKKLEHSWKALVHDGDTVSVHRPGFYAERFQRFMCNTVFKKIPLKPSPSKKFRSGSSFSRRAGSSGNSCITYQPSVSGEHKAQVTTKAEVEPGVHLGRPDVLPQTPPLEEISEGSPIPDPSFSPLVGETLQMLTTSTTLEKLEVAESEFTH

SEQ ID NO: 62773 - protein, 39 aa, Homo sapiens
  Payload ID: 12533
  Gene Symbol: PIP5K1A
  Gene Name: phosphatidylinositol-4-phosphate 5-kinase, type I, alpha
  ENSP ID: ENSP00000416196
MASASSGPSSSVGFSSFDPAVPSCTLSSGKPGRAWVGSW

SEQ ID NO: 62774 - protein, 540 aa, Homo sapiens
  Payload ID: 12534
  Gene Symbol: PIP5K1B
  Gene Name: phosphatidylinositol-4-phosphate 5-kinase, type I, beta
  Uniprot ID: O14986
  ENSP ID: ENSP00000265382
MSSAAENGEAAPGKQNEEKTYKKTASSAIKGAIQLGIGYTVGNLTSKPERDVLMQDFYVVESVFLPSEGSNLTPAHHYPDFRFKTYAPLAFRYFRELFGIKPDDYLYSICSEPLIELSNPGASGSLFFVTSDDEFIIKTVQHKEAEFLQKLLPGYYMNLNQNPRTLLPKFYGLYCMQSGGINIRIVVMNNVLPRSMRMHFTYDLKGSTYKRRASRKEREKSNPTFKDLDFLQDMHEGLYFDTETYNALMKTLQRDCRVLESFKIMDYSLLLGIHFLDHSLKEKEEETPQNVPDAKRTGMQKVLYSTAMESIQGPGKSGDGIITENPDTMGGIPAKSHRGEKLLLFMGIIDILQSYRLMKKLEHSWKALVYDGDTVSVHRPSFYADRFLKFMNSRVFKKIQALKASPSKKRCNSIAALKATSQEIVSSISQEWKDEKRDLLTEGQSFSSLDEEALGSRHRPDLVPSTPSLFEAASLATTISSSSLYVNEHYPHDRPTLYSNSKGLPSSSTFTLEEGTIYLTAEPNTLEVQDDNASVLDVYL

SEQ ID NO: 62775 - protein, 103 aa, Homo sapiens
  Payload ID: 12534
  Gene Symbol: PIP5K1B
  Gene Name: phosphatidylinositol-4-phosphate 5-kinase, type I, beta
  ENSP ID: ENSP00000366498
MSSAAENGEAAPGKQNEEKTYKKTASSAIKGAIQLGIGYTVGNLTSKPERDVLMQDFYVVESVFLPSEGSNLTPAHHYPDFRFKTYAPLAFRYFRELFGIKPD

SEQ ID NO: 62776 - protein, 162 aa, Homo sapiens
  Payload ID: 12534
  Gene Symbol: PIP5K1B
  Gene Name: phosphatidylinositol-4-phosphate 5-kinase, type I, beta
  ENSP ID: ENSP00000398587
MSSAAENGEAAPGKQNEEKTYKKTASSAIKGAIQLGIGYTVGNLTSKPERDVLMQDFYVVESVFLPSEGSNLTPAHHYPDFRFKTYAPLAFRYFRELFGIKPDDYLYSICSEPLIELSNPGASGSLFFVTSDDEFIIKTVQHKEAEFLQKLLPGYYMNLNQN

SEQ ID NO: 62777 - protein, 157 aa, Homo sapiens
  Payload ID: 12534
  Gene Symbol: PIP5K1B
  Gene Name: phosphatidylinositol-4-phosphate 5-kinase, type I, beta
  ENSP ID: ENSP00000411477
MSSAAENGEAAPGKQNEEKTYKKTASSAIKGAIQLGIGYTVGNLTSKPERDVLMQDFYVVESVFLPSEGSNLTPAHHYPDFRFKTYAPLAFRYFRELFGIKPDDYLYSICSEPLIELSNPGASGSLFFVTSDDEFIIKTVQHKEAEFLQKLLPGYYM

SEQ ID NO: 62778 - protein, 549 aa, Homo sapiens
  Payload ID: 12534
  Gene Symbol: PIP5K1B
  Gene Name: phosphatidylinositol-4-phosphate 5-kinase, type I, beta
  Uniprot ID: O14986
  ENSP ID: ENSP00000435778
MSSAAENGEAAPGKQNEEKTYKKTQVKNQILSRLPKIPCTFIQAWTNTEMITLLACYYFRSVSTASSAIKGAIQLGIGYTVGNLTSKPERDVLMQDFYVVESVFLPSEGSNLTPAHHYPDFRFKTYAPLAFRYFRELFGIKPDDYLYSICSEPLIELSNPGASGSLFFVTSDDEFIIKTVQHKEAEFLQKLLPGYYMNLNQNPRTLLPKFYGLYCMQSGGINIRIVVMNNVLPRSMRMHFTYDLKGSTYKRRASRKEREKSNPTFKDLDFLQDMHEGLYFDTETYNALMKTLQRDCRVLESFKIMDYSLLLGIHFLDHSLKEKEEETPQNVPDAKRTGMQKVLYSTAMESIQGPGKSGDGIITENPDTMGGIPAKSHRGEKLLLFMGIIDILQSYRLMKKLEHSWKALVYDGDTVSVHRPSFYADRFLKFMNSRVFKKIQALKASPSKKRCNSIAALKATSQEIVSSISQEWKDEKRDLLTEGQSFSSLDEEALGSRHRPDLVPSTPSLFEAASLATTISSSSLYVNEHYPHDRPTLYSNRFKMATSEH

SEQ ID NO: 62779 - protein, 502 aa, Homo sapiens
  Payload ID: 12534
  Gene Symbol: PIP5K1B
  Gene Name: phosphatidylinositol-4-phosphate 5-kinase, type I, beta
  Uniprot ID: O14986
  ENSP ID: ENSP00000438082
MSSAAENGEAAPGKQNEEKTYKKTASSAIKGAIQLGIGYTVGNLTSKPERDVLMQDFYVVESVFLPSEGSNLTPAHHYPDFRFKTYAPLAFRYFRELFGIKPDDYLYSICSEPLIELSNPGASGSLFFVTSDDEFIIKTVQHKEAEFLQKLLPGYYMNLNQNPRTLLPKFYGLYCMQSGGINIRIVVMNNVLPRSMRMHFTYDLKGSTYKRRASRKEREKSNPTFKDLDFLQDMHEGLYFDTETYNALMKTLQRDCRVLESFKIMDYSLLLGIHFLDHSLKEKEEETPQNVPDAKRTGMQKVLYSTAMESIQGPGKSGDGIITENPDTMGGIPAKSHRGEKLLLFMGIIDILQSYRLMKKLEHSWKALVYDGDTVSVHRPSFYADRFLKFMNSRVFKKIQALKASPSKKRCNSIAALKATSQEIVSSISQEWKDEKRDLLTEGQSFSSLDEEALGSRHRPDLVPSTPSLFEAASLATTISSSSLYVNEHYPHDRPTLYSNSK

SEQ ID NO: 62780 - protein, 668 aa, Homo sapiens
  Payload ID: 12535
  Gene Symbol: PIP5K1C
  Gene Name: phosphatidylinositol-4-phosphate 5-kinase, type I, gamma
  Uniprot ID: O60331
  ENSP ID: ENSP00000335333
MELEVPDEAESAEAGAVPSEAAWAAESGAAAGLAQKKAAPTEVLSMTAQPGPGHGKKLGHRGVDASGETTYKKTTSSTLKGAIQLGIGYTVGHLSSKPERDVLMQDFYVVESIFFPSEGSNLTPAHHFQDFRFKTYAPVAFRYFRELFGIRPDDYLYSLCNEPLIELSNPGASGSLFYVTSDDEFIIKTVMHKEAEFLQKLLPGYYMNLNQNPRTLLPKFYGLYCVQSGGKNIRVVVMNNILPRVVKMHLKFDLKGSTYKRRASKKEKEKSFPTYKDLDFMQDMPEGLLLDADTFSALVKTLQRDCLVLESFKIMDYSLLLGVHNIDQHERERQAQGAQSTSDEKRPVGQKALYSTAMESIQGGAARGEAIESDDTMGGIPAVNGRGERLLLHIGIIDILQSYRFIKKLEHTWKALVHDGDTVSVHRPSFYAERFFKFMSNTVFRKNSSLKSSPSKKGRGGALLAVKPLGPTAAFSASQIPSEREEAQYDLRGARSYPTLEDEGRPDLLPCTPPSFEEATTASIATTLSSTSLSIPERSPSETSEQPRYRRRTQSSGQDGRPQEEPPAEEDLQQITVQVEPACSVEIVVPKEEDAGVEASPAGASAAVEVETASQASDEEGAPASQASDEEDAPATDIYFPTDERSWVYSPLHYSAQAPPASDGESDT

SEQ ID NO: 62781 - protein, 700 aa, Homo sapiens
  Payload ID: 12535
  Gene Symbol: PIP5K1C
  Gene Name: phosphatidylinositol-4-phosphate 5-kinase, type I, gamma
  Uniprot ID: O60331
  ENSP ID: ENSP00000444779
MELEVPDEAESAEAGAVPSEAAWAAESGAAAGLAQKKAAPTEVLSMTAQPGPGHGKKLGHRGVDASGETTYKKTTSSTLKGAIQLGIGYTVGHLSSKPERDVLMQDFYVVESIFFPSEGSNLTPAHHFQDFRFKTYAPVAFRYFRELFGIRPDDYLYSLCNEPLIELSNPGASGSLFYVTSDDEFIIKTVMHKEAEFLQKLLPGYYMNLNQNPRTLLPKFYGLYCVQSGGKNIRVVVMNNILPRVVKMHLKFDLKGSTYKRRASKKEKEKSFPTYKDLDFMQDMPEGLLLDADTFSALVKTLQRDCLVLESFKIMDYSLLLGVHNIDQHERERQAQGAQSTSDEKRPVGQKALYSTAMESIQGGAARGEAIESDDTMGGIPAVNGRGERLLLHIGIIDILQSYRFIKKLEHTWKALVHDGDTVSVHRPSFYAERFFKFMSNTVFRKNSSLKSSPSKKGRGGALLAVKPLGPTAAFSASQIPSEREEAQYDLRGARSYPTLEDEGRPDLLPCTPPSFEEATTASIATTLSSTSLSIPERSPSETSEQPRYRRRTQSSGQDGRPQEEPPAEEDLQQITVQVEPACSVEIVVPKEEDAGVEASPAGASAAVEVETASQASDEEGAPASQASDEEDAPATDIYFWRLWGPHAPTWPWRREGRAACLCPYPPHVVTPFPGTGLCASWSPDGTGGLGAMSCCVSVS

SEQ ID NO: 62782 - protein, 640 aa, Homo sapiens
  Payload ID: 12535
  Gene Symbol: PIP5K1C
  Gene Name: phosphatidylinositol-4-phosphate 5-kinase, type I, gamma
  Uniprot ID: O60331
  ENSP ID: ENSP00000445992
MELEVPDEAESAEAGAVPSEAAWAAESGAAAGLAQKKAAPTEVLSMTAQPGPGHGKKLGHRGVDASGETTYKKTTSSTLKGAIQLGIGYTVGHLSSKPERDVLMQDFYVVESIFFPSEGSNLTPAHHFQDFRFKTYAPVAFRYFRELFGIRPDDYLYSLCNEPLIELSNPGASGSLFYVTSDDEFIIKTVMHKEAEFLQKLLPGYYMNLNQNPRTLLPKFYGLYCVQSGGKNIRVVVMNNILPRVVKMHLKFDLKGSTYKRRASKKEKEKSFPTYKDLDFMQDMPEGLLLDADTFSALVKTLQRDCLVLESFKIMDYSLLLGVHNIDQHERERQAQGAQSTSDEKRPVGQKALYSTAMESIQGGAARGEAIESDDTMGGIPAVNGRGERLLLHIGIIDILQSYRFIKKLEHTWKALVHDGDTVSVHRPSFYAERFFKFMSNTVFRKNSSLKSSPSKKGRGGALLAVKPLGPTAAFSASQIPSEREEAQYDLRGARSYPTLEDEGRPDLLPCTPPSFEEATTASIATTLSSTSLSIPERSPSETSEQPRYRRRTQSSGQDGRPQEEPPAEEDLQQITVQVEPACSVEIVVPKEEDAGVEASPAGASAAVEVETASQASDEEGAPASQASDEEDAPATDIYF

SEQ ID NO: 62783 - protein, 707 aa, Homo sapiens
  Payload ID: 12535
  Gene Symbol: PIP5K1C
  Gene Name: phosphatidylinositol-4-phosphate 5-kinase, type I, gamma
  Uniprot ID: O60331
  ENSP ID: ENSP00000466363
MELEVPDEAESAEAGAVPSEAAWAAESGAAAGLAQKKAAPTEVLSMTAQPGPGHGKKLGHRGVDASGETTYKKTTSSTLKGAIQLGIGYTVGHLSSKPERDVLMQDFYVVESIFFPSEGSNLTPAHHFQDFRFKTYAPVAFRYFRELFGIRPDDYLYSLCNEPLIELSNPGASGSLFYVTSDDEFIIKTVMHKEAEFLQKLLPGYYMNLNQNPRTLLPKFYGLYCVQSGGKNIRVVVMNNILPRVVKMHLKFDLKGSTYKRRASKKEKEKSFPTYKDLDFMQDMPEGLLLDADTFSALVKTLQRDCLVLESFKIMDYSLLLGVHNIDQHERERQAQGAQSTSDEKRPVGQKALYSTAMESIQGGAARGEAIESDDTMGGIPAVNGRGERLLLHIGIIDILQSYRFIKKLEHTWKALVHDGDTVSVHRPSFYAERFFKFMSNTVFRKNSSLKSSPSKKGRGGALLAVKPLGPTAAFSASQIPSEREEAQYDLRGARSYPTLEDEGRPDLLPCTPPSFEEATTASIATTLSSTSLSIPERSPSETSEQPRYRRRTQSSGQDGRPQEEPPAEEDLQQITVQVEPACSVEIVVPKEEDAGVEASPAGASAAVEVETASQASDEEGAPASQASDEEDAPATDIYFFTDGRYWIYSPRHRRLRAVTLSASGTVSDRSRPPWGEGAVPLGQQGAAGPRPEAQCLTSVVFQKGFG

SEQ ID NO: 62784 - protein, 191 aa, Homo sapiens
  Payload ID: 12536
  Gene Symbol: PIP5KL1
  Gene Name: phosphatidylinositol-4-phosphate 5-kinase-like 1
  Uniprot ID: Q5T9C9
  ENSP ID: ENSP00000300432
MQSVFYPAGRISERYDIKGCEVSRWVDPAPEGSPLVLVLKDLNFQGKTINLGPQRSWFLRQMELDTTFLRELNVLDYSLLIAFQRLHEDERGPGSSLIFRTARSVQGAQSPEESRAQNRRLLPDAPNALHILDGPEQRYFLGVVDLATVYGLRKRLEHLWKTLRYPGRTFSTVSPARYARRLCQWVEAHTE

SEQ ID NO: 62785 - protein, 394 aa, Homo sapiens
  Payload ID: 12536
  Gene Symbol: PIP5KL1
  Gene Name: phosphatidylinositol-4-phosphate 5-kinase-like 1
  Uniprot ID: Q5T9C9
  ENSP ID: ENSP00000373399
MAAPSPGPREVLAPSPEAGCRAVTSSRRGLLWRLRDKQSRLGLFEISPGHELHGMTCMMQAGLWAATQVSMDHPPTGPPSRDDFSEVLTQVHEGFELGTLAGPAFAWLRRSLGLAEEDYQAALGPGGPYLQFLSTSKSKASFFLSHDQRFFLKTQGRREVQALLAHLPRYVQHLQRHPHSLLARLLGVHSLRVDRGKKTYFIVMQSVFYPAGRISERYDIKGCEVSRWVDPAPEGSPLVLVLKDLNFQGKTINLGPQRSWFLRQMELDTTFLRELNVLDYSLLIAFQRLHEDERGPGSSLIFRTARSVQGAQSPEESRAQNRRLLPDAPNALHILDGPEQRYFLGVVDLATVYGLRKRLEHLWKTLRYPGRTFSTVSPARYARRLCQWVEAHTE

SEQ ID NO: 62786 - protein, 266 aa, Homo sapiens
  Payload ID: 12537
  Gene Symbol: PIP4K2A
  Gene Name: phosphatidylinositol-5-phosphate 4-kinase, type II, alpha
  ENSP ID: ENSP00000326294
MHNILKKYHQYIVECHGITLLPQFLGMYRLNVDGVEIYVIVTRNVFSHRLSVYRKYDLKMANLKATFTFPKPTGSTVAREASDKEKAKELPTLKDNDFINEGQKIYIDDNNKKVFLEKLKKDVEFLAQLKLMDYSLLVGIHDVERAEQEEVECEENDGEEEGESDGTHPVGTPPDSPGNTLNSSPPLAPGEFDPNIDVYGIKCHENSPRKEVYFMAIIDILTHYDAKKKAAHAAKTVKHGAGAEISTVNPEQYSKRFLDFIGHILT

SEQ ID NO: 62787 - protein, 406 aa, Homo sapiens
  Payload ID: 12537
  Gene Symbol: PIP4K2A
  Gene Name: phosphatidylinositol-5-phosphate 4-kinase, type II, alpha
  Uniprot ID: P48426
  ENSP ID: ENSP00000365757
MATPGNLGSSVLASKTKTKKKHFVAQKVKLFRASDPLLSVLMWGVNHSINELSHVQIPVMLMPDDFKAYSKIKVDNHLFNKENMPSHFKFKEYCPMVFRNLRERFGIDDQDFQNSLTRSAPLPNDSQARSGARFHTSYDKRYIIKTITSEDVAEMHNILKKYHQYIVECHGITLLPQFLGMYRLNVDGVEIYVIVTRNVFSHRLSVYRKYDLKGSTVAREASDKEKAKELPTLKDNDFINEGQKIYIDDNNKKVFLEKLKKDVEFLAQLKLMDYSLLVGIHDVERAEQEEVECEENDGEEEGESDGTHPVGTPPDSPGNTLNSSPPLAPGEFDPNIDVYGIKCHENSPRKEVYFMAIIDILTHYDAKKKAAHAAKTVKHGAGAEISTVNPEQYSKRFLDFIGHILT

SEQ ID NO: 62788 - protein, 347 aa, Homo sapiens
  Payload ID: 12537
  Gene Symbol: PIP4K2A
  Gene Name: phosphatidylinositol-5-phosphate 4-kinase, type II, alpha
  Uniprot ID: P48426
  ENSP ID: ENSP00000442098
MLMPDDFKAYSKIKVDNHLFNKENMPSHFKFKEYCPMVFRNLRERFGIDDQDFQNSLTRSAPLPNDSQARSGARFHTSYDKRYIIKTITSEDVAEMHNILKKYHQYIVECHGITLLPQFLGMYRLNVDGVEIYVIVTRNVFSHRLSVYRKYDLKGSTVAREASDKEKAKELPTLKDNDFINEGQKIYIDDNNKKVFLEKLKKDVEFLAQLKLMDYSLLVGIHDVERAEQEEVECEENDGEEEGESDGTHPVGTPPDSPGNTLNSSPPLAPGEFDPNIDVYGIKCHENSPRKEVYFMAIIDILTHYDAKKKAAHAAKTVKHGAGAEISTVNPEQYSKRFLDFIGHILT

SEQ ID NO: 62789 - protein, 142 aa, Homo sapiens
  Payload ID: 12537
  Gene Symbol: PIP4K2A
  Gene Name: phosphatidylinositol-5-phosphate 4-kinase, type II, alpha
  ENSP ID: ENSP00000473858
MHNILKKYHQYIVECHGITLLPQFLGMYRLNVDGVEIYVIVTRNVFSHRLSVYRKYDLKGSTVAREASDKEKAKELPTLKDNDFINEGQKIYIDDNNKKVFLEKLKKDVEFLAQLKLMDYSLLVGIHDVERAEQEEVECEEN

SEQ ID NO: 62790 - protein, 71 aa, Homo sapiens
  Payload ID: 12538
  Gene Symbol: PIP4K2B
  Gene Name: phosphatidylinositol-5-phosphate 4-kinase, type II, beta
  ENSP ID: ENSP00000477549
MLMPDDFKAYSKIKVDNHLFNKENLPSRFKFKEYCPMVFRNLRERFGIDDQDYQNSVTRSAPINSDSQGRC

SEQ ID NO: 62791 - protein, 416 aa, Homo sapiens
  Payload ID: 12538
  Gene Symbol: PIP4K2B
  Gene Name: phosphatidylinositol-5-phosphate 4-kinase, type II, beta
  Uniprot ID: P78356
  ENSP ID: ENSP00000480776
MSSNCTSTTAVAVAPLSASKTKTKKKHFVCQKVKLFRASEPILSVLMWGVNHTINELSNVPVPVMLMPDDFKAYSKIKVDNHLFNKENLPSRFKFKEYCPMVFRNLRERFGIDDQDYQNSVTRSAPINSDSQGRCGTRFLTTYDRRFVIKTVSSEDVAEMHNILKKYHQFIVECHGNTLLPQFLGMYRLTVDGVETYMVVTRNVFSHRLTVHRKYDLKGSTVAREASDKEKAKDLPTFKDNDFLNEGQKLHVGEESKKNFLEKLKRDVEFLAQLKIMDYSLLVGIHDVDRAEQEEMEVEERAEDEECENDGVGGNLLCSYGTPPDSPGNLLSFPRFFGPGEFDPSVDVYAMKSHESSPKKEVYFMAIIDILTPYDTKKKAAHAAKTVKHGAGAEISTVNPEQYSKRFNEFMSNILT

SEQ ID NO: 62792 - protein, 416 aa, Homo sapiens; identical to SEQ ID NO: 62791
  Payload ID: 12538
  Gene Symbol: PIP4K2B
  Gene Name: phosphatidylinositol-5-phosphate 4-kinase, type II, beta
  Uniprot ID: P78356
  ENSP ID: ENSP00000482548

SEQ ID NO: 62793 - protein, 71 aa, Homo sapiens; identical to SEQ ID NO: 62790
  Payload ID: 12538
  Gene Symbol: PIP4K2B
  Gene Name: phosphatidylinositol-5-phosphate 4-kinase, type II, beta
  ENSP ID: ENSP00000487739

SEQ ID NO: 62794 - protein, 421 aa, Homo sapiens
  Payload ID: 12539
  Gene Symbol: PIP4K2C
  Gene Name: phosphatidylinositol-5-phosphate 4-kinase, type II, gamma
  Uniprot ID: Q8TBX8
  ENSP ID: ENSP00000347032
MASSSVPPATVSAATAGPGPGFGFASKTKKKHFVQQKVKVFRAADPLVGVFLWGVAHSINELSQVPPPVMLLPDDFKASSKIKVNNHLFHRENLPSHFKFKEYCPQVFRNLRDRFGIDDQDYLVSLTRNPPSESEGSDGRFLISYDRTLVIKEVSSEDIADMHSNLSNYHQYIVKCHGNTLLPQFLGMYRVSVDNEDSYMLVMRNMFSHRLPVHRKYDLKGSLVSREASDKEKVKELPTLKDMDFLNKNQKVYIGEEEKKIFLEKLKRDVEFLVQLKIMDYSLLLGIHDIIRGSEPEEEAPVREDESEVDGDCSLTGPPALVGSYGTSPEGIGGYIHSHRPLGPGEFESFIDVYAIRSAEGAPQKEVYFMGLIDILTQYDAKKKAAHAAKTVKHGAGAEISTVHPEQYAKRFLDFITNIFA

SEQ ID NO: 62795 - protein, 373 aa, Homo sapiens
  Payload ID: 12539
  Gene Symbol: PIP4K2C
  Gene Name: phosphatidylinositol-5-phosphate 4-kinase, type II, gamma
  Uniprot ID: Q8TBX8
  ENSP ID: ENSP00000412035
MASSSVPPATVSAATAGPGPGFGFASKTKKKHFVQQKVKVFRAADPLVGVFLWGVAHSINELSQVPPPVMLLPDDFKASSKIKVNNHLFHRENLPSHFKFKEYCPQVFRNLRDRFGIDDQDYLYIVKCHGNTLLPQFLGMYRVSVDNEDSYMLVMRNMFSHRLPVHRKYDLKGSLVSREASDKEKVKELPTLKDMDFLNKNQKVYIGEEEKKIFLEKLKRDVEFLVQLKIMDYSLLLGIHDIIRGSEPEEEAPVREDESEVDGDCSLTGPPALVGSYGTSPEGIGGYIHSHRPLGPGEFESFIDVYAIRSAEGAPQKEVYFMGLIDILTQYDAKKKAAHAAKTVKHGAGAEISTVHPEQYAKRFLDFITNIFA

SEQ ID NO: 62796 - protein, 421 aa, Homo sapiens; identical to SEQ ID NO: 62794
  Payload ID: 12539
  Gene Symbol: PIP4K2C
  Gene Name: phosphatidylinositol-5-phosphate 4-kinase, type II, gamma
  Uniprot ID: Q8TBX8
  ENSP ID: ENSP00000439878

SEQ ID NO: 62797 - protein, 403 aa, Homo sapiens
  Payload ID: 12539
  Gene Symbol: PIP4K2C
  Gene Name: phosphatidylinositol-5-phosphate 4-kinase, type II, gamma
  Uniprot ID: Q8TBX8
  ENSP ID: ENSP00000447390
MASSSVPPATVSAATAGPGPGFGFASKTKKKHFVQQKVKVFRAADPLVGVFLWGVAHSINELSQVPPPVMLLPDDFKASSKIKEYCPQVFRNLRDRFGIDDQDYLVSLTRNPPSESEGSDGRFLISYDRTLVIKEVSSEDIADMHSNLSNYHQYIVKCHGNTLLPQFLGMYRVSVDNEDSYMLVMRNMFSHRLPVHRKYDLKGSLVSREASDKEKVKELPTLKDMDFLNKNQKVYIGEEEKKIFLEKLKRDVEFLVQLKIMDYSLLLGIHDIIRGSEPEEEAPVREDESEVDGDCSLTGPPALVGSYGTSPEGIGGYIHSHRPLGPGEFESFIDVYAIRSAEGAPQKEVYFMGLIDILTQYDAKKKAAHAAKTVKHGAGAEISTVHPEQYAKRFLDFITNIFA

SEQ ID NO: 62798 - protein, 171 aa, Homo sapiens
  Payload ID: 12539
  Gene Symbol: PIP4K2C
  Gene Name: phosphatidylinositol-5-phosphate 4-kinase, type II, gamma
  ENSP ID: ENSP00000448042
MASSSVPPATVSAATAGPGPGFGFASKTKKKHFVQQKVKVFRAADPLVGVFLWGVAHSINELSQVPPPVMLLPDDFKASSKIKVNNHLFHRENLPSHFKFKEYCPQVFRNLRDRFGIDDQDYLVSLTRNPPSESEGSDGRFLISYDRTLVIKEVSSEDIADMHSNLSNYHQ

SEQ ID NO: 62799 - protein, 50 aa, Homo sapiens
  Payload ID: 12539
  Gene Symbol: PIP4K2C
  Gene Name: phosphatidylinositol-5-phosphate 4-kinase, type II, gamma
  ENSP ID: ENSP00000449335
MASSSVPPATVSAATAGPGPGFGFASKTKKKHFVQQKVKVFRAADPLVDQ

SEQ ID NO: 62800 - protein, 134 aa, Homo sapiens
  Payload ID: 12539
  Gene Symbol: PIP4K2C
  Gene Name: phosphatidylinositol-5-phosphate 4-kinase, type II, gamma
  ENSP ID: ENSP00000449538
  MOD_RES (1)..(1): Any amino acid
XLLPQFLGMYRVSVDNEDSYMLVMRNMFSHRLPVHRKYDLKVKELPTLKDMDFLNKNQKVYIGEEEKKIFLEKLKRDVEFLVQLKIMDYSLLLGIHDIIRGSEPEEEAPVREDESEVDGDCSLTGPPALVGSYG

SEQ ID NO: 62801 - protein, 160 aa, Homo sapiens
  Payload ID: 12539
  Gene Symbol: PIP4K2C
  Gene Name: phosphatidylinositol-5-phosphate 4-kinase, type II, gamma
  ENSP ID: ENSP00000450197
MASSSVPPATVSAATAGPGPGFGFASKTKKKHFVQQKINELSQVPPPVMLLPDDFKASSKIKVNNHLFHRENLPSHFKFKEYCPQVFRNLRDRFGIDDQDYLVSLTRNPPSESEGSDGRFLISYDRTLVIKEVSSEDIADMHSNLSNYHQYIVKCHGNTL

SEQ ID NO: 62802 - protein, 323 aa, Homo sapiens
  Payload ID: 12540
  Gene Symbol: PLCXD1
  Gene Name: phosphatidylinositol-specific phospholipase C, X domain containing 1
  Uniprot ID: Q9NUJ7
  ENSP ID: ENSP00000371073
MGGQVSASNSFSRLHCRNANEDWMSALCPRLWDVPLHHLSIPGSHDTMTYCLNKKSPISHEESRLLQLLNKALPCITRPVVLKWSVTQALDVTEQLDAGVRYLDLRIAHMLEGSEKNLHFVHMVYTTALVEDTLTEISEWLERHPREVVILACRNFEGLSEDLHEYLVACIKNIFGDMLCPRGEVPTLRQLWSRGQQVIVSYEDESSLRRHHELWPGVPYWWGNRVKTEALIRYLETMKSCGRPGGLFVAGINLTENLQYVLAHPSESLEKMTLPNLPRLSAWVREQCPGPGSRCTNIIAGDFIGADGFVSDVIALNQKLLWC

SEQ ID NO: 62803 - protein, 323 aa, Homo sapiens; identical to SEQ ID NO: 62802
  Payload ID: 12540
  Gene Symbol: PLCXD1
  Gene Name: phosphatidylinositol-specific phospholipase C, X domain containing 1
  Uniprot ID: Q9NUJ7
  ENSP ID: ENSP00000371079

SEQ ID NO: 62804 - protein, 323 aa, Homo sapiens; identical to SEQ ID NO: 62802
  Payload ID: 12540
  Gene Symbol: PLCXD1
  Gene Name: phosphatidylinositol-specific phospholipase C, X domain containing 1
  Uniprot ID: Q9NUJ7
  ENSP ID: ENSP00000381976

SEQ ID NO: 62805 - protein, 174 aa, Homo sapiens
  Payload ID: 12540
  Gene Symbol: PLCXD1
  Gene Name: phosphatidylinositol-specific phospholipase C, X domain containing 1
  ENSP ID: ENSP00000394848
MGGQVSASNSFSRLHCRNANEDWMSALCPRLWDVPLHHLSIPGSHDTMTYCLNKKSPISHEESRLLQLLNKALPCITRPVVLKWSVTQALDVTEQLDAGVRYLDLRIAHMLEGSEKNLHFVHMVYTTALVEDTLTEISEWLERHPREVVILACRNFEGLSEDLHEYLVACIKNI

SEQ ID NO: 62806 - protein, 178 aa, Homo sapiens
  Payload ID: 12540
  Gene Symbol: PLCXD1
  Gene Name: phosphatidylinositol-specific phospholipase C, X domain containing 1
  ENSP ID: ENSP00000399510
MGGQVSASNSFSRLHCRNANEDWMSALCPRLWDVPLHHLSIPGSHDTMTYCLNKKSPISHEESRLLQLLNKALPCITRPVVLKWSVTQALDVTEQLDAGVRYLDLRIAHMLEGSEKNLHFVHMVYTTALVEDTLTEISEWLERHPREVVILACRNFEGLSEDLHEYLVACIKNIFGDM

SEQ ID NO: 62807 - protein, 60 aa, Homo sapiens
  Payload ID: 12540
  Gene Symbol: PLCXD1
  Gene Name: phosphatidylinositol-specific phospholipase C, X domain containing 1
  ENSP ID: ENSP00000400904
MGGQVSASNSFSRLHCRNANEDWMSALCPRLWDVPLHHLSIPGSHDTMTYCLNKKSPISH

SEQ ID NO: 62808 - protein, 174 aa, Homo sapiens; identical to SEQ ID NO: 62805
  Payload ID: 12540
  Gene Symbol: PLCXD1
  Gene Name: phosphatidylinositol-specific phospholipase C, X domain containing 1
  ENSP ID: ENSP00000405307

SEQ ID NO: 62809 - protein, 74 aa, Homo sapiens
  Payload ID: 12540
  Gene Symbol: PLCXD1
  Gene Name: phosphatidylinositol-specific phospholipase C, X domain containing 1
  ENSP ID: ENSP00000408558
MGGQVSASNSFSRLHCRNANEDWMSALCPRLWDVPLHHLSIPGSHDTMTYCLNKKSPISHEESRLLQLLNKALP

SEQ ID NO: 62810 - protein, 88 aa, Homo sapiens
  Payload ID: 12540
  Gene Symbol: PLCXD1
  Gene Name: phosphatidylinositol-specific phospholipase C, X domain containing 1
  ENSP ID: ENSP00000412018
MGGQVSASNSFSRLHCRNANEDWMSALCPRLWDVPLHHLSIPGSHDTMTYCLNKKSPISHEESRLLQLLNKALPCITRPVVLKWSVTQ

SEQ ID NO: 62811 - protein, 124 aa, Homo sapiens
  Payload ID: 12540
  Gene Symbol: PLCXD1
  Gene Name: phosphatidylinositol-specific phospholipase C, X domain containing 1
  ENSP ID: ENSP00000414181
MGGQVSASNSFSRLHCRNANEDWMSALCPRLWDVPLHHLSIPGSHDTMTYCLNKKSPISHEESRLLQLLNKALPCITRPVVLKWSVTQALDVTEQLDAGVRYLDLRIAHMLEGSEKNLHFVHMV

SEQ ID NO: 62812 - protein, 304 aa, Homo sapiens
  Payload ID: 12541
  Gene Symbol: PLCXD2
  Gene Name: phosphatidylinositol-specific phospholipase C, X domain containing 2
  Uniprot ID: Q0VAA5
  ENSP ID: ENSP00000377511
MLAVRKARRKLRMGTICSPNPSGTKTSSEVCNADWMASLPPHLHNLPLSNLAIPGSHDSFSYWVDEKSPVGPDQTQAIKRLARISLVKKLMKKWSVTQNLTFREQLEAGIRYFDLRVSSKPGDADQEIYFIHGLFGIKVWDGLMEIDSFLTQHPQEIIFLDFNHFYAMDETHHKCLVLRIQEAFGNKLCPACSVESLTLRTLWEKNCQVLIFYHCPFYKQYPFLWPGKKIPAPWANTTSVRKLILFLETTLSERASRGSFHVSQAILTPRVKTIARGLVGGLKNTLVHRLALIPVYPLRFSRRS

SEQ ID NO: 62813 - protein, 73 aa, Homo sapiens
  Payload ID: 12541
  Gene Symbol: PLCXD2
  Gene Name: phosphatidylinositol-specific phospholipase C, X domain containing 2
  ENSP ID: ENSP00000417436
MKKWSVTQNLTFREQLEAGIRYFDLRVSSKPGDADQEIYFIHGLFGIKVWDGLMEIDSFLTQHPQEIIFLDFN

SEQ ID NO: 62814 - protein, 305 aa, Homo sapiens
  Payload ID: 12541
  Gene Symbol: PLCXD2
  Gene Name: phosphatidylinositol-specific phospholipase C, X domain containing 2
  Uniprot ID: Q0VAA5
  ENSP ID: ENSP00000420686
MLAVRKARRKLRMGTICSPNPSGTKTSSEVCNADWMASLPPHLHNLPLSNLAIPGSHDSFSYWVDEKSPVGPDQTQAIKRLARISLVKKLMKKWSVTQNLTFREQLEAGIRYFDLRVSSKPGDADQEIYFIHGLFGIKVWDGLMEIDSFLTQHPQEIIFLDFNHFYAMDETHHKCLVLRIQEAFGNKLCPACSVESLTLRTLWEKNCQVLIFYHCPFYKQYPFLWPGKKIPAPWANTTSVRKLILFLETTLSERASRGSFHVSQAILTPRVKTIARGLVGGLKNTLVHSNRWNSHGPSLLSQERS

SEQ ID NO: 62815 - protein, 321 aa, Homo sapiens
  Payload ID: 12542
  Gene Symbol: PLCXD3
  Gene Name: phosphatidylinositol-specific phospholipase C, X domain containing 3
  Uniprot ID: Q63HM9
  ENSP ID: ENSP00000333751
MASSQGKNELKLADWMATLPESMHSIPLTNLAIPGSHDSFSFYIDEASPVGPEQPETVQNFVSVFGTVAKKLMRKWLATQTMNFTGQLGAGIRYFDLRISTKPRDPDNELYFAHGLFSAKVNEGLEEINAFLTDHHKEVVFLDFNHFYGMQKYHHEKLVQMLKDIYGNKMCPAIFAQEVSLKYLWEKDYQVLVFYHSPVALEVPFLWPGQMMPAPWANTTDPEKLIQFLQASITERRKKGSFFISQVVLTPKASTVVKGVASGLRETITERALPAMMQWVRTQKPGESGINIVTADFVELGDFISTVIKLNYVFDEGEANT

SEQ ID NO: 62816 - protein, 321 aa, Homo sapiens; identical to SEQ ID NO: 62815
  Payload ID: 12542
  Gene Symbol: PLCXD3
  Gene Name: phosphatidylinositol-specific phospholipase C, X domain containing 3
  Uniprot ID: Q63HM9
  ENSP ID: ENSP00000367032

SEQ ID NO: 62817 - protein, 375 aa, Homo sapiens
  Payload ID: 12543
  Gene Symbol: PISD
  Gene Name: phosphatidylserine decarboxylase
  Uniprot ID: Q9UG56
  ENSP ID: ENSP00000266095
MMCQSEARQGPELRAAKWLHFPQLALRRRLGQLSCMSRPALKLRSWPLTVLYYLLPFGALRPLSRVGWRPVSRVALYKSVPTRLLSRAWGRLNQVELPHWLRRPVYSLYIWTFGVNMKEAAVEDLHHYRNLSEFFRRKLKPQARPVCGLHSVISPSDGRILNFGQVKNCEVEQVKGVTYSLESFLGPRMCTEDLPFPPAASCDSFKNQLVTREGNELYHCVIYLAPGDYHCFHSPTDWTVSHRRHFPGSLMSVNPGMARWIKELFCHNERVVLTGDWKHGFFSLTAVGATNVGSIRIYFDRDLHTNSPRHSKGSYNDFSFVTHTNREGVPMRKGEHLGEFNLGSTIVLIFEAPKDFNFQLKTGQKIRFGEALGSL

SEQ ID NO: 62818 - protein, 375 aa, Homo sapiens; identical to SEQ ID NO: 62817
  Payload ID: 12543
  Gene Symbol: PISD
  Gene Name: phosphatidylserine decarboxylase
  Uniprot ID: Q9UG56
  ENSP ID: ENSP00000371586

SEQ ID NO: 62819 - protein, 262 aa, Homo sapiens
  Payload ID: 12543
  Gene Symbol: PISD
  Gene Name: phosphatidylserine decarboxylase
  ENSP ID: ENSP00000380637
MMCQSEARQGPELRAAKWLHFPQLALRRRLGQLSCMSRPALKLRSWPLTVLYYLLPFGALRPLSRVGWRPVSRVALYKSVPTRLLSRAWGRLNQVELPHWLRRPVYSLYIWTFGVNMKEAAVEDLHHYRNLSEFFRRKLKPQARPVCGLHSVISPSDGRILNFGQVKNCEVEQVKGVTYSLESFLGPRMCTEDLPFPPAASCDSFKNQLVTREGNELYHCVIYLAPGDYHCFHSPTDWTVSHRRHFPGPAHKQPKAQQGLLQ

SEQ ID NO: 62820 - protein, 409 aa, Homo sapiens
  Payload ID: 12543
  Gene Symbol: PISD
  Gene Name: phosphatidylserine decarboxylase
  Uniprot ID: Q9UG56
  ENSP ID: ENSP00000391739
MATSVGHRCLGLLHGVAPWRSSLHPCEITALSQSLQPLRKLPFRAFRTDARKIHTAPARTMFLLRPLPILLVTGGGYAGYRQYEKYRERELEKLGLEIPPKLAGHWEVALYKSVPTRLLSRAWGRLNQVELPHWLRRPVYSLYIWTFGVNMKEAAVEDLHHYRNLSEFFRRKLKPQARPVCGLHSVISPSDGRILNFGQVKNCEVEQVKGVTYSLESFLGPRMCTEDLPFPPAASCDSFKNQLVTREGNELYHCVIYLAPGDYHCFHSPTDWTVSHRRHFPGSLMSVNPGMARWIKELFCHNERVVLTGDWKHGFFSLTAVGATNVGSIRIYFDRDLHTNSPRHSKGSYNDFSFVTHTNREGVPMRKGEHLGEFNLGSTIVLIFEAPKDFNFQLKTGQKIRFGEALGSL

SEQ ID NO: 62821 - protein, 73 aa, Homo sapiens
  Payload ID: 12543
  Gene Symbol: PISD
  Gene Name: phosphatidylserine decarboxylase
  ENSP ID: ENSP00000396002
MMCQSEARQGPELRAAKWLHFPQLALRRRLGQLSCMSRPALKLRSWPLTVLYYLLPFGALRPLSRVGWRPVSR

SEQ ID NO: 62822 - protein, 56 aa, Homo sapiens
  Payload ID: 12543
  Gene Symbol: PISD
  Gene Name: phosphatidylserine decarboxylase
  ENSP ID: ENSP00000396500
MATSVGHRCLGLLHGVAPWRSRCQKNPHCPCPNHVPAASPAHSVGDRRRVCRVPAV

SEQ ID NO: 62823 - protein, 81 aa, Homo sapiens
  Payload ID: 12543
  Gene Symbol: PISD
  Gene Name: phosphatidylserine decarboxylase
  ENSP ID: ENSP00000399818
MMCQSEARQGPELRAAKWLHFPQLALRRRLGQLSCMSRPALKLRSWPLTVLYYLLPFGALRPLSRVGWRPVSRVALYKSVP

SEQ ID NO: 62824 - protein, 73 aa, Homo sapiens; identical to SEQ ID NO: 62821
  Payload ID: 12543
  Gene Symbol: PISD
  Gene Name: phosphatidylserine decarboxylase
  ENSP ID: ENSP00000401606

SEQ ID NO: 62825 - protein, 228 aa, Homo sapiens
  Payload ID: 12543
  Gene Symbol: PISD
  Gene Name: phosphatidylserine decarboxylase
  ENSP ID: ENSP00000412169
MMCQSEARQGPELRAAKWLHFPQLALRRRLGQLSCMSRPALKLRSWPLTVLYYLLPFGALRPLSRVGWRPVSRVALYKSVPTRLLSRAWGRLNQVELPHWLRRPVYSLYIWTFGVNMKEAAVEDLHHYRNLSEFFRRKLKPQARPVCGLHSVISPSDGRILNFGQVKNCEVEQVKGVTYSLESFLGPRMCTEDLPFPPAASCDSFKNQLVTREGNELYHCVIYLAPGD

SEQ ID NO: 62826 - protein, 362 aa, Homo sapiens
  Payload ID: 12543
  Gene Symbol: PISD
  Gene Name: phosphatidylserine decarboxylase
  ENSP ID: ENSP00000414395
  MOD_RES (1)..(1): Any amino acid
XGLLHGVAPWRSSLHPCEITALSQSLQPLRKLPFRAFRTDARKIHTAPARTMFLLRPLPILLVTGGGYAGYRQYEKYRERELEKLGLEIPPKLAGHWEVALYKSVPTRLLSRAWGRLNQVELPHWLRRPVYSLYIWTFGVNMKEAAVEDLHHYRNLSEFFRRKLKPQARPVCGLHSVISPSDGRILNFGQVKNCEVEQVKGVTYSLESFLGPRMCTEDLPFPPAASCDSFKNQLVTREGNELYHCVIYLAPGDYHCFHSPTDWTVSHRRHFPAVGATNVGSIRIYFDRDLHTNSPRHSKGSYNDFSFVTHTNREGVPMRKGEHLGEFNLGSTIVLIFEAPKDFNFQLKTGQKIRFGEALGSL

SEQ ID NO: 62827 - protein, 108 aa, Homo sapiens
  Payload ID: 12544
  Gene Symbol: PTDSS1
  Gene Name: phosphatidylserine synthase 1
  ENSP ID: ENSP00000337331
MASCVGSRTLSKDDVNYKMHFRMINEQQVEDITIDFFYRPHTITLLSFTIVSLMYFAFTRDDSVPEDNIWRGILSVIFFFLIISVLAFPNGVCCELPCDHLGEDYQPL

SEQ ID NO: 62828 - protein, 473 aa, Homo sapiens
  Payload ID: 12544
  Gene Symbol: PTDSS1
  Gene Name: phosphatidylserine synthase 1
  Uniprot ID: P48651
  ENSP ID: ENSP00000430548
MASCVGSRTLSKDDVNYKMHFRMINEQQVEDITIDFFYRPHTITLLSFTIVSLMYFAFTRDDSVPEDNIWRGILSVIFFFLIISVLAFPNGPFTRPHPALWRMVFGLSVLYFLFLVFLLFLNFEQVKSLMYWLDPNLRYATREADVMEYAVNCHVITWERIISHFDIFAFGHFWGWAMKALLIRSYGLCWTISITWELTELFFMHLLPNFAECWWDQVILDILLCNGGGIWLGMVVCRFLEMRTYHWASFKDIHTTTGKIKRAVLQFTPASWTYVRWFDPKSSFQRVAGVYLFMIIWQLTELNTFFLKHIFVFQASHPLSWGRILFIGGITAPTVRQYYAYLTDTQCKRVGTQCWVFGVIGFLEAIVCIKFGQDLFSKTQILYVVLWLLCVAFTTFLCLYGMIWYAEHYGHREKTYSECEDGTYSPEISWHHRKGTKGSEDSPPKHAGNNESHSSRRRNRHSKSKVTNGVGKK

SEQ ID NO: 62829 - protein, 301 aa, Homo sapiens
  Payload ID: 12544
  Gene Symbol: PTDSS1
  Gene Name: phosphatidylserine synthase 1
  Uniprot ID: P48651
  ENSP ID: ENSP00000430928
MHLLPNFAECWWDQVILDILLCNGGGIWLGMVVCRFLEMRTYHWASFKDIHTTTGKIKRAVLQFTPASWTYVRWFDPKSSFQRVAGVYLFMIIWQLTELNTFFLKHIFVFQASHPLSWGRILFIGGITAPTVRQYYAYLTDTQCKRVGTQCWVFGVIGFLEAIVCIKFGQDLFSKTQILYVVLWLLCVAFTTFLCLYGMIWYAEHYGHREKTYSECEDGTYSPEISWHHRKGTKGSEDSPPKHAGEGTWGSLFEIVSLVSHRPGRVRQIIAWGAFANVGSLLTSALDMRSPVAARCVEGKR

SEQ ID NO: 62830 - protein, 487 aa, Homo sapiens
  Payload ID: 12545
  Gene Symbol: PTDSS2
  Gene Name: phosphatidylserine synthase 2
  Uniprot ID: Q9BVG9
  ENSP ID: ENSP00000308258
MRRGERRDAGGPRPESPVPAGRASLEEPPDGPSAGQATGPGEGRRSTESEVYDDGTNTFFWRAHTLTVLFILTCTLGYVTLLEETPQDTAYNTKRGIVASILVFLCFGVTQAKDGPFSRPHPAYWRFWLCVSVVYELFLIFILFQTVQDGRQFLKYVDPKLGVPLPERDYGGNCLIYDPDNETDPFHNIWDKLDGFVPAHFLGWYLKTLMIRDWWMCMIISVMFEFLEYSLEHQLPNFSECWWDHWIMDVLVCNGLGIYCGMKTLEWLSLKTYKWQGLWNIPTYKGKMKRIAFQFTPYSWVRFEWKPASSLRRWLAVCGIILVFLLAELNTFYLKFVLWMPPEHYLVLLRLVFFVNVGGVAMREIYDFMDDPKPHKKLGPQAWLVAAITATELLIVVKYDPHTLTLSLPFYISQCWTLGSVLALTWTVWRFFLRDITLRYKETRWQKWQNKDDQGSTVGNGDQHPLGLDEDLLGPGVAEGEGAPTPN

SEQ ID NO: 62831 - protein, 60 aa, Homo sapiens
  Payload ID: 12545
  Gene Symbol: PTDSS2
  Gene Name: phosphatidylserine synthase 2
  ENSP ID: ENSP00000432100
MRRGERRDAGGPRPESPVPAGRASLEEPPDGPSAGQATGPGEGRRSTESEVYDDGTNTFF

SEQ ID NO: 62832 - protein, 81 aa, Homo sapiens
  Payload ID: 12545
  Gene Symbol: PTDSS2
  Gene Name: phosphatidylserine synthase 2
  ENSP ID: ENSP00000435168
MRRGERRDAGGPRPESPVPAGRASLEEPPDGPSAGQATGPGEGRRSTESEVYDDGTNTFFCCDPGLALCRCSSVRRIKPST

SEQ ID NO: 62833 - protein, 393 aa, Homo sapiens
  Payload ID: 12545
  Gene Symbol: PTDSS2
  Gene Name: phosphatidylserine synthase 2
  ENSP ID: ENSP00000488064
  MOD_RES (1)..(1): Any amino acid
XGIVASILVFLCFGVTQAKDGPFSRPHPAYWRFWLCVSVVYELFLIFILFQTVQDGRQFLKYVDPKLGVPLPERDYGGNCLIYDPDNETDPFHNIWDKLDGFVPAHFLGWYLKTLMIRDWWMCMIISVMFEFLEYSLEHQLPNFSECWWDHWIMDVLVCNGLGIYCGMKTLEWLSLKTYKWQGLWNIPTYKGKMKRIAFQFTPYSWVRFEWKPASSLRRWLAVCGIILVFLLAELNTFYLKFVLWMPPEHYLVLLRLVFFVNVGGVAMREIYDFMDDPKPHKKLGPQAWLVAAITATELLIVVKYDPHTLTLSLPFYISQCWTLGSVLALTWTVWRFFLRDITLRYKETRWQKWQNKDDQGSTVGNGDQHPLGLDEDLLGPGVAEGEGAPTPN

SEQ ID NO: 62834 - protein, 779 aa, Homo sapiens
  Payload ID: 12546
  Gene Symbol: PDE10A
  Gene Name: phosphodiesterase 10A
  Uniprot ID: Q9Y233
  ENSP ID: ENSP00000355847
MRIEERKSQHLTGLTDEKVKAYLSLHPQVLDEFVSESVSAETVEKWLKRKNNKSEDESAPKEVSRYQDTNMQGVVYELNSYIEQRLDTGGDNQLLLYELSSIIKIATKADGFALYFLGECNNSLCIFTPPGIKEGKPRLIPAGPITQGTTVSAYVAKSRKTLLVEDILGDERFPRGTGLESGTRIQSVLCLPIVTAIGDLIGILELYRHWGKEAFCLSHQEVATANLAWASVAIHQVQVCRGLAKQTELNDFLLDVSKTYFDNIVAIDSLLEHIMIYAKNLVNADRCALFQVDHKNKELYSDLFDIGEEKEGKPVFKKTKEIRFSIEKGIAGQVARTGEVLNIPDAYADPRFNREVDLYTGYTTRNILCMPIVSRGSVIGVVQMVNKISGSAFSKTDENNFKMFAVFCALALHCANMYHRIRHSECIYRVTMEKLSYHSICTSEEWQGLMQFTLPVRLCKEIELFHFDIGPFENMWPGIFVYMVHRSCGTSCFELEKLCRFIMSVKKNYRRVPYHNWKHAVTVAHCMYAILQNNHTLFTDLERKGLLIACLCHDLDHRGFSNSYLQKFDHPLAALYSTSTMEQHHFSQTVSILQLEGHNIFSTLSSSEYEQVLEIIRKAIIATDLALYFGNRKQLEEMYQTGSLNLNNQSHRDRVIGLMMTACDLCSVTKLWPVTKLTANDIYAEFWAEGDEMKKLGIQPIPMMDRDKKDEVPQGQLGFYNAVAIPCYTTLTQILPPTEPLLKACRDNLSQWEKVIRGEETATWISSPSVAQKAAASED

SEQ ID NO: 62835 - protein, 789 aa, Homo sapiens
  Payload ID: 12546
  Gene Symbol: PDE10A
  Gene Name: phosphodiesterase 10A
  Uniprot ID: Q9Y233
  ENSP ID: ENSP00000438284
MEDGPSNNASCFRRLTECFLSPSLTDEKVKAYLSLHPQVLDEFVSESVSAETVEKWLKRKNNKSEDESAPKEVSRYQDTNMQGVVYELNSYIEQRLDTGGDNQLLLYELSSIIKIATKADGFALYFLGECNNSLCIFTPPGIKEGKPRLIPAGPITQGTTVSAYVAKSRKTLLVEDILGDERFPRGTGLESGTRIQSVLCLPIVTAIGDLIGILELYRHWGKEAFCLSHQEVATANLAWASVAIHQVQVCRGLAKQTELNDFLLDVSKTYFDNIVAIDSLLEHIMIYAKNLVNADRCALFQVDHKNKELYSDLFDIGEEKEGKPVFKKTKEIRFSIEKGIAGQVARTGEVLNIPDAYADPRFNREVDLYTGYTTRNILCMPIVSRGSVIGVVQMVNKISGSAFSKTDENNFKMFAVFCALALHCANMYHRIRHSECIYRVTMEKLSYHSICTSEEWQGLMQFTLPVRLCKEIELFHFDIGPFENMWPGIFVYMVHRSCGTSCFELEKLCRFIMSVKKNYRRVPYHNWKHAVTVAHCMYAILQNNHTLFTDLERKGLLIACLCHDLDHRGFSNSYLQKFDHPLAALYSTSTMEQHHFSQTVSILQLEGHNIFSTLSSSEYEQVLEIIRKAIIATDLALYFGNRKQLEEMYQTGSLNLNNQSHRDRVIGLMMTACDLCSVTKLWPVTKLTANDIYAEFWAEGDEMKKLGIQPIPMMDRDKKDEVPQGQLGFYNAVAIPCYTTLTQILPPTEPLLKACRDNLSQWEKVIRGEETATWISSPSVAQKAAASED

SEQ ID NO: 62836 - protein, 183 aa, Homo sapiens
  Payload ID: 12546
  Gene Symbol: PDE10A
  Gene Name: phosphodiesterase 10A
  ENSP ID: ENSP00000478556
MEGEQGEDGKTAAGPGRSTSGCRRSRPWAPARLRRQSGRVRLPAAQSAAPEPPSTACAPEPLSAPRSGAAFPRRLLWADALPGLLFRFPAPNCGSFPGFGRPGSPGHPRLSPSLRPKLLRAHRPLRHLWGAAPGLASVFAPGSAAPCNPASRARASPRRPRGQRPLVHPCGLRLASRCLRLIG

SEQ ID NO: 62837 - protein, 933 aa, Homo sapiens
  Payload ID: 12547
  Gene Symbol: PDE11A
  Gene Name: phosphodiesterase 11A
  Uniprot ID: Q9HCR9
  ENSP ID: ENSP00000286063
MAASRLDFGEVETFLDRHPELFEDYLMRKGKQEMVEKWLQRHSQGQGALGPRPSLAGTSSLAHSTCRGGSSVGGGTGPNGSAHSQPLPGGGDCGGVPLSPSWAGGSRGDGNLQRRASQKELRKSFARSKAIHVNRTYDEQVTSRAQEPLSSVRRRALLRKASSLPPTTAHILSALLESRVNLPRYPPTAIDYKCHLKKHNERQFFLELVKDISNDLDLTSLSYKILIFVCLMVDADRCSLFLVEGAAAGKKTLVSKFFDVHAGTPLLPCSSTENSNEVQVPWGKGIIGYVGEHGETVNIPDAYQDRRFNDEIDKLTGYKTKSLLCMPIRSSDGEIIGVAQAINKIPEGAPFTEDDEKVMQMYLPFCGIAISNAQLFAASRKEYERSRALLEVVNDLFEEQTDLEKIVKKIMHRAQTLLKCERCSVLLLEDIESPVVKFTKSFELMSPKCSADAENSFKESMEKSSYSDWLINNSIAELVASTGLPVNISDAYQDPRFDAEADQISGFHIRSVLCVPIWNSNHQIIGVAQVLNRLDGKPFDDADQRLFEAFVIFCGLGINNTIMYDQVKKSWAKQSVALDVLSYHATCSKAEVDKFKAANIPLVSELAIDDIHFDDFSLDVDAMITAALRMFMELGMVQKFKIDYETLCRWLLTVRKNYRMVLYHNWRHAFNVCQLMFAMLTTAGFQDILTEVEILAVIVGCLCHDLDHRGTNNAFQAKSGSALAQLYGTSATLEHHHFNHAVMILQSEGHNIFANLSSKEYSDLMQLLKQSILATDLTLYFERRTEFFELVSKGEYDWNIKNHRDIFRSMLMTACDLGAVTKPWEISRQVAELVTSEFFEQGDRERLELKLTPSAIFDRNRKDELPRLQLEWIDSICMPLYQALVKVNVKLKPMLDSVATNRSKWEELHQKRLLASTASSSPASVMVAKEDRN

SEQ ID NO: 62838 - protein, 683 aa, Homo sapiens
  Payload ID: 12547
  Gene Symbol: PDE11A
  Gene Name: phosphodiesterase 11A
  Uniprot ID: Q9HCR9
  ENSP ID: ENSP00000351232
MLKQARRPLFRNVLSATQWKKVKITRLVQISGASLAEKQEKHQDFLIQRQTKTKDRRFNDEIDKLTGYKTKSLLCMPIRSSDGEIIGVAQAINKIPEGAPFTEDDEKVMQMYLPFCGIAISNAQLFAASRKEYERSRALLEVVNDLFEEQTDLEKIVKKIMHRAQTLLKCERCSVLLLEDIESPVVKFTKSFELMSPKCSADAENSFKESMEKSSYSDWLINNSIAELVASTGLPVNISDAYQDPRFDAEADQISGFHIRSVLCVPIWNSNHQIIGVAQVLNRLDGKPFDDADQRLFEAFVIFCGLGINNTIMYDQVKKSWAKQSVALDVLSYHATCSKAEVDKFKAANIPLVSELAIDDIHFDDFSLDVDAMITAALRMFMELGMVQKFKIDYETLCRWLLTVRKNYRMVLYHNWRHAFNVCQLMFAMLTTAGFQDILTEVEILAVIVGCLCHDLDHRGTNNAFQAKSGSALAQLYGTSATLEHHHFNHAVMILQSEGHNIFANLSSKEYSDLMQLLKQSILATDLTLYFERRTEFFELVSKGEYDWNIKNHRDIFRSMLMTACDLGAVTKPWEISRQVAELVTSEFFEQGDRERLELKLTPSAIFDRNRKDELPRLQLEWIDSICMPLYQALVKVNVKLKPMLDSVATNRSKWEELHQKRLLASTASSSPASVMVAKEDRN

SEQ ID NO: 62839 - protein, 489 aa, Homo sapiens
  Payload ID: 12547
  Gene Symbol: PDE11A
  Gene Name: phosphodiesterase 11A
  Uniprot ID: Q9HCR9
  ENSP ID: ENSP00000374333
MSPKCSADAENSFKESMEKSSYSDWLINNSIAELVASTGLPVNISDAYQDPRFDAEADQISGFHIRSVLCVPIWNSNHQIIGVAQVLNRLDGKPFDDADQRLFEAFVIFCGLGINNTIMYDQVKKSWAKQSVALDVLSYHATCSKAEVDKFKAANIPLVSELAIDDIHFDDFSLDVDAMITAALRMFMELGMVQKFKIDYETLCRWLLTVRKNYRMVLYHNWRHAFNVCQLMFAMLTTAGFQDILTEVEILAVIVGCLCHDLDHRGTNNAFQAKSGSALAQLYGTSATLEHHHFNHAVMILQSEGHNIFANLSSKEYSDLMQLLKQSILATDLTLYFERRTEFFELVSKGEYDWNIKNHRDIFRSMLMTACDLGAVTKPWEISRQVAELVTSEFFEQGDRERLELKLTPSAIFDRNRKDELPRLQLEWIDSICMPLYQALVKVNVKLKPMLDSVATNRSKWEELHQKRLLASTASSSPASVMVAKEDRN

SEQ ID NO: 62840 - protein, 575 aa, Homo sapiens
  Payload ID: 12547
  Gene Symbol: PDE11A
  Gene Name: phosphodiesterase 11A
  Uniprot ID: Q9HCR9
  ENSP ID: ENSP00000386539
MQMYLPFCGIAISNAQLFAASRKEYERSRALLEVVNDLFEEQTDLEKIVKKIMHRAQTLLKCERCSVLLLEDIESPVVKFTKSFELMSPKCSADAENSFKESMEKSSYSDWLINNSIAELVASTGLPVNISDAYQDPRFDAEADQISGFHIRSVLCVPIWNSNHQIIGVAQVLNRLDGKPFDDADQRLFEAFVIFCGLGINNTIMYDQVKKSWAKQSVALDVLSYHATCSKAEVDKFKAANIPLVSELAIDDIHFDDFSLDVDAMITAALRMFMELGMVQKFKIDYETLCRWLLTVRKNYRMVLYHNWRHAFNVCQLMFAMLTTAGFQDILTEVEILAVIVGCLCHDLDHRGTNNAFQAKSGSALAQLYGTSATLEHHHFNHAVMILQSEGHNIFANLSSKEYSDLMQLLKQSILATDLTLYFERRTEFFELVSKGEYDWNIKNHRDIFRSMLMTACDLGAVTKPWEISRQVAELVTSEFFEQGDRERLELKLTPSAIFDRNRKDELPRLQLEWIDSICMPLYQALVKVNVKLKPMLDSVATNRSKWEELHQKRLLASTASSSPASVMVAKEDRN

SEQ ID NO: 62841 - protein, 36 aa, Homo sapiens
  Payload ID: 12547
  Gene Symbol: PDE11A
  Gene Name: phosphodiesterase 11A
  ENSP ID: ENSP00000389777
MQMYLPFCGIAISNAQLFAASRKEYERSRSYVRDVY

SEQ ID NO: 62842 - protein, 136 aa, Homo sapiens
  Payload ID: 12547
  Gene Symbol: PDE11A
  Gene Name: phosphodiesterase 11A
  ENSP ID: ENSP00000406922
  MOD_RES (1)..(1): Any amino acid
XVLPLVEERKISMLMTACDLGAVTKPWEISRQVAELVTSEFFEQGDRERLELKLTPSAIFDRNRKDELPRLQLEWIDSICMPLYQALVKVNVKLKPMLDSVATNRSKWEELHQKRLLASTASSSPASVMVAKEDRN

SEQ ID NO: 62843 - protein, 437 aa, Homo sapiens
  Payload ID: 12547
  Gene Symbol: PDE11A
  Gene Name: phosphodiesterase 11A
  ENSP ID: ENSP00000416884
  MOD_RES (1)..(1): Any amino acid
XLPFCGIAISNAQLFAASRKEYERSRALLEVVNDLFEEQTDLEKIVKKIMHRAQTLLKCERCSVLLLEDIESPVVKFTKSFELMSPKCSADAENSFKESMEKSSYSDWLINNSIAELVASTGLPVNISDAYQDPRFDAEADQISGFHIRSVLCVPIWNSNHQIIGVAQVLNRLDGKPFDDADQRLFEVLSYHATCSKAEVDKFKAANIPLVSELAIDDIHFDDFSLDVDAMITAALRMFMELGMVQKFKIDYETLCRWLLTVRKNYRMVLYHNWRHAFNVCQLMFAMLTTAGFQDILTEVEILAVIVGCLCHDLDHRGTNNAFQAKSGSALAQLYGTSATLEHHHFNHAVMILQSEGHNIFANLSSKEYSDLMQLLKQSILATDLTLYFERRTEFFELVSKGEYDWNIKNHRDIFRSMLMTACDLGAVTKPWEISRQ

SEQ ID NO: 62844 - protein, 609 aa, Homo sapiens
  Payload ID: 12548
  Gene Symbol: PDE12
  Gene Name: phosphodiesterase 12
  Uniprot ID: Q6L8Q7
  ENSP ID: ENSP00000309142
MWRLPGARAALRVIRTAVEKLSRAEAGSQTAAGAMERAVVRCVPSEPKLSLSFALADGSHKNMQRDQSEPLGRVLSRIATNALKGHAKAAAAKKSRKSRPNASGGAACSGPGPEPAVFCEPVVKLYYREEAVAEDVLNVDAWQDGAVLQIGDVKYKVERNPPAFTELQLPRYIMAGFPVCPKLSLEFGDPASSLFRWYKEAKPGAAEPEVGVPSSLSPSSPSSSWTETDVEERVYTPSNADIGLRLKLHCTPGDGQRFGHSRELESVCVVEAGPGTCTFDHRHLYTKKVTEDALIRTVSYNILADTYAQTEFSRTVLYPYCAPYALELDYRQNLIQKELTGYNADVICLQEVDRAVFSDSLVPALEAFGLEGVFRIKQHEGLATFYRKSKFSLLSQHDISFYEALESDPLHKELLEKLVLYPSAQEKVLQRSSVLQVSVLQSTKDSSKRICVANTHLYWHPKGGYIRLIQMAVALAHIRHVSCDLYPGIPVIFCGDFNSTPSTGMYHFVINGSIPEDHEDWASNGEEERCNMSLTHFFKLKSACGEPAYTNYVGGFHGCLDYIFIDLNALEVEQVIPLPSHEEVTTHQALPSVSHPSDHIALVCDLKWK

SEQ ID NO: 62845 - protein, 472 aa, Homo sapiens
  Payload ID: 12548
  Gene Symbol: PDE12
  Gene Name: phosphodiesterase 12
  ENSP ID: ENSP00000420626
MWRLPGARAALRVIRTAVEKLSRAEAGSQTAAGAMERAVVRCVPSEPKLSLSFALADGSHKNMQRDQSEPLGRVLSRIATNALKGHAKAAAAKKSRKSRPNASGGAACSGPGPEPAVFCEPVVKLYYREEAVAEDVLNVDAWQDGAVLQIGDVKYKVERNPPAFTELQLPRYIMAGFPVCPKLSLEFGDPASSLFRWYKEAKPGAAEPEVGVPSSLSPSSPSSSWTETDVEERVYTPSNADIGLRLKLHCTPGDGQRFGHSRELESVCVVEAGPGTCTFDHRHLYTKKVTEDALIRTVSYNILADTYAQTEFSRTVLYPYCAPYALELDYRQNLIQKELTGYNADVICLQEVDRAVFSDSLVPALEAFGLEGVFRIKQHEGLATFYRKSKFSLLSQHDISFYEALESDPLHKELLEKLVLYPSAQEKVLQRSSVLQVSVLQSTKDSSKRICVANTHLYWHPKGRFYLVSQVT

SEQ ID NO: 62846 - protein, 519 aa, Homo sapiens
  Payload ID: 12549
  Gene Symbol: PDE1A
  Gene Name: phosphodiesterase 1A, calmodulin-dependent
  Uniprot ID: P54750
  ENSP ID: ENSP00000309269
MDDHVTIRKKHLQRPIFRLRCLVKQLERGDVNVVDLKKNIEYAASVLEAVYIDETRRLLDTEDELSDIQTDSVPSEVRDWLASTFTRKMGMTKKKPEEKPKFRSIVHAVQAGIFVERMYRKTYHMVGLAYPAAVIVTLKDVDKWSFDVFALNEASGEHSLKFMIYELFTRYDLINRFKIPVSCLITFAEALEVGYSKYKNPYHNLIHAADVTQTVHYIMLHTGIMHWLTELEILAMVFAAAIHDYEHTGTTNNFHIQTRSDVAILYNDRSVLENHHVSAAYRLMQEEEMNILINLSKDDWRDLRNLVIEMVLSTDMSGHFQQIKNIRNSLQQPEGIDRAKTMSLILHAADISHPAKSWKLHYRWTMALMEEFFLQGDKEAELGLPFSPLCDRKSTMVAQSQIGFIDFIVEPTFSLLTDSTEKIVIPLIEEASKAETSSYVASSSTTIVGLHIADALRRSNTKGSMSDGSYSPDYSLAAVDLKSFKNNLVDIIQQNKERWKELAAQEARTSSQKCEFIHQ

SEQ ID NO: 62847 - protein, 501 aa, Homo sapiens
  Payload ID: 12549
  Gene Symbol: PDE1A
  Gene Name: phosphodiesterase 1A, calmodulin-dependent
  Uniprot ID: P54750
  ENSP ID: ENSP00000350858
MGKKINKLFCFNFLVQCFRGKSKPSKCQIRKKVKNHIERLLDTEDELSDIQTDSVPSEVRDWLASTFTRKMGMTKKKPEEKPKFRSIVHAVQAGIFVERMYRKTYHMVGLAYPAAVIVTLKDVDKWSFDVFALNEASGEHSLKFMIYELFTRYDLINRFKIPVSCLITFAEALEVGYSKYKNPYHNLIHAADVTQTVHYIMLHTGIMHWLTELEILAMVFAAAIHDYEHTGTTNNFHIQTRSDVAILYNDRSVLENHHVSAAYRLMQEEEMNILINLSKDDWRDLRNLVIEMVLSTDMSGHFQQIKNIRNSLQQPEGIDRAKTMSLILHAADISHPAKSWKLHYRWTMALMEEFFLQGDKEAELGLPFSPLCDRKSTMVAQSQIGFIDFIVEPTFSLLTDSTEKIVIPLIEEASKAETSSYVASSSTTIVGLHIADALRRSNTKGSMSDGSYSPDYSLAAVDLKSFKNNLVDIIQQNKERWKELAAQEARTSSQKCEFIHQ

SEQ ID NO: 62848 - protein, 529 aa, Homo sapiens
  Payload ID: 12549
  Gene Symbol: PDE1A
  Gene Name: phosphodiesterase 1A, calmodulin-dependent
  Uniprot ID: P54750
  ENSP ID: ENSP00000386767
MDDHVTIRKKHLQRPIFRLRCLVKQLERGDVNVVDLKKNIEYAASVLEAVYIDETRRLLDTEDELSDIQTDSVPSEVRDWLASTFTRKMGMTKKKPEEKPKFRSIVHAVQAGIFVERMYRKTYHMVGLAYPAAVIVTLKDVDKWSFDVFALNEASGEHSLKFMIYELFTRYDLINRFKIPVSCLITFAEALEVGYSKYKNPYHNLIHAADVTQTVHYIMLHTGIMHWLTELEILAMVFAAAIHDYEHTGTTNNFHIQTRSDVAILYNDRSVLENHHVSAAYRLMQEEEMNILINLSKDDWRDLRNLVIEMVLSTDMSGHFQQIKNIRNSLQQPEGIDRAKTMSLILHAADISHPAKSWKLHYRWTMALMEEFFLQGDKEAELGLPFSPLCDRKSTMVAQSQIGFIDFIVEPTFSLLTDSTEKIVIPLIEEASKAETSSYVASSSTTIVGLHIADALRRSNTKGSMSDGSYSPDYSLAAVDLKSFKNNLVDIIQQNKERWKELAAQGESDLHKNSEDLVNAEEKHDETHS

SEQ ID NO: 62849 - protein, 535 aa, Homo sapiens
  Payload ID: 12549
  Gene Symbol: PDE1A
  Gene Name: phosphodiesterase 1A, calmodulin-dependent
  Uniprot ID: P54750
  ENSP ID: ENSP00000387037
MGSSATEIEELENTTFKYLTGEQTEKMWQRLKGILRCLVKQLERGDVNVVDLKKNIEYAASVLEAVYIDETRRLLDTEDELSDIQTDSVPSEVRDWLASTFTRKMGMTKKKPEEKPKFRSIVHAVQAGIFVERMYRKTYHMVGLAYPAAVIVTLKDVDKWSFDVFALNEASGEHSLKFMIYELFTRYDLINRFKIPVSCLITFAEALEVGYSKYKNPYHNLIHAADVTQTVHYIMLHTGIMHWLTELEILAMVFAAAIHDYEHTGTTNNFHIQTRSDVAILYNDRSVLENHHVSAAYRLMQEEEMNILINLSKDDWRDLRNLVIEMVLSTDMSGHFQQIKNIRNSLQQPEGIDRAKTMSLILHAADISHPAKSWKLHYRWTMALMEEFFLQGDKEAELGLPFSPLCDRKSTMVAQSQIGFIDFIVEPTFSLLTDSTEKIVIPLIEEASKAETSSYVASSSTTIVGLHIADALRRSNTKGSMSDGSYSPDYSLAAVDLKSFKNNLVDIIQQNKERWKELAAQEARTSSQKCEFIHQ

SEQ ID NO: 62850 - protein, 545 aa, Homo sapiens
  Payload ID: 12549
  Gene Symbol: PDE1A
  Gene Name: phosphodiesterase 1A, calmodulin-dependent
  Uniprot ID: P54750
  ENSP ID: ENSP00000410309
MGSSATEIEELENTTFKYLTGEQTEKMWQRLKGILRCLVKQLERGDVNVVDLKKNIEYAASVLEAVYIDETRRLLDTEDELSDIQTDSVPSEVRDWLASTFTRKMGMTKKKPEEKPKFRSIVHAVQAGIFVERMYRKTYHMVGLAYPAAVIVTLKDVDKWSFDVFALNEASGEHSLKFMIYELFTRYDLINRFKIPVSCLITFAEALEVGYSKYKNPYHNLIHAADVTQTVHYIMLHTGIMHWLTELEILAMVFAAAIHDYEHTGTTNNFHIQTRSDVAILYNDRSVLENHHVSAAYRLMQEEEMNILINLSKDDWRDLRNLVIEMVLSTDMSGHFQQIKNIRNSLQQPEGIDRAKTMSLILHAADISHPAKSWKLHYRWTMALMEEFFLQGDKEAELGLPFSPLCDRKSTMVAQSQIGFIDFIVEPTFSLLTDSTEKIVIPLIEEASKAETSSYVASSSTTIVGLHIADALRRSNTKGSMSDGSYSPDYSLAAVDLKSFKNNLVDIIQQNKERWKELAAQGESDLHKNSEDLVNAEEKHDETHS

SEQ ID NO: 62851 - protein, 536 aa, Homo sapiens
  Payload ID: 12550
  Gene Symbol: PDE1B
  Gene Name: phosphodiesterase 1B, calmodulin-dependent
  Uniprot ID: Q01064
  ENSP ID: ENSP00000243052
MELSPRSPPEMLEESDCPSPLELKSAPSKKMWIKLRSLLRYMVKQLENGEINIEELKKNLEYTASLLEAVYIDETRQILDTEDELQELRSDAVPSEVRDWLASTFTQQARAKGRRAEEKPKFRSIVHAVQAGIFVERMFRRTYTSVGPTYSTAVLNCLKNLDLWCFDVFSLNQAADDHALRTIVFELLTRHNLISRFKIPTVFLMSFLDALETGYGKYKNPYHNQIHAADVTQTVHCFLLRTGMVHCLSEIELLAIIFAAAIHDYEHTGTTNSFHIQTKSECAIVYNDRSVLENHHISSVFRLMQDDEMNIFINLTKDEFVELRALVIEMVLATDMSCHFQQVKTMKTALQQLERIDKPKALSLLLHAADISHPTKQWLVHSRWTKALMEEFFRQGDKEAELGLPFSPLCDRTSTLVAQSQIGFIDFIVEPTFSVLTDVAEKSVQPLADEDSKSKNQPSFQWRQPSLDVEVGDPNPDVVSFRSTWVKRIQENKQKWKERAASGITNQMSIDELSPCEEEAPPSPAEDEHNQNGNLD

SEQ ID NO: 62852 - protein, 495 aa, Homo sapiens
  Payload ID: 12550
  Gene Symbol: PDE1B
  Gene Name: phosphodiesterase 1B, calmodulin-dependent
  ENSP ID: ENSP00000442559
MVKQLENGEINIEELKKNLEYTASLLEAVYIDETRQILDTEDELQELRSDAVPSEVRDWLASTFTQQARAKGRRAEEKPKFRSIVHAVQAGIFVERMFRRTYTSVGPTYSTAVLNCLKNLDLWCFDVFSLNQAADDHALRTIVFELLTRHNLISRFKIPTVFLMSFLDALETGYGKYKNPYHNQIHAADVTQTVHCFLLRTGMVHCLSEIELLAIIFAAAIHDYEHTGTTNSFHIQTKSECAIVYNDRSVLENHHISSVFRLMQDDEMNIFINLTKDEFVELRALVIEMVLATDMSCHFQQVKTMKTALQQLERIDKPKALSLLLHAADISHPTKQWLVHSRWTKALMEEFFRQGDKEAELGLPFSPLCDRTSTLVAQSQIGFIDFIVEPTFSVLTDVAEKSVQPLADEDSKSKNQPSFQWRQPSLDVEVGDPNPDVVSFRSTWVKRIQENKQKWKERAASGITNQMSIDELSPCEEEAPPSPAEDEHNQNGNLD

SEQ ID NO: 62853 - protein, 191 aa, Homo sapiens
  Payload ID: 12550
  Gene Symbol: PDE1B
  Gene Name: phosphodiesterase 1B, calmodulin-dependent
  ENSP ID: ENSP00000447354
MELSPRSPPEMLEESDCPSPLELKSAPSKKMWIKLRSLLRYMVKQLENGEINIEELKKNLEYTASLLEAVYIDETRVSRLWKHLLSFLCDSPSGVSGKSWTRRTSCRSCGQMPCLRRCGTGWPPPSPSRPGPKAAEQRRSPSSEALCTLCRLGSSWNGCSGEHTPLWAPLTLLRFSTVSRTWISGALMSFP

SEQ ID NO: 62854 - protein, 516 aa, Homo sapiens
  Payload ID: 12550
  Gene Symbol: PDE1B
  Gene Name: phosphodiesterase 1B, calmodulin-dependent
  Uniprot ID: Q01064
  ENSP ID: ENSP00000448519
MANPVPVQRSHLQGPILRLRYMVKQLENGEINIEELKKNLEYTASLLEAVYIDETRQILDTEDELQELRSDAVPSEVRDWLASTFTQQARAKGRRAEEKPKFRSIVHAVQAGIFVERMFRRTYTSVGPTYSTAVLNCLKNLDLWCFDVFSLNQAADDHALRTIVFELLTRHNLISRFKIPTVFLMSFLDALETGYGKYKNPYHNQIHAADVTQTVHCFLLRTGMVHCLSEIELLAIIFAAAIHDYEHTGTTNSFHIQTKSECAIVYNDRSVLENHHISSVFRLMQDDEMNIFINLTKDEFVELRALVIEMVLATDMSCHFQQVKTMKTALQQLERIDKPKALSLLLHAADISHPTKQWLVHSRWTKALMEEFFRQGDKEAELGLPFSPLCDRTSTLVAQSQIGFIDFIVEPTFSVLTDVAEKSVQPLADEDSKSKNQPSFQWRQPSLDVEVGDPNPDVVSFRSTWVKRIQENKQKWKERAASGITNQMSIDELSPCEEEAPPSPAEDEHNQNGNLD

SEQ ID NO: 62855 - protein, 50 aa, Homo sapiens
  Payload ID: 12550
  Gene Symbol: PDE1B
  Gene Name: phosphodiesterase 1B, calmodulin-dependent
  ENSP ID: ENSP00000478185
MELSPRSPPEMLEESDCPSPLELKSAPSKKMWIKLRSLPHGVIFYGSYQF

SEQ ID NO: 62856 - protein, 709 aa, Homo sapiens
  Payload ID: 12551
  Gene Symbol: PDE1C
  Gene Name: phosphodiesterase 1C, calmodulin-dependent 70kDa
  Uniprot ID: Q14123
  ENSP ID: ENSP00000318105
MESPTKEIEEFESNSLKYLQPEQIEKIWLRLRGLRKYKKTSQRLRSLVKQLERGEASVVDLKKNLEYAATVLESVYIDETRRLLDTEDELSDIQSDAVPSEVRDWLASTFTRQMGMMLRRSDEKPRFKSIVHAVQAGIFVERMYRRTSNMVGLSYPPAVIEALKDVDKWSFDVFSLNEASGDHALKFIFYELLTRYDLISRFKIPISALVSFVEALEVGYSKHKNPYHNLMHAADVTQTVHYLLYKTGVANWLTELEIFAIIFSAAIHDYEHTGTTNNFHIQTRSDPAILYNDRSVLENHHLSAAYRLLQDDEEMNILINLSKDDWREFRTLVIEMVMATDMSCHFQQIKAMKTALQQPEAIEKPKALSLMLHTADISHPAKAWDLHHRWTMSLLEEFFRQGDREAELGLPFSPLCDRKSTMVAQSQVGFIDFIVEPTFTVLTDMTEKIVSPLIDETSQTGGTGQRRSSLNSISSSDAKRSGVKTSGSEGSAPINNSVISVDYKSFKATWTEVVHINRERWRAKVPKEEKAKKEAEEKARLAAEEQQKEMEAKSQAEEGASGKAEKKTSGETKNQVNGTRANKSDNPRGKNSKAEKSSGEQQQNGDFKDGKNKTDKKDHSNIGNDSKKTDGTKQRSHGSPAPSTSSTCRLTLPVIKPPLRHFKRPAYASSSYAPSVSKKTDEHPARYKMLDQRIKMKKIQNISHNWNRK

SEQ ID NO: 62857 - protein, 634 aa, Homo sapiens
  Payload ID: 12551
  Gene Symbol: PDE1C
  Gene Name: phosphodiesterase 1C, calmodulin-dependent 70kDa
  Uniprot ID: Q14123
  ENSP ID: ENSP00000379485
MESPTKEIEEFESNSLKYLQPEQIEKIWLRLRGLRKYKKTSQRLRSLVKQLERGEASVVDLKKNLEYAATVLESVYIDETRRLLDTEDELSDIQSDAVPSEVRDWLASTFTRQMGMMLRRSDEKPRFKSIVHAVQAGIFVERMYRRTSNMVGLSYPPAVIEALKDVDKWSFDVFSLNEASGDHALKFIFYELLTRYDLISRFKIPISALVSFVEALEVGYSKHKNPYHNLMHAADVTQTVHYLLYKTGVANWLTELEIFAIIFSAAIHDYEHTGTTNNFHIQTRSDPAILYNDRSVLENHHLSAAYRLLQDDEEMNILINLSKDDWREFRTLVIEMVMATDMSCHFQQIKAMKTALQQPEAIEKPKALSLMLHTADISHPAKAWDLHHRWTMSLLEEFFRQGDREAELGLPFSPLCDRKSTMVAQSQVGFIDFIVEPTFTVLTDMTEKIVSPLIDETSQTGGTGQRRSSLNSISSSDAKRSGVKTSGSEGSAPINNSVISVDYKSFKATWTEVVHINRERWRAKVPKEEKAKKEAEEKARLAAEEQQKEMEAKSQAEEGASGKAEKKTSGETKNQVNGTRANKSDNPRGKNSKAEKSSGEQQQNGDFKDGKNKTDKKDHSNIGNDSKKTDDSQE

SEQ ID NO: 62858 - protein, 634 aa, Homo sapiens; identical to SEQ ID NO: 62857
  Payload ID: 12551
  Gene Symbol: PDE1C
  Gene Name: phosphodiesterase 1C, calmodulin-dependent 70kDa
  Uniprot ID: Q14123
  ENSP ID: ENSP00000379487

SEQ ID NO: 62859 - protein, 46 aa, Homo sapiens
  Payload ID: 12551
  Gene Symbol: PDE1C
  Gene Name: phosphodiesterase 1C, calmodulin-dependent 70kDa
  ENSP ID: ENSP00000379492
MESPTKEIEEFESNSLKYLQPEQIEKIWLRLRGLRKYKKTSQRLRS

SEQ ID NO: 62860 - protein, 709 aa, Homo sapiens; identical to SEQ ID NO: 62856
  Payload ID: 12551
  Gene Symbol: PDE1C
  Gene Name: phosphodiesterase 1C, calmodulin-dependent 70kDa
  Uniprot ID: Q14123
  ENSP ID: ENSP00000379494

SEQ ID NO: 62861 - protein, 769 aa, Homo sapiens
  Payload ID: 12551
  Gene Symbol: PDE1C
  Gene Name: phosphodiesterase 1C, calmodulin-dependent 70kDa
  ENSP ID: ENSP00000379496
MTDAGNRKEGFKKCRSATFSIDGYSFTIVANEAGDKNARPLARFSRSKSQNCLWNSLIDGLTGNVKEKPRPTIVHDPRPPEEILADELPQLDSPEVLVKTSFRLRSLVKQLERGEASVVDLKKNLEYAATVLESVYIDETRRLLDTEDELSDIQSDAVPSEVRDWLASTFTRQMGMMLRRSDEKPRFKSIVHAVQAGIFVERMYRRTSNMVGLSYPPAVIEALKDVDKWSFDVFSLNEASGDHALKFIFYELLTRYDLISRFKIPISALVSFVEALEVGYSKHKNPYHNLMHAADVTQTVHYLLYKTGVANWLTELEIFAIIFSAAIHDYEHTGTTNNFHIQTRSDPAILYNDRSVLENHHLSAAYRLLQDDEEMNILINLSKDDWREFRTLVIEMVMATDMSCHFQQIKAMKTALQQPEAIEKPKALSLMLHTADISHPAKAWDLHHRWTMSLLEEFFRQGDREAELGLPFSPLCDRKSTMVAQSQVGFIDFIVEPTFTVLTDMTEKIVSPLIDETSQTGGTGQRRSSLNSISSSDAKRSGVKTSGSEGSAPINNSVISVDYKSFKATWTEVVHINRERWRAKVPKEEKAKKEAEEKARLAAEEQQKEMEAKSQAEEGASGKAEKKTSGETKNQVNGTRANKSDNPRGKNSKAEKSSGEQQQNGDFKDGKNKTDKKDHSNIGNDSKKTDGTKQRSHGSPAPSTSSTCRLTLPVIKPPLRHFKRPAYASSSYAPSVSKKTDEHPARYKMLDQRIKMKKIQNISHNWNRK

SEQ ID NO: 62862 - protein, 941 aa, Homo sapiens
  Payload ID: 12552
  Gene Symbol: PDE2A
  Gene Name: phosphodiesterase 2A, cGMP-stimulated
  Uniprot ID: O00408
  ENSP ID: ENSP00000334910
MGQACGHSILCRSQQYPAARPAEPRGQQVFLKPDEPPPPPQPCADSLQDALLSLGSVIDISGLQRAVKEALSAVLPRVETVYTYLLDGESQLVCEDPPHELPQEGKVREAIISQKRLGCNGLGFSDLPGKPLARLVAPLAPDTQVLVMPLADKEAGAVAAVILVHCGQLSDNEEWSLQAVEKHTLVALRRVQVLQQRGPREAPRAVQNPPEGTAEDQKGGAAYTDRDRKILQLCGELYDLDASSLQLKVLQYLQQETRASRCCLLLVSEDNLQLSCKVIGDKVLGEEVSFPLTGCLGQVVEDKKSIQLKDLTSEDVQQLQSMLGCELQAMLCVPVISRATDQVVALACAFNKLEGDLFTDEDEHVIQHCFHYTSTVLTSTLAFQKEQKLKCECQALLQVAKNLFTHLDDVSVLLQEIITEARNLSNAEICSVFLLDQNELVAKVFDGGVVDDESYEIRIPADQGIAGHVATTGQILNIPDAYAHPLFYRGVDDSTGFRTRNILCFPIKNENQEVIGVAELVNKINGPWFSKFDEDLATAFSIYCGISIAHSLLYKKVNEAQYRSHLANEMMMYHMKVSDDEYTKLLHDGIQPVAAIDSNFASFTYTPRSLPEDDTSMAILSMLQDMNFINNYKIDCPTLARFCLMVKKGYRDPPYHNWMHAFSVSHFCYLLYKNLELTNYLEDIEIFALFISCMCHDLDHRGTNNSFQVASKSVLAALYSSEGSVMERHHFAQAIAILNTHGCNIFDHFSRKDYQRMLDLMRDIILATDLAHHLRIFKDLQKMAEVGYDRNNKQHHRLLLCLLMTSCDLSDQTKGWKTTRKIAELIYKEFFSQGDLEKAMGNRPMEMMDREKAYIPELQISFMEHIAMPIYKLLQDLFPKAAELYERVASNREHWTKVSHKFTIRGLPSNNSLDFLDEEYEVPDLDGTRAPINGCCSLDAE

SEQ ID NO: 62863 - protein, 685 aa, Homo sapiens
  Payload ID: 12552
  Gene Symbol: PDE2A
  Gene Name: phosphodiesterase 2A, cGMP-stimulated
  Uniprot ID: O00408
  ENSP ID: ENSP00000365633
MVLVLHHILIAVVQFLRRGQQVFLKPDEPPPPPQPCADSLQDALLSLGSVIDISGLQRAVKEALSAVLPRVETVYTYLLDGESQLVCEDPPHELPQEGKVRFTDEDEHVIQHCFHYTSTVLTSTLAFQKEQKLKCECQALLQVAKNLFTHLDDVSVLLQEIITEARNLSNAEICSVFLLDQNELVAKVFDGGVVDDESYEIRIPADQGIAGHVATTGQILNIPDAYAHPLFYRGVDDSTGFRTRNILCFPIKNENQEVIGVAELVNKINGPWFSKFDEDLATAFSIYCGISIAHSLLYKKVNEAQYRSHLANEMMMYHMKVSDDEYTKLLHDGIQPVAAIDSNFASFTYTPRSLPEDDTSMAILSMLQDMNFINNYKIDCPTLARFCLMVKKGYRDPPYHNWMHAFSVSHFCYLLYKNLELTNYLEDIEIFALFISCMCHDLDHRGTNNSFQVASKSVLAALYSSEGSVMERHHFAQAIAILNTHGCNIFDHFSRKDYQRMLDLMRDIILATDLAHHLRIFKDLQKMAEVGYDRNNKQHHRLLLCLLMTSCDLSDQTKGWKTTRKIAELIYKEFFSQGDLEKAMGNRPMEMMDREKAYIPELQISFMEHIAMPIYKLLQDLFPKAAELYERVASNREHWTKVSHKFTIRGLPSNNSLDFLDEEYEVPDLDGTRAPINGCCSLDAE

SEQ ID NO: 62864 - protein, 197 aa, Homo sapiens
  Payload ID: 12552
  Gene Symbol: PDE2A
  Gene Name: phosphodiesterase 2A, cGMP-stimulated
  ENSP ID: ENSP00000388997
MLQDMNFINNYKIDCPTLARFCLMVKKGYRDPPYHNWMHAFSVSHFCYLLYKNLELTNYLEDIEIFALFISCMCHDLDHRGTNNSFQVASKSVLAALYSSEGSVMERHHFAQAIAILNTHGCNIFDHFSRKDYQRMLDLMRDIILATDLAHHLRIFKDLQKMAEVGYDRNNKQHHRLLLCLLMTSCDLSDQTKGWKT

SEQ ID NO: 62865 - protein, 327 aa, Homo sapiens
  Payload ID: 12552
  Gene Symbol: PDE2A
  Gene Name: phosphodiesterase 2A, cGMP-stimulated
  ENSP ID: ENSP00000392457
FPTASSVPEHKGVGFHAWDVRNLRKLRGQVPAGSLPPTDPSLHRWFLAPLPSPEVIGVAELVNKINGPWFSKFDEDLATAFSIYCGISIAHSLLYKKVNEAQYRSHLANEMMMYHMKVSDDEYTKLLHDGIQPVAAIDSNFASFTYTPRSLPEDDTSMAILSMLQDMNFINNYKIDCPTLARFCLMVKKGYRDPPYHNWMHAFSVSHFCYLLYKNLELTNYLEDIEIFALFISCMCHDLDHRGTNNSFQVASKSVLAALYSSEGSVMERHHFAQAIAILNTHGCNIFDHFSRKDYQRMLDLMRDIILATDLAHHLRIFKDLQKMAEG

SEQ ID NO: 62866 - protein, 826 aa, Homo sapiens
  Payload ID: 12552
  Gene Symbol: PDE2A
  Gene Name: phosphodiesterase 2A, cGMP-stimulated
  ENSP ID: ENSP00000410310
MGQACGHSILCRSQQYPAARPAEPRGQQVFLKPDEPPPPPQPCADSLQVHCGQLSDNEEWSLQAVEKHTLVALRRVQVLQQRGPREAPRAVQNPPEGTAEDQKGGAAYTDRDRKILQLCGELYDLDASSLQLKVLQYLQQETRASRCCLLLVSEDNLQLSCKVIGDKVLGEEVSFPLTGCLGQVVEDKKSIQLKDLTSEDVQQLQSMLGCELQAMLCVPVISRATDQVVALACAFNKLEGDLFTDEDEHVIQHCFHYTSTVLTSTLAFQKEQKLKCECQALLQVAKNLFTHLDDVSVLLQEIITEARNLSNAEICSVFLLDQNELVAKVFDGGVVDDESYEIRIPADQGIAGHVATTGQILNIPDAYAHPLFYRGVDDSTGFRTRNILCFPIKNENQEVIGVAELVNKINGPWFSKFDEDLATAFSIYCGISIAHSLLYKKVNEAQYRSHLANEMMMYHMKVSDDEYTKLLHDGIQPVAAIDSNFASFTYTPRSLPEDDTSMAILSMLQDMNFINNYKIDCPTLARFCLMVKKGYRDPPYHNWMHAFSVSHFCYLLYKNLELTNYLEDIEIFALFISCMCHDLDHRGTNNSFQVASKSVLAALYSSEGSVMERHHFAQAIAILNTHGCNIFDHFSRKDYQRMLDLMRDIILATDLAHHLRIFKDLQKMAEVGYDRNNKQHHRLLLCLLMTSCDLSDQTKGWKTTRKIAELIYKEFFSQGDLEKAMGNRPMEMMDREKAYIPELQISFMEHIAMPIYKLLQDLFPKAAELYERVASNREHWTKVSHKFTIRGLPSNNSLDFLDEEYEVPDLDGTRAPINGCCSLDAE

SEQ ID NO: 62867 - protein, 920 aa, Homo sapiens
  Payload ID: 12552
  Gene Symbol: PDE2A
  Gene Name: phosphodiesterase 2A, cGMP-stimulated
  Uniprot ID: O00408
  ENSP ID: ENSP00000411657
MRRQPAASLDPLAKEPGPPGSRDDRLEDALLSLGSVIDISGLQRAVKEALSAVLPRVETVYTYLLDGESQLVCEDPPHELPQEGKVREAIISQKRLGCNGLGFSDLPGKPLARLVAPLAPDTQVLVMPLADKEAGAVAAVILVHCGQLSDNEEWSLQAVEKHTLVALRRVQVLQQRGPREAPRAVQNPPEGTAEDQKGGAAYTDRDRKILQLCGELYDLDASSLQLKVLQYLQQETRASRCCLLLVSEDNLQLSCKVIGDKVLGEEVSFPLTGCLGQVVEDKKSIQLKDLTSEDVQQLQSMLGCELQAMLCVPVISRATDQVVALACAFNKLEGDLFTDEDEHVIQHCFHYTSTVLTSTLAFQKEQKLKCECQALLQVAKNLFTHLDDVSVLLQEIITEARNLSNAEICSVFLLDQNELVAKVFDGGVVDDESYEIRIPADQGIAGHVATTGQILNIPDAYAHPLFYRGVDDSTGFRTRNILCFPIKNENQEVIGVAELVNKINGPWFSKFDEDLATAFSIYCGISIAHSLLYKKVNEAQYRSHLANEMMMYHMKVSDDEYTKLLHDGIQPVAAIDSNFASFTYTPRSLPEDDTSMAILSMLQDMNFINNYKIDCPTLARFCLMVKKGYRDPPYHNWMHAFSVSHFCYLLYKNLELTNYLEDIEIFALFISCMCHDLDHRGTNNSFQVASKSVLAALYSSEGSVMERHHFAQAIAILNTHGCNIFDHFSRKDYQRMLDLMRDIILATDLAHHLRIFKDLQKMAEVGYDRNNKQHHRLLLCLLMTSCDLSDQTKGWKTTRKIAELIYKEFFSQGDLEKAMGNRPMEMMDREKAYIPELQISFMEHIAMPIYKLLQDLFPKAAELYERVASNREHWTKVSHKFTIRGLPSNNSLDFLDEEYEVPDLDGTRAPINGCCSLDAE

SEQ ID NO: 62868 - protein, 92 aa, Homo sapiens
  Payload ID: 12552
  Gene Symbol: PDE2A
  Gene Name: phosphodiesterase 2A, cGMP-stimulated
  ENSP ID: ENSP00000438008
MVLVLHHILIAVVQFLRRGQQVFLKPDEPPPPPQPCADSLQETVYTYLLDGRLSSPRSGWAAMGWASQTCQGSPWPGWWLHWLLIPKCWSCR

SEQ ID NO: 62869 - protein, 39 aa, Homo sapiens
  Payload ID: 12552
  Gene Symbol: PDE2A
  Gene Name: phosphodiesterase 2A, cGMP-stimulated
  ENSP ID: ENSP00000438295
MGQACGHSILCRSQQYPAARPAEPSLQLPEHCFHTCDLI

SEQ ID NO: 62870 - protein, 106 aa, Homo sapiens
  Payload ID: 12552
  Gene Symbol: PDE2A
  Gene Name: phosphodiesterase 2A, cGMP-stimulated
  ENSP ID: ENSP00000438559
MVLVLHHILIAVVQFLRRGQQVFLKPDEPPPPPQPCADSLQDALLSLGSVIDISGLQRAVKEALSAVLPRVETVYTYLLDGESQLVCEDPPHELPQEGKVRCTVAS

SEQ ID NO: 62871 - protein, 65 aa, Homo sapiens
  Payload ID: 12552
  Gene Symbol: PDE2A
  Gene Name: phosphodiesterase 2A, cGMP-stimulated
  ENSP ID: ENSP00000438868
MVLVLHHILIAVVQFLRRGQQVFLKPDEPPPPPQPCADSLQPAWTPLQRSQDPQGVETTDWRTPC

SEQ ID NO: 62872 - protein, 336 aa, Homo sapiens
  Payload ID: 12552
  Gene Symbol: PDE2A
  Gene Name: phosphodiesterase 2A, cGMP-stimulated
  ENSP ID: ENSP00000439077
PGLDRSRGRGRAELGGEVGGLGDPGSRRRARRGAERRLRDPDTEVRRGPLSDRRLALAGELYDLDASSLQLKVLQYLQQETRASRCCLLLVSEDNLQLSCKVIGDKVLGEEVSFPLTGCLGQVVEDKKSIQLKDLTSEDVQQLQSMLGCELQAMLCVPVISRATDQVVALACAFNKLEGDLFTDEDEHVIQHCFHYTSTVLTSTLAFQKEQKLKCECQALLQVAKNLFTHLDDVSVLLQEIITEARNLSNAEICSVFLLDQNELVAKVFDGGVVDDESYEIRIPADQGIAGHVATTGQILNIPDAYAHPLFYRGVDDSTGFRTRNILCFPIKNENQ

SEQ ID NO: 62873 - protein, 38 aa, Homo sapiens
  Payload ID: 12552
  Gene Symbol: PDE2A
  Gene Name: phosphodiesterase 2A, cGMP-stimulated
  ENSP ID: ENSP00000439302
MGQACGHSILCRSQQYPAARPAEPQPGPPCKGARTPRE

SEQ ID NO: 62874 - protein, 144 aa, Homo sapiens
  Payload ID: 12552
  Gene Symbol: PDE2A
  Gene Name: phosphodiesterase 2A, cGMP-stimulated
  ENSP ID: ENSP00000439683
MRRQPAASLDPLAKEPGPPGSRDDRLEDALLSLGSVIDISGLQRAVKEALSAVLPRVETVYTYLLDGESQLVCEDPPHELPQEGKVREAIISQKRLGCNGLGFSDLPGKPLARLVAPLAPDTQVLVMPLADKEAGAVAAVILVH

SEQ ID NO: 62875 - protein, 178 aa, Homo sapiens
  Payload ID: 12552
  Gene Symbol: PDE2A
  Gene Name: phosphodiesterase 2A, cGMP-stimulated
  ENSP ID: ENSP00000440834
MMMYHMKVSDDEYTKLLHDGIQPVAAIDSNFASFTYTPRSLPEDDTSMAILSMLQDMNFINNYKIDCPTLARFCLMVKKGYRDPPYHNWMHAFSVSHFCYLLYKNLELTNYLEDIEIFALFISCMCHDLDHRGTNNSFQVASKSVLAALYSSEGSVMERHHFAQAIAILNTHGCNIFD

SEQ ID NO: 62876 - protein, 172 aa, Homo sapiens
  Payload ID: 12552
  Gene Symbol: PDE2A
  Gene Name: phosphodiesterase 2A, cGMP-stimulated
  ENSP ID: ENSP00000441322
  MOD_RES (1)..(1): Any amino acid
XSAVTPSPCLSLSQLQQETRASRCCLLLVSEDNLQLSCKVIGDKVLGEEVSFPLTGCLGQVVEDKKSIQLKDLTSEDVQQLQSMLGCELQAMLCVPVISRATDQVVALACAFNKLEGDLFTDEDEHVIQHCFHYTSTVLTSTLAFQKEQKLKCECQALLQVAKNLFTHLDDV

SEQ ID NO: 62877 - protein, 934 aa, Homo sapiens
  Payload ID: 12552
  Gene Symbol: PDE2A
  Gene Name: phosphodiesterase 2A, cGMP-stimulated
  Uniprot ID: O00408
  ENSP ID: ENSP00000442256
MVLVLHHILIAVVQFLRRGQQVFLKPDEPPPPPQPCADSLQDALLSLGSVIDISGLQRAVKEALSAVLPRVETVYTYLLDGESQLVCEDPPHELPQEGKVREAIISQKRLGCNGLGFSDLPGKPLARLVAPLAPDTQVLVMPLADKEAGAVAAVILVHCGQLSDNEEWSLQAVEKHTLVALRRVQVLQQRGPREAPRAVQNPPEGTAEDQKGGAAYTDRDRKILQLCGELYDLDASSLQLKVLQYLQQETRASRCCLLLVSEDNLQLSCKVIGDKVLGEEVSFPLTGCLGQVVEDKKSIQLKDLTSEDVQQLQSMLGCELQAMLCVPVISRATDQVVALACAFNKLEGDLFTDEDEHVIQHCFHYTSTVLTSTLAFQKEQKLKCECQALLQVAKNLFTHLDDVSVLLQEIITEARNLSNAEICSVFLLDQNELVAKVFDGGVVDDESYEIRIPADQGIAGHVATTGQILNIPDAYAHPLFYRGVDDSTGFRTRNILCFPIKNENQEVIGVAELVNKINGPWFSKFDEDLATAFSIYCGISIAHSLLYKKVNEAQYRSHLANEMMMYHMKVSDDEYTKLLHDGIQPVAAIDSNFASFTYTPRSLPEDDTSMAILSMLQDMNFINNYKIDCPTLARFCLMVKKGYRDPPYHNWMHAFSVSHFCYLLYKNLELTNYLEDIEIFALFISCMCHDLDHRGTNNSFQVASKSVLAALYSSEGSVMERHHFAQAIAILNTHGCNIFDHFSRKDYQRMLDLMRDIILATDLAHHLRIFKDLQKMAEVGYDRNNKQHHRLLLCLLMTSCDLSDQTKGWKTTRKIAELIYKEFFSQGDLEKAMGNRPMEMMDREKAYIPELQISFMEHIAMPIYKLLQDLFPKAAELYERVASNREHWTKVSHKFTIRGLPSNNSLDFLDEEYEVPDLDGTRAPINGCCSLDAE

SEQ ID NO: 62878 - protein, 65 aa, Homo sapiens; identical to SEQ ID NO: 62871
  Payload ID: 12552
  Gene Symbol: PDE2A
  Gene Name: phosphodiesterase 2A, cGMP-stimulated
  ENSP ID: ENSP00000442797

SEQ ID NO: 62879 - protein, 86 aa, Homo sapiens
  Payload ID: 12552
  Gene Symbol: PDE2A
  Gene Name: phosphodiesterase 2A, cGMP-stimulated
  ENSP ID: ENSP00000443232
MRRQPAASLDPLAKEPGPPGSRDDRLEDALLSLGSVIDISGLQRAVKEALSAVLPRVETVYTYLLDGESQLVCEDPPHELPQEGKV

SEQ ID NO: 62880 - protein, 75 aa, Homo sapiens
  Payload ID: 12552
  Gene Symbol: PDE2A
  Gene Name: phosphodiesterase 2A, cGMP-stimulated
  ENSP ID: ENSP00000443737
  MOD_RES (1)..(1): Any amino acid
XLWLVASGGRHSAFPVSHPKGVGLACLPSTVASTGGCHWETGRAWEFRELRPAWTPLQRSQDPQGVETTDWRTPC

SEQ ID NO: 62881 - protein, 65 aa, Homo sapiens; identical to SEQ ID NO: 62871
  Payload ID: 12552
  Gene Symbol: PDE2A
  Gene Name: phosphodiesterase 2A, cGMP-stimulated
  ENSP ID: ENSP00000445443

SEQ ID NO: 62882 - protein, 92 aa, Homo sapiens
  Payload ID: 12552
  Gene Symbol: PDE2A
  Gene Name: phosphodiesterase 2A, cGMP-stimulated
  ENSP ID: ENSP00000445750
MSYILKMPGTCLPGEGTTYELPPSSLHPSSAPVTSGGTCPALLTEAGWEAPIMAFTEAASAVGPSWTHSGASRSSSSRTSRRRRRSHAPTAC

SEQ ID NO: 62883 - protein, 932 aa, Homo sapiens
  Payload ID: 12552
  Gene Symbol: PDE2A
  Gene Name: phosphodiesterase 2A, cGMP-stimulated
  Uniprot ID: O00408
  ENSP ID: ENSP00000446399
MKKQRIQEGKSLAHRRGQQVFLKPDEPPPPPQPCADSLQDALLSLGSVIDISGLQRAVKEALSAVLPRVETVYTYLLDGESQLVCEDPPHELPQEGKVREAIISQKRLGCNGLGFSDLPGKPLARLVAPLAPDTQVLVMPLADKEAGAVAAVILVHCGQLSDNEEWSLQAVEKHTLVALRRVQVLQQRGPREAPRAVQNPPEGTAEDQKGGAAYTDRDRKILQLCGELYDLDASSLQLKVLQYLQQETRASRCCLLLVSEDNLQLSCKVIGDKVLGEEVSFPLTGCLGQVVEDKKSIQLKDLTSEDVQQLQSMLGCELQAMLCVPVISRATDQVVALACAFNKLEGDLFTDEDEHVIQHCFHYTSTVLTSTLAFQKEQKLKCECQALLQVAKNLFTHLDDVSVLLQEIITEARNLSNAEICSVFLLDQNELVAKVFDGGVVDDESYEIRIPADQGIAGHVATTGQILNIPDAYAHPLFYRGVDDSTGFRTRNILCFPIKNENQEVIGVAELVNKINGPWFSKFDEDLATAFSIYCGISIAHSLLYKKVNEAQYRSHLANEMMMYHMKVSDDEYTKLLHDGIQPVAAIDSNFASFTYTPRSLPEDDTSMAILSMLQDMNFINNYKIDCPTLARFCLMVKKGYRDPPYHNWMHAFSVSHFCYLLYKNLELTNYLEDIEIFALFISCMCHDLDHRGTNNSFQVASKSVLAALYSSEGSVMERHHFAQAIAILNTHGCNIFDHFSRKDYQRMLDLMRDIILATDLAHHLRIFKDLQKMAEVGYDRNNKQHHRLLLCLLMTSCDLSDQTKGWKTTRKIAELIYKEFFSQGDLEKAMGNRPMEMMDREKAYIPELQISFMEHIAMPIYKLLQDLFPKAAELYERVASNREHWTKVSHKFTIRGLPSNNSLDFLDEEYEVPDLDGTRAPINGCCSLDAE

SEQ ID NO: 62884 - protein, 1141 aa, Homo sapiens
  Payload ID: 12553
  Gene Symbol: PDE3A
  Gene Name: phosphodiesterase 3A, cGMP-inhibited
  Uniprot ID: Q14432
  ENSP ID: ENSP00000351957
MAVPGDAARVRDKPVHSGVSQAPTAGRDCHHRADPASPRDSGCRGCWGDLVLQPLRSSRKLSSALCAGSLSFLLALLVRLVRGEVGCDLEQCKEAAAAEEEEAAPGAEGGVFPGPRGGAPGGGARLSPWLQPSALLFSLLCAFFWMGLYLLRAGVRLPLAVALLAACCGGEALVQIGLGVGEDHLLSLPAAGVVLSCLAAATWLVLRLRLGVLMIALTSAVRTVSLISLERFKVAWRPYLAYLAGVLGILLARYVEQILPQSAEAAPREHLGSQLIAGTKEDIPVFKRRRRSSSVVSAEMSGCSSKSHRRTSLPCIPREQLMGHSEWDHKRGPRGSQSSGTSITVDIAVMGEAHGLITDLLADPSLPPNVCTSLRAVSNLLSTQLTFQAIHKPRVNPVTSLSENYTCSDSEESSEKDKLAIPKRLRRSLPPGLLRRVSSTWTTTTSATGLPTLEPAPVRRDRSTSIKLQEAPSSSPDSWNNPVMMTLTKSRSFTSSYAISAANHVKAKKQSRPGALAKISPLSSPCSSPLQGTPASSLVSKISAVQFPESADTTAKQSLGSHRALTYTQSAPDLSPQILTPPVICSSCGRPYSQGNPADEPLERSGVATRTPSRTDDTAQVTSDYETNNNSDSSDIVQNEDETECLREPLRKASACSTYAPETMMFLDKPILAPEPLVMDNLDSIMEQLNTWNFPIFDLVENIGRKCGRILSQVSYRLFEDMGLFEAFKIPIREFMNYFHALEIGYRDIPYHNRIHATDVLHAVWYLTTQPIPGLSTVINDHGSTSDSDSDSGFTHGHMGYVFSKTYNVTDDKYGCLSGNIPALELMALYVAAAMHDYDHPGRTNAFLVATSAPQAVLYNDRSVLENHHAAAAWNLFMSRPEYNFLINLDHVEFKHFRFLVIEAILATDLKKHFDFVAKFNGKVNDDVGIDWTNENDRLLVCQMCIKLADINGPAKCKELHLQWTDGIVNEFYEQGDEEASLGLPISPFMDRSAPQLANLQESFISHIVGPLCNSYDSAGLMPGKWVEDSDESGDTDDPEEEEEEAPAPNEEETCENNESPKKKTFKRRKIYCQITQHLLQNHKMWKKVIEEEQRLAGIENQSLDQTPQSHSSEQIQAIKEEEEEKGKPRGEEIPTQKPDQ

SEQ ID NO: 62885 - protein, 1112 aa, Homo sapiens
  Payload ID: 12554
  Gene Symbol: PDE3B
  Gene Name: phosphodiesterase 3B, cGMP-inhibited
  Uniprot ID: Q13370
  ENSP ID: ENSP00000282096
MRRDERDAKAMRSLQPPDGAGSPPESLRNGYVKSCVSPLRQDPPRGFFFHLCRFCNVELRPPPASPQQPRRCSPFCRARLSLGALAAFVLALLLGAEPESWAAGAAWLRTLLSVCSHSLSPLFSIACAFFFLTCFLTRTKRGPGPGRSCGSWWLLALPACCYLGDFLVWQWWSWPWGDGDAGSAAPHTPPEAAAGRLLLVLSCVGLLLTLAHPLRLRHCVLVLLLASFVWWVSFTSLGSLPSALRPLLSGLVGGAGCLLALGLDHFFQIREAPLHPRLSSAAEEKVPVIRPRRRSSCVSLGETAASYYGSCKIFRRPSLPCISREQMILWDWDLKQWYKPHYQNSGGGNGVDLSVLNEARNMVSDLLTDPSLPPQVISSLRSISSLMGAFSGSCRPKINPLTPFPGFYPCSEIEDPAEKGDRKLNKGLNRNSLPTPQLRRSSGTSGLLPVEQSSRWDRNNGKRPHQEFGISSQGCYLNGPFNSNLLTIPKQRSSSVSLTHHVGLRRAGVLSSLSPVNSSNHGPVSTGSLTNRSPIEFPDTADFLNKPSVILQRSLGNAPNTPDFYQQLRNSDSNLCNSCGHQMLKYVSTSESDGTDCCSGKSGEEENIFSKESFKLMETQQEEETEKKDSRKLFQEGDKWLTEEAQSEQQTNIEQEVSLDLILVEEYDSLIEKMSNWNFPIFELVEKMGEKSGRILSQVMYTLFQDTGLLEIFKIPTQQFMNYFRALENGYRDIPYHNRIHATDVLHAVWYLTTRPVPGLQQIHNGCGTGNETDSDGRINHGRIAYISSKSCSNPDESYGCLSSNIPALELMALYVAAAMHDYDHPGRTNAFLVATNAPQAVLYNDRSVLENHHAASAWNLYLSRPEYNFLLHLDHVEFKRFRFLVIEAILATDLKKHFDFLAEFNAKANDVNSNGIEWSNENDRLLVCQVCIKLADINGPAKVRDLHLKWTEGIVNEFYEQGDEEANLGLPISPFMDRSSPQLAKLQESFITHIVGPLCNSYDAAGLLPGQWLEAEEDNDTESGDDEDGEELDTEDEEMENNLNPKPPRRKSRRRIFCQLMHHLTENHKIWKEIVEEEEKCKADGNKLQVENSSLPQADEIQVIEEADEEE

SEQ ID NO: 62886 - protein, 1061 aa, Homo sapiens
  Payload ID: 12554
  Gene Symbol: PDE3B
  Gene Name: phosphodiesterase 3B, cGMP-inhibited
  Uniprot ID: Q13370
  ENSP ID: ENSP00000388644
MRRDERDAKAMRSLQPPDGAGSPPESLRNGYVKSCVSPLRQDPPRGFFFHLCRFCNVELRPPPASPQQPRRCSPFCRARLSLGALAAFVLALLLGAEPESWAAGAAWLRTLLSVCSHSLSPLFSIACAFFFLTCFLTRTKRGPGPGRSCGSWWLLALPACCYLGDFLVWQWWSWPWGDGDAGSAAPHTPPEAAAGRLLLVLSCVGLLLTLAHPLRLRHCVLVLLLASFVWWVSFTSLGSLPSALRPLLSGLVGGAGCLLALGLDHFFQIREAPLHPRLSSAAEEKVPVIRPRRRSSCVSLGETAASYYGSCKIFRRPSLPCISREQMILWDWDLKQWYKPHYQNSGGGNGVDLSVLNEARNMVSDLLTDPSLPPQGLNRNSLPTPQLRRSSGTSGLLPVEQSSRWDRNNGKRPHQEFGISSQGCYLNGPFNSNLLTIPKQRSSSVSLTHHVGLRRAGVLSSLSPVNSSNHGPVSTGSLTNRSPIEFPDTADFLNKPSVILQRSLGNAPNTPDFYQQLRNSDSNLCNSCGHQMLKYVSTSESDGTDCCSGKSGEEENIFSKESFKLMETQQEEETEKKDSRKLFQEGDKWLTEEAQSEQQTNIEQEVSLDLILVEEYDSLIEKMSNWNFPIFELVEKMGEKSGRILSQVMYTLFQDTGLLEIFKIPTQQFMNYFRALENGYRDIPYHNRIHATDVLHAVWYLTTRPVPGLQQIHNGCGTGNETDSDGRINHGRIAYISSKSCSNPDESYGCLSSNIPALELMALYVAAAMHDYDHPGRTNAFLVATNAPQAVLYNDRSVLENHHAASAWNLYLSRPEYNFLLHLDHVEFKRFRFLVIEAILATDLKKHFDFLAEFNAKANDVNSNGIEWSNENDRLLVCQVCIKLADINGPAKVRDLHLKWTEGIVNEFYEQGDEEANLGLPISPFMDRSSPQLAKLQESFITHIVGPLCNSYDAAGLLPGQWLEAEEDNDTESGDDEDGEELDTEDEEMENNLNPKPPRRKSRRRIFCQLMHHLTENHKIWKEIVEEEEKCKADGNKLQVENSSLPQADEIQVIEEADEEE

SEQ ID NO: 62887 - protein, 860 aa, Homo sapiens
  Payload ID: 12555
  Gene Symbol: PDE4A
  Gene Name: phosphodiesterase 4A, cAMP-specific
  Uniprot ID: P27815
  ENSP ID: ENSP00000293683
MARPRGLGRIPELQLVAFPVAVAAEDEAFLPEPLAPRAPRRPRSPPSSPVFFASPSPTFRRRLRLLRSCQDLGRQAWAGAGFEAENGPTPSPGRSPLDSQASPGLVLHAGAATSQRRESFLYRSDSDYDMSPKTMSRNSSVTSEAHAEDLIVTPFAQVLASLRSVRSNFSLLTNVPVPSNKRSPLGGPTPVCKATLSEETCQQLARETLEELDWCLEQLETMQTYRSVSEMASHKFKRMLNRELTHLSEMSRSGNQVSEYISTTFLDKQNEVEIPSPTMKEREKQQAPRPRPSQPPPPPVPHLQPMSQITGLKKLMHSNSLNNSNIPRFGVKTDQEELLAQELENLNKWGLNIFCVSDYAGGRSLTCIMYMIFQERDLLKKFRIPVDTMVTYMLTLEDHYHADVAYHNSLHAADVLQSTHVLLATPALDAVFTDLEILAALFAAAIHDVDHPGVSNQFLINTNSELALMYNDESVLENHHLAVGFKLLQEDNCDIFQNLSKRQRQSLRKMVIDMVLATDMSKHMTLLADLKTMVETKKVTSSGVLLLDNYSDRIQVLRNMVHCADLSNPTKPLELYRQWTDRIMAEFFQQGDRERERGMEISPMCDKHTASVEKSQVGFIDYIVHPLWETWADLVHPDAQEILDTLEDNRDWYYSAIRQSPSPPPEEESRGPGHPPLPDKFQFELTLEEEEEEEISMAQIPCTAQEALTAQGLSGVEEALDATIAWEASPAQESLEVMAQEASLEAELEAVYLTQQAQSTGSAPVAPDEFSSREEFVVAVSHSSPSALALQSPLLPAWRTLSVSEHAPGLPGLPSTAAEVEAQREHQAAKRACSACAGTFGEDTSALPAPGGGGSGGDPT

SEQ ID NO: 62888 - protein, 647 aa, Homo sapiens
  Payload ID: 12555
  Gene Symbol: PDE4A
  Gene Name: phosphodiesterase 4A, cAMP-specific
  Uniprot ID: P27815
  ENSP ID: ENSP00000341007
MPLVDFFCETCSKPWLVGWWDQFKRMLNRELTHLSEMSRSGNQVSEYISTTFLDKQNEVEIPSPTMKEREKQQAPRPRPSQPPPPPVPHLQPMSQITGLKKLMHSNSLNNSNIPRFGVKTDQEELLAQELENLNKWGLNIFCVSDYAGGRSLTCIMYMIFQERDLLKKFRIPVDTMVTYMLTLEDHYHADVAYHNSLHAADVLQSTHVLLATPALDAVFTDLEILAALFAAAIHDVDHPGVSNQFLINTNSELALMYNDESVLENHHLAVGFKLLQEDNCDIFQNLSKRQRQSLRKMVIDMVLATDMSKHMTLLADLKTMVETKKVTSSGVLLLDNYSDRIQVLRNMVHCADLSNPTKPLELYRQWTDRIMAEFFQQGDRERERGMEISPMCDKHTASVEKSQVGFIDYIVHPLWETWADLVHPDAQEILDTLEDNRDWYYSAIRQSPSPPPEEESRGPGHPPLPDKFQFELTLEEEEEEEISMAQIPCTAQEALTAQGLSGVEEALDATIAWEASPAQESLEVMAQEASLEAELEAVYLTQQAQSTGSAPVAPDEFSSREEFVVAVSHSSPSALALQSPLLPAWRTLSVSEHAPGLPGLPSTAAEVEAQREHQAAKRACSACAGTFGEDTSALPAPGGGGSGGDPT

SEQ ID NO: 62889 - protein, 886 aa, Homo sapiens
  Payload ID: 12555
  Gene Symbol: PDE4A
  Gene Name: phosphodiesterase 4A, cAMP-specific
  Uniprot ID: P27815
  ENSP ID: ENSP00000370078
MEPPTVPSERSLSLSLPGPREGQATLKPPPQHLWRQPRTPIRIQQRGYSDSAERAERERQPHRPIERADAMDTSDRPGLRTTRMSWPSSFHGTGTGSGGAGGGSSRRFEAENGPTPSPGRSPLDSQASPGLVLHAGAATSQRRESFLYRSDSDYDMSPKTMSRNSSVTSEAHAEDLIVTPFAQVLASLRSVRSNFSLLTNVPVPSNKRSPLGGPTPVCKATLSEETCQQLARETLEELDWCLEQLETMQTYRSVSEMASHKFKRMLNRELTHLSEMSRSGNQVSEYISTTFLDKQNEVEIPSPTMKEREKQQAPRPRPSQPPPPPVPHLQPMSQITGLKKLMHSNSLNNSNIPRFGVKTDQEELLAQELENLNKWGLNIFCVSDYAGGRSLTCIMYMIFQERDLLKKFRIPVDTMVTYMLTLEDHYHADVAYHNSLHAADVLQSTHVLLATPALDAVFTDLEILAALFAAAIHDVDHPGVSNQFLINTNSELALMYNDESVLENHHLAVGFKLLQEDNCDIFQNLSKRQRQSLRKMVIDMVLATDMSKHMTLLADLKTMVETKKVTSSGVLLLDNYSDRIQVLRNMVHCADLSNPTKPLELYRQWTDRIMAEFFQQGDRERERGMEISPMCDKHTASVEKSQVGFIDYIVHPLWETWADLVHPDAQEILDTLEDNRDWYYSAIRQSPSPPPEEESRGPGHPPLPDKFQFELTLEEEEEEEISMAQIPCTAQEALTAQGLSGVEEALDATIAWEASPAQESLEVMAQEASLEAELEAVYLTQQAQSTGSAPVAPDEFSSREEFVVAVSHSSPSALALQSPLLPAWRTLSVSEHAPGLPGLPSTAAEVEAQREHQAAKRACSACAGTFGEDTSALPAPGGGGSGGDPT

SEQ ID NO: 62890 - protein, 825 aa, Homo sapiens
  Payload ID: 12555
  Gene Symbol: PDE4A
  Gene Name: phosphodiesterase 4A, cAMP-specific
  Uniprot ID: P27815
  ENSP ID: ENSP00000394754
MRSGAAPRARPRPPALALPPTGPESLTHFPFSDEDTRRHPPGRSVSFEAENGPTPSPGRSPLDSQASPGLVLHAGAATSQRRESFLYRSDSDYDMSPKTMSRNSSVTSEAHAEDLIVTPFAQVLASLRSVRSNFSLLTNVPVPSNKRSPLGGPTPVCKATLSEETCQQLARETLEELDWCLEQLETMQTYRSVSEMASHKFKRMLNRELTHLSEMSRSGNQVSEYISTTFLDKQNEVEIPSPTMKEREKQQAPRPRPSQPPPPPVPHLQPMSQITGLKKLMHSNSLNNSNIPRFGVKTDQEELLAQELENLNKWGLNIFCVSDYAGGRSLTCIMYMIFQERDLLKKFRIPVDTMVTYMLTLEDHYHADVAYHNSLHAADVLQSTHVLLATPALDAVFTDLEILAALFAAAIHDVDHPGVSNQFLINTNSELALMYNDESVLENHHLAVGFKLLQEDNCDIFQNLSKRQRQSLRKMVIDMVLATDMSKHMTLLADLKTMVETKKVTSSGVLLLDNYSDRIQVLRNMVHCADLSNPTKPLELYRQWTDRIMAEFFQQGDRERERGMEISPMCDKHTASVEKSQVGFIDYIVHPLWETWADLVHPDAQEILDTLEDNRDWYYSAIRQSPSPPPEEESRGPGHPPLPDKFQFELTLEEEEEEEISMAQIPCTAQEALTAQGLSGVEEALDATIAWEASPAQESLEVMAQEASLEAELEAVYLTQQAQSTGSAPVAPDEFSSREEFVVAVSHSSPSALALQSPLLPAWRTLSVSEHAPGLPGLPSTAAEVEAQREHQAAKRACSACAGTFGEDTSALPAPGGGGSGGDPT

SEQ ID NO: 62891 - protein, 96 aa, Homo sapiens
  Payload ID: 12555
  Gene Symbol: PDE4A
  Gene Name: phosphodiesterase 4A, cAMP-specific
  ENSP ID: ENSP00000465792
MPLVDFFCETCSKPWLVGWWDQFKRMLNRELTHLSEMSRSGNQVSEYISTTFLGSVHGPGDSRRPLRGCHPRCGSPWGLQPVPHQHQFGAGAHVQR

SEQ ID NO: 62892 - protein, 278 aa, Homo sapiens
  Payload ID: 12555
  Gene Symbol: PDE4A
  Gene Name: phosphodiesterase 4A, cAMP-specific
  ENSP ID: ENSP00000467137
ETCQQLARETLEELDWCLEQLETMQTYRSVSEMASHKFKRMLNRELTHLSEMSRSGNQVSEYISTTFLDKQNEVEIPSPTMKEREKQQAPRPRPSQPPPPPVPHLQPMSQITGLKKLMHSNSLNNSNIPRFGVKTDQEELLAQELENLNKWGLNIFCVSDYAGGRSLTCIMYMIFQAVFTDLEILAALFAAAIHDVDHPGVSNQFLINTNSELALMYNDESVLENHHLAVGFKLLQEDNCDIFQNLSKRQRQSLRKMVIDMVLATDMSKHMTLLADLK

SEQ ID NO: 62893 - protein, 864 aa, Homo sapiens
  Payload ID: 12555
  Gene Symbol: PDE4A
  Gene Name: phosphodiesterase 4A, cAMP-specific
  Uniprot ID: P27815
  ENSP ID: ENSP00000468507
MKRSRSALSVAGTGDERSRETPESDRANMLGADLRRPRRRLSSGPGLGWAQPEPSDPGVPLPPRPTTLPLLIPPRISITRAENDSFEAENGPTPSPGRSPLDSQASPGLVLHAGAATSQRRESFLYRSDSDYDMSPKTMSRNSSVTSEAHAEDLIVTPFAQVLASLRSVRSNFSLLTNVPVPSNKRSPLGGPTPVCKATLSEETCQQLARETLEELDWCLEQLETMQTYRSVSEMASHKFKRMLNRELTHLSEMSRSGNQVSEYISTTFLDKQNEVEIPSPTMKEREKQQAPRPRPSQPPPPPVPHLQPMSQITGLKKLMHSNSLNNSNIPRFGVKTDQEELLAQELENLNKWGLNIFCVSDYAGGRSLTCIMYMIFQERDLLKKFRIPVDTMVTYMLTLEDHYHADVAYHNSLHAADVLQSTHVLLATPALDAVFTDLEILAALFAAAIHDVDHPGVSNQFLINTNSELALMYNDESVLENHHLAVGFKLLQEDNCDIFQNLSKRQRQSLRKMVIDMVLATDMSKHMTLLADLKTMVETKKVTSSGVLLLDNYSDRIQVLRNMVHCADLSNPTKPLELYRQWTDRIMAEFFQQGDRERERGMEISPMCDKHTASVEKSQVGFIDYIVHPLWETWADLVHPDAQEILDTLEDNRDWYYSAIRQSPSPPPEEESRGPGHPPLPDKFQFELTLEEEEEEEISMAQIPCTAQEALTAQGLSGVEEALDATIAWEASPAQESLEVMAQEASLEAELEAVYLTQQAQSTGSAPVAPDEFSSREEFVVAVSHSSPSALALQSPLLPAWRTLSVSEHAPGLPGLPSTAAEVEAQREHQAAKRACSACAGTFGEDTSALPAPGGGGSGGDPT

SEQ ID NO: 62894 - protein, 736 aa, Homo sapiens
  Payload ID: 12556
  Gene Symbol: PDE4B
  Gene Name: phosphodiesterase 4B, cAMP-specific
  Uniprot ID: Q07343
  ENSP ID: ENSP00000332116
MKKSRSVMTVMADDNVKDYFECSLSKSYSSSSNTLGIDLWRGRRCCSGNLQLPPLSQRQSERARTPEGDGISRPTTLPLTTLPSIAITTVSQECFDVENGPSPGRSPLDPQASSSAGLVLHATFPGHSQRRESFLYRSDSDYDLSPKAMSRNSSLPSEQHGDDLIVTPFAQVLASLRSVRNNFTILTNLHGTSNKRSPAASQPPVSRVNPQEESYQKLAMETLEELDWCLDQLETIQTYRSVSEMASNKFKRMLNRELTHLSEMSRSGNQVSEYISNTFLDKQNDVEIPSPTQKDREKKKKQQLMTQISGVKKLMHSSSLNNTSISRFGVNTENEDHLAKELEDLNKWGLNIFNVAGYSHNRPLTCIMYAIFQERDLLKTFRISSDTFITYMMTLEDHYHSDVAYHNSLHAADVAQSTHVLLSTPALDAVFTDLEILAAIFAAAIHDVDHPGVSNQFLINTNSELALMYNDESVLENHHLAVGFKLLQEEHCDIFMNLTKKQRQTLRKMVIDMVLATDMSKHMSLLADLKTMVETKKVTSSGVLLLDNYTDRIQVLRNMVHCADLSNPTKSLELYRQWTDRIMEEFFQQGDKERERGMEISPMCDKHTASVEKSQVGFIDYIVHPLWETWADLVQPDAQDILDTLEDNRNWYQSMIPQSPSPPLDEQNRDCQGLMEKFQFELTLDEEDSEGPEKEGEGHSYFSSTKTLCVIDPENRDSLGETDIDIATEDKSPVDT

SEQ ID NO: 62895 - protein, 736 aa, Homo sapiens; identical to SEQ ID NO: 62894
  Payload ID: 12556
  Gene Symbol: PDE4B
  Gene Name: phosphodiesterase 4B, cAMP-specific
  Uniprot ID: Q07343
  ENSP ID: ENSP00000342637

SEQ ID NO: 62896 - protein, 564 aa, Homo sapiens
  Payload ID: 12556
  Gene Symbol: PDE4B
  Gene Name: phosphodiesterase 4B, cAMP-specific
  Uniprot ID: Q07343
  ENSP ID: ENSP00000360084
MKEHGGTFSSTGISGGSGDSAMDSLQPLQPNYMPVCLFAEESYQKLAMETLEELDWCLDQLETIQTYRSVSEMASNKFKRMLNRELTHLSEMSRSGNQVSEYISNTFLDKQNDVEIPSPTQKDREKKKKQQLMTQISGVKKLMHSSSLNNTSISRFGVNTENEDHLAKELEDLNKWGLNIFNVAGYSHNRPLTCIMYAIFQERDLLKTFRISSDTFITYMMTLEDHYHSDVAYHNSLHAADVAQSTHVLLSTPALDAVFTDLEILAAIFAAAIHDVDHPGVSNQFLINTNSELALMYNDESVLENHHLAVGFKLLQEEHCDIFMNLTKKQRQTLRKMVIDMVLATDMSKHMSLLADLKTMVETKKVTSSGVLLLDNYTDRIQVLRNMVHCADLSNPTKSLELYRQWTDRIMEEFFQQGDKERERGMEISPMCDKHTASVEKSQVGFIDYIVHPLWETWADLVQPDAQDILDTLEDNRNWYQSMIPQSPSPPLDEQNRDCQGLMEKFQFELTLDEEDSEGPEKEGEGHSYFSSTKTLCVIDPENRDSLGETDIDIATEDKSPVDT

SEQ ID NO: 62897 - protein, 721 aa, Homo sapiens
  Payload ID: 12556
  Gene Symbol: PDE4B
  Gene Name: phosphodiesterase 4B, cAMP-specific
  Uniprot ID: Q07343
  ENSP ID: ENSP00000392947
MTAKDSSKELTASEPEVCIKTFKEQMHLELELPRLPGNRPTSPKISPRSSPRNSPCFFRKLLVNKSIRQRRRFTVAHTCFDVENGPSPGRSPLDPQASSSAGLVLHATFPGHSQRRESFLYRSDSDYDLSPKAMSRNSSLPSEQHGDDLIVTPFAQVLASLRSVRNNFTILTNLHGTSNKRSPAASQPPVSRVNPQEESYQKLAMETLEELDWCLDQLETIQTYRSVSEMASNKFKRMLNRELTHLSEMSRSGNQVSEYISNTFLDKQNDVEIPSPTQKDREKKKKQQLMTQISGVKKLMHSSSLNNTSISRFGVNTENEDHLAKELEDLNKWGLNIFNVAGYSHNRPLTCIMYAIFQERDLLKTFRISSDTFITYMMTLEDHYHSDVAYHNSLHAADVAQSTHVLLSTPALDAVFTDLEILAAIFAAAIHDVDHPGVSNQFLINTNSELALMYNDESVLENHHLAVGFKLLQEEHCDIFMNLTKKQRQTLRKMVIDMVLATDMSKHMSLLADLKTMVETKKVTSSGVLLLDNYTDRIQVLRNMVHCADLSNPTKSLELYRQWTDRIMEEFFQQGDKERERGMEISPMCDKHTASVEKSQVGFIDYIVHPLWETWADLVQPDAQDILDTLEDNRNWYQSMIPQSPSPPLDEQNRDCQGLMEKFQFELTLDEEDSEGPEKEGEGHSYFSSTKTLCVIDPENRDSLGETDIDIATEDKSPVDT

SEQ ID NO: 62898 - protein, 147 aa, Homo sapiens
  Payload ID: 12556
  Gene Symbol: PDE4B
  Gene Name: phosphodiesterase 4B, cAMP-specific
  ENSP ID: ENSP00000397548
MSFDVENGPSPGRSPLDPQASSSAGLVLHATFPGHSQRRESFLYRSDSDYDLSPKAMSRNSSLPSEQHGDDLIVTPFAQVLASLRSVRNNFTILTNLHGTSNKRSPAASQPPVSRVNPQEESYQKLAMETLEELDWCLDQLETIQTY

SEQ ID NO: 62899 - protein, 137 aa, Homo sapiens
  Payload ID: 12556
  Gene Symbol: PDE4B
  Gene Name: phosphodiesterase 4B, cAMP-specific
  ENSP ID: ENSP00000431909
METLEELDWCLDQLETIQTYRSVSEMASNKFKRMLNRELTHLSEMSRSGNQVSEYISNTFLDKQNDVEIPSPTQKDREKKKKQQLMTQISGVKKLMHSSSLNNTSISRFGVNTENEDHLAKELEDLNKWGLNIFNVA

SEQ ID NO: 62900 - protein, 66 aa, Homo sapiens
  Payload ID: 12556
  Gene Symbol: PDE4B
  Gene Name: phosphodiesterase 4B, cAMP-specific
  ENSP ID: ENSP00000432400
  MOD_RES (1)..(1): Any amino acid
XHGDDLIVTPFAQVLASLRSVRNNFTILTNLHGTSNKRSPAASQPPVSRVNPQGRPCHKVYLDVSR

SEQ ID NO: 62901 - protein, 503 aa, Homo sapiens
  Payload ID: 12556
  Gene Symbol: PDE4B
  Gene Name: phosphodiesterase 4B, cAMP-specific
  Uniprot ID: Q07343
  ENSP ID: ENSP00000432592
MPEANYLLSVSWGYIKFKRMLNRELTHLSEMSRSGNQVSEYISNTFLDKQNDVEIPSPTQKDREKKKKQQLMTQISGVKKLMHSSSLNNTSISRFGVNTENEDHLAKELEDLNKWGLNIFNVAGYSHNRPLTCIMYAIFQERDLLKTFRISSDTFITYMMTLEDHYHSDVAYHNSLHAADVAQSTHVLLSTPALDAVFTDLEILAAIFAAAIHDVDHPGVSNQFLINTNSELALMYNDESVLENHHLAVGFKLLQEEHCDIFMNLTKKQRQTLRKMVIDMVLATDMSKHMSLLADLKTMVETKKVTSSGVLLLDNYTDRIQVLRNMVHCADLSNPTKSLELYRQWTDRIMEEFFQQGDKERERGMEISPMCDKHTASVEKSQVGFIDYIVHPLWETWADLVQPDAQDILDTLEDNRNWYQSMIPQSPSPPLDEQNRDCQGLMEKFQFELTLDEEDSEGPEKEGEGHSYFSSTKTLCVIDPENRDSLGETDIDIATEDKSPVDT

SEQ ID NO: 62902 - protein, 152 aa, Homo sapiens
  Payload ID: 12556
  Gene Symbol: PDE4B
  Gene Name: phosphodiesterase 4B, cAMP-specific
  ENSP ID: ENSP00000436104
METLEELDWCLDQLETIQTYRSVSEMASNKFKRMLNRELTHLSEMSRSGNQVSEYISNTFLDKQNDVEIPSPTQKDREKKKKQQLMTQISGVKKLMHSSSLNNTSISRFGVNTENEDHLAKELEDLNKWGLNIFNVAGYSHNRPLTCIMYAI

SEQ ID NO: 62903 - protein, 143 aa, Homo sapiens
  Payload ID: 12556
  Gene Symbol: PDE4B
  Gene Name: phosphodiesterase 4B, cAMP-specific
  ENSP ID: ENSP00000437249
METLEELDWCLDQLETIQTYRSVSEMASNKFKRMLNRELTHLSEMSRSGNQVSEYISNTFLDKQNDVEIPSPTQKDREKKKKQQLMTQISGVKKLMHSSSLNNTSISRFGVNTENEDHLAKELEDLNKWGLNIFNVAGYSHNR

SEQ ID NO: 62904 - protein, 680 aa, Homo sapiens
  Payload ID: 12557
  Gene Symbol: PDE4C
  Gene Name: phosphodiesterase 4C, cAMP-specific
  Uniprot ID: Q08493
  ENSP ID: ENSP00000262805
MQGPPAPAPVPGPGSPRGSPRGSPGLFRKLLVNQSIRLQRRFTVAHPLCFDLENGLSCGRRALDPQSSPGLGRIMQAPVPHSQRRESFLYRSDSDYELSPKAMSRNSSVASDLHGEDMIVTPFAQVLASLRTVRSNVAALARQQCLGAAKQGPVGNPSSSNQLPPAEDTGQKLALETLDELDWCLDQLETLQTRHSVGEMASNKFKRILNRELTHLSETSRSGNQVSEYISRTFLDQQTEVELPKVTAEEAPQPMSRISGLHGLCHSASLSSATVPRFGVQTDQEEQLAKELEDTNKWGLDVFKVAELSGNRPLTAIIFSIFQERDLLKTFQIPADTLATYLLMLEGHYHANVAYHNSLHAADVAQSTHVLLATPALEAVFTDLEILAALFASAIHDVDHPGVSNQFLINTNSELALMYNDASVLENHHLAVGFKLLQAENCDIFQNLSAKQRLSLRRMVIDMVLATDMSKHMNLLADLKTMVETKKVTSLGVLLLDNYSDRIQVLQNLVHCADLSNPTKPLPLYRQWTDRIMAEFFQQGDRERESGLDISPMCDKHTASVEKSQVGFIDYIAHPLWETWADLVHPDAQDLLDTLEDNREWYQSKIPRSPSDLTNPERDGPDRFQFELTLEEAEEEDEEEEEEGEETALAKEALELPDTELLSPEAGPDPGDLPLDNQRT

SEQ ID NO: 62905 - protein, 712 aa, Homo sapiens
  Payload ID: 12557
  Gene Symbol: PDE4C
  Gene Name: phosphodiesterase 4C, cAMP-specific
  Uniprot ID: Q08493
  ENSP ID: ENSP00000347689
MENLGVGEGAEACSRLSRSRGRHSMTRAPKHLWRQPRRPIRIQQRFYSDPDKSAGCRERDLSPRPELRKSRLSWPVSSCRRFDLENGLSCGRRALDPQSSPGLGRIMQAPVPHSQRRESFLYRSDSDYELSPKAMSRNSSVASDLHGEDMIVTPFAQVLASLRTVRSNVAALARQQCLGAAKQGPVGNPSSSNQLPPAEDTGQKLALETLDELDWCLDQLETLQTRHSVGEMASNKFKRILNRELTHLSETSRSGNQVSEYISRTFLDQQTEVELPKVTAEEAPQPMSRISGLHGLCHSASLSSATVPRFGVQTDQEEQLAKELEDTNKWGLDVFKVAELSGNRPLTAIIFSIFQERDLLKTFQIPADTLATYLLMLEGHYHANVAYHNSLHAADVAQSTHVLLATPALEAVFTDLEILAALFASAIHDVDHPGVSNQFLINTNSELALMYNDASVLENHHLAVGFKLLQAENCDIFQNLSAKQRLSLRRMVIDMVLATDMSKHMNLLADLKTMVETKKVTSLGVLLLDNYSDRIQVLQNLVHCADLSNPTKPLPLYRQWTDRIMAEFFQQGDRERESGLDISPMCDKHTASVEKSQVGFIDYIAHPLWETWADLVHPDAQDLLDTLEDNREWYQSKIPRSPSDLTNPERDGPDRFQFELTLEEAEEEDEEEEEEGEETALAKEALELPDTELLSPEAGPDPGDLPLDNQRT

SEQ ID NO: 62906 - protein, 606 aa, Homo sapiens
  Payload ID: 12557
  Gene Symbol: PDE4C
  Gene Name: phosphodiesterase 4C, cAMP-specific
  Uniprot ID: Q08493
  ENSP ID: ENSP00000402091
MQAPVPHSQRRESFLYRSDSDYELSPKAMSRNSSVASDLHGEDMIVTPFAQVLASLRTVRSNVAALARQQCLGAAKQGPVGNPSSSNQLPPAEDTGQKLALETLDELDWCLDQLETLQTRHSVGEMASNKFKRILNRELTHLSETSRSGNQVSEYISRTFLDQQTEVELPKVTAEEAPQPMSRISGLHGLCHSASLSSATVPRFGVQTDQEEQLAKELEDTNKWGLDVFKVAELSGNRPLTAIIFSIFQERDLLKTFQIPADTLATYLLMLEGHYHANVAYHNSLHAADVAQSTHVLLATPALEAVFTDLEILAALFASAIHDVDHPGVSNQFLINTNSELALMYNDASVLENHHLAVGFKLLQAENCDIFQNLSAKQRLSLRRMVIDMVLATDMSKHMNLLADLKTMVETKKVTSLGVLLLDNYSDRIQVLQNLVHCADLSNPTKPLPLYRQWTDRIMAEFFQQGDRERESGLDISPMCDKHTASVEKSQVGFIDYIAHPLWETWADLVHPDAQDLLDTLEDNREWYQSKIPRSPSDLTNPERDGPDRFQFELTLEEAEEEDEEEEEEGEETALAKEALELPDTELLSPEAGPDPGDLPLDNQRT

SEQ ID NO: 62907 - protein, 481 aa, Homo sapiens
  Payload ID: 12557
  Gene Symbol: PDE4C
  Gene Name: phosphodiesterase 4C, cAMP-specific
  ENSP ID: ENSP00000439470
MASNKFKRILNRELTHLSETSRSGNQVSEYISRTFLDQQTEVELPKVTAEEAPQPMSRISGLHGLCHSASLSSATVPRFGVQTDQEEQLAKELEDTNKWGLDVFKVAELSGNRPLTAIIFSIFQERDLLKTFQIPADTLATYLLMLEGHYHANVAYHNSLHAADVAQSTHVLLATPALEAVFTDLEILAALFASAIHDVDHPGVSNQFLINTNSELALMYNDASVLENHHLAVGFKLLQAENCDIFQNLSAKQRLSLRRMVIDMVLATDMSKHMNLLADLKTMVETKKVTSLGVLLLDNYSDRIQVLQNLVHCADLSNPTKPLPLYRQWTDRIMAEFFQQGDRERESGLDISPMCDKHTASVEKSQVGFIDYIAHPLWETWADLVHPDAQDLLDTLEDNREWYQSKIPRSPSDLTNPERDGPDRFQFELTLEEAEEEDEEEEEEGEETALAKEALELPDTELLSPEAGPDPGDLPLDNQRT

SEQ ID NO: 62908 - protein, 712 aa, Homo sapiens; identical to SEQ ID NO: 62905
  Payload ID: 12557
  Gene Symbol: PDE4C
  Gene Name: phosphodiesterase 4C, cAMP-specific
  Uniprot ID: Q08493
  ENSP ID: ENSP00000469696

SEQ ID NO: 62909 - protein, 712 aa, Homo sapiens; identical to SEQ ID NO: 62905
  Payload ID: 12557
  Gene Symbol: PDE4C
  Gene Name: phosphodiesterase 4C, cAMP-specific
  Uniprot ID: Q08493
  ENSP ID: ENSP00000470210

SEQ ID NO: 62910 - protein, 93 aa, Homo sapiens
  Payload ID: 12557
  Gene Symbol: PDE4C
  Gene Name: phosphodiesterase 4C, cAMP-specific
  ENSP ID: ENSP00000472034
MENLGVGEGAEACSRLSRSRGRHSMTRAPKHLWRQPRRPIRIQQRFYSDPDKSAGCRERDLSPRPELRKSRLSWPVSSCRRFDLENGLSCGRR

SEQ ID NO: 62911 - protein, 231 aa, Homo sapiens
  Payload ID: 12557
  Gene Symbol: PDE4C
  Gene Name: phosphodiesterase 4C, cAMP-specific
  ENSP ID: ENSP00000473713
MQGPPAPAPVPGPGSPRGSPRGSPGLFRKLLVNQSIRLQRRFTVAHPLCFDLENGLSCGRRALDPQSSPGLGRIMQAPVPHSQRRESFLYRSDSDYELSPKAMSRNSSVASDLHGEDMIVTPFAQVLASLRTVRSNVAALARQQCLGAAKGHGAEAGIGDARRAGLVPGSVGDAADPALGGGDGLQQVQADPEPGVDPPVRNQPLREPGVRVHLPDLPGPADRGGAAQGDR

SEQ ID NO: 62912 - protein, 11 aa, Homo sapiens
  Payload ID: 12557
  Gene Symbol: PDE4C
  Gene Name: phosphodiesterase 4C, cAMP-specific
  ENSP ID: ENSP00000473937
  MOD_RES (1)..(1): Any amino acid
XARQQCLGAAK

SEQ ID NO: 62913 - protein, 427 aa, Homo sapiens
  Payload ID: 12557
  Gene Symbol: PDE4C
  Gene Name: phosphodiesterase 4C, cAMP-specific
  ENSP ID: ENSP00000474591
MPRSSQFKRILNRELTHLSETSRSGNQVSEYISRTFLDQQTEVELPKVTAEEAPQPMSRISGLHGLCHSASLSSATVPRFGVQTDQEEQLAKELEDTNKWGLDVFKVAELSGNRPLTAIIFSIFQAVFTDLEILAALFASAIHDVDHPGVSNQFLINTNSELALMYNDASVLENHHLAVGFKLLQAENCDIFQNLSAKQRLSLRRMVIDMVLATDMSKHMNLLADLKTMVETKKVTSLGVLLLDNYSDRIQVLQNLVHCADLSNPTKPLPLYRQWTDRIMAEFFQQGDRERESGLDISPMCDKHTASVEKSQVGFIDYIAHPLWETWADLVHPDAQDLLDTLEDNREWYQSKIPRSPSDLTNPERDGPDRFQFELTLEEAEEEDEEEEEEGEETALAKEALELPDTELLSPEAGPDPGDLPLDNQRT

SEQ ID NO: 62914 - protein, 89 aa, Homo sapiens
  Payload ID: 12557
  Gene Symbol: PDE4C
  Gene Name: phosphodiesterase 4C, cAMP-specific
  ENSP ID: ENSP00000474849
  MOD_RES (1)..(1): Any amino acid
XARQQCLGAANPAPAKTITPSGMDPTTLILQMRRLRPRDLMVTQALGEQIWNLGPGVLGGPRGNSFRVQMKRRSRERRGVPERGGWAGP

SEQ ID NO: 62915 - protein, 482 aa, Homo sapiens
  Payload ID: 12557
  Gene Symbol: PDE4C
  Gene Name: phosphodiesterase 4C, cAMP-specific
  ENSP ID: ENSP00000476923
MPRSSQFKRILNRELTHLSETSRSGNQVSEYISRTFLDQQTEVELPKVTAEEAPQPMSRISGLHGLCHSASLSSATVPRFGVQTDQEEQLAKELEDTNKWGLDVFKVAELSGNRPLTAIIFSIFQERDLLKTFQIPADTLATYLLMLEGHYHANVAYHNSLHAADVAQSTHVLLATPALEAVFTDLEILAALFASAIHDVDHPGVSNQFLINTNSELALMYNDASVLENHHLAVGFKLLQAENCDIFQNLSAKQRLSLRRMVIDMVLATDMSKHMNLLADLKTMVETKKVTSLGVLLLDNYSDRIQVLQNLVHCADLSNPTKPLPLYRQWTDRIMAEFFQQGDRERESGLDISPMCDKHTASVEKSQVGFIDYIAHPLWETWADLVHPDAQDLLDTLEDNREWYQSKIPRSPSDLTNPERDGPDRFQFELTLEEAEEEDEEEEEEGEETALAKEALELPDTELLSPEAGPDPGDLPLDNQRT

SEQ ID NO: 62916 - protein, 82 aa, Homo sapiens
  Payload ID: 12557
  Gene Symbol: PDE4C
  Gene Name: phosphodiesterase 4C, cAMP-specific
  ENSP ID: ENSP00000476961
MQAPVPHSQRRESFLYRSDSDYELSPKAMSRNSSVASDLHGEDMIVTPFAQVLASLRTVRSNVAALARQQCLGAAKQGPVGN

SEQ ID NO: 62917 - protein, 1132 aa, Homo sapiens
  Payload ID: 12558
  Gene Symbol: PDE4DIP
  Gene Name: phosphodiesterase 4D interacting protein
  ENSP ID: ENSP00000316434
MKEICRICARELCGNQRRWIFHTASKLNLQVLLSHVLGKDVPRDGKAEFACSKCAFMLDRIYRFDTVIARIEALSIERLQKLLLEKDRLKFCIASMYRKNNDDSGAEIKAGNGTVDMSVLPDARYSALLQEDFAYSGFECWVENEDQIQEPHSCHGSEGPGNRPRRCRGCAALRVADSDYEAICKVPRKVARSISCGPSSRWSTSICTEEPALSEVGPPDLASTKVPPDGESMEEETPGSSVESLDASVQASPPQQKDEETERSAKELGKCDCCSDDQAPQHGCNHKLELALSMIKGLDYKPIQSPRGSRLPIPVKSSLPGAKPGPSMTDGVSSGFLNRSLKPLYKTPVSYPLELSDLQELWDDLCEDYLPLRVQPMTEELLKQQKLNSHETTITQQSVSDSHLAELQEKIQQTEATNKILQEKLNEMSYELKCAQESSQKQDGTIQNLKETLKSRERETEELYQVIEGQNDTMAKLREMLHQSQLGQLHSSEGTSPAQQQVALLDLQSALFCSQLEIQKLQRVVRQKERQLADAKQCVQFVEAAAHESEQQKEASWKHNQELRKALQQLQEELQNKSQQLRAWEAEKYNEIRTQEQNIQHLNHSLSHKEQLLQEFRELLQYRDNSDKTLEANEMLLEKLRQRIHDKAVALERAIDEKFSALEEKEKELRQLRLAVRERDHDLERLRDVLSSNEATMQSMESLLRAKGLEVEQLSTTCQNLQWLKEEMETKFSRWQKEQESIIQQLQTSLHDRNKEVEDLSATLLCKLGPGQSEIAEELCQRLQRKERMLQDLLSDRNKQVLEHEMEIQGLLQSVSTREQESQAAAEKLVQALMERNSELQALRQYLGGRDSLMSQAPISNQQAEVTPTGRLGKQTDQGSMQIPSRDDSTSLTAKEDVSIPRSTLGDLDTVAGLEKELSNAKEELELMAKKERESQMELSALQSMMAVQEEELQVQAADMESLTRNIQIKEDLIKDLQMQLVDPEDIPAMERLTQEVLLLREKVASVESQGQEISGNRRQQLLLMLEGLVDERSRLNEALQAERQLYSSLVKFHAHPESSERDRTLQVELEGAQVLRSRLEEVLGRSLERLNRLETLAAIGGAAAGDDTEDTSTEFTDSIEEEAAHHSHQQL

SEQ ID NO: 62918 - protein, 173 aa, Homo sapiens
  Payload ID: 12558
  Gene Symbol: PDE4DIP
  Gene Name: phosphodiesterase 4D interacting protein
  Uniprot ID: Q5VU43
  ENSP ID: ENSP00000358353
MSNGYRTLSQHLNDLKKENFSLKLRIYFLEERMQQKYEASREDIYKRNIELKVEVESLKRELQDKKQHLDKTWADVENLNSQNEAELRRQFEERQQETEHVYELLENKIQLLQEESRLAKNEAARMAALVEAEKECNLELSEKLKGVTKNWEDVPGDQVKPDQYTEALAQRDK

SEQ ID NO: 62919 - protein, 969 aa, Homo sapiens
  Payload ID: 12558
  Gene Symbol: PDE4DIP
  Gene Name: phosphodiesterase 4D interacting protein
  ENSP ID: ENSP00000358355
MSNGYRTLSQHLNDLKKENFSLKLRIYFLEERMQQKYEASREDIYKRNIELKVEVESLKRELQDKKQHLDKTWADVENLNSQNEAELRRQFEERQQETEHVYELLENKIQLLQEESRLAKNEAARMAALVEAEKECNLELSEKLKGVTKNWEDVPGDQVKPDQYTEALAQRDKRIEELNQSLAAQERLVEQLSREKQQLLHLLEEPTSMEVQPMTEELLKQQKLNSHETTITQQSVSDSHLAELQEKIQQTEATNKILQEKLNEMSYELKCAQESSQKQDGTIQNLKETLKSRERETEELYQVIEGQNDTMAKLREMLHQSQLGQLHSSEGTSPAQQQVALLDLQSALFCSQLEIQKLQRVVRQKERQLADAKQCVQFVEAAAHESEQQKEASWKHNQELRKALQQLQEELQNKSQQLRAWEAEKYNEIRTQEQNIQHLNHSLSHKEQLLQEFRELLQYRDNSDKTLEANEMLLEKLRQRIHDKAVALERAIDEKFSALEEKEKELRQLRLAVRERDHDLERLRDVLSSNEATMQSMESLLRAKGLEVEQLSTTCQNLQWLKEEMETKFSRWQKEQESIIQQLQTSLHDRNKEVEDLSATLLCKLGPGQSEIAEELCQRLQRKERMLQDLLSDRNKQVLEHEMEIQGLLQSVSTREQESQAAAEKLVQALMERNSELQALRQYLGGRDSLMSQAPISNQQAEVTPTGRLGKQTDQGSMQIPSRDDSTSLTAKEDVSIPRSTLGDLDTVAGLEKELSNAKEELELMAKKERESQMELSALQSMMAVQEEELQVQAADMESLTRNIQIKEDLIKDLQMQLVDPEDIPAMERLTQEVLLLREKVASVESQGQEISGNRRQQLLLMLEGLVDERSRLNEALQAERQLYSSLVKFHAHPESSERDRTLQVELEGAQVLRSRLEEVLGRSLERLNRLETLAAIGGAAAGDDTEDTSTEFTDSIEEEAAHHSHQQL

SEQ ID NO: 62920 - protein, 988 aa, Homo sapiens
  Payload ID: 12558
  Gene Symbol: PDE4DIP
  Gene Name: phosphodiesterase 4D interacting protein
  ENSP ID: ENSP00000358357
MSNGYRTLSQHLNDLKKENFSLKLRIYFLEERMQQKYEASREDIYKRNIELKVEVESLKRELQDKKQHLDKTWADVENLNSQNEAELRRQFEERQQETEHVYELLENKIQLLQEESRLAKNEAARMAALVEAEKECNLELSEKLKGVTKNWEDVPGDQVKPDQYTEALAQRDKRIEELNQSLAAQERLVEQLSREKQQLLHLLEEPTSMEVQPMTEELLKQQKLNSHETTITQQSVSDSHLAELQEKIQQTEATNKILQEKLNEMSYELKCAQESSQKQDGTIQNLKETLKSRERETEELYQVIEGQNDTMAKLREMLHQSQLGQLHSSEGTSPAQQQVALLDLQSALFCSQLEIQKLQRVVRQKERQLADAKQCVQFVEAAAHESEQQKEASWKHNQELRKALQQLQEELQNKSQQLRAWEAEKYNEIRTQEQNIQHLNHSLSHKEQLLQEFRELLQYRDNSDKTLEANEMLLEKLRQRIHDKAVALERAIDEKFSALEEKEKELRQLRLAVRERDHDLERLRDVLSSNEATMQSMESLLRAKGLEVEQLSTTCQNLQWLKEEMETKFSRWQKEQESIIQQLQTSLHDRNKEVEDLSATLLCKLGPGQSEIAEELCQRLQRKERMLQDLLSDRNKQVLEHEMEIQGLLQSVSTREQESQAAAEKLVQALMERNSELQALRQYLGGRDSLMSQAPISNQQAEVTPTGRLGKQTDQGSMQIPSRDDSTSLTAKEDVSIPRSTLGDLDTVAGLEKELSNAKEELELMAKKERESQMELSALQSMMAVQEEELQVQAADMESLTRNIQIKEDLIKDLQMQLVDPEDIPAMERLTQEVLLLREKVASVESQGQEISGNRRQQLLLMLEGLVDERSRLNEALQAERQLYSSLVKFHAHPESSERDRTLQVELEGAQVLRSRLEEVLGRSLERLNRLETLAAIGGAAAGDDTEDTSTEFTDSIEEEAAHHSHQQVSQCQGLGLPGWTAHSPSEV

SEQ ID NO: 62921 - protein, 2346 aa, Homo sapiens
  Payload ID: 12558
  Gene Symbol: PDE4DIP
  Gene Name: phosphodiesterase 4D interacting protein
  ENSP ID: ENSP00000358360
MSNGYRTLSQHLNDLKKENFSLKLRIYFLEERMQQKYEASREDIYKRNIELKVEVESLKRELQDKKQHLDKTWADVENLNSQNEAELRRQFEERQQETEHVYELLENKIQLLQEESRLAKNEAARMAALVEAEKECNLELSEKLKGVTKNWEDVPGDQVKPDQYTEALAQRDKRIEELNQSLAAQERLVEQLSREKQQLLHLLEEPTSMEVQPMTEELLKQQKLNSHETTITQQSVSDSHLAELQEKIQQTEATNKILQEKLNEMSYELKCAQESSQKQDGTIQNLKETLKSRERETEELYQVIEGQNDTMAKLREMLHQSQLGQLHSSEGTSPAQQQVALLDLQSALFCSQLEIQKLQRVVRQKERQLADAKQCVQFVEAAAHESEQQKEASWKHNQELRKALQQLQEELQNKSQQLRAWEAEKYNEIRTQEQNIQHLNHSLSHKEQLLQEFRELLQYRDNSDKTLEANEMLLEKLRQRIHDKAVALERAIDEKFSALEEKEKELRQLRLAVRERDHDLERLRDVLSSNEATMQSMESLLRAKGLEVEQLSTTCQNLQWLKEEMETKFSRWQKEQESIIQQLQTSLHDRNKEVEDLSATLLCKLGPGQSEIAEELCQRLQRKERMLQDLLSDRNKQVLEHEMEIQGLLQSVSTREQESQAAAEKLVQALMERNSELQALRQYLGGRDSLMSQAPISNQQAEVTPTGRLGKQTDQGSMQIPSRDDSTSLTAKEDVSIPRSTLGDLDTVAGLEKELSNAKEELELMAKKERESQMELSALQSMMAVQEEELQVQAADMESLTRNIQIKEDLIKDLQMQLVDPEDIPAMERLTQEVLLLREKVASVESQGQEISGNRRQQLLLMLEGLVDERSRLNEALQAERQLYSSLVKFHAHPESSERDRTLQVELEGAQVLRSRLEEVLGRSLERLNRLETLAAIGGAAAGDDTEDTSTEFTDSIEEEAAHHSHQQLVKVALEKSLATVETQNPSFSPPSPMGGDSNRCLQEEMLHLRAEFHQHLEEKRKAEEELKELKAQIEEAGFSSVSHIRNTMLSLCLENAELKEQMGEAMSDGWEIEEDKEKGEVMVETVVTKEGLSESSLQAEFRKLQGKLKNAHNIINLLKEQLVLSSKEGNSKLTPELLVHLTSTIERINTELVGSPGKHQHQEEGNVTVRPFPRPQSLDLGATFTVDAHQLDNQSQPRDPGPQSAFSLPGSTQHLRSQLSQCKQRYQDLQEKLLLSEATVFAQANELEKYRVMLTGESLVKQDSKQIQVDLQDLGYETCGRSENEAEREETTSPECEEHNSLKEMVLMEGLCSEQGRRGSTLASSSERKPLENQLGKQEEFRVYGKSENILVLRKDIKDLKAQLQNANKVIQNLKSRVRSLSVTSDYSSSLERPRKLRAVGTLEGSSPHSVPDEDEGWLSDGTGAFYSPGLQAKKDLESLIQRVSQLEAQLPKNGLEEKLAEELRSASWPGKYDSLIQDQARELSYLRQKIREGRGICYLITRHAKDTVKSFEDLLRSNDIDYYLGQSFREQLAQGSQLTERLTSKLSTKDHKSEKDQAGLEPLALRLSRELQEKEKVIEVLQAKLDARSLTPSSSHALSDSHRSPSSTSFLSDELEACSDMDIVSEYTHYEEKKASPSHSDSIHHSSHSAVLSSKPSSTSASQGAKAESNSNPISLPTPQNTPKEANQAHSGFHFHSIPKLASLPQAPLPSAPSSFLPFSPTGPLLLGCCETPVVSLAEAQQELQMLQKQLGESASTVPPASTATLLSNDLEADSSYYLNSAQPHSPPRGTIELGRILEPGYLGSSGKWDVMRPQKGSVSGDLSSGSSVYQLNSKPTGADLLEEHLGEIRNLRQRLEESICINDRLREQLEHRLTSTARGRGSTSNFYSQGLESIPQLCNENRVLREDNRRLQAQLSHVSREHSQETESLREALLSSRSHLQELEKELEHQKVERQQLLEDLREKQQEVLHFREERLSLQENDSRLQHKLVLLQQQCEEKQQLFESLQSELQIYEALYGNSKKGLKAYSLDACHQIPLSSDLSHLVAEVRALRGQLEQSIQGNNCLRLQLQQQLESGAGKASLSPSSINQNFPASTDPGNKQLLLQDSAVSPPVRDVGMNSPALVFPSSASSTPGSETPIINRANGLGLDTSPVMKTPPKLEGDATDGSFANKHGRHVIGHIDDYSALRQQIAEGKLLVKKIVSLVRSACSFPGLEAQGTEVLGSKGIHELRSSTSALHHALEESASLLTMFWRAALPSTHIPVLPGKVGESTERELLELRTKVSKQERLLQSTTEHLKNANQQKESMEQFIVSQLTRTHDVLKKARTNLEVKSLRALPCTPAL

SEQ ID NO: 62922 - protein, 2362 aa, Homo sapiens
  Payload ID: 12558
  Gene Symbol: PDE4DIP
  Gene Name: phosphodiesterase 4D interacting protein
  ENSP ID: ENSP00000358363
MSNGYRTLSQHLNDLKKENFSLKLRIYFLEERMQQKYEASREDIYKRNIELKVEVESLKRELQDKKQHLDKTWADVENLNSQNEAELRRQFEERQQETEHVYELLENKIQLLQEESRLAKNEAARMAALVEAEKECNLELSEKLKGVTKNWEDVPGDQVKPDQYTEALAQRDKRIEELNQSLAAQERLVEQLSREKQQLLHLLEEPTSMEVQPMTEELLKQQKLNSHETTITQQSVSDSHLAELQEKIQQTEATNKILQEKLNEMSYELKCAQESSQKQDGTIQNLKETLKSRERETEELYQVIEGQNDTMAKLREMLHQSQLGQLHSSEGTSPAQQQVALLDLQSALFCSQLEIQKLQRVVRQKERQLADAKQCVQFVEAAAHESEQQKEASWKHNQELRKALQQLQEELQNKSQQLRAWEAEKYNEIRTQEQNIQHLNHSLSHKEQLLQEFRELLQYRDNSDKTLEANEMLLEKLRQRIHDKAVALERAIDEKFSALEEKEKELRQLRLAVRERDHDLERLRDVLSSNEATMQSMESLLRAKGLEVEQLSTTCQNLQWLKEEMETKFSRWQKEQESIIQQLQTSLHDRNKEVEDLSATLLCKLGPGQSEIAEELCQRLQRKERMLQDLLSDRNKQVLEHEMEIQGLLQSVSTREQESQAAAEKLVQALMERNSELQALRQYLGGRDSLMSQAPISNQQAEVTPTGRLGKQTDQGSMQIPSRDDSTSLTAKEDVSIPRSTLGDLDTVAGLEKELSNAKEELELMAKKERESQMELSALQSMMAVQEEELQVQAADMESLTRNIQIKEDLIKDLQMQLVDPEDIPAMERLTQEVLLLREKVASVESQGQEISGNRRQQLLLMLEGLVDERSRLNEALQAERQLYSSLVKFHAHPESSERDRTLQVELEGAQVLRSRLEEVLGRSLERLNRLETLAAIGGAAAGDDTEDTSTEFTDSIEEEAAHHSHQQLVKVALEKSLATVETQNPSFSPPSPMGGDSNRCLQEEMLHLRAEFHQHLEEKRKAEEELKELKAQIEEAGFSSVSHIRNTMLSLCLENAELKEQMGEAMSDGWEIEEDKEKGEVMVETVVTKEGLSESSLQAEFRKLQGKLKNAHNIINLLKEQLVLSSKEGNSKLTPELLVHLTSTIERINTELVGSPGKHQHQEEGNVTVRPFPRPQSLDLGATFTVDAHQLDNQSQPRDPGPQSAFSLPGSTQHLRSQLSQCKQRYQDLQEKLLLSEATVFAQANELEKYRVMLTGESLVKQDSKQIQVDLQDLGYETCGRSENEAEREETTSPECEEHNSLKEMVLMEGLCSEQGRRGSTLASSSERKPLENQLGKQEEFRVYGKSENILVLRKDIKDLKAQLQNANKVIQNLKSRVRSLSVTSDYSSSLERPRKLRAVGTLEGSSPHSVPDEDEGWLSDGTGAFYSPGLQAKKDLESLIQRVSQLEAQLPKNGLEEKLAEELRSASWPGKYDSLIQDQARELSYLRQKIREGRGICYLITRHAKDTVKSFEDLLRSNDIDYYLGQSFREQLAQGSQLTERLTSKLSTKDHKSEKDQAGLEPLALRLSRELQEKEKVIEVLQAKLDARSLTPSSSHALSDSHRSPSSTSFLSDELEACSDMDIVSEYTHYEEKKASPSHSDSIHHSSHSAVLSSKPSSTSASQGAKAESNSNPISLPTPQNTPKEANQAHSGFHFHSIPKLASLPQAPLPSAPSSFLPFSPTGPLLLGCCETPVVSLAEAQQELQMLQKQLGESASTVPPASTATLLSNDLEADSSYYLNSAQPHSPPRGTIELGRILEPGYLGSSGKWDVMRPQKGSVSGDLSSGSSVYQLNSKPTGADLLEEHLGEIRNLRQRLEESICINDRLREQLEHRLTSTARGRGSTSNFYSQGLESIPQLCNENRVLREDNRRLQAQLSHVSREHSQETESLREALLSSRSHLQELEKELEHQKVERQQLLEDLREKQQEVLHFREERLSLQENDSRLQHKLVLLQQQCEEKQQLFESLQSELQIYEALYGNSKKGLKAYSLDACHQIPLSSDLSHLVAEVRALRGQLEQSIQGNNCLRLQLQQQLESGAGKASLSPSSINQNFPASTDPGNKQLLLQDSAVSPPVRDVGMNSPALVFPSSASSTPGSETPIINRANGLGLDTSPVMKTPPKLEGDATDGSFANKHGRHVIGHIDDYSALRQQIAEGKLLVKKIVSLVRSACSFPGLEAQGTEVLGSKGIHELRSSTSALHHALEESASLLTMFWRAALPSTHIPVLPGKVGESTERELLELRTKVSKQERLLQSTTEHLKNANQQKESMEQFIVSQLTRTHDVLKKARTNLEEPCKKRSHQKSLKQQERWACPPFVQLPIC

SEQ ID NO: 62923 - protein, 95 aa, Homo sapiens
  Payload ID: 12558
  Gene Symbol: PDE4DIP
  Gene Name: phosphodiesterase 4D interacting protein
  ENSP ID: ENSP00000431596
  MOD_RES (1)..(1): Any amino acid
XAERQLYSSLVKFHAHPESSERDRTLQVELEGAQVLRSRLEEVLGRSLERLNRLETLAAIGGAAAGDDTEDTSTEFTDSIEEEAAHHSHQQPSFL

SEQ ID NO: 62924 - protein, 51 aa, Homo sapiens
  Payload ID: 12558
  Gene Symbol: PDE4DIP
  Gene Name: phosphodiesterase 4D interacting protein
  ENSP ID: ENSP00000431777
MFLCQGFRKYLPEHLNDLKKENFSLKLRIYFLEERMQQKYEASREDIYKRG

SEQ ID NO: 62925 - protein, 309 aa, Homo sapiens
  Payload ID: 12558
  Gene Symbol: PDE4DIP
  Gene Name: phosphodiesterase 4D interacting protein
  ENSP ID: ENSP00000432498
  MOD_RES (1)..(1): Any amino acid
XEEHLGEIRNLRQRLEESICINDRLREQLEHRLTSTARGRGSTSNFYSQGLESIPQLCNENRVLREDNRRLQAQLSHVSREHSQETESLREALLSSRSHLQELEKELEHQKVERQQLLEDLREKQQEVLHFREERLSLQENDSRLQHKLVLLQQQCEEKQQLFESLQSELQIYEALYGNSKKGLKDSAVSPPVRDVGMNSPALVFPSSASSTPGSETPIINRANGLGLDTSPVMKTPPKLEGDATDGSFANKHGRHVIGHIDDYSALRQQIAEGKLLVKKIVSLVRSACSFPGLEAQGTEVLGSKGIHE
